United States Patent Application Publication US 2016/0078168 A1 - sequence listing, part 4

SEQ ID NO: 70214 - RNA, 70 nt, Homo sapiens
ccacaccgcggcccagccccaccacggccaaaacacaaacaagaccgcagggacagaccgcaagccggca

SEQ ID NO: 70215 - RNA, 71 nt, Homo sapiens
aaacagagaagacacggaagccaccgcaacagccaaccagaaaaccagaaacaccggcagggagcaaaccc

SEQ ID NO: 70216 - RNA, 71 nt, Homo sapiens
aaaaacaacgccaagagggaaggggacccgccgggaggacgcggcccaggacacacaaagacaaacacaga

SEQ ID NO: 70217 - RNA, 76 nt, Homo sapiens
ccggggggcgcgccgcgaccgcccgccgggacaaccccagaacaagcaggaaaggaaaaggcggagcacccgagag

SEQ ID NO: 70218 - RNA, 74 nt, Homo sapiens
accacggacgaagacaggccgaggaagaagacagccacaggccagcgagaagcgaggaagagccaaacaccgga

SEQ ID NO: 70219 - RNA, 82 nt, Homo sapiens
gaaaaaggcaaagcagaaggagaccgaacacaaccccacgccaaagaaaccagcccgaccaccccacccagaaagacaagca

SEQ ID NO: 70220 - RNA, 66 nt, Homo sapiens
cagcagagaaagaagagagagcaggccgaggcacagaagaaaggcagcagaagacggggagaaggg

SEQ ID NO: 70221 - RNA, 57 nt, Homo sapiens
ggagagcccagaaccacaacagaaaaaacagacgggcgcacccacgaaaggaaaacc

SEQ ID NO: 70222 - RNA, 84 nt, Homo sapiens
aggaccccgaggagcgggacccgaagagcccggcagggacccgggcaggcagcacgaagggagaaggagacccaggagaagaga

SEQ ID NO: 70223 - RNA, 71 nt, Homo sapiens
gaaggccggggcgcccggcgccggccgagaaggcagaggcgaacccaaagcaaagccagagccagagcaga

SEQ ID NO: 70224 - RNA, 74 nt, Homo sapiens
aacacccggcccaggagcgacgccagaaacagccaccagaaggcggaaggggaacagagagaagagacacagca

SEQ ID NO: 70225 - RNA, 59 nt, Homo sapiens
cagcccaccacagcccccagcgccccgagccggaccgcccagcccccggccccgcgccc

SEQ ID NO: 70226 - RNA, 34 nt, Homo sapiens
aaagacccaaagaagaaagggaaaaagcccagga

SEQ ID NO: 70227 - RNA, 88 nt, Homo sapiens
agccggagagcccaacgggacgggcaagacgagagggcccgacggaggggaggaaacaggacccagaccagccaaagagaagaagaaa

SEQ ID NO: 70228 - RNA, 80 nt, Homo sapiens
caagaaagcaaggggaaggcgcaggagaaaggggaaaacaggaagagaacgaggagcaacccaaaggcgaaacccggaag

SEQ ID NO: 70229 - RNA, 83 nt, Homo sapiens
ggggcaggacccggccgcgcccgcagcgcaaaccagcaaaagcagaaagcacggaccaaaccagcgaaaaggggagaaaacag

SEQ ID NO: 70230 - RNA, 65 nt, Homo sapiens
caagcagaagcagagaggaaggaaaacccacccagaccgaaacaaagaccagaagagaacaaaca

SEQ ID NO: 70231 - RNA, 72 nt, Homo sapiens
ggaaagacccaggacccagaacacaacacgagagggccaacggccgccaccaaaaagaagaagggaaagcgc

SEQ ID NO: 70232 - RNA, 78 nt, Homo sapiens
agcgcgaagcacgacacgggggcccaagggaccacaaaacggaggagagagggaaagggagaaggagcccccgagccc

SEQ ID NO: 70233 - RNA, 64 nt, Homo sapiens
agaggaaagaaacggaacgacccaagggggggagacacggcaacagcggagcccccccgaggac

SEQ ID NO: 70234 - RNA, 71 nt, Homo sapiens
ccggacaggagcaggcagaccggacacaagagggcaagaaaggcgcgacgggccgaaaagggacgaagggg

SEQ ID NO: 70235 - RNA, 65 nt, Homo sapiens
gcaggccagccgcaccagcagggccgggccgcaccagcaccaagcgggcgagagagaccagaccc

SEQ ID NO: 70236 - RNA, 61 nt, Homo sapiens
ggaaagagagccacacgaagaacacggccaaagcgccgcccaagagagagaagagaggcgc

SEQ ID NO: 70237 - RNA, 61 nt, Homo sapiens
ccggggacgccacaccaggacgcgcagcggcaggggagcgggggagccaagggagcagaga

SEQ ID NO: 70238 - RNA, 85 nt, Homo sapiens
ccccgggaccgcggagagaagcagcggacagcagaggagacagaagaaacggcagaggccaaggggaagccagacagacagggcc

SEQ ID NO: 70239 - RNA, 63 nt, Homo sapiens
ccgccgcgcccgcccgacccgccaccgccaggccagacgaaaccacaaaacgcccaccagcac

SEQ ID NO: 70240 - RNA, 74 nt, Homo sapiens
gcggagaagaggcaggaagaccgccaacaggcgcgagaaacagggaaacgagaaacagaaagagaagaagggag

SEQ ID NO: 70241 - RNA, 80 nt, Homo sapiens
gggcggacccaggccgagcggcacacccccgacccacgcacccgcagcaaacaacacccaacagcccaaagcaaaggagc

SEQ ID NO: 70242 - RNA, 75 nt, Homo sapiens
gaagggagagcgggccgggaccaggacggggcgaaccgagcaccagaacaggcaacccgaaaccgccggagaaaa

SEQ ID NO: 70243 - RNA, 80 nt, Homo sapiens
acgcgaacggagccaggcgagcgcggcgccggggcggggcccaggagacggaggacaccaggggggaaaaaccacacagg

SEQ ID NO: 70244 - RNA, 75 nt, Homo sapiens
gccgcgccccggccgcgccggggccgcgcggccccgcggagccaggaaaggcacaaggaagaagcggaaggggca

SEQ ID NO: 70245 - RNA, 79 nt, Homo sapiens
gaacccagaaggcaaacagaacacagaggagagagaggaaccagaaccaccacgaccaagaggccagaaccaccagagc

SEQ ID NO: 70246 - RNA, 55 nt, Homo sapiens
agcaaagagaaacagaaacgggccgaagaagcaggaccgacagaacgagacaaca

SEQ ID NO: 70247 - RNA, 47 nt, Homo sapiens
aaccgccacggaagggggcagccaccagggaccaaccaccccggacc

SEQ ID NO: 70248 - RNA, 82 nt, Homo sapiens
aaaggagggcaggagagaaagagcaagaaggccgagagagaaaaggaagaccgaggggacagagggacggacggcggcccaa

SEQ ID NO: 70249 - RNA, 81 nt, Homo sapiens
gaacaggagaaagaaggcggaacaccacaaggcaccgcaagaggaacaaagaccgacacgaaaaaaaccacgggcagggaa

SEQ ID NO: 70250 - RNA, 75 nt, Homo sapiens
gccccccagcccaggaccccgacgcccgacagccgagcaccaccagccagcgggaggaagcgcacaccgccccac

SEQ ID NO: 70251 - RNA, 71 nt, Homo sapiens
agagaacgggcccacacaacccaggcaaccaacagaaaccggaaggcgaaacagcgcgccgaagagcggaa

SEQ ID NO: 70252 - RNA, 83 nt, Homo sapiens
gaggcgcggcggccgcagcgccacaaaccaggcggacaagaaccgcaagagcgaggacccagcacacaccacacaccacggcc

SEQ ID NO: 70253 - RNA, 76 nt, Homo sapiens
ccgcgccacagccaccagagccggcagcaaagagggaacagggacagagagccgaaagccgggcaaggggaaagaa

SEQ ID NO: 70254 - RNA, 71 nt, Homo sapiens
accacaagaaagcaccacagaacaaaaggcacaacaaacgacaaagcagcccaacagcccacagcacccca

SEQ ID NO: 70255 - RNA, 80 nt, Homo sapiens
aggaacgcgcggacgccaccaggacagcccaaggcggaaaagcgaaggaagccacaagcacagcccacacaaaccagagg

SEQ ID NO: 70256 - RNA, 113 nt, Homo sapiens
agcgacccgaccagggagaacccaccggaggcgcacccacacacggaccccaggagccaggccccagggcaaagagcggcagaagggaggagaggagggggagggacaccgcc

SEQ ID NO: 70257 - RNA, 110 nt, Homo sapiens
agacggcaaggaggagccagaggcaacaaggcggacaagagaagccgccaggcaggggaaggaaaacacggcagggaaaccaccaaaaaaaagagcacaaagcaagcgcc

SEQ ID NO: 70258 - RNA, 83 nt, Homo sapiens
gcgggggcggacggaacccgggcccacgcaaaagcagaccggaaaacccaccggcaagaccacacccgaggggagcccaggac

SEQ ID NO: 70259 - RNA, 78 nt, Homo sapiens
cgccccccaccggacagcaagaagaggacggagccgagaaggagaacacccgccgcagcagaaccccccgcgggagcc

SEQ ID NO: 70260 - RNA, 82 nt, Homo sapiens
accgaagcgaggagccccagcgaaggaaagcggaacgacgacaccgagcagagaaggacggagaagcgaaagccagaccggc

SEQ ID NO: 70261 - RNA, 80 nt, Homo sapiens
agcagccagcaagggaaggaccgagacagaagagggcgggaacagccaggggaggggggcagcgaacccgccagaaggac

SEQ ID NO: 70262 - RNA, 73 nt, Homo sapiens
cacaggaccagaccaagacacacaaccaaacaggagaaaaagcccgcgacccagccggaacacaggaccaagg

SEQ ID NO: 70263 - RNA, 93 nt, Homo sapiens
caccgcggagcaaaaaaagagcccgcaagaagaacagagacagcagccaaacccccaggcccccacagagagcacacaaacaaagcgaaacca

SEQ ID NO: 70264 - RNA, 57 nt, Homo sapiens
gagacggaagggcgaaggacaaaccagagaacacaaggaacgaaaggaagggaagaa

SEQ ID NO: 70265 - RNA, 79 nt, Homo sapiens
gaggggcccggcggcggggagggagagagaaggcccaaaagccaggggccgacggacaagaggaagaccaggccccgac

SEQ ID NO: 70266 - RNA, 69 nt, Homo sapiens
acaacgggaacagggccacaaacacagaaggacagaaaccgaagggagaagagccacaaccaggagaac

SEQ ID NO: 70267 - RNA, 79 nt, Homo sapiens
acccggaggaggcgaccgcggcgcagcgacccccgccaggcaaaaggaagggagaagaccaaaccgaacgaagggaccc

SEQ ID NO: 70268 - RNA, 74 nt, Homo sapiens
cgccgcgccccgggcgcagggagccggcaggggccccaggcagccagcagaacgaaagacccgagggacacggg

SEQ ID NO: 70269 - RNA, 73 nt, Homo sapiens
gacaacgcccgccggaacaccgcagagaaaaagggacggcagcgggcgacccagcaacgcggccggccagggg

SEQ ID NO: 70270 - RNA, 81 nt, Homo sapiens
cggggaggggggacggcggcggagggaggagggagccgggaggccagggcaggcgaagagagcgaagaagagaagacacag

SEQ ID NO: 70271 - RNA, 84 nt, Homo sapiens
ggaccgaggggcggcgcggcgcgggaggaggccaaagagaaagagaaaggagagcaagagaaccgggcagaagcacacaccagc

SEQ ID NO: 70272 - RNA, 77 nt, Homo sapiens
gaaggacccggggcgaaaagagggccaagaggcgcgcacgaaagacgacacagcaagcaaaagacaacagaacaaac

SEQ ID NO: 70273 - RNA, 62 nt, Homo sapiens
gaaacaacacagaaaagaaagcccacaccagaaaggaaggccagaagccagagaaacggagc

SEQ ID NO: 70274 - RNA, 69 nt, Homo sapiens
ggcacaagggcagcgccgagagggaggaagagaagcgaggccaacaggccaaacacacaggaacgccag

SEQ ID NO: 70275 - RNA, 65 nt, Homo sapiens
ggcgcggccaacgacccacccagcaggagaacggacccggaggcaagagccaaaggaggaaaaac

SEQ ID NO: 70276 - RNA, 81 nt, Homo sapiens
cgacaagccgcggcagccgcggaccaccgccgccaggggaggccaacagacccaacccagaaggcaccaaacggaggggga

SEQ ID NO: 70277 - RNA, 80 nt, Homo sapiens
ccccccccgcggcccccccccggagggaaaaggcccggcgaggacgccccaaaagcagcccgccaagaccggcccacggg

SEQ ID NO: 70278 - RNA, 68 nt, Homo sapiens
gaggcaggaccccgggacacccggaagccaggaaaggagcagaagacagagggaggagggccacggac

SEQ ID NO: 70279 - RNA, 67 nt, Homo sapiens
cacaggccgggccccgggccaaggcggaccgcaggaaaaggcggacgcaaccgccaaacgaacagaa

SEQ ID NO: 70280 - RNA, 79 nt, Homo sapiens
gggggaaacaaggcccaggccaagagaaccaggagcggcagaccgccgccaggaggaggcacgcagcccgagaaggagc

SEQ ID NO: 70281 - RNA, 73 nt, Homo sapiens
cccaaggacacagagcacaagcccgccaacgagcgcacccccaccaaggaagagaagaccccagcagagggac

SEQ ID NO: 70282 - RNA, 63 nt, Homo sapiens
gcccgccaccccccagcccaggggggaccagcccccaccgcccccagagacggggcgccaggg

SEQ ID NO: 70283 - RNA, 79 nt, Homo sapiens
caccgccccccgggacccccggagcccccagacccaagaagacagcgaaccagcgaccgacccagcccgccacaccagc

SEQ ID NO: 70284 - RNA, 91 nt, Homo sapiens
agaagagaggaaaaccacacagcaagaagagggacacggaggaccgaggaagaaggcacgaccgacacaagaagcgcgggcccgggaggag

SEQ ID NO: 70285 - RNA, 36 nt, Homo sapiens
cacagcgcggcagaacgggggaccggccaagcagag

SEQ ID NO: 70286 - RNA, 76 nt, Homo sapiens
gccggcgagaaagcggaggggaagccaacaagccgaccagacgagaccgcaaccagggagaggagccgcaagccga

SEQ ID NO: 70287 - RNA, 77 nt, Homo sapiens
cagaacagaaagaaaggcagaagggcacaaggcccacaaagaaaaaaacacacacgaggaaagacggaagcaagcac

SEQ ID NO: 70288 - RNA, 81 nt, Homo sapiens
ggccccgccgagcccagcccccagaaaggaggacaacgggacccagaagagagagaaaaacccagaggagaagaagccagg

SEQ ID NO: 70289 - RNA, 75 nt, Homo sapiens
gaggacccgagcagccagcaaagaaccacagggacccccgaagacaaggagcaaaggcgaggccgccaaagggag

SEQ ID NO: 70290 - RNA, 74 nt, Homo sapiens
accccggaaaccagaaaggagcggacgagagaaaaaggccaggagaagagggcgaaacaacaagagccaaacca

SEQ ID NO: 70291 - RNA, 70 nt, Homo sapiens
ccagaagacagagggcgaggagcgaagaaagcaggggaggaagcagcaaggcgcgacacaagaaaaccac

SEQ ID NO: 70292 - RNA, 73 nt, Homo sapiens
aagggaagacagcaggacaaggccaaccaagacagaccaggacaacaaggaaaaggggggagagacaaccaca

SEQ ID NO: 70293 - RNA, 76 nt, Homo sapiens
ggaaaaaagaacacagggagcgagaacgggccaggcaggaaggcagcacacaaccggacaccacagggaagacgag

SEQ ID NO: 70294 - RNA, 88 nt, Homo sapiens
gagcccacacgagacggagggcagccggggggccggaaggcgcggccggaggacaccccacggcaggagccccaagggggggcaggca

SEQ ID NO: 70295 - RNA, 62 nt, Homo sapiens
gccggggccagccagaagaagggcaggccagaaggccaacagcaggcaggggcgcacccagg

SEQ ID NO: 70296 - RNA, 65 nt, Homo sapiens
gacggcggcagccaccgccgagccccaggcccgagagagaaagggaaagaaggagcggagcagaa

SEQ ID NO: 70297 - RNA, 85 nt, Homo sapiens
gccccgcaccaggaggaggacgacagcacgggcggagaacggaaaagcaccaggaagcagagaggaccgcagaagggaaggagag

SEQ ID NO: 70298 - RNA, 78 nt, Homo sapiens
aagagaaagacacagggcagcccagagcagaaccagacacccaggagagaaaggccgggaaaacaacgggaagaagag

SEQ ID NO: 70299 - RNA, 39 nt, Homo sapiens
ccccacccgcgccgcgacccgaacaacggcccaagagca

SEQ ID NO: 70300 - RNA, 79 nt, Homo sapiens
caacacagaaggagaaccgaaagaccgacccacaaccagggaccaagaaaggcccagggaccaaagcccggacaaggcc

SEQ ID NO: 70301 - RNA, 76 nt, Homo sapiens
ggagcacgcacgccacgaaggaagaaacaagccgagggagccgccgcgcagcgggcgaggcagaagccagcacgcg

SEQ ID NO: 70302 - RNA, 74 nt, Homo sapiens
aagccgggcacaaagaacggaagcgaaagagcagcagaaacgcacccagagacaacaagccgagacaggagagg

SEQ ID NO: 70303 - RNA, 78 nt, Homo sapiens
ccagaaggaagcgccggccagaggccggcacacggcaaacggggacagcgccgaccggaacagggaccacggaagccc

SEQ ID NO: 70304 - RNA, 81 nt, Homo sapiens
ggacgggcggagggagagcgcccggccaccgggagcaacggagaggagcgggcagagaagagggccagaaccaaccgacca

SEQ ID NO: 70305 - RNA, 94 nt, Homo sapiens
ccagcgccggcccccaggcgaagaagcgcagccgcaccggccaaggggcggggacagagagcaccagcacccacggcaccgcccccccacgcag

SEQ ID NO: 70306 - RNA, 66 nt, Homo sapiens
cccacacaggacacaggggcggaaaaaacaagcaccgaggagcaacacccccagggagcccagacc

SEQ ID NO: 70307 - RNA, 92 nt, Homo sapiens
ccgcggagagcgcaagccgggcagcagcccagcggcagcagaaagagcaaaaaagggagcggcaaagaggcagacccagagcccacgaagcc

SEQ ID NO: 70308 - RNA, 82 nt, Homo sapiens
ggaaccaggagcccgggcaccgggcagaaagggcaaaaggagagccgcggaaccgcaaggaagcgaagggaaaacagacgag

SEQ ID NO: 70309 - RNA, 66 nt, Homo sapiens
cccagccccagacagcacgccacgcgggcccgccaagacagccgacaccgcgacgaacagccgaaa

SEQ ID NO: 70310 - RNA, 75 nt, Homo sapiens
caaccgccgacacggggccacggggcccacaggacggggagacagcagcaggaacacagcaaccaccgaaacggg

SEQ ID NO: 70311 - RNA, 84 nt, Homo sapiens
gaagagaagaagaagcaggagaacgaaacggagccagagaaggcagaagagcgacccccaaggaaaacaacgaaaaacaaaaaa

SEQ ID NO: 70312 - RNA, 65 nt, Homo sapiens
acaccggaagcgggaaagacgaaaaagagccacgcccccacgagcgccccccggaccacgaaggg

SEQ ID NO: 70313 - RNA, 84 nt, Homo sapiens
cgccccgcccggaccgcgcagaaccagggcggcggccagcgccacgccacgggcccagacgcagacaaacgagaagagagaaga

SEQ ID NO: 70314 - RNA, 112 nt, Homo sapiens
ccgaaagaccgaccaccccgggcgggaagacagaaccagggccgggggccaggcaagaacagaagaccggggaccagaagggagaagaagcaaaaggaaccacccaaaagaa

SEQ ID NO: 70315 - RNA, 72 nt, Homo sapiens
agccaggcagaggccccggaggagcggagaaccggagcggccaacggcaggagggaacaaaaaccggaagca

SEQ ID NO: 70316 - RNA, 56 nt, Homo sapiens
gcccgggcgaaggggccacgcgaagaaaaacggacagccccaggaggaaggcgggc

SEQ ID NO: 70317 - RNA, 68 nt, Homo sapiens
cagcaaccccgaccaggccaaggcaacagccaaccagaaaaccagaaacaccggcagggagcaaaccc

SEQ ID NO: 70318 - RNA, 78 nt, Homo sapiens
cacagcagccccccgccccaaagcagggcggaccaggcccacgcagcccgacccccccggcccagcaccccgcccaac

SEQ ID NO: 70319 - RNA, 64 nt, Homo sapiens
accccagccggcgccgagggcggaaccgagcgggaaaagggcacagagcagaggacaccacagg

SEQ ID NO: 70320 - RNA, 82 nt, Homo sapiens
ccgacgcgcggcgacccagcgcagcgccaccgccgggggcgggacggaaaaaggacaaggaggaaagaaacgcaccacacgg

SEQ ID NO: 70321 - RNA, 76 nt, Homo sapiens
ggcaacagaaagagcaacagcagggcaacagcaacacccccagggagcgggggcggaaacacggaagagggggagg

SEQ ID NO: 70322 - RNA, 56 nt, Homo sapiens
cgcggaggacgggcaacaggagccccacgccacgggacgggggcaaccggacagag

SEQ ID NO: 70323 - RNA, 78 nt, Homo sapiens
agccgccgccaccccgcggccgcacccccgccccagcccgccgagggccgggaaccgcagagaagagcaggggggcca

SEQ ID NO: 70324 - RNA, 53 nt, Homo sapiens
cagagcacccaccacaggagcaagaaggagaacaagaagcaaaccaagaaaga

SEQ ID NO: 70325 - RNA, 63 nt, Homo sapiens
ccgagaggcggccgcagcaaagccagccaaagaaacggaaaaagacaaggcagagcgcggaaa

SEQ ID NO: 70326 - RNA, 80 nt, Homo sapiens
ccagaaacaaggagaacgggaccggccacaagggcaacccgggagcaaggcacaaaaggagaagccacagaccacgcaga

SEQ ID NO: 70327 - RNA, 60 nt, Homo sapiens
ggccagacaagaggaagaccagccgcaaaccaaggggagcgacagaacaagaaagaggag

SEQ ID NO: 70328 - RNA, 88 nt, Homo sapiens
gcgccgcggccaggcagggaggagaccggcacccagacaggggcgaaggcagaggacagcacccgcggccgccccgacaagcgggagg

SEQ ID NO: 70329 - RNA, 75 nt, Homo sapiens
gcccccagcggcccgaggcacgagcaacaacggagaaaagaagacgacacaggcagccacagaaagcccgcccca

SEQ ID NO: 70330 - RNA, 71 nt, Homo sapiens
aacgaaagcccggccgcagacccaagaggagcggggccacacgaagagccaggagggagggggggaacgga

SEQ ID NO: 70331 - RNA, 87 nt, Homo sapiens
cggccgggaacccaagagggccaaggggaggccggcaagacgggccgacaggacccagaccagccaaagagaagaagaaaggaagca

SEQ ID NO: 70332 - RNA, 71 nt, Homo sapiens
agcaacacagggagacgcacagggggacgggacaagcccagggcgcggggaaaaagaccacaagaggaaaa

SEQ ID NO: 70333 - RNA, 72 nt, Homo sapiens
gacaggcaggcaaaaacaggagaccgcggccgaccagagaacagccacaagaacggaagcagaagcacgcaa

SEQ ID NO: 70334 - RNA, 83 nt, Homo sapiens
acggcacggacgacagaagcgacgggagaccgagcgggggacgagaagacgcccggacgaccgaggcccacgcaggcggcgag

SEQ ID NO: 70335 - RNA, 81 nt, Homo sapiens
gaaaggaagcggggaggccggggagaggcgaccaggccgcgggaagcgcggacgccccaccaacggcgcggacccgaccgc

SEQ ID NO: 70336 - RNA, 33 nt, Homo sapiens
gaaggacagcacccgcagcgcacacaaaccgga

SEQ ID NO: 70337 - RNA, 78 nt, Homo sapiens
ccgccacccggcgcgaccgcccggcaccgggagaaccaccgccaccgccaccaggccgcgggagagcgggggcgggag

SEQ ID NO: 70338 - RNA, 72 nt, Homo sapiens
gacgcggcggaggcgagcgagaaggcagaacgccaaccaggaaccgaacccccagaggacgaaaccgcacaa

SEQ ID NO: 70339 - RNA, 80 nt, Homo sapiens
ggcaccaccggccccggaagaaggagcacaccagaggcagcaccggcgcccgagcccccgcccacagcggccacaccacc

SEQ ID NO: 70340 - RNA, 82 nt, Homo sapiens
caacgacgaggaccgacgcagcccagcaagcaaccacgagagcacaaggacaaccaacaacccccagaacccgaaaccggga

SEQ ID NO: 70341 - RNA, 59 nt, Homo sapiens
aagagagacacaccaaaagggagcagggacggggggaaaagcgcacccgggcccgggcg

SEQ ID NO: 70342 - RNA, 73 nt, Homo sapiens
cgcacccacgcccggcccggcccggccccgacacggcacacagagaaaaaaagggaacaaaacacagcaagca

SEQ ID NO: 70343 - RNA, 55 nt, Homo sapiens
ggggcgggggcaagggcgcccgcgggacagccagcacaaaaaaacaaaacgagaa

SEQ ID NO: 70344 - RNA, 70 nt, Homo sapiens
gggaacccacaaaggaccagagaagcgggcaaggcagaagaaacagagggaggaccaagccacagggggc

SEQ ID NO: 70345 - RNA, 128 nt, Homo sapiens
aggccagagcggagaccagcacccagaagagagaccgcaacgagaacaaagggccgggagcgagggcgccaagcccgaccgccaaggccggacgaggagagcggcaagcgacaccgggaccgggacca

SEQ ID NO: 70346 - RNA, 81 nt, Homo sapiens
ggcggggagaccgcggggggagcccgcggccggggaccggacaaccccccaagaagccgggggcccagggccacccccggc

SEQ ID NO: 70347 - RNA, 81 nt, Homo sapiens
ggagaccagcacccagaagagagaccgcaacgagaacaaagggccgggagcgagaacagccagcaaagacaagagcagacc

SEQ ID NO: 70348 - RNA, 78 nt, Homo sapiens
ggcggcggccgggggcccagcccgggcggcgcggccaggcccgagagagaaagggaaagaaggagcggagcagaacaa

SEQ ID NO: 70349 - RNA, 81 nt, Homo sapiens
caacacgcgggcagcgaacaagcgggagcaaggagggcgaagagcgaggaggacaagcagaagaacagcagagggccagga

SEQ ID NO: 70350 - RNA, 82 nt, Homo sapiens
cagagggacagcaggagcaggggcgcagcgcggccgcggagacagggagacccggggcggaaggccagaaacacagggacaa

SEQ ID NO: 70351 - RNA, 68 nt, Homo sapiens
gaggcccccagccacgggaacgaagaaacccgcgccgagcgccaacggggcggcaccaagaaaaacga

SEQ ID NO: 70352 - RNA, 59 nt, Homo sapiens
agaccgaagccaacaaagaagcggaaagcagaggaccgaaacccgcgccagagagccaa

SEQ ID NO: 70353 - RNA, 62 nt, Homo sapiens
accgcccgaaccagagccggaggcgggaggacgggcgccgcaggacagcagaccacagcccg

SEQ ID NO: 70354 - RNA, 84 nt, Homo sapiens
gcccgcccgcccggcgaccagcaaggacgcaaccaaagcacggccagcagaggaaaagaaaggaaaagcaggaagccaggcaac

SEQ ID NO: 70355 - RNA, 73 nt, Homo sapiens
agacggaaaggagccggggacccagagacagggcggccgcgccccggagaaccccaaccggaaaggaagaccc

SEQ ID NO: 70356 - RNA, 82 nt, Homo sapiens
agaaacaacgagcggaaagcaacccggagcggaggacaggagaccgaacagacacgaggaggggacggcccgccacaggcac

SEQ ID NO: 70357 - RNA, 76 nt, Homo sapiens
gaaaaacagcaaaacagaccgaaagaaacgccacaacgggacaaaggaacacagcaccggaggaccaaaggaccgg

SEQ ID NO: 70358 - RNA, 73 nt, Homo sapiens
accaggcaccagcaccacggagcacaagacacacggcggcggcgaagccaagacacgggcccgccgagggcgg

SEQ ID NO: 70359 - RNA, 83 nt, Homo sapiens
accgagagcgaaaaccgccccggaggagaaaagaaggccaccagcgggcccccacggagggcagcaaggggacggggaacccg

SEQ ID NO: 70360 - RNA, 66 nt, Homo sapiens
ccaccgggaaaaggcacgaagggacggaccacaaaacccaacgcggacccggcagccggacaggac

SEQ ID NO: 70361 - RNA, 53 nt, Homo sapiens
gccaagccaggcccagcagccgccaccgaagccaaacaccgaagagaggccac

SEQ ID NO: 70362 - RNA, 59 nt, Homo sapiens
agcacgaacaagcaagcaggaaagaacgccggacaacagcggcgaagaaggcaaaccga

SEQ ID NO: 70363 - RNA, 83 nt, Homo sapiens
cagcgccagcgacccccacggccgcgggggcgggcgcgcacaaccgccggcaccagggcagggagccaccgccaagcccgccc

SEQ ID NO: 70364 - RNA, 77 nt, Homo sapiens
gggcgcgcggcgccggcggcgcgcgacccccgcgcaggaaaaagaacagaggccaacccgacaagaggaccaaggcc

SEQ ID NO: 70365 - RNA, 76 nt, Homo sapiens
aagacacaggaagcgccgaggcccggccaacgcaacagggagcccacgcaagaggggccggggaccgcccagcagc

SEQ ID NO: 70366 - RNA, 77 nt, Homo sapiens
ccacgcggcccggacggcccaccgacacgcaaagaacagagcgggagagccccccacgacccagaaccagggaagag

SEQ ID NO: 70367 - RNA, 88 nt, Homo sapiens
agcaaagcccccacgcccagccaggagcaccgccgaggacccagcacaccgagggcgcgagaaaggaccaacgaccccgagcgcaacc

SEQ ID NO: 70368 - RNA, 86 nt, Homo sapiens
cgcagcaccccggagccgagaacaggagggccaaccggggaaggggagcagagagcacacacaggagccgccccaccgccgccccc

SEQ ID NO: 70369 - RNA, 64 nt, Homo sapiens
acaaaaggcggccggaaaccaaaccaacaaaaagaaggaaccaaggccccagaagaagggacac

SEQ ID NO: 70370 - RNA, 49 nt, Homo sapiens
aagacccagggcggcgaagggaagagggcaggcagggccaaagacccag

SEQ ID NO: 70371 - RNA, 81 nt, Homo sapiens
aaacagaccaagaggccggagaaccagcgggacccaaagacaggaccacgcaccagcagagaaggaaagcaaaccgaagca

SEQ ID NO: 70372 - RNA, 71 nt, Homo sapiens
ccaaagaagcaaaacacgaggccaagggagcagagaggaacagcacggaggagagagcagagaaggaggag

SEQ ID NO: 70373 - RNA, 81 nt, Homo sapiens
caaagaagcgcgcaccgccggggagacaccacagacaagaccggcaccccacggaaaacaacaggagcaaggaggcgcacg

SEQ ID NO: 70374 - RNA, 50 nt, Homo sapiens
gggccaggaaggacaacagcagggcgcaagcagccccagacaagccaaaa

SEQ ID NO: 70375 - RNA, 68 nt, Homo sapiens
cacgggacgggagacccgacggagcagacagaaacgcgcgcacggccacgccaacggcccagaggcac

SEQ ID NO: 70376 - RNA, 59 nt, Homo sapiens
aggagcacagaagcgcacagggggcaccaccacgaggcgaggggccaaccaaggaggcg

SEQ ID NO: 70377 - RNA, 74 nt, Homo sapiens
gcccaggagcgccacgcgcggaaggcagcgcccagcagcgcaggccggacacccaacagcacgcagacaaggca

SEQ ID NO: 70378 - RNA, 71 nt, Homo sapiens
aagaccccgccgcacaacgcaggcccacccgggcaggagaggccgaccacccggggggcccgcgcgaacac

SEQ ID NO: 70379 - RNA, 76 nt, Homo sapiens
caagagccccagccaccagagaaggagggggcagagcacggcaggcagaaggggccaacccgggggaacgcaccgg

SEQ ID NO: 70380 - RNA, 77 nt, Homo sapiens
gcagcgagcccgaagcaaaagccccacacaagcggcaccgaggcaagcaccagcacccagagagaagacgcaaccaa

SEQ ID NO: 70381 - RNA, 78 nt, Homo sapiens
gccggacaggaggaacccgagcagaaggcacaacaggcgagcaggccgaaaccggcgggagagccgcgagaacggccg

SEQ ID NO: 70382 - RNA, 43 nt, Homo sapiens
acaggcgggccgccggaagacgggcggaccccggcaaaacgcc

SEQ ID NO: 70383 - RNA, 80 nt, Homo sapiens
ccgcaggcagacacccgaacaacaacacagggaagacgagcagagcacggcagacgaggcccacgagcggacccgcccca

SEQ ID NO: 70384 - RNA, 54 nt, Homo sapiens
aagagaggcacgaccaagacgcagggaccaaccaagaagaaacaacgaccacca

SEQ ID NO: 70385 - RNA, 82 nt, Homo sapiens
aagagacaaagaaaaacggaaaggaaacacaacaccaagcccacaagccgccaaacgaagcccgagaagagagaacaacaaa

SEQ ID NO: 70386 - RNA, 83 nt, Homo sapiens
ggaaccacacacaaaagcacacaaagaccccccccacaggggagacagagagccgcccgacacacaaacaaaaaaggaccccc

SEQ ID NO: 70387 - RNA, 78 nt, Homo sapiens
cagcacgacaaacacgacggacagagcgaagcgaccaagcagaagcgcgccccagaccaccggcagggaacagccgag

SEQ ID NO: 70388 - RNA, 85 nt, Homo sapiens
gaaaaagaacagcaacagaccacgagaagcgagccgggccagaggacagagcgggagccaccagcgccaaagggaagccaggagc

SEQ ID NO: 70389 - RNA, 104 nt, Homo sapiens
gccccgagcgaggagcccagcggacaaagcggcaaaggagaagaacgggagcaacagcgagcaacaggcaacgaaaacagacaaaacaacggaaaagcagggca

SEQ ID NO: 70390 - RNA, 72 nt, Homo sapiens
aagcacaaagccagggaagcagcgagagggacagacccaaagacaggaccacgcaccagcagagaaggaaag

SEQ ID NO: 70391 - RNA, 43 nt, Homo sapiens
cagcgaggcccgcggagaccaggggcgaagccgacgagcccga

SEQ ID NO: 70392 - RNA, 76 nt, Homo sapiens
cgcacggagacccacagacaggaccgaagggcggcccgacccaaaaagacaccaggggggaaaaaccacacaggca

SEQ ID NO: 70393 - RNA, 80 nt, Homo sapiens
aagaaccaaaagcccagagcaacagccagcaacacagaaacaggaagcgccaaaagaggaagcagccacgaagaagcagg

SEQ ID NO: 70394 - RNA, 75 nt, Homo sapiens
gaaggagcgacgcgagccaagaggacgagccaacacccgagccccaggccagaaggacgggcaccccgggccgac

SEQ ID NO: 70395 - RNA, 81 nt, Homo sapiens
ggccccagagaaaaacggcagagacagcgccagaaccacggcaaagacaccaagcagaagccagcccccaggagcagacag

SEQ ID NO: 70396 - RNA, 79 nt, Homo sapiens
gcaaagcccccgcacacgccggaggcaggggacaacacgacacaagcggccggggaaggcgacagcgaccgaagaacag

SEQ ID NO: 70397 - RNA, 69 nt, Homo sapiens
ccggccgcggcacggcccggggccgggagcgcccgaggaacacgccgcagagggagcaccaggcccggg

SEQ ID NO: 70398 - RNA, 57 nt, Homo sapiens
gcagaaggacgccgggagagagagcagagcaagcacacccgaggaaaggagcagcga

SEQ ID NO: 70399 - RNA, 35 nt, Homo sapiens
cccagggggggaaaccaccggcgggaccccgcgaa

SEQ ID NO: 70400 - RNA, 74 nt, Homo sapiens
ggcccccaaagcgcgggaaagcgaggaacaggaccgagccaggggcccggcaccgccgcacccccacccaagac

SEQ ID NO: 70401 - RNA, 77 nt, Homo sapiens
accggccaaggacccagcagaacgcaaaaggcgaaaggagaaagaagagcaaaaagccagaggccgaagacaaagca

SEQ ID NO: 70402 - RNA, 72 nt, Homo sapiens
gcaaggaacgagagaaaccaccaaaccaacccgcaaaccagggacagagcacggcccaaagaagagcaggcc

SEQ ID NO: 70403 - RNA, 58 nt, Homo sapiens
ggcggcagacacacgggccagcccagcacaggaggagcaaaaaggacagagcacagag

SEQ ID NO: 70404 - RNA, 61 nt, Homo sapiens
gggaggaaccgacgggaacgaaggcgggcgcggacaagaagacagcagacggacgaagaga

SEQ ID NO: 70405 - RNA, 85 nt, Homo sapiens
cgggcgggccccggacccggagacaccccgcagcacagccgcgaccaagacaaagaaacggcggacagagcgggggcggaccggc

SEQ ID NO: 70406 - RNA, 75 nt, Homo sapiens
ccagccaccgagaccaaaaagacagccaaaagaggcaacaagaaaaacgaaaagcgcaggaggaggacagaaaag

SEQ ID NO: 70407 - RNA, 69 nt, Homo sapiens
acaagagacgaaacacgcaccaaaaacaaaagagagcgcacgaccggcccggagcggggggaaaacccc

SEQ ID NO: 70408 - RNA, 69 nt, Homo sapiens
gcacggcagggcaaaagagccaaccgaaacgaccagaaacgaaggaggcccaaccacaaaaggagccga

SEQ ID NO: 70409 - RNA, 72 nt, Homo sapiens
caaaaggagcggggcgacggccccacccccgagcccagcaccgcgggaaggaaggacagggaacaagaagag

SEQ ID NO: 70410 - RNA, 60 nt, Homo sapiens
gcaacggagaggcacaggaacacgaggaaacccacgggcgacagcaagaaggagccagca

SEQ ID NO: 70411 - RNA, 61 nt, Homo sapiens
cgccggaccaagcgggcccagaagcggacggggacagaagacccacgccgagccgcggcag

SEQ ID NO: 70412 - RNA, 79 nt, Homo sapiens
gaccaggcacccgggaagaaaaggcaacagaggccccgcaaaggaggaggacggaaaggagacggacacacaagagacg

SEQ ID NO: 70413 - RNA, 67 nt, Homo sapiens
ccagcgggaaccgccacgccaggaaggaaagccccgaccacacgagaaagccaaggacacgcaggac

SEQ ID NO: 70414 - RNA, 67 nt, Homo sapiens
gaaaccaacaaagaaaaagagcgacgcaaggaaaaaggagcagccgcaacagcgcaccgacacaagc

SEQ ID NO: 70415 - RNA, 67 nt, Homo sapiens
acaggaaacagggaacagaggaggagcagccggccagaagagccaaacagggcaaagcacagaaaaa

SEQ ID NO: 70416 - RNA, 72 nt, Homo sapiens
gggaggaagagagaaaagagagaaccccaaccggggaggaaaaccgacgaaggagacacacagaagacgaaa

SEQ ID NO: 70417 - RNA, 67 nt, Homo sapiens
ggaggcccaaccgaagaaaacaagccacggggaaaaagcgggaccgcagccagcacaacaaacagcg

SEQ ID NO: 70418 - RNA, 59 nt, Homo sapiens
cgcacaggaagagcgagaaacgcggaaagaagcagaaggacagggcagaccgccagcag

SEQ ID NO: 70419 - RNA, 72 nt, Homo sapiens
aaaaccacagagagcagcggagacccaagcaccggcccagagaaagacggggaccacgaccacagcaacaca

SEQ ID NO: 70420 - RNA, 66 nt, Homo sapiens
ccggaacgaagaaaccaaaggcagcacagcaggcgacaagaaccaaaccccagagacaagaaggag

SEQ ID NO: 70421 - RNA, 39 nt, Homo sapiens
cgacgggccgccacggacgcaggaccgaagacccccccg

SEQ ID NO: 70422 - RNA, 86 nt, Homo sapiens
agcaccacggagcacaagacacccgacaggaggacgcccgccaggggagcagacagaacacccgggcccagccggggaccgcaccc

SEQ ID NO: 70423 - RNA, 66 nt, Homo sapiens
agacaaaagggccaaagaagggagagaggaccacagggacaagcagaggcgagccagggcgagaaa

SEQ ID NO: 70424 - RNA, 74 nt, Homo sapiens
gacgcccgcgccggcgccccggacccaacagaggaagccgcaagaaacgggacgacaggaaggccagagaaggc

SEQ ID NO: 70425 - RNA, 72 nt, Homo sapiens
ggcaccaacagccccaagccgacggcggcagcaacagaagacagcggaagccgcagaaggaccggccagaag

SEQ ID NO: 70426 - RNA, 74 nt, Homo sapiens
ggcagagcgaaacaccaaaaccagcggagcgacacagccaaccccagagaggcacaccgaacaacccaaagcaa

SEQ ID NO: 70427 - RNA, 54 nt, Homo sapiens
ccaaaaacaaaacgaaccaggacggcaaggggacccaagcggggaagagggcca

SEQ ID NO: 70428 - RNA, 75 nt, Homo sapiens
accacaacagaaagcgacaacagccaagagggcgcccagagacaacgagagaacccgcaagaccgccacaagaaa

SEQ ID NO: 70429 - RNA, 75 nt, Homo sapiens
gccgaaccaacacagggaccaagggccgagcaggcccagagagccaggaagcccaggccaggaaaagcaccaaag

SEQ ID NO: 70430 - RNA, 77 nt, Homo sapiens
aaagaagaaacaaaaaaagcacaaaacagagcaaggcaagaaggggcagaaacgaagcacaggaacaagaagccaaa

SEQ ID NO: 70431 - RNA, 51 nt, Homo sapiens
gcggccagcggcacacccaccgaaggaggagaaaaccaccaaaaaaagaag

SEQ ID NO: 70432 - RNA, 46 nt, Homo sapiens
ccagaaccccacacagacagaaccagaaagaaacggaagaaccgag

SEQ ID NO: 70433 - RNA, 58 nt, Homo sapiens
gaaaaacggagagccacaaaaaaggaagcgaaaggagaggcagagagcccgaaagccg

SEQ ID NO: 70434 - RNA, 39 nt, Homo sapiens
gagaggagggagccggggggaaagaccacagcaagacca

SEQ ID NO: 70435 - RNA, 80 nt, Homo sapiens
cgcgggaaccaggagcgaccacgcgcaccaacgagaagggcggagcggcaggaagccaaggaccaaagaaagcgacaccc

SEQ ID NO: 70436 - RNA, 61 nt, Homo sapiens
caccacacggccaacaaccaggcaggcacagagagcgggaccagaaagacagggcgccagg

SEQ ID NO: 70437 - RNA, 56 nt, Homo sapiens
ccaagagaaaacgggaaaaagcagggaggaacccgagaagggagacggagcaccgg

SEQ ID NO: 70438 - RNA, 76 nt, Homo sapiens
aagagcccccacaacggggagaacagcccaaaaaagcgccagagcagaaacacaggccgagggagcaggaaagagg

SEQ ID NO: 70439 - RNA, 56 nt, Homo sapiens
cggccgggggcgcccgcagccgaaagacgcacaacaagagggcccgacaccaaaaa

SEQ ID NO: 70440 - RNA, 70 nt, Homo sapiens
cgcgcagcaggagaaaacagagcgcaaaaacaggcaccgcaagcggacccaggagggagagagcggcagc

SEQ ID NO: 70441 - RNA, 77 nt, Homo sapiens
aaacaaaaaggccagaaagaggagcagagacgccggacagaaagcaccgggaggaaagagagccacacgaagaacac

SEQ ID NO: 70442 - RNA, 56 nt, Homo sapiens
gcgagagacacaggaacggggcgccaccagcggagggagcgagcccccgcggcgcc

SEQ ID NO: 70443 - RNA, 77 nt, Homo sapiens
ggcgccaccgccgccgcagagaggagaacacagcaacagaagagaccaacccaagcgacccgccgggaaggaagcac

SEQ ID NO: 70444 - RNA, 54 nt, Homo sapiens
ggggcaggagcgcccgcaccacaccccacggacagagagggaaagccggcccac

SEQ ID NO: 70445 - RNA, 79 nt, Homo sapiens
gacccgggcgcccgcgcccgccccaacccagccacagcgccacggccaccacgcggcagacagggcccgcccggagcaa

SEQ ID NO: 70446 - RNA, 71 nt, Homo sapiens
acaacaaccaaggaaagagcaacgacgcccgggagcagaaggcaagaaagggagaagccagaaaagcagaa

SEQ ID NO: 70447 - RNA, 71 nt, Homo sapiens
ccccaaccagggcagaagccgaacacgacagaaagaaaggccaaagcagcagcaagacaaacagagaacag

SEQ ID NO: 70448 - RNA, 84 nt, Homo sapiens
ccaggcacccgggcccagccgggaacccccacgcggccagcgaaaacgcccagaaaaccgggcacaggaccaaagcaaacacag

SEQ ID NO: 70449 - RNA, 67 nt, Homo sapiens
agccccagaccggaggacaaccacacccagcaggcagggcagaagaccgcaccaggccaaggcacag

SEQ ID NO: 70450 - RNA, 81 nt, Homo sapiens
cgccgcccggccaccggcgggcccgaggagagcgcggagccgcgcccccggagaaggcagcaggaagaaacagcgaaccaa

SEQ ID NO: 70451 - RNA, 77 nt, Homo sapiens
ccgccacggcagacgggaccccgcaccggaccagaggcaaaccagccggagcagcagcaacagcagcaggaaaaacc

SEQ ID NO: 70452 - RNA, 77 nt, Homo sapiens
ggaggagcagggccagcgcagaaaacagggaagaaagccaaaggaagccaggccacgaaaaaggaaggcagagccca

SEQ ID NO: 70453 - RNA, 53 nt, Homo sapiens
cacgacccggggacccacagcgcggcagagcgcggcgcccaggcggagacaag

SEQ ID NO: 70454 - RNA, 85 nt, Homo sapiens
ccggacccaaccagagaaagacaaccaaccccaccgaggaggacagagacgcaagaaagaacggcgggggcacacagaaccaaaa

SEQ ID NO: 70455 - RNA, 89 nt, Homo sapiens
cggcaccggcggcggcgcgcagcggcaggcggagagacccgccgccagaccaaccagggcaaggagggccagggaagggcggaccaaga

SEQ ID NO: 70456 - RNA, 65 nt, Homo sapiens
gcccaaaggaacacagaagagaggagacagacgcggaggaaccagcagcacaaacacgggggcaa

SEQ ID NO: 70457 - RNA, 70 nt, Homo sapiens
aacacagagcagcggaaccagacaggcaggaaaagacagaaacacaggggaaacacgagagagcaacagc

SEQ ID NO: 70458 - RNA, 76 nt, Homo sapiens
aaaacaaacggaaaaaaagaacagagaaaaaaccaacaccccggcagccgggaacagagggcagaacacaccaccc

SEQ ID NO: 70459 - RNA, 84 nt, Homo sapiens
agaccggaggccaacggcagaagccaccacaaaagcgaaagggcacaccacagggggagcagaggacagggaagcaggaaaaag

SEQ ID NO: 70460 - RNA, 78 nt, Homo sapiens
gggccccgagcgcgagggagggacaggacagcggccaggcccgcccccccccgaaccaaaaaccacgaggagaggagg

SEQ ID NO: 70461 - RNA, 54 nt, Homo sapiens
ggagacacgaggaaggccgagagcaagcaaagaagccaaacaaagaagcagaac

SEQ ID NO: 70462 - RNA, 83 nt, Homo sapiens
acacgggaagcaggagcgaaagcgccggaagggcaggaagagaacaccaaaggcgaaggagaagaggaacaagaaaaagaaaa

SEQ ID NO: 70463 - RNA, 86 nt, Homo sapiens
acgaggagaccaagagagggcggggagccggagaaaacagaacggacgggccacagacaagcggaaggcgcggaggagaccaggcc

SEQ ID NO: 70464 - RNA, 75 nt, Homo sapiens
gagagcgcacgaagaagggcggaggacaaggagaaggaggccgcacccagaggaagagggcccggcgggccggcc

SEQ ID NO: 70465 - RNA, 67 nt, Homo sapiens
ccgccgcgcaccgacccgacgcgccggcccacgcgcggccaagaccggcgggggcccagggccagcg

SEQ ID NO: 70466 - RNA, 54 nt, Homo sapiens
cccaaggccagacaaaaccccggaaccagacagacagccgaaaccaagcacacg

SEQ ID NO: 70467 - RNA, 79 nt, Homo sapiens
agcccgcagacaaggagcaggcgcgaaggcagagaacgcagaagcaacacaagaagacaaaggcaaggccgaggcaaaa

SEQ ID NO: 70468 - RNA, 56 nt, Homo sapiens
ccaaacgacaccccaaggcgagccaggaggaggaaaggacaggcaacaagcaagga

SEQ ID NO: 70469 - RNA, 82 nt, Homo sapiens
gcggaacccccagacaaggccccaacgggggaagacccccacggggcggccaaggagcaggccgggcccgccagggcacgcg

SEQ ID NO: 70470 - RNA, 90 nt, Homo sapiens
caaaacggcgcgagagcggggacccgcgggacccgcagccccgcgcgggcaccagccagaagcggggggcacgcagcgaagccacagacc

SEQ ID NO: 70471 - RNA, 72 nt, Homo sapiens
ccgacgcaacggcaccaaaaccagaaagcagcagcagaaaacgaaggaagaggaggaaggaggcgggaggaa

SEQ ID NO: 70472 - RNA, 78 nt, Homo sapiens
gccagaaccagggccaacagggacagccgcaaccaggaagaccagaagggcgaaaacaagcaagcagaaaaccgagca

SEQ ID NO: 70473 - RNA, 81 nt, Homo sapiens
gaacgaggccaagcggaggggcgcgagccaccgcgccggacgggagggccgaacacggcaaagaaaccccaaagccagcaa

SEQ ID NO: 70474 - RNA, 80 nt, Homo sapiens
ggaggacaggaagggaacgggaaagcgcaacaggacccaaacaggaggaagaccccagagaaacacaggccaaaaaaaca

SEQ ID NO: 70475 - RNA, 69 nt, Homo sapiens
agaacagaacgaccgagcagagccccagagacagaaaacaacccgcgcacagaagggagcggcaccgga

SEQ ID NO: 70476 - RNA, 75 nt, Homo sapiens
agacgaacgaaacacgaaagggcaggcacgggaagacccaacgcggcaagagcagagaagggccagagcaggcga

SEQ ID NO: 70477 - RNA, 59 nt, Homo sapiens
cggcgccggcccgcccccgcagcagcgccagagccaggacaaaaccaggcagaaccaac

SEQ ID NO: 70478 - RNA, 72 nt, Homo sapiens
acagaaagaccccaaggacacagagcacaagcccgaggagaaccaggaccaaagcaccagcacagaagggaa

SEQ ID NO: 70479 - RNA, 86 nt, Homo sapiens
gcggcgcccggcccccgccgcgggcaaaagcagaccggaaaacccaccggcaagaccacacccgaggggagcccaggacaccacga

SEQ ID NO: 70480 - RNA, 70 nt, Homo sapiens
ggggagacgccgagggacccacacaaccaccagcgcccaaaggcaagcagccacggccagacgacgccac

SEQ ID NO: 70481 - RNA, 71 nt, Homo sapiens
gggagcaccagcgcgccacgacccgcagacaagaaagggaccccaccacgccgggacaccaccccagccac

SEQ ID NO: 70482 - RNA, 37 nt, Homo sapiens
gacgcggaaaaacgcaaagggccccagggagagcccc

SEQ ID NO: 70483 - RNA, 72 nt, Homo sapiens
ccggggccacggcaccggcacaccgcggggccgaaaacaacgacaacgagcacagagcggcgggaggggaag

SEQ ID NO: 70484 - RNA, 69 nt, Homo sapiens
aaaagaaaggcagacgaagggaaagcccagaacaagaaggcaaacggcaggaaacggagcgaaaggaag

SEQ ID NO: 70485 - RNA, 75 nt, Homo sapiens
aaggcaccaggccaccacagaaacaaaagcaacaaagagggaagcaagaccagagagcaaagggagaggaaaaac

SEQ ID NO: 70486 - RNA, 73 nt, Homo sapiens
cacaagcccgagcccgaagagagaaggcaaagaacccggggaaaggggccaacaagcagccgcaaagaggaac

SEQ ID NO: 70487 - RNA, 77 nt, Homo sapiens
aaaaccacaacacacccagacaggccaacacaaaaagcagcagcagggacaagcaaggggccaaggagccaaggagg

SEQ ID NO: 70488 - RNA, 51 nt, Homo sapiens
accggaacaggcacaccccacacaagcacgccaagggacggaaaaggcgca

SEQ ID NO: 70489 - RNA, 77 nt, Homo sapiens
gaagaaagaagcgcgaaaacagaagcaccgcacacgcccaacacaagaaggaaacaggaacacgaaagaggaaaaac

SEQ ID NO: 70490 - RNA, 38 nt, Homo sapiens
gggggggcaaacccgagagaacggcccgaaccgggggg

SEQ ID NO: 70491 - RNA, 67 nt, Homo sapiens
cacaccagcccccaaggaggcgacgaaggacacgcaacccccagcacagcagggacaggaccagaag

SEQ ID NO: 70492 - RNA, 55 nt, Homo sapiens
gcccggaaagaagaaggagaggggagaaccccagacaggacgacccggacaacca

SEQ ID NO: 70493 - RNA, 74 nt, Homo sapiens
gcccaacccccaagccaagcagcaggaagacgagggccagcggagacgccaacagagaagaagaggacacccac

SEQ ID NO: 70494 - RNA, 72 nt, Homo sapiens
ggagacgagcaagaccgcgacacccgaagcgagaaaggcagaaggcggcagggagcacgcaccaggagccca

SEQ ID NO: 70495 - RNA, 74 nt, Homo sapiens
gcgccaagaccgcgcagccgcggcgacgccgaaaagcgaaaagaaacaagccgcggcaacagcgaccccaagcc

SEQ ID NO: 70496 - RNA, 79 nt, Homo sapiens
caaaccccaggccaagcagccaccagcagcccccagagcgggaccacagggacacgagacgagaacagacccgcccgca

SEQ ID NO: 70497 - RNA, 77 nt, Homo sapiens
gcagaccgcagaacacccagccaggaaccccagccccacaccgaggagcgggcagagacggacacaccggggagaac

SEQ ID NO: 70498 - RNA, 65 nt, Homo sapiens
agaaggggcaaagagcgccgagacgaggagggcaggaccagggggagcgaaagggaggaaaccga

SEQ ID NO: 70499 - RNA, 72 nt, Homo sapiens
gggaaccggcgcgccggcgcgcggcgcggacaggcccaaacggccccgggggcgccgagggcacaagggcaa

SEQ ID NO: 70500 - RNA, 83 nt, Homo sapiens
ggccagccaaccgccggcaaccccgggcggccgcaccgccagccagcaacacccaacacaaagcggaagaacacagaaacagc

SEQ ID NO: 70501 - RNA, 73 nt, Homo sapiens
cacggagagacacggcgggggggggcagggccgccaagaccggagacaggaacacggccccggggaccgccgg

SEQ ID NO: 70502 - RNA, 85 nt, Homo sapiens
agcgccgcaacgaaacagcagcgggagaagaggacaagagaaagccgggcgacggccaccaccgaagcacagagggaaggagaag

SEQ ID NO: 70503 - RNA, 77 nt, Homo sapiens
gaaggccggcaacccacacaagcgaaggcgcgcaccggaagcaccagcgaggaaggacaagccagggagacacgacc

SEQ ID NO: 70504 - RNA, 81 nt, Homo sapiens
cggaaaccggagcgcgcagcaggccgccaaggcgagaagacaaacacaaggagggccggccaggggccagggcgcagggag

SEQ ID NO: 70505 - RNA, 61 nt, Homo sapiens
agccagccacgcgggccgcccgacggcggccaccggaaccaaaagagaccggggacgccca

SEQ ID NO: 70506 - RNA, 76 nt, Homo sapiens
cagcggggcggcggggaagcgagcacaccaaggcaggaaccaacgacaagagcagcaggggcgcacccaaagaagc

SEQ ID NO: 70507 - RNA, 74 nt, Homo sapiens
gacgcaccccacagcagagaaaaggcagcagaccggaagccacaaagagggcgacaccgcaagccggacggcca

SEQ ID NO: 70508 - RNA, 68 nt, Homo sapiens
agcagcgaaaccaaggccggggcccaagggaggggacgcggagggccaacaacacacccccccaaggc

SEQ ID NO: 70509 - RNA, 83 nt, Homo sapiens
gaacacacagaaaagggaggccaaggcggagaacccaagacgccccaaaggaagagcgccgagggaagggccagacgagccgc

SEQ ID NO: 70510 - RNA, 80 nt, Homo sapiens
cgaccccaccaggcggcggaggagagaggccagaggccgaagcaagcgagaagcagaccaaaaagagccaagcgagaaga

SEQ ID NO: 70511 - RNA, 76 nt, Homo sapiens
gcagcgggcccggcgggggaccgagggaggagcggggacggcgacccaggagagagaggagccacacaggccggaa

SEQ ID NO: 70512 - RNA, 78 nt, Homo sapiens
ggaaagccccagccacccacaaacagagagaaggaaccacccacgcaggcagacaagccccaccccgaggcagaaaga

SEQ ID NO: 70513 - RNA, 71 nt, Homo sapiens
aagccgacccggagccgagcaaccagggacagcaggcgccgcgaaggcccaagcgcacacaccgggccaga

SEQ ID NO: 70514 - RNA, 80 nt, Homo sapiens
ccaggccccggaggggccccgagccaggccgaggacggagggggagggccccccggaccagcccgggagacgggggggcc

SEQ ID NO: 70515 - RNA, 76 nt, Homo sapiens
caggacagaaaagacaggcgccaggagcacagaagagcgaggagacagaagccaaaacaggaaccgaaaggccaag

SEQ ID NO: 70516 - RNA, 69 nt, Homo sapiens
gaggaagcgacagagagaggcagacggagccagccaaagaaggcacagggggaccccaagccagacccc

SEQ ID NO: 70517 - RNA, 63 nt, Homo sapiens
aacggccaggaccccgcagagggcccgcggcacgaggcacaaggaacaggacacccaaccgcg

SEQ ID NO: 70518 - RNA, 71 nt, Homo sapiens
gcagggaggcccaggaaacgaaaagagacagcagggcaaaacgggccacacacagggcaaaaagaacgggc

SEQ ID NO: 70519 - RNA, 79 nt, Homo sapiens
ggaccggcgcgccggaccccgccccccccgcgcggcgcgggcgccgggggcaccgagggccgggaccaagacaaacgcc

SEQ ID NO: 70520 - RNA, 79 nt, Homo sapiens
ccgcccagccccagagagcgggaacaggcccgccgccccggggcacgccaggcaaccaagacaacaagccaaagccaca

SEQ ID NO: 70521 - RNA, 70 nt, Homo sapiens
cgagacaaaggcaccaggccaccacagaaacaaaagcaacaaagaggggaccccaccacgccgggacacc

SEQ ID NO: 70522 - RNA, 40 nt, Homo sapiens
acgcaagaagagagcagccaaggaaagaccacagcaagac

SEQ ID NO: 70523 - RNA, 49 nt, Homo sapiens
cgcgccgggggacaaggaaaagcaaacacaaaaagagagcagaacgcaa

SEQ ID NO: 70524 - RNA, 81 nt, Homo sapiens
cagcaggaggcccacaagcagacacaccggacaagaccgacgaacacacgagaccgggcggagaagagaaacgagggcaca

SEQ ID NO: 70525 - RNA, 76 nt, Homo sapiens
ggagaggcccgaagcagacaccagcaccaaggcggagcccgacggccacaaggcagcaccccagaacacgggcggc

SEQ ID NO: 70526 - RNA, 72 nt, Homo sapiens
aacgcccaccaaagaggaaagcgaggaggagcgagcgcgagaggaaaaggggagaaacggcacacgggacag

SEQ ID NO: 70527 - RNA, 54 nt, Homo sapiens
gaaggcccgcggcgccccggcgcagaaacaacaggaacccccaaaaccaaaagc

SEQ ID NO: 70528 - RNA, 76 nt, Homo sapiens
ccccacaggaggggaggcgaccaggccgacggagccagcaccgccgaccgccagcgccagaagccagagagggcgg

SEQ ID NO: 70529 - RNA, 74 nt, Homo sapiens
ggagcagcagcagaaacaggggccagagaacaagcccagacagcaagacgcgagcgcaggggaccaggcagagg

SEQ ID NO: 70530 - RNA, 61 nt, Homo sapiens
agcagcaaacacgggacaaaaaccagaccagaaaaggggaaggaacaaaccaaagagcaga

SEQ ID NO: 70531 - RNA, 64 nt, Homo sapiens
agccaggagccaccaacaccaaaaagccccccccagccagagcccgggcgcgggaagagacaga

SEQ ID NO: 70532 - RNA, 79 nt, Homo sapiens
ccccgaggccaaggcgccaggcaggacgacagcagcagcagcacgccccagacaacgaagagaggaaagaagcggaaag

SEQ ID NO: 70533 - RNA, 70 nt, Homo sapiens
caagcgggagcaaggagggcgaagagcgaggagaccgggaccccgggaaaggcacaggacaagacggagc

SEQ ID NO: 70534 - RNA, 72 nt, Homo sapiens
gaggagaggccggggcagcagggccccgcccccgaaggacagcaaaccaggggacagggaaagcagaaccgc

SEQ ID NO: 70535 - RNA, 64 nt, Homo sapiens
ggccagcccgccgggaccgcagccgccccagccaccaccccaggggccagagcccccccagaac

SEQ ID NO: 70536 - RNA, 82 nt, Homo sapiens
cggaccgaagaggaggagagaggaagaacagcggaaaacagaaaaggggaacaaacacaacccccaaagacgacgacccacc

SEQ ID NO: 70537 - RNA, 79 nt, Homo sapiens
ggcaagacgggacggaccagcccccccacccggcaagccgaaaacggcgagaagggcgccacgcccaagcggagagcag

SEQ ID NO: 70538 - RNA, 78 nt, Homo sapiens
cccagcaggcggggaagagaaagggcacgaaggcagccccggggaacccacgcgaccggaggggggaagggaagcaca

SEQ ID NO: 70539 - RNA, 70 nt, Homo sapiens
ggaacagcacagggcgcaacaagagcgacaaacgcaggacagggacaagcgcacagcggagaaagcagcg

SEQ ID NO: 70540 - RNA, 59 nt, Homo sapiens
ggaggcccgcgggacccccaccgccaccggaaacccgaccgccccaggggcacagcagg

SEQ ID NO: 70541 - RNA, 78 nt, Homo sapiens
cccggagaagaggacggagcgacgacacaaaagccaggaagacaagagcagaagaaacagaccgaaagacaacaagaa

SEQ ID NO: 70542 - RNA, 64 nt, Homo sapiens
agggagacgcacagccaggacaccggaaccgggaaagggcaagagcaacgaaccaaagcaaagg

SEQ ID NO: 70543 - RNA, 75 nt, Homo sapiens
caggaagacggccaggccggccggccggacaagcccaggagccgaccagagagcaggcccagcccccggacacgg

SEQ ID NO: 70544 - RNA, 43 nt, Homo sapiens
gcagggccgcacacagcccagaggagaaggcagagccccccca

SEQ ID NO: 70545 - RNA, 74 nt, Homo sapiens
aaaagccaggaaagggcaaggcacagcggagccaagcagcgagggccgacccaaggaaaggacaggcacagcag

SEQ ID NO: 70546 - RNA, 77 nt, Homo sapiens
aggagacaggacgaagcccaaaccacaagccacaaaaggaggagaacagccgcacgggcggcgcccggcgcgggaca

SEQ ID NO: 70547 - RNA, 64 nt, Homo sapiens
aacagcggaggagaccgggaaaccgccgaagacgaaggacgcagaaggacccacagaagcccaa

SEQ ID NO: 70548 - RNA, 80 nt, Homo sapiens
agaacagcaacgcagcagcccggcaaccggcgaggaacgaccacccgaaccgcaaagcggagcagggccaggagagggca

SEQ ID NO: 70549 - RNA, 72 nt, Homo sapiens
caaaaaaaagcccaagcaacagcacgggaaacgagagcagaagggagcgcccaaaacaaaccaaagaagaac

SEQ ID NO: 70550 - RNA, 75 nt, Homo sapiens
ggcgggggcccggccacccgcagaggagcggaggagacagaaccgccccggagccgaggagcccacgacgccgag

SEQ ID NO: 70551 - RNA, 75 nt, Homo sapiens
gaaggacacccgcaggaaccggcagaggagaaacagacggccccgagggggaaacaagccggcgcgccacagcgg

SEQ ID NO: 70552 - RNA, 44 nt, Homo sapiens
gcgcgccagcccaggaaaggcgccgaagagaacggccgagcgac

SEQ ID NO: 70553 - RNA, 81 nt, Homo sapiens
ccagccaggccgcgcgggcccgaggccggaggaacccggacccggcgagcggcacgcagaagccagcggacgcccgcaacg

SEQ ID NO: 70554 - RNA, 71 nt, Homo sapiens
aaagcagaacacaagaccaacccgccaaaaggccacagggaacggggggcagcggccccaacagccccaga

SEQ ID NO: 70555 - RNA, 83 nt, Homo sapiens
ccagcccccacgaccagccacacgacgggccggcgcggaagaggccggcggcgggacggccccacgggacccgccccgaccac

SEQ ID NO: 70556 - RNA, 74 nt, Homo sapiens
acagcaagggacagacgggaaaaaagagcaccagacagggggacagcagcaccagaaccaaaaagccacaacag

SEQ ID NO: 70557 - RNA, 75 nt, Homo sapiens
ggggacggacaggcacccgggccgcagacccagggaggcggccgaagcgcccagcaggcaccaaggccgggccgg

SEQ ID NO: 70558 - RNA, 84 nt, Homo sapiens
gcgggagagcccggcggcggagcgcgccacgcagagccccgccaggaagacacgccggggaacgaagcagaagacggagggggg

SEQ ID NO: 70559 - RNA, 77 nt, Homo sapiens
agaggagaacggaaaaagaagcacaaaagccagcccgaggagcaaggggcagcaacacggagacaaacccgcaaccg

SEQ ID NO: 70560 - RNA, 58 nt, Homo sapiens
ggacagcgcacacagcaagcacgaggagaaaccccagaggaacccacgagaaaaacag

SEQ ID NO: 70561 - RNA, 68 nt, Homo sapiens
cggaccgcagaaacgaggcgccaagcccacgggcgcaccaacggagagccagagcaagggggaggccc

SEQ ID NO: 70562 - RNA, 82 nt, Homo sapiens
cagaagggccgaccagaaaggaaccccaagcgacgcaggcagaagcgagacggcaagacccacaacaggcacacaggaaaaa

SEQ ID NO: 70563 - RNA, 73 nt, Homo sapiens
ggaaaccacacagccagggacccccgacaggccagcgccaccaccgccgaccagcagccacgcccagacaccc

SEQ ID NO: 70564 - RNA, 66 nt, Homo sapiens
gcgaagaacggaccgggccggagccggaggaacgacgaaccagaagagacccaaggacaacgcaag

SEQ ID NO: 70565 - RNA, 87 nt, Homo sapiens
gcggaccggagcgggcggcggaggacccggacagagaggaggcagagagccccgcgacgagagagacagagagaccacgccgagcga

SEQ ID NO: 70566 - RNA, 66 nt, Homo sapiens
gaagaccggcaaacggccggacagaaaccagaccagccggcccagaacagggccgcaggccgggca

SEQ ID NO: 70567 - RNA, 73 nt, Homo sapiens
gaaggaccaagaaccaggccaaggcggaagggacgccgccggaacacaggacgggacgagaacgcgagaagag

SEQ ID NO: 70568 - RNA, 84 nt, Homo sapiens
agcccgcccaggggacaccgggaaggacggacccacggggaacaacaagacaacaagaggagcaagaacaacacaagagcaggg

SEQ ID NO: 70569 - RNA, 73 nt, Homo sapiens
agagaaagcaaagagaaaggaagcaggcccgggaaggggaacgggcgcaggaggaggcaagacgggcagacga

SEQ ID NO: 70570 - RNA, 72 nt, Homo sapiens
aacccagcagcgcagagggaggcccaaaaagaaggcaaagccaggcacggcggcccccccgccaccagccca

SEQ ID NO: 70571 - RNA, 68 nt, Homo sapiens
gcacccacgagcaggggaaggagggcgaaacaaaggaccagcacgggaaccggccgcccagcgcagcg

SEQ ID NO: 70572 - RNA, 77 nt, Homo sapiens
accacacccacagaaggagagcaaaggagacaggacagggcagaccgccagcagcacagcaagccacagagagggcc

SEQ ID NO: 70573 - RNA, 72 nt, Homo sapiens
agaggaagcagagggggggggccagcgacccggggccgagaagacacggacagcagaccacagcccggcagg

SEQ ID NO: 70574 - RNA, 68 nt, Homo sapiens
gaccacaggcgaggaaaggaaccagcggaaaaaggggaagaacaaggcgaaggggccaagaggaagga

SEQ ID NO: 70575 - RNA, 62 nt, Homo sapiens
ccacggcgggcgcgcccagagggcggagggggagcgggccggagagaagagaggggcgcgag

SEQ ID NO: 70576 - RNA, 42 nt, Homo sapiens
aagaaagaagcccaggcacaagcagggggacgcccaccggcg

SEQ ID NO: 70577 - RNA, 71 nt, Homo sapiens
aaaaaggcgaaagcagacaaaggccaccgcacccgaaaaaagagcaggcgagaacgaaaccaagaggcaaa

SEQ ID NO: 70578 - RNA, 65 nt, Homo sapiens
cggggaggaccccagaccacgagaacacagaagagcagaacacccggcgacagccccacggaccc

SEQ ID NO: 70579 - RNA, 70 nt, Homo sapiens
gccgcacagagccaggcaaggcggccggagccccgggaaggccaacccaagccaaagcagacccccaagc

SEQ ID NO: 70580 - RNA, 57 nt, Homo sapiens
agaggcggagagggaagggggggagccgcacgacccgaacgccagagacaaaaccag

SEQ ID NO: 70581 - RNA, 72 nt, Homo sapiens
accagagagaaccaggaaacagaccgacaacagggccaagaccccaaccgcaagagaaaggagcccagggca

SEQ ID NO: 70582 - RNA, 73 nt, Homo sapiens
cagcaaacagccaacccagagagcgaaggagaacgggaggcgggaacacaagaggaggagagaaagaacccac

SEQ ID NO: 70583 - RNA, 76 nt, Homo sapiens
gcagcgcaccacggcaggaggcggcagagacgggaggaagggagcaagaggcagacagaccgagacgggcaaccaa

SEQ ID NO: 70584 - RNA, 76 nt, Homo sapiens
aaacgcccgaggcccgaaccgcgggagaggggaagagacaagaccagggacaaccaaagccaagcaacgaaggaca

SEQ ID NO: 70585 - RNA, 75 nt, Homo sapiens
aaacaggacgacccgaggaacagagaacgacaagcagcccaagccagggagccccccaacggcagcagaaaggag

SEQ ID NO: 70586 - RNA, 71 nt, Homo sapiens
gccccgagcgaacgggaagccggcgaagacggaccacaggaggagagaaagaacccacgcaggacgacaga

SEQ ID NO: 70587 - RNA, 82 nt, Homo sapiens
agggcacgccagcggcgcgagaggaccaccggggcggcccggcggaggcgaggaaaaaaaaccgccccgggcggggaacgga

SEQ ID NO: 70588 - RNA, 76 nt, Homo sapiens
acagacaccccgagccgaaggacagacaccaagagagcccacagacccagccacgaaggccccgcgacgaaaacgg

SEQ ID NO: 70589 - RNA, 72 nt, Homo sapiens
gcgaagagggagaagaagaaaagcacggaaacgcgcaacggcggaagacccaagccgagagcgccggaggac

SEQ ID NO: 70590 - RNA, 38 nt, Homo sapiens
ccaccaaagaggacagacgcaggccaaaaagagagaaa

SEQ ID NO: 70591 - RNA, 86 nt, Homo sapiens
aagacggcacgcaccgagaggccaggcagacaagccaaagagacagcaggcgcaaaggagcaagaaaagaaggccaaaggacacac

SEQ ID NO: 70592 - RNA, 66 nt, Homo sapiens
ggcgcggagcgccccaggggccgcaggcaggggcaacgaggcagaggggcaccaccgggcagagaa

SEQ ID NO: 70593 - RNA, 77 nt, Homo sapiens
accgggagagcgaccagggacaaaaggcggacgaaagaaagaaggagcaccaacgcaaagaaaaagaccaagaagac

SEQ ID NO: 70594 - RNA, 75 nt, Homo sapiens
agacaaccaccgggggccaccaccgaggagagcgcgggcgcggagacacagcggccagagcagcgaccgcgggca

SEQ ID NO: 70595 - RNA, 74 nt, Homo sapiens
gacgcccaacaccacccacccaccacgaggccgccagacagcgcagacaagaaggagagcaagcacacaaacga

SEQ ID NO: 70596 - RNA, 79 nt, Homo sapiens
cgagcaagaagcagcccaaagcgaagacagacgcaagccgaaaagacgaggcgaggaggcgagacacccaacccacccc

SEQ ID NO: 70597 - RNA, 82 nt, Homo sapiens
cgcgaaggccgggacccggccccggcccacaggggggggcaaacccgagagaacggagcagaggccaggaggggcccagccc

SEQ ID NO: 70598 - RNA, 76 nt, Homo sapiens
agaagaacgcaaggaggcaaaacggggaaaacagagcgaaacaagggacccaggggacaggagagccgaccacagg

SEQ ID NO: 70599 - RNA, 74 nt, Homo sapiens
agaacagcgggaaagaaggcaaaacacggaacaggcgggacgagagagaacggagaccccgcagaagcgagccc

SEQ ID NO: 70600 - RNA, 71 nt, Homo sapiens
gccgaagcgcccgagacagcaaaccccacaaccccaagaaggaaaacccccgggaaaggagcaaccgaacg

SEQ ID NO: 70601 - RNA, 54 nt, Homo sapiens
cggaacgggagaagaggcaaagaaacaccaacaggcacaacaaaagcagaaccc

SEQ ID NO: 70602 - RNA, 91 nt, Homo sapiens
cacccaacaaaccgcagcaccacccaaaaccagcaagcaaaagacccacaggaccgaagaggagagcaaacacacacggagaaagcgacgg

SEQ ID NO: 70603 - RNA, 75 nt, Homo sapiens
accagccccaggacagggagacaaaccaccaggaacccgaaaccaaacacggagggaaacaggaggaccgggggc

SEQ ID NO: 70604 - RNA, 71 nt, Homo sapiens
aggacgagcccgggagcgacccgcgcaaacaaacaggaagcgaaagggggcagacagaagagagacgagca

SEQ ID NO: 70605 - RNA, 71 nt, Homo sapiens
aaaacaacaccaagaacaggccggaaaaacagaagcagcccagaagaccagcaccggaaggaggcccccgc

SEQ ID NO: 70606 - RNA, 56 nt, Homo sapiens
aacacaggaaacagccaaggaacagccacaaacaacccccaccacgccaagagaag

SEQ ID NO: 70607 - RNA, 75 nt, Homo sapiens
accgcgcacgccagcagcaagcccggccaacgcaacagggagcccacgcaagaggggccggggaccgcccagcag

SEQ ID NO: 70608 - RNA, 83 nt, Homo sapiens
ggccccggagcgcggcgcccgcggccgggcggcgcggccgcccgggccgggccccaccggacgcagcacccgcggccgccccg

SEQ ID NO: 70609 - RNA, 77 nt, Homo sapiens
cccacgagaggacagcccagcacagggcccccaagaagcacggccggcacgggacagagcgccaccgccgcacccgc

SEQ ID NO: 70610 - RNA, 81 nt, Homo sapiens
aaaacccgggacccaccacccaggccccgacgccccgagcccccgggcgcgccggacaggccgccgcggcgggacagcggc

SEQ ID NO: 70611 - RNA, 77 nt, Homo sapiens
ggccaccaacccccgcggccggcacccccgaagaaaacccgcagcccaaagggcagaagaagaagaagacgcaagac

SEQ ID NO: 70612 - RNA, 71 nt, Homo sapiens
aaccaccccagaccacaggagaggaggcggacaaacccgaaagggggcaaccagaaagccaggagccacgc

SEQ ID NO: 70613 - RNA, 78 nt, Homo sapiens
gcgcacggcccacagccggcacagccaggggcggaggagagaagagcccgcccaaacagacagcgacgagaaggccac

SEQ ID NO: 70614 - RNA, 80 nt, Homo sapiens
cccccaaagagcgcaggcccaacagccaagcaaacgcagccccaggcgacaaggcgaagggcaggccgaaggcaaaagag

SEQ ID NO: 70615 - RNA, 78 nt, Homo sapiens
ggagcgaagggcagaggaagcgccgccaggcccgcaggaccgccggagacagggcaagaccagggccacagggcgcca

SEQ ID NO: 70616 - RNA, 82 nt, Homo sapiens
gccggggggcgcgccgcgaccgcccgccgggcccggagcgccaccacaggcaagagaagcaccaggcgccaccaggaagacg

SEQ ID NO: 70617 - RNA, 70 nt, Homo sapiens
ccagggcacggcacagcagggcaccagaggggacggcagccccaggccgccaggacggccacaaaaccga

SEQ ID NO: 70618 - RNA, 50 nt, Homo sapiens
ccccaaccacagcccgcaagaaggccgcaaggacgaagagcaccggaaag

SEQ ID NO: 70619 - RNA, 58 nt, Homo sapiens
gacgagaaccacccagccaaggagcacagcccaagccaccgggagcaggagagggcca

SEQ ID NO: 70620 - RNA, 74 nt, Homo sapiens
aagaaaaggccccaacagagccccagcaaggcggcccaaaggcgaaacacagaaggagacaaccacagggcccc

SEQ ID NO: 70621 - RNA, 72 nt, Homo sapiens
aaggaccaagaaccagaacgaaccggggagagaacaagacagccagagaggcggcaaacaggacaagaggga

SEQ ID NO: 70622 - RNA, 83 nt, Homo sapiens
ggccggggagggacgcagccgggaacgagcgagcgccgcgcagcccaggacgcggccgcacccgaaaaaggaagcccaccacc

SEQ ID NO: 70623 - RNA, 82 nt, Homo sapiens
cgaggacaaaaccgaaggagggaagacaccaagacacacaaagagaccgggccccagagaagaaaaagaagaagaaagggca

SEQ ID NO: 70624 - RNA, 76 nt, Homo sapiens
cggccggccggacaagcccaggagccgaccagagagcaggacagaaggcgggaaaaaaggcaaacgacagagccaa

SEQ ID NO: 70625 - RNA, 85 nt, Homo sapiens
ggagaacgaaaaacccaccagcagacgccagcagcccggacgccaccaagccgagccacgggcagcgggcgacgggagcaccgga

SEQ ID NO: 70626 - RNA, 77 nt, Homo sapiens
cgacccccgagcgcagccagaacggaggaggagccgcagccaaaaggaggccaacacaaaggaggagacagaaacgc

SEQ ID NO: 70627 - RNA, 80 nt, Homo sapiens
aacagcacaggccacaaagcagaacacaagaccaacccgccaaaagaacccgcccagagccagcgcccccgcgaggacac

SEQ ID NO: 70628 - RNA, 62 nt, Homo sapiens
cccgaaggcccacaggacaggagagaaagacgggaccaacacgaccaggagagacggaagga

SEQ ID NO: 70629 - RNA, 71 nt, Homo sapiens
ccagggcacagcgcgggagccgcacgggccaagagcccaaaaggcagagcgaggagagaagaaggagggaa

SEQ ID NO: 70630 - RNA, 74 nt, Homo sapiens
gagaaagccaggacaaaacagacgcgcccagagcgcagcacgggcgcagcccccgcgacgagcccccaacgagc

SEQ ID NO: 70631 - RNA, 73 nt, Homo sapiens
gagagcaggggggcgccaggcacccgagaaaggggacgggcagaagacccgagcggcccgagacaaggggacc

SEQ ID NO: 70632 - RNA, 78 nt, Homo sapiens
gaaaaggaagaaaggacaaggagaaaaccacaggcccaaaaggggacaagacggcgccgccaagcagggagacagagc

SEQ ID NO: 70633 - RNA, 67 nt, Homo sapiens
ccgaggggccccgagagaacagggcaaagccaagacaagggaacacgggagaggggggagaagggca

SEQ ID NO: 70634 - RNA, 69 nt, Homo sapiens
gagaggggcacccaccggcccagaagagccacagggaccaaaacgcagggccggaaacgaacacccgga

SEQ ID NO: 70635 - RNA, 79 nt, Homo sapiens
ggggcagcagcagccggcagcagcagcgggaggcacaaaaagaacaaccagaaggaacgcagagaccgacggagagcag

SEQ ID NO: 70636 - RNA, 83 nt, Homo sapiens
ccaggcaacggggcgccgcagccccgccgggcgagcgagcgcggagcccgggggaccgggagaagaccggagacccgaaagag

SEQ ID NO: 70637 - RNA, 102 nt, Homo sapiens
ccaaaggaaagcagacggagaggacaaggagagaagccaggggggaggggaacagcagcggagaacacggcagagacaaaacggaccaccgcgacagaaaca

SEQ ID NO: 70638 - RNA, 71 nt, Homo sapiens
gcgccggaaaccggagcgcgcagcagcgagaaaagccgacgcaagagggaaagcggagcacagccccagcg

SEQ ID NO: 70639 - RNA, 79 nt, Homo sapiens
cggcggcccgggcccgcgggcccagcaccaaagagccagggaaccaagccaaagacaggcaaaacggaggaggcaggga

SEQ ID NO: 70640 - RNA, 67 nt, Homo sapiens
ggagagcagaccgggaccaggagccgcaaagagcacggacgcccgggagcgacggggaagacggacg

SEQ ID NO: 70641 - RNA, 70 nt, Homo sapiens
cccaaacagagcgcaggggacaagaaaaccagaaacgggggcccgacaagacacaaaaagggaacggacg

SEQ ID NO: 70642 - RNA, 76 nt, Homo sapiens
ccgccggcgcgggaaacgggcgaagcgacgagccgcgaggagggcccgggacgagcggcccagcgacgagcgaaga

SEQ ID NO: 70643 - RNA, 81 nt, Homo sapiens
ccaggccccaaggccggaagaagggagagcagaagccgcgaaaaaggggggccgagggcacggccgagcagagaggacggg

SEQ ID NO: 70644 - RNA, 67 nt, Homo sapiens
accagcagcccaacccaggccgcagacgcaaacagaaagcaggggcgagcggcaagaccccccagca

SEQ ID NO: 70645 - RNA, 86 nt, Homo sapiens
cacgagggacgccagcggcgaccccccggcggccgaccagccaggagagcaccaggaacgccagaagccaggcggaacccacgagg

SEQ ID NO: 70646 - RNA, 83 nt, Homo sapiens
gccggcagccccaggaggaacagacgagacaccaaggaacaagacggaagcccacagcccagacacaccagccggagagccaa

SEQ ID NO: 70647 - RNA, 89 nt, Homo sapiens
ccacccgcccgcgacacacgaagcgggaggcaaaggcacaagcgccccagaggacacacgccaagggcagacccacggagaacccaacg

SEQ ID NO: 70648 - RNA, 75 nt, Homo sapiens
cgacggggaggcgcggccaacggggccacaagccggcgacggcgcgacggggcgccaacggagcccgagcaccgc

SEQ ID NO: 70649 - RNA, 72 nt, Homo sapiens
gagcacaacacaaggaaacaaaacaccagcaggcaagcaagggaagaagaccaaaggacaaaaaagacggag

SEQ ID NO: 70650 - RNA, 83 nt, Homo sapiens
accccggggccaccaccggcccacggagcaggacacgggccaccaccaccaccaaacggcgccagggaagacaaggagagacg

SEQ ID NO: 70651 - RNA, 75 nt, Homo sapiens
gccagcgcgggcggaccgacggagacggaaagccgggacaggagacagcaaagcaagccaagagggcccagccaa

SEQ ID NO: 70652 - RNA, 88 nt, Homo sapiens
ggacaggaagaagcggagggcgaggaggagcagaggagcacacagagaagcagggcggagaacggaaaagcaccaggaagcagagagg

SEQ ID NO: 70653 - RNA, 72 nt, Homo sapiens
caaggaaagcagaagacaagacaggcgacacaacagggaagaccgggagaccagacaagaaaagaagcggag

SEQ ID NO: 70654 - RNA, 79 nt, Homo sapiens
agaaggaaaaagcagaaagccagaggaagagaagaaaaacccaagccggaacacagcgagggagacgcacaccgaaagc

SEQ ID NO: 70655 - RNA, 56 nt, Homo sapiens
gacccagccggagacgggaacaggacacccaaccgcgagaccagcaaggacggggg

SEQ ID NO: 70656 - RNA, 86 nt, Homo sapiens
accgccagccgccacaggagggccaagagggagcaggagggacgggcgaagaaggcccggagaagagacgcggcccagaggccagg

SEQ ID NO: 70657 - RNA, 83 nt, Homo sapiens
cgggcacaccggaggagaggcgggaaggcaggcaacgcaacgagaccagggggcgcgggacgcgggacaacaacacggggacg

SEQ ID NO: 70658 - RNA, 84 nt, Homo sapiens
gccgaggcagagggcacagcagcaaggaccaagaacggaaggcgcggcccaaaccagcaggagggacagacaaacaggcaggag

SEQ ID NO: 70659 - RNA, 83 nt, Homo sapiens
gcagggagaaagaggaagggccggccggggcagacaccgaagaacagaacggagacggaaaaaacaaaagaagccggaagaca

SEQ ID NO: 70660 - RNA, 84 nt, Homo sapiens
ccaagggacggaccacgcccgcaccagaagccccaggccacccccgacgcagccggaggccggggaccggagaaggacgacacc

SEQ ID NO: 70661 - RNA, 78 nt, Homo sapiens
aaggaagggacaagacccacagcaaagccagcgacagaagccaggaccggcagaaaggaggacggaaagacaaacgaa

SEQ ID NO: 70662 - RNA, 111 nt, Homo sapiens
ggcagaagagcccaaaagaagaggcacaggcccaggcagaccgcagcaaagagagggcggggacacagcgggcaggaagaagacgccgaggcccccccacccagaaccgag

SEQ ID NO: 70663 - RNA, 72 nt, Homo sapiens
agaaagcccaaggggcaaagcgcggaacgggggaaccaaagccaagcggaacaaacacgaccgggcgccgac

SEQ ID NO: 70664 - RNA, 74 nt, Homo sapiens
aacaccaaaccagccaaagggcgggaagaaagaacaagaagcaaaaaagcaaagaagcggaggaaaaaaaaccg

SEQ ID NO: 70665 - RNA, 79 nt, Homo sapiens
ggacagcgcgaggcgagggcagagccgcggggcaagacggacgcaccaaagaagacagacacgcagaaaaggagccgga

SEQ ID NO: 70666 - RNA, 78 nt, Homo sapiens
cgcagcacacagcgaccgggagaacaagacgacaacaggcacaaagagagaaggaacacccacagggcagacagagaa

SEQ ID NO: 70667 - RNA, 76 nt, Homo sapiens
aagaaaccagcaacaaaaagaaagcgcgaaggcaaagcagaggaagaacagagacgacccggagaacacaagagga

SEQ ID NO: 70668 - RNA, 63 nt, Homo sapiens
gaaggaagagggaaaaaggaggacccccaccccaggagcaacccagccccaaggccaaccgga

SEQ ID NO: 70669 - RNA, 84 nt, Homo sapiens
ccgcgcaggcgccaacgccccggggagaagcgagaaggccgaggcacccgaaagaagaaagaaaaccggaggaaaggaagcgac

SEQ ID NO: 70670 - RNA, 77 nt, Homo sapiens
cgacccccacgcagcccccaagagcgggaccacagagggaaaggccaaccggccggaaagcccgacgcgagccccag

SEQ ID NO: 70671 - RNA, 79 nt, Homo sapiens
cgcagaccagaccgccgaccggcgcccgccggcccagggaaacacccggagaacccaggcaacagagcaaccgcagaca

SEQ ID NO: 70672 - RNA, 79 nt, Homo sapiens
ggcggaacgcaggagacacaagaagcggaccagaaaggaccaagacagcaggaacgaaccaaacccgggaacaccggca

SEQ ID NO: 70673 - RNA, 56 nt, Homo sapiens
aaaaaagcaagcacaccaaagcagcaggaggaccaggacacaccccagaagaagcc

SEQ ID NO: 70674 - RNA, 60 nt, Homo sapiens
ggggaggggagggaaaggcccaggaaaaaggcccggagaggaagccgccagccaccaagg

SEQ ID NO: 70675 - RNA, 72 nt, Homo sapiens
gagaggagcgggaaacgggagggaaccagcaacaagccggcagcagacgacaggacggcagagccccaagaa

SEQ ID NO: 70676 - RNA, 72 nt, Homo sapiens
cgaggaagacgaggacaggacagagcccccgaggccccagaacaccgggcgccggccgagcccgggaaaacg

SEQ ID NO: 70677 - RNA, 73 nt, Homo sapiens
gcagccagaaagcggcacgaacagagccgggagcaagaagaacacccagagagaggagcccggaagaaagaca

SEQ ID NO: 70678 - RNA, 75 nt, Homo sapiens
gaacagaaaagaacgagccccacaaggggcaccccccaccccgggacaccccagggcaccacagagcggcagagc

SEQ ID NO: 70679 - RNA, 48 nt, Homo sapiens
cgagaacaacggggccacacacggcaagcgggcgcggacggcaggggc

SEQ ID NO: 70680 - RNA, 79 nt, Homo sapiens
cccgcgcccaggccagcgccccaggccaagagggacccacccggcgacgaggagcgccaggaaagaggcagagacgaag

SEQ ID NO: 70681 - RNA, 58 nt, Homo sapiens
cagagccagagaccacaggagcgagagcaaacaggcgaagggaggaggcagcgaaaac

SEQ ID NO: 70682 - RNA, 71 nt, Homo sapiens
acagcaccgcgccgacaagaaccagccccaagcacgggaagacccccagccgagcacccgccgggcgacca

SEQ ID NO: 70683 - RNA, 66 nt, Homo sapiens
gaagaaaggaaacaaaagagggcagcacaggcccgccaagcgcccccgggcacgagagcggacgag

SEQ ID NO: 70684 - RNA, 71 nt, Homo sapiens
cagagaccacagcgcagacccaggacaagaaacacgcacaggcccagcgggaaaccaaaaagacgcgcgcc

SEQ ID NO: 70685 - RNA, 76 nt, Homo sapiens
aaaaacaccagaacggagaggggcggaaacacagacccagaccagaagacgaaacccgccaagacccaagagcaga

SEQ ID NO: 70686 - RNA, 80 nt, Homo sapiens
gagcccgggggcgcgccccgcaggaacaaggccacacagccgcacgagaggaacgcgacaagaagacggagagaagagac

SEQ ID NO: 70687 - RNA, 89 nt, Homo sapiens
caccacgacaagaaggacaagccagaacccaacagcagccggccagcaccgagagccccccgcagacacccaggccccccaccagaccg

SEQ ID NO: 70688 - RNA, 78 nt, Homo sapiens
cgacggcggcccgaagccagcgccccaccggggcaagcaggaaggaagacccacaagagaccacgcagagacagcacc

SEQ ID NO: 70689 - RNA, 82 nt, Homo sapiens
ccgagggacgggagcgaggagaaaccccaaggcgcagacaccgacggagcgggagccagagagcgccgccaccagagccgga

SEQ ID NO: 70690 - RNA, 85 nt, Homo sapiens
ggcagcccagcgggaggacggagacagccaggagcacagaggcaggagaggacagccgcagcgccagaggaggagcacgcccgac

SEQ ID NO: 70691 - RNA, 70 nt, Homo sapiens
cagcaccaagcgcaaagaagcagcagacggccagggaccgcgccaacggaggaaaccgggaccacggaca

SEQ ID NO: 70692 - RNA, 73 nt, Homo sapiens
gacgggaacagggagaccaagccaagacaacgacaagagaacaaaggaggggaccccggcaaaaaaaacccac

SEQ ID NO: 70693 - RNA, 77 nt, Homo sapiens
aacaacagcacgggagaaagcgcccacgcacgaaagcccaggccaaaaagagacacaacgcgcagggacgcagaaaa

SEQ ID NO: 70694 - RNA, 78 nt, Homo sapiens
gaagagccagacagcaggaggggaaaggaggagagggaaagagaagagaaacagaaggaacacccaccacccaagccc

SEQ ID NO: 70695 - RNA, 73 nt, Homo sapiens
cgcacagacggaagcaaggaacaaaccgaagaacagcgggaaagaaggcaaaacacggaggaaccaggacaga

SEQ ID NO: 70696 - RNA, 72 nt, Homo sapiens
aggggaaggggagccgcacaagagggggaaacggggaaaaggcaagcagcgcaccaagcccgaggaaacaaa

SEQ ID NO: 70697 - RNA, 72 nt, Homo sapiens
agcagaagcaggaacagcagaccgccagcaaagggcaaaggacaagcaaagagccagcaaacaggcaaaacc

SEQ ID NO: 70698 - RNA, 56 nt, Homo sapiens
cggcagaccaagcagggggggaagcggagagaggagaggagaaaagcagaacagag

SEQ ID NO: 70699 - RNA, 67 nt, Homo sapiens
caaaccgagccaaaagcggcaaggcaacaggaggacccacgcagagcgaaacccgagaaagagagaa

SEQ ID NO: 70700 - RNA, 65 nt, Homo sapiens
ccagaccaagcgaagagcgcggagcaaccccgggggccaaggaaacggaagaccaacccagcaac

SEQ ID NO: 70701 - RNA, 74 nt, Homo sapiens
agcgcgggaacggcgcggaaggcaaaagcagaccggaaaacccaccggcaagaccacacccgaggggagcccag

SEQ ID NO: 70702 - RNA, 81 nt, Homo sapiens
ggagcacgaccaagcgaggcgcaccacagcagcacagcgagaaagggaaccgaacccggaaaagagaaggaggacccgccg

SEQ ID NO: 70703 - RNA, 73 nt, Homo sapiens
aaggagaccccccgggaaagcaagaaagaaacaaaagcacccgcgaaggcacacaggaaaagaaccaaaaggc

SEQ ID NO: 70704 - RNA, 73 nt, Homo sapiens
gcccggaccgcgcagaaccagggcggcggccagcgccacgcaaaacccccaccagcgcagaaggaaccgagga

SEQ ID NO: 70705 - RNA, 101 nt, Homo sapiens
ccgaaggaccgggagagaacagcgacgaaccggggaacagaccaggggacaccagcaggaaaacacgggccccagaaacaaggaaagggcaggccaccgag

SEQ ID NO: 70706 - RNA, 70 nt, Homo sapiens
acgcagggcgcccccggccaggggcccccccgaaaggcccgacccagaaggaccaccgaggagagcaagg

SEQ ID NO: 70707 - RNA, 93 nt, Homo sapiens
agccgagacggcacgagaacgggacccggccagaggaaagaacccgagaacgaaaacaaacggaagagagggcagcaagaaagaacaagaaag

SEQ ID NO: 70708 - RNA, 63 nt, Homo sapiens
ggccagagcacacacggccaagagcgggcaccaggaagcgaaggcgcccacagggacacaagc

SEQ ID NO: 70709 - RNA, 86 nt, Homo sapiens
gggcgcagaggccacacccacagagaacccagacaacaggacgccgccaagacagcagagacaggcccaacaaaagcaaaagaaaa

SEQ ID NO: 70710 - RNA, 71 nt, Homo sapiens
gcggggagcagcgccgggagaaggaccacgcaggaagaaaaagacgcaggaacaaaaacaccgagaaagaa

SEQ ID NO: 70711 - RNA, 43 nt, Homo sapiens
agcccgacggggaaggcgagccaggcagagggcaccacagaca

SEQ ID NO: 70712 - RNA, 81 nt, Homo sapiens
agaacaagaaacgaaccacgggggcagaccaggaccacccgaggaagaggccaaccgcaccagcaccccacgcagcaacag

SEQ ID NO: 70713 - RNA, 68 nt, Homo sapiens
aaaccaaagaaaaacgaagcaacccaaggcagaggggaagggcgaaagaggaagaagaaagacaaaga

SEQ ID NO: 70714 - RNA, 70 nt, Homo sapiens
aaaaaaggaaaaacacgacggagaaaaacggagggagaaaaagcaagaggaaagcagcgggcaggggcac

SEQ ID NO: 70715 - RNA, 53 nt, Homo sapiens
agagcgagcgaccaccgacaggagccacggaagaggccgcagcagggacgcac

SEQ ID NO: 70716 - RNA, 63 nt, Homo sapiens
gagagaaggcaaagaacccggggaaaggccccccggaggccagccccccgcccccagggcaac

SEQ ID NO: 70717 - RNA, 60 nt, Homo sapiens
ggggaagaggcccacccggagaaccccacggagaaccagaggaccgggaacaaagagcaa

SEQ ID NO: 70718 - RNA, 76 nt, Homo sapiens
agccacccggagaccaagcagccacgccagaccaaggagccggacacgcggccgagaccgagaaagccgcagcggg

SEQ ID NO: 70719 - RNA, 77 nt, Homo sapiens
cggccagccacggccacggcaacgagcggggcaaccacgcgagacgccaccaggcggccggggacccccgccgggac

SEQ ID NO: 70720 - RNA, 73 nt, Homo sapiens
ggccgagaaggcagaggcgccccagggcgaagacccccccccagggcaaaccaccaggcaagaagaccccgcc

SEQ ID NO: 70721 - RNA, 80 nt, Homo sapiens
aaaaaagcagggcacccgaggccaaggaaaaggaacagagagagcagaaccgaaacggggaaagaccgaagaaagaaaag

SEQ ID NO: 70722 - RNA, 79 nt, Homo sapiens
cccgcgccccagagccacgaaggcaccgacgcacagcgaccaccaacagaccgaaggcccagcccccggacacgggcgg

SEQ ID NO: 70723 - RNA, 56 nt, Homo sapiens
gaggaagaccaaagggcacacaagccccacacaaggagagcaagcagggagggccc

SEQ ID NO: 70724 - RNA, 76 nt, Homo sapiens
gccgcgggcggaagacaggccacccagcggggagcacggcgagcagccaggccaggagagccgaaaagacgaggcg

SEQ ID NO: 70725 - RNA, 84 nt, Homo sapiens
gcgggcccagaggaggccggggaccagggcccaggacaagagacacgagcccacccgagaccacgccggacccgccccgccaca

SEQ ID NO: 70726 - RNA, 80 nt, Homo sapiens
cggcggaaaaccgaagggaaggccagcagcgcgcggagaagaacggggagccagagaagaccaagagacagaagggacgg

SEQ ID NO: 70727 - RNA, 74 nt, Homo sapiens
cgaggaaagaccggacgaacaagagggcccccacagagagcacacaaacaaagcgaaaccacggaagaaaaggg

SEQ ID NO: 70728 - RNA, 70 nt, Homo sapiens
aaaaccaccgaggacgagaaaacccaccggacgaacaaaacgaagaccggagacacgggaagcacaaaga

SEQ ID NO: 70729 - RNA, 77 nt, Homo sapiens
gccagacgggccaacaggcgaggagagcacagggagagcacaccgggacagccagccaacagcccaagaacaaccca

SEQ ID NO: 70730 - RNA, 77 nt, Homo sapiens
gcgcaaggagaacaaaacaggccgaggagcgagcgacaggcagaggaggcgagccccaccggaccacccggaccgga

SEQ ID NO: 70731 - RNA, 60 nt, Homo sapiens
aagagaaacgaggagacaccagaggaaaaccaccaagggcggagaacggaaaagcaccag

SEQ ID NO: 70732 - RNA, 56 nt, Homo sapiens
ggcccgcgcggggacggcgcgcagcgcggcgcgagaagggaaagggaaggacccga

SEQ ID NO: 70733 - RNA, 84 nt, Homo sapiens
ggccgcggaaaacagagaggccagaaaggcgcaggccaagcgcccacgccggaccgggcagggcacgggccagcgaggaaagag

SEQ ID NO: 70734 - RNA, 106 nt, Homo sapiens
aacaaagcacgaggggaaaagccaaaacaaacacaccaaaagagcacaagaacacaggcagggagcgaacagccgaagaggacgaagagaagaggaaaaacgaaaa

SEQ ID NO: 70735 - RNA, 79 nt, Homo sapiens
aaaagaacccgccaaaacacagcgaggagacagaggaggaccccgaaccccaagcgagagaaaaaaaaaagaaggaaaa

SEQ ID NO: 70736 - RNA, 81 nt, Homo sapiens
gggcgggccagaacagcccaagaggccgaccgagacgggcggagaggagaagaaaaacaaccaccagcgagcaaaaaggca

SEQ ID NO: 70737 - RNA, 46 nt, Homo sapiens
cagccaggcccccacgcgaagcaccgagccaggcgccaacggccga

SEQ ID NO: 70738 - RNA, 50 nt, Homo sapiens
agcggcaaagggaaaaaggcggaaagaacccagagaaaaaagacccacac

SEQ ID NO: 70739 - RNA, 76 nt, Homo sapiens
ggcgagaggccggacccgaaaaacgagacgggcggcgaacggcggaggcagcaggcgagcccgggcgccaccagcc

SEQ ID NO: 70740 - RNA, 63 nt, Homo sapiens
gcagacacagccccagcaaagggggagagaaagagcaagcgcccccgaaggacgcccagccgc

SEQ ID NO: 70741 - RNA, 84 nt, Homo sapiens
cagagcccagggcaggacaccgacaggaacagggaccacgggggaacacgacacagaccccggccggaacccagggagaccagc

SEQ ID NO: 70742 - RNA, 73 nt, Homo sapiens
gggagacaaacaaacagacaagcagcaaggcagaagaaaaaccagcacgcaggaacaacagacaagcggaaca

SEQ ID NO: 70743 - RNA, 59 nt, Homo sapiens
ggcaggcgagaaggcggcgaggaagcgcgcccggcgcacgcacacgccgaggagccaag

SEQ ID NO: 70744 - RNA, 73 nt, Homo sapiens
aaaccaaggaacacggagaagaaaaacgcgcaacaagcaggaaaagagagaccaggagacagacccagcacgg

SEQ ID NO: 70745 - RNA, 62 nt, Homo sapiens
agaccgacggcggagcaccgccccggcagaagcggcagcaaagcaaaagcagaccggaaaac

SEQ ID NO: 70746 - RNA, 37 nt, Homo sapiens
caggccagcgcacgcgggccaaggagcgagccccccc

SEQ ID NO: 70747 - RNA, 72 nt, Homo sapiens
ccaccccaggagaacaaaaagccaggaacaaggcacaaggagaggggaccaccaggaagagggacgcggacc

SEQ ID NO: 70748 - RNA, 75 nt, Homo sapiens
ggcccccccgcgcggagccgagccggaacgcggcagcccccgccaggcccaccaagagggaaacccccggaaaca

SEQ ID NO: 70749 - RNA, 66 nt, Homo sapiens
gcccccgagcggacaggagaagggaccgaaaagcccgccgggaccgagagaccagcccgaccgagc

SEQ ID NO: 70750 - RNA, 85 nt, Homo sapiens
gcagacgggacacagcggggcaggagcgcccgcaccacaccccacgccacccaccccaccagagccggacaccagagccggacac

SEQ ID NO: 70751 - RNA, 61 nt, Homo sapiens
ccggcgccgggagaggacgcggagggcgcaggagcagcgcaggccgcgaggggggcgacac

SEQ ID NO: 70752 - RNA, 81 nt, Homo sapiens
ggggagagagcggaggacagccgagaggaggaagggccgggccggggcacgggcccacggccccccaccgggccaccccgg

SEQ ID NO: 70753 - RNA, 73 nt, Homo sapiens
caaacgccaaccacaaaaaaaacagaaaggaaaacagcgaaagaggaaccaagaccaggacaaagaagacccg

SEQ ID NO: 70754 - RNA, 52 nt, Homo sapiens
gaaagagaagcagagccaggagaagcaccgacaaccggagaaagcagacgca

SEQ ID NO: 70755 - RNA, 54 nt, Homo sapiens
acagagaagaaggggggggggacaaaggaaaagcgcacgaggagcaggaaccga

SEQ ID NO: 70756 - RNA, 60 nt, Homo sapiens
gcggggaggcaagagaccaccagcggccaccacacgggcgagcaggccagagggaaaccc

SEQ ID NO: 70757 - RNA, 88 nt, Homo sapiens
gccgggacagacgggggagccccggcggagacgagacgcggcccagagaccccccacgggaacggaagcaacgagccagcagcaggca

SEQ ID NO: 70758 - RNA, 81 nt, Homo sapiens
gggaaagaaagagcgccgggacagggggaggaaagcaccgaggcacaacagggcagccaagcaggaccacccaccagccac

SEQ ID NO: 70759 - RNA, 77 nt, Homo sapiens
cgggacccagcccaggcggcgcggacggggcgggaacaggcacaaggacgaacgagaccagagggagagggcaacaa

SEQ ID NO: 70760 - RNA, 57 nt, Homo sapiens
gaaggagcaggagcgagaccaacgggagccccaagggccccgggcgcgggagccagc

SEQ ID NO: 70761 - RNA, 80 nt, Homo sapiens
accgaaggggagacccaacagacacgcccggcaccagacgggaggggcaggcaccccccagaggaagcacagggcccacg

SEQ ID NO: 70762 - RNA, 75 nt, Homo sapiens
gaaggcaaaaccaaacaccccagcccacagagagcaaaacacaagagagcagggaggagacaaaacagaggagac

SEQ ID NO: 70763 - RNA, 55 nt, Homo sapiens
aggaaccgcaaaggagcccaggaagaagccaagaggagaaagaagcgacacccac

SEQ ID NO: 70764 - RNA, 56 nt, Homo sapiens
gagaccccccaggacaacagcacacgcacccaagcgagggcgaaaggagcagagaa

SEQ ID NO: 70765 - RNA, 81 nt, Homo sapiens
gccgacgcccagccgcggggcccgcacggaccccaccagccggggggggcacagagccccggaagacagcccccagcgacc

SEQ ID NO: 70766 - RNA, 78 nt, Homo sapiens
ccccgccgcgcgcggcgccaagaacaggagagggaaggcaaaacaacccgcagggcacacgcaccgcaggagaacaga

SEQ ID NO: 70767 - RNA, 51 nt, Homo sapiens
cagaccacaaaggaaaagaggaggacccaaaaggggaacggacacagcaaa

SEQ ID NO: 70768 - RNA, 73 nt, Homo sapiens
cgacacgcaccaggcccggcagcagcggcccgccgccgcccgcccgcgcgcagcccccgcagcccaacacacc

SEQ ID NO: 70769 - RNA, 48 nt, Homo sapiens
gccgcgggagagaggacccccccccccccccaaggaccgcggcaagcg

SEQ ID NO: 70770 - RNA, 62 nt, Homo sapiens
gcgcggcgcacagagcggccgacaaggcaccaagcgcaggccgagacgcaacagagaaacga

SEQ ID NO: 70771 - RNA, 66 nt, Homo sapiens
ccaccaaaggggaaacagaaacaagaacaaagggcaaaggacacaccgcacaaacggccgcgcacc

SEQ ID NO: 70772 - RNA, 72 nt, Homo sapiens
aaacgacccaacagcaaaggacccccacccacccgagaacaggcgcagcaacggcacacagaggggagacca

SEQ ID NO: 70773 - RNA, 34 nt, Homo sapiens
gcgaagcagagggccgacagggccgggggcaaga

SEQ ID NO: 70774 - RNA, 77 nt, Homo sapiens
aacaccacagccggaccgcacccgcaccgccaaccacgggcgaggaggcgccgcgcaggcacagacgcgagaaagca

SEQ ID NO: 70775 - RNA, 59 nt, Homo sapiens
agaaccgaaagaagcggaaagcagaagcgcgcagcaacggcggaggcagagacagggcg

SEQ ID NO: 70776 - RNA, 57 nt, Homo sapiens
gacagcccgggacaccaagaaagaacgccagggcgacagacaagaaggcacagaaag

SEQ ID NO: 70777 - RNA, 80 nt, Homo sapiens
accgagaccggaccgagagcggaccgagagcgcgaaacgcacgagaagggagacggacggaacgcggcgcgaccagaaaa

SEQ ID NO: 70778 - RNA, 81 nt, Homo sapiens
cgggaccaggcccgggggcggcggccacgccaaggacggcccacagggcgacgcagagacaaggacccgccgccaccaccc

SEQ ID NO: 70779 - RNA, 74 nt, Homo sapiens
ccggacacacccgggccaggacaccgacgaaggaagaacagaaacacacaccaagaaagggcacgaagagcgca

SEQ ID NO: 70780 - RNA, 80 nt, Homo sapiens
cccccgcaaggagcccaagcccagcgaccccggcccaaagcgcagggaagaacaaacaccaagggcagccgggacaagca

SEQ ID NO: 70781 - RNA, 56 nt, Homo sapiens
aagcagagcgcagaggacccagagacacagggcacgcccgagacagaccaagcaag

SEQ ID NO: 70782 - RNA, 54 nt, Homo sapiens
gccgggccacaccaaagagcagagccaaacgcccccaacagggaacagcggggc

SEQ ID NO: 70783 - RNA, 90 nt, Homo sapiens
gcgggaggccacagcagccagccggcccgaggacaccgacaccagcaggccggcgcggaagaggccggcggcgggacggccccacgggac

SEQ ID NO: 70784 - RNA, 68 nt, Homo sapiens
gcccagcggcagcagaaagagcaccgggggagacggagaacaaaaacaagacagggacacgcaccgga

SEQ ID NO: 70785 - RNA, 80 nt, Homo sapiens
gccgcgccgcgcccaaccgcccccccccagaacgcgggagagagggggaaggcgacaggaaacggccggacaaaggggac

SEQ ID NO: 70786 - RNA, 76 nt, Homo sapiens
agcagcaccaaaccaagaggcggccagcaggaggcgagaagacaacggcaagcggagaagagcaaggccgaaccga

SEQ ID NO: 70787 - RNA, 90 nt, Homo sapiens
cgggaccccacgccagcccgacgggacggcgagcgcaccgcgccgcaggcacccggacaagcgaacaagaggaaagaggggaaggagcca

SEQ ID NO: 70788 - RNA, 74 nt, Homo sapiens
ggggggaagccagaacacgccaaggcaaggccgggccacgccacaccacccccccggcgggcaccacacgccaa

SEQ ID NO: 70789 - RNA, 104 nt, Homo sapiens
gggcgacccgcgaccccgccggccgagcccaccgagccgcagccagcggggacgagggcccggccaggccccaccgccacaagcaggggaacaccgccaacccc

SEQ ID NO: 70790 - RNA, 105 nt, Homo sapiens
aaacaaaccccacacaaaggcgcagcgccccccagagagagccccaacaggaaggcagcaggacacccagagccgcgaagcagccacggaccccagcacgaaaag

SEQ ID NO: 70791 - RNA, 90 nt, Homo sapiens
ggcgagagccgcaccgccaacccccgagcaagacggggagggcaagagcggaaacagaagagacaaagcagagacggacagccaggaaaa

SEQ ID NO: 70792 - RNA, 78 nt, Homo sapiens
acagggaagcggggccccagccccggagcgaacggcgagaaggacgggcagaaaggagagacaagcagggccccgccc

SEQ ID NO: 70793 - RNA, 74 nt, Homo sapiens
gacaacacaagggacaaagaaaggagcagcggaagccaacacgcggaggagagcaccagaggcgcccgagagcg

SEQ ID NO: 70794 - RNA, 73 nt, Homo sapiens
aggcgaaagcggaacgagaagcacccaagccagggagcggcaaaagcaaaagggccagaaaacgacacgagag

SEQ ID NO: 70795 - RNA, 78 nt, Homo sapiens
aagaagccagccgaaaaggagagagaaacgcagacggaagcaagaggcagagcagaaggaggaaaacaggaaaggagg

SEQ ID NO: 70796 - RNA, 76 nt, Homo sapiens
cagaagccagccgacaagggcagaacgaacaggaacaaagccagacggaccgcaagccagaggacaagaaagggac

SEQ ID NO: 70797 - RNA, 85 nt, Homo sapiens
cccaagccagaagaaacaaccgccaccggggagcgaacacaggacaccagaggaccagaacccacgagaaacagacgagccaacc

SEQ ID NO: 70798 - RNA, 40 nt, Homo sapiens
ccaggggccagacccacgccccgggaccaaggacacgcag

SEQ ID NO: 70799 - RNA, 86 nt, Homo sapiens
gagaaggaaagcgaaggggaaggcgccgaagaggacgaagcacggcgaagcagcggagaagcggccaagaaggcggagaaggaccc

SEQ ID NO: 70800 - RNA, 66 nt, Homo sapiens
cagcacacggcccccgggccaagagacagcgcccacgggacacaaaaaacccagggacaacacacg

SEQ ID NO: 70801 - RNA, 79 nt, Homo sapiens
ggccagccgccccagaacgcagacagaggagcggacccccgcggcgcgcagcccagcaggcggagaagacgcagaagcg

SEQ ID NO: 70802 - RNA, 84 nt, Homo sapiens
aagacccaccaaggaagcagcggccacgccagcgccacgcagagccccgccaggaagacacgccggggaacgaagcagaagacg

SEQ ID NO: 70803 - RNA, 55 nt, Homo sapiens
accaagaaccagacccaacagaggaagccgcaagaaacgggacgacaggaaggcc

SEQ ID NO: 70804 - RNA, 79 nt, Homo sapiens
caaaacaccagaaccaaccgaaggggcagaccaacaccacccagcaaaaaccccgacgaacgcgccagggagcgccaga

SEQ ID NO: 70805 - RNA, 78 nt, Homo sapiens
acgcaaaccaccaagaagcgccagccccagccaagcaaagggaaagcaagaccaacaggcgaaagagaaacagaaaca

SEQ ID NO: 70806 - RNA, 74 nt, Homo sapiens
gcccaacacaacacgcaggggagacaacagccacacaaagcagcaacaggagcagggaagaaaaggggagaccg

SEQ ID NO: 70807 - RNA, 61 nt, Homo sapiens
gaggacaacaaagcaagcgagcaggcgacccaaaagagcgaaggaaaaccagcaacaaaac

SEQ ID NO: 70808 - RNA, 85 nt, Homo sapiens
cagcccccaagcagcgggcacagcaacgaagaaacgaggaggggccaaaggaagaaagaggaagaaaccccgagacagcaagcac

SEQ ID NO: 70809 - RNA, 109 nt, Homo sapiens
ggaggcaccgcccgcgcagccgagagccgggggagcggggccccacacccccccggggggggaccgaaggagaagaaggagaaggggaggagaaggcaagccggaaaga

SEQ ID NO: 70810 - RNA, 80 nt, Homo sapiens
cccaggccacacacagaaccgacccaaggaacccaaagaggaaccagaggaaagccccagaagcaaagagaggagaagaa

SEQ ID NO: 70811 - RNA, 59 nt, Homo sapiens
gcggggaccgcggcccggacacgcaggggagaaccggaggaagcagagcaaggcaaggc

SEQ ID NO: 70812 - RNA, 60 nt, Homo sapiens
cggccgggggcccagcccgggcggcgcggccaggcaccgagcgggaacacgagggaggca

SEQ ID NO: 70813 - RNA, 56 nt, Homo sapiens
gaagaccgggcgccagggccgccgccccgcccggggcggagaacggaaaagcacca

SEQ ID NO: 70814 - RNA, 58 nt, Homo sapiens
gcgcaaacacagaaggcaccagagcgccccagcaacagggcccgggcaacaaggcccg

SEQ ID NO: 70815 - RNA, 82 nt, Homo sapiens
ccgaccgggcgcaccgaccaggccccaaagccccaaggcgacaagaccggaccggcgccgaccccgacagaacgggccccgc

SEQ ID NO: 70816 - RNA, 75 nt, Homo sapiens
agacgcgagccgggcacagcgacccggaggagagagcaaggaagggcgcgcaggaacaagaagaagggcaaccac

SEQ ID NO: 70817 - RNA, 79 nt, Homo sapiens
ccggggccgggacgcagcccggcggcagcagacccgccagcgccgccagcgcccggcccggcccgaggaggacccagga

SEQ ID NO: 70818 - RNA, 86 nt, Homo sapiens
cagcgcgggccagagcgcagcgccgagcgcggcccgggcgccacgagccggcggcggacggcaggcaaaagcagaccggaaaaccc

SEQ ID NO: 70819 - RNA, 80 nt, Homo sapiens
gaagagaagcaaggcaaagcggccccccccccacaaaggaaaggggaaaagccagcgaaaggacaaagggaacgcagagc

SEQ ID NO: 70820 - RNA, 69 nt, Homo sapiens
cagaagaaggaagggccacccaggacaggggcacccagacaaagaccggcagcacacaacgcggagccc

SEQ ID NO: 70821 - RNA, 70 nt, Homo sapiens
agcaaaacaagagaacacacggaccaaagggaggggcggagaggggggaagagaccgaccgggaacagag

SEQ ID NO: 70822 - RNA, 82 nt, Homo sapiens
cccccacaaggggagcggggcagggaaaaccacaggggggggggccgcagcaagaagcagccaacaggcacggcccccggac

SEQ ID NO: 70823 - RNA, 38 nt, Homo sapiens
agggcaggggccgccccaggaaaagcaacggcgcaaga

SEQ ID NO: 70824 - RNA, 68 nt, Homo sapiens
aggggcaccgccgagggcacaccgcgaaagagcgagaaacagggaaaacagaagcggagaggcccaga

SEQ ID NO: 70825 - RNA, 57 nt, Homo sapiens
gcccgccgcgagagcgcaggggccagggcgacagacaagaaggcacagaaagacggg

SEQ ID NO: 70826 - RNA, 62 nt, Homo sapiens
caagaaccaaagaaaacaaaaggggacaggcagaaccggccacacccaggaccggaacaccc

SEQ ID NO: 70827 - RNA, 77 nt, Homo sapiens
aggccaccacgcccgccgggccgcaggcaggggggacccgcccaaccccggacccgagccccaaagacagaaaagcc

SEQ ID NO: 70828 - RNA, 74 nt, Homo sapiens
gccggcagccagggcagcaggcgggcagaaagaaggcacaaagagcacacggaacgccagggaaggaccaggac

SEQ ID NO: 70829 - RNA, 81 nt, Homo sapiens
agagcgcgccaagaccgcgcagccgcggcgaggaaaagaacaggaagagaaaccagcagggcagagacccaggacaaacgg

SEQ ID NO: 70830 - RNA, 75 nt, Homo sapiens
aagagagcgcaggcgacgcacaagaagcacaaaggcaggccagaaccaggacgcgagaaaggcgaggaaaagaag

SEQ ID NO: 70831 - RNA, 75 nt, Homo sapiens
ccgccacccagagcgcacggcgacgccccaggggaaaacccccgggaccagacaaaacaaccgccggacccgccg

SEQ ID NO: 70832 - RNA, 86 nt, Homo sapiens
cacaagggcgcggcgggcccgcggggaggggcagcagcacgaaagaccggaaaaaagccacggggaccaaggagagagagaaagac

SEQ ID NO: 70833 - RNA, 84 nt, Homo sapiens
aagaaaacgaggggcggaacacccgccaaagcagagaaaagacgagcacggaaggcacaccgggcagcgggaacaagcgagagg

SEQ ID NO: 70834 - RNA, 73 nt, Homo sapiens
gaagcaacagaaggcaaaacgaagacgaggcaaagcacccagcccaccccggcacaggaagagggcggcacgc

SEQ ID NO: 70835 - RNA, 38 nt, Homo sapiens
gcaaaggcccgagcaggggaaaagcagcaaccgaccag

SEQ ID NO: 70836 - RNA, 69 nt, Homo sapiens
ccaacaaggcagcgcacacaaccgcaagagagaagcaagcggggacgagagccccggcacaaacggacc

SEQ ID NO: 70837 - RNA, 81 nt, Homo sapiens
ggcacaacaacgacgccgagccggggcgcgcagcccagagcaccacgcggcaagaacgccaagcagagcaccgaagaaaaa

SEQ ID NO: 70838 - RNA, 80 nt, Homo sapiens
ggcggacagaggggaagcaagagcaaaccagccagcacgggggcccagccagccagcagcgaggggggacggaggcggca

SEQ ID NO: 70839 - RNA, 69 nt, Homo sapiens
gagggagaacacagaaaccggccccaggccggcacaagaggcaaaaaaccaagaaagggcacaaagagc

SEQ ID NO: 70840 - RNA, 76 nt, Homo sapiens
gcgaacagcgcgacacaggaggcaacaaaaagcccgcccagaagccaagcacggaaggaaaaaacaccaagaaaga

SEQ ID NO: 70841 - RNA, 75 nt, Homo sapiens
caggagcagaagccccgccaaaacgcaagcacaaaagcgaaaacccgacaaccaaccagacagcccggccagccc

SEQ ID NO: 70842 - RNA, 73 nt, Homo sapiens
ggacccgcgaggggcagaggcgagaccgagcagaccacgggggaaagacggaggacggacaaaaagaccacgc

SEQ ID NO: 70843 - RNA, 94 nt, Homo sapiens
cccgccaagggccccaagagggcacacagcacacaccgacagaggccaggcggggaagagcagcaagggagcaggacagggggacgaggacgac

SEQ ID NO: 70844 - RNA, 74 nt, Homo sapiens
ggggccccagggcgcagacaaggcaggcggaaagcaaagacagcggaagccaaagccaccaaggccgaggagaa

SEQ ID NO: 70845 - RNA, 82 nt, Homo sapiens
ccagcagccacggacgagaagaaaccgagagcgcagcagcacaccggcccaggggcagaggccaagcaaccaggggagaaag

SEQ ID NO: 70846 - RNA, 56 nt, Homo sapiens
ggaacggcggagaacaagaaaagaagagaggaccggaaaagaaacagaaaaacagc

SEQ ID NO: 70847 - RNA, 49 nt, Homo sapiens
ccgacgccaggcagcgcccccaaacggagaaacaggaagaacccgagcg

SEQ ID NO: 70848 - RNA, 51 nt, Homo sapiens
gcccggacggccccgcggcgcaaagccccgcgcccacaccgcaccccccag

SEQ ID NO: 70849 - RNA, 83 nt, Homo sapiens
ccacggccgacgcgggaaccaggagcgaccacgcgcaccaacgagaaggaaacagagcaaagcagcgacaacaaagacagagg

SEQ ID NO: 70850 - RNA, 81 nt, Homo sapiens
ccggaggcggcgggaggaggcggcggccgagacagggccaccgcgcccaagcggaggcagcaggcacacagccacgcagcc

SEQ ID NO: 70851 - RNA, 75 nt, Homo sapiens
acgaacagagacgaggcggaacagagaaaagaaagcgccacgcagagccccgccaggaagacacgccggggaacg

SEQ ID NO: 70852 - RNA, 77 nt, Homo sapiens
ggcacgaagggggacacaggcgagagggacgcccagaaccagcgcaccggcccgccgcaccacgccgcacacgaccc

SEQ ID NO: 70853 - RNA, 72 nt, Homo sapiens
gcgaaacgcacgagaaggagaacacccacgaagcaccgccccacgccgagccgccacacaggcaaccgcagg

SEQ ID NO: 70854 - RNA, 34 nt, Homo sapiens
accagcaacaagccgggcgacccagcaacgcggc

SEQ ID NO: 70855 - RNA, 70 nt, Homo sapiens
gccggggagcggcccacaggagccaacaccgaggccccaggccacagacaagagagccccaggccaacca

SEQ ID NO: 70856 - RNA, 80 nt, Homo sapiens
ggagcaaaaaaagagcccgcaagaagaacagagacagcagccaaacccccagaaacgggggagaaggaggaacacaaaga

SEQ ID NO: 70857 - RNA, 57 nt, Homo sapiens
ccaaggcaaacggcagagacccgagaagagagagagcaacacgcgccaaccccagag

SEQ ID NO: 70858 - RNA, 85 nt, Homo sapiens
agacagaagaggcgccaggacgaaggcccacgggcaagacagggcgggaccaccaggagcagagcggaggccaccagcccaacac

SEQ ID NO: 70859 - RNA, 74 nt, Homo sapiens
ggaagcacaaaaagggacagcggccaaggaagcacgggaagaacagaaaagagaagcaccacggaaaccaccgc

SEQ ID NO: 70860 - RNA, 84 nt, Homo sapiens
aggacaggagaagagcaagcagggcaacccaccagcaggcggaaaagggacccggaagagagacccaagccaagaggcccggag

SEQ ID NO: 70861 - RNA, 67 nt, Homo sapiens
gggacccaaaaagggcagaaaggcaaagagcacacgccggagccgggaagaaaacgagcacaacaga

SEQ ID NO: 70862 - RNA, 79 nt, Homo sapiens
gcaggggcgcgcgaaggagcggaagaaggcaggccaaaccaccgaccaggaggagcacggcgaaccgcaaacagaagag

SEQ ID NO: 70863 - RNA, 83 nt, Homo sapiens
acacggccccacggcacaacacacccgcaagcgccacgcagagccccgccaggaagacacgccggggaacgaagcagaagacg

SEQ ID NO: 70864 - RNA, 78 nt, Homo sapiens
gccaggagaaggagcggcaggcgacgaggaggcggagcggacaaagggcacagagcagaggacaccacaggaaggagg

SEQ ID NO: 70865 - RNA, 64 nt, Homo sapiens
gcaaagcaagcggccagaagcggaggaagaggcaaaggaggaaggaaaaagacgcaccggggag

SEQ ID NO: 70866 - RNA, 83 nt, Homo sapiens
cagaagggccaagaaaagaagcagaaaccaagaagagaaggcgaagagcagcaaaggacaaccacagggcgcacccccccgcc

SEQ ID NO: 70867 - RNA, 39 nt, Homo sapiens
cccccgagggcgggacacaggcccaacaggagcacaaga

SEQ ID NO: 70868 - RNA, 74 nt, Homo sapiens
gccgggccaggcacgggcaggacgacacaccccgaagcccagacagggccacagccaggagaaaaagcgggaag

SEQ ID NO: 70869 - RNA, 77 nt, Homo sapiens
cagggcgccaaaaacagacgcccccgcaaaacggcccaacacgaagcggcaccggcacccgcgcccgggagcagaac

SEQ ID NO: 70870 - RNA, 79 nt, Homo sapiens
gaacagcgaggaaacagagcaggcagcaaggagccgccccagccgaaacgaggacaagagcaccaagagagaccaggac

SEQ ID NO: 70871 - RNA, 81 nt, Homo sapiens
cgggcccacacaacccaggcaaccaacaggccaagaacccaaagcaaggcgagacaaggggccaaccagccagggccaaca

SEQ ID NO: 70872 - RNA, 66 nt, Homo sapiens
aggacgcccgccccaggaaaggccgaggggcccaccagggaggaagaggcaggcgcagcagagaga

SEQ ID NO: 70873 - RNA, 61 nt, Homo sapiens
agaagcaagcgaggcccacaagaaggagcgcggagaccaagcgccgcagagacccgacggg

SEQ ID NO: 70874 - RNA, 58 nt, Homo sapiens
acgggcggccggcgcgaggcgagggaggccaggagaaggcggggcagcagaagaagca

SEQ ID NO: 70875 - RNA, 77 nt, Homo sapiens
agccggcaagagggagaaggacaccaggcagaggcaagacgccggcccaagagccgcagggaggaggggccaaccac

SEQ ID NO: 70876 - RNA, 84 nt, Homo sapiens
aaaaccaaacaggcccccagaagagcggagagacgaaagaggacacaaagcgagaagacccagcaaccagcagcaagaccaaga

SEQ ID NO: 70877 - RNA, 79 nt, Homo sapiens
gaacccaaccagggggaaacacagaacgcagggacgggagaacagaagagcagacagagccgagccaggacaggccagc

SEQ ID NO: 70878 - RNA, 77 nt, Homo sapiens
ggaaaggagaccaaagcccacacgggacagaaaggggaaacaccacaaagcgagcaaacccaccaaagagggccgga

SEQ ID NO: 70879 - RNA, 86 nt, Homo sapiens
caagcagacggcaaaggcaagagaacagcagcgccgcccgccgacagccaggcccgggagaagaaccccgaaaaacaaaggacgga

SEQ ID NO: 70880 - RNA, 78 nt, Homo sapiens
gggagggccgagggaacgggcggaggccgacgacacagacaaggccaagaagacgcggagggaggcgaggagggaccg

SEQ ID NO: 70881 - RNA, 69 nt, Homo sapiens
gaaaaaaaagggaaaaacacaaacgaccaacagggcaaagaaaaagggcccgcgcgagcggggaaacag

SEQ ID NO: 70882 - RNA, 87 nt, Homo sapiens
ggccgacgccacaacaccgagcaagaacacccgcaccaacgagaaggccagaccagaaggagcacaggcggaggccggcagacccaa

SEQ ID NO: 70883 - RNA, 73 nt, Homo sapiens
gaaacaccaggacccaggcgcgggcagccacagccaaaggcacggagggcagaagccgcaggacagaagcaca

SEQ ID NO: 70884 - RNA, 76 nt, Homo sapiens
ggcggagcaggaggagggcggagcgggggaggggcccagggcaagggcggaaccacaaaggcgaaccacggacaac

SEQ ID NO: 70885 - RNA, 73 nt, Homo sapiens
gcccgaacagaaccgcccggacaagagacacgcaaaccaaggcgacggaaggcagccaaaaaaacagacggca

SEQ ID NO: 70886 - RNA, 83 nt, Homo sapiens
gagggggcagcagcccagccccacccaagacacccacaggaaacggaccgccagcagccgcccccacccccgggggccacccg

SEQ ID NO: 70887 - RNA, 60 nt, Homo sapiens
ccagccccaaagagcgagacacagagccggagacgaaaagacggaaccagcaggagcgca

SEQ ID NO: 70888 - RNA, 54 nt, Homo sapiens
agggaacccggcaccgccccagacaggaagggaaggggcggagacgggcggaac

SEQ ID NO: 70889 - RNA, 33 nt, Homo sapiens
gcacacaccaccagggcagaccaacagacgcag

SEQ ID NO: 70890 - RNA, 79 nt, Homo sapiens
ggaccgagcagaccaaggcgacccagcgcaggagacaagccggagaacgcccagaccgaaaaccagaaaacgaaaaaag

SEQ ID NO: 70891 - RNA, 73 nt, Homo sapiens
gcaccaagacagggcacgcggaagggcagcagcggaccaggaggagagaaagaacccacgcaggacgacagaa

SEQ ID NO: 70892 - RNA, 73 nt, Homo sapiens
ggaccagacgcagggagacgcacagccaggacaccggaaccgggaaagggccagagaacccaaaagcaaaccc

SEQ ID NO: 70893 - RNA, 67 nt, Homo sapiens
cgcgagcgccccgccacgcccggaagcagaggggaaaagcagggaccgcgccgcccaggggagcgcc

SEQ ID NO: 70894 - RNA, 60 nt, Homo sapiens
cgggaggaaagagagccacacgaagaacacggccaaaggaaacccaccggcggagacaca

SEQ ID NO: 70895 - RNA, 51 nt, Homo sapiens
acagcgaccgacgccacacggagagacaaagcgaaagaaacccgcacagag

SEQ ID NO: 70896 - RNA, 85 nt, Homo sapiens
gaacagggcagcgcgaccggccagcgccgcgacgggaggagcgccggaacgccgaggcccagaacccccaaagacaacaaggagc

SEQ ID NO: 70897 - RNA, 57 nt, Homo sapiens
aaccaaagacgggaacaagggagggggacagaccaaagaggaagaaccgcgggggcg

SEQ ID NO: 70898 - RNA, 75 nt, Homo sapiens
cgccccagccacccaggccccgccgcccgggggcgccgcccaccgcgcccgccgaccggggggccgcgcgcgaac

SEQ ID NO: 70899 - RNA, 77 nt, Homo sapiens
aagggaccgcggagcagaggagggcccaccgcgaagggggcagagacagggcaaacggaccaaacaaaaagaaggcc

SEQ ID NO: 70900 - RNA, 60 nt, Homo sapiens
agagcccaaacccagacagcgcaccccaagcccgggagcccaggcagaagaaagaaacgg

SEQ ID NO: 70901 - RNA, 59 nt, Homo sapiens
gccagcacccccacaagcagcaggaccaggacacagaccggaaaccgaggaggcggaac

SEQ ID NO: 70902 - RNA, 76 nt, Homo sapiens
accggaagaacccggcccagagccaaaggagccccacaaaaggaagaggagacccagaacggagagacgggagagc

SEQ ID NO: 70903 - RNA, 38 nt, Homo sapiens
gaaacacgaaagggcaggaaacaggaacacgaaagagg

SEQ ID NO: 70904 - RNA, 79 nt, Homo sapiens
cgcaagcgaaaacagaccgcgagcccagagcgagggagaccacaaaaggccccagccaccaggagcaggggaggcggag

SEQ ID NO: 70905 - RNA, 68 nt, Homo sapiens
gcgccacggaaaagagcggagacaaaaaggaggacaacggcaagcggagaagagcaaggccgaaccga

SEQ ID NO: 70906 - RNA, 78 nt, Homo sapiens
cagaagggaggggcaaagacagaggagcgccagaagaaagccagcccaggaagagagaaccaaaagcaccggaccaga

SEQ ID NO: 70907 - RNA, 72 nt, Homo sapiens
caaacagaaaaggaagaaagggacaaagagaggagcagggaagagacgagacagaggcacgcagcagagacg

SEQ ID NO: 70908 - RNA, 81 nt, Homo sapiens
gggcgcagaagcaggaacagcagcccccccccaaccccaaacccccggcgcggagagaggccccggagcgccaggcgggga

SEQ ID NO: 70909 - RNA, 111 nt, Homo sapiens
cccggccgccgggacgcacccggcagcgccggggagcagccgcacggaggacagaacgaccgcccggccagcccaccccccgacgaaggccacggggagacacgcccaccc

SEQ ID NO: 70910 - RNA, 60 nt, Homo sapiens
acagaaggaaacaacagaacagcaaaagcgaaggagaaggaaaaggacgacagaagaaaa

SEQ ID NO: 70911 - RNA, 77 nt, Homo sapiens
agcccgcagcacgaccagcaggaacgggaaccgccgacccaccccagcccaaccacagcaccacacgggaagggccc

SEQ ID NO: 70912 - RNA, 81 nt, Homo sapiens
agacccgaaaaacggaccaaaagacagaggagacaccaaaggaggcaagcaaagaccaaccaacgaagcaggcacacacca

SEQ ID NO: 70913 - RNA, 61 nt, Homo sapiens
gaaggaccaagaaccagacaacggcaagcggagaagagcaaggccgaaccgagaggaaggg

SEQ ID NO: 70914 - RNA, 69 nt, Homo sapiens
cacggagacaccagggccgagaggacaccgagaaaaagggccggccgcagacccaaaaaccccccccag

SEQ ID NO: 70915 - RNA, 64 nt, Homo sapiens
gcgagagcgcagacccgcagaagggacgaacagcggggacgccccagcagaccgcccaggagag

SEQ ID NO: 70916 - RNA, 81 nt, Homo sapiens
gggccgcgggagcggagcccccgggaccagggccgaccacaaacacccacgcgagccccccagggagcagagcgccaggcc

SEQ ID NO: 70917 - RNA, 84 nt, Homo sapiens
gaacagagcagacccggacggaacaggcaaaagagggaccggaacacggagcaggaggagggcgggaggcgggcacgaggggag

SEQ ID NO: 70918 - RNA, 76 nt, Homo sapiens
caaggagacaagaaggcagaggagggccaaggagcacacgaaaaggaacaaagaagagcaagaagcaccggagcac

SEQ ID NO: 70919 - RNA, 103 nt, Homo sapiens
aagacgacgcaccgcaggcagacaaaagggccaaagaagggagagaggagaccaagaagaaaacaggacagaagagaagggaccaagagcagggagaagaggg

SEQ ID NO: 70920 - RNA, 79 nt, Homo sapiens
cgaaaaaacaaacaacagcagaagcacagacaccccgaaacgccaaaagagaacgggaaagagagacgcggagagcagc

SEQ ID NO: 70921 - RNA, 77 nt, Homo sapiens
ccgggagaagacaggcggccaaacagcaccgggcaacacccccacaaagagcaagccagccggacgcaccacggggg

SEQ ID NO: 70922 - RNA, 71 nt, Homo sapiens
gaggcagaggccccacacagccggacccgacggggaaccaaggccggaggcgggggccaggccgcagccag

SEQ ID NO: 70923 - RNA, 63 nt, Homo sapiens
ggacagacaaaacggaaaggcgcccagcccaagcagagccgggagcgggcggggggagccccg

SEQ ID NO: 70924 - RNA, 88 nt, Homo sapiens
gagacgagcggcgaaagcggcgggaagcgacgggcagaacgcgacgggcgcggcaggccagacaacacagggacacaacaaacacaac

SEQ ID NO: 70925 - RNA, 72 nt, Homo sapiens
aaccggagaggaagagaagagggcgaacgggccaggcccaggacaggccacacgggacagagagagaaaaca

SEQ ID NO: 70926 - RNA, 40 nt, Homo sapiens
acgggagaagaaagccgcaggagggccgaggcaaggacgg

SEQ ID NO: 70927 - RNA, 44 nt, Homo sapiens
cgcaaggccagcgcccagccagcaggaaaaagaagggacacgga

SEQ ID NO: 70928 - RNA, 75 nt, Homo sapiens
gcgcgagcgacaacgggacgggaaacggaccaagaaaggcccagggaccaaagcccggacaaggcccgagcacca

SEQ ID NO: 70929 - RNA, 85 nt, Homo sapiens
gccgagcaaggagcgggccgcgcggagccggagggcgggaggaacagacacgcggagggccgaccaccaagagaaggcccaggag

SEQ ID NO: 70930 - RNA, 76 nt, Homo sapiens
cgagggagagacacccgcaaacaggagccagagaagcacaccaggcccaggaaagccggaccaaacacagaaacac

SEQ ID NO: 70931 - RNA, 85 nt, Homo sapiens
cgagcacgcccaggagaagcgcacgcggagggcgagcgcagacgcggggccaggggccaagaaacccagacagcagggaaacagc

SEQ ID NO: 70932 - RNA, 70 nt, Homo sapiens
caggagcccacgacaaaccccagcgacgaagcaagcgggcaacaggggcacacacacgagaaagagccac

SEQ ID NO: 70933 - RNA, 54 nt, Homo sapiens
aagacagcgcgcagaagcccaaggcgaacggagagacacagacggagcaccggc

SEQ ID NO: 70934 - RNA, 56 nt, Homo sapiens
caacaccaaaaacaaaacgaaccaggacggcaaagacaccccgaccgcacccggcc

SEQ ID NO: 70935 - RNA, 73 nt, Homo sapiens
acaacacaccgccccgccgagacaccgcccgcccgagaacaccaggagacacaagggacagagagggaaagcc

SEQ ID NO: 70936 - RNA, 87 nt, Homo sapiens
cccagcggaagaggccaaggccaagcccagggggagaccagccgagcaacacaggcaggaacgcagggccagcggcaggaggaggcc

SEQ ID NO: 70937 - RNA, 115 nt, Homo sapiens
gaacaggccggagagagagaaacaggagacaggagagagagaagaagagaccgccgggagcaacagaccggagaaacagaaaagagccaggcgcagacgaaaagcaaaggaggag

SEQ ID NO: 70938 - RNA, 66 nt, Homo sapiens
cacaggccccacacccacgccaccacgcagcacaacacgaaaggagaagaggacgggaggagaaaa

SEQ ID NO: 70939 - RNA, 75 nt, Homo sapiens
aaagaagaacgggagcgccgcaagacccgaggcgaacaagaaccacgacgcagaacggaaaacagaagcgcaagc

SEQ ID NO: 70940 - RNA, 48 nt, Homo sapiens
ggaccaagaaccaggcgaagagccaccagcggcgacgcaggccaaaac

SEQ ID NO: 70941 - RNA, 111 nt, Homo sapiens
cagcacgaggagccgccgcgccccgcgcgcgggaagcagcaccaagcacggccaacgccggcacagggcgaggacgcggccacacccgaacgaccgggagacaaggaaccc

SEQ ID NO: 70942 - RNA, 76 nt, Homo sapiens
acaggcgcgcaaacggaggaaagggcacagaggggcccagaaaacaagccagcagacgcgggaagccgacgggcag

SEQ ID NO: 70943 - RNA, 65 nt, Homo sapiens
acggagaaccccgacagaagccaaagggcagcggacggaaccaaagccgaccccgaaacagggag

SEQ ID NO: 70944 - RNA, 66 nt, Homo sapiens
ggaaaaggagcagccagggggcggcgaagccaaccacagcccggagagagacgagagaaccaaacc

SEQ ID NO: 70945 - RNA, 87 nt, Homo sapiens
caaaaaggacaccagcaagcgcaagaggaggagaggcaagagaaagccgggcaccgacaaccgggccagaggcagcggaggcacaga

SEQ ID NO: 70946 - RNA, 74 nt, Homo sapiens
ccccagcgcaacccgccacggagcacaccaaccaaccaaggaaagagaagccgaagagaaaaagcggaaggaga

SEQ ID NO: 70947 - RNA, 70 nt, Homo sapiens
gggacaaggggacggcgaaggccgaggaagaggaggacgcagcagagagggcaggcgcaagcaggggaga

SEQ ID NO: 70948 - RNA, 63 nt, Homo sapiens
acgccaacgaaccacccaccccagaacaccgaccagggaacgcaacaaaggcgcaaaaaccag

SEQ ID NO: 70949 - RNA, 81 nt, Homo sapiens
accaaaacaaacgcaccccacgacagagagaaagcaggccgcagaagcagggaaacccgaccggcgcagaaacaacgaaga

SEQ ID NO: 70950 - RNA, 69 nt, Homo sapiens
aaacagcgccgagagaaacaaagcacggcccggcccaaagaagcaggaaagcggaccgcaggccccccc

SEQ ID NO: 70951 - RNA, 67 nt, Homo sapiens
cgggaccggcgagagagcgcaggccgcgcaaagaaggcacacgggccaagcgccaaccaagcccggg

SEQ ID NO: 70952 - RNA, 71 nt, Homo sapiens
agcaaaacagaaggacagcaaaacgcagaggggagcaggcaacacacgggggccaacagacccgggcacgg

SEQ ID NO: 70953 - RNA, 70 nt, Homo sapiens
cgggggcaagggcgcccgcggagacagaagaagcacaagcgcaacggaacgcaaaacgagaacgcacgag

SEQ ID NO: 70954 - RNA, 48 nt, Homo sapiens
aaacggccaccacccgcgcgaaccaagccaacaggaaaagcaggaacg

SEQ ID NO: 70955 - RNA, 72 nt, Homo sapiens
accgacccaccacaccacgggcggccccagaaggccagaagccgcagagcagcagaacagacagaaacacga

SEQ ID NO: 70956 - RNA, 75 nt, Homo sapiens
accggcccgcgagaaccaacggggcacccgacccaaccagacaggaaggcaagaacaaaggcaccaaaggagcca

SEQ ID NO: 70957 - RNA, 59 nt, Homo sapiens
gcgcggcgggcagacggcgggagccgcccggagcggcagcccacaagcaggaagaccag

SEQ ID NO: 70958 - RNA, 86 nt, Homo sapiens
gcacagaagcggcaggaaagccccgggcagcccacgagacgaacacgagcgagacagcacgagcgggggccccccccgggcacggg

SEQ ID NO: 70959 - RNA, 84 nt, Homo sapiens
ggaagcccacagcccagaggacggaagacagaccacgccgcaagaagagccacaggaaagcaaagaggcgagccacgaaaagcc

SEQ ID NO: 70960 - RNA, 72 nt, Homo sapiens
acaagggggagccggcaaaacaccagagggccaagaacagacaagaaaaaaggagcacaggaggaaaaaaca

SEQ ID NO: 70961 - RNA, 76 nt, Homo sapiens
cggaaacccccaggcaacccacacccgcagaacacaaccgcaacaaaggaaccagacacaaagaggaagcccacac

SEQ ID NO: 70962 - RNA, 77 nt, Homo sapiens
cgagacccggaggaggcgaagcgagaggacaggcggcccgcagacggccccaagaccggagcgggaagccgcggcca

SEQ ID NO: 70963 - RNA, 50 nt, Homo sapiens
agaaccccaaagaggacccgcacggggaacacagcaagaccccggggagg

SEQ ID NO: 70964 - RNA, 71 nt, Homo sapiens
cggagacggaacgggagaagaggcaaagaaacaccaacggaaagggagaacgggagaggagcggaaacgcc

SEQ ID NO: 70965 - RNA, 64 nt, Homo sapiens
acacagaacccggagggaggcggacgagagaacggcagagaggcggaccccgcgggcgcgcggc

SEQ ID NO: 70966 - RNA, 79 nt, Homo sapiens
gcgcccccgcgccgccccgaagcccaggggaccaaaagaacccagccaacccgcagagggaggggaggggcgagcggag

SEQ ID NO: 70967 - RNA, 81 nt, Homo sapiens
agcggacccgcagccccaaagacagcggccagagagccaacgggccggcaagccacggggggaccaccgaagagacgagga

SEQ ID NO: 70968 - RNA, 91 nt, Homo sapiens
gcgaagcaagacccaggagccagggagagccgggaaacaagccaaaccgaaaggaaggacaaccaggggaaagcacgggacgagagaaggg

SEQ ID NO: 70969 - RNA, 72 nt, Homo sapiens
acaagacggacgcaccgacggaacaccggagagaacagaaaaaaagcggcccgggaccaggaaagacaggac

SEQ ID NO: 70970 - RNA, 83 nt, Homo sapiens
ggcacgaaaaggaaagacacgcagaaaagagccgaggccaaggcaagacggcaagaaaacaacccagaccggaccagaggcgc

SEQ ID NO: 70971 - RNA, 57 nt, Homo sapiens
gacgaaccgaccgagagcgcagacccgaaagaagacggccgagggaacagagggaaa

SEQ ID NO: 70972 - RNA, 74 nt, Homo sapiens
cggggggagcaccagcggggcacgcaaaaaaaccaagggaaaagagacaagaccgagacacaaaaaaagcaagg

SEQ ID NO: 70973 - RNA, 66 nt, Homo sapiens
caagggcacaccacgacgcagggcagcaggaccagcagagcaaggagacccagccgacagcagcgc

SEQ ID NO: 70974 - RNA, 73 nt, Homo sapiens
cgagaagcaaagacagggacaggacagcgagcgaggacgaggaacggcgggggcacccgaggaggaagagggc

SEQ ID NO: 70975 - RNA, 81 nt, Homo sapiens
ccaccccgagccgacaagaaggacaaagagacaagccgagagaaagcaagcaaagcgaccccaagagaccgaccgacacag

SEQ ID NO: 70976 - RNA, 59 nt, Homo sapiens
gacgaaagagaaacccggagggcgccgggccccgcacaaggcagaccggccacgcgacc

SEQ ID NO: 70977 - RNA, 39 nt, Homo sapiens
cagcggggaaaacaaagccaaggacaaaagagagaggcc

SEQ ID NO: 70978 - RNA, 77 nt, Homo sapiens
acaccgagaagcggagacaagggcagcgcaagaccccgcacggaagcagcaagcacaggcagcgcagagccagagac

SEQ ID NO: 70979 - RNA, 74 nt, Homo sapiens
agcaaaaccgggcaaaagaccacaacaggacacaaaaaggagagaagaccacagcgggacagcaagggaggcag

SEQ ID NO: 70980 - RNA, 81 nt, Homo sapiens
aaaaccaagacaacccaacaaacaaccggagggaggaacccagacaacagaccaagagaggagcaaaggggaacccaaaga

SEQ ID NO: 70981 - RNA, 49 nt, Homo sapiens
aagagaagacaacgcacaacaggcaccaccgaacacagcccgaccaccc

SEQ ID NO: 70982 - RNA, 79 nt, Homo sapiens
cgcccgagaacagcagcgggccaagagggaggcccacagccagccagaacaaccacaacccacaaccaaccaaccacaa

SEQ ID NO: 70983 - RNA, 76 nt, Homo sapiens
cgggacccgggcgcccgcgcccgccccaacccagccacaggcagcagcggacaggagaaccaacgccacacccgcg

SEQ ID NO: 70984 - RNA, 74 nt, Homo sapiens
ccaaggcagaacccagccccagcgccagggggcaagaacgcaaagggggaaggcggcaaggacacccgaaaccc

SEQ ID NO: 70985 - RNA, 98 nt, Homo sapiens
cagaaccaagcggagagagcagcccggcagacgcagaaccaagacgaggacgcgcacaggaaaggacgcggaacaagcaggcagccaggcagcagaag

SEQ ID NO: 70986 - RNA, 76 nt, Homo sapiens
agccgcggcgagcgccccagccaggccgcgccggcaccccgagggaagacggaccgagggacaaacgaagagcaca

SEQ ID NO: 70987 - RNA, 64 nt, Homo sapiens
caccgcaggcagacaaaagggccaaagaagggagagaggagccaggcacagcagggaccagaaa

SEQ ID NO: 70988 - RNA, 76 nt, Homo sapiens
ggccaagaaaccaggaggaacagacgcccccacaacaaagagaaagaggacaggcagcgccaaagccaggacaagg

SEQ ID NO: 70989 - RNA, 77 nt, Homo sapiens
aagccagccaaccaaagacgggaacaagggagggggacagaccaaagagggaaggagccagagacagcaaaagcaag

SEQ ID NO: 70990 - RNA, 82 nt, Homo sapiens
cgccgccgcgccgcgccgcgccgcaccccgagcgaccgggaaacaacacgaggaggacggcacaaaaagcaccagcggggag

SEQ ID NO: 70991 - RNA, 91 nt, Homo sapiens
aaaaaccggaagggaaacccgcgacaccgcgagggacaaagaccgaaaggagaaacgggcaagccagagaacacaaaaggggacgagacag

SEQ ID NO: 70992 - RNA, 69 nt, Homo sapiens
gggcgcccggcgccggccgagaaggcagaggcggggcgacagcaagaaggagccagcacagaggcaaaa

SEQ ID NO: 70993 - RNA, 70 nt, Homo sapiens
cagcagcggaggcggacgcgcaggcgcgagaaaagcgcccaggaagcggaaaaacaaaagagccgcccaa

SEQ ID NO: 70994 - RNA, 74 nt, Homo sapiens
gacgcgccaaccagacgcgcgggaggcaagggcagacaaacaaaagaggaaacacggcacgcccagggccgcgc

SEQ ID NO: 70995 - RNA, 69 nt, Homo sapiens
cgcacgggcaaggcgacagacccccagaggaccccaacacccacccccgccgggaccccgcggacacgg

SEQ ID NO: 70996 - RNA, 82 nt, Homo sapiens
aggcaccgggacggaccgagaccggaccgagagcggaccgagagcgcgaaacgcacgagaagaagagacaacagccacaagg

SEQ ID NO: 70997 - RNA, 66 nt, Homo sapiens
gcaagggaaggacagagcaaaaaggcaccacggcgagaaggcacaccgggccaaacacaaaaccaa

SEQ ID NO: 70998 - RNA, 73 nt, Homo sapiens
gcaggcaggcgcgagaaggacgcgcagccaccccagggaaagaacccaacgcggagagccacaacaacgaaca

SEQ ID NO: 70999 - RNA, 75 nt, Homo sapiens
caaaaaaaagaaaaccaggcagggcgaagggaagagagaagggcacagaccaagacaacgaaccccggccaggac

SEQ ID NO: 71000 - RNA, 83 nt, Homo sapiens
gcgcaggggacaggggcggcgaccggcggcgccgaggagggaggaggacaggagaacgggcggggcgaaagaggcacccggga

SEQ ID NO: 71001 - RNA, 81 nt, Homo sapiens
gaccccagagcggcgcggacagacaaggccagacccaccgcgagacgcaacggaagggggagcagccacggggcccagcag

SEQ ID NO: 71002 - RNA, 62 nt, Homo sapiens
accaagccaacaaaagaagcgccgcagaagaggcccggggaggaggaagagagagccgagcg

SEQ ID NO: 71003 - RNA, 58 nt, Homo sapiens
caaggacaccgaggccacccgcaggcagccggcacccgcacaacccagggggccgaac

SEQ ID NO: 71004 - RNA, 72 nt, Homo sapiens
cggagccgcagccccggcgcgcgcgcgcgcaggccaaagagcacagggacagaaaaacagcgcagacgagcc

SEQ ID NO: 71005 - RNA, 74 nt, Homo sapiens
caaggcggcgcgggagcccggcgcggcaagggccccagcccccgcagggggggccgcccgcccaaggcaggaag

SEQ ID NO: 71006 - RNA, 69 nt, Homo sapiens
gaggcgaggacagcggcgaaagcccggggccgccccccccacacaccagcccgcgcagaccacagaagc

SEQ ID NO: 71007 - RNA, 75 nt, Homo sapiens
gcggccggagaccggaccccaggaggaagcgcacggcaagccggccggcgggcgaaaccgggagaccgaggaacc

SEQ ID NO: 71008 - RNA, 67 nt, Homo sapiens
caaccaacaccagagacgccaagccagcacaaaggggaccaccaggaaaacgggcaccacgccaaaa

SEQ ID NO: 71009 - RNA, 91 nt, Homo sapiens
agagcgggaccacccgggcacagcaggcacggaggccccggggaagggaagcaggggcggggcgggcccagaagcagcagcaccagggaag

SEQ ID NO: 71010 - RNA, 73 nt, Homo sapiens
cggaggaaacccgagcaacccaggccagccagaaaccacggaggccaccgggcagcccgacagcccccgcccg

SEQ ID NO: 71011 - RNA, 79 nt, Homo sapiens
caaagacaacagccggaacgccccaaaaaaggacccaaccgcggcacacagaaaacccggacccaccccgcccagaacc

SEQ ID NO: 71012 - RNA, 68 nt, Homo sapiens
ggcagaagacaaaaagaagacggacagggcacacagaaccgaaaaagagcgggcggaaaccaacccgg

SEQ ID NO: 71013 - RNA, 80 nt, Homo sapiens
gcgccggagcagcggacccaggcagaaaggagagaaggcggagcaggcaggccgaaaggccccgaggggaagagcagcgc

SEQ ID NO: 71014 - RNA, 93 nt, Homo sapiens
gacggagccgagaggcaaagcggggaggaacacagcaagaggcgcaggaagggcaacaccaaaccagaagaaggacgagcaaagcgaaaacac

SEQ ID NO: 71015 - RNA, 87 nt, Homo sapiens
gacacacagaggggcagccaaaagaagaaaggaacccgcaaaccccaaagggagaagaccacggccgaaggcagcagagagacgcaa

SEQ ID NO: 71016 - RNA, 83 nt, Homo sapiens
ccagaaaaggaaccaagccagaaaaaagcacggccgaaggcaaaagaccaagacgagagacaaggcaacaagcagcacaagcc

SEQ ID NO: 71017 - RNA, 66 nt, Homo sapiens
cgcccaccggagggcagacacacgcaggggcgcgacgagagaccgcgcacacgggcccagaagcag

SEQ ID NO: 71018 - RNA, 72 nt, Homo sapiens
cccgcggcaggacagcgaacagcggcaaacccgggaggagccgagggccgcaacgggagcgcccgccaagag

SEQ ID NO: 71019 - RNA, 60 nt, Homo sapiens
cccggcccgggagcacgcgcggaaaaggaacagaagaggaaccgaaacccaagaaaaacc

SEQ ID NO: 71020 - RNA, 58 nt, Homo sapiens
gaacagaagagaagcaaggcaccgacacagggggagaaacagggacggaaaaggcgca

SEQ ID NO: 71021 - RNA, 67 nt, Homo sapiens
aagaagaagaacggcgagagccgggaagaaacaccaggccggcaagaagccaacggagaaccaaggc

SEQ ID NO: 71022 - RNA, 71 nt, Homo sapiens
acccggcagccccacgaggcaaaagcagaccggaaaacccaccggcaagaccacacccgaggggagcccag

SEQ ID NO: 71023 - RNA, 56 nt, Homo sapiens
cggagaaaaaggaagcgagcaagaagccaaaacgagaaggaggagcgaggcccggc

SEQ ID NO: 71024 - RNA, 74 nt, Homo sapiens
gaagaaccaggagcagcggccaaaggggaccgagcaccgcagaccgccgaggagaagcgcccccaacgacgcca

SEQ ID NO: 71025 - RNA, 84 nt, Homo sapiens
gcaggacgggcacagcagagaccaaaggcagggcaaggaaacggccacaaagaacacaaggaacgaaaggaagggaagaagcag

SEQ ID NO: 71026 - RNA, 61 nt, Homo sapiens
gaagcccacgccgggacccagcgcaggagggagacagagggggcacccagaggccggggac

SEQ ID NO: 71027 - RNA, 76 nt, Homo sapiens
gggggcagcgccgaaccaggaccggacccggacccaaaggccagcaaggacccagagacccaggcagcaggggaca

SEQ ID NO: 71028 - RNA, 73 nt, Homo sapiens
gaggacacgggagagccgaaccagaagagaaagacagaagccaaaacaggaaccgaaaggccaagcaaccaga

SEQ ID NO: 71029 - RNA, 71 nt, Homo sapiens
ggccacgagcagacgcccccccccgaggaccccaggccaccaaaagcaacccgggacacgaaacacacgcc

SEQ ID NO: 71030 - RNA, 52 nt, Homo sapiens
aggcccaagacccacaacaaaagggacgaggcaaagaaaccacagacagagc

SEQ ID NO: 71031 - RNA, 68 nt, Homo sapiens
gcccacccccaacgcgacggaaaggcacgaaagccaggggagaagcagaccgcaccaggcgggacccc

SEQ ID NO: 71032 - RNA, 73 nt, Homo sapiens
gcggccgcgagacggcgcgagaacgagcgcagggagcggaggaaaagggccagacaacggcaagcggagaaga

SEQ ID NO: 71033 - RNA, 74 nt, Homo sapiens
aggcggacagaggaagcggcgcgcaggggacaggaggccagggcacgggaaggcagcacgaggcaaaacaagga

SEQ ID NO: 71034 - RNA, 88 nt, Homo sapiens
gccaggagcaccgccgaggacccagcacaccgaggacaacaggcacaaagagagaaggaacacccacagggcagacagagaaagaaca

SEQ ID NO: 71035 - RNA, 79 nt, Homo sapiens
gcagaaagcaagaagacagcggaagcggaggaggacaggaagccaagaggggcaacaagacaccaggagcaggagaaag

SEQ ID NO: 71036 - RNA, 82 nt, Homo sapiens
ccagccgccgcccggagagccgcccgccgaggagcgacgcaccgcagacccgacagggacagcggcaccacccaaaagaaaa

SEQ ID NO: 71037 - RNA, 59 nt, Homo sapiens
gccaccaggagcccgagagagaaggggggaaccgaaagaggcgacgcaaggcaaaccag

SEQ ID NO: 71038 - RNA, 52 nt, Homo sapiens
aagaccgcgaaacggcacaaccggagacaggggagacaaaacaccgaagcga

SEQ ID NO: 71039 - RNA, 61 nt, Homo sapiens
cgggaccccagccagaacgcagggaaacagccacagagggcaaaccagacagaaccgacgg

SEQ ID NO: 71040 - RNA, 80 nt, Homo sapiens
cgcccgcacggccgagggcccccgcaccgaccccgaggccaagccagaagacagcgccagacgaccacaccaacccagag

SEQ ID NO: 71041 - RNA, 84 nt, Homo sapiens
acgaaaggagcaagagcaagacaccggacaccgagggcccccaaaaggagcccagggcggcccggagcccacgaagccacgcgg

SEQ ID NO: 71042 - RNA, 59 nt, Homo sapiens
gagaaaaggaagggacagaacgagagccagacaggccacggagagcaccggaggaagcg

SEQ ID NO: 71043 - RNA, 56 nt, Homo sapiens
acaccagggggcaggcccgcagaccgaaaagggcggaaaaggaccaaggcccgcaa

SEQ ID NO: 71044 - RNA, 78 nt, Homo sapiens
accaaaaacaggcccggcgagccccgcagagacggcaagcaggaaacggaggacggggaaaaaggaccacaagccacg

SEQ ID NO: 71045 - RNA, 73 nt, Homo sapiens
gcagggccaggaggccggggggcggccaggggccgacggaagcgaaggacaacgcaccggacaaggagggaac

SEQ ID NO: 71046 - RNA, 55 nt, Homo sapiens
cgccgggaggcacggaaccgcgccgcaggcggaaacggggaccaggaggagaagc

SEQ ID NO: 71047 - RNA, 47 nt, Homo sapiens
aggcagcgcccccaaacgaagacccaagaacggaacgaagaggagcg

SEQ ID NO: 71048 - RNA, 86 nt, Homo sapiens
agcgcgccccggagaaagccccgagcgaagcagccaccaccagcagcgagcaagaagaaagaagacgagggcgaaggaagaaaaag

SEQ ID NO: 71049 - RNA, 84 nt, Homo sapiens
cagggcccgcgggccaggagagcgccggcgggcccccaaaggaccaaaacgcaaccaaggaaaagcgcagagggaaacggaccc

SEQ ID NO: 71050 - RNA, 69 nt, Homo sapiens
ggaacgggagaaagcacgggaggagagagacacagcaccagagaaaaaaaacggaccaccgcggaagac

SEQ ID NO: 71051 - RNA, 75 nt, Homo sapiens
cagaagaggagagagagcaagagaggaagaagaacgacccgcccggggcagcagacagagcgggaaacagaagaa

SEQ ID NO: 71052 - RNA, 73 nt, Homo sapiens
ccaaacgcaaacaagcggaagacacaaacagcagggagaagagacaacaagacaggcggagcacagggcgcgc

SEQ ID NO: 71053 - RNA, 68 nt, Homo sapiens
acaacccaaaccaaggcccaggaaaagagcacagaggaagaaaccggacacaagagggcaagaaaggc

SEQ ID NO: 71054 - RNA, 67 nt, Homo sapiens
ccacgaacccggagaagacccacagaagaacgcggcagaacggaggcaggcagcacgagacacacca

SEQ ID NO: 71055 - RNA, 79 nt, Homo sapiens
gcgggcgggcgggagcgcccaagggggcggagagcggggggggcccgccagcagagggaaggcgcccgaaacaacaccc

SEQ ID NO: 71056 - RNA, 65 nt, Homo sapiens
agaaccgccaagaaacaaagcagaaggcacgcaaagcaggggcacgcgcgcggcaagcacgaagg

SEQ ID NO: 71057 - RNA, 79 nt, Homo sapiens
cgcgaggcgcggcgcgcgccagaccggcgagcccgagcaggagaagggcccaccccgcagcgggccccaccgagcaaca

SEQ ID NO: 71058 - RNA, 69 nt, Homo sapiens
ccccacaggccagcaaggacagcagcagggaacgccgcagaaagaagaaggggcaagaacagccacagc

SEQ ID NO: 71059 - RNA, 91 nt, Homo sapiens
ggagacggagggccaagaaaacaggccgagagaagaaaaagacccaagaaagcaacgaaaggaacgcaagaacagaagaagaaagcagggg

SEQ ID NO: 71060 - RNA, 72 nt, Homo sapiens
cccaacaggagcacaagagaccacagacacagcgcagaagagcaagaccgaagacaacaaaagaaaacaaag

SEQ ID NO: 71061 - RNA, 37 nt, Homo sapiens
gcccgaggagccccgcgcgagcccaagagacacaggc

SEQ ID NO: 71062 - RNA, 68 nt, Homo sapiens
caagagaaacaccaaacaaggaccgagagaaacaggccagaggaggaaaggccagcaccaccgaagac

SEQ ID NO: 71063 - RNA, 77 nt, Homo sapiens
agcgggcccggccaggaacagggacagcacccaccccggagggggaccacaagacccacgacagggcacaccaaagg

SEQ ID NO: 71064 - RNA, 65 nt, Homo sapiens
cagccccaggaccagaggacaaagcaggaggcccacccgacgcggagcgaccggcacgggcggcc

SEQ ID NO: 71065 - RNA, 69 nt, Homo sapiens
ccaaagcgaaagacacgacaagaccgccacagcccaagacggaaaccagaacgaaaacccgcccaacag

SEQ ID NO: 71066 - RNA, 66 nt, Homo sapiens
agcaacaaagcggcccacgcacgggacagcacggccaagcagagcaaggggcacgcccacggaagc

SEQ ID NO: 71067 - RNA, 77 nt, Homo sapiens
ggcccgagaacacgcagacagccgaccccacacaaggagagcaagcagggagggcccacgaaggacagagaagaaag

SEQ ID NO: 71068 - RNA, 59 nt, Homo sapiens
agccggcagcagagcaaaacagagcggaacgaacaagggagaccccagagcggcccccg

SEQ ID NO: 71069 - RNA, 76 nt, Homo sapiens
aggagcaaagggaaaaggacagcccaagaccggggcggcaagcgcggaggagcacacggaaaccgcaaaacccagc

SEQ ID NO: 71070 - RNA, 76 nt, Homo sapiens
aggggaggacaaccgcccgggaccagggagccaccaacagagagcagcaagaaggcccaccagaggggcacaaggg

SEQ ID NO: 71071 - RNA, 72 nt, Homo sapiens
cccaacaggcggcggccgaagggcagggagaggaaaaccgccgccggggccagcaagaacaaaaagcaccaa

SEQ ID NO: 71072 - RNA, 64 nt, Homo sapiens
ccagcagacgcccccgccaccccacaccggaaggccgagagacccgcgaacgagcacaagggca

SEQ ID NO: 71073 - RNA, 73 nt, Homo sapiens
ccggaggaacggaccagagagaccccggaggcgccaagcccacgggcgcaccaacggagagccagagcaaggg

SEQ ID NO: 71074 - RNA, 79 nt, Homo sapiens
accacgagcaccgaagagcgcgccgcccccgaaggcggccaaggaacaagacacagaaggaagaaggagcccaggcggg

SEQ ID NO: 71075 - RNA, 76 nt, Homo sapiens
ggagcccgagcgcggaggccggccggggcggcgaggcccccaccggagcaggagccggaagagggaagaaggaagc

SEQ ID NO: 71076 - RNA, 99 nt, Homo sapiens
acagggaccggcgcgcaggccacgacccccagagcaaccggaaggcaaggcaaggagacaggcacaagccgggaccacaaagagcaacacagcaacccc

SEQ ID NO: 71077 - RNA, 82 nt, Homo sapiens
gcccgggcggcgggcggagacggggcgcccccccgccaaggcccggcgaggcgggcaacacaacaaggcgcggacacccaga

SEQ ID NO: 71078 - RNA, 41 nt, Homo sapiens
gaggcccccagccagggaacaaaggcagcaaagcgagaccc

SEQ ID NO: 71079 - RNA, 55 nt, Homo sapiens
aagaagggccagcggaaacaccgcgccccagaccaccggcagggaacagccgagc

SEQ ID NO: 71080 - RNA, 37 nt, Homo sapiens
cgaaccccagcacgggagccaggaggccgacccgacc

SEQ ID NO: 71081 - RNA, 72 nt, Homo sapiens
ggaaagcccgccccaacaccccagcaacaaaacaggcaaggcccagcagcacacaaggagcaagccaggaga

SEQ ID NO: 71082 - RNA, 51 nt, Homo sapiens
gaaaacaagccggcagaaaccaccaaacagaaagaccgaccaaggcggacc

SEQ ID NO: 71083 - RNA, 60 nt, Homo sapiens
agcccagaaggcggcgaccgggcgcgggcaaggcggagaaaggagcaaccagggaaaaga

SEQ ID NO: 71084 - RNA, 84 nt, Homo sapiens
caagaacaccgaggggccgggaacggcgccggaggaccagacccaggagggacaaagccggaggcagaagcaggaaaccagagg

SEQ ID NO: 71085 - RNA, 70 nt, Homo sapiens
aaaaaaaggagcgcgcggaaggcaacaccgagaggccgaacggccacagggacaggaacccacaggggaa

SEQ ID NO: 71086 - RNA, 73 nt, Homo sapiens
gaagaccagcccggggcgggggggcccaagaacacgcggcaagggcaaaagacaacccgccgggacaccagcc

SEQ ID NO: 71087 - RNA, 70 nt, Homo sapiens
aaaaccaaaaaccacgggcgggagcaaccgaaccaagcaaagaaggcccgccagcaacagcaggagcggg

SEQ ID NO: 71088 - RNA, 68 nt, Homo sapiens
ccaaggggacgagcaaaggaagcgcgaacagcagcgcaggggagcggacaaaaaagcccggcaccgac

SEQ ID NO: 71089 - RNA, 50 nt, Homo sapiens
agaaacgcaccaggccaaagaaagagaagcaggaagagcggagagcagcc

SEQ ID NO: 71090 - RNA, 72 nt, Homo sapiens
ggggacggcccccaaacacgaagagacgacagaccagaccaagcaacagaacgccccggaacccaaaccgaa

SEQ ID NO: 71091 - RNA, 82 nt, Homo sapiens
ccggacgagagcaaggagaggcagggcaagaaccacgaggccacccgacacgggagccacaccaggcccggacaagacaagc

SEQ ID NO: 71092 - RNA, 59 nt, Homo sapiens
aaggaccaagaaccagcaagaacgcagcgaagagacgagaagaccacagcacagaaaca

SEQ ID NO: 71093 - RNA, 71 nt, Homo sapiens
gaccggcgggagagagagcgcccagaaagccagcggggccacgaccccgacgacagcacccggagaacccc

SEQ ID NO: 71094 - RNA, 75 nt, Homo sapiens
cacgacacaacgaacgcaaaccccagaaagcagcggagccaaccaggaaccagcagagaagaaacccaaaccaaa

SEQ ID NO: 71095 - RNA, 71 nt, Homo sapiens
caacccgccgcgcaccgacccgacgcgccggcccacgcgcggccaaggcacaccggcagcaccacaaaccg

SEQ ID NO: 71096 - RNA, 73 nt, Homo sapiens
cgcgaccagaagcgagaaacgggagccagaggagagagacacagcaggcgaaccacgacagcagagaagaaag

SEQ ID NO: 71097 - RNA, 59 nt, Homo sapiens
ggaaagggccgccacagaaaccagggaggcaggccccccagagaagcccgagaccagga

SEQ ID NO: 71098 - RNA, 65 nt, Homo sapiens
gccccacagaggggcgacgggcaacaacacggcaccacacaagcgaagaagccgagaaaccagcc

SEQ ID NO: 71099 - RNA, 75 nt, Homo sapiens
caagggacgcccgagccccaaggagccgcggcgcggcagcaggggacagcggagagaacgacccaacccaacacg

SEQ ID NO: 71100 - RNA, 82 nt, Homo sapiens
gcggccaggcagcggaacgcgcccccggggcccagggagagcacgagcgcacagcgaggaggggggcgcgcagcccggggac

SEQ ID NO: 71101 - RNA, 83 nt, Homo sapiens
gcgagaacgaccccgagacggaacagcaccaaagaccaacacaagaggaggggaaaggaccaaggagcaggagcagcgcgcac

SEQ ID NO: 71102 - RNA, 91 nt, Homo sapiens
cgcgccgccaaggcggcgcgcgagcggagcaccgcccaaaacagagggagacgagaaaagggccgagcacaagccaagaaggcgccccaaa

SEQ ID NO: 71103 - RNA, 83 nt, Homo sapiens
acccaggcccaagaagaagcacgcgccgcaggccgaggcagaaggacagaccaccaaggcgcccacgggccccaaaagagagg

SEQ ID NO: 71104 - RNA, 78 nt, Homo sapiens
caggcagaaaaagaaccaggagcagaagacagagggaggagggccacggacaaacacgggcccggcccagcagagcga

SEQ ID NO: 71105 - RNA, 82 nt, Homo sapiens
gaacccaacaagacccgccccaccaccgcagcgcaccccccacgggcagcagggggagaagcagagaacgggggccagagga

SEQ ID NO: 71106 - RNA, 40 nt, Homo sapiens
caggacccgaagacgaggaaaccccccaggcaagaggcgc

SEQ ID NO: 71107 - RNA, 75 nt, Homo sapiens
caagcggcgagacgcaggagcagagagaccaagcagcggcggagcgcaagaaaagagagaccaaggaaaagggaa

SEQ ID NO: 71108 - RNA, 58 nt, Homo sapiens
gagccaccgggagagccgagcagccccagcagaaaaacagcccgccgggacacacccc

SEQ ID NO: 71109 - RNA, 80 nt, Homo sapiens
cgcgacggccagcgcaaccgcggaccaagcaacccccacccagccccccgagagcgggacacaaacagggcaccgcaccc

SEQ ID NO: 71110 - RNA, 73 nt, Homo sapiens
cgcgggagccgaggcgccgaaggaccgacgcccgggaaagagcacacgggagcgcccccgagagaaccaaacg

SEQ ID NO: 71111 - RNA, 58 nt, Homo sapiens
cagcaacccacacgcccgggcgggacaagcggcaaggcaccagaaggccagcggacaa

SEQ ID NO: 71112 - RNA, 101 nt, Homo sapiens
gagcgggaaaggccgcgggggcaacggagaaaacccggaaccgcgacggcggcaggacccaaagacaggaccacgcaccagcagagaaggaaagcaaaccg

SEQ ID NO: 71113 - RNA, 75 nt, Homo sapiens
acaaagaggaggagaagaaaaccgaaaaaaaccccgaggccgaaaagagcgacagcaggacgggaccgaaggagg

SEQ ID NO: 71114 - RNA, 72 nt, Homo sapiens
gggaaccgaagagagccgggcacccgggaagcaggcgcaaaaacaggaaaacgacacgacggccgagaaagc

SEQ ID NO: 71115 - RNA, 71 nt, Homo sapiens
agcccgaggaagggcggaccaaccacggcaaaccaacaagaccggaccaaaccagagacaaaaggcacagc

SEQ ID NO: 71116 - RNA, 85 nt, Homo sapiens
ccggaaggaagggaaaccgggggccccggacaacccgagcagaggacgggaggggcaagcgcggccaaccaaggccaagagcgag

SEQ ID NO: 71117 - RNA, 73 nt, Homo sapiens
gggcccgcgcggccagagcccaggagcgaagcccggacgcaaccgagaggcggaccgcagcgcgcccggcaca

SEQ ID NO: 71118 - RNA, 80 nt, Homo sapiens
cgacagccgccacgaccacccccggaccggcagagcgcggaggccgaaccccgaaggaaaccaggagcacacggcgcacg

SEQ ID NO: 71119 - RNA, 76 nt, Homo sapiens
caggccaacaagaggccaaagggcggagaacggaaaagcaccaggaagcagagaggaccgcagaagggaaggagag

SEQ ID NO: 71120 - RNA, 79 nt, Homo sapiens
ccaccccaccccagggagccggaggcgggcgcgccccaccaccgccccaccagcgcggacaccgaagcccgaggccaca

SEQ ID NO: 71121 - RNA, 34 nt, Homo sapiens
ggcgaagcgagaggacaggaagccccagcaagac

SEQ ID NO: 71122 - RNA, 68 nt, Homo sapiens
cggagcagcgaacgcaaacggcaccccaccccagccacgcaaacaaccacagggaacaaagagcaccc

SEQ ID NO: 71123 - RNA, 82 nt, Homo sapiens
gaccgaccaccaaaagaaagcggggaagcgaaggcagaaacacccacaacaggagacaccaaagaagagaaagacaaggaga

SEQ ID NO: 71124 - RNA, 55 nt, Homo sapiens
ccagcggccggggaaaggggaagagagaaggccacgcccgaccccaagcaacaac

SEQ ID NO: 71125 - RNA, 71 nt, Homo sapiens
acaaggaaaggccacaacagcaagacagaacagaaacccaggggaaagaccacaacccaggcccagccgaa

SEQ ID NO: 71126 - RNA, 68 nt, Homo sapiens
cggaagcgccgcaacaggcccaaaaagagagaggaagccaccacgcaaccagaccccgaacacaaacc

SEQ ID NO: 71127 - RNA, 84 nt, Homo sapiens
aacggcccagccgaggagcggcgggcggcggcgcgcggacccaggcgcggaggcgaggccagcaggcaccggggccgagaagcc

SEQ ID NO: 71128 - RNA, 86 nt, Homo sapiens
acgcaggggccaacggcccaccagcccccacgcagaggccagcgaccacaagcagaagaggggcacgggccccaccccaccgccag

SEQ ID NO: 71129 - RNA, 117 nt, Homo sapiens
cggcgccgcggagaccccaccgccggcgcgggaaacgggcgaagcgacgagccgcgaggagggcggaaaacaccccaaaagccaaaagggaaaggaaaagaccaacaacagcgcagg

SEQ ID NO: 71130 - RNA, 51 nt, Homo sapiens
ggacccaagcagccgagagggaccggaccagaacagccacacgaacaaccc

SEQ ID NO: 71131 - RNA, 53 nt, Homo sapiens
acggcgccccgcaaggagaggggcaacggacacaggagacagccaccaggaac

SEQ ID NO: 71132 - RNA, 75 nt, Homo sapiens
acccggggcagcccccccggaaccgggcacaggcccagagaggggcgaaaacgcggaagcggagacacaggcggc

SEQ ID NO: 71133 - RNA, 79 nt, Homo sapiens
aagccgaggcagaggcgacacaagaagagggcggagcggagacgggagaagaaaagacggagggcaacagagagaaaag

SEQ ID NO: 71134 - RNA, 77 nt, Homo sapiens
agacagcaaggaacccaaacaggaccaagaaaggcccagggaccaaagcccggacaaggcccgagcaccaggaccgc

SEQ ID NO: 71135 - RNA, 61 nt, Homo sapiens
cggggcggcggcgacgcggaccgcggacagcgaacccggagggggagaggcaccagcaaca

SEQ ID NO: 71136 - RNA, 81 nt, Homo sapiens
ccaccccggacggagaaacaggcggaccaaaccgccgcgcgcgagcaaggaaccccgggccccgccacccacgcgaccagc

SEQ ID NO: 71137 - RNA, 72 nt, Homo sapiens
agaaaaggacagaccagacggaggaggagccggacgggccaggcacacaacaaagaagaaaagggggaaaag

SEQ ID NO: 71138 - RNA, 77 nt, Homo sapiens
cagcagaaccgcagccaccggcacggggcgggcagcggcgccgggcacaggagggaagagcaagagccgcgcaagac

SEQ ID NO: 71139 - RNA, 41 nt, Homo sapiens
aagccaggccgccacgcggcgggccccacaccgaccggacg

SEQ ID NO: 71140 - RNA, 56 nt, Homo sapiens
cagcaaaacacgcccgagacccggccaccagccggagagagagacgggggcaccag

SEQ ID NO: 71141 - RNA, 51 nt, Homo sapiens
cacgcgcgccaggaccagcagcgaacacggagccaaggagaaccgaaggac

SEQ ID NO: 71142 - RNA, 72 nt, Homo sapiens
cggaacagcgggaagcaggaccagagaaagcgccgcaacgcccccagggccgcgagggcccggaacaggggc

SEQ ID NO: 71143 - RNA, 59 nt, Homo sapiens
ggggaggcgcggccgccccgcgggggacgcgggcagaggaaaaccgagagacaaaacac

SEQ ID NO: 71144 - RNA, 85 nt, Homo sapiens
ccccgagcaccgggccccgcgaccggggcccggggaaggcccgccgcccgccccagacaaggaaaggaaccagggaagacacaga

SEQ ID NO: 71145 - RNA, 37 nt, Homo sapiens
ccagaccagccgcaagagcacgggaggggagagagaa

SEQ ID NO: 71146 - RNA, 72 nt, Homo sapiens
gaaaaaaaggaccaccccaacaggaaacaagggagaaaccaaagggaggcggagagaacaagaggaaagccc

SEQ ID NO: 71147 - RNA, 87 nt, Homo sapiens
cgcaccccaacaagaggaaagacacaccaccaagaagccagcaagcggccagggaggagcggcaggagaagcaaagcaggaaacaag

SEQ ID NO: 71148 - RNA, 74 nt, Homo sapiens
cagccgaccgagcccaggagcgccacgcgcggaaggcagcgcccagcagcgcagacaaagggaggaaaaagaga

SEQ ID NO: 71149 - RNA, 77 nt, Homo sapiens
gacggccacagcagggaaacacacgcgcaaaggagaaccccacaccagaacccagccgccaccacaaggccgcggca

SEQ ID NO: 71150 - RNA, 77 nt, Homo sapiens
ggaagaccaacagacaaccaccaaaggggaaacagaaacaagggcacggaggggggggggagagggcaagaaccaac

SEQ ID NO: 71151 - RNA, 78 nt, Homo sapiens
gagaacggcgggaagagaagacacgagcacaaacggcgccaagaggacaacaaacgagccacccagagagcagccccc

SEQ ID NO: 71152 - RNA, 73 nt, Homo sapiens
acgcgaacgagacacggaaaaacaaaggaacgcaagggcgaggggaaccagaagaggccaaccagcacgaacg

SEQ ID NO: 71153 - RNA, 78 nt, Homo sapiens
ggagcccagggaagcagccgaccagccgcggagccgggggcagcacccagccaaacccaggcccgagaagaagaggaa

SEQ ID NO: 71154 - RNA, 80 nt, Homo sapiens
gcgcacgccgggggcgaggagacaaaaaagcccaaggcacagaaaacgaacgagaaacgagggagaagaagcagaaaaag

SEQ ID NO: 71155 - RNA, 81 nt, Homo sapiens
gccgagccagcgccggccgcgcgccgcgcccgcgccacagagaaaaaaagaggcgaccagcccgggggaaaagaagagaac

SEQ ID NO: 71156 - RNA, 68 nt, Homo sapiens
aaaacagcgcagacgcacaacccagcgggaaaaacagagcgccgacggccgcgagaaccgggcagagc

SEQ ID NO: 71157 - RNA, 56 nt, Homo sapiens
aaaaaacaaaagcagcccaagcaccaggagccagccaaccaagaaaaagaaccaca

SEQ ID NO: 71158 - RNA, 62 nt, Homo sapiens
gccgccgccggcgcccgcgagcgaaaggcaggagagcgaaagagagcggaaaaacgaccaaa

SEQ ID NO: 71159 - RNA, 74 nt, Homo sapiens
gccgaggcacagagaaccgaccagaacgcagcaacaaagggagagaacagcacacagaggcgcaaggggaagag

SEQ ID NO: 71160 - RNA, 77 nt, Homo sapiens
caaaagaaagaagcgagaggcaccaccacccaaacccggaaacagggaaccgacccagacacaccgcggccagaggc

SEQ ID NO: 71161 - RNA, 71 nt, Homo sapiens
ggggggcggggccgggccgccgcccgccccggccaccgccccgggaagcccggaaaggacaagggagagac

SEQ ID NO: 71162 - RNA, 78 nt, Homo sapiens
gcaggccggacccagagcccggcgccagacggacacccacccacgcgggccacgggccacacggggagacgcacgagc

SEQ ID NO: 71163 - RNA, 106 nt, Homo sapiens
cgggagaggcgggacaagccaagggacaggggggccgggggaacgaggaagcgcccaaggagaaggaagccaacaccggagccagaaagccgaacccacggccaga

SEQ ID NO: 71164 - RNA, 59 nt, Homo sapiens
cagaagccagaccggcgcgagaacaacggccggacaggggccacaccggaacccagaac

SEQ ID NO: 71165 - RNA, 68 nt, Homo sapiens
ggacagggagacacgaacaaagcaaaagcaaacagacccccccagccaaaggaccgaccaagggaccc

SEQ ID NO: 71166 - RNA, 59 nt, Homo sapiens
gccgagccgcgcgcggggacggccgggccggccgcaaaccagccggcgggcgccacaac

SEQ ID NO: 71167 - RNA, 78 nt, Homo sapiens
ggaagagaggagcgacgccgggggcgcagaccgggcaagaccacccgcaagcacgcgcaaacccgaaacagcgcgaag

SEQ ID NO: 71168 - RNA, 82 nt, Homo sapiens
cagggggcagcagcgcaccccaccgaccagcggacacggagagcgaaagcacaggcagcacaacaggagcaggcccagcaga

SEQ ID NO: 71169 - RNA, 75 nt, Homo sapiens
cccacccgggggggcagcgcacggaggagcggcgggccagacagcacagcaacagccgaaaaaggaaaaacagac

SEQ ID NO: 71170 - RNA, 82 nt, Homo sapiens
ccacaagggaacgggcggccccggagagagagccgcgcacgcacagacaaggagacaaaggacaggcagaaaccagaacagg

SEQ ID NO: 71171 - RNA, 82 nt, Homo sapiens
cgcgccccgccgcgccgcgcccaaccgcccccccccagaacgcggaaaaccggcccccgggaagcgacccgcgacggccaag

SEQ ID NO: 71172 - RNA, 74 nt, Homo sapiens
aacgaaacaaggaagagaaacagggagcccaaaagaaacagggcgcaggaaaagacgagccaggaaaagcaaca

SEQ ID NO: 71173 - RNA, 77 nt, Homo sapiens
cagcgcagagccagagaccacaggagcgagagcaaacagggaccaaagaacccaccgccccgaggaaacgagaagcc

SEQ ID NO: 71174 - RNA, 62 nt, Homo sapiens
accgccaaacccaaaccgggcccggcagcgacggagcggaggcccaaagaccaaaaaagaca

SEQ ID NO: 71175 - RNA, 79 nt, Homo sapiens
gaaagcagcccaccagcaggcgggacccgcaccggaaggccacgccaagcccggaagaagacccaacagacccaaaagc

SEQ ID NO: 71176 - RNA, 55 nt, Homo sapiens
agacaaaaagaccaggagagaaacccgcgaaaaagcaaaagcgcacagccagaag

SEQ ID NO: 71177 - RNA, 81 nt, Homo sapiens
gcggagcaccaggcccggaaagagcaggcacccggagcaaaagcccacgacgcccaccgaaaggggagcggaagagcccag

SEQ ID NO: 71178 - RNA, 75 nt, Homo sapiens
ccggaaaggaaaaagaagcccggacaccgggagagacaaaggggcaagaccagccgggagcccgacgaaagccaa

SEQ ID NO: 71179 - RNA, 75 nt, Homo sapiens
gggaagacccccccaccagggcaacgaggacaagcgagaagacgaacaagacgaaacggaggagcccaggaggaa

SEQ ID NO: 71180 - RNA, 71 nt, Homo sapiens
acagcaagccccgggacagggccgggaggcgccccacacgaggaggcacccgggaagcggaaaagcagcca

SEQ ID NO: 71181 - RNA, 79 nt, Homo sapiens
ggaacaaaccgaagaacagcgggaaagaaggcaaaacacggggcccagggggcccgggcccgcacacccggaagaggga

SEQ ID NO: 71182 - RNA, 76 nt, Homo sapiens
cgcccaacaccacccacccaccacggcccaaaagagaaacaggaaggagcaacgcgcaccgccaacagaacgcgca

SEQ ID NO: 71183 - RNA, 84 nt, Homo sapiens
gcgcgaagcggccaaagccgcccagacggccaccggcgggaggaacaaaaggccacggaggcaccacggagaaacaagaccagg

SEQ ID NO: 71184 - RNA, 83 nt, Homo sapiens
gcccagagaggggcaacaaggacaccaggccgccggccgccggaaggcgacggcgggcccaccgggccggcagcggccagaga

SEQ ID NO: 71185 - RNA, 71 nt, Homo sapiens
ggggaacgcagccaggagccccaaccgacgcccgaggcgggcgacaggagaagagagcggacccacaccag

SEQ ID NO: 71186 - RNA, 84 nt, Homo sapiens
gcaccagccgcccaagccgcacagccgcggcggcagcagcaggagagaacgggccagcggggcgagcagagcgcgcgaagggcg

SEQ ID NO: 71187 - RNA, 67 nt, Homo sapiens
acccaaagggacacccaagaaccggccagaagcagagggacagaagaagaagcgacagaacacaggc

SEQ ID NO: 71188 - RNA, 80 nt, Homo sapiens
gaggccgcccaacacgccaccacggcaaggaaagaggaggcccccccccacaaggcccgcaagcaccagccccacccgca

SEQ ID NO: 71189 - RNA, 51 nt, Homo sapiens
cagcgcagcagagcgccaagacgaaccagaagggagcaaagcccggaaaaa

SEQ ID NO: 71190 - RNA, 63 nt, Homo sapiens
cggaggagaaagacacccagcccccagcgcaccggaccaccaacagggggagcgaaaaagggg

SEQ ID NO: 71191 - RNA, 70 nt, Homo sapiens
ggagggcaaggagaaacgaagcgagcaacagcagaaaagagaagagacccacgcaacgaagcagccccca

SEQ ID NO: 71192 - RNA, 55 nt, Homo sapiens
ggccggacggggcggggggaacggacccgagcggggaccgagaaagacccccgag

SEQ ID NO: 71193 - RNA, 38 nt, Homo sapiens
caagagggaagcagacgagagcaagccgcagcagccac

SEQ ID NO: 71194 - RNA, 80 nt, Homo sapiens
caccaggcgaccgccaaccaagccagaccacaggaaagcaaacaaacggaacaaaaccaaagccacaagcaagcgaaaga

SEQ ID NO: 71195 - RNA, 76 nt, Homo sapiens
accagcagcaaggcagaaccaccccaggcacccccggccggcgcgaggccagccaggagaggagaaaaaacaccga

SEQ ID NO: 71196 - RNA, 87 nt, Homo sapiens
cgcgggggagccccgggagccgcacggaaaagaaacgagaccagaaggaaagaaaaggaagcaacaacaaagcccagagggagccaa

SEQ ID NO: 71197 - RNA, 74 nt, Homo sapiens
cacaaacagaaaaggaagaaagggacaaagagaggagcaggaaggggaaaaccgccgccacccaagacagcggg

SEQ ID NO: 71198 - RNA, 67 nt, Homo sapiens
aaacaccaggaccccggcacaacccgacgacacacacaggccgggcccaagaagcacgaagcggggg

SEQ ID NO: 71199 - RNA, 76 nt, Homo sapiens
cgccagaccacagcacagccgggaaggggagccaccagccccccgcccgaaaaacagcgaagaagaagaggaccca

SEQ ID NO: 71200 - RNA, 84 nt, Homo sapiens
cagcaccaaacccacagaggcacgagcccgccgcccgcagccaaccgccgggacgacggcggggacgccggcggagcaagcgga

SEQ ID NO: 71201 - RNA, 52 nt, Homo sapiens
aacgaacgacagccggcgaacaaaacgacgcagaacaagacgggcaagggga

SEQ ID NO: 71202 - RNA, 55 nt, Homo sapiens
accggggcaggcacccaggagaggacagcagccggcaaggcgcgcccccacccgg

SEQ ID NO: 71203 - RNA, 79 nt, Homo sapiens
cggaccccgcggcgggaggagccgccccgaggcggcgagccagcccccagaacccaacaccccgcgggaggaaacaaca

SEQ ID NO: 71204 - RNA, 52 nt, Homo sapiens
gaggacaggccagcgcggccaagacccgccgcaagggagccaggacgcagag

SEQ ID NO: 71205 - RNA, 83 nt, Homo sapiens
gcacgggccaggcgaaggcgccaacgaaggggcgccgggggaagaccagcccgcccagacccgaacgaccgaacagaggaacg

SEQ ID NO: 71206 - RNA, 56 nt, Homo sapiens
cccagaaccaccacacagaccaacagcccgggaagaccacaacaagcaagcagcag

SEQ ID NO: 71207 - RNA, 69 nt, Homo sapiens
agaaaccacaccaaaacacagacgggaggggagcaccaaaaccagccaagcagcagacgcaaagaaaag

SEQ ID NO: 71208 - RNA, 75 nt, Homo sapiens
acaggaagaagagagcggaacagcagagcgcacaagagaaagaaggcggaaggagggccaaaagaaaagcaaggg

SEQ ID NO: 71209 - RNA, 82 nt, Homo sapiens
gccccgcggggagcgcccccggcgcgagccccaggaaagacagaccaggagagcaccaaacgcccaggagcgagcgaaaagg

SEQ ID NO: 71210 - RNA, 74 nt, Homo sapiens
gaccgagaccggaccgagagcggaccgagagcgcgaaacgcacgagaagggagacaagcacaccagcaaccaac

SEQ ID NO: 71211 - RNA, 79 nt, Homo sapiens
cgccggagccagccagccgcccgagcaccagcaggaagggccgggccggggcacgggcccacggccccccaccgggcca

SEQ ID NO: 71212 - RNA, 51 nt, Homo sapiens
acggcaggaaggaggagacgaagaaaggagggcagcaggagcgacgccccc

SEQ ID NO: 71213 - RNA, 72 nt, Homo sapiens
gcgaggaccacagacacagagcccgccagcagccagggcggaacaggagacgcgggcgcgggccagaaaacg

SEQ ID NO: 71214 - RNA, 70 nt, Homo sapiens
aacgcggccgacaacagccggcgccgccacggaacaccggaaacacagacgcaaccgcccaggcagacag

SEQ ID NO: 71215 - RNA, 71 nt, Homo sapiens
ggagacccggggacccccgacgccaggcagcgcccccaaacgaacgccgggagccaggaaaggaccaaaca

SEQ ID NO: 71216 - RNA, 62 nt, Homo sapiens
cggcggccagagaagagcaagggcacgagcacggagcagagaaagggggaggcggacccggc

SEQ ID NO: 71217 - RNA, 71 nt, Homo sapiens
gaaacgaggacaaggaccgccgggcaagacccaaggggaccaaagccaacccagccaggcaacagcaacac

SEQ ID NO: 71218 - RNA, 64 nt, Homo sapiens
cggacccagggcagccggcccaccccagggcaggaggaacagaggagcggaaacgcaggaggag

SEQ ID NO: 71219 - RNA, 86 nt, Homo sapiens
gaaaagaaaacagagcgacgagcaagaagcagcccaaagcgaagacagacgcaaggagagaacaaggagcaggccaacggccagaa

SEQ ID NO: 71220 - RNA, 74 nt, Homo sapiens
gggaccggcgccagaccgacggcgggcggagaacggaaaagcaccaggaagcagagaggaccgcagaagggaag

SEQ ID NO: 71221 - RNA, 69 nt, Homo sapiens
acaaagccacaggagacccaaggaagaaaacacaacaggaccacaaggaccgccaaaacgcagagcacc

SEQ ID NO: 71222 - RNA, 74 nt, Homo sapiens
gcggaaaagcaaagacaagccgggaagagaaagcggcaaggagagcgaaaggaaaacaaggcaccaggaccaaa

SEQ ID NO: 71223 - RNA, 80 nt, Homo sapiens
gaagagaaagagaaaggacaagcaggaacccccagaagcagggcgagcgcgagcagccgggaacgaggccaacaagggag

SEQ ID NO: 71224 - RNA, 56 nt, Homo sapiens
gacggagaacgggaagccgcccggcagagggaagggccggagcgagggagagcagg

SEQ ID NO: 71225 - RNA, 71 nt, Homo sapiens
cagaagaggagagagagcaagagaggaagaagaacgacccgcccggggcagcaggcagccgccgcaaaggg

SEQ ID NO: 71226 - RNA, 85 nt, Homo sapiens
aagacagcagcgcacccgggaggagggagccaaggaagccaagaagcagaccccacgagcgaaagggaaaaaacgaaggaggcag

SEQ ID NO: 71227 - RNA, 79 nt, Homo sapiens
ccgaggccgcgggcggcgggcccgggcacgcagcacgggggcaggggccgacccagaacgccagcgccgcaaggaaaaa

SEQ ID NO: 71228 - RNA, 84 nt, Homo sapiens
cgccccgagcacgagcggacgcaggagacgagagcaccgacaccgccggggggcccacccccgggaccagaccccacaagaaaa

SEQ ID NO: 71229 - RNA, 76 nt, Homo sapiens
cgaggcacccgaagaagagaccaccaaccagacaggagaacggcggccccgagccaaggaaaaaacaaaccaagac

SEQ ID NO: 71230 - RNA, 79 nt, Homo sapiens
gaaccggaccagagagcggcagagggaagaaaagacaagcgcaaagccgaaaaacagcagcagaggaaagaaaagacca

SEQ ID NO: 71231 - RNA, 66 nt, Homo sapiens
agaaaaaccaccggacagaacaggaggcagccgccacaggcgagggggaagccaggaccgcccgca

SEQ ID NO: 71232 - RNA, 75 nt, Homo sapiens
aaaagggaaccacacgcaaagccagagggagcagcgaggacggaagacgggcaagagaaacgaaaagagacagca

SEQ ID NO: 71233 - RNA, 41 nt, Homo sapiens
cagagcgggccggggacggacaagaaggccaaacagccaca

SEQ ID NO: 71234 - RNA, 83 nt, Homo sapiens
cgcccccgcgccccgcaccagagcggggcaccgagccgggagaagacagaggagccagaccaagagacagcacaggcgagcga

SEQ ID NO: 71235 - RNA, 81 nt, Homo sapiens
caacacaccagccagcccgaccagggaaagaacgccggacaacagcggcgaagaaggcaaaccgaaggcccacagagaaga

SEQ ID NO: 71236 - RNA, 90 nt, Homo sapiens
ccggccgcgacagcgaacagcgcggccgcagacaagcagaccggaagaccgacggaagaccacaccccgagggagcccaggacaccacga

SEQ ID NO: 71237 - RNA, 76 nt, Homo sapiens
agaagaaggagcaagaaagaagagcgggagaggagccaaaggaagggagccgccaccaaaagcagacggaaaaccc

SEQ ID NO: 71238 - RNA, 75 nt, Homo sapiens
gcacgcgaagaccgagccagcagagaccaaaccgacagcagcagagaagaccaccgccccccggaaggaacacgg

SEQ ID NO: 71239 - RNA, 72 nt, Homo sapiens
ccccagggacagcaacagcggccgggaacgaccgaaacaccagaaacgaaggaggcccaaccacaaaaggag

SEQ ID NO: 71240 - RNA, 71 nt, Homo sapiens
ggcccgcgggaggacacacccccgcaaccggggggaccaaaccacagcaaaaacaccaggaaagacaacga

SEQ ID NO: 71241 - RNA, 74 nt, Homo sapiens
aaaagaagaacacgcccaaaacgacacagcaaacgacaaggcaggagggggaaaaacgcgaagaggcacacacc

SEQ ID NO: 71242 - RNA, 79 nt, Homo sapiens
ccgagggagggccgagccagccgcggccggaggagcccccaggccacgcagggcagggcccgcaccgcaggaggagcca

SEQ ID NO: 71243 - RNA, 78 nt, Homo sapiens
gacggacacgggagagaggccgggcgagcagcaggagcaccggcccaagaaacaggccgagaagcaggagaaaggaga

SEQ ID NO: 71244 - RNA, 68 nt, Homo sapiens
cggccggaacccacggacgagcaagagaagccagggccaggccacaaaggccccagcagccgagcgga

SEQ ID NO: 71245 - RNA, 86 nt, Homo sapiens
gcccaggaggcgccggggaacgcagggcgccgaggccaggaaagcgggaaggcgcgacgcgcccagaagaggccgacgggacgagg

SEQ ID NO: 71246 - RNA, 67 nt, Homo sapiens
gaccagagccgggaccccagccagagccccggggcccgcgcaaaaccaaccggaagggaaaggcgaa

SEQ ID NO: 71247 - RNA, 81 nt, Homo sapiens
ggcgggcccggcacccgccgcacaaacacgcagaggcaagaagagaggcaggagggccgggacgggagaggggccgaaccg

SEQ ID NO: 71248 - RNA, 80 nt, Homo sapiens
ccagaagggcccgggccgaggcgaccagcaggaggaaaaaaaagaaggagccaagagggcgggcggggagcgcggaccag

SEQ ID NO: 71249 - RNA, 64 nt, Homo sapiens
cgagcggaggggccaccgggaagggaaaacgacccccaggaaaaagaaaaggaccagaaacaca

SEQ ID NO: 71250 - RNA, 74 nt, Homo sapiens
cccgggagcgacgccgacagcgaagcgagcgaaagacccaaggagaacgacccacaccacagcaacccgaaccc

SEQ ID NO: 71251 - RNA, 99 nt, Homo sapiens
cccgaggcgaggcgcccggcccccgcccgccgcgcccagagaagggagcacgcacgcgcaagaaagcgaggaggccgggcgcaccccggaggcggcccc

SEQ ID NO: 71252 - RNA, 64 nt, Homo sapiens
gacaaaagaagagcagcacagacaccagccaggaccgaaaagacgcggccccaaaggaaacacc

SEQ ID NO: 71253 - RNA, 73 nt, Homo sapiens
aacaaagaacgagaaacccgggagagcaaccaccgaaacgggcgaaaaagaagaacagcaaaacacgaaaggc

SEQ ID NO: 71254 - RNA, 32 nt, Homo sapiens
accaacaggaaaagggagaccgccagcgcccc

SEQ ID NO: 71255 - RNA, 74 nt, Homo sapiens
cacgaaggagggcaggggccggaggccgggccaggccaccggacaggaaggcaggccccgaagccccagaacaa

SEQ ID NO: 71256 - RNA, 77 nt, Homo sapiens
cagaccggcacggcacgccccgcaagaaacgggggaagcagagcgcacaaagggaaagggccggagcgggagccagg

SEQ ID NO: 71257 - RNA, 62 nt, Homo sapiens
gccgccgcacgggaccgccgagccacaccggggggaacaccaggcaggaaaacaagcaacac

SEQ ID NO: 71258 - RNA, 70 nt, Homo sapiens
caggaccagcccaaccacccaacgggcccgggcaagcacaacgacaggaccccccggcggaggaaagagg

SEQ ID NO: 71259 - RNA, 43 nt, Homo sapiens
gaccggaggccagcccccaccgcggacgggaagaagggagacc

SEQ ID NO: 71260 - RNA, 79 nt, Homo sapiens
ggaacaggccggcggccccaccccccaggaaggaagacccacaagagaccacgcagagacagcacccaaccggcagcag

SEQ ID NO: 71261 - RNA, 82 nt, Homo sapiens
gaggcagaaggagccccagagccaagggggaccacagcagcacccccagcagcacacaggccagcaagacagaaccgccaaa

SEQ ID NO: 71262 - RNA, 35 nt, Homo sapiens
cgaggaggaaaggaggacgagcgggaaaacccaga

SEQ ID NO: 71263 - RNA, 72 nt, Homo sapiens
agcgagggggggcgcgccggaaaccggagcgcgcagcagggcgccggccgagcccgggaaaacgacagcagc

SEQ ID NO: 71264 - RNA, 89 nt, Homo sapiens
gcggacaagacccccagcacaacacaccggcaagccagggcgagcaggaagaagaacaagaacacacaagaaaacaggcgcagaaggag

SEQ ID NO: 71265 - RNA, 56 nt, Homo sapiens
cgaaaagacaccaaaacaaggaagaaaacaggacccaaaaggaaacacacaagaag

SEQ ID NO: 71266 - RNA, 68 nt, Homo sapiens
agagaagaagggaagaagcggagagacgagcaagaagacaaacaagggaaggccgcacaggccaagga

SEQ ID NO: 71267 - RNA, 86 nt, Homo sapiens
ccgggaccgcccggacccggccgggagaagcagcagagaaagaagacgaccccgacgcaggccaggagccgcggacagaagccgag

SEQ ID NO: 71268 - RNA, 75 nt, Homo sapiens
caagggcagcagcggcgaccccaggacgggaaaccaggaagacagaggagaagggaaagggaaggacccgagggg

SEQ ID NO: 71269 - RNA, 80 nt, Homo sapiens
cgggcagccccgggccaggccgcggccggggcaggagcgcagccaccgcccccggccgccgggggacagcgggcccacgc

SEQ ID NO: 71270 - RNA, 72 nt, Homo sapiens
ggagggagaacacaggaacaggcgcggggcgaaaacacagaaacaccaaagaaaagacaaagaacacaagag

SEQ ID NO: 71271 - RNA, 73 nt, Homo sapiens
gcggaaaaccgacacaacagggaaggagaaacaacaagaaaacggcccggacggaggaaaagggaagcagccc

SEQ ID NO: 71272 - RNA, 81 nt, Homo sapiens
gaacggcacaggaggccacacaggaagccgaggagagccgaggaggacaccaggagggggcagagagcgaaggagagccag

SEQ ID NO: 71273 - RNA, 31 nt, Homo sapiens
caacaacaaacaaacggcaaaccgaccaacg

SEQ ID NO: 71274 - RNA, 67 nt, Homo sapiens
ccaaacagagaaaaaaaaaagggggcaaaagagcaacaagaaacaaagccaggaaaacccagagcaa

SEQ ID NO: 71275 - RNA, 73 nt, Homo sapiens
gggcccagagaccgccagccagaacaagccgggagaggaacagcgcgccgggcgcacgaacagcagaagaccc

SEQ ID NO: 71276 - RNA, 73 nt, Homo sapiens
cgcagcaaaaagcagcaacagaaccgcggaggagccagcccaggaaccagcacaccaggacccgagaggaggc

SEQ ID NO: 71277 - RNA, 102 nt, Homo sapiens
agggggagcggcgcggcagagcgggcaggagaggccggcgccgccgaccgggaggggggggcggaggacgccaccccgggcacccggccacacccccccggg

SEQ ID NO: 71278 - RNA, 75 nt, Homo sapiens
ccgagaaagaaggaggaggggggaggcgaacagccggcgcccggacgcgaggggggaggcgacgcaccagaaacg

SEQ ID NO: 71279 - RNA, 59 nt, Homo sapiens
gccgaggcccacagaaagcgcaccacgggcagaaggcagagggggcgagggaggaaagg

SEQ ID NO: 71280 - RNA, 75 nt, Homo sapiens
gcgcccccacgcgggccgggggcgccggccacagcgaggcgggggcaaggccaaagggcaccgggacgagcaaac

SEQ ID NO: 71281 - RNA, 78 nt, Homo sapiens
cgaggggacccgcacaagaaaacccacgaagggaacacgacccccaggcaaaccgccccgcagcaccacccggcccgg

SEQ ID NO: 71282 - RNA, 78 nt, Homo sapiens
ggccagcgacgcaccgagaaaggaaggaaaaccgacgagacaccccccaggcacagccacaccccagcggccaaggac

SEQ ID NO: 71283 - RNA, 81 nt, Homo sapiens
aaagacgaagacgccagaaagacggaaagcaagaggcaaagaacagcggccagcgagggcgcgacgcgggcccccagccag

SEQ ID NO: 71284 - RNA, 78 nt, Homo sapiens
acaagggcagagccagcaaagacaagggaggcgaggacggacaaaaggaaacggacgggaggccagccagcagaagga

SEQ ID NO: 71285 - RNA, 73 nt, Homo sapiens
aggaagaacggagcacgacagaaacacagccgcagggcaggcagaacagacagaagacagaccagccacaccg

SEQ ID NO: 71286 - RNA, 83 nt, Homo sapiens
acccgcagcaaacaacccgcaaacgaaaaagaacgacagagcaaccaggaaagaagaggaggccagcgcgaaaccaagaagcg

SEQ ID NO: 71287 - RNA, 73 nt, Homo sapiens
ggaggagggccgaagggagcaccaaaaagcccgggcaccgcccagcgcccagaccaccaagacagagaccagc

SEQ ID NO: 71288 - RNA, 60 nt, Homo sapiens
ggaaagaaaaaaaggcgaaggggggacaagggcaagagcaacgagaggaggcgcaccgcc

SEQ ID NO: 71289 - RNA, 72 nt, Homo sapiens
ccaagaagacagagaccagcaagcagccaggccaaaaaccacaggagaaaagaggagaaggcagaagagaaa

SEQ ID NO: 71290 - RNA, 81 nt, Homo sapiens
agaagggggggggacagcagacccccaccacccaaccggcggcgcagacccggagcagagcccagccccaccgccagccgg

SEQ ID NO: 71291 - RNA, 83 nt, Homo sapiens
aggagaaaggggacagacgaaacggcaaaccaccaccaccagaagcaccacaaccgcagaggcgggagagacggcaggacacg

SEQ ID NO: 71292 - RNA, 56 nt, Homo sapiens
agcggcgccgcccgcagcccacagcccggccaggaacacaaggcccgaggagagga

SEQ ID NO: 71293 - RNA, 68 nt, Homo sapiens
acgaccagcgcgcaggagcagacaggcggcaggacagcgcaggcaaagaacacgaaaccagggccaga

SEQ ID NO: 71294 - RNA, 81 nt, Homo sapiens
ccacccccgggggaaaagaacgaggccagcagcacgaggaaggaaaaccgcaacggacaacggcccccaaggaggcagcac

SEQ ID NO: 71295 - RNA, 68 nt, Homo sapiens
accgaagcgaagcgccccccaagacaccagaaggcagcagcggaggggcgggcagagccaggggccaa

SEQ ID NO: 71296 - RNA, 82 nt, Homo sapiens
gccacacaacaaagggcaagcacgagccccaacaagacgaccacgcagagcccaaagcgggaagaagcagcggcgcagcgga

SEQ ID NO: 71297 - RNA, 51 nt, Homo sapiens
aagacaacgcagcggcagaaacaaggcgcaggacacacagcaacgaagcag

SEQ ID NO: 71298 - RNA, 71 nt, Homo sapiens
aaaacacagggcaagccaaagggggggaaccgccaaacccccccgaccacccggaaccacaaggccagagg

SEQ ID NO: 71299 - RNA, 62 nt, Homo sapiens
agccaaaagcggaaagaccaaccgcgcgaacgggacagacgcgagcaagccgaacgccagag

SEQ ID NO: 71300 - RNA, 68 nt, Homo sapiens
ccgccaacacccagccgcggagcgcaagcccccccgcccacccgagggcgggccaaggggcgggcgaa

SEQ ID NO: 71301 - RNA, 83 nt, Homo sapiens
gggacacccgggagcaggaaaggccaggagggggccacaccgaacccagccgggaggccaaggccagggagcgagcccaggag

SEQ ID NO: 71302 - RNA, 73 nt, Homo sapiens
gcccaaggggcccccgggcaccccggaccgcgcagccaccgcggcccccgcggacaccgccagaagcaccagg

SEQ ID NO: 71303 - RNA, 36 nt, Homo sapiens
gaccgccccccaggaccacaggaccaaccaagccga

SEQ ID NO: 71304 - RNA, 62 nt, Homo sapiens
agccaaggggcagcagcggaagcggaggaggcgagcaagggcgcgaggccacggacgcggag

SEQ ID NO: 71305 - RNA, 65 nt, Homo sapiens
aacaggcgccacaacgaccagacagcaacccaacaaccagggaccaggcagacgaccaaggagca

SEQ ID NO: 71306 - RNA, 83 nt, Homo sapiens
agagcgcggagcgggcggagcggcgagagcccccacggaagcccaccagaggcgaggggaggaggaagcgagcgaaaagaggc

SEQ ID NO: 71307 - RNA, 60 nt, Homo sapiens
gagggaaggggacccgccgggaggacgcggagccaacccccgcagaggaagaaagggaca

SEQ ID NO: 71308 - RNA, 68 nt, Homo sapiens
caccaaaaagcaaacggaccagaccgaccaccaaaaagaccccaacaggcccgaccaacaaagaaacc

SEQ ID NO: 71309 - RNA, 70 nt, Homo sapiens
accagggggagccaccccgcggggaaccaagaccaggacaaagaagacccggagagacaagccggaggac

SEQ ID NO: 71310 - RNA, 93 nt, Homo sapiens
acgagcacaaccccagggccgcacgggggcgaccaggccgccagccggggcaagaagaccgcagccaagggggaagcaccacaccccggaccc

SEQ ID NO: 71311 - RNA, 77 nt, Homo sapiens
gcccaacagaaaaagagaggagggagaacacagaaacccgccccggaggaggagagaaagaaagccagcgcaacgag

SEQ ID NO: 71312 - RNA, 73 nt, Homo sapiens
aacgagggggaagcggcccagggaggagggaggaaccgaaaggaaaccgaggacacagaaaagggcacagcaa

SEQ ID NO: 71313 - RNA, 78 nt, Homo sapiens
aaaggccggccagcgggacaggagggcaggaagagcgcagcggggacaaggccaccagcccccgggccaagagcagca

SEQ ID NO: 71314 - RNA, 79 nt, Homo sapiens
ggggaggggaggggagggggcgcggggaacgggagcggagagcgggagacaccaccgggccagaaccgaccagagcacg

SEQ ID NO: 71315 - RNA, 93 nt, Homo sapiens
gagggcaggacccgcaggccagaccccgggagcccagccaccacagacaggaaacaaagagccccgggaaaagaaaaaaaacgccccaaacgg

SEQ ID NO: 71316 - RNA, 78 nt, Homo sapiens
aaaaccaaacgaggagcgcccacacagacagagcccagaaaccaaacaccgaaccggagccggacgagcgggagagga

SEQ ID NO: 71317 - RNA, 77 nt, Homo sapiens
cggggcccggccgccggcccccagccgcgcccccgccgcccccgggcgcccggagccccagcaagggcaccaaagaa

SEQ ID NO: 71318 - RNA, 76 nt, Homo sapiens
gacacaagacacacgaaaagaacagaggaaggaaacaaggaaccgaccaagcaggccacgaaaaaggagaggagag

SEQ ID NO: 71319 - RNA, 78 nt, Homo sapiens
cgcgccacccccgaggcccgggacaagcagaagcaagcaaacgcacgaggaggcaaggaccgcgcacccggcagagaa

SEQ ID NO: 71320 - RNA, 72 nt, Homo sapiens
gaacggagccagagcggccggcccccagacaggcaaaccgacaccagcgacacaagcgcgagggaaccacag

SEQ ID NO: 71321 - RNA, 82 nt, Homo sapiens
ggccccgacgacagcgggccgggaaaagggcacgaggccggaaccgcccagccccggcccgagagagaaagggaaagaagga

SEQ ID NO: 71322 - RNA, 64 nt, Homo sapiens
aaaacccagggcacgaggaggagccccagccccggggaagaaaaccggaggacaacgaagccgg

SEQ ID NO: 71323 - RNA, 75 nt, Homo sapiens
ggcaaaacccgaaagagggcagggcccaccagccagcagcagaacgcaaccccaagcccacggagcccgcagaca

SEQ ID NO: 71324 - RNA, 76 nt, Homo sapiens
aagaagccaaagggacacggaacaagcgcgagaaggaacaaaccaggagaaaccgaacagaagaggcaccagggac

SEQ ID NO: 71325 - RNA, 114 nt, Homo sapiens
gaggcaccgggacggaccgagaccggaccgagagcggaccgagagcgcgaaacgcacgagaaggaaagggccgagaaagaagagaggaagaagaggaggaggaggaagaggagg

SEQ ID NO: 71326 - RNA, 59 nt, Homo sapiens
gaagcggaaagcagaagcgcgcagcaacggcgggagcaccaggccaagaaccccaaaaa

SEQ ID NO: 71327 - RNA, 74 nt, Homo sapiens
cagcccggggccggcgcagggcggaaggacaacagcccgacaaccaggacacagcagaagaaggcgcagaaaga

SEQ ID NO: 71328 - RNA, 78 nt, Homo sapiens
ggagacagacacacaaagcacgcaccagacacgacaggcgcacgcggggaggaagagaagaggcacgcaagaccagag

SEQ ID NO: 71329 - RNA, 54 nt, Homo sapiens
gcgggagcgaggccgccgcgcaagaaaggaaaggcaagggcagaaaagagggga

SEQ ID NO: 71330 - RNA, 57 nt, Homo sapiens
agaaacaacagaaacggcacccaaagaccaagaccaacaaacccaagaggaaagaga

SEQ ID NO: 71331 - RNA, 75 nt, Homo sapiens
cacggcgacgccccaggggaaaacccccgggaccaggcagaaacccaagaacaaccgaagcacaggaaacgaaag

SEQ ID NO: 71332 - RNA, 77 nt, Homo sapiens
cgccaccggcggcgggcacacagacacgcacggagggcccaacccacagcgccccaggaacgcacagccacccaacc

SEQ ID NO: 71333 - RNA, 34 nt, Homo sapiens
cagggagagacgacagggggaccacaggcagcag

SEQ ID NO: 71334 - RNA, 40 nt, Homo sapiens
gacaagacccgccagaacaggaaaccccccaggcaagagg

SEQ ID NO: 71335 - RNA, 52 nt, Homo sapiens
gcaaaagaggaggcaaacacacagggaagaagaccgaggaaagcccgcagag

SEQ ID NO: 71336 - RNA, 79 nt, Homo sapiens
cccggagccaaacgaccaagcagaaaagaaaccggggcgaaccccagaagaagagaaggcacaagagaggacccacaca

SEQ ID NO: 71337 - RNA, 79 nt, Homo sapiens
cacgacaggaccgccccagcccggggcgccccagggcccagggcccgcagccccagccagaggaggagcaccgcaccca

SEQ ID NO: 71338 - RNA, 58 nt, Homo sapiens
gaaacaggaacagcagaagcaagcaggggaccggccaagaagaagacaccccaccacg

SEQ ID NO: 71339 - RNA, 69 nt, Homo sapiens
gaccagagacagacaacaccacagcacaaagaaacggccgacaaccagcgggagaacgacaggaggggg

SEQ ID NO: 71340 - RNA, 87 nt, Homo sapiens
cgcccgcccgccccccccgggcgcggcggcggggaggcgagacggggcaacagagggggacgagggggcccaggcccggcgaagccg

SEQ ID NO: 71341 - RNA, 82 nt, Homo sapiens
gcgccgcacccggacggaccgccacgcgcccgggagacgcccgcgccgccgccaagacaagcaaacccaggaacacccggcc

SEQ ID NO: 71342 - RNA, 71 nt, Homo sapiens
ccgggcgcggccggggaccggagaaacgcggcgggcacagcaggggagcaaccagcagcagcacagacccc

SEQ ID NO: 71343 - RNA, 78 nt, Homo sapiens
agcaaacacgaggccacggggaaacacagcagaacacaggcaggcgagaacgaaaccaagaggcaaagagagaaccca

SEQ ID NO: 71344 - RNA, 75 nt, Homo sapiens
aaacgggggcggcaccgcgacacaggggcagcgaggagcgcagacaaagaaggcagagcagaacacaccagaacc

SEQ ID NO: 71345 - RNA, 72 nt, Homo sapiens
gagcgaaccaagagagaggacagcagcccaggagagaggcagaaacccagaagaaaccgcacgagaaaagac

SEQ ID NO: 71346 - RNA, 69 nt, Homo sapiens
cgggaacacccaacaggccccccgcgcgggcgcaagccaccgcaggccccaccccccagaaagaagagg

SEQ ID NO: 71347 - RNA, 60 nt, Homo sapiens
gcgcaaagcaagaaagccacgaagaccagaacggaacagcagcagcaccaaagacccacc

SEQ ID NO: 71348 - RNA, 86 nt, Homo sapiens
cacggagccagggaggcagcagggcagccacgaggggaccaaaccccacacccagggggacccggcagcacgagcgaagaagaggc

SEQ ID NO: 71349 - RNA, 72 nt, Homo sapiens
caaaaacacgcagggcgcagagccaaaaaagcagggcgcaggcgaaaccgggccccaacagaggagagccag

SEQ ID NO: 71350 - RNA, 71 nt, Homo sapiens
ccaggagaacgggggccccgggagggaaggggcggcaagggccaccggaagacaagaacgagccagcaaac

SEQ ID NO: 71351 - RNA, 62 nt, Homo sapiens
agaaaagggaaaaccccccaccgccaggagggggccacaccgaacccagccgggaggccaag

SEQ ID NO: 71352 - RNA, 71 nt, Homo sapiens
acccgccaggagagaagaacaagggaaaaccagacgagagacagaagacgaaagggcaagaaagagagcac

SEQ ID NO: 71353 - RNA, 72 nt, Homo sapiens
gaagaacacaccagccccaagaaaagcgcaggaaaaacccgaggacccaccgcaaggcgccccagcacgaac

SEQ ID NO: 71354 - RNA, 50 nt, Homo sapiens
cggccaggcgcacaaggcacaaacgaccgaagaccagacccacaccgggg

SEQ ID NO: 71355 - RNA, 72 nt, Homo sapiens
gacccggaaacagcaggcaagcaggacccgggaggaccaggagcgccccaaggaaggaagggaacacggacg

SEQ ID NO: 71356 - RNA, 82 nt, Homo sapiens
cgagaaagccccgggagaagcagcgccgcccggggcagaccaggcagacacagggccagaggaggcggaccggccccccaag

SEQ ID NO: 71357 - RNA, 63 nt, Homo sapiens
ggacaagccggcaaggagcggggagaggcaagcaacgaggaccaggcagacgaccaaggagca

SEQ ID NO: 71358 - RNA, 73 nt, Homo sapiens
aagacgcgcgggagcccggcgccggagcccaagggccccgacgagaaggcaccccgaagagccagggcgaaag

SEQ ID NO: 71359 - RNA, 56 nt, Homo sapiens
cgcccccacccgcggcagcgcacaacaaagagagcagggagagaagggggagaaaa

SEQ ID NO: 71360 - RNA, 70 nt, Homo sapiens
acagccagcccagcccgccccggcgccccaaccccggcagccccagacacaagcgggacggaagaggccc

SEQ ID NO: 71361 - RNA, 52 nt, Homo sapiens
gggacgggagcgaggaggagcggagcggccaaaacaacaggcccaggacgag

SEQ ID NO: 71362 - RNA, 74 nt, Homo sapiens
cgagagaaggacccacggcgcgcgaaggggccggaagcccccggccgcccaccgccaggaggaggaagaccacc

SEQ ID NO: 71363 - RNA, 72 nt, Homo sapiens
cagacgcagggcgcccccgcaggcaggaaaagcagacgccaaaggcagaagcaggcaggcccagccaaggag

SEQ ID NO: 71364 - RNA, 53 nt, Homo sapiens
aaagcacaacccaaccgggagaggagcagagacagccacaagcacgcgaagca

SEQ ID NO: 71365 - RNA, 73 nt, Homo sapiens
gcagcgaggaacacagcccaagcgcgggacccggcccggggaccgcccgcccgcgccgggggcaaaaggaccg

SEQ ID NO: 71366 - RNA, 65 nt, Homo sapiens
cgaacgccggaagcacaaggacaccccccaggcacagccacaccccagcggccaaggacgaacgg

SEQ ID NO: 71367 - RNA, 76 nt, Homo sapiens
gaaagaaacccacgggcagagcgaaaaaggagaggcaccggccccacgcggagagcgacacgggagcccggacgga

SEQ ID NO: 71368 - RNA, 109 nt, Homo sapiens
cgacccaccccccaacccagggagcggcgcagaccgagacccggacagggcaggaaacaggaacagagacagacccgggggcccccaaggagagggaagaagccaggca

SEQ ID NO: 71369 - RNA, 79 nt, Homo sapiens
cggagcaaacaacccagacgagcaaacagccagcagaaacaaagacgaaccaaggaaaacgacggagagaaaaaacggc

SEQ ID NO: 71370 - RNA, 64 nt, Homo sapiens
ccgacagaccaggcccaagcgaaaaagcgggaacgcaggacccaaagcagagacggggcgccgg

SEQ ID NO: 71371 - RNA, 70 nt, Homo sapiens
agcagaaggcaagcggacgaggacccacgaggaagcggccgcggcgaaccccagagccagcgggcagacg

SEQ ID NO: 71372 - RNA, 91 nt, Homo sapiens
gcaccgccgaggacccagcacaccgaggagcgccacagcagccaaacggggacgcccagagagccgaagaaggaggcggcggcggccgagc

SEQ ID NO: 71373 - RNA, 60 nt, Homo sapiens
cggggcgaggcggccgcggggcccgagcgcagaacagcagaccagaggcccaggccccgc

SEQ ID NO: 71374 - RNA, 73 nt, Homo sapiens
aaaagaaagacagaaggagcgggagcaaagccccagcagagacgaaaaaaccggaaaaacagagaagagacga

SEQ ID NO: 71375 - RNA, 78 nt, Homo sapiens
ggcgaaggaggcagaggcacagcgcaggacccagagagggaccagggccaaagaagagccggggggcaggcggacagc

SEQ ID NO: 71376 - RNA, 89 nt, Homo sapiens
gagcccacagaaggcagaggcagaaccacaggggacccagcaccggacgagacacagaggagcccccacaccacccgaacacgcaccag

SEQ ID NO: 71377 - RNA, 73 nt, Homo sapiens
ccacgaagggaggaaaagggcagggacagcgcaggcagcaggacacaccggccgaagacaaaccggagccaaa

SEQ ID NO: 71378 - RNA, 85 nt, Homo sapiens
cccgcccggaaggcaagcgcagcaacaacagagagcacggaccagcccaccgcacccagggaaaaaacagcagccacacgaagcc

SEQ ID NO: 71379 - RNA, 70 nt, Homo sapiens
ccgcgcggggacccgacgcccgcacgcacgagagaaacagaggacgaccgggaggacaagaagaggaaga

SEQ ID NO: 71380 - RNA, 55 nt, Homo sapiens
agaccagcggagcacggaaaggagcaccacgaagaaacgcccagaggagccagaa

SEQ ID NO: 71381 - RNA, 70 nt, Homo sapiens
ggagcgacggagcgaggggcaggccggaaacgcaggccaacaaaacgagcaaaagggaccggggcaaaca

SEQ ID NO: 71382 - RNA, 68 nt, Homo sapiens
aagcaaggagcaaacccaagaccacaggaagaaaggaacaggggcgcccgagagccgaagcacaggga

SEQ ID NO: 71383 - RNA, 73 nt, Homo sapiens
agcgggaaagaaagcagaggccgagacagacagggaagcgcagcagacggccagggaacgcggagacaaagag

SEQ ID NO: 71384 - RNA, 83 nt, Homo sapiens
gggggagaccccaccaccggcccccacgccccaggaggagcaggccagaccaagagaggcggggaccgcagcagcgagaaagg

SEQ ID NO: 71385 - RNA, 70 nt, Homo sapiens
aaaaagccccaaaagcacccccccaccggccaggaacagacagacaagagaagagaggaaaagaaacccg

SEQ ID NO: 71386 - RNA, 76 nt, Homo sapiens
aaaaaggaagaggacagcaaggagggccagacacacagcgaacgacagagaacaaccaccacgcggagacaaccga

SEQ ID NO: 71387 - RNA, 67 nt, Homo sapiens
aaaggaagggcaaacccacacggcaccaaagggagcggcaggggaggcgaagaagagcccggacaga

SEQ ID NO: 71388 - RNA, 39 nt, Homo sapiens
gcggggaagcagcaccacagcaaaacgggacaggccaga

SEQ ID NO: 71389 - RNA, 62 nt, Homo sapiens
cggggaaaaagggagcggggcggaagacggggagagccaggacaggacaggagaagagggga

SEQ ID NO: 71390 - RNA, 71 nt, Homo sapiens
agccccgcgccgccgaccccccggcgccgcgccggcggcggcacaacagacagaagcgcaacagagcagaa

SEQ ID NO: 71391 - RNA, 55 nt, Homo sapiens
acacgggaggcaggagggggaagggaaggaaagagagggccgaggcagacaaggg

SEQ ID NO: 71392 - RNA, 51 nt, Homo sapiens
gcagacacacaacccgacccgacgaaagccacagggagaccagcaaaaagg

SEQ ID NO: 71393 - RNA, 72 nt, Homo sapiens
aaccccgaacggggggagacgccacggaacgcaggaaggacggaaggcccggacaggaggcgacacaaggaa

SEQ ID NO: 71394 - RNA, 66 nt, Homo sapiens
gccgacaacccaggcaggacacccggacaaaaggccaggcaaaaaaggcagcgggccgccgcccgg

SEQ ID NO: 71395 - RNA, 67 nt, Homo sapiens
gggggccacgcaggggaggcgccgaggaagaccgcaggaaagcaggaaggcaagaaagccaaggacg

SEQ ID NO: 71396 - RNA, 38 nt, Homo sapiens
ggcgaagcgagaggacaggaagaagccaggaaaaaaag

SEQ ID NO: 71397 - RNA, 65 nt, Homo sapiens
gacacaaggcagcgcgcagggaaacccagacgacaaggaaggccaagggacccacgaccaaccaa

SEQ ID NO: 71398 - RNA, 79 nt, Homo sapiens
gacgacgggaggcggagggcgcccggcgaggagcgccaggcgagaacagaacgggggaaggacggggaaacagcgaaca

SEQ ID NO: 71399 - RNA, 73 nt, Homo sapiens
ggaagccaaaggcaacgacaacaacgcaaacgcccacacagcaagcacgggcagaagaaggaacggaaaaagc

SEQ ID NO: 71400 - RNA, 77 nt, Homo sapiens
gagacccccggagaaccgggcccagcagcacggggcagggaaaaaccaggacaaaaagcaaaggacggcgcaaggag

SEQ ID NO: 71401 - RNA, 75 nt, Homo sapiens
cacacccgagggcggccaccaagaggaccaagaacgcccagcccgcgggcaccggcagaaaggaggaggaaaaca

SEQ ID NO: 71402 - RNA, 87 nt, Homo sapiens
gggggaccccgcacacgaagagacgccgggcaccccaacacgacagagggccgcccagcagggcacaaggaggagaaggggccaggg

SEQ ID NO: 71403 - RNA, 87 nt, Homo sapiens
agccggccggggcccccccggccggcagggggacgggggccgccacccagaggagaaggccaccccgccggaggcacaggccagagg

SEQ ID NO: 71404 - RNA, 66 nt, Homo sapiens
gaggcccaggccaaaagaagagcgcgcacaccgaaccagagcccccaaagggcagaagagaaccgg

SEQ ID NO: 71405 - RNA, 63 nt, Homo sapiens
cccagggaagcgcagaaagcaggcgaacccgcggcgcaaaacggggcaaaaggaaaaaggaaa

SEQ ID NO: 71406 - RNA, 74 nt, Homo sapiens
aaagccgaggccacacaacgggcacccccgacgccccacccgcccaacaggggcaaggccgaggggaacagcac

SEQ ID NO: 71407 - RNA, 65 nt, Homo sapiens
aggacaggccaaacaccaggacaaaggcaacccaaacagcaggaagagaggaggaaacagccaca

SEQ ID NO: 71408 - RNA, 114 nt, Homo sapiens
aagcgaaggaagaagacgcagaagcaggacgacccgaaagacagccccacccaaacagcccgaggagcaccaacgcccagaaacagcaacacgccaccagcccgcccggagagc

SEQ ID NO: 71409 - RNA, 72 nt, Homo sapiens
ggccgggccagccacagcaccccgaaggcaacagaacggcagcccagacaccagcagccaccggaaaagcaa

SEQ ID NO: 71410 - RNA, 55 nt, Homo sapiens
acaggggaccccaaaaagcccggcccagaccaggacagcgcccgcgccgacccca

SEQ ID NO: 71411 - RNA, 54 nt, Homo sapiens
cccacagagggaaagaagaggccccagcacacggaacacagcacccacccacac

SEQ ID NO: 71412 - RNA, 73 nt, Homo sapiens
aagagcaagcgggggaccgaacaaggcaaaagggccccgacaagggaccgggcgggccccgcaggaaaccccc

SEQ ID NO: 71413 - RNA, 60 nt, Homo sapiens
ggcaggggacggaacaggagacccaagaaggaagccagaaaccacgaagaggcccgaaag

SEQ ID NO: 71414 - RNA, 74 nt, Homo sapiens
gcgggagaccgagaggcagggacgcgggagccacaaaaaacacgacaccaccaggacaaaggcaaaccaagccc

SEQ ID NO: 71415 - RNA, 54 nt, Homo sapiens
ggcggagcaggaggagggcgcggcccagaaggacggaacagccagggaggcgcg

SEQ ID NO: 71416 - RNA, 68 nt, Homo sapiens
ccgggcgagcccggagaagaggaagggacccggcagcaaccccaacaaacgccagaggcagccccccc

SEQ ID NO: 71417 - RNA, 74 nt, Homo sapiens
cgggcggggccgcgccacagccaagcagagggcacccaccggaccgagccaggcgacagagaagagagggacgg

SEQ ID NO: 71418 - RNA, 63 nt, Homo sapiens
ccacggggcgggacgggacgggggacagaggcggacccgaccaaagacgccccccggcccccc

SEQ ID NO: 71419 - RNA, 65 nt, Homo sapiens
cagcgcggaggggcgagccagcggccagaaagaccacacagggaaacgaccagggagagaccaac

SEQ ID NO: 71420 - RNA, 69 nt, Homo sapiens
agacggccaacacaacaaaaccaagaagcgacccggaagcgcaagcccccaacgaagaggagcgcgggc

SEQ ID NO: 71421 - RNA, 78 nt, Homo sapiens
gacaccggaagcgggaaaggccggcaaaaccagaaccaggacaaaccacaaacgagagggaaggaaggaaacagaaca

SEQ ID NO: 71422 - RNA, 80 nt, Homo sapiens
accgagcaagaccgagacacccagcgggaccgcccacaagcaaaagggagaccacaacagccaccaaacagaagaaccgc

SEQ ID NO: 71423 - RNA, 71 nt, Homo sapiens
gacgagcaaaggaagcgcgaacagcagcgcagggcgaagaagagcagagcagccgaagcggggacgacacg

SEQ ID NO: 71424 - RNA, 59 nt, Homo sapiens
gagaggaagacccagacagcggacggccgccaccgagggcgaaccggcgcgcgggccgc

SEQ ID NO: 71425 - RNA, 71 nt, Homo sapiens
acggcaccaaacacgagaccccagaggcagcggaccggggcccgggcgcaacggacagcccaaggaggccc

SEQ ID NO: 71426 - RNA, 61 nt, Homo sapiens
acggagaaagccagggaacacaaaggacagggaacaccaccgcacggcggagccgagaagc

SEQ ID NO: 71427 - RNA, 56 nt, Homo sapiens
gcgaagaaggaacgaagcaagagcacaggggaaaaacgaggaggcacaggaggaag

SEQ ID NO: 71428 - RNA, 81 nt, Homo sapiens
agcggccggggccgggccgagcacggggaaacgcccggcgaaaaacagccaagagaaaggagggcaaacagcaacgaagcc

SEQ ID NO: 71429 - RNA, 77 nt, Homo sapiens
cgccacgaacccggaaggacgagcaggagcggcacaccacaagcaacgagcgcaccgggggccaacacaccgcacgg

SEQ ID NO: 71430 - RNA, 82 nt, Homo sapiens
cccagcagagccaggaccacagaagaaggagacagggaaagaggagaaggaaggagagagagaagccaccagagaaacaaac

SEQ ID NO: 71431 - RNA, 73 nt, Homo sapiens
agggcacaaggccaggcccaagagccaggacgaacaggccgagaaacgagaccaaaagcggaaagcagcccgg

SEQ ID NO: 71432 - RNA, 78 nt, Homo sapiens
agccccaggagggcgaggaggagccggcaccaaccaggccacggagccaagaagcaagcagccggccacaaggaacca

SEQ ID NO: 71433 - RNA, 81 nt, Homo sapiens
gacagacgcgagcgacaagagaaggaggaaaggaaacaggagaagggcacccaagaagaccgaaggggagcaagcaggcca

SEQ ID NO: 71434 - RNA, 76 nt, Homo sapiens
ggggaggcgcccccgggggcccgacgcacacgggggcggacaccacaagaagggcgccaggcaccagacacgaaag

SEQ ID NO: 71435 - RNA, 64 nt, Homo sapiens
cacagacccccaccaagcaggggagaagcagaccgcaccaggcgggaccccgaaaaagcccaaa

SEQ ID NO: 71436 - RNA, 64 nt, Homo sapiens
gcggaggaggggcgccacacaccgaaaccccaaccaaaggaggcaaaaggcgcgggggaaagga

SEQ ID NO: 71437 - RNA, 68 nt, Homo sapiens
acaacacagaccaaagggaacgaaaacagccgagacaggaaagccaggcagcccggggcaagacacca

SEQ ID NO: 71438 - RNA, 82 nt, Homo sapiens
accggccgagaggaagacgagccgggaggaacggcccggaaacaggaggacggcaggaaccacagagaacagcccggacacg

SEQ ID NO: 71439 - RNA, 74 nt, Homo sapiens
gccggaggagcccccaggccgaggcaggggaagcacaaaagcgcacccgcgccagcgaggaccggaacggggga

SEQ ID NO: 71440 - RNA, 66 nt, Homo sapiens
ggcaaagacagcaggccaaggcagaaaagcagaaaaccaaagcccccggaaagagccgcccgagag

SEQ ID NO: 71441 - RNA, 82 nt, Homo sapiens
ggcaggagaagggccggcccggagggcagggccgacaccacaacgggcaggccaggccacacaagccccagccaaaaccagg

SEQ ID NO: 71442 - RNA, 72 nt, Homo sapiens
ggagcaacaggacagagcaaggggaggagcaaccaccgagacagggaccccgacggagagacaaagaagacg

SEQ ID NO: 71443 - RNA, 57 nt, Homo sapiens
aaagcggaccaaggaaccagcccagaagagcacagcgaaggggacgggaaaacacaa

SEQ ID NO: 71444 - RNA, 70 nt, Homo sapiens
gaaggaggcaggaaggaccgagaccaggaggaagacggcgaaggcccagaggccgagagacccgcgaacg

SEQ ID NO: 71445 - RNA, 74 nt, Homo sapiens
cgggaaagccgcaaaggccaagaacccaaagcaaggcgagacaaggggccaaccagccagggccaacaaacagg

SEQ ID NO: 71446 - RNA, 61 nt, Homo sapiens
cgggggagccccgggagccgcacggaggcggagcccgagaacaacccaggcagagcaggga

SEQ ID NO: 71447 - RNA, 81 nt, Homo sapiens
gacgggcgcaacggcggagcggaggcacccgaagcgcccggggagcacgagagaaacagaggacgaccgggaggacaagaa

SEQ ID NO: 71448 - RNA, 79 nt, Homo sapiens
gggacgaagaaagcacacagcaagaaggaggccacagcaaacgggaagaggaccccaccaggaaccacacgccagcacc

SEQ ID NO: 71449 - RNA, 119 nt, Homo sapiens
ggcgcccaggaaaagcgaacaggggcaccccgggaggggccgggccgcggcccagggcgagaggaagagagcgaaacaccagaggcgggacccagagacacaaccaacacagaaaagga

SEQ ID NO: 71450 - RNA, 60 nt, Homo sapiens
gagagagccaagcaaccaagccagcccggccaacgcaacagggagcccacgcaagagggg

SEQ ID NO: 71451 - RNA, 74 nt, Homo sapiens
gaaggaccaagaaccaggacacacagcaacgaagcaggggaggagggaagaccggacagcgagccaagagagaa

SEQ ID NO: 71452 - RNA, 65 nt, Homo sapiens
ggaaaccccgccccccccaggggccaaaaggcgcaagccaaggacacagcacacacacgggcgag

SEQ ID NO: 71453 - RNA, 73 nt, Homo sapiens
cggcacccccaggaagcgcgcccaaccggcagccagccggaacacccacacgagaaaaccgaagcggcaacaa

SEQ ID NO: 71454 - RNA, 76 nt, Homo sapiens
ccgggacgaccaccaggaccccagcaagaaacccagaacagaaaccgggcacgcaggaaccgcggcaggagacgca

SEQ ID NO: 71455 - RNA, 86 nt, Homo sapiens
cggcgagagaggcaggcggagccgaccgggccaggcgaacagacaagcagagggagccaaggcccagacagaggccagccagcaga

SEQ ID NO: 71456 - RNA, 64 nt, Homo sapiens
aagaaggcggacaaaggaaagccaaaacacgacaggcaacaccggaggaccaacggagcgaaga

SEQ ID NO: 71457 - RNA, 84 nt, Homo sapiens
cggaagcacagagagacggaccgaagaggcagcaggcgagcccccacaggaggcagccagccaggggaagcccccccaagaagg

SEQ ID NO: 71458 - RNA, 65 nt, Homo sapiens
caaacgcggaaagaaacagagcgcgaaaaggcgaaagcaaacccaaggagcgcgcccaccagaga

SEQ ID NO: 71459 - RNA, 58 nt, Homo sapiens
aagggaaagaggagaggcacccgaaagccaggccagaaaacagagagggaaagggcgg

SEQ ID NO: 71460 - RNA, 69 nt, Homo sapiens
aaagagagagacagacccggacgagagaggaggaaggaggggcccggggggaggaaaacagggcgagga

SEQ ID NO: 71461 - RNA, 84 nt, Homo sapiens
ccccacccccggcggcggcacgagcccgaccaggaggagggagaagaccaaagaagagagagcaggaccaccaccgcccacagc

SEQ ID NO: 71462 - RNA, 58 nt, Homo sapiens
ggacagagcccgggcgcgcagggaccagaggagacaacaaagaaacaaacagcacaag

SEQ ID NO: 71463 - RNA, 82 nt, Homo sapiens
caaaaccccagagccacgagcaagaagggaaggcgcagagcagagggaaggcaacacgagcggaagaacacacaccgggacc

SEQ ID NO: 71464 - RNA, 70 nt, Homo sapiens
agacgccacgcccagcagcacacacgagaaaaagcagccaaggaaaaccagaaagaaggagaaacagcaa

SEQ ID NO: 71465 - RNA, 82 nt, Homo sapiens
gcccggacaggaagggcaggcccgaagaaaaagcggggaaaacaaaaaaaagaaggagggaagagggggccaggaccaggcc

SEQ ID NO: 71466 - RNA, 58 nt, Homo sapiens
caagacgccgccccagcggacacaaaccagggcgcccccaaagaagcaggacccagac

SEQ ID NO: 71467 - RNA, 81 nt, Homo sapiens
cagcccggggcaaccggagccccccaggaggagaaccaggaggaacacggaggacccaaaccgaacaaggcaccaagaagc

SEQ ID NO: 71468 - RNA, 75 nt, Homo sapiens
ccaacgggagaggccgacggggacggaaggggaaccccaaggaacagagggcacgcagcaacgcagagagcaaaa

SEQ ID NO: 71469 - RNA, 71 nt, Homo sapiens
cggccccacacacacccgcacagcaccggggcgagacaagagcgagcaagccgccgcagcaagccagagac

SEQ ID NO: 71470 - RNA, 77 nt, Homo sapiens
gcaagcgaaaaagggaaaaggagagaaaagagcagaacgaagaaacccgcagggaaggaagacgagaaaggccacac

SEQ ID NO: 71471 - RNA, 73 nt, Homo sapiens
gaaaaaaaagggaagaggagacaccccgggggccccgagcaaaccagggggagagaaagacggcgagaacacg

SEQ ID NO: 71472 - RNA, 81 nt, Homo sapiens
agaaaagagcagacgccacggggccgcgccaagccagagcaaaagcgagaagcagaaagccaaagaaagaaagaggaagaa

SEQ ID NO: 71473 - RNA, 73 nt, Homo sapiens
ggagagcccggacacgcaacccagaccacccacaggagcaacagagacagacgcagccgaggaaggggcaccc

SEQ ID NO: 71474 - RNA, 86 nt, Homo sapiens
ccgcgcgccgcgcacccgcgccagcaccacgcccgcgccgcgccgccgccaccagcccaagagaaagcgcaccccccggaggcggc

SEQ ID NO: 71475 - RNA, 69 nt, Homo sapiens
ggaggccagaggaagggggaaaaaggaggcaaagggaacccggagcagcaggacaagcggaagcaagga

SEQ ID NO: 71476 - RNA, 70 nt, Homo sapiens
cgagacccgacccaaaggggagaaacacaggacaacggacccaaaggcaccaaaaccagagaaacaaacg

SEQ ID NO: 71477 - RNA, 79 nt, Homo sapiens
ggaggggaccgccgcgggaagagacagcgagcagagaccaggagaagagaagagaacagggaaaacaaaagaaagagcc

SEQ ID NO: 71478 - RNA, 70 nt, Homo sapiens
ggcgggaacacgaagacagcaacggcagggaaggagccaagacccaaggaccgccccagaaccacaacac

SEQ ID NO: 71479 - RNA, 74 nt, Homo sapiens
cacaaagccaagagaggacacccacaacaggaggccccccgggacccccacccagaggaacagccagaccaaaa

SEQ ID NO: 71480 - RNA, 60 nt, Homo sapiens
caaagaaaagaaggaaaggaaaaaagggccagagacggaaagaacaggccaagaaaagcc

SEQ ID NO: 71481 - RNA, 87 nt, Homo sapiens
aacccgccgcgaggggcgagaaaggcccacgcagcccccaagcaggcagcgggccccaggccggggcgagcgggcccgggagcggga

SEQ ID NO: 71482 - RNA, 85 nt, Homo sapiens
ggaggcggcagcggcgggccgaggcgaaggagcggccgggagcccgccgcgcggagcgagcaccccagccgagcccagagccggg

SEQ ID NO: 71483 - RNA, 41 nt, Homo sapiens
agaggcgcggagccccaggaggggacggggacaccagacgg

SEQ ID NO: 71484 - RNA, 76 nt, Homo sapiens
agggagacgcgacaccgccagcaaaaaacagagcgaagaagcaggggagaggccgagcgaagaaccagcggccaag

SEQ ID NO: 71485 - RNA, 107 nt, Homo sapiens
aggaagaagccagccacaccaggcgagaccccagggcccgcagccgcagcaggaagaagaacgccaagagcacgccccagcaacccaccacagaaaaccagcaaccc

SEQ ID NO: 71486 - RNA, 76 nt, Homo sapiens
agagaggccacccaccccacagaggcaaagcagcccggagcacccacgggccagaaaacaagacgaagaggacgag

SEQ ID NO: 71487 - RNA, 73 nt, Homo sapiens
cacagagggggaaagccaaggaaaaacggagagccacaaaaaaggaagcgaaagccggaggaaagagaagaca

SEQ ID NO: 71488 - RNA, 74 nt, Homo sapiens
cagagggacagccaacggagcgaagcagagccaggaacagagacgcaggcaagagcgcggaggagagagccaaa

SEQ ID NO: 71489 - RNA, 74 nt, Homo sapiens
ccaagaaaaaaaccacaaagcggccgaaacagaaaacaagagaccacagaaggagcgcagaggcggagacagag

SEQ ID NO: 71490 - RNA, 73 nt, Homo sapiens
caggcgggaaaccacaggaacaaggaccaacaccaaggaccagccaccgaaccacacaccaaagaaaaaagaa

SEQ ID NO: 71491 - RNA, 70 nt, Homo sapiens
ggaccgggaccagcaacacagaggaaaagaaagagcaacgaaacggaaaccaagccgccggggagaggcg

SEQ ID NO: 71492 - RNA, 85 nt, Homo sapiens
cgcgaggaaagggcgaggagaccgccaacgccggagggcacgcgaaagaccaagacagaccgacaaaaaccaaaacaaagaagca

SEQ ID NO: 71493 - RNA, 83 nt, Homo sapiens
gccgccaccacccacccggacacaggcgcaaggaagaagagacgccgcgcggcagacaaggcccggcaggcaaagcgggcggg

SEQ ID NO: 71494 - RNA, 84 nt, Homo sapiens
agaacagccaagagcgggcccgggccaaccgagggaccccaacaacaggagagagcaagcgagcagggagaaaggaaaggcccg

SEQ ID NO: 71495 - RNA, 77 nt, Homo sapiens
gccgaggggcggacgcggccgcccacccgcgggagcacccccaagccccccccccaacgcacccgaggaggccagga

SEQ ID NO: 71496 - RNA, 82 nt, Homo sapiens
cggggcggcccggacggaggggagcccacagagaaaagaagaaacaagggcaacgagaaaagaaaccaaacaaagaagaaaa

SEQ ID NO: 71497 - RNA, 106 nt, Homo sapiens
gggcggaagcggaaaacagagacagcgacgagacagccaagaggcagacgagcgagaagaaagcccgccgccggcagaacaagacaccccgccaacagcagaagcc

SEQ ID NO: 71498 - RNA, 78 nt, Homo sapiens
gcaggcagaccacgccacaagcacgcaacaaggaaacaccaacagagaggaaggacacaggcagaaacgaaaaaccgc

SEQ ID NO: 71499 - RNA, 70 nt, Homo sapiens
ggcccgcagccgccaccacccaggaccagaagaggacccaagccgacaggagggcggcaacaagaaagaa

SEQ ID NO: 71500 - RNA, 76 nt, Homo sapiens
ccaggccgcacggacggggggggagggaacaggcacgccccacccgccagccgagcccccgacgcagcacaaagcc

SEQ ID NO: 71501 - RNA, 75 nt, Homo sapiens
gagggaagcagccgcacagcacccgagaagagaagaaagcagcacagacccaaggccggacaaagcaaaccaaag

SEQ ID NO: 71502 - RNA, 85 nt, Homo sapiens
cgaggcggccaggggaccgggaggggcgaaggcgggcggcagaggcgacaggaacacagaaacgccccgggccagccgccaaggc

SEQ ID NO: 71503 - RNA, 65 nt, Homo sapiens
cgcaaaccgcggaaggcacagcgcggaacggagcagacaagggagggggagaaaacgcaaaacgg

SEQ ID NO: 71504 - RNA, 81 nt, Homo sapiens
cccacgcccccggagaggccgccacccacgccgagccgccagagacggcaggcccggccaaagaacgaaaacaaacggaag

SEQ ID NO: 71505 - RNA, 38 nt, Homo sapiens
cgcagagcaggccagaagagccacgaggagggagaacc

SEQ ID NO: 71506 - RNA, 85 nt, Homo sapiens
gacagagaggcgagcgcccggaggggagagagcggaggacagccgagaggagggcgaccagacgaggggagacggacgggggaga

SEQ ID NO: 71507 - RNA, 38 nt, Homo sapiens
aggcgcacaccacaccagacggggcgccagggccagac

SEQ ID NO: 71508 - RNA, 77 nt, Homo sapiens
gcgagcccggaggcggcgggaggaggcggcggccgaacagagagaagggcgggagaaaccaaggaaagagaaaagcg

SEQ ID NO: 71509 - RNA, 81 nt, Homo sapiens
ggcccccgcggcggccggcccccccccagggccaggcgccgccagaacggggacagaccagagcaggaccaaaggcgcaca

SEQ ID NO: 71510 - RNA, 80 nt, Homo sapiens
acacccgggcacagaggaggccagccgcgccaggcaccgcgaggaccccaacagcgggagggagcaaaggaggcgcgccc

SEQ ID NO: 71511 - RNA, 73 nt, Homo sapiens
caaaaagaaagaagagaaccagggggcacccgaggaggaagagggcagggcccacggaaagaagggaaacccg

SEQ ID NO: 71512 - RNA, 82 nt, Homo sapiens
gccaaccaaaaacaaagcgaaaaaccaagcccagcggcggcagcagcgaaagagaagaaccagcagaaagcaaaacagagcg

SEQ ID NO: 71513 - RNA, 87 nt, Homo sapiens
ccgggacccagcgaggccagagcgagagccccgcagggccgccccgcgcgagagcccagccccgccgcgcccgcccgccagccagag

SEQ ID NO: 71514 - RNA, 85 nt, Homo sapiens
cggaccagaccggaacgcccaagccccaccgcgaggcgcacccccgaaaggcggcagagggcaccgagcgcacaccagggaggaa

SEQ ID NO: 71515 - RNA, 80 nt, Homo sapiens
agagcagcccccccgcccagcgcccccaggccgccccggggccacgaagccccagcggccagagcacgacgagcccaggg

SEQ ID NO: 71516 - RNA, 75 nt, Homo sapiens
gcgccaaggcggaaaagcccaagaaacaaacagaaaacaacggagcacgcaaagcaagccggcaacgggacaagc

SEQ ID NO: 71517 - RNA, 68 nt, Homo sapiens
cagcagcgaacccgaacccgcaggcccccacacagcgaaggaggacgggaaagacccaaaggccacga

SEQ ID NO: 71518 - RNA, 73 nt, Homo sapiens
cgacaggacaagggggagcgaggcgacagaacacagaacacacaaggggagacaagcgcaagcagccagagcc

SEQ ID NO: 71519 - RNA, 87 nt, Homo sapiens
gaacagaaccgagccagacagggacggaggacgagcaaaagagcaccgaaccggagaccgaggaggaggaagaggaggaagaggaag

SEQ ID NO: 71520 - RNA, 37 nt, Homo sapiens
agggagagagaccaagcccagaaggaccgggacgagg

SEQ ID NO: 71521 - RNA, 80 nt, Homo sapiens
ggacacgagccccagaaacgaaaacagaggagcacccaccgaggggcgagcaaggcaaccagcaagaacaggccacgcca

SEQ ID NO: 71522 - RNA, 83 nt, Homo sapiens
aaagagcaacagcagggcaacaggagcacagcaagcgggagcaggcagaccaaaggaacagaagccagggccggaaaaccaga

SEQ ID NO: 71523 - RNA, 63 nt, Homo sapiens
gaaccggcacagcccccggcacccagccaaacccaggcccgagaagaagaggaaaacccacca

SEQ ID NO: 71524 - RNA, 71 nt, Homo sapiens
agacccagagagacaagacagaggaggcgcagacaacaaacaaaggaaagggcgccaacaaaggagagaag

SEQ ID NO: 71525 - RNA, 91 nt, Homo sapiens
cacagcaagcaccacgcggccacggaacaaccgaacgcaccgaggagaagaccaggaggcgggccaagggacggacggagagcgcgaggac

SEQ ID NO: 71526 - RNA, 34 nt, Homo sapiens
gggaccaaaagaggcccgggcgacgccaggagca

SEQ ID NO: 71527 - RNA, 83 nt, Homo sapiens
ggcacccgaaccggccgccgggacgagcagggggaggaacaaagcgaggaagggaagggaaggcgacaggcagcaaggccccg

SEQ ID NO: 71528 - RNA, 80 nt, Homo sapiens
gagcccaaaccccaggccaagcagccaccagcagcccccagagcgggaccacagacggaagaccagagacacagaaacgg

SEQ ID NO: 71529 - RNA, 70 nt, Homo sapiens
acaggcgggagggcagaaaccacgagcgagacagaagagcagcacaggggaagagacagaaggcaggaca

SEQ ID NO: 71530 - RNA, 58 nt, Homo sapiens
gcagaaccagggcggcggccagcgccacgcggaaccaagaccaggacaaagaagaccc

SEQ ID NO: 71531 - RNA, 78 nt, Homo sapiens
ccgggaccggacagggcggagcagcgcagaggaaaggcggcagccagcacccagccacaccccaccgcccagagaagg

SEQ ID NO: 71532 - RNA, 78 nt, Homo sapiens
ccgggagcgcagacagcaagggcggagcaccccccggcaacggccgacaagcaccgccaaagaagccgccagggaacg

SEQ ID NO: 71533 - RNA, 35 nt, Homo sapiens
ccccgcaccaacagcaggaccagagaaggcagaag

SEQ ID NO: 71534 - RNA, 73 nt, Homo sapiens
cgcgcgggaggccaagaccgcggggaggagccgcagcgccagcaccagccagcgaggaaagaggcagcgagcc

SEQ ID NO: 71535 - RNA, 72 nt, Homo sapiens
accaacacccgaggcggacgcagagacaggacagggacaagcgcacagcggagaaagcagcgcggccaggag

SEQ ID NO: 71536 - RNA, 74 nt, Homo sapiens
cgagggaagcggaaccaaccgggaaagcccggggcagggacggcagagaacgccggagcacgaagacaaagaag

SEQ ID NO: 71537 - RNA, 80 nt, Homo sapiens
cgcgaaggccgggacccggccccggcccacaggggggggcaaacccgagagaacgggcgagaaagccgagcacccccaga

SEQ ID NO: 71538 - RNA, 67 nt, Homo sapiens
ggggggggcaaacccgagagaacgggaaaacgcaaagacagcaggaaacggaaggaaacaacccaga

SEQ ID NO: 71539 - RNA, 74 nt, Homo sapiens
ggacccggccagcgacgcaccgagaaaggaaggaaaaccgacgaacacaaacaacacgacccaggggaagaacc

SEQ ID NO: 71540 - RNA, 77 nt, Homo sapiens
gagagccacgcaaaccggcccgaaggacccgcaacaggcacgcagcagcacacgagaagccaaggcacagcaggaga

SEQ ID NO: 71541 - RNA, 30 nt, Homo sapiens
gcagacggaacagaaggaggcacaaagaga

SEQ ID NO: 71542 - RNA, 65 nt, Homo sapiens
ccagaggagacgagcccagacaaaagaggaagcccgaaagagagacaaacaggaaacccgggaga

SEQ ID NO: 71543 - RNA, 65 nt, Homo sapiens
ggcccccagagggggaagcagaggagacccccagaacccgcggaggacgagaagacaaagccaga

SEQ ID NO: 71544 - RNA, 78 nt, Homo sapiens
gaaaccaggagccacggacaagaccaaaagaacacgaagagagggccggcacccgccggaaccgagcaacgcgagcag

SEQ ID NO: 71545 - RNA, 76 nt, Homo sapiens
cacagccgaaaagaaaaggaagccaggggagacagcccgaagggacaacccaaagacggccaccgcgcaggaccag

SEQ ID NO: 71546 - RNA, 83 nt, Homo sapiens
gcgaccccccgacgcgggcccggacgcaccccgcggacgcgcacgcgaggaaaacagcagaagaaaaggaaagaaggcaacaa

SEQ ID NO: 71547 - RNA, 60 nt, Homo sapiens
agaaccgaagaccaggaaaacaaccaacacaaacaacgacacaggcacagacccgagaaa

SEQ ID NO: 71548 - RNA, 81 nt, Homo sapiens
gggggcccgcgggccgccgcaggcaccccccggccggcgccacaggcgcacagcaaggcgccaccggaagaaacgggaggg

SEQ ID NO: 71549 - RNA, 84 nt, Homo sapiens
cagccgcccaccccgggccacgagccacgcaggacaggggagcgcgaccaggagaagagaggcccaagaacgagcccacaacca

SEQ ID NO: 71550 - RNA, 76 nt, Homo sapiens
gaagcaaacgcagacaaagaacaaggccagaggcccacggacggacaggcagcgcggccaggaaagaaccagacac

SEQ ID NO: 71551 - RNA, 74 nt, Homo sapiens
ggacaaggaccggggaccgagaggccggaggaggcggaggccagccgagacaccacgacgccacacgacagaga

SEQ ID NO: 71552 - RNA, 64 nt, Homo sapiens
cagaccccagaagagacggaaagccaagaggcccaaggacccgagggcccagccagacccaccc

SEQ ID NO: 71553 - RNA, 76 nt, Homo sapiens
gagcggcgacgcaagacaaagaagggagaggaacaccagggagcgcaaacccggggaaggcacagaagccgacaac

SEQ ID NO: 71554 - RNA, 83 nt, Homo sapiens
ccagaaaggcgcaccgcagaacgagacgggcacgggaaggcaccgcgggcaccacacgcgacacggagccgcgaacgaagccc

SEQ ID NO: 71555 - RNA, 79 nt, Homo sapiens
cccggccccgaccccgcggccggacgacccaagcccgcgagcaggagagggccaacaggaggggagaagcggcgggaga

SEQ ID NO: 71556 - RNA, 43 nt, Homo sapiens
ccacccgcgccgcgacccgcccgcgggaggaccagacccagca

SEQ ID NO: 71557 - RNA, 80 nt, Homo sapiens
cagccccagcccggccccaggaacggaacagcaagccaaagagcggcgggccacccaagaagcaggaggaccagcaccca

SEQ ID NO: 71558 - RNA, 47 nt, Homo sapiens
gcaccgggaaggggagcgggggccgcgcaagcaccgagaagaacacc

SEQ ID NO: 71559 - RNA, 75 nt, Homo sapiens
gcggccgggcggggagcgcgagggggcccgccccaggcgggagcccgccggaggggaccacccaacacacagcgc

SEQ ID NO: 71560 - RNA, 84 nt, Homo sapiens
caacacggcgcggaaaacgcgaacggggcaagcggaaggacagccgagcagaacccagaaaacacgaggcacaggccagcagga

SEQ ID NO: 71561 - RNA, 74 nt, Homo sapiens
ccgaaagcggcaaagagaggacaagcccacacaccagccagaggaaaaacagaacccaacaaaccaaaaacaac

SEQ ID NO: 71562 - RNA, 72 nt, Homo sapiens
cgggagacacggccagacgcccccagagaaaccagaggcaagcgacgggaaggaccaccaaacccagccagc

SEQ ID NO: 71563 - RNA, 82 nt, Homo sapiens
agggacggaagccaagaagggcacaggcacgcagcacagacagcaggcaagccgcagcggcgccaggaccgccggggacgga

SEQ ID NO: 71564 - RNA, 75 nt, Homo sapiens
cacacaacccagaggaaacggcaggagaccaaaaaggaacaagaaagaacaaaaccacagcccagggaggacaac

SEQ ID NO: 71565 - RNA, 77 nt, Homo sapiens
gagcagaaggccggagagagggggggggcggcaggacccggagagaccgaggagccccaggaaggcccccgcagaag

SEQ ID NO: 71566 - RNA, 79 nt, Homo sapiens
cgagaccagcggaccgggccggaggagggaggaggagggagagaagaagggagccagccccaggccgcgagccggacaa

SEQ ID NO: 71567 - RNA, 53 nt, Homo sapiens
ggcaccggccgaggcaaagccaaaaagagagaaaaaccagaaagaaaacagac

SEQ ID NO: 71568 - RNA, 68 nt, Homo sapiens
cgcagggccgcagcgggagcggacggcgagcgcgagcggcgcgagaaaaacaaggaaacacgcagaag

SEQ ID NO: 71569 - RNA, 83 nt, Homo sapiens
cccccaccccagaagaggaggcaaaggggcaaggacccaacccaggagaaaaagggcgcccagggcacagccacacccgaacc

SEQ ID NO: 71570 - RNA, 76 nt, Homo sapiens
gccaccgaaggcacggacagggacagaccagggacacaacgggaaaccggaccggggccagagaacaagcccagac

SEQ ID NO: 71571 - RNA, 64 nt, Homo sapiens
ccccgcccgaaccgagggaacagggaccaagaaaggcccagggaccaaagcccggacaaggccc

SEQ ID NO: 71572 - RNA, 52 nt, Homo sapiens
gggaccccggagcccagaagacagagggcgaggaagcgaacgaacaggccaa

SEQ ID NO: 71573 - RNA, 89 nt, Homo sapiens
ccgcggccagcacggcaacgcagcccgaggacaagcggcgcggggccccgggagacgggcgggagagagcaccaacccgagaacagcga

SEQ ID NO: 71574 - RNA, 73 nt, Homo sapiens
agcgcacggcgagaaacagccaacacaaaaagcggacagggcagaccgccagcagcacagcaagccacagaga

SEQ ID NO: 71575 - RNA, 66 nt, Homo sapiens
agaaaccagccagagggaccagaccaaagaacagaggcgcaacgaagcgccccccccgaggccaga

SEQ ID NO: 71576 - RNA, 60 nt, Homo sapiens
caaacagagagaaggaaccacccacgcaggcaggacacgccaccgcccaccaggaccgga

SEQ ID NO: 71577 - RNA, 74 nt, Homo sapiens
aaaaaggaccacgaagacaacaggcacaccccaaccccacaaaagacgagagcggagcggccccggggaccacc

SEQ ID NO: 71578 - RNA, 62 nt, Homo sapiens
aagaggccgccgcggagacccagcgcacgggagcagccagaagagcgaaaaccccagcggaa

SEQ ID NO: 71579 - RNA, 74 nt, Homo sapiens
cgccgccacccccccccagcaggggaaaaagaaaagggcgaagacccgaagcagcgcaggaacagaagagaaga

SEQ ID NO: 71580 - RNA, 72 nt, Homo sapiens
acacgacgaggagcgaagcaacaaggaaacgggacagaggaagaggagaaagaacaagggcgaaggccagga

SEQ ID NO: 71581 - RNA, 66 nt, Homo sapiens
acagagacccaggcgacagacagccacaagcgggccacacccaaaaccggacaggcagggcaagaa

SEQ ID NO: 71582 - RNA, 80 nt, Homo sapiens
agccccggagaaccacccggaggagacggggcagacaacggagcccggggcgggaggagccagcgcaccggagcagaccc

SEQ ID NO: 71583 - RNA, 70 nt, Homo sapiens
caacagcgggcaaaccagaagacagaaggaagaaacagagcacaaaggcaagcagagacggaaaagggaa

SEQ ID NO: 71584 - RNA, 62 nt, Homo sapiens
ccagaaaaaacgaggcaaagcgacgccagaaccaggcccaaaacgagaagcaagaaaggaca

SEQ ID NO: 71585 - RNA, 68 nt, Homo sapiens
aaacaggccaccaagccaaaacgcgcaaaaaccagacaccccacaccaccacccagacgaccaaaagg

SEQ ID NO: 71586 - RNA, 73 nt, Homo sapiens
ccggagaccacaaagccgggggcgaaggaacaaaagacgcaagaaaacgagagaaaccaagagagagaccgga

SEQ ID NO: 71587 - RNA, 58 nt, Homo sapiens
aagacgaagaagcagaagcgcgccagggcagcaggagagagggagaccggcgacggcc

SEQ ID NO: 71588 - RNA, 74 nt, Homo sapiens
ggcgccaccagggcgcggacggggcgggcgcaggacggaccagcacgcagcaacgcagagagcaaaacccagac

SEQ ID NO: 71589 - RNA, 60 nt, Homo sapiens
gccacaggggcacgggaggccagcagcgggaaggggccggaagagccacacagaccaagg

SEQ ID NO: 71590 - RNA, 74 nt, Homo sapiens
accggaacggcggcgacaaggggcccgaacagaggggagaagggaaagacgggaacgcaccaagaaggaaaggg

SEQ ID NO: 71591 - RNA, 75 nt, Homo sapiens
gaaacagaaaccaagaaccaacaaccaaagaaaacagaacagaaaaggaaggagccgggccccggagagcacagg

SEQ ID NO: 71592 - RNA, 77 nt, Homo sapiens
ggcccacaacccgcagagaccacggcgcgccccggccggagggaagcccagaggcacggggcagaacaccaacagag

SEQ ID NO: 71593 - RNA, 106 nt, Homo sapiens
aaaacgcagggaagagaggacagcaggagggcggagacaacagaaacagaaacgagggaaacaggcaaggacggggacacaagaccagccagcccagccacagaga

SEQ ID NO: 71594 - RNA, 36 nt, Homo sapiens
cgcacaggaaggaaaaagggaagccgagaacgagca

SEQ ID NO: 71595 - RNA, 49 nt, Homo sapiens
agcacacccccagaaggacggggaagggggggcaggaggggaccgagag

SEQ ID NO: 71596 - RNA, 75 nt, Homo sapiens
gcgcgaccggccgcgcgcccccaccgccgagaccggaaccaccgaagaccacaagcaggccccgggagcaagcgg

SEQ ID NO: 71597 - RNA, 78 nt, Homo sapiens
gccggaggagaagcaagaaggcccggacacagcaaaccgggccacagggccagcccgcaacccccggcgaccacgggc

SEQ ID NO: 71598 - RNA, 57 nt, Homo sapiens
acgggaggcgacaggaaggggaggagcacagaacgccaggaccaaaacagggagaaa

SEQ ID NO: 71599 - RNA, 81 nt, Homo sapiens
cgcacacggccccgaccggcgggccccgggcacaccaacaagccacgaccggggagcagcccgacaggacggcaccaccca

SEQ ID NO: 71600 - RNA, 61 nt, Homo sapiens
gacgccaagcaccggcagcccacacccagacagcacccaagaaaacccaggccgcgaagga

SEQ ID NO: 71601 - RNA, 79 nt, Homo sapiens
gcccgccaccccgcgggcaacgccggcacgccgcccgggcgaggaggaggccgagaccagccaggggagacccaggggg

SEQ ID NO: 71602 - RNA, 76 nt, Homo sapiens
ggagaaggagaccaaaccggaaaccgccaaaaccccccacacaccccgccggggaacagaaccgaggagcccagcc

SEQ ID NO: 71603 - RNA, 94 nt, Homo sapiens
ggagagagaggcggaaggcgaccggccgccgcccagacccacgaagagaagggaaggaagagccccgaggaagagaggaggaaggggaggaagg

SEQ ID NO: 71604 - RNA, 57 nt, Homo sapiens
acaggccgccaacagacagggcggagggcgccggccgagcccgggaaaacgacagca

SEQ ID NO: 71605 - RNA, 72 nt, Homo sapiens
gagggcgcagaaccccgaagagcgaaaacacaagggcggccccaccagaagcgacgagacaaggcgcgggcc

SEQ ID NO: 71606 - RNA, 72 nt, Homo sapiens
aaaggcagcccccaaggcaacagggagggacacacccaagcacggaccaaaggaacgaagaggagacaagaa

SEQ ID NO: 71607 - RNA, 71 nt, Homo sapiens
aggaccggccggcacgccgcccggggccagacccccgccaaaccaaacaggaagcacccaccagccaagag

SEQ ID NO: 71608 - RNA, 85 nt, Homo sapiens
cggccgcgacccccggcaacccggagaaggcacagagcggccgcgccagcgagggagcgcggccacagacgcacaggcagagaca

SEQ ID NO: 71609 - RNA, 74 nt, Homo sapiens
aggaaagcacagcagaaacacaaagcagcccaaccaaaggaggaacgcaaggaagaaaagggaacgccaccgcc

SEQ ID NO: 71610 - RNA, 80 nt, Homo sapiens
gcacgacgggaccacaaggcccgcaggagcggggagcgaaccggcgcaccggaaccagagggaaccaagaccaggaagcg

SEQ ID NO: 71611 - RNA, 80 nt, Homo sapiens
gaagaccccggcgcgggaacgcaaaagaagggagggggaggagcaccccccggaaggacggcgaggaggagacccacagc

SEQ ID NO: 71612 - RNA, 89 nt, Homo sapiens
ccagaacagcacaaccccacgagcccgacggggggacagaccccagccccgagaaggggaggcaagcccagagcgggcagccaccgcag

SEQ ID NO: 71613 - RNA, 56 nt, Homo sapiens
ccaccgcggccagccacgggacagccgcggcgagccgcacagggcaacacacgcac

SEQ ID NO: 71614 - RNA, 73 nt, Homo sapiens
cgggacaccccggaagcgggaaagcccaccagccggacacccgaagcagaagcgcggccaaaagaggggaagg

SEQ ID NO: 71615 - RNA, 68 nt, Homo sapiens
ggcgagcagccaggccaggagaggcgggaaaacggcacaaggcgacgagggagggcagaccgccaggc

SEQ ID NO: 71616 - RNA, 71 nt, Homo sapiens
aggcgccccgggccccagcccagcggcgcgaagcgaaaccggggccaaggcccagggagggaggggaaaaa

SEQ ID NO: 71617 - RNA, 81 nt, Homo sapiens
aacaccaaaacgacaagaccaagacgcgcgcccccaaaaaagaagagaaccgagcagcggcaagaaacagaagaaaagaaa

SEQ ID NO: 71618 - RNA, 73 nt, Homo sapiens
cccacaagggcaaggcaacagagagaggacggaacacagcaaagcacaagcagaagggccaggacacagccaa

SEQ ID NO: 71619 - RNA, 58 nt, Homo sapiens
ggcagcacggccccggagcaaaccgccaccacagcgcagacaaagacagagaagcaca

SEQ ID NO: 71620 - RNA, 74 nt, Homo sapiens
aagcgagggagcaccccgccggccgcccagagagagacccccgaagaagaaacagccaaacaagaagaagagaa

SEQ ID NO: 71621 - RNA, 59 nt, Homo sapiens
ggacgagccccaccagccccaagagaagagggacaccccaaaacagcacagggaacacc

SEQ ID NO: 71622 - RNA, 74 nt, Homo sapiens
aggagcaaacgaaacaggcagaagaacgaagaacacacaacgggaggagaacaccgacggacccgccgcaccgg

SEQ ID NO: 71623 - RNA, 80 nt, Homo sapiens
ccgcacaaaaacaaaagaagccagaggcgaaaacggaagagacaagcgcaagcagccagagcccgggcgcaaagaaccag

SEQ ID NO: 71624 - RNA, 70 nt, Homo sapiens
gggacagggagagacgggcacagggaagcgccggaaaaaccaaagacagggcaccagggccaggaggcga

SEQ ID NO: 71625 - RNA, 74 nt, Homo sapiens
gccggcgcaaagaagcccaagccaggacggaccccaagcaagccggaccccaggaaaggaaaaggcaacagccc

SEQ ID NO: 71626 - RNA, 53 nt, Homo sapiens
cagacgcagggcgcccccgcgacaggagcaagcaacaggacaagagccagggg

SEQ ID NO: 71627 - RNA, 75 nt, Homo sapiens
agaggagagaggaacccgaagaagaaaggacgacagccagagaggcaaagggccaggcgaaaagaggcaagaagg

SEQ ID NO: 71628 - RNA, 61 nt, Homo sapiens
ggcagaggcgggagagccaccggccacacgcgaaccagcgagagggaagcacgagaccgag

SEQ ID NO: 71629 - RNA, 105 nt, Homo sapiens
cccggccggccagaacaggcggggggggacggacccgcaccagccggccccagggaacccgagaaggccaacaaaagagcgaggaaccaagaagaggagacaaga

SEQ ID NO: 71630 - RNA, 73 nt, Homo sapiens
ccgcagcgaaaacccaacgagaccaaagaggcaaggggaacgaaagaacacaaacggaggcaaagaagaccca

SEQ ID NO: 71631 - RNA, 51 nt, Homo sapiens
aaggggagaaggcaggcaccacaaaaaggacagaaaaagcaagcccagccc

SEQ ID NO: 71632 - RNA, 69 nt, Homo sapiens
gaacacccgccgcgcaaaaggaacgggacccgaacaacgaaaaacaagcgaacagagaaaagagaaaaa

SEQ ID NO: 71633 - RNA, 79 nt, Homo sapiens
gaagcccggcaccgccgcccacgagcgaagcaccgcagccgggcagacacacgacgagaaccgggaccaaggccgagcc

SEQ ID NO: 71634 - RNA, 65 nt, Homo sapiens
cacaaccagaagcggaaacaagcggaaaggacacagacagcaaccggaaagggccaaccggcgca

SEQ ID NO: 71635 - RNA, 74 nt, Homo sapiens
ccgacgccaggcagcgcccccaaacggcaacaaaaagcccgcccagaagccaagcacggaaggaaaaaacacca

SEQ ID NO: 71636 - RNA, 60 nt, Homo sapiens
ggaacaccggagcccgcgggcaggacaggacaacagaaaaacacacacagggggaagaac

SEQ ID NO: 71637 - RNA, 68 nt, Homo sapiens
aagagagaaccaagacgaaaacaaacggaacggcagcggcggccgcgcccaccggcagggaagacacg

SEQ ID NO: 71638 - RNA, 84 nt, Homo sapiens
cacagagagcggagcgccaacaccccaggcagcacgggaaagaaaacccgcagcccaaagggcagaagaagaagaagacgcaag

SEQ ID NO: 71639 - RNA, 77 nt, Homo sapiens
gcagaagcaaaacaggacgacccgaggaacagagaccgaggaggagaaggggcggcccggaggccgagaggagcgga

SEQ ID NO: 71640 - RNA, 61 nt, Homo sapiens
gcccagacgcaggaccaagggacaagagaaaaaaagggcgggcgaacaaaaagagcagagg

SEQ ID NO: 71641 - RNA, 77 nt, Homo sapiens
gcacggggccggggaacgaccagcaccagacagcgaaaaagaggacccaaaaaagagagaaaaggccaaagagaggg

SEQ ID NO: 71642 - RNA, 55 nt, Homo sapiens
gagaacagaagggaaaaaagacaagaggagccggccacaacaggcacaaagagag

SEQ ID NO: 71643 - RNA, 73 nt, Homo sapiens
gagccaccgcacgcggccagcgcgagggacccggccagcccagggccacgaggggccaaggcgaccacaaagc

SEQ ID NO: 71644 - RNA, 66 nt, Homo sapiens
cccggggacccccgacgccaggcagcgcccccaaacgaacaagccgagcaagaacaaaacagcccg

SEQ ID NO: 71645 - RNA, 77 nt, Homo sapiens
aacagaacaggaggggagagggcaggaaccaccgcccaaagccaaggccaccgagccacaagaccacagcaccgacc

SEQ ID NO: 71646 - RNA, 82 nt, Homo sapiens
aacagcccagccgcgccagcgcccggcgccgcgcgccacccccgagcgggggagcgggaggagccagagcacaccgcaccac

SEQ ID NO: 71647 - RNA, 78 nt, Homo sapiens
gcaggacccaacgacaggcgccccggcccaacgggcggagaacggaaaagcaccaggaagcagagaggaccgcagaag

SEQ ID NO: 71648 - RNA, 99 nt, Homo sapiens
gccgaccccccggcgccgcgccggcggcgaaggaaggcccgaagccacagagcggaaggagaaggggagcgcgccacaagaagccccgggagcggaaac

SEQ ID NO: 71649 - RNA, 71 nt, Homo sapiens
gagcagcaggcacaccgcagcaaggggacgggccaacgcacggcccggcagagccagcaccccccgcggca

SEQ ID NO: 71650 - RNA, 64 nt, Homo sapiens
ccaaccgcaccaggcgccagacccacagcgggggcgcaggcaaacaccagcaacacccgggaca

SEQ ID NO: 71651 - RNA, 60 nt, Homo sapiens
cccggccccggcccacaggggggggcaaacccgagagaacggcaggcccccacgggaacg

SEQ ID NO: 71652 - RNA, 76 nt, Homo sapiens
ggccagccacccaccagcgcggagcgaggcccgggggggaaaagcagccaccacaggacagacgcaaagagacagg

SEQ ID NO: 71653 - RNA, 57 nt, Homo sapiens
gcaggagaagcgaaaagaaacccaagaaggccccgggaccaaggacacgcagacccg

SEQ ID NO: 71654 - RNA, 77 nt, Homo sapiens
gagagccggagcggggacccaggagccggccagcgcgccggagccgccgaggcccacaaaggcccagacagcacgca

SEQ ID NO: 71655 - RNA, 83 nt, Homo sapiens
ccccaaaaggcgggaacaggggaccacacaaggggaaggggaggaggggagccccagggagaaggggacacacacagcgaggg

SEQ ID NO: 71656 - RNA, 50 nt, Homo sapiens
gcacggccccagagaaaccagggagaagaaggaagaggaaaagaggaggg

SEQ ID NO: 71657 - RNA, 72 nt, Homo sapiens
gacacaaacgcaaaagcaagcacaacaaccaacagccgaaaacccaaagaagcggcaggaacacaaaaggaa

SEQ ID NO: 71658 - RNA, 77 nt, Homo sapiens
cggggaagccaccccaccccccaggccccagggcaggggcccggagagcgcgccccccaggacccagaccgagcccc

SEQ ID NO: 71659 - RNA, 82 nt, Homo sapiens
ggaggccgcccggcgcagcggggaccggcggcggcgcccaggcacccggcccggggaggcggcagcgaagaagacgaaaaaa

SEQ ID NO: 71660 - RNA, 71 nt, Homo sapiens
ggaaagaggagagaacccaacacagggaaaggaaccgcggacagaacaagcaacagacaaggccacacacc

SEQ ID NO: 71661 - RNA, 74 nt, Homo sapiens
cacgggagagggcaaggcccgaaccagaaacaggcacaggggaagaagacggacagaagcaacaaaggaaaaac

SEQ ID NO: 71662 - RNA, 77 nt, Homo sapiens
agggggaccgggcggcaccacacacaccacaccgaacggccaggccgcagccgcagagggggcagaagccaagcccc

SEQ ID NO: 71663 - RNA, 90 nt, Homo sapiens
cggaccggcgcccggacaacccggagagcaaagagcccgacaaccggaccacagcaggaagagaaggaaaaggcgagagggcccacaacc

SEQ ID NO: 71664 - RNA, 56 nt, Homo sapiens
ggagagaagaagaacagagagaacaaaagagcagggcggcgacggcggcgcgagga

SEQ ID NO: 71665 - RNA, 79 nt, Homo sapiens
agcgggaggccccagggaggagagggccggcggcaacggcacaggccccggaccccccgcgcccagcgcggggacgccc

SEQ ID NO: 71666 - RNA, 83 nt, Homo sapiens
cgcgcccgcgcccagcccgggccccgcgcacagccccagcgcagaacacgcccaggacgggacagaagccacgagaccgccaa

SEQ ID NO: 71667 - RNA, 76 nt, Homo sapiens
aagagcggcagacgccaagagaagaacaacaaacggcaaagaacacgacgagggaccaagaaaggcccagggacca

SEQ ID NO: 71668 - RNA, 89 nt, Homo sapiens
gccgagaacgcagagaggccaaaccaggaacgacaagcagaggaggagagaaagaacccacgcaggacgacagaagaggccggacaaga

SEQ ID NO: 71669 - RNA, 80 nt, Homo sapiens
accccccagccgggccgcaccagcgcaagggacaacacggccaccgccaccaaaagcgcaccacgccggaacgggccaca

SEQ ID NO: 71670 - RNA, 57 nt, Homo sapiens
gaggcaaagggaggaggaggaccggagggaccagaccccacaagaaaacacacaacc

SEQ ID NO: 71671 - RNA, 117 nt, Homo sapiens
gagaccaaacagcaaagggaggcccaagccagaagagagcgggggcccacccgcccccaggggacaagaaaaccagaaacgggggcccgacaagacacaaaaagggaacggacgggg

SEQ ID NO: 71672 - RNA, 72 nt, Homo sapiens
gggagagaggacccccccccccccccaagaagcgaaaccacaacacccaaaagcaaggaagaccacggacga

SEQ ID NO: 71673 - RNA, 77 nt, Homo sapiens
gcgcgccgccgccgaggagaaagggagaccggcgacggccggcgacacccccaccgccacgggcaaccgcgcgcggc

SEQ ID NO: 71674 - RNA, 73 nt, Homo sapiens
ccaggccaagcaaaaccagaaagccaaagggcaacagagaaagccacagacgggaaggaaagaagaaaggcag

SEQ ID NO: 71675 - RNA, 79 nt, Homo sapiens
ccaccggaaaagcccacaaaaacggccacaccagggcgcccaccacggggaaggcgacaccagaaggacaaagagcaaa

SEQ ID NO: 71676 - RNA, 78 nt, Homo sapiens
gggacgacaaagaggcggcagggaccagcagacgggaagagccagaccaggaccaggcggggcgaaccagcgcggacc

SEQ ID NO: 71677 - RNA, 46 nt, Homo sapiens
cggcaaccgcgcggcaggccaggggaccggggaagaacacggaaac

SEQ ID NO: 71678 - RNA, 75 nt, Homo sapiens
ccgccccgcggcgcggcgcccagaagccgcggagaccgaaagaagaagaaggacgaccggccagagcagaaggag

SEQ ID NO: 71679 - RNA, 44 nt, Homo sapiens
caacagaccaggaagcgaggcccagggagcaggcagggccaggg

SEQ ID NO: 71680 - RNA, 46 nt, Homo sapiens
ggagggcgcagcggggacgcggacgcacgcgggaggccaccgcccc

SEQ ID NO: 71681 - RNA, 55 nt, Homo sapiens
gcacacaacaggaaaacaaaagaggagaaaggggaggcaagcaggggggcaaagg

SEQ ID NO: 71682 - RNA, 75 nt, Homo sapiens
aggacaggacgcaacgaaaccggcacggccgcccgcgcacaggccagagcggaggcaccagcagagagcccgccg

SEQ ID NO: 71683 - RNA, 79 nt, Homo sapiens
cccaaggaaacgcggcgacccgaggaggaaggcccgcgggcccaaggaccgcgaggccagcgaagacgccagaggaaga

SEQ ID NO: 71684 - RNA, 69 nt, Homo sapiens
acacgaaagagcaaagaaagaggcgggacacccaccccaacagagaagcgcaccaccggcccagcacag

SEQ ID NO: 71685 - RNA, 83 nt, Homo sapiens
cgggccgagcgaggaggccgaggccgggaggccggcccggagggcagcaagcgccagaaccagcccacgccgcacagccagga

SEQ ID NO: 71686 - RNA, 72 nt, Homo sapiens
agcaaaacggcaagcaaaccgcggcgacccaaggaacggaagacgggccacgaacggaaagaaacaaaagag

SEQ ID NO: 71687 - RNA, 77 nt, Homo sapiens
agcggccaggagcaccgggcaccacacgcccgggaggagggcccaggagaccaggaggcgaaagcgcgccaagagcc

SEQ ID NO: 71688 - RNA, 76 nt, Homo sapiens
acccaggcaggaggagaaagagcaaaaacacagccagcccacaagggggaaagcaggggagaaaagaaaagaaaga

SEQ ID NO: 71689 - RNA, 73 nt, Homo sapiens
caacggccaaccggcaagaccagacgggaacgggagacaagcgcagcgagaccccaaaggacgacacccgcgg

SEQ ID NO: 71690 - RNA, 79 nt, Homo sapiens
ccagagcgcagccccggcgccggcggcgggaccgcggaccggacggaggggcagaagaggccgccgacaccaagccaac

SEQ ID NO: 71691 - RNA, 71 nt, Homo sapiens
ccagccgcccgcccccgccaggagggaacggagggaaagcgacaaacaaccaacccacagagacccagaga

SEQ ID NO: 71692 - RNA, 54 nt, Homo sapiens
ggagcgagaccggagcgccacggccacggcccccacaagagaacacccacacga

SEQ ID NO: 71693 - RNA, 85 nt, Homo sapiens
cgccagcggccgagcgggcggcccggccgggcgcccggggcggcggagggccccccgggccggccgccggacgacacagcccgcc

SEQ ID NO: 71694 - RNA, 88 nt, Homo sapiens
caaagagagagagggagaagaagcaaaaagagaggagaagcgcacgggggacgcggaagagacagcagaacaagagccaggaccggac

SEQ ID NO: 71695 - RNA, 76 nt, Homo sapiens
gggcgcggagggccgagggagggccgagccagccgcggccggaggagcccccaggccggaacgacacgggacaaag

SEQ ID NO: 71696 - RNA, 65 nt, Homo sapiens
aaccaccagaagaacgacagagaggagggagaacaagcaacggcggaagccaggaccaaagccca

SEQ ID NO: 71697 - RNA, 63 nt, Homo sapiens
cgacaggcgagaaggacagcacaagagcagcgcaggaaaagggacgaagcgcacccagaaacc

SEQ ID NO: 71698 - RNA, 72 nt, Homo sapiens
caaaagcggcaaggcaacaggagcacaccaaccccacagacggccaccagccaggacaaggaacgaaaaaga

SEQ ID NO: 71699 - RNA, 73 nt, Homo sapiens
gaaccccgagccaaaaaagcagaaaagccaagggaagagcgaccggaaagcgggggaagcacaaggaccgagg

SEQ ID NO: 71700 - RNA, 33 nt, Homo sapiens
gggccgcggagccaagagaaagcagaagaacga

SEQ ID NO: 71701 - RNA, 68 nt, Homo sapiens
aggcaaccccacagaacacaagggagcagggggcagcaaaaaggcaggggcaaagcggggaagaccca

SEQ ID NO: 71702 - RNA, 80 nt, Homo sapiens
ggccaagagcccaacaccacccgagagccccaaggggaagcgagagaagcagcaacgcggagcaagagaaagaaacccgg

SEQ ID NO: 71703 - RNA, 81 nt, Homo sapiens
gagacagcacaagaaaagaggacggcacaccccggcagcagccccagacaacacgcgagcagagaccagaccgcgaggacc

SEQ ID NO: 71704 - RNA, 79 nt, Homo sapiens
ggccaggaagcgcaccaggaggccggggggggcacagagccccggaagacagcccccagcgaccagacccagggccaga

SEQ ID NO: 71705 - RNA, 72 nt, Homo sapiens
caaaaaagcaaggcaggggccccaaaaccggaaaggacgcgaggacaggagcagggacggggggaaaagcgc

SEQ ID NO: 71706 - RNA, 72 nt, Homo sapiens
cggcccaagcgaggacacccggaaaggaaagcaggaggaggagcggcggcagaaagccgaaaaagaagaaac

SEQ ID NO: 71707 - RNA, 70 nt, Homo sapiens
agccccagccaggagggaaaacgaaagccggaaacgcgggaacaagaaaaaaaaaacaacacacccaaaa

SEQ ID NO: 71708 - RNA, 82 nt, Homo sapiens
ccagccgagggccaccgggaaggacagaagggaaagggagcagcaccggccacacccacagcacgaccggaacccagcgacc

SEQ ID NO: 71709 - RNA, 86 nt, Homo sapiens
accggcccgggaggagcagaccggcgcaggggaaccacagggggcccgcaagaaacgaagaagggaccaagaaaggcccagggacc

SEQ ID NO: 71710 - RNA, 73 nt, Homo sapiens
ggaggagcccccagcggggcggagcgaccccgcggggcgcgacccgccgccaggaagggacgacaccagacca

SEQ ID NO: 71711 - RNA, 38 nt, Homo sapiens
aggacgcggacaaggcccagccaccggccacgggccaa

SEQ ID NO: 71712 - RNA, 78 nt, Homo sapiens
ccccaagacccggccggcgccgcggccgcgggcccaccgccggcgcaggcagcacagaagaacgaagaaggcaacaag

SEQ ID NO: 71713 - RNA, 72 nt, Homo sapiens
ggagcaggggaaaaaggaccaaccggcaagggacaacggccaaggggaaaggaagggacgacgaacaacccc

SEQ ID NO: 71714 - RNA, 84 nt, Homo sapiens
ggggaaaaacgaacagagacgaggcggaacagagaaaagaaagcagagaccgacggaagaccacggcgagcagaagccaccgac

SEQ ID NO: 71715 - RNA, 52 nt, Homo sapiens
cagacaggcccggagagaaagcgcccaaccacggcaaaggcgaaggcaacac

SEQ ID NO: 71716 - RNA, 61 nt, Homo sapiens
aaccagccaggccgaaaccccccccacacgcaggggggaaccgaaagaggcgacgcaaggc

SEQ ID NO: 71717 - RNA, 79 nt, Homo sapiens
ccgcaggcggggagaagcaaaaaacagaggagagcgaccggaagcgcagccggagagcgggacccaacgaggagaggaa

SEQ ID NO: 71718 - RNA, 72 nt, Homo sapiens
cagcgacaacaccgaggacaaggaacgaggaaccccagagaggacagaagccaaccaggcagcagaggaccc

SEQ ID NO: 71719 - RNA, 74 nt, Homo sapiens
ccccggccagcccgccacacgggcacggaaaaaaaggaacggaaccgaacagaagaaagagaagaccccaagga

SEQ ID NO: 71720 - RNA, 84 nt, Homo sapiens
cggccgccgcagcgagggcgccgagcaaccggaggcaccacagcgaacacaacccccggggccggccagaacacagggcccccc

SEQ ID NO: 71721 - RNA, 73 nt, Homo sapiens
ccgcaggcgaggacggcggaccccgcggcgggaggagccgccccgaggcaggagcacggagaagagaacgacg

SEQ ID NO: 71722 - RNA, 63 nt, Homo sapiens
gaaagccccgacggggggacagaaggggcacacaaaaagaaaggcccgagccaaaagacccag

SEQ ID NO: 71723 - RNA, 82 nt, Homo sapiens
ggcaccagacagccacgcagacacagccagacagaagaaagggagcccccaagaacagcgagcacaggaaggaaaccggacc

SEQ ID NO: 71724 - RNA, 79 nt, Homo sapiens
caaagccgcccagacggccaccggcgggaggaacaaaagggggaagagaccgaaaccaagggggaaaggcacgagggca

SEQ ID NO: 71725 - RNA, 89 nt, Homo sapiens
gaagcgcccgagacagcaaaccccacaaccccaagacagcgcagcggaagagcgacgcggcgaaaggcagagacgaccacgggacgcag

SEQ ID NO: 71726 - RNA, 90 nt, Homo sapiens
acaaggccaccacgcccgccgggccgcaggcaggggggacccgcccaaccccgaacgaggggcaaaaagcagccgccggagcagagagaa

SEQ ID NO: 71727 - RNA, 76 nt, Homo sapiens
aaggccggagacaccagcagggaaaggaaagcaagccaggaggaaacgacaccaaaccggggggggcggaggacag

SEQ ID NO: 71728 - RNA, 52 nt, Homo sapiens
cgcgccccagaaggcagaggaacacaacaggaacaagcgggaaacggagcca

SEQ ID NO: 71729 - RNA, 73 nt, Homo sapiens
agagaaagacaaccaaccccaccgaggaggacagagacgcaagcaagaacaacccaagaaggacagcgcgaca

SEQ ID NO: 71730 - RNA, 58 nt, Homo sapiens
cggcggacgcaggagcgaggcagcgaccgaaagccgccagggcagcgcgcagacagga

SEQ ID NO: 71731 - RNA, 69 nt, Homo sapiens
cgaaggagaaaaagcaggggaagcagcgcacgccagccacaagaaggagagacgcagagccagacaaga

SEQ ID NO: 71732 - RNA, 77 nt, Homo sapiens
aaaaaccgccgaaaaagagaagacgcacccgaccgggccgaccacaacaccagcaggaaaaaagagcggcagaaggc

SEQ ID NO: 71733 - RNA, 53 nt, Homo sapiens
caccgccaggaacacaccagccggagcgaagaacaccacagggacgccagggc

SEQ ID NO: 71734 - RNA, 42 nt, Homo sapiens
aggagccagcagagcgccaggcagccagagcagccccccagc

SEQ ID NO: 71735 - RNA, 73 nt, Homo sapiens
acagagcacagaagcccccacagaccagaaaccggaaggcaaaaagccaaaaggacacccaacaacagcaagg

SEQ ID NO: 71736 - RNA, 76 nt, Homo sapiens
gacaaaagggccaaagaagggagagaggcgcagagacgcaagcggaagaacagcgcaaggaggggagaaggagcga

SEQ ID NO: 71737 - RNA, 71 nt, Homo sapiens
ccggaaacacgacaagccaaagcaaaccaagacacccaggagaaagacagcggggaaaagaaaaaggaggg

SEQ ID NO: 71738 - RNA, 76 nt, Homo sapiens
acagccaagagggcgcccagagacaacgagagaacaacagaaacgcaacgggcgcgggaccggaaaaaccaagaga

SEQ ID NO: 71739 - RNA, 80 nt, Homo sapiens
acggcaaacacccccaccgcccaggcaacaaaggaggaacgccgggacccgggcacgccgcagaccaccccgcacacaga

SEQ ID NO: 71740 - RNA, 80 nt, Homo sapiens
cccggaggagcagggcagagcacgcgcgcagcgaagcccagggaggccaccagaccagaggccccacagacaaaaccgcc

SEQ ID NO: 71741 - RNA, 79 nt, Homo sapiens
acagggcggcaacaggggcgagaaaggccggaagaccaagggcaaccgaagacccaccgcacgaccccagcaccccaag

SEQ ID NO: 71742 - RNA, 87 nt, Homo sapiens
cggcccgagggcgcggcggacgcaggagcagcaccgaggccccccccaccccccgcccgcggcgccaccccgcggcgccaaaaagaa

SEQ ID NO: 71743 - RNA, 78 nt, Homo sapiens
gagccagagccagggaacggaggagcgagccacggcggggccaccacagagcccgcagggacacagcagaacaagcaa

SEQ ID NO: 71744 - RNA, 60 nt, Homo sapiens
cgagcagccagaccgacccacccgcgcggaggaccacccgcacccaggggacgcacggcc

SEQ ID NO: 71745 - RNA, 76 nt, Homo sapiens
gaaaagccggcagagaacggccccgaagaaaaggggaagcaacacgcagcaacaacaacagccaggccaggagcaa

SEQ ID NO: 71746 - RNA, 81 nt, Homo sapiens
cccgcgagccgccgagagcaggaaagaccacacagggaaacgaccagggagagaccaacaggaaccacagcggccgcgggg

SEQ ID NO: 71747 - RNA, 71 nt, Homo sapiens
cgcggagaccccgcggcccggcagggggaacgggaggggggagacgagcgccaaagacagaagcaagcaga

SEQ ID NO: 71748 - RNA, 79 nt, Homo sapiens
ggacacccgcagagagcggacggggacggcgcgggacgggcgaaggaaagacagggaagcagagccccgggccgggaag

SEQ ID NO: 71749 - RNA, 59 nt, Homo sapiens
acgcccggaaccccacaaaggacaaggggcaaggcgaaagggcgcagagcagcgcagga

SEQ ID NO: 71750 - RNA, 69 nt, Homo sapiens
cagaaagcgcagcccgaagcacaaacaaacaaggcagcccaggacccgggcaccggaggcccaaagggg

SEQ ID NO: 71751 - RNA, 64 nt, Homo sapiens
cggcggcggcggcggcgggcacgcagggcgcaggacacaggcggagaccgggagacgggccaaa

SEQ ID NO: 71752 - RNA, 74 nt, Homo sapiens
agcgacagcccgggacaccaagaaagaacccccgcggcgagcccaccaggagaccagggccaccgcagaccgac

SEQ ID NO: 71753 - RNA, 75 nt, Homo sapiens
ggcggacggccacgcagccaggacgcggaacggggaacggcgagggaacccaggaaggagggcgacaaacaccag

SEQ ID NO: 71754 - RNA, 43 nt, Homo sapiens
ggagcccagaagacagagggcgagccgccaaacgcagggcgag

SEQ ID NO: 71755 - RNA, 54 nt, Homo sapiens
cggagaaagcagccagagacgggcgcccgggagagaagaggaccaagccaaaga

SEQ ID NO: 71756 - RNA, 78 nt, Homo sapiens
gagggcgggacagccaggcagacggccaggcccggagagaagaaacacaagaaccccaaaacagacggagaagacaac

SEQ ID NO: 71757 - RNA, 74 nt, Homo sapiens
aaagaccaggagcgcaggcagcagcccacggaaaaaaagacgggccaagggcagggagaagggacaacacagaa

SEQ ID NO: 71758 - RNA, 73 nt, Homo sapiens
aggggaaaccgaaggaccaacggaaccagagaagaagcggggacaggaaaccacaggaaacccccaggcggag

SEQ ID NO: 71759 - RNA, 56 nt, Homo sapiens
acaaccagaaagcccaacaggcaagcaaaaggccagcaacagaagaaagcaagcac

SEQ ID NO: 71760 - RNA, 83 nt, Homo sapiens
ggacaccgacagcacagacagaacccgcaccagagggagaaaacgcaggacacaaggaagaagaaggaccagaggaaaacagc

SEQ ID NO: 71761 - RNA, 74 nt, Homo sapiens
cagccagagggaaaagcggcgcagcacggaagacaagacagcgaagggagacaggccaggaggcccaggaggcc

SEQ ID NO: 71762 - RNA, 79 nt, Homo sapiens
gacaggcaaacaagaggggcaagaagcacgcccaaggacagaacgacagacgccaaggcaagaaaccacccgaccgaca

SEQ ID NO: 71763 - RNA, 69 nt, Homo sapiens
cacgaggcacccggacccgcaggccgcgcagagaccaccagcgaaccagacccagggggcagaaggcag

SEQ ID NO: 71764 - RNA, 68 nt, Homo sapiens
caaaaaaccacgcaagggcacccacaaacgacaagcagagagggaacagaggcacagaaaagaaggga

SEQ ID NO: 71765 - RNA, 78 nt, Homo sapiens
ccaccgaagagccaagcccagcgagaaagaacgcagcgcagcggacgcaaagacaagcagccagcagacaggagagac

SEQ ID NO: 71766 - RNA, 75 nt, Homo sapiens
ggccgacccgcccgcccccgccccacgaagccagaaagaagccacccagagagaaccagaccgggaaaaccggag

SEQ ID NO: 71767 - RNA, 48 nt, Homo sapiens
ggagacacggccagacgcccccacacaaaggacacagaaaggacaaga

SEQ ID NO: 71768 - RNA, 62 nt, Homo sapiens
caccgccaccggcccgacccaggcccggccgccccgcaccgagcgccccgcccccccgcggc

SEQ ID NO: 71769 - RNA, 61 nt, Homo sapiens
aagaggagcagaccaaagagggaggagagaagagaaagcgaaagggagaaccccgggacca

SEQ ID NO: 71770 - RNA, 62 nt, Homo sapiens
cgaggcaggagcgaaaggaaaccggccaacggacagaagaaggggacccaaagcaggcacac

SEQ ID NO: 71771 - RNA, 63 nt, Homo sapiens
acaccccgccaggcaaaaggggggggaccgccgccagcccacaagaccaccaaagcgaccggc

SEQ ID NO: 71772 - RNA, 54 nt, Homo sapiens
acagcgcgcgcgccccccaggccccccccgagcccacacaaagcgaggggaagc

SEQ ID NO: 71773 - RNA, 71 nt, Homo sapiens
aagaagacagcaaaccaacaaagaaggaacaccaagaggagacgaccagaaaaaaacagccgccgaagaag

SEQ ID NO: 71774 - RNA, 66 nt, Homo sapiens
aggcgccaccgaaacaaaagaagaaggaggaaggaagagacccagggaggcggagcacaccaaacc

SEQ ID NO: 71775 - RNA, 77 nt, Homo sapiens
gagggcgaagcacgacacagaaggggaggggagggaaaggcccaggaaaaaggcagacgagaccggagaaggaaaga

SEQ ID NO: 71776 - RNA, 81 nt, Homo sapiens
cgcgcgcaccaggccaacaacgccccacgccggcgccgggcaccggggcccacagaacaagcagccacgggacagggggcg

SEQ ID NO: 71777 - RNA, 75 nt, Homo sapiens
gcccgggagggcggccgcagagggacgaaagccgaaagaacgagaagcgaacggagcagggcaaaagaacaccaa

SEQ ID NO: 71778 - RNA, 75 nt, Homo sapiens
ggagaaggaccgaagggaccaagccgagacaccagacccgagccaagaagaccaagagcaaagcaggaaaggggg

SEQ ID NO: 71779 - RNA, 56 nt, Homo sapiens
ggagggagagagcaaaaccaggcgcacaacacgcccacaggggggaaagcccaaac

SEQ ID NO: 71780 - RNA, 68 nt, Homo sapiens
gaaggcagagaggggccccagaggagaaacaacagaaaaccacccagccaccaacggacgcgaggcgg

SEQ ID NO: 71781 - RNA, 72 nt, Homo sapiens
gacccggacagggggaggaaacagcaaagacgcacacagcggcccacagggcacaacaaagagagcagggag

SEQ ID NO: 71782 - RNA, 81 nt, Homo sapiens
acagacaaggcaaagcgaaaggcaccgcaacaacgcccagcgagcaacagggagcgccaccaccggacggcgcgcccagaa

SEQ ID NO: 71783 - RNA, 72 nt, Homo sapiens
ggcccaaggaccccgccagcccaagaagcgaggacagccccgaaacaaaccggagacgcacggcagaacacc

SEQ ID NO: 71784 - RNA, 70 nt, Homo sapiens
aagccagaagaccacagaagacggagagaggcgcgcgcagaaccaacaaaagcgaaggaaaagggagcga

SEQ ID NO: 71785 - RNA, 35 nt, Homo sapiens
cccccaagaacgggaacagcaacaagagaggggac

SEQ ID NO: 71786 - RNA, 73 nt, Homo sapiens
acacagaccgagcgggcaacaccaggcaccagcaaggggggcacacacagggcaccaaccagaccaaagagac

SEQ ID NO: 71787 - RNA, 74 nt, Homo sapiens
caggccagaggaccacccccaaccccacgccaccgaagagccaagcccaggaagaagacggcacgggaccccca

SEQ ID NO: 71788 - RNA, 56 nt, Homo sapiens
cgccagcaccggaccggacacagaccagaagaaacaagaggagaaccaggaacgag

SEQ ID NO: 71789 - RNA, 78 nt, Homo sapiens
ggcacaggaccaggcgcccaaaggggccaaaaggccggccggcagggggcgccacggcgacggggcaggggagacgag

SEQ ID NO: 71790 - RNA, 84 nt, Homo sapiens
ggggaaggcggaggaccgggagcggcggggccacgccacagaaagcccgccccagacagggccccggcccgcccggaagcgcag

SEQ ID NO: 71791 - RNA, 78 nt, Homo sapiens
cggaggcagaacgaaagaggacgagagaggagcgcgggccgagagcggagagcgggacgcaaggaggaggacggacag

SEQ ID NO: 71792 - RNA, 78 nt, Homo sapiens
cgacccgggcgaccacggggcgcggcgcaaaggccgcaggcgcgcaaacggccagaggacccccaggccaccgggaaa

SEQ ID NO: 71793 - RNA, 111 nt, Homo sapiens
caggaggccgagaaggacagagaaccgggaacaggcggacggccagcccacacagggagcagaccccggggagagaaggacaacagaaacaggggagccacccaacacaac

SEQ ID NO: 71794 - RNA, 78 nt, Homo sapiens
agacacagaccacagaacccacgagaagggaagaaagcggaggcggcggcgcgaaaagagaaaaaagaaaagagaaga

SEQ ID NO: 71795 - RNA, 75 nt, Homo sapiens
acaccgggcagggccgagaggacgccagcggcgcgcaggacgcacaaaaccgaggacagaggcaaggcagaaagc

SEQ ID NO: 71796 - RNA, 54 nt, Homo sapiens
cccagacggccaccggcgggaggaacaaaaggccggggcagcagaagaggacaa

SEQ ID NO: 71797 - RNA, 36 nt, Homo sapiens
agcaacacgccagcggagacacacgccgcagcagag

SEQ ID NO: 71798 - RNA, 75 nt, Homo sapiens
ggggggagcaaaccaccacaaaacggagagagagcacaggaaggagagcaaaaacgacaaagaagccgggaaagg

SEQ ID NO: 71799 - RNA, 72 nt, Homo sapiens
aaagcagaaacccaccaacgaccgaccgccggccggaccgcgaagagaaaagccccaacagacaagagaaga

SEQ ID NO: 71800 - RNA, 73 nt, Homo sapiens
gcaaggcgaggaggaagaacagccacccggcccgcgcgcccggaagccgcgagccggaagccggaaccagacg

SEQ ID NO: 71801 - RNA, 77 nt, Homo sapiens
gacaccgcggagcaaggaaaagaaccggaaggaagagacagagaggaacgaacccccaggccgggcagagcgaaacg

SEQ ID NO: 71802 - RNA, 73 nt, Homo sapiens
gaaaaaagcagagcccaggagaaaccggacgcgacgggggacagagaaagaagcaagaaaaaccagccaaaag

SEQ ID NO: 71803 - RNA, 77 nt, Homo sapiens
aaagccaggaagcggcccaggacagaaaccaaagagcaagcgagagcaggacgccccagacaaggcagcacacccaa

SEQ ID NO: 71804 - RNA, 53 nt, Homo sapiens
gggagaccggaagaagccgcccgggccaggagcaagagaagaaacaacagccg

SEQ ID NO: 71805 - RNA, 75 nt, Homo sapiens
cggggcagaagagacgaagacagacacacaagaggacagggagaaagggccccaagaagggaaaagaggacgagg

SEQ ID NO: 71806 - RNA, 80 nt, Homo sapiens
agcagggaaggaggccgagccgggaccaggcccgggggcggcggccacgccaaggacgggacagagcagccaggccacga

SEQ ID NO: 71807 - RNA, 56 nt, Homo sapiens
cgggccgggggccgccgggacccggccaccagcaagccggaagaagagagggcgaa

SEQ ID NO: 71808 - RNA, 73 nt, Homo sapiens
gcaaaggcccaccggcagcaaaaggaaaagaacagcgaaaaagagagcagcgaggaaggagccagacgccaac

SEQ ID NO: 71809 - RNA, 76 nt, Homo sapiens
gaggcagagcgggagcgcgcagccagacaggccagcggggaacgcgggcaggaacgccgagcccacccagacaccg

SEQ ID NO: 71810 - RNA, 79 nt, Homo sapiens
cgccaccggccaggagcccaggaagaaacccggagacaaagccccacgaccccacgggggagaagcagaccgcaccagg

SEQ ID NO: 71811 - RNA, 80 nt, Homo sapiens
gacgcgggagcgagcgcagcaaagcgcccagccgccgcccgcgcccgcggccggggcacacacaagccaggggcgaagga

SEQ ID NO: 71812 - RNA, 79 nt, Homo sapiens
acccgagcaaaccccagcaagagcggaggcgcccggcggagcagaggaaccacacgcgacagaacacgacgggccaacc

SEQ ID NO: 71813 - RNA, 79 nt, Homo sapiens
gaggccagagccagggcagcggccaggaaggaaggagaaagacaaacccaagaaaacaagaagagaaaagccgaagaac

SEQ ID NO: 71814 - RNA, 66 nt, Homo sapiens
cgccgggagccgccccgccagcgcaaggaaccaagaaaagcagaaacaccgacggaaggaccaagc

SEQ ID NO: 71815 - RNA, 81 nt, Homo sapiens
ggacgaggacgaggaccccgacacgaggagacacacacaccaggaccacgggcccggaagcccggggcggcgacggagcac

SEQ ID NO: 71816 - RNA, 92 nt, Homo sapiens
accacccggaggagacggggcagacaacggagcccggggggcacaagaaggccaaccccaaaagagagaacacaggcaagacgaaaaccgcc

SEQ ID NO: 71817 - RNA, 70 nt, Homo sapiens
cagagaaagcgagaaggcagagggccaaacgaagcccaaacccaaaagacaagcggccacgcagacacga

SEQ ID NO: 71818 - RNA, 58 nt, Homo sapiens
gcgggcacccacggagccccggggcgacagaaaggagacgaccagaaggggaaacgag

SEQ ID NO: 71819 - RNA, 74 nt, Homo sapiens
ccacacaacccaagcgccaggaccgaaggaggaacacagaaacgccccgggccagccgccaaggccgcccagag

SEQ ID NO: 71820 - RNA, 82 nt, Homo sapiens
caacaccacccacccaccacgagcacacaaacaccacggcccgaaaagccgccaagggcccggcaccgcgcacgcacaacca

SEQ ID NO: 71821 - RNA, 85 nt, Homo sapiens
ggacacacgcccaccagggccgccccaaccccgacacaccacacaaaaaggccggggcccgccaagaccccggccaccgcacggg

SEQ ID NO: 71822 - RNA, 75 nt, Homo sapiens
cgaccggcgcgggggacggccgccagagggcagccacaaggagggggcacggaccacaacaggaaacacgcaacg

SEQ ID NO: 71823 - RNA, 78 nt, Homo sapiens
aaagagccccccaacccaacccgcacccgcccgggggcacaggccccgcccagaaaaagacagaggcgggcaagaaag

SEQ ID NO: 71824 - RNA, 103 nt, Homo sapiens
gcgggcgccagaaggaagaggcggacggaggagcaggcgagaagagaaggagcaggaacacaaacaccgaagcacgggcccaacaggcaccccacaaacaggg

SEQ ID NO: 71825 - RNA, 80 nt, Homo sapiens
gaaccgaaaaacaagaaggaaaaacgccacgcaccggagagagcacagcgacaaaagaagcgaagccaggaacaagaggc

SEQ ID NO: 71826 - RNA, 77 nt, Homo sapiens
cggcacgcacgcaggccagacagacaggacaggcaacaccaaggaggcaccagacaaggaaaccgagaggaagaaag

SEQ ID NO: 71827 - RNA, 58 nt, Homo sapiens
ccaggccagaaaacagagaacggacaaaggggagaggaggagaggaacagcccaagca

SEQ ID NO: 71828 - RNA, 81 nt, Homo sapiens
gccaggggcgaggcagcggcacccgagcgcccagacgggcccgggacacccagacagagagagcgcacgaagaagggcgga

SEQ ID NO: 71829 - RNA, 80 nt, Homo sapiens
aaggcgccgcgccaggccgggcgggcgggaaccaagaccaggacaaagaagacccggagagacaagccggaggacgcaaa

SEQ ID NO: 71830 - RNA, 75 nt, Homo sapiens
gcagaaggaagccgaaaagcacgcaggaagcggagccggcgggcccaggaagagcgaccacaacagcccgccacg

SEQ ID NO: 71831 - RNA, 77 nt, Homo sapiens
ggggccgcccacaaggccacggacccagcggaaacggggacgcaccaaagaagacagacacgcagaaaaggagccgg

SEQ ID NO: 71832 - RNA, 73 nt, Homo sapiens
gagagagggagagccaaagaaggaaagaccacagcaagaccacgcccccagccgggggaccaggccgaacgac

SEQ ID NO: 71833 - RNA, 74 nt, Homo sapiens
ggacagaggcacagaagagagccgcccggacaagagccgggaagcgggaaggcacggagcaccagcgaaggcaa

SEQ ID NO: 71834 - RNA, 75 nt, Homo sapiens
cgcccagcccagagagcgggacacaggaacgccccaaagaggacccaaaggaaggacggcacccaaccaaaacca

SEQ ID NO: 71835 - RNA, 78 nt, Homo sapiens
agaggacgccggaacacccggaagccgagaaaggccgagggcgcccgcggacacggagccagccaaaaggcggcaggg

SEQ ID NO: 71836 - RNA, 73 nt, Homo sapiens
gagacgaaagagagggacgcagacggagagaccaagaaaaggaaccccgacaccgcacggcaagaacaaccgc

SEQ ID NO: 71837 - RNA, 77 nt, Homo sapiens
gggagcaggcagggaggagcaagaggacgcagcccaaggcaggcacaagaggaaggaagaacgaagagaaagagaca

SEQ ID NO: 71838 - RNA, 71 nt, Homo sapiens
gacagcacgagaacagcagaaacagcgcccacagggcacgaagacagaaggcccggggcggacgcaggggg

SEQ ID NO: 71839 - RNA, 68 nt, Homo sapiens
aggagccagacaccagagcgggacaggcagaaacggagcacgccgacgcggcagccacaccacgggcg

SEQ ID NO: 71840 - RNA, 68 nt, Homo sapiens
gccacaacaacaccccagcccagacacgaaaaagcggcccccagcaccggcggagcggcgcaaacggc

SEQ ID NO: 71841 - RNA, 71 nt, Homo sapiens
cgaggcgcgggcgcgcacccgagccgcaagggggcccccaaagggaagccaaacacaaaggaagaagcccg

SEQ ID NO: 71842 - RNA, 77 nt, Homo sapiens
ccgaacaacgccagggacagacaacacaccacacaaagaggagaggaagaggagagaggcggaccgcgaccgagaag

SEQ ID NO: 71843 - RNA, 77 nt, Homo sapiens
ggggcacgacgacccaacagcaaggccgaagaccccaagaagagagagaagaaccagacacgcgaagaaaaaaggaa

SEQ ID NO: 71844 - RNA, 71 nt, Homo sapiens
ggaccgcagagggggaaaaaacagaagaggcgaaccaagaaggagcgagggaggagcagcgagacagcaag

SEQ ID NO: 71845 - RNA, 61 nt, Homo sapiens
gaccgacccacccgcgcgggacgagcagggggaggaacaaagcgaggaagggaagggaagg

SEQ ID NO: 71846 - RNA, 64 nt, Homo sapiens
gaacccagaccggccgacaccccaccagcccagacaaagaggcacgggaacacaccgccacaga

SEQ ID NO: 71847 - RNA, 48 nt, Homo sapiens
ggagaaggaccaagaaccagacagaagcgaaggggacagggggagaac

SEQ ID NO: 71848 - RNA, 79 nt, Homo sapiens
accggagagaggggaagcaccaggggcccagacccgggacaccgagacgagaggcacagcaagcccaagaagaccgaga

SEQ ID NO: 71849 - RNA, 76 nt, Homo sapiens
ccaacacagccccaacagccaaggacgaggagaccaaacgagaaccagaagaacgaaaaggcagacgacgagagaa

SEQ ID NO: 71850 - RNA, 79 nt, Homo sapiens
gcggccaacagagagaaagcaagagccgagacagaacggaccacacgaagaagcacaggaacgaagaaaagcggaaaaa

SEQ ID NO: 71851 - RNA, 85 nt, Homo sapiens
cgcaggcccacggagaagaggaggagcaacagaaacagaaagaccccaggagaagacaggggaagaaacgaaggaggcccaacca

SEQ ID NO: 71852 - RNA, 70 nt, Homo sapiens
cgagaaaccaaagggaacgggggagagaagccacaaagcaagcagggccaaagccaccgccccgcgccgc

SEQ ID NO: 71853 - RNA, 42 nt, Homo sapiens
aagcaacgcgggaagagaagagagccaagaggaaggaagccc

SEQ ID NO: 71854 - RNA, 76 nt, Homo sapiens
ccagacgaccgccccccggccaacccgaagccgcgccacgacagcgcagggccgcggccgggccaaagagcacagg

SEQ ID NO: 71855 - RNA, 86 nt, Homo sapiens
aaggccagagaagaagcggaggaaggaggaagccagcccgagcaggcccaggggaggaggggcaaccacagacccgccaggaagcg

SEQ ID NO: 71856 - RNA, 73 nt, Homo sapiens
ggcggaagacaggccacccagcggggagcacggcgagcagccaggccaggagagggaccgaaaacaaggacac

SEQ ID NO: 71857 - RNA, 73 nt, Homo sapiens
ggacaacaccgccccagcccaccagacaagcaccggaagcggcaccccaccgacaagacccaacaaggacgcc

SEQ ID NO: 71858 - RNA, 74 nt, Homo sapiens
gaaggcaagagaaacgaacacagcaaacaaaagcagcacaaggaaagccaaaaagccagggggacaggagaagc

SEQ ID NO: 71859 - RNA, 73 nt, Homo sapiens
gacaacagagaaagagaaaaaggaagaccccaccccagcagcccaggggacggaaaggagcggccagccaaca

SEQ ID NO: 71860 - RNA, 77 nt, Homo sapiens
cggaacggagcaccagagagcggagaaagcgcccgggagcgggagcgcgcggcaagggccgcagacaggaagagagc

SEQ ID NO: 71861 - RNA, 65 nt, Homo sapiens
cgccaggcagggccgagcagaccagaaggaaacgggggcgcacaggaaacagaaaaaacagcaaa

SEQ ID NO: 71862 - RNA, 88 nt, Homo sapiens
aagaagcagccgacaggcggaggcccccgggcaagaggcgcaaacaagccaacccaggaggaaaaacggcaaaagcagaccggaaaac

SEQ ID NO: 71863 - RNA, 82 nt, Homo sapiens
acacaacaccgggccaaaaaagaccgaagccaacgggacccaggggagcgacagccaaagcaacaagcccgaaaacagccca

SEQ ID NO: 71864 - RNA, 60 nt, Homo sapiens
ccaggccccgacgccccgagcggagaagaagcaggcgccccccaccagccacagacacag

SEQ ID NO: 71865 - RNA, 83 nt, Homo sapiens
agaggccaggaagacccagggcggaaaggaagaggagacagagggccgagaaggacaggacagagacaaggcagccggagcag

SEQ ID NO: 71866 - RNA, 66 nt, Homo sapiens
acgaggaaaaccagaagcgaagcgaaggcagcccacgaccaaagaggaggcaggggaagcacaaaa

SEQ ID NO: 71867 - RNA, 76 nt, Homo sapiens
gccaagcgcaagccacgaaagggccagaagaagacacaaggagcggccaagccgacgccagcgggcgccacccaac

SEQ ID NO: 71868 - RNA, 115 nt, Homo sapiens
agaccccgcgcagcggcccggcggggcccggcaccaggaccaccgcggcagcacgcggcggcaaagagaagaaaccaagagggaagaggaaagaagaaacccagagaaagcaaac

SEQ ID NO: 71869 - RNA, 77 nt, Homo sapiens
ggacaagggcggcggcgaaaagaagaacaaacgacgcagagaagagaggacagagacgaggcgggcccaagggcacc

SEQ ID NO: 71870 - RNA, 67 nt, Homo sapiens
gagggccagcggagccgcccagagggacaagagaaaaaaagggcgggcgaacaaaaagagcagagga

SEQ ID NO: 71871 - RNA, 77 nt, Homo sapiens
caaggaaccagcccaagaagcagccgggacaccacagcaagaggaacgggcacgccagaaaagaccaggagaagcag

SEQ ID NO: 71872 - RNA, 76 nt, Homo sapiens
gaaaagagcagcgcccagccccagcaggcagacacggcccgggcaaacagcagaacgcaagaggggaaccacccac

SEQ ID NO: 71873 - RNA, 77 nt, Homo sapiens
ccccagaggaggcgggcccggagcaggcaagccagagacggacacgggaaaaagacacaaagagagcacaaagagcc

SEQ ID NO: 71874 - RNA, 71 nt, Homo sapiens
gcgaagaagcccgacaaacgaaggacgcacacaggacaacaacgaggaggacgccaccaggaggaccggga

SEQ ID NO: 71875 - RNA, 36 nt, Homo sapiens
agcaacccgcgacagggcagcggaagaagagaaggg

SEQ ID NO: 71876 - RNA, 68 nt, Homo sapiens
gcacagaggccagaagcaagccagaagcacaaggaccgaggaaccacgccagggccccaaaaaggcag

SEQ ID NO: 71877 - RNA, 72 nt, Homo sapiens
gcggcccagccccaccacggccaaaacacaaacaagaccgcaggaggaccggcgggagccagcaaccccaag

SEQ ID NO: 71878 - RNA, 74 nt, Homo sapiens
gccaaaaagcggagaagaggggccaggaagaacacgaccgccagaaggaggccgaggaggaggaaaccccgccc

SEQ ID NO: 71879 - RNA, 82 nt, Homo sapiens
cacggggacagagccgggccaccagaccggaccccggaggaaaagcggaagcggcagcggcgaacgccggaacggaccaaca

SEQ ID NO: 71880 - RNA, 85 nt, Homo sapiens
caccaggagagccccggcggcgggcgccgccccacgcgcgcgagaggacccacgaggaagcggccgcggcgaaccccagagccag

SEQ ID NO: 71881 - RNA, 79 nt, Homo sapiens
ccaacaccgcccgccaggacgacgggcgggaagaagcccgccgccaccaccccaccaccagcgcagcagagaagaaaag

SEQ ID NO: 71882 - RNA, 67 nt, Homo sapiens
cagaggggaggacaggcgccacgaaccaaaggaaggcacagagcagaagaaagaagaaacacacgaa

SEQ ID NO: 71883 - RNA, 81 nt, Homo sapiens
cagcccaaacccggaaacccagcggcccagccggacccggccgaaccacgcgcgcaccgcggaacggggagaagaaccacg

SEQ ID NO: 71884 - RNA, 60 nt, Homo sapiens
ccgcccccccgcccccagcagcgcggaggccgccgcagcaagacggcgaagacaaacacc

SEQ ID NO: 71885 - RNA, 75 nt, Homo sapiens
gggaccagaaccaggcacaaagcccgacaagcgcccgaggcaagccaagcgaggacaggaggagagcagagaggc

SEQ ID NO: 71886 - RNA, 58 nt, Homo sapiens
gacaaccccagggaaggggcagcacaccgaggcacacagagcgggccagggggggagc

SEQ ID NO: 71887 - RNA, 80 nt, Homo sapiens
gagaccgagggaagagcccaacaggagccaggaccacagcggagcccagcaccagcagcggcaggggagaccagcacaga

SEQ ID NO: 71888 - RNA, 84 nt, Homo sapiens
gagaggacaggcggaggccccagggaagcgcagaaagcaggcgaacccgcggcgcaaaacggagaagacagaggagccagacca

SEQ ID NO: 71889 - RNA, 85 nt, Homo sapiens
gacagccgaggaacacccagggcaggaaaggagggcgaaacacaagcaccacccccggaagcaccaggagccacagacgaccggc

SEQ ID NO: 71890 - RNA, 74 nt, Homo sapiens
cgaacgcacacacgcggcacaggagaagacgcccgacaccaagaaagcgagaccaaaccgcacaaacaaagcca

SEQ ID NO: 71891 - RNA, 85 nt, Homo sapiens
cgcgcgccgcggaaccccgggcccccgacgcagcccagcggcacggagaaaggacagcccaaggcggaaaagcgaaggaagccac

SEQ ID NO: 71892 - RNA, 68 nt, Homo sapiens
gcgcggaacacagaccccgcgcagggacagccacccagcaacaacaagaaagccgaaggacggagaac

SEQ ID NO: 71893 - RNA, 66 nt, Homo sapiens
ggccccaaaccaagaaccaaaagaaccaaaggaggggccgcaaggccaggcgcgcagaggcaccca

SEQ ID NO: 71894 - RNA, 44 nt, Homo sapiens
gcccgaggacaccgacaccagcaggcaccggaaaagaaccacca

SEQ ID NO: 71895 - RNA, 79 nt, Homo sapiens
ggggacggggaggaacacccagaagcagagagcaggcagcagaagaagaagccacacaccgaaggaaaaaccaaccaag

SEQ ID NO: 71896 - RNA, 82 nt, Homo sapiens
gcgcccgacggggcggccgggggccagagaccaaggcgcgcccggcgggccggaccaagggcgagacgcggaaaaagggcaa

SEQ ID NO: 71897 - RNA, 83 nt, Homo sapiens
gcccggcgagcaagggcaaggacacggggaaaagacagacaggacaggaagcacaagaagaaaagacacaggaaaagaggcca

SEQ ID NO: 71898 - RNA, 85 nt, Homo sapiens
ccccggagcgagccccaccccccaccgcagccccaaggccccccagaggagaccacagagaagacgagacgcaccgcagccggag

SEQ ID NO: 71899 - RNA, 80 nt, Homo sapiens
ggcaggaccaggacccccgcacagcgaccgacgcgaacaccagggagccgcggcacccaggcggaggcagggggacggca

SEQ ID NO: 71900 - RNA, 56 nt, Homo sapiens
accaacacaagccaacccacaagcggcaggacaaaccggcgaccacacacggggac

SEQ ID NO: 71901 - RNA, 55 nt, Homo sapiens
cgggcagagccccaaccaccaggaggaaagcccaggaggcaagcgccaggaccgc

SEQ ID NO: 71902 - RNA, 72 nt, Homo sapiens
aagacccaacaaaaaagaaacagcaaacaagaggaagaggaggcacaaaccacgagcccgccaaccacgaga

SEQ ID NO: 71903 - RNA, 67 nt, Homo sapiens
cgccggggcgccccgcgcacgagggagagcgcacccaggaacgagcgcgagaagaaccggaagacgc

SEQ ID NO: 71904 - RNA, 74 nt, Homo sapiens
gcgggggaggcgagcgcgccgcccggagccgcgcacacggccaagggagccaaggaggcgcagccaagacagga

SEQ ID NO: 71905 - RNA, 80 nt, Homo sapiens
accacaagcgccggagagcgggccgcaaaaccaagggaccgccaagggcgcaagaagaacggacagaccacgggccggca

SEQ ID NO: 71906 - RNA, 74 nt, Homo sapiens
gggggcaggagaacccccacagagagggagagaccagaggcgcccccacgcgcggaaaggaaaacacgggcccc

SEQ ID NO: 71907 - RNA, 79 nt, Homo sapiens
gaaagggacaagaagggcaaagccgaaggaagaggccaggcggcagcaggggcgcagggaacggaagaaaaggcccgag

SEQ ID NO: 71908 - RNA, 88 nt, Homo sapiens
ggagccgccccgcccggggacgaagagcgcagcccccggcgggcagaagcaggagcgcagaaccgcgcgagagacaaacagcggggag

SEQ ID NO: 71909 - RNA, 84 nt, Homo sapiens
cgccaacgagaggccaccagcagacgagccacagcgccgaggcgagccggaggaaagaaccggaggcgaagcaggccaaagaag

SEQ ID NO: 71910 - RNA, 90 nt, Homo sapiens
gggacagagcggcgggacagcccaagggccagcaccgcgcccaggcagagccagaccagccccccccagcgccgaaggcccgacccagca

SEQ ID NO: 71911 - RNA, 109 nt, Homo sapiens
caggaagacggccaggccggccggccggacaagcccaggagccgaccagagagcagaagacgaccccgacgcaggccaggagccgcggacagaagccgagcacggccga

SEQ ID NO: 71912 - RNA, 78 nt, Homo sapiens
agacgcccgcacagacgggcagccgcccagacaggggccggcccaagcaacagcgccggagggccaccgcgcccaggc

SEQ ID NO: 71913 - RNA, 72 nt, Homo sapiens
cgaaaaggagcagaaaaacacgacagccagacaggccgaaagaagagaaggcgagaggaaagcaaagaaagg

SEQ ID NO: 71914 - RNA, 51 nt, Homo sapiens
gcgcgcccgccgacgacccgcccccgggaaacagcccgcaacagagagcgc

SEQ ID NO: 71915 - RNA, 72 nt, Homo sapiens
gggcccggggacacgcgcgggcgggagcggcccacgacgggacacgccccggagggcccgggggggaggccc

SEQ ID NO: 71916 - RNA, 47 nt, Homo sapiens
gaaggacaggaaaaggcccaaaaagccgaggcaggcgcccaggcaag

SEQ ID NO: 71917 - RNA, 73 nt, Homo sapiens
gaagaggaacccccagaacaaccggaaacgcaaggcagaaagacagaggcgaaaaaaggaccagcaaagacac

SEQ ID NO: 71918 - RNA, 83 nt, Homo sapiens
gcgcggagccgcgcccgccgcgccgccgggcgggcccggggccgggcacacgggccacagaggaccagcaaggagaagaaagg

SEQ ID NO: 71919 - RNA, 56 nt, Homo sapiens
acagccagccaccagcagaaggccccggaggcacaagaggaccagaaaaaagcaga

SEQ ID NO: 71920 - RNA, 76 nt, Homo sapiens
cggacaaccacagcccggagagccgaccgggagaacacggggaaggccggaacggggggcaggaccgggccagacg

SEQ ID NO: 71921 - RNA, 39 nt, Homo sapiens
cgcccccgccgcgcccgggcggccaccggggaccgcaag

SEQ ID NO: 71922 - RNA, 72 nt, Homo sapiens
gaaaaaagaaacacgaaaaaagccgcaaaaagagggaaagacacggagaaagaagcggacccacgacagaaa

SEQ ID NO: 71923 - RNA, 80 nt, Homo sapiens
cgccccaccgggcaaaccgcggacgccggggccgccacgccgggaaggaagccgcccccaacgcagacgccacccagagc

SEQ ID NO: 71924 - RNA, 73 nt, Homo sapiens
agaaccggagagacacacagcagcccagccagcccgagcaagaaagaggagccaaggggaggaacggagaaag

SEQ ID NO: 71925 - RNA, 75 nt, Homo sapiens
acgaaccacaggcgagaccgagacaagcaggacaagggaaaaggagaaccccagcgggaaccgcaccgcaaaccg

SEQ ID NO: 71926 - RNA, 81 nt, Homo sapiens
aagagacagcgaggacagaaggaagagcaaggcaccggcaccggaccaacacgaaggagaaccgcaggccccgcggagaac

SEQ ID NO: 71927 - RNA, 78 nt, Homo sapiens
ggcaacgcgaaaggaggcaagaaggcagcccaagagaacgaaagcaaaaagcgccgaccagccgcaaaaaacaaaaag

SEQ ID NO: 71928 - RNA, 72 nt, Homo sapiens
caccaacgcaacccccccaagcgcgccaaccagcggggggaagacaccaaggcccgagagcacccagcccca

SEQ ID NO: 71929 - RNA, 38 nt, Homo sapiens
aagggaagcagaaccaacagacccaaaaggcggaaacg

SEQ ID NO: 71930 - RNA, 81 nt, Homo sapiens
ccgggagaccgcaggcagaaagcccacgaccgccccagaggcaccagaagaggcaacggacaaaagagaaacacaagggca

SEQ ID NO: 71931 - RNA, 56 nt, Homo sapiens
caagggacacaacgcgccacgaaggccaggccagggagaaccccggggccaacagc

SEQ ID NO: 71932 - RNA, 86 nt, Homo sapiens
caccaccacgccagccgcaccagccgcccaagccgcacagccgcggcggcagcagcaggagaggggcagcggcgccgcaagcacgc

SEQ ID NO: 71933 - RNA, 35 nt, Homo sapiens
gcgcaacccaagcgcgaacagaagcaggagaagca

SEQ ID NO: 71934 - RNA, 84 nt, Homo sapiens
gaaggggaaggaggggcagcgcgccacgcagagccccgccaggaagacacgccggggaacgaagcagaagacggaggggggcgg

SEQ ID NO: 71935 - RNA, 48 nt, Homo sapiens
acaggaaccgcacgcgggaagcaccaccgacacagggaggaagcaagc

SEQ ID NO: 71936 - RNA, 84 nt, Homo sapiens
cggaaccgagagccccgaggggggcgagcagacccaggcagccgcgcaaggaacaaaaggagcagaaaaccagcagaaaggaaa

SEQ ID NO: 71937 - RNA, 80 nt, Homo sapiens
caccaggacccaaggaaccacgaggcaaaaagagggccaagaccgaaggggaggaaggccaaagccaagaccgaggggag

SEQ ID NO: 71938 - RNA, 70 nt, Homo sapiens
aggcgcggaggggcaacggcaggggcgcaacaacaagccaaggaggacaaccggaaacacacaggaacag

SEQ ID NO: 71939 - RNA, 48 nt, Homo sapiens
acccccaccaacccgccgagccagggcccacccagcgggaaagacaac

SEQ ID NO: 71940 - RNA, 53 nt, Homo sapiens
gacgcagcgcgccccagaagaagacacaacaggaccaaggccgagcccagcca

SEQ ID NO: 71941 - RNA, 77 nt, Homo sapiens
caggaggccaccgaaggcacggacagggacagaccagggacacaacgggaaaccggaccgacaagcagaccggaaga

SEQ ID NO: 71942 - RNA, 106 nt, Homo sapiens
gccgccgccgccgccagaacaaccgggcgccgacgagacggggaagaagcccagcggaggcgaacggcccccgccaacacgaggaccccacggagaggcccgcgga

SEQ ID NO: 71943 - RNA, 52 nt, Homo sapiens
gcaaacggaaagagcacagcccggggggaaagggagcggcgacagacacggg

SEQ ID NO: 71944 - RNA, 59 nt, Homo sapiens
gccggaacagcagagacacagagggcagcagagccaagacaggaacacagagagcaaca

SEQ ID NO: 71945 - RNA, 82 nt, Homo sapiens
gccggagcggcccgcgccgggcgccggcaccgcggcagcccgccgacacagccaccaagaaggcacaagcagaacgggaaaa

SEQ ID NO: 71946 - RNA, 64 nt, Homo sapiens
caagaaccagggagaagccgcccgaacaccagaggcgcggccagcgaagaagacgcagccagac

SEQ ID NO: 71947 - RNA, 57 nt, Homo sapiens
agacaaaagggccaaagaagggagagaggaccgagaaaaaacaccagagaaaaagag

SEQ ID NO: 71948 - RNA, 79 nt, Homo sapiens
cacacagagcagacaccaggccgggcacacaggccgaagggcaagagggcacagaagacggcgccccacacacggccca

SEQ ID NO: 71949 - RNA, 70 nt, Homo sapiens
acacgaccagcagccggggccaaaagaaagggagaggcgcaccagaaggggaggaccaggagaagccaac

SEQ ID NO: 71950 - RNA, 65 nt, Homo sapiens
agagccaaccggagcagcagaccacaggagagggaaacccgccccgcgcagcagcacacagaaga

SEQ ID NO: 71951 - RNA, 86 nt, Homo sapiens
gcagaagaaaggcggcccagaccgaaggacacgagaggaaggacggagaaggcaggaacccaagaaggcagaagccagccccgcag

SEQ ID NO: 71952 - RNA, 77 nt, Homo sapiens
ggcaacccagaacaaggaaaagcaaggcagacacaagaaccggggccacaacacggacaccagccgaaagccggaaa

SEQ ID NO: 71953 - RNA, 115 nt, Homo sapiens
cccaaacgggcccccgaccgcgcccgcgccggcgcacggcggccgcggcgcggcgccacgcccgaagggccgaggacaagcagcgggaggaacaaccgcaaggacgcaggcgaag

SEQ ID NO: 71954 - RNA, 69 nt, Homo sapiens
aagaccccccggggaagagcaggaccgggagccaacccgggaagagccacacggaaggaggaaaaacca

SEQ ID NO: 71955 - RNA, 82 nt, Homo sapiens
aacaccaccacgccacagaaaaacgaggcccagagacagaacaaggccacaccccccacaggaccacaggaggaaaagagcc

SEQ ID NO: 71956 - RNA, 43 nt, Homo sapiens
agagggaccgcgccaccggccgcaagaagcaagcaaccaggcg

SEQ ID NO: 71957 - RNA, 102 nt, Homo sapiens
gacccccccccccgggccacccagcccgcccaaccccagcggagagcaaggggaaaagaaacaaacaacaagaagaaggacaaggaacgaaggcaaggaggc

SEQ ID NO: 71958 - RNA, 75 nt, Homo sapiens
ccccaagggccaggccgcccagaccaggaggagaagaaagcacagggaccaggggaaggccagaagcacgagaag

SEQ ID NO: 71959 - RNA, 56 nt, Homo sapiens
cgcgcgcccgccgcccgaggagccccgcgcggacccacgcccaccacaagcagaaa

SEQ ID NO: 71960 - RNA, 75 nt, Homo sapiens
ggcagaaaagcagacaagaggaacgccagccgagcagaaccgaacacacagcaagcaaacccagagcaagcaggc

SEQ ID NO: 71961 - RNA, 73 nt, Homo sapiens
gccaccgccgaccgaagccgcaaaagcgcgcaggcaggcacaaggcccaggcacaggccccaggaggcccaaa

SEQ ID NO: 71962 - RNA, 36 nt, Homo sapiens
agggggcgcgagcggggagcccgagcaagaagaagg

SEQ ID NO: 71963 - RNA, 63 nt, Homo sapiens
agaagaccggcaggagaacagggcaggaaagggaacaacgaccgggggaagcggaagcacagc

SEQ ID NO: 71964 - RNA, 87 nt, Homo sapiens
cggccaccggaggagcgggagccaagcaggagcaggccgggcccgccagggcacgcgcccgccacgggaagcccgagaagccgcgca

SEQ ID NO: 71965 - RNA, 61 nt, Homo sapiens
ggaccgaaggaggccgggaccacccagccagcggaagaaggcccgaaaaagcccaagacag

SEQ ID NO: 71966 - RNA, 73 nt, Homo sapiens
ccggggggggcgcaaccgggagcccaggaagcgcagacacaggaaacacaaagaagacaccagaagggccagc

SEQ ID NO: 71967 - RNA, 64 nt, Homo sapiens
cccgcgacgccaaccacgacgaagcggaaggcagaagaccccagaagaaaggcggacaggagga

SEQ ID NO: 71968 - RNA, 49 nt, Homo sapiens
gcgcgagcgacaacgggacgggaaacgccaaaccggaagcaaaagccac

SEQ ID NO: 71969 - RNA, 79 nt, Homo sapiens
ccagccccaccaccaaacgggccagacaggccacaagcccagcacaaaggagaagcgccccaaacagaggaccagcggc

SEQ ID NO: 71970 - RNA, 59 nt, Homo sapiens
agccccaggacaaaccaaacccccagggagacacgaggggagcccccgagcgcccgcga

SEQ ID NO: 71971 - RNA, 75 nt, Homo sapiens
ggcccgacgcgacgggcccccagggcggagaacggaaaagcaccaggaagcagagaggaccgcagaagggaagga

SEQ ID NO: 71972 - RNA, 74 nt, Homo sapiens
ccgaccgccaccagaggcacaggggaacaaacagagcaccaagaaagcacgcagccagagcaacccaggaacaa

SEQ ID NO: 71973 - RNA, 76 nt, Homo sapiens
ccacagcaagcccaggcagaggcccacagccaggccaagcgaagcacagagacggagaagggcgcgaggaagagac

SEQ ID NO: 71974 - RNA, 85 nt, Homo sapiens
aagccgcccgaacaccagccacccgaagggccccccaagcccagggaccgcagaggacggggaccagcaagcaacccccagggca

SEQ ID NO: 71975 - RNA, 67 nt, Homo sapiens
ggacgccgcgcacgaaaaacgaaagaggggcgcccccaagcccacagcgaagaagggccacccccga

SEQ ID NO: 71976 - RNA, 75 nt, Homo sapiens
cacaccaaccgacgggagacgacggcgagaaacacgcagcaagacgacagcaagaagccacccaaccagccaaga

SEQ ID NO: 71977 - RNA, 84 nt, Homo sapiens
ccgccgcgaggagcgcgccacccaggggcgggcccccgccgcgcgcggcgccagggaagcgacgaggaagccaagcaggccgga

SEQ ID NO: 71978 - RNA, 67 nt, Homo sapiens
agcgccggaaaccaacaaggggaaaccacaccacccgccacagacagggaggaggacagccgaaaac

SEQ ID NO: 71979 - RNA, 79 nt, Homo sapiens
agaaaaagcccagacgggagggaccacagcccagcaccgaagcaagaacaggaccagagaagaggggaggggcaaacaa

SEQ ID NO: 71980 - RNA, 72 nt, Homo sapiens
ccccccgcccccccccccacgcaaccccagaccaacacacagcaaccgcacacaaggaggccccggcaggcc

SEQ ID NO: 71981 - RNA, 79 nt, Homo sapiens
cggacacgaggagaaacagcagaaacgcaccaggccaaagaaagagaagaccagacagcaggaaaagacaagaaaaggc

SEQ ID NO: 71982 - RNA, 85 nt, Homo sapiens
caacaacgcagcacagccggcacaggggcccgcgagaggaacaagaccaaccaacgccaaccgccccgcgcagcgggaacgcgca

SEQ ID NO: 71983 - RNA, 82 nt, Homo sapiens
gcccccgggccgccggcacccgccaccaccgcgggacaagcaggaacacagaaccgccaccacagaaaagggaaagaaacgc

SEQ ID NO: 71984 - RNA, 88 nt, Homo sapiens
ggagcacaacaggcagacagacaacagcaaccaagccagaagaagaccaggggggaggagggagaggaagcagcgggggaagaagggg

SEQ ID NO: 71985 - RNA, 80 nt, Homo sapiens
caaagccgcaagaaagacgccgccccaacagacgcccaaaggacggcacacgagggagcgaccacaaaagcgggaaagcc

SEQ ID NO: 71986 - RNA, 57 nt, Homo sapiens
acgcagggcgcccccgccaacagcgcaggagcaccccacaggcccagaggaggcagg

SEQ ID NO: 71987 - RNA, 78 nt, Homo sapiens
agcccccagcccgccgccgccccgccgcggcgcacccgccccgcgccgcaggcaaaagcagaccggaaaacccaccgg

SEQ ID NO: 71988 - RNA, 79 nt, Homo sapiens
ccgggcaccagagcgacgggcaggaaggagggggcgcacaaacgaggggggaacgccaagcacaacggcagcagaacac

SEQ ID NO: 71989 - RNA, 79 nt, Homo sapiens
gggcgcccggacccgcggagggcgacagaggcgaggaggaggagccagggcgagcaccaagagggaccacaggacaggg

SEQ ID NO: 71990 - RNA, 78 nt, Homo sapiens
caggggaccaaagcagggcacagcgaaggaaagccagaggacacgaagggcagccacaaagcgacacgccagaaacgc

SEQ ID NO: 71991 - RNA, 69 nt, Homo sapiens
ggcacaaagcggagcgaccgaccaggcaaccacgggagagaagaaacgaggcaggaaagaaaggcagcc

SEQ ID NO: 71992 - RNA, 76 nt, Homo sapiens
caccgcagaccacccagccgagggggagggggacccaggcagcggaaggggccggggaggcaagcaggggggcaaa

SEQ ID NO: 71993 - RNA, 66 nt, Homo sapiens
aggcgccgaagagccgggcggacaggcacggggaacaaccaaccaagaggagggcccggacaggag

SEQ ID NO: 71994 - RNA, 65 nt, Homo sapiens
gccgggcaagacccaagaaagaggcagcagcacgcgaaaagccggaacccagaagcaagagagga

SEQ ID NO: 71995 - RNA, 78 nt, Homo sapiens
cccagaggaggaagagcagacgcacacggcccaaccagcaggccgggacccaacaggaggggcgcaaaacgagaacaa

SEQ ID NO: 71996 - RNA, 80 nt, Homo sapiens
ggagggggggaccacgaaaggagcaagagcaagacaccggacaccgagggcccccaaaagggagaacagcccccaaacag

SEQ ID NO: 71997 - RNA, 82 nt, Homo sapiens
ccaggagacaaggacaccgcacgcagcacaggcaaggcgggaccgacgcaggaagcccgagcaccgacgagaccagaagggc

SEQ ID NO: 71998 - RNA, 71 nt, Homo sapiens
gccggccgagaaggcagaggcggcggaccgcgggacgacgaagagaggaggggcaccggggccaccccagg

SEQ ID NO: 71999 - RNA, 80 nt, Homo sapiens
agagcgagcgacccagcccgcgagcgaggcaaggcaagaggagggagagaggaaagccaaagagcgaagagagaaacagg

SEQ ID NO: 72000 - RNA, 50 nt, Homo sapiens
ccgaagaccgaagggaccagggcagacagcgagacgacgggaccgaagga

SEQ ID NO: 72001 - RNA, 75 nt, Homo sapiens
aagcaaagaccaagagaagaggaggaggaagccaagaacgggagcgaagccacgcagcggcaccaacgaccgggc

SEQ ID NO: 72002 - RNA, 53 nt, Homo sapiens
gggaaaggaagcgcacaggaagccggaaacgcgagacgacgggaccgaaggac

SEQ ID NO: 72003 - RNA, 75 nt, Homo sapiens
ggacccccaaaagcgggaaagaacgaaaacaaacggaagagagggcagcaagaaagaacaagaaagcgaacggaa

SEQ ID NO: 72004 - RNA, 76 nt, Homo sapiens
gacaagacaccacggacgagagacaaacgccgaagagcgacgccgacaaaggaggaaaagaagagaccagcgcagc

SEQ ID NO: 72005 - RNA, 76 nt, Homo sapiens
cagccaaagagagaacgaaaggaaaccggaaacacagagaaggaaaacacccggcagggaaggaaggaacgcaacc

SEQ ID NO: 72006 - RNA, 77 nt, Homo sapiens
cacaccggagagacgagggagaagcaggccaacagcaaaaaaccaagagggggaacgaaaaaggcggcagcagggca

SEQ ID NO: 72007 - RNA, 104 nt, Homo sapiens
gagcacagcaggggcagggaggcggcgcgaaggagaacggagaggaagaacgagccgcacagacggggcgggcaccagaacaagacggcagagccgcggcggag

SEQ ID NO: 72008 - RNA, 78 nt, Homo sapiens
ggagcgcgagggagcgccaagggcacgggaagaccggaggggacgaagaacggcagagagcgcagaagacaggacaaa

SEQ ID NO: 72009 - RNA, 83 nt, Homo sapiens
cgggcggagacaggaccgcggcgagcaaggaagaaggggaaaagcacagaaaccaggacggggcgggaaccaggagaaaagag

SEQ ID NO: 72010 - RNA, 78 nt, Homo sapiens
gccagccccccgagggcaacgagaaagagacggggcgaagaagaagcacaaaaccacacaggcaagcaggagggcacc

SEQ ID NO: 72011 - RNA, 83 nt, Homo sapiens
ccgcaccggcccgagccaggagaacgccggcagggcggagaacggaaaagcaccaggaagcagagaggaccgcagaagggaag

SEQ ID NO: 72012 - RNA, 85 nt, Homo sapiens
caaccaacggacaccaccaggggacggcacggacgacagaagcgacgggagaccgagaccaggaaggcaaggaagaaaggaaaac

SEQ ID NO: 72013 - RNA, 56 nt, Homo sapiens
cagccccgaggagcgggaacagcaaaggaaaaggagagcggaaggaaagagacaca

SEQ ID NO: 72014 - RNA, 76 nt, Homo sapiens
gcagacggaaacaaggcaacagaaagagcaacagcagggcaacagcgcagaaccggccgaaaagcacaaacagcaa

SEQ ID NO: 72015 - RNA, 69 nt, Homo sapiens
gagcccggccgccagaccacagcacagccgggaaggggagccaccagccccccgcaacggggcggcaca

SEQ ID NO: 72016 - RNA, 77 nt, Homo sapiens
cgcggggcggccgggagggggcagcccgccggcgagcagcggggggccccagcccggccgaacgggcgcacgacaca

SEQ ID NO: 72017 - RNA, 53 nt, Homo sapiens
agggccaaagaagggagagagggagggaaacagcgaaaagcaaccagcagacc

SEQ ID NO: 72018 - RNA, 40 nt, Homo sapiens
cgggggccgccggcggcccggccagaggagccgccgcgcc

SEQ ID NO: 72019 - RNA, 106 nt, Homo sapiens
gcgagaacagaaggagacagcgaagcggggggaaggagcgaaagagaggacagagcagaagggcgaaagaccgggccgcagaagaggccccaacccgggccagaca

SEQ ID NO: 72020 - RNA, 86 nt, Homo sapiens
ggggcccagcaaagccaaaggaaggaccaggccaccaccaccacagacagagggaagagcggaacaccaacaaaccagcagagcca

SEQ ID NO: 72021 - RNA, 71 nt, Homo sapiens
cacaacgcaagaaacggagaacccagacggcaccgaaggccggaaagagccagacgagcagggacgggggc

SEQ ID NO: 72022 - RNA, 54 nt, Homo sapiens
accaagaaccaggcaacaacggccagcccagggagaggcacacaaaccacgggg

SEQ ID NO: 72023 - RNA, 76 nt, Homo sapiens
caggaggcgagcaacaggaaacccgaccgccccaggggcacagcaggaccagcagggccccacacagcaaagaaag

SEQ ID NO: 72024 - RNA, 67 nt, Homo sapiens
gacagaggaaccgcagggcgaggccgccaaagggagcgaggagacacgaagcagaagcagccagcgg

SEQ ID NO: 72025 - RNA, 70 nt, Homo sapiens
agcaagagggcggaggccacgaacacgccggagccgccaggcacggggccaaaaaggcacgagggaacgg

SEQ ID NO: 72026 - RNA, 69 nt, Homo sapiens
gacgcaagaacgccgaaccaggaacaacaagaaccaagccacagcaaaaagaagccaaggggagcaaaa

SEQ ID NO: 72027 - RNA, 55 nt, Homo sapiens
caggagcagcccaagcgccccccacgacagacagggggccggggcaacaagaagc

SEQ ID NO: 72028 - RNA, 83 nt, Homo sapiens
ggccggcgagcggcggcggcggcaccaacggcaccaacacgcggagcggaagacggcaacccagacacagcgagacagcccgg

SEQ ID NO: 72029 - RNA, 85 nt, Homo sapiens
ccacccgccccgccgaggcaggcgcccaccgccggcgggagcggcggaagcccagcgggccacacccccggagaccaagagaaga

SEQ ID NO: 72030 - RNA, 77 nt, Homo sapiens
gacgggccaagagagcccgggcccggaaagcgcccagcgacaaagaaaagccagcggagggcagagccccaagaagc

SEQ ID NO: 72031 - RNA, 77 nt, Homo sapiens
agaaccaagaagcaacccgaaaaagggaaagaggacgagaggacccaccgccccggaagccaggggcccggaacaca

SEQ ID NO: 72032 - RNA, 60 nt, Homo sapiens
agccacgaagggggagagaagcgccagagaggaaaagaagccgggcggaacgacgccagc

SEQ ID NO: 72033 - RNA, 53 nt, Homo sapiens
cagcgaggaacacagcacaaaagggaacaccaaccaaggcaccaggaaacccg

SEQ ID NO: 72034 - RNA, 59 nt, Homo sapiens
cgcgcggacgcaaaccgagccccgcgccgcaggccagaaccgcccaaacgagcagaagc

SEQ ID NO: 72035 - RNA, 63 nt, Homo sapiens
gacagaccgcagcggaccgcagcaggcgcgcgagcgcacagcgccacgccaggaggcccgaac

SEQ ID NO: 72036 - RNA, 57 nt, Homo sapiens
agcaaggaggccccagcggaccgaacaggaaaagccaccaaggccaacccgggagga

SEQ ID NO: 72037 - RNA, 78 nt, Homo sapiens
ggcgcagccgggcccggccccagccgacgcgcaagccccggggcagagacacaggacacccacccgccggggacagac

SEQ ID NO: 72038 - RNA, 39 nt, Homo sapiens
gggaacgaggaagcgcccaagaacaagaaccagaggaca

SEQ ID NO: 72039 - RNA, 51 nt, Homo sapiens
cggcgccaccccacgcaggaggcagagaacaaggcaaagaggcaggagggc

SEQ ID NO: 72040 - RNA, 71 nt, Homo sapiens
caagagccaggacaccggaagcgggaaaaggacaaaccggcgaccacacacggggacgacggggaagccgg

SEQ ID NO: 72041 - RNA, 63 nt, Homo sapiens
ggaggacagggaaaggagcggggagccccgcgccacagcaaaccagccggcgggcgccacaac

SEQ ID NO: 72042 - RNA, 77 nt, Homo sapiens
gagaggccgcggcgaggaggagggccggcaggcgggcgcgcggcagcaggcgagcccgcgagcaaaacagagcagaa

SEQ ID NO: 72043 - RNA, 74 nt, Homo sapiens
ccggcggaccccggcggcggcgcgcggcccgagccgggccggagagacagcaacgacaacggccgagcgaccag

SEQ ID NO: 72044 - RNA, 96 nt, Homo sapiens
cgggcgagccggcgacggacgcggcgcgcgaccgacacgaagaaaccagcccgagcagcagccgagaaagggggccaggcaaacaacagaacacca

SEQ ID NO: 72045 - RNA, 71 nt, Homo sapiens
gacaaagaaccaagcagacagccaacaaaagcaggcccgcgcgggagcgacacgacaacaaccagagcaga

SEQ ID NO: 72046 - RNA, 49 nt, Homo sapiens
gaagaggaagcaaagccaagcaagggggaacaggcaaagggcagcaccg

SEQ ID NO: 72047 - RNA, 71 nt, Homo sapiens
gcggacaccaggacccaaaaggcgcagggagccgagacaggggagagacagagcaccgggcgcgagggaag

SEQ ID NO: 72048 - RNA, 75 nt, Homo sapiens
aggagcgcccgggcccacccgagagacggcgccgcaccacgcggcacccaccagcagcgcggcacagcagccacg

SEQ ID NO: 72049 - RNA, 69 nt, Homo sapiens
cggaggggccgcggaggggcacgagcgccacaaccccaggggcccaccacagccacccacggccgaggc

SEQ ID NO: 72050 - RNA, 70 nt, Homo sapiens
gagaacaagcaacggcggagcgaggggaggggaaagggccgcagggccaggcccccagaggaccccgccc

SEQ ID NO: 72051 - RNA, 74 nt, Homo sapiens
cgcccacccaaagagacacggagaaggagaggacggcacaaacaagcaacgagcgcagaaaggccagacaggga

SEQ ID NO: 72052 - RNA, 70 nt, Homo sapiens
cggaaaggaccagaccgcccaggaaacgggagaaaacgggccggaggaaaagggcggcaggggaccacca

SEQ ID NO: 72053 - RNA, 79 nt, Homo sapiens
gacgccagcgggacgaggaccgagaccgcggccgggaccgagggcaccagaagcccccagcgggaaaagagcacccaag

SEQ ID NO: 72054 - RNA, 56 nt, Homo sapiens
gaacacgccggagccgccaggacccaaagacaggaccacgcaccagcagagaagga

SEQ ID NO: 72055 - RNA, 74 nt, Homo sapiens
aagacaagaaaagaaggacgggggcacgaagcagggccgacacaagcccgcagcaaagaagggaaggacacaac

SEQ ID NO: 72056 - RNA, 83 nt, Homo sapiens
ccgccggcgaccccagccagcgcagcgacggggcgcgccggcccaggcgcacacggaaggccccacgaagacgaccaagcaaa

SEQ ID NO: 72057 - RNA, 73 nt, Homo sapiens
gcagaagaagagaggagggagaacacagaaaccggccccaggacaggaagcacaagaagaaaagacacaggaa

SEQ ID NO: 72058 - RNA, 54 nt, Homo sapiens
ccaccccgagagaggacgaagaacaaggcagagcgcaaccccgcccgaagcaga

SEQ ID NO: 72059 - RNA, 73 nt, Homo sapiens
gggaagcaccggaaacggacgacagaaaaaagcaccaccagaggcacgggagaggaaaaaacaccagcagccc

SEQ ID NO: 72060 - RNA, 78 nt, Homo sapiens
agcccgcgccgccggcaccagaggagccagggcagaaacccccaccaggcgggcgccacacggcaccccgggacaaag

SEQ ID NO: 72061 - RNA, 76 nt, Homo sapiens
cgcgcgcggcgcgggacgcgcgcgggcacccacggagccccggggcggggcgggaagaagcccgccgccaccaccc

SEQ ID NO: 72062 - RNA, 89 nt, Homo sapiens
caagaaaaaaagacgaaagaagaagaagagcaaagggcccgcaggaaccaaccgggagccccccaagagacccaggggaagacccaaag

SEQ ID NO: 72063 - RNA, 53 nt, Homo sapiens
gaaaggccaacagaacaagagagaccaggggggagcgggaaacgcacaacaga

SEQ ID NO: 72064 - RNA, 34 nt, Homo sapiens
cggagaccacacccgaggccgccccccccacaca

SEQ ID NO: 72065 - RNA, 78 nt, Homo sapiens
cggagaggcaggcgcggcccgcggggcgccaggcacgcgaggcccccaggaaacggaacgccaagcgaagaagaacga

SEQ ID NO: 72066 - RNA, 81 nt, Homo sapiens
gaaagcacaaaggaagacgaaccggagaagagcaccaggagacaaagccacaaaaacaccagaaaaaccaagcagaaaagg

SEQ ID NO: 72067 - RNA, 69 nt, Homo sapiens
ccccgggccagcccgcgcggacgcaaaccgagccccgcgccgcaggccaaacgcagaagagcagcacag

SEQ ID NO: 72068 - RNA, 69 nt, Homo sapiens
aagcgaacaggagagagggagaacacagagccggacacgaggcaccgcccagcagcagaacagagcagg

SEQ ID NO: 72069 - RNA, 76 nt, Homo sapiens
cacaccccccccaggcaccagcccaggccaggacggaggcaccaagaccgacagcgagcggcgaggcacaggcccg

SEQ ID NO: 72070 - RNA, 71 nt, Homo sapiens
ggaacgacgaacacggggccacccagagcccgacacggggcagacaaacacagcgccaaggaaagaaaacc

SEQ ID NO: 72071 - RNA, 42 nt, Homo sapiens
accgcgaggagcgcagccgcaagaaaagaagacgccacaaac

SEQ ID NO: 72072 - RNA, 67 nt, Homo sapiens
acacagcaccacacgcccccaagacaacgaaggggccgcaaggccaggcgcgcagaggcacccaacg

SEQ ID NO: 72073 - RNA, 81 nt, Homo sapiens
gacccaggaaccagcagaggcccggaggggggggggagcacaggcagaggaccaccgggcaaagcccaccacggcagcagg

SEQ ID NO: 72074 - RNA, 79 nt, Homo sapiens
gcaaggagcacccggcggagcagagccaggaacacagcacccacccacacccacacccgcgacgggagggaggagccgg

SEQ ID NO: 72075 - RNA, 61 nt, Homo sapiens
gagaaccgaacaagcccagcgaagcgggcacggggcggaagcggcgccgcaagccaggagc

SEQ ID NO: 72076 - RNA, 76 nt, Homo sapiens
caacgagggccaaccagcagaagcacgggaggggagagagaaccggcacaccggagcaacccagaacacagcggag

SEQ ID NO: 72077 - RNA, 86 nt, Homo sapiens
gcggccaaggaggagagcaccggaacccccaccagaagcagaacaacgaagccccgaagacaacgggacccccacacaagaggacc

SEQ ID NO: 72078 - RNA, 51 nt, Homo sapiens
cagagcccagacgcaccgccaagagagaaagcaagccagaagccagggggc

SEQ ID NO: 72079 - RNA, 71 nt, Homo sapiens
ggacacgggggccacaaagccccccggagacgcaaccaaggacacgcgccaaaccgacgaaaggcgagggg

SEQ ID NO: 72080 - RNA, 75 nt, Homo sapiens
acccgccacacccggggccggcaccccgacccacaggaggagccgacaccggaggaagcccggcccacaccgccc

SEQ ID NO: 72081 - RNA, 83 nt, Homo sapiens
acaggaacggaggacgcccagagacaccgcccccagcgggggggaggagccccagccaccaagaaaagagaagacacagggga

SEQ ID NO: 72082 - RNA, 84 nt, Homo sapiens
ccagacccggagcccagggaagcagccgaccagccgcggagccgggggcagaagcagaccccacgagcgaaagggaaaaaacga

SEQ ID NO: 72083 - RNA, 70 nt, Homo sapiens
gaagccaaggagcgccgggaacaaaaccagcacccaaggcagccggaaacgaggccagggaccgaaaggg

SEQ ID NO: 72084 - RNA, 81 nt, Homo sapiens
cgcagaccgcagaaggccggagacaccagcaggaagaagaaaggggggcgaagccagcaagacgaggacgacccaaggaaa

SEQ ID NO: 72085 - RNA, 74 nt, Homo sapiens
gggccagagaggccaaaacaggcggagaaaccgaggaagcagcaggacgaagcacgcagagaagccgagacaaa

SEQ ID NO: 72086 - RNA, 75 nt, Homo sapiens
gagccaggagcgacgcaccgccaggcaggcacaaaggcccaaagcccagccaaggacccgaaaaacgagccacac

SEQ ID NO: 72087 - RNA, 76 nt, Homo sapiens
caagaaccagggagaagccgcccgaacaccagggcgaaaccaagaggagggaagcaggcagacgcgaggccggcca

SEQ ID NO: 72088 - RNA, 79 nt, Homo sapiens
caagaacaccggagggcggcggaggacgcaaaacaccgagaggagggcaggagaaaggagaaaaagaggcagggagaag

SEQ ID NO: 72089 - RNA, 68 nt, Homo sapiens
cagaaccccccagaaaagacaccggggggccaaagacgagagaagcccacaaaggaggaaacagaaac

SEQ ID NO: 72090 - RNA, 86 nt, Homo sapiens
cagggcacggcacgggggcgagaaggcgaaggcgcaggcggagcgagaaccagccaaaacacacgaacagggaacaagaaacaccg

SEQ ID NO: 72091 - RNA, 74 nt, Homo sapiens
ccaaggaaaaacggagagccacaaaaaaggaagcgaaacacccgaaagagcgaaagcccagacaggaagcaacg

SEQ ID NO: 72092 - RNA, 77 nt, Homo sapiens
agaccggcaggcacagccacagacagaaacaagggaaaagaaaggcggcgaagaagagccgagagggaggaaaggga

SEQ ID NO: 72093 - RNA, 74 nt, Homo sapiens
cacagcagaagaaggcgcagaaagagagagcacaggacaccaacacgcggaagccccaacccgaagcacccaaa

SEQ ID NO: 72094 - RNA, 76 nt, Homo sapiens
caacaaccacaagaaaacggccagagcaaaagcagggcagagcgcaaaaacacagaagcggagaacaagagcagac

SEQ ID NO: 72095 - RNA, 65 nt, Homo sapiens
acacccaggggcaaagggaccccgacggagagacaaagaagacggagggggggccagccaccgcg

SEQ ID NO: 72096 - RNA, 82 nt, Homo sapiens
gcggaccgcacgagcgcggcaaaagcagaccggaaaacccaccggcaagaccacacccgaggggagcccaggacaccacgaa

SEQ ID NO: 72097 - RNA, 73 nt, Homo sapiens
gagaacaagaggaagcacacggaagagcgaaaaagagaaagcacacagacgcggccaaccacccaaagaggag

SEQ ID NO: 72098 - RNA, 83 nt, Homo sapiens
agaaacagagaaggaacaggcccggagccacagaacccaaagcacaaagcacaagggcaggagcacgcgccccaacgccccgg

SEQ ID NO: 72099 - RNA, 78 nt, Homo sapiens
aacacggaggcgggaaagagcagaaacgaggcccagcagagagagaacagcgaggcaccacccacacgccccagcaag

SEQ ID NO: 72100 - RNA, 73 nt, Homo sapiens
gccaagacccggagacgaccaaacagcaaagagggaccgaccggccaggcacagcgaccgaacgaggccaaag

SEQ ID NO: 72101 - RNA, 76 nt, Homo sapiens
accaaggacagagccagggacggacagaaaggcgaagccgacgagcccgaacagacgcaccagcgggaggaagagg

SEQ ID NO: 72102 - RNA, 82 nt, Homo sapiens
ccccagagcggagacaacagcaggagcaaggaacgagagaaaagccacagcacgacgagaggcaaagcacagcggcagcgag

SEQ ID NO: 72103 - RNA, 76 nt, Homo sapiens
gggagccggagcgggcgcggacgccgaggcaccgaggcaccagaggaggaaacaaaaagccaacggaaaaagaaac

SEQ ID NO: 72104 - RNA, 97 nt, Homo sapiens
cgcggcagaggaaacggaagggggacggcaagaggagcaaaaacgacacaaaggacaaagccggaggcagaagcaggaaaccagagggagagccggc

SEQ ID NO: 72105 - RNA, 51 nt, Homo sapiens
gagcccaggcacaagggagaggacagacagaaggggggcagaaagaagagg

SEQ ID NO: 72106 - RNA, 81 nt, Homo sapiens
ggaaggacagccaacacaacaaggaggagacaggagagcgccacacagagggacgagccagagccgaccagcgcgcagccc

SEQ ID NO: 72107 - RNA, 73 nt, Homo sapiens
cgcggccggcaagaacggacgggcgccacaagccacacggaggcaggcaggggcagaaggcgacccagcgcag

SEQ ID NO: 72108 - RNA, 52 nt, Homo sapiens
aggcagaagggaagaggcgggaagggaaaggacccacgaccaagcagacaag

SEQ ID NO: 72109 - RNA, 102 nt, Homo sapiens
gcgcccggcggcgcagcgccccagcgcgccccaggagcggccggacacagagcgggggaggaaaagccagaggaggaacacaagagagcccgagcccacaaa

SEQ ID NO: 72110 - RNA, 80 nt, Homo sapiens
gaagcgaagaccgaagcaagagcggcaggaaacaaagcgagaaaaagacaagcagagaagcagaagccgaaggcaaggcg

SEQ ID NO: 72111 - RNA, 94 nt, Homo sapiens
ggggcgagccgccgcgccccaggccgcagccccgcgcggcgccccgcgcagcgaggagaagaaagggaagcaaagaaagaagaaccgaggagcg

SEQ ID NO: 72112 - RNA, 69 nt, Homo sapiens
aaaaaagaacgcgggccaagaacaaacagacaaacccagaacgcccgcgccaagcgggggcagcgggga

SEQ ID NO: 72113 - RNA, 78 nt, Homo sapiens
gcgaagcacagcagaaggggccacaagacagcacaaaaagaccgcagagccaagccccgggcggcaccaggaaaaaga

SEQ ID NO: 72114 - RNA, 78 nt, Homo sapiens
ccccgcggcccgggcgagcccggagaagaggaaggcaaagcgaaaaagaccgcagggaaggccgccacgagacagaaa

SEQ ID NO: 72115 - RNA, 71 nt, Homo sapiens
gaaaccagggcaaaacaccacccccccacaggaaacagcggaacgggcacaaagaaggcgcaggcaagacg

SEQ ID NO: 72116 - RNA, 41 nt, Homo sapiens
gccccggggaagccaccccaccccccagagcaggcgggcag

SEQ ID NO: 72117 - RNA, 76 nt, Homo sapiens
ccacgggagaggaaaagagaagaagacccaggggaggggggggagagccagggggagagccacccagcagggaggg

SEQ ID NO: 72118 - RNA, 70 nt, Homo sapiens
ggaaggagagccccgaaaaagacaacagaccaaagagacaagggcagagccaagcgccgcccgggcccaa

SEQ ID NO: 72119 - RNA, 73 nt, Homo sapiens
gaacaccgcggaaacgagaagcgaggggacaaggaaagcccgaaaaggaccagcgaagcaagcacagggagga

SEQ ID NO: 72120 - RNA, 75 nt, Homo sapiens
gggccgacgggggaagccgaaggacacagacaaggcgccccgcagcgcaagcacaccgagagagcgacggaaaga

SEQ ID NO: 72121 - RNA, 81 nt, Homo sapiens
gagcggcggcggcggcagcagcggcagcggcaagcaccccccgacaggggccccaccagccaacaccccccccagaaggaa

SEQ ID NO: 72122 - RNA, 75 nt, Homo sapiens
cgaacgggacagagggggacagcgaaacgcaccgcccccaccacccaaagcggaggagcaaagaccgggggacga

SEQ ID NO: 72123 - RNA, 73 nt, Homo sapiens
gaagaccgcgagaacagaacggcacccccccgcgcgcgggccagaggagcagccaagaagccccccaggggcc

SEQ ID NO: 72124 - RNA, 75 nt, Homo sapiens
caggaccacggcaagccaacagggggccggcaacccagccagggcagccccccggccaagcagagacacaaaacc

SEQ ID NO: 72125 - RNA, 66 nt, Homo sapiens
cacgcaacccccagcgccaacccaaacgagcgagacacacagaaaggaaaagggaacagcggcaag

SEQ ID NO: 72126 - RNA, 53 nt, Homo sapiens
ggacaaaagagcggaggagcggcgagggcgggaaaaccgccacaaagccccca

SEQ ID NO: 72127 - RNA, 83 nt, Homo sapiens
cacagcggcagcgacaagcaggcagcgggcgccagcaaaaccgaaacagcacacccgccgggcaaacggacccccgcccgacc

SEQ ID NO: 72128 - RNA, 80 nt, Homo sapiens
ccaggacgagaacagcaacaggccagaaggggagagggaagcgcagggaagacccggaggagccgacaaggggagcgaca

SEQ ID NO: 72129 - RNA, 74 nt, Homo sapiens
gcccggcaccaaaacaggagacagccggacagagacaccaaaaggaagcgggcacaaaaaaaagcggaagaaag

SEQ ID NO: 72130 - RNA, 80 nt, Homo sapiens
cagagggcagcgagggagcgcgcgggcgcggggccgaaccccggaagggcaccagggaagccagggcaagcgagcaacca

SEQ ID NO: 72131 - RNA, 73 nt, Homo sapiens
cgccgggacggcagagaacccacaaagaggcgccagcagcgcagcgcccgcagccacgcaacacaagccaacc

SEQ ID NO: 72132 - RNA, 80 nt, Homo sapiens
agcgggcggagcggcggcgcaccaaccgcgcgcaccgccgacccggaagaccgccgccggaaccacaccaagaaagcaaa

SEQ ID NO: 72133 - RNA, 36 nt, Homo sapiens
cggccccccaaggaaaacaggagaaaacccccgaaa

SEQ ID NO: 72134 - RNA, 84 nt, Homo sapiens
gagcccagcagcgagggcagggagagaagcagccacgccccacggaagacggacccaacacggggagaccggaaaccgagagaa

SEQ ID NO: 72135 - RNA, 79 nt, Homo sapiens
ccaaaaacaacccaaccacggggaaaaggcaaaaacccacaccgcaacccagcgagagaaagcacacagcacagcacgc

SEQ ID NO: 72136 - RNA, 66 nt, Homo sapiens
ggaagccagcaacaggaacaacaacgcagccaccagagaacagccaagaacaggaaaacgcaacac

SEQ ID NO: 72137 - RNA, 77 nt, Homo sapiens
gaaacaagcccaggaagaaaaacaaggcgaaagcgcccgcaaacgcaggaaaccccccggagccccaaagccaggac

SEQ ID NO: 72138 - RNA, 79 nt, Homo sapiens
cagcaccaccccacggccagggccaccaaccccaacccggagagcggcgaggggaccaaagccaacccagccaggcaac

SEQ ID NO: 72139 - RNA, 75 nt, Homo sapiens
ccccgcccgcgcgcgcgcgcgccgaggcggagcgccgagcgaggcgacccgcggcgagagcccccccagagcgcc

SEQ ID NO: 72140 - RNA, 60 nt, Homo sapiens
gaaaaggaagaaagggacaaagagaggagcagaaacccacagacaaagggaagaacaaac

SEQ ID NO: 72141 - RNA, 66 nt, Homo sapiens
ccgaccgcaacagaacggacccgcaacggggcggcacacaaggagcgaagggcagggagaacgcca

SEQ ID NO: 72142 - RNA, 52 nt, Homo sapiens
cgccaccagcccgacaaaaggcaggcgacaggcggaacaaacgaagcgcgac

SEQ ID NO: 72143 - RNA, 70 nt, Homo sapiens
gagagaccaaaggaagaagcagaaggaccgagccaagggaaaccgccgggaagagcagcacacgcaaaaa

SEQ ID NO: 72144 - RNA, 73 nt, Homo sapiens
aagaccggcagggcagggaacacacgcaccccgcgccgccgccccccaccaaggaagcccaagccccaccaga

SEQ ID NO: 72145 - RNA, 66 nt, Homo sapiens
ggaggaaaaggccacgggaggaagacccaaaaggagaaacaccccagacaacccaagaaaaggcaa

SEQ ID NO: 72146 - RNA, 61 nt, Homo sapiens
ggcggagagaagccgggagcgagcccaggcggcaggggggccagaagcccaggggcagacg

SEQ ID NO: 72147 - RNA, 72 nt, Homo sapiens
gcgccgcaccaggagcgaagagcgccgacaagccagggcccccaaaggaagcaccagacacacgaaaacggc

SEQ ID NO: 72148 - RNA, 74 nt, Homo sapiens
agaagccagacaaacacccggaccaccggaaaaagaagcacagacaagaaaaagcggggaaggggggcaaaaaa

SEQ ID NO: 72149 - RNA, 81 nt, Homo sapiens
cgcagaaggaaccacccagaaacggcgaggaaagagaggagccccggaaagaaaaggacagacccggccagaaaggaagac

SEQ ID NO: 72150 - RNA, 64 nt, Homo sapiens
gaaaaagcaccccgaggaggaagacgaacgaaacacgaaagggcaggaaaccccccaggcaaga

SEQ ID NO: 72151 - RNA, 84 nt, Homo sapiens
gaagccgcgccacgccagcagcacagacacagaccgcaagaacaagaccgccccgaccgcgcagagaacggagaccaaccgggc

SEQ ID NO: 72152 - RNA, 78 nt, Homo sapiens
cgcccagcaagcgaccgagaaacaaaggaaccggaaaagcaaaacagggcggcaggcccgaaggacgaaaccaagaag

SEQ ID NO: 72153 - RNA, 75 nt, Homo sapiens
ccgggcccggcggacagccgcacccgcgccccagcagggaggaacagacacagacgagaaacgcaggagaaggcc

SEQ ID NO: 72154 - RNA, 66 nt, Homo sapiens
gccaagaacaagggccgcgagggaagaaggcccgcacgcagaggaaacggcaaaccgaggcgagcc

SEQ ID NO: 72155 - RNA, 64 nt, Homo sapiens
cggcgcgcgcccgaggcgaggaggagcgcggcggggaaggcagagaccgcagaaggcccaggaa

SEQ ID NO: 72156 - RNA, 75 nt, Homo sapiens
cgggagaaaacggcgcaccggagagacgcagaggggcggcgggggagcggggcccccgacgaccaaccaggcagc

SEQ ID NO: 72157 - RNA, 77 nt, Homo sapiens
cccaaggacagcgcagaccccggaggaggaccggaggaacgcgaccagaccagcgcgaaggacccagacaacagaga

SEQ ID NO: 72158 - RNA, 79 nt, Homo sapiens
cagccccagcgagaggccaaccaggccccggagggccccaaggaccgagagccccagagcagagccaggcaagaggccc

SEQ ID NO: 72159 - RNA, 68 nt, Homo sapiens
ccgcgggccgcaggccgcgagcagcggacgccggccgccgcaggaggacaagggagagacagagcgac

SEQ ID NO: 72160 - RNA, 71 nt, Homo sapiens
gggcggaaagacgagacggaagcaccaccaccaggcaaagccgaaggagcagacagagcacgcgcccggaa

SEQ ID NO: 72161 - RNA, 71 nt, Homo sapiens
cacggcgcggagcgccgccagaggagaagaggcccacgcggaccggcagcgccaccggaccaccagacaag

SEQ ID NO: 72162 - RNA, 85 nt, Homo sapiens
cagcgagcagacgcgggacagcagcaaaggggaccgagacagagcagcgcgaccggccccccgcggaaccgagagggcagcagcg

SEQ ID NO: 72163 - RNA, 84 nt, Homo sapiens
gcggggagacacggcaaagggccaccagcggcaggagaaggcggaggggccgaggggaccaagcggagagaccaaagagaggag

SEQ ID NO: 72164 - RNA, 83 nt, Homo sapiens
ccagaagacacacaggaacccaacaacagacgccaaaaccagaggaacaaggcccccacggagccacgaaccagggaaccccg

SEQ ID NO: 72165 - RNA, 66 nt, Homo sapiens
gcaaaggaacggaagccgccggcaagaaccagacgaagaaccaagagaaaagacccacagaagcag

SEQ ID NO: 72166 - RNA, 57 nt, Homo sapiens
accaaaagcaaccgcgaagagcagccaccagcaagacccccagagggacgggcgaca

SEQ ID NO: 72167 - RNA, 71 nt, Homo sapiens
ggaaaaggggcgcaagaggaaacagaagcccgccaaggaacccgcggggcagaccacaccagcacacccag

SEQ ID NO: 72168 - RNA, 86 nt, Homo sapiens
cagaaaagcagaaggacagacgccgccagggccggaggcgagcaagagaccgaggaccaagcgagccgagcagagcacccggcccg

SEQ ID NO: 72169 - RNA, 75 nt, Homo sapiens
caggcagaaggccccccgaacagcaggcgccaccagcccggagggggggccccagcccggccgaacgggcgcacg

SEQ ID NO: 72170 - RNA, 73 nt, Homo sapiens
aaagacacccccgccggaggaaccgaagaccagccgcaggaagagaccgagaccaggaaccaggcaggggaac

SEQ ID NO: 72171 - RNA, 77 nt, Homo sapiens
cccgaaaaccaagccgaggacgcggggccgggccacgcagacagagaccgggaggcagcaacccagaggccaccgcc

SEQ ID NO: 72172 - RNA, 71 nt, Homo sapiens
gggagccaccaaggaggaaacgcacaaaggagaggacaaacaacagaccaaggggcggaaaacccgaagcc

SEQ ID NO: 72173 - RNA, 74 nt, Homo sapiens
gagaagagaggagggagaacaagcaacggacacagacgcgaccggaaaggagagagagacagaaccacagacaa

SEQ ID NO: 72174 - RNA, 60 nt, Homo sapiens
ggaaaccaagaaagacaacaagagcgccgacaggaaaaggacacaaccagagggaagcac

SEQ ID NO: 72175 - RNA, 78 nt, Homo sapiens
aaagccgcccagacggccaccggcgggaggaacaaaagggacgaaacgcccaccccgggaagcaggacgcgcacagag

SEQ ID NO: 72176 - RNA, 59 nt, Homo sapiens
gagcccaaggccgcaacaaagcaacacagccacagcacaacagcaccaaccgcacccag

SEQ ID NO: 72177 - RNA, 81 nt, Homo sapiens
gaaaggagcaaagacaaaggcacagcggagaaggaaagcaaagaagaaagccaaggggccaggaagaagcaaaggaagaca

SEQ ID NO: 72178 - RNA, 57 nt, Homo sapiens
cgggaagcaggacgcgccgcgccccaaggaaaacccaaccccaagaaacagaagcaa

SEQ ID NO: 72179 - RNA, 76 nt, Homo sapiens
acgacgacgaggaagaggaggcgaggggacaagaccccccccagggaagaccaaagcaagggaggagaagccagcc

SEQ ID NO: 72180 - RNA, 83 nt, Homo sapiens
gaaccagcagcccgagcgagcgagcggcgcccagcccagcgcccggccgaaccccccgcagcagacccccaggcaaaccgccc

SEQ ID NO: 72181 - RNA, 44 nt, Homo sapiens
gcggcccagcagcgagacacagaccagccgacagcgaccaaggc

SEQ ID NO: 72182 - RNA, 80 nt, Homo sapiens
ggggggcagcagcacacggcgccccgacccaccggagcagcgcagaagcgagcggccagagacaacggcaagcggagaag

SEQ ID NO: 72183 - RNA, 80 nt, Homo sapiens
cccccgaacaaggaaaagaggccgagcagccggagacccgcaccaaggaggagacacgagccggccgagcagaccgacca

SEQ ID NO: 72184 - RNA, 69 nt, Homo sapiens
aaaaccgaaagggggcagcgaccagcaacccccaggaccgggcagacggcggggcaaggaagacccaaa

SEQ ID NO: 72185 - RNA, 90 nt, Homo sapiens
aaaagaagaagaaaaaaaggaaaaggagcccccaaacaagggaaggagaaggccaagaaggcagagcagggacaagcagaagcaagcaaa

SEQ ID NO: 72186 - RNA, 72 nt, Homo sapiens
cggaccaggggggcgcgccacggcgacgccccagcccgcccaaagaaagaaggagaacagcggcagcgaaac

SEQ ID NO: 72187 - RNA, 67 nt, Homo sapiens
agaagagaagaaacaagcagggcagagaggcagaaccagaagggaggagggcagggaagcagagaac

SEQ ID NO: 72188 - RNA, 38 nt, Homo sapiens
gccacgagccaacacagacgcagcccgagaaggagaac

SEQ ID NO: 72189 - RNA, 75 nt, Homo sapiens
ggacgaaagaggacacgggaagaacaaagacagaccgaaaagcgccaggcaggcaggaaagcgccgggaagaaag

SEQ ID NO: 72190 - RNA, 77 nt, Homo sapiens
gagcggaccgagagcgcgaaacgcacgagaagggccacccccaaccaggaccaaagacgaccaccaaagccagcccc

SEQ ID NO: 72191 - RNA, 74 nt, Homo sapiens
aaaggagaaacagagggagaacaaggacaaccggaacccccgaccaacagaagagcaccgggaagcaagacccc

SEQ ID NO: 72192 - RNA, 71 nt, Homo sapiens
ccagaagggccagagcacacggccgaaagagggccacccagagcaggacccagggccgaggagggcggaac

SEQ ID NO: 72193 - RNA, 35 nt, Homo sapiens
ggcccccccacacagacagaagccaaaacaggaac

SEQ ID NO: 72194 - RNA, 55 nt, Homo sapiens
gcaaagaacagaagaccccgaacggcaacgaaaagagacacgacgcaaaccccca

SEQ ID NO: 72195 - RNA, 78 nt, Homo sapiens
ccgagcacaaggcaagagaccaaccccagccccgaaaggaaccagcagcacaaacacgggggcaacaggaacagccaa

SEQ ID NO: 72196 - RNA, 57 nt, Homo sapiens
ggaacaggcgggacagcgacacaacacggagaaccacggggaccaagaagcgagcag

SEQ ID NO: 72197 - RNA, 85 nt, Homo sapiens
ggaagaaacaagaaacacaagacggcaaaaccccaggggcagggacacgaagccagcaagcaacgaggaacacacccgacagccc

SEQ ID NO: 72198 - RNA, 77 nt, Homo sapiens
gcgcggcgcgcgcccagcgccgccccgcgcgcgcccgccacggcgccgagccgcggccgaagcccaaaaggcagagc

SEQ ID NO: 72199 - RNA, 91 nt, Homo sapiens
gcgcaggcacaaagaccagggaacaaaaccggaccagcacgagaccaaaaaccaccaaccaggacccaagaggagcacaaagaaagaaccc

SEQ ID NO: 72200 - RNA, 77 nt, Homo sapiens
gacagccgaacacaccaccgggcacacggaagggcaccaaggaagagagaaggccacgcccgaccccaagcaacaac

SEQ ID NO: 72201 - RNA, 76 nt, Homo sapiens
cccggcgaggacacccagaacccccaaaggggcaaaggagaagagcgagcccaccgggacagcagaaacaggggcc

SEQ ID NO: 72202 - RNA, 74 nt, Homo sapiens
gacacccgggcacccgagccacaggagaagaaggagacccaacaccccggccagacgggccaccaggccggcgc

SEQ ID NO: 72203 - RNA, 81 nt, Homo sapiens
gcagaaagcaggcgaacccgcggcgcaaaacggacccaaagacaggaccacgcaccagcagagaaggaaagcaaaccgaag

SEQ ID NO: 72204 - RNA, 84 nt, Homo sapiens
acaggaggagccaccgcgcccggccgaaaaagcggggaaaacaaaaaaaagaaggagggaagagggggccaggaccaggcccca

SEQ ID NO: 72205 - RNA, 84 nt, Homo sapiens
cggagccgagcgggaggaaaaccggaccgacccccgacgggcggacacaaaagccaggaagacaagagcagaagaaacagaccg

SEQ ID NO: 72206 - RNA, 73 nt, Homo sapiens
gagaccgagaaaaaaggacaaccgcgcgggacccaaacggaaggaacggaggcgaacacgcccaggacgggac

SEQ ID NO: 72207 - RNA, 55 nt, Homo sapiens
ggccacaaaggaccccggaacgggcgggcggcccccggaaaaccgccgccggggc

SEQ ID NO: 72208 - RNA, 69 nt, Homo sapiens
cgccaccaccccgcgccagggagcgccgcggcggagcgggaagaagagagggcgaaggaggccacacag

SEQ ID NO: 72209 - RNA, 63 nt, Homo sapiens
aagccgcgccggagcggagcgcgggcgccggggagccagggcagaggacaacagcaaccaaga

SEQ ID NO: 72210 - RNA, 80 nt, Homo sapiens
agggaaaagaaagaagagaggagaaccagccagccaacgggacaggaaaaccagcccacagcgcaagaagacgcagcgcg

SEQ ID NO: 72211 - RNA, 69 nt, Homo sapiens
cagaacgccaggaccaaaacagggagaaacacagccagaaggccaagaaaaaacagaacaacaagagaa

SEQ ID NO: 72212 - RNA, 79 nt, Homo sapiens
ccaaacagaagccagaacgcggacccccgcagaggagccgccgcggaccaccagaggccgaaaacgggagaccccagac

SEQ ID NO: 72213 - RNA, 67 nt, Homo sapiens
gacaaggaaacagcagaaaccggaaccacacacaccacaggaagccaagcccagcagaccagcaagc

SEQ ID NO: 72214 - RNA, 75 nt, Homo sapiens
ccagcaccgcagcaaccacccagaaacccccccagcaacccacagagagagaggaaacgaagggagcgacacaca

SEQ ID NO: 72215 - RNA, 73 nt, Homo sapiens
ccacaccgggaaaagccgcaggcgcaggaggacgcggcacaccaagagacacccacgccacccggggggcgca

SEQ ID NO: 72216 - RNA, 67 nt, Homo sapiens
gcaaggcaccaagaggacaacaaggggcgagaccaaaaggaggagaagagacaaccaaacaggagcc

SEQ ID NO: 72217 - RNA, 54 nt, Homo sapiens
cgcccccagggcagaaggcaccaaaggcagggacggacaagggagggccaagaa

SEQ ID NO: 72218 - RNA, 70 nt, Homo sapiens
aggaagccaggaccgggggaaaagccccagagcggaaggcgaagcacaaacagaagagcgaaagcgaagc

SEQ ID NO: 72219 - RNA, 77 nt, Homo sapiens
cccgacagcaagcaccggagggagaagacaggccggcgccagcgccagcgaggaaccgaacccagccaaaaggcccc

SEQ ID NO: 72220 - RNA, 78 nt, Homo sapiens
cagccccggcgcccccggccgcaccgccagggcgcaggcacagcccgagaaaccgcagcacacacgagaaagcccgaa

SEQ ID NO: 72221 - RNA, 81 nt, Homo sapiens
aaacccacagaccaagccagaggagcaacaggaaagaccacagcaagaccacgcccccagccgggggaccaggccgaacga

SEQ ID NO: 72222 - RNA, 85 nt, Homo sapiens
ggagaagagccagggcccgaccgcagggagcagaggggacagaggcaccaaggaccccaagacaggaagcagccagccaccaagg

SEQ ID NO: 72223 - RNA, 72 nt, Homo sapiens
cggcagagccggcagcagaaagcagaacagaggccagaaagaaaaaggccccaagagccacaagcccgcacc

SEQ ID NO: 72224 - RNA, 69 nt, Homo sapiens
gcaggaaaagcaaaacagaaggacagcaaaacgcagaggggagcaggcaacacagagggacaggccacg

SEQ ID NO: 72225 - RNA, 69 nt, Homo sapiens
cgacagaccggggcaagccccgggcgggacaggaaccgaacaagacagaaagcgggacgcgcaacccca

SEQ ID NO: 72226 - RNA, 84 nt, Homo sapiens
cccgccaggacccggacagaacaaaacaaaaagcccgagcccaaaccccgccaccacaaggacacgagcgaagacagagcccgg

SEQ ID NO: 72227 - RNA, 75 nt, Homo sapiens
gagaaaagggccgaccaaacaaggacagaagaaaaaaaggaacagcagccaaaacaaaacccaaggaaacggagc

SEQ ID NO: 72228 - RNA, 73 nt, Homo sapiens
agggccaaagaagggagagagaggcgccgcgacccaaccgaggaagcaccagcagaagagggggcaagggaga

SEQ ID NO: 72229 - RNA, 65 nt, Homo sapiens
gaaaaccaaggggcaaaccagaaaacagggccagacgggaagaaacgagaagggaccaggggcgg

SEQ ID NO: 72230 - RNA, 72 nt, Homo sapiens
aagccagaagagaaaacaaaagaccaacccgagggaagagaaaccaagaagacaaacccaagagagcaagag

SEQ ID NO: 72231 - RNA, 73 nt, Homo sapiens
caaagaggagcagcaacccagaccacaaggcgaacaagcccaaacacggaagcaggaagcaggaagccggacg

SEQ ID NO: 72232 - RNA, 69 nt, Homo sapiens
cgggacaggaggaagaggcagcgccaacccacgccgaaaggaggcaggggaagcacaaaagcgcacccg

SEQ ID NO: 72233 - RNA, 63 nt, Homo sapiens
gcacaccggaccaggaaacggaggcgggaagcagaaaacggggccacagggcccacccacggc

SEQ ID NO: 72234 - RNA, 71 nt, Homo sapiens
aaaccccaagccaaaggggcaacagagaaagccacagacgggaaggaaagaagaaaggcagaagagagagg

SEQ ID NO: 72235 - RNA, 64 nt, Homo sapiens
cgccggaaaccaacaaggcgacccggggacgcggggccaaagccccccggcggcggcgagacag

SEQ ID NO: 72236 - RNA, 80 nt, Homo sapiens
cgggccgcgcgggccacccaagaggagccccggggaacccgcagcacaccagggggcaggcccgagagacggggcacccg

SEQ ID NO: 72237 - RNA, 73 nt, Homo sapiens
ggaccagaccgaccaccaaaaggcagagggccagacccccaacaaagccaaaggagaaacggacccagcaggg

SEQ ID NO: 72238 - RNA, 76 nt, Homo sapiens
gacaagggaacacacggaacacaccgcagccagaggaagacggaccaggagcggggaaaaaaccggccacagaccc

SEQ ID NO: 72239 - RNA, 63 nt, Homo sapiens
gacagacgagagaacgagcccaaagagaagagaagcaaggaaagaagacaagaagaagccaaa

SEQ ID NO: 72240 - RNA, 55 nt, Homo sapiens
aacccggaagcaggccgacagggggccgagacaacaagaaggggaggaacaaaag

SEQ ID NO: 72241 - RNA, 65 nt, Homo sapiens
agcgcgccgccgccgccgccagaacaaccgggcgccgacgagacggagaggggagaagagcgaga

SEQ ID NO: 72242 - RNA, 86 nt, Homo sapiens
cgggccaggcccagcagggccacggccaacccgaaaaaacggcccccggcgaagaagccccaagacagccagcggaggagggcaaa

SEQ ID NO: 72243 - RNA, 81 nt, Homo sapiens
cggaaccagcgcaagccagaagcgcgagcggggcccggcgcacccaccaccgccgcccacggcagcccagggacccgagca

SEQ ID NO: 72244 - RNA, 85 nt, Homo sapiens
agggaaagggaaggagaaggagggacgcaggcgcaggccaggccaagaagcccaggaggacagagacgaggacgaggagggccca

SEQ ID NO: 72245 - RNA, 73 nt, Homo sapiens
cagccggccggcggccgggccacgcgcacaggggcggcagggggaccagccagcaacccgcccccggaccaag

SEQ ID NO: 72246 - RNA, 87 nt, Homo sapiens
ccggacaccgggcgcccaggaacgaaccccgcggccgcaacgggccggccccggccgcggcgagagggcacaccggcagggaacgga

SEQ ID NO: 72247 - RNA, 86 nt, Homo sapiens
gaggaacggacccacagaaggacgggcacaggaccgaaggagaagaaggagaaggggaggagaaggcaagccggaaagagcgaaag

SEQ ID NO: 72248 - RNA, 82 nt, Homo sapiens
gcagggcgcgagggcgggggcagcggcagaaggagcccgcagggccgccaccagcacagggagggagaggagccagaggaca

SEQ ID NO: 72249 - RNA, 76 nt, Homo sapiens
acgcacccagggccgggagggggaccgcagggccacaagaggcgacacgggaaacgcacccgcacagagcgcagaa

SEQ ID NO: 72250 - RNA, 79 nt, Homo sapiens
ggcaggaacagacacggggaagcgcaaaaacaagacggggcgccccacagaggggcgacggaacgcccaaaacccgccg

SEQ ID NO: 72251 - RNA, 68 nt, Homo sapiens
gacccaagcggccgggcccggcagccccgacgcagccgggaagggcaaagacaagcccagagcagcgc

SEQ ID NO: 72252 - RNA, 81 nt, Homo sapiens
gggccagaacagcccaagaggccgaccgagacgggcggagaggagaagggcccacccagacaggagcccagcagggggagg

SEQ ID NO: 72253 - RNA, 77 nt, Homo sapiens
gcccccaggagcgggaacaggcacaggaagcgggagcgggacccgaaagaaccgagcgccagaggggcagcagcagg

SEQ ID NO: 72254 - RNA, 65 nt, Homo sapiens
caaaagagcgaaacagggaaagaaaccagagacgggcgcgaggcccccaggcggagggccgcgcg

SEQ ID NO: 72255 - RNA, 80 nt, Homo sapiens
aggggagcaggggccaaggagcacggacggacccagcacgaggaggcgcgaggagagagcccaaaaggcagagcgaggag

SEQ ID NO: 72256 - RNA, 73 nt, Homo sapiens
ccgaacagaggagcgagaaagccggccccagcaccaccaagcccccgggaacaggagggaagaaagggacaca

SEQ ID NO: 72257 - RNA, 74 nt, Homo sapiens
gcgccgccaggcccgcaggaccgccggagacagggcaagagaggaggcaaaagcacgaacaccggcccaaggag

SEQ ID NO: 72258 - RNA, 52 nt, Homo sapiens
caaaaggagaccccccgggcccccaagccggcaggggaacgaggagggagcg

SEQ ID NO: 72259 - RNA, 83 nt, Homo sapiens
cggaagaggacagcccacaaggacaaaagaagccaagggggcaacgggaccaagaaaggcccagggaccaaagcccggacaag

SEQ ID NO: 72260 - RNA, 74 nt, Homo sapiens
agggggcgccggcggacgcacccggacgcaaagcgcacggaaggcacaccaacggcacaaagagaagcaacaga

SEQ ID NO: 72261 - RNA, 78 nt, Homo sapiens
gcccgacggcgcggccaggccggcgggccgcgagcccgcggggagggcagacaaagaaacagccggaaaagcacgagc

SEQ ID NO: 72262 - RNA, 31 nt, Homo sapiens
ccgaacccagccgcaccgaccgggccccccc

SEQ ID NO: 72263 - RNA, 79 nt, Homo sapiens
agaggggggagagccagggggcacccgcaacaccagacggccacgccacccggggcaagacagcaacgagaaccggacc

SEQ ID NO: 72264 - RNA, 57 nt, Homo sapiens
aaaccacacgcccgggcggcccaccacaaagagcagggcagagaggcagaaccagaa

SEQ ID NO: 72265 - RNA, 54 nt, Homo sapiens
agacccgcccacgcagaaaccccacagcggagaaaaaggagaaacccccaagac

SEQ ID NO: 72266 - RNA, 56 nt, Homo sapiens
aaggagaaaggcgaaccaaagacggccggagcaaggaagacagaacgaggccagga

SEQ ID NO: 72267 - RNA, 67 nt, Homo sapiens
ggggacagcaaccagcagcgcaggccggaacaacccaacagcaccaaacaacaagcagcacagggca

SEQ ID NO: 72268 - RNA, 79 nt, Homo sapiens
gagcccaccaggccgcccaccgggccaggcccccggccccagggccccaggagcacacgcagaccaaaacagaaagcag

SEQ ID NO: 72269 - RNA, 79 nt, Homo sapiens
gccggaaggaagggaaaccgggggccccggacaacccgagcagagaccaagcagacaaggaagagaaagcaaagcagaa

SEQ ID NO: 72270 - RNA, 50 nt, Homo sapiens
aaggggagcgggaagaagaaggaaaacagggcggcacccaggcgaagaca

SEQ ID NO: 72271 - RNA, 74 nt, Homo sapiens
gagacccaccgaacggcagcgaaagcagggcgcaggcgaaaccgggccccaacagaggagagccagcaacggcc

SEQ ID NO: 72272 - RNA, 67 nt, Homo sapiens
ggagccggagggaacagcagggcaaagcaacagccaaaaaacaggagaccggcagcacacagcgcac

SEQ ID NO: 72273 - RNA, 63 nt, Homo sapiens
aacccgccgagcaccggaaccaccggacacagacaccgggaagggcacgacaggaaaagacga

SEQ ID NO: 72274 - RNA, 69 nt, Homo sapiens
agcaacgagagaggcccccgccgagcacgggacccagccaaacagggagaggccgcagccacccccacc

SEQ ID NO: 72275 - RNA, 82 nt, Homo sapiens
cagggcgcccgccgcgcgccgcgccggaccggggcgggccagcccgggcgggccgcgcgggagaggaagaccgcaggaaagc

SEQ ID NO: 72276 - RNA, 74 nt, Homo sapiens
ggacgagcgaagaacaacgggcgcaccggacaacgcagaagagaggccggccacacaacagccaagcaacgcgg

SEQ ID NO: 72277 - RNA, 56 nt, Homo sapiens
aaagcagcacacagagaggagcagagcacagacaacggcacagacgggagcagccg

SEQ ID NO: 72278 - RNA, 77 nt, Homo sapiens
gagacaagcacaaaggccgccagacgccacaccaaccggaccagccccagaacacccggaaccgcacggacacgaca

SEQ ID NO: 72279 - RNA, 80 nt, Homo sapiens
cagagcgacccccggccaccgggcggaagagccaagggggaagagccaccggaccaggaaaccacccgagccggaagcca

SEQ ID NO: 72280 - RNA, 71 nt, Homo sapiens
ggaagcacacccgccagggacgggcacgggaagggagagaggcagaacagaacaaacggagaaacaccgga

SEQ ID NO: 72281 - RNA, 54 nt, Homo sapiens
caaagaaacaggccacagggagagagagagagagaggaagcgaagaaaaagcgc

SEQ ID NO: 72282 - RNA, 65 nt, Homo sapiens
cgggcacgcgagaagggaagaagacgaagagcagcagaaagacagaggaaacgccgagaagaagg

SEQ ID NO: 72283 - RNA, 77 nt, Homo sapiens
gccgcgccgccacggccagcccccggcacccggaggagaagaggcgcggaacaagcgggagagcaaggaaagcgaag

SEQ ID NO: 72284 - RNA, 82 nt, Homo sapiens
cgaccggaggccacacagcaccggcaaaggccagccagggcaccaggagcggccggacgcgcacggaagcccaagaccaccg

SEQ ID NO: 72285 - RNA, 65 nt, Homo sapiens
cccgggcaggaagacaaaaacaggcgaaacagaccccgaaaagcccggaaggacaagccagccca

SEQ ID NO: 72286 - RNA, 73 nt, Homo sapiens
cgcagggcgcccccggcaacgagaggacgaccaaaacgaacaggaaccccggcgcccccggggaaaccacccc

SEQ ID NO: 72287 - RNA, 72 nt, Homo sapiens
gacaaccacgcgcagacacaggcacagaacgaacagagcagcgaagaacaccggacagaggaagacgcagga

SEQ ID NO: 72288 - RNA, 83 nt, Homo sapiens
cgcgcgggacggcagcggcccgcggcaggcaggagaagggcaccggggaggaccgcgcgacgcgccggagccaggcccgagcg

SEQ ID NO: 72289 - RNA, 72 nt, Homo sapiens
aacgcaaaacgcggaggaaaagccggagaaaggaaagaaaacgcaccccaaaaagaagacaaacagggcaac

SEQ ID NO: 72290 - RNA, 81 nt, Homo sapiens
gcgggacgggggggcggcccggccccgcagaaaaaggcacaaacccagcacagagaagacggcgacaagcaaaagacgacg

SEQ ID NO: 72291 - RNA, 79 nt, Homo sapiens
agcaccgcgccggcccagcaccccgagaaccgcaggagccagaggcccgaaaaagcccaagacagcagaagcagacacc

SEQ ID NO: 72292 - RNA, 80 nt, Homo sapiens
gcccggccccacaccggcacacagcgaaggaacgggagaggaagacaagaggaaacgagcacaggaccacaaacagcaac

SEQ ID NO: 72293 - RNA, 68 nt, Homo sapiens
caagaggcggccaaggggacgagcaaaggaagcgcgaacagcagcgcaggaggagccaggaggagaga

SEQ ID NO: 72294 - RNA, 67 nt, Homo sapiens
aagaaaaaagagggcccaaggaggcccacgaggccgagaacaccaggcgggggagcaagagacgagg

SEQ ID NO: 72295 - RNA, 78 nt, Homo sapiens
ccaccccagcaccagcccagagggaaagcacaccaccccagccaggggcacccgaggaggaagagggcagggcccacg

SEQ ID NO: 72296 - RNA, 74 nt, Homo sapiens
ccaccacaaagccaccgcgcgaaccaacggagagcggagcgaggaacagggcccacacgcacggcaagaaaacc

SEQ ID NO: 72297 - RNA, 86 nt, Homo sapiens
agccagaaagcggcacgaacagagccgggagcaagaagaacacccagaggacaccagacacgaaggaccacaggccccggaggggg

SEQ ID NO: 72298 - RNA, 81 nt, Homo sapiens
gcggccaggagacgcgggcggcaggaacagcacaccgagcaagaaacagaaggaaggacggaacaaggaacaggaaagagg

SEQ ID NO: 72299 - RNA, 72 nt, Homo sapiens
caagccaggccgggaaaggccaacagaacaagagagaccaggggagacacagagcgccgaaccagaagcaag

SEQ ID NO: 72300 - RNA, 81 nt, Homo sapiens
aaaaccggaagaggccgaagaacgcccggcgcaagaggcagacagacaggcgacgggcagccaacaagaaacgacacccag

SEQ ID NO: 72301 - RNA, 62 nt, Homo sapiens
gcccgcgaagaggagggggcgcggggccaccgcggcggagcccgagagccaccggcccaggc

SEQ ID NO: 72302 - RNA, 80 nt, Homo sapiens
ggaacggcggcgacaaggggcccgaacagaggggagggagaagaccaaagaagagagagcaggaccaccaccgcccacag

SEQ ID NO: 72303 - RNA, 77 nt, Homo sapiens
gacaggagacccacagaggaaaacaaccccggggccacaaagcgagaagacggcagcgaacgagaagagcaaggcgc

SEQ ID NO: 72304 - RNA, 85 nt, Homo sapiens
accagacggccaaggccgccgggagaaggcaaaagcagaccggaaaacccaccggcaagaccacacccgaggggagcccaggaca

SEQ ID NO: 72305 - RNA, 81 nt, Homo sapiens
caaaccgccgccgcccccaccagacagacgcgcaaaacccagaagcagcgacacaggagagaacgagcgggagagcacgac

SEQ ID NO: 72306 - RNA, 59 nt, Homo sapiens
cccgacccaggccacggcacagcgggccccagaaggcagcccacgcaacagaaagaggg

SEQ ID NO: 72307 - RNA, 71 nt, Homo sapiens
ggcaccgcccccccccgcgaggcacgaccccggccggcgcgcggcgcggagcgcgggacccacaccgccga

SEQ ID NO: 72308 - RNA, 80 nt, Homo sapiens
cgaagacgagacaaaacgaaaggccccccaccccacagaaaaaagggagacggcgaaaaccaaagaagaaaagcacccca

SEQ ID NO: 72309 - RNA, 55 nt, Homo sapiens
gaaacacagcgaccgagagggggagaagagggagacccgaacgaagacgcagccc

SEQ ID NO: 72310 - RNA, 82 nt, Homo sapiens
ccacccagagcggcggggaaggccacccagggcggaaaacaccccaaaagccaaaagggaaaggaaaagaccaacaacagcg

SEQ ID NO: 72311 - RNA, 93 nt, Homo sapiens
cgccgcccgccacacccgccgccaggggacggcaaaacagaacagaaaggcggagaaaaaagagggggaaaagaccacgagaagacaggccgg

SEQ ID NO: 72312 - RNA, 73 nt, Homo sapiens
ccgcacgcagagccgcggccccgcgccggcggccccgcgggccccgaacagaacccggaaaacagaggcccaa

SEQ ID NO: 72313 - RNA, 74 nt, Homo sapiens
gccccgagagcggacacagggagcgggaggccggagaaggagcacgaacagggagagcaggacaccagcacacc

SEQ ID NO: 72314 - RNA, 73 nt, Homo sapiens
acagggaagaaagggaagggcaagggggccgaagcaaccaggggcccagccagggaccaggacccaacagcag

SEQ ID NO: 72315 - RNA, 63 nt, Homo sapiens
cgccaggagcaacagccaaaggcaggccgagcagaccacaagaaaaagcggggaaggggggca

SEQ ID NO: 72316 - RNA, 58 nt, Homo sapiens
gcggccaaacccacccggcccccggcgccgccagcgaggcacaggggccacagacaca

SEQ ID NO: 72317 - RNA, 71 nt, Homo sapiens
gacgggcgccacagacacaaaagggcgcagggagcaggagaagcggagcgaaggggcgggcaggcagaggc

SEQ ID NO: 72318 - RNA, 68 nt, Homo sapiens
acaacacaagcgaaaacaaaccaagacaacaggcacagaacagaaggaacggacaccccagcacaccc

SEQ ID NO: 72319 - RNA, 78 nt, Homo sapiens
gaccgggagccggagcggaacgaggagggcgcccaaagcgcagcccgggggacaagacccgacccgaacacgaggaca

SEQ ID NO: 72320 - RNA, 83 nt, Homo sapiens
gggcgcgcgcgccgccgcccggaggaaaagggaacaaacagccgccggccacgccccggccagccaggcagccggaggcccga

SEQ ID NO: 72321 - RNA, 76 nt, Homo sapiens
ccaaaacagaacggcagcacagaagaaagaggcaacagaagcaagaaccagcaaaggagaagaaacacagcaagaa

SEQ ID NO: 72322 - RNA, 78 nt, Homo sapiens
cgacagccgggcaaagcagaaaccaggagccagggagccaaggaccggagaacccagcccggacacaagcgggaggaa

SEQ ID NO: 72323 - RNA, 83 nt, Homo sapiens
aaggacccaccgaaaacgggccgagagacgggcagaaagacaagcacccaagaccgaagaaggagaaccagcccaagcgcgca

SEQ ID NO: 72324 - RNA, 85 nt, Homo sapiens
gccgaaccaggcgcaagccacaggccagcgcacgcggagaacgcgacacacaccaagcgaagcccggagcccgagacgggaaaag

SEQ ID NO: 72325 - RNA, 54 nt, Homo sapiens
gcgcgaagaggcggaccggacggccgagggagaagaaccaacaacggaaaacca

SEQ ID NO: 72326 - RNA, 80 nt, Homo sapiens
gaggcgcacacaaacggcagcgcccggagaggaagaggcaaggcccaggaaaccagagaaaaaccgaggggagacccgcc

SEQ ID NO: 72327 - RNA, 65 nt, Homo sapiens
ggcagcccagcccgcccccagaaaccagccggggggaaaagaccccccccagcccgggggcccgg

SEQ ID NO: 72328 - RNA, 76 nt, Homo sapiens
cggaagaaacagcgaccccgaacaggacaggacaacgcacaacagggcaggagaaggcccaacaggaggcaacagg

SEQ ID NO: 72329 - RNA, 71 nt, Homo sapiens
aaaagcaggggaaccggaccggcccagccggcagagccccgagaggggcgcgcagaaacgggaagaaacac

SEQ ID NO: 72330 - RNA, 106 nt, Homo sapiens
gcaggaccagacgcggcagcaacagcgagacccggggcgaggacccccgagccagggagccggcggaagagcgagacacgaaaacacgagagagcgcgcaccggac

SEQ ID NO: 72331 - RNA, 71 nt, Homo sapiens
agaagaagcacaggaggagaggcaaagcaagcgaggaacaacgaggacagaaccgcgacacaccggcagac

SEQ ID NO: 72332 - RNA, 41 nt, Homo sapiens
cgacgcaggaaaggcaaacgcaggaggcagagcgagggaag

SEQ ID NO: 72333 - RNA, 91 nt, Homo sapiens
gggcccagagccccgggccaggcaggcggcgcggggcccgcgcccggagcggcgccagccccagggcgaagacccccccccagggcaaacc

SEQ ID NO: 72334 - RNA, 76 nt, Homo sapiens
ccgccgaaacagagaagacgcaacagcccacagaggcaccaaaccaggaggagacacacagccccagacgggagga

SEQ ID NO: 72335 - RNA, 80 nt, Homo sapiens
ccaaagacaagaggagacacgagggaacaaacaccggagcaccgagaagggcacacaccaacgaaagcagagaaaagaac

SEQ ID NO: 72336 - RNA, 78 nt, Homo sapiens
aaacgcgcccggcgagcgggaacccagcagacagggaggagagcaaacacacacggagaaagcgacggcgccggaacc

SEQ ID NO: 72337 - RNA, 48 nt, Homo sapiens
cagaagaacgccccacggaacgacaagccaagcggagaagagagcgga

SEQ ID NO: 72338 - RNA, 53 nt, Homo sapiens
aaggaccaagaaccaggccccaagccgaagcaggaaccccgggcaggcgcggg

SEQ ID NO: 72339 - RNA, 78 nt, Homo sapiens
ggcaagcagcccaagccccaaaggaaaggcaaaacaggaagagagaaaaggaggaggacggcacaaaaaaaggcagag

SEQ ID NO: 72340 - RNA, 64 nt, Homo sapiens
caccaggccaaagaaagagaacccacggcagacacagcaggccaacccagaaccaccgaagaag

SEQ ID NO: 72341 - RNA, 46 nt, Homo sapiens
acccaccaagacaccaaaaccagacaaggccccacgcagaaggccc

SEQ ID NO: 72342 - RNA, 82 nt, Homo sapiens
gcacccaccgcccgcagaaagccgacaagagacaacccccaaaagcaccgagaccgggcagagcccagggggagaagccagg

SEQ ID NO: 72343 - RNA, 76 nt, Homo sapiens
acccccccacgcacgcccgcgccgggaaccaagcagggcagaaaagaacagacccagaagaagcgaaaggggagaa

SEQ ID NO: 72344 - RNA, 78 nt, Homo sapiens
aaagccacccaggccggccagcacccaccgagaaggccagcagaccacaggagcagcaacccagccccggaaccacgc

SEQ ID NO: 72345 - RNA, 80 nt, Homo sapiens
aaaccgaaggggacccagcccggggacacaagcccccaaggcaaacgaacacgcgcagcgcagaggcccggcagccccaa

SEQ ID NO: 72346 - RNA, 75 nt, Homo sapiens
cgagaccagagacgagaagaggcgcaagggacaagcgcaccagaaagagacggacgagcccgaacacgcgaacac

SEQ ID NO: 72347 - RNA, 123 nt, Homo sapiens
caagcggagagaccgccggccgagggggcccaggggcagcgagcaagacagcaagcagggacgaacagcggggacgccccagcagaccgcccaggagaggaaagcaggaggaaagaccaccca

SEQ ID NO: 72348 - RNA, 50 nt, Homo sapiens
agagcaagcgggggaccgaacaaggcaaaaggggacaaaccggcgaccac

SEQ ID NO: 72349 - RNA, 98 nt, Homo sapiens
cgaaacagcgcagccaggaacaggacgaagaccagcgccagggaaagaagcaaacggggacagcgccgaccggaacagggaccacggaagcccaggac

SEQ ID NO: 72350 - RNA, 78 nt, Homo sapiens
cgaggggaacacaagaggccccaacgcagggcccgcccgacggagaggaggggaccacccaccaccagaggaccgcga

SEQ ID NO: 72351 - RNA, 73 nt, Homo sapiens
gaaaccaggggaacgaaagcagcaggggcagagaaggaaagcgaggggaaggaggacacagcaccagagaacc

SEQ ID NO: 72352 - RNA, 81 nt, Homo sapiens
gaacaagaagaggaagaaagaggaaggagaaacaaaccagccgaaaagaagacgcaagggccgccagaaacccagagcaaa

SEQ ID NO: 72353 - RNA, 55 nt, Homo sapiens
gcgcgcagacggagggccgcgccacaagcagcaggccaaggccacggggcgccgg

SEQ ID NO: 72354 - RNA, 58 nt, Homo sapiens
caaacaagaggccgcccacacgagcaaccgaggagagaggagagccgagcaaagagag

SEQ ID NO: 72355 - RNA, 53 nt, Homo sapiens
aacgccggccgaacagcccacgccaagacacgggaagcaggacaccaaccgac

SEQ ID NO: 72356 - RNA, 81 nt, Homo sapiens
gcaacccccacagccaggggacgagaagcccagagccccaggagccccaagggacaggcgcgccgaggacagaacgggccc

SEQ ID NO: 72357 - RNA, 59 nt, Homo sapiens
agggggcagcagcgcacagcggacagcaagcagaagaagagggaaaacagacggaggga

SEQ ID NO: 72358 - RNA, 61 nt, Homo sapiens
cgagcacacaaccacagacacagaccgggaacagcgggggcagaagagacgggaccagcgc

SEQ ID NO: 72359 - RNA, 59 nt, Homo sapiens
gccagcgggacgaggaccgagaccgcggccgggaccgagggcaccgcgcgccgcgcccc

SEQ ID NO: 72360 - RNA, 78 nt, Homo sapiens
aaagccaagaaaaaggggaaaggcgccacgagcaggacgacaagaaggaaaggaagccgacaagagcaagcaagaaga

SEQ ID NO: 72361 - RNA, 76 nt, Homo sapiens
ggcggggaacaagccggccaacgccgccgcacaaggcgggaagggaggaagaaacgccccacgaacgcaggaccac

SEQ ID NO: 72362 - RNA, 87 nt, Homo sapiens
agggaaaacaccgaagcgacagcaaccaaggaacaagagagcaagaggacagaacagaacaccaaggagagaacagaagaccggcaa

SEQ ID NO: 72363 - RNA, 59 nt, Homo sapiens
cccgagccccaacccacgcgccccaaggacagagcgggagccaccagcgccaaagggaa

SEQ ID NO: 72364 - RNA, 75 nt, Homo sapiens
gaggggcccaccagcagggcacacaggaaggaacaggaggaaaccacagaggagaggagaagacagagagcagca

SEQ ID NO: 72365 - RNA, 78 nt, Homo sapiens
accaaggaaaggggacagcaacagccggcgggcggaagggacacaggacaaggagccaccggagaggaagcggcagac

SEQ ID NO: 72366 - RNA, 79 nt, Homo sapiens
cggagccggagaccccccgaaaccggcacgggacccgaccggaggcaccggcaaggacaggccccgagccccggcccca

SEQ ID NO: 72367 - RNA, 37 nt, Homo sapiens
aagggacccgagcacggagagagggggaaccggggaa

SEQ ID NO: 72368 - RNA, 60 nt, Homo sapiens
gaaggggaggcagcgcggcccagggacgaacagcggggacgccccagcagaccgcccagg

SEQ ID NO: 72369 - RNA, 53 nt, Homo sapiens
acggagccaaggaaggcgccacacaaggcccgaaaaggagccaaaagcaacac

SEQ ID NO: 72370 - RNA, 39 nt, Homo sapiens
gagaggaacccaagacaccaccagggaggccaggagaag

SEQ ID NO: 72371 - RNA, 71 nt, Homo sapiens
gcccggagcggccgccggcccaaaggcaccaagccacaaaacaggccagaccgggcacagacaccgcggac

SEQ ID NO: 72372 - RNA, 74 nt, Homo sapiens
cagcccgccaacacccaggacgaccacaccggcggcgagcgcgcccgcaggagcccgcccggccgccgccgcag

SEQ ID NO: 72373 - RNA, 74 nt, Homo sapiens
aacaagaagggaccaagcagagggagacccaacaaaggcggacggaagacgagcaaaaaggacggaggccacca

SEQ ID NO: 72374 - RNA, 54 nt, Homo sapiens
aaaacaggcaacagacaaaagagaccgcaacagggcggagaacggaaaagcacc

SEQ ID NO: 72375 - RNA, 74 nt, Homo sapiens
gcacagcagaaccagagaacggccagagccggaacggggggccacgacgggccaaagcggagaagacacaaggc

SEQ ID NO: 72376 - RNA, 76 nt, Homo sapiens
agaagacccaccgccaagaccgcaaaccacacgacccaggccccggcaacccaggaaaacaaagagggaaaacgga

SEQ ID NO: 72377 - RNA, 79 nt, Homo sapiens
acgagcccagcgcaaccccaagcgcccaaagagaaggagggggcagagcacggcaggcagaaggggccaacccggggga

SEQ ID NO: 72378 - RNA, 53 nt, Homo sapiens
ggagagcaaggaagaaagcagcccagcccgaagaaaggaggcaaacaaaaaaa

SEQ ID NO: 72379 - RNA, 74 nt, Homo sapiens
agacgcagaacgggcagagaccgcaggaagaagcgaagagggacgaacagcggggacgccccagcagaccgccc

SEQ ID NO: 72380 - RNA, 75 nt, Homo sapiens
gggcgaaaccgcagacgaagacgcacggggcgcgcaaacccaggaacacggacccgagaagaagaagaagaaggg

SEQ ID NO: 72381 - RNA, 72 nt, Homo sapiens
caagagaaccaccgggaccacaggaagagaaaacggccagaggccacgaagccaaagagaaaaacagcccag

SEQ ID NO: 72382 - RNA, 74 nt, Homo sapiens
ggacgcgccaggcacagcagcagggccggacccgaaaacacaagaacacagcaacacacggcgcacggaagcgc

SEQ ID NO: 72383 - RNA, 89 nt, Homo sapiens
cgccgcggcccccgcaaaacaagacccgaagagggggaaaacgcagggaagagaggacagcaggagggcggagacaacagaaacagaaa

SEQ ID NO: 72384 - RNA, 78 nt, Homo sapiens
acccggccggcggcggcgcccggggagcaggagaaaccacaaccccagaacgaacaaagacaacagccggaacgcccc

SEQ ID NO: 72385 - RNA, 72 nt, Homo sapiens
gacacaagagacagcaacaaagcaaccggaaaggggcgcaaaaggcagagaagcagaagcggcccaccagag

SEQ ID NO: 72386 - RNA, 80 nt, Homo sapiens
cggagccgcccagaaggaccgacagggagcagcggagaacacaggaaccggccacggaaggcgcaagcgcccaggcggag

SEQ ID NO: 72387 - RNA, 83 nt, Homo sapiens
gaaaaaccacagcaaccagcaacgagcaacaagcagacacaaagggagagagcacgcacagagcagcaccgaggcccccccca

SEQ ID NO: 72388 - RNA, 83 nt, Homo sapiens
agccacgagaccggagacagggcagccccaccggaagggagcccaaaggaaccgaaacaaacagaagcgcacgagaacccagg

SEQ ID NO: 72389 - RNA, 76 nt, Homo sapiens
cacggaggggcagccacccccgacgaagggaacgcacgggaaagcgcgcaaaagacgcacacgggccgccgcgggc

SEQ ID NO: 72390 - RNA, 65 nt, Homo sapiens
cccaggaacggaaaagggcagccgcacgggacaccccacgccccggccgcagccaccccacggcg

SEQ ID NO: 72391 - RNA, 80 nt, Homo sapiens
gcaggcaccgggccacgcaccgccgcgcgcggagggaacaggcacgccccacccgccagccgagcccccgacgcagcaca

SEQ ID NO: 72392 - RNA, 66 nt, Homo sapiens
ggagggagacggcggacacacggaggcgcgggggaccaggcagagcacccccaggaaggccacggg

SEQ ID NO: 72393 - RNA, 69 nt, Homo sapiens
ggagcagaagaacggcgccacaagcagccaccggaagagaaaaccaagaacgacagaggggcaaaaaaa

SEQ ID NO: 72394 - RNA, 77 nt, Homo sapiens
ggggccgcaggcggggaacagccggaagaccccggccaaccggcccagacagaggcccgagaggggaaaacgacgga

SEQ ID NO: 72395 - RNA, 36 nt, Homo sapiens
gagaacggcacacgcgagcgccagcgcggaggccag

SEQ ID NO: 72396 - RNA, 75 nt, Homo sapiens
gaccgccgcaccaggccaccgccacgggccgagacacgcagcggcggccagggaccaaggaacccacagcccaga

SEQ ID NO: 72397 - RNA, 78 nt, Homo sapiens
cgaagaaggaaagcaaggacaggcacgccacacacaggagagaagagacgaggaggaggggagaccgcggcaggacac

SEQ ID NO: 72398 - RNA, 78 nt, Homo sapiens
ccagcgcggaccagaccggaacgcccaagccccaccgcgagcacccggaggagaagaggcgcggaacaagcgggagag

SEQ ID NO: 72399 - RNA, 72 nt, Homo sapiens
aggagacccccgggcgagggaggccccaggcggaccggccccacagccacaagaggcaccaaggagggacag

SEQ ID NO: 72400 - RNA, 82 nt, Homo sapiens
acggaagagaggagcgaccagacggcaggaggccgagcaacaagaaccagacgagaggaagaccaggcagcccgcacgaaaa

SEQ ID NO: 72401 - RNA, 79 nt, Homo sapiens
ccaaagagaacaaccccgaagaaggggcagagacggccagagggcccaaacaccaggcaagggggaaggaagcgcgaaa

SEQ ID NO: 72402 - RNA, 72 nt, Homo sapiens
acccaaaaaaaagaggagcagcaggcacagcacgggcagagccagggaacggcgccaccgagcacagaagag

SEQ ID NO: 72403 - RNA, 85 nt, Homo sapiens
cggcgcggcccgggggcaggggaggagacgagggagagagcagagaggggagcagagcggcgagcgcaagcgagcccacaaccgg

SEQ ID NO: 72404 - RNA, 93 nt, Homo sapiens
agacagaaagagaccggaccagaaaccaggagccacggacaagaccaaaaggagccagcaggccaagggaaaagcagcggaaaaccagcccaa

SEQ ID NO: 72405 - RNA, 74 nt, Homo sapiens
ggaaaggcacgacgaacagccagaagcggcaagcaacacggagaaccacggggaccaagaagcgagcagcccaa

SEQ ID NO: 72406 - RNA, 82 nt, Homo sapiens
cgggccgcccgcgcgacggggaaccgcgaccgagacggcaggcggcggaagcggggagagaccccgagaagcaggcaaggag

SEQ ID NO: 72407 - RNA, 77 nt, Homo sapiens
gccaagcgcaccagaacaaagccaggccggggccagggcaaggcggacaggccacacgcaccaggcagcaaaaaccg

SEQ ID NO: 72408 - RNA, 82 nt, Homo sapiens
cgaagcgggcgagcggggggacgccggcggagacgcgggcgagcacgagagaaacagaggacgaccgggaggacaagaagag

SEQ ID NO: 72409 - RNA, 66 nt, Homo sapiens
aggagaaggaccgaagagcagccgcccgccccgccccaagaacacgcacaggcccaagccggagaa

SEQ ID NO: 72410 - RNA, 88 nt, Homo sapiens
cccgcgcgcgcccgggaggaaggaacgaggcaaggagcaaagcagcggcgcagcccgggcccccgggcgcgccggacaggccgccgcg

SEQ ID NO: 72411 - RNA, 61 nt, Homo sapiens
ccggggccgcgcggccccgcggagccagggagagagacagcggacgggagaccgagccaca

SEQ ID NO: 72412 - RNA, 80 nt, Homo sapiens
cgcgccacacccaaaccaaaaccacgccccaccagaagacccaaacaaacgggagggcagcgggaacgaaacagagcaga

SEQ ID NO: 72413 - RNA, 81 nt, Homo sapiens
caacaccagccaggcccaccaggaccccagggcccccggccaccggcccccaaggccaccgggcacaacacgaaggagaaa

SEQ ID NO: 72414 - RNA, 47 nt, Homo sapiens
agcagacagacccacagcagaggaggagagcaggcccccacgagccg

SEQ ID NO: 72415 - RNA, 72 nt, Homo sapiens
gaacaggaacgggacaagcagcacacacacagacagcaaacgccagccgcgaggggaccccgaccaaggagc

SEQ ID NO: 72416 - RNA, 75 nt, Homo sapiens
cagagcaccagcaccagcagaggaacacgaggacccaaagaacaaacccggagagaagaaaaccccagcagggcg

SEQ ID NO: 72417 - RNA, 75 nt, Homo sapiens
agaaaccgaagagaaaggccaacgagaacaagcacagggaagggacgcgaagaaccccaaggacaagaaggaagc

SEQ ID NO: 72418 - RNA, 72 nt, Homo sapiens
gcccagccgggaacccccacgcggccagcgaaaacgcccagcaagcgcagagccgggacaaggagggacacc

SEQ ID NO: 72419 - RNA, 73 nt, Homo sapiens
cagggcgccggggaagcgggaccgcaagaaccagggagaccacaaaagagcagaggaggaacaccaggcacaa

SEQ ID NO: 72420 - RNA, 64 nt, Homo sapiens
cacgcaagcaggggcacacggcgcgaacccacaaggaggggagaaaaccaccaaaaaaagaaga

SEQ ID NO: 72421 - RNA, 68 nt, Homo sapiens
gggcggagagagacaacacgaaaaaccaccagcgcccgcggaaacgccagagaaagcggcgcgagcgg

SEQ ID NO: 72422 - RNA, 109 nt, Homo sapiens
gggaccagggcgccggcgccccccgcgggcggaaggcggcgcccaccccccccggacccgcggacaagggaggcgaggacggacaaaaggaaacggacgggaggccagc

SEQ ID NO: 72423 - RNA, 57 nt, Homo sapiens
ggaggaagccggaggaccaacagcggacagcggggccaagacggcagaggcccgcac

SEQ ID NO: 72424 - RNA, 82 nt, Homo sapiens
cccgcagcgcgaggacgcacagccccagaacaggaaccagggcagagggccccccgcccccaccccacccggccaggcggca

SEQ ID NO: 72425 - RNA, 63 nt, Homo sapiens
ggaccacccaccagccaccaggcccggaacccagcgcagcacagaagaggagccagagaagag

SEQ ID NO: 72426 - RNA, 78 nt, Homo sapiens
gaaccacccgcacacagccacgagcaaaggaaggaggcagaaagggagccccaagagagagggccaagccaaccggcc

SEQ ID NO: 72427 - RNA, 62 nt, Homo sapiens
agaccggagcagcaacgcaagacaccggcacgcaacagaaagccacaggacagggagaaaag

SEQ ID NO: 72428 - RNA, 68 nt, Homo sapiens
gaagcacacacgaagccagaaaaacggcgaagacacgagaggcgagggacgacagagcaagcggcaga

SEQ ID NO: 72429 - RNA, 74 nt, Homo sapiens
gcagcgaaagaccacggacagcaggcccacacccaggaaagagccaaaagaagcaagggaaagaccaggagcca

SEQ ID NO: 72430 - RNA, 75 nt, Homo sapiens
cggagaagagggggcccggggggaggaggggcaggcccggcggagccaaagaacccccggccccagccagccccc

SEQ ID NO: 72431 - RNA, 52 nt, Homo sapiens
gacaggagacggcagcaagacgaccgcaacgggggaagaggcgcaggcgaga

SEQ ID NO: 72432 - RNA, 78 nt, Homo sapiens
acaagcaagcgcaggaagagaccagaggacagaccgaagcaaaggagcagacaagggcccacaccaaagccaccagag

SEQ ID NO: 72433 - RNA, 72 nt, Homo sapiens
ggaaaccacacaaaggaaaagcggagagagcccaaaagcaaagcagggcagcaaagaacacaaaggcacggg

SEQ ID NO: 72434 - RNA, 80 nt, Homo sapiens
accagggcccacgaagacgaaaccacgaccagacaaagggagcaccagccagaccgggaagaaacgaaggggggaggccc

SEQ ID NO: 72435 - RNA, 75 nt, Homo sapiens
gggccgggcgacaggagcaggacacggggggcacacaacccagccagccgccggggccgacgaaaggcgaagcac

SEQ ID NO: 72436 - RNA, 75 nt, Homo sapiens
ccaaagagagaacgaaaggaaaccggaaacacagagggaccccgaagcaggaggcccaaggaacagcacagcagc

SEQ ID NO: 72437 - RNA, 69 nt, Homo sapiens
agacccagaggccacaaccggacaaaagaagaaacacggcaagacaaccaagacagaggacccaaaccc

SEQ ID NO: 72438 - RNA, 66 nt, Homo sapiens
cgggcacccacgccagcaccccgcgacgaaaggaaaccgacgaaaagaagaaaaggaacagcccca

SEQ ID NO: 72439 - RNA, 78 nt, Homo sapiens
acggcgcaaggacgccgcgccagcagcccgccggcgcgagaggacaagagaaaggagcaagaaccaacgaaccagagg

SEQ ID NO: 72440 - RNA, 73 nt, Homo sapiens
ccaaaaggccacaccgacggggaacgacggcccacagacaaggcgggcaaaaccaggaaacagaaaaaccagg

SEQ ID NO: 72441 - RNA, 79 nt, Homo sapiens
agaagcacagaacgggaagcagagcggacaaacaaaagcagagaccgacgcgacaggcccggggcgacagcagcgccaa

SEQ ID NO: 72442 - RNA, 76 nt, Homo sapiens
cagagcgcagaggcggcggggcgagagggcggcgaaggaggcagaggcacagcgcagggccgcaagagacaccaca

SEQ ID NO: 72443 - RNA, 83 nt, Homo sapiens
caggcccccgagggcagcccgagacccaccagagggcgccacaaacgggacgggccagcaaaagaagcccgggccacaggccc

SEQ ID NO: 72444 - RNA, 86 nt, Homo sapiens
gggagagacgccgaacgacgccccgcacaccggagcgcccagcgcgaggaggggagaaggacggcagaaaacgagacgccggcggc

SEQ ID NO: 72445 - RNA, 56 nt, Homo sapiens
aggaaaagggcagggacagcgcaggcagcaggacaccaggggggaaaaaccacaca

SEQ ID NO: 72446 - RNA, 80 nt, Homo sapiens
aggcgggcggagggcacaccagagggccaaaccaaacaggaagcacccaccagccaagagcaacagaacagcaagaggaa

SEQ ID NO: 72447 - RNA, 77 nt, Homo sapiens
agccaaggcacaggggcccgacccagcaggacagaaagggggggagagaacggccaagggagccgccaccgagaccc

SEQ ID NO: 72448 - RNA, 81 nt, Homo sapiens
gcggcgccggggccggaggaaaaagccggagaggaaccgcacccaaggacggcggaggcccagcccccgcccggcgcccgg

SEQ ID NO: 72449 - RNA, 50 nt, Homo sapiens
cagggcgacacaccgcaggaaaagcggacccacccaaggagaagaaccgg

SEQ ID NO: 72450 - RNA, 73 nt, Homo sapiens
gccccggggagcggaggggagccgaagaggcacagccgggaaaaagaaaagggcgaagacccgaagcagcgca

SEQ ID NO: 72451 - RNA, 80 nt, Homo sapiens
cacgaggagggccaagacgggagagccacgggcccccggcaacgaacgggacccccgaccggcgggggcccacaaccggg

SEQ ID NO: 72452 - RNA, 54 nt, Homo sapiens
acgggaaacacgcaaaacacgagcaaggacaagcaacgaagaggagaagcagga

SEQ ID NO: 72453 - RNA, 76 nt, Homo sapiens
cgcagcaacaaggaacaaaagaagaagaacacaaacgggcagcgaggcacaggccccaccgcgaggcgagccaccc

SEQ ID NO: 72454 - RNA, 63 nt, Homo sapiens
ccagagccggcagaacccccaacgagcgggagacgagagggccccaaagggaccagggacgcg

SEQ ID NO: 72455 - RNA, 78 nt, Homo sapiens
gccaggcagaccggggacaacaaagcgcgggaacaaagcagcccaggcagaccccaggaagaaagggcaggcgagaga

SEQ ID NO: 72456 - RNA, 59 nt, Homo sapiens
ggaaggcagcgcccagcagcgcagccccacagagaccaccacacacgcggaggagggcg

SEQ ID NO: 72457 - RNA, 84 nt, Homo sapiens
gccaggacaaccgggggccgcaggggcgaggaggaacaggaggaggcaaggagaaggagccccggagcgcagaccagggggccc

SEQ ID NO: 72458 - RNA, 82 nt, Homo sapiens
caaacaagccaacccaggaggaaaaacgccgccacaggaccaggcaccaaggaacaccgaccagcgccaaccgagcaaagag

SEQ ID NO: 72459 - RNA, 71 nt, Homo sapiens
aaggcagggcaaaccagaaagacggagacaggaagcaccggacccagaacgccccaacccgagaccaccag

SEQ ID NO: 72460 - RNA, 116 nt, Homo sapiens
acgcagagccccaggacaaagaagccccacacgcccccagaacagcacaaaacgcccaggcccacaagaaacggacgcaagacacggagaaggggccccaggccacaagcaaggac

SEQ ID NO: 72461 - RNA, 74 nt, Homo sapiens
gcgccaaagcgcgccgccccgggcaaaagaccggaaacaggcacagaacagaaggaaaggacgaagagcccagg

SEQ ID NO: 72462 - RNA, 76 nt, Homo sapiens
gcggcgccggcggcgcgcgacccccgcgcagggacaagacggacagaaacgaacagcgggcgagccaggggagcca

SEQ ID NO: 72463 - RNA, 85 nt, Homo sapiens
ggccacaggcccgcccaggaacacgagcccaaagagggccagagagacaacaccccgccgcaccacccagcgacgggcgcccccc

SEQ ID NO: 72464 - RNA, 39 nt, Homo sapiens
aaagcagccagcagcacccaggacaaccccagaacaagc

SEQ ID NO: 72465 - RNA, 78 nt, Homo sapiens
cccagcacgacaccgggcaaccaaagacgggcgccacagacacaaaaggacagaaaaggaacgggacaacaccagcgg

SEQ ID NO: 72466 - RNA, 76 nt, Homo sapiens
gacggaaacaaggcaacagaaagagcaacagcagggcaacaggaaacggcaaaaggcgccccacaaagaggaaaac

SEQ ID NO: 72467 - RNA, 81 nt, Homo sapiens
gagggaggagagagggagagccaaagaagggcaaaagaggaaacaaccagaaggacgaggcggccaccgagcggaaaaacc

SEQ ID NO: 72468 - RNA, 74 nt, Homo sapiens
ggaccaaccggccacccaggaaagaggagaaggcgcgcagcagaagaccagaaaccggaggaggcaaggccgga

SEQ ID NO: 72469 - RNA, 67 nt, Homo sapiens
cccccagaacagcaccagaccaacccggaaacaaaaccagacaccaggaaaaggggacccaaccaca

SEQ ID NO: 72470 - RNA, 75 nt, Homo sapiens
gcgcagaaagggcgaccaccaaaaaaacgcacaaacggcagaacgaagcccccggcaccaagaggaagcaagaca

SEQ ID NO: 72471 - RNA, 69 nt, Homo sapiens
aaacaaaacgacaaaaacgacgcaaggccagcacaaagggcacacagaagaagggacagcacaaagaaa

SEQ ID NO: 72472 - RNA, 104 nt, Homo sapiens
gggggaacagcgagcggagccggcaggaaggggaccgggcggcggagcggcggaagaaggccgggggagcacccagaacagcagcaaggcaagaaaggcaaggg

SEQ ID NO: 72473 - RNA, 72 nt, Homo sapiens
caaaaccccaagagcacacgcagacacggaggcacacgagcagggccgaccaagcagaacccgagaagagcc

SEQ ID NO: 72474 - RNA, 63 nt, Homo sapiens
ccacgccccgcccgggagccagaagcaagagagccacaggaacaccagccaacagagggaccc

SEQ ID NO: 72475 - RNA, 86 nt, Homo sapiens
ccccgcggagcggccagaaaaaggcgcggaaaaaggaacgaaccagaagccgaagccggagaaccaaggcgaacagcgcggagaac

SEQ ID NO: 72476 - RNA, 72 nt, Homo sapiens
ggacaaacacgagaggagagacgaaacaaagaagcaaggaccgggaaacaaaaaccggcagccaggaacggg

SEQ ID NO: 72477 - RNA, 77 nt, Homo sapiens
gacagggcaaaggacagaccagggccaaggccaagacgcgaggcgagggcgaaagcccccggacacccgaacaggcg

SEQ ID NO: 72478 - RNA, 71 nt, Homo sapiens
aagaacccaaggaccccgaacaccaggacggacaaaagacgggcaaagcaggaagaacggaagaagaccga

SEQ ID NO: 72479 - RNA, 77 nt, Homo sapiens
cggccggggcgccacggccacggcgcggcaccggggcgccgggcacggggccaaaaaggcacgagggaacgggaaag

SEQ ID NO: 72480 - RNA, 83 nt, Homo sapiens
gagaagcagccgggacagaacgaacaggcaaagcccaaaaggcaaggcacaaggaagaagagagggcgaaggaggccacacag

SEQ ID NO: 72481 - RNA, 64 nt, Homo sapiens
ccgggacacaaaaacacccaacaggaggaaaagggacggaacggagaagagacaagcgacgaaa

SEQ ID NO: 72482 - RNA, 70 nt, Homo sapiens
gccgccgccaagcccggcccggcccgacaccgcgggccgccagacgggaaggaaacagaggaagagccgg

SEQ ID NO: 72483 - RNA, 79 nt, Homo sapiens
cccaaccgccacggaaggggcaaagacacagcggaacgacaacaagagggggaacccgcgaagaacacccacggacacg

SEQ ID NO: 72484 - RNA, 81 nt, Homo sapiens
gacaagggaagaggaaaaagaacgccccgaacccagaaaggagaagccaagcccacagagacggagagagcgacggccccg

SEQ ID NO: 72485 - RNA, 81 nt, Homo sapiens
acgccggagaagcagcgggcaagaaagacgcaagcccagagagcaaacagaacaaaaacaagaaaagcgacagaggggaga

SEQ ID NO: 72486 - RNA, 72 nt, Homo sapiens
ggcgggcagaccaagcgagacggaaacgcaaggggaaagccccaggacgccagaccaaaagggagaagacgc

SEQ ID NO: 72487 - RNA, 76 nt, Homo sapiens
caggaagagcagaagggacgagcgcggaaccaaacaagacaaaggaggcagcaaacagcacacaacggacggagaa

SEQ ID NO: 72488 - RNA, 42 nt, Homo sapiens
ggcacacagcacacaccgacagacgcccggcaagaggggaga

SEQ ID NO: 72489 - RNA, 76 nt, Homo sapiens
ggaaccacccaggaaacagcgcaagagccaggcagcgagcgggagcagacagggaaccgaaggcagcagaaaagaa

SEQ ID NO: 72490 - RNA, 78 nt, Homo sapiens
gggccgcgccgggcacagccggaaagcaggaccgcgacggcagcagagcagaagcagcaggacgaagcacgcagagaa

SEQ ID NO: 72491 - RNA, 78 nt, Homo sapiens
ccgaacacagaacccaagaaggagcaaggcgccaccggaagaaacgggaggggaggagccgggaaagacagcgccaag

SEQ ID NO: 72492 - RNA, 66 nt, Homo sapiens
agagcgcgaaacgcacgagaagcccgaccgagggggaggcacaccagcgaagggcagccagccaag

SEQ ID NO: 72493 - RNA, 64 nt, Homo sapiens
gcaggcaccacaaaaaggacagggaccagcccagaagaaaacagagacaccaggccgcccgaca

SEQ ID NO: 72494 - RNA, 78 nt, Homo sapiens
gaagacacccacacagaacaagagcggacaggaagcgggagcagcggggaaggagcgagggacggcgcgacggaagaa

SEQ ID NO: 72495 - RNA, 74 nt, Homo sapiens
ggccagcgcccacccccacgcccacccaccggacaccgaagggccgagaggagaacgagaaggcggagcggcac

SEQ ID NO: 72496 - RNA, 91 nt, Homo sapiens
ccagaggaaagccagaaggcaccagagagaggccgaacggagcagacaaagggagagaacagcacacagaggcgcaaggggaagagaaaag

SEQ ID NO: 72497 - RNA, 79 nt, Homo sapiens
gaagcgcaaaagggaagacgagggcaggagcgccaggggaacgaccaggcaccagaccgccggccacacccgacccgcc

SEQ ID NO: 72498 - RNA, 81 nt, Homo sapiens
aaggccgaggcgcagcgaccccaaaggcacgcccccggggcaaaggcacccacccgcgagacccccaagagacaaaagaag

SEQ ID NO: 72499 - RNA, 94 nt, Homo sapiens
aagcagcccgccgcgccgccccgagcagcccgccaggcgcagacggggaagcggagccaacagccagggcccggagcggggcgcaaaacaggac

SEQ ID NO: 72500 - RNA, 79 nt, Homo sapiens
ccgaggcacgacgacggcaccaacaccccgaacccggccggaaacggaggggacggccaagacgcccccccgcccccac

SEQ ID NO: 72501 - RNA, 62 nt, Homo sapiens
cacgaggcgcacaccgccagcccaagaaaaaggccgacagacagagccggacgggaggaagc

SEQ ID NO: 72502 - RNA, 85 nt, Homo sapiens
ccggggaccgcaggggcgcgcgaaggagcggaagaaggcaggccaaaccaccgaccagccggcacagccacaccgagaagaccgg

SEQ ID NO: 72503 - RNA, 74 nt, Homo sapiens
gccccgcggggcggcgagaaaaggcccggggcccgggacgagggaagaagacgcacacgccagagcgcccaacc

SEQ ID NO: 72504 - RNA, 74 nt, Homo sapiens
cagccaacccagagagcgaaggagaacgggaggcgggaacacaagaggcagaccgaccaaacagggagcagcgg

SEQ ID NO: 72505 - RNA, 122 nt, Homo sapiens
gagcgcgggacgccgagcccacgcgcgccgccgggacaagggagacgaggccggcgagcggacgccccgagaccggagagcaaggggacccgcacacgcaacccgccccagggcaagggccc

SEQ ID NO: 72506 - RNA, 70 nt, Homo sapiens
ggaggagaggagcggcggaagaggggaacccagggcgagagggcacaggcaggaccaccggaggagagcg

SEQ ID NO: 72507 - RNA, 75 nt, Homo sapiens
agacggagcgaaggccggaggggagaagaccaagccccccgaggagccccagaccgagcccccagaacaacaaca

SEQ ID NO: 72508 - RNA, 79 nt, Homo sapiens
aaaccacgacaaccgggcagagagaaggaaacacagaggaagcggagagaaccacagagggccgccagcacaagaccgg

SEQ ID NO: 72509 - RNA, 89 nt, Homo sapiens
gcaaagagacaaggagagaagaaccaaagaagcaaaacacgaggacagggcagaccgccagcagcacagcaagccacagagagggccgg

SEQ ID NO: 72510 - RNA, 84 nt, Homo sapiens
gaagcaaaagcccagaaaaaaggacccaagggggcaaaggcggaaacagcagaggacaccaggagaggcggcagcaggccagac

SEQ ID NO: 72511 - RNA, 67 nt, Homo sapiens
ggcccccaccccgcccgcgcggaccgccccagaaaggcccgaaagccgacaagagacaacccccaaa

SEQ ID NO: 72512 - RNA, 69 nt, Homo sapiens
ggccagaacccccgggcaccgcggacaaacagaccaaggaacacagcacccacccacacccacacccgc

SEQ ID NO: 72513 - RNA, 83 nt, Homo sapiens
ggcgccgcgccggcggcggagcgggggccccccccgggcacggggccagacaacgggacgggcgccgacgccccggggcagcg

SEQ ID NO: 72514 - RNA, 74 nt, Homo sapiens
ccccgcccccccccccacgcaaccccagaccaacacacaagagggacaccagggggaaaacaggaaacgaagcc

SEQ ID NO: 72515 - RNA, 79 nt, Homo sapiens
acgaggggaagggcaggaggaggaggaggggcccggcggcggggagggcaaggggggccacaccgaaccagcacgggag

SEQ ID NO: 72516 - RNA, 84 nt, Homo sapiens
caccgacaacccaccggcccgaggagcgcggcgcccggcccgccccccggaagcagaggacgggcggcgggggcccggagcaga

SEQ ID NO: 72517 - RNA, 77 nt, Homo sapiens
gaaacacagcaaacccaccgccaccagcagcggccaggggaggccccacggcggccgggacccggggggcgggcaca

SEQ ID NO: 72518 - RNA, 79 nt, Homo sapiens
gacaacaacaaagacaaacaagacaaacgacggaaaaggagagagacgggacagcaagggaggcagcagacgggaagaa

SEQ ID NO: 72519 - RNA, 80 nt, Homo sapiens
cgcgagccccgcccccgccgccgcgcacaaccgcacggcaggagagccgacccacgaagccaaggccgagagaagacccc

SEQ ID NO: 72520 - RNA, 75 nt, Homo sapiens
ggccaaggccgccgaaccgacaccggagacaccacaccaacggcagagaccccccaagggccagagggcaggccc

SEQ ID NO: 72521 - RNA, 83 nt, Homo sapiens
ggaggccgagccgggaccaggcccgggggcggcggccacgccaaggacggcagcgccgcccaagagagagaagagaggcgcga

SEQ ID NO: 72522 - RNA, 76 nt, Homo sapiens
agaggcgacgcaaccgcgggagaggcgcgccaaagaaaaggacacaaccggaaaagccgccagaaggagacgggac

SEQ ID NO: 72523 - RNA, 71 nt, Homo sapiens
aagacaccaaaagacaccaggaagagaccaggcgggagagaacaaagagagcaggcgacagaggagcagca

SEQ ID NO: 72524 - RNA, 70 nt, Homo sapiens
gccccgccgagacaccgcccgcccgagaacaccaggagacacaagggcggaggaggacgacaggaggcag

SEQ ID NO: 72525 - RNA, 83 nt, Homo sapiens
acagccgggcaggcccagaggcccccgcagcaggccggccacccagagggcccggccaaggcggcacagggagaacacagggc

SEQ ID NO: 72526 - RNA, 55 nt, Homo sapiens
gaacccaggaaaaggcaagggaagcagacagccggaagaacggcaccaggggaac

SEQ ID NO: 72527 - RNA, 81 nt, Homo sapiens
ggaaacggaaccgggaggcgacgcacacgagcggaggcgaaggacagaagccgagaggagacccccccaccgacggaggcc

SEQ ID NO: 72528 - RNA, 78 nt, Homo sapiens
agcaagacggcagcccaaagaaagagaagaagggcaagaaaacagaggaaaagcgcggcaaacccagggcggagagga

SEQ ID NO: 72529 - RNA, 86 nt, Homo sapiens
aagaagccgcgagcaccacagcaaagacccaagacggagggcccggaaaccagccaccaacagccaggagggaacgacaagaggaa

SEQ ID NO: 72530 - RNA, 88 nt, Homo sapiens
ccggggccggccagaagcgggcggcgcgggggagaggaagaaggggagacaagcggagcccggcagggaaaccaggaaggggccaaga

SEQ ID NO: 72531 - RNA, 83 nt, Homo sapiens
caacgggcaaaaaagccagaaagccaaggaagagggggggacacacgcaggggccacagagggagccgagcaagggaagaaga

SEQ ID NO: 72532 - RNA, 88 nt, Homo sapiens
ggccccaacacccggagcagcgccacaagggacaggcaaccggggggaaaagaccccccccagcccgggggcccggaccggaggagca

SEQ ID NO: 72533 - RNA, 60 nt, Homo sapiens
ggagacgccgagcccacccccacggagaaaaggacgacggaaccaccacgaaaaaaagca

SEQ ID NO: 72534 - RNA, 73 nt, Homo sapiens
gggacccacgcccgcacggggcgggaagaagcccgccgccaccaccccaccaccagcgcagcagagaagaaaa

SEQ ID NO: 72535 - RNA, 78 nt, Homo sapiens
gggagcggacggcgagcgcgagcggcgcgagaaagggaccccagcccaacgccaaacgagccggacccggaggacgga

SEQ ID NO: 72536 - RNA, 50 nt, Homo sapiens
accaagaaccaggagaagaaggaggcccggagcgagccagccccgagcaa

SEQ ID NO: 72537 - RNA, 80 nt, Homo sapiens
ggaagggacgcacacaaagcccgaacagcaaggaaaacaaaagaagcgaaccgggagcgacacaccccagagagagccga

SEQ ID NO: 72538 - RNA, 75 nt, Homo sapiens
gacagacaccgccccgagacgagcggacagaaggcacgggggcccgcacgagaaagacacggcagcgcaggcaga

SEQ ID NO: 72539 - RNA, 75 nt, Homo sapiens
aaggaaaaacggagagccacaaaaaaggaagcgaaagaaggaggcgcagggccagagccggcaacagcagaagga

SEQ ID NO: 72540 - RNA, 82 nt, Homo sapiens
gccgaagaagcacgaaagccccacccgccgcagcaagcagagggaaggaagaagcgcgaaaacgcggacagacaagaagagc

SEQ ID NO: 72541 - RNA, 61 nt, Homo sapiens
acaaggccaagaccgccagcaaaggaagacgaggagagggcggggacacagcgggcaggaa

SEQ ID NO: 72542 - RNA, 57 nt, Homo sapiens
cggaagccacacaggccagaacgaggaccaccagaaagcccgccaagcgggcaaaca

SEQ ID NO: 72543 - RNA, 57 nt, Homo sapiens
cgagcagaggacgaccgagagggcggggacacagcgggcaggaagaagacgccgagg

SEQ ID NO: 72544 - RNA, 73 nt, Homo sapiens
ggaaaaaaagcaagacgacggaaacaacagagaagaggacagcaggcgacaggaaccaacacagcccaggcgg

SEQ ID NO: 72545 - RNA, 59 nt, Homo sapiens
gcgcacgccgccgagcgcagaacccaccacggaggcaccgggagccggccgcgcaggga

SEQ ID NO: 72546 - RNA, 42 nt, Homo sapiens
caaaacccaggaaaagcaaagcggaagacagcgagaagccac

SEQ ID NO: 72547 - RNA, 77 nt, Homo sapiens
cgcccagagcaaagcacgagagcgggccaggaccccagccggaggcaacagccaacggacccaccacccccccaagg

SEQ ID NO: 72548 - RNA, 74 nt, Homo sapiens
aaaaaggggccaccccaggaggaaggaaggagaggaagagcaggcccagccaacaaccagaaaaaccaggagag

SEQ ID NO: 72549 - RNA, 75 nt, Homo sapiens
ggcgccgggccagcgccggagcgggcaccgcagaggaggaggaagagccagggccgaaagggccgggagggaaga

SEQ ID NO: 72550 - RNA, 79 nt, Homo sapiens
aaggagcacacaaaaagcggccgaggagcagcaaaagcagacaagggcaccggacccgggaaggggagagcccaagcag

SEQ ID NO: 72551 - RNA, 81 nt, Homo sapiens
cggacaggaggagaaggccgccaaaaacagcagacaaggagccgccacccgccagggaaggagaagccaccccgaagacag

SEQ ID NO: 72552 - RNA, 48 nt, Homo sapiens
gggacaccgaagaggaaggaaggcaggcagagcaagaaagcacccccc

SEQ ID NO: 72553 - RNA, 76 nt, Homo sapiens
aaaaagggcaagaggaaacgacaggcacaaacgccaggacccagcaaacgcccagaggaccccgagcaggcgcagc

SEQ ID NO: 72554 - RNA, 76 nt, Homo sapiens
acagcccagccgcgccagcgcccggcgccgcgcgccacccccgagggaaccagaagaggccaaccagcacgaacgc

SEQ ID NO: 72555 - RNA, 57 nt, Homo sapiens
gggggggagggcgcggcggagggagaaggaccgaaagcacagaacacgggcgaagca

SEQ ID NO: 72556 - RNA, 88 nt, Homo sapiens
cagcggcgcaggacgggcacagcagagaccaaaggcagggcaaggaaacggccacaagcggcccagagcgcaggcccgaagcagaaag

SEQ ID NO: 72557 - RNA, 77 nt, Homo sapiens
aagccccaacggcccccgcgccgggcgcagcgaaaaagcaagagagcccaacaaagaagagaacccagggcgaccac

SEQ ID NO: 72558 - RNA, 49 nt, Homo sapiens
accgcaggcagacaaaagggccaaagaagggagacagccaggagagaga

SEQ ID NO: 72559 - RNA, 70 nt, Homo sapiens
aagaacgcagccaccagaggagcacaagacggcagaaaggcggaaaaaggaaaccacacaaaggaaaagc

SEQ ID NO: 72560 - RNA, 104 nt, Homo sapiens
cggaagacggcccaaaacacagcgcaccacacacagagggaaacggaaaggacagagccacgaaccccaggacagcagacgcaggggcagcgcggaccgggaag

SEQ ID NO: 72561 - RNA, 78 nt, Homo sapiens
ggacgcgggccgcgacgagcgcccggccccgacacgccgagagcacgacggcccaccggagggccacccgcccacagc

SEQ ID NO: 72562 - RNA, 76 nt, Homo sapiens
cagcacacaccacacccaggccggggcgccagagcgccaagcagcaaaggagagacagagaggggacggcaccaca

SEQ ID NO: 72563 - RNA, 60 nt, Homo sapiens
agaccgccacgagagcaaccgacacagaagcacggagcccaaggcggaggcaaggccgac

SEQ ID NO: 72564 - RNA, 83 nt, Homo sapiens
aaccacgaggaaggcccacaaagcaaggcccacagacaccccaccaagaacagcaggcccagagaacaccaggccagaccggg

SEQ ID NO: 72565 - RNA, 70 nt, Homo sapiens
cccaggcagcagcgaccgaaagccacgaggaggcgcaaggccgcaccggccacagcgcgagcggccgggg

SEQ ID NO: 72566 - RNA, 74 nt, Homo sapiens
cggcggccgaaagccaagaggaggcgcgagggacccggccaccccgccaccgagcccagcccgagcacgcggcg

SEQ ID NO: 72567 - RNA, 86 nt, Homo sapiens
cagcggccccggggacaccagcagccgcgcggagcgggaggaggaccgaaagcgggaaggaagaaagaggaaagcgggcagcgcgg

SEQ ID NO: 72568 - RNA, 77 nt, Homo sapiens
ccgccgccgccaccacccacccggacacagaggcacaggccagacgaaccccagaggcaacgagaaaggcagaagaa

SEQ ID NO: 72569 - RNA, 75 nt, Homo sapiens
gagaagccccggaacacagaggcgagagaccgacaaaaccggcggaaacacaaagccggggaagcaaagagaaca

SEQ ID NO: 72570 - RNA, 76 nt, Homo sapiens
gccgaagcccagccgccaaacagacccgagacccagcagccccacggagcccgggccacacccaaaaccggacagg

SEQ ID NO: 72571 - RNA, 82 nt, Homo sapiens
acaggaggcaggccgccggccgaaggcccgagcgcccgaggcgcgggaggggggaccgggacaaaagacccacaccgaagga

SEQ ID NO: 72572 - RNA, 74 nt, Homo sapiens
cagcagcagagcaggcagggcagaagaaaagcgccccggaacgaccaacccgagagcacgccacgggcccaccc

SEQ ID NO: 72573 - RNA, 64 nt, Homo sapiens
ccccacgggccccaggagaacacacaaccagcacggaaagcaggggaagacaaccggacccaga

SEQ ID NO: 72574 - RNA, 41 nt, Homo sapiens
ccccaggagcgggaacagcacacagagccaagaaggcagca

SEQ ID NO: 72575 - RNA, 73 nt, Homo sapiens
cggacgagcgcaccagcgaccacaagacgccaaaggggccgcaaggccaggcgcgcagaggcacccaacggca

SEQ ID NO: 72576 - RNA, 54 nt, Homo sapiens
cgcaggccgcgagcagcggacgccggccgccgcaggagcagcagagcccacccg

SEQ ID NO: 72577 - RNA, 55 nt, Homo sapiens
cgccgcaccgccgaaagcacaccacgagcgacccggacgaacacaaacacaggcc

SEQ ID NO: 72578 - RNA, 69 nt, Homo sapiens
cggacaagaggagacgacgccaaggggggcccagaagaaccagcggaaccaaaacgcgcaagaaacccc

SEQ ID NO: 72579 - RNA, 58 nt, Homo sapiens
cagcaccaaaacagcgcggcagaagagcacagaagcagaagaaaccacaccaaaaggc

SEQ ID NO: 72580 - RNA, 44 nt, Homo sapiens
gggcaacacgggcaccggacccgccagacggggaaagagacccg

SEQ ID NO: 72581 - RNA, 87 nt, Homo sapiens
ccgggcgcgcgggccgccgcgggagggcacggcggcggcgcggagcgcgaggggcccggagcggccgcggagacaaagccgccaccc

SEQ ID NO: 72582 - RNA, 76 nt, Homo sapiens
gaaaaagaaagacacagacaggaagaagaaaagagaagcaccggggaaagaaaaggaaaaccgcgcgcaaagcgga

SEQ ID NO: 72583 - RNA, 70 nt, Homo sapiens
aaagcaagaaacccaggacagcagcggacaacaagcaggcggcccaaccgggggaggaaacaaaacccac

SEQ ID NO: 72584 - RNA, 83 nt, Homo sapiens
gggcaacgggccgacagcacagcgcaaaccaacgggacacaaaggacggcaacgagggagaaggacagaagaaagccaaagag

SEQ ID NO: 72585 - RNA, 45 nt, Homo sapiens
gagacccgacacaagcaacagcaggaaccggccgaaaaacacacg

SEQ ID NO: 72586 - RNA, 78 nt, Homo sapiens
cggaaagagcaggcggcggcggcggaacgccaggcaggcaggcaggggcagaaggcgacccagcgcagagcaaacaga

SEQ ID NO: 72587 - RNA, 56 nt, Homo sapiens
ggaaaggagaaagcgaacgccaccgaggacaaagccaaaggccccgagcggccacc

SEQ ID NO: 72588 - RNA, 58 nt, Homo sapiens
aggagacggaaccggagaaaaacaacaggcacaaagagagaaggaacacccacagggc

SEQ ID NO: 72589 - RNA, 57 nt, Homo sapiens
gcgccgggcggacaacacggagaacgacccaaccaggggagagggaaccccagcgca

SEQ ID NO: 72590 - RNA, 81 nt, Homo sapiens
gagcagaaccagagccacccgggagaggaagagcgaggaggaacgcgcaaggcaaagcaccgaagaagccacacacagaag

SEQ ID NO: 72591 - RNA, 80 nt, Homo sapiens
gcacaacggggcaccgagccggcacgggacgcgggcggggcaccgggaaggagaagacagccaagcaccgccccaaggga

SEQ ID NO: 72592 - RNA, 82 nt, Homo sapiens
aaaaccagagaaagagcaagacagagaaaaggaagcgcaaagcccagaagaccggaacaagacgccaccggacccaagagca

SEQ ID NO: 72593 - RNA, 82 nt, Homo sapiens
cagcacacaacaaaacacaggagggggaagaccgaccgggccgggcaaggaagaagaccagacaaccagacaggaaagacca

SEQ ID NO: 72594 - RNA, 73 nt, Homo sapiens
gacgacgaggcagcgggcccggcgagcagagccaaccaagaagaagccgggacagggccagaagcgagcacca

SEQ ID NO: 72595 - RNA, 112 nt, Homo sapiens
cgagcgagcgaccgacgcgccacccgccgacgcccagccgcggggcccgcacggaccccaccaggcacaagacaagaaagacccagcggagaagaaaacgaagaagaccggg

SEQ ID NO: 72596 - RNA, 65 nt, Homo sapiens
agacaaagcgaaacaaaacgcacggaaagacccagaaagccaagacaaagcgggcaggggcacgg

SEQ ID NO: 72597 - RNA, 60 nt, Homo sapiens
acgcgaggaaaagagcagccgcccccgccggccggcccaacaacagggaacaagccgcca

SEQ ID NO: 72598 - RNA, 73 nt, Homo sapiens
gaaaccccccacccaggaaaaagggaaagaaacccggcaagaaccgggaagggggacaggagcagcagacaga

SEQ ID NO: 72599 - RNA, 64 nt, Homo sapiens
ccggagcaggcagagcagccgagccaggaaccagacgccgcaggcccacgcagcggaggcgggg

SEQ ID NO: 72600 - RNA, 76 nt, Homo sapiens
aaaacacagacagaaggaagcccagaacacccgaacaccacaagcccgggaaaaaaaaggagaaacaaccaaaacg

SEQ ID NO: 72601 - RNA, 68 nt, Homo sapiens
gggagcgaagaggaccggacccgccaggcccgagccaagaagagacagcagagcagcgaaacaccaag

SEQ ID NO: 72602 - RNA, 55 nt, Homo sapiens
gccacggaggcggagagaggagaaaaggacgacggaaccaccacgaaaaaaagca

SEQ ID NO: 72603 - RNA, 79 nt, Homo sapiens
ccacgacaagagcacaaccccggggcccggaagggaccaacgcaaggaggcaccacccaccagaccccggagcccagac

SEQ ID NO: 72604 - RNA, 75 nt, Homo sapiens
cccggggaagaagacacaccaggggcagcgccccaaagacagcagccagaaaccaagaacccgggaagcaccgaa

SEQ ID NO: 72605 - RNA, 69 nt, Homo sapiens
agagccgcccccaccagacgaggccaccagccagggaacccaaccgccgaaaaaaggacaaagcgaggc

SEQ ID NO: 72606 - RNA, 85 nt, Homo sapiens
gggaccgaaaccagccccggacgagaagcgcagcaacggcgggggaccacgagagcggccgaggagcccaagagaagaaaaggag

SEQ ID NO: 72607 - RNA, 76 nt, Homo sapiens
ccagcgggaggcggagcccggccaccagcgggcgcggagcgggaaagacacggagcaggccggaggagaccgggca

SEQ ID NO: 72608 - RNA, 55 nt, Homo sapiens
gaccggaaccaccaagcggaagaggagaaccggaaccgggagcacaggaggcgcg

SEQ ID NO: 72609 - RNA, 77 nt, Homo sapiens
cacagaaacaagagccaccacaaaacgagccaccggacgccggaaggagagcacagacaagcgggaggcagggacgc

SEQ ID NO: 72610 - RNA, 71 nt, Homo sapiens
agcagcgcgcaggcgggcaggagaaggaccaaaaggaacgagacggaagagggagcgcggccagcagagga

SEQ ID NO: 72611 - RNA, 91 nt, Homo sapiens
agaggcagagagcaaagaacccccaagcaggaagggccacgagcacccccggagcaaagcggagagagaaacagggggcacgaaacgaaag

SEQ ID NO: 72612 - RNA, 86 nt, Homo sapiens
gcagccagccgccgccgccccagccgcccgcggccgggagcggagccccgggagaggaaaaaagcagccgacagcgggaagacgag

SEQ ID NO: 72613 - RNA, 78 nt, Homo sapiens
aagcaaaccagacgcacggcagcagggagagggccaaaggaacgggacagcacggcacacaccccgcaccagcgcgaa

SEQ ID NO: 72614 - RNA, 75 nt, Homo sapiens
caagaccagccgggcaacaacacaccgcccaagcgccgagcgggcccaccaggggcacacacgccagcccccaca

SEQ ID NO: 72615 - RNA, 71 nt, Homo sapiens
gagcccaggagcgccacgcgcggaaggcagcgcccagcagcgcagagagccaggaacaaaaggggaaagga

SEQ ID NO: 72616 - RNA, 87 nt, Homo sapiens
agcacgaagcacaaaggaggggcccgagaccccacccagccaaccaccacccccaagccccaagggcgggaaacaggaggaagaacc

SEQ ID NO: 72617 - RNA, 85 nt, Homo sapiens
agccacgagaggggaacaggcccggcagagcgggccgacccgaaagaagacgggacagacagagaagcacgggagcaggcaccag

SEQ ID NO: 72618 - RNA, 79 nt, Homo sapiens
acgggaccaggcgaagcggccgagcaggcgagcgaacgacggcccaaaaaaacagaccaccagccgcgaggacaggacc

SEQ ID NO: 72619 - RNA, 71 nt, Homo sapiens
ccggcgggcccagagcccagagccggacggggacacaggccgaaacagccagagaacacaaaggccaacgc

SEQ ID NO: 72620 - RNA, 66 nt, Homo sapiens
ggacgggcccagaggcccagggaggcaggggcagaaacagagaaggaacaggcgggcgcggacggc

SEQ ID NO: 72621 - RNA, 71 nt, Homo sapiens
gcaaaggacaggacaaccccgcccaacacccaccgagaagcagagcgcacaggaaacaaccgcaaccagcc

SEQ ID NO: 72622 - RNA, 82 nt, Homo sapiens
ggggccccgccaggcgaagaagaccgggagggaagccgggcgccaagagccagcccagccagggggggggggggaggcagcc

SEQ ID NO: 72623 - RNA, 52 nt, Homo sapiens
gaggcgcgacccgcggcccgagcggccggaccgccgacacccgcaggagcaa

SEQ ID NO: 72624 - RNA, 71 nt, Homo sapiens
caaaaagcaaacggaccagaccgaccaccaaaagaaagcaacccaccacaagacaaagaccaccaggacac

SEQ ID NO: 72625 - RNA, 53 nt, Homo sapiens
agaaaagaagggagaaaaccagaaggagggggacacagcaggacacagggacc

SEQ ID NO: 72626 - RNA, 88 nt, Homo sapiens
aacgcaaaaagaggcgaaaggaagcaagcagcagaagagccaaggaaaaacagcaagaacccaaaaggggaccaccaggacacaagaa

SEQ ID NO: 72627 - RNA, 59 nt, Homo sapiens
caccgagcggccccccggagacgcggagcagccgcggacagccccagcagccgaggccc

SEQ ID NO: 72628 - RNA, 82 nt, Homo sapiens
ccggaagaaaggcagaagaccggaaccaagcaggcaccaagcagccaccaagcacagcagccgccaacccacgggaccgccc

SEQ ID NO: 72629 - RNA, 76 nt, Homo sapiens
gaaaaccacgagaccagaaggacaccaaccagcccgcccaggccccaccacacagccccgaagcgacacacccaca

SEQ ID NO: 72630 - RNA, 70 nt, Homo sapiens
gggcaaacccacacggcaccaaaggggccaggaaaaccaggaaggcacaacaacacggccagagcgggga

SEQ ID NO: 72631 - RNA, 78 nt, Homo sapiens
gagggacggcacagggaggccagccggagaagcgagcagcggacaagagaaaggagcaagaaccaacgaaccagagga

SEQ ID NO: 72632 - RNA, 73 nt, Homo sapiens
gaaggagaagagaagaggcaaaaaccaccgccagggagaaaagacgaggaagcccaaaaaccgcaagaaaggc

SEQ ID NO: 72633 - RNA, 68 nt, Homo sapiens
cgccgaggagggggacccacgcccggcaggagagagcacgcccggccaggacacaagaggaggcaagc

SEQ ID NO: 72634 - RNA, 50 nt, Homo sapiens
ggccacggcaccggcggggggcacgaggaaagaaaccgggagaagcagaa

SEQ ID NO: 72635 - RNA, 75 nt, Homo sapiens
caggcggacgcccggcacgggccgcgcacggcaagggcccgaagccagcagagagcggaggcgcaaaccgagcca

SEQ ID NO: 72636 - RNA, 89 nt, Homo sapiens
caaaaagagagaggagcaagcagcggccggaggacgccaaagaaggcacaggccagacggggcagggaacaacgggcgaaagggcacac

SEQ ID NO: 72637 - RNA, 78 nt, Homo sapiens
caaacagaagaagagaagagaccggggggacaagggaaaaaggccagaaagagagaccagccaaagaagaagagaaaa

SEQ ID NO: 72638 - RNA, 73 nt, Homo sapiens
cgacgagcgagccaaaaggggggacacccaagacaacggcaagcggagaagagcaaggccgaaccgagaggaa

SEQ ID NO: 72639 - RNA, 82 nt, Homo sapiens
ggagaagaagcgcggccgcaccggccaagaaaaccagacgagagacagaagacgaaagggcaagaaagagagcacggacaag

SEQ ID NO: 72640 - RNA, 52 nt, Homo sapiens
acaagaaccacacccaggcacaggcaaaggaaaccagacggagcgccgggcc

SEQ ID NO: 72641 - RNA, 68 nt, Homo sapiens
agagcggaaaaaaaagggagaacacagagcagaaaaccaggacacgcaggggagaaccggaggaagca

SEQ ID NO: 72642 - RNA, 79 nt, Homo sapiens
agacgcggcagcgaacgggggcgaacggggcgagccggaggagcacccaaccccgcggagggaaggaaacgcaagagcc

SEQ ID NO: 72643 - RNA, 50 nt, Homo sapiens
ccggaacagcagccgccaccagagcaacggaagagaggaaacgagaagaa

SEQ ID NO: 72644 - RNA, 68 nt, Homo sapiens
gaacgaacccccccccccgcgacaaaagaagcgaagccaggaacaagaggcggaagacacacaacaca

SEQ ID NO: 72645 - RNA, 75 nt, Homo sapiens
cgccgggaccaacaggggcaagacaagccagaacgagaagcgcaccacagcagaacccaagccagacacgaaacc

SEQ ID NO: 72646 - RNA, 80 nt, Homo sapiens
aggagggcaggcagggcccagaggaggagagaacacgcccagggcacccaacaagaggagcccgaacagaagccgaaaag

SEQ ID NO: 72647 - RNA, 89 nt, Homo sapiens
gaggcgcgggagggcgagaacgaccccgagacggcagcggccaaccagggagcagaacacccggcggcggcgccaaggggcagcacggc

SEQ ID NO: 72648 - RNA, 53 nt, Homo sapiens
acgacccgcaggggccggaccacgagagaagcgcagggaaacggccaaacccg

SEQ ID NO: 72649 - RNA, 61 nt, Homo sapiens
ccgccgcccccccggcggcagcccccgggcagcaaggaaagccaaagagaaacgaccacca

SEQ ID NO: 72650 - RNA, 88 nt, Homo sapiens
caaggacagcgcgaggccgcgcagcccagcgcagccaagccaggacaaaaccaggcagaaccaacacgaacccaagcacaaacaagaa

SEQ ID NO: 72651 - RNA, 64 nt, Homo sapiens
gaaaaagccagaaggagaggacaggccccggaacaagaggaggacagaaccaggcgaggaggaa

SEQ ID NO: 72652 - RNA, 86 nt, Homo sapiens
aagaaacagcagcagggccaggggccagggcaaaggcggacaggggcacgagggagaggccgagaagaaacagggaacggagcccg

SEQ ID NO: 72653 - RNA, 82 nt, Homo sapiens
gaagaagaaacaacaagagaaagacccaggaagcagaagaagcgaggagaagaagagggagaaagcgaagaggaccggaaaa

SEQ ID NO: 72654 - RNA, 51 nt, Homo sapiens
ccacccaggaggggagaaccaaaggcaaacccagaaaagcaagccggggcc

SEQ ID NO: 72655 - RNA, 74 nt, Homo sapiens
cggcgcagcccggaaagccggcaagacgagaaagcagccggacaggacgggcagcgcaaggggagaaaggcgag

SEQ ID NO: 72656 - RNA, 79 nt, Homo sapiens
ccgcaggccaccgacacgagacaaccgggagccggagcgccaccccaaaccgccgaccccaccggagagaggggaagca

SEQ ID NO: 72657 - RNA, 81 nt, Homo sapiens
gcgcgagcgaaagagaggcccccggccgacaagcaagcagcgcgccggccccaacacggaccgcgcgacgcggagaagagc

SEQ ID NO: 72658 - RNA, 77 nt, Homo sapiens
gcagcccagggagcaggagcgaaagacggcacggcagacacaccgaccagaggaaggcgaacccgccacgcagcagg

SEQ ID NO: 72659 - RNA, 80 nt, Homo sapiens
caccgaggaggacagagacgcaaaaagagaagcccagcgagggggagagaagacggagaccagcgccacagcgagcgagg

SEQ ID NO: 72660 - RNA, 68 nt, Homo sapiens
gcgggccgggggcgccggccacagcgaggcggacacagcaggggccagacaaccagacccgggaggca

SEQ ID NO: 72661 - RNA, 99 nt, Homo sapiens
cccgcaacccacgaaagaaaaaagcccacggagcccagaccgacaggccaaagggcagccccgagaaccacagggacacccgcccccacccgggagagc

SEQ ID NO: 72662 - RNA, 84 nt, Homo sapiens
ccccaccagacagacgcgcaaaacccaggaaacggccaagaagcggaaagagaccagagcagcacccgacaggagagacggagg

SEQ ID NO: 72663 - RNA, 76 nt, Homo sapiens
cgccacagggcgggcccggcaccggcgaacacccaaacccaggagcggaccggcaccacacgggggccacccccgg

SEQ ID NO: 72664 - RNA, 69 nt, Homo sapiens
cggcaaacccagcaacacggagacacagggccccaagcagcgcacccggaacccaccgagcgccccacc

SEQ ID NO: 72665 - RNA, 84 nt, Homo sapiens
ggggagcgcagagcgggcgagcgcggaaacggaaacggccagaagcaggacaaagcagagaacaacccggggacccccagcaga

SEQ ID NO: 72666 - RNA, 91 nt, Homo sapiens
cacccaagaggagaggagaacacaagagcccacaagacgggaagaccacggcagcaaggagaggcaaaaaccaagggaaagaggagagggg

SEQ ID NO: 72667 - RNA, 79 nt, Homo sapiens
acacggacaacaaacggaacgcaagcacaggaccagaaacgaaaggcagcagaagaggaaagccagaaagacgagcaac

SEQ ID NO: 72668 - RNA, 73 nt, Homo sapiens
cccggaaacgaccacgccaggagacggggcgccagggccagacggccgaacccgacccagcgaccaccgccag

SEQ ID NO: 72669 - RNA, 72 nt, Homo sapiens
cggccaacaaggccgggccgacagcacggggcagacaccgcccgaacacacaccgacgcgcaagccccaggc

SEQ ID NO: 72670 - RNA, 84 nt, Homo sapiens
cagcagaggcgcgcggcgccggccggcggcgcgcggcgcgagccgcagccggcccgccgggagcgccgccgccagccgccaggg

SEQ ID NO: 72671 - RNA, 56 nt, Homo sapiens
cgggcgagggaagagcggaaagaggcggaaaccagagagggagaaggccagaaaga

SEQ ID NO: 72672 - RNA, 74 nt, Homo sapiens
gcccccgagggcgggaacagaaaagcgaaccagacggacgacaagaggagaggaggagccgccgagaaagaacc

SEQ ID NO: 72673 - RNA, 79 nt, Homo sapiens
aacacgaccaaacccacagggaaaagcaacgacaagaaaaggcgacggcggagacagaagagaggagagcccacaaacg

SEQ ID NO: 72674 - RNA, 71 nt, Homo sapiens
gaacacaggcaaaagggaaaggggaacacaagcccaaacccagaacgcccccgaacggagaagagcgaacc

SEQ ID NO: 72675 - RNA, 71 nt, Homo sapiens
gacaacaagcgagaagagccaaggggacagcccaacccaaaggggagccgccaccaaaagcagacggaaaa

SEQ ID NO: 72676 - RNA, 57 nt, Homo sapiens
caggcccccggaaagaaggagagagacccaagcaaggaagccaccgaaagaccgaag

SEQ ID NO: 72677 - RNA, 61 nt, Homo sapiens
accccaccaccagagacaaagaagggaccaccgcaaggaaagaacagagaaggcacacggg

SEQ ID NO: 72678 - RNA, 103 nt, Homo sapiens
aggacgggcgcggagccggccccaggcagcgggcggcgccagcggagaacagcccgaccacgcaggggaaagcgcgagcgagcacccggagcagcagagcacc

SEQ ID NO: 72679 - RNA, 74 nt, Homo sapiens
ggagaagccggaagaggcgcgcgcacggcgccaccccccgccccccgggcgcgggcggggcgcagacccccaac

SEQ ID NO: 72680 - RNA, 64 nt, Homo sapiens
aaaaagcggaaaaacgaggcaaccgggaccaaaaacaccaggcagacgaggcaggaaaaggggg

SEQ ID NO: 72681 - RNA, 79 nt, Homo sapiens
cccggccgggcggcaggaccaggcgcgacggggacgaagccaagcacccagacacggcccccacagaccccacaaacca

SEQ ID NO: 72682 - RNA, 81 nt, Homo sapiens
caggaagcagacgggaccaagaagcaagccagcacaacgccgcaggggagcgcgagcggccccggcacacggagagccaca

SEQ ID NO: 72683 - RNA, 71 nt, Homo sapiens
gcgaaaaccaacgcccccccagcacacagaggagagcgacgagaagaaaaagcggggaaaacaaaaaaaag

SEQ ID NO: 72684 - RNA, 73 nt, Homo sapiens
gacaggacaagggggagcgaggcgacagaacacagaacacacaaggggaaaccccccggagccccaaagccag

SEQ ID NO: 72685 - RNA, 59 nt, Homo sapiens
acggcccccccccagcccgccccaaaaggaccccaaaggacaagaaagcagagaggcag

SEQ ID NO: 72686 - RNA, 56 nt, Homo sapiens
aggcacccccaaggccgacggagcagcacccgggcggaccagggacgagcgccccc

SEQ ID NO: 72687 - RNA, 49 nt, Homo sapiens
gacgccccaccgccgacgcccccagccaccaggcaaggcgggaccgacg

SEQ ID NO: 72688 - RNA, 52 nt, Homo sapiens
cccccccccccgggggaagaggagccggagggcaaagcaagggagagcaaaa

SEQ ID NO: 72689 - RNA, 70 nt, Homo sapiens
caaaggagagaggaccacccagaggagcaacaggggcaccccccaccccgggacaccccagggcaccaca

SEQ ID NO: 72690 - RNA, 72 nt, Homo sapiens
ggaagggccagaaagcgaacagccgagacgacaaagggcagaggagacccgacgacagggacaaaaggccga

SEQ ID NO: 72691 - RNA, 76 nt, Homo sapiens
ggaaggagcgacacgaaggagagcgcaaccgggcagcccgcaccagagcaaagggacaacgaagagaggaaagaag

SEQ ID NO: 72692 - RNA, 35 nt, Homo sapiens
ggccagcgaaaacgcccaggccagaaccgcccaaa

SEQ ID NO: 72693 - RNA, 66 nt, Homo sapiens
gaggccgcggcccaaaggccagggagacaaggaaaaaggaaggaaagcgaggccggaaaaaggcca

SEQ ID NO: 72694 - RNA, 44 nt, Homo sapiens
aggagcggcgaagcgcggcgcagacccaagccgcccaaggcagg

SEQ ID NO: 72695 - RNA, 86 nt, Homo sapiens
gcgagccccagcccgggagaccgccgaaggcgggaagggaagcggccaaggcacggaggccgcgcccgggcgcgccaggcacagcc

SEQ ID NO: 72696 - RNA, 82 nt, Homo sapiens
gccagggacccggcaagggccgaggcggccgccggacacccaagaaaggacaggcccagcgccccaggaccagacccgaacc

SEQ ID NO: 72697 - RNA, 65 nt, Homo sapiens
gcggcaggccaggggaccgaaggacaggagaaacaggggccaaaaaaccaaaggagaagaaaacc

SEQ ID NO: 72698 - RNA, 38 nt, Homo sapiens
caggggcgggagcacccgagggaccgacagcaagaaaa

SEQ ID NO: 72699 - RNA, 76 nt, Homo sapiens
cccagagacaaagccagcacccaaaggagcaacagacagcccccagaacagcaccagaaggcacagagaacaggcc

SEQ ID NO: 72700 - RNA, 90 nt, Homo sapiens
gccaagaggaggacagcgcacacagcaagcacgaggcacggcagacacaccgaccagaggaaggcgaacccgccacgcagcaggagcagg

SEQ ID NO: 72701 - RNA, 79 nt, Homo sapiens
ccaggccgacccgcgaacccccgggaccccgccgccgcacaacccgagggaaagacaaggagccgggccgagaaaccga

SEQ ID NO: 72702 - RNA, 78 nt, Homo sapiens
gggaggcggcgccgcggccgcgcggacggacgccgccgccggcgagacaacagacaaacgaaggaaacgcgagggggg

SEQ ID NO: 72703 - RNA, 57 nt, Homo sapiens
gagaaccggcgccagaaggaagaacagaagagaagaaaaaaagaagaagggaagcgc

SEQ ID NO: 72704 - RNA, 79 nt, Homo sapiens
agggccaccccacagacggaccccaacaacaggagagagcaagcgagcagggagaaaggaaaggcccgggagcggcaga

SEQ ID NO: 72705 - RNA, 67 nt, Homo sapiens
aaccaaacagcaacaccgcaagcggagcagccccaccagcaacgaagaggagaagcaggaccaagac

SEQ ID NO: 72706 - RNA, 76 nt, Homo sapiens
gggccaggggaggagagaacggccacgaggacccaggcacggaggagggaaaagagacggggcgccggagccagga

SEQ ID NO: 72707 - RNA, 87 nt, Homo sapiens
cgcggccccagccacaccaagcagggcgcggagcccgccggccgccagggagcgcagcggcaacggcacagggcggggaggagcgcc

SEQ ID NO: 72708 - RNA, 86 nt, Homo sapiens
aggaagacaagaaaggggaaccacgagaaggaacagaaggcggccggggccgggccggggcacggcagaggcgccaagaagagccg

SEQ ID NO: 72709 - RNA, 97 nt, Homo sapiens
ggaggggggaacagagacgaaaggaaccaaaaccagcccgagggaaaggccagcagcaaagccaaagagggcgccaggggaacaagaagccgagcaa

SEQ ID NO: 72710 - RNA, 85 nt, Homo sapiens
gggccgccgagcggacccggaccgggggaccgaaaagacgcggccccaaaggaaacacccgaagaacacagcgccagcccaacgg

SEQ ID NO: 72711 - RNA, 81 nt, Homo sapiens
gcgacacgaccgcccgcgagagagagaaagacgcgaggggacgaggaagacagggcggcgacaccacccccgcagggagac

SEQ ID NO: 72712 - RNA, 66 nt, Homo sapiens
gccggcgggaccgcagcacggggaaacgaccgccccaaaacgcaccaaacagagaaagccaaggaa

SEQ ID NO: 72713 - RNA, 82 nt, Homo sapiens
aagcggccccacaccacccgcagggccggcacggccaaggagaggcgcgggggcaggcagggcgcgcgggccaaggcccggc

SEQ ID NO: 72714 - RNA, 56 nt, Homo sapiens
gcgcaccaccaggacagcaaaggaacggaagcaaccagaccccgcaagggaccaaa

SEQ ID NO: 72715 - RNA, 35 nt, Homo sapiens
caaggcgcacaccacaccggaaacacacgaaggaa

SEQ ID NO: 72716 - RNA, 70 nt, Homo sapiens
cggcagaaagaagagcaggaaacggcaccaagcggggcaggacgcgagcacgcgggagcagagggcacaa

SEQ ID NO: 72717 - RNA, 69 nt, Homo sapiens
gcaaaagggaggcggaaagcaagaacggaagcacgggcggaggaaagcacaagcagagcccccgcagag

SEQ ID NO: 72718 - RNA, 54 nt, Homo sapiens
agacacacagcagcccagccagcccgagcaagaaagagagggaagagcaaggga

SEQ ID NO: 72719 - RNA, 69 nt, Homo sapiens
aggccagcagagcccggacgcgaacaacaacacggcacagaacagcagggaggcccccaggggagacgc

SEQ ID NO: 72720 - RNA, 72 nt, Homo sapiens
agaacggccccggggcgcacagccggaagcacacgcaccgaggcccgccgccccggggcacgccaggcaacc

SEQ ID NO: 72721 - RNA, 54 nt, Homo sapiens
ggggaaacccgacaagagaaggagggcaggaaagacaaccaggcaaggaaacac

SEQ ID NO: 72722 - RNA, 76 nt, Homo sapiens
gaagggaaggcgcgaggaggaaaggaggacgaggcgggggagccaagggagagggaagaaaacaccggcgaaacca

SEQ ID NO: 72723 - RNA, 76 nt, Homo sapiens
accgggcgagcgacccaggaaggagagagcccccacccaggaaggaacaaccccacaccaccacacagcaccagcc

SEQ ID NO: 72724 - RNA, 77 nt, Homo sapiens
cccgacagcgccaggcccagacgccaacgcaggagcacccagacagagcacccgacccaggcggaggacaagaggac

SEQ ID NO: 72725 - RNA, 71 nt, Homo sapiens
acccaccgggaaaaggcacgaaggaacacagaagagaacccgaacacagcaggagcaagcgggggcaggag

SEQ ID NO: 72726 - RNA, 81 nt, Homo sapiens
ggcgccgcgcaaggggcccgaggaagcgcgggcggacgacagaggagccgaaccacccagcagaagaaacacacaggagaa

SEQ ID NO: 72727 - RNA, 81 nt, Homo sapiens
ggcaaaggagagcacaaccacgcagggaagcccaggggcagagaagacggcccagcagagcacccaaccagcgggaacaca

SEQ ID NO: 72728 - RNA, 56 nt, Homo sapiens
gggacccggcaggccgcccccggcaagaagacgaccccgacgcaggccaggagccg

SEQ ID NO: 72729 - RNA, 80 nt, Homo sapiens
aaagcggggacccagacccggagcccagggaagcagccgaccagccgcggagccgggggcaggagaaacaggaagacaac

SEQ ID NO: 72730 - RNA, 72 nt, Homo sapiens
caaggagccacaaagaagaaaacacaaaaacgggaaagggacagaggacgcgaaaggccaaaaaccgcagca

SEQ ID NO: 72731 - RNA, 45 nt, Homo sapiens
ccccagcagaagaccccggcggacacagaggggggcgggccgagc

SEQ ID NO: 72732 - RNA, 82 nt, Homo sapiens
cagcgagccccacacagagaccggagacaaaaagaggccaagaccaagaggacaggggacagcgcccagacccagacagaca

SEQ ID NO: 72733 - RNA, 78 nt, Homo sapiens
gcggaagaggccacgaggcgcacaccgccagcccaagaaaaaggggagagcacaagcgaaaccaggccccagcacacc

SEQ ID NO: 72734 - RNA, 76 nt, Homo sapiens
cgggcccgggagacccaggcgggacagagggagccaggcagaggaggaggcggacgcgggccacagcgggagcccc

SEQ ID NO: 72735 - RNA, 76 nt, Homo sapiens
agcagccagaaagcggcacgaacagagccgggagcaagaagaacacccagagggaaggggaagcaggccaacccag

SEQ ID NO: 72736 - RNA, 78 nt, Homo sapiens
ggacgcacggaccaaaaacccgcaacagcccccgcccaaaaagaccacacagggaaacgaccagggagagaccaacag

SEQ ID NO: 72737 - RNA, 81 nt, Homo sapiens
ccacccgcccccgcgggcgccgggccaggacgggacgggcaggacgagggccggacagggcccagaccccagccagcagcc

SEQ ID NO: 72738 - RNA, 78 nt, Homo sapiens
gggccggcgagcacacgccgaggcccaccagacgaccacgacgaggccggggcacacccagggagaacccaccacgag

SEQ ID NO: 72739 - RNA, 38 nt, Homo sapiens
gaggagggcggcacagaacgggaaccagcaggccgggc

SEQ ID NO: 72740 - RNA, 108 nt, Homo sapiens
accacccgggcgaagcgggcgagcggggggacgccggcggagacgcgggcgaggggagcgacagaaaagcagcacaacccccggagaaccgaagggacacagcagcgg

SEQ ID NO: 72741 - RNA, 80 nt, Homo sapiens
cgacgaggacgacacacaagcccggcaagggggcagcagcaggaaggaaaagaagacggcaagaaaacagaacagaagca

SEQ ID NO: 72742 - RNA, 76 nt, Homo sapiens
agcagccggacccggaaacacgcggcaagcaagaaaacaggaagggagccccaaagagccagccagcagggcagcc

SEQ ID NO: 72743 - RNA, 88 nt, Homo sapiens
caaaccaacgacaacaggagcaaccagacaccgggcagaacgccagaaagagagcggagggcgaaacacagaaaaccgcaacgaaaac

SEQ ID NO: 72744 - RNA, 76 nt, Homo sapiens
gggagacgacagaccggggcaagccccgggcgggacagaccaggagaagacgaaccgaggggacggcaaagaagag

SEQ ID NO: 72745 - RNA, 72 nt, Homo sapiens
gaggagggaagcgaggcacggagggaagggccgacgcaggagaggaaccaagaggacaacagagaaacacaa

SEQ ID NO: 72746 - RNA, 75 nt, Homo sapiens
agagggacacgcaggccgagaaaaagcgaacaaggggccgaagacaagaagaaacaccccaggggcccagacgag

SEQ ID NO: 72747 - RNA, 74 nt, Homo sapiens
gaaggagagaaaaggcgccacgggcgaacaagaggcgccagcgggcgcgccggaagaacagcgccacgccacac

SEQ ID NO: 72748 - RNA, 80 nt, Homo sapiens
agaggagacaaggaaaaggaaaaagggaaacagaacaaacaaagccaggcaggaggaacaaagaaacccagagacagcaa

SEQ ID NO: 72749 - RNA, 82 nt, Homo sapiens
cgagagaaccggagcgccggcaagggcagcgccaccccaacggaagaagacgcccccagcacagggcgcgcccccagcaagg

SEQ ID NO: 72750 - RNA, 59 nt, Homo sapiens
cagaaccgccaggagcggcagacggcaggccagcgcggggcagcacgccgaaggagaga

SEQ ID NO: 72751 - RNA, 80 nt, Homo sapiens
cgaggaggcgcccggagcggccgccccagcggcggagaacggaaaagcaccaggaagcagagaggaccgcagaagggaag

SEQ ID NO: 72752 - RNA, 74 nt, Homo sapiens
agaggggaggggaggagaggacacgggagagccgaaccagaagagaaaggaggcagccgaagaagcaggaaggc

SEQ ID NO: 72753 - RNA, 71 nt, Homo sapiens
cgcggcccccagcagagcccgccgcccggcagccgaggaaacccagacccaagaccaaccgaggaggagga

SEQ ID NO: 72754 - RNA, 77 nt, Homo sapiens
aaggagcgcggaacggggagcgccggagcagcggacccaggcagacagaggcacaaaaggagaaagcagaagaaaca

SEQ ID NO: 72755 - RNA, 48 nt, Homo sapiens
agggcgcccccgcccccaaccccagaaccccaccaggacggacccgga

SEQ ID NO: 72756 - RNA, 74 nt, Homo sapiens
agcccggggaaagaggcgggagagggaggagcccagaccgggcgacccgccgagccacaacgaccgagcggaca

SEQ ID NO: 72757 - RNA, 98 nt, Homo sapiens
cagacacccgagggccaccccagcaagcagcagaccgagacccgagacgcaagaagcggggagaacaggcgcggcaacggcagaaccacgcacccacg

SEQ ID NO: 72758 - RNA, 79 nt, Homo sapiens
caaggaggggaaaaaccgcgaagcaggggccgcgggaagaagaaaagaagagccccaggccaagggcgggagcaccccg

SEQ ID NO: 72759 - RNA, 75 nt, Homo sapiens
aaaagcccaggaacgcgaggagagagagagaggggccagcaccagcccaggaggaagagaagagaagaagaaagg

SEQ ID NO: 72760 - RNA, 75 nt, Homo sapiens
cgagccggggccccgccggcccagaggccgcgaaccagggcgcgggagcagcaacccaagagaggaccggagcgg

SEQ ID NO: 72761 - RNA, 75 nt, Homo sapiens
agcccacagggggagaacaagggacaggaaacagaagagggacaacgcggaaaagcggcgacaaccggcgggccc

SEQ ID NO: 72762 - RNA, 78 nt, Homo sapiens
aaggaaaaaacaaggggaagacccaaggaaccaggcgaagccacaggaaaaggccgagacaggcaaccagacggaggg

SEQ ID NO: 72763 - RNA, 84 nt, Homo sapiens
gcccgcagacagaaagaggccccccggaggggcggaccggcgcccagaagccccgggagggggaccggccaagcagagccaaga

SEQ ID NO: 72764 - RNA, 75 nt, Homo sapiens
gacaggcaacgagacagcgacgcaaagaggccgacgagccagggccggagcgagggagagcaggaacacagagag

SEQ ID NO: 72765 - RNA, 78 nt, Homo sapiens
agaccggaccgagagcggaccgagagcgcgaaacgcacgagaagccccaccaaagccaccaagccaagaccagcagcc

SEQ ID NO: 72766 - RNA, 76 nt, Homo sapiens
cccccgaggcgcagaagggagagaacaaacaccagggcaaccaagggacacagcggcaacgcaagaaaaagcagca

SEQ ID NO: 72767 - RNA, 85 nt, Homo sapiens
gaggagaaggagcaaagagggggccaagacgggcagggcccgggcaccaggagcaacaagcaagccccgaggggaggccacgcac

SEQ ID NO: 72768 - RNA, 77 nt, Homo sapiens
aggggccgcagccaaggaaggaggccgcaaacagacaggaagagggacagagcgaagaaccccccaagaagacgaaa

SEQ ID NO: 72769 - RNA, 75 nt, Homo sapiens
agacgccaagcggggagcgcccgcgacagaggagggaggaaaacaaccgagggcagaccaccagggagaagagga

SEQ ID NO: 72770 - RNA, 77 nt, Homo sapiens
gcgccaaagcgagagagggaagcgcccggccggaggcaggggaaagggaggaagacggccaggcaccacaggccaga

SEQ ID NO: 72771 - RNA, 77 nt, Homo sapiens
acagaagcaacaaaggaccgcccccagagagagcaaagaagcagcaccgagcccaaaagaagaaaagaaaagaaaag

SEQ ID NO: 72772 - RNA, 71 nt, Homo sapiens
caaaaaaaccagagcaaaacacacgaacgcgagaaagcaaacccagggaccggagcaagccgaagaaagga

SEQ ID NO: 72773 - RNA, 73 nt, Homo sapiens
gccaagccgccgcaccccggccagaacaggccaagacaaccgggaaagcagcccaaggagggcgacacacgac

SEQ ID NO: 72774 - RNA, 109 nt, Homo sapiens
cggcgccggcggacggggcagcggcggcggcgcccgcgcacgcgcaagaccgcgaggcgagacccacgcacccccagacgccgacccagaaagccagggacaccaaacc

SEQ ID NO: 72775 - RNA, 36 nt, Homo sapiens
gaaagaacaagaaaggagagcaaacagccccacgcg

SEQ ID NO: 72776 - RNA, 78 nt, Homo sapiens
cggccacggcgccagagccggggacgaaagggaaggacaggcagagcaaacaagcgcgggggccgcccgccagaggcc

SEQ ID NO: 72777 - RNA, 52 nt, Homo sapiens
aaagcaaacggaccagaccgaccaccaaaacaaaaagagcacaagaaggacc

SEQ ID NO: 72778 - RNA, 56 nt, Homo sapiens
ggcccacagccagagccagcaagcgcagcccggacaggcaaccagacacacaacca

SEQ ID NO: 72779 - RNA, 75 nt, Homo sapiens
aagaaggagaccaggggcaccgggcgggcagacagaggacacgcacccgcagcaggggccccggggagccggaag

SEQ ID NO: 72780 - RNA, 75 nt, Homo sapiens
agaaacggaaagagccaaggggggaccagcacggccccccaccccccagcgggggccagcaaggaccacacagga

SEQ ID NO: 72781 - RNA, 113 nt, Homo sapiens
ggaagaccaggcacagcagagagccaggaggcaggaggaaggaaggggaaaaccaacgggccgaagagcgaaagcgaaaaaggcagcagcccaaaagaaggaacaccgccggc

SEQ ID NO: 72782 - RNA, 81 nt, Homo sapiens
cccagaggagccagaaacagccaaacaacagaggcaggagacagagagaaagcaacagcaggccagccccagagcccgggg

SEQ ID NO: 72783 - RNA, 54 nt, Homo sapiens
aagacggcaacaacacaaccggacacagggggaaagcaggggagaaaagaaaag

SEQ ID NO: 72784 - RNA, 81 nt, Homo sapiens
agaaccgggagaaacaccacacacgaagagagggcacagaccaggagaaaagagaggaacagcacggaagaaccgaagaaa

SEQ ID NO: 72785 - RNA, 81 nt, Homo sapiens
ccgggccgggggccgccgggacccggccaccagcaagccggaggaggcaaaccaaagcgacagcaagcaaacagcaggaaa

SEQ ID NO: 72786 - RNA, 84 nt, Homo sapiens
ggcggcccaggacgagagggggcaaggggaggcaagcaggggggcaaaggaaagaaggcagaaagggaggccaggagcgcgggc

SEQ ID NO: 72787 - RNA, 82 nt, Homo sapiens
aacagcgggaaagaaggcaaaacacggccccggacagccccgaggaggagaagaggaaccccgcgcgagccagcaacggcgg

SEQ ID NO: 72788 - RNA, 34 nt, Homo sapiens
ccgacagccgcagaacaggaggccgcacccaggc

SEQ ID NO: 72789 - RNA, 69 nt, Homo sapiens
ggccacccccccggagcccggagcaaggagacagacgggaggggacacggacgcggaacgcacagcacc

SEQ ID NO: 72790 - RNA, 83 nt, Homo sapiens
ccgcgggccgcgcaacgcaggccgcagccgccgcgcgccaccgcgccagcgccgccagcccagaaaccaagggagggaaccgg

SEQ ID NO: 72791 - RNA, 73 nt, Homo sapiens
agccccagagagacaagccccaaggagcccggccccacaccggcacacagcgagaagggaaagacgggaacgc

SEQ ID NO: 72792 - RNA, 55 nt, Homo sapiens
gcacgcgagaacggggacacgggaggaggcgccggagacaccagcagcccgcagc

SEQ ID NO: 72793 - RNA, 68 nt, Homo sapiens
gaggagaaaccaagcagacccagggcgaccccccccagcaaaaacggccggagacacgagaagaggga

SEQ ID NO: 72794 - RNA, 62 nt, Homo sapiens
ccgcagcggcaaggagagacgcgcgaggggcgccgaagcgaggggagccgcaggccaggacg

SEQ ID NO: 72795 - RNA, 59 nt, Homo sapiens
accacggaaccgggccgacggccgggcgggaagggaaaagccgggccacagaagcacca

SEQ ID NO: 72796 - RNA, 44 nt, Homo sapiens
cacacgggcggaacaagagaccaggcccagcgacaagcgccccc

SEQ ID NO: 72797 - RNA, 53 nt, Homo sapiens
gcagaagaccgcaggggaaaaccaaagaccgacaagacccacagacagaaagc

SEQ ID NO: 72798 - RNA, 64 nt, Homo sapiens
gaggccaaggccaaaagccaaagcggaaccaacaagaagagccgaaacgcgcggccaggggaga

SEQ ID NO: 72799 - RNA, 56 nt, Homo sapiens
acacccacgaccggccaagaagacgaccccgacgcaggccaggagccgcggacaga

SEQ ID NO: 72800 - RNA, 82 nt, Homo sapiens
agcgaaccgccccgagccccgccgcgcgcgccgcgccgccgcgaccggaccggcgcgcgcaggcaccaccagcaccacccca

SEQ ID NO: 72801 - RNA, 87 nt, Homo sapiens
gcaccgacagccgacgcgcagaagcagagccaccgggaaaaccggcccacagaagagccgaccgccagcccccccgcccagaagcgg

SEQ ID NO: 72802 - RNA, 63 nt, Homo sapiens
aggcaccgcgcagggcaaccggacccaaagagaagagaagggcgccccacccaaagccccgga

SEQ ID NO: 72803 - RNA, 72 nt, Homo sapiens
gccagagacgaaccggcagggaaaaagcaggaacaaccaccgagcgaggaagaaaggagcccagaggaaccg

SEQ ID NO: 72804 - RNA, 87 nt, Homo sapiens
ggcacacacgcgcccccggaccaggagcacggccagccccaccacaccggaagaggagggggccccgggaaggggccccccacacgc

SEQ ID NO: 72805 - RNA, 75 nt, Homo sapiens
ccgccccccccccgccagccgaccagggccgcccacaacagccagcagaaaacgagcccggcacagagaacggca

SEQ ID NO: 72806 - RNA, 72 nt, Homo sapiens
aggaagcagaaacaccacggagaaaaacgagcagcggcgagacacagaaagggccacccgacccagcggaga

SEQ ID NO: 72807 - RNA, 48 nt, Homo sapiens
caagaacaccagcaggggggaagaaaggaagggccgcaaggccaggcg

SEQ ID NO: 72808 - RNA, 78 nt, Homo sapiens
gacccgcagccccgcgcgggcaccaggcagcgcacccagacaccggggcccaaggaggggacacgccagaaagggaga

SEQ ID NO: 72809 - RNA, 61 nt, Homo sapiens
aaagccaagaggaggacagcgcacacagcaagcacgagcgaaaagggcgacagcaagccag

SEQ ID NO: 72810 - RNA, 61 nt, Homo sapiens
ggaccaggagacaagagcaaccagaaagagagggacaaggcaggacgaggagcggaggcgg

SEQ ID NO: 72811 - RNA, 85 nt, Homo sapiens
cggcgccaggaggagggggcgccgcggcagcacaggcagaacaggagggaaaacgacggaacgagaagaggaagagccccaggcc

SEQ ID NO: 72812 - RNA, 74 nt, Homo sapiens
gcgggagggggccggcgcccgcggcaggcgccacaggagccgcagaagcaaaggcaccgccaaaccgaaaacgc

SEQ ID NO: 72813 - RNA, 75 nt, Homo sapiens
gaagcaaggagggaagggaagaaagacccgcgacgcccccagacaggccaacaagggccccaggcagagccgcga

SEQ ID NO: 72814 - RNA, 70 nt, Homo sapiens
gcaaaacccaggagaagacacacaagcagacgcaagagacacacagaagacgaaagacgaaagaagaaca

SEQ ID NO: 72815 - RNA, 48 nt, Homo sapiens
gggaccgccaggccccggacacccagagagaacggacgagaccaacgc

SEQ ID NO: 72816 - RNA, 74 nt, Homo sapiens
gcaaaccaaaaaggagagaaaaaaaagagcaaggccaggagagacagaagggagcggcaggggaggcgaagaag

SEQ ID NO: 72817 - RNA, 34 nt, Homo sapiens
gagaggggacgccacgagcgacagaccacaaggg

SEQ ID NO: 72818 - RNA, 79 nt, Homo sapiens
aaggaggcagaaggagcaggacgaaagcgaaagagaagcggagaagggcagaagggagggcgaaagacgagcaccggaa

SEQ ID NO: 72819 - RNA, 71 nt, Homo sapiens
gagggcaagaacgaaccaaccccacaacaccgccggagacagccaaggcggggccaggacacacgagcaag

SEQ ID NO: 72820 - RNA, 89 nt, Homo sapiens
cagcggggcaggcaagacccgccgagacgagcgaaccccgcgggccgggacgccgccgccgcggccgaggcagaacaaccgggagggcg

SEQ ID NO: 72821 - RNA, 58 nt, Homo sapiens
ggcgcgccggaaaccggagcgcgcagcaggagaagacagaggagccagaccaagagac

SEQ ID NO: 72822 - RNA, 76 nt, Homo sapiens
cggccagcccagcagacgagaggagcagccagcagcacccaccacacagggaacgagggcccccagaaccacagca

SEQ ID NO: 72823 - RNA, 82 nt, Homo sapiens
ggaggccccagggaagcgcagaaagcaggcgaacccgcggcgcaaaacggccggcaagaagccaacggagaaccaaggccaa

SEQ ID NO: 72824 - RNA, 60 nt, Homo sapiens
cgaggcgaacaaagggcgcccaccgcccacaaacagccacacagaaaagaaagaagacag

SEQ ID NO: 72825 - RNA, 80 nt, Homo sapiens
aaacacacaacagaagggaaggggaaggagaccacaaagccaccagggaaaaacagagaggaacaacgagcccacaaagg

SEQ ID NO: 72826 - RNA, 72 nt, Homo sapiens
gaggagaaacagcagaaacgcaccaggccaaagaaagagaaacaggggcaaggccgaggggaacagcacaca

SEQ ID NO: 72827 - RNA, 75 nt, Homo sapiens
aagcaaggaacaaaccgaagaacagcgggaaagaaggcaaaacacgggccgggcaccccagcagccccagcagcc

SEQ ID NO: 72828 - RNA, 83 nt, Homo sapiens
agcagcaccgggcacacgcagaagcacggaggacaagaaacaacgaacgagcaaggaagggccaaggcagaccccacaccgga

SEQ ID NO: 72829 - RNA, 70 nt, Homo sapiens
gcaaccggaaagggggacccgccaccccaggagcccagcaccggagaacaacgagggacagaagaaacgc

SEQ ID NO: 72830 - RNA, 73 nt, Homo sapiens
caccagacagggaccggcggcaaccggaaggaacggaggcccagagaggaggaaaaggaagccacaacgagag

SEQ ID NO: 72831 - RNA, 72 nt, Homo sapiens
gaaaaagcccaagagggacacacagcagaggagagcaagcaagccgacaacaggcacaaagagagaaggaac

SEQ ID NO: 72832 - RNA, 128 nt, Homo sapiens
gccgccaggagagccggggagcagcgggccggcgcgaggcgcccggcacaacgaccccagcaggccccaaggaaggaagcccagacgccgggaggcaggagacccgccagccccggcccacgccgcgc

SEQ ID NO: 72833 - RNA, 80 nt, Homo sapiens
gcaggcgcggcagacggcgacagggcggcggcgccaggcagggcgcagggaaacacaaagaagacaccagaagggccagc

SEQ ID NO: 72834 - RNA, 82 nt, Homo sapiens
agggaccaggccgacccgcggagacagacaagacaagaccggcggggaagcggcccaggcgcaagcacaaaggaaggccagc

SEQ ID NO: 72835 - RNA, 71 nt, Homo sapiens
gaggggagaccggccgccccgcccccaccgccgcagacccccaagcagcagaccacggcaggacaccgagg

SEQ ID NO: 72836 - RNA, 80 nt, Homo sapiens
cgccgccgccgccgccgccacgagagcaggcgagaagaaacgccagggcgcacagggaggggcagaaggaacgcagaaag

SEQ ID NO: 72837 - RNA, 76 nt, Homo sapiens
gaagagaaaggcaaagacgccgagaaggggacaaggacaccggagagagagcgagaaagagaccaagacgaaaaag

SEQ ID NO: 72838 - RNA, 65 nt, Homo sapiens
cgggaaggagccggaggcggcgaggagcgccgccgaggagagcaggcgccccgcacaccaagcca

SEQ ID NO: 72839 - RNA, 64 nt, Homo sapiens
ccgggcccaaagaacaggggaaggcgccccaaaccccaagacaagcccacaaggaaaccccggc

SEQ ID NO: 72840 - RNA, 69 nt, Homo sapiens
ggaaacgcccagccgacgggaagccggcggaggaagaagacagaagagcccgcgaacggaagcggagcg

SEQ ID NO: 72841 - RNA, 83 nt, Homo sapiens
agccacgcgggcgagcggcggggagcggcgaagccgcgggcgaggcccggaggccgggcagggcccacggaaggggcccccag

SEQ ID NO: 72842 - RNA, 66 nt, Homo sapiens
aggccggaggaacggagcaccgcgcaaaaaaacgggaagagacccagacgaagagcgcacagaaag

SEQ ID NO: 72843 - RNA, 77 nt, Homo sapiens
ccagagaaaggaggcaggccaagaagcgagagaagaaaaacagaaaaagccaagacagaaacaagaaccaggaaaac

SEQ ID NO: 72844 - RNA, 73 nt, Homo sapiens
gggagacacagaagaagcgggaaggaaggaccacacagagcgcaccaaaacaagaaggccgagcccacagaga

SEQ ID NO: 72845 - RNA, 68 nt, Homo sapiens
acccaggcaaacgaccaaagacaagaagcccaccacaaaccaaacgagcaagaaggagcgaggcagag

SEQ ID NO: 72846 - RNA, 76 nt, Homo sapiens
gagaggagaaacacagggcaccaacagaagacccagggcgcgaaagaagacagagaacccccgggagcgacaagcc

SEQ ID NO: 72847 - RNA, 77 nt, Homo sapiens
ggggcagacgcgggagcccggagagaagccgacacagcccccgaggagcagccacaccagccccaggcgccccccca

SEQ ID NO: 72848 - RNA, 78 nt, Homo sapiens
acaggcgcgcccagggaccgaggcgcgaggaaaagcgggacgcccagaggccgcgacagccaccaaagcagcgcggac

SEQ ID NO: 72849 - RNA, 65 nt, Homo sapiens
acccaaaagcggaggcagaccaacggccaacgggacggaagggagacgggcgaacacagggaaga

SEQ ID NO: 72850 - RNA, 69 nt, Homo sapiens
aaaacgaagacgaagacacccgaggaacagaagagacagaggaagagagaggaagccagcgaccccaca

SEQ ID NO: 72851 - RNA, 56 nt, Homo sapiens
gaagccgcacgggcacggccgacgccccgccgggcgaccagcaccagacaccagca

SEQ ID NO: 72852 - RNA, 78 nt, Homo sapiens
gggcagcgcccacggccgcgaccggccgacagacgaggagcgcagagcgcgagacgagaccgcaccccagcagccagg

SEQ ID NO: 72853 - RNA, 78 nt, Homo sapiens
cggcggcgccggccccggggagaaacgcaagacagaaaggagaacccgggagcgagacagggaagaaccggcaaggaa

SEQ ID NO: 72854 - RNA, 71 nt, Homo sapiens
gcagggcgcccccgagccggcaagggaggaaagcacccgaaggaggcaagccagggaaccacgcgcgaggc

SEQ ID NO: 72855 - RNA, 78 nt, Homo sapiens
cagaggcaccacccggacgacgccaagaaaggagagaagagaaagccggaggaagggaccggaccagaacagccacac

SEQ ID NO: 72856 - RNA, 77 nt, Homo sapiens
cggacggcccggagagacgaaccgaagcgggcgggcccccccacccagagggacacagaagagcaacacagcgagca

SEQ ID NO: 72857 - RNA, 79 nt, Homo sapiens
gcccggacaccaacagccaggccgggcaagcccccagaaacaaggcccaagaggagggagcacggcggaggcaacggag

SEQ ID NO: 72858 - RNA, 77 nt, Homo sapiens
acggcgcggaccaaagcggaaaaacacaccgacccaccgggcgccgggaagcgaaaagaccaagacaaaaaagcggg

SEQ ID NO: 72859 - RNA, 55 nt, Homo sapiens
gagagagcagcccggcagacgcagaaccaaaacaagacagacgaagaaggaaaag

SEQ ID NO: 72860 - RNA, 77 nt, Homo sapiens
ggggaggcgcggagcgcgcggggccgcgccgcgaccccacggccgggcaccgaaagaaacgccggaccgaacacgcc

SEQ ID NO: 72861 - RNA, 71 nt, Homo sapiens
gggcacgccgaacagagccccccccccaccgcgggggcgcagagcgggcaagccacaacagcagccagacc

SEQ ID NO: 72862 - RNA, 54 nt, Homo sapiens
aagacagagaccccgaggaagacaacgggccaaccagaagacggagcaggcaaa

SEQ ID NO: 72863 - RNA, 80 nt, Homo sapiens
cgcgcgacgcccagagccgcgaaccccgcccgagcccgccggaccccccgacccagaaggcacaaagagcacacggaacg

SEQ ID NO: 72864 - RNA, 75 nt, Homo sapiens
caacaccaaaaacaaaacgaaccaggacggcaagccgggcccgggaggagcaggggcagaggggagaacccagcc

SEQ ID NO: 72865 - RNA, 82 nt, Homo sapiens
aaaggaacagcccccagaacgggggcagaaaacccgcacacagaagcagggagccagagaccaggagccccagagagcagag

SEQ ID NO: 72866 - RNA, 70 nt, Homo sapiens
ggcacccacaagccaggcacagagggcacagcggcggagaaaccaccacaaacacgaggccagcaacgac

SEQ ID NO: 72867 - RNA, 76 nt, Homo sapiens
cagaaccaacacgaggaaacgcaaaaccgacagagacgcagacaaggagggcggaaaggggagagacgcaaacgga

SEQ ID NO: 72868 - RNA, 76 nt, Homo sapiens
caccggcacaggcgacgagacgaaggaaagccggcccagaaacacacaaaccggcaggagggccccaaggcggcag

SEQ ID NO: 72869 - RNA, 71 nt, Homo sapiens
ccacacgacgcgcaggagacggcccggagccggacaggagagacaacggaggcaagaaagacggagaagcg

SEQ ID NO: 72870 - RNA, 87 nt, Homo sapiens
ccacggagaaaaacggccaagaggcagaccaggaaagggcaaaagaaggaccccagcaggaaaagcaaagcaagagaacgcaagaag

SEQ ID NO: 72871 - RNA, 69 nt, Homo sapiens
gaaccaaaagaccaggagcccccacccacaagggccggggacacaagcaacagccagaacaagccgaag

SEQ ID NO: 72872 - RNA, 86 nt, Homo sapiens
acaggccaaaggagcggaagcagccaggggggaaccagaaaagcccccaaagaggaccaagaaagagagagcgaggaaagagaccc

SEQ ID NO: 72873 - RNA, 87 nt, Homo sapiens
agacaccgagcgaaagagaaagagcaggaggagcaagcacaacaggccgaagaggccggagaaggacacgcgaagaagaagagacag

SEQ ID NO: 72874 - RNA, 71 nt, Homo sapiens
caacccggccgggaggaagccgcaggaccggaccaggagccaacagagacacaagcagcgaggaccaggaa

SEQ ID NO: 72875 - RNA, 33 nt, Homo sapiens
ccccccgggaccagcagagggaagaaaccccgg

SEQ ID NO: 72876 - RNA, 35 nt, Homo sapiens
gagcagcaagggagaagaaagaccacaggagaaaa

SEQ ID NO: 72877 - RNA, 87 nt, Homo sapiens
gcgcgcggcggaggacgaggaagaggggcgaggcagaccgccccgggccgcggccgcccccgcggcgccaggccacgcggccccgca

SEQ ID NO: 72878 - RNA, 75 nt, Homo sapiens
gccaccgcaaggcgcaacaggggccgggcacaaacagcgggcaagagagcgagcgccccccaacaaggccccgcc

SEQ ID NO: 72879 - RNA, 67 nt, Homo sapiens
agaaaaccagaagcacaaggacagagcacccaccacaggagacccacacagcgacaggaagaacaga

SEQ ID NO: 72880 - RNA, 56 nt, Homo sapiens
cgccggccgagaaggcagaggcgaagccgacacacagagacacagccaggccaggg

SEQ ID NO: 72881 - RNA, 58 nt, Homo sapiens
agaagcagaacccacagagagccaggaggagggggaagccagccaagcagacgaccgg

SEQ ID NO: 72882 - RNA, 93 nt, Homo sapiens
acggccgggggagacacgccacaacaaggccaaagggaggcacggagagcacaagaaaggacacggacggccacgacaggggcacagagggcc

SEQ ID NO: 72883 - RNA, 75 nt, Homo sapiens
gaagaagcaggaggcaagaaaggggaaccccggagaaaaggccaagaaggcagcaaggcgccaccggaagaaacg

SEQ ID NO: 72884 - RNA, 63 nt, Homo sapiens
agagcaaagaagaggccgcaaagcgacaagagacagcaggcaccgggaaaacgcagaggaacg

SEQ ID NO: 72885 - RNA, 75 nt, Homo sapiens
cagcgcgaccgggaggcccaggcacgggaaggaaaagaggcagaacgaaggggcggggacggagagacacgggag

SEQ ID NO: 72886 - RNA, 81 nt, Homo sapiens
aggaggaaccagaccgcggccagagcgcagaacaggacagagccacgaccaggggacacccccgcccccaacccagaagga

SEQ ID NO: 72887 - RNA, 80 nt, Homo sapiens
agcccaaggccacaggaagccacagcaggccaccagccagaagacccaacagagggaccccaacgcagacacgaaggaag

SEQ ID NO: 72888 - RNA, 59 nt, Homo sapiens
gcgcgagcgcgggcgcgcgagcagccgccggcagagcgaaagcacacgaagaggcagcc

SEQ ID NO: 72889 - RNA, 40 nt, Homo sapiens
cccgggaggggcaccagaaagcgccggaagacacacggca

SEQ ID NO: 72890 - RNA, 84 nt, Homo sapiens
caacgggacgaagcagaggaacggggcaacgcgagcagaacagcccagccgccgcccagacacccccaagcaccaacacacggg

SEQ ID NO: 72891 - RNA, 79 nt, Homo sapiens
gaaaaaacccagaacacgggagaaaaaggaaaacgcggaaaaccgacacaacaggaaaccagaaccgggcaaggaaagg

SEQ ID NO: 72892 - RNA, 85 nt, Homo sapiens
aagaagccgccaccccccgcacgagggacgaagccagcaggaccccgggcagaccccagaaaagcagcagcagcgcgacggcaga

SEQ ID NO: 72893 - RNA, 74 nt, Homo sapiens
agcacagagcgagaccaggaaagaagggggcagaagagggagcaaagccggccagacaaggagagcaacacaag

SEQ ID NO: 72894 - RNA, 61 nt, Homo sapiens
ggagaacacaagcaggccaacggcgagcgcccaacacaccagcgacgagaacacacaagaa

SEQ ID NO: 72895 - RNA, 80 nt, Homo sapiens
aaaaaaaaggcgcggagagggcacacgaaaagcagcagccagagcaaaccgcgaagaagccaagcgaaccagaggagggc

SEQ ID NO: 72896 - RNA, 74 nt, Homo sapiens
gaaccgagagacccgccagcagggggagaggcaaagacaccggcagagaaccaaagccggggggggcacagagc

SEQ ID NO: 72897 - RNA, 77 nt, Homo sapiens
aaaacaacgcaggacagcaaagggaaggggcagggaacccaagcagccagcggcacagaggcaccacacggaaaaag

SEQ ID NO: 72898 - RNA, 66 nt, Homo sapiens
agaggagaaaaacaggagcagaccagcagagcagcacaggagacggagccaccaccaccccgagag

SEQ ID NO: 72899 - RNA, 84 nt, Homo sapiens
aacacagaacagcacgaccagaggggaagccaagcaaacgcagaaggacgcccacgagcaaccaagaagggcagaaaggacagg

SEQ ID NO: 72900 - RNA, 83 nt, Homo sapiens
agaacacacaaacgagcagcaccagacaaaccggacaaggggacgaaggacaaaaagccaggaagaacaaacaggagacacca

SEQ ID NO: 72901 - RNA, 65 nt, Homo sapiens
ggagaggacacgggagagccgaaccagaagagaaagacgggaaaacaaaagcgccagaagaaaag

SEQ ID NO: 72902 - RNA, 72 nt, Homo sapiens
cgaggagggggacccacgcccggcaggagagaacgaaaccagaacagaaagggacgggacagcaaaaggcga

SEQ ID NO: 72903 - RNA, 79 nt, Homo sapiens
acggcgggaagagaagacacgagcacaaacggcccgcgggaagaaggcgcggcccaggaggaagcacccccggcagaga

SEQ ID NO: 72904 - RNA, 77 nt, Homo sapiens
gcagggcggacgaccggaaaggaccgaggaggaagaaaagagcggaagcaaacaggaagcaaaagcacagccagacc

SEQ ID NO: 72905 - RNA, 46 nt, Homo sapiens
gcgagcgcgagcggcgcgagaaagcgccgaccccgacagaacgggc

SEQ ID NO: 72906 - RNA, 72 nt, Homo sapiens
gcgcagcagccaaggagacaccccagcacacggcaccgggcacacggggaacccacaagcccagcaaaccca

SEQ ID NO: 72907 - RNA, 79 nt, Homo sapiens
acgcacaaagaaggaaaggaaggaagcccaggccagaggcacggacgaccccggagagagcgggcgagcagaaacccgg

SEQ ID NO: 72908 - RNA, 37 nt, Homo sapiens
aacaaggagaagaggagggcaaaacacagaggccgca

SEQ ID NO: 72909 - RNA, 84 nt, Homo sapiens
gcccgcgggacggcggaaggacgcgcgcaccgaggccagggggccggccgcgcgccgaggagcgcgagcagccgcgaacgcggc

SEQ ID NO: 72910 - RNA, 80 nt, Homo sapiens
ggccgcgggcacagccccgaaggagcgcagagaagcgagcgcccagggaccgggacgccccagaaaagaggggcgggcac

SEQ ID NO: 72911 - RNA, 64 nt, Homo sapiens
aagacgacgcaccgcaggcagacaaaagggccaaagaagggagagagggggcccacgagaagag

SEQ ID NO: 72912 - RNA, 74 nt, Homo sapiens
agacgcagggcgcccccgaagcagcgcagcaaacaagcacgaagaggaacggagagaagcgcagggacacaaag

SEQ ID NO: 72913 - RNA, 59 nt, Homo sapiens
cgcgccaggagcccagcagcaaggaaaaaaacagggggaagagagaaagacacaaggca

SEQ ID NO: 72914 - RNA, 73 nt, Homo sapiens
aagcacacccgaaaagcgccaaggaaaaggacgagaacgccgcgacagaaaaccaagccacccggagaacaag

SEQ ID NO: 72915 - RNA, 72 nt, Homo sapiens
gaaccggcaagaagaaagccaaagcagaacgaaaagaagccgggaaccaaggacggggggcgaagcaagccc

SEQ ID NO: 72916 - RNA, 83 nt, Homo sapiens
acagaagcaaagaaagaggaaagaagacacgaacccaacaccacccaaaccacagaccggccggacagaaacggaacacaacc

SEQ ID NO: 72917 - RNA, 82 nt, Homo sapiens
ggccggagacaccagcagggggagcgggccggagagaagagaggggcgcgaggagaaggaaacaggcccggaggccccaccc

SEQ ID NO: 72918 - RNA, 76 nt, Homo sapiens
gggacgcaaaaggaacgacaaagcagaaaggccgaggggcaaagaaaaggaaagcacggccgaaaagaaggcgaaa

SEQ ID NO: 72919 - RNA, 89 nt, Homo sapiens
gcgcgagccaggacccgaaccgggggcggcggcagacaagaggacagcgcccgccgccgcccggaaccgaagaaggagcgaaccccagc

SEQ ID NO: 72920 - RNA, 68 nt, Homo sapiens
ggaaaaaaaccaagccaggcccaaacacccaggcaaaccgacaccagcgacacaagcgcgagggaacc

SEQ ID NO: 72921 - RNA, 82 nt, Homo sapiens
ccacagcccaccgaggcaccacagagagaacccaccgcaagagaccaaaggccaagagcaccgcagccaccagcccggaacc

SEQ ID NO: 72922 - RNA, 76 nt, Homo sapiens
cggagggcagacgacaacggagacagcacgcacgaaacagaaacaggcaccccaagaaagacgacacagcagccac

SEQ ID NO: 72923 - RNA, 56 nt, Homo sapiens
cagacccccaccaagcagcaccgggcaggaaaagagaaagcaacagaaccgaaaag

SEQ ID NO: 72924 - RNA, 75 nt, Homo sapiens
cgcggacccaaggccagaaccaggaagaggagggggaaagcagcagccagaaagacccagagaagcgagaagcag

SEQ ID NO: 72925 - RNA, 75 nt, Homo sapiens
cgcgcgccacgagcaccaacaaggccccgacaacaccagggaaagcaacggcgcaagcggcggcggcgggcagag

SEQ ID NO: 72926 - RNA, 78 nt, Homo sapiens
ggaagcggcccaaggggcggggagcagggaggagcccggcccgcccaggaccagggaggaacaccaggacagggagag

SEQ ID NO: 72927 - RNA, 68 nt, Homo sapiens
acccgagggcagaccagaaacaacacggaagcgccgaaaagcgaaaagaaacaagccgcggcaacagc

SEQ ID NO: 72928 - RNA, 38 nt, Homo sapiens
cgaaacgcacacaaacggaggcacagcgagaagggaag

SEQ ID NO: 72929 - RNA, 42 nt, Homo sapiens
cccaccagcgccacacccaacggaccgccaggaagggcagcg

SEQ ID NO: 72930 - RNA, 58 nt, Homo sapiens
caccaacaacaccacaaaaccacagccaagaacaccgaccgaggacaacaggagagaa

SEQ ID NO: 72931 - RNA, 69 nt, Homo sapiens
cggaaaggagggcggcccggaccgggagacacggccagacgcccccaacgaaggaagaccaaggaagaa

SEQ ID NO: 72932 - RNA, 81 nt, Homo sapiens
cggaggcccggggggcccagccccgagggagccggggcgccgggcccgggccgggcaggaagaagagagggcgaaggaggc

SEQ ID NO: 72933 - RNA, 81 nt, Homo sapiens
gcgcgcgagccggaggcccgggcgcggggaagcagccgccacggaggcaaagcagccgggcggagaacggaaaagcaccag

SEQ ID NO: 72934 - RNA, 82 nt, Homo sapiens
cgacaccaaccaggaggccgagacaacaacggcaccgcgagaaggagggggcagagcacggcaggcagaaggggccaacccg

SEQ ID NO: 72935 - RNA, 75 nt, Homo sapiens
gcccaggcagcggggcagaagagaggaaagggaggcaccacacacaaaaagagccggaggaaaccacagagcagc

SEQ ID NO: 72936 - RNA, 66 nt, Homo sapiens
ggcccgcgggggagccccgggagccgcacgcaacgaagggggaacagaaaaggcaagaaggaacgg

SEQ ID NO: 72937 - RNA, 87 nt, Homo sapiens
gcgcgaggaagcagcgcggagacggaggcccgccccagagacgcgcccccagggaagcagaggggaagcagacggaaaccaaaagga

SEQ ID NO: 72938 - RNA, 77 nt, Homo sapiens
aacggcaccgcggacagagcagacagaacagacaaggggacacgaagcagaaagggccgccaaaacagggagagaga

SEQ ID NO: 72939 - RNA, 64 nt, Homo sapiens
accaacaaagacggaccaacccaggacccccccacagaaagccagaggcgacgccaggagcaca

SEQ ID NO: 72940 - RNA, 83 nt, Homo sapiens
accacggagccaagcccgggggagcagacagaccaccccaaccgggaggagagagaaagaaaaagccagagaggagagcgggg

SEQ ID NO: 72941 - RNA, 79 nt, Homo sapiens
agaaaaaagagaggagcgaaacaagaggacagaacaagcagcagccagagaagggaggaaaggaaacagacagcgcgag

SEQ ID NO: 72942 - RNA, 77 nt, Homo sapiens
gcacaaacccgaaaaacgaccgagcagaaccggccagaaggaagaacaagcaaaggcagccaagaaagggagggagg

SEQ ID NO: 72943 - RNA, 66 nt, Homo sapiens
agggcacccagagaggcacacagagaaaaaaagggaacaaaacacagcaagcagacaaaagggggg

SEQ ID NO: 72944 - RNA, 76 nt, Homo sapiens
aaacagaaagcaacaaaggacccgaaccacaaagacacacagaggacaagaaagcagaaagcagcacagcaggcag

SEQ ID NO: 72945 - RNA, 85 nt, Homo sapiens
aaacaccccagcccacagagagcaaaacacaagagagcagggaggagcagacagggcaacggccacccaaccagcgcgccaggca

SEQ ID NO: 72946 - RNA, 57 nt, Homo sapiens
caccaaagcacccgaaaccagacaggaacgccgaagagggggcgaaacacccggcgc

SEQ ID NO: 72947 - RNA, 40 nt, Homo sapiens
gaccaacggggaaccccggaaacgccggaccgaacacgcc

SEQ ID NO: 72948 - RNA, 71 nt, Homo sapiens
aggaacgggggaagccagaagcagaggacaacagaacgccaggacgagcaacggccccagggcgaagaagg

SEQ ID NO: 72949 - RNA, 59 nt, Homo sapiens
cggcggaggaaacaacaggagcgacaaccaagacccagagacacagggcacgcccgaga

SEQ ID NO: 72950 - RNA, 107 nt, Homo sapiens
acaaccgaaaaaggaacagaacagcgcagaaccggaggagaaggcgagaacaggaagcacaaacaccagcccgaacgagacgagaaaccggagacccaacaaaggcc

SEQ ID NO: 72951 - RNA, 33 nt, Homo sapiens
ggacccggacaccaacccagggaaaccgcagaa

SEQ ID NO: 72952 - RNA, 71 nt, Homo sapiens
caccaccacgggaggggcccgcaggaaggacggaccaggggcagcccaccacaaaccaaacgagcaagaag

SEQ ID NO: 72953 - RNA, 85 nt, Homo sapiens
ccggaccccgcggcgcccccggcccggagcaacgagcgcagcgccgggcggcgccagcgcgcgccccccagagaagggcaccccg

SEQ ID NO: 72954 - RNA, 83 nt, Homo sapiens
cgcgaccagcgccagcgcagccgccagcgccggggaccgacgcaggcgggcccaagcgcgaaggaaaaacggaagaccagaga

SEQ ID NO: 72955 - RNA, 89 nt, Homo sapiens
aaggagcgacgcgcgcagccaagcccggagccaacaagcggaagggggagcgggccggagagaagagaggggcgcgaggagaaggaaac

SEQ ID NO: 72956 - RNA, 90 nt, Homo sapiens
gggaggggcgaaggcgggcggcagaggcgacaggccaagacaaggggcgcagagcggggggacaggcgcaagaccggagaagcaggagcg

SEQ ID NO: 72957 - RNA, 76 nt, Homo sapiens
cggggcgcgggcagccacgcccgggggcaaaagcccagccagaaagggcaggaggaaccaaaccaggaccggcagc

SEQ ID NO: 72958 - RNA, 70 nt, Homo sapiens
gggcgggccccccggcaacgcggcaagccaaagcgccacagaggaccaaagaggagcagccgacggcggc

SEQ ID NO: 72959 - RNA, 78 nt, Homo sapiens
cgggcgccacggcgacgcccagagcagcccgggcgcaggagggagcaaaggaggcgcgcccaccgcgagcggaaaaga

SEQ ID NO: 72960 - RNA, 53 nt, Homo sapiens
caggaggcgcggacacgcaaaccacacaagggaagaaccccaccaacacacag

SEQ ID NO: 72961 - RNA, 69 nt, Homo sapiens
cgccggaagcggggggaccgcacgggggaggaccacgaccccgcagggaacacgcccgcgccccgccca

SEQ ID NO: 72962 - RNA, 60 nt, Homo sapiens
gaccgcagaacacccagccaggcccgccccccaaagcgaagccaaagcgaaggcaaaggc

SEQ ID NO: 72963 - RNA, 66 nt, Homo sapiens
acacaccggcagcgccgagaccgagcccagccacagccaagagacgaggacgcgcacaggaaagga

SEQ ID NO: 72964 - RNA, 79 nt, Homo sapiens
ggaccgcaggacggacggcccagagaggaaccgggacgcccgaagccgcgagagccaggacacggccaaggccggcgag

SEQ ID NO: 72965 - RNA, 74 nt, Homo sapiens
gagcccagcccacgccgagagaaccccccccgcagcaggagcaaaagaaaacaggggcacagacgacagaagcc

SEQ ID NO: 72966 - RNA, 83 nt, Homo sapiens
gaaggaggagcgggccgggaggccgccgccagagaaaccaggcggggaacaagccagcagcccaaggagaagccccacagagc

SEQ ID NO: 72967 - RNA, 58 nt, Homo sapiens
agcccccagagcggaacacagggaaccaaagggcacccgcacggagagaagggaaccg

SEQ ID NO: 72968 - RNA, 81 nt, Homo sapiens
aggaaaccaagccgggcgcccgcaaggagacgcggaggcacccaccacgggccaggcgggccagaggcaagccgcgggagc

SEQ ID NO: 72969 - RNA, 108 nt, Homo sapiens
cgaaggcaggagcagaggaaaaaacgaccaagccagagaacagcccccacgcagcccagaaggaggagcgagcgacagaaaccaacccaagagcgcccagcggaaagg

SEQ ID NO: 72970 - RNA, 76 nt, Homo sapiens
gagggcgcagagcccaggagacggggccggaacagggccaaaccagcgaggcgcaaacacagaaaccacagagaca

SEQ ID NO: 72971 - RNA, 72 nt, Homo sapiens
gccacgcacgccagaaaaacaaacacagggaggaagaaccaggagaggaaacaggaacaaaaccgaaagccg

SEQ ID NO: 72972 - RNA, 76 nt, Homo sapiens
cgggccggggcaggggcgggcgcagcgggaccgaagcccccaacaggcagagaaacgggcggagaacggaaaagca

SEQ ID NO: 72973 - RNA, 70 nt, Homo sapiens
gggcaaacaagccaggccgggaaaggccaacagaacaagagagaccaggggcacccagccaaacccaggc

SEQ ID NO: 72974 - RNA, 71 nt, Homo sapiens
cggcaggcgcccggacacagaagaggacagggaccagaccccacaagaaaacacacaaccacaggcccaag

SEQ ID NO: 72975 - RNA, 93 nt, Homo sapiens
cggcccgcgcccgccgcgccgggagcagcaccgcggggccagcaccaacaagacgcaaaaccagcaggccgcgaagagggagcagccagacgg

SEQ ID NO: 72976 - RNA, 76 nt, Homo sapiens
ggaggagccgaacgagccccagccaggaacacgacccgagagaacccagagacggaaagacaaaagagccagcccc

SEQ ID NO: 72977 - RNA, 81 nt, Homo sapiens
gagccgggcgcgcagcgacggagcggggccggccgggaccagggcggggccgccacaggcgcccgcaaaggccccgccaga

SEQ ID NO: 72978 - RNA, 76 nt, Homo sapiens
ccccgacagcccgggaagaagcagacacaagagagccacaggccgcacaccccagagcccgaagggggccccgacc

SEQ ID NO: 72979 - RNA, 84 nt, Homo sapiens
aagagacagcgaagggggcggaggagcaagaacagggagacccgagaagaacgggggaggacaagaagggaggcaaacgagagg

SEQ ID NO: 72980 - RNA, 77 nt, Homo sapiens
agccggaaaggagccaagaggacaacaggcacaaagagagaaggaacacccacagggcagacagagaaagaacacaa

SEQ ID NO: 72981 - RNA, 79 nt, Homo sapiens
agcaaaccgggcagccccaaacggaaagaagagcaaaaaggaaggacaaccaccaccagcgagcaaaagaacaaagacc

SEQ ID NO: 72982 - RNA, 72 nt, Homo sapiens
cgacccgcccggggcagcaggaccgaggaagaagagccggggaacaagcagagagagaggggaccccggaaa

SEQ ID NO: 72983 - RNA, 66 nt, Homo sapiens
aaagaaaggacagcaccggacccgccaccaccaaaaaaccaccccccaggacaacaacaagcaccg

SEQ ID NO: 72984 - RNA, 69 nt, Homo sapiens
ccgaccaggagcaggcagcccgccaagaccggcccacgggcacgccaaaaccagaaacacaggaagggg

SEQ ID NO: 72985 - RNA, 87 nt, Homo sapiens
caccagcaggagcagccaaccagcagcagccacaggagaaacaggacacccggagcaaccggacaaacgcggcccggcaacaagcca

SEQ ID NO: 72986 - RNA, 73 nt, Homo sapiens
ggcccacaggcccgcccggacaccgagcaacgagggggaaccaagggcggacagcccaacgacaacaaagaag

SEQ ID NO: 72987 - RNA, 75 nt, Homo sapiens
cagcccggagcccagccagagggggccgacacacggcggcagcacaagggaaaccacaggaaaaggcacacaaag

SEQ ID NO: 72988 - RNA, 78 nt, Homo sapiens
ccagcgccgcagcacgcggaccagagaaacacagcccaaagaaacacacccccccacaacaaggcccaaagaaaaggg

SEQ ID NO: 72989 - RNA, 67 nt, Homo sapiens
gaacacgcaggaggggggcacgagggagaggccgagaagaaacagggaacggagcccgcaagaagaa

SEQ ID NO: 72990 - RNA, 74 nt, Homo sapiens
ggaaaccagcgcgcgccaaagggcgacggcacacagagagaccgacgacacaagggcgggacccggagcaaaag

SEQ ID NO: 72991 - RNA, 54 nt, Homo sapiens
ggggcagaaaaagcacacaccacgcaacggccaggaacgcccaaaacccgccgg

SEQ ID NO: 72992 - RNA, 133 nt, Homo sapiens
ggaagaaaagacaaacagaggaagaggaaggaaaagacaacagccaagaagcgacccgagaaggcacacagggaccaagaagccccggggacacgcgagaaaagacgccgaagggaagaccagcgggaaggcc

SEQ ID NO: 72993 - RNA, 88 nt, Homo sapiens
gcggacccagcagccgcgcccaggccgcagcagcaggagagcagagccggagccagggcaggccaggagagaaggcccggcccaggcc

SEQ ID NO: 72994 - RNA, 80 nt, Homo sapiens
cacaccgggacaggggagaggaacagcgagaagagcaagagcgaaccaacgggcccaaccagaggaagcaaaaagcagag

SEQ ID NO: 72995 - RNA, 85 nt, Homo sapiens
caggaacagggcagacgagcggaggacacccaacccggacaaaccagggccggaggaacgaaagagagagaaaacagagagaaaa

SEQ ID NO: 72996 - RNA, 84 nt, Homo sapiens
acccgccagcacaagaggagacacaccccgacggcagccagacgggaagaagggagagggggcgcggggcagggcgcggggaca

SEQ ID NO: 72997 - RNA, 66 nt, Homo sapiens
cccggcgccccaaccccggcagccccaggaggaagagaacagcggaggacacaaggaaaacaaaaa

SEQ ID NO: 72998 - RNA, 91 nt, Homo sapiens
gggagacagaacgccagcgggccgacggagcccaggaaaccacgaggacacaggaccagaggcgccaggcgccggcaggccggaaggcaaa

SEQ ID NO: 72999 - RNA, 71 nt, Homo sapiens
gcaggaggcggggacccgcgaagcggggaagaggcccagccagagaccgggaagaaggagcgcagaaggaa

SEQ ID NO: 73000 - RNA, 89 nt, Homo sapiens
acaaacaaaaggaaaagacacaccagaaggcccgcacgcagcacagacagaagagcagaagacagagaaggaaaagaaaggaacagaaa

SEQ ID NO: 73001 - RNA, 82 nt, Homo sapiens
accagggggagccggcgccgcgcccaagccggacggggacgagcggcaggacgcgcccggggcacggccaacgggggcagcg

SEQ ID NO: 73002 - RNA, 67 nt, Homo sapiens
ggcaaaccagaaagacggaaaggcccgagccaaaagacccagagaaaggagcacgaaggaacaaagc

SEQ ID NO: 73003 - RNA, 75 nt, Homo sapiens
gcacaaaggaagacccaacgaaaggggcgacaccagggccgcagaggcccaggcagcgcagacgaaacagcgcgc

SEQ ID NO: 73004 - RNA, 54 nt, Homo sapiens
gggggggccagggagcccggaaggaccagcggagcagccaggagagcaaagggg

SEQ ID NO: 73005 - RNA, 78 nt, Homo sapiens
cgcagggccaggaggccggggggcggccaggggccgacggaaggggaggacacaaccccagagagcggaacgagcaac

SEQ ID NO: 73006 - RNA, 75 nt, Homo sapiens
ccgaaggggcaggaggagaaggcaaagagccagcccggagacaaggagaaggccaggacacgggggagccggagg

SEQ ID NO: 73007 - RNA, 74 nt, Homo sapiens
aaaggcgcgagcaccggaaccccaacgcgcggacaggcgcgacacagaaggcaaaagcagaccggaaaacccac

SEQ ID NO: 73008 - RNA, 57 nt, Homo sapiens
cggacaggaaccggacagcacaccagggccgggacacacgagcaaccagacacacaa

SEQ ID NO: 73009 - RNA, 84 nt, Homo sapiens
ccgacgaaagccagcgagccccagcccagccacgccgcaagaagagccacaggaaagcaaagaggcgagccacgaaaagccaag

SEQ ID NO: 73010 - RNA, 92 nt, Homo sapiens
ggagggacgaaaagcaagggaaaaaggaggaccccgccaagggccccaagagggcacacagcacacaccgacaggaaaaaggaggacaaacg

SEQ ID NO: 73011 - RNA, 61 nt, Homo sapiens
agggggggagacacggcaacagcagcgggaagcccgaaccgggaggcagaccacagcggcg

SEQ ID NO: 73012 - RNA, 81 nt, Homo sapiens
accaagcaaagagccagcaagaacaccccaaggccagaaccaaacagacgacaaagagcacgaaacggcgaggaaagagag

SEQ ID NO: 73013 - RNA, 111 nt, Homo sapiens
aaacacaggaagcggggaaaagggcaaagcccacacaaaacaaccgcgcccgcaaggccaagccggcgaagcccgcgcgcagccccaaaagcagaaccacagcagcggcag

SEQ ID NO: 73014 - RNA, 73 nt, Homo sapiens
acaccaagaaaaaacgcacacggcagccaaggaagggcaaagcgcgcccaggccaaagaccaaaacaccagaa

SEQ ID NO: 73015 - RNA, 57 nt, Homo sapiens
acaaaccaagcgccgacaacacccgaaccaagaccagcccaggcgaagggagagcgg

SEQ ID NO: 73016 - RNA, 78 nt, Homo sapiens
ggaaaaaccgagccacacgaagcagcagaaagcagagagcccagaagaaaccaaagccacaccacccaaccagcaagg

SEQ ID NO: 73017 - RNA, 76 nt, Homo sapiens
aaacagaggaaaaaagacagagaaggagggggaacgccaggaagagaaaaagagccacagagagagcacgaccgca

SEQ ID NO: 73018 - RNA, 77 nt, Homo sapiens
ccggcgagcggagccggggcggagagcggcgaccacgcggaccgggacgcagaaaaggcgcggaacaaggacccaac

SEQ ID NO: 73019 - RNA, 83 nt, Homo sapiens
aagagagaggaaacgaggcggagagcagcagggaacagggcccaaagcacaagcgaccgccgaaggagcccccgaacggcaac

SEQ ID NO: 73020 - RNA, 60 nt, Homo sapiens
ggcgaaccccgggcagcccgggaaacccaagcagaaaggaccaggcccggagacgcgacg

SEQ ID NO: 73021 - RNA, 43 nt, Homo sapiens
acagaagaagggagagaggggacaaaggggcccggaggccgaa

SEQ ID NO: 73022 - RNA, 57 nt, Homo sapiens
cgcacggacgcggagaggggagccgcagacccaaggccagccagccccaggcaccag

SEQ ID NO: 73023 - RNA, 70 nt, Homo sapiens
ccgcgacgcggggcagccgagcacagcacgggaaggcggaccccggcagcaagcaacagagcgccaagcc

SEQ ID NO: 73024 - RNA, 84 nt, Homo sapiens
ggaggcgggaccggccgaaaccggagaagcgggcagcgggggcagagacggggaacagggccacccacacggacgccaacgcgg

SEQ ID NO: 73025 - RNA, 67 nt, Homo sapiens
ggcgaaaccccacaagggaaaggaaaggacccccccagaagcccacccagagagagaagaacaaggc

SEQ ID NO: 73026 - RNA, 73 nt, Homo sapiens
aaaaagaagcaaacagccggccacggcccaaacacacccaggcccaggaagaaggggaggcagggcgcgacgg

SEQ ID NO: 73027 - RNA, 66 nt, Homo sapiens
cgggaagggaccggccgccgcaggagcgcggcgagggggaaaccggaaaggcgaaaaggggaagga

SEQ ID NO: 73028 - RNA, 58 nt, Homo sapiens
agggcggaggccacgaacacgccggagccgccagggcaagaaccgaccccgagcccca

SEQ ID NO: 73029 - RNA, 75 nt, Homo sapiens
gccgccggcggccaagcagccaaccagccaaccgggccccccagcagacgcggacaccagcaccccaaccgcacg

SEQ ID NO: 73030 - RNA, 64 nt, Homo sapiens
cccggggacccccgacgccaggcagcgcccccaaacggcagggaggcgaccgaggagggaggca

SEQ ID NO: 73031 - RNA, 64 nt, Homo sapiens
gaacaaaggaaagagggaagccacaaggaaagcgaggaagcgcggcgcagccagacgcaaaaag

SEQ ID NO: 73032 - RNA, 58 nt, Homo sapiens
cccagaaagaggagccccgacccccggccccagcaaacgaggcgcggggccgagaggc

SEQ ID NO: 73033 - RNA, 58 nt, Homo sapiens
gaagcagcaagaacaacagcaggccaagcccgccggagcggggcacaaaacacaccaa

SEQ ID NO: 73034 - RNA, 86 nt, Homo sapiens
cccggaggagcggccgcccgcgccccggggcagcagcgcgcccaggaggagcaggacgaggaggcgaccaacgacgaagagcagag

SEQ ID NO: 73035 - RNA, 76 nt, Homo sapiens
aagaaaagcgggcaaccgaaagagacccccagaccaggaaagacagacagggaggccgcacagaggaggagcacca

SEQ ID NO: 73036 - RNA, 80 nt, Homo sapiens
cggcagaaggccccaagcgccgcgaaaggggagcaggagaaccgaggcagaagggaaaggaacaaggcccccacaacacc

SEQ ID NO: 73037 - RNA, 51 nt, Homo sapiens
gagacacagagcacacggaccagagcacaggggccgcagccggccagggga

SEQ ID NO: 73038 - RNA, 39 nt, Homo sapiens
gaccaaccacgcccgggcgcaggccagaaccgcccaaac

SEQ ID NO: 73039 - RNA, 67 nt, Homo sapiens
ggaccaaacgcggaacgacaaagggacaaaacccaggaaaggaaacagacggacccccaggcaggac

SEQ ID NO: 73040 - RNA, 57 nt, Homo sapiens
aaagcccgcaacaagaagcaggaagccacagggagaccagcaaaaaggccagccccg

SEQ ID NO: 73041 - RNA, 115 nt, Homo sapiens
ccagcgcggggggccgaggccgggacaagcagcaaggcgcggggggccacgcgaggccgagccacggaacccagaacaggccaagccccacaggccacgagcccacggcgacggg

SEQ ID NO: 73042 - RNA, 78 nt, Homo sapiens
gggacagaacagggaacggaaacgccggccaaaccgaacacaccaagagagccgaagcgacagaaccccaaggccaca

SEQ ID NO: 73043 - RNA, 63 nt, Homo sapiens
aaaagaccaacacagccggacacaagagggcaagaaaggcgcgacgggccgaaaagggacgaa

SEQ ID NO: 73044 - RNA, 70 nt, Homo sapiens
cacgcgcaagacgaggcgcccgggagaagggggaggccccgcaaccaggcgaggaaaacgccacccgagc

SEQ ID NO: 73045 - RNA, 61 nt, Homo sapiens
cccgcaagacgggcccaccgagcaggaggcagaagccacaggaagagccaaggaagcacgc

SEQ ID NO: 73046 - RNA, 38 nt, Homo sapiens
cgccggggcacgacacaaaaacagagaggggccccagc

SEQ ID NO: 73047 - RNA, 75 nt, Homo sapiens
cgggaagcaggacgcgccgcgccccaaggaccgacagcacgaggaggagagaagaaaagcggcccgagacaacaa

SEQ ID NO: 73048 - RNA, 71 nt, Homo sapiens
cggcaagagaggcaccccgaagaggcgaggagcaacccagaagagacccagacgaagagcgcacagaaaga

SEQ ID NO: 73049 - RNA, 77 nt, Homo sapiens
aggaagaggagaaaggaaacggaagaaaaaagaaaagaaacgacaaaaacacgagacaaagcgccacaggaagcacg

SEQ ID NO: 73050 - RNA, 91 nt, Homo sapiens
gcgcgcccgcgcggcgcggggaccgcggcccgaaagccaacaggcagaccagagacagcgccacgcacccggggagcagaccacgccgggg

SEQ ID NO: 73051 - RNA, 74 nt, Homo sapiens
ggcgcccgacagggagacggcagccaggggccgcaaggccaggcgcgcagaggcacccaacggcacagacccca

SEQ ID NO: 73052 - RNA, 70 nt, Homo sapiens
acaccaggcaacagcaccaaaggggaggagggcggggagcccaagggcaaaagccgggcgcgacgcaagc

SEQ ID NO: 73053 - RNA, 72 nt, Homo sapiens
accaaaagggggcccacaaagaagcacaagaagaccccaaacagcaggaggagaaccaggaccaaagcacca

SEQ ID NO: 73054 - RNA, 79 nt, Homo sapiens
accccccgagacccggaccgagcagcccgacccccaacggaccccgccccggaggagcgcgcaccaggagcgccgcccc

SEQ ID NO: 73055 - RNA, 59 nt, Homo sapiens
cgaccgcgggcaggcggacgaggggaagcgacagcgacgggcaagccaccacacggcca

SEQ ID NO: 73056 - RNA, 77 nt, Homo sapiens
cacggaacagcaccgccgcagccagcaagagacgggagaagggccgcggacagcccgccagaaccagcgacagcggg

SEQ ID NO: 73057 - RNA, 78 nt, Homo sapiens
ggggacgaggcagcagagcagcagaagcccgcggagcaaagggaccgaaggaggcaagcaaccgcccggcacacaagg

SEQ ID NO: 73058 - RNA, 73 nt, Homo sapiens
ccgagccgccccgagcccgccgccacacccgagacaggaagggaaggggcggagacgggcggaacgcaggagg

SEQ ID NO: 73059 - RNA, 76 nt, Homo sapiens
ggggaacagccggaagggcggggggcgggccggaggggagacgggaggcaggaccaggacacagaccggaaaccga

SEQ ID NO: 73060 - RNA, 78 nt, Homo sapiens
cggccagagaagagcaagggcacgagcacggggcagcgccaggagagcggcaccgcgcagaggacaaaccgaccggaa

SEQ ID NO: 73061 - RNA, 55 nt, Homo sapiens
cgcagggcgcccccgagacaagcgggggggggcaaagaggaccgggcccccagca

SEQ ID NO: 73062 - RNA, 79 nt, Homo sapiens
cgcccacccacccaagagagccagacgaccgaccagaagccaagagccaaacggggcggaggcgcaaaagggagccgga

SEQ ID NO: 73063 - RNA, 78 nt, Homo sapiens
aaaacaaaaaagagcagggacacagagaaccagccagacccacaccaaaacacacagccaggggaagagaccggaggg

SEQ ID NO: 73064 - RNA, 77 nt, Homo sapiens
aacaagacggggcgccccacagaggggcgacgcgagacgacgggaccgaaggaccccgccagagacaaccgagcgcc

SEQ ID NO: 73065 - RNA, 68 nt, Homo sapiens
cagccccccgcggcggcagccacaggaaccaaacaggggcaccagggaggaagaccgcaagaggggcc

SEQ ID NO: 73066 - RNA, 61 nt, Homo sapiens
gagaggaccccggacacgaaagccgggaaagaaacagccggacaccagcagaggaggcggg

SEQ ID NO: 73067 - RNA, 76 nt, Homo sapiens
acaaaaccaaaaaagcagaaaggaggagaggaagaaaccgaagaacggcggggcccgccccccccccagcccggcg

SEQ ID NO: 73068 - RNA, 69 nt, Homo sapiens
cagaacgccggagggcggccacgcgggaccaccggcaccaccaaagggaccagccgcacaccccgagac

SEQ ID NO: 73069 - RNA, 37 nt, Homo sapiens
agaaagccaaacgaggagaggaaaggaaaggcaaggg

SEQ ID NO: 73070 - RNA, 74 nt, Homo sapiens
aagggacgaccaccacagccacacccaggaggcacacacgaaggaaccaggaagacagaggagcggggaaccgg

SEQ ID NO: 73071 - RNA, 72 nt, Homo sapiens
gcaaagaaaaggagaaaagaagccaaagggacacgaaaggaagcacgcgcgcggacaagaccagaaagaaaa

SEQ ID NO: 73072 - RNA, 83 nt, Homo sapiens
gggagcgaagcgagggcgaagcacgacacagaaggggaggggagggaaaggcccaggaaaaaggaaacggggacagaagaacg

SEQ ID NO: 73073 - RNA, 66 nt, Homo sapiens
ggaagacgaggcggcgggggacaagcggcgccccagagcggacgaggaccagccacaagcagaaga

SEQ ID NO: 73074 - RNA, 69 nt, Homo sapiens
ggaacccagaagcagggaggaaaaagcagcgaaacagacaaccccccacacaaccggaaaaagacgaga

SEQ ID NO: 73075 - RNA, 71 nt, Homo sapiens
gagcgggcaccacccaaagaagcgggcaaaaggcacaaaaaacaagcaaaacccggcccaaagacacgaga

SEQ ID NO: 73076 - RNA, 75 nt, Homo sapiens
cgaaggccaggacgacgaaccgcaccacggcgggaggccgcgcagccagggcggagaacggaaaagcaccaggaa

SEQ ID NO: 73077 - RNA, 76 nt, Homo sapiens
agcccggggggacgggccaaggagaccaaggggggagcaaggggaggcaagcaggggggcaaaggaaagaaggcag

SEQ ID NO: 73078 - RNA, 74 nt, Homo sapiens
cgcgaggaggaaaggcaccccaccagaaccaaaggcaagaaccggagcaggagaaaagccggaaagaaaacgca

SEQ ID NO: 73079 - RNA, 89 nt, Homo sapiens
aaagaccagagaagagaaagaaaccaaaaacagcaagcgcagagccaaacagccaggcaggaggcacaacagcaagaaagcagccaaca

SEQ ID NO: 73080 - RNA, 57 nt, Homo sapiens
gggcggccgggacggaggacgcgcaggaagaacgaagcacagcggaacaagcgaacc

SEQ ID NO: 73081 - RNA, 58 nt, Homo sapiens
ggggccacaccacgaaggcgagggcgacagaagagcacgcgcgggccgccaacccgac

SEQ ID NO: 73082 - RNA, 81 nt, Homo sapiens
cacgaaaggagcaagagcaagacaccggacaccgagggcccccaaaaggccagcgcagaagacgagaagccaggaggagaa

SEQ ID NO: 73083 - RNA, 72 nt, Homo sapiens
aaaaaacacacgacaagccaaacaccagaacaagggacaccaaacaccagagaccagaggacaagacaaagg

SEQ ID NO: 73084 - RNA, 76 nt, Homo sapiens
gccaaaagagcagccacagaagaccaaacgcagaccagcccaggaagacggcaaacaaaggaacagaggcacgcgg

SEQ ID NO: 73085 - RNA, 59 nt, Homo sapiens
gccccgggcgggacggccgggcgggccggaagaaaagagagaacgcggccccaggagga

SEQ ID NO: 73086 - RNA, 62 nt, Homo sapiens
gggacacagacgacgccaggacggcaaggcggcacggggaaggaccagaacagagaagaaag

SEQ ID NO: 73087 - RNA, 80 nt, Homo sapiens
cgggacgcagcccagcccccaggcgcaggcacagcgcggcccggaagccaacaacccagaccaacaagcagcaaagagga

SEQ ID NO: 73088 - RNA, 76 nt, Homo sapiens
ccggcggcggcgcagggcacccgggagacggcgaagagccaagacccagaagaccccagacggggagcgcagcaga

SEQ ID NO: 73089 - RNA, 61 nt, Homo sapiens
ggaccgagaccgcggccgggaccgaggaccggagagcaaggggacccgcacacgcaacccg

SEQ ID NO: 73090 - RNA, 57 nt, Homo sapiens
ggggcgagcgcgggagagaggcgaggcgggccagcccaggcagagccgcgacaaacc

SEQ ID NO: 73091 - RNA, 78 nt, Homo sapiens
acagagagccagccgaaaacaaacgcagagagagaacagagacaaaggacccagaaggaaagaaacccacacagagag

SEQ ID NO: 73092 - RNA, 71 nt, Homo sapiens
agcggacccggaccgggggacaggagagacaacggaggcaagaaagacggagaagcgagaagagaccagca

SEQ ID NO: 73093 - RNA, 68 nt, Homo sapiens
acaaggggaggagagaaaaaccacaagagcggaaaagccagggcggaaaccggcaagaggaagagaaa

SEQ ID NO: 73094 - RNA, 75 nt, Homo sapiens
ccaagcaagagaagagagcgcgggcgcagaagaacgacaagcaagagcaagcacccagcaagggagaaagacaac

SEQ ID NO: 73095 - RNA, 78 nt, Homo sapiens
agaagacgcgagcgcgggcgcaggggggcaaccagccgagagagggccagaggaggggccaacccacgcgacgggggg

SEQ ID NO: 73096 - RNA, 47 nt, Homo sapiens
ccgagagcacaacggccagacaggagcggacacgagcccaagggcaa

SEQ ID NO: 73097 - RNA, 75 nt, Homo sapiens
gcaccaggacaagcaaagaacccacaacaccaacagcccaccaacgagcgacggccccaacccgggcacaggacg

SEQ ID NO: 73098 - RNA, 73 nt, Homo sapiens
ccgacacgaaagcagacccaacaccggaaaccgacgcccccgaaaaggacacagcacaagcaagacacgcccg

SEQ ID NO: 73099 - RNA, 68 nt, Homo sapiens
cacacacaggaagcccaggaggcaaaagcccagggaagagaacggaccgcagcagcaaacagaaggcc

SEQ ID NO: 73100 - RNA, 77 nt, Homo sapiens
gcggcacggcgccgaccagcaccaggggaagcgggacaacgggggaagaagaaggggagacacgaacaaggagcaca

SEQ ID NO: 73101 - RNA, 64 nt, Homo sapiens
ggcaaaaggaagcaccgcgggaacagggagcacaaccgaaggggggcagacccaaaggaaacgc

SEQ ID NO: 73102 - RNA, 74 nt, Homo sapiens
ggagggcggcagggggcaggacccgcgccgcgacgccgaccaggaaagagaaaggagaccacaagaccccgcgc

SEQ ID NO: 73103 - RNA, 74 nt, Homo sapiens
ccaagaaagcagaaggaacacccgaaccaaggaagcaggccagaggacacaaaagggcaacgggaaaaagggaa

SEQ ID NO: 73104 - RNA, 82 nt, Homo sapiens
gcagcccaggagcaagacccaggaagcacagagcgaccagacacggcccacggccaggccagcacaaagcgagaaggaggga

SEQ ID NO: 73105 - RNA, 45 nt, Homo sapiens
cccacccgcgccgcgacccggccaggcagagcagcccaccaggga

SEQ ID NO: 73106 - RNA, 75 nt, Homo sapiens
gaggagacgagacgaggccggcaacccacaggcagccggcacccgcacaacccagggggccgaacccagaccaac

SEQ ID NO: 73107 - RNA, 61 nt, Homo sapiens
cagagcacgcgcgcagcgaagcccagggaggccaccaggaggaccgcgccaacaggacgag

SEQ ID NO: 73108 - RNA, 77 nt, Homo sapiens
cagggaaaaggaagagaagccgcgacccaaagcccccaaaccgaaggacccgacgcagcggccagcaccagggagaa

SEQ ID NO: 73109 - RNA, 78 nt, Homo sapiens
gaagggaaagaacccaagggagaacgaaacggagaggacaagacgggggagagacgaagacgcaccagaaggcgccag

SEQ ID NO: 73110 - RNA, 77 nt, Homo sapiens
gggggcgcggcgcccgcggccggggcgcgaccccccacggaccaccaggagagaacgccgcgccgcgcgacaacggc

SEQ ID NO: 73111 - RNA, 58 nt, Homo sapiens
gccacaggcccgggagcggcgcgggcccagccagcaccgcgcacccagcagcacccaa

SEQ ID NO: 73112 - RNA, 70 nt, Homo sapiens
gacagcagacccgggcaacgggccacagcagcaccagcggaggcacccaccacgggccaggcgggccaga

SEQ ID NO: 73113 - RNA, 72 nt, Homo sapiens
agagaaacaaccacccaggggggcccaacccgagaacacaacccgaacaggaaaccaagagggcaaaagcca

SEQ ID NO: 73114 - RNA, 107 nt, Homo sapiens
gcaacgccaagggcaggggagggaccgccgcccggcaaacacggaaccaccaccagaaaagacgagaaagcacaggggaggagagagaggaccaccaggcaaccaaa

SEQ ID NO: 73115 - RNA, 51 nt, Homo sapiens
gaacaccgccgggcaaagcgagaacgcggacaagcaaacaaagaggaaaaa

SEQ ID NO: 73116 - RNA, 72 nt, Homo sapiens
gaaacaggccgacgcaaacgagggcaccaagagcgaaggccaacaagaggaacaaagaagggaacaacgaga

SEQ ID NO: 73117 - RNA, 38 nt, Homo sapiens
cccaaggaggcccagcgaccagagccacgcgcccaggc

SEQ ID NO: 73118 - RNA, 69 nt, Homo sapiens
cccagaggccaggcagggagcagggaccagcgacgcacccgagacccccacccagaagaccagcgggac

SEQ ID NO: 73119 - RNA, 47 nt, Homo sapiens
accaacacaaaaaaaaccaacagccccccaggagggaagagcgagaa

SEQ ID NO: 73120 - RNA, 81 nt, Homo sapiens
ggggcggaagaccaagacacgagagagaaaccaagaccaggacacaaccaccaaaagaaacaaagcacgaggagcagaccc

SEQ ID NO: 73121 - RNA, 64 nt, Homo sapiens
cgagggagccgagggcggagcggagacgaccgagaaccaccacgaacggggcccgcgaacggga

SEQ ID NO: 73122 - RNA, 84 nt, Homo sapiens
gacagagcggcgggacagcccaagggccagcaccgcgcccaggcagagccagaccgcacagagcagagcgcccaggcaccgcga

SEQ ID NO: 73123 - RNA, 83 nt, Homo sapiens
agagcagagaaaaccagaaaaaggccaagggacacggaaaacgacagaacgaagcagaagaacgcccaggcaggcagggaagc

SEQ ID NO: 73124 - RNA, 45 nt, Homo sapiens
gagacaacaccgagagagaaggaaagaagaacgccagaaaaaaac

SEQ ID NO: 73125 - RNA, 84 nt, Homo sapiens
cccgcacgagcaacagacgagcgcgccaggccgacagccgcggccgggcccgagaagaggccccaggaccggcgaggccccccc

SEQ ID NO: 73126 - RNA, 77 nt, Homo sapiens
cccccaagggcgggaacaggccaaacaaagacagaagagcaccaaaaagaagaagaaaagagagcaggcacccagaa

SEQ ID NO: 73127 - RNA, 85 nt, Homo sapiens
cgggaaggcgggagacgagaagccgaaaagcgcagcgagcggagccgccggaggacccaggcgaacaccaaaagccgacaacagc

SEQ ID NO: 73128 - RNA, 63 nt, Homo sapiens
ggcgagaaggaggggcggagcagcaagcgacggccggcccagcaaaagggggacaggagccag

SEQ ID NO: 73129 - RNA, 78 nt, Homo sapiens
gggcggcggggcggggggccgggccccagcacggccgcaccggggagaagcaggaggagcagaacaacacagcacccc

SEQ ID NO: 73130 - RNA, 53 nt, Homo sapiens
gccacgcagggccaccaaacaggccaggaaacgaggccgcgcaaggcacaaga

SEQ ID NO: 73131 - RNA, 84 nt, Homo sapiens
ccagaacgaagaaaagacgagaagccccccgagagaccggagacaaaaagaggccaagaccaagaggacaggggacagcgccca

SEQ ID NO: 73132 - RNA, 51 nt, Homo sapiens
cggagcaggagagcaaagggaagagcgccagcccaagaaccaaccaagaac

SEQ ID NO: 73133 - RNA, 76 nt, Homo sapiens
cagggaagcagccgaccagccgcggagccgggggcagagccgcagggaaagaggacccccaagcgccccgaggaac

SEQ ID NO: 73134 - RNA, 77 nt, Homo sapiens
gagacggcccagcccccgcaaggaggccccaccagaagggaagccggcccagaaggagcgaacgaagcgcagggcga

SEQ ID NO: 73135 - RNA, 78 nt, Homo sapiens
cccacggccgggcaccgaaagggagaagagcaaccggacacagaaggggaaggaaaccccaagcagcagaggggcagc

SEQ ID NO: 73136 - RNA, 85 nt, Homo sapiens
gacagggcgccggggaagcgggggccaagacaagcagcagagaggagcagcggggcagggcaggggggagcgggcccagcagggg

SEQ ID NO: 73137 - RNA, 82 nt, Homo sapiens
aagccaggaggaagaagaccagacaccagaggaacacacaaccagggaaaggagccggaagcgggcagcccacccagaggag

SEQ ID NO: 73138 - RNA, 82 nt, Homo sapiens
ccagggaagaaagcagcagagaaaacagacacaggggagaaagccaaacggagaacccggcggcggaggagaaaaaaggaaa

SEQ ID NO: 73139 - RNA, 82 nt, Homo sapiens
ggcccccgcccccgcccgggaaccgccgggaacccgccagcaccaccgcccaaccccaggccagggccgacccacagagcac

SEQ ID NO: 73140 - RNA, 82 nt, Homo sapiens
caaaaggaaccgagacagaaagaggaccaggcaccggaccagcgggaagccgcacaggaaaaccggagcacagggaaacccg

SEQ ID NO: 73141 - RNA, 36 nt, Homo sapiens
cccaggacacccccagagaagaaggacagcaaaaag

SEQ ID NO: 73142 - RNA, 76 nt, Homo sapiens
gggccgcgcagggcggccccggcgggggcgcggacccacggcagggcaaccccaccgcggaaggcaggcacacaga

SEQ ID NO: 73143 - RNA, 74 nt, Homo sapiens
gacgcagggcgcccccggagggaagaagacgaagaaggcggagaaaaggagcaagaaggagagagagagaccga

SEQ ID NO: 73144 - RNA, 76 nt, Homo sapiens
aggaggcagagggacaagaccggaagcagagagaaggagagagagagagagaggaagcgaagaaaaagcgccagga

SEQ ID NO: 73145 - RNA, 80 nt, Homo sapiens
acccacccaagggaggagaagaagcccggcagaaggaaaaacccaggaacccaggaggaacgaaccaaagaaaagcaaac

SEQ ID NO: 73146 - RNA, 71 nt, Homo sapiens
ccggcaggacaaaacccccaagcaaccccaagcaaaagggcaaacaaggaagcacaagaaaggagaagaca

SEQ ID NO: 73147 - RNA, 49 nt, Homo sapiens
cgcagggcgcccccgggacagacaacgaagagaagagccgcacgggaaa

SEQ ID NO: 73148 - RNA, 79 nt, Homo sapiens
cagggggaacaggccggagcggcccagaccccgcccgcgggagcgggcagagacacagcaccagagaaaaaaaacggac

SEQ ID NO: 73149 - RNA, 84 nt, Homo sapiens
cggcaggcacaacaaccaagaaaaacgggggccgccgccaagacagcacccaagaaaacccaggccgcgaaggagaagaccgga

SEQ ID NO: 73150 - RNA, 74 nt, Homo sapiens
gaggagcgggcaccacagagccagggaaagccaaaacacacaggggagcccaccaggacgggcgggagcgaaag

SEQ ID NO: 73151 - RNA, 66 nt, Homo sapiens
acccccggacccggcaacgggaccccggcacccaggcccagggccgggcccggacgggccccggcc

SEQ ID NO: 73152 - RNA, 32 nt, Homo sapiens
cccggacggcacagggcaccgggcaagcaccc

SEQ ID NO: 73153 - RNA, 76 nt, Homo sapiens
agacccccgagggccgagcaacaggagggcgaccacaagcaaacagcagccaggcccggggccaagagcaacaaga

SEQ ID NO: 73154 - RNA, 85 nt, Homo sapiens
agcagaacagccggaccgcaccccggaccaccccacaccagacaagacccccaacacagcaggcgcaggggccacaggcggcaca

SEQ ID NO: 73155 - RNA, 54 nt, Homo sapiens
ccgccggcacggggggaaaagcagaagaaccaggacaagaacgcgccacaaaga

SEQ ID NO: 73156 - RNA, 75 nt, Homo sapiens
caaacgcaacaagcagcagggggacgagcgaaagaacgccagacaaacaggcgaccccacacaaaacccagcgcc

SEQ ID NO: 73157 - RNA, 82 nt, Homo sapiens
gcgcggaggcggagaggcacggaggagccgcggggcgccgccacggccgcccggagacaacggcaagcggagaagagcaagg

SEQ ID NO: 73158 - RNA, 77 nt, Homo sapiens
aaagagcggaaaacgggccaaagcaggaaacgcccagaagccgggccccagcccgaagcaaacgagacccagaggcc

SEQ ID NO: 73159 - RNA, 83 nt, Homo sapiens
ccgaggccggcgccggcgccggcgccgcggccccggcgcggacccgccaccggaggaggagcggcagcccacaagcaggaaga

SEQ ID NO: 73160 - RNA, 63 nt, Homo sapiens
ccagccccaaaaggcggcaacagggcggcgacggcggcgcgaggaccgaccgggcccgcggac

SEQ ID NO: 73161 - RNA, 98 nt, Homo sapiens
ccaggaacagggacagcacccaccccggagggggaccacaagacccacgacaggacccaaagacaggaccacgcaccagcagagaaggaaagcaaacc

SEQ ID NO: 73162 - RNA, 56 nt, Homo sapiens
ccacacaagcgaaggcgcgcaccggaagcaccagcgaggaagccgagaagaaaccg

SEQ ID NO: 73163 - RNA, 78 nt, Homo sapiens
cacaggcgggaccagcccacacccaaggagagaagacagcaaacacccaccgaggcaaaaggagcggaagcgcggggc

SEQ ID NO: 73164 - RNA, 80 nt, Homo sapiens
ccacacacaagcaagaacggaaaaagcaaaagggcccaaggcccgaccaggaacaaagagagaaagacagccaagccagc

SEQ ID NO: 73165 - RNA, 39 nt, Homo sapiens
gcccaaggagaggccaaagagacgagagggacaggagcg

SEQ ID NO: 73166 - RNA, 72 nt, Homo sapiens
gacgcccacgaccccagcaggggaaggaaaccaccacggacccaaggcggaggcccagggagacccaaaacc

SEQ ID NO: 73167 - RNA, 74 nt, Homo sapiens
accgcccgcgcggggcacgaggaacagggaagggcgcgagcggggacaaagccgaagcaggaggggaaggcgcc

SEQ ID NO: 73168 - RNA, 72 nt, Homo sapiens
cggagacgcgggcccgagcgggccgcgagggccacacagggacgaaaacccgcggcgagcgcgcagaaggaa

SEQ ID NO: 73169 - RNA, 79 nt, Homo sapiens
cagcccacggcgcaggcccacggagcgcagccgccgagacagaccacgaacacggacggggaggcgggaaggggaagac

SEQ ID NO: 73170 - RNA, 56 nt, Homo sapiens
cagccaaagccgggcggacgcgggagcagaggcaccagcccaggcagaagaacacc

SEQ ID NO: 73171 - RNA, 81 nt, Homo sapiens
aaccgccacaggaaggccaccagcgggccggaccaacacaggagaggagcgagcaggccaccccccaccccacagcccaag

SEQ ID NO: 73172 - RNA, 78 nt, Homo sapiens
acaaggcaacccaacacgggcgaggacagaagccacaggcagagccggggagaacaacgcagaaaccgaggacaaaac

SEQ ID NO: 73173 - RNA, 51 nt, Homo sapiens
cggcgaagccccagaaagcgcaagccccggggcagagacacaggacaccca

SEQ ID NO: 73174 - RNA, 73 nt, Homo sapiens
ccagagcgccagcagccacggcccggggcaaggcaacgaagagaggcaacaaaaacccaaccaccaccagcag

SEQ ID NO: 73175 - RNA, 61 nt, Homo sapiens
gcccgcgggaagcaggacgcgccgcgccccaagagcagagccaaaagacaaaacgggacca

SEQ ID NO: 73176 - RNA, 83 nt, Homo sapiens
caccacccagaaccagcaaccccccacgagaacaacccagacggacacagggaaaaaccgaccgagccaggaagccaaccagg

SEQ ID NO: 73177 - RNA, 79 nt, Homo sapiens
ggacggcagcggaggaggggaaccgacccggagcagcggcggcgccgacccgacgagagaggcggggacagaaggcacg

SEQ ID NO: 73178 - RNA, 70 nt, Homo sapiens
acaaccagaggcagccagcagggggaggaaaaccgccgccggggccagcaagaacaaaaagcaccaacag

SEQ ID NO: 73179 - RNA, 87 nt, Homo sapiens
gacaccaggaagccggcggaacagcaaggcagcggccccagggccaggggagaggagcaacaccccaagaagagaagcgaggccgga

SEQ ID NO: 73180 - RNA, 71 nt, Homo sapiens
ccggagcgcacccggaggcgccccaccggggagcccccagcgacagaacgaaaacaaacggaagagagggc

SEQ ID NO: 73181 - RNA, 76 nt, Homo sapiens
gccgggccacccacaggccgcaaagagcaaaaagcggaaccacaagaagaaagcaacgacaagaacccacacgcgc

SEQ ID NO: 73182 - RNA, 68 nt, Homo sapiens
gacagcgagggacgaaggagaccgcgcaggaccacgaaaaacacacaacacgacgcagaccccaaaag

SEQ ID NO: 73183 - RNA, 58 nt, Homo sapiens
accacgccaagcagagggcacgagaacaggccgagcaccacagacagcgcgccccccg

SEQ ID NO: 73184 - RNA, 70 nt, Homo sapiens
gaagagggaaggcacgaggaagagacaacaccagagggccccagggaaaagcacagggccaggaagcaga

SEQ ID NO: 73185 - RNA, 77 nt, Homo sapiens
caacagcaaggcggggaagagcgggcgaccaagcgacagggccacgagcccaggggccgaacccggccaagcgaccc

SEQ ID NO: 73186 - RNA, 75 nt, Homo sapiens
caacaaaaagcagccaccagcaggcaaaagacaacccgccgggacaccagccgacagccaccaaacaggcacgcc

SEQ ID NO: 73187 - RNA, 89 nt, Homo sapiens
gcgggcggcgggcgcgcgcaccagggggagaaacccgggaccagcccgggaccgggagcccgggaccgggagccggggggccaccccga

SEQ ID NO: 73188 - RNA, 79 nt, Homo sapiens
ggccgggagccagcaggaagaccggcaacggagacgcagccggacaccgggaccagggccccgggcgcgggagccagcc

SEQ ID NO: 73189 - RNA, 59 nt, Homo sapiens
ggaaacaagcccacccagaaaaaggcccgggacccaggaaccagcccgggaagcaggcg

SEQ ID NO: 73190 - RNA, 66 nt, Homo sapiens
acaggacaccgggaagcgcacgaagcccagaaggcacgaagagggacggacaggagagccaaccaa

SEQ ID NO: 73191 - RNA, 63 nt, Homo sapiens
accagagcgggaaaacacgcacagcggaaacaagagcaccacccccaggaccgaaccaaacca

SEQ ID NO: 73192 - RNA, 77 nt, Homo sapiens
cgaagagagaacaagagaagagcaagccccaggaacgccgaaacgagcaggcaagagacaggagacggcgcaggacc

SEQ ID NO: 73193 - RNA, 72 nt, Homo sapiens
gaaaaaccaaagccagccgaccgccaaggggaagagagcgccgggaaccgagccaggggcccagacaacagc

SEQ ID NO: 73194 - RNA, 74 nt, Homo sapiens
gagcgccccacgagagaacggcacacgcgagcggcaggcagccgcggacgccggccaggcgacaagacggaagg

SEQ ID NO: 73195 - RNA, 59 nt, Homo sapiens
ggaagaagagaagaggaacaaaaagcaagaacgaggccaaggaggagggacacagagac

SEQ ID NO: 73196 - RNA, 82 nt, Homo sapiens
cgggggcggccccccgggccgcggcccacgcccgcggagcagccggcggaccgcacaagacggcaaagccgggaggccacca

SEQ ID NO: 73197 - RNA, 63 nt, Homo sapiens
ccgcgcgcccgcgcccccgcgcgacgccagggcagcggggaagaagaaaaggaaccgaggccc

SEQ ID NO: 73198 - RNA, 73 nt, Homo sapiens
aacagacgcccaacgagggcaagaccagagagccgcggggaaaggaggaacagaacccccacagcagcacgca

SEQ ID NO: 73199 - RNA, 72 nt, Homo sapiens
aggacaaacggaggagcaagcacagacgaacccaggacgagaaaaaacagagcggaacaagcggcccaagag

SEQ ID NO: 73200 - RNA, 81 nt, Homo sapiens
ccccgacgaggaccagggacagacacggggcaacgacgcagacggcagggggaaaagaccagccaagaggccggggcggcc

SEQ ID NO: 73201 - RNA, 60 nt, Homo sapiens
ccggaaccagacgagagacagaggcgaccgcgcggcagacggagcggaaccgccagacca

SEQ ID NO: 73202 - RNA, 61 nt, Homo sapiens
caaaggaccgcccccagagagaaccagcaccagacagcgaaaaagaggacccaaaaaagag

SEQ ID NO: 73203 - RNA, 82 nt, Homo sapiens
gaaaaaaggaacagcggcgccccgcgaagccacaggaccgaagcccgcgagaggagaggagacgccggagcgggacgaccag

SEQ ID NO: 73204 - RNA, 82 nt, Homo sapiens
cgcccgggcccccgaagaggcggcgccagacaggcgacaaaaccagacccccgacgccgggcagggcgaaggggccggcacc

SEQ ID NO: 73205 - RNA, 74 nt, Homo sapiens
cgcgcgaggcaagcgcgcgccgacggaaaggagagcggacccaccgaccaagcacagcaaaaaaacaagaagac

SEQ ID NO: 73206 - RNA, 69 nt, Homo sapiens
gggagagccggagagaaaccacggccaacaggaagaaagccacgcgggagaacagacagcacgcggcca

SEQ ID NO: 73207 - RNA, 79 nt, Homo sapiens
agaacagagaaggccaaggagaggagacgccggagcgggacgaccagagaccgagagcggcgcgcaccgcggcacgcgg

SEQ ID NO: 73208 - RNA, 105 nt, Homo sapiens
gaaggagcagcagagagccgggccagagccaggggccgggagggcgccaggaacgcggccgcagcgccgcccccaccgaccccggcccgcgccgggggcccccgg

SEQ ID NO: 73209 - RNA, 68 nt, Homo sapiens
cacacgacagcaacaagacacggagcaaggaggaaaacacacggggcccggacgccaccaacaacagc

SEQ ID NO: 73210 - RNA, 57 nt, Homo sapiens
ccccaacaccagagcgcacaccggggcaaaagggacaagggacgagaacacaccaac

SEQ ID NO: 73211 - RNA, 83 nt, Homo sapiens
gaaggaaacagcaagcgaagccgaaaaagcgcccgagacgggcccgccgaaagagcggacgaaagaagaaagacaagcgcaaa

SEQ ID NO: 73212 - RNA, 74 nt, Homo sapiens
ccccccaggacaacagcacacgcacccaagcgacgaaaagagagagacagagaagacaagaaagcagaagaaaa

SEQ ID NO: 73213 - RNA, 78 nt, Homo sapiens
ggcgaagaagcagcacaaggcgagccaggacccaaagacaggaccacgcaccagcagagaaggaaagcaaaccgaagc

SEQ ID NO: 73214 - RNA, 77 nt, Homo sapiens
ggccccgggacagacagggaagacagagcgacagacagaacgccggaggcgagggaggacgggcaggccccgcagag

SEQ ID NO: 73215 - RNA, 77 nt, Homo sapiens
agcaccgcgccccgcacccgggagccgggaccggccagagaacggccggcgcggaagaggccggcggcgggacggcc

SEQ ID NO: 73216 - RNA, 83 nt, Homo sapiens
gcgggcagaggcgggccgccgagcggacccggaccggggcccaaagacaacaggcccccccgccccccgcggagccccgccca

SEQ ID NO: 73217 - RNA, 80 nt, Homo sapiens
caccacgggcggccccagaaggcccccagcacaagggggcaccaggcggagaaggacgccacacgcagggacccgcaggg

SEQ ID NO: 73218 - RNA, 75 nt, Homo sapiens
cgggaaaacgggagaagagaacggccacagcagccagcgcacagacaccgcacccgaagagccggcacggagaaa

SEQ ID NO: 73219 - RNA, 67 nt, Homo sapiens
gcagaggcgacgcgagaggcggcagccagcggcggcgaccaggggaccaaaagaacccagccaaccc

SEQ ID NO: 73220 - RNA, 75 nt, Homo sapiens
ccccaggacagcaccagcgggccggaggagccagagcgcagaaaggggaggcacagcgagagcagggacgacccc

SEQ ID NO: 73221 - RNA, 64 nt, Homo sapiens
caagcacccaacagaagaagaggggccacccacaaacacaccgcccccagcggagagaagagga

SEQ ID NO: 73222 - RNA, 77 nt, Homo sapiens
aaacagccccgggccagcaggacagcaaaggccagacgcaccaacaaccccgccaccaccccaccacccaccggcca

SEQ ID NO: 73223 - RNA, 75 nt, Homo sapiens
agaaagagccaaaagaaagcaaagcgcagaaagggagaaaccagcggcgggaagccgcaaaaagggaacaagacc

SEQ ID NO: 73224 - RNA, 80 nt, Homo sapiens
ccggccgccgcgccgcccggcagcccggcaggggaccccagcggaacacacccaccacaaggcagagcacagacagccag

SEQ ID NO: 73225 - RNA, 85 nt, Homo sapiens
cgcgccggagagccgcgcgcggacagcgcgacggcgcgcgggcggcgcggccggccaaaggaaaccgaaaaaccagaggaggcca

SEQ ID NO: 73226 - RNA, 74 nt, Homo sapiens
gcccccaggcggaacgcccgccccgcagagagggccccccacaccgaggagcccagaaggaagagaaccgccaa

SEQ ID NO: 73227 - RNA, 79 nt, Homo sapiens
ggcggggccccccaggacacgaagggaggaggaggaaggagcagagagaaaggagaggcaacccagaggaagagcaaag

SEQ ID NO: 73228 - RNA, 78 nt, Homo sapiens
acaagagacaacaccgcgcggaccacaaaccgcgccagaaaaggggcggagacacgcacacaaagaagccggagcaga

SEQ ID NO: 73229 - RNA, 76 nt, Homo sapiens
gaaaacgcgcgaaaagaaacacaggcaacacccgaccgagggagaccgacagggccgccgccaccgacaccaccgc

SEQ ID NO: 73230 - RNA, 43 nt, Homo sapiens
ggcgcggacccgcgcccggcagagacagcagggaccccggcca

SEQ ID NO: 73231 - RNA, 84 nt, Homo sapiens
ggcaaccgccagcccacgacccggcccggaggacaagccaggcccacaccgccaccagccacggaacacccacaacaagcaagc

SEQ ID NO: 73232 - RNA, 84 nt, Homo sapiens
caccacgcggcgggccaccggccggcacgaaggcgccccacgcggaaggggggagaagcacaagcgccgggaggcagagccgga

SEQ ID NO: 73233 - RNA, 79 nt, Homo sapiens
ggcagcggaggacgggaccgggaaccacgggggccgcggccggaccgagcgcccgacccggcgagacgcagaaaacaga

SEQ ID NO: 73234 - RNA, 74 nt, Homo sapiens
ggcggaaccgggcggcgcggcgggccggccaagcaccagaaggccaacacaaccaaggggaaacagcaaaacac

SEQ ID NO: 73235 - RNA, 82 nt, Homo sapiens
gcaccccaggcaacccaaacgaggacaccccgaggaagcagaccagcccacacagagccaggcaggccggacaggggaagca

SEQ ID NO: 73236 - RNA, 84 nt, Homo sapiens
caaaaggccagaaaggggaaaaggggagggaaacacaaaggcgaaccgaccaagaacaacacccagagggccaggagaaggcga

SEQ ID NO: 73237 - RNA, 59 nt, Homo sapiens
cgggggacaggaaaacgacgcaaagacgaacaaaccgaagcagacgaacgaagacaaag

SEQ ID NO: 73238 - RNA, 67 nt, Homo sapiens
aaaaagaagaacaaagcacaaagaggcgaaccaaaacgccacggaggaggcaagcaaagggcgagag

SEQ ID NO: 73239 - RNA, 55 nt, Homo sapiens
cgacccaaaggacaaaggcagagaggagggcaaaaagacaaacaccaccggagca

SEQ ID NO: 73240 - RNA, 82 nt, Homo sapiens
ccgcggcagccgcggaccaccgccgccaggcaacacagagacacacggggcacaccaagcgaccccgagaacccagaaccag

SEQ ID NO: 73241 - RNA, 58 nt, Homo sapiens
cgggacgaggaccgagaccgcggccgggaccgaggaaaccccaccacgcggcaggggc

SEQ ID NO: 73242 - RNA, 78 nt, Homo sapiens
cgcgccgggcacagccggaaagcaggaccgcgacggcagcagagcaaaccaacacaacccgacaacggaagaccaacc

SEQ ID NO: 73243 - RNA, 74 nt, Homo sapiens
gaagaaaggagagaggagaagaaaggagaagaagaccgagaggaacaaagacaggcagacagaagacgcggaag

SEQ ID NO: 73244 - RNA, 91 nt, Homo sapiens
cggcggagcggggaggccaaagccggcgcggaagaggccggcggcgggacggccccacgggacccgccccgaccacagcagcgacaccgag

SEQ ID NO: 73245 - RNA, 75 nt, Homo sapiens
gcacacacggaggagaaagggagaccgaaggaccaccggcagcgggaaaaaacgaccaagacaaacaaaagcagg

SEQ ID NO: 73246 - RNA, 95 nt, Homo sapiens
acaaaacacacaacagaagggaaggggaaggagaccacaaagaggcgcagcagccccagccaggcaggaaacacccccaggagaggcagccagag

SEQ ID NO: 73247 - RNA, 76 nt, Homo sapiens
ggaaccggagagacacggcaccagaccccacagcaacagacaacccagcaacagacggaacagcgcgaggcaagaa

SEQ ID NO: 73248 - RNA, 44 nt, Homo sapiens
gacaagaaaccgcacaagaccgggaggggacaggagagacaacg

SEQ ID NO: 73249 - RNA, 70 nt, Homo sapiens
ggcaaaggagaacccgcaagccagaaagaaacagaaagaagggagaaggggcaaaacaaaaaacaggacg

SEQ ID NO: 73250 - RNA, 85 nt, Homo sapiens
gagggagagcaagaccacagcgcgcggcccccacaccacacagagagcgagccccagagggaccgaagcaggaaacaacccacag

SEQ ID NO: 73251 - RNA, 86 nt, Homo sapiens
cgcccgccacacccgccgccaggaaacagcccgaacgcacagaagaaaccagcgcccagcgccgggagacaaagagaaaacaggaa

SEQ ID NO: 73252 - RNA, 74 nt, Homo sapiens
ggcggcccgaaggaggaaagccggacaaggaaaagccaagaaagacccaaaagaccccagaccagaaagaggcg

SEQ ID NO: 73253 - RNA, 75 nt, Homo sapiens
gccgccgagcagccgccagccccacggacggacgccagccccacaacaaaagcaccgggaggaaagagagccaca

SEQ ID NO: 73254 - RNA, 77 nt, Homo sapiens
ggccgcggaggggcacgagcgccacaaccccaggaccgaaggagaagaaggagaaggggaggagaaggcaagccgga

SEQ ID NO: 73255 - RNA, 78 nt, Homo sapiens
gcgcggccggcgccggaaagccacaaagaaagcaagagaggaaaaggccgaagaaaccaaggaggacaggaaaaaaac

SEQ ID NO: 73256 - RNA, 63 nt, Homo sapiens
aaaggagggacgaagacaccgacgggcgaacaagaggcgccagcgggcgcgccggaagaacag

SEQ ID NO: 73257 - RNA, 75 nt, Homo sapiens
aggagaaccaacggcccgaaagagggcgagcaacggcccaaccaacccccggaccgcaagaaaaagaaaccacgg

SEQ ID NO: 73258 - RNA, 76 nt, Homo sapiens
caggaaaaacaaagaagacccagcccaacagcaggggggaacaccccgagcccaaggcagggaaggagccggccgc

SEQ ID NO: 73259 - RNA, 81 nt, Homo sapiens
cagacagccaggcgcccagaggggccccggagccagggggggccccagcccggccgaacgggcgcacgacacaaacacaac

SEQ ID NO: 73260 - RNA, 50 nt, Homo sapiens
aaaagccaaaggggaccagggcaaggcagagcgaccgaagagagaggcgg

SEQ ID NO: 73261 - RNA, 68 nt, Homo sapiens
caaccagaaaacaaagacaaaaggagacgagaagaagacaagagacaccaaagaggggaaccccggaa

SEQ ID NO: 73262 - RNA, 79 nt, Homo sapiens
agggagaacagaggcgagagcggcagcagcaccagcccaagagaaggaagggagggcggagggaaaaagacagaggcca

SEQ ID NO: 73263 - RNA, 81 nt, Homo sapiens
gggcacacgggagagaccggggcagccccccgcagacggcacccgcgagcccacgggcggagccccgggaccaacacagcg

SEQ ID NO: 73264 - RNA, 56 nt, Homo sapiens
ggacgagagcaaccagccagaagagaagccagaggacaacagagcaaccagccggg

SEQ ID NO: 73265 - RNA, 73 nt, Homo sapiens
aggaacaaacagaaaaggagagagagggaccgaaagacaacaacgcagagaagaacgccggccaacggaagcg

SEQ ID NO: 73266 - RNA, 78 nt, Homo sapiens
cacggcggacaagcagggcaaccaacgccggggcggggagcacggaacgacagggcgcagcacgagcaaaggaagaag

SEQ ID NO: 73267 - RNA, 50 nt, Homo sapiens
cacgggccaacacggcgcgaaagccagggaaggcgaggggcccgcgagca

SEQ ID NO: 73268 - RNA, 90 nt, Homo sapiens
ccacggccccggcgcgacaccgaaggcgacccacgggggccgcacgacacacgcagccgccgcccgccagcggacccgcggcaccgcccc

SEQ ID NO: 73269 - RNA, 73 nt, Homo sapiens
gccccacaagaagcggaagaagcgccccgaggaaggccaaggaccgaccgcgacaccccgaaccgcaccgagg

SEQ ID NO: 73270 - RNA, 79 nt, Homo sapiens
aggaacggagcaagaagcgacacaaggagaaaagggcggacagaaggagaagaacaggagcagacacacaggaggggaa

SEQ ID NO: 73271 - RNA, 60 nt, Homo sapiens
gaaggaccaagaaccagcaaagaaacacgagaccaggaccaacaacgagaggaagaaccc

SEQ ID NO: 73272 - RNA, 73 nt, Homo sapiens
agaggagcagaaggagcaaaaggcggacaggcaggcgggcaacacaacaaggcgcggacacccagacaagcgc

SEQ ID NO: 73273 - RNA, 72 nt, Homo sapiens
caagcccgaagccaaggggccaagaggagaagaaggcaaaagcaacaaccagcaaggagaggcaaccagacc

SEQ ID NO: 73274 - RNA, 69 nt, Homo sapiens
aagcggggagcgcccgcgacagaggagggaggaaaacaaccgagggcagaacggagccgggacgagagc

SEQ ID NO: 73275 - RNA, 77 nt, Homo sapiens
cccccccaccgagcggcccgccccaacccgcgcgccagaaagagccgcagacgcacagcaaccaccggacccgaagg

SEQ ID NO: 73276 - RNA, 84 nt, Homo sapiens
gcggccgcggacgaagaggcgaccgccagacggagcacacggacaggcgcgcggagccaggacagcggagcagcgcggaccccg

SEQ ID NO: 73277 - RNA, 65 nt, Homo sapiens
ccccagccaaggagacacacacaggggcgcaagacaggcagaaacggcacaaccacccagaaaca

SEQ ID NO: 73278 - RNA, 80 nt, Homo sapiens
cagccaaccgggccccccagcagacgcgagagacaagagagacaccccaaccgacaaagagcaccagacagccgggaacg

SEQ ID NO: 73279 - RNA, 59 nt, Homo sapiens
cgggaccccgcgcgcgaccgccgaacgcccgcagcagagacccagcaggggaacgagcc

SEQ ID NO: 73280 - RNA, 80 nt, Homo sapiens
gccccggccggccgaaggccacggcaggcccccggacccccagacaacaaaccaggacaacacacacaagaaaccaggcc

SEQ ID NO: 73281 - RNA, 66 nt, Homo sapiens
gcgcaagcgcaaaaacacaagagaaaagacggggacggacgagaagagaagagggacgaaacagga

SEQ ID NO: 73282 - RNA, 73 nt, Homo sapiens
aaaaacaccccacagaacagaacaagacgggaaccgaccaccaagggcaggaagagccacggcagacaacacg

SEQ ID NO: 73283 - RNA, 78 nt, Homo sapiens
ggccgcggcacggcccggggccgggagcgcccgaggaacacgccgcaggagcacagaccagcgcgcgaccggagcccc

SEQ ID NO: 73284 - RNA, 80 nt, Homo sapiens
gagaccaggagaccccacggagcgggcgacgagcgacccgggagacacgacggaagccacagaggacacaaccggcaaaa

SEQ ID NO: 73285 - RNA, 71 nt, Homo sapiens
acagagcgcacggagagcaaggaaggagggcagcccaagggcggagcagggagagcaggaccacacacgga

SEQ ID NO: 73286 - RNA, 77 nt, Homo sapiens
cggacagcggggcccgcggaaaacagagacagcgcggaacaagggaaccacaaaagcaccgggacaaccgaaaggca

SEQ ID NO: 73287 - RNA, 77 nt, Homo sapiens
cagcaccgggcagcgagacgaaaaacaaagaccagggacacagagagccacggcccaccaacgggacagcccgggac

SEQ ID NO: 73288 - RNA, 82 nt, Homo sapiens
cccgcggcgcccggcgcgcacgcgcgcgcgccccggccgcaaccaccaacccgcggagagcgacagagcgggagccaccagc

SEQ ID NO: 73289 - RNA, 74 nt, Homo sapiens
gagcccagcgcacccaggagggaacagcccaggagccagaggcccccgcgggcgcacacaggaaggcggaggga

SEQ ID NO: 73290 - RNA, 71 nt, Homo sapiens
aacccgcaccccggaccacgacacgcggcccggcgggccagcagccacaggggaaaaccacaagaaagcgg

SEQ ID NO: 73291 - RNA, 72 nt, Homo sapiens
aaaacaccggcagccgacagcggacggcgcggcccagaacagcgaaaccaaccaccgcccacgaagcccgac

SEQ ID NO: 73292 - RNA, 85 nt, Homo sapiens
agcaagaagcaggaaaggccggacaccaggcgccaggccggggcaccagaagaaccggccagccagaaacgacaagcgagccgcc

SEQ ID NO: 73293 - RNA, 86 nt, Homo sapiens
gcacagcgagccgggcggaggagcgggcggaggggacggcaacgagggacgcccagaacggacgcggcagcccagggaggcacgcc

SEQ ID NO: 73294 - RNA, 76 nt, Homo sapiens
agagccaagcaagagcccacggagaaccacggggaccaagaagcgagcagcccaaacggacccgggaacaagagcc

SEQ ID NO: 73295 - RNA, 78 nt, Homo sapiens
gaacgggagccgcgcacacaccgggagaggcagagcaggggcgcacgcgcaccgcagcggcacacgcccgccgcaagg

SEQ ID NO: 73296 - RNA, 80 nt, Homo sapiens
ccggagacccgggccggcccccaccagagaccgggaaaagccgggccacagaagcaccaccacaagccacaccaacaaac

SEQ ID NO: 73297 - RNA, 84 nt, Homo sapiens
gagaagcggaggagccgcccgaagacagcccccccgggaagaagcaggacggacagaaaagggagaggacaaaacgcaccaccc

SEQ ID NO: 73298 - RNA, 31 nt, Homo sapiens
cccaagccccgaggaaggggcagccaccaca

SEQ ID NO: 73299 - RNA, 72 nt, Homo sapiens
accggccagcaacacgggcccgggcggccccgcacagggccggggccggccagacaaaccccccgggcaacc

SEQ ID NO: 73300 - RNA, 39 nt, Homo sapiens
caggccccggagcgggaacagccacccgcacccaggcgg

SEQ ID NO: 73301 - RNA, 58 nt, Homo sapiens
agacacgaggaacaacaagcccaacaggcgaccccgcccggacgccacaagagaaagg

SEQ ID NO: 73302 - RNA, 39 nt, Homo sapiens
aagaagcgggcaggagagggggaccagagacacccgacc

SEQ ID NO: 73303 - RNA, 71 nt, Homo sapiens
gcgacgccggggggggcggcccgcagcgaaggaccgggcgccgcccaagagagagaagagaggcgcgaggg

SEQ ID NO: 73304 - RNA, 83 nt, Homo sapiens
ccgcccggcgccacgccgcccccgggcggccccgcgcgggcagcgcagccaggccgcgggacaaggaagcaaccccagaagca

SEQ ID NO: 73305 - RNA, 74 nt, Homo sapiens
cggccaggccccagacacagacgagcaggggaagaccgcggaggcaggagaggaagaccaggcaggaaacagag

SEQ ID NO: 73306 - RNA, 42 nt, Homo sapiens
cgacagcaccaagaacccacgcagcggagagacgcccaggag

SEQ ID NO: 73307 - RNA, 76 nt, Homo sapiens
cccaggcgacgagagcaagccaaagaccaaggggggggcacccccacaacgaccccaacaggaaccccccggcggc

SEQ ID NO: 73308 - RNA, 70 nt, Homo sapiens
agaccacacccgagccgagcccgacaaccgagagaagaacagccccccggggacagaggaaagagacgaa

SEQ ID NO: 73309 - RNA, 44 nt, Homo sapiens
gcacggcgggcgaaacaggccgacaggagggaagaaaccagaca

SEQ ID NO: 73310 - RNA, 55 nt, Homo sapiens
ggcgcccccacgagagggcaaacgcgcgcaggggcagagaaagaaagaagacgcg

SEQ ID NO: 73311 - RNA, 71 nt, Homo sapiens
gcgcaccacaaccagcggacacggccgccgggccgcgcccacgggcagcgaggagagacaaagcgaaagaa

SEQ ID NO: 73312 - RNA, 59 nt, Homo sapiens
cgagggcgagcagaggacgacaggccgggaggaggaaagcggacagaagaagccaaaac

SEQ ID NO: 73313 - RNA, 89 nt, Homo sapiens
cgagaaaagaccgcaaccgccagcaccgggaagagaaagaaaagccgaaggcaccagacaggcaggcagcggaagagaaagaccgaggc

SEQ ID NO: 73314 - RNA, 77 nt, Homo sapiens
acaggagaaggacgacggccgcagagaggaaagcgagccagggcgccccagacaaaaagccggcaccacgggaggaa

SEQ ID NO: 73315 - RNA, 64 nt, Homo sapiens
caagacagaggccagagagggccgagccacacgaaacacagacaagccaacaccacgcaagcca

SEQ ID NO: 73316 - RNA, 79 nt, Homo sapiens
ccgggggcgcggcgagggcgagggcgagccggacgcacgggagaaagcagcaagaccaggaagggagcccggaagagca

SEQ ID NO: 73317 - RNA, 116 nt, Homo sapiens
ggaaccagaaacaagcaacacaaagggaaacgggacaacccacgaccgacagagaaaaggcacagacggaggaggaacgcacagagagaagagaacgaggcccagaggaagcgcag

SEQ ID NO: 73318 - RNA, 85 nt, Homo sapiens
cgcggacgaccggagcagagagcggcgagcaagcacgagccagggagccgccgggaccggcccgggagacgacaacccaaaccga

SEQ ID NO: 73319 - RNA, 83 nt, Homo sapiens
aacaaaggcacaaaccgcaccacaagaagggcgggggcaggggacagagcgaagaaccccccaagaagacgaaacccccgggc

SEQ ID NO: 73320 - RNA, 80 nt, Homo sapiens
ggaggagagaaagggcaacccacgagagaacagaggcccggccaacgcaacagggagcccacgcaagaggggccggggac

SEQ ID NO: 73321 - RNA, 47 nt, Homo sapiens
cgccccccaaagccagggcagcgacacccagacccaccggaccaggc

SEQ ID NO: 73322 - RNA, 81 nt, Homo sapiens
ggggcggccagagcgccggcaagagccgggccgagaacgaggcagccagcggacaagcggaggccgaggcaagcaagacca

SEQ ID NO: 73323 - RNA, 74 nt, Homo sapiens
ggaacccggagaaggccgcaccaccaaaccaagcaaggaaagaacaagaaaggagagacgcagcgaaagaaaac

SEQ ID NO: 73324 - RNA, 72 nt, Homo sapiens
gcggccggcagggggcacccgcggccggcccggggccccgggaccggcgcccccccggcacggagcggagag

SEQ ID NO: 73325 - RNA, 57 nt, Homo sapiens
gacacgagagacaaggcacgacagaaggcacaggagggcagaccaaaagcacaaaaa

SEQ ID NO: 73326 - RNA, 36 nt, Homo sapiens
cagaagcggcagcaaagaaggagccgggccccggag

SEQ ID NO: 73327 - RNA, 80 nt, Homo sapiens
ggcggaaaggcgcggccccgcgccagagggccggggcccccgggccgaggacccgcagggagcgggaagaaagggcaggc

SEQ ID NO: 73328 - RNA, 55 nt, Homo sapiens
ccaggaagaaacgaaacaacagcagaccaggaaggaaggacaggacaacaacacc

SEQ ID NO: 73329 - RNA, 78 nt, Homo sapiens
cgcgccgagaaccgaccgagggcaagagagccggcaggcccaccgcgagaacgggggcccaggcacagaagagccggc

SEQ ID NO: 73330 - RNA, 82 nt, Homo sapiens
gcagcgcagccgcagccgccccgaagagggggacacgacccggagcacccgaccccgagcggagaccgacgcggaaaaaaag

SEQ ID NO: 73331 - RNA, 71 nt, Homo sapiens
ggagaaccgacgaaccgggcggaagagcgcgggaggggaggccaccaagaagaggagccagaaggaaaaga

SEQ ID NO: 73332 - RNA, 69 nt, Homo sapiens
gaaggaggagggggaaagcacggccagcggaggaggccagccacaggcggggggacacaggacaacgag

SEQ ID NO: 73333 - RNA, 62 nt, Homo sapiens
gggaccaccccagaacccgcgcgacccgagacggggaaggggcaccgagccgagagggcaag

SEQ ID NO: 73334 - RNA, 80 nt, Homo sapiens
ccagcccagcagcaagcagcaggccccagccgcagaaggaagccgggaaggcagcacaaaaggagaagaaaacacaagga

SEQ ID NO: 73335 - RNA, 77 nt, Homo sapiens
agaccacggacggaagacaaaagaggaaaagcggacagaagagagagacaccacaaggccagaagccacgacaaaag

SEQ ID NO: 73336 - RNA, 81 nt, Homo sapiens
cgaacagagaccaccagaaaacccagacacgaaaggcgaagagacagagagagccagaagcgggaagaacaaagaaagagg

SEQ ID NO: 73337 - RNA, 72 nt, Homo sapiens
cggggcccgaggccccagccgagaggacgcggcggaaacgaagggcagggcgaggaaaggagacggcaccaa

SEQ ID NO: 73338 - RNA, 73 nt, Homo sapiens
aggaggaacccaggggccaccaaaaaggaccccagcccggcacaaacaggaaggacagccagcccagccccag

SEQ ID NO: 73339 - RNA, 86 nt, Homo sapiens
cgagcccccgcggacccacccccgaacccccaagcaaaagagccaacacccaggccaggccgcccggaaggaggccgccacgcccc

SEQ ID NO: 73340 - RNA, 80 nt, Homo sapiens
gcgggacgccgaggcagacgaaggaacacgagacaagcagaccggaagaccgacggaagaccacaccccgagggagccca

SEQ ID NO: 73341 - RNA, 51 nt, Homo sapiens
gaaccgggagaggaaccggcccagagcacagaagacgccaggaagccggac

SEQ ID NO: 73342 - RNA, 62 nt, Homo sapiens
cgccgcgaggccgggaagggaagaaaaccagacgagagacagaagacgaaagggcaagaaag

SEQ ID NO: 73343 - RNA, 80 nt, Homo sapiens
gagcaccaggaccgggccggaacgagacgcacgggcggagaacggaaaagcaccaggaagcagagaggaccgcagaaggg

SEQ ID NO: 73344 - RNA, 74 nt, Homo sapiens
agacacgagcacaaacgggcagcggggaagaagaaaaggaaccgaggccccccggcgacacggcgaagaccacc

SEQ ID NO: 73345 - RNA, 71 nt, Homo sapiens
aagcgagccccgaaaccaggaacgaaacaaaaggagacccaaccaggcgacagcagcagacgcggcacgcg

SEQ ID NO: 73346 - RNA, 86 nt, Homo sapiens
ccgcccgcagccggacgacacgaccgccgcccgcggggggccacagggacgaagcgcggagcaaccggagaaggcgaccccggaac

SEQ ID NO: 73347 - RNA, 44 nt, Homo sapiens
aaacaggagaagaccagccaagagccaagcggacccgcgccgcc

SEQ ID NO: 73348 - RNA, 63 nt, Homo sapiens
gccgagacaggggccaagggcggcccagcagggggagacaggaggccaccccaccgagggcag

SEQ ID NO: 73349 - RNA, 86 nt, Homo sapiens
agaacccgcccgcgccccgccgcggggcgcgcggcgccggcggcgcgcgacccccgcgcagccagcacaggccagccagaagagac

SEQ ID NO: 73350 - RNA, 73 nt, Homo sapiens
cgagagccagagagagcggacgacagaacccggccgacccggaccaacaaccccaaggccggcagagcaagac

SEQ ID NO: 73351 - RNA, 68 nt, Homo sapiens
gggacggaaccacaacaagaaggacagcaaaggagcagggacaggagagacaacggaggcaagaaaga

SEQ ID NO: 73352 - RNA, 58 nt, Homo sapiens
caccaggcgagcagcgcccccgggcgacaagaacagagaagaaggcgggaagaaaagc

SEQ ID NO: 73353 - RNA, 78 nt, Homo sapiens
cggcaacacagagaaagggagaaaaggagaaaagcccgaaaaacgaggaaacagagaacaaaccaccagcgagaaccc

SEQ ID NO: 73354 - RNA, 83 nt, Homo sapiens
gcgaggaggcgcgggagggcgagaacgaccccgagacggcaagaggaagaaacagcgcccccaccccaccccagccccaggag

SEQ ID NO: 73355 - RNA, 72 nt, Homo sapiens
aaaacggcgaagcccaccagacggagcgaaccaccgaaggccacgaaaacgcacgcgagacggacaggcggc

SEQ ID NO: 73356 - RNA, 71 nt, Homo sapiens
caaagcgcgacacgaagacaagaggcccgaagagaggaagggcaaggggaaggaccgagacccaaagggcc

SEQ ID NO: 73357 - RNA, 79 nt, Homo sapiens
ggggcacccgcggccggcccggggccccgggaccggcgcccccccgaacccagcggggccgccccacccgaggcccacc

SEQ ID NO: 73358 - RNA, 78 nt, Homo sapiens
agaaccgcaggagccagaggggcaaaggagcagagaacgacaagccacacgaggacagcccgcaacaccaccgacagc

SEQ ID NO: 73359 - RNA, 60 nt, Homo sapiens
cgcgccggaaaccggagcgcgcagcagagccaggacaaaaccaggcagaaccaacacgaa

SEQ ID NO: 73360 - RNA, 82 nt, Homo sapiens
cagccccccagagcgggaacaggaggagcagagcgagacaggagaccgggcgcgcccgaacaccccagaggacgaaaggccg

SEQ ID NO: 73361 - RNA, 78 nt, Homo sapiens
ccagcgccgggccgaccgccgcacagggcacacaggcccgagcacaaacacaagaaacgcacgcccgccagcgagaag

SEQ ID NO: 73362 - RNA, 80 nt, Homo sapiens
cccccgaacccccagcccaaacccggaaacccagcggcccagccgggacaaacaacagaccaaggggcggaaaacccgaa

SEQ ID NO: 73363 - RNA, 78 nt, Homo sapiens
caagacagagcgcacccggcaggcgcaacagagcgccggcgggaagacagccgccaccaggcgcccccccagcaacca

SEQ ID NO: 73364 - RNA, 79 nt, Homo sapiens
gcgcacacagcaagcacgagcagagagaccaagcagcggcggagcgcaagaaaagagagaccaaggaaaagggaacaag

SEQ ID NO: 73365 - RNA, 78 nt, Homo sapiens
ccgccgcagcggcgcagcccacgccagacgaccccacccgcgccgcgacccgggccccccgggccggccgccggacga

SEQ ID NO: 73366 - RNA, 70 nt, Homo sapiens
caaccaaggacccccaaaaccacaaacgccacgcagaacagccaccaagggaaccgacgcaaccgaggcc

SEQ ID NO: 73367 - RNA, 67 nt, Homo sapiens
caagcagcagaagagccaaggaaaaacagcaagaacccaaaagggggcaaaggaaaggggcaggcac

SEQ ID NO: 73368 - RNA, 82 nt, Homo sapiens
gaggagccaggaggagagcccacagggcaaagagagcagacccgaggagcccgcaggagacgacaaggcgggcagggggagc

SEQ ID NO: 73369 - RNA, 80 nt, Homo sapiens
cggcggggcgcgccaaggacacggcacaccgaccgacggacaccagaggaccagaacccacgagaaacagacgagccaac

SEQ ID NO: 73370 - RNA, 73 nt, Homo sapiens
ggagggagaacaagcaacggcggagggaacaggcacgccccacccgccagccgagcccccgacgcagcacaaa

SEQ ID NO: 73371 - RNA, 58 nt, Homo sapiens
gcagggcgcccccgccaaagacagcagcacccaagcgcaagagaaagcgggccggaag

SEQ ID NO: 73372 - RNA, 66 nt, Homo sapiens
gaaaccaggaacgaaacaaaaggagacccaaccaggggagaagcagaccgcaccaggcgggacccc

SEQ ID NO: 73373 - RNA, 71 nt, Homo sapiens
agacgcccgaaaaagaggccgaaacagccaaagcaggccagaagaagcgcacagagcagaggacgagaccg

SEQ ID NO: 73374 - RNA, 88 nt, Homo sapiens
ggcagcccagccccagccgcccagaccggcgagaccagccgcgggagcagccccaggcgggaccacaggccaggcaacaacagagcag

SEQ ID NO: 73375 - RNA, 91 nt, Homo sapiens
aacacacaacggaacgccacacagaggaaagcacaaaggaagacgaaccggagaagagaacgacccacgaagcaaagaagagcaaaaagca

SEQ ID NO: 73376 - RNA, 84 nt, Homo sapiens
ggaggcgcggcggcgccgcgcgcgcagggccgccggcccgcagccgccaccacccaggaccagaaggcggaggcaaggcaccac

SEQ ID NO: 73377 - RNA, 69 nt, Homo sapiens
gggagcgccggagccggggccgcgaaaaaggaccacaaaaagaccacaggggggcaccggcacggcgcc

SEQ ID NO: 73378 - RNA, 82 nt, Homo sapiens
gagcgcgcagagaacagaaggcaaaagagggaggagagcgaccgaagcagaaaggaggaccccccaaggacagcagcacacc

SEQ ID NO: 73379 - RNA, 62 nt, Homo sapiens
gcccgcgccgacgccgcagggcacaaggaaaacagacacccccagacaaagccaccacccgc

SEQ ID NO: 73380 - RNA, 67 nt, Homo sapiens
agaaccagagcaaaaggacccaagaacacgggagacacacacaaacgaccggggcagcggggaagac

SEQ ID NO: 73381 - RNA, 66 nt, Homo sapiens
ggccccacgacacaaggaggcagcggccacaaaagccacagcggaaccggaaagaagcacaccacg

SEQ ID NO: 73382 - RNA, 78 nt, Homo sapiens
aagcaagacccaggacaccccgaagccgagaaaggaggcagcacggcaggagacgaggagaggacagcaggacacccg

SEQ ID NO: 73383 - RNA, 106 nt, Homo sapiens
cacaggggggcggcaggggcggcaggaaccggggcagcgacaggcagccagacaggacggaccgccggagcccagcccagagcaccccaggccaccaccagcccga

SEQ ID NO: 73384 - RNA, 49 nt, Homo sapiens
cgacgggcagcacacccaccgagccgagagggaaccaaaagagcagaag

SEQ ID NO: 73385 - RNA, 80 nt, Homo sapiens
ggggcggaaggggccagcggagacagcaaggagaaaagaaagccagaaggaaggaagcaacgaaccaagaaaaaacggaa

SEQ ID NO: 73386 - RNA, 86 nt, Homo sapiens
agacgcacggaaagcagcgcaggagccaagaccacagcagcacccaggagacgcaggcagaaggaaagggcgcagaccgggcagca

SEQ ID NO: 73387 - RNA, 78 nt, Homo sapiens
gacaacccagaacaaagagaaaaggagggccaagaagccacgccacgaccccagagaccaggcaccaggaaccaagaa

SEQ ID NO: 73388 - RNA, 116 nt, Homo sapiens
cgcagccggaaagccagaaaaaggcgccccgccaggcccccgaggagacggcgacagcagagaaaagcaacccagacacacggccggaaacaaaagaggaaggggagcaggacacc

SEQ ID NO: 73389 - RNA, 78 nt, Homo sapiens
ggacaagcgaggaagcaaggggaggacagagccaccaaagcagacagcacggaagaaggaggcagaggggaggaagcc

SEQ ID NO: 73390 - RNA, 77 nt, Homo sapiens
ggcgcagggcagggcccgaagcaggccagcgcacaggccaagaacccaaagcaaggcgagacaaggggccaaccagc

SEQ ID NO: 73391 - RNA, 83 nt, Homo sapiens
ccaggccccaacaggacacacccgacacccaaccccgaaccccacacaccgccagcacacaggaggagagcggaccgagggcc

SEQ ID NO: 73392 - RNA, 107 nt, Homo sapiens
ggaaacgaggacacgaacagaagcagcaagacgggggaccagggcaaaaagccagagggccacagaagaagagacgcagaacgggagggccacagcaagagagcagg

SEQ ID NO: 73393 - RNA, 75 nt, Homo sapiens
acggaggaccggggaacggcaaagcaggagcgggagaaaggaaagggcggcaggaagacaggaaaagagaaacag

SEQ ID NO: 73394 - RNA, 54 nt, Homo sapiens
caacgccaggcgccgcccacagaggcagcgagaagaaaaagaagagagagacac

SEQ ID NO: 73395 - RNA, 80 nt, Homo sapiens
caaagacggccccagaaaaccaaagggaggcgggaagcagcagcagggagaaggagggagcaccacacaaaagcgcaaca

SEQ ID NO: 73396 - RNA, 56 nt, Homo sapiens
cacccgaccgacaaaagaacccaggagaaacgagagggacagcaaggaagacgcca

SEQ ID NO: 73397 - RNA, 77 nt, Homo sapiens
gaagagaaaggcggagaaacggacagcacagaccaccggcaccacaaacaaagagagaagcggggaagaaagcaaaa

SEQ ID NO: 73398 - RNA, 82 nt, Homo sapiens
gccaacacacaccgcagacaccccgaagcgacgccacagccgacggacccaccaaacaccaacccacgaaagcccaacccca

SEQ ID NO: 73399 - RNA, 62 nt, Homo sapiens
ggcgcgccaacacaagagaaacaccaaacaagaagaagcacaggaggaaacgggccagagcc

SEQ ID NO: 73400 - RNA, 74 nt, Homo sapiens
aagacgaggaaagaaccgggcacaacccccagcagagggccacccgccccaaggggcgccgcaggaggacaaga

SEQ ID NO: 73401 - RNA, 57 nt, Homo sapiens
ggacacggcaggggggcgacagagccgagcagcaccaaccaaagagaccgccaaacg

SEQ ID NO: 73402 - RNA, 74 nt, Homo sapiens
aagcaacggccacgaagaaggaagcacaaacaccagcccgaacgagacgagaaaccggagacccaacaaaggcc

SEQ ID NO: 73403 - RNA, 59 nt, Homo sapiens
cgggcggcggcgagcgcggcgagacgccagccacccgaacagcacaccgagcaagaaac

SEQ ID NO: 73404 - RNA, 75 nt, Homo sapiens
cccgggcacacaaaacagccacaccaggaagggggcccgcagcaaaagcgaccccgagcggaggcaaggcgcgac

SEQ ID NO: 73405 - RNA, 72 nt, Homo sapiens
gggaacgggagcaaaaccgggaacagagggacagaggccacgacaggcacagaccagagaggacaaccaaaa

SEQ ID NO: 73406 - RNA, 81 nt, Homo sapiens
acccagaggcaacaaaggcgaggacgggcacccgcgcccccgcgcgcccaccgcgacggccgacggccagcccccgacgcc

SEQ ID NO: 73407 - RNA, 73 nt, Homo sapiens
accaccgcccgaacccgcgccgcacgacgccagcagcccccacaggcagaagacacaagagaggccggccggc

SEQ ID NO: 73408 - RNA, 79 nt, Homo sapiens
gccaagaggagaacagaagccagccgacaagggcagaacgaacaggaacaaagccagacggaaacaaagccagaccgcc

SEQ ID NO: 73409 - RNA, 84 nt, Homo sapiens
ggaggacagcacgcagcgccgccagccgcccgcccgccccccccgggcgcggcggcggggaggcgagacagggcgggaccacca

SEQ ID NO: 73410 - RNA, 76 nt, Homo sapiens
agacgaagagcaagagccacaaaagaaggagccacagcaccgcacaaagaacaggggaagcacgaaaggccagaag

SEQ ID NO: 73411 - RNA, 72 nt, Homo sapiens
aagacaaaagaaaacagcgcaaagcagaaggcagaaaaaccacagaaacgaaagaaaagacaaaaaacaacg

SEQ ID NO: 73412 - RNA, 75 nt, Homo sapiens
cggaggaccaggggacgggccccgcaggccacccggccgccagcgcccgcaccagaccaccaaacccagcacaag

SEQ ID NO: 73413 - RNA, 81 nt, Homo sapiens
gacgcggaccagaagccagagcgaggacgccggcagggacgacgaagacacaacacgaacacacgcaccgcagcaagccag

SEQ ID NO: 73414 - RNA, 67 nt, Homo sapiens
gcacagccgagacggcacgagaacgggacccggccagaggaaagaacccgaggccgagaaacagaca

SEQ ID NO: 73415 - RNA, 70 nt, Homo sapiens
caccccacccgagggcaccgcccccccacccagcacccgggggaaagccggaggagcgcacagcacagcc

SEQ ID NO: 73416 - RNA, 51 nt, Homo sapiens
cgccccccgcaacaacccacaaggggcaagacgccaagagaaaaggcgaga

SEQ ID NO: 73417 - RNA, 78 nt, Homo sapiens
ccagcgcccggcgccgcgcgccacccccgaaggacgcgggagaaggagaagaagaaaaagaacaccaaacacaacaag

SEQ ID NO: 73418 - RNA, 63 nt, Homo sapiens
aaacagaaggaaagaaggaacggagaaggcaaagaagaaaaaagacccacaggcgaagaacaa

SEQ ID NO: 73419 - RNA, 84 nt, Homo sapiens
gcggaggcccccgggcaagaggcgcaaacaagccaacccaggaggaaaaacggggacaagaaaaccagaaacgggggcccgaca

SEQ ID NO: 73420 - RNA, 82 nt, Homo sapiens
gaagacacaagaagaccgagcaaagagaccccggaacgaaaccccccaggcaagaggcgcaggaccgggaagaccaacaaac

SEQ ID NO: 73421 - RNA, 64 nt, Homo sapiens
aggagggcggaaagccaagaacaggaacaagcgggaaacggagccaccaacaagcgggagaaag

SEQ ID NO: 73422 - RNA, 80 nt, Homo sapiens
ggaccccagacggacgcggcccccacgaaccgcgaccggacgcgcggcgaagacggcagacgcagcagcgagggggcccg

SEQ ID NO: 73423 - RNA, 74 nt, Homo sapiens
acggagggacgccaagagggcaacaagcggcgaagagcccgaacagggcgccagcagcacaagggagcggagca

SEQ ID NO: 73424 - RNA, 52 nt, Homo sapiens
caggaaaggaaagagccaggacacgccaccacaccgacccacgacaagaacg

SEQ ID NO: 73425 - RNA, 79 nt, Homo sapiens
gccccaaacggaaagaagagcaaaaaggaagaccggacaaaggaaggccccagcccgagacaaaggcaggggccagaaa

SEQ ID NO: 73426 - RNA, 70 nt, Homo sapiens
aaaggagagaacgaaggcagagacggaagggcgaaacacaggaacacaacaagccggcagacagcagaaa

SEQ ID NO: 73427 - RNA, 74 nt, Homo sapiens
acaagcccaaaacgggccagcgaacagggacccacgggaggagacaggccgagaccgagggccccgcaccccgg

SEQ ID NO: 73428 - RNA, 68 nt, Homo sapiens
aaggaccaagaaccagaaaagcgagaaagaccccggacaggacaggcagaaagccgaacgccggcgcc

SEQ ID NO: 73429 - RNA, 65 nt, Homo sapiens
acgccccaggccccaggcaaggaagcggcaggaggagggagacaggggcaaaaaacggcagggaa

SEQ ID NO: 73430 - RNA, 73 nt, Homo sapiens
agcgagaagcagccgggacagaacgaacaggcaaagcccaaaaggcaaggcacaaggaagcggaagaaagaag

SEQ ID NO: 73431 - RNA, 76 nt, Homo sapiens
cggcggcccacacccgccggggcgacaagccagaccagccaacaggaggaaggggagcgccaccagggcaggggaa

SEQ ID NO: 73432 - RNA, 77 nt, Homo sapiens
caagaaaggcacagagacgaaacagcacccagcaacacgccaaaggcgaaccggcaaggaaggcgccagacacagaa

SEQ ID NO: 73433 - RNA, 53 nt, Homo sapiens
gcgaaacggaaacacgaggcccggcaagagaacacgaagagagggccggcacc

SEQ ID NO: 73434 - RNA, 61 nt, Homo sapiens
agccgccaagagaagccgaaggcgggcacgaaaggaaagccgagaaggcacgacaagccgg

SEQ ID NO: 73435 - RNA, 81 nt, Homo sapiens
ggcggcgcgcgcggcgcgggacgcgcgcgggcacccacggagccccggggcgagcgccagcgcacgccccacggaacaccc

SEQ ID NO: 73436 - RNA, 47 nt, Homo sapiens
ggcgcgggaggcagagcgcagagcgcgagacaccaagcagcaagcag

SEQ ID NO: 73437 - RNA, 72 nt, Homo sapiens
gccaaagggacgagaagaccacaggacgaaaaacggaaacgccggaccaaaagcaagccagagagaaccaga

SEQ ID NO: 73438 - RNA, 76 nt, Homo sapiens
accagggccaccgcgcaagggcccaggacagaaggcgggcaaggagcgccccccgagcaccccccacagcccacgc

SEQ ID NO: 73439 - RNA, 71 nt, Homo sapiens
ggaggaggggcaggcccggcgagagcaccacgaggaccgccccgagcgcaagacagagaaaggagccgacc

SEQ ID NO: 73440 - RNA, 80 nt, Homo sapiens
caccaccccagccagggggcggcgacggggcgggcggagaggacccccaccacgcacgggcccacacgacgccggagggc

SEQ ID NO: 73441 - RNA, 51 nt, Homo sapiens
gggaacaccacaaggccaaggacacccccggaccccacgggcggacgagag

SEQ ID NO: 73442 - RNA, 71 nt, Homo sapiens
cccagaacgacccaacacgagcagagacacgggagcaaaaccagaacagggacccaccaggccacacccag

SEQ ID NO: 73443 - RNA, 66 nt, Homo sapiens
aaaaagagcacgaccgaacgccaaacccaagggggagagggagaagccgggcccagcaaccggcgc

SEQ ID NO: 73444 - RNA, 75 nt, Homo sapiens
ccaagaggaggaggaggcggaggccaagcggaaaggaaggagggaagacggccggagacaaggcgcacagcgaca

SEQ ID NO: 73445 - RNA, 73 nt, Homo sapiens
cgggggacgaccccccagagccaacacacagaaggagaggggcgccccccccggaagacagcccaccccccac

SEQ ID NO: 73446 - RNA, 83 nt, Homo sapiens
ggcggaccgccaccacgggggcccgaagcggaagacaccgcagccaggcccccgacaacccagcaggccacggccgaagcaac

SEQ ID NO: 73447 - RNA, 72 nt, Homo sapiens
caccggcacaacacacaaaggagaccaagacacaccaccccagggggggcccaaccaccaggacgaacagag

SEQ ID NO: 73448 - RNA, 57 nt, Homo sapiens
gggacaggaaggggcagacaagcacgccgcccagacaaccccaccgaggaacgggag

SEQ ID NO: 73449 - RNA, 75 nt, Homo sapiens
gggacggagcacaaacggaggaaacgacaaaacggggaacagcaggccaggagcgacacaccacacaaccccaca

SEQ ID NO: 73450 - RNA, 89 nt, Homo sapiens
gggaccgccaggccaccaccggccgcccagccaggacgcgcccggagaaggccccccagccagcgcagggcagaaggcccccccgagag

SEQ ID NO: 73451 - RNA, 73 nt, Homo sapiens
cgggcccgcagcccgacccgaggagcgcgggggcggcccgccccggacccgagcagagaggcggccccagggg

SEQ ID NO: 73452 - RNA, 80 nt, Homo sapiens
gaaaggcggggagccaacgcccacagaagaagggaaaaaagagcgcgccaagaacgcgaacccccgcgcggagcggcacg

SEQ ID NO: 73453 - RNA, 59 nt, Homo sapiens
gaagaagcggaagaagaggcgccaccagaccacagacacaaaaggaggacaaaaaagac

SEQ ID NO: 73454 - RNA, 73 nt, Homo sapiens
ccgcccgggccagcggccgcgcacccccggccggaggcaccagccgagagccgcggcagcccaagcgaacacc

SEQ ID NO: 73455 - RNA, 82 nt, Homo sapiens
cgaaccagggagcgcaccgaaccggacccagaaggcgcgaaggcagaccgcccagcggcggaaaaacgcaacaacgagcgac

SEQ ID NO: 73456 - RNA, 82 nt, Homo sapiens
cagaagcagggcgaaccagagaaaacggcaaggaagcagaaaccaggcggggaacaagccagcagcccaaggagaagcccca

SEQ ID NO: 73457 - RNA, 62 nt, Homo sapiens
gacaaccagaaagcaggggaccacagcacaccggaaaacagaggacagcccgacaggacaac

SEQ ID NO: 73458 - RNA, 75 nt, Homo sapiens
gacccccgaccgccggccggccccagcccagggggggccaccaacaccccccggaggaccagcgcgagggggagc

SEQ ID NO: 73459 - RNA, 76 nt, Homo sapiens
ccggagagcgaacgagccgccgaccgagaaacaccgggcgggccccgggcgagcgggggccaaggggcagagcaca

SEQ ID NO: 73460 - RNA, 82 nt, Homo sapiens
gcagaagggcacaccaccacgggaccagacggcccccgccgaaccgccacggccacaaccaacaaccgcccgacaccggacg

SEQ ID NO: 73461 - RNA, 108 nt, Homo sapiens
gcggaagcagcgagccggcggagccgcggcgggacgcgcgagccggccggggggaaggggagaagcagaccgcaccaggcgggaccccgaaaaagcccaaacagacag

SEQ ID NO: 73462 - RNA, 70 nt, Homo sapiens
gcggaaggcagcgcccagcagcgcagcccaccaccaggaggccgagaaggacagagaaccgggaacaggc

SEQ ID NO: 73463 - RNA, 66 nt, Homo sapiens
ccaggccacaagacaccgccggaaccgacaagacccacccaggaggcagaaacacgccgcgcgcca

SEQ ID NO: 73464 - RNA, 76 nt, Homo sapiens
gcaagacgaaaagaacaggagcaaaacgggaaaaagccagaagggcaaaaaggccgcgaacacaaagagcagacaa

SEQ ID NO: 73465 - RNA, 72 nt, Homo sapiens
cggaacagacgcaggaaggggccagagaacaagcccagacagcaagacgcgagcgcaggggaccaggcagag

SEQ ID NO: 73466 - RNA, 36 nt, Homo sapiens
ccccgagagcggaacacagcaggagaccggaaccca

SEQ ID NO: 73467 - RNA, 62 nt, Homo sapiens
aaggcgccagcaaacagcccgcaggaaggagaggggggggccgcccgcccaaggcaggaaga

SEQ ID NO: 73468 - RNA, 75 nt, Homo sapiens
cgcagcgggagaagcaggaggcaaagggaccccaagaaaccaaagggcaagagccgcagcccggcagacagcaga

SEQ ID NO: 73469 - RNA, 77 nt, Homo sapiens
aaaccgcagggcggagagaccagaagcagcggggagaccggaaagaagaaggcacaagcggagagaccgagccagac

SEQ ID NO: 73470 - RNA, 84 nt, Homo sapiens
caggagcccagcaaccggcaacaggaaaagacccagagccggaccccggaggggcccccccgcccaggggaccgcagcgccagc

SEQ ID NO: 73471 - RNA, 83 nt, Homo sapiens
cgccagggcgcagggccgggccgccgcgcaccgcagcgccggggcacgacacaaaaacagcgccccgagccggaccgcccagc

SEQ ID NO: 73472 - RNA, 70 nt, Homo sapiens
cccgagcgcaccggagggacggcacagggaggccagccggagaagcgagcagcgagcagcagccgagaca

SEQ ID NO: 73473 - RNA, 85 nt, Homo sapiens
cagaaagaccacgaaccaaaggggaaagcaaggccaaagacagggagaagggagcgcaggagcggaagaagccaagaagaggaga

SEQ ID NO: 73474 - RNA, 78 nt, Homo sapiens
gcaccagacgccaccacgggcacccgcgccgggcaccgaggaccagccaagacaggaggcaaaacccaacgaggacgg

SEQ ID NO: 73475 - RNA, 76 nt, Homo sapiens
gaaaagaaggggaacccggaccgcgaaggcgggggagacgaaaacagagaacccaagcagcacaccccggaggaga

SEQ ID NO: 73476 - RNA, 88 nt, Homo sapiens
aagcgggaggcaggcagccagggaaagaaaaggcccgaaccaagcagacgccgaagccaccgggggaaagccccccgcaaacagcggc

SEQ ID NO: 73477 - RNA, 76 nt, Homo sapiens
caggggcacgacccgggacgcccccgccagccgagcccccgggccgacggaacaagaagacagaaaaagcacagaa

SEQ ID NO: 73478 - RNA, 74 nt, Homo sapiens
aaacaagaaaggaacccaacagagacccgcccacgcagggcggagaacggaaaagcaccaggaagcagagagga

SEQ ID NO: 73479 - RNA, 77 nt, Homo sapiens
aggcgaccgagacggggagcccaaagcaaagagggacaagaaccaaggggacagcaagaacaaagaggccacgccac

SEQ ID NO: 73480 - RNA, 82 nt, Homo sapiens
gcgcggccggccggagccagcagcaggagcaggacacgagacacaggccgcacgcacgcgggggaccccaagggaaaccggc

SEQ ID NO: 73481 - RNA, 77 nt, Homo sapiens
gagcaagagcggaccgccgaaaaacgacaggcacccagggcaacacagcaggaccgaggaaagaaaagaacagaaca

SEQ ID NO: 73482 - RNA, 68 nt, Homo sapiens
gaccccccaaggagaggccccggacaaggcacgaggcgcggcgaccaccacagcagagcccggcgaag

SEQ ID NO: 73483 - RNA, 82 nt, Homo sapiens
gcacaagacgaacaggaaggaagagagagcgagcaggaaaaccaggaccgccgccaaacgcccagcaaaagaagggccgcgg

SEQ ID NO: 73484 - RNA, 70 nt, Homo sapiens
gaaaccacaaggaccaaacaccaaaacaggacagcaaaggcggggagacacccaagaaaacaaagaaggg

SEQ ID NO: 73485 - RNA, 82 nt, Homo sapiens
gaccgcggagcagaggagggcccaccgcgaagggggcagagacagccggccaggcgccgcacccacaggaacgccgcggagc

SEQ ID NO: 73486 - RNA, 112 nt, Homo sapiens
agaagggagagcaggcggagaggaaaggggaaaaaggaacagacccaacaaagggggagagacaaccagagcggaaagggagaaaagcccccagaaaggaggcaccaaagag

SEQ ID NO: 73487 - RNA, 73 nt, Homo sapiens
aggagaccccaaagaaggcccgcagaccgaagaacccaagagacggaaaaacaggaaaggagcacagaaaggc

SEQ ID NO: 73488 - RNA, 78 nt, Homo sapiens
cgaacccagcaacacgaggcccaggggggcaccccggagggcccaggcgggaggggacggcaaagggcgcggagggaa

SEQ ID NO: 73489 - RNA, 46 nt, Homo sapiens
cggaggggcacgagcgccacaaccccagggaaaagccgggccacag

SEQ ID NO: 73490 - RNA, 70 nt, Homo sapiens
agcggacccggaacaacagccgcaacggcaacacccagcccaaccccaggggcaccggccgaacaccaca

SEQ ID NO: 73491 - RNA, 82 nt, Homo sapiens
aacacaccgcgggccagccagccgggcgcagaggcgggccagacacgggaaacgcccagagcccagaccaagcaggacgccg

SEQ ID NO: 73492 - RNA, 78 nt, Homo sapiens
ccaagcaaaacccaagcaaaaccagagcagaacaggagacagcggagaaagagcccgggaagcacgaagccgagacca

SEQ ID NO: 73493 - RNA, 80 nt, Homo sapiens
ggagaacggaaaaccccaacccgaagaacagcggaaaacagaaaaggggaacaaacacaacccccaaagacgacgaccca

SEQ ID NO: 73494 - RNA, 79 nt, Homo sapiens
aaacccagcaggcgaaggacacgaaaagaggaaaaccaacggccagcaccgccacaccacagcacaaggcacaaagcag

SEQ ID NO: 73495 - RNA, 79 nt, Homo sapiens
caaggaggcggaagcaacagaaggcaaaacgaagacgaggcaaagcacccagcccaccccgggaaaaaccaggaacgag

SEQ ID NO: 73496 - RNA, 76 nt, Homo sapiens
gaccccacgcggacgggcgaggagaacacccggaccggacacgccgagcaggccgaagacaagccccggcacagga

SEQ ID NO: 73497 - RNA, 73 nt, Homo sapiens
agggaaggggagccagaggacaccccggaggccgcgagaggagaaagacacccagaaggagaccaaaaacggc

SEQ ID NO: 73498 - RNA, 82 nt, Homo sapiens
gacagcacagcccagaaggagacaggaaaagagcaaaaccaccaccgcaagaaaccgaaaccagcccccaaggggaaccagc

SEQ ID NO: 73499 - RNA, 78 nt, Homo sapiens
aaggaaggaaggcggagacggcacgggccgaggcaacgaagcagcagcgggacaagcgaggcagaccagaagaggacg

SEQ ID NO: 73500 - RNA, 86 nt, Homo sapiens
agcgagcgcgcgaggggcggccgagagcaagcggccgaccacaggggggcccgggcacacgccaagcacgccaacaggcaggacag

SEQ ID NO: 73501 - RNA, 74 nt, Homo sapiens
acaagagggggggagaaacaaaccgacaagggaaagcccggcaggcggggaaacgccggagagcaagaaaaagc

SEQ ID NO: 73502 - RNA, 69 nt, Homo sapiens
ccgccccacagaacagggcagcgcagaagaaagaagccccgggcgcaggggggaaaggcacccgcccac

SEQ ID NO: 73503 - RNA, 73 nt, Homo sapiens
cgcccaaaccgcgaaaggaaccagacaaacaccagccagaagacgaaacaggaacacgaagcgcaaacgccga

SEQ ID NO: 73504 - RNA, 73 nt, Homo sapiens
gcgacacgaaggcggaagaaaagagacagaagcaggaccggcccacgccaaggacagcagaccacagcccggc

SEQ ID NO: 73505 - RNA, 78 nt, Homo sapiens
gaaggaagggagaaggggacagaccggaggccgagggagaggaggccgaaggggggaggaagaagggaagcgaagaag

SEQ ID NO: 73506 - RNA, 78 nt, Homo sapiens
ggaacacacacgacggcaacgggacagcacgaggacccccgcaggcagcggcaggaccgaaggacacagcgagaagcg

SEQ ID NO: 73507 - RNA, 75 nt, Homo sapiens
agcagaggaaggcccgcacagccagccgcaagggcacacgcgggccagccgcggaaagcggagcaagggagccca

SEQ ID NO: 73508 - RNA, 58 nt, Homo sapiens
gcaggaaaggagggacacagaggagcgaccgggaggaaagcaaacacgaagaccggag

SEQ ID NO: 73509 - RNA, 78 nt, Homo sapiens
cccgacagaccagaaaccacccagagcaaagaaggcgggcaacacaacaaggcgcggacacccagacaagcgcgccac

SEQ ID NO: 73510 - RNA, 79 nt, Homo sapiens
aggacgagccgagagccgaagagagaaacccccaaagaagagccccccaaagcacaaggaaagaggaaaagaggcgcag

SEQ ID NO: 73511 - RNA, 76 nt, Homo sapiens
cccaaaggcgagaaaaggagacccaaagcaggcggaggacgggcaacacccagaggagacgagccaaaacagaaca

SEQ ID NO: 73512 - RNA, 78 nt, Homo sapiens
ccaccccccggcgccagcacagacagcccaaagccacccacgagacaccacgacgcccgagagaccaccccaagcaca

SEQ ID NO: 73513 - RNA, 79 nt, Homo sapiens
cggaaaccgaaaagggggcggaagaagagcaccaccagcagaccacgaggccaccggccagccccgagagcgcagacag

SEQ ID NO: 73514 - RNA, 59 nt, Homo sapiens
ggaagggaggagagagaggaccccgcgaggcaagacaagaccaggcacacgaccaagaa

SEQ ID NO: 73515 - RNA, 69 nt, Homo sapiens
gcaggcgccgagaaaagaacagagggacgcccaaaaaggaacagagacgcaggcaagagcgcggaggag

SEQ ID NO: 73516 - RNA, 72 nt, Homo sapiens
accacgcccacggcccacacgcaagggaaaccccccacaacagcagccagaccccgagccggacaagaccga

SEQ ID NO: 73517 - RNA, 82 nt, Homo sapiens
cgcgaccccacccagcaggggacaccagaagcacgaagaccaggacacaaccggaaccgcaggaagacagcccaacaaggcg

SEQ ID NO: 73518 - RNA, 94 nt, Homo sapiens
gccggcgcgcacacaccacgggcgaggcaacgaacaccagcaggaaaaaagagcggcagaaggccaaacggccgagcaggcgagcgaagagaca

SEQ ID NO: 73519 - RNA, 64 nt, Homo sapiens
cgagccggggccacccggaggagcccgggaccaagggcggaagagcgcgggaggggaggccacc

SEQ ID NO: 73520 - RNA, 83 nt, Homo sapiens
cagccagaccaggaacccaccagaaggaaccaaccggacacaaacaagcagcaggaggacaccaaagccgggggagacggaga

SEQ ID NO: 73521 - RNA, 86 nt, Homo sapiens
ccacgccccggcgagcagggagcggagaccagcaccaccagcaggcacagggggcagaaccgaggggccggagcagccgcacccgg

SEQ ID NO: 73522 - RNA, 78 nt, Homo sapiens
cgggccgggcggaaccccccagcccaccggagaagccaccagcgcggagccgagagcgagacgaacacggaggagagc

SEQ ID NO: 73523 - RNA, 72 nt, Homo sapiens
cccccagaaaaccaaggaggaaacgacacaaacagacaacccagaaaagaaaaggccaggggcgccgaaaaa

SEQ ID NO: 73524 - RNA, 72 nt, Homo sapiens
ccaggagagcgagggagcgagcgggcagcgcggaccacaggcaaacaaagaaccacggcaagcagagaagga

SEQ ID NO: 73525 - RNA, 78 nt, Homo sapiens
cgggggccgcggccaagaacgccggcgccccaaccgcacaccgaaaaggcaccagaagaaagcacgaaagagaaagag

SEQ ID NO: 73526 - RNA, 85 nt, Homo sapiens
agaggccggggaccgccaaccccccaagaagcagagacggagccaccaccaccccgagagacggaccggaccacccccaggcgcc

SEQ ID NO: 73527 - RNA, 96 nt, Homo sapiens
cacacgccagagccggagcgcgaaggccgggacccggccccggcccacaggggggggcaaacccgagagaacggggcaggcgccccaacccaagcc

SEQ ID NO: 73528 - RNA, 119 nt, Homo sapiens
cccgaaaaagaggaaggcacaagccccaaagccacccaggcaaagcaggcacggcaaagaaggagagagaacaaggccccccaacagccccgccgaggcccccgccgcccagcaccggg

SEQ ID NO: 73529 - RNA, 82 nt, Homo sapiens
acgccgcggcgcgcccgggccccgcgacccagccgggagaagaggcacaaggacaggcacagagaacagaacaaaaaaaaac

SEQ ID NO: 73530 - RNA, 74 nt, Homo sapiens
agcgagcaggagcacgaaggggagaaaagggaaggccccaagccaagggcaccacaagccgaacagccagccag

SEQ ID NO: 73531 - RNA, 66 nt, Homo sapiens
accagaccacccaaaggagaaacaccaaaaggaaccgcagcgacaggaagaggcacaacaaagaaa

SEQ ID NO: 73532 - RNA, 108 nt, Homo sapiens
gcgaggggcgaggcgcggagcccgggacgcgcgacgcccgcgccccggaggagacagcaaggaagaagaaaagagagccaaggcggcaaaacccaaaaccagggccaa

SEQ ID NO: 73533 - RNA, 40 nt, Homo sapiens
accggcaccgagaaagacaagaaccagcaagacgcaaccc

SEQ ID NO: 73534 - RNA, 52 nt, Homo sapiens
ggagcaccccaacgagacgcggccggagcccccccagacacacgagggggac

SEQ ID NO: 73535 - RNA, 66 nt, Homo sapiens
cgcacgccggaccgccgccaccggaccccgggcccggcagggaaacggcagggcgaggcgggacca

SEQ ID NO: 73536 - RNA, 79 nt, Homo sapiens
gagcgcaggacgagcgagccacgcgcagccagagcaaagaagggcagcgagcagggaccgagacgcggccgaacacaag

SEQ ID NO: 73537 - RNA, 62 nt, Homo sapiens
caaagcaggcaagaggcagagaaagggggacacgcgcccaccagggggagccagcagccggg

SEQ ID NO: 73538 - RNA, 80 nt, Homo sapiens
acgcagcgaagccacagaccccagaaacgggcaagcgcgcaaacccagaagaccggaaagaggcagaggaggaaggcagc

SEQ ID NO: 73539 - RNA, 80 nt, Homo sapiens
aggaacccaccgccgcccccaccgccagcccggccgcgagcgcggccgcaggagccagggccccccacgcgagaacccgg

SEQ ID NO: 73540 - RNA, 95 nt, Homo sapiens
aagaaaaggaggagacggggagacaggacgaaggaagaagaacgagacgggcccaccagggaccagggacagcccagcaaggggagggagaaaac

SEQ ID NO: 73541 - RNA, 68 nt, Homo sapiens
gcggcacaagaccaggagaggagcggcagcccacaagcaggaagaccagccccaggagggaaacagag

SEQ ID NO: 73542 - RNA, 78 nt, Homo sapiens
cccaacgggccccagcgccaaccaaaccgaaagccagaagcacgggcggaaaaggaaagaagggagccccaccgcggg

SEQ ID NO: 73543 - RNA, 78 nt, Homo sapiens
acccgagaccccgaaaagcgccgcagacagaagggggagaagcggaggccgaccgccgcgccacagagcacaccaacc

SEQ ID NO: 73544 - RNA, 73 nt, Homo sapiens
aagacaccaagggacgcagcggaagaaaagaaagacacacacagagccgaaccaagaaaagcaaaaaacacca

SEQ ID NO: 73545 - RNA, 77 nt, Homo sapiens
acaggcggggaagaaacagaaagaaacacaaaagcaaaagagagccaaaaaggggggaaacaggaagagaacagaac

SEQ ID NO: 73546 - RNA, 62 nt, Homo sapiens
aaccaggggccgaaggcgacacacgaggagacgccaaggccccaaaggacaaagcacagaca

SEQ ID NO: 73547 - RNA, 90 nt, Homo sapiens
cgggacagagcggcgggacagcccaagggccagcaccgcgcccaggcagagccagaccggacacacaaagccacgggcaaaggaggcaga

SEQ ID NO: 73548 - RNA, 81 nt, Homo sapiens
ccagacaccgacgggccgcgaggggaagaggaagcaaagccaagagaaccagagagcacagagaaagcgggaaacggccaa

SEQ ID NO: 73549 - RNA, 76 nt, Homo sapiens
aacgcaaccaggcgcaggacacacagagagccggcagaacacagaggcagagaagcaaggcagaaccgcaagcgac

SEQ ID NO: 73550 - RNA, 91 nt, Homo sapiens
cggaaaggggcccggcgcgcccgagacgaagaccggagaacacgagacccgcacaaaaccccgccccccaggccacacaggggccgagacg

SEQ ID NO: 73551 - RNA, 79 nt, Homo sapiens
caaggcggacgcggcgagaagaggaagaaaccacagcgacagaacaaacaggaccaaccgaggaaggaggacggcaagc

SEQ ID NO: 73552 - RNA, 85 nt, Homo sapiens
cagaggccaggaggacgaggagagacagaagaagcggaggccggcaaagccaaggaaaggcacacgggaagaaaaaaaaaacaaa

SEQ ID NO: 73553 - RNA, 56 nt, Homo sapiens
cagcgcggaccagaccggaacgcccaagccccaccgcgaggaacaagggagcagag

SEQ ID NO: 73554 - RNA, 71 nt, Homo sapiens
cagcccaccaaacacgccggaaaccccgcccacagcacgagggcccgagggcaggacagcaggcaccggcg

SEQ ID NO: 73555 - RNA, 68 nt, Homo sapiens
gcgaacggaggagcgacggccagcgcgcacaggcagccccccaaggaagggaaacagagaaaaagaac

SEQ ID NO: 73556 - RNA, 75 nt, Homo sapiens
cgggagggaaaaccagcaccgcaggcagcagaagaccggaggaccggggcgagggaccgagaagaccccagaagc

SEQ ID NO: 73557 - RNA, 72 nt, Homo sapiens
cgcggggaccagcagcggagggggccggcgccgacggcggcacggcgccagggccccccacgcgagaacccg

SEQ ID NO: 73558 - RNA, 75 nt, Homo sapiens
ccggggcgccacggccacggcgcggcaccggggcgccgggccgagcggccccgagccgggacacccggcggcggc

SEQ ID NO: 73559 - RNA, 45 nt, Homo sapiens
ggaggggggccgccgccgaccaacaaggcaaaggcaacgcagaac

SEQ ID NO: 73560 - RNA, 60 nt, Homo sapiens
gccccagcccccgacccgggggccgccggcacacaagggacacagagacacccgaagccc

SEQ ID NO: 73561 - RNA, 84 nt, Homo sapiens
ggcgccaggggagcggagccaccgcgaagggcccccaacggaccccacaggcccagcccccggacacgggcggccggaaggcga

SEQ ID NO: 73562 - RNA, 75 nt, Homo sapiens
gaagaagcaggaggcaagaaaggggaaccccggagaaaaggccaagaaggcagagagggaaagggcgggggcaag

SEQ ID NO: 73563 - RNA, 72 nt, Homo sapiens
ggggagggcgagcggcgagcggccagggccgggcagcagccggccgcgagaggagacgacgaagacccaacc

SEQ ID NO: 73564 - RNA, 76 nt, Homo sapiens
aagaacaaggcgaaaaaggacaccaggggggaaaaaccacacaggcaaagaacgcgcaaaacaggacgaaaacaaa

SEQ ID NO: 73565 - RNA, 58 nt, Homo sapiens
gcggagagaaccagcgaggacgagaacaaaaccagccaagcagaggagaaaaagacag

SEQ ID NO: 73566 - RNA, 69 nt, Homo sapiens
ccaccggcccagcaaccaggccgaccagaaaaggaccaaagacaggcccggcagacaaacaccccggcc

SEQ ID NO: 73567 - RNA, 74 nt, Homo sapiens
ggagcgagaagacacaaagccggggagcaacgacagaggagggggggagcgaaaggagagcaccaagaaaggaa

SEQ ID NO: 73568 - RNA, 75 nt, Homo sapiens
aaaaggcccgacgacgagacccaaacacagaagaaagccacgggaggcgcccaagaacaaaccaccgggagaacc

SEQ ID NO: 73569 - RNA, 68 nt, Homo sapiens
cacccagcaccgaacagaccccgccccagcagaagaggagagccaggaggagggaggcgagcgaaaag

SEQ ID NO: 73570 - RNA, 72 nt, Homo sapiens
cggggggcgggaagagccggggccgggcgacaggagcaggcgaaagggcagacccagaagcgcaggcaagac

SEQ ID NO: 73571 - RNA, 119 nt, Homo sapiens
aggcccgacccgagcaccagcacggagagaggaggccgcgagaccaggggaccaggaccccaggacaggagaaacaggagaagcgaggaaaagaaaaaaccccggccccccggagggcc

SEQ ID NO: 73572 - RNA, 74 nt, Homo sapiens
ccaaggaaaaacggagagccacaaaaaaggaagcgaaaaagacaaacagaccccagaaagaagaagaggaaagc

SEQ ID NO: 73573 - RNA, 78 nt, Homo sapiens
cgagcccgcgccgcccgcacgcgcgaccaccgggcgcccgcgcccccggagcgcagaacaggacagagccacgaccag

SEQ ID NO: 73574 - RNA, 41 nt, Homo sapiens
aagacagaggccacaccagcccagagaaacagagggcaaag

SEQ ID NO: 73575 - RNA, 81 nt, Homo sapiens
ccggcacgacgccgaggagccgcaggggggcgaaaggcggcagccccccggggccccgcggagaaaaccccagagaaacag

SEQ ID NO: 73576 - RNA, 76 nt, Homo sapiens
gggcacaggagggacgagacggagccggaacagggggaaccaggggcggagaacggaaaagcaccaggaagcagag

SEQ ID NO: 73577 - RNA, 40 nt, Homo sapiens
cggccaagcacccgcagcaggaggacccaggacccccggg

SEQ ID NO: 73578 - RNA, 73 nt, Homo sapiens
aggccgcggggacccagcgccaccacaacagcagcaacccgggcagcgccaagccagagagacacagcaccag

SEQ ID NO: 73579 - RNA, 73 nt, Homo sapiens
ccgagggcagggaacagggagaggccagaaacaggaccgaacaggaaagccgggaaccaccacccccggccag

SEQ ID NO: 73580 - RNA, 87 nt, Homo sapiens
ccgaagccaggggcggggaccacggccgggacaccagggcaggcgccgaccccgacagaacgggccccgcacccgcggccccggggc

SEQ ID NO: 73581 - RNA, 73 nt, Homo sapiens
agccagccagggcacgaaccagagggccagaccaggacggcaaacaccccagcaggcagagcaagaggaagaa

SEQ ID NO: 73582 - RNA, 54 nt, Homo sapiens
gcgggaggacgacgagagaggacaccaggggggaaaaaccacacaggcaaagaa

SEQ ID NO: 73583 - RNA, 76 nt, Homo sapiens
cgcccaccgcgccgcaccagcgaaacggcaaggggaaaccagaagcgggggggcggggcaggcaaaagaaagacga

SEQ ID NO: 73584 - RNA, 85 nt, Homo sapiens
ggccccggcccggcccccgggaaaggagcgggaacgcggccgcggcccgccggccccggggaaggggcccaggcccccggccccg

SEQ ID NO: 73585 - RNA, 98 nt, Homo sapiens
aacaaaacagagcacgccccaggaacaagaccaccgccagaacgggggccggccggcaacagagaaaggcgaagaaccaagaaggacccgaaaccaac

SEQ ID NO: 73586 - RNA, 72 nt, Homo sapiens
accggccagcaacacgggcccgggcggccccgcacagcacacgaccgcgagagggcgaagaacgccaaaacc

SEQ ID NO: 73587 - RNA, 81 nt, Homo sapiens
agcaccaggagcggcggccggccgcgggggccccccgccccgccccccggagccgcgagcacccaagaaccgcgccggggg

SEQ ID NO: 73588 - RNA, 80 nt, Homo sapiens
caccgcgcggcacgcaagaacgagcgggcagccgcccaagacaaagagccgggaaaaacccagcagggggcgaaagaaac

SEQ ID NO: 73589 - RNA, 86 nt, Homo sapiens
ccgcggccggcgccgcgcagagccgagcgaacccgagcccgggcagcagaaagggcaccgaagagggaaccaaaacacagcaacca

SEQ ID NO: 73590 - RNA, 63 nt, Homo sapiens
acagacaggaccacagggaccaagagagaagaagcaaaccgggaccggaagcaccaaggagaa

SEQ ID NO: 73591 - RNA, 81 nt, Homo sapiens
ccagacccacacccacggagcaaggaaaaaaacccgacagcagagacagagaggagccaacccccagagaggagcgccggc

SEQ ID NO: 73592 - RNA, 50 nt, Homo sapiens
gggcgagcagaggacgacaggccgggagcaacaggagaaccgaaagcagg

SEQ ID NO: 73593 - RNA, 77 nt, Homo sapiens
ccccgggacccgccgcgagggacccgggggccacaagaacaccgagacgacacaagaacaaagacgggccacaaaca

SEQ ID NO: 73594 - RNA, 87 nt, Homo sapiens
cgcccaccaggaccgcgcagcgagaccaggcaaaccagccagcacgggggcccagccagccagcagcgaggggggacggaggcggca

SEQ ID NO: 73595 - RNA, 75 nt, Homo sapiens
cagcagcagcaacccggaaacaagaagacgccaaggcagacaaggacaaccagcaaggaggggcaggagcacacc

SEQ ID NO: 73596 - RNA, 79 nt, Homo sapiens
agaggcgggcaggagcggcggccaggccagacccgaaggccaggagacccgaccccaaggaggcagcacggcaggagac

SEQ ID NO: 73597 - RNA, 60 nt, Homo sapiens
gcgaagcggccgagcaggcgagcgaacgacgagccgggcagcgacgacagcccgcggggg

SEQ ID NO: 73598 - RNA, 71 nt, Homo sapiens
gaaggcccaccagacaggcgccagagccccagccacagacaagagagccccaggccaaccacggacgcagg

SEQ ID NO: 73599 - RNA, 64 nt, Homo sapiens
ggggcgggggcaagggcgcccgcggacaagcagagcccaggcgggaaggcagcccaggacacag

SEQ ID NO: 73600 - RNA, 128 nt, Homo sapiens
ggcagcagaccaacagaggggcaaacagaggaagaggaagccagaagagggagagacagaacaccggaacgggcaggaaagaaaaagcagaaagaaaaaaaaccacagacccgggcagcgaacaagag

SEQ ID NO: 73601 - RNA, 77 nt, Homo sapiens
cgcgccacggagcccggagcgggcaaggagcggcgcgcccaggcgccaccagcaaaaccagagaaacaggcagagaa

SEQ ID NO: 73602 - RNA, 80 nt, Homo sapiens
aaaccgaacacacgaacacagaagggacagacccagacgcgccacccaccaggacaaaagaagggcagcacaaaggaaag

SEQ ID NO: 73603 - RNA, 74 nt, Homo sapiens
aacggcggagcagggagcccaaagaccccggagacaggcggccaaggaacaagacacagaaggaagaaggagcc

SEQ ID NO: 73604 - RNA, 51 nt, Homo sapiens
ggaaaaacgaacagacgcacaccaccaccaccacaaagaaacccagagcca

SEQ ID NO: 73605 - RNA, 79 nt, Homo sapiens
gccaggagggcccggggggcgcagaggcaggcgcacgcagaagagcgccggagacaaggccgccccaaccgccacacag

SEQ ID NO: 73606 - RNA, 98 nt, Homo sapiens
gggaacacagaaagaaagagggacggaaggcccagacccagggcggcgaaggcgcgccacggagccacccaagcggccgccacccggaacccacaacc

SEQ ID NO: 73607 - RNA, 70 nt, Homo sapiens
cagcaaggggcagacaaggacgcaaagagaacaggaacaacccagacacccgggccagcacaaacccaga

SEQ ID NO: 73608 - RNA, 73 nt, Homo sapiens
aggcggagaggaaagagagggaccaccgaaaaaccccaaacccacaaggagacaagccaaacgcaccagacga

SEQ ID NO: 73609 - RNA, 70 nt, Homo sapiens
agaagagacagcgagaacaaaggagagaggaccacccagaggagcaacgaagaagaggacaggaccaccc

SEQ ID NO: 73610 - RNA, 75 nt, Homo sapiens
caacgcgggcagcaccccgcagacaccggcgacaccccggcaggggggggaagacaacccggagaacacccaggg

SEQ ID NO: 73611 - RNA, 65 nt, Homo sapiens
caacgcgcaggccgcaggccgccagacccaacccagcaaacacggcggagaggaacaaggaccag

SEQ ID NO: 73612 - RNA, 57 nt, Homo sapiens
aggaagagagggacaggagacgaggaggagaaccagcacggagggaaaccccgcaga

SEQ ID NO: 73613 - RNA, 82 nt, Homo sapiens
aaggaagaggcggacggaggagcaggcgagaagagaaggaccagagaagaaaggccaaaacgacaggacggcgagggaccag

SEQ ID NO: 73614 - RNA, 59 nt, Homo sapiens
cggccgagacggcggcagcagcggcacaggagcgacaaggcggaacagaaaccagagag

SEQ ID NO: 73615 - RNA, 84 nt, Homo sapiens
ggagggggcccgggcgccccgcagccccccaacaccgcccgccaggacgaccggaggggagcgggacgagccgagcagggcacc

SEQ ID NO: 73616 - RNA, 76 nt, Homo sapiens
gagccaaaaaccccacaaaacgcggagccgcccagcaaaacccaacgggaacccgccggaaaacggagagcaggca

SEQ ID NO: 73617 - RNA, 73 nt, Homo sapiens
ccaggaggggcccccgccagacgagaaggaagagaacgccccggaacccaaaccgaagccacggggaaggaac

SEQ ID NO: 73618 - RNA, 57 nt, Homo sapiens
gacagcaggccgagcccgagcgcgggaagaaagagccaacacccgaagcgaagggcg

SEQ ID NO: 73619 - RNA, 73 nt, Homo sapiens
agacacggggaagcgcaaaaacaagacggggcgccccacagaggggcgacgaagcaacggcaaaggaacaggg

SEQ ID NO: 73620 - RNA, 51 nt, Homo sapiens
acaagagcccgcacagcccaagccggccccggcggggggcacggcggccca

SEQ ID NO: 73621 - RNA, 79 nt, Homo sapiens
acggcggagaccccgaaggcgcaaacgacaccacccgaccggacagcccaaggcggaaaagcgaaggaagccacaagca

SEQ ID NO: 73622 - RNA, 73 nt, Homo sapiens
gagccagcaaagaacagcagcagggcccaacgcgcaggccacgggccggcggggaaacccaggcgaacagcag

SEQ ID NO: 73623 - RNA, 77 nt, Homo sapiens
gagcgacccccggagcaccggggccaccaggagggaggggagacgcacaaggcgacagcgcgcgcagcgaggccacc

SEQ ID NO: 73624 - RNA, 61 nt, Homo sapiens
cagcccgcccccggaccggccgagcaggaggcgccacagcagcgccagccaggaacgagac

SEQ ID NO: 73625 - RNA, 88 nt, Homo sapiens
cagagcgcagcgccgagcgcggcccgggcgccacgagccggcggcggacggcagaacgggccagcggggcgagcagagcgcgcgaagg

SEQ ID NO: 73626 - RNA, 80 nt, Homo sapiens
cccgcgcccccggacggccacgagaccggaaaagacagcgacggcgcaaaaaagaagaggaagagcccccccccgagaac

SEQ ID NO: 73627 - RNA, 72 nt, Homo sapiens
gcacgcccgcccgaggcgacggccgcggcgcacagagcaacacgcgccaaccccagagagcgccacgccgac

SEQ ID NO: 73628 - RNA, 68 nt, Homo sapiens
cggcgaccagaacccacacacgcggggcccacacacacgcagggcgcccagcacgcccccacagcgcc

SEQ ID NO: 73629 - RNA, 78 nt, Homo sapiens
gaagggccgaggcgcccaagaggcgacgccggcggaaacggagcgccgcccggcgggcgccgggagccgccaggaacc

SEQ ID NO: 73630 - RNA, 74 nt, Homo sapiens
gaagagcacccaaagcaaacaggcccgcgcggcagcggaaaaggcagagagccaggcgaaccagccgaaaaagg

SEQ ID NO: 73631 - RNA, 71 nt, Homo sapiens
caggagacgcgggcgcgggccagaaaacgggcaaacgaggcggccagggcagcccaagcagcagggacgaa

SEQ ID NO: 73632 - RNA, 76 nt, Homo sapiens
gcgccaagaccagcagcaccaggagccccccgcccagacaagccacagcagaaccacaaccacggggcagcccaag

SEQ ID NO: 73633 - RNA, 79 nt, Homo sapiens
caggcccaaggggcccccgggcaccccggaccgcgcagccaccgcggcccccgcgggcccagaagaaagagaagagcga

SEQ ID NO: 73634 - RNA, 67 nt, Homo sapiens
gagagcgccgaggacgacgagcgcagcgcggggccgcgagcggacgaaggccccgagccccggcccc

SEQ ID NO: 73635 - RNA, 71 nt, Homo sapiens
aggacagaccgagcccccggaaaccccaggagaagacagaggagccagaccaagagacagcacaggcgagc

SEQ ID NO: 73636 - RNA, 72 nt, Homo sapiens
cacggagagcggaacaacagagaacagcgaagccaagagcagagcaacccacccaagcgagaaggaggcaag

SEQ ID NO: 73637 - RNA, 73 nt, Homo sapiens
gcagcagaggacgcggccaggcgacgggaagcgaccgcaggcgggcccccgaccgcacaaacacggcgccaga

SEQ ID NO: 73638 - RNA, 54 nt, Homo sapiens
acgcacgaaccaagccacaacccgaggcgaacaccccagggccgaagggggccc

SEQ ID NO: 73639 - RNA, 107 nt, Homo sapiens
gggacgaacaagaacagaaagggaacacagcagagggggaaaaaaacagaccagcaccagacagcgaaaaagaggacccaaaaaagagagaaaaggccaaagagagg

SEQ ID NO: 73640 - RNA, 54 nt, Homo sapiens
gcggagaccccgaaggcgcaaacgacaccacccgaccgcggccgcgagaaccgg

SEQ ID NO: 73641 - RNA, 75 nt, Homo sapiens
gagcccgcaccaaacagagcagcagcagcagagagaaacagcagccgacgaccccagcccgggggcggcgaggag

SEQ ID NO: 73642 - RNA, 69 nt, Homo sapiens
gccgacagcagagacaggaggcacaaaaagaacaaccagaaggaacgcagagaccgacggagagcagcc

SEQ ID NO: 73643 - RNA, 51 nt, Homo sapiens
gagaaacaaagacaaccgcaccagggcacaagaggcgcggcgcagacccag

SEQ ID NO: 73644 - RNA, 36 nt, Homo sapiens
aggcccccggagggaggggggacggaagcggcagcg

SEQ ID NO: 73645 - RNA, 78 nt, Homo sapiens
caggagaggaaaaggagcgagcagacgacaagccgggagcgggcggccaaccaggaacccaacacagggagggccaag

SEQ ID NO: 73646 - RNA, 76 nt, Homo sapiens
aaaagacccgccaagaagaaagagcgggcagagcacaccaggcagacaagcaaggaagagacacagcaacccaaga

SEQ ID NO: 73647 - RNA, 78 nt, Homo sapiens
gaagagacgacacaaggagacgaggggaagaggagcaggcccagaaagaacagacaaagaccgaaaaacacgaggaaa

SEQ ID NO: 73648 - RNA, 75 nt, Homo sapiens
gccgggacccgagccagcgccgcacaggaccggccaccgcccccgcaccgacggccagggagccaacccgcaggc

SEQ ID NO: 73649 - RNA, 63 nt, Homo sapiens
gaaggaccaagaaccagaggggggagcccccaaaaggcggccaggagaaccggcgaccaacag

SEQ ID NO: 73650 - RNA, 74 nt, Homo sapiens
gaacgagcaccaacgcacccaccagccggggaggaccagagagcaaaagaaaagagacacagcccggagaaacg

SEQ ID NO: 73651 - RNA, 75 nt, Homo sapiens
ccgccgcgcaccgcagcgccggggcacgacacaaaaacagagggcgaaccaaagaaggaaggcgacccaaaacca

SEQ ID NO: 73652 - RNA, 71 nt, Homo sapiens
acggaagaacccaccgcccccgacacggggcgacacagcggccgagagaccggaggagcgaagacaggcgg

SEQ ID NO: 73653 - RNA, 55 nt, Homo sapiens
gacggcccggagagcggcgcgcagggaaacaggagaaccgacagaaaccccaagc

SEQ ID NO: 73654 - RNA, 77 nt, Homo sapiens
gagaaacaagcccaagagcccaggagggccccaaggcggcagccccgaccgacggggcaacgcgaagaaacaccgga

SEQ ID NO: 73655 - RNA, 68 nt, Homo sapiens
caccgagcaagacaacaccacggagaagggcccaagaagaggaagaacaaaaaaaaaagaaccaaaga

SEQ ID NO: 73656 - RNA, 67 nt, Homo sapiens
gccacgcgggaccaccggcaccaccaaagaaaagcccggaaaagcagccaagcggaagacagagccg

SEQ ID NO: 73657 - RNA, 76 nt, Homo sapiens
agaagaagagcgagggggcccgcagcgaaacaacaaggagccaaaaaccgaacacccggaaggggacaagggacgg

SEQ ID NO: 73658 - RNA, 75 nt, Homo sapiens
ggagggcccagcggagcacgaggggacagaaggaccgaaggagaagaaggagaaggggaggagaaggcaagccgg

SEQ ID NO: 73659 - RNA, 71 nt, Homo sapiens
agccggagaagagggggcccggggggaggaggggcaggcccggcgggaagcacaggcacgggccagaggca

SEQ ID NO: 73660 - RNA, 63 nt, Homo sapiens
aacgcgacaagcgcacgcgcaggacacacaagcacaacaacaaagagcacaaggccagcccgc

SEQ ID NO: 73661 - RNA, 72 nt, Homo sapiens
gagagagccaacgggcgagaacaagcaaaaccagcaacaaaccggcacccgccacaacgggccccaacacca

SEQ ID NO: 73662 - RNA, 55 nt, Homo sapiens
aggcacccgggaccagccgggggggaagcgggagggacaggagaacaggcacgac

SEQ ID NO: 73663 - RNA, 74 nt, Homo sapiens
ggaggcggaggacgagaggaggaaacagcgcggagaccccagacccccagcgcggcacgcgaacaagaggcgcc

SEQ ID NO: 73664 - RNA, 79 nt, Homo sapiens
ggcacacagaggaacagaaaaagaggaacccgcgacccgggcacccagagcagggagggacagcccaaggcggaaaagc

SEQ ID NO: 73665 - RNA, 78 nt, Homo sapiens
gcggaccagaggaaaaagggaacagacaccccagagcaagcaaacgcagcaaaagcagaccggaaaacccaccggcaa

SEQ ID NO: 73666 - RNA, 76 nt, Homo sapiens
cgaagccagaaagaagccacccagagagaaccagagaaggagggggcagagcacggcaggcagaaggggccaaccc

SEQ ID NO: 73667 - RNA, 82 nt, Homo sapiens
gggaggagccgaggcggcggcgggggggcccgcgcgcggggccgggcacaccaggcccaggaaagccggaccaaacacagaa

SEQ ID NO: 73668 - RNA, 87 nt, Homo sapiens
cgaggcggacacgccggcacagacccagaggccacccagaggagaaggccaccccgccggaggcacaggccagaggggcccaggagg

SEQ ID NO: 73669 - RNA, 98 nt, Homo sapiens
cccgagccagcgagccagcgagccgccgacccgccgagcaaaagagcgccggaaacaggccagaaagaacacgaggcccagagaaaacacacccacag

SEQ ID NO: 73670 - RNA, 62 nt, Homo sapiens
gcccgagagcaccgcgccagacagcccggaccaaaaaacaggccaccgaggaaagaggggcc

SEQ ID NO: 73671 - RNA, 77 nt, Homo sapiens
gaagaagacaggagagaccgccggaacagcccccagggaccagggaggacaaggaaaggaaccagggaagacacaga

SEQ ID NO: 73672 - RNA, 80 nt, Homo sapiens
accaagacaccaaggagaggccaaccaggggcagaaaacaaaagcagcaaaagccaacgcacaggccagcgaaaacagaa

SEQ ID NO: 73673 - RNA, 81 nt, Homo sapiens
gagcaggcgccggcgcaagacacagagcaggggccgggcgcagaagaaaccgccgaaagagaagagcgcgaaaagagacac

SEQ ID NO: 73674 - RNA, 74 nt, Homo sapiens
caaagagcgaggacaagggggcacgcggaaacaagagcaggaacagacgaggcacaagcaccaccggcgagagc

SEQ ID NO: 73675 - RNA, 68 nt, Homo sapiens
cggggccggccggcccgaggaaggcaagacccgcggccgcgagaaccgggcagagcagcccggcgcac

SEQ ID NO: 73676 - RNA, 77 nt, Homo sapiens
agcgaccaacacaagggggccgcaagacccacggcagggcaaccccaccgcggaaggcaggcacacagacgagaaca

SEQ ID NO: 73677 - RNA, 72 nt, Homo sapiens
acggcgccgccggcgcggccggcacacgagaacagcgcgagccacaaggcaaggaagcaggcggcaccaccc

SEQ ID NO: 73678 - RNA, 72 nt, Homo sapiens
agacaacagaaaagcacaaagacacgagaagggaccgcgaccggcagaagccaaaccgaccacagacacaag

SEQ ID NO: 73679 - RNA, 80 nt, Homo sapiens
cgcaccagcaagacggcaggcgagagccgacccaggccgccggccccacaggggcacaccaccgagcggcaccggaggac

SEQ ID NO: 73680 - RNA, 79 nt, Homo sapiens
aggccacaccgaggaacagggcggagagcggccgagcgcgaaagagcaggccacacccaagaccaggccaggcagggca

SEQ ID NO: 73681 - RNA, 65 nt, Homo sapiens
ggcgacacggggcaaggggagcgggcgcgcgcgaccgcgccccggagccacgccgccaggagccc

SEQ ID NO: 73682 - RNA, 71 nt, Homo sapiens
accaggcaccagcaaggggggcacacacagggcagaccaggccaacgcacggcccaaggccggggagaaaa

SEQ ID NO: 73683 - RNA, 75 nt, Homo sapiens
ggaagcgaaaaccagccaggagagccaggcgggcggcagcggcggcggaaccggggcagcgggcgccccacaaca

SEQ ID NO: 73684 - RNA, 56 nt, Homo sapiens
gcggggcagagcagcccccagccagccgcgaggacagcccaaggcggaaaagcgaa

SEQ ID NO: 73685 - RNA, 73 nt, Homo sapiens
cccaagggcgggaacggacaaaagagaacgaacgcagaccgggaaaaccaacaaaccaagagggacgaagcag

SEQ ID NO: 73686 - RNA, 58 nt, Homo sapiens
acagggaaacacaagcagaaacagacaggaccacgcaaggccacgaaggaggcccaaa

SEQ ID NO: 73687 - RNA, 78 nt, Homo sapiens
ccagcaaaggcaccggacaggccaaggcaggggccagaagacaaagcaaccaaccccaggaagaaaaaggcaccggca

SEQ ID NO: 73688 - RNA, 59 nt, Homo sapiens
gcgcggcggcccgcgcacagagaaaccaggcggggaacaagccagcagcccaaggagaa

SEQ ID NO: 73689 - RNA, 80 nt, Homo sapiens
gcgcgcaagaagagggggcgcgagggaaaaagcgggaggaggcgggccagaacacgaccggggcacaggcaaggacaagc

SEQ ID NO: 73690 - RNA, 84 nt, Homo sapiens
cccggcggcggcaacccccggaggagccgccgcggaccaccagaggccgaaaacgggagaccccagacgcaaccggcgcgggag

SEQ ID NO: 73691 - RNA, 70 nt, Homo sapiens
ccgggaggcacggacacacaaaaaggccgagccgggggcgacggcgccgaccacacaaggagagagacgc

SEQ ID NO: 73692 - RNA, 73 nt, Homo sapiens
accgcgccggcgaccaggagaagaggagccggacggcacaccgcccgggcaccaacaaggcgccacggagacg

SEQ ID NO: 73693 - RNA, 67 nt, Homo sapiens
gaaggaccaagaaccaggaagcagcaggacgaagcacgcagagaagccgagacaaaaaggcaaaccc

SEQ ID NO: 73694 - RNA, 80 nt, Homo sapiens
cagacccggagcccagggaagcagccgaccagccgcggagccgggggcagcgagcgggcggacaccagaacgaggaaagg

SEQ ID NO: 73695 - RNA, 72 nt, Homo sapiens
ccacgaccgcgcgcccagaaccgcgcggaggcgcccgacggcacgggaaaacgcagacaaagggacaggaag

SEQ ID NO: 73696 - RNA, 84 nt, Homo sapiens
aggagcgaacaaggcgacaacacaggcagaaagaggccagaagaaacaccagggaaggagaccaagaaccaggacggagccagg

SEQ ID NO: 73697 - RNA, 88 nt, Homo sapiens
gcagcagcagaagcagcagaaaggccgcggcagggcggcgcggccgagccgagaagccagggcacagaccggaagggaggcgggggag

SEQ ID NO: 73698 - RNA, 57 nt, Homo sapiens
cagccgagggccaccgggaaggacagaaggagcccccaggacaggcacacccgggaa

SEQ ID NO: 73699 - RNA, 65 nt, Homo sapiens
gaaaaagaagggaacggagagacaaaacccacgaaggaacggccagaaaggagggggcagaaccc

SEQ ID NO: 73700 - RNA, 68 nt, Homo sapiens
agaggaacaggcggcgggcgagccgaccaaagggacggcagcagacagcaccacaaccgaaaggcacg

SEQ ID NO: 73701 - RNA, 86 nt, Homo sapiens
gcacggagaagaggggcacgaaaggcaggacccggacccgaagcgcgggagcacccagaagcaggccgaggagcgagcgacaggca

SEQ ID NO: 73702 - RNA, 53 nt, Homo sapiens
aaaagaagaggaggaaaaaaagaagaacggccacagggccaaccagaagacgg

SEQ ID NO: 73703 - RNA, 53 nt, Homo sapiens
cgacaccagcaccccggccccggcccgcccggaggcgcaagggacaagcgcac

SEQ ID NO: 73704 - RNA, 63 nt, Homo sapiens
caccacggcacccacacacaaacaacaggcagccacaaaacaaggcgcggacggcccaagagg

SEQ ID NO: 73705 - RNA, 78 nt, Homo sapiens
gcccagcagcaaccagccacccgcccccaagaaggaagcacagggccggccggaacagagaccggcccggggaacaaa

SEQ ID NO: 73706 - RNA, 77 nt, Homo sapiens
cggcgcgggagggaaggcgcgggccagggccccccacgcgagaacccgggccggggcccgggggcccgagcccccac

SEQ ID NO: 73707 - RNA, 70 nt, Homo sapiens
ccgaaagaacaccgaaccaggcccaaaaggcaccccgaaggagggacaaggcgaccaagggcgggacgga

SEQ ID NO: 73708 - RNA, 79 nt, Homo sapiens
agggcccaagaggagaggcggggaaaggagaaaaaggaggggggaagaaaggccccagaacgggaccccgagacaccgg

SEQ ID NO: 73709 - RNA, 65 nt, Homo sapiens
agccagcggacgggcagggcccagggccagaacgcggagacggacaagaagcgagccgcgcacac

SEQ ID NO: 73710 - RNA, 87 nt, Homo sapiens
cgccgcgaaggacagccccgcgcgggacccggggcgccacgggggccagaagcagggacaccgaaaagcaaagggagaggacacacg

SEQ ID NO: 73711 - RNA, 60 nt, Homo sapiens
gacaagcccaagagccacggcaaaccaggcaaggggacgcccgccacggcccgccagaac

SEQ ID NO: 73712 - RNA, 70 nt, Homo sapiens
cgcccagaacagaaggggcaaagaaaaaggagagaaaaagaggcaaaacaacaagaagaaaagagaaaaa

SEQ ID NO: 73713 - RNA, 89 nt, Homo sapiens
gcagacgcagccgagacaccagcccgaaacaccaccaagcaagaggagccaggagcacggggggaacaagaccgccgggacggaagacg

SEQ ID NO: 73714 - RNA, 53 nt, Homo sapiens
agaaccgcccgcaacacaacagggggcggagcagaaaccagagacagcaccac

SEQ ID NO: 73715 - RNA, 66 nt, Homo sapiens
gcggacacccgcacccccaccgaggaggcccaggcccaggagcccggcgccccgccgcaccaggcc

SEQ ID NO: 73716 - RNA, 65 nt, Homo sapiens
cagcggcgcccccgccacgaaaagaggaagaggaccccaaagcaacaccagagacaggaaagagg

SEQ ID NO: 73717 - RNA, 62 nt, Homo sapiens
gagaaggaccaagaaccaggacggcacaagcaggaaggggagacaaaccggacggcgaggac

SEQ ID NO: 73718 - RNA, 87 nt, Homo sapiens
gggggaaaagagacaccgacaagacaccacggacgagagacaaacgccgaagcagacgaggaagagaacccacaaagaagaaaacac

SEQ ID NO: 73719 - RNA, 80 nt, Homo sapiens
agccgggccgcccaggaagcagcaggagcgccgcccacgcggagcaacaaggaagggccaaagccccaagaacccagcca

SEQ ID NO: 73720 - RNA, 80 nt, Homo sapiens
cgccgcccccaccgccagcccggccgcgagcgcggccgcaggaggggagacggacgcaaagacaagggagaagcggcgga

SEQ ID NO: 73721 - RNA, 69 nt, Homo sapiens
gcaaacaagagaacgggcccacacaacccaggcaaccaacaggggagcgaacgaagaaaggccaagagg

SEQ ID NO: 73722 - RNA, 81 nt, Homo sapiens
gaggaggaggagcggacgcggccccccgcgggagcccccagcaggcaaacagcacgccagcagaaccgcagagccagcacc

SEQ ID NO: 73723 - RNA, 68 nt, Homo sapiens
cgggcgcacccaccgagaaaggcgcgccccagcagacacggccaagacgcccccaagaaagcgccaga

SEQ ID NO: 73724 - RNA, 55 nt, Homo sapiens
gggcaccaaggcccgggaagagaggacggggacgggccccaggacgaggaagaca

SEQ ID NO: 73725 - RNA, 125 nt, Homo sapiens
gacaggccaaagagcggcaccgggaggaggaggagacgcaggcggcccaggaccgggaggagagaagaaccaggccaggaaccccagccggagcagaaagaagagccagggccaccacccaaaac

SEQ ID NO: 73726 - RNA, 64 nt, Homo sapiens
cccaggcaaccgcgcgggcaacacgcaggcaagacacagagagacccagagaccaacggagagg

SEQ ID NO: 73727 - RNA, 79 nt, Homo sapiens
aagggaacggaggacggaggaagaagcaaggggacaccagaagaacgcaccagccagagacaggaggaacaggaaagca

SEQ ID NO: 73728 - RNA, 79 nt, Homo sapiens
gacaagaaaagaaggacgggggcacgaagcagggccgacacaagcccgcagcgcagacccaggggagcccaccagccag

SEQ ID NO: 73729 - RNA, 69 nt, Homo sapiens
ggcaaaaaagaacagccagaagaaccagaagcaagcagccggccacaaggaaccaggaaacaacccgac

SEQ ID NO: 73730 - RNA, 54 nt, Homo sapiens
ccccaccgccgggaacaaagcagaacggagcaggaagaagagagccaagcgaac

SEQ ID NO: 73731 - RNA, 54 nt, Homo sapiens
acgcaagaaacccaggacgagaacagcaacagcgaccagggaccaaccaaaggc

SEQ ID NO: 73732 - RNA, 71 nt, Homo sapiens
aaacaaacgcgaacacccaaagaaaagcaaacccggaccccagagcggccacagcccacaccagaagcaaa

SEQ ID NO: 73733 - RNA, 77 nt, Homo sapiens
accaaagaaaaacgaagcaacccaaggcagagggcaagccaggcggcagacaaacggaaccaaccaaagcaaaacag

SEQ ID NO: 73734 - RNA, 86 nt, Homo sapiens
gccagcaaaggaaggcagaaggcccagggccagcaaagcagagcggaaaacgccagcggacaaaagggacgcgcggagaccgaaca

SEQ ID NO: 73735 - RNA, 67 nt, Homo sapiens
gcagcacgaccagcaggaacggaaacagagcggaaacagacacccaccacaagaaggacccgaccac

SEQ ID NO: 73736 - RNA, 84 nt, Homo sapiens
ccgccgccgccgggcggaggcgggccggagaaggggcgacgcgggcaccccccgaaggacaaccccgcaacggcaggggcaggc

SEQ ID NO: 73737 - RNA, 104 nt, Homo sapiens
ggcaacgccaggacaaaaacaaagcgcgcagaaagggcgaccaccaaaaaaacgagaaaagcccagcgaaaaggagagagaaacccggaaaaggggagagggaa

SEQ ID NO: 73738 - RNA, 68 nt, Homo sapiens
gagcacgaggagccgaagaaggaagaaccacgaagaaacaccacaaaccgggcggggccggggagccc

SEQ ID NO: 73739 - RNA, 104 nt, Homo sapiens
acccagaggccgcgcgcgcgaagcccacgccgagccgagaggggacggccgccccgcgggcaccggcacggaccaccccaacaccgggggagaaccgggcccac

SEQ ID NO: 73740 - RNA, 79 nt, Homo sapiens
gcagcagcagagcaggcagggcagaagaaaagcggggcggaggaccggcacggcacacgggaccgccacacaacacgcg

SEQ ID NO: 73741 - RNA, 79 nt, Homo sapiens
cggaggcggcgaggagcggcgggccggcccggccacccccgggcccgcgccccaggcgagagccccgcaacgacagcca

SEQ ID NO: 73742 - RNA, 86 nt, Homo sapiens
cccaggcccacggaggaagagccgggcagcccggagcgggccagggaggccaacagacccaacccagaaggcaccaaacggagggg

SEQ ID NO: 73743 - RNA, 69 nt, Homo sapiens
gggcgacgaaacaacaggcaagaacggaagcacgggcggaggaaagcacaagcagagcccccgcagagg

SEQ ID NO: 73744 - RNA, 83 nt, Homo sapiens
gcgaggcccccgcacagcacgcgcagaacaaagggacagagcccacgcaggagacgggaggagcgacaacggagcacacccac

SEQ ID NO: 73745 - RNA, 85 nt, Homo sapiens
aggaacaggaagcacagcaagaggaccagccggagaggccagaagccggaggagccaccaacagaagcaggagccaggaaaccaa

SEQ ID NO: 73746 - RNA, 74 nt, Homo sapiens
cccaagcaaggccggaagaagagcgcagagaccagaaaaagaagagaaaccacggggaggaagagaagaccagg

SEQ ID NO: 73747 - RNA, 81 nt, Homo sapiens
gaaaaaccgaggaccgaaggacgcgcaggagaagcggagccacggagaagaaggccccgacgcaccgccagggaggagagc

SEQ ID NO: 73748 - RNA, 72 nt, Homo sapiens
acaagagacaccagaagcagggaccccaagaacaacagagaaaggccaaaacgcacagggaaggcacccaga

SEQ ID NO: 73749 - RNA, 73 nt, Homo sapiens
gacaggaggaagccggcagacgggcacaccggccaggaccggcagaggggaagacacacgaagccggcaggaa

SEQ ID NO: 73750 - RNA, 84 nt, Homo sapiens
aacggggccgcacccgcggggcccccagcccgcgcgaggccgcgcccccccgcccgagggggggcccaccaggagagcaagcgc

SEQ ID NO: 73751 - RNA, 80 nt, Homo sapiens
cgaggaagcccaacccagagcccccggcaggaaaaagcaaaagggcccaaggcccgaccaggaacaaagagagaaagaca

SEQ ID NO: 73752 - RNA, 70 nt, Homo sapiens
agaaggacaacggagcagaggcgcgaagcgaggaagaggaacgaccagaacaaaaaccagaaaaaaggaa

SEQ ID NO: 73753 - RNA, 79 nt, Homo sapiens
gacccacacagccggcacgcacaccacgcccaagccgcgcccaagaaaacgccaaaagagcaagaaagcccgggagcca

SEQ ID NO: 73754 - RNA, 66 nt, Homo sapiens
cagcaacaagcaccgaccaagaagcggcaagaaagcaaggcaaaccagggggccacacagagcgca

SEQ ID NO: 73755 - RNA, 74 nt, Homo sapiens
ccaggaaaagcgccaacagcagaaaacacggaaggccgcggggggcagacaaccacgcgcggcaagccaccccg

SEQ ID NO: 73756 - RNA, 69 nt, Homo sapiens
cgaagcagggccgacacaagcccgcagggacaaagcccccagaggaaccggggcacaccaagaaaaacc

SEQ ID NO: 73757 - RNA, 80 nt, Homo sapiens
ccagggaaggaagcaaagcaaaggagaaggcagcgggacggacaggcagggaagcaacgcagaggggaggcaagcagggg

SEQ ID NO: 73758 - RNA, 71 nt, Homo sapiens
aaaaaaaccacaaagcggccgaaacagaaaacaagagaccacagaagaacaacgccgaaaagaagaacaac

SEQ ID NO: 73759 - RNA, 70 nt, Homo sapiens
caagggaaaacaacagggaggaaaaaggcaaacgcaaagggacagaagagaacaaaacaacgggaaccca

SEQ ID NO: 73760 - RNA, 74 nt, Homo sapiens
ggcgaccagacccagccacggaaggagacgaggccagacgagcaggcacgcaggagcccgacccacagcagcga

SEQ ID NO: 73761 - RNA, 83 nt, Homo sapiens
cggaaaggcaccggagacagaggcggaaccaaaagcagggaaaccggcgggaggggcgaacggggaagacaggccgaggagcg

SEQ ID NO: 73762 - RNA, 60 nt, Homo sapiens
ggcaaaggcggaaaaaggcaccaggagacgcagagccccagcggggaggcgcaacacgag

SEQ ID NO: 73763 - RNA, 83 nt, Homo sapiens
gccccgagcagggggggggggaagccgcagcggaaagcaggagcacaggcaaaggggccagggggcagcaaggcccagggggg

SEQ ID NO: 73764 - RNA, 54 nt, Homo sapiens
ccgagaaccgcaggagccagagggaaagaagaaagcaccccgcaaaagaaggga

SEQ ID NO: 73765 - RNA, 75 nt, Homo sapiens
agaccaaggcgacccagcgcaggaggcacgaagggcagcagcacagggagcccccggagaccaagagcgaggcaa

SEQ ID NO: 73766 - RNA, 76 nt, Homo sapiens
acgaaggggagaaacacggacagaggaaaccgagaagggaagccaagcagagaagcgcgaccagacaaccagccgc

SEQ ID NO: 73767 - RNA, 69 nt, Homo sapiens
gggcggaaaaccaccaaaaccggcagcgagccgagcaaggccaccagaggaccaagccagacgacgaga

SEQ ID NO: 73768 - RNA, 77 nt, Homo sapiens
caggacccgccaccaaaccgcccgagggaccaggacaccaggggggaaaaaccacacaggcaaagaacgcgcaaaac

SEQ ID NO: 73769 - RNA, 87 nt, Homo sapiens
gagaacaaccagcacggcagaggcgggccgggcccgcacgggagaagcgcccaagagccggaggcgccggcccacaggggggcgacg

SEQ ID NO: 73770 - RNA, 81 nt, Homo sapiens
agaccacaagggggcccgagcggcgcggggacggcggggaccgagcggggaggagacaaaggagacgaaaaaaaggccaac

SEQ ID NO: 73771 - RNA, 101 nt, Homo sapiens
cagacccgcccaacagaaaaagagaggagggagaacacagaaacccgccccggggaggggggaagacagggcccagcaccacaggacgggccgggaagccg

SEQ ID NO: 73772 - RNA, 70 nt, Homo sapiens
aaaacaaaacaaaagaacagaaagcgagcagagcccgcgaacaagacaagcgcgaccaaacacgggggca

SEQ ID NO: 73773 - RNA, 78 nt, Homo sapiens
cagcccaggcggggccgcaacccccggggagaccgggaccaagaagcgaaagaggaccggaaccagccagggaacaca

SEQ ID NO: 73774 - RNA, 76 nt, Homo sapiens
cgcagcggagaagaggcgcacgcgggacagagcacccgaagcgcccagccagcacgccacccccgggaccggaggg

SEQ ID NO: 73775 - RNA, 70 nt, Homo sapiens
accgagcccaggagcgccacgcgcggaaggcagcgcccagcagcgcagaggaccagcagaaacagaaggg

SEQ ID NO: 73776 - RNA, 40 nt, Homo sapiens
acccgaagacagggaaaaggagagagagcggagacaaggc

SEQ ID NO: 73777 - RNA, 90 nt, Homo sapiens
ccgccaccaccaccgccgcgccccggcgcccccccgagcgcaggaagacaggaacaagaaaaagaaggagaccgaagcaagaagcacaga

SEQ ID NO: 73778 - RNA, 76 nt, Homo sapiens
gcgcgagccaggacccggcgaaccgggagaccgcccccgccggcgcggggccaggccgccaggcgaccaacaagga

SEQ ID NO: 73779 - RNA, 75 nt, Homo sapiens
cagccccgcgccgccgaccccccggcgccgcgccggcggcgaacaacggcccaagagcacagagaagaccaaggg

SEQ ID NO: 73780 - RNA, 87 nt, Homo sapiens
caaccacacggggcagccccaaggccaagggacaggcagagagccacaagagccggagagggccgaggccggagaaacccggggccc

SEQ ID NO: 73781 - RNA, 78 nt, Homo sapiens
aagccgcacagccgcggcggcagcagcaggagaggacagagcagccaggccacgagccagaaccgagacacacacagg

SEQ ID NO: 73782 - RNA, 77 nt, Homo sapiens
ccggggggcacgagaacggccccaccgagccagcaccccaggccaggggagcgaaaggccgacagcagggccggaaa

SEQ ID NO: 73783 - RNA, 72 nt, Homo sapiens
aggcccaggagaaagcacaggacaggcggcagagaggccccgagacccagaacgcaaaaccaaggcccggca

SEQ ID NO: 73784 - RNA, 74 nt, Homo sapiens
ggcccgacaccgcgggccgccagacgggaagggggagaacagaggacagagaagacgaaccgcgaaacgccagc

SEQ ID NO: 73785 - RNA, 46 nt, Homo sapiens
aacagccgagacgacaaagggcagaggaccagcgaagcgcggcaaa

SEQ ID NO: 73786 - RNA, 57 nt, Homo sapiens
caggaccaggcggacccagagcagggaagcagagagacggggcgccagggccaggag

SEQ ID NO: 73787 - RNA, 61 nt, Homo sapiens
cgaagaggacgaccggagaacgcgaggcagagcgggagcgcgcagccagggcgagaaaaag

SEQ ID NO: 73788 - RNA, 76 nt, Homo sapiens
gacacgacgacggaaggagcagaacaaacggccaagaagggccaccccacagacggagggagagcacggcgcacca

SEQ ID NO: 73789 - RNA, 51 nt, Homo sapiens
ccgcaagaggccagcgaaaaccgaagaaggcgacacacaacaacaggacaa

SEQ ID NO: 73790 - RNA, 63 nt, Homo sapiens
agaaaccgcccgaaaacggagaagcagccacaagaacggaagcagaagcacgcaagcagagac

SEQ ID NO: 73791 - RNA, 60 nt, Homo sapiens
cgacaagggagaacagcacccagaaaacgagcgccccacacaagaagggacaagcgaaca

SEQ ID NO: 73792 - RNA, 74 nt, Homo sapiens
agcagcgccgcccgccgacagccaggcccgggagaaggccaaccgccccccagcagcaggcacgggcgaacccc

SEQ ID NO: 73793 - RNA, 73 nt, Homo sapiens
aagacagggcccggaggcgacaaccccggccaggaacaagggagcccgccagagaaggacggagaagcgaaag

SEQ ID NO: 73794 - RNA, 38 nt, Homo sapiens
aggacaaaaccgaaggagggagacagggaaacgaaaac

SEQ ID NO: 73795 - RNA, 85 nt, Homo sapiens
gcgcgggcccaccgggaagccggggggcccggaaagagagagcaggcgaagaggaacgaaccgggggcagggcccagggaccgga

SEQ ID NO: 73796 - RNA, 73 nt, Homo sapiens
ccgacacccccaggccaggagcccagaccaacagaagaggcccccgcgcagggaaaagcaagagaagccagga

SEQ ID NO: 73797 - RNA, 78 nt, Homo sapiens
cgaaacaaaagagcacaaaggaaaacgaggaaagcccaggagacacggcaagcacagcagaagaagcacacaaccaca

SEQ ID NO: 73798 - RNA, 68 nt, Homo sapiens
ccagcagacgcagcaccaggaaaacgagaagaaccggggaacagaccggaggaaccgagcggaacacc

SEQ ID NO: 73799 - RNA, 58 nt, Homo sapiens
gacagggaccagcgggaaggcagacagcgagggcgacgaggccgagcggaacgcagag

SEQ ID NO: 73800 - RNA, 75 nt, Homo sapiens
gagagcggcagcagcaccagcccaagagaagaaacggagccccaaggagaccgcccccagcccacagaggcgcgg

SEQ ID NO: 73801 - RNA, 85 nt, Homo sapiens
cgacgacccggaccaagaaggggaggcccgcggcagacgggcaccacagacgccagaagaagaagcgggagccacggccggggac

SEQ ID NO: 73802 - RNA, 73 nt, Homo sapiens
gagaaggaccaagaaccagagggaacaagaaggaggggggaggcggaccagagagacaccacccagggggggg

SEQ ID NO: 73803 - RNA, 52 nt, Homo sapiens
ggccagccagcacaaccgcgaggaagacaagggccgaacaccaacagaggaa

SEQ ID NO: 73804 - RNA, 95 nt, Homo sapiens
agcccgccagagcccccaggggagggcgacccccgcggcaccccggggccaccaccggcccacggagcaggagaaggaagcgccggccaaacgag

SEQ ID NO: 73805 - RNA, 82 nt, Homo sapiens
gcgcaaaggccccggcaagaagcgagccgccgcccgaaaggccgggccgcgcaggaggagcgccgccgccgccaccccgcca

SEQ ID NO: 73806 - RNA, 42 nt, Homo sapiens
caggagaggacaaggagaggagcgggcgaccccggcggaggg

SEQ ID NO: 73807 - RNA, 85 nt, Homo sapiens
gaaaaaagcagaccgccggggcaacacccagccggccgccaacggaagcagacggaagggaaacccccaacgcaacccaaacccc

SEQ ID NO: 73808 - RNA, 78 nt, Homo sapiens
cgagcgccaggccacccccgggcagcgggccgcccggcagcagggacgaaccaaagcaaaccacgggacgggggaccc

SEQ ID NO: 73809 - RNA, 49 nt, Homo sapiens
aggccccccaaccaggcaaggcgcacaaaagagcacaaaagcaccaagg

SEQ ID NO: 73810 - RNA, 84 nt, Homo sapiens
ggcccagagcacgcgacagaacaaacaccgcaacaacaagagaaaggagaagaagccggaggaaagaacaaaacagaaagggag

SEQ ID NO: 73811 - RNA, 79 nt, Homo sapiens
cggagggagaaaggagagcccggaccgacagcaggaaacccagcggcggcagaaccagccggcacaaagccgaaccaga

SEQ ID NO: 73812 - RNA, 49 nt, Homo sapiens
acgaacaagggcaaggaccaaaggaccagaccgcggcaacacaaaaaag

SEQ ID NO: 73813 - RNA, 80 nt, Homo sapiens
ggaggagagcacacgccgcgccaccgggcacaccggaccccaaggcaaaaccgcagccggggagcccggcccagcccccc

SEQ ID NO: 73814 - RNA, 60 nt, Homo sapiens
ggcaaggcaaaggacccagaggagaggcgacccgcggcgagagcccccccagagcgccag

SEQ ID NO: 73815 - RNA, 55 nt, Homo sapiens
gggcagcacacacgaaagagaagccccggagaggagacagaccaagccaaagcac

SEQ ID NO: 73816 - RNA, 71 nt, Homo sapiens
cagcagccccaaaccagcagccaaccgccacaaccaccaagagaaacaaggcggaccggcccccacgccaa

SEQ ID NO: 73817 - RNA, 66 nt, Homo sapiens
ccgggcgcggcgggcgcgcccgccagcgcccggagaacgaaggacagaaaacgggccccagacaca

SEQ ID NO: 73818 - RNA, 78 nt, Homo sapiens
ccccggcgggccccgcgaaagaccggcagcccacggggcccgcgaaagagcccacgaacggcgggaacagaaagccag

SEQ ID NO: 73819 - RNA, 72 nt, Homo sapiens
cgcggcaccgcgaagagccccggcaagagggaaagacaaggagccgggccgagaaaccgaaccagagaccag

SEQ ID NO: 73820 - RNA, 87 nt, Homo sapiens
cggcggaaggccccaacacccggagcagcgccacaagggacaggcaaggcccggcgagcagccaaggaggccaaggaggccccgccc

SEQ ID NO: 73821 - RNA, 71 nt, Homo sapiens
gggagacgggacaaggggcagggaggcggccaggcagaggggcgagccggcacacgcacccaccggcagaa

SEQ ID NO: 73822 - RNA, 81 nt, Homo sapiens
gacaagagaggagacccaacagacggggcaaagaaaaaggagagaaaaagaggcaaaacaacaagaagaaaagagaaaaaa

SEQ ID NO: 73823 - RNA, 54 nt, Homo sapiens
aacagcaaacaagaggaaggcaacccgcccagaagaggcaccaggcccaccaaa

SEQ ID NO: 73824 - RNA, 79 nt, Homo sapiens
gaaaggaagaaaagcccccacaaaagagagagacaagaggaaggacacaggaaagccagcccgacaccggacaacaacg

SEQ ID NO: 73825 - RNA, 77 nt, Homo sapiens
gcaacaggaaagcagcccgaaaaagacgcgagaagccacacgggagagaagagggcaggcagcagcgagagcagggg

SEQ ID NO: 73826 - RNA, 50 nt, Homo sapiens
cgaggcgcaagagacaacacagccacaggagcagccagaccacgggccca

SEQ ID NO: 73827 - RNA, 75 nt, Homo sapiens
ggcgggacagcgacccccaagacagaaaccacacagcacgaggaccgcgggcacgagcgaccagcaaggcgggcg

SEQ ID NO: 73828 - RNA, 70 nt, Homo sapiens
ggggccgggggaacgaggaagcgcccaagggcagccaccgagagacaaaccggacccacccagacaagag

SEQ ID NO: 73829 - RNA, 79 nt, Homo sapiens
gcacccagagagcccagccccgagggaggcaggccccgcgagcggccaccgcccaccaacagcgggaagaagccgcccc

SEQ ID NO: 73830 - RNA, 67 nt, Homo sapiens
gaaaaaagccgaaagggcggagaaaagaaaggccaagaagcgagagaagaaaaacagaaaaagccaa

SEQ ID NO: 73831 - RNA, 33 nt, Homo sapiens
gacggaacccaaagccccgggcccgacacccgc

SEQ ID NO: 73832 - RNA, 80 nt, Homo sapiens
aggcaaacggcaaagggagagcaggcggggcaagcagcgcgccggagagcagccaagaaagccacagaaagacaaccagg

SEQ ID NO: 73833 - RNA, 81 nt, Homo sapiens
cacaccggagcaacaaccggcgggccgaggccgcaggaggagggagggcccaggagaacgagccgagcccgaggaaaccag

SEQ ID NO: 73834 - RNA, 79 nt, Homo sapiens
gagacaccagcccgaaacaccaccaagggaccggagggccggaagcgggccgggacaacgggcaggagccggaagggcg

SEQ ID NO: 73835 - RNA, 78 nt, Homo sapiens
ggggggccccccaagagacgcacccaggaccagcgcagagcagggaagggaggaagagagagaccccccccaaaagcc

SEQ ID NO: 73836 - RNA, 84 nt, Homo sapiens
cagaagccacggagaaaaacggccaagaggcagaccaggaaaggccaaaaccagccaaaaccaggacgcaacgggcagagaacg

SEQ ID NO: 73837 - RNA, 70 nt, Homo sapiens
aagccagggcagccccaagagagccaggagcgcacacacgacaggagaaaggagggcggcgcagccgaag

SEQ ID NO: 73838 - RNA, 70 nt, Homo sapiens
ccgaggaaaacacaaaggacggaagaccgcaggaaagcaggaaggcaagaaagccaaggacgaaacccac

SEQ ID NO: 73839 - RNA, 72 nt, Homo sapiens
ccacccccaaaaacgcggaagacggggcagcacaaaaagagggggggacgaaacgccccagaggcagaagcg

SEQ ID NO: 73840 - RNA, 79 nt, Homo sapiens
gcccacgcccacgcccccgcgccggagccccgggccagaacgacgacaaccacagagcgaccgagcaccaaacccgccg

SEQ ID NO: 73841 - RNA, 80 nt, Homo sapiens
aggagaaccaacggcccgaaagagacagacggaaggagggggaagaaccaaccccggcaacaacccccaccagccgccag

SEQ ID NO: 73842 - RNA, 76 nt, Homo sapiens
gaggcgaggcggaagggcaccccacccgacgaccaaaaggaagggcaagcgaacacaagaacaagggccgaaagcc

SEQ ID NO: 73843 - RNA, 72 nt, Homo sapiens
acaacaaaaaccaagaggacaagcagggacgcgaggagaccgacaaaaagaggagccgcggcccaggcggag

SEQ ID NO: 73844 - RNA, 71 nt, Homo sapiens
gaggaaacgacaaaacgggagggcgacagaccagagaaagagaagggccaaacaagggcacaagcacgaag

SEQ ID NO: 73845 - RNA, 77 nt, Homo sapiens
ggcagccccgacgcagccgggaagggaagcgagaaacggggaggcgaccaaaagaaaaacgggaccgcaacgacaag

SEQ ID NO: 73846 - RNA, 74 nt, Homo sapiens
aaaaacaggagaaggaacacaagacaggaagccaaagaccgggaaccccaggggcgagcgaagaaaaccccaga

SEQ ID NO: 73847 - RNA, 82 nt, Homo sapiens
gacgagccagacacaagcacagcgagaccgcggcgcaggaggaggaggagaaaaaggcacaaacccagcacagagaagacgg

SEQ ID NO: 73848 - RNA, 68 nt, Homo sapiens
caaccacaggcacagcaccaagacaacgagggacacaaggacaacacggaccagaaaaaggaggaccc

SEQ ID NO: 73849 - RNA, 39 nt, Homo sapiens
gagcagagccccagaagagccagaaggagcacccagccc

SEQ ID NO: 73850 - RNA, 61 nt, Homo sapiens
aaaaccccgagggaaacaagaaaacacaaagaggcagcaaaggggaggcaagcaggggggc

SEQ ID NO: 73851 - RNA, 74 nt, Homo sapiens
gaaccagaggaccacggggccaagccggacacacagcagcggacgacgggagcagacggacgggccacggggag

SEQ ID NO: 73852 - RNA, 67 nt, Homo sapiens
ccgcccgggccagcggccgcgcacccccggccggaggcaccagccggagggaggcgcccggccaccc

SEQ ID NO: 73853 - RNA, 63 nt, Homo sapiens
gcaccgcaggcagacaaaagggccaaagaagggagagagaggaccagacccgaaccagccccc

SEQ ID NO: 73854 - RNA, 67 nt, Homo sapiens
acaggaacaaagccagacgggccaaaaacaaacaaaaaagaacccacccaggaagaaccagcaggag

SEQ ID NO: 73855 - RNA, 80 nt, Homo sapiens
gcgacacaaacaaaaggcgcagagagacaagggcacccgaggcaaccaccggggcagaaggacagggagacagcaaccac

SEQ ID NO: 73856 - RNA, 54 nt, Homo sapiens
ccggacaaccagaggcagccagcagggggagggcgagaggacagccgacggacc

SEQ ID NO: 73857 - RNA, 102 nt, Homo sapiens
cggcggaagcggccgacacaccaccacggaacgccaaccggcggaccgcgagacagccagccgaccgagccgggccccgaggaccgagacaggagcacccgg

SEQ ID NO: 73858 - RNA, 78 nt, Homo sapiens
ccccgggggacagcgcccgacaggcaagaaaccccggacagaaggcacggcgaacaaagggcaacaacacaagaacgc

SEQ ID NO: 73859 - RNA, 72 nt, Homo sapiens
gcccaagcggaaagcacgcgcacagagggcggagaacggaaaagcaccaggaagcagagaggaccgcagaag

SEQ ID NO: 73860 - RNA, 44 nt, Homo sapiens
gccacccggagccagcggagggacagggcggaggcgcgcgccgc

SEQ ID NO: 73861 - RNA, 68 nt, Homo sapiens
cacaaacgaagggagccggcaacacaaacagccagcaaagacaagagcagaccagcagccgcagcgcg

SEQ ID NO: 73862 - RNA, 73 nt, Homo sapiens
cacacaacggggagcaggcggggcgggcacaggacgcgggagcgcgcgaagggacacagcacaccccgagccg

SEQ ID NO: 73863 - RNA, 84 nt, Homo sapiens
ggacgccccagccaagaagaagggcggaaaccacaccccgaaaggcgcaccccccgcgccggccccgccagcagaccccgcgag

SEQ ID NO: 73864 - RNA, 73 nt, Homo sapiens
ggcggcggggacacccggacacggcaagaaaaacgagcacaacgagaaccgcgaaagaacgccgaaagcgaac

SEQ ID NO: 73865 - RNA, 73 nt, Homo sapiens
gccccccgcccccccccccacgcaaccccagaccaacacacaggggcggcggccggcgggcaaaggacgccag

SEQ ID NO: 73866 - RNA, 86 nt, Homo sapiens
cggggccgggcgaccgggcaccagcaggacccgaggccaggagccaggggcccagaagggacgcggagccccggaggccgcggcgg

SEQ ID NO: 73867 - RNA, 69 nt, Homo sapiens
gccaaaggaggaaccccccgacaagacggagaacaaacaaagacgaaaaagagccacgcccccacgagc

SEQ ID NO: 73868 - RNA, 77 nt, Homo sapiens
cggcaccacagcaggcagagccggaacgcgcgccacccggcagaaacgcacccagacgagagcggccagaccgagag

SEQ ID NO: 73869 - RNA, 57 nt, Homo sapiens
cgacacagcacgaggaaagcggaggaggccgccgaaggaggagcccccccggggagc

SEQ ID NO: 73870 - RNA, 71 nt, Homo sapiens
cggacccaggcgaaaccgcaggcgggacaagaaaagaaaaagcaacagaaaaacaaccggaagccggaaga

SEQ ID NO: 73871 - RNA, 80 nt, Homo sapiens
ccggaggagcggagagcgagcggcaacccggagggcggagaacggaaaagcaccaggaagcagagaggaccgcagaaggg

SEQ ID NO: 73872 - RNA, 78 nt, Homo sapiens
ggcacaccgcggggccgaaaacaacgacaacgagcacagggggaaagcaggggagaaaagaaaagaaagacgggaaag

SEQ ID NO: 73873 - RNA, 68 nt, Homo sapiens
gaaaacagaaacaaagggagcaccaaaggacggaaacagcaaaaccccgggaagagcggagggccagg

SEQ ID NO: 73874 - RNA, 60 nt, Homo sapiens
cggacgaggcggcggagaacaagcggcagcaaacggggacagcgccgaccggaacaggga

SEQ ID NO: 73875 - RNA, 75 nt, Homo sapiens
aacaccccccgggcaaccacggcgcgaagaggccagaaagcaccaacaaccggcaaaacaaagaacaaagacaaa

SEQ ID NO: 73876 - RNA, 73 nt, Homo sapiens
cacaggacaaaagaagaagcagcaagcaccagagccggacccacaacaaccaggagccaaaggaccagaacgc

SEQ ID NO: 73877 - RNA, 68 nt, Homo sapiens
aacccccgcacggaaggagcaagagacagggaacaccgcacggcgagacgcggaaaaagggcaacaga

SEQ ID NO: 73878 - RNA, 78 nt, Homo sapiens
ggacccccccccccccccaaggccaagaaaaggagacggggcggcgcggccaaagcagaaaccaagaggaggaggagc

SEQ ID NO: 73879 - RNA, 86 nt, Homo sapiens
ccggccagcgcggcgcgcgcgcccgccgccccgcccacgaggagcacagccgggccgcgcgaagggcagccgggccaggggccccc

SEQ ID NO: 73880 - RNA, 70 nt, Homo sapiens
gcccccggaccacacagcgcccaggccagagaaggggaaggaggggcagcgcggagccccggccgaaaac

SEQ ID NO: 73881 - RNA, 84 nt, Homo sapiens
cggcccaagaaacaaaaaaaggaaacacacaaacgcagaggccagaaaagggcggggcaccggcgacagcggccgccaaacgcg

SEQ ID NO: 73882 - RNA, 73 nt, Homo sapiens
agaaaaaaggcgaggaggacaccgcaaagaagcaaggccgaagagcgagaacgggaccggagaacggacgaaa

SEQ ID NO: 73883 - RNA, 39 nt, Homo sapiens
agcacccaagagccaacagcgccaacgaacccaccacga

SEQ ID NO: 73884 - RNA, 80 nt, Homo sapiens
gccacccgcggacacgcaaggggccaagaaggccgggcgccaccccaaaccaggaaagacaggaccgcacaggacgagcg

SEQ ID NO: 73885 - RNA, 56 nt, Homo sapiens
caacgcgccacgaaggccaggccagggagggaaagggagcagcaccggccacaccc

SEQ ID NO: 73886 - RNA, 78 nt, Homo sapiens
ccggagggaggaagcgggacacccgggagcaggaaaggggccggacaaggacgacagcaggggagccgcagaaagcgc

SEQ ID NO: 73887 - RNA, 38 nt, Homo sapiens
gaaagggaagcgggcgagagggcccggcaggaaccgga

SEQ ID NO: 73888 - RNA, 57 nt, Homo sapiens
aagcgacaagagacagcagggagccagggacgagcgggggacagcaagcaggagaca

SEQ ID NO: 73889 - RNA, 34 nt, Homo sapiens
gagacggaagggaaagaggacaaaccggcgacca

SEQ ID NO: 73890 - RNA, 121 nt, Homo sapiens
ccgagccgccgcccccgggaggccggcgccgcagcccgggcccaggccccggcagcgccgggacaagagggggccccggggcagccagcagaaggaagcccaggcccggcacaagaacccc

SEQ ID NO: 73891 - RNA, 77 nt, Homo sapiens
cagaagggaacaacacccgagggcccagggggcccgggcccgcacacccggaagagggacacaaggcgaggggaccc

SEQ ID NO: 73892 - RNA, 68 nt, Homo sapiens
caggaccacaaacagcaacacagaacgcaagaaggccggggggggcacagagccccggaagacagccc

SEQ ID NO: 73893 - RNA, 75 nt, Homo sapiens
ggcccgggcagccgcgccccacgcggcccgagccccaggagagccgaggacccacccccacaagacaacaggcgc

SEQ ID NO: 73894 - RNA, 83 nt, Homo sapiens
cccccagcagcagcaacagcagcgccccccaccccaccgccaccgaggcccccccgccccccaggcaaacacggagaagcgac

SEQ ID NO: 73895 - RNA, 77 nt, Homo sapiens
acagccacaccgcggggagaacggcgccgccaaccaaaccagccggaagggagacagccgggaggaacaagaccccc

SEQ ID NO: 73896 - RNA, 69 nt, Homo sapiens
ggcggaagccacacaggccagaacgagggaacagagacagacccgggggcccccaaggagagggaagaa

SEQ ID NO: 73897 - RNA, 61 nt, Homo sapiens
gacagaacagaacccaaaagccgacaaccccagaaacaggaaaaggacacccaagaaaaag

SEQ ID NO: 73898 - RNA, 56 nt, Homo sapiens
ggacaccggaccccggacgcgggaaaggaagaagagagggcgaaggaggccacaca

SEQ ID NO: 73899 - RNA, 76 nt, Homo sapiens
acccgcccgcgccccgccgcggggcgcgcggcgccggcggcgcgcgacccccgcgcagaacagagcgaagggaagg

SEQ ID NO: 73900 - RNA, 82 nt, Homo sapiens
cgcccggcggcggcgggagcccaggagccgccccgcccggggacgaagagcgcagcccccggcggcggcgccgacaccggaa

SEQ ID NO: 73901 - RNA, 75 nt, Homo sapiens
gaaccagcgccacaaggccagagcagccaggggaaaagaggacccgccaacaggaacggccgaacacagagggag

SEQ ID NO: 73902 - RNA, 90 nt, Homo sapiens
gagcaaagaagacagcaagaggcaaaaccggacaagaggccaaccaaccggagaaccaccaggccccgaaagagccagagaaggaaggag

SEQ ID NO: 73903 - RNA, 69 nt, Homo sapiens
ccacaccaagacaccaggggagaccaaccaacgaaacgagcccccaagggagcgagggcacacgagaaa

SEQ ID NO: 73904 - RNA, 40 nt, Homo sapiens
gggaaacccggagaccaaaccgaaaagacgagcacccgcc

SEQ ID NO: 73905 - RNA, 71 nt, Homo sapiens
aagagcccaggaagcacagaaaggagagcacggccacgaggaagcgcaaagaaagaacaagcgggaaacgg

SEQ ID NO: 73906 - RNA, 58 nt, Homo sapiens
gggcgcaacaagagcgacaaacgcaggcccccagggaggccgaacacacagcgagaac

SEQ ID NO: 73907 - RNA, 75 nt, Homo sapiens
ggcccccccccagcccgccccaaaagcgcccgaagagcggaaagagagaagaaaaccaggccggagaacacggac

SEQ ID NO: 73908 - RNA, 70 nt, Homo sapiens
ccgccacagcggaaaaaagacagaaaggaccggaagaaaaagcgaaaaacaaaacaaaaagagagaacgc

SEQ ID NO: 73909 - RNA, 79 nt, Homo sapiens
gcggaggacgcggcagcccgggagcggcgagggaaaagcgaggcaaggcaggcggggccagaacgcggagacggacaag

SEQ ID NO: 73910 - RNA, 57 nt, Homo sapiens
cccgcgccgccccgaagcccagacaaggacgcggaaccggcgccggccgccaaccac

SEQ ID NO: 73911 - RNA, 74 nt, Homo sapiens
gagccgaaccaggccaacccagaaaggcccgagacaccccgcaacccagccgccacacggccagcgaaaccagg

SEQ ID NO: 73912 - RNA, 78 nt, Homo sapiens
ccaaggccaagaaacaggcgaccaaccaaggggaaaggccagacagcgcagcagccgccagcacgcaacaccaagcag

SEQ ID NO: 73913 - RNA, 84 nt, Homo sapiens
gcaagaggcggacaccccggacgaaccacaggaagcgcggggcggcggcgaaaggacgggcaagaaagccagagcccgaacgga

SEQ ID NO: 73914 - RNA, 86 nt, Homo sapiens
gcgagccgaaggcgcccaagcagcagcgccggagcccgagggacggggacggagagaacacgagcccacagagacaggaccacagg

SEQ ID NO: 73915 - RNA, 70 nt, Homo sapiens
aagaccacacagaccagagggagaggcgcaggccagggaaggaaaacagggcgcagaaccccaggaggca

SEQ ID NO: 73916 - RNA, 62 nt, Homo sapiens
gaaaacagcccccgcagaaaaggaccgagccaggagacacgagccggagaggaggccggagc

SEQ ID NO: 73917 - RNA, 65 nt, Homo sapiens
acggcggcagaccggagaggcgcggcacaggaaagggacacgagaaacaagaacaccggaaggaa

SEQ ID NO: 73918 - RNA, 62 nt, Homo sapiens
ggggccgcgaggaggccggaggccgccgacgaccgcccgacaaagggaaccgacagaacgga

SEQ ID NO: 73919 - RNA, 91 nt, Homo sapiens
cccgacgcaacgcggagcgcaaggcgagggacgagaacgagagagcgaaccaggggagcggagacaccacgggcagcgcaaaagcaaagac

SEQ ID NO: 73920 - RNA, 57 nt, Homo sapiens
gacacagcccgcggaggcagcgggagcagggagaaaaagacggacagaagcgagagg

SEQ ID NO: 73921 - RNA, 59 nt, Homo sapiens
cagaagcgcagaaaaagggacccaggccggagcgcgaagacgcagggaaagcggcacac

SEQ ID NO: 73922 - RNA, 101 nt, Homo sapiens
ggaccgggacagccgcggcccccgagagccagccgcgaggagcgccggggacgaggccggggcggccggccgcaccaaagaaccccaccggagcagagagc

SEQ ID NO: 73923 - RNA, 82 nt, Homo sapiens
cccgcgccgaggccgcgggcggcgggcccggcgcaaacgccaaggcgccggggagcaggagaagaaggcacccagcgagacc

SEQ ID NO: 73924 - RNA, 72 nt, Homo sapiens
ccccgaaggcggccaacggccagggcgaacccagggagcaagagccgcaagcagaaggagcacccgaaacgg

SEQ ID NO: 73925 - RNA, 73 nt, Homo sapiens
acaaaggagagcaggagagacaaagaaccagagccggaaccagccagagaagaccgggcacccggagcggcac

SEQ ID NO: 73926 - RNA, 92 nt, Homo sapiens
accccacaacaccagaacaaaaggcagggagaagaggaagaccagccagaaacacccacagacccaccaaaggggagacaagcacggagacg

SEQ ID NO: 73927 - RNA, 67 nt, Homo sapiens
aagcacaaaaggacaaaccaacgcaccaggcgaccagacaagccagcgaaaccagccccaagcgcag

SEQ ID NO: 73928 - RNA, 84 nt, Homo sapiens
ggcgcccaccgcagcaaggacgccgcagcagggaaagcaggcaggagggagagcgccgaagaaccaccccccgccccgggcggg

SEQ ID NO: 73929 - RNA, 84 nt, Homo sapiens
aagaacgggaggggacgggcggcccagcgggcgagacggaggaggagcgcagaggcggagacagaggggccaacccgcgagcgc

SEQ ID NO: 73930 - RNA, 79 nt, Homo sapiens
accaggccaccggccccaccaaaaagaagaagagccaaggaaaacggcccacgacgaccaagaccacccccgagcaaga

SEQ ID NO: 73931 - RNA, 86 nt, Homo sapiens
aagagccaggaccaccggaagccagaaaggaagaacagggcaggacggacacaagccggaaaccaaaaaggccaagccccagacaa

SEQ ID NO: 73932 - RNA, 39 nt, Homo sapiens
ccgccaccggggagcgaacacaggcagcagaccacagac

SEQ ID NO: 73933 - RNA, 56 nt, Homo sapiens
acggaggaaacagcgagggggaggagacggggaaggagaggacagccgcagacagg

SEQ ID NO: 73934 - RNA, 73 nt, Homo sapiens
acagaaaaccgaggcaccaagccggccagcaagacccgagcccaacagcacaaggggggggccgggcgggccg

SEQ ID NO: 73935 - RNA, 83 nt, Homo sapiens
gagggagcccccggcgggggcaagggcacaggcaggaggccgagcgacaggaaccagcgggaccggggccccggcagcagccg

SEQ ID NO: 73936 - RNA, 81 nt, Homo sapiens
ggcggcagcgggccagacccaggaccgcgacacgagaacacgggaggcccgcgaccacggaagaagagagccgagcaggag

SEQ ID NO: 73937 - RNA, 57 nt, Homo sapiens
gccgacaaccccagaaacagggagcggcaggggaggcgaagaagagcccggacagaa

SEQ ID NO: 73938 - RNA, 79 nt, Homo sapiens
gaaagacaaaaggaacgaagaaaaagccccaagaagagaaaggcaaaacaggaccacgaaaaacacacaacacgacgca

SEQ ID NO: 73939 - RNA, 76 nt, Homo sapiens
gacgaacaggaagcggacgcgcagcggaacagcggccaagcccaggaagcccccaacaagacaggaccggggacaa

SEQ ID NO: 73940 - RNA, 75 nt, Homo sapiens
ggaggcaccaacaccaaaggccaagcagagacaagagggaaagccagggaacaaaacaaacccccagagcccagc

SEQ ID NO: 73941 - RNA, 64 nt, Homo sapiens
gcggggcggggagccggccccgggcccacggaaacagccacaggcaccagagacggggcgccgg

SEQ ID NO: 73942 - RNA, 50 nt, Homo sapiens
accccgaggaagacaacggacagaaagcgggacacaagcaggagcacaga

SEQ ID NO: 73943 - RNA, 82 nt, Homo sapiens
gaggcggcaaaaaagcaaacacgaggccacggggaaacacagcagaacacagcgccccacaaagccaagcgaggagagacca

SEQ ID NO: 73944 - RNA, 75 nt, Homo sapiens
cccgcgggcgccagagccccacaccccggccagcgccgagcgggaagccccacgcccaagcgggagaaagcccaa

SEQ ID NO: 73945 - RNA, 73 nt, Homo sapiens
ggaacccagggggggagaagggagggaaaacaaccacagccggaaggggcgaccggaccgggagaagaaggcg

SEQ ID NO: 73946 - RNA, 77 nt, Homo sapiens
agaccgccccgcccggagcgagggggcgcccgccacgacagaccgacacgacgcagcacaaagagccgcagacgcac

SEQ ID NO: 73947 - RNA, 84 nt, Homo sapiens
gggaccgagcgcgccgcccggcgccggcccgcccccgcagcagcgccaggacccaaggccagccagccccaggcaccagcggac

SEQ ID NO: 73948 - RNA, 74 nt, Homo sapiens
gcccaaggacccccaccagccccaagagcgggaccacagccgaagcaggacacaaagaaaagacgaaggaagca

SEQ ID NO: 73949 - RNA, 41 nt, Homo sapiens
cacacagcgaccgggagaacaagacgcacggcgccaccggg

SEQ ID NO: 73950 - RNA, 78 nt, Homo sapiens
accgcgggccagcagaaggccggcagcacaagcggaacacgccccgcaaagagcgccggagacaaggccgccccaacc

SEQ ID NO: 73951 - RNA, 77 nt, Homo sapiens
agaccgagcagaacccgaggcgcggcggcgagaagcaacgaaggaagcgccacgggagggcaggagaaggagaaaac

SEQ ID NO: 73952 - RNA, 105 nt, Homo sapiens
gggacagcgacgacgcggaggcagagaagggaacgcccggcccagccccgaaggaggcagaaagggagccccaagagagagggccaagccaaccggccaaaacaa

SEQ ID NO: 73953 - RNA, 73 nt, Homo sapiens
cccagcgacacccgcgcccggagaaagaagaacacgcggccccggcaggccgagccgccccgcggcgcagggc

SEQ ID NO: 73954 - RNA, 76 nt, Homo sapiens
gcgcccgaagcaccgggagggcacaaagagaacggacagaaagacagagcaaccacggcaggcaagcgaaagaaaa

SEQ ID NO: 73955 - RNA, 87 nt, Homo sapiens
ccgccgccaccagcccaagagaaagggacccggcaaagagagaggcacacgccgccgaaggccaggagcagaggccaacgccccaag

SEQ ID NO: 73956 - RNA, 77 nt, Homo sapiens
gccgcgcacccccggccggaggcaccagcaccggaaacaggcacagaacagaaggaaaggacgaagagcccaggaac

SEQ ID NO: 73957 - RNA, 60 nt, Homo sapiens
cccacaccacgacaccgaaaacccaccgagcccgccaaagaaggggccgcccgaaagaag

SEQ ID NO: 73958 - RNA, 81 nt, Homo sapiens
cacggggccggcggccacggccggaaggcagcaagccaggaccgcgaagcccagagcacccaaggaccacccccacaggcc

SEQ ID NO: 73959 - RNA, 72 nt, Homo sapiens
ggcaggaaaggaagaaaggaaacacaaaacgggccaaaagggcggggaacggaccaccagccccaacgcacg

SEQ ID NO: 73960 - RNA, 66 nt, Homo sapiens
caagccggaggagaagcaagaaggcccggacacagcaaaccgggccacagagagacagcaaagccc

SEQ ID NO: 73961 - RNA, 89 nt, Homo sapiens
cgcggccccgagggagggcaaaccggaacccacccgagagcaacaaagcaggcgacacagccacggaagccagccccaggaaacagccc

SEQ ID NO: 73962 - RNA, 80 nt, Homo sapiens
cccagaacccagaagccaccaagagaggcgcaagccgcagcgggccccgcggaccggaagcccaagaccacccacggggc

SEQ ID NO: 73963 - RNA, 72 nt, Homo sapiens
ggagacaaacagcgacaggcaaaggaagaccgcccccgacaaagaagacgccccaaaaggggaaagcagcaa

SEQ ID NO: 73964 - RNA, 91 nt, Homo sapiens
agaggccagaggagaagagagagcaaagaaaacaggaccagccaaggaagcaacacagcagcgagagaagcagaaaaagcagaagaaaaaa

SEQ ID NO: 73965 - RNA, 82 nt, Homo sapiens
cagccaccacgcaccccccccgcaagccacacccaggggccgggagaggaaggccccaagcagccagcagaaaagcaaccag

SEQ ID NO: 73966 - RNA, 82 nt, Homo sapiens
ggggcagcagcagccgcagcaccagcaccaccaccaccgcggaggagccacgcaggggagggcgacccgggccaggcgaacc

SEQ ID NO: 73967 - RNA, 76 nt, Homo sapiens
agaagaggaaaaccagagacgggagaggaagaacacagccagaacaagccgggagaggaacagcgcgccgggcgca

SEQ ID NO: 73968 - RNA, 79 nt, Homo sapiens
gcaggcgcaaggccaggcgacccgacgggccaccgagagaaaggcagaaggaacgacaccacagaagaaaagaagaaaa

SEQ ID NO: 73969 - RNA, 115 nt, Homo sapiens
cggggcgccgcaagaccgggcagacggcccaacgaggcgagggcgccccaggagacgcaggagcggagcggccaaaacaacaggcccaggacgagaaaggaacaagccacaacac

SEQ ID NO: 73970 - RNA, 89 nt, Homo sapiens
cggagcgccaccggcaaagaggggcagaacccggccccaaggacaaggggacagagaaagaccagggcagaggaagaacgcagggaaaa

SEQ ID NO: 73971 - RNA, 68 nt, Homo sapiens
gaaccgccgcgaggacacccggcgcagccccacccaggcacggggcaagacgccaagagaaaaggcga

SEQ ID NO: 73972 - RNA, 40 nt, Homo sapiens
gaagacagggaagccagacaggccagcagggcacccggag

SEQ ID NO: 73973 - RNA, 82 nt, Homo sapiens
gacgggacaagagaacagccgcgcggcgagcggcccgcacaaggccggcagagaaggggagaaggaacccccgacaacacac

SEQ ID NO: 73974 - RNA, 78 nt, Homo sapiens
ggcgaggcgcagggcccccacaccgcgccgccaaggcaagggagggagagagcaaaaccaggcccaagggccagcgcg

SEQ ID NO: 73975 - RNA, 95 nt, Homo sapiens
agcgaaggccagcggcaccgacagggacaccaccgaaccccagcccaagccgcgcccgcaaggcgccaccggaagaaacgggaggggaggagccg

SEQ ID NO: 73976 - RNA, 69 nt, Homo sapiens
cacgggagggccgcagccagcagagagaccccaagaacccgaggacagacaagaacacgagacgaaaag

SEQ ID NO: 73977 - RNA, 47 nt, Homo sapiens
gagagacacaggaacggcaaaagcagaccggaaaacccaccggcaag

SEQ ID NO: 73978 - RNA, 68 nt, Homo sapiens
aggaggcggcgcggcggccccgggaccaaggaggccagccgccgcagggaagacgccgggcccgcagc

SEQ ID NO: 73979 - RNA, 71 nt, Homo sapiens
gcggaagaccgccaaaaaggacacggagccagggagagagaggggaacacgccagaccgagcacggcggga

SEQ ID NO: 73980 - RNA, 74 nt, Homo sapiens
agccacggagagccccggaggaccggacccccaagcacccaaaagaaaaaaacagaggcgggaaacacggcaaa

SEQ ID NO: 73981 - RNA, 83 nt, Homo sapiens
gacaccggaagcgggaaaggccagggagaccagggggcaggggaggagcgcccaggcgaccggcgaacaggcccccccagggc

SEQ ID NO: 73982 - RNA, 76 nt, Homo sapiens
ggcaaacgaggaaaacagcgccgaaggggaaacccaacccaacaaccagaagaaagggaaccaacaaaagaggcca

SEQ ID NO: 73983 - RNA, 56 nt, Homo sapiens
ggaaccacgagggaaggagagcagcaaaaacaagggaagcagagccccgggccggg

SEQ ID NO: 73984 - RNA, 85 nt, Homo sapiens
gaagaggacggaggggaagcgggaggcgagcgggggggccgcacagagccagagagcacgaccagcaaacgggcaacgaaaccag

SEQ ID NO: 73985 - RNA, 76 nt, Homo sapiens
ccccagccaggggccggcgccggcgccgcgcccgccccggccacccggccagcgaggcaacagcacgaaaaaacag

SEQ ID NO: 73986 - RNA, 84 nt, Homo sapiens
cgcagaccgagacccggacagggcaggaaacagggagccaccagcgggcagcacaggaccccaccaccagccggcccgcgggcc

SEQ ID NO: 73987 - RNA, 76 nt, Homo sapiens
ccagccggcaggcaggccgggcgcgggaccggagccgcgcaaggaagggcgcgcaggaacaagaagaagggcaacc

SEQ ID NO: 73988 - RNA, 56 nt, Homo sapiens
ggaccccggacgagcccggcgagggaacagaaaccgcaccagagaagcagacgagc

SEQ ID NO: 73989 - RNA, 82 nt, Homo sapiens
gagcgaccgccgccccacgccggaggaaccgagaagagcagagcggagggagccccagacacggccgcccaggagacccgcg

SEQ ID NO: 73990 - RNA, 83 nt, Homo sapiens
caggacacgcccgcagccaggcaaaaagcaccaccgccagcgaagcaccgagagaaagacacagagaccacacgggccagcca

SEQ ID NO: 73991 - RNA, 75 nt, Homo sapiens
ccccaaagagagacacaagcgggacagcccagccaggcccagagaagcccaaaagcaaagcagggcagcaaagaa

SEQ ID NO: 73992 - RNA, 95 nt, Homo sapiens
gggcgaccgaccgagcagggcacacccgcgaggaagacagcaaaggcggggagacacccaagaaaacaaagaaggggcagagagcgaacacgaac

SEQ ID NO: 73993 - RNA, 79 nt, Homo sapiens
ggcgggcagacagcagagccacaaagggcaaggccagagaaggcgggagaaagacacgaaccacagaacgcaacaggac

SEQ ID NO: 73994 - RNA, 37 nt, Homo sapiens
ggaccagcagaaaccagaggaaaacagaaacgccgga

SEQ ID NO: 73995 - RNA, 78 nt, Homo sapiens
ggaaacaagcccacccagaaaaaggcccgggacccaggaaccagaaacgaggaaagaaccaaggaagacacccgccga

SEQ ID NO: 73996 - RNA, 56 nt, Homo sapiens
cagcagcccgagcaagcgaaagccagccccccacgacgaaagccaagaaaggacac

SEQ ID NO: 73997 - RNA, 50 nt, Homo sapiens
gaccaagaaccagggccgggagccagccccagcgccccaaaagccgccag

SEQ ID NO: 73998 - RNA, 81 nt, Homo sapiens
agcaagaaagaccacaagaccaagcccagaccccacagccagccgagggcgagaagcacagaaacccgcagacaccccaga

SEQ ID NO: 73999 - RNA, 71 nt, Homo sapiens
ccacccagaggagcaacgggaaaaagaaaagggcgaagacccgaagcagcgcaggaacagaagagaagacc

SEQ ID NO: 74000 - RNA, 73 nt, Homo sapiens
gcacagcgccccaccccagaggcgcggagcgccccagggaacccgccacccccacccggcgccccgcgacgag

SEQ ID NO: 74001 - RNA, 75 nt, Homo sapiens
ccagagagggaaaaaaaagaccgaccgcccaggagcacccccaaaacagcaagaggggaaacaacagaagaagca

SEQ ID NO: 74002 - RNA, 79 nt, Homo sapiens
caaaccgacaggcaccaggaggaaaaccgagggagccggaaacaaagaagaggagaaaaagccaaggaaaggcccacag

SEQ ID NO: 74003 - RNA, 78 nt, Homo sapiens
agaaaacgacccaacagcaaaggacccccacccacccgagaacagcaaaagcagaccggaaaacccaccggcaagacc

SEQ ID NO: 74004 - RNA, 79 nt, Homo sapiens
ggaccacagaccgcgcgcccacacagccccgcggaagacccgaggaccgggaacgaaggggccccgaggaagcagaagc

SEQ ID NO: 74005 - RNA, 63 nt, Homo sapiens
acaacgcaaggaaagagggagaaaacgggccggaggaaaagggcggcaggggaccaccacaca

SEQ ID NO: 74006 - RNA, 80 nt, Homo sapiens
accgcaggacggacccaggggagcgcccccgaaggcaggacagcggggcggcaggccccgcagggggagcccgcgccagg

SEQ ID NO: 74007 - RNA, 39 nt, Homo sapiens
cccggagagcgggacgcaggcgaaaagacaaacgacaaa

SEQ ID NO: 74008 - RNA, 69 nt, Homo sapiens
aacggcagaagccaccacaaaagcgaaagggcacaccacagagcagccagacacagcccaacgccacca

SEQ ID NO: 74009 - RNA, 81 nt, Homo sapiens
gaacccagacccaccgcagccccgcaacgcagacccagcggcagcgcaggggcagaccggcggggaggggacgggggccca

SEQ ID NO: 74010 - RNA, 79 nt, Homo sapiens
acagcaggacacagccaggagagcaccgaaaagagcaagaaaacgcccagccaccaaggggcgacgagaggccaggggc

SEQ ID NO: 74011 - RNA, 77 nt, Homo sapiens
caaagaagcagaaagagcagaaaggagggggcgagaaggcgggaagccgaaggcagccacagaaaggaagcacgcgc

SEQ ID NO: 74012 - RNA, 68 nt, Homo sapiens
caggcgaaaacaaagcggccacgaggcaggaaggcagaagcaacacggaaagacaccgagcagacaaa

SEQ ID NO: 74013 - RNA, 83 nt, Homo sapiens
acgccagcggacacgcgggcgaggcaccaaccagcggacacacggaaaagggacgggaaaagccgagaaagagaagaagccca

SEQ ID NO: 74014 - RNA, 70 nt, Homo sapiens
aaaaaggcacgagggaacgggaaagaacagagaagaagcagcaaacccccgcagagcgcgacgggaaagg

SEQ ID NO: 74015 - RNA, 80 nt, Homo sapiens
cccgagcggagcggggcgcaggcgccgccgccggacgcggcaacggagaagcacgacagaacgccagggaagaaaaaggc

SEQ ID NO: 74016 - RNA, 74 nt, Homo sapiens
cgccccgcagccccccgcagcacccagccggccacgaccacagaagaccagcccgccgccagcaggccccacgg

SEQ ID NO: 74017 - RNA, 37 nt, Homo sapiens
gcggaagggccaaggcgcgagaccaccccgaccggcg

SEQ ID NO: 74018 - RNA, 60 nt, Homo sapiens
gacaggagcacacccggagaagcaggagcccaccggcagagaaagagcgcgcacgaaagc

SEQ ID NO: 74019 - RNA, 62 nt, Homo sapiens
ccgacggagccggaaacagccccgccccaggaggaggccgaaacgacgccccccagacacag

SEQ ID NO: 74020 - RNA, 76 nt, Homo sapiens
caacgcgccacgaaggccaggccagggaggcccgccagcaagaggaaaagcagagacacccggcacccaggacggg

SEQ ID NO: 74021 - RNA, 81 nt, Homo sapiens
ggcagccgcaccacaggcgggccgcaaggagcggacccaccggccaccggcggagcgagaagcaaagaggggcaacggcag

SEQ ID NO: 74022 - RNA, 88 nt, Homo sapiens
ccgagcccgggcgcgacgcgaggcaacgcaacgcgcagcccacaaacccccccacgacaccgaagcagcgacggcacagcgggaagaa

SEQ ID NO: 74023 - RNA, 64 nt, Homo sapiens
agagcaaaaaaggagaaggcaaagagggggcacggcccggagcgaccccccccggacgaccaca

SEQ ID NO: 74024 - RNA, 51 nt, Homo sapiens
aaccccagaccggagccagacagcagccaagcgagacgacgggaccgaagg

SEQ ID NO: 74025 - RNA, 37 nt, Homo sapiens
aaaggagccccaccaagcaacgcacccgcccccaaag

SEQ ID NO: 74026 - RNA, 76 nt, Homo sapiens
ggagcaggaggggaggaggggagagagcggcgccagagaggaccagaccagaaggggaccccacaccacaaaccga

SEQ ID NO: 74027 - RNA, 68 nt, Homo sapiens
aggagcgcagagacagaccagggaacagaaggacaacggacacagcaaagagcgacaagaagcagggc

SEQ ID NO: 74028 - RNA, 83 nt, Homo sapiens
aacccgccgcgcgccgcgaccccaagcagcggcccagcaggagggcggggccgcggcagccacccccacagcacgccacacgg

SEQ ID NO: 74029 - RNA, 31 nt, Homo sapiens
gcaccacaggcggacagaaagcgcgcgcccg

SEQ ID NO: 74030 - RNA, 77 nt, Homo sapiens
acgaaggggcagaggccaagagcccaacaccacccgagagccccaagaaagcggacgccggaagcggagaagaaggg

SEQ ID NO: 74031 - RNA, 78 nt, Homo sapiens
cgaaaaccacaggccagcaaccaagaacccacaaagccccgggggccacgcaaggccggccccgagagccaaagccgc

SEQ ID NO: 74032 - RNA, 73 nt, Homo sapiens
caaacccgcgcacgacgggaacaacaagcgaaagcacaagggaagaagcaagcgagggaaaaagcgggaggag

SEQ ID NO: 74033 - RNA, 68 nt, Homo sapiens
gcggggcgcgggcgggaccgccgagaagccaggccccggcagcaaggaccccaaggccgacagcggcg

SEQ ID NO: 74034 - RNA, 84 nt, Homo sapiens
aaaggggacacccggaggcggcgcagcagcaccgaggaccgaaagcggggggagcgggcaagcagcaggggaggaggacgcaga

SEQ ID NO: 74035 - RNA, 56 nt, Homo sapiens
cggcccccaaaggcgcaaacagggggcaacaaccacccccaagcacaaggaagaag

SEQ ID NO: 74036 - RNA, 69 nt, Homo sapiens
gcaagagaggaagaagaacgacccgcccggggcagcagggcacgagacaaggaaagcacaaagagccag

SEQ ID NO: 74037 - RNA, 91 nt, Homo sapiens
ccgcccgcgcccccggggccgcggagccagagacaccaggcgccgagaaggccagcagagaaacaggcaggagaggcccacaggcgcggac

SEQ ID NO: 74038 - RNA, 76 nt, Homo sapiens
aggcggcgcggagagggggcgcgagcgggggacccaagcccccgaccgacagaacacaaacaccaaaaacaagaca

SEQ ID NO: 74039 - RNA, 75 nt, Homo sapiens
cgcccggcgcccgcgggccgcagcggggggggcgcccgcaacgaggaccagaaggaggcgggaaaggcagaagcg

SEQ ID NO: 74040 - RNA, 70 nt, Homo sapiens
caaagcaaaccaggaagcggcagagaaaggacaggcaacccaaaaggcgcgcccgccacaaagaccaaga

SEQ ID NO: 74041 - RNA, 57 nt, Homo sapiens
cgggccccagcgccaaccaaaccgaaagccagaagagaaaaacggcagcagccaagc

SEQ ID NO: 74042 - RNA, 34 nt, Homo sapiens
agaagaggcgcggcccagagaggggcaccggaac

SEQ ID NO: 74043 - RNA, 71 nt, Homo sapiens
cgacccagaaggcaccgaggaaagcaaaggaggaagccccacagaagagcgaaggcgagccccaacagacc

SEQ ID NO: 74044 - RNA, 57 nt, Homo sapiens
gggaaaggcggagacggccccaccggcaccgagaaagacaagcagcccggacggaga

SEQ ID NO: 74045 - RNA, 65 nt, Homo sapiens
cgggaggacgaagccggccgcaggaaacccaccagagaaggcgcggccacccaggacccggggga

SEQ ID NO: 74046 - RNA, 71 nt, Homo sapiens
ggaccaccaccgaaggaacggacaacaaggaagaagaaccgcagagaggaaaggcgccacacacccccagc

SEQ ID NO: 74047 - RNA, 70 nt, Homo sapiens
aagacaagaagaaaggggaaagcaagaaaaagagccaaacggagaagccagcggaggggggccggaggcg

SEQ ID NO: 74048 - RNA, 80 nt, Homo sapiens
gcagcgggggggcaggcgacgaagagacgccggggcccggcgccaccaccggggagccagagcaagaggccaaggcccca

SEQ ID NO: 74049 - RNA, 78 nt, Homo sapiens
agacgcaggaagaaccacaacaagaaagcagaaacgaaagaaagcaagagcaaaaccaggcaagcgccagcaggaccc

SEQ ID NO: 74050 - RNA, 83 nt, Homo sapiens
cgagccgcccccaggccgcgccgagcccgccgcgcgggcccgcccgacgcggaagacagcgaggacagacagcgcaggacagc

SEQ ID NO: 74051 - RNA, 81 nt, Homo sapiens
gcaaccgcccggcaacgccaaccgcccgcgcgcgcaggcgggcgcaggcccggcgcagcgcggggcgaacccacccggcac

SEQ ID NO: 74052 - RNA, 76 nt, Homo sapiens
gcggaccggaccacggcgcggagcgccgccagaggagaagccagaagaaccgaaaccgcagaggggggccccgccg

SEQ ID NO: 74053 - RNA, 78 nt, Homo sapiens
acgagcacacgcagaagggggaaagagaccgggacagaacagggggcaccagccgaagccaggcaagcaagaaccaac

SEQ ID NO: 74054 - RNA, 81 nt, Homo sapiens
gccacacagaaggacggcccgacggaagcccccaagacccccccgagaacggccccgcccaacaccaaccgacaccaccca

SEQ ID NO: 74055 - RNA, 68 nt, Homo sapiens
caaaacccagagggagaaggagacagccacggagcacaccaggaaaagggccacccccaaccaggacc

SEQ ID NO: 74056 - RNA, 75 nt, Homo sapiens
aaacggcacacgaaggcacccgacgcaacgcggccacgggaagaaagaagcaacacgaaggacaagaaggaagga

SEQ ID NO: 74057 - RNA, 57 nt, Homo sapiens
ggacgcacggaccaaaaacccgcaacagcccccgcccaaacgaaacagaggagccga

SEQ ID NO: 74058 - RNA, 72 nt, Homo sapiens
gcaggagacagacgaccgcgagaccgaggcacgggcaggcacagcagaccagaagcagcgaggggacaaaac

SEQ ID NO: 74059 - RNA, 70 nt, Homo sapiens
ccacgaggaacaaagacagcccaccaggaagagcgaaaagggcccgagacacccccgcgcaacagagcgg

SEQ ID NO: 74060 - RNA, 71 nt, Homo sapiens
caaccgccgggcgcccccggacagaccaacggcagaagcaacacggaaagacaccgagcagacaaaccacc

SEQ ID NO: 74061 - RNA, 75 nt, Homo sapiens
gcggccccagcggaaggcgccagagcccagcagccacagcaaccggccacgccagaaccgccccacccaggccca

SEQ ID NO: 74062 - RNA, 85 nt, Homo sapiens
ggggacccgcccgccaggccaccaagggcggaaaacaccccaaaagccaaaagggaaaggaaaagaccaacaacagcgcaggaca

SEQ ID NO: 74063 - RNA, 81 nt, Homo sapiens
cgcaagcgccaggcaagggagcccagccagggaaagaggcgaaaggagcagcgacggacccagagccagggcggccccggc

SEQ ID NO: 74064 - RNA, 52 nt, Homo sapiens
caacacccgccccaaccccaggacggaccagcgggggagacacgcagggggg

SEQ ID NO: 74065 - RNA, 51 nt, Homo sapiens
aacaaacacccaccagaagaccgcgaccagcaccagggccaggccaggaac

SEQ ID NO: 74066 - RNA, 63 nt, Homo sapiens
cccccgcgggaacaccacggcacggagcaacgcccaaggaaaggcccaggcacagcagacgca

SEQ ID NO: 74067 - RNA, 67 nt, Homo sapiens
gacacccgaggaacagaagagacagaggaagagaggcaaaccgacaccagcgacacaagcgcgaggg

SEQ ID NO: 74068 - RNA, 95 nt, Homo sapiens
cggcacagccgaggggccccgagagaacagggcaaagccaaggaccgaaggagaagaaggagaaggggaggagaaggcaagccggaaagagcgaa

SEQ ID NO: 74069 - RNA, 58 nt, Homo sapiens
cacccagcagagacagcaaccggccacgaggagggagcgcccccgagggaagcaaggg

SEQ ID NO: 74070 - RNA, 67 nt, Homo sapiens
ggagaggagcaaacagcaaagagaacgagcggaagcccggcgcacccggccacccaccgcgagcagc

SEQ ID NO: 74071 - RNA, 73 nt, Homo sapiens
acaccacaagaagggcgccagcgcacggaacggcggagaacagaggaagcgcgcgcagaaggggaagggaaca

SEQ ID NO: 74072 - RNA, 106 nt, Homo sapiens
cgccaaccgcaaccagacgccagcgggacgaggaccgagaccgcggccgggaccgagggaggcagcacggcaggagacgaggagaggacagcaggacacccggacc

SEQ ID NO: 74073 - RNA, 75 nt, Homo sapiens
gagaagagcagccagcaagcggaggacagcaggcagaagaccccaggggacggaagcacagagagaaggaaagcc

SEQ ID NO: 74074 - RNA, 84 nt, Homo sapiens
cgggcgggcgcacgcgggcgcacccgccccggcgccgccggcccgcgggaccgacagccgggcagagccgggccgcccgcggca

SEQ ID NO: 74075 - RNA, 72 nt, Homo sapiens
caaaagaccaaggcgcacacaggagagcacgagaggaaccagcaggcaaagaaagcaaaagaagagcgaccg

SEQ ID NO: 74076 - RNA, 61 nt, Homo sapiens
ccgcgcgagccggcggcccggagggggcggcgggacaaaggccacaaggacgccccagggg

SEQ ID NO: 74077 - RNA, 76 nt, Homo sapiens
cgagagcgcgaaacgcacgagaaggccggaaaggaaaaacaccagaacggaaacagaaggacacaccagagggagc

SEQ ID NO: 74078 - RNA, 73 nt, Homo sapiens
gggaaaagaacagaacccaggagcacagcagcgaagcagcagcaacgcccagaaagcagcaacaagggacgac

SEQ ID NO: 74079 - RNA, 76 nt, Homo sapiens
gaagagcaagcgggggaccgaacaaggcaaaaggggaaaacagccaggcaggcgcagaagagacaggggaggcacg

SEQ ID NO: 74080 - RNA, 38 nt, Homo sapiens
gccgggaggagagccccgggaagagcccaagagaacga

SEQ ID NO: 74081 - RNA, 75 nt, Homo sapiens
cgcccgccgaccgcggcagacggggcacgaagaacacaaagcaaaaaggaaaagaagagaagaagaggcaggagc

SEQ ID NO: 74082 - RNA, 65 nt, Homo sapiens
gccccaggaggcagcccgcccacacccgcgcaccccccggcacaacagggccgcaggccgggcag

SEQ ID NO: 74083 - RNA, 78 nt, Homo sapiens
ccaaggccaggacccccggagcccgaagacagcaccgccagccaagggaaggagacagcaaaaccgccggagcgaacg

SEQ ID NO: 74084 - RNA, 69 nt, Homo sapiens
ggagcacgagcaaccccaaaccaaacccgaccagcggcccaggaagggcgagaaggcccaaggcgaaaa

SEQ ID NO: 74085 - RNA, 86 nt, Homo sapiens
cgagcggaagcagcccgcggccggacccggcgggaccgccggaggaaggcgccgccgggaccaagcccaccaagggacgccagcac

SEQ ID NO: 74086 - RNA, 80 nt, Homo sapiens
ggcaccacgaaggaccgaagagcaaaagcagccaacacaacgaagaggcacagcagagaaggaaggccaagcccgacgag

SEQ ID NO: 74087 - RNA, 75 nt, Homo sapiens
acaaggccacgaaagccccacaccagaccacggagggagcggaaaccgacgcagacggaacgcagcaccagccca

SEQ ID NO: 74088 - RNA, 83 nt, Homo sapiens
ggagaagcaaggcgacgccagaggaggaaaggaagacaagggccacagagccgaacacagcagagggggacaagcccacggag

SEQ ID NO: 74089 - RNA, 73 nt, Homo sapiens
gcacccacgaacgcccaccccccgaacccagccgcaccgaacccaggacgagaaaaaacagagcggaacaagc

SEQ ID NO: 74090 - RNA, 92 nt, Homo sapiens
ggacgagcagcagcggccccaacacccccgaaggggacagccggaggcgaagggggccaccagaggagcacggagacgggccggcagggaga

SEQ ID NO: 74091 - RNA, 73 nt, Homo sapiens
gaacacagagggaagagaaagcaaacgagcagggcaaggagaaaagcagaagcccaggacgcccggcaccgga

SEQ ID NO: 74092 - RNA, 77 nt, Homo sapiens
ccgagagccaccggaccccagagccaccaacaacccaccagcagccaccaaggccgacggaaagagcaaacagcaag

SEQ ID NO: 74093 - RNA, 81 nt, Homo sapiens
agggaggccggacggaacacccggccccaggccgcagagcagaccagcagagcagcaggcccaaacccccggacaaacgcc

SEQ ID NO: 74094 - RNA, 85 nt, Homo sapiens
cgccgccccggggggagccaccgggagagccgagcagccccagcagcggagcgggcacggacacaagaacgagagccaaaggcca

SEQ ID NO: 74095 - RNA, 108 nt, Homo sapiens
caaggcggagcaaagaaaacacaggagaaggaaaggcaaaacggaggcgggaagggaaggagaagaacaagcacagggcacccgaacgccccagaagaaacagaaacc

SEQ ID NO: 74096 - RNA, 70 nt, Homo sapiens
gaaaggcgcccgccagcgagaggacaagggagaagagcagaggaggccgcagaagaacgagaccaagagc

SEQ ID NO: 74097 - RNA, 79 nt, Homo sapiens
aaggcgccagaagggccgaaccggacgcccagccccagaaccaaagcgaagaggagcccagacaaagacgaacgaacaa

SEQ ID NO: 74098 - RNA, 76 nt, Homo sapiens
accgcgcacacggcacaggcaccagcccgggcagcgagcgcaaaaagacgaagaggagcagaaccagaagggacac

SEQ ID NO: 74099 - RNA, 65 nt, Homo sapiens
gcaccgcaaagccggaaaggagaagacccgggggacagaccaggacaaaacaacagacaggaaga

SEQ ID NO: 74100 - RNA, 83 nt, Homo sapiens
cgccgggaaacaagcccccggaccgggaaccggcacaaggcacgggcacggcggacagagcggcgggaggggaaggagcagcc

SEQ ID NO: 74101 - RNA, 81 nt, Homo sapiens
ggaggaagcacacccgccagggacgggcacgggaaggacagggccaaagcggcaggagaaggaagggaccggaaacgacaa

SEQ ID NO: 74102 - RNA, 74 nt, Homo sapiens
aacaggcccgacccgaccccaaaagagacggacgcacaggaaggaaaaaggggacaaagccgcgaaaaggaacc

SEQ ID NO: 74103 - RNA, 55 nt, Homo sapiens
gggaaccgcggcgaaccggcgggaccccaagggcgagacgggacacccccggaac

SEQ ID NO: 74104 - RNA, 84 nt, Homo sapiens
ccgagaccgcggccgggaccgaggacccaacccggagccggggacggcacacgggcgggggcaacgggaggagaagacgagagg

SEQ ID NO: 74105 - RNA, 38 nt, Homo sapiens
cggccccccaccacaagaacagagagaagggggaggac

SEQ ID NO: 74106 - RNA, 78 nt, Homo sapiens
gggggcagaacccagaggcgggaggggccgggaggcagaggggcagggaaggccgccagaagacagccaaaacaccca

SEQ ID NO: 74107 - RNA, 84 nt, Homo sapiens
acgcgcaggggcccgggaaagggcagaggcccaacgcagaccgaggcgaagcgcgcagcgccggaacgccaaaagacgaacaca

SEQ ID NO: 74108 - RNA, 70 nt, Homo sapiens
gagaaccgagaaagcaacggaaacgaagaaggcccagcccaccagggcaaggaggaaggcccacaagcgc

SEQ ID NO: 74109 - RNA, 79 nt, Homo sapiens
acccaccaggcacaggcagaaaagccaggcacgaacagacaggagacaaaccagcaggcagaaaacaacgaaagaaagg

SEQ ID NO: 74110 - RNA, 87 nt, Homo sapiens
gcaaagccccagaggacaaccaccccaggacaggagcagaggacagcccagagcaagcacacggaggcccgggagccagaccgggag

SEQ ID NO: 74111 - RNA, 77 nt, Homo sapiens
gggaaacagagacagaaaggagggacgaagacaccgacggaagagaagcgaaggacgacagccaggggaggacacca

SEQ ID NO: 74112 - RNA, 61 nt, Homo sapiens
ggagccgagcgcccaagcgcgagcgagcgacgcgcccacggaggaggcgggggccccacaa

SEQ ID NO: 74113 - RNA, 77 nt, Homo sapiens
acggaaacagagcacccaagagaagagcgagccgcagccgacaaagaaaacaacccccaggccagacaaggaaaaga

SEQ ID NO: 74114 - RNA, 75 nt, Homo sapiens
cgagcccacccgaccgaaacaaccacaaaggacagaacacaggcaggcgagcccccaagccacgcacgaaaaacc

SEQ ID NO: 74115 - RNA, 82 nt, Homo sapiens
cccggaaccccaccccacagacccgccggggcgaaagccacggagcacccggcaaacagaggccgaccgcgggccgcgcacc

SEQ ID NO: 74116 - RNA, 79 nt, Homo sapiens
gggagaccaccgaaagcgggccaccaacggcggggggcgaggagcgagcaggagccgggcggcggccggggaggaaggc

SEQ ID NO: 74117 - RNA, 72 nt, Homo sapiens
agaaggcccggacacagcaaaccgggccacagacagaccaggacaacaaggaaaaggggggagagacaacca

SEQ ID NO: 74118 - RNA, 81 nt, Homo sapiens
agacaccagcccgaaacaccaccaaggcgcaaggaagaagagacgccgcgcggcagacaaggcccggcaggcaaagcgggc

SEQ ID NO: 74119 - RNA, 68 nt, Homo sapiens
aaaagcaccaacggcacaacacagcaagcccaggccgcacccaggacaaaaggacacacagaggggca

SEQ ID NO: 74120 - RNA, 77 nt, Homo sapiens
agaagagcaaaggcgagagccacaaccggccgggggcagccccccacccagcaccgcgcacggagcagcccaagccc

SEQ ID NO: 74121 - RNA, 74 nt, Homo sapiens
accagagccgcaacaggacccgacaaacggacagcaggaccagaacaaggagaagcaccgggcaggacaggaca

SEQ ID NO: 74122 - RNA, 48 nt, Homo sapiens
aaagggccaaagaagggagagaggcagcggcggccgcgcccaccggca

SEQ ID NO: 74123 - RNA, 67 nt, Homo sapiens
caccccccggacccagccccgggcaaaacgggcgggggcaaagaaccacaagaacaaaaggcaagaa

SEQ ID NO: 74124 - RNA, 87 nt, Homo sapiens
aaagggaaaacagaaacaggagaccgaggggagacagcagcaccagcggggcagagaccccagacacaagccgggaagggagcaccg

SEQ ID NO: 74125 - RNA, 74 nt, Homo sapiens
accaaggccaagcaaggagccaccacgggcgcccgacccgcaccaacggagaaaccagaacagaagacaaggaa

SEQ ID NO: 74126 - RNA, 70 nt, Homo sapiens
cgcccccggcgcgcccaggacccaaagacaggaccacgcaccagcagagaaggaaagcaaaccgaagcag

SEQ ID NO: 74127 - RNA, 79 nt, Homo sapiens
ccaaccgggcccggcccgcaggccacaagcggcgagcgaccacaccggccacagaggaagcggaacgcagggagaccac

SEQ ID NO: 74128 - RNA, 55 nt, Homo sapiens
gcaggacaggagaaaagcaccacaacagaccaaggcacagccacagccgcaagcc

SEQ ID NO: 74129 - RNA, 88 nt, Homo sapiens
aaaaaacccacacaggacgcggacaagggcggcaggcgaagggagggccgccccaaccgacgcaccagccggaggaggagggacaggg

SEQ ID NO: 74130 - RNA, 51 nt, Homo sapiens
agaagagaagaccgcagccacgagaaagagcagagcaggccaagcaccccc

SEQ ID NO: 74131 - RNA, 65 nt, Homo sapiens
acacgcacaaggaagcagcaccacaacagagccccgaaaaggaacggaaaaagagcgggaccccc

SEQ ID NO: 74132 - RNA, 66 nt, Homo sapiens
ggagcgagcgggcagcgcggccgcggagacagacagaagaaggacacaagagccaacaaaaggcag

SEQ ID NO: 74133 - RNA, 74 nt, Homo sapiens
agacaaagccagcacccaaaggagcaacagacagcccccagaacagcaccaggcagcacagaaaaccaagcgga

SEQ ID NO: 74134 - RNA, 78 nt, Homo sapiens
cgcgcccaccggagagccaccggacggccagcgcagcagcacaggacggcgcggagccggagcgaggcgggggaggca

SEQ ID NO: 74135 - RNA, 68 nt, Homo sapiens
ggacggcgccgcacgaggaccaccaggcacggcacggggcagagcagagcagggccggggaccgggcg

SEQ ID NO: 74136 - RNA, 75 nt, Homo sapiens
agacagaggaacaggggagcggagccccgcagaggggggaccacaggccacccaccgggggccccaagcaggacc

SEQ ID NO: 74137 - RNA, 86 nt, Homo sapiens
gcaagacgccgccgcgcccggaggcgaggcgacgggggaggccgagaaccgcagggacggccgagaaagaccacacagggaaacga

SEQ ID NO: 74138 - RNA, 71 nt, Homo sapiens
cggcgggagccggaacgggccaggaaagacaggagcagacaaaaagggcaagaacaaaaacggggggacac

SEQ ID NO: 74139 - RNA, 74 nt, Homo sapiens
caccggagacggggggaaacaggcgaggcggcggcgcccggagggcagcgagaggaaaggcaagggcagaaaag

SEQ ID NO: 74140 - RNA, 89 nt, Homo sapiens
gggagcggggccccacacccccccgggggggacaggacccagaccagccaaagagaagaagaaaggaagcaaaacaaagaaaaaaaaaa

SEQ ID NO: 74141 - RNA, 88 nt, Homo sapiens
ggcggaggccccagggaagcgcagaaagcaggcgaacccgcggcgcaaaacggagaaaagccaagcaggcaagcacaaacagaccgaa

SEQ ID NO: 74142 - RNA, 79 nt, Homo sapiens
agaaacaaagaaacaaaacgagcaaggcaagaggcaagagcccgccaggaggaaacacaaaccaacggcgaggacgcga

SEQ ID NO: 74143 - RNA, 43 nt, Homo sapiens
gggccgggcccccggccgcaagcagcacggacaagcacgagag

SEQ ID NO: 74144 - RNA, 75 nt, Homo sapiens
agaggaaacgaggccggagaggaaagagacccgcagagccacagggcagggcggaaaaccagccagccagcacaa

SEQ ID NO: 74145 - RNA, 51 nt, Homo sapiens
cacaacaagacccacggacgacaccggagaccgacacagagaccacacggg

SEQ ID NO: 74146 - RNA, 70 nt, Homo sapiens
gggcgggaagcaaggagcgcagaagggaagcgcagaaaggccagacagggaccgaacgacacaacacacc

SEQ ID NO: 74147 - RNA, 77 nt, Homo sapiens
acgccacacaccagcggagagaggaccagacaccccacaagaccaacccaccggagcaccaccacaacccagcagcc

SEQ ID NO: 74148 - RNA, 83 nt, Homo sapiens
gccaaccagagcgggaagacgaacaccgacccgcccggccccgcagccggaaccacgccagaagaacccgcccagcagccgaa

SEQ ID NO: 74149 - RNA, 71 nt, Homo sapiens
gaagaggaaggaaggagcgcagcggaaacacccaaggaaccaaagcaggccagcagaaaaccccgcgcaca

SEQ ID NO: 74150 - RNA, 78 nt, Homo sapiens
gggcgcccggggcggcggaggccgggcgaggaaaacgcaaggggccaggacgggccccccgccccaagaagagccgcc

SEQ ID NO: 74151 - RNA, 80 nt, Homo sapiens
cggagcgcggcggagaggagggggacgaagcccccagaaagacaccgagaggacggcaggggggccagagcacagcacga

SEQ ID NO: 74152 - RNA, 74 nt, Homo sapiens
cggccccgaggcagccgggcagggcccccggccaaaggaaagagggcccggagcgggcccggccccgggcccga

SEQ ID NO: 74153 - RNA, 76 nt, Homo sapiens
cgcgcgcgccggcccagccgcgcgacgggaggacgaagccggccgcagggaaagacaaggagccgggccgagaaac

SEQ ID NO: 74154 - RNA, 64 nt, Homo sapiens
cgacagggggcaagagaaccaccgagaccccaccaacaacgaacgcggcaggcgcacaaggaag

SEQ ID NO: 74155 - RNA, 65 nt, Homo sapiens
caaaaccccgaaaaaggcgcagcgagggcccaaaggcaccgccggaagccagccccccccgcgcc

SEQ ID NO: 74156 - RNA, 99 nt, Homo sapiens
gggcacgacagcgcaaggaggccgcacccaaggccgcagacaaggcaccaagaccgcggcgaaggcccaggaccgcaagggggggggagacaacaaaaa

SEQ ID NO: 74157 - RNA, 43 nt, Homo sapiens
agcaagaggagacagccgacggaagggaaacacacagaagacc

SEQ ID NO: 74158 - RNA, 63 nt, Homo sapiens
agagaacagcccccacgcagcccagaaggcgagggaggcggccggagccaaaccgaagagcgg

SEQ ID NO: 74159 - RNA, 74 nt, Homo sapiens
caggacggcccaaaaccagccgacaaagagggggcccaagaaggagcagcagccggcccggcgccagcaggaaa

SEQ ID NO: 74160 - RNA, 76 nt, Homo sapiens
ggcccccagaccccggcgcgggacaagagaaaggagcaagaaccaacgaaccagaggagaccgacaagcggcaaaa

SEQ ID NO: 74161 - RNA, 58 nt, Homo sapiens
gggcgagacggcaagagcgcgaagggccagaagggcgggagagagaagaaaaaacaac

SEQ ID NO: 74162 - RNA, 88 nt, Homo sapiens
cgccacgcacccaacgaggaggaaaaaaaggggcaccaggcgccacaaccaggagaaccggggcaagagacggcagacaaacacagcc

SEQ ID NO: 74163 - RNA, 78 nt, Homo sapiens
gccacacaggcaagacagcaaaagcaccaagagacagccaagacgcagaccggaagcacccgcagacaaggcccagca

SEQ ID NO: 74164 - RNA, 73 nt, Homo sapiens
cacacagcgcccaggccagagaaggggaaggaggggcagcgagcgcaggagaacaccaaccaccagggaagag

SEQ ID NO: 74165 - RNA, 74 nt, Homo sapiens
aagagccagaagcccggcggaagcccaaaaggagaaccgacgggagaagaaagaagagaaaggaaaagcgaagg

SEQ ID NO: 74166 - RNA, 54 nt, Homo sapiens
cagacgcgcggcgggccagcgagggaacgcccagcgacccccacgccagaacga

SEQ ID NO: 74167 - RNA, 73 nt, Homo sapiens
gaaaccgccgaagagaggcgaacggccagagaagcagcccaaccaaggcgggccaggcagaacgagcaaacag

SEQ ID NO: 74168 - RNA, 75 nt, Homo sapiens
acaaaagaagccaaaccgccccaagagccgcaaacaccgaagccaaaccagacacggagcgcgaaacagagcgcc

SEQ ID NO: 74169 - RNA, 90 nt, Homo sapiens
cgagcgagcgggagaaccagccaaggggcaccgggagcccacccaaggcacgggagcgccggggagggaacagaaggaacccagacgcaa

SEQ ID NO: 74170 - RNA, 88 nt, Homo sapiens
agcggggcccaacccccacggcggcggggcggaggggcagggcggaccagaagcgaggcgggcacagaacgccccccaccccaccaca

SEQ ID NO: 74171 - RNA, 81 nt, Homo sapiens
agcccgcgaccaccaaacacgggagaccacaggaaaagaggcggaccacacggggagcaccgagagagaaagagaacggcc

SEQ ID NO: 74172 - RNA, 72 nt, Homo sapiens
cgagaaagccagacagcaaagacaaccagcgcccacccagcacgagaacagaaagcggggcagaagaagaac

SEQ ID NO: 74173 - RNA, 52 nt, Homo sapiens
gcgccagggcggaaccaagcagggaaacgaaaaaggcaaaggaacagagcac

SEQ ID NO: 74174 - RNA, 54 nt, Homo sapiens
accggagccaaggccgccgggaccgggagacaacaaaaaagggagaacgcacaa

SEQ ID NO: 74175 - RNA, 76 nt, Homo sapiens
ggagcggcccacgacgggacacgccccggaggacgcgagaaggaagaagaacacaacagaaagagcggagaaaggc

SEQ ID NO: 74176 - RNA, 81 nt, Homo sapiens
aggcagcggcggcgaacggcaccggggaaaggggaaaccaggagcaacggccagggagaacgggcccccggaccccagggc

SEQ ID NO: 74177 - RNA, 81 nt, Homo sapiens
ggccgacacaccaccacggaacgccaaccggcggaccgcgagacagccagccgaccgaggacagcccaaggcggaaaagcg

SEQ ID NO: 74178 - RNA, 74 nt, Homo sapiens
gccggggcccaaccacaagacgaccaaaggaggaaggcgaaccaacccaccgacaaaacaagacgggaaaagaa

SEQ ID NO: 74179 - RNA, 58 nt, Homo sapiens
ggaaaagaggggacagcaagaggcccccagaggagaaggcaacaagcggaacccccag

SEQ ID NO: 74180 - RNA, 69 nt, Homo sapiens
ggagccggccggcggcaaaggaccaggaacagcagccaagggcaaggggcagcgcaggcacacaaagaa

SEQ ID NO: 74181 - RNA, 50 nt, Homo sapiens
agagaacaagcaccaaagcgaaggagggccgcaagggggagagagacgcg

SEQ ID NO: 74182 - RNA, 53 nt, Homo sapiens
agcaaaaagagcgggaagccacccgggaggaggaggggagccaccggagagga

SEQ ID NO: 74183 - RNA, 78 nt, Homo sapiens
ggggccccagcagcccccgaaggcccacaggacaggagagaaagacgacacagaacgggggcaaagcgggggaggcca

SEQ ID NO: 74184 - RNA, 43 nt, Homo sapiens
gcgcgcaagaaggaggcagaaccagagaccacagaagaaggaa

SEQ ID NO: 74185 - RNA, 80 nt, Homo sapiens
gggggcagagcccgccgggcggaggcgcggggccacgcccagccccaaggccccaaccggacccggagccccaggagacc

SEQ ID NO: 74186 - RNA, 58 nt, Homo sapiens
cagaaacaaacacaccagggggaggcaagcaggggggcaaaggaaagaaggcagaaag

SEQ ID NO: 74187 - RNA, 109 nt, Homo sapiens
gcaagaccgcggggcagcgacccacaccaacaccagcacccgggaaggagcccacaggggccagaggaagaagaaaggccagcccaacaagaaccaccagcagcccaag

SEQ ID NO: 74188 - RNA, 85 nt, Homo sapiens
gaaaaaaacggagcaggaagccggccacccaggaaaagggagacaagaggagagaaggaaccagggaaagagcagagggagagca

SEQ ID NO: 74189 - RNA, 83 nt, Homo sapiens
aagaggagccaggaggagagcccacagggcaaagagagcagacccgaggagcccgcagcccaggccgagcggcccgcgaaacg

SEQ ID NO: 74190 - RNA, 75 nt, Homo sapiens
cccgcgcagcgccccaggccagaaggagcgcccccagggcccgggggacaaggggagagccacaagaggccaaac

SEQ ID NO: 74191 - RNA, 80 nt, Homo sapiens
ggggcccagcaaagccaaaggaaggaccagcgacggcccagagggggggccaaccaccagcagcgcaacgaaaagcaagg

SEQ ID NO: 74192 - RNA, 81 nt, Homo sapiens
cccacaccacagacgagaacggacagccccagacccaccccccagggaagaagggggccgccaccgaccccagcaagaccc

SEQ ID NO: 74193 - RNA, 73 nt, Homo sapiens
accaaaagcaaccggcaaacacggaagccaaggacagggaagaacccccacagccgccggagcaggagggaag

SEQ ID NO: 74194 - RNA, 79 nt, Homo sapiens
gcggggggcggagcagacacagacagcagagggaggccagaacacaaaccaccaggagaaagcgggaaaacggacacag

SEQ ID NO: 74195 - RNA, 69 nt, Homo sapiens
aagaccacgccacccaacacgaggcacggcaggggacgaagggaacccgccgggcggcccggcacccag

SEQ ID NO: 74196 - RNA, 61 nt, Homo sapiens
ggaaaacgaagaaggcaaaaccaagaggaaaagaggcccgggaggagcggggacacgagga

SEQ ID NO: 74197 - RNA, 73 nt, Homo sapiens
gcccgagcaacaacagcggcaagagacaagcagcagagagaggcgcagagcgaccagaaagaaggacccacga

SEQ ID NO: 74198 - RNA, 59 nt, Homo sapiens
cccgcgccagaaaaaacgcagaacggcaaaaagggcggagaacggaaaagcaccaggaa

SEQ ID NO: 74199 - RNA, 71 nt, Homo sapiens
aggaggaggagggcaacccggacaagcggggagaaaagagccggaagcaaaccccaggaccaaagcaaaca

SEQ ID NO: 74200 - RNA, 80 nt, Homo sapiens
cgcgacagacccggggcagcccccccggaaccgggcacaggcccagcacacaggacaggccccccagccaccagcggggc

SEQ ID NO: 74201 - RNA, 75 nt, Homo sapiens
gcgagcgagggggggcgcgccggaaaccggagcgcgcagcagggacaggagagagggcaagagacgacaagcaga

SEQ ID NO: 74202 - RNA, 86 nt, Homo sapiens
gggacgcgcggggggcggggacccggagcaagcagcgacgccagcggcggagaaccgacgaaaggagccgaggccagagcagaaac

SEQ ID NO: 74203 - RNA, 80 nt, Homo sapiens
cacgcacacagaacccggccaggacagaagggcgagaaaaggcgacgcccagggaggacgaggcaagcccccaccgaaag

SEQ ID NO: 74204 - RNA, 72 nt, Homo sapiens
gcaggcccggccccagacgagccgagaaggggggcgcccccgagggaaagacaaggagccgggccgagaaac

SEQ ID NO: 74205 - RNA, 99 nt, Homo sapiens
cgaggggggagaaccagccgacggagcaggcagcagcccagggccccgcccaacaccccccccccaagagggagacaacaacagagcccagccaaccag

SEQ ID NO: 74206 - RNA, 76 nt, Homo sapiens
cagaagaggcacccaggccacaagggggcccacgagaagagcaggcgacgggggagagggagacagcggcgcaaag

SEQ ID NO: 74207 - RNA, 58 nt, Homo sapiens
gcccacgcaaacccaaagaccccgccggagacgagagggggggccccagcccggccga

SEQ ID NO: 74208 - RNA, 65 nt, Homo sapiens
cccccacacccacacgaccagaacgaggaaccccagagaggacagaagccaaccaggcagcagag

SEQ ID NO: 74209 - RNA, 67 nt, Homo sapiens
acccaagaggcgacagaccgcagaaaacacagcaagcagggacacacaggaacggagaaagcgacac

SEQ ID NO: 74210 - RNA, 86 nt, Homo sapiens
gcgagggcccggcaacaggcggaaaggcgaaaaaagcacagaaagccgaacaagacccaaccaaagagcacagccccaggcacaac

SEQ ID NO: 74211 - RNA, 69 nt, Homo sapiens
agcacacaaggcaagcacacgaacagggacggcaacgagaaggggacgagcaagccccggcccccagcc

SEQ ID NO: 74212 - RNA, 88 nt, Homo sapiens
gccgggagccgcggcccggaacggggcgccgccccgggccccccagcagaagaccccggcggacacaggcgaaggggagcaagggaga

SEQ ID NO: 74213 - RNA, 78 nt, Homo sapiens
aaagcgagcagagaacagccgcaccggagagggacaagaaagaacaccaccccagagcaagcccaaggcacgaccggg

SEQ ID NO: 74214 - RNA, 82 nt, Homo sapiens
acccgcacaaagaaggagccaccgccaagcgaagggcggaccccgcaaaacccgcgccgacagggaggcgggcagggaccgg

SEQ ID NO: 74215 - RNA, 77 nt, Homo sapiens
cacaccccaaaaggggcccgaaaaccgaaggaaaacgaacgagggaaagacaggcgagcccagcagacagcagagcg

SEQ ID NO: 74216 - RNA, 54 nt, Homo sapiens
ccgcaagaaaccacagggcgacacccagggcaaagacgaagagagaaaggcagg

SEQ ID NO: 74217 - RNA, 66 nt, Homo sapiens
agcggcaggcgggccacaaccccaaccacaccagcagcccgagagacggccacaccgggcgagccc

SEQ ID NO: 74218 - RNA, 70 nt, Homo sapiens
cccagagagccacagcaaacaccaagaccgaggggccagcgccgaaaagacgaggcccaagcgcgaagca

SEQ ID NO: 74219 - RNA, 83 nt, Homo sapiens
gacaccacggaggaggcggccggagggccgacgccccccccagggcagcgcgggccccaggccaggcgcccagaccccacgcc

SEQ ID NO: 74220 - RNA, 73 nt, Homo sapiens
ggaggacacggcagagacacacagcaaggggcggcaacccgaagcaagcccgcaccgaaccgcggaagaacca

SEQ ID NO: 74221 - RNA, 77 nt, Homo sapiens
agggagaagaggcacccagacccagagaaaggccacgcgagccaggcagggagccccagagagacaagccccaagga

SEQ ID NO: 74222 - RNA, 78 nt, Homo sapiens
gccaggacgagcagagccccccccaccagaggacgggaggagcagcaacagccacagcacacaggaacagacaaagaa

SEQ ID NO: 74223 - RNA, 63 nt, Homo sapiens
accgacaacccaccggcccgaggagcgcgggcggcccagcagggggagacaggaggccacccc

SEQ ID NO: 74224 - RNA, 73 nt, Homo sapiens
ggagaacacaggaaccggagcgggaacaagagcaaacggcgaaaccggcacagaagcacgggacggagaagga

SEQ ID NO: 74225 - RNA, 61 nt, Homo sapiens
ggcaccaccacacccgaaaacaccagccccaccggggaccccccagcgaagaaacagcaca

SEQ ID NO: 74226 - RNA, 56 nt, Homo sapiens
gagaggaagcaaagcagccaacagcaggcaggggcgcacccagggacccagagggg

SEQ ID NO: 74227 - RNA, 57 nt, Homo sapiens
gaggagaacgaacaccggaccgccagcaaggcgccaccggaagaaacgggaggggag

SEQ ID NO: 74228 - RNA, 39 nt, Homo sapiens
cggcgccgcggcccaaaagggacagagcagaagggcgaa

SEQ ID NO: 74229 - RNA, 75 nt, Homo sapiens
cgaccgaacgcgaagagccgccaacgggagcccaaacccagccgagcgggcccaacaagagggggagcagaagga

SEQ ID NO: 74230 - RNA, 58 nt, Homo sapiens
agaaaaaagacgggaacagggagaccaaggacaaaagagccaaggcgcggaccagcga

SEQ ID NO: 74231 - RNA, 100 nt, Homo sapiens
acgcaaaaaggccccgaccacaaagacaccacagcaggccgggggaaaagccagaaaggacacaagagaggaaacccccggaagcccccacagagagcaa

SEQ ID NO: 74232 - RNA, 78 nt, Homo sapiens
ccgggcgccagcgcgacgccccgcggccccagggcacagcccaaggcgcagcccccggcccaggggcgaaggagaaag

SEQ ID NO: 74233 - RNA, 76 nt, Homo sapiens
aaaggacccgggccgcacgagaaggcaaacgggcagagaccaggcagccacagaagcagcaaagggcgagagaagc

SEQ ID NO: 74234 - RNA, 61 nt, Homo sapiens
caccagcagggcagccgaagccagcccaggaaccggagggacggagggcaaccaggaagaa

SEQ ID NO: 74235 - RNA, 75 nt, Homo sapiens
gacgcagggcgcccccgcccgaagcggaggacccggcccagccgggcaggccgacccccaccagccgagacacaa

SEQ ID NO: 74236 - RNA, 88 nt, Homo sapiens
caggagccgacgacccggaccaagaaggggaggcccgcggcagaaaggagaaggagaggagagccacaaaaccacagaaagagaagac

SEQ ID NO: 74237 - RNA, 53 nt, Homo sapiens
gagaacacccgccgcgcaaaaggcgcgaggcagaaaagcaaacacacaccgag

SEQ ID NO: 74238 - RNA, 75 nt, Homo sapiens
ggaaggagaaaagggagacgcgggccggggcacgcacgcgagagccgccagaggagccagcccaggccacaacgg

SEQ ID NO: 74239 - RNA, 70 nt, Homo sapiens
gagaagaagggaaaaaggagcgaccacagagaacaaagacgagacagcgcccgaacgggccaaaggcagg

SEQ ID NO: 74240 - RNA, 79 nt, Homo sapiens
caccgcggcagccgaagagagcgcggccgggcgccgcaggccgaagcaggacacaaagaaaagacgaaggaagcaacac

SEQ ID NO: 74241 - RNA, 60 nt, Homo sapiens
cgcgcagcgccgccaccccacccaaagaggcagggcagcaccagagcaaaccaagacccc

SEQ ID NO: 74242 - RNA, 78 nt, Homo sapiens
cagcccgccagcgcgccgggacggaagggccgggccggggcacgggcccacggccccccaccgggccaccccgggggc

SEQ ID NO: 74243 - RNA, 84 nt, Homo sapiens
ggagacgacggagcccggaagcgcagaagcgccccacagagagccgccagagaaggcagcccccacaaggcgagggccggagga

SEQ ID NO: 74244 - RNA, 78 nt, Homo sapiens
aacgaccgcggagacggccccgggcggagcagcggcgggcgcggcggccgcgaggcaggaagggccacgggaacaaaa

SEQ ID NO: 74245 - RNA, 82 nt, Homo sapiens
ggcaacccacaaggccaagcacccccgcaccagccacacaccagggggcccgaaggcaccgcagaacggggcgggacgacag

SEQ ID NO: 74246 - RNA, 58 nt, Homo sapiens
aggaagccggacccggccacaagaccagcacaaggacaggccgcagacagcagcccag

SEQ ID NO: 74247 - RNA, 64 nt, Homo sapiens
cgaaggcgaaggaaggaggaaggagccgccgaagaaacaaagcacaagcgccgccaggccacga

SEQ ID NO: 74248 - RNA, 81 nt, Homo sapiens
cgcgccgccgccgccgccgcgggcgccagaaggaagaggcggacggaggagcaggcgagaagagaagagcagacacaagag

SEQ ID NO: 74249 - RNA, 78 nt, Homo sapiens
caagacggccacggaggagaccacaaacagccacaagcggacacagaacaaaacacaaagcaagagaaaaaccagaag

SEQ ID NO: 74250 - RNA, 79 nt, Homo sapiens
gacgcaacgaacgaaaaaaccagaacacgccaagggcggagaacggaaaagcaccaggaagcagagaggaccgcagaag

SEQ ID NO: 74251 - RNA, 65 nt, Homo sapiens
gccagaaacgcaacggacaaaaaagggacagcagaccacagcccggcaggcccaaaaacccaaag

SEQ ID NO: 74252 - RNA, 69 nt, Homo sapiens
aacacaccgccaccgaagacgggccccaacacccagagacgaaagggagacaggaaccaaaaagcaaca

SEQ ID NO: 74253 - RNA, 52 nt, Homo sapiens
aaagcccagaggacccagaggggcagcggaaaaagaggccagaaagccagcc

SEQ ID NO: 74254 - RNA, 66 nt, Homo sapiens
aaagggacgcaaggaacaaaaggaaacccaccaaggccgcggccgaggagacagccccgcaagaaa

SEQ ID NO: 74255 - RNA, 72 nt, Homo sapiens
gcaccgaggagcgcgccgcgcccccccggagaccgagccccaacgcccagaagagcacaaagaaccaacgcc

SEQ ID NO: 74256 - RNA, 83 nt, Homo sapiens
cccagggaggcaagcagagcgcggccaagaacagaggaagggcgcacaggcgagccaagcccagccccaggacgccgaggagg

SEQ ID NO: 74257 - RNA, 80 nt, Homo sapiens
acccccgagccaaacaccgggcgcccaacaagccgaaaggccacaaggggccggaccgcaggaagagagcagagccgcac

SEQ ID NO: 74258 - RNA, 67 nt, Homo sapiens
aagagggagcgcggccagcagaggaaccacgaccgcggccgcgcgaaaggccaaccggcgccaaacg

SEQ ID NO: 74259 - RNA, 66 nt, Homo sapiens
ccgccccggcagcgacaagagggggcagacccaaaggaaacgcacgaaagaaacaggagagcgcag

SEQ ID NO: 74260 - RNA, 86 nt, Homo sapiens
gaggcagagacccacgcgaaggccgggacagcagaaaacagccagcagaaaaagccaaaaagcaagcggacaaaagaagaaacaag

SEQ ID NO: 74261 - RNA, 54 nt, Homo sapiens
ggcgcaccacccaggagccaaaccaccagcaggggccggacaaggacgacagca

SEQ ID NO: 74262 - RNA, 71 nt, Homo sapiens
agcaaacgaggagaaggaagacgaaccagaaaacacgcaaagaaaagaggggacgggagcggaaaccagaa

SEQ ID NO: 74263 - RNA, 69 nt, Homo sapiens
ggcccacagcccaagaaccagacccaaaagagcaaacaaccgacggagaaggaaaaaagccgagaaagg

SEQ ID NO: 74264 - RNA, 69 nt, Homo sapiens
aagcccagacaacgacaagaaaacagaaacgacggagagaaaccacaagggggcccgagggcaggacag

SEQ ID NO: 74265 - RNA, 74 nt, Homo sapiens
gggacacacgggccacaaaggggggcagaaagaagaggaggacaacaagccaacagagagagacgaagaaacca

SEQ ID NO: 74266 - RNA, 50 nt, Homo sapiens
gcccaccccccgaacccagccgcaccgggagaaaagaagcagcccacgaa

SEQ ID NO: 74267 - RNA, 82 nt, Homo sapiens
ggacagggaccaaagccaagaggaagcacacagacaggggacaaaagggaacgcaccccacaaccagcgcaaccagcccggc

SEQ ID NO: 74268 - RNA, 60 nt, Homo sapiens
gcgaggcacggcgccccaagcgcgaaaaggcaccaagcacccagcccagcacccacgggg

SEQ ID NO: 74269 - RNA, 90 nt, Homo sapiens
ccgcagcccacgcagcaagacccgcgccgccgggacccccaggacgacggaccggacacaccggcggacgaaagaaagaaggagcaccaa

SEQ ID NO: 74270 - RNA, 110 nt, Homo sapiens
gccaaccgccccgggcgggggcgggcgggcaaacccgcgaggagaagaggacggcccgagcaagggggaggcacccaaaacggccaaagaccacagccaaaagaagaagc

SEQ ID NO: 74271 - RNA, 75 nt, Homo sapiens
gaagcaacgggccagcagacaggaggaagacaaggcagcaccacgcagaggacggagaccgggccaagcaacgaa

SEQ ID NO: 74272 - RNA, 79 nt, Homo sapiens
cgcgcgcgggacggggcgccgcccggggcgaggcagggccagcagcaggcgggagagggaacaggcacgccccacccgc

SEQ ID NO: 74273 - RNA, 81 nt, Homo sapiens
gaagacgcagggaccgcccaaccaaggaggaggagggaggccggcaggggaggccccccaggccaagggcaggggccgggc

SEQ ID NO: 74274 - RNA, 73 nt, Homo sapiens
acaccagcacccagccagaacccccagcaaagcagacggagagagaaaacaagacaaagaaggccggaaagcg

SEQ ID NO: 74275 - RNA, 77 nt, Homo sapiens
aacgggcaggcgaacgagggaccaagcacgccagaaaggaaagagggcacgcccagcgggcccagcccagaacacac

SEQ ID NO: 74276 - RNA, 71 nt, Homo sapiens
acgaggagagcccgggccagggacccgcggaaccaccggcgcagcacagcgacggacggccacccggaaga

SEQ ID NO: 74277 - RNA, 72 nt, Homo sapiens
ggcgcgccggagcaagggaggacaggagagacaacggaggcaagaaagacggagaagcgagaagagaccagc

SEQ ID NO: 74278 - RNA, 69 nt, Homo sapiens
gggaaaagaaacacagggacccgccaggggaagacaagccaggggagagcacaaagcagaagaaacaaa

SEQ ID NO: 74279 - RNA, 74 nt, Homo sapiens
gcacaaggagggaaggacaagcccacaaggcaggcagaggggcagggaccaagggcacccgcccacccacccaa

SEQ ID NO: 74280 - RNA, 108 nt, Homo sapiens
gagccgagcagaggaaccaacaaagaaggagcggaaaaccaggaacggccaggcagagacggagggcacccaggaaaagacacagggagaacaggagaaacaacagag

SEQ ID NO: 74281 - RNA, 73 nt, Homo sapiens
gggaacaggaaagccgagccaggcgggacccaaagacaggaccacgcaccagcagagaaggaaagcaaaccga

SEQ ID NO: 74282 - RNA, 76 nt, Homo sapiens
cggggccccgacagaccaccccgccaacgcggcaccgcagaacgccacaaccagcaaagcaccgggaggaaagaga

SEQ ID NO: 74283 - RNA, 49 nt, Homo sapiens
agcacgaccagcaggaacgagagggaagcgccggaggaaccagcccgca

SEQ ID NO: 74284 - RNA, 64 nt, Homo sapiens
gggcccacacccgggcgcggccacacgcgacgggggagccgcggaaccccaaacggggcgacgg

SEQ ID NO: 74285 - RNA, 77 nt, Homo sapiens
caccaaggcagcggggacccaccagcaggacagagcgaagaaccccccaagaagacgaaacccccgggccacaagaa

SEQ ID NO: 74286 - RNA, 36 nt, Homo sapiens
gcgacaagaccggaccgcccgcagagcccgcccccc

SEQ ID NO: 74287 - RNA, 73 nt, Homo sapiens
cggccgaccgccgggaccggagggaggaagcgggacacccgggagcaggaaagacgcgacccggggcgccgcg

SEQ ID NO: 74288 - RNA, 73 nt, Homo sapiens
accagggaccacgccaaaggaaaaccggcagaggacaagccagagcgcccccgagacccacgagccaccagcg

SEQ ID NO: 74289 - RNA, 112 nt, Homo sapiens
gaacaacccgcgcccaggccagcgccccaggccaagagggacccacccggcgggccagaagcccccaggaggagaacgagcaacggaagccagaagaagcacccccagcagg

SEQ ID NO: 74290 - RNA, 82 nt, Homo sapiens
cccagccccagccgcggccagaggaccgcagaacccacggggccggacgaccaggagaagaggagaaacaaggaagagcaac

SEQ ID NO: 74291 - RNA, 51 nt, Homo sapiens
cgcggaaggcagcgcccagcagcgcaggaagagcacggcaccagagagaca

SEQ ID NO: 74292 - RNA, 83 nt, Homo sapiens
gggacgcgagcccgcaacccccaagcagaggacccaaacacgcccagcagaagccaggaaggaagcccgccagccagaagggg

SEQ ID NO: 74293 - RNA, 51 nt, Homo sapiens
accgagggacgggagcgaggagaagccacgccagaagcagacaaacccaac

SEQ ID NO: 74294 - RNA, 80 nt, Homo sapiens
caccaaagaggaaagcgaggaggagcgagcgcgagagggaagcaccacgaccagaccccccaaaccccaagacagaggac

SEQ ID NO: 74295 - RNA, 74 nt, Homo sapiens
agagacaacaccgagagagaagacagaaagcgggacacaagcaggagcacagaccccgaaaagggagacacaga

SEQ ID NO: 74296 - RNA, 74 nt, Homo sapiens
accacaccacgaagacccgaagcccgaggaaagcagggaaccaagaccaggacaaagaagacccggagagacaa

SEQ ID NO: 74297 - RNA, 37 nt, Homo sapiens
gcccaacaacacccagggagcgggaggggccaaccgc

SEQ ID NO: 74298 - RNA, 77 nt, Homo sapiens
cgaaagaaccacgaaggaccgaaggcaaggcgcggccaagagcagagagcagagaaacacaccagcaacagccaccc

SEQ ID NO: 74299 - RNA, 86 nt, Homo sapiens
cagcaggagcgggccagccaggagacggcggaggggcggacgccacgccaaaggccgacgcccgccgcggccggggaacaggccac

SEQ ID NO: 74300 - RNA, 76 nt, Homo sapiens
cccccgagggcaacgagaaagagacggagaccggaaacgagagaaacgaagacgaagaaacagccgcacacagaag

SEQ ID NO: 74301 - RNA, 75 nt, Homo sapiens
ggacggcaaggaaaccgcagcacgcgcgacgcagcagaaagggaccaagaaaggcccagggaccaaagcccggac

SEQ ID NO: 74302 - RNA, 73 nt, Homo sapiens
cgggcaggggcggggcaacgcggaagacaggaagggaaggggcggagacgggcggaacgcaggaggccagagg

SEQ ID NO: 74303 - RNA, 73 nt, Homo sapiens
cgcgcggacccgccagaacggaacaccaagggagccggggcccgaacgaccagaccgcgacaagacagaccaa

SEQ ID NO: 74304 - RNA, 89 nt, Homo sapiens
acgcagcagccgcgccgccgccgcgggagccgcgcccgaaccccggcccgaacccagacaaagacaccaccagccgggacgaggggagg

SEQ ID NO: 74305 - RNA, 38 nt, Homo sapiens
accgggcgcagccgaacggcagagcgaaacaaacaaga

SEQ ID NO: 74306 - RNA, 74 nt, Homo sapiens
aaaacaaaagacaccagacgggaagccagagggaccaacggaaccccaagaggaccgagaggggccacgggccc

SEQ ID NO: 74307 - RNA, 73 nt, Homo sapiens
cacgccccacggacacagcaagcccgaaaaaggagggaagagaccagaagagcaggaggaaacaaaggaagac

SEQ ID NO: 74308 - RNA, 78 nt, Homo sapiens
cgcgggacccacgacgccgggaccggccaagggcccacacaccaagaccaaggaaggcgccacaagcaaaccagccgc

SEQ ID NO: 74309 - RNA, 54 nt, Homo sapiens
gcaaagacgacaccagggggaggagcacaaacgcccaccacacagcagaaacgg

SEQ ID NO: 74310 - RNA, 70 nt, Homo sapiens
aaaaggagagcgggcaggaggcagagaacacaacaggaggcacaggccgcacccagaggaagagggcccg

SEQ ID NO: 74311 - RNA, 83 nt, Homo sapiens
ccaacagaacaacacaaaggcagaaaagaagcccagaagcgcaccgaaggacagaagaggacccagccaacgacaagaagagg

SEQ ID NO: 74312 - RNA, 76 nt, Homo sapiens
gaaccaaacagacgacaaagagcacgggcagagcggcgggaaaccaccaacaacacccccaaaccaaaacagccgg

SEQ ID NO: 74313 - RNA, 63 nt, Homo sapiens
gcgaagcgacgagccgcgaggagacgcacccccccccccggcggagccccgaaggagcgcagg

SEQ ID NO: 74314 - RNA, 77 nt, Homo sapiens
caaccagcaggggaaggagacacagaccagcacacaacggcaagcggagaagagcaaggccgaaccgagaggaaggg

SEQ ID NO: 74315 - RNA, 53 nt, Homo sapiens
ggcgggaacgagggcgagcagaggacgacaggccgggagcggccgcgagaacc

SEQ ID NO: 74316 - RNA, 73 nt, Homo sapiens
ccgagaggacgccagcggcgcgcaggcaaagagagggaagcagagagcccgagaccgcccccccagccccgga

SEQ ID NO: 74317 - RNA, 77 nt, Homo sapiens
aaagggggagccgcaaggggaaggccgggccagaccaaacaccacacaaggcaccgcaaagagagggccgaggcaga

SEQ ID NO: 74318 - RNA, 69 nt, Homo sapiens
ggccggccgacacaaacagaagagagggaagcgagaggaacggcaagaaggcagacagcaacaagaagg

SEQ ID NO: 74319 - RNA, 67 nt, Homo sapiens
gccgaaagaaaggggcagacaacgacaccaaaggccagggaacggcacggagaaagaaccggccaag

SEQ ID NO: 74320 - RNA, 80 nt, Homo sapiens
gaaggcagaacaagaaggagacgcgacggacgcggagcccgccacaaccagaagacgacagcacagccgccaaagcgacg

SEQ ID NO: 74321 - RNA, 80 nt, Homo sapiens
acagcggaggcgacacccagagagcccagacaaaccaagccaggcccgaagagcacccagacagggaccccgcccgccag

SEQ ID NO: 74322 - RNA, 67 nt, Homo sapiens
ccaaccaagggcagaaggaaaggcagaaaagcacggggaacagggcgagacaaacgggccgcccccg

SEQ ID NO: 74323 - RNA, 70 nt, Homo sapiens
aagaaacgagcagaagaggaacaagggggggaaacccaccgggaaaaggcacgaaggaagcccccccaga

SEQ ID NO: 74324 - RNA, 70 nt, Homo sapiens
cgcgacaggggcaggcggcacaggagagaggaagcacggacaagccacaacgggaggggggcgggggcac

SEQ ID NO: 74325 - RNA, 73 nt, Homo sapiens
aaaaagaacaaaagaaaaccaaagcagaccagaaaaaacagcacaccaggaagcaaggcaaggaagccccaca

SEQ ID NO: 74326 - RNA, 34 nt, Homo sapiens
cacccacgggaggcagaacaccaccacccacgca

SEQ ID NO: 74327 - RNA, 67 nt, Homo sapiens
cgccagaggggaggaaacacaagaagacggaagaggcaaggcaacaaaccagacaaacaaccggaca

SEQ ID NO: 74328 - RNA, 80 nt, Homo sapiens
gccggcccccccaggacaacccagaggcaacaaaggcgagacgcacccccagacgccgacccagaaagccagggacacca

SEQ ID NO: 74329 - RNA, 80 nt, Homo sapiens
gcagaagaagcacccagcaagcgagggaccgggacgccacagccaggcccaggaacagcaggcccagcaaaggagacccc

SEQ ID NO: 74330 - RNA, 83 nt, Homo sapiens
cggaccacacagcgcgggagccacgcagaggacgccggaacacccggaagccgagaaagagagaagaagaaggaggccgcggc

SEQ ID NO: 74331 - RNA, 79 nt, Homo sapiens
gaacagaaggagcagcgaaaaacccgaccccccaagcaggcaagaagagaaaggaaggaggggaaaagacaaacaccaa

SEQ ID NO: 74332 - RNA, 48 nt, Homo sapiens
ggggagagccacggaagccgacagacaaccagagagggaaaaggacag

SEQ ID NO: 74333 - RNA, 73 nt, Homo sapiens
cgcgcaagcggcacaaaggaggaaacagaaacagcacaaacaagcacgaaaagggaacgcacaaaaagcgggg

SEQ ID NO: 74334 - RNA, 77 nt, Homo sapiens
cgagggcgcaccgcggagacccgccagccgccggccgcgagcccagagaaagggggccaggaagccaagacagggca

SEQ ID NO: 74335 - RNA, 79 nt, Homo sapiens
ccgccgagccgaaggacccgagaaagggaaacggggcggaccagaccaccgggcaggggcgagggcggcggagcacaga

SEQ ID NO: 74336 - RNA, 37 nt, Homo sapiens
ccagagacacgaagaagagagccaacacacagcacaa

SEQ ID NO: 74337 - RNA, 70 nt, Homo sapiens
acgcaaggcaagaggaaaaaaagccagccaacgacaacaccagggcagaagaaagaaggacgacacagcc

SEQ ID NO: 74338 - RNA, 62 nt, Homo sapiens
acaagagcccacaagacgggaagaccacggcagcaagcacccaaaccccacagcaccaccag

SEQ ID NO: 74339 - RNA, 71 nt, Homo sapiens
agggagaggggccgaaggaaccggacagaagcgcggcggcgcggcggcaggacgcaccaacccaaaaaccc

SEQ ID NO: 74340 - RNA, 74 nt, Homo sapiens
cggaagaaggaggaagcaaccacggacgccagcagaacagcaccgccagcagcaaaggacaaaaagcccaaaga

SEQ ID NO: 74341 - RNA, 77 nt, Homo sapiens
ggcccggcaccgccgcggacggccgagcaccacggccaccaggccagcacggaagccccaaccggcgccaaggaaac

SEQ ID NO: 74342 - RNA, 69 nt, Homo sapiens
ccagccagcgggcaccagccgggcacaggcagacccgcagaccaacgaaaaccacggcgccacgaagag

SEQ ID NO: 74343 - RNA, 71 nt, Homo sapiens
caaccccaggggaccagaggaaccagcccgagcgaccaccacaacccgcaacgccacagcgagaacagacc

SEQ ID NO: 74344 - RNA, 75 nt, Homo sapiens
aaacagggggcaccgacccgcacgcaagaacccaagagaaggagaggcagaaagaccaaagggcgacccaacccc

SEQ ID NO: 74345 - RNA, 65 nt, Homo sapiens
gacgacgcaccgcaggcagacaaaagggccaaagaagggagagagggcacgcgcccaagggaggc

SEQ ID NO: 74346 - RNA, 75 nt, Homo sapiens
gacgaagcgcccgccaccaagagcggaagcgagggcaccaaccaggagaggagacaaacgaacccggcagaaacc

SEQ ID NO: 74347 - RNA, 67 nt, Homo sapiens
acagcacgagaggccccagagagacacgggacgggaggacgaaggagcagcagaacggagagaaaca

SEQ ID NO: 74348 - RNA, 66 nt, Homo sapiens
cgcggcgagagcccacaggcccccacagggaaggagcgcggacggcccgcacagggggcccagcgc

SEQ ID NO: 74349 - RNA, 67 nt, Homo sapiens
aaagggccacggaaagcagccccgcaggagaagcgaaaagaaacccaagaagccaacgaaagaaggc

SEQ ID NO: 74350 - RNA, 75 nt, Homo sapiens
ggacgacccaagcccgcgagcaggagagggcaggaagaggagaggcggacgcagggccgaacggagaccagaggg

SEQ ID NO: 74351 - RNA, 113 nt, Homo sapiens
ggacagccccacccgggggccgggacagccaagcacccgccgccggcagccgcggaagacgggcccgggacacccagacagagagagcgcacgaagaagggcggaggacaagg

SEQ ID NO: 74352 - RNA, 57 nt, Homo sapiens
gaggagggaggaaaacaaccgagggcagagcccgaaaacggaccgagggagacagaa

SEQ ID NO: 74353 - RNA, 79 nt, Homo sapiens
cgcaaggagcggaaaacacgggccaacacggcgcgaaagccagggaagggcaaaccagacagaaccgacggggaaagga

SEQ ID NO: 74354 - RNA, 73 nt, Homo sapiens
gaacgcgaggccaacagccccgaacaccggcagagagagagacacaccagacgagaaagcgacggagcggacg

SEQ ID NO: 74355 - RNA, 69 nt, Homo sapiens
cggcgccgaggagcccaccggagcagcaccaccgcccgggacccgaggccaaaccaggaacccagacaa

SEQ ID NO: 74356 - RNA, 79 nt, Homo sapiens
gaaaaggggaaacagggcccggaaaagggcggagggggcagggcagaaggaccaggggcgacgaggcccagagcaagag

SEQ ID NO: 74357 - RNA, 79 nt, Homo sapiens
aaagccgacccaacccaagggccaaaggaagagacccagacgaagagcgcacagaaagagggaaaacaaagaaccaaaa

SEQ ID NO: 74358 - RNA, 67 nt, Homo sapiens
gaccccagccagggagcacgacgcaccaaacccccacggacagccccagaacaacacccccagcacc

SEQ ID NO: 74359 - RNA, 55 nt, Homo sapiens
caccaggcgagcagcgcccccggacaggccacccggccagaccaccagcgaagac

SEQ ID NO: 74360 - RNA, 74 nt, Homo sapiens
ccggagcaagccaccaggaacagaggggcaaggacaaagaagcgccgggaaaagcaacgaagaggggacccgga

SEQ ID NO: 74361 - RNA, 76 nt, Homo sapiens
cggaggaggaagaagaaggaagccaaagaaggcaggacagcggccagagagccaacgggccggcaagccacggggg

SEQ ID NO: 74362 - RNA, 104 nt, Homo sapiens
gaccccaaagacaaacgacaagcccaaggagcccagggggaccaagaaaggcccagggaccaaagcccggacaaggcccgagcaccaggaccgcagaaggcccc

SEQ ID NO: 74363 - RNA, 77 nt, Homo sapiens
gacccaccgcacgcagaagcggaaagggaaacaccgagccagaaagccgcaagaggacaacacagcagacaaagacc

SEQ ID NO: 74364 - RNA, 70 nt, Homo sapiens
gaagaccgaacaagccgagagggaaacaacccacgcagcaacacgcaaccccccgacccccaaaaaggcc

SEQ ID NO: 74365 - RNA, 38 nt, Homo sapiens
cccaggacaggggcacccagaagcagaagaaggaaaaa

SEQ ID NO: 74366 - RNA, 86 nt, Homo sapiens
acccggccccggcccacaggggggggcaaacccgagagaacggaagcacaccacaggaagagcaagaaggaagggaaggaggagag

SEQ ID NO: 74367 - RNA, 120 nt, Homo sapiens
gccaggagccgccgccgccaagcccggcccggcccgacaccgcgggccgccagacgggaaggcccgggcgcgccaggcacagccaagagcggaccggcagcggccagcgcagcggccgga

SEQ ID NO: 74368 - RNA, 46 nt, Homo sapiens
gccccccggagcggcacaggaacgcacaccagcaccagcccaccaa

SEQ ID NO: 74369 - RNA, 60 nt, Homo sapiens
ggagcgaggaaaaaacaaccgagcacaaaaaaggcacccggagaacagacagaccagccg

SEQ ID NO: 74370 - RNA, 75 nt, Homo sapiens
agcaccagccgacgagaaggcgcagaagagcaagaccgaagacaacaaaagaaaacaaagcacggaaacaagaga

SEQ ID NO: 74371 - RNA, 39 nt, Homo sapiens
ccccggaaaagcagcaaccggcggccgggagaggaggga

SEQ ID NO: 74372 - RNA, 73 nt, Homo sapiens
aaccggaaccacacacaccacaggaagccacggagaggagaaaaagaaacccaaaggggcacaagaggagacg

SEQ ID NO: 74373 - RNA, 91 nt, Homo sapiens
gagccgagcgggggcgcagagcgcgggaggcggcggcggcgcggagcccagaccgcgaccgcacaagcagccgccagcggaaccaagcggc

SEQ ID NO: 74374 - RNA, 65 nt, Homo sapiens
ccggaggcagcacgggcgaccccccggcgcagcagcacacaaggggcaggcggaggcaagacaag

SEQ ID NO: 74375 - RNA, 71 nt, Homo sapiens
gcgaagaggacggaacacagcacaaaagggagccacggcgaaccccagcaggcaccaggaagcagaaaaga

SEQ ID NO: 74376 - RNA, 115 nt, Homo sapiens
agcccgccgggacacaccccaggaaaaagacagcccgcagcacgaccagcaggaacggcggggccggggagcccgggccagaccccccagacccagcccaccccggagcagccgc

SEQ ID NO: 74377 - RNA, 82 nt, Homo sapiens
gacagaagaaagacggcggaccgcgggggagaacgggcaaaccgccgacacccagaggcgcagaggggggccacgaaggagg

SEQ ID NO: 74378 - RNA, 80 nt, Homo sapiens
ggggacgcggccgcgcgcccagagcggggccgcaggagcggaggcaagaggggcgaggaaaacaggagaaggaacccagg

SEQ ID NO: 74379 - RNA, 61 nt, Homo sapiens
cggccggcaaccgagggacccgcgccaggcaggacagaagaccagcgcccgccacaggggc

SEQ ID NO: 74380 - RNA, 77 nt, Homo sapiens
agaccaagaaggggaacggaaagcaaggaccagaaggacccaaggacgaaggcaggggaaaggaccccagcccagcg

SEQ ID NO: 74381 - RNA, 76 nt, Homo sapiens
gcggaggaccccaagaaccagaacagcagagcagaaaccgggggcccacaacagggcccaccccaggaccccacca

SEQ ID NO: 74382 - RNA, 71 nt, Homo sapiens
caacggacacacgggacccgcaagcgagggcccggcaaaggacaaccccagaacaagcaggaaaggaaaag

SEQ ID NO: 74383 - RNA, 75 nt, Homo sapiens
caaaggcaaaggcggccgggagacagccggaagcaaggcagaagaggccagagcgccagccaggaaaaccagggc

SEQ ID NO: 74384 - RNA, 80 nt, Homo sapiens
ggacgccgccagcgcgaaggcgcagcccggaggccgcgcggggacaggcaagggaggacagggccaccaagaggagggca

SEQ ID NO: 74385 - RNA, 81 nt, Homo sapiens
ccacgacggagcaagacagacacacgcccacaaagcccagaagaagggcaccagcgaagcaggagcagaagagcgaagaag

SEQ ID NO: 74386 - RNA, 49 nt, Homo sapiens
ccaccaaggcaccccggggggagaagaacaccaagaccagacgaacaga

SEQ ID NO: 74387 - RNA, 51 nt, Homo sapiens
cgcgagcgcgggcgggggagcaacgagagacagcagggaggaaacgagaaa

SEQ ID NO: 74388 - RNA, 79 nt, Homo sapiens
agaaaggaaaaccacgggaacaggaaaaaagcaaccagacagaaacgcagaaggaaaaacgcaagcgaccgcggggggg

SEQ ID NO: 74389 - RNA, 108 nt, Homo sapiens
cgcccgccggagcagccgaggccccccagccacgccgacagccgcagaacgccagggcccagcagcagcccacggggccagcggaggaaaaggggagcgcgcccagga

SEQ ID NO: 74390 - RNA, 63 nt, Homo sapiens
ccgcccgccgggacccccacacaacggcgaccaggaaagagagaaccccacccaagagacaaa

SEQ ID NO: 74391 - RNA, 63 nt, Homo sapiens
aaaagcgcccagggggcacaaccggagggcgcggaacacgccaaggcgaaccgcagaagaaga

SEQ ID NO: 74392 - RNA, 90 nt, Homo sapiens
cagggaagcgcagaaagcaggcgaacccgcggcgcaaaacgagcgagaagaggcgacaccagggcccaaagaacaaccgaaaggaagaag

SEQ ID NO: 74393 - RNA, 70 nt, Homo sapiens
aaaagaggcaagacggcaaagaagcccacaggggcaacacagcccaacgccaaacacggacgcacacccc

SEQ ID NO: 74394 - RNA, 83 nt, Homo sapiens
agagaggagcaccgcaaaggcaccggccgagccacggagcaaggggccagggaagcgagaaccaggaacgaagaacaaagggg

SEQ ID NO: 74395 - RNA, 71 nt, Homo sapiens
gaaggagagggcgcaaagccaggcccaaagcggccaaaagcggcacagccggaaaccaggccgcgggggaa

SEQ ID NO: 74396 - RNA, 76 nt, Homo sapiens
cgacaccccagaaagagggaacaacagaaaaaacaagagaggaagcccagaggaacaagggaggcgaacagggaga

SEQ ID NO: 74397 - RNA, 73 nt, Homo sapiens
cccccgcacacgaggccaacccgcaaggggcccccccccgagcccagaagacgccacgggggcaaggacgcac

SEQ ID NO: 74398 - RNA, 58 nt, Homo sapiens
ggaaggcagaggaccgcgcggaggcagcgggggcggagaacggaaaagcaccaggaag

SEQ ID NO: 74399 - RNA, 86 nt, Homo sapiens
ccgcccccagcccgggcgcccgcgccggcagaggaggcgagcacccgccagggagaggaacccccgcgcacccagcgcagaaggcg

SEQ ID NO: 74400 - RNA, 77 nt, Homo sapiens
caccgccccccggaagaaggaagagcccccaaaacacaagaggacggagaagcgacgaaagaagccgggacaaggac

SEQ ID NO: 74401 - RNA, 37 nt, Homo sapiens
accccaaaccccaaacgacgacggagcccccggcagc

SEQ ID NO: 74402 - RNA, 57 nt, Homo sapiens
gagagagaggcgcaggacgccaggggaacgacaagaaacaaaggacgacgaccgaag

SEQ ID NO: 74403 - RNA, 77 nt, Homo sapiens
aaggagcagcccaggaccgagaccggagcagccggggcggagcgggcgaccggcccgaggaccgccgcacgaccaaa

SEQ ID NO: 74404 - RNA, 68 nt, Homo sapiens
ggcacgggccgaggcggccggggaagggagcggagacgcgccacaggagccgcagaagcaaaggcacc

SEQ ID NO: 74405 - RNA, 73 nt, Homo sapiens
aaagcagaggaaggcagaagaaaaaggcaagcagaagaggaacagaagaagcagagcagagacggagcagcag

SEQ ID NO: 74406 - RNA, 74 nt, Homo sapiens
agccaccagaagacacgggcacccagaaacggcaccagaggcgacggagaaagagggaccaaagcacagaggcg

SEQ ID NO: 74407 - RNA, 84 nt, Homo sapiens
caacaagcccaagagccgcccaaaggaaaaagggcggaaaagcggggaaaggaagggagccacgacagcacccagaaacacccg

SEQ ID NO: 74408 - RNA, 76 nt, Homo sapiens
ccagaggccgggcggagcgcccagacgcggggagccgccggagcgagaagccccgggcaaggggagcagacaacaa

SEQ ID NO: 74409 - RNA, 82 nt, Homo sapiens
cccaagagccgaggcagcggcggccgaggcgcccaaccagaagcccaccagaggcgaggggaggaggaagcgagcgaaaaga

SEQ ID NO: 74410 - RNA, 65 nt, Homo sapiens
ggaggacacaccgggccagacaggcccacagacaagccgcccccccacccgacggagcggcgagc

SEQ ID NO: 74411 - RNA, 37 nt, Homo sapiens
ccacaaggaggaaaggacaggagcccggacgaaacag

SEQ ID NO: 74412 - RNA, 69 nt, Homo sapiens
cgcgccgggcgccacaacggacgaggagaaaaaaaagacagcccgaagaaggcggagggcaaaggaaga

SEQ ID NO: 74413 - RNA, 70 nt, Homo sapiens
acaagaggaggaaaacaaaagggaacccgaggcggaccggaagccccaggagcggacaaaccggaggagc

SEQ ID NO: 74414 - RNA, 75 nt, Homo sapiens
gaagccggcccgcccggagggaaaggccgcaaggagaacgcagccccaggcgggggaggaggaggggacgaggca

SEQ ID NO: 74415 - RNA, 80 nt, Homo sapiens
gaaggaaaggccagacagacacgagggaccaggccagaacggcgcggcagggcgagaggcccgggagaacgcaccagcaa

SEQ ID NO: 74416 - RNA, 77 nt, Homo sapiens
gggaagagagcacaagccaaagcaacacggcacagaaaaagcggaagaagcagggaaaaacgaacagaaggaagcag

SEQ ID NO: 74417 - RNA, 33 nt, Homo sapiens
cccgaggagcgggaacagcggggacgagagccc

SEQ ID NO: 74418 - RNA, 73 nt, Homo sapiens
accccgcccgaggcccccacaagaagcagcggacgcgcccccaagaaagagggaggaaccgaaaggaaaccga

SEQ ID NO: 74419 - RNA, 76 nt, Homo sapiens
cggagccaccaggccccaccaacaccagcgcggaaaaagagcagcaccgaggccacgcgacgccagcccgccccca

SEQ ID NO: 74420 - RNA, 87 nt, Homo sapiens
agacgcgggcggccaccgggcgggaccgcacccgagcggccggagacaccgaaaggggcaggaggggccacggaaagaaaaaaagcc

SEQ ID NO: 74421 - RNA, 109 nt, Homo sapiens
agggaaagaacaaaccgcacgacacaggaaaggacaaaaccagaagcagggccacagagcccgaccggcccacagccacccgacggccacaggagggcacaccgagcca

SEQ ID NO: 74422 - RNA, 84 nt, Homo sapiens
ggcggcgccgggcccggggggggacagcaggcgagacaagcagaccggaagaccgacggaagaccacaccccgagggagcccag

SEQ ID NO: 74423 - RNA, 42 nt, Homo sapiens
aacaaggggagccgccggacggcaaacaccagcaacacccgg

SEQ ID NO: 74424 - RNA, 72 nt, Homo sapiens
gaccccccgccggaccccacagcaacaagccaagcaagaaaagagacacagaaggaaaaagaagagaggaaa

SEQ ID NO: 74425 - RNA, 75 nt, Homo sapiens
gccaagccccgcgggcacaggaccccacacagagacaagccaccagcagaaaggccaaagaagagacgaagcaaa

SEQ ID NO: 74426 - RNA, 79 nt, Homo sapiens
gacaggcaggaaaagacagaagggagaggaagaaagaccaaacgagagacaaaagagaacaacagaacgcaaggagagg

SEQ ID NO: 74427 - RNA, 84 nt, Homo sapiens
cagcgacccaagcgccgcggaaccacgccgccacgacccccagccgagagcggcccaggaggaacaaccagcccacccggagag

SEQ ID NO: 74428 - RNA, 72 nt, Homo sapiens
gccgcaggcggcagcaggacaacgagccacggaggcggagagagccccgacgccacaccgcggggggcacgc

SEQ ID NO: 74429 - RNA, 81 nt, Homo sapiens
caagaccaagaaggaaaccgcacccacacggccgaggcagcaagagaagaaaggccacaccaccgagaagccacaggccac

SEQ ID NO: 74430 - RNA, 80 nt, Homo sapiens
cagcggcggcccaggccagcacccgcaagaacagacagccacgcagacggaaacaaggcaacagaaagagcaacagcagg

SEQ ID NO: 74431 - RNA, 79 nt, Homo sapiens
ccagaaccaggcggcagaggcgccgccaaggggggcagacaacaggagagaggcgaccccagaagagggagggagcgaa

SEQ ID NO: 74432 - RNA, 71 nt, Homo sapiens
cgggcacaaagagaaccaggaacgggaagcgggcaccaacagacaaccagggcaagcagaggcaaaggcaa

SEQ ID NO: 74433 - RNA, 73 nt, Homo sapiens
caggagaggaaggagccgccacggagcccgacgagcgcggcaagacaccaacacagacggaaccgccgcgccc

SEQ ID NO: 74434 - RNA, 81 nt, Homo sapiens
cggacgcacgcgaagggagcggggaggaaacgaccaaagcaaaaaaaaggccagaggacaggccgagaggaaagaggagcc

SEQ ID NO: 74435 - RNA, 88 nt, Homo sapiens
caggaaggcaggccgggcggccaccgggaggcaaggaggcgcggagagcgcaaacgggcgaaaaccacccaaggcccaacccagccaa

SEQ ID NO: 74436 - RNA, 55 nt, Homo sapiens
gaggccgcccacagaacaggggagaagcccgacagagaaaggagaaaaggccgac

SEQ ID NO: 74437 - RNA, 70 nt, Homo sapiens
ccaggcgacaacagaaaaggccagcaaaagagccggaaggcaggcgaacgaaggagggcgagggagcaag

SEQ ID NO: 74438 - RNA, 75 nt, Homo sapiens
aggcccgaaaagcaccccccaaagccggagcgggagaagccgcgggagcggaagacaggcccggagcccgacgga

SEQ ID NO: 74439 - RNA, 81 nt, Homo sapiens
gagcggcggccaggccagacccgaaggccaggagacccgaccccaaggcaagaacggaagcacgggcggaggaaagcacaa

SEQ ID NO: 74440 - RNA, 71 nt, Homo sapiens
aagcccagcagggaacaggaagaagccagcagaggaacccgccggggcagcagaagaggacaagcagacag

SEQ ID NO: 74441 - RNA, 63 nt, Homo sapiens
agaccaagggcgacacgcggcaccacccaagaagcgggccgccaaggggcgaagaccaagaca

SEQ ID NO: 74442 - RNA, 64 nt, Homo sapiens
aaaacaacgagccagagacaggaacccaggacaaggcacgaggcgcggcgaccaccacagcaga

SEQ ID NO: 74443 - RNA, 75 nt, Homo sapiens
gggggaggcgcgcgacgaagagccccagccccggccgggccgaccggcagcaggaaggacagaaaacgggcccca

SEQ ID NO: 74444 - RNA, 39 nt, Homo sapiens
cagccgccagcaccgccggccacgacgaccacagcggac

SEQ ID NO: 74445 - RNA, 82 nt, Homo sapiens
aaagcaagagacagcgaggacagaaggaagaagagccagaagcagcaggaccggcggaggagcgagagcaggacagaggacc

SEQ ID NO: 74446 - RNA, 86 nt, Homo sapiens
gcggcggcgaggcggccgaggcggccaggggaccgggaggggcgaaggcgggcggcagaggcgacagccaagcgaggcccaggcgc

SEQ ID NO: 74447 - RNA, 73 nt, Homo sapiens
aggccgaaaagacagagaggggaaaccccgaaaggggggcagggagagaaggggaaccgcccaaaagcccgcc

SEQ ID NO: 74448 - RNA, 65 nt, Homo sapiens
gaagagcgcagaagccggaagagagccaagccaggcccagcagccgccaccggggaaccagaaga

SEQ ID NO: 74449 - RNA, 39 nt, Homo sapiens
ggggaggaggggcaggcccggcgaagaccggcgaaagag

SEQ ID NO: 74450 - RNA, 80 nt, Homo sapiens
aggcaaggcaggcgcacaggcgcagaagagcaagaccgaagacaacaaaagaaaacaaagcacggaaacaagagaacaca

SEQ ID NO: 74451 - RNA, 79 nt, Homo sapiens
ggcggacggggcagcggcggcggcgcccgcgcacgcgcaagaccgcgaggcgagaccccccgccgacacagccaccaag

SEQ ID NO: 74452 - RNA, 78 nt, Homo sapiens
agcaccaaagcacacagaaccaggccaggggagaagaaccagccggcacgaaggcaaaccgagacccaggcaaaggcc

SEQ ID NO: 74453 - RNA, 74 nt, Homo sapiens
aaggagcccgggcgcgggggcggcggcagggggcggagcgcaggagcacaaaggaacggaaaccaagccaaaga

SEQ ID NO: 74454 - RNA, 81 nt, Homo sapiens
gccaaacagcccagccgcgccagcgcccggcgccgcgcgccacccccgacgggacccccgccccggccccccagcgaggaa

SEQ ID NO: 74455 - RNA, 79 nt, Homo sapiens
caaaagccccgggaggagggcacaccccaacacccgccaccccgaggcaggaacagcacccggacggacacgagaccag

SEQ ID NO: 74456 - RNA, 80 nt, Homo sapiens
caccacgggcggccccagaagagcccccccccggaagagaaacgggcacagaggacccaccacgcccagacgaggaaagc

SEQ ID NO: 74457 - RNA, 67 nt, Homo sapiens
gcgcgcggaaagagaagacccaagggcaagccaagaaaaggggaacgaaacccaaacaaaacacccg

SEQ ID NO: 74458 - RNA, 37 nt, Homo sapiens
aggcccccaagacaagggccggaaagagggcgggccc

SEQ ID NO: 74459 - RNA, 38 nt, Homo sapiens
ccgggaagcagagggagaaagggcccggggcgcccgaa

SEQ ID NO: 74460 - RNA, 80 nt, Homo sapiens
ccacagcaagacgccaggacccacggaagccagaaaggagaaacaaccaaggagaccagccagagaaagcccccgagcag

SEQ ID NO: 74461 - RNA, 73 nt, Homo sapiens
cgcaaggcggcaggcaaaccccgccagggccaccagaaacgaggcacaggcagcaagagcggaacacagaaag

SEQ ID NO: 74462 - RNA, 85 nt, Homo sapiens
aaggcccggaagaaagaggagcggcagagccgcgggaccgcaccagcaggggcccgaccaggaggcccggaggaccccccccgag

SEQ ID NO: 74463 - RNA, 81 nt, Homo sapiens
cagggcaaaggacagaccagcagacggacggacgagcccggccaggggcggccaccccacgcgccgcggccccaccgcgcc

SEQ ID NO: 74464 - RNA, 70 nt, Homo sapiens
gaaggccgggccagaccaaacaccacacaaggcaccgcaaagcaacggagcaaggaaagagcagaagcca

SEQ ID NO: 74465 - RNA, 73 nt, Homo sapiens
ccaggagggcccgcgacagacgggcaggagccgagaaagcgccgggagggaaaagggggaaggggccaaagag

SEQ ID NO: 74466 - RNA, 77 nt, Homo sapiens
acaaagaaagaacacaaacgacacagacaggcccaggagaaagcaagacacggaccggacggcaaagaagcgaccag

SEQ ID NO: 74467 - RNA, 71 nt, Homo sapiens
cacaggccgaccgcgcgggaaggcgccagacacagaaaagaaagagagcaaccacccacaaggaccgagaa

SEQ ID NO: 74468 - RNA, 70 nt, Homo sapiens
ggaggcgggacggaaggaccagagcccagcagccaaaccacagaacaggcaaagaaaccccaaagccagc

SEQ ID NO: 74469 - RNA, 85 nt, Homo sapiens
ggggaccagcagaggaagggccagcagcaaaaacccgaccaagcaggcagggacacacggacccgaacaaagacaaagacaaacc

SEQ ID NO: 74470 - RNA, 85 nt, Homo sapiens
caaggcccgccggcggcgcgcgcggcgagcccgggggcccagggagggccacggcgagccccaaggacggggccgaccgaggcca

SEQ ID NO: 74471 - RNA, 85 nt, Homo sapiens
cacacccaggaaaagaccaggacggacaagcacagccggaaggcacgagcccgggcggacaggggaaacacagggggcgacaaac

SEQ ID NO: 74472 - RNA, 86 nt, Homo sapiens
cgggcaggacccgaacccgccgcgaggggcgagaaaggcccacgcagcccccaagcaggggaacgcccgcggacggcagggcgcga

SEQ ID NO: 74473 - RNA, 82 nt, Homo sapiens
agagcaccagcaccagcagaggggggcgcagagagacggcccaagccgaaaacacggcccaggccgcccgggagggcgcacg

SEQ ID NO: 74474 - RNA, 80 nt, Homo sapiens
acgacaccaggggaggagcagacggccagagacacaaggccccggcagcagcaggccgggcgaggaaaacgcaaggggcc

SEQ ID NO: 74475 - RNA, 56 nt, Homo sapiens
agggcagggacagcgcaggcagcaggacaggccggcgaggagagacacgacaagac

SEQ ID NO: 74476 - RNA, 70 nt, Homo sapiens
gggaagccaccgcacagcgaccagggacgcgaggggaaagccggggaagagaaggggagcaacgcggcgg

SEQ ID NO: 74477 - RNA, 77 nt, Homo sapiens
accaggcccgggagcgcgagggagcgccaagggcacgggaagaccggaggggacgaagaacggagcagcagcagaga

SEQ ID NO: 74478 - RNA, 41 nt, Homo sapiens
acacgaccccacgcgaaaggaagagaggggaacgagcccca

SEQ ID NO: 74479 - RNA, 40 nt, Homo sapiens
agcacgaggaggcgcgaggagagagggagccggaagcgag

SEQ ID NO: 74480 - RNA, 82 nt, Homo sapiens
agggaggcccgcccacggcgggcacggacccaggacccccgcgggcgacgcgagcccagaccgcgaccgcacaagcagccgc

SEQ ID NO: 74481 - RNA, 65 nt, Homo sapiens
ggcacagggggggagcacagcgacgcacaaaaacaaccaaaccagcacccaaagcaaaaagcagg

SEQ ID NO: 74482 - RNA, 73 nt, Homo sapiens
ggacagcacaacagagaagacagcaccaggccaaacacaagaagcaagaaggacagcagaccacagcccggca

SEQ ID NO: 74483 - RNA, 80 nt, Homo sapiens
cgcggcgcccagcccggaccaggccgggacacaagaaacaaacgaagcacccccagaaacccccaacaaacagaagaaaa

SEQ ID NO: 74484 - RNA, 79 nt, Homo sapiens
cagaccgcagaaggacaccgcaggaggacaccaccacagcccagggccgaagcccgggaggggcccaggagcgcgcggg

SEQ ID NO: 74485 - RNA, 74 nt, Homo sapiens
cacgagaagacacaagggaaaagggggaggaagagaagacaacgcacaacaggaaacggaggaaaacaacagaa

SEQ ID NO: 74486 - RNA, 73 nt, Homo sapiens
cacaacaacgcagaaagcccacaaccggcacaagacaacaggaccccccagaaacccaggacgcacacacaag

SEQ ID NO: 74487 - RNA, 73 nt, Homo sapiens
agcccggacagaccaaccgcaggcgcaaacaacagggcggacccgaccgaagaagggaagcgcgaaaagccaa

SEQ ID NO: 74488 - RNA, 66 nt, Homo sapiens
accccggcagaacacggcccacgaacaaccgagaaccagacaaaaaagcgccccgggggaaaggca

SEQ ID NO: 74489 - RNA, 71 nt, Homo sapiens
agaggaggacaaagaaaaagacccggcaacggaggcaaggcgaaaaacaacgccgcagaaaggcaaggacc

SEQ ID NO: 74490 - RNA, 40 nt, Homo sapiens
gaaagccggagccggccaggcggagaacggaaaagcacca

SEQ ID NO: 74491 - RNA, 63 nt, Homo sapiens
cgcaggcccgaggccggcccccagaggagaacgccaagccaaccgaaaaagccgacaaaaaaa

SEQ ID NO: 74492 - RNA, 73 nt, Homo sapiens
ccagacaaggaaacagcagaaaccggaaccacacacaccacaggaagccagagcgaaaacgccacaacagagg

SEQ ID NO: 74493 - RNA, 78 nt, Homo sapiens
agggaggagggagaacacaggaaccggccccggaaggggcagaccaacaccacccagcaaaaaccccgacgaacgcgc

SEQ ID NO: 74494 - RNA, 68 nt, Homo sapiens
cgccagaaggacacccggacccaaggcgccggcccagagcaaaaggaagacaacccccccgggcagca

SEQ ID NO: 74495 - RNA, 77 nt, Homo sapiens
gggcgggcggagacccagaggcccgccgacaaaaggagcccccgaaccagcgaaaagccccgcccgggcgacagagc

SEQ ID NO: 74496 - RNA, 66 nt, Homo sapiens
cggggcgacaggaaccgggaccagaaaaggccccagcagccgagcggaacaacaagcccggaagga

SEQ ID NO: 74497 - RNA, 70 nt, Homo sapiens
aggagacacaagacagggacccaggccacgcaaaccccacaccacgggcggggacagcaccggacccaag

SEQ ID NO: 74498 - RNA, 67 nt, Homo sapiens
cgaaagccggagcaggggaccccaagcaagaaaccgaaagggaaacaaagggaacaaaaaccggaag

SEQ ID NO: 74499 - RNA, 83 nt, Homo sapiens
cggacggcgcgcggacaccaggagcaggccgggcccgccagggcacgcgcccgccacgggaagcccgagaagccgcgcagcac

SEQ ID NO: 74500 - RNA, 65 nt, Homo sapiens
ccaaagaagggagaagaaagaaaagcacccaccgaccgccagcgcagggacgcaaagaagcgcgc

SEQ ID NO: 74501 - RNA, 74 nt, Homo sapiens
aggccgaggagccggagccgcagcacgcacccggcaaagaacgcagccaaccgaaagccacggcaaccagagaa

SEQ ID NO: 74502 - RNA, 93 nt, Homo sapiens
ggcacggaccaacgggaacaaaacacacacccgcagacaagaacggagagggcgcacaaaagagcacaaaagcaccaaggcgcacaacagcga

SEQ ID NO: 74503 - RNA, 34 nt, Homo sapiens
cacgagagagcgagaaccagagcacagagcagac

SEQ ID NO: 74504 - RNA, 72 nt, Homo sapiens
aacgccaggcggaccagaaggccagcaaagaaaaagggagcggcaaagaggcagacccagagcccacgaagc

SEQ ID NO: 74505 - RNA, 74 nt, Homo sapiens
acagaccaccccgccaacgcggcaccgcagaacgccacaaccagcggggaggcaagcggagcaggcagaccgaa

SEQ ID NO: 74506 - RNA, 60 nt, Homo sapiens
gagaggaaacaaggaagagcacaacaagccgccacccgaagacaagcagacaggacgagc

SEQ ID NO: 74507 - RNA, 64 nt, Homo sapiens
ggccaacccccaggaccagagaaaggagacccaccaagccaggaaacgaaaagggagagacagc

SEQ ID NO: 74508 - RNA, 84 nt, Homo sapiens
agggagcggcggccgcgccgcccaaggcgcaacgggggacgaccgacgcgcgccggcggccccgaaagccggaacgagcgaccg

SEQ ID NO: 74509 - RNA, 79 nt, Homo sapiens
gagacccaagaggacgaaacagggaggagaagaggagcaggcccgcacaggacacagaacagacccccgccgccccggg

SEQ ID NO: 74510 - RNA, 72 nt, Homo sapiens
cgggacgaggaccgagaccgcggccgggaccgaggggacccaccaggccacacccagcggaaaagaccgcca

SEQ ID NO: 74511 - RNA, 60 nt, Homo sapiens
gccaacacaccacgccagcgcaagcggcggaagccgggcagaaaaccgaccccaaaccca

SEQ ID NO: 74512 - RNA, 78 nt, Homo sapiens
gaaaccagcagcagcccgcgacacacagacaagagacggagacgggcgccgacccaggcggaggcagggggacaagcc

SEQ ID NO: 74513 - RNA, 81 nt, Homo sapiens
cgacggcgccgcccacggcgaggacagagcgggagccaccagcgccaaagggaagccaggagcccgggggcacggggagaa

SEQ ID NO: 74514 - RNA, 37 nt, Homo sapiens
accagcacgacgagcaacagggaaacaaagagccccg

SEQ ID NO: 74515 - RNA, 85 nt, Homo sapiens
gccgcgccgcaccccgagcgaccgcaggggcgagaagaagggaccccagcccacggcccaccagccacgggacggcaaacccaca

SEQ ID NO: 74516 - RNA, 88 nt, Homo sapiens
cggaacgaccgcaggacacgggaccgcggacgaggaccggcccgaacgccaccagaggaagacgagagaagaggaggcagcccgggaa

SEQ ID NO: 74517 - RNA, 69 nt, Homo sapiens
agcaagaaaccgcccccagaacacaacagggcaaaggccccgacaggagagacagagagaggagaaagc

SEQ ID NO: 74518 - RNA, 62 nt, Homo sapiens
cgcccccagaacacaacagggcaaaggccccgacagggccggcggccccgggagcgagacaa

SEQ ID NO: 74519 - RNA, 67 nt, Homo sapiens
gagacccaggccgagccgagaggcaagacaacacacccagaagggaaacccagacgacaaggaaggc

SEQ ID NO: 74520 - RNA, 80 nt, Homo sapiens
gggacgcaccgcaccgagggcgagcccagaggaagaggcaaagcagacacccggaccaggacaacccccaggcggggccc

SEQ ID NO: 74521 - RNA, 64 nt, Homo sapiens
agcgaagcagcagaaccccaggcgggacggccggacccaagccagaagcccgcaaagcccccag

SEQ ID NO: 74522 - RNA, 38 nt, Homo sapiens
cagaagacaccacagagcaacccccagccacaacgcga

SEQ ID NO: 74523 - RNA, 86 nt, Homo sapiens
cgagcgcgcgggaagacacgacccccggcgggcacgcggagcccgcagggaagaaggccagcaggcgcgccccgcacaccggagca

SEQ ID NO: 74524 - RNA, 79 nt, Homo sapiens
agacgccaacgagcggcgcggacggcgcgcggacaccagagcaccaagcaggacacaggagaccgggcggcggccagca

SEQ ID NO: 74525 - RNA, 36 nt, Homo sapiens
gcagcacacacaggggaagggagccccccccaagga

SEQ ID NO: 74526 - RNA, 77 nt, Homo sapiens
ggccgcgcaagggcacccgcgacgacgagacgacacccaaagacaaggaaaggacaggcggagcgcgcagaggaaag

SEQ ID NO: 74527 - RNA, 67 nt, Homo sapiens
cggcgaggcaccccaacagcagagaaacaagggggcgccgggaggaaccgaggccacagagaggcac

SEQ ID NO: 74528 - RNA, 60 nt, Homo sapiens
cggggccagggaacccggcaccgccccagaccaacggacagcaggcgccggacaacaaaa

SEQ ID NO: 74529 - RNA, 88 nt, Homo sapiens
aaccacacaccagcggcgcaggacgggcacagcagagaccaaaggcagggcaaggaaacggccacaaaccgccagagcggaacgaccc

SEQ ID NO: 74530 - RNA, 73 nt, Homo sapiens
cagccgcagccacaacaccggcaggaaccaccaggacagaccccgggcaaggggagcagacaacaaaacgagc

SEQ ID NO: 74531 - RNA, 79 nt, Homo sapiens
gcggaggcgagggggcgggggcccaacgcgggacaggaagggccgagcggcgggaaagaggcaggaagaaggacaacag

SEQ ID NO: 74532 - RNA, 83 nt, Homo sapiens
cccagccaagcacaggagaaggcgacaggaaccagccgggggccaaccgaggagccacgcagcagacacgcggcacaggagaa

SEQ ID NO: 74533 - RNA, 78 nt, Homo sapiens
cgcgcagccgccgccccgaccgggcgccagcccccggacagccgcccgggaagcccggggcggcgacggagcacgacc

SEQ ID NO: 74534 - RNA, 42 nt, Homo sapiens
cgcgcgagcacgggcggagcgaacgcaccaggagccgaagac

SEQ ID NO: 74535 - RNA, 99 nt, Homo sapiens
cgcgccgcagccgcccagaacccgaccaacaccagaacccagcgcccccagggggcgaggaagagacaggcgggggagaagaagcagggccaaacgcag

SEQ ID NO: 74536 - RNA, 76 nt, Homo sapiens
cgcggccgccgcaaggaaacacaacgagaagaaaacgccaggccaaggggcgccaccaccagccgacccaggcagc

SEQ ID NO: 74537 - RNA, 73 nt, Homo sapiens
caggcgcccgacgagcacggcggccaaggccagagacccagcaggagccaggaagagaagaaaagaagaaaca

SEQ ID NO: 74538 - RNA, 59 nt, Homo sapiens
cacagacccacagcgaaagcaacaggaacagcaagccaaagagcggcgggccacccaag

SEQ ID NO: 74539 - RNA, 63 nt, Homo sapiens
gcacaaggacgccaagggggcgagagccacccacacagaaagccagggccggagggagaacag

SEQ ID NO: 74540 - RNA, 79 nt, Homo sapiens
gcagcggggaggccgcccggcgcagcggggaccggcggcggcgcccaggcacccggcccggggcaagggcgcagcacgc

SEQ ID NO: 74541 - RNA, 70 nt, Homo sapiens
agaacccagaagagaaaaccccggccggcgccaggcaagcagaaaggacagggcgaaccccgcgccccgc

SEQ ID NO: 74542 - RNA, 75 nt, Homo sapiens
gacccgagccccagagggcacagggcagcgagaagcgagacacagccagcgcgccagaaaccggggaacgagaag

SEQ ID NO: 74543 - RNA, 65 nt, Homo sapiens
gcggcgagagcccccacggacaggaagggaaggggcggagacgggcggaacgcaggaggccagag

SEQ ID NO: 74544 - RNA, 81 nt, Homo sapiens
ggagcagggccggaccccgcggcgcccccggcccggagcaacgagcgcagcgccgagagaacggacgagaccaacgcggaa

SEQ ID NO: 74545 - RNA, 65 nt, Homo sapiens
ggaaaggggaggcagacgcagcggaagagagaagagagaaagagagacaggaggcagaacaacgg

SEQ ID NO: 74546 - RNA, 75 nt, Homo sapiens
aaccggccagggcggaacccaccaggagggacaccggacgccggaagcaaagcccacagaccacccaggggccca

SEQ ID NO: 74547 - RNA, 88 nt, Homo sapiens
ccaaacagcccccgaaaacgcacggagcgggcccgggccagaggcagaaaacggacggaagaaaaggcggccggcagcggaaaagaga

SEQ ID NO: 74548 - RNA, 72 nt, Homo sapiens
cgagggacccgcgccccagacagccgcccaccagggccaccagcgccccgggaaaaaggcaaggagggaggg

SEQ ID NO: 74549 - RNA, 71 nt, Homo sapiens
ccgagagccgcccgggccagcggccgcgcacccccggccggaggcaccagccgccgggaggacaagcgacc

SEQ ID NO: 74550 - RNA, 87 nt, Homo sapiens
ggcacgccacccgcagggcgacaaaggcccggcgcgcagggcgggggcgccccaggagccggacaggaccaagccagcgccccagac

SEQ ID NO: 74551 - RNA, 87 nt, Homo sapiens
acagccaggcaggcgcagaagagacaggggaggcacgcgaggagacacagcaggcggaacacaccaggagccccagcgcaacccccc

SEQ ID NO: 74552 - RNA, 85 nt, Homo sapiens
agcgcgccgcgccggagccggagaacggccaggcggccccgagcggaacggagaaagcgaggaggcgagacaggaccgcggacaa

SEQ ID NO: 74553 - RNA, 80 nt, Homo sapiens
ggcggccaacgggccaggaggaccgggagaggcgcgggaggcgaggaggcggcggcggagacgggccagggacgcggacg

SEQ ID NO: 74554 - RNA, 74 nt, Homo sapiens
ccccgccgggagcccggcccagacacccaccgacagggccccgcaggaaagccagggccccccacgcgagaacc

SEQ ID NO: 74555 - RNA, 75 nt, Homo sapiens
gagcccgaggcaccacccaagcggacccaggggccccaaaagaagagcggaggcccacgcagccgcggaaaggca

SEQ ID NO: 74556 - RNA, 67 nt, Homo sapiens
gcccgccagcagcgggccgcgccgcgcccagccggacccacaaagcaggaagggacaacaaacgagg

SEQ ID NO: 74557 - RNA, 76 nt, Homo sapiens
acaaaggcggacacgaaaccaccgggaagcgccggggaacgcaggcggaaagaggcagacgagccgcaaagccacg

SEQ ID NO: 74558 - RNA, 66 nt, Homo sapiens
caagacgacggaaccaacacacaaagccgcagaaagcagcagacgaacgaaccacggcaacagccg

SEQ ID NO: 74559 - RNA, 81 nt, Homo sapiens
gagagggaagccccggaaccagcgagagacaccaagaagaagaggaggagagacggggagaagaacaacgaggaagccaaa

SEQ ID NO: 74560 - RNA, 83 nt, Homo sapiens
agcccccaagagcgggacacaggccacgggaagaaccggcagaaaagaagacaccccaagggcagggggacagacagggcccc

SEQ ID NO: 74561 - RNA, 81 nt, Homo sapiens
gggggacacgcccgaggaaaaggggccggacagacagcaaggaggcaaacgagagccccaagaggcacacaagcagaggag

SEQ ID NO: 74562 - RNA, 62 nt, Homo sapiens
aaagacaggacaccgggaagcggaccaagaaaacggggaaaaacacagagaaggccgcagag

SEQ ID NO: 74563 - RNA, 76 nt, Homo sapiens
cgcgagcaagagcagacgccaggaaagagacaagagaagcgggccgacacccgcggaaagacagaaaccaacgaga

SEQ ID NO: 74564 - RNA, 71 nt, Homo sapiens
aaaggagacacgaggaagggaaccagcggcccagaaacgggagacacccaaggagggacgggccagaacca

SEQ ID NO: 74565 - RNA, 70 nt, Homo sapiens
gaccaagaaccaggacgccacaaacgggcacaccaacggcccaggaccggcaggaaccaggaaaacaccc

SEQ ID NO: 74566 - RNA, 85 nt, Homo sapiens
caggaaccagccgggggccaaccgaggagccacgcagcaggccaaacaccagagcacccagaaggaacaaaagaagccaggaccc

SEQ ID NO: 74567 - RNA, 71 nt, Homo sapiens
ccgaacgcgacaggaggcggccgaaaaaacccgacaaccggaaagaaggcagacggagacccggagacccg

SEQ ID NO: 74568 - RNA, 73 nt, Homo sapiens
aggagcgcgaagcgggaccacgcggaggacgggcaacaggagccccacgccacggcaacccccagccacaacg

SEQ ID NO: 74569 - RNA, 70 nt, Homo sapiens
ccgcacccacaacagccagagaacgggaaggaaaaaaccaaaagacgcggacgccaaacacacaacgaca

SEQ ID NO: 74570 - RNA, 68 nt, Homo sapiens
ggagaggaggcccagaaacagcgcagagaagagagcgccaaagcagcggcaaggaaacaagacaaaag

SEQ ID NO: 74571 - RNA, 85 nt, Homo sapiens
cggccacacaacagcagccccgaaacagcacaggccaaagagcaccaagagaccaccaagaagagagaagaagcgaagaaaagag

SEQ ID NO: 74572 - RNA, 87 nt, Homo sapiens
cggccccgcccaccccccccgcggggcggcagcccgaagccggaccagcaggcggcggccgggagagacgggggcaccagagccagg

SEQ ID NO: 74573 - RNA, 78 nt, Homo sapiens
cgacgaggaacgaagggacaagacccgccagaacagggcccgagggcaggacagcaggcaccggcgaagcacagagag

SEQ ID NO: 74574 - RNA, 68 nt, Homo sapiens
ccaggaaggaagacagcgacgcagaccaaaagcagagaggcgcgagaaacacagcccaaagaaacaca

SEQ ID NO: 74575 - RNA, 85 nt, Homo sapiens
gcggcgcgcacagggacaccggggcgacgggagaccgaaggaagaaaccgggcagaaagaagacccagagaaaaacgggagagaa

SEQ ID NO: 74576 - RNA, 92 nt, Homo sapiens
ggagcggagaaggagaagcccaacaggaggccaaacgcgcagccaagcgaggagcagggaggcgcgaggggcaggcacaggagccggcgagc

SEQ ID NO: 74577 - RNA, 70 nt, Homo sapiens
ggaaaggacccaaaccaaacgcggcaaaaggagcagaacggcacgcagcccccgcagagagagagggagg

SEQ ID NO: 74578 - RNA, 65 nt, Homo sapiens
aagaggccaacccacaaacagaagaagccgaggcccagagcccaaaaggcagagcgaggagagaa

SEQ ID NO: 74579 - RNA, 83 nt, Homo sapiens
accacacgcgccaacacagaaaaccggccagcggggaagcgcaggagcggcgggggaggcagcaagcgaccggacccaccggg

SEQ ID NO: 74580 - RNA, 71 nt, Homo sapiens
aaggggaccaggaagccaaaagaagccggagggcgaaggaggagaaaaggaccgcaacacaggaaacccac

SEQ ID NO: 74581 - RNA, 58 nt, Homo sapiens
ccggagcgagacgagcgaggagaaaaaaccccgcggaaaacaaccaagggcccagggg

SEQ ID NO: 74582 - RNA, 78 nt, Homo sapiens
ccgcaggacgggagaccaagggaggacggcggaacacggaggcgggaaagggcccaaaaaagggaaccgcacagcgag

SEQ ID NO: 74583 - RNA, 86 nt, Homo sapiens
gcggggaacggaagcggagcagggaagacggagcggcggcccgaagggacccaggaggaaaccagcagccgcaccgcccgagaagg

SEQ ID NO: 74584 - RNA, 65 nt, Homo sapiens
ccggggcggaacagggcgcacacccgcacgcagggacgaccagcaagcaaagggacgagaagcaa

SEQ ID NO: 74585 - RNA, 70 nt, Homo sapiens
aaggcaaagcagaggaagaacagaggccccgaagagcgaaagcgccaccggaggccgagccaccaccaga

SEQ ID NO: 74586 - RNA, 72 nt, Homo sapiens
ggcaccccagcgccaccgccaggacagagggagcacagccaaaacgccaaaacaaaggggagggaggaggcg

SEQ ID NO: 74587 - RNA, 73 nt, Homo sapiens
ggggcggacgagaggaaggcgcgaccccgcaagagcccagcaaaaccggcggacaagaacacgggccccgaga

SEQ ID NO: 74588 - RNA, 76 nt, Homo sapiens
acaacaaagcacaaaggacgggaggccagacgagcaggcacgcaggagcccgacccacagcagcgagccaccccca

SEQ ID NO: 74589 - RNA, 66 nt, Homo sapiens
ggcccgaaagaagagcccaacagaagcaagaagagagaacccaacaggaacccagaaccgcgggca

SEQ ID NO: 74590 - RNA, 76 nt, Homo sapiens
agcgaggaaccagaacgaaaagcgccagaaagggggcggacccgggaagcccccggcggggcaggaccacgcagag

SEQ ID NO: 74591 - RNA, 73 nt, Homo sapiens
accaaaggaacagacccacccaaacacggggcaaagaaccaggcacggcaggaggagaggaccggaaagacag

SEQ ID NO: 74592 - RNA, 76 nt, Homo sapiens
gccggaggcgggagcagccaggacgcaccgccaccgcggaccgaggcgccacggggggaaccagaagcacaagcac

SEQ ID NO: 74593 - RNA, 78 nt, Homo sapiens
cagacggggagagccaccggccccagcagaaggacaagagcggggaggaccggggaccgacacggagccccaaacaac

SEQ ID NO: 74594 - RNA, 71 nt, Homo sapiens
cccaggccgcccccacgggggagcacccagcccacccagacgagcaagaagacaaacaagggaaggccgca

SEQ ID NO: 74595 - RNA, 74 nt, Homo sapiens
gaagcccgcgccgccggcaccagaggcaaaggccagccgaacaaaaggccgaagggagcgcagcacaccggcaa

SEQ ID NO: 74596 - RNA, 82 nt, Homo sapiens
gaacgcacagaggaacgagcgagcggcagagcgcgagcggcgaccgacccaacccccacccgccccgcccgcgacccggggg

SEQ ID NO: 74597 - RNA, 70 nt, Homo sapiens
ggggccgggcacggaagcgacccccacaaggaaccccccagaagaggaagcggggccgccgccccaagga

SEQ ID NO: 74598 - RNA, 73 nt, Homo sapiens
aagagagaaagccaagcaaaaagcagagacccccacccgggaagacacggacccccccgcgacagggcagcgg

SEQ ID NO: 74599 - RNA, 73 nt, Homo sapiens
caccaggcgcagacagacaagacaagcagaagaacagcagagggccaggacaccacaagggccgaaaggagca

SEQ ID NO: 74600 - RNA, 67 nt, Homo sapiens
caccggccaccggcggagcgaggggggagcacagaggcaagagcacgggcggcagccccaggggaac

SEQ ID NO: 74601 - RNA, 60 nt, Homo sapiens
gaaaaacaacagacccaggccaagaggccaaccagaccaagcgagacagaggcaaggaaa

SEQ ID NO: 74602 - RNA, 80 nt, Homo sapiens
gcagcgagaaacgaacgacgcagacccgggaaaaggagaagagaaggaagccaaggagcccgcaaccaagggcaccccac

SEQ ID NO: 74603 - RNA, 78 nt, Homo sapiens
gcacaaggaagaggacacagacaccaagcaggcacaccccaaggagggccccaaggcggcagccccgaccgacggggc

SEQ ID NO: 74604 - RNA, 77 nt, Homo sapiens
cggaagaaccgaaggacacacaggaccagaaaccacggcacccagccccccccaaacacagaaaccacaagacaaaa

SEQ ID NO: 74605 - RNA, 69 nt, Homo sapiens
gacgcagggcgcccccgggaccccgggagggcccagcaaccggccagcgaaccggagacaaacaggcag

SEQ ID NO: 74606 - RNA, 67 nt, Homo sapiens
ccagacggcggcggccccgaggagcaacccgaaagacaaaacggggagaccaacaaaacagggaggc

SEQ ID NO: 74607 - RNA, 51 nt, Homo sapiens
agacgcagggcgcccccggagaagagaaaagggaaggcacggaggaagccc

SEQ ID NO: 74608 - RNA, 81 nt, Homo sapiens
cggcaaggcgcagacggcacaggaacccgcaagaggaccccggccccaaggacccagggcggggagggccagccagggcca

SEQ ID NO: 74609 - RNA, 78 nt, Homo sapiens
ccgcagcagcgggaaggcgcaggaggcaggcaggccggcgaccgagcagagaaacgccacaccacccgagcggcagcc

SEQ ID NO: 74610 - RNA, 73 nt, Homo sapiens
aacgacgacccagaaagagcaaccggagcagcagacaccacgccacccaagagagagcaaaaaccgagaacca

SEQ ID NO: 74611 - RNA, 76 nt, Homo sapiens
acgagggacccccacaagcaagcacaaggcgacggggaggacgcacgacgcgcggcacgggaacgcagccggcaca

SEQ ID NO: 74612 - RNA, 66 nt, Homo sapiens
ccaaacgggcagcggagaaggaccacgcccccaggccgggcaaggcagggggaggcacggcagacc

SEQ ID NO: 74613 - RNA, 89 nt, Homo sapiens
cccgagagcgggaccacagaacgagcgacggacacaagaggcccaagggagcaaaccgaaagccagagccccgaaacacaaacgccggg

SEQ ID NO: 74614 - RNA, 72 nt, Homo sapiens
ccggcgcccgcgcgcgggaagaggcggaacaggcaccaagccggcggggcgggaggaccccccccagaaaac

SEQ ID NO: 74615 - RNA, 58 nt, Homo sapiens
caaaaccaagccaaacacaagcagaaggagcgaagaagagccacccggcccgcgcgcc

SEQ ID NO: 74616 - RNA, 72 nt, Homo sapiens
caaagcaggccccggaaacagcccgaaggagagggcggcaagcagcagagaggacaccaccgccggagaaac

SEQ ID NO: 74617 - RNA, 88 nt, Homo sapiens
gagaacgaccggcccgccaagaccagagaaggaggagggaccacgcgcgagagggcaccaacaaagcgccagccagcgggcagacgcc

SEQ ID NO: 74618 - RNA, 58 nt, Homo sapiens
aaccaaaacgggccaggaaggacaacagcagacacgagaggcgagggacgacagagca

SEQ ID NO: 74619 - RNA, 62 nt, Homo sapiens
gcgcggggaggcagcggaaggcggcagcacaacaacagcaacggaggcgggaccggaacagg

SEQ ID NO: 74620 - RNA, 68 nt, Homo sapiens
ggcacaaacacaacggaaaggcggaagcacagccggggaaagggaaaggaagccaaaggcagcaacgg

SEQ ID NO: 74621 - RNA, 85 nt, Homo sapiens
cccgccgccgcgaaggacagccccgcgcgggacccggggcgccacgggggccagaagcagccaccacgcaccggaagcgagacca

SEQ ID NO: 74622 - RNA, 68 nt, Homo sapiens
ggaaacaacagccagcggggcggggagacagagagcacgcaaacaaggagcagaaccacgcggacaac

SEQ ID NO: 74623 - RNA, 57 nt, Homo sapiens
gcggagggcgcggcgcgagaacacccgggggcagagaaaggccgggaaaagccccgg

SEQ ID NO: 74624 - RNA, 79 nt, Homo sapiens
gacgggggggcggcccggccccgcaggacgaccgaaaacccagccagacaaaagagaagcagaggagcgaagaaagaga

SEQ ID NO: 74625 - RNA, 84 nt, Homo sapiens
gaagcggccaaagccgcccagacggccaccggcgggaggaacaaaagagcggccaggaagagcgagcccgggcacgacggcgac

SEQ ID NO: 74626 - RNA, 70 nt, Homo sapiens
gagaaaggcgcagaagaagcaccgggggaaagcccacagagaggaccggagaaccagacgccgggccccc

SEQ ID NO: 74627 - RNA, 67 nt, Homo sapiens
agcgccgccgccgcccgagggggacacacaggaagacgaacacggaacgggcgagaagaaagcagag

SEQ ID NO: 74628 - RNA, 75 nt, Homo sapiens
cgaaggaggaaacaggacagaccggagacgcagccacccacacaggaacgccacaggaacgcgaggcagcgaggc

SEQ ID NO: 74629 - RNA, 78 nt, Homo sapiens
acgcagggagacgcacagccaggacaccggaaccgggaaagggcccccgggccacgggcaccagggcccacagggcac

SEQ ID NO: 74630 - RNA, 84 nt, Homo sapiens
gcccggacacagcaaaccgggccacagaggagaaacgaggccagaagagggagcaccgcccaaggcacaggaccagaggggcag

SEQ ID NO: 74631 - RNA, 33 nt, Homo sapiens
caaccccaaggaggggccagcacgaaagcagcc

SEQ ID NO: 74632 - RNA, 81 nt, Homo sapiens
gcaccgcacccggccagcccccccccagaccacaccggggcccgccggcaggcagcccgaagcagcccaggaacaaggccc

SEQ ID NO: 74633 - RNA, 75 nt, Homo sapiens
cacacgaacaacacacgaggaaagaacaagcaccggagagagagcaccagcggcaagcgcccacccagcacaagg

SEQ ID NO: 74634 - RNA, 73 nt, Homo sapiens
cagacaccagagccagaagaagcaggaaagcgaccaccacgcaagcagaggcggagcacccgaagcaaagagc

SEQ ID NO: 74635 - RNA, 84 nt, Homo sapiens
ccgccaccccgcggccgcacccccgccccaggccgccgccgccaggaaccagaggaggcccgcagggacagcacgagcagccgc

SEQ ID NO: 74636 - RNA, 72 nt, Homo sapiens
caccaagcgccccgccgggcccacaacaaggagccggggggggccccaagcgagccgacggccaccggggag

SEQ ID NO: 74637 - RNA, 77 nt, Homo sapiens
gacaggagcagaaaaaggggccaccaagagagcagcaaaccacggccggcgcggcccagcaagccgaaagcagaagc

SEQ ID NO: 74638 - RNA, 39 nt, Homo sapiens
aaacaccagaaaagacaagaggaaagcaggagcggacaa

SEQ ID NO: 74639 - RNA, 67 nt, Homo sapiens
cccagcagcaacccgagcccgaccacagggaacaggacgagaagaagcagaagaagcaaaagggaga

SEQ ID NO: 74640 - RNA, 89 nt, Homo sapiens
gggaccagccagagaacgccccaacgggggacccaccgacgagcaagaaggacacgagaccacaaaccccacccaagagccccccgcga

SEQ ID NO: 74641 - RNA, 123 nt, Homo sapiens
gaaccaggacggcagggcccccggagggaacccgcccccagggagggaacaaagcccacagcaccggaccacgcaccaggggaggcagggcacaacacagcagcagcccaaccccgggccagg

SEQ ID NO: 74642 - RNA, 102 nt, Homo sapiens
ccaacacaaagcagggaggcagcgccgacaacaccgacacagaccaacaacgaagcgagggcagaagaacaagaggaacccaacaaggccagaaaaggaaga

SEQ ID NO: 74643 - RNA, 99 nt, Homo sapiens
ccgcgccggacgacggaaggagaaacgacaggcaacaagacaagcggcggggccccggacagaagcgaaggggacagggggagaaccgccagggaaacc

SEQ ID NO: 74644 - RNA, 85 nt, Homo sapiens
caccccggaccgcgcagccaccgcggcccccgcggcgccacggccaccacgcggcagacagggcccgcccggagcaaagacccgg

SEQ ID NO: 74645 - RNA, 79 nt, Homo sapiens
ccgccccggaacagaaacagaccaggccccgccccagcccgggggcagggcaggggcgacgggcggaagaacgggcagg

SEQ ID NO: 74646 - RNA, 80 nt, Homo sapiens
ggccccgaggccccccgcaggacaggggcgggcccggccaggcccggggaggcaggcgcaaggaggcagcacggcaggag

SEQ ID NO: 74647 - RNA, 79 nt, Homo sapiens
gaagcccaggcgcaccacgggaggccaacagggaagacgaaagagggcagggacagacgggacgcgcccacagcagaca

SEQ ID NO: 74648 - RNA, 77 nt, Homo sapiens
gggaaagcgcacagagacggagcggagaagcagcacggacagcagccgaggaagaagaaggcagcagaaaagagaag

SEQ ID NO: 74649 - RNA, 104 nt, Homo sapiens
cgcggggcggaggacgcggcagcccgggagcggcgagggaaaagcgaggcaaggcaggcgggcaaccaagggcagaccgcacaagcagccccggaacacacaga

SEQ ID NO: 74650 - RNA, 70 nt, Homo sapiens
aaacacacacagaagggcgcgacgggccagcccacggcagaaagacggcggaagaggagagcggcaagag

SEQ ID NO: 74651 - RNA, 61 nt, Homo sapiens
agagaaacccggagggcgccggggccggcccggccacccccgggcccgcgccccaggcgag

SEQ ID NO: 74652 - RNA, 56 nt, Homo sapiens
agaggagccaggaggaaaacacaccaaggcaaacccagcaggaagccacgggcgaa

SEQ ID NO: 74653 - RNA, 34 nt, Homo sapiens
cggacacggaggggacaccggggagagagggagg

SEQ ID NO: 74654 - RNA, 58 nt, Homo sapiens
cgcgcacaggggagggaagggcgaccgacgccaagagcacgcgccaagggcacacgca

SEQ ID NO: 74655 - RNA, 60 nt, Homo sapiens
cccaacccaccagcaccgagaagaggcggacccaggaggcagagggacaaaccaaaggca

SEQ ID NO: 74656 - RNA, 83 nt, Homo sapiens
agagagacacaaaggcacagccggggccaaagcgaccaaccccccaccgcacgcagggggccccccgcccggggcaagaccac

SEQ ID NO: 74657 - RNA, 81 nt, Homo sapiens
ccaacaagcaggcacaaccaagcgagccgcccaaccccaaaagcaaacgaccaaagacaggaagaaaccaaaagacggacc

SEQ ID NO: 74658 - RNA, 66 nt, Homo sapiens
cgagagcgcagaacccgagcaagagaaaggagagaggcgcaacccagaagaaaggcaagaaggcgc

SEQ ID NO: 74659 - RNA, 83 nt, Homo sapiens
ccgggcggcacgcacgcgggcagggaacaggcggagcggaaggagaggcgggagagagcagcaccgaagagccgaagcgaccc

SEQ ID NO: 74660 - RNA, 77 nt, Homo sapiens
gcagcggaggaacgcagcaggggggccgggaagcaggccggggacgaaaaagggccgccaccgccgagccaaaacaa

SEQ ID NO: 74661 - RNA, 83 nt, Homo sapiens
gcaggaaaggccggacaccaggacccgcgccgggacccgggcgacagccagagagcacagcggccagcccggagaggagggga

SEQ ID NO: 74662 - RNA, 70 nt, Homo sapiens
aaaggaaccggaaaagcaaaacagggcggcagcaaaacaaacggagagaggagggagaaacaaaggccaa

SEQ ID NO: 74663 - RNA, 69 nt, Homo sapiens
ccgaaaaaaaagcaaaggccagacggagccaaacagccacagaaggggccgcaaggccaggcgcgcaga

SEQ ID NO: 74664 - RNA, 78 nt, Homo sapiens
cccaccaacaggaacagggcagacgagcggaggacacccaacccggccacgaggcggccccagcgcgggcgacaggcc

SEQ ID NO: 74665 - RNA, 55 nt, Homo sapiens
gaagcccagcgggccggacggggcggggggaacggccggacccgacgacacggcc

SEQ ID NO: 74666 - RNA, 79 nt, Homo sapiens
ccgaggccgccggagggcaacaacgcggccacccggagggcagaaggcgcaaaggcaaagaccagcagggcgcccccgc

SEQ ID NO: 74667 - RNA, 77 nt, Homo sapiens
acgggccgccaccacgcggccacaccccacgcagggaaagaaggagagagagaaggcgaccaaacagccaccaacaa

SEQ ID NO: 74668 - RNA, 76 nt, Homo sapiens
aacccagaagccagaaaaaagggacagaaggagacgggcacaccgacagagaacccaggccaacacacagacagag

SEQ ID NO: 74669 - RNA, 81 nt, Homo sapiens
gcagccaccgccgccgccgggcggcccggaccgccccaccaccgcgggacacgacggcaaagaaaccccaaagccagcaag

SEQ ID NO: 74670 - RNA, 72 nt, Homo sapiens
aaacgcagagagaaagagagaggaagccagcagccgacgaagcaagacaaacagagaacaggacagcaagaa

SEQ ID NO: 74671 - RNA, 85 nt, Homo sapiens
gggccgcgaagcgcagcgccagacccaaggcccccgaggagcgcgggcgccgagggcggagaacggaaaagcaccaggaagcaga

SEQ ID NO: 74672 - RNA, 43 nt, Homo sapiens
cgacagggggaacgcacgagagagcacgcgccaagggcacacg

SEQ ID NO: 74673 - RNA, 81 nt, Homo sapiens
gggcgggcgagcacaggcacacacacaaacgaaggaggcccaaccacaaaaggagccgacggaacccagacggagaacaaa

SEQ ID NO: 74674 - RNA, 77 nt, Homo sapiens
ccgcccgccccgccgcccgagccggcgccaaggagcacagaccagcgcgcgaccggagccccacagcggcacaggcc

SEQ ID NO: 74675 - RNA, 81 nt, Homo sapiens
aagcccaaaccccaggccaagcaaccaccagcagcccccagagcggaacacagaccgggaagccggaagcaggacgccgcc

SEQ ID NO: 74676 - RNA, 77 nt, Homo sapiens
accacaaaccagaggcgcagcgagcacacaacaacgagcacaccacggggagaagaaggaggggccgcggcaggccg

SEQ ID NO: 74677 - RNA, 76 nt, Homo sapiens
gccccggccccgggcggggcaaggggaagggaccgcagggcccggcaaagggccccggacaaagaggagaaccgga

SEQ ID NO: 74678 - RNA, 72 nt, Homo sapiens
cgcgggccgccaaggcccccggccggccccgcccccggccgagcgacgaacaaagaagccacagacaaagag

SEQ ID NO: 74679 - RNA, 76 nt, Homo sapiens
accccaaccaagcaagcagcaacagaggaacacagccccaccagaagagccgaaagcagggcgaaaagacagaagg

SEQ ID NO: 74680 - RNA, 72 nt, Homo sapiens
caggccaaccacaccagcagggagacacacaccaaacccggaggaacgaaagggagagaagcaagaaagggg

SEQ ID NO: 74681 - RNA, 73 nt, Homo sapiens
cgcccgcgcgcgcggcggcgcaaggaagaagagacgccgcgcggcagacaaggcccggcaggcaaagcgggcg

SEQ ID NO: 74682 - RNA, 63 nt, Homo sapiens
gcgacgacccgccgccgccgggcggagagcgagccaaggcagcaaggagacgacagccggaga

SEQ ID NO: 74683 - RNA, 75 nt, Homo sapiens
cgcagaagaggccccaacccgggccagacaaaggacaaagagacggaagcggaagcacacgccagacgccagcag

SEQ ID NO: 74684 - RNA, 80 nt, Homo sapiens
ggggcacagcacagcgccggcgcaaggagccagagaccaagagcccagagaacagagcgccccaccgaagagccccagac

SEQ ID NO: 74685 - RNA, 58 nt, Homo sapiens
ccgggcaccgcgcgcgcccgaggaacgaggcgcgacacaccagcggagcgggggaacc

SEQ ID NO: 74686 - RNA, 86 nt, Homo sapiens
ccccaccggaccacacggcgcggcccccaggcacgaagcgaagaagaggagagaagcagcggcgcagacgacggcacaacaaccac

SEQ ID NO: 74687 - RNA, 83 nt, Homo sapiens
agggaggagggcgccggcgcccggggaggcgcacggggaagagaacacccgcagggggaccaggccggcacagcccggaaaca

SEQ ID NO: 74688 - RNA, 75 nt, Homo sapiens
cgaggacacggcaggagaaaacaaacagcagagagaagagcaaaggaagaaaacgcaaaaccagaagcgcgccga

SEQ ID NO: 74689 - RNA, 68 nt, Homo sapiens
acacggaaccggcccaccccagaggcgggcagagagaggagcaccgccccaggcggagacaaggcaga

SEQ ID NO: 74690 - RNA, 72 nt, Homo sapiens
cgcgcacccacgaacgcccaccccccgaacccagccgcaccggaaggagggccccggagcagccacaccacc

SEQ ID NO: 74691 - RNA, 67 nt, Homo sapiens
agcccaaggacaaacagaggagcccaaaaaggacagagggaggggcagaaacccggacagagggaag

SEQ ID NO: 74692 - RNA, 73 nt, Homo sapiens
ggaccccgccgcggcgggagggccagcaacagaagaaagcaagcaccggggaaagcggcccgaaacaagcaga

SEQ ID NO: 74693 - RNA, 62 nt, Homo sapiens
aaaccaacaaggaggcccacaaacccagagaagagaggaaacggagaagaaaggaggaaaaa

SEQ ID NO: 74694 - RNA, 60 nt, Homo sapiens
ccggccacggaaaagcaaaggggaagaaacgagcgagcccgggacagcaagagccaagcg

SEQ ID NO: 74695 - RNA, 76 nt, Homo sapiens
gaaagcagaccgcagaggaagaaagcggaaagagcgacaaacaaagaaagacggaccagaaaaaaggccaggagac

SEQ ID NO: 74696 - RNA, 72 nt, Homo sapiens
agaggaaaagccaaggaacaggaagcccagaaacaaaaagacgggccacccgggagggcacccacaacacag

SEQ ID NO: 74697 - RNA, 87 nt, Homo sapiens
acgaagcagaagacccccaccacgcccgcaacagggcaccaagagaggcgagagaccagcacaccacacaaagaggagaggaagagg

SEQ ID NO: 74698 - RNA, 76 nt, Homo sapiens
aaccagaagcacaaggacagagcacccaccacaggagggcccccagaaccacagcaacaccggaccgcccaacagc

SEQ ID NO: 74699 - RNA, 57 nt, Homo sapiens
aagaccagaagccagcccgcccagcagaccgggaaaaacacgccaggaagagcaaga

SEQ ID NO: 74700 - RNA, 79 nt, Homo sapiens
ccccgcaaaagggaagcgaagccgaaaaaggcagcagcgaaggaggacaccgggcccagacagaagcacggacagaaga

SEQ ID NO: 74701 - RNA, 74 nt, Homo sapiens
acagcacaagcggcacaggcccaggaggacccgccggacaaacgcggcagagggaaagaaaaccaagcagcccg

SEQ ID NO: 74702 - RNA, 72 nt, Homo sapiens
caacagaacggacccgggagcgaccggagagagccgaggaaagacacaccggcacgcccgagccgagcaagc

SEQ ID NO: 74703 - RNA, 70 nt, Homo sapiens
gcgcacagcgccccaccccagaggcgcggagcgccccaggggcacccggaagcaaggcggccagcaaaga

SEQ ID NO: 74704 - RNA, 84 nt, Homo sapiens
gccccgccgagccgccaccgcaggcgaggacggcggaccccgcggcgggaggagccgccccgagccaagagaaaccaccaagag

SEQ ID NO: 74705 - RNA, 53 nt, Homo sapiens
gaacgggagaaagcacgggaggagagacccagagcaggacggacaccgaaccg

SEQ ID NO: 74706 - RNA, 57 nt, Homo sapiens
aacgacgagaaagcccacagccaaagccgggcggacgcggcccaaaggacgccaggc

SEQ ID NO: 74707 - RNA, 69 nt, Homo sapiens
gaaggaccaagaaccagagggcgcgacggaccacacgcagcaagcaacacagacgagcagaagacggga

SEQ ID NO: 74708 - RNA, 72 nt, Homo sapiens
ggcacaaagccaaagcacagcaggccacgccgcccgcaagagggagcagaccccaggccggcaggggacgag

SEQ ID NO: 74709 - RNA, 74 nt, Homo sapiens
aaagcgccccaaaagacaggcccaccgaagagcagcagcagagaaacgagcagaacaaaaaggggacaagagac

SEQ ID NO: 74710 - RNA, 51 nt, Homo sapiens
caaagccagcgacagaagccagaacagagaaaaggaggccggacaaaaacc

SEQ ID NO: 74711 - RNA, 73 nt, Homo sapiens
gcgcggcggccagccgcaccgggacgacaccggggaccggacaggacgggagaacagaagagcagacagagcc

SEQ ID NO: 74712 - RNA, 64 nt, Homo sapiens
ccccagaaccgcagcacccggccacagcgcacagcagggaagcagcaccggcccagcgaagaag

SEQ ID NO: 74713 - RNA, 71 nt, Homo sapiens
cacagaagcccaagaggcagcggacggaaaggacaaaccggcgaccacacacggggacgacggggaagccg

SEQ ID NO: 74714 - RNA, 58 nt, Homo sapiens
cacgaaagcccaggccaaaaagagcaggaaaccaaaccccccaaaggcccaggacagg

SEQ ID NO: 74715 - RNA, 51 nt, Homo sapiens
agcaacgcgggaagagaaggacgaaaaggcccaggccggcggaaaacccac

SEQ ID NO: 74716 - RNA, 55 nt, Homo sapiens
agaagaaaagaccagacacaacgaagagaggaaagaagcggaaaggagggagcac

SEQ ID NO: 74717 - RNA, 68 nt, Homo sapiens
caggggagagccgagccaagaggcaacacgagcgcggaaaaaaaggcgaagcaaaaacaagaaccacc

SEQ ID NO: 74718 - RNA, 65 nt, Homo sapiens
ccggcagcccgccacagccacgacagccagcaaagggggagagcaaaacggcggaggccgacgag

SEQ ID NO: 74719 - RNA, 82 nt, Homo sapiens
gcagaagccgagcaacaccccggccaccgacccacaagagccaaagggaccgggacaggggaagaaaagaagaagaagagag

SEQ ID NO: 74720 - RNA, 68 nt, Homo sapiens
cccagagggacagagcaggaacaagaacagccacccagagagagaaaccgaagaaggcccacacacac

SEQ ID NO: 74721 - RNA, 70 nt, Homo sapiens
agagcagaaaggagggggcgagaaggcgggaagccgaaggcagccacaggaaggggaggagcacagaacg

SEQ ID NO: 74722 - RNA, 73 nt, Homo sapiens
ccgacgccaggcagcgcccccaaacggaaaaggaccagcgcagccagacaaaacacgccaaggcaggggacga

SEQ ID NO: 74723 - RNA, 50 nt, Homo sapiens
acacccccgcccccacaagagaaaaagaccgcggagaaccgacccagacc

SEQ ID NO: 74724 - RNA, 80 nt, Homo sapiens
ccaaacgcacaaagggagcagggagaggagcgggaaacgggagggaaccagcaacaagccgaccgcggcccgagaggagc

SEQ ID NO: 74725 - RNA, 80 nt, Homo sapiens
gggccgccagagagccaggagaacgccaggagaaacccgaagcgacagcgccgcgaagcaccaggcgccggaagaccccg

SEQ ID NO: 74726 - RNA, 85 nt, Homo sapiens
gagcccaggagacccggggacagcacgcccaggccccgggagcgggacgcgacaaaagggaccgagggcggaggcaaggcgcgac

SEQ ID NO: 74727 - RNA, 58 nt, Homo sapiens
ggagcaggcgagaagagaagccagcagacacaaagagacagaagaagaggaagccggg

SEQ ID NO: 74728 - RNA, 85 nt, Homo sapiens
ggcgcagaccgcggagaagggagacacaaggacagcagcgacggggcccgcaccccagagaagacggcccagcagagcacccaac

SEQ ID NO: 74729 - RNA, 69 nt, Homo sapiens
cggccgagaaggcagaggcgaaaggacgagaccgaagagaaggaaggacagcgagagagaagagagcag

SEQ ID NO: 74730 - RNA, 85 nt, Homo sapiens
ggggcagcgcccggaccggccgagaggaagacgagccgggaggaacggcccggaaacaggaggacgacggggaggacgcacgacg

SEQ ID NO: 74731 - RNA, 73 nt, Homo sapiens
gcggcagagcggcacaggacagcaggaagaagacggcacgggacccccagcacaggcagcaggccgggagaga

SEQ ID NO: 74732 - RNA, 70 nt, Homo sapiens
acgcccggaaacagaaaacagaaaaccagaaggcaccgacaggaaaggaaaaggagaaccaggcacccgg

SEQ ID NO: 74733 - RNA, 74 nt, Homo sapiens
cagaaggaaggaaaccgagaggaaccggggcaggaagggcgccaacccccaacccacgcgggcagccagaaccc

SEQ ID NO: 74734 - RNA, 75 nt, Homo sapiens
gagaagaagacccaaaaaaaagaggagcagcaggcacagcacgggcagagccagccgcaaccaaagccgccgggc

SEQ ID NO: 74735 - RNA, 78 nt, Homo sapiens
cagcagagccgaaagaccgaaaggagagaagaacaaaggaacgcggaagcccggaaaccgagaggaagaaaggccaga

SEQ ID NO: 74736 - RNA, 61 nt, Homo sapiens
agaaacaaccagggcaaaaggaaaggacccaccaaggcacgccaggacaccgacaacaccc

SEQ ID NO: 74737 - RNA, 35 nt, Homo sapiens
gcgacacaaacaaaagggcccgagggcaggacagc

SEQ ID NO: 74738 - RNA, 74 nt, Homo sapiens
cgcgcggccggcggcccaggcgcacaccgcgcaacggggcggcacacaaggagcgaagggcagggagaacgcca

SEQ ID NO: 74739 - RNA, 64 nt, Homo sapiens
aacgaggagagaggagccgcaggccagagccggagcagagcacggacgcccgggagcgacgggg

SEQ ID NO: 74740 - RNA, 53 nt, Homo sapiens
ggagcgcgcaacggaggaggaaaagcccccacgcccaggcagaaggggcaccc

SEQ ID NO: 74741 - RNA, 80 nt, Homo sapiens
ccgcgcggagcggacgcgcgggcgcgcccggcccgaagacccaaggaacacacggaccgaaggaccgccacgccggccgg

SEQ ID NO: 74742 - RNA, 80 nt, Homo sapiens
gagaaaggaaggaaaaccgacgaggcgacgcgccacagagcgggcgggcgggccacgcggcgggacaggaacccaacccc

SEQ ID NO: 74743 - RNA, 58 nt, Homo sapiens
gcgagaaggagaaccccaccggaggaggagcagcggacaggcgacggcgaagacaaac

SEQ ID NO: 74744 - RNA, 85 nt, Homo sapiens
ccggccagcccgacgggaaccagcagcggaggcggacgcgcaggcgcgagaaaacccgaggagagagcccaaaagagccaaagcc

SEQ ID NO: 74745 - RNA, 77 nt, Homo sapiens
gggagacagcggggaggaccggggcagaacaccagagcagccagagccaaaggcccacgggagacaggcggaagccc

SEQ ID NO: 74746 - RNA, 72 nt, Homo sapiens
cagagggggcggcgaccgagaggcgcggagccggggacgcaaacagagaagcgagaaagagaagaagaacac

SEQ ID NO: 74747 - RNA, 67 nt, Homo sapiens
cgcgcagcccccggccgcagcgcaggcagcccagcagaaaagcagcgggcgcaggcggggacccaga

SEQ ID NO: 74748 - RNA, 71 nt, Homo sapiens
aggcgaggaacgccgggcgcgggcccacgcggcgcagggaaaccggcacagggaagagaaacagagaaacc

SEQ ID NO: 74749 - RNA, 75 nt, Homo sapiens
accagaaaaacagaaagcagcgcacaaaacaggacgccgaggaccacagaggagacaaagcagcgacaggcaaaa

SEQ ID NO: 74750 - RNA, 88 nt, Homo sapiens
gcggggccgggcggcgcaaaggcggaggcggaaggggaaagccggagccggccaccggcacggagaaggcgaggcaaggcccaacgca

SEQ ID NO: 74751 - RNA, 74 nt, Homo sapiens
ggcgcgagaaggacgcgcagccaccccagggggacccacaaggccgcaaaaggacccagagggcgacagggagg

SEQ ID NO: 74752 - RNA, 84 nt, Homo sapiens
gcagccaaacaccgggcaaacgaaggcaagggcagcaggaaagacgagaccgggcacgccaacaaccgacgaccgcacgacggc

SEQ ID NO: 74753 - RNA, 79 nt, Homo sapiens
gcccagcgggccggacggggcggggggaacgggcagcaggaggggggaagcaggaggcacggaggggaccccagaaccc

SEQ ID NO: 74754 - RNA, 69 nt, Homo sapiens
agccgcaaggaagaggccaggcaggaaccagcaaggaaaggagacgggcgaacacagggaagaaggacg

SEQ ID NO: 74755 - RNA, 75 nt, Homo sapiens
ccagccccggaagccagcaggcaggggggcccacgcggaggacgcagaacacggcgggcggcccgccaacgacgc

SEQ ID NO: 74756 - RNA, 74 nt, Homo sapiens
cacaaaccagagaaagcccagcagcaggaacaagacaacagaggcggcagcaggagcagcgaaggcacagcagc

SEQ ID NO: 74757 - RNA, 60 nt, Homo sapiens
gacccaggggcccgaggcgccccaaggcagccaggacaggagcgaaggaaaaaacagaag

SEQ ID NO: 74758 - RNA, 74 nt, Homo sapiens
ggcgcgcaccagcggcgaccggggagagggaccgcgccaccggccgaagacaacgaggggcacgcgcccaccca

SEQ ID NO: 74759 - RNA, 57 nt, Homo sapiens
ggagagcagggggagaaagagaaggcggagaaaagaacagagcaccacgaaagaccc

SEQ ID NO: 74760 - RNA, 74 nt, Homo sapiens
aaacaaaggagagccgaccaagcgggcggaaaacaccccaaaagccaaaagggaaaggaaaagaccaacaacag

SEQ ID NO: 74761 - RNA, 76 nt, Homo sapiens
gccagccgaggggagaagagcccagagagacaggagagacaacggaggcaagaaagacggagaagcgagaagagac

SEQ ID NO: 74762 - RNA, 74 nt, Homo sapiens
ggagcgcggcagcacgccccaaacaaggcccacacggccggggcccccagcccgccccagacccgagcagacaa

SEQ ID NO: 74763 - RNA, 67 nt, Homo sapiens
ccgcaaaaaaggaagaccagaaacagaaccagagaccacaacacaaggccgacgcgcacgaacacgg

SEQ ID NO: 74764 - RNA, 68 nt, Homo sapiens
cggaagcccgcgaccgggaccgaggaggcgaggacaaaacagcgcagacagggagagcaaagaagggg

SEQ ID NO: 74765 - RNA, 60 nt, Homo sapiens
ggcccagcaccccgagaaccgcaggagccagaggcgagcacacagagaggggaagggcag

SEQ ID NO: 74766 - RNA, 90 nt, Homo sapiens
ggagccgacagacgaaggacagcggcaccgccagacggccagaaagccgccagagcggggcacggagcgggaggagaaacgaggcccaga

SEQ ID NO: 74767 - RNA, 42 nt, Homo sapiens
caggacagagagaaagaagcggcgaagcggccaggcccgggc

SEQ ID NO: 74768 - RNA, 75 nt, Homo sapiens
acaagagaccacacccaggaagccaggcacgcacagccaacagagaccaaaaacggacacggcaagggcccgcgc

SEQ ID NO: 74769 - RNA, 60 nt, Homo sapiens
ccgcagagcgagccggaggggaaccggaagggacacgcgaacagacgcgcagaagaagcc

SEQ ID NO: 74770 - RNA, 70 nt, Homo sapiens
gcggccccccacccccaccgaagacgaagcagaaaaccacacaggacgcaagaacgaccccggaagccgc

SEQ ID NO: 74771 - RNA, 80 nt, Homo sapiens
caggagagggaggcaggccgaggcacggagcgcccccacaggagagaaagaagcccggcgaggccggagggccacccccg

SEQ ID NO: 74772 - RNA, 74 nt, Homo sapiens
gggacaaaacaaccaacgaagacaccgagcgaaagagaaagaggaacgaggaagcagaaaggcgaaggaacaca

SEQ ID NO: 74773 - RNA, 62 nt, Homo sapiens
ccggcggcgaaggcacacgcggcagagagaagcggacaggggaggcgagcagcccagaccgg

SEQ ID NO: 74774 - RNA, 75 nt, Homo sapiens
caccggagaagggaggaaaaccaacaaggcccaagaccaccaaaccccagaaccggaagaccccgccaggaacaa

SEQ ID NO: 74775 - RNA, 77 nt, Homo sapiens
ggggcacccggggagccccgaagccacaaggcgacggggacgaccagcgggagccggcgcgcgcgacgggcacgcag

SEQ ID NO: 74776 - RNA, 72 nt, Homo sapiens
agcggcccacgcagaacccgggagaggagaccagaacgaacccccccccccgaccgaacaggaaggccccgg

SEQ ID NO: 74777 - RNA, 56 nt, Homo sapiens
accagaggcagccagcagggggagggcagcaggaggggggaagcaggaggcacgga

SEQ ID NO: 74778 - RNA, 76 nt, Homo sapiens
accggagccgggcccggcgcagaggggcggcccaagggcccgcggcaccggagcccggacgagggagcccggggcc

SEQ ID NO: 74779 - RNA, 84 nt, Homo sapiens
cgccgccaaggcggcggccgcgcgcaccccagggccaccggcaagggaaggaaaagagcccacgaacggcgggaacagaaagcc

SEQ ID NO: 74780 - RNA, 72 nt, Homo sapiens
ggaaaacacaaccaacggagcacaagcccacgagaaggcagggcacacagagaggcgagagcagagcaacgg

SEQ ID NO: 74781 - RNA, 80 nt, Homo sapiens
gacgccacggaaaggccccgaaggggcagaccaacaccacccagcaaaaaccccgacgaacgcgccagggagcgccagac

SEQ ID NO: 74782 - RNA, 83 nt, Homo sapiens
cgcggagaggaagccagccaccagccaggacacggccaaaagaagacccagacaagaaagaggaagacgaagccagaaaccaa

SEQ ID NO: 74783 - RNA, 79 nt, Homo sapiens
ggccaggggaacaacagccgacaaaggcaaccccaacgggccagcacagaggagcccaggaggaggaccccccgacccc

SEQ ID NO: 74784 - RNA, 66 nt, Homo sapiens
caggacagaacaacaaaagaacagcagagaagggaacgaaagcgaggaggccgggcgcaccccgga

SEQ ID NO: 74785 - RNA, 71 nt, Homo sapiens
cagaagccagacccagaagcgccacagcgagggaaaggccagccccagaggcggagaaaacgcgccacaca

SEQ ID NO: 74786 - RNA, 84 nt, Homo sapiens
cacggccgcccggccaccgcgcccgacgagccgcaggcgagaaagacgaccgccaaccagggagaacacagagaaaaaccgcaa

SEQ ID NO: 74787 - RNA, 64 nt, Homo sapiens
cggggagaagacgcaggcagaaagggggcacaagggaagcagcggaagaccaaacagcagccca

SEQ ID NO: 74788 - RNA, 83 nt, Homo sapiens
ccccgaccgcagcccccgggcacgaccccggacacgggcaggcagccaagaagaggaaaccagaacacggcaagagcagccac

SEQ ID NO: 74789 - RNA, 71 nt, Homo sapiens
agaggaccaggacgcggacagggcagaccgccagcagcacagcaagccacagagagggccggcagggcggg

SEQ ID NO: 74790 - RNA, 81 nt, Homo sapiens
ggaaagaagcaccggagagacagcacagcacccacaaagcaacgcgaccaagaggaggaagccaccccgaacaaaggaaag

SEQ ID NO: 74791 - RNA, 56 nt, Homo sapiens
cgaccggcggggggagccgccgccggaggccaggacaccacccgggccaagcagac

SEQ ID NO: 74792 - RNA, 84 nt, Homo sapiens
ggaggcagcagggcggaggcggggcgggccagggcaaccacccggccggcgcggcgggaaaagaggcacagagagaagaaggac

SEQ ID NO: 74793 - RNA, 68 nt, Homo sapiens
acaagcacgccgcccagacaaccgggacccaagggagggcggaaaaaccggagagggagaacccacag

SEQ ID NO: 74794 - RNA, 76 nt, Homo sapiens
cgcaccggacacagcggaggagaagcgcaggagaaaggggaggcaagcaggggggcaaaggaaagaaggcagaaag

SEQ ID NO: 74795 - RNA, 60 nt, Homo sapiens
gaagaaacgaagccgcagaaacaaccggagaaaagagaggaggagcgccggaccagcgcg

SEQ ID NO: 74796 - RNA, 80 nt, Homo sapiens
aaaccggaaagcggccagagcagaggccgcgagacaggcgcccgcccggccggcaccaggacagcgaggcaccagagcgc

SEQ ID NO: 74797 - RNA, 38 nt, Homo sapiens
gaagagggcggagacaagggcagcacacccccgcccag

SEQ ID NO: 74798 - RNA, 75 nt, Homo sapiens
gcggcgccggacccaggcaagcgcaaggaagaagagacgccgcgcggcagacaaggcccggcaggcaaagcgggc

SEQ ID NO: 74799 - RNA, 68 nt, Homo sapiens
gccgcacaccacacccaaccgccacggaagggagaaggccacagcagggagcaaagaacgaacgagcc

SEQ ID NO: 74800 - RNA, 55 nt, Homo sapiens
gcggcccccggggccccgggagccccccaggcaggccaagagcgaaacagggaca

SEQ ID NO: 74801 - RNA, 69 nt, Homo sapiens
cgaaaaaacccagaacacgggagaaaaaggaaaacgcggaaaaccgacacaacagcgcagaacagaaga

SEQ ID NO: 74802 - RNA, 93 nt, Homo sapiens
agagcagcgggagcggcgcggggaagggggcgggccgcagagcagaaagagacggcgccgaggaagcacaggcaacaccacccgcgccgcgcc

SEQ ID NO: 74803 - RNA, 73 nt, Homo sapiens
ccgcccagaagacaacacaggcgaccagcgaggagagaggaacaagaagaacaggcgcccgcagccaccagag

SEQ ID NO: 74804 - RNA, 65 nt, Homo sapiens
acccccggggagccagcgagcccccccgacacggccaagaaaggaagggaaacaggaggaggccg

SEQ ID NO: 74805 - RNA, 67 nt, Homo sapiens
cgccacaaccccagagcacaggggaggggaagcaacagggcggggggaaccgccaccaagggaaaca

SEQ ID NO: 74806 - RNA, 71 nt, Homo sapiens
aagcggcaaacaaaacagaggccagcagggggaaggaaccagcagagccaccgcgagagcagaagaaggcg

SEQ ID NO: 74807 - RNA, 76 nt, Homo sapiens
ccacgaagaacagcagcaagaccccccgggaaccacccgcgcccccaggacgaaacccccccgacgccaggaagac

SEQ ID NO: 74808 - RNA, 57 nt, Homo sapiens
caagggagcgaaaagaacccccaaaaggcccaccgaacccaccccacccccaaaaaa

SEQ ID NO: 74809 - RNA, 74 nt, Homo sapiens
ggcgccaacagaaaccaccgcggggccaaccaggggagcgacagggacacaacggcaagggagcccaccagaaa

SEQ ID NO: 74810 - RNA, 78 nt, Homo sapiens
cccaacgaagagacgacacaaggagacgaggggaagaggacagaggagaggcacaaagaagagagaagagacaacaga

SEQ ID NO: 74811 - RNA, 75 nt, Homo sapiens
gaggagcggcgggccagacagccccggacccaggaaaaaagaaccaccaccacacacaccccagggggcgaagag

SEQ ID NO: 74812 - RNA, 61 nt, Homo sapiens
caagacagcagggcccagaaacaggacagagcgggagccaccagcgccaaagggaagccag

SEQ ID NO: 74813 - RNA, 66 nt, Homo sapiens
agagcgcaggagcaaccaccagggacacagggaagcggcagacggcccagaccccaagacccccca

SEQ ID NO: 74814 - RNA, 64 nt, Homo sapiens
gcgaagaaggaacgaagcaagagcacaggggaaaaacgagggaagacagaggaagaggaagaca

SEQ ID NO: 74815 - RNA, 79 nt, Homo sapiens
cgggacagacagacagccgggaggcagcacacggggagaggagaccaacccggaaggccccagccaggacagcccagac

SEQ ID NO: 74816 - RNA, 74 nt, Homo sapiens
acccccagacgcaagccaaggaaagcgaagccaacaaagaaaggaccggggcaaaacggccagaaggcccaagc

SEQ ID NO: 74817 - RNA, 40 nt, Homo sapiens
cgaggccgccgcgcaagaagacggagagagagccaaaggc

SEQ ID NO: 74818 - RNA, 76 nt, Homo sapiens
agcgcgagaagagggggcgaagaaggagggagaagcacagaacaaggagagcggagccgccggaagggcgaccgac

SEQ ID NO: 74819 - RNA, 82 nt, Homo sapiens
cagcgccggccacccaaagcacgggggcaacagagaaccagaagcggaaccggaagaagacgaacagacggggagaaagcca

SEQ ID NO: 74820 - RNA, 75 nt, Homo sapiens
caaggcaagacccaggcggcccaaaagaaaagggggccccaccgcgcgcggcaaggcccgaacgagcgcaaggcc

SEQ ID NO: 74821 - RNA, 86 nt, Homo sapiens
gccgccacggcccaccacccgccgcgcgacccaccgcggaccacaccagggccgagaacgacaggccccggagccagcgggggcca

SEQ ID NO: 74822 - RNA, 105 nt, Homo sapiens
aacagacccggaaccccagaaaccaaaaaacagaaccacaccggggcaacaccggaggacagcaacccccaccgaacaaagaaggaaaaagcgcagcagaaagcg

SEQ ID NO: 74823 - RNA, 99 nt, Homo sapiens
ccgccgccaggacccacgcagcaggagcgcccgcccgagccagcccgccagcagccccagccaaaggcaaaagcagaccggaaaacccaccggcaagac

SEQ ID NO: 74824 - RNA, 73 nt, Homo sapiens
acagcacacccaaccacgcccgccccccagcaccacagaccgcgagaacaagccaaagacagaccgccagcgc

SEQ ID NO: 74825 - RNA, 53 nt, Homo sapiens
gaacagcgagacccgaagcagcgccaggaagaagaagggaagaaggagaagag

SEQ ID NO: 74826 - RNA, 68 nt, Homo sapiens
cggagcagcggaagggagaggaaagcgggaggggccacaaagccgagacagacacccgggaagcgagc

SEQ ID NO: 74827 - RNA, 53 nt, Homo sapiens
gacaccagcaccagaccacacgggggaggcccccccccacaaggcccgcaagc

SEQ ID NO: 74828 - RNA, 70 nt, Homo sapiens
gccaggccccggaccaaggagcagcagcccagagcagacgaccagaagacgacccgaggcaagaagcggc

SEQ ID NO: 74829 - RNA, 60 nt, Homo sapiens
ggcaagaacccgaccgacggagagacacccaagcggcgaaggaagaaaccaggaacggga

SEQ ID NO: 74830 - RNA, 62 nt, Homo sapiens
cagagcaggagaagcgagcccggacagaccaaccgcaggcgcaacccaggaccacaagccag

SEQ ID NO: 74831 - RNA, 68 nt, Homo sapiens
caaggaagacccacgccacaccaccccccagcacacagcaagaaggaggccacagcaaacgggaagag

SEQ ID NO: 74832 - RNA, 76 nt, Homo sapiens
gccgggagccgaccgaggcgcccgcggggcggggaccgccgcccggggccacaccgccccccacgaccaaacacag

SEQ ID NO: 74833 - RNA, 75 nt, Homo sapiens
gaccagaaggaaacacgaaggcaggaagcgaagaaaaggacccagaaagcagggaaaccaagccccaggaggcaa

SEQ ID NO: 74834 - RNA, 63 nt, Homo sapiens
aaagcgggaagcagacgaacagcacaagggcaaggaaagcagcccgagcgagggagggcgaca

SEQ ID NO: 74835 - RNA, 65 nt, Homo sapiens
cgcgccaccagagacggcccgacaacaagccaaaacgcaccaaaggcagaggacagcaaagcaga

SEQ ID NO: 74836 - RNA, 77 nt, Homo sapiens
gacaacagcacccgccagggcagagggaaggaagcgaacgcaaccaaggagcaaggcgggaccgggcccccaacccg

SEQ ID NO: 74837 - RNA, 82 nt, Homo sapiens
aggcgggcagcagcagccccggggcccggagagcagggcgacagccaggaagccacagacccaaggaaagaaaccagaaaca

SEQ ID NO: 74838 - RNA, 65 nt, Homo sapiens
aaacgcgaagaaaaacgcgggggacacccagccacacgcggagaagagagcgaaaagcggcaaga

SEQ ID NO: 74839 - RNA, 82 nt, Homo sapiens
ggaagaccgaaaaaaccacccaaggcccccaaaggaccaagagagaggccgggcgcccacaccgggcccagggaggccaaac

SEQ ID NO: 74840 - RNA, 87 nt, Homo sapiens
gggggggaccacgaaaggagcaagagcaagacaccggacaccgagggcccccaaaaggagcaggggagagaagacagaagaggggag

SEQ ID NO: 74841 - RNA, 109 nt, Homo sapiens
cgggacggaccgagaccggaccgagagcggaccgagagcgcgaaacgcacgagaagcgggacgacccgggacagcccacggggcagaccagcgaccaccggcacagccg

SEQ ID NO: 74842 - RNA, 80 nt, Homo sapiens
gaacggcagcacgccaggacgagcagagccccccccaccagaggacgggaggagcagcaacagcgcacacagacccgggc

SEQ ID NO: 74843 - RNA, 97 nt, Homo sapiens
caaacggccgggcggacacaccacggaggaccgacaggagagaacacaacagaccacaagaagaaacaaccgaccgaacaacgcccccaggagaccc

SEQ ID NO: 74844 - RNA, 85 nt, Homo sapiens
ccaggcgagaccggggcgccagccgggcaggggcagcgggagccggccggacgggccaccagagaacccaggagccgcagacgac

SEQ ID NO: 74845 - RNA, 83 nt, Homo sapiens
ggaagagggagcaccacggaccccaaggaagccacggcagacacacaacccgacccgacgaagggcagccacacaagagagaa

SEQ ID NO: 74846 - RNA, 78 nt, Homo sapiens
gaaggcccagagccgggggagacaaggcacccaaaagcaagcgcgggaagcgacacccagaccccacgggagaagcag

SEQ ID NO: 74847 - RNA, 87 nt, Homo sapiens
gccaccgcgcccgacgagccgcaggcggggaaagacagagaagcgaagacagagacgggaaagacagggagagagacacggagagag

SEQ ID NO: 74848 - RNA, 84 nt, Homo sapiens
agcagcaccccagccagcgaacacagacagacaacagaaacggaccaggacaagaagcaaagccgagagaagaacggacagaaa

SEQ ID NO: 74849 - RNA, 61 nt, Homo sapiens
acacggcgagccaggccccaccggaggcggaggacacggccggcggcaggaccaaccccgg

SEQ ID NO: 74850 - RNA, 56 nt, Homo sapiens
gaaccacagcaggaacgagagcagcacgggaagcccagaagggacagaggccacca

SEQ ID NO: 74851 - RNA, 74 nt, Homo sapiens
ccagaacagagaagaaagcagcaaccaccgaaacgggcgaaaaagaagaacagcaaaacacgaaaggcaaagag

SEQ ID NO: 74852 - RNA, 69 nt, Homo sapiens
aacccagcacggaaggccaagaaagcaggaccggcacgcgccggcagggcgaaggcaggccaacaagca

SEQ ID NO: 74853 - RNA, 69 nt, Homo sapiens
gcaaagggcgcggagggaacggaggggggaggaaggccgggggaggcaagcaggggggcaaaggaaaga

SEQ ID NO: 74854 - RNA, 72 nt, Homo sapiens
caacgcgcaccggacccaagccccaaccgcgccaacaccaccggaccaaggaaccaccacccaccgaagggg

SEQ ID NO: 74855 - RNA, 74 nt, Homo sapiens
cggagcggccccgccgcgccgggcggccacacgaccagacgaggacacagggagcagaagcaggacggcaccac

SEQ ID NO: 74856 - RNA, 58 nt, Homo sapiens
acagagcaggcacagccacccagcaggcacgcgccacaagaagcgaacagcgcgcgca

SEQ ID NO: 74857 - RNA, 61 nt, Homo sapiens
caggcacgcaggggcagggaaagggagcagcaccggccacacccacagcacgaccggaacc

SEQ ID NO: 74858 - RNA, 61 nt, Homo sapiens
acgcaccgggggagcgggagcgcggaaagggcgggacccgagagaacgcaagacccacccc

SEQ ID NO: 74859 - RNA, 82 nt, Homo sapiens
aggagaggagccacgcggcgggccagaccgggcaagaccacccgcaacggacgcgaaacagaggccacccaggaaggggcag

SEQ ID NO: 74860 - RNA, 73 nt, Homo sapiens
aggagcggcccccgaggagacggggagcaggggcaggaaagccgccccacccaacagacccaaaccgagccga

SEQ ID NO: 74861 - RNA, 76 nt, Homo sapiens
agcgcagaaaggaagcgcgggccagcgacccgcgccagcgcccagggggggaaaccaccggaacgcaggagaaaag

SEQ ID NO: 74862 - RNA, 44 nt, Homo sapiens
ccgcagcgggacaccagcacaaggccagccgccgcagggaagac

SEQ ID NO: 74863 - RNA, 78 nt, Homo sapiens
gcgccgcgggcccgcgcccggccggacccgggcccgaggacaccagaggaccagaacccacgagaaacagacgagcca

SEQ ID NO: 74864 - RNA, 58 nt, Homo sapiens
cgaacaaagaaaaagaaagacaagaagaaccaggggacggaaggcaaggagcgaaaac

SEQ ID NO: 74865 - RNA, 80 nt, Homo sapiens
cgaggcgaaagcaaccacagggaagagacagcgagcagagaccaggagaagagaagagaacagggaaaacaaaagaaaga

SEQ ID NO: 74866 - RNA, 73 nt, Homo sapiens
ggcgcagaagaagcacccagcaagcgagggaccgggacgccacagccagggaaaagccgggccacagaagcac

SEQ ID NO: 74867 - RNA, 69 nt, Homo sapiens
gcagacgacaaaacagcagaccgagcaaaagccaaaccaaaggcaagaaccggagcaggagaaaagccg

SEQ ID NO: 74868 - RNA, 83 nt, Homo sapiens
cgcagcagcggggaggagccaaagcccggcgccaccaagccgcagggagaacacccaacgggaggcggagcgcaaggcggacc

SEQ ID NO: 74869 - RNA, 73 nt, Homo sapiens
ccaaggacacgcacgcaaacgaccccggccgggaggagcagggaaagcacggcacgaggagcgagccagcgcc

SEQ ID NO: 74870 - RNA, 71 nt, Homo sapiens
acaagagaaacaccaaacaagacagcaaggccggaggaaaaacagcggggagaagagcggaggcgacgagg

SEQ ID NO: 74871 - RNA, 78 nt, Homo sapiens
gagcccgcggagcgcgcgaggcgcaggaagccggggccaaaggcaggggaaagggagcccagggggagcaacaggaga

SEQ ID NO: 74872 - RNA, 72 nt, Homo sapiens
ccagaaacccaggagcacaaaaacagccggacacccacagacaaaggccagaaagggccccagaaaagcgag

SEQ ID NO: 74873 - RNA, 82 nt, Homo sapiens
ggcgagccgaaaagcgagcgcgaggaaaaggcggcgggagggaaggaagagaaccgaagaagaaaaccaaaaacgaaaaagc

SEQ ID NO: 74874 - RNA, 52 nt, Homo sapiens
gcgcgaagcccggcccccagcaggcagaggagggaacaaaaacaaaaccaac

SEQ ID NO: 74875 - RNA, 64 nt, Homo sapiens
cgcgcaacgcgggagagcccgggccacccccccaggcaaggaaccaaccgggagccccccaaga

SEQ ID NO: 74876 - RNA, 66 nt, Homo sapiens
aagaaggaggaagaggaacaacggaaccagcagcaggggaacgaaaaagacccaaaggccgacccc

SEQ ID NO: 74877 - RNA, 69 nt, Homo sapiens
aggaacaccaagaagaaacagccagcaaagacaagagcagaccagcagccgcagcgcgacagccaaaaa

SEQ ID NO: 74878 - RNA, 76 nt, Homo sapiens
cgggaccacggcagaagaggacgaggccgacagcacgccgagaagccacagggccagacaaccacgccgggcgccc

SEQ ID NO: 74879 - RNA, 63 nt, Homo sapiens
aggaacagaagagacagaggaagagagggcgccaacggggagaaggaggcacaagaaggaccc

SEQ ID NO: 74880 - RNA, 78 nt, Homo sapiens
cagcaagacccggccccccgggcccccagcagcacggacaacgggggccccccaggccacccaggaccagcggcacac

SEQ ID NO: 74881 - RNA, 65 nt, Homo sapiens
agccggaaacaagccaccgcgggagaggacgccccacggagaaagagaccccgacaagggaccgg

SEQ ID NO: 74882 - RNA, 76 nt, Homo sapiens
gccccaccgccgacgcccccagccaccagagggcagggaagcagagaggaggagggggggcaagccagagagacaa

SEQ ID NO: 74883 - RNA, 106 nt, Homo sapiens
caggaacacccaagccagcggaggcggcagaaaaagaaggaaaacccagggaaaaagaaaagggcgaagacccgaagcagcgcaggaacagaagagaagaccagaa

SEQ ID NO: 74884 - RNA, 75 nt, Homo sapiens
ggagaaggaccaagaaccaggaaaaccagagacccagacacgcgaaggaacgaaaggccaaaaggcaaaagacga

SEQ ID NO: 74885 - RNA, 74 nt, Homo sapiens
cgggggaggcgagcgcgccgcccggagccgcgcacacggaccaaaggcgaccaggagagaaaaccaaacacaca

SEQ ID NO: 74886 - RNA, 75 nt, Homo sapiens
gaaaggaaaaaaaggaaaaaacgaagggaaaagagcaccgacgagaggcggggaaaaaaaggggaccaccggcag

SEQ ID NO: 74887 - RNA, 79 nt, Homo sapiens
gagacacacggcgagaagccaacaaaacggcaagagagcaggaaccagaaagaaaagccagaggacgaggaaaccacac

SEQ ID NO: 74888 - RNA, 73 nt, Homo sapiens
gagagacccggggaacaggagcacgaagcagaccacaggcaaggcgagaaggggcaagaaaacggagcaccag

SEQ ID NO: 74889 - RNA, 74 nt, Homo sapiens
cccacaccggaaacccccccaccacccgagaagaggccaaagacagcgcaagagaagccaggcaacagaaaacc

SEQ ID NO: 74890 - RNA, 85 nt, Homo sapiens
cgcaagaagaagaagcagcgaagccggggcgagcgacgagcggggcgcagaagaagcacgcacagaggcacagcggaggacacgc

SEQ ID NO: 74891 - RNA, 57 nt, Homo sapiens
caagccaagaaggacggccagggcacccccgagaggacaacaggcacggaaggcccc

SEQ ID NO: 74892 - RNA, 83 nt, Homo sapiens
cagcaggggcagcgccacaaaccccccacaacgccaggaggaaaagcccaggaaaaaggaagacagaaggacgcagcaggcgg

SEQ ID NO: 74893 - RNA, 75 nt, Homo sapiens
cgcgccgccccccgcgcagccagcccgacgagcggcccggaccgagaaggacggagaagcgaaagccagaccggc

SEQ ID NO: 74894 - RNA, 33 nt, Homo sapiens
agaaggcagaggcgggacacccacaggagagac

SEQ ID NO: 74895 - RNA, 74 nt, Homo sapiens
gcggagcacaggcaaacgccgggaggaaccgaggccacagagaggcaccccaccaccgcacggaagacgccccc

SEQ ID NO: 74896 - RNA, 69 nt, Homo sapiens
cagggccgccaggggcccccccaggcacaggcgaccgaagccaccgacaaggaaaggaacaagaaaaaa

SEQ ID NO: 74897 - RNA, 93 nt, Homo sapiens
caccgaggccggggccaacgagccaacgccaggcgccgcccacaggaggcagcacggcaggagacgaggagaggacagcaggacacccggacc

SEQ ID NO: 74898 - RNA, 36 nt, Homo sapiens
cggggcagacaacagaggaaagggagcaagcacgca

SEQ ID NO: 74899 - RNA, 80 nt, Homo sapiens
cgcccccaggagcgcagacgagacaagagagccacccaaagccacaccgacccaggaacggcagagcgaaacaaacaaga

SEQ ID NO: 74900 - RNA, 77 nt, Homo sapiens
acggggacgacgcggccgggcccggcaccgccgcggacggccggggagcgagcacccagagccagggaggagagaag

SEQ ID NO: 74901 - RNA, 74 nt, Homo sapiens
gaaaacacagcgcaggaaaagacccaccccaagcgccacgcagagccccgccaggaagacacgccggggaacga

SEQ ID NO: 74902 - RNA, 67 nt, Homo sapiens
gcacgaccgaacgccaaacccaagggggagagggagaaggcccacgaggccgagaacaccaggcggg

SEQ ID NO: 74903 - RNA, 80 nt, Homo sapiens
gaagaacacagcccgggaaagcacagaaagccaaaagcaaagggaagagccacaaagggaaccaggcgaagaggaaaaaa

SEQ ID NO: 74904 - RNA, 75 nt, Homo sapiens
caagggaaccaacgaacaacgggaggccacccagaacgagcagagccgggcaggccacgcagaacaagacaggga

SEQ ID NO: 74905 - RNA, 81 nt, Homo sapiens
aacaggacaggccaaaacggacccaacggggcagccgaagaggaagcagacccggacaaaagggcccccaacgccaaaaac

SEQ ID NO: 74906 - RNA, 79 nt, Homo sapiens
ggccgcggaggacagagacaagcggacaaaagggcagcaacgcccacggaccgagaaaaggggggcccgacgaagaggg

SEQ ID NO: 74907 - RNA, 78 nt, Homo sapiens
agagccgggaagcccccacacagaagcacgagagagcggccccccgcagggagggcgaaaagcccagacagagcggca

SEQ ID NO: 74908 - RNA, 81 nt, Homo sapiens
ccaccacgccaagaggccaaggcgacagccacaggagacacgcgcgcacgaagcccagggacccacaaagcggccggggga

SEQ ID NO: 74909 - RNA, 77 nt, Homo sapiens
gaggaaccccaagccaagcccaagacaaaaacaagagaccaagaccggcccgcgccggcaggaggcgcgaagaaggc

SEQ ID NO: 74910 - RNA, 66 nt, Homo sapiens
aaccaagagggaaggagacagggaagcaaagcgcaacagaaacagagagagggcccacaaaccgac

SEQ ID NO: 74911 - RNA, 76 nt, Homo sapiens
ggacggcacaaaccagccgaacacccaacaagaaggcaacgacaaacagccaagcaagccccagggccccgaaacc

SEQ ID NO: 74912 - RNA, 73 nt, Homo sapiens
aaagcgaggccagagaaagagaagcggcacccccaggaagcgcgagccaccaaagaacaacaagagccgcaga

SEQ ID NO: 74913 - RNA, 68 nt, Homo sapiens
ggacaccaccaccagcacaacggaccacaagaggccgggccgccacgcagccgggacgggagccacca

SEQ ID NO: 74914 - RNA, 83 nt, Homo sapiens
gacagcacaccagggccgggacacacgagggcaaagaaaaaggagagaaaaagaggcaaaacaacaagaagaaaagagaaaaa

SEQ ID NO: 74915 - RNA, 78 nt, Homo sapiens
aaacccacaacacgagaccgcggcccccaaggccgcgcgagagaacggcgacaccgagccagccccaggccgcgagcc

SEQ ID NO: 74916 - RNA, 79 nt, Homo sapiens
cagaccccacccccacccgagcagccagagcggaccggggcagaccaaacggcaagaccaggccccgccccagcccggg

SEQ ID NO: 74917 - RNA, 69 nt, Homo sapiens
ccacgcgcggaaggcagcgcccagcagcgcagaccaacaagagacgagaaaacaacaaaaaaaaaagcc

SEQ ID NO: 74918 - RNA, 85 nt, Homo sapiens
cccaacacagccccggcagcgcaggacaccggaggacgaacagcggggacgccccagcagaccgcccaggagaggaaagcaggag

SEQ ID NO: 74919 - RNA, 80 nt, Homo sapiens
gagacggagccgacgcggggcagcgccgcaccgaggcagcccgcggcaccgggggacagacaagcagaccggaagaccga

SEQ ID NO: 74920 - RNA, 77 nt, Homo sapiens
accaccggcacgccaagacaggggggaggaagaagggaagcgaagaagccccagagccacaggggagcgcagccccg

SEQ ID NO: 74921 - RNA, 76 nt, Homo sapiens
cgagacgaaagacccccaagaggagcggggaggggggcagacggcggcgcccaacggaaccaaacaagacaaagga

SEQ ID NO: 74922 - RNA, 82 nt, Homo sapiens
ggggcaagcccgccgcaaacagggcaacccgcagcacgcccagagggagccacacccaaaaaggcacaaacccagcacagag

SEQ ID NO: 74923 - RNA, 67 nt, Homo sapiens
cgcggaccccgaagccgcaacccggggagggcccgcggcgcgagggggccgacgacgagccccgcga

SEQ ID NO: 74924 - RNA, 80 nt, Homo sapiens
gcccggccggaggcaggggaaagacccacggcagggcaaccccaccgcggaaggcaggcacacagacgagaacagagagg

SEQ ID NO: 74925 - RNA, 71 nt, Homo sapiens
accccggacaaagaaaaagcgccccgggaggagccaccagaagcagcaaaagaccaaaccagccaaaacaa

SEQ ID NO: 74926 - RNA, 64 nt, Homo sapiens
cgaaaccagaagggggaaagacggcaagaagaagcgaaaaccgcccacaacaccagcacgaaac

SEQ ID NO: 74927 - RNA, 69 nt, Homo sapiens
gccgcagaagcaaccaacgagacaagagggcacagaaagcaaaagacagggcagagaaaaccgagcacc

SEQ ID NO: 74928 - RNA, 79 nt, Homo sapiens
agcacaaaagggaaagagacggagaaaagaagaacacgcccaaaacgaggaacgacaacccaggaaaacagaggcacac

SEQ ID NO: 74929 - RNA, 63 nt, Homo sapiens
gaaaagacgggcaacagcaccccagcaagccaagcaacgccacaacaacgaggcgaagcccaa

SEQ ID NO: 74930 - RNA, 78 nt, Homo sapiens
cgggagcgcgagcggccaggccggcgccggccggcgccccggggcccaagcgaggggcacagaggcaggcacaaaacc

SEQ ID NO: 74931 - RNA, 73 nt, Homo sapiens
caaggacggcgaaacgaagcagcagccagaccccccacagccagcgcccggacgaacccgccccagcaacagc

SEQ ID NO: 74932 - RNA, 97 nt, Homo sapiens
cagggaagacgcaccgcggacgcccgcgagcggcgcacgggccgaccaggacaccccgggccaagaggacaacaagaagcgccggccacgccacacc

SEQ ID NO: 74933 - RNA, 83 nt, Homo sapiens
ggagaagaggacggcccgagcaagacccacagccaccgggacaagccaacaccgcacagagacaagcccgcggcgcgagaccc

SEQ ID NO: 74934 - RNA, 66 nt, Homo sapiens
cgaggacccgggaaaagagccagaaccaaccaagcacaggaagagggcggcacgcggccagagagc

SEQ ID NO: 74935 - RNA, 64 nt, Homo sapiens
acagcggcgagcagaacacggcgagcgggcacgcccgcgggagacgggagaccgggagagagcc

SEQ ID NO: 74936 - RNA, 74 nt, Homo sapiens
ccccccaccaacgaccagacacggaccggcaccgccgcgacgcagaggacccaacagaggaagccgcaagaaac

SEQ ID NO: 74937 - RNA, 77 nt, Homo sapiens
gaccacccaggcgcagcaaggagaggcggcggcggcccggcgaagaaagaagacggcccgccacgggccccgcagcc

SEQ ID NO: 74938 - RNA, 79 nt, Homo sapiens
accgaggaggggcaaacaaaaccgccaggcaaacgggaaacaacccacaaaccaagcagcagaaagggaagaggcaaaa

SEQ ID NO: 74939 - RNA, 76 nt, Homo sapiens
aagacccaagaccaagaacaagacagcgcgagaagcgcagaagcccgaccaacggcccgggaaaccagcccagcgg

SEQ ID NO: 74940 - RNA, 81 nt, Homo sapiens
aagcgccgaacgcgcgcagaaccggcgcaggaccgggcaggagcgaagagaccgaaggagcagacgaggcacgagcgccag

SEQ ID NO: 74941 - RNA, 67 nt, Homo sapiens
ggacaggcggcaccgacccccggcgcggcacggcacaggagacaaaaacaggaagagaaggagggag

SEQ ID NO: 74942 - RNA, 71 nt, Homo sapiens
gccagacccgcaagcgacacacacgaccaggacaagcgccccaaaccagagagaccccccggggcggcagc

SEQ ID NO: 74943 - RNA, 79 nt, Homo sapiens
ccgcgcgcccgcacccggccgccggggccgcccaggcaaacgaacacgcgcagcgcagaggcccggcagccccaaggaa

SEQ ID NO: 74944 - RNA, 72 nt, Homo sapiens
cgagaaagcccgccagcagacacgaagcccgggcaagacaacaaaacccgcgggcagaaaggagccgagaac

SEQ ID NO: 74945 - RNA, 70 nt, Homo sapiens
gaccggccgccccgcccccaccgccgcagacccccaagcagcaggagacccccacccagaagaccagcgg

SEQ ID NO: 74946 - RNA, 75 nt, Homo sapiens
ggcccagccgggaacccccacgcggccagcgaaaacgcccagaggacaacaaaaagaaacaggaagaaggaaaag

SEQ ID NO: 74947 - RNA, 58 nt, Homo sapiens
gccccaaggagcccggccccacaccggcacacagcgagaacgcgccgcaggggcggac

SEQ ID NO: 74948 - RNA, 58 nt, Homo sapiens
ggccagaaggggagcgaacgacgcaaaggaaaaagcaaagggaaaagcaaaaggaaaa

SEQ ID NO: 74949 - RNA, 55 nt, Homo sapiens
ggacgggacggaaccacccccagacaagaggcagcgaagccaccagccacgcaac

SEQ ID NO: 74950 - RNA, 73 nt, Homo sapiens
ccagaaagaaaaagagaacagcaaacacaggcacgaaaaagccaggagggcccagagccgcggcccaggcgga

SEQ ID NO: 74951 - RNA, 60 nt, Homo sapiens
cacaggaagagcgagaaacgcggaaagaagcagaagagaaccggcccaagagaaacccag

SEQ ID NO: 74952 - RNA, 52 nt, Homo sapiens
cacgacaccccacgccggaacaggccggacgggcgcccggaaaagacgacag

SEQ ID NO: 74953 - RNA, 33 nt, Homo sapiens
gacggagacaagagaggaacagaggaggaggcg

SEQ ID NO: 74954 - RNA, 74 nt, Homo sapiens
cgagcagcgccagccaagccccaagggagcagcacacccgacgcgcaggcggacccagaccgcggggaagcacg

SEQ ID NO: 74955 - RNA, 40 nt, Homo sapiens
cccccaacaaggagacgagagcggaggcggggggaccggc

SEQ ID NO: 74956 - RNA, 72 nt, Homo sapiens
cggggcgccccacagaggggcgacgagccaacagaccgaggagacaacccccacaggcccagagacccaccc

SEQ ID NO: 74957 - RNA, 66 nt, Homo sapiens
ggcgcgaaaaagccaaaggccacaacgcagccaacacacagcccaagaacagaaaagccagaccaa

SEQ ID NO: 74958 - RNA, 75 nt, Homo sapiens
ccccaggcacagaccgcacgaggaacagcccccaaccccaccacccaagggccagaagcccccaggaggagaacg

SEQ ID NO: 74959 - RNA, 87 nt, Homo sapiens
cagcgaagagaacgcgcccaagggcggggacacgggccgcgcgaaaaagggaaaagagccagaagaagaaaaggcaagccaggcaaa

SEQ ID NO: 74960 - RNA, 59 nt, Homo sapiens
aagaaagcgccaaaaacaacaccaaaaagccgcagggaaccaagaaggagcgagggagg

SEQ ID NO: 74961 - RNA, 89 nt, Homo sapiens
ccgagccggccgagcggcgacggaccgcgaggccagccgagaggaagaggcaagcgaggagcacccaacccggccgaggagccagagga

SEQ ID NO: 74962 - RNA, 86 nt, Homo sapiens
gcccagccccaagagcgggacacaggcagaggcaaggcggcagcaaaacgggcgcccgggcagaagcaagagaaacgcagagagaa

SEQ ID NO: 74963 - RNA, 78 nt, Homo sapiens
gagcagagggaaagggaaggagaaggagggacgcaggcgcaggccaggacgagcacagcccgggggagccgggagaca

SEQ ID NO: 74964 - RNA, 79 nt, Homo sapiens
cacggagaggcccggcggcgcgcccaaccggcgacggaaccaaggcgccacaggagccgcagaagcaaaggcaccgcca

SEQ ID NO: 74965 - RNA, 74 nt, Homo sapiens
cacgaagccgcaaacccaggaacaacgaagcacaaagccgaaacagaacgaccacagagacgaaccaggaggca

SEQ ID NO: 74966 - RNA, 76 nt, Homo sapiens
gcaaacacggaacgcggcgaccgccaggccacaggcgccaagaagccgagacaagccagaaaagccaaaaaccgac

SEQ ID NO: 74967 - RNA, 71 nt, Homo sapiens
cccgagcaagacgccaggaccggaagcagagaaagacgccaagccagcacaaaggggaccaccaggaaaac

SEQ ID NO: 74968 - RNA, 76 nt, Homo sapiens
cacaaaagcagagcgcgaacggagaaagggagacaagagaccaaagcaggggagcaacaaagccaaaaacagcaga

SEQ ID NO: 74969 - RNA, 68 nt, Homo sapiens
ccagaggaccccagccgcgcccgggagagcaagaaaccgagaccaagaacccgcggaaagcagaacgg

SEQ ID NO: 74970 - RNA, 59 nt, Homo sapiens
ggaaaaagagaagaccagaccaaggcagggaggcgagggaccaaggaccagagagcaga

SEQ ID NO: 74971 - RNA, 73 nt, Homo sapiens
gccggggcagcggggagcagagcggcggcaagacacgaagacgccaccggagagagaaaagcaaccgaagggg

SEQ ID NO: 74972 - RNA, 81 nt, Homo sapiens
acgggcgaagcgacgagccgcgaggagggaacacggccacaggcgacaaaagaccacgacaccaagacagggcggaaccag

SEQ ID NO: 74973 - RNA, 75 nt, Homo sapiens
ggacaaccacaacagaaagcgacaacagccaagagggcgcccagagacaacgagagaacaggggagagagcggag

SEQ ID NO: 74974 - RNA, 67 nt, Homo sapiens
cacacacacggcacagaaggcaacaggcccccacccgagacacaacagagaaagggccaaaaaaccc

SEQ ID NO: 74975 - RNA, 68 nt, Homo sapiens
agaaaacgacagagcgaccaggaaggaggacggccaaccaagcaggcagcagcagaaggagggccaaa

SEQ ID NO: 74976 - RNA, 90 nt, Homo sapiens
gaaggcccccagacggcgccagaagacaaagcgaggagacggacagacacagggcacccaggaccgggcaacccagaccagaagaaacag

SEQ ID NO: 74977 - RNA, 38 nt, Homo sapiens
cgagagcccgagccacgcaggaaaagacagagccaaac

SEQ ID NO: 74978 - RNA, 86 nt, Homo sapiens
ccgcgggacaagaaaagcgggcaaccgaaagagacccccagaccaggaaagacaggggccacacgcggacccggagggaccagacg

SEQ ID NO: 74979 - RNA, 78 nt, Homo sapiens
gaccccacaaggagcgcagggaaggccggaggcgaagaagacgaacaacagacagccacacgggcaagcaaaacggag

SEQ ID NO: 74980 - RNA, 78 nt, Homo sapiens
aaagcagcacgcgaggaggaaaggcaccccaccaggaggaaacaggggccaggaaggaaggccgaaagcagaacgaaa

SEQ ID NO: 74981 - RNA, 51 nt, Homo sapiens
gcccaccggaaggccaccccgcagaccgaccacaggaccacccgaggcccc

SEQ ID NO: 74982 - RNA, 81 nt, Homo sapiens
ggcggcgcgcgcggcgcgggacgcgcgcgggcacccacggagccccggggcgggccaggccgagggcccgcccggccccag

SEQ ID NO: 74983 - RNA, 85 nt, Homo sapiens
ggaaaaacggagagccacaaaaaaggaagcgaaacacaccgaggagaagaccaggggaacaccaaaaacggaaaaagaaaacgag

SEQ ID NO: 74984 - RNA, 69 nt, Homo sapiens
cgccgaagagcgaggcagaccaacggggaaaacaagaaagaaaccacagaaaagaggaaacccaaagcc

SEQ ID NO: 74985 - RNA, 53 nt, Homo sapiens
cggacaaggaagaaaacaacggcgaaagaacagacacaaggccgaaccccaag

SEQ ID NO: 74986 - RNA, 79 nt, Homo sapiens
gcgggcccgcccggggcccgccgggggcggccgggaccagcgcgcccccaccaccacggcagaaaagccaaaagccacc

SEQ ID NO: 74987 - RNA, 81 nt, Homo sapiens
cagcggagcgccgcagccagaaggagagaggaagaaaaggccacaagcccagagccagccggggaccgggaggagagcccc

SEQ ID NO: 74988 - RNA, 73 nt, Homo sapiens
ggaaaaggcaaaaacccacaccgcaacccagcgagagaaaggcaaggacaggcggaagaggcaaagacgaagg

SEQ ID NO: 74989 - RNA, 73 nt, Homo sapiens
ccagggaaaggagcagagagagagagcagaaggaccacggccgagccgggacaagccgccgcgccgaccaggg

SEQ ID NO: 74990 - RNA, 83 nt, Homo sapiens
ccgcccgggggacagggagaaccgaacaagcccagcgaagcgggcacggggcggacccagcagccagcgaagccccaaggaag

SEQ ID NO: 74991 - RNA, 53 nt, Homo sapiens
agaccccgacagcaagaacagggccagaacaggaccccgacaacagagcagcc

SEQ ID NO: 74992 - RNA, 80 nt, Homo sapiens
acaacgaaaccacgccgcaaaccagacagaggaaaagggcccaaagaaaccagggggagaccgcaccaggaggaaaacag

SEQ ID NO: 74993 - RNA, 43 nt, Homo sapiens
gcgcagcgccccagccggaggccccagagagaccacccaaagg

SEQ ID NO: 74994 - RNA, 76 nt, Homo sapiens
gacgcaaaggccaaggggcggcaaaaagggggacacagccagggcgcaggcagcgcccaacaacacgggaaagaag

SEQ ID NO: 74995 - RNA, 69 nt, Homo sapiens
gccacccgggagcggacagagaagaggacggagcgaggaggggagcggagccaccgacacaacaaaaga

SEQ ID NO: 74996 - RNA, 70 nt, Homo sapiens
cacggcgcaaaccaggccaggagagagggcgggaaaccaacccgcaaggcagaaccagcaagggaagggc

SEQ ID NO: 74997 - RNA, 39 nt, Homo sapiens
gaccgcccacagacccaaacaaagcacaggccccagaca

SEQ ID NO: 74998 - RNA, 74 nt, Homo sapiens
aggccgaaagacacccacagcagcaaaggcagcagaagaaaccgagggcagaggcaacccggaggacacaggac

SEQ ID NO: 74999 - RNA, 78 nt, Homo sapiens
ggcagaaggaggccgccgccagcggaagacgcgccaccggagcggaggagggacgagcggcccgggcggcagagggca

SEQ ID NO: 75000 - RNA, 65 nt, Homo sapiens
acaaccaggggcacgagagacggcaggaggggcaggaggacgcggcggcggcgaggagaccccgg

SEQ ID NO: 75001 - RNA, 81 nt, Homo sapiens
aagccaacaggacacggagggaacaagaccagagcacgcgcggaaaaggaacagaagaggaaccgaaacccaagaaaaacc

SEQ ID NO: 75002 - RNA, 59 nt, Homo sapiens
gcagagaaggagcccaaacagagcggggcgagcccggggcaagcaaaccagccggcggg

SEQ ID NO: 75003 - RNA, 71 nt, Homo sapiens
agaagagaacacagaaaagcaccgagcagggaagaagcaaaggagaagacggcggaaaaccccaggcaaac

SEQ ID NO: 75004 - RNA, 74 nt, Homo sapiens
cgacgggagggaggagccggccagcaacccacgggaccgggaaaggggaaaggacgcgcagcggagccgcagac

SEQ ID NO: 75005 - RNA, 71 nt, Homo sapiens
gaccgagaccaggaggaagacggcgaaggcccaggccagagggcccaaagcggagaggcacgagcacaggg

SEQ ID NO: 75006 - RNA, 66 nt, Homo sapiens
gaggcaggagcgaaaggaaaccggccaacggacagacaaaacagaggagaccagaccagaagcccc

SEQ ID NO: 75007 - RNA, 58 nt, Homo sapiens
aggcgcccggacaacaagcacagaaaggcagaagcaacacggaaagacaccgagcaga

SEQ ID NO: 75008 - RNA, 75 nt, Homo sapiens
ccggaaaggaagacaacccgccagccagggccaggcggaagccagccgacaccaggccgacagccgagggaggga

SEQ ID NO: 75009 - RNA, 68 nt, Homo sapiens
caaggcacaaaaccgcgcggaaaccaccgggcccaacggacaaggggcccagcggcaacaagcggcca

SEQ ID NO: 75010 - RNA, 70 nt, Homo sapiens
gaaagagaagagcaagaggaagacgccgcgcccaagcagaaaagaagggggaaacagcaacaggagcgcc

SEQ ID NO: 75011 - RNA, 66 nt, Homo sapiens
cagccaaagggaaacaggccacagcgacaggagaggcaggacaaccccgccagaggaccagaggaa

SEQ ID NO: 75012 - RNA, 70 nt, Homo sapiens
agaaaccgcccggagcacgaccgaggcggcgcacacagagaaagcgagaaggcagagggccaaacgaagc

SEQ ID NO: 75013 - RNA, 78 nt, Homo sapiens
gaagcccagggccggagcagcccaaagcagaagccgagaacaccacgcggagccagcgcccggcaaggagcgagcggg

SEQ ID NO: 75014 - RNA, 75 nt, Homo sapiens
gaggagaagaagccgggagccaaggggaggcaagcaggggggcaaaggaaagaaggcagaaagggaggccaggag

SEQ ID NO: 75015 - RNA, 69 nt, Homo sapiens
gcgcggcaagggggcagggggaggagcagaaacacagcaggacagcagcccggcacagccacaaacggc

SEQ ID NO: 75016 - RNA, 73 nt, Homo sapiens
gaagccaccaggggcacaagaacagcgccaagaacaggcaggaagacaagagacagggagcagggaagccaac

SEQ ID NO: 75017 - RNA, 70 nt, Homo sapiens
gccgaccgaagccgcaaaagaggaagagccgcaccacggcccaaaccaaccccaaaaacaccgacgggac

SEQ ID NO: 75018 - RNA, 82 nt, Homo sapiens
gcagaagccgcgaaaaaggggggccgagagccggaagaagaggaaagcaaagaagccaagaagcgaagaaccaagaacggaa

SEQ ID NO: 75019 - RNA, 30 nt, Homo sapiens
gacgcaccaacgagaggagcgcccggccca

SEQ ID NO: 75020 - RNA, 72 nt, Homo sapiens
acaagggccaaaggaggaacacgccggcccaagagccgcagggaggaggggccaaccaccagcagaaggaaa

SEQ ID NO: 75021 - RNA, 66 nt, Homo sapiens
cgacaagcacacaccaccgcagcgaggaagacagccaagcagagaaacgaaggagcgacaaggaga

SEQ ID NO: 75022 - RNA, 79 nt, Homo sapiens
ccgggagcgcgcagccaggaacagcacaccgagcaagaaacagaaggaaggacggaacaaggaacaggaaagagggaac

SEQ ID NO: 75023 - RNA, 75 nt, Homo sapiens
cccgcgcgcgccgccggaaagcccacgccaggaggcaggcgccaccgggcgcacaacaaaggcgcccccgaacca

SEQ ID NO: 75024 - RNA, 59 nt, Homo sapiens
cggcagccgagaaggagcgcagggccagaccaaaccgaggcgcggagcacacagaaacg

SEQ ID NO: 75025 - RNA, 69 nt, Homo sapiens
ccaagagagaagacgcgacaagaagcgccaaaaaggggagaaccaggagaggaagggcggaaaaggcaa

SEQ ID NO: 75026 - RNA, 69 nt, Homo sapiens
cgagccgccacccggccaacggggcggcacacaaggagcgaagggcagggagaacgccaggcacagcac

SEQ ID NO: 75027 - RNA, 33 nt, Homo sapiens
cgaaggcccccaaacaacagaaaacggacgaac

SEQ ID NO: 75028 - RNA, 85 nt, Homo sapiens
aaccagcacccacagggagggggccaagcaccccaggagagaagcagaagagggccaacccaggccagcacagacagaggaaaaa

SEQ ID NO: 75029 - RNA, 122 nt, Homo sapiens
gccgaagccggagcgcgcggccgggagcacgggcgccggcaagacaagaggcagccagcggacggggggcacccgaggaggaagagggcagggcccacggaaagaagggaaacccggggaga

SEQ ID NO: 75030 - RNA, 70 nt, Homo sapiens
ccaaccggccacccaggaaagcgcccacggacacaagcacgacggagaagagaggaacccgccaaaggaa

SEQ ID NO: 75031 - RNA, 108 nt, Homo sapiens
gcgcagacacaagagggccacgcagaagggcaggagcagggccggaggccaagcccgcagagcccagaaccgccccagacaaggcccggcccgcggcagagacaagag

SEQ ID NO: 75032 - RNA, 64 nt, Homo sapiens
agcagaaaagccgagacgagacgggagaccggaaacgagagaaacgaagacgaagaaacagccg

SEQ ID NO: 75033 - RNA, 65 nt, Homo sapiens
aggaagggacaacacggcgaggcaccccaacagcagagaaacaagggggggaccagaaaagacag

SEQ ID NO: 75034 - RNA, 62 nt, Homo sapiens
acaacaaccaggggaggaacaagagcgaaggacaaacacggcagcgcagaagacaaagaaac

SEQ ID NO: 75035 - RNA, 73 nt, Homo sapiens
gccccacacccccccgggggggggcagacacaaggaacagccagccaggagaaaaacgaacccaacagaccac

SEQ ID NO: 75036 - RNA, 99 nt, Homo sapiens
agcgccgaagcagccgggagccggagcgggcgcggacgccgaggcaccgaggcaccagaggagcaacggggcggcacacaaggagcgaagggcagggag

SEQ ID NO: 75037 - RNA, 78 nt, Homo sapiens
cgggacagaccgggaggcggcgaagcgcccgggcccaaaagcggagaacggcccaggaaagacccgagaaaaggccaa

SEQ ID NO: 75038 - RNA, 75 nt, Homo sapiens
gcccagccggcgcggagcggcacgacagggccgagaaaaggggccagcgagccggacgccgggaaggaagaacag

SEQ ID NO: 75039 - RNA, 76 nt, Homo sapiens
ccccaaaggcgggagcaggaaaacaccaggggacagaaccgcaagggcccgccccggagaacagcagccacccccg

SEQ ID NO: 75040 - RNA, 77 nt, Homo sapiens
acagcacaacccccagaggaaaagggacgaaaacaagggaggcaaagccaaacaacaacagagcaaaagcaaaggac

SEQ ID NO: 75041 - RNA, 84 nt, Homo sapiens
caagagaacaagggaaccagccaaaagggacccagaaagaagcacaaaacaaacgacagcagcagagaaacacgcaaagccgag

SEQ ID NO: 75042 - RNA, 66 nt, Homo sapiens
gaaggcggcggcagagaacgccgggccagcgaggggaaaggaggagcaggaggacgaggacaagga

SEQ ID NO: 75043 - RNA, 79 nt, Homo sapiens
gagagaagggcgcacccccgagcgaagaagcccggacagacacagggggaggaacagcccgcgcaggacaagcgagcac

SEQ ID NO: 75044 - RNA, 87 nt, Homo sapiens
ggacagccagcccccccccaacagaacagggcgacaacaaagcacccgccgcccaagccggggaccaggcagcaggggcgggggcca

SEQ ID NO: 75045 - RNA, 79 nt, Homo sapiens
ccccgcgccgccgaccccccggcgccgcgccggcggcggcgccgcgaggccgcggccaggccgagcccgccaccaggcc

SEQ ID NO: 75046 - RNA, 80 nt, Homo sapiens
agcacagccgcggaacaaccacgccgggcccgggcagagccgcccagaacccacgcccaggccggcccggccacccccgg

SEQ ID NO: 75047 - RNA, 79 nt, Homo sapiens
cgcggagcagcggagggaagaggcgaaccccgcccccagggccagcagcgcagcccgaggacggacacaggaggaccgc

SEQ ID NO: 75048 - RNA, 66 nt, Homo sapiens
ccagggccgcggggacaggaccccggacgagcccggcgaggaccagcaccagacagcgaaaaagag

SEQ ID NO: 75049 - RNA, 76 nt, Homo sapiens
agccgccgcggagcccccgcccgccccgccggcgagcaaggaagaccgcaggaaagcaggaaggcaagaaagccaa

SEQ ID NO: 75050 - RNA, 69 nt, Homo sapiens
ggagagaggaccacccagaggagcaacgagggacaaggcacacgcgggacggagcccggacccagacca

SEQ ID NO: 75051 - RNA, 71 nt, Homo sapiens
gggcgcccccaggacgacgggggagccggaccgcccccagccgacagaacaaccgccagggaacagcaaaa

SEQ ID NO: 75052 - RNA, 72 nt, Homo sapiens
ggaccagaccgaccaccaaaaacagcgcgggagccaggaaacgcagaccccccacgagaagcaggcagagca

SEQ ID NO: 75053 - RNA, 91 nt, Homo sapiens
cgaaacagcagcgaagaaggagaccccgcgaaggggaaacaaagagcgcccggaaagaggcagaggaaacgagcccccgcagaagaagagg

SEQ ID NO: 75054 - RNA, 51 nt, Homo sapiens
agccgggaacccccacgcggccagcgaaaacgcccagggacacagagccac

SEQ ID NO: 75055 - RNA, 33 nt, Homo sapiens
ggccccacacgaccgagggccacccgcccacag

SEQ ID NO: 75056 - RNA, 75 nt, Homo sapiens
ccgcccacccacacccggccccaagagaggaggagacaagcaggcggagacacaggcccgacaaagcgggacaaa

SEQ ID NO: 75057 - RNA, 75 nt, Homo sapiens
cacacccaggcagcaagggcaccgcgagcaagggagaagccaaaaggacaggcagagggcccaacaacagaagaa

SEQ ID NO: 75058 - RNA, 69 nt, Homo sapiens
gaacagaacgccggagggcggccacgcgggaccaccggcaccaccaaaaggagggacagcacaacagag

SEQ ID NO: 75059 - RNA, 84 nt, Homo sapiens
acccagcaccaggaggcgaggaggccaacggccgcgaggcacgcagccagcccaggcgacaggcgacccaggagccgagagcac

SEQ ID NO: 75060 - RNA, 59 nt, Homo sapiens
cgcccgggcccgaggaggcagccaagccgggccgcccgcggcccccagacaaacccaga

SEQ ID NO: 75061 - RNA, 98 nt, Homo sapiens
gcccgaaaaacggagacggagagggaaagacagggccaaggggggcagccagcacagaaaacccacggaaccaagaccggagaagaaaaaaacaaacg

SEQ ID NO: 75062 - RNA, 87 nt, Homo sapiens
agcggaagcagaagaagaagcaggcaggacaaacgggagcggaagagaggaaaagaaggaggccagcgggacacacaaagaaagacg

SEQ ID NO: 75063 - RNA, 76 nt, Homo sapiens
acacccggcgaaccagaggaaccccaagagaagaagaaaacccggaaagcggaggagaacgagaaccaccgcagac

SEQ ID NO: 75064 - RNA, 74 nt, Homo sapiens
gaagcgcggcagggagcgcgggggcccgcgcagcagcgaccacgacaaaaagaaccccgaagaggacaggagga

SEQ ID NO: 75065 - RNA, 67 nt, Homo sapiens
cgcccgggccagcggccgcgcacccccggccggaggcaccagcgggccaaggagaccgcacgccgga

SEQ ID NO: 75066 - RNA, 74 nt, Homo sapiens
gcccgagacacaccaccccgacggagacggacgggaagcagcacggcaagcggaaacacagggggggcagacgc

SEQ ID NO: 75067 - RNA, 72 nt, Homo sapiens
ccaccacaagcccaaaggaggcacagaaccaggacaacgcgaaccaagagcacgagcacgaccagcaacgca

SEQ ID NO: 75068 - RNA, 79 nt, Homo sapiens
caaacggcaagagccagaagcccggcggaagaacgccaaaagacgaacacaaagggaaagaggagaggcacccgaaagc

SEQ ID NO: 75069 - RNA, 68 nt, Homo sapiens
ggcagcgcagagacagcaaagccggagaacagcccggggaaagagaagcagccggaccgcggcaggcg

SEQ ID NO: 75070 - RNA, 84 nt, Homo sapiens
gacagcacagcacacgacacccccgggaccgcggagagaagcagcggacagcagagggcaaggagagccaagcggaccaagaag

SEQ ID NO: 75071 - RNA, 81 nt, Homo sapiens
gcagcaacagagaaagaccagaccgacaccacccaaagagcgaccccagaaccgaggcagcaagagcaaccaccaccagcc

SEQ ID NO: 75072 - RNA, 86 nt, Homo sapiens
gggggcgacggcggcggcggggccgaggaggcccgagcggcggcggggcggcgaaggccgaggcggggaacggcgagggaacccag

SEQ ID NO: 75073 - RNA, 77 nt, Homo sapiens
gcagacaccagccgcgccagcgggagaacagagacccaccaagaaaccagaacccggacaagggaagggcccgagga

SEQ ID NO: 75074 - RNA, 104 nt, Homo sapiens
ggagcgcagcaggcaccacggaaggcgggacgcagccaagcagcagccccgacaggacagcagaccacagcccggcaggcccaaaaacccaaagggacagaagc

SEQ ID NO: 75075 - RNA, 84 nt, Homo sapiens
cgcccgcgaagggagccgcggggccacacgaccgagggagaaccgaagaacaggaggccagcagaggggaacaagagaagagac

SEQ ID NO: 75076 - RNA, 83 nt, Homo sapiens
ggccaaggggacgagcaaaggaagcgcgaacagcagcgcaggccacccagaggagaaggccaccccgccggaggcacaggcca

SEQ ID NO: 75077 - RNA, 71 nt, Homo sapiens
ggggaggcaaagggaggaggaggaccggagacagccccaagcgagaacaaacaacaaaacccagccaccac

SEQ ID NO: 75078 - RNA, 63 nt, Homo sapiens
cacgcagcacgaggcgacgggagcccaaggggagaggggaggccaagcgacgaaggaagaaaa

SEQ ID NO: 75079 - RNA, 62 nt, Homo sapiens
gccgcacccccggcgccaagagggaaaaggaaaccagaagagggacgaagaaaacagcgcag

SEQ ID NO: 75080 - RNA, 70 nt, Homo sapiens
gggacccagcccaggcggcgcggacggggcgggccggcagaaacagccgggacaaaagcagaaaacaaag

SEQ ID NO: 75081 - RNA, 74 nt, Homo sapiens
aggccgaggggcggacgcggccgccccggcacaaagcagaccgccccacgggcgcgcccgcgacagcaccccgg

SEQ ID NO: 75082 - RNA, 77 nt, Homo sapiens
gaccaagcagggcgggggcgcggggcaggcgggagaggacggacgcgcacaagacaagggcaccgccgaccgaaacc

SEQ ID NO: 75083 - RNA, 88 nt, Homo sapiens
caagccgccgcccgacccagggcccgcgggccaggagagcgccggcgggcaaaagcagaccggaaaacccaccggcaagaccacaccc

SEQ ID NO: 75084 - RNA, 73 nt, Homo sapiens
cggggagaagccaggaccaaagggaggggaaacaagaaccagacaggcacaggcgaggggcggaaagagaaac

SEQ ID NO: 75085 - RNA, 63 nt, Homo sapiens
ccaaggccaccaccgccgccgggccggcaagcggccccggccccgggaccaaggacacgcaga

SEQ ID NO: 75086 - RNA, 90 nt, Homo sapiens
acccggaccagggcagccccccccaagccaggcacccaccgggaacggccagagaagaagaaagaagaggcccgaaccaacgccacgaag

SEQ ID NO: 75087 - RNA, 73 nt, Homo sapiens
gaaaaagggggaaagagcgccagaggcacacagaggcaaggcagcagcaggaaaaccgccgagaagcagcccc

SEQ ID NO: 75088 - RNA, 69 nt, Homo sapiens
caacggacagcacccgagggaagccaagggacggaaagaagagaagacggaaggaaacacccggaaaac

SEQ ID NO: 75089 - RNA, 68 nt, Homo sapiens
gccggggaaaccgaacagaagggggcaaaggcacaaacaaggacccagaacggccccaaaaaaaaggc

SEQ ID NO: 75090 - RNA, 78 nt, Homo sapiens
ggcaggcccagaggcccccgcagcaggccggccacccagagggcccggccaaggcacaagacaaaagaccccgggggg

SEQ ID NO: 75091 - RNA, 70 nt, Homo sapiens
agagagaaaggacgaagcgccaagaggagccagaggcagcaccgagaaggcagggaacagggcagcaacc

SEQ ID NO: 75092 - RNA, 71 nt, Homo sapiens
ccccaacgggcagaaggcaaagaggcggaacaacacagagagcaggaaaggagaagcagggcccaacaaga

SEQ ID NO: 75093 - RNA, 75 nt, Homo sapiens
gggagagaggacccccccccccccccaaggacacaaggcacgaggacgaagaggaaaggggccacgaggaagacg

SEQ ID NO: 75094 - RNA, 83 nt, Homo sapiens
ggccaggggagcccagcggcgcgccggcagcaggggcccggaagggaccaacgcaaggaggcaccacccaccagaccccggag

SEQ ID NO: 75095 - RNA, 84 nt, Homo sapiens
cgcaccacgcgcagaggaccaccagggcaaaaggggacgcacgacgagcgcgaagggggaaaggacgagcagggagcaggacaa

SEQ ID NO: 75096 - RNA, 80 nt, Homo sapiens
gggcaggccacagggaaggggacgaagaaacaacccagccgggcgccagaaaaagcggggaaaacaaaaaaaagaaggag

SEQ ID NO: 75097 - RNA, 81 nt, Homo sapiens
cagaaacacacagaccaaagcgaagagcggcagagaaagccaggagaccgcagccaagggaaaacgaagagccaaaacacc

SEQ ID NO: 75098 - RNA, 70 nt, Homo sapiens
agaacgcgggaaccccccagccaggccccggggcagaccccggagggcccggagaaaagaccacagaacc

SEQ ID NO: 75099 - RNA, 51 nt, Homo sapiens
aaaggacaagcgaacggcagaaagccaccacaaggacccaacaccgcaccc

SEQ ID NO: 75100 - RNA, 74 nt, Homo sapiens
agcgagaaagagcgcgagcgagcgaggccgggccgccgagcaaaaccgcacggagacgccaaacgcaacagaaa

SEQ ID NO: 75101 - RNA, 81 nt, Homo sapiens
gcgaggccgagcaacaccgcgagccgcgcggcgcggggccccgcggcggagcgcgagggcgaggcccccagcaggagacgg

SEQ ID NO: 75102 - RNA, 68 nt, Homo sapiens
gccagagcggaagccaaaggcaacgacgcaccgcccaacagcgccacacgagacaaaagagcccaacc

SEQ ID NO: 75103 - RNA, 69 nt, Homo sapiens
agaagcccggcagaagacaacacaggaaggcgcagacaaggacgggaagggcccggaagccgcagagca

SEQ ID NO: 75104 - RNA, 78 nt, Homo sapiens
aggacaagaagccggacacaaggcgccacggcagcgggacccggcaaagagagaggcacacgccgccgaaggccagga

SEQ ID NO: 75105 - RNA, 75 nt, Homo sapiens
gggcagcggcccgggcggcacggccagcaggaggagcaaccagaacgagaagacccgaagccacccacgccacag

SEQ ID NO: 75106 - RNA, 74 nt, Homo sapiens
aggagcaccaacggaacagagaggaaagcccagagcgagccaaagaagcagaaaggaggaagggggaggagggg

SEQ ID NO: 75107 - RNA, 79 nt, Homo sapiens
agagccaaccgagggcgccgagaagccagcacgccgggagcggacacagcccagcaaaccaggggacagggaaagcaga

SEQ ID NO: 75108 - RNA, 74 nt, Homo sapiens
cggcaaccgaaagccagcagcggaccacagagagcccagaagaccaaagaaaaaaagaagggggacgaagccag

SEQ ID NO: 75109 - RNA, 75 nt, Homo sapiens
ccacccaggagcggcaggagccaaggagcccggggccgcgcaagcagaagcgaggaagagcacgaacgcagagca

SEQ ID NO: 75110 - RNA, 77 nt, Homo sapiens
agcaagagcaccacaaccacacagccaaaaaagaggaaaccaaaagaagacggaaaaaggccaaggaacacaaaaag

SEQ ID NO: 75111 - RNA, 83 nt, Homo sapiens
ggccgcggcaccccgaacggggccccccgcgcgaggccaccaacggcggggggcgaggagcgagcaggagccgggcggcggcc

SEQ ID NO: 75112 - RNA, 79 nt, Homo sapiens
agacccgcagcaacccgagaacaacggggccacacacggcaagaggccagcaagcgcacccagccacacccgacaccag

SEQ ID NO: 75113 - RNA, 79 nt, Homo sapiens
ccaggccccggcccagcggccagccggagaaaggggcggcgggagaggagaaaagcccagacccgaagccacagaccgg

SEQ ID NO: 75114 - RNA, 74 nt, Homo sapiens
acccggcccagcgacccgaccccgcgcgacgacccgccgccgccgggcggagcgacaggcgccacccgacaaaa

SEQ ID NO: 75115 - RNA, 77 nt, Homo sapiens
ggagacggcagaaagaccacaagaagccccaaaccgccaccaccggcgcggggacaccaggcccagaagaggacgcg

SEQ ID NO: 75116 - RNA, 100 nt, Homo sapiens
ccaggaaaaggagaagggaaagaaagaaagagacaacgacagccaacagccagccaaaagaccaagggacagggaaaaaggcgccaaagcacagagcaag

SEQ ID NO: 75117 - RNA, 52 nt, Homo sapiens
agggccaaagaagggagaggaaaagaaacccgaacccggaggacaagaccgc

SEQ ID NO: 75118 - RNA, 80 nt, Homo sapiens
ccacccccggaccccggagaagcagaggaaaaggcaagaagagaaccgacagcacaaggaaaggaggaaagagaaagaag

SEQ ID NO: 75119 - RNA, 73 nt, Homo sapiens
aggaagacaaaagcaaaacgcagcacagacgaggggacaacgaaggaggcaagcaacaaagggacaaaaacga

SEQ ID NO: 75120 - RNA, 74 nt, Homo sapiens
ggcgcgggcacgcccaccggcccgcgccgcccaggccccgcaggaccaggaacacccaagccagcggaggcggc

SEQ ID NO: 75121 - RNA, 55 nt, Homo sapiens
gagaaccccaaccggggaggaaaaccgacgaagggagagcacaccgggacagcca

SEQ ID NO: 75122 - RNA, 83 nt, Homo sapiens
cagagaccacgggagccgccaagcccgcagggcccccagcgaggacccccagccccaagggcagggccaccccggaacgcgcc

SEQ ID NO: 75123 - RNA, 73 nt, Homo sapiens
accgaggaccccccccgacagcccgccgcagacgggagggccccgggccccagccccgggacagagaaagacc

SEQ ID NO: 75124 - RNA, 44 nt, Homo sapiens
caggccaagccaagaagggcgggcagggcgggcagcggccgagc

SEQ ID NO: 75125 - RNA, 82 nt, Homo sapiens
cgcgcggccaagcagaaaggaacagaacgcggccccagccacaccaagcagacgcgaccggaaaggagagagagacagaacc

SEQ ID NO: 75126 - RNA, 84 nt, Homo sapiens
gaaaggaagcaagcagcagaagagccaaggaaaaacagcaagaacccaaaaggcgcggaaaaggaacagaagaggaaccgaaac

SEQ ID NO: 75127 - RNA, 77 nt, Homo sapiens
caaacacggggggaccacggaaagagggaaaccaaagagccaggcgacccccgcgcccgaggcccagaaggggacaa

SEQ ID NO: 75128 - RNA, 67 nt, Homo sapiens
cgcgccgcgggcgccgcccccccggcccccgggacggcccaaggccagcccgcaggacccgaagaca

SEQ ID NO: 75129 - RNA, 47 nt, Homo sapiens
ggcgccggaggcaaagggagagcgccccagcgggacccagagaagga

SEQ ID NO: 75130 - RNA, 58 nt, Homo sapiens
gagggccccggagcggcgcggcgggccggcggcgcgacgaagcaaagcgagaggagaa

SEQ ID NO: 75131 - RNA, 81 nt, Homo sapiens
aaacgggagggaaccagcaacaagccgggagaggagcggaagacccggggggcgggcagcaacacgaaggagaaacagccc

SEQ ID NO: 75132 - RNA, 71 nt, Homo sapiens
caggacagaacgggcaaaagcagaccggaaaacccaccggcaagaccacacccgaggggagcccaggacac

SEQ ID NO: 75133 - RNA, 73 nt, Homo sapiens
ggggaccgaagaagacaaaaggaaccaccaggggagggaccggggcggaagagcaggcaggcggagaggcacg

SEQ ID NO: 75134 - RNA, 69 nt, Homo sapiens
ggcccccagccgcagccacaacaccggcaggaaccaccaggacagaaaacagccaacccgcaacaacgg

SEQ ID NO: 75135 - RNA, 71 nt, Homo sapiens
gggaccggaacaagaagaagaccccacggaaggagagagcagagcagaagagcaggccccaccgaggcacc

SEQ ID NO: 75136 - RNA, 77 nt, Homo sapiens
cagccggaagcccgagggcagcgcccacggccgcgaccggccgcgaccccggaaagagagagaacacagggacagag

SEQ ID NO: 75137 - RNA, 79 nt, Homo sapiens
gcccagggaaccaccagcaccaagggcgaaaagccccaagaaagcccaggacgggccaagagagcccgggcccggaaag

SEQ ID NO: 75138 - RNA, 73 nt, Homo sapiens
agcagaccgaaagccggcggagaggaccggagcggaaaacccgaaacgaacacaaacacaggccggagggcac

SEQ ID NO: 75139 - RNA, 73 nt, Homo sapiens
gccccagccccagaaccgagaaccagccaaaacacacgaacagggaacaagaaacaccgaagaagagcaagac

SEQ ID NO: 75140 - RNA, 69 nt, Homo sapiens
gcacagcaggagaagccggaaagaacaagaggagcagaaagcgagaaaagaccggagagaccagggcag

SEQ ID NO: 75141 - RNA, 47 nt, Homo sapiens
aggcgaaagcggaacgaggagaagcaaaaagccacgagggacacaag

SEQ ID NO: 75142 - RNA, 77 nt, Homo sapiens
gaagagcaacgaggcacgagggaggccggccccccgacagaccccgcacgaggccacccggagcaggggccagcgga

SEQ ID NO: 75143 - RNA, 80 nt, Homo sapiens
aaaggcgaagggcgggaccccacgagagcaccaccagaaggcccgaggaagagccccccaagagaacccagggggagcca

SEQ ID NO: 75144 - RNA, 78 nt, Homo sapiens
caccaaaccacagaacaaggacacgcgaaaaaaaagcccaggaagggaaagcaagcgacaagcccacgagacgaaccc

SEQ ID NO: 75145 - RNA, 47 nt, Homo sapiens
ccccgcacacacacccaaggacagcagaccacagcccggcaggccca

SEQ ID NO: 75146 - RNA, 73 nt, Homo sapiens
ccgaccgcccccaggaggggagcaagcccgagaagcaagaccgccccaaaaagcaagaaaagaccggagggcc

SEQ ID NO: 75147 - RNA, 68 nt, Homo sapiens
acgaaagaaaggagaccaaccaccagggaggccagcagagccagagcgcggcggagagggcccccacc

SEQ ID NO: 75148 - RNA, 58 nt, Homo sapiens
aaacagacacaacagagcagaagcccagagccccgcagggagaaaggaagggccaaga

SEQ ID NO: 75149 - RNA, 83 nt, Homo sapiens
acacggagcaaggaggaaaacacacggacaaagaggccaggagacacgccaccgccggcggcccccggccaggccacccccca

SEQ ID NO: 75150 - RNA, 82 nt, Homo sapiens
acggagggaaggagaccggaggagcggccgacgggacaagggacagacgcggcaggccaacggcagcggcgaaggagaccgc

SEQ ID NO: 75151 - RNA, 66 nt, Homo sapiens
aacaaaccaacaccaaagccagagaagccggacccagcagggcccccggaacaaacccgggagcca

SEQ ID NO: 75152 - RNA, 78 nt, Homo sapiens
ggaagcgccaggacaaggggacccgggacgacgagacgacaccacaaagaaaccccaccacgcggcaggggccgccga

SEQ ID NO: 75153 - RNA, 82 nt, Homo sapiens
aagaggaacagcagagagaagagaggggccaacgacaagccacagagcaggcgaacgcaagcagccaacagggaagaggcgc

SEQ ID NO: 75154 - RNA, 75 nt, Homo sapiens
ggagaaagcccgaaagcagcaggccaggaccccgacaagaaaaaggcgcagcccaacagaacccagaggaaccag

SEQ ID NO: 75155 - RNA, 58 nt, Homo sapiens
gccaccccacagacggccaacacccaggcacaggaaaaaaaaccagaaacacaacaaa

SEQ ID NO: 75156 - RNA, 72 nt, Homo sapiens
gaccagggacaaaagaggggaaacagggagcccaaaacaagaagcagcagacccggccaacgagcagcacaa

SEQ ID NO: 75157 - RNA, 38 nt, Homo sapiens
cggaaggggccagcgccggaaccaaaaagaagccccag

SEQ ID NO: 75158 - RNA, 73 nt, Homo sapiens
acacaacccggggagcgaaaccgcagcgcgcacggcaagaaaaccagaaggggggcggcgcaggacgagagcc

SEQ ID NO: 75159 - RNA, 78 nt, Homo sapiens
gggccccggccgcaggagggagaccacagcaagacaccgggaccccggaagccaaaaagccagaggagcagccaagaa

SEQ ID NO: 75160 - RNA, 73 nt, Homo sapiens
cgaagagggagaagaagaaaagcacggaaacgcgcaacggcggaagacccagacccagcaggacgaccagcca

SEQ ID NO: 75161 - RNA, 69 nt, Homo sapiens
ggcggaagccacacaggccagaacgaggcaacgcccagaaagcagcaacaagggacgacccaggaaaac

SEQ ID NO: 75162 - RNA, 41 nt, Homo sapiens
cagcacgaggaggcgcgaggagagcggcaaccggccagcaa

SEQ ID NO: 75163 - RNA, 74 nt, Homo sapiens
cccgccacccacagcagcccgcgaggcggagaagaagaaaccaaaaaacaggagggcaggaacacaggaggaac

SEQ ID NO: 75164 - RNA, 73 nt, Homo sapiens
gccgaccggaggacgcggagaaccggcacagcccccgggggcgacagcaagaaggagccagcacagaggcaaa

SEQ ID NO: 75165 - RNA, 76 nt, Homo sapiens
cgcggcccccccagcgggacaaccgaggaggaggcgcggaacccccacaacccgagaggagcaggaccagagagca

SEQ ID NO: 75166 - RNA, 77 nt, Homo sapiens
gggccccaacacccagagacgaaagcggaagccgcagaaggaccggccagaagcaagccggagaacagaaagacaag

SEQ ID NO: 75167 - RNA, 83 nt, Homo sapiens
gccgcgcacgcacagacaagggagaaggggaaagggagacccggaacggaggagaccagcagcccacagcaaccaaagagacc

SEQ ID NO: 75168 - RNA, 93 nt, Homo sapiens
gccccagccgagaggacgcggcggaaacgaaggacaaaaagcgagcccgagaacacagggcgcggcagcgaaacagcagagaaggaacgaccc

SEQ ID NO: 75169 - RNA, 74 nt, Homo sapiens
aggccccccaaggggacagaggcccggagcgcccccagagccagggaaagcagccgccccaaaaccaccagaga

SEQ ID NO: 75170 - RNA, 69 nt, Homo sapiens
cccgggcaccacagaaaagggaaacacaaagaagacaccagaagggccagcaccacgacaacacggcga

SEQ ID NO: 75171 - RNA, 79 nt, Homo sapiens
ccccgcgcagcggcccggcggggcccggcaccaggaccaccgcggcagcacgcggcggcgccaccagcaaaaccagaga

SEQ ID NO: 75172 - RNA, 73 nt, Homo sapiens
cgcacccaccagcaaagaaagggaagcagcgggagaggagcaggcaacaggaagaagaacccacaggggccaa

SEQ ID NO: 75173 - RNA, 79 nt, Homo sapiens
ccagagccggaacgggcccagaagacgaacagagcgcggagacgagggccaaagcggggcagaggacacccgcgcccag

SEQ ID NO: 75174 - RNA, 77 nt, Homo sapiens
cggccacgaccaagaagaagccacggaccccgcgaagagcccggaacgccagagcggaaaggaagagaacgccggaa

SEQ ID NO: 75175 - RNA, 82 nt, Homo sapiens
ggggccgagaaccaggagccacaaacagcacagcggggccaggaggagggggcaggagacaaggaggccaggccagagggac

SEQ ID NO: 75176 - RNA, 77 nt, Homo sapiens
cggcccgcaggaccggaccgggggagaaacccgcaaagaagcgagccagcaaagaaacggggggacccacgagagaa

SEQ ID NO: 75177 - RNA, 80 nt, Homo sapiens
aaaagaaccaaaaggcgcaacaagaggggcgccggacccgccccagagggaggcccgcccacggcgggcacggacccagg

SEQ ID NO: 75178 - RNA, 71 nt, Homo sapiens
ccccgaccacccagcggaagagagaaggccacgcccgaccccaagcaacaacggggcagggacaggcgcga

SEQ ID NO: 75179 - RNA, 73 nt, Homo sapiens
acaagcaaggggaggagcagcagcgcggcagagcagggggccgaaggccaggacagagaaccgaaggaccaga

SEQ ID NO: 75180 - RNA, 69 nt, Homo sapiens
acaacggaccaaaaacacgagaggccgcgagagaagagggcggacaccgcccgcgcgcgggccagcggg

SEQ ID NO: 75181 - RNA, 39 nt, Homo sapiens
aaagacaggagaccaaaaaggaagccaccaccagagggc

SEQ ID NO: 75182 - RNA, 66 nt, Homo sapiens
acgaccccaagacagggccaaacgccgaggaagccgcgagagaagagacaagagagacgacagcag

SEQ ID NO: 75183 - RNA, 61 nt, Homo sapiens
gcagcagaggcgagaggccgggccgaggccacgggcaagcccgggagggaaagccagaccg

SEQ ID NO: 75184 - RNA, 82 nt, Homo sapiens
ggagcgcgaaggccgggacccggccccggcccacaggggggggcaaacccgagagaacggacccccgcacggcacaaaacgg

SEQ ID NO: 75185 - RNA, 85 nt, Homo sapiens
gccgggacccggccccggcccacaggggggggcaaacccgagagaacggggcggaagcgcgccacccaccaggaggccgcacaac

SEQ ID NO: 75186 - RNA, 76 nt, Homo sapiens
gccaaagaaccgacaaccaagggccccgcggaccaaggaagaacccgaagcaccgggcggagaacggaaaagcacc

SEQ ID NO: 75187 - RNA, 68 nt, Homo sapiens
aaagagacaaggagagaagaaccaaagaagcaaaacacgagcggagaaccccgccaaccagaggcaag

SEQ ID NO: 75188 - RNA, 80 nt, Homo sapiens
aagaagagaaaaaggaaccccccacagcaaaaaaggggggacccaaacgagcagccagagcgccgccaaagcagcaaaag

SEQ ID NO: 75189 - RNA, 40 nt, Homo sapiens
cccgagagcgggacacaggagcgagaccagccggccaaag

SEQ ID NO: 75190 - RNA, 80 nt, Homo sapiens
cgaacgagcgacggcggaacccggggccgggacgcagcccggcggcagcagccaccaggagagaacgccgcgccgcgcga

SEQ ID NO: 75191 - RNA, 74 nt, Homo sapiens
cgagagacgcgacgcgggcgggggaccgggcaggaaaaagcacgcagggccacccgcacggcagcaagaggaaa

SEQ ID NO: 75192 - RNA, 82 nt, Homo sapiens
cagccgcgcagacggacaccgggcccaagggagggccccccagggggcccccaacccgacaggaaagaccacagcaagacca

SEQ ID NO: 75193 - RNA, 58 nt, Homo sapiens
cccagggcgagcacagcacacaaggaccaccaagcagccggcggggggaccaaccaga

SEQ ID NO: 75194 - RNA, 78 nt, Homo sapiens
ggccgcgccggccggccgggaccagccagggccccccacgcgagaacccgggccggggcccgggggcccgagccccca

SEQ ID NO: 75195 - RNA, 39 nt, Homo sapiens
aagaaaacagaacagaaaagagaccacaagcggcagccc

SEQ ID NO: 75196 - RNA, 82 nt, Homo sapiens
ggcggcgggagagcacagccaacggaaaaggaggaaaagaagagaagagaggccaacacaggacccgagccccaaagacaga

SEQ ID NO: 75197 - RNA, 68 nt, Homo sapiens
cggccacgagccggaggagcgaccggacgccacaagggcgcagaagccggcagagcccaagagacaac

SEQ ID NO: 75198 - RNA, 70 nt, Homo sapiens
aggaccgccggcagggaagcgccccccaaccacaacaagccacgggcccagggcaaggccagagaaggcg

SEQ ID NO: 75199 - RNA, 42 nt, Homo sapiens
ccaggacaagcgcagcggcacaggaggaagcccaaaaggaaa

SEQ ID NO: 75200 - RNA, 84 nt, Homo sapiens
cccgccagcagccgccggagccagccaacgagcgagaccccgcagaggccagagaggacaggccagaccccagcacggagcaag

SEQ ID NO: 75201 - RNA, 70 nt, Homo sapiens
gcacgcgaccgacagccacacagcgggcgggaccgcgccgacggcaggacagcggccgaagccagagccg

SEQ ID NO: 75202 - RNA, 77 nt, Homo sapiens
agaagaaacccagaggaaaacccagaacaaagcacaagggaggacaaacggacgaacgagaaacagccaggacacgg

SEQ ID NO: 75203 - RNA, 81 nt, Homo sapiens
aagcagcgcccgcgccgggcccggaaagcgccgcccagcagccgcaggcccacgaagaggacgccagggccggggcagacc

SEQ ID NO: 75204 - RNA, 71 nt, Homo sapiens
ccagacagagaaagcagacacgaacaagccgagcgaccacccaggggagaaggggagagggaaaggaggga

SEQ ID NO: 75205 - RNA, 81 nt, Homo sapiens
ggagagaccaaccgaagcggcggcaggggccgcggcccggagcgaaaaggcaaaagcgccagcggacaagccagagaagga

SEQ ID NO: 75206 - RNA, 74 nt, Homo sapiens
ccgcaggcacccggacaagcggaaggcagcaacaaccacccagggagaaaaacaagaggacagacaccagaaca

SEQ ID NO: 75207 - RNA, 49 nt, Homo sapiens
aacccagaaacaagcggccacagcagggcggagcgcgaggcaagaacgc

SEQ ID NO: 75208 - RNA, 49 nt, Homo sapiens
ggaaggacgggcgcgcgaacgcccaggggcagcaaaaccaccaggcgga

SEQ ID NO: 75209 - RNA, 54 nt, Homo sapiens
caaaagaaagggggacggcaccgccgagcgaaaaccagaaggcgagacagcaca

SEQ ID NO: 75210 - RNA, 82 nt, Homo sapiens
cggaggacgagcccgggagcgacccgcgcaaacaaacagaggcaggagagcggcgacaaaaaggaccggagcacaccccaag

SEQ ID NO: 75211 - RNA, 89 nt, Homo sapiens
cgggaggaccgacgcagccagacggagaaagaagaacaaacacaaaacacacaccgagcagaacagagaagagaagaaaagagcagaca

SEQ ID NO: 75212 - RNA, 88 nt, Homo sapiens
cgcggcgcgggcgcagacggcgcgaggcgcgggcacaggcagaggggaggagacacgaagcgacgcagagccagaagggaggcaggga

SEQ ID NO: 75213 - RNA, 58 nt, Homo sapiens
gcaggggcggaccccacaccacgggccgcagaaaaagaaggaacccacacacaccacc

SEQ ID NO: 75214 - RNA, 56 nt, Homo sapiens
gcacaaacgagaaaaaggaaggagcagcagaacgaaaagacgggagcagaacacga

SEQ ID NO: 75215 - RNA, 57 nt, Homo sapiens
cggccgcacccccgccccaggacaccagaggaccagaacccacgagaaacagacgag

SEQ ID NO: 75216 - RNA, 81 nt, Homo sapiens
aggagacacaagaagcggaccaggacggaaaaaggacaaggaggaaagaaacgcaccacacggacagcccggggaagcgga

SEQ ID NO: 75217 - RNA, 78 nt, Homo sapiens
aaccccacggagaaccagaggggacgaaaagaggaagaccgaaaaaaccacccaaggcccccaaaggaccaagagaga

SEQ ID NO: 75218 - RNA, 79 nt, Homo sapiens
cagacagcggccaaggagcgcaacgaggagggaggaggcacaccgagcccgagggcggggacagagagcaccagcaccc

SEQ ID NO: 75219 - RNA, 76 nt, Homo sapiens
cgcaccccccgccacccaaagccgaaggagggccgccccaaccgggggagaagggaaaaagcgcggcaaagcgcgg

SEQ ID NO: 75220 - RNA, 77 nt, Homo sapiens
agaccggaccgagagcggaccgagagcgcgaaacgcacgagaagccccagggaacccgagaaggccaacaaaagagc

SEQ ID NO: 75221 - RNA, 78 nt, Homo sapiens
gggacccggagacggggcgccgcagccgggaacgcaggccgcggggggcagacaaccacgcgcggcaagccaccccgg

SEQ ID NO: 75222 - RNA, 71 nt, Homo sapiens
accgcaggcccggacgccgccaagaccgcaggcagaggaaggcaaggcccaagcaggaggaccccaccccc

SEQ ID NO: 75223 - RNA, 77 nt, Homo sapiens
cacacccccagaagagccgaagggcagcgcaccagggaccggcaagaaagagagaacagaagaagaacagaacggga

SEQ ID NO: 75224 - RNA, 72 nt, Homo sapiens
gcacaaaccacgccgagaagcagacaagcaagagcgagacacaggagaacgacgagaagaacaaagacagac

SEQ ID NO: 75225 - RNA, 71 nt, Homo sapiens
cacaggaacaagaaccagggagaagccgcccgaacaccagaccgacacaaggacagagcaccaagaccgaa

SEQ ID NO: 75226 - RNA, 75 nt, Homo sapiens
cgcacccagccgccagacaccagaggccccacgaccagacgaaaaccacagccggagagaagagccgaaaagcca

SEQ ID NO: 75227 - RNA, 75 nt, Homo sapiens
gccgccgccgccaccgagccgccgcaaacacaggggaaacacgagagagcaacagccgacagagcggcaccgacc

SEQ ID NO: 75228 - RNA, 79 nt, Homo sapiens
gggcacaaaaaccgacgagccagggcccagcacagaagacagcacgccaccagaacagagacgaaaaaacacagcagcg

SEQ ID NO: 75229 - RNA, 74 nt, Homo sapiens
acaaagaagaggacagaagaaaagagcgcccacacagaggaggagggcagcacagccaggaaccagaacacgca

SEQ ID NO: 75230 - RNA, 75 nt, Homo sapiens
agaagaggcacgcaagcgaggagagacgaggcacacggccggaaggagagaaagaacaaagacccgacagcaaac

SEQ ID NO: 75231 - RNA, 65 nt, Homo sapiens
agacgaccagagacgcgcgcagggaacaggaaaggcccacgcacaggagaagaggaacgccccgg

SEQ ID NO: 75232 - RNA, 73 nt, Homo sapiens
cgacgagaagagagagaagggagagagaccaaagacgagagagcggggacgggaaagagggcagaagcagcaa

SEQ ID NO: 75233 - RNA, 78 nt, Homo sapiens
caaaggcagaaaagaagcccagaagcgcagggggagccaaggaagcagacacgagcacaagccacccgcgcggcgccc

SEQ ID NO: 75234 - RNA, 68 nt, Homo sapiens
ggccgccgcccgcagaaacaggcccccccccaaccacagggaaggccccgagcaagggccggagcccg

SEQ ID NO: 75235 - RNA, 80 nt, Homo sapiens
aggccgagagccggaacaaacgagggcccgggaggaccgacgcagccagaaagccagaccaacgagcgagcacgcgccaa

SEQ ID NO: 75236 - RNA, 73 nt, Homo sapiens
agaaaggggaaccccggagaaaaggccaagaaggcaggaaggcccgccgaaggagaagggcaggaagacccag

SEQ ID NO: 75237 - RNA, 81 nt, Homo sapiens
cggagcagccaccacggagccagccgggcccggcagccaaggagggcacaaagccccggagagacaccgaaccaccagcag

SEQ ID NO: 75238 - RNA, 87 nt, Homo sapiens
ccgcccaagccgcacagccgcggcggcagcagcaggagaggggcacgggccccaccccaccgccagacaggccccccgggggccccc

SEQ ID NO: 75239 - RNA, 59 nt, Homo sapiens
gaaacacgagcacgccggacaggaggaacccggacagagagaggcagaagaaaaagcac

SEQ ID NO: 75240 - RNA, 75 nt, Homo sapiens
gccgggcgcggggccaacagcggaacccggaccacgcggcgaccggagcccgagcagcaggcgcggacgcggcgc

SEQ ID NO: 75241 - RNA, 73 nt, Homo sapiens
gggaacacccacccaaagggacgaaggagaagaaggaggagaggagcgggggacaggagaccaacggcgagag

SEQ ID NO: 75242 - RNA, 69 nt, Homo sapiens
cgaagcccccgcaggaaccacaacccaaccaggaaaaacggcgcagaacaacccggcgcacaaggagca

SEQ ID NO: 75243 - RNA, 73 nt, Homo sapiens
gggaacgaccgcccagccgcacaagcagcccgccgacacagccaccaagaaggcacaagcagaacgggaaaag

SEQ ID NO: 75244 - RNA, 77 nt, Homo sapiens
cccgccgggcgagcaggggcgccggcccgaggccgcgcgcggcgcccgcggggaaggacagaagcccccagcaacgc

SEQ ID NO: 75245 - RNA, 78 nt, Homo sapiens
cccaggccgcaccagccccggacccgcccccccagccccggcagagcagccagcaggaaagaccaccccgacccaagc

SEQ ID NO: 75246 - RNA, 79 nt, Homo sapiens
cccaacgcccacaacaaggcggcggggacgcacccacaaaagcgaaaagccagacaggaacaccagacagaagaacgcc

SEQ ID NO: 75247 - RNA, 73 nt, Homo sapiens
gccaacaaaaaaaggaccccgaaaaagcaaggaacagaagccaccgcaaaaacccggaccgacaggaaagaag

SEQ ID NO: 75248 - RNA, 67 nt, Homo sapiens
acacagaaccacacgcccaagggcagcaagaaagggaagggcagaccagaagaagccccgaaggcaa

SEQ ID NO: 75249 - RNA, 83 nt, Homo sapiens
cgagccgggaccaggcccgggggcggcggccacgccaaggacgggaaacggcaaaaggcgccccacaaagaggaaaaccaaag

SEQ ID NO: 75250 - RNA, 73 nt, Homo sapiens
gcagaaggaaccggcaaagcgcaggaacgggaacgcaggagcgaccaggagccagaaggcccggagaccgaag

SEQ ID NO: 75251 - RNA, 70 nt, Homo sapiens
caagaaagcagcaaacagcgaccgccaagagacacacagggcaccagaccgggccagaggacaccagaga

SEQ ID NO: 75252 - RNA, 86 nt, Homo sapiens
gagaccaagaggaaggggccagcccgcccaggaccacccgggacccacggcagggcaaccccaccgcggaaggcaggcacacagac

SEQ ID NO: 75253 - RNA, 75 nt, Homo sapiens
cggaccggcagggaggacaggccaggccggcggggcccggaaacacaacccagaaaggggaaagaccaacgggag

SEQ ID NO: 75254 - RNA, 40 nt, Homo sapiens
ggcagagaggaagaagaccccacgccagcgacagcccacc

SEQ ID NO: 75255 - RNA, 57 nt, Homo sapiens
aagaggaccggacccgccaggcccgagccaagaagagcaaagggaagagccacaaag

SEQ ID NO: 75256 - RNA, 39 nt, Homo sapiens
cccaagcagcgccgcacccggggacaagagcgggcagaa

SEQ ID NO: 75257 - RNA, 80 nt, Homo sapiens
caagaaaccacaaaggccgggggcacaggagggaaaaaggagaggcccacgggaagggaaaagcacaaaggcagagggaa

SEQ ID NO: 75258 - RNA, 53 nt, Homo sapiens
aggcccagagggcgggccggaacgggagcggcaaagacaaagaggggagagca

SEQ ID NO: 75259 - RNA, 71 nt, Homo sapiens
cacccacaaaaccaaagagaggccagccccacgacgcagggcggcaaggaccgggagaccagcggccaggg

SEQ ID NO: 75260 - RNA, 82 nt, Homo sapiens
caaagaacagaagcaaggaagcgggcaagagaggaagaggagagaagcccacccaaagaaacaggacccggagggacccaca

SEQ ID NO: 75261 - RNA, 83 nt, Homo sapiens
ggagaagcccagaaaaaagcccagcgcggcgcggggcgcggagcgccggagccgcgcgcggacaccccccaggcacagccaca

SEQ ID NO: 75262 - RNA, 74 nt, Homo sapiens
cacccaaaaaaacgacagaacccaccagacaacacacgggaagagcaagaccagaggaaagaacaaacaggaag

SEQ ID NO: 75263 - RNA, 76 nt, Homo sapiens
gaagacagcccggacaccgacagcacagacagaacccgcaccagggacaagggaaaacaacagggaggaaaaaggc

SEQ ID NO: 75264 - RNA, 70 nt, Homo sapiens
agccccgaccgagagaaccagcgccagagccgcacggcgagccacgcgccggagcccgcggcggcccggc

SEQ ID NO: 75265 - RNA, 70 nt, Homo sapiens
aagagaagccagagcaacccaaaaagcaaggaagagccggaagaccaagcaacagacaccgaaaacccga

SEQ ID NO: 75266 - RNA, 80 nt, Homo sapiens
cacggacaggcgccggaagcacccaacagacgagagcaagagcgaggaggagagcgaggaagaggaagaggacaggagag

SEQ ID NO: 75267 - RNA, 68 nt, Homo sapiens
gccaagccccccccgcacccccagcccccccaaaggggaggcgccggcgggaaccacacaggggcccg

SEQ ID NO: 75268 - RNA, 92 nt, Homo sapiens
ccccgggccgggagaagcggaggcccgacgggcgcggccccgagacgggacgaagcgcgagcgaggcccagcccggcgggcgcagcgcggag

SEQ ID NO: 75269 - RNA, 71 nt, Homo sapiens
cagcagagggagacaccccacccgcggaaaaacaagaagagccaaagcccaggacggggaaacagcagaga

SEQ ID NO: 75270 - RNA, 64 nt, Homo sapiens
cgggcggcgaccggggccgggccacgccgagggcaggacgaaccaccagccaacaggcagacca

SEQ ID NO: 75271 - RNA, 102 nt, Homo sapiens
ggagccgccgccgccaagcccggcccggcccgacaccgcgggccgccagacgggaaggagagggccgaggcagacaagggaaaggccgcgcaggggaccacc

SEQ ID NO: 75272 - RNA, 92 nt, Homo sapiens
agaccaccgcccggagaacccaacgaaaaccgggagcagaaacccacgagcgaacaccggagccccgcagggcgggagaggaggcgagcggc

SEQ ID NO: 75273 - RNA, 76 nt, Homo sapiens
cgaacccccccccccgggagaaaggccagagcagcacaggaaccgcaaaagaggaacagacacagcccagacgaag

SEQ ID NO: 75274 - RNA, 78 nt, Homo sapiens
ccagaaaaccagacccacccgcaccggagcaccaacccgcagcggcgggaccagagagaaacagacacagagcagaga

SEQ ID NO: 75275 - RNA, 53 nt, Homo sapiens
cagacgcagggcgcccccggggccggaagcccccggccgcccaccgccaggag

SEQ ID NO: 75276 - RNA, 74 nt, Homo sapiens
agacagccaggcaggcaagaaacaagaccacgggagccggggccagagagcagacagccagcaggggccgagag

SEQ ID NO: 75277 - RNA, 56 nt, Homo sapiens
gaaccgaaagaagcggaaagcagaagcgcgcagcaacggcgggcagcgagcccggg

SEQ ID NO: 75278 - RNA, 69 nt, Homo sapiens
caccgaaccgacagcgacgacaggcaaggaggggcaggagcacacccccacaggaccccccacagaagg

SEQ ID NO: 75279 - RNA, 70 nt, Homo sapiens
gccgccgagcagccgccagccccacggacggacgccagccccacaacagagaggagccaagcccaacggg

SEQ ID NO: 75280 - RNA, 79 nt, Homo sapiens
acccaaagcaccaagaaagaggcccaaccaaagacagggagacgaggcggcccaccggcacggggaagacgcccgcaaa

SEQ ID NO: 75281 - RNA, 73 nt, Homo sapiens
ccacgaagaaagaagacaaaccaagcccgggagcagccaacagcagaagacgaccccggggacaaacgacgga

SEQ ID NO: 75282 - RNA, 80 nt, Homo sapiens
cgagcgcgccgcccggcgccggcccgcccccgcagcagcgccaggcagagaaagcaagagacgcaaccgaacgcagagcg

SEQ ID NO: 75283 - RNA, 75 nt, Homo sapiens
gagagcgcacgacccagccgccaggaaaaaggggaaacagagaaccagcaaagaggaccaaaaggaaaccgggga

SEQ ID NO: 75284 - RNA, 80 nt, Homo sapiens
gggagcgcgaacgagcgacggcggaacccggggccgggacgcagcccggcggcagcagggggagaggcaccagcaacaga

SEQ ID NO: 75285 - RNA, 63 nt, Homo sapiens
gggacccggacaaccagaggcagccagcagggggagggggcagacccaaaggaaacgcacgaa

SEQ ID NO: 75286 - RNA, 73 nt, Homo sapiens
gccaggagcacagaagagcgaggaggcagacggcagaaaacagacgaagcaacagcgaacaaaaaagggacag

SEQ ID NO: 75287 - RNA, 78 nt, Homo sapiens
cgaacggggcgcccaggccgcccgacccaaagggaaaacagaaacagagcacagcaaggaggaaacagcaagggaaca

SEQ ID NO: 75288 - RNA, 84 nt, Homo sapiens
caagcgcccagaagcaaccgcccacagcacggcggggccgcccagcgcaagagaaagggaagcgccaaagaagcgacgcgaaag

SEQ ID NO: 75289 - RNA, 57 nt, Homo sapiens
cacaacaaccaagaaaaacgggggccgccgccaagggccaagccgcccgccaaccgg

SEQ ID NO: 75290 - RNA, 75 nt, Homo sapiens
cagagaggcaacgaaccggccacgggacccgagcgaccagaaagccaacggcccacggccagaaggcccaaacgc

SEQ ID NO: 75291 - RNA, 62 nt, Homo sapiens
ccccagggggaacggcaagagcaaccaacagacaaccaaaagaaggcaaagaaaaagggccc

SEQ ID NO: 75292 - RNA, 43 nt, Homo sapiens
cgcgggagccgcacgggccaagaggaggcgcgggacgaccggg

SEQ ID NO: 75293 - RNA, 78 nt, Homo sapiens
cccggagcaggagaacagacagacacagagaaccgcccaacagcaggaccacagaaaccccgacccagcagggccaaa

SEQ ID NO: 75294 - RNA, 80 nt, Homo sapiens
cgaaaacggaaagggaagggacgacgcagcagaaagacagccgggaaaggagaagggaagccgcccccgacacgaggcgc

SEQ ID NO: 75295 - RNA, 74 nt, Homo sapiens
cggcggagcgcaggggagaaccggaagggaagaacagacacagcaccgacacgcgcaaaagcacgacaggaccc

SEQ ID NO: 75296 - RNA, 66 nt, Homo sapiens
gagacagcccaaaacccggaagagcgccccaggagaaacaaggcacacaaagcgggaaagggaaag

SEQ ID NO: 75297 - RNA, 48 nt, Homo sapiens
aggaaagaagggggaacaacgaggaacaggaaaagggaggcaaagaca

SEQ ID NO: 75298 - RNA, 78 nt, Homo sapiens
cacagccccgaggagccccaaacagagcccagccaagccagaaccaggggcaacagacacagccaccacaaggagggg

SEQ ID NO: 75299 - RNA, 76 nt, Homo sapiens
aagagcacagcacacaccgcccggcgcggaacccggaaggcgacggcggcgcggccgccccggagggcacgcagcg

SEQ ID NO: 75300 - RNA, 80 nt, Homo sapiens
ccaaaaccagcaccaaagagaaagcagaagcaggcaccagcagcaacacccacaggaccgcgaacaaggaggccacaaaa

SEQ ID NO: 75301 - RNA, 79 nt, Homo sapiens
ggcccgcgcggagcggacgcgcgggcgcgcccgagggacggaaacagacgacgacacggacaggacggcggacagggcg

SEQ ID NO: 75302 - RNA, 73 nt, Homo sapiens
ccccagccgcagccacaacaccggcaggaaccaccaggacagaaggaccacacaccccgaccacagcgcaaca

SEQ ID NO: 75303 - RNA, 72 nt, Homo sapiens
cccccgggcgcgggcgaggccgggcggcgccgccccaccggacccgcaggccagcacaaagcgagaaggagg

SEQ ID NO: 75304 - RNA, 83 nt, Homo sapiens
ccgcgccgcgccgcgccgcaccccgagcgaccggagcggaggaccagaagaagcccccccaaccgcggaaccgccagcgagag

SEQ ID NO: 75305 - RNA, 75 nt, Homo sapiens
gaaacccgcccgccgcggccgcgccccggcccgcgggaagcaggacgcgccgcgccccaagaccagacaaaggga

SEQ ID NO: 75306 - RNA, 66 nt, Homo sapiens
aacggagaaggaaacaaccccaaggaccagacaggaaaagcgagaaacaaacacaagaggggccag

SEQ ID NO: 75307 - RNA, 73 nt, Homo sapiens
accgagcccagccggcaggccgcagggaaggaaccagaggaaagccccagaagcaaagagaggagaagaaagg

SEQ ID NO: 75308 - RNA, 109 nt, Homo sapiens
cggaaacgacacgaaaaaaccggagagaaagaaagaaaagagcaggacagggaacaaaggcagagaaacgcaccccagagcaggacacaagacaaaacccgccaccagc

SEQ ID NO: 75309 - RNA, 92 nt, Homo sapiens
cgcggcccggccccgcggcccgcgcggagcggacgcgcgggcgcgcccgggagaccaaaccggaaacaacccgaacccacaggaagaagcca

SEQ ID NO: 75310 - RNA, 55 nt, Homo sapiens
cccgcggaaaggccccgcaacagggccccaacaccaagaacagagagcacaagca

SEQ ID NO: 75311 - RNA, 65 nt, Homo sapiens
ggcggaccacggccgcagcacgcggcccccaggcacgaagcgaagaagaggagagaagcagcggc

SEQ ID NO: 75312 - RNA, 74 nt, Homo sapiens
acacagagagacagcagagccgcgaaacaaaagaagcagaggagagcagaagaccggccccacaccagaagaaa

SEQ ID NO: 75313 - RNA, 78 nt, Homo sapiens
accgaaacaaaaaaagaacgcgcaggcaggaagaaaggggacacggccggagacggggaggcagacagcgaagaacag

SEQ ID NO: 75314 - RNA, 86 nt, Homo sapiens
ccgcccggcagccaccccgcgggaacggggcaagaaggcaaagcccgcagaggcccaccgacacaacggacggagaagggcggcgc

SEQ ID NO: 75315 - RNA, 81 nt, Homo sapiens
agggcagacaagacccggagggcgagccggcaccagggcccagaaaaagcggggaaggggggcaaaaaaaagaagcaagcg

SEQ ID NO: 75316 - RNA, 82 nt, Homo sapiens
acccagcccccccgcgaacgcccaagggagacccagggagaaacaccaggaagacaggaagaaaccccagccacaaaagacg

SEQ ID NO: 75317 - RNA, 62 nt, Homo sapiens
aggagccacaaggacgggaagcaccaaagcgcgccaagaccgagagcggcccaggaggaaca

SEQ ID NO: 75318 - RNA, 79 nt, Homo sapiens
accagcccaaaagcagcaaagaacaccaagacggcgaccacaggaaggacacaggcagagacgaagagaccgcagaagc

SEQ ID NO: 75319 - RNA, 85 nt, Homo sapiens
gaaagcagaagaaaagggacgcaagaaacccaggacgagaacagcaacagccggagggaaaagaaacggaggaagcaagagaagg

SEQ ID NO: 75320 - RNA, 76 nt, Homo sapiens
gcggcacacacgacgggcacagggaaccaccaaagaaaaaacgccacgcaagacgaaaaggggaaaggagaaagaa

SEQ ID NO: 75321 - RNA, 81 nt, Homo sapiens
aggcgggccgccgagcggacccggaccggggaccacaggagcagcaacccagccccggaaccacgccaggggaagaaacga

SEQ ID NO: 75322 - RNA, 61 nt, Homo sapiens
gacaccaaccaggacagaaacaacagccaccagcagccagacgccccgggcacgccaggag

SEQ ID NO: 75323 - RNA, 51 nt, Homo sapiens
accaaaggccggaggcaccacaacacaggaggcgcggaggaggaggaggaa

SEQ ID NO: 75324 - RNA, 79 nt, Homo sapiens
aaagcccacgcagacaggcgaagaccaaaggaaggaggagcaccaccaaagagcagcgaaggcagccggaggaagaaga

SEQ ID NO: 75325 - RNA, 43 nt, Homo sapiens
ccaacgagagccagagcccgggcagccgccgagaccaggcgcc

SEQ ID NO: 75326 - RNA, 69 nt, Homo sapiens
gggagcaaaagcaccccgcaccaacgagaagaggcgggagcaaaccagcagcccccacacagcaagagc

SEQ ID NO: 75327 - RNA, 72 nt, Homo sapiens
caaagccaagagaaaaagcgaagcgaaccccacaaacgggcgcaccgccgcccagcagcaagacggcggccc

SEQ ID NO: 75328 - RNA, 68 nt, Homo sapiens
aggggcaggacaggaggcgcaaaggaccgggcaaagaaaacacaaccagcggaaccgggagggaacag

SEQ ID NO: 75329 - RNA, 78 nt, Homo sapiens
cgggacgccggagaggcaggcgcggcccgcggggcgccaggcacgcgaggcccccagggaaggggcgagagaaaaaga

SEQ ID NO: 75330 - RNA, 76 nt, Homo sapiens
gcacggcacgacaccgcaagaagagaaacggacacagaccacgcgggacagaaaaggacgagagacccgacaaaac

SEQ ID NO: 75331 - RNA, 55 nt, Homo sapiens
ggcagcccgaaccagccacaaagcaaaggccccgggggcgccgagggcacaaggg

SEQ ID NO: 75332 - RNA, 87 nt, Homo sapiens
aaacacgaggcccggcccagagggacaacgcgccccagaccaccggcagggaacagccgagcagaccgaggaggcccaccagcagac

SEQ ID NO: 75333 - RNA, 68 nt, Homo sapiens
ggaggaacaggccaggaaccgggcccagggggcaaagaggggggaacccaaaagacaaaacgggaagc

SEQ ID NO: 75334 - RNA, 70 nt, Homo sapiens
gacggacgagagggagcaccacagaggaaggaagggcgacaaccagaccgggacccgccaaaggcacaga

SEQ ID NO: 75335 - RNA, 72 nt, Homo sapiens
gacagagggcagccccgccggccgcaggaaaccaaggcagggggaaagagggaaggagaacagagggaaaaa

SEQ ID NO: 75336 - RNA, 71 nt, Homo sapiens
cccgacaagaaaacaccacaaagcaccagaaaaagggaaccagcaggcggcggagaaaccaccacaaacac

SEQ ID NO: 75337 - RNA, 31 nt, Homo sapiens
gccacaaccaagaaaggaggagggagacagg

SEQ ID NO: 75338 - RNA, 71 nt, Homo sapiens
caaccgggagcccaggaagcgcagacacagcccaaggcaccggaaggaagaaagagccccccggccccccc

SEQ ID NO: 75339 - RNA, 76 nt, Homo sapiens
cacacaaggcggaggacccgaacgggggccacccccgcaggccccacaggacaaaagagagaggaggcaagcaacg

SEQ ID NO: 75340 - RNA, 32 nt, Homo sapiens
ggaccaagaaacgaggaggagacccaagcgac

SEQ ID NO: 75341 - RNA, 69 nt, Homo sapiens
gggaaaagacacaagccgaacaccgacgaagagcaaggaagagcggggcccggcgcacccaccaccgcc

SEQ ID NO: 75342 - RNA, 71 nt, Homo sapiens
cgcggcagggagcgcgggggcccgcgcagcagcgaccacgggacaagagaaaaaaagggcgggcgaacaaa

SEQ ID NO: 75343 - RNA, 93 nt, Homo sapiens
gcccgaccccgcccgacccggccgccccgagcggagccggagccggaaccaaaaagaagccccagagccggggccaggagccccaagcgcccc

SEQ ID NO: 75344 - RNA, 72 nt, Homo sapiens
cgccggaggccgagcggagggaaaccccaaagagaggagaaacagcgacgacccaaaggggaaacgggagca

SEQ ID NO: 75345 - RNA, 74 nt, Homo sapiens
ggcgcaaacggaccgggaggaaacaaaccagcggcgggccagagaagcagacgcccagcgaacaagcaggagga

SEQ ID NO: 75346 - RNA, 74 nt, Homo sapiens
gagaacagccggaaggcacaaggacaaacccacccacaaagggggggaaaggacaccaagcagggggcggcagc

SEQ ID NO: 75347 - RNA, 78 nt, Homo sapiens
acgcggaccccgaagccgcaacccggggagggcccgcggcgcgaggaagaggagaaggaaccgaacacaaagaggaag

SEQ ID NO: 75348 - RNA, 58 nt, Homo sapiens
cccaaccagccaaggacccacggggaacagggcgagacgaacaacgcgcgcaggagac

SEQ ID NO: 75349 - RNA, 74 nt, Homo sapiens
aagagaccaccaaacaggcggcaggcacagaacgaaccaaaaaggaaaggacccacaaagacagaaagagaaca

SEQ ID NO: 75350 - RNA, 82 nt, Homo sapiens
cacaggaccagaccaagacacacaaccaaacaggagaaaaaggagaaagacagcaaagaaaaggagaagaaaggaaaaaaac

SEQ ID NO: 75351 - RNA, 42 nt, Homo sapiens
cagcagcgcccacaaggagcggaagaggcgccgcgacgggaa

SEQ ID NO: 75352 - RNA, 80 nt, Homo sapiens
aggaggcccaaggcagcccgggggagggaggagagaagcgaaggaccgagccaggagacacgagccggagaggaggccgg

SEQ ID NO: 75353 - RNA, 88 nt, Homo sapiens
gcagcagaggggccacgcgggcccgaggcgcaccaagggcgaaggagccggcccaagggcagcacgcgaggaaacgcaagagacgagg

SEQ ID NO: 75354 - RNA, 68 nt, Homo sapiens
gccccacaccacccccggaaccagacacaaagaggaagcccacacagaacgaacaaaaagaaaacaag

SEQ ID NO: 75355 - RNA, 77 nt, Homo sapiens
acacaaaagaggagaaaaccgggcgcagccgacagcggcaaacgaagccaccaggcacaggcacagcgaccaacaga

SEQ ID NO: 75356 - RNA, 68 nt, Homo sapiens
gaggagcccggcgagaagaggagaggggaagaacaagaagcacacacaaagaaagaagacccggccag

SEQ ID NO: 75357 - RNA, 76 nt, Homo sapiens
gcagccacaacaccggcaggaaccaccaggacagagaaacagagcaaagcagcgacaacaaagacagaggaagaaa

SEQ ID NO: 75358 - RNA, 107 nt, Homo sapiens
gggggcgcaggaccggccgcaggccaccgacacgagacaaccgggagccgggccgccacccggaaaaaaacacaagaaagaaccagaaggagaaacaagcaaccacc

SEQ ID NO: 75359 - RNA, 60 nt, Homo sapiens
ccgcggaccgccagccaacagagcacaacaggcgaaccccaaaggcccgcgaggcacagg

SEQ ID NO: 75360 - RNA, 50 nt, Homo sapiens
cggagaggaagccagccaccagccaggcaaggggaggaagcacaagaccc

SEQ ID NO: 75361 - RNA, 69 nt, Homo sapiens
ggagacccaacaaaggcccagagacggagacagaggaagacgcgagaaacaacgcagacgaggaggagg

SEQ ID NO: 75362 - RNA, 85 nt, Homo sapiens
acggaaagacagaacaacacccaaaaaaggaaggcaacaggaagacagacagggccgcgccacacaggcggaggcaaggcacagc

SEQ ID NO: 75363 - RNA, 83 nt, Homo sapiens
ggaccaagccagcaggccacaccacaaaggaacggcaggcccagagcaccccaagacggcacccgggcccgaggcagaccaca

SEQ ID NO: 75364 - RNA, 84 nt, Homo sapiens
ggaaaggcgcgagacccagaggccgcggccgcgggacgcacaccgagacgaacacagaacagcacgaccagaggggaagccaag

SEQ ID NO: 75365 - RNA, 58 nt, Homo sapiens
acaagcaggccgggagcggggagacggggacgcaggagccaggacacaccggacaagc

SEQ ID NO: 75366 - RNA, 86 nt, Homo sapiens
agagccgcgagcgcccggccgaacccgcgaggaaaagcccagcggcccgccaggcccgacgaagacagcagacacagccaccccag

SEQ ID NO: 75367 - RNA, 82 nt, Homo sapiens
gagaaacaagcagaccagcacgacacgacccacgaaacagggagggaggagaaagagaaggaaacccacagacccagcaaag

SEQ ID NO: 75368 - RNA, 81 nt, Homo sapiens
gcgaacgagccacagggacccagcaaaggagagcaggagaaaaacggcagcaggacccacccgaggacgggcaccaggcgg

SEQ ID NO: 75369 - RNA, 70 nt, Homo sapiens
cgagcgcccccgccagggccgaccagaccaaggagccaaacaccaaggccgcaccgagcgagagaccagc

SEQ ID NO: 75370 - RNA, 80 nt, Homo sapiens
cgcggggaccaagggcaacgacggacacgagcgcacgccgaaaacaggccgcaagagagacaagcagaccggaagaccga

SEQ ID NO: 75371 - RNA, 71 nt, Homo sapiens
gcaaggcagcggaaagcccccccgaagaagaaagaacacacaaagggaagagaaacaggagaagaccaaac

SEQ ID NO: 75372 - RNA, 77 nt, Homo sapiens
aggagcggcgggcccacccagagggaacgccaggcgaggaaaaccaccacacaggggaaacacccagacaacacaca

SEQ ID NO: 75373 - RNA, 110 nt, Homo sapiens
ggaaagcgggaagaccacggagcggggagagccgccgcaaacccagaccgccaccaacaacaccagggacacaacagcaaggagcagaaaccgaaacaccagaaggagac

SEQ ID NO: 75374 - RNA, 57 nt, Homo sapiens
aggaagaacaagcgccagagccaaagaccacgggggccaaacaccaggagaagggcg

SEQ ID NO: 75375 - RNA, 76 nt, Homo sapiens
agaggaagaaagcacagggacgagacagaacaacgagagagagcaaaaacaccagacaagaacagggcaccagggc

SEQ ID NO: 75376 - RNA, 72 nt, Homo sapiens
caaagcaaacacccagaagaaccgaccgcccagccagcggagagacgggcagccaggccggacggcgagcgg

SEQ ID NO: 75377 - RNA, 55 nt, Homo sapiens
cccgaggagcccgaccacccacagcaacacagaagccaagagagaacacgaagga

SEQ ID NO: 75378 - RNA, 80 nt, Homo sapiens
caagagcgggagcagagaaaaagagcggcgaggaacccagaaacaagaggacgccggacgagagaaggacagcgaaggga

SEQ ID NO: 75379 - RNA, 41 nt, Homo sapiens
accaggacagcacccaacagcccaaaagccaggacgcaaac

SEQ ID NO: 75380 - RNA, 67 nt, Homo sapiens
cgacaagcggcaaacgagaagacggagagcagcgccaaggaggaccgaaggagaagaaggagaaggg

SEQ ID NO: 75381 - RNA, 72 nt, Homo sapiens
agcaagaaggagagcaagaccgaaaaaagagcgagaagcgaaaacagagggaaaccgccgacgcgcacccca

SEQ ID NO: 75382 - RNA, 83 nt, Homo sapiens
agacgcaacaggagagagcaccgcccggggacagaccaaggaaacaggaaccaaagaaccaaaaccaagacccagccaagcag

SEQ ID NO: 75383 - RNA, 85 nt, Homo sapiens
aaaaaccagaagggccgaccagaaaggaaccccaagcgacgcaggcagaagcgagacggcaaggccgcgggagagcgggggcggg

SEQ ID NO: 75384 - RNA, 45 nt, Homo sapiens
acaccaagccaagaaggacgggcgcaaagccagaccagacggacc

SEQ ID NO: 75385 - RNA, 61 nt, Homo sapiens
accccgagaaccgcaggagccagaggaagggaccacagaccagcacgccggcgccacgaac

SEQ ID NO: 75386 - RNA, 79 nt, Homo sapiens
agagaaccccagccccgccacggcaccaccgccaaccaggcaacggggccaccaaaaagaagagacgccaacagaccgg

SEQ ID NO: 75387 - RNA, 87 nt, Homo sapiens
agacggaggaggggcggccaagcgcggaagccgaaaagacgaggcgaggaggcgagacacccaacccaccccaccccggagggccag

SEQ ID NO: 75388 - RNA, 102 nt, Homo sapiens
ccgcccgggccagcggccgcgcacccccggccggaggcaccagcggaaagcaggcaggagggagagcgccgaagaaccaccccccgccccgggcgggggaag

SEQ ID NO: 75389 - RNA, 76 nt, Homo sapiens
gagacaaagccagcacccaaaggagcaacagacagcccccagaacagcaccagacgcccaagcagcccagaaccgc

SEQ ID NO: 75390 - RNA, 78 nt, Homo sapiens
ccaagacgcgcggccaagcagaaaggaacagaacgcggccccagccacaccaagcaggaggcacccgcccccgcgccc

SEQ ID NO: 75391 - RNA, 71 nt, Homo sapiens
agcgagcccccaccaagacaggcgcggcagcacacaacaacaggcggggagaaagaaaagaaccggccgga

SEQ ID NO: 75392 - RNA, 74 nt, Homo sapiens
acacgaaagagaagccccggagagccggcggcacgacagcaaaagccagggcacagggccgcaccccagcggag

SEQ ID NO: 75393 - RNA, 76 nt, Homo sapiens
cagcaagggacgcgaaaaagacaagagacgaaaggcaaaagcaaaaccaacagaagggagacagcagaaagagaag

SEQ ID NO: 75394 - RNA, 61 nt, Homo sapiens
caaaacacagaccgcacccccagcagaggcaggaggagcgcaccggacgacaccccgacga

SEQ ID NO: 75395 - RNA, 74 nt, Homo sapiens
cagacgccccaaccaaaacaagagaagaaaaccgaacagaaaggagcgcccagaggcggaagaaccgagccaga

SEQ ID NO: 75396 - RNA, 64 nt, Homo sapiens
agaacagcaggccagagggcaaagcagagaacccaaagcccgcaggaggcaaagcgcaacagga

SEQ ID NO: 75397 - RNA, 58 nt, Homo sapiens
gggggacggccgccagagggcagccacaaggaggaacagagacagacccgggggcccc

SEQ ID NO: 75398 - RNA, 72 nt, Homo sapiens
ggaacaaacaggcagagccaaggcgccggaggccccccggcgaagacaggcagccagcgaccccagaccgaa

SEQ ID NO: 75399 - RNA, 71 nt, Homo sapiens
caccggcgggaggaacaaaaggcacaacgaagccaaaggacgaaacaaagaagaaagacgaaaagagaaca

SEQ ID NO: 75400 - RNA, 79 nt, Homo sapiens
gcaacacggacacccacagcggggcggcggcggcggcggcgcggcccaaaaggcacccacaccaaggaggagcaccccg

SEQ ID NO: 75401 - RNA, 83 nt, Homo sapiens
agagcgagccagcgcccggagcaagcggagccccccaagagccggaaagggggagagacaaccagagcggaaagggagaaaag

SEQ ID NO: 75402 - RNA, 71 nt, Homo sapiens
gcggcggccagacagggcccaagccgaaccaagcgcagggcgacaagcgcgagacgggaggcacaggagga

SEQ ID NO: 75403 - RNA, 86 nt, Homo sapiens
ccggcccgcggggacccccaccggcagcagggacccagaacgggggaacggcacccccccccggcagccaggggcaagaaccaccc

SEQ ID NO: 75404 - RNA, 112 nt, Homo sapiens
aggcggcacggagaccacaggcgacgcgcacgacgacaccgaagaacggccgcggccacgaggcgacagggccaggccaccaagccagaagagaccccacggaacaaccagg

SEQ ID NO: 75405 - RNA, 77 nt, Homo sapiens
gcagggggaggcccaccaggaggcccaggaaggggcgcagcacgcagccgcgcgacggcggagccccgcggaggacc

SEQ ID NO: 75406 - RNA, 81 nt, Homo sapiens
caggcgcacccagacacgacaccagcaccccggccccggcccgcccggggacccgagaaggaggcaaacagccggccagca

SEQ ID NO: 75407 - RNA, 48 nt, Homo sapiens
agaaaaggcacggcggggccggggagcccgggccagaccccccagacc

SEQ ID NO: 75408 - RNA, 63 nt, Homo sapiens
ccagagcccagggcaggacaccgacaggaacagggaccacgggggcacccgcaacaccagacg

SEQ ID NO: 75409 - RNA, 83 nt, Homo sapiens
gcccaggagaagcgcacgcggagggcgagcgcagacgcggggccaggggccaagacaagccagcaccagcggccaagccagac

SEQ ID NO: 75410 - RNA, 77 nt, Homo sapiens
gcgggcgccccggggccggggccaaggacagcccccccgcagcgcccgggaggacagaggggcgcaggacaagcggc

SEQ ID NO: 75411 - RNA, 78 nt, Homo sapiens
aaaggagcccaaacaaagccccagggagaggcacgaaaacagcccacgagcccagccagggggagaggacgcccgaag

SEQ ID NO: 75412 - RNA, 77 nt, Homo sapiens
gccgagcaaggagagcacacaccccagccccgcacacgagcagcgcggagacagacccagcacggacccccccccca

SEQ ID NO: 75413 - RNA, 76 nt, Homo sapiens
ggaaggagcacccaggaccaccagaacggacggagaaagagagcgaaaagcagaagcagaaacacagaaaaagacg

SEQ ID NO: 75414 - RNA, 85 nt, Homo sapiens
gggccggccgggccgggagcggccagcgagacgagagcaccagcgcaagcggcccacaagacagaccagagacaaagcaagagaa

SEQ ID NO: 75415 - RNA, 76 nt, Homo sapiens
gaggaggaagaggcggccggcaagagcggcggagcgcaggggagaaccggaaggagacaaagaccaccacaggaca

SEQ ID NO: 75416 - RNA, 78 nt, Homo sapiens
ccggcgccccggcccccgccccagcccgccggcggcggcggccgaacacaaccccagagccggcagcgggccccccgc

SEQ ID NO: 75417 - RNA, 74 nt, Homo sapiens
cgcacgcaaccccacccccgggcaagcgaccgcccagcccccaagagcggggaaaggcggaggcagggcggacc

SEQ ID NO: 75418 - RNA, 70 nt, Homo sapiens
cagaccacccgagcaagcggccaaccaccagaaaccgcccgacaggagcacaagacgaccagccggggcc

SEQ ID NO: 75419 - RNA, 84 nt, Homo sapiens
ccccaaaggccgggaacagggcggacaccaccaccacggaagcccccccagcgcccgcaggccaaccccgaagcccgcgagggc

SEQ ID NO: 75420 - RNA, 73 nt, Homo sapiens
gaacacgcaggagggcgacaaagacagacggaaaagaagagaaccgaggcccggccacagagcccgcaggaca

SEQ ID NO: 75421 - RNA, 42 nt, Homo sapiens
gagagaagagagacagaagagcaacgaagccgcggcaaggcc

SEQ ID NO: 75422 - RNA, 83 nt, Homo sapiens
agacggcaggcggcggaagcgcaggcaggcagggccaacgggggcgacccgccaggaaccaaggcacgcgcgaagggcaggcg

SEQ ID NO: 75423 - RNA, 81 nt, Homo sapiens
agaaggcacagaaaagccaccgagggcacagcccgggaaaaggcacccccaacccacgcgcagagaaacaaaggaacagcc

SEQ ID NO: 75424 - RNA, 72 nt, Homo sapiens
cccagaaagagacaacacaggaacaagcaccacagaggaggcagcacggcaggagacgaggagaggacagca

SEQ ID NO: 75425 - RNA, 83 nt, Homo sapiens
cggcggccacgccacgacccggcagggggcggcggcggcggcggcgcccgcgggcagaaaggaaggcggaggaaggcgggagc

SEQ ID NO: 75426 - RNA, 56 nt, Homo sapiens
gcagggcgcccccggcacaacggggccacagagagcagccaccaaaacacaagagg

SEQ ID NO: 75427 - RNA, 72 nt, Homo sapiens
aaggaagccccacgaagcccgggaacaccaaggcaagacggcacccagcacagcagcccccagacgaggaac

SEQ ID NO: 75428 - RNA, 61 nt, Homo sapiens
ccacacccacacacaagccgagaagccagggcacagaccggaagggaggcgggggagcccc

SEQ ID NO: 75429 - RNA, 74 nt, Homo sapiens
acaagcggagaacaaacccgcccaaccgagcaagcaggaaaaacaagggaccccaagaaaaggcccccccaaag

SEQ ID NO: 75430 - RNA, 83 nt, Homo sapiens
cggccgccgcagccaggaggccaacggaccgcgccgccaggagcgaggaggagagaaaaggaacagagagcagcgaagaggga

SEQ ID NO: 75431 - RNA, 79 nt, Homo sapiens
aaagacggccaccgaaagccagggcgaagaggagacaagcgacagagaagaagagaaccgcacgcacaggaacccggaa

SEQ ID NO: 75432 - RNA, 77 nt, Homo sapiens
agggagaacgcccacgacaagaccggcccacccagcaggacaggcaggcgggaagaacagggccaggccaagaaacg

SEQ ID NO: 75433 - RNA, 84 nt, Homo sapiens
cgccagagagcgacccggggggagcgcggggcgacgcggcgcagggacccgggacagcggagaggacgggaaaagccagccggc

SEQ ID NO: 75434 - RNA, 61 nt, Homo sapiens
gccagggacccggcaggccgcccccggcaagaacacgcgaaaggcagcagccacaccgcca

SEQ ID NO: 75435 - RNA, 65 nt, Homo sapiens
gaccaagcacgccccaaagacgaggacagagcgggagccaccagcgccaaagggaagccaggagc

SEQ ID NO: 75436 - RNA, 75 nt, Homo sapiens
agaagccaaaacaaagacaggggcggaaggcacgaaggaaagaaacagaccacaagcaccagccaaaaccagcgc

SEQ ID NO: 75437 - RNA, 75 nt, Homo sapiens
cagggcccagcaggccgaccgcccgccacgcacgagacagacaagaagaacaaggaaagagcaagagcgcgagca

SEQ ID NO: 75438 - RNA, 75 nt, Homo sapiens
gcaagagacagcgaggacagaaggaagggggcacccgaggaggaagagggcagggcccacggaaagaagggaaac

SEQ ID NO: 75439 - RNA, 78 nt, Homo sapiens
cggggaacgacgcggcgcgcgcggacgaagagccccccccccaacaccgcgacacgcaggcgggcaacacaacaaggc

SEQ ID NO: 75440 - RNA, 67 nt, Homo sapiens
gcgaaagcacacgccagcacagcgaagagagaagaagcaaaccgggaccggaagcaccaaggagaaa

SEQ ID NO: 75441 - RNA, 56 nt, Homo sapiens
ggcgcgggggacgggagcggcagccccgagaccacagcagacacagagacgggcgg

SEQ ID NO: 75442 - RNA, 69 nt, Homo sapiens
ggccccggcgcagccgggccccacgggggaggccaggcgaagagcgccaaggggagaagacagaggaaa

SEQ ID NO: 75443 - RNA, 64 nt, Homo sapiens
cgaagcgggggacacgcagcagaacaaagacggacgaaaagcgccaccagacgaggggcccaca

SEQ ID NO: 75444 - RNA, 82 nt, Homo sapiens
agacccaagccaacccaccaacacggaaaaccgacccaaaaagaaaacaccgaaggggaagcgagaaccaggaacgaagaac

SEQ ID NO: 75445 - RNA, 61 nt, Homo sapiens
ccacacccgagagcccccccggggccggcaaagcaccaggcacagcaagcgccgaaagacc

SEQ ID NO: 75446 - RNA, 84 nt, Homo sapiens
ccccaaggccggagccaacggacaggacgagaacccccgcgaaccagaggaacccagcgagcgagagcggaccagaggacggaa

SEQ ID NO: 75447 - RNA, 74 nt, Homo sapiens
caccggccaccggccaacaaaggacacacacaaggacgcccccaggccagccaaccccagcaccccagggcagc

SEQ ID NO: 75448 - RNA, 70 nt, Homo sapiens
aaaagccaagaaggcagcgcccaaaaggcaggcacacaacaaagaagaaaagggggaaaagagaaaccgc

SEQ ID NO: 75449 - RNA, 69 nt, Homo sapiens
aacgaccgaagcagccacgggagagaagaacgcgcaggagggaagagccgcaggaggagaaccaaacgc

SEQ ID NO: 75450 - RNA, 76 nt, Homo sapiens
ggaggcggaacaacaccgcgccccagggcagacaacccagagacggacacaaggacgcgacacgccagggcgcagc

SEQ ID NO: 75451 - RNA, 59 nt, Homo sapiens
cccgacacccggaagagcaggccgcagcggagagcaacgcaggcgcggccagcaaaaag

SEQ ID NO: 75452 - RNA, 76 nt, Homo sapiens
gccgaaagacacccacagcagcaaaggcagcagaagaaggaccaagaaaggcccagggaccaaagcccggacaagg

SEQ ID NO: 75453 - RNA, 70 nt, Homo sapiens
cgcaggcagacaaaagggccaaagaagggagagagcgcaagacggacaacacgaagaagcagcgaaaggg

SEQ ID NO: 75454 - RNA, 78 nt, Homo sapiens
gggcgagcggcgagccgaaaagcgagcgcgaggaaaaggcggcgggagccaaaagaagcaagggaaagaccaggagcc

SEQ ID NO: 75455 - RNA, 46 nt, Homo sapiens
aagaggccgcaaaaacaggacgggcacccaagaaaagcccgaaaca

SEQ ID NO: 75456 - RNA, 76 nt, Homo sapiens
gcagaccaggagaccacaccagaccaggagagccgaggaccaagcccacagacacacccaaagcagcccacacagg

SEQ ID NO: 75457 - RNA, 82 nt, Homo sapiens
acgcggggccaggcaggacccaacgacaggcgccccggcccaacggaaaggaacacggagcgcagaggcacagagccaagag

SEQ ID NO: 75458 - RNA, 80 nt, Homo sapiens
agcgagagaagcggcggaggacgagcccgggagcgacccgcgcaaacaaacagcgaagcacagcaaacaaggcaaggcag

SEQ ID NO: 75459 - RNA, 81 nt, Homo sapiens
agagagaaagggccacagcagcccagaacacagagccagagaaaaaaaacacagaaaggcccaagaaaccacagccagcac

SEQ ID NO: 75460 - RNA, 51 nt, Homo sapiens
caaacaacacagacccacaagcaagcacagggacacacaggaagacgaaca

SEQ ID NO: 75461 - RNA, 84 nt, Homo sapiens
caccgcagaggaggcccggcccaccgcaccgggacccaagccagcaacagggaggagcgcccccgggacccccgggcccggcgg

SEQ ID NO: 75462 - RNA, 49 nt, Homo sapiens
ccaagaggcagcagcggagaaagaaccaagaaaaggcggggccagcgcc

SEQ ID NO: 75463 - RNA, 81 nt, Homo sapiens
ccgggcaccagccagcaaaccagaggcaacgggaggacacagcaagccccacaacacgcggcgcccgcggcagcccgccag

SEQ ID NO: 75464 - RNA, 79 nt, Homo sapiens
cagccgggcaagcccccgagaagaacccacgccgacacgacgccgcgggcaggcgcgcgcacccgcacgcaagcaaaac

SEQ ID NO: 75465 - RNA, 59 nt, Homo sapiens
cggaggaagaacgccgccaccagccaccaccaaggggcggcgaaaacacccacgccgca

SEQ ID NO: 75466 - RNA, 72 nt, Homo sapiens
acggcgaccccgagcccacggcagaacaaaacgccacccaggcaggaggaccaaagagagacacacccgagg

SEQ ID NO: 75467 - RNA, 68 nt, Homo sapiens
ggggggcacccccacaacggggagaagcagaccgcaccaggcgggaccccgaaaaagcccaaacagac

SEQ ID NO: 75468 - RNA, 57 nt, Homo sapiens
ccagccagcccgcgcccgcgccgcgcgcagcgccggcccaggaacacagaccaccag

SEQ ID NO: 75469 - RNA, 88 nt, Homo sapiens
gcgacgccgggggcaccgagcgggaacgcacggggcgcgccgggcggagcagggacccaggaggaaaccagcagccgcaccgcccgag

SEQ ID NO: 75470 - RNA, 82 nt, Homo sapiens
aagcggagggcgaggaggagcagaggagcacacagagaagcagaaaaaggcacggacaggacgaggggcccgggacaggacg

SEQ ID NO: 75471 - RNA, 53 nt, Homo sapiens
cccccgccaccaaaggcccaggagagagggaaaggaagaaggagaaagacaaa

SEQ ID NO: 75472 - RNA, 80 nt, Homo sapiens
agcacagcacccccgaagggcaccgggagagcccgggaggcgccggggccggagcagcggggagagaagaagagacagga

SEQ ID NO: 75473 - RNA, 81 nt, Homo sapiens
ggcaagcggaagggagcccaagaggaccagcacaagagggccagggaccaggggacgcccaagacggccacccgcgaaggg

SEQ ID NO: 75474 - RNA, 80 nt, Homo sapiens
accacggaaagaaaccagagcaaacaaggaacggaaaggagaacggggaaaacgccaaggggcacaccaaaagcacaccc

SEQ ID NO: 75475 - RNA, 84 nt, Homo sapiens
aagaacccgccaagaagaagccccccaccaaggcaagaaggagagacccagaagacggcgaacaaaggcagagaacccaagaca

SEQ ID NO: 75476 - RNA, 56 nt, Homo sapiens
cccgacaaagcgaaagcacaccaaggaacgaaagcggcacggagaagaaggaaaag

SEQ ID NO: 75477 - RNA, 78 nt, Homo sapiens
ggagaacagagcaaagacagcaaaaaaaaggaagcacaccagagagcaagggccagagaaggaggagaaggagacagg

SEQ ID NO: 75478 - RNA, 78 nt, Homo sapiens
ggaagcggaagaaaaagaaaagcagcaacgacgagacgaaggggaccaaaacaaaacgagagcaagaggaaagaaaaa

SEQ ID NO: 75479 - RNA, 77 nt, Homo sapiens
caaggaacaccgacaaaccgaccgaccaggagccacaggcccccacagagagcacacaaacaaagcgaaaccacgga

SEQ ID NO: 75480 - RNA, 76 nt, Homo sapiens
gcaccccaacaagaggaaagacacaccaccaagaagccagcaagcggccagcaaaacaaacggagagaggagggag

SEQ ID NO: 75481 - RNA, 69 nt, Homo sapiens
cacagcagagggcgggcacacacggaggagggagccagccagagcccccccaagggaaaaccaaagccc

SEQ ID NO: 75482 - RNA, 117 nt, Homo sapiens
cacggagcgccgcggccgcacacaccaggcccacacgacagggacgcccagcccgaacgcaaggagggacaggacggaaggagcggaggaagacacaagagcgagcgaagaaggcgg

SEQ ID NO: 75483 - RNA, 35 nt, Homo sapiens
cacgaccaacaagggcaagcgggccccaagggaag

SEQ ID NO: 75484 - RNA, 78 nt, Homo sapiens
gggcggccggcgggcggggcggcggcgcgacagggacagagaagaggacggagcgaggaggggagcggagccaccgac

SEQ ID NO: 75485 - RNA, 70 nt, Homo sapiens
ggacgcggaggcccaaccgaagaaaacaagaaacagaggcggagaagagcagaccccacaaaacgcacgc

SEQ ID NO: 75486 - RNA, 65 nt, Homo sapiens
gcacgacccacgcggaacggcacacagagaaaaaaagggaacaaaacacagcaagcagacaaaag

SEQ ID NO: 75487 - RNA, 73 nt, Homo sapiens
cagagacaaggcacggagagcaacaaagccgacccaacccaagggccaaaggggccacacgcggacccggagg

SEQ ID NO: 75488 - RNA, 80 nt, Homo sapiens
gaccggaggggacgaagaacgggcacacggcccccccccagccgggaacacgcagacacgggcaagagcacagcgaccca

SEQ ID NO: 75489 - RNA, 69 nt, Homo sapiens
gaagccagaagaaagcaggacagaaagaaaccaggcaccaaagggagcaaagagaagagcaaaccaagc

SEQ ID NO: 75490 - RNA, 77 nt, Homo sapiens
cagccagccaggacgcccgcgccacacgccaccgcaggcaaccggccaccaggccgcgggagccccagcaagggggc

SEQ ID NO: 75491 - RNA, 76 nt, Homo sapiens
caccccagccccgacgcaaaacagaccaggaggagaagaagggaggcagagaagcccgaccccgaggaaccagcga

SEQ ID NO: 75492 - RNA, 72 nt, Homo sapiens
ggaccaggaacacacgacgggacaaaagacccaagcaggacacggccggaccagggggacgcgaagaagccc

SEQ ID NO: 75493 - RNA, 72 nt, Homo sapiens
aggcaccagcccgggcagcgagcgcaaaagaaagcaagaaccagaggcggagccgggggacagcaagccccc

SEQ ID NO: 75494 - RNA, 59 nt, Homo sapiens
gaagggcagaagaaaacaggaaacccgggcggggccggacggggggagaaggaaaaggg

SEQ ID NO: 75495 - RNA, 58 nt, Homo sapiens
aaggaggaagggaaccaacccacccggcgccgcggcccaaaagacgaagccaggaaac

SEQ ID NO: 75496 - RNA, 82 nt, Homo sapiens
gaagaaagcagggggacgcaaaggccaaggggcggcaaaaaggccaagggaggaaaaagcggcacagaggaagaggcccacc

SEQ ID NO: 75497 - RNA, 71 nt, Homo sapiens
cccacagccccagacggggcagagacgcaaggaagacggcgcagaaggcagaacccgggccagaaagacag

SEQ ID NO: 75498 - RNA, 79 nt, Homo sapiens
gccccagcccggggagcagacccccaccggcaggcagggccgggagcgcggaacaccgcaagagaaggaagccaacacc

SEQ ID NO: 75499 - RNA, 41 nt, Homo sapiens
gaaacaccacgaagcagccaagacaagcaggaaggacaagc

SEQ ID NO: 75500 - RNA, 70 nt, Homo sapiens
cagccaggaacaagagaaaagaaacgaggaagagaaagaagcacgaccggccaaggacacacggggaacc

SEQ ID NO: 75501 - RNA, 64 nt, Homo sapiens
acacccaggggcaaaggaagagagaagagggggaagaagcccccacccccaggacgccaagaag

SEQ ID NO: 75502 - RNA, 43 nt, Homo sapiens
gaagaggccaaggagaagaaaggggcaaagaaaaaggagagaa

SEQ ID NO: 75503 - RNA, 71 nt, Homo sapiens
gagaaagcaccaacagcagcggcagccaaggcacaagaaacagaaaccgggacagcggacccgcgggggag

SEQ ID NO: 75504 - RNA, 70 nt, Homo sapiens
gcaagggccccccacggaaaaacagcaaaagggagaaagccaaaggaaaggcacaacccagggcacaaga

SEQ ID NO: 75505 - RNA, 66 nt, Homo sapiens
aaacccaaaccaaccccagaccggagccagacagcagccaagggaaacccagacgacaaggaaggc

SEQ ID NO: 75506 - RNA, 73 nt, Homo sapiens
ccaacggagaaaaaagggacgccacccagacggacacccaaaagacaaggggccgggagaggaaggccccaag

SEQ ID NO: 75507 - RNA, 86 nt, Homo sapiens
cccgccccgcccgcagccccgggcacggcggaggcagcggagcccgggccacgcaaacgagaaggagacccaaccagccagacagc

SEQ ID NO: 75508 - RNA, 69 nt, Homo sapiens
gccaacccacaaacagaagaagccgaggcccaggccaaacacacaggaacgccagaccccagccgaggg

SEQ ID NO: 75509 - RNA, 79 nt, Homo sapiens
ccgggaccgccgccgccgccgccaccagaaacagagggaggaccaagccacagggggcccaagcccacgaaaacacaga

SEQ ID NO: 75510 - RNA, 80 nt, Homo sapiens
cggcgaacccaaagagcaagcaagacagggaagaagaccgcaacacagcaacccagaccacaaaaacagaaaggacagca

SEQ ID NO: 75511 - RNA, 75 nt, Homo sapiens
ggagcagccgaccgagccaggacaaacaggagggaacaagaaggaacgccaacgaccggagagcggccggaagag

SEQ ID NO: 75512 - RNA, 113 nt, Homo sapiens
aggcgcgagcggggaccacgccgcgcccgcaagaacggccaagaaagcccgaaaaccaaaccgacccccaccaccggcagggagcagcccggacacggcaggcgccggcccac

SEQ ID NO: 75513 - RNA, 83 nt, Homo sapiens
cgccgagagcaaaaccgccggccggaccagaccggggggaaaggcggacagagcgggagccaccagcgccaaagggaagccag

SEQ ID NO: 75514 - RNA, 75 nt, Homo sapiens
gcggccaacggggccacaagccaaccagggccagaagagcaagacaacgggaaaagcacagagccaggagccccg

SEQ ID NO: 75515 - RNA, 80 nt, Homo sapiens
acaagccaaaaccccagggcacccaccgggaaaccacaggacgcaagaacaagagccacacgaagcagcaagacagcacc

SEQ ID NO: 75516 - RNA, 63 nt, Homo sapiens
aaaaccgcgaagcaggggccgcgggaaggggaaacagcaaacagcggggaagggagaggaccc

SEQ ID NO: 75517 - RNA, 116 nt, Homo sapiens
gccagcgccacacagggcagacagagaagaaggcgcgcaccggaaaagagccccggaagacaaaccaaggagaaacgaaagacggacagagcgggggcgacccggaagagcaacca

SEQ ID NO: 75518 - RNA, 80 nt, Homo sapiens
caaagaacgagaggagagagggaccacacgcgccaacacagaaaaaccagaaccggcgcaacaccccagccaaagccaac

SEQ ID NO: 75519 - RNA, 78 nt, Homo sapiens
caaagaagagcccacacaggcacaccagagaagcagcccccaccgcagccagcaggacaggcaaaaagacagccgaaa

SEQ ID NO: 75520 - RNA, 59 nt, Homo sapiens
aggagagagcgcgggcccaggaagacggcccgccacgggccccgcagccgcgcccgagc

SEQ ID NO: 75521 - RNA, 55 nt, Homo sapiens
ccaccccaacaggaaacaagcccagcggcaggggcgggcagaccacccggggaga

SEQ ID NO: 75522 - RNA, 73 nt, Homo sapiens
ggaaacccgcagggaaaccgacggagaaaccaccggcggaccgcacaagcaggagcggcggcagcaggaacaa

SEQ ID NO: 75523 - RNA, 96 nt, Homo sapiens
gagcacccagggaaaggagacaaggaccgaaacagaaacggaacaccaagcaaccaagccccacgaggagccccgcgccagaaccccaaaagggag

SEQ ID NO: 75524 - RNA, 94 nt, Homo sapiens
acccggccaggcaggcacccgggcccggcaccgcgccgcccagaggccacccagccccagacagcgccagcagcccgggggcgacgacgaggac

SEQ ID NO: 75525 - RNA, 56 nt, Homo sapiens
ccggaacagccaacaaagagaggagccagagcggaagcacgaccagcagagaaaag

SEQ ID NO: 75526 - RNA, 77 nt, Homo sapiens
gaagaagaacggcgagagccgggaagaaacaccagggcgcacccacgacgcgcacaccaccggcagaccggcgccac

SEQ ID NO: 75527 - RNA, 61 nt, Homo sapiens
gggaaagacagccgggccaaagcagagacgaagaacccagcaagcacaacagcagcgcgag

SEQ ID NO: 75528 - RNA, 75 nt, Homo sapiens
cgacccccaccgagacgaagcgggcggcgaagagagaggccgcagaagggcagaagaacaggccgggcacaaaaa

SEQ ID NO: 75529 - RNA, 77 nt, Homo sapiens
caagcggagaacaaacccgcccaaccgagcaacacccggaggagaagaggcgcggaacaagcgggagagcaaggaaa

SEQ ID NO: 75530 - RNA, 50 nt, Homo sapiens
agaaacaccaggaagggagaacgagcagaaaaccaaggagcaggccccgc

SEQ ID NO: 75531 - RNA, 34 nt, Homo sapiens
gcagaagcccggagccgaaaagaacaggaacaga

SEQ ID NO: 75532 - RNA, 80 nt, Homo sapiens
gagaagacgaacccccaaagagaaaaagaaagagcaagaacagaccggcaaggagggagacggcgagcagaggcgcccca

SEQ ID NO: 75533 - RNA, 73 nt, Homo sapiens
ccaaaggaaggaccaaaaaaggcagaacgacgaaggagaagcggagaaaagagacacaagcacacgaccggga

SEQ ID NO: 75534 - RNA, 86 nt, Homo sapiens
cggcacaagcagacggcaaaggcaagagaacagcagcgccgcccgccgacagccaggcccgggagaagaccacagacacaaggaca

SEQ ID NO: 75535 - RNA, 77 nt, Homo sapiens
gagcagcacccggaaagagaaaccccaagccaaaggaaacaccaagaagcaggcgcagggggcaaaagggaaaacca

SEQ ID NO: 75536 - RNA, 70 nt, Homo sapiens
gagcccaggagcgccacgcgcggaaggcagcgcccagcagcgcaggcccaggggacacccagcaggccag

SEQ ID NO: 75537 - RNA, 71 nt, Homo sapiens
ggaagccgcagcggaaagcaggagcacaggcagagaccgggcacaaccagccagcaacccgcccgggccaa

SEQ ID NO: 75538 - RNA, 55 nt, Homo sapiens
gggaacgcacaacagccaccgcagcgaacagacccagaccagaccgagagcaaca

SEQ ID NO: 75539 - RNA, 77 nt, Homo sapiens
ggcgggaccgggcggcacgcacgcgggcagggaacaggcggagcggaagagacaagccaacaagaaaggcacaggaa

SEQ ID NO: 75540 - RNA, 80 nt, Homo sapiens
gaagggcgggaacgccaccccgcgcgccccccggggaccagggcggcccccaggaggagcggaacgggacccgaacaacg

SEQ ID NO: 75541 - RNA, 73 nt, Homo sapiens
aagaaagcggcggagagacaaagagcagaggagcgcagaaaccaaaaaagcagaaccgagccaccaacagaag

SEQ ID NO: 75542 - RNA, 77 nt, Homo sapiens
aacagccaaagaaaagcagaaagccgcccgggcgccgcacgaaaggaaagacggaagagcaccgagaaaagcccaga

SEQ ID NO: 75543 - RNA, 85 nt, Homo sapiens
gggaacagccaggagagcaagcaaaagggggccaaagggcgagggcacaaaaaaccacaccccccaccgaggaagagcgggagaa

SEQ ID NO: 75544 - RNA, 31 nt, Homo sapiens
gaccgagcaggccggagcaaagagaaaggac

SEQ ID NO: 75545 - RNA, 76 nt, Homo sapiens
ccgcaggagccgacgagacggaagagagcgagcggaaaacggccgaaggcaaagcgaccagaccggacccgggacc

SEQ ID NO: 75546 - RNA, 73 nt, Homo sapiens
cccacacccagagcgccccggacgaccaggcaccgcgcgggcagacgcccgcaccgggcccccacccgcccgg

SEQ ID NO: 75547 - RNA, 128 nt, Homo sapiens
agcagccaggggacagcagcgcgcaggccgagaagcgggcagccgagaagggccgaggcccgcaaaagcaagagcgagcggcgcccagaagaaccacagccgagaaggggaagagaaacagcggcgcc

SEQ ID NO: 75548 - RNA, 77 nt, Homo sapiens
ccgaaaccaccaagagcaaggaagagaccaagcaccaagaaaacgccaaggaacggaggggcacgcccggaagacca

SEQ ID NO: 75549 - RNA, 57 nt, Homo sapiens
cgcccgaccagaggcgacaaggagacccaacaccccggccagacgggccaccaggcc

SEQ ID NO: 75550 - RNA, 74 nt, Homo sapiens
gcacagggacgggagaagaagagaagagagacaacaagagaacagggcagggcaggcccagcagggaagccgaa

SEQ ID NO: 75551 - RNA, 75 nt, Homo sapiens
agcgacagaaacaagccaggaccacaaaagggcagcgcaagccacaggaacgagccacgagaagccccaacaaaa

SEQ ID NO: 75552 - RNA, 81 nt, Homo sapiens
accaagaccgaaggcagcacaggaccggaaaaaacaccgaacacaaccccagagccggcagcgggccccccgccgcggccc

SEQ ID NO: 75553 - RNA, 73 nt, Homo sapiens
cggaagaaaccacaaggacccagggaccgcagggagcagaacggaaacagccccgacccccagcaccgccacc

SEQ ID NO: 75554 - RNA, 54 nt, Homo sapiens
ggacggccgccccgcggaaagaacgggggggagacaccagcgggaagggcggaa

SEQ ID NO: 75555 - RNA, 71 nt, Homo sapiens
aaccaggcgcacgacgagacgcacaggaggaggacagaggcggcaaggagagcgaaaggaaaacaaggcac

SEQ ID NO: 75556 - RNA, 85 nt, Homo sapiens
ggggcgccagccgggccacggagaggagcagcccccggagacagcggcacagagggccgccagccgacaaagccagacccaccca

SEQ ID NO: 75557 - RNA, 74 nt, Homo sapiens
gaagaaaacaaaacccagagcgacaaaggagcaggcgaagcgagccagggaagcgaaccaggcgaacaagacga

SEQ ID NO: 75558 - RNA, 73 nt, Homo sapiens
agaggagaagacaccaaaaagcaaacggaccagaccgaccaccaaaagccaaaacagaagaggcaaagcccag

SEQ ID NO: 75559 - RNA, 80 nt, Homo sapiens
gggagagggaaggaccaacaagggaaagcacacgaacagagacaggcagggaaggaggcccaaaagcgacaggcaaacca

SEQ ID NO: 75560 - RNA, 83 nt, Homo sapiens
cgaggagcgagcgcgcgaggggcggccgaggccagcgcgggccgccagcggcggccaccacagcgccgcagcccagcgaggcc

SEQ ID NO: 75561 - RNA, 81 nt, Homo sapiens
agcgagggcgcaccgggggcgggggcgccagcccaccaagaagggccgagcacagcaagcaaaaaaccacccgcgccgaag

SEQ ID NO: 75562 - RNA, 79 nt, Homo sapiens
ccagaccacaaagaggaaaggacgccaggacacacggcacaagagcaaagggggcgaacagagcgcgcggaaccaaggg

SEQ ID NO: 75563 - RNA, 80 nt, Homo sapiens
cccccgggaacaggaggaccggagcacggggagacccgacacacccaccccaccgggccgcgacccccagccgagggaag

SEQ ID NO: 75564 - RNA, 71 nt, Homo sapiens
caggaagaagagagcggaacagcagagcgcacaagcccaagagaaacaggcacgccgcaccacccaccagc

SEQ ID NO: 75565 - RNA, 79 nt, Homo sapiens
aagcaagaagggaaagaaaccgaagccccacaagccagggaagaccccgaaggaccaagaaaagcagcgggcgcaggcg

SEQ ID NO: 75566 - RNA, 88 nt, Homo sapiens
cggcagcgcgccccgccgccgcgccaccgaaggaagcacccagacaccgggaagaacaacccagccacggaagaaaagcaaagaaaca

SEQ ID NO: 75567 - RNA, 54 nt, Homo sapiens
ccggaggcaggaccagcgcagcgcgccagacccagacaagaacgggggggcacc

SEQ ID NO: 75568 - RNA, 52 nt, Homo sapiens
gccacggaagccgacagacaaccagggaaagcacaagcgaaagggcgaaaga

SEQ ID NO: 75569 - RNA, 78 nt, Homo sapiens
ggagaaggaccaagaaccagcgccacgcagagccccgccaggaagacacgccggggaacgaagcagaagacggagggg

SEQ ID NO: 75570 - RNA, 72 nt, Homo sapiens
accagacgggaacgggagacaagcgcagcgaggggacaccagcagcgccgccggaccaccgggcagcagaac

SEQ ID NO: 75571 - RNA, 44 nt, Homo sapiens
gcgaccacaggaaggacacaggcagggcgaagagagaacacgca

SEQ ID NO: 75572 - RNA, 76 nt, Homo sapiens
gagcccacgaacccgaagcccccaaagagagaaccggagagcacccaacaggggcccccaaagggaagccaaacac

SEQ ID NO: 75573 - RNA, 80 nt, Homo sapiens
gaggacgcgcacacacagcgaggagaggagggaagcgccccagaggaagaagccaagccaagagacagcgcccccacagc

SEQ ID NO: 75574 - RNA, 88 nt, Homo sapiens
ccggagggagcccggcggccggaaggcagaaagcgaggcgaagcaaaggcaagggacagaaggaggggcaggggcccaagccaggagg

SEQ ID NO: 75575 - RNA, 73 nt, Homo sapiens
cacgaggcaaagacaccccacacgacaggaagcacaagaagaaaagacacaggaaaagaggccacagaacaac

SEQ ID NO: 75576 - RNA, 70 nt, Homo sapiens
aggggagggcagacggaggccccggagccaggcaggcaggcccagcaggcgcagcagcaagagggaaaaa

SEQ ID NO: 75577 - RNA, 90 nt, Homo sapiens
acaagagcgcaggcagggccacaagagcgaggagaagcgagaaaagagaaacggacccggcagaaagaaagcaggaccagggggagggac

SEQ ID NO: 75578 - RNA, 74 nt, Homo sapiens
ccgcgaccagaccggcgacaagccagcagacaacgacagaaaaccacccccaggcaaccccagagaccaagacg

SEQ ID NO: 75579 - RNA, 71 nt, Homo sapiens
accaacagaacaacacaaaggcagaaaagaagcccagaagcacccgcaaccgacacacagcaaaagcaaag

SEQ ID NO: 75580 - RNA, 82 nt, Homo sapiens
agaagacaacgcacaacaggaaagggccgagaaagaagagaggaagaagaggaggaggaggaagaggaggaagacgaggaga

SEQ ID NO: 75581 - RNA, 79 nt, Homo sapiens
gccaacccaggggaccacgcgaccaaggacggagagcggaagaccggcccaggccaggcacggagaagaggcgcgcacc

SEQ ID NO: 75582 - RNA, 68 nt, Homo sapiens
acgcaccgcaggcagacaaaagggccaaagaagggagagagaggaacaacccgaagcacaggggaaaa

SEQ ID NO: 75583 - RNA, 85 nt, Homo sapiens
gccgcgccgcccggcagcccggcagcgacacaccaccggagcaaccacacgggagagcgcggccacagggacaagggcggccggg

SEQ ID NO: 75584 - RNA, 52 nt, Homo sapiens
cacgcaccacggacggacagaaagcggacaacaagaacagagaggcacccag

SEQ ID NO: 75585 - RNA, 60 nt, Homo sapiens
gaaacaccacgaagcagccaagaaacaacgaacgagcaaggaagggccaaggcagacccc

SEQ ID NO: 75586 - RNA, 33 nt, Homo sapiens
gacggaacccgggacgacggacacgcgcaaacc

SEQ ID NO: 75587 - RNA, 82 nt, Homo sapiens
ccaccccacggccagggccaccaaccccaacccggagagcggcgagagcgagaagaggcgacaccagggcccaaagaacaac

SEQ ID NO: 75588 - RNA, 73 nt, Homo sapiens
aggaggaagcgaggccagacagcaagagcacccgacccacaggccagagaggagccaccccaagagaaagaaa

SEQ ID NO: 75589 - RNA, 66 nt, Homo sapiens
accgagaaagagaagaaagaaagcgcgcggggagcccccacccccaaaaacgcggaagacggggca

SEQ ID NO: 75590 - RNA, 82 nt, Homo sapiens
ggcgcggggccaccgcggcggagcccgagcaaaggagagccagagcgaacccaagacggggcacgccgggagaaacaagcac

SEQ ID NO: 75591 - RNA, 65 nt, Homo sapiens
gcaacgccaggacaaaaacaaagcgcgcagaaagggcgaccaccaaaaaaacgccagacaccaag

SEQ ID NO: 75592 - RNA, 54 nt, Homo sapiens
gaccggaggacgcggagaaccggcacagcccccggaccggacaacgcaacagag

SEQ ID NO: 75593 - RNA, 72 nt, Homo sapiens
aaaccgacccaaaaagaaaacaccgaaggaggagaaaaccggaacgcagcgaaggggcgagacgcacccgaa

SEQ ID NO: 75594 - RNA, 65 nt, Homo sapiens
aacaaaaaaaggaccccgaaaaagcaaggaacagaagccaccgcaaaaacaaggaaaaacagagg

SEQ ID NO: 75595 - RNA, 68 nt, Homo sapiens
ccaaccagcccagcgcgcggccccaccggcccacgaggccgagaacaccaggcgggggagcaagagac

SEQ ID NO: 75596 - RNA, 83 nt, Homo sapiens
ccacaacgccgcaacaaaagaaacccgggccgcggaaggcccgaaggcccccaggcaacaaagacaaggaggcccccgcccag

SEQ ID NO: 75597 - RNA, 60 nt, Homo sapiens
gcagcggagggccaccagcaaggggggcagcagaggagaggaggagggaggggaaaagga

SEQ ID NO: 75598 - RNA, 70 nt, Homo sapiens
gagaagcgcccaagcggacgaaccaaaggcaagaaccggagcaggagaaaagccggaaagaaaacgcaga

SEQ ID NO: 75599 - RNA, 39 nt, Homo sapiens
ccccaagacgggaccacaggccggggacgcccgggcggg

SEQ ID NO: 75600 - RNA, 44 nt, Homo sapiens
ccgggagcgggcggccaaccagcaggacaaggacagcccggagg

SEQ ID NO: 75601 - RNA, 84 nt, Homo sapiens
ggggggagaaccagccgacggagcaggcagcagcccagagacgaaacggacaagccgggaccacgagggcacgaaacggcagac

SEQ ID NO: 75602 - RNA, 62 nt, Homo sapiens
cccccggccgcagcgcaggcagcccagcagagaaggagggggcagagcacggcaggcagaag

SEQ ID NO: 75603 - RNA, 40 nt, Homo sapiens
agaagaaagggagaagcgaggagaacggccgacccggggc

SEQ ID NO: 75604 - RNA, 71 nt, Homo sapiens
gcgggaggccaccgccagagacgacgcaaccaaaggggggagggagcaaacaaggacaaccgaaaacgaac

SEQ ID NO: 75605 - RNA, 59 nt, Homo sapiens
gggcaagcggaagggagcccaagaggaccaggaagagacccagacgaagagcgcacaga

SEQ ID NO: 75606 - RNA, 84 nt, Homo sapiens
gcagagaggaagaagaccccacggacaagaccagaagcagaacgaaagaaaaggagggaaggaagaacacaaccaaaggaagaa

SEQ ID NO: 75607 - RNA, 55 nt, Homo sapiens
gaccaaacgggaaacggcgccagccaaggaaagggagacggacggaacgcggcgc

SEQ ID NO: 75608 - RNA, 80 nt, Homo sapiens
ccagcggacaacaaagaaggggcaaagagcgccgagacgaggagcagcgcaccccccacgggcagcagggggagaagcag

SEQ ID NO: 75609 - RNA, 76 nt, Homo sapiens
caccaccggggccacgggaggacgagggcaccccaacccgcggcaaggagaacgacagcgcgggcgcgcgcgccaa

SEQ ID NO: 75610 - RNA, 59 nt, Homo sapiens
gacagacacaggagcacaaacagcagacaaacgggacgggggacaggaaagaacacaag

SEQ ID NO: 75611 - RNA, 77 nt, Homo sapiens
cgggcagcgagacgaaaaacgcagaacagagccaaccggggcccagcagaggcaccagcgggaagcaggcccggaag

SEQ ID NO: 75612 - RNA, 72 nt, Homo sapiens
aaggaccaagaaccagcaccgccgcgagccgagaagaggccccccaccggggccaaacacacgcccgacccc

SEQ ID NO: 75613 - RNA, 50 nt, Homo sapiens
caaggagcggggagaggcaagcaacgacgggacgacccgggacagcccac

SEQ ID NO: 75614 - RNA, 77 nt, Homo sapiens
ccccccaacggcgagagcgcacaaaggagccacccaaacccccccaaggacgccaaagggcggagaacggaaaagca

SEQ ID NO: 75615 - RNA, 65 nt, Homo sapiens
aggcaacaaggcggacaagagaagccgccagagacacgcacgcaggaccacagaaccggcaacgc

SEQ ID NO: 75616 - RNA, 61 nt, Homo sapiens
gcagcagcagaacaaagcagccggaaaggagccaagaggcgcacaggagcgagagacccac

SEQ ID NO: 75617 - RNA, 82 nt, Homo sapiens
cgccccccgccaaggcgacccccaccgagacgaagcgggcggcgaagcgacccccggaccggaagagaaagggcccgaccga

SEQ ID NO: 75618 - RNA, 37 nt, Homo sapiens
aggaagcagggagaccagacggagcaccgcgcccagg

SEQ ID NO: 75619 - RNA, 77 nt, Homo sapiens
gcccggagcaggggcagcaaccccccgcgcccccgcccccgggacggaaaaggcgcacacgacccggagaaccccac

SEQ ID NO: 75620 - RNA, 63 nt, Homo sapiens
agcgcgccaccaaagcccagacgggaaccagaccggccagcaggagccaccaacacccaccaa

SEQ ID NO: 75621 - RNA, 90 nt, Homo sapiens
aggcgggcgggccggcgagcgcagcgcgaccgggaggcccaggacagaaacaagcggaaaaagcaaagacgagcagaaagcacagggagc

SEQ ID NO: 75622 - RNA, 113 nt, Homo sapiens
cgcaagccaaagagagaggcacgcaccaacccaagaacaccccagaaaaggagaggagacgcgcagaagaaagggacaaacacgaacgcccgaacaccacaaacacgccaaag

SEQ ID NO: 75623 - RNA, 72 nt, Homo sapiens
cacaaaaaaggaagcgaaaggcacggaagaagcaaacaggagcacaagcaccgaaaaggcccaagggaacaa

SEQ ID NO: 75624 - RNA, 85 nt, Homo sapiens
ccgcagcagagcgaaagcacacgcggagagagaagaaagacgggacaagggcacacggcaccagacagccgcgaagccagaggac

SEQ ID NO: 75625 - RNA, 69 nt, Homo sapiens
agagggacagccgcacggaggcgaaacacaaaggggcccgcgcgcccaacagcagggaggaagcccagg

SEQ ID NO: 75626 - RNA, 76 nt, Homo sapiens
gaggcaggggcagaaacagagaaggaacagccggggggcggacgggcggcccaggcagagaccgcggcaccaacag

SEQ ID NO: 75627 - RNA, 57 nt, Homo sapiens
cagcacgcagccccaggcaggccagcagaagaggaccagacgcccgggggggcggcg

SEQ ID NO: 75628 - RNA, 115 nt, Homo sapiens
ccgggaagagcgagagaagcggcggaggacgagcccgggagcgacccgcgcaaacaaacaggggagcccccagaaccaggccgagcccgcgcggagacacgccacaacacacacg

SEQ ID NO: 75629 - RNA, 82 nt, Homo sapiens
acacccccaagcaacagaagcagccagcagaggcgcagggccagcaggagggacaacaaagagagaggagggggagacagca

SEQ ID NO: 75630 - RNA, 79 nt, Homo sapiens
cacgacgaggaggccccagaggaagacgggggagcaggagccacaacgagcggagcagaccaccgcccagcaaaaagcg

SEQ ID NO: 75631 - RNA, 80 nt, Homo sapiens
ccggggcacagagaggacaggaacgagggcagaagacggggagccagcaggcaggccaacagcaagcgaagcagagagaa

SEQ ID NO: 75632 - RNA, 79 nt, Homo sapiens
cacccggacaggaggagccagggcccggcccgaaaggagagccgccccacacaggaaggaggaggaccacaaaccccgc

SEQ ID NO: 75633 - RNA, 78 nt, Homo sapiens
gcgcaggaccccaggcgagacaacaaagccccaacaagggagagaaagacggcgagaacacggaggagaagaaaccgg

SEQ ID NO: 75634 - RNA, 71 nt, Homo sapiens
aagaccagcgcgagggcccgggcaaggcccgacaggcgaggaggaggccgagaccagccaggggagaccca

SEQ ID NO: 75635 - RNA, 36 nt, Homo sapiens
aaagggagaacccaaagacggaacacgcgaacacgc

SEQ ID NO: 75636 - RNA, 79 nt, Homo sapiens
gccacgccagcagggcacacagccagaaaggaggagcaaggaagcccaggaacgagaacccaagcgcaggcaaacacac

SEQ ID NO: 75637 - RNA, 55 nt, Homo sapiens
agaagaaccaaagaagcaaaacacgaggcaccccgcgacgaaaggaaaccgacga

SEQ ID NO: 75638 - RNA, 79 nt, Homo sapiens
gcggaaggcaacaccgagagccacggacggagccagggaaggggacgcgcgccccgagcacgcacgcgggacaggagcc

SEQ ID NO: 75639 - RNA, 77 nt, Homo sapiens
gccgcaggcccagcgccggcgcaagcccaaaggggcaggacaagacagaaggccaagggagggacgggagaaacaag

SEQ ID NO: 75640 - RNA, 69 nt, Homo sapiens
gccaccggggaaacaaacacacgcaggcaggcagaaaccacaaacagcccgcagggcaacggaagcaga

SEQ ID NO: 75641 - RNA, 82 nt, Homo sapiens
agagaggaggagccagacgacaagcacacacaggcgcgaaacggaaaaagagaagagggcagaaagccgcggcggcgacaag

SEQ ID NO: 75642 - RNA, 67 nt, Homo sapiens
ccggacaaagccgaaaccagaaccggagaaagaaagagcagaggagcggccggccgcgaaacagaag

SEQ ID NO: 75643 - RNA, 78 nt, Homo sapiens
caccgccggcgcgggaaacgggcgaagcgacgagccgcgaggagcccagccagagcagcggacgggagcgccaccgca

SEQ ID NO: 75644 - RNA, 86 nt, Homo sapiens
aaccagcacgaggccgggggaggcggaaccagcgcaagccagaagcgcgggcgcacccacgacgcgcacaccaccggcagaccggc

SEQ ID NO: 75645 - RNA, 88 nt, Homo sapiens
ggaggccccagggaagcgcagaaagcaggcgaacccgcggcgcaaaacgagccaggacaaaaccaggcagaaccaacacgaacccaag

SEQ ID NO: 75646 - RNA, 75 nt, Homo sapiens
ccggggaggagaggcaaacgcaagaaaaggcgaaggcagcaagccaagagcaggaaagaacgcagggagcagagg

SEQ ID NO: 75647 - RNA, 74 nt, Homo sapiens
cccagccaaagaaacaagccgggaaagggacaagaagggcaaagccgaacccaaaggcaggcccggcaccgagg

SEQ ID NO: 75648 - RNA, 86 nt, Homo sapiens
gacgaggaagaagggcaggaccgggcggaggccgccaagacgaaacaaagggcacccagaaagagaaccgcggcacaggagggaaa

SEQ ID NO: 75649 - RNA, 79 nt, Homo sapiens
agcccagaccagcagagggcccaggagacaccagcgggggcgccgcgcagggaaagggaccgccacccaagcgcagaac

SEQ ID NO: 75650 - RNA, 70 nt, Homo sapiens
cacagaaaaaaagcaaaacgagaaaagacaaagaagagaccacacagaagacacaggaaagggaagcgcc

SEQ ID NO: 75651 - RNA, 67 nt, Homo sapiens
cgaggggcgaaccacggaaaggaggaagaagacaccggggacagacagggaagacgcaaacacaagg

SEQ ID NO: 75652 - RNA, 79 nt, Homo sapiens
gagcgcaacagcggcgggcggggcaccccaggaccccacaaaaagaccgacaccgcaagaccaggccgacggcaacgca

SEQ ID NO: 75653 - RNA, 77 nt, Homo sapiens
ccaaacaaggacaggcaggcccaaaggaagggaaaggagcaccagggacgcccaaaacagacacagggccaaaaacc

SEQ ID NO: 75654 - RNA, 77 nt, Homo sapiens
gaaaagagcgggcaggaacacaacccccaccaacagcccggcagacaggcaagccacagccaggaaacaccagcccc

SEQ ID NO: 75655 - RNA, 99 nt, Homo sapiens
ccgcgcgccgggccgcgcccaccccaggccggggcgcacgcggccccacgcagccagccccgcaggcaacaggaagaagaacccacaggggccaacaga

SEQ ID NO: 75656 - RNA, 93 nt, Homo sapiens
cgaggggcgaaaacagacccggagaaagacggccagcaaggggaaccacaggaacggaccgggagaagacaggaagaccggaaggccagagaa

SEQ ID NO: 75657 - RNA, 37 nt, Homo sapiens
acaccagagccagaaaagccagacacagcaagagcga

SEQ ID NO: 75658 - RNA, 76 nt, Homo sapiens
gaggccaagccaccccggcggaaccgcccccaggggaaaggaaggaaaaacgggaaaagaaccggagcagaagacc

SEQ ID NO: 75659 - RNA, 72 nt, Homo sapiens
cgcggggaccgcggcccggcgggacgcaaagcagaccgcagaaaggcggaacggaccaaccagcccaagaaa

SEQ ID NO: 75660 - RNA, 36 nt, Homo sapiens
aaacccagaggcaaggacggcggacaaggcccagaa

SEQ ID NO: 75661 - RNA, 54 nt, Homo sapiens
cgaaaaagaaaaaagaggaagaagccagcggggaaccaacagcccacagacaaa

SEQ ID NO: 75662 - RNA, 71 nt, Homo sapiens
gaaagcacagagcaaaccggggaaaagagccaaagcagccacacaacagcggaggaagacccagcccccca

SEQ ID NO: 75663 - RNA, 70 nt, Homo sapiens
aagagagagacagaagccacagaggcagcgaaggaaggaagaagagaggaacacgaaaggaaggaggaaa

SEQ ID NO: 75664 - RNA, 73 nt, Homo sapiens
gagcgccgcacaaaaagcagagagagaaagagcgcgcacgaaagcacacgaaaaggaaggaaaaacgcagcgg

SEQ ID NO: 75665 - RNA, 65 nt, Homo sapiens
caaacggaggaaacgacaaaacggggccgggggcaagacggagagaacggcccaggaagcccacg

SEQ ID NO: 75666 - RNA, 77 nt, Homo sapiens
cggcaaccaccccgcgagaaggaggagccccccgcccggcagcgccccgcgagaagggaaaagcggaagggaaaaag

SEQ ID NO: 75667 - RNA, 78 nt, Homo sapiens
acaaaagcgcaaaccggagccagaaacaaccgcaaccacccaacaaggaaaaaagcccgaacaagaaaaggcacaagc

SEQ ID NO: 75668 - RNA, 78 nt, Homo sapiens
acgaagagcacgaaaaaaccaaagacgggcgcaaagagcgaagaaaccagccagaagggccagcccaaggcaagaaaa

SEQ ID NO: 75669 - RNA, 77 nt, Homo sapiens
gaccccagccaccccgcccaaaaaaccacagggcgccaggaacggaggggcagccgcacccaagaaggacagacccc

SEQ ID NO: 75670 - RNA, 73 nt, Homo sapiens
caggggccggaagcaccgcacaccacacccgcgccgacaggggaaaaccagaaccgaaaacccagaccaacca

SEQ ID NO: 75671 - RNA, 86 nt, Homo sapiens
ccgccggagcggcgccggagccggagccggaacccagccgcgccagaagagccagaagcagcaggaccggcggaggagcgagagca

SEQ ID NO: 75672 - RNA, 75 nt, Homo sapiens
gaggccggcagcacgaggaccccaaacagaccacccccggcgggggagagagacgcgggaaccgccagcaaacca

SEQ ID NO: 75673 - RNA, 78 nt, Homo sapiens
gcaaggagaacggcagaacaccacaggaaggggccagacgcgaggaggaaggcagcaacccccccggccggaaacgga

SEQ ID NO: 75674 - RNA, 71 nt, Homo sapiens
ccaggaaggacaacagcaggcgacaccgaaacccagagaccagccccgggaaaggagaggcagaaaagggc

SEQ ID NO: 75675 - RNA, 76 nt, Homo sapiens
gagacaagagaccgacgacgaccggggacggggagcgggccagagggggcgaccgggacaaacggcggaggcagaa

SEQ ID NO: 75676 - RNA, 71 nt, Homo sapiens
aacgggccagaaggcgcgaggcgggaacacgaagacagcaacggcagcagccgagggaacggcagaagaga

SEQ ID NO: 75677 - RNA, 83 nt, Homo sapiens
cggacaggcaccacgcaccgacagcgccgccaccgagccgggcccaccccccaccaaggaaggacaaggcacgaggcgcggcg

SEQ ID NO: 75678 - RNA, 72 nt, Homo sapiens
caggaacaggacgacccaggagacgcaggccaaggagaaagcaggggagaagcgcagcgccaacccgaaaag

SEQ ID NO: 75679 - RNA, 73 nt, Homo sapiens
agccgacaagagcgcgcccagacaaggagagggaagcaaggacaggcgacagcccgacgacaggagcgcgcac

SEQ ID NO: 75680 - RNA, 75 nt, Homo sapiens
acccaccgcacacggggccaagcaggggaaaacaccccaggagaagcacgcacggacaccagagaaaaacccaag

SEQ ID NO: 75681 - RNA, 91 nt, Homo sapiens
cgcgccgggcgaggccgcggcagggcccgcaggcggcgcacaggaagcacggcagggagcaagccgaggggaaagaaggaccacgaacaaa

SEQ ID NO: 75682 - RNA, 93 nt, Homo sapiens
ggcgcgggcccggccggcacggcgaaccacgcgaggggcgggagccgcgcacaccaccacacccggaccgccgcgccccccaacgaccaggcc

SEQ ID NO: 75683 - RNA, 70 nt, Homo sapiens
cccagcaccggcgaagccgggccaaaggacgaagaacccacagaggcgcagccagagaaacagcaaaaaa

SEQ ID NO: 75684 - RNA, 63 nt, Homo sapiens
agaccgcccagcggcggagagaagaagaaggaggccgcggccagaaacccaagaaaaagcgaa

SEQ ID NO: 75685 - RNA, 81 nt, Homo sapiens
gccaccgccccagccagagccaggccgaacacagagcccgccccccagacagagccgcgcacccagccggggcagggcaag

SEQ ID NO: 75686 - RNA, 72 nt, Homo sapiens
gaaaaggaaacacggaaacgagagggacgagagcgccacacacaaggaggagagaaagaacccacgcaggac

SEQ ID NO: 75687 - RNA, 67 nt, Homo sapiens
ggacagaggggaaacaagaaagcaagaaaccgagcagacagcaacaagaaacccagaacaaaaggag

SEQ ID NO: 75688 - RNA, 70 nt, Homo sapiens
cagccaccagcaggaggaaaaccaacgccacgaccagagacgaagaaggaggaagcgcaggcgcagcaac

SEQ ID NO: 75689 - RNA, 71 nt, Homo sapiens
ggcacgaggaacaggacacagcggaacgcggcacagacaggcgggcagcaccaaaggaaaaaccgagagca

SEQ ID NO: 75690 - RNA, 56 nt, Homo sapiens
accgcggcgagaagccccagcgcacacgcgggagcaggcgaagcgagccagggaag

SEQ ID NO: 75691 - RNA, 76 nt, Homo sapiens
cggccgcgcccgggagcggcgccaggccggagcgcgacacggagacaggggcagaaggaccacgggaggcagaccc

SEQ ID NO: 75692 - RNA, 61 nt, Homo sapiens
gggcccgagggggaggggagacgaagagagaagggcacagaccaagacaacgaaccccggc

SEQ ID NO: 75693 - RNA, 67 nt, Homo sapiens
gcgcggcagaagaggcgagaagaggggagcgaagaagggagccacccaaaacacgcggaaacgccac

SEQ ID NO: 75694 - RNA, 81 nt, Homo sapiens
gccccaggcaaccgccgggcggacaaaagcaaaccagccagcacgggggcccagccagccagcagcgaggggggacggagg

SEQ ID NO: 75695 - RNA, 51 nt, Homo sapiens
agaaggccaaggaaaggaccgaccccaaaggaagaggagaaaggacggcac

SEQ ID NO: 75696 - RNA, 56 nt, Homo sapiens
gaagcggagaccaccacgcacaccgacagagaacccaggccaacacacagacagag

SEQ ID NO: 75697 - RNA, 87 nt, Homo sapiens
gcaggcgcggcacgggagcggcgaagggcagcccgcgcagggcgagagcgacggggccaccacagccagaaagcccggaaacaccaa

SEQ ID NO: 75698 - RNA, 60 nt, Homo sapiens
acagcgcgggaaggccccaaagggggcccagagaccggcacgggcggagcgagccgcgcg

SEQ ID NO: 75699 - RNA, 42 nt, Homo sapiens
aggcagacgccccaaggcccggcaggagaaagacagcaaaga

SEQ ID NO: 75700 - RNA, 73 nt, Homo sapiens
cagggggcaaggaaaccaagaagaggccaagaaggccagagagagagaacaccgaagaagcaggcacaccccc

SEQ ID NO: 75701 - RNA, 70 nt, Homo sapiens
gaccacccagggcaaaccccgccagaggcacacacgcaacacagaagcggagcccaggcaccccccagcg

SEQ ID NO: 75702 - RNA, 100 nt, Homo sapiens
aaaacaagggcgcggccgcgcccaggagcacggacgccagaacggggcccccggagggccacaagccagagcgccccggccaaggcagaccagcgggcac

SEQ ID NO: 75703 - RNA, 80 nt, Homo sapiens
gcgacaggaaccagccgggggccaaccgaggagccacgcagcagaaagcgggaacccacaacgaaggaaggaacagaggc

SEQ ID NO: 75704 - RNA, 73 nt, Homo sapiens
aaggaccaagaaccagcacacaggacagcaacgccagcgcacgagcacaccacagaccccaagagagccagcc

SEQ ID NO: 75705 - RNA, 86 nt, Homo sapiens
cacgaggcaaccagcaagcgaaggaggaccagacaagaaggaaacggaacgccaagcgaagaagaacgaaacggaagcacaaagca

SEQ ID NO: 75706 - RNA, 73 nt, Homo sapiens
cagacccaccacaccgcaagccaaacagagaaggaccgccggcagccccacccggcgcggccccccgcgacag

SEQ ID NO: 75707 - RNA, 75 nt, Homo sapiens
caagggggaccgcaccggaggaagaaacggcgggggccggggccccgcagggcacaggcaaaagaccacccggac

SEQ ID NO: 75708 - RNA, 74 nt, Homo sapiens
ggaaacccgaaccacaccacacccaaagggagagaacagcacacagaggcgcaaggggaagagaaaagacagaa

SEQ ID NO: 75709 - RNA, 74 nt, Homo sapiens
cgacgcccggcgccagcacacgcaggggaacaaaggccgacaaagaacacaaggggaaagagaaaagagcacca

SEQ ID NO: 75710 - RNA, 106 nt, Homo sapiens
cacgggccggccaccaggaggcccaagagggcaaggccagggaggaggggaggccaaagagcagagccggagcgcccccagcaggaagggagaagccaggccgggc

SEQ ID NO: 75711 - RNA, 89 nt, Homo sapiens
gaaaaacggcaaaaaccagacaacgagaaagagagaagaaagacagcgggaagaggagagggagaggcacagaagagagaggcggaacg

SEQ ID NO: 75712 - RNA, 76 nt, Homo sapiens
ccaagcgggaacacggacagcccagccaaaaaagacgcggagccacccccccagccggcagcacaccccaaagccc

SEQ ID NO: 75713 - RNA, 74 nt, Homo sapiens
cgaagccccggagaaccacccggaggagacggggcagacaacggagcccggggagaccacacaggaacgaaaag

SEQ ID NO: 75714 - RNA, 79 nt, Homo sapiens
ggaagaccccggccaaagcgaaaggcagcccagcaagcacccgacaaaacggggacgcgggaacacgaacaacagggca

SEQ ID NO: 75715 - RNA, 71 nt, Homo sapiens
gaaggaaagcaaggacaggcacgccacacacaggacgccaaaccaccggccaggaggcacaggacgcgacg

SEQ ID NO: 75716 - RNA, 70 nt, Homo sapiens
aacacgacaagccaaagcaagcagccgccgcaaagggacgacgaagggacagccagaagggaagacagaa

SEQ ID NO: 75717 - RNA, 69 nt, Homo sapiens
gcccgggcaacagccgaggaaaggcacagagcgcaacaaggagccaaggaggagcaaaaaggacagagc

SEQ ID NO: 75718 - RNA, 62 nt, Homo sapiens
caagggcgacgccccccaccccgcccacacccgacggccccccacccagccgccggcccgcc

SEQ ID NO: 75719 - RNA, 72 nt, Homo sapiens
ggcaaaccccggggacaggaggccaagcgggcaccaaggaaccaaaggcgagacaccacacaacagaggcag

SEQ ID NO: 75720 - RNA, 81 nt, Homo sapiens
cggggagcgcccgcgacagaggagggaggaaaacaaccgagggcagagaaagcggacagacaccgcgccccgaaaaacgaa

SEQ ID NO: 75721 - RNA, 88 nt, Homo sapiens
cgaagacacgcgacccggagacagcccaaaacccggaagagcgccccaggagaaacaaccgcagcccggagccgccccaaaacagagg

SEQ ID NO: 75722 - RNA, 78 nt, Homo sapiens
aacgcaaaacggaagaacccaccgcccccgacacggggcgacacagcggccgagagacgaagccaaggcagccgagag

SEQ ID NO: 75723 - RNA, 80 nt, Homo sapiens
acggacaaggcacccccaccaggcgccagccgaaacgacaaggcagacaaaccccgccagcagcgcgacccccgagagca

SEQ ID NO: 75724 - RNA, 78 nt, Homo sapiens
gccccgagagcaggacacaggcaaggaaccgaaggaacaagccaaaagggaggagcagcagagcgaacagcaagcaac

SEQ ID NO: 75725 - RNA, 86 nt, Homo sapiens
ccggaaccccgcggggacccgcggcccggcggcggcgaccggagaaccgcacggggcacggaggaccaaacagacagagaccgggg

SEQ ID NO: 75726 - RNA, 67 nt, Homo sapiens
ggaaaagaggagggagagaagaaggcaaagaggaccagagaagggcacgcgagaaggggagggggag

SEQ ID NO: 75727 - RNA, 76 nt, Homo sapiens
gcccccaccccccacgccccaccacaacaaacgaggaaccagcacaagacaaagaggaaaacccaagacaaggaag

SEQ ID NO: 75728 - RNA, 85 nt, Homo sapiens
ccgcccgggaggaaagcggcgccggaccaaaaagagccaagcgagaagagagaaccacaaagggcagagcaaagacccagaacac

SEQ ID NO: 75729 - RNA, 39 nt, Homo sapiens
agaacagcccaccccagaaacacggaaggagaccaagcc

SEQ ID NO: 75730 - RNA, 76 nt, Homo sapiens
ggcggcgacaaggggcccgaacagagggggcgggaaggaagagccaaccgcgcaacgaaccgcacccccccaaccc

SEQ ID NO: 75731 - RNA, 64 nt, Homo sapiens
ggcagcgcgcggagaacgggggcggagggggcagggcagaaggaccaggggcgacgaggcccag

SEQ ID NO: 75732 - RNA, 78 nt, Homo sapiens
accgcagagggcaacgcgaacgcggcacaagaacacacggggggaaacaggaggccaggaaacgaaaagcaccccaaa

SEQ ID NO: 75733 - RNA, 60 nt, Homo sapiens
gacaagaaagaggagacgcagccgcccgggcgcaagaaagaaggaagaagagagggcgaa

SEQ ID NO: 75734 - RNA, 74 nt, Homo sapiens
agacccaaggcgacgaccgacaggggggaaagggcggagaacggaaaagcaccaggaagcagagaggaccgcag

SEQ ID NO: 75735 - RNA, 72 nt, Homo sapiens
gaaggaccaagaaccagggagcagagggaaaggagggagcgggaagcaaaggcggcagacacaggccccagc

SEQ ID NO: 75736 - RNA, 82 nt, Homo sapiens
cccgcccccagcgggaggaaggacccggggaggccggccacgccccgcacgggagcgaggcggccagggccccagaagcaaa

SEQ ID NO: 75737 - RNA, 87 nt, Homo sapiens
acgcggaagagcacgcagccgacggccccaggcccgcgggacccgccagaccccaagaagaagcggaagaggagccgcggaaccaag

SEQ ID NO: 75738 - RNA, 75 nt, Homo sapiens
acaagccagggaagaccccgaaggaccaagagaccagaaccggaaaaaagaagaaaccaggcgaaaacaagaagg

SEQ ID NO: 75739 - RNA, 72 nt, Homo sapiens
ggaacacgacaaaaaaaagaaaggcaagccaagccaaaaagaaccaacagaagaaaccagaaacagaagaag

SEQ ID NO: 75740 - RNA, 54 nt, Homo sapiens
caacaacgagcgacaccaaagaacaaagggcaaaggacacaccgcacaaacggc

SEQ ID NO: 75741 - RNA, 74 nt, Homo sapiens
cgccgccgcgccgagggaccgccgggcggcggaaagcagaaacacggcaccgggggcggaaaagcagaaaggaa

SEQ ID NO: 75742 - RNA, 45 nt, Homo sapiens
ccgagaaaaccaaaaggggcgcggaccccaaaggacgacacccgc

SEQ ID NO: 75743 - RNA, 59 nt, Homo sapiens
agcaggcaggcccgagcacgcgcgggagcagcaggaacagagccgacaggcacgaagaa

SEQ ID NO: 75744 - RNA, 78 nt, Homo sapiens
cgaaaccaggagaggggagcccacaagcggcagccagggacgaaaaaagagccacaggggcagagagaacccaacaca

SEQ ID NO: 75745 - RNA, 80 nt, Homo sapiens
gcaagcagaccccaggaccagacacggccggacaggcacccggccagggcacagacaacgcccgacgccgacgagcggcc

SEQ ID NO: 75746 - RNA, 57 nt, Homo sapiens
aaaagagagcaacacggacaaggaacgggacagcaccacagagaagagacaaagccc

SEQ ID NO: 75747 - RNA, 69 nt, Homo sapiens
gggacgggccgagaggcaacgagaagcgggggacagagggcacaaacagacaaacagacaagaacacga

SEQ ID NO: 75748 - RNA, 82 nt, Homo sapiens
gccaagaccagagaaggaggagggaccacgcgcgagggcagcggggaagaagaaaaggaaccgaggccccccggcgacacgg

SEQ ID NO: 75749 - RNA, 85 nt, Homo sapiens
ggcggagccgggcacggagccgcccgcgcacccagggcacagcgcgggagccgcacgggccaagaagccaaccgccaggacgaac

SEQ ID NO: 75750 - RNA, 83 nt, Homo sapiens
gggaaaccaagaccccaggacaacaaggagggcaggccacgaggacgacggggaaaagcgaaagaaaaccaccagaaaaaagc

SEQ ID NO: 75751 - RNA, 58 nt, Homo sapiens
cccaggacccagaacacaacacgagagaaagagccgcagacgcacagcaaccaccgga

SEQ ID NO: 75752 - RNA, 80 nt, Homo sapiens
gcgccagaaggaagaggcggacggaggagcaggcgagaagagaagaagcacagagggaaggagaaggagacacagaagga

SEQ ID NO: 75753 - RNA, 61 nt, Homo sapiens
aagcccaaaccacaagccacaaaagaaagacaacggccagccaaaccaaaaggccgggggc

SEQ ID NO: 75754 - RNA, 44 nt, Homo sapiens
gggccgccaggggcgccgccaccagccccaccaagacgggacaa

SEQ ID NO: 75755 - RNA, 84 nt, Homo sapiens
gaggaagagcgaggaggaacgcgcaaggcaaagcaccggcaggaagagaacacagaagaagaggagaggaaccagcaagggcga

SEQ ID NO: 75756 - RNA, 76 nt, Homo sapiens
gaggagaaaaaacacaaagaacaaagaccaccccggaaaggaaaaacaaccaccagcgagcaaaaaggcaaagacc

SEQ ID NO: 75757 - RNA, 87 nt, Homo sapiens
gacgacaggggaggggcccaaggaaccccaggagaagaggcgcggcccagagagaggggcaccggaaccaggaagccgacccgaccc

SEQ ID NO: 75758 - RNA, 73 nt, Homo sapiens
gccaccagcgacaagaaggaccagagaaaaggcacagaacagacacaccggaacaaagaaaaccaaaacgcaa

SEQ ID NO: 75759 - RNA, 72 nt, Homo sapiens
ggcagccacaggaggcgcggaggacgccccaccgccgacgcccccagccaccaggcaggaccagccgccccc

SEQ ID NO: 75760 - RNA, 59 nt, Homo sapiens
cgcgggccgggaagaagcgccgcgcacggaccggcagagggcggagaacggaaaagcac

SEQ ID NO: 75761 - RNA, 73 nt, Homo sapiens
gagaagcggagcaggcacgagcgcggcgcgacaacaggcacaaagagagaaggaacacccacagggcagacag

SEQ ID NO: 75762 - RNA, 70 nt, Homo sapiens
ccacgcaagagagaagaaagaagacgaccccgacgcaggccaggagccgcggacagaagccgagcacggc

SEQ ID NO: 75763 - RNA, 51 nt, Homo sapiens
gaagcgcgaaaaggcaaaggaacccccacggcaggcaacaccgggcgcgca

SEQ ID NO: 75764 - RNA, 85 nt, Homo sapiens
gaagaacagacagacaggcccagaccaaaaagagccaagcgagaagagagaaccacaaagggcagagcaaagacccagaacacca

SEQ ID NO: 75765 - RNA, 78 nt, Homo sapiens
ggaggcaagcggcggccacagagacaagaaaggacgggcgccaggaccccgaggcggcgaagagcaacaaggccgccc

SEQ ID NO: 75766 - RNA, 127 nt, Homo sapiens
ccggcacaagcagacggcaaaggcaagagaacagcagcgccgcccgccgacagccaggcccgggagaaacaagcagaccggaagaccgacggaagaccacaccccgagggagcccaggacaccacga

SEQ ID NO: 75767 - RNA, 75 nt, Homo sapiens
agaacaacgaagaagcaagggaagaaagacccggggaggagacacaggaccaggccccccgcagaaaccggagaa

SEQ ID NO: 75768 - RNA, 74 nt, Homo sapiens
gagacgggaccccggcccagcagcagcagccaacaccggggaacaggcagcagaacgcagggggcgccccccac

SEQ ID NO: 75769 - RNA, 81 nt, Homo sapiens
acgccagaacacaaagccaaggccgccgagccccaggaccaaaaccacacagggacgaaaagaacacagaagcgccaggga

SEQ ID NO: 75770 - RNA, 75 nt, Homo sapiens
agcccgcgacaccgggagagagaaggcccaaaagccaggggccgacggacaagaggaagaccaggccccgaccac

SEQ ID NO: 75771 - RNA, 81 nt, Homo sapiens
ggaaggggcccgaagcccccgcaggaaccacaacccaaccaggggacagcagacgcagagacacggagaaccccgacgcca

SEQ ID NO: 75772 - RNA, 75 nt, Homo sapiens
ggcgggcccgaggcggcgagagaggcaggcggagccgaccgggccagccaaccgaaaaccagggcgaaaaaagaa

SEQ ID NO: 75773 - RNA, 59 nt, Homo sapiens
gggacaagacccacagcaaagccagcgacagaagccagcgggaaggcaaagaagaagcg

SEQ ID NO: 75774 - RNA, 55 nt, Homo sapiens
ccagagcgagcacagcaggaggagcccagcaagcaaccacgagagcacaaggaca

SEQ ID NO: 75775 - RNA, 56 nt, Homo sapiens
aaccgccggccggaccagaccggggggaaaggcggggagacagaggaaagcaccaa

SEQ ID NO: 75776 - RNA, 38 nt, Homo sapiens
ggacagccagccgcggccgacacaacaaccgaccagca

SEQ ID NO: 75777 - RNA, 44 nt, Homo sapiens
ccggaagacccaaagcgaggccaggcagagcagcccaccaggga

SEQ ID NO: 75778 - RNA, 81 nt, Homo sapiens
cggccggagcgggaggcgggccagcgacaaaaagaggaggaagacagcgaacccccccaccacaggagcccagacccgggc

SEQ ID NO: 75779 - RNA, 79 nt, Homo sapiens
cgaacagcgcgacacaggaggcggcggccggggcagcgccgcgagccagcaacgggggaaggccacaacaccacggaga

SEQ ID NO: 75780 - RNA, 69 nt, Homo sapiens
aagcaaaggaaaagaggacggaggggcggaggcggaagcccgaccaggggagaagcgcagcgccaaccc

SEQ ID NO: 75781 - RNA, 82 nt, Homo sapiens
ccaacaaagaaggacccaggaacaacggcaaccaaggcaaaaccacaaggacaggagaaacaggggccaaaaaaccaaagga

SEQ ID NO: 75782 - RNA, 94 nt, Homo sapiens
cgaagggggccacggggcagcggacaaaaaggccaggcgccagcagaaaccgaacgggaaggagacccgccacaccgacagagaacccaggcca

SEQ ID NO: 75783 - RNA, 85 nt, Homo sapiens
cgcccgcgcgacggggaaccgcgaccgagacggcaggcggcggaagcggggacaggcaaaggagaaacaagaccccagggacgac

SEQ ID NO: 75784 - RNA, 80 nt, Homo sapiens
ccacaggcgggccgcaaggagcggacccaccggccaccggcggagcgagggcagcagaccgcgcgccagacgccaaggac

SEQ ID NO: 75785 - RNA, 79 nt, Homo sapiens
ggggaccgcccggccgcgagccggcgcagacggaaccaacaaacaccagaccaaccagaccaccgacagaaccccagcc

SEQ ID NO: 75786 - RNA, 81 nt, Homo sapiens
cgccggaacccgcaggaggaccgagcgacagcgcacggcagcggcaccacggcgacgcacaagaaccaagaaggagcgagg

SEQ ID NO: 75787 - RNA, 75 nt, Homo sapiens
aaaacccaccgagacggccacagacaacggagaaggagagagcacgaccaccgccgagagacccacagagggaga

SEQ ID NO: 75788 - RNA, 83 nt, Homo sapiens
cagacgaccggagacgaggggggagaaccagccgacggagcaggcagcagcccaggaaaccaagcacccaaaaggccacccaa

SEQ ID NO: 75789 - RNA, 36 nt, Homo sapiens
caacccccccaacaagcgagaaaccaagaccaggac

SEQ ID NO: 75790 - RNA, 61 nt, Homo sapiens
aaaagccccaccacaacccaaccccacaagacgagaacccaagaaggcagaagccagcccc

SEQ ID NO: 75791 - RNA, 81 nt, Homo sapiens
caccaaacggaggagccagacccggggaggcgcacacacaccaaagggagcagaaagcgagaaaagaccggagagaccagg

SEQ ID NO: 75792 - RNA, 74 nt, Homo sapiens
aaaagccggaacaaacaaagaacgaccgaaaaagcaccgggaggaaagagagccacacgaagaacacggccaaa

SEQ ID NO: 75793 - RNA, 70 nt, Homo sapiens
gagaacccacgccaaagaggaagcccaccacaaaaacgaaggcggcgggggccgcaaggccaggcgcgca

SEQ ID NO: 75794 - RNA, 82 nt, Homo sapiens
caacggagaaggaaaagaaccagaagcgagagaaaagcccccaaaagcagcacaggagccaggagcaggggcgcggcagagg

SEQ ID NO: 75795 - RNA, 88 nt, Homo sapiens
ccggcgagccaccggggagccaccgcccagcccaaaccaggagagcgagggagcgagcgggcagcgcggagcgaagaaaccgcaaagg

SEQ ID NO: 75796 - RNA, 72 nt, Homo sapiens
accggagagcacccaacagacacggggggcccacacaagcccccacccgaagcaaccacacacaaaacgccc

SEQ ID NO: 75797 - RNA, 74 nt, Homo sapiens
aaggaaaagaaaaacagaagcacagaaaacagcaaacagccggcaccaggagcagcaccagagcgaacgagccc

SEQ ID NO: 75798 - RNA, 77 nt, Homo sapiens
ccaacgggaagggccggcccgcccccggccggggcgcagcggaggcagaggccgggaagaaggagggacacagcagc

SEQ ID NO: 75799 - RNA, 84 nt, Homo sapiens
ggacggcgggggccgagcccagagagggaggagaaacagaagcgggcagaaaggaaacccacgccacaacaaagaccaacagca

SEQ ID NO: 75800 - RNA, 66 nt, Homo sapiens
aggagggcggcgggcggaggaacagcggcagccacaggagccaggaggagggccccgagggcagaa

SEQ ID NO: 75801 - RNA, 80 nt, Homo sapiens
cccggggccgggcagcccgcgcgaccgacacacagacgggccaacaaccagccaaaccggccacaagcgccacagggacc

SEQ ID NO: 75802 - RNA, 67 nt, Homo sapiens
gggaggaggaggccggagaaaggaaaaagacccgccgagaaaagcaccaaggaccggaagagggcag

SEQ ID NO: 75803 - RNA, 80 nt, Homo sapiens
ggggagccaacgccggaccagcaaggcgcagcaagaaggcgggaccccagccaagggcaaagcggcgggcgcggaagaga

SEQ ID NO: 75804 - RNA, 74 nt, Homo sapiens
gggccacacaaccgaaagaaaaggagaggaaaacacaagagacacaacagaacaacccagagcccgagaaagga

SEQ ID NO: 75805 - RNA, 81 nt, Homo sapiens
cacggccgccagcagggggcggaaagggcggaggacaagcaggcaaagcgaggcaccgagcccagcagacccgaggaaggc

SEQ ID NO: 75806 - RNA, 73 nt, Homo sapiens
agaagcagggcagaggaccaggacgcgaaaccccacacacgccaaagaagggaacacccaccagacgggcaac

SEQ ID NO: 75807 - RNA, 67 nt, Homo sapiens
gaaggaccaagaaccagagagagcaccagagggcgcaggcaaaaagcgcaggacggggaaaaaagcg

SEQ ID NO: 75808 - RNA, 66 nt, Homo sapiens
cgggggcacgaagggggacacaggcgagaacaggaagggaaggggcggagacgggcggaacgcagg

SEQ ID NO: 75809 - RNA, 78 nt, Homo sapiens
ggagcgaggcgggggaccaggcggccacacacccggagcaccgcacacagcggcaagccaccggaccagccccaccca

SEQ ID NO: 75810 - RNA, 58 nt, Homo sapiens
gcaacagacaaggcagacacaaaaggaagagaggaacaggccggcaggcagggaccag

SEQ ID NO: 75811 - RNA, 75 nt, Homo sapiens
ccccgggccacgcggaagcagccgcccggagaaacagacgaccggccgggcccaagaccagagcgcaaaaaagcg

SEQ ID NO: 75812 - RNA, 85 nt, Homo sapiens
ccagcaccccaccacgacacgggaggacgcgcacaggcagaaaaacgccaagacacgccggcaacaaggacgcccgggacaagag

SEQ ID NO: 75813 - RNA, 56 nt, Homo sapiens
cacagaggcgcgccgagcaccgggcccacacgaaggcccaggggaaggaaggagga

SEQ ID NO: 75814 - RNA, 57 nt, Homo sapiens
gccaagggagcgaaaagaacccccaaaaggaacgaaaacaaacggaagagagggcag

SEQ ID NO: 75815 - RNA, 79 nt, Homo sapiens
aagaccaacagcagggccagacaagcaggaaaagcacacgccggacggaaacccacagccaagggggaaccaggacgca

SEQ ID NO: 75816 - RNA, 47 nt, Homo sapiens
gaaaaaagacccaaccaacgcagaaacaaggcgaggaggaagggccc

SEQ ID NO: 75817 - RNA, 79 nt, Homo sapiens
gggccggcccggaggcgggacccagggcccaggacgagacaagggcaacgagacacccagcggcccggccccgccggga

SEQ ID NO: 75818 - RNA, 36 nt, Homo sapiens
ggccggagggccgagaaagcccaagcgcaaaaaaaa

SEQ ID NO: 75819 - RNA, 77 nt, Homo sapiens
ggccggcacaccccgggcccgcggcggcgggcacccggaggcgcccgagcgacaaaacagaggagaccagaccagaa

SEQ ID NO: 75820 - RNA, 78 nt, Homo sapiens
gaggacgccggacccccgacaggaggcacccagcaggaaggccaagagaggccaacagaggaacaaggcccgcagaac

SEQ ID NO: 75821 - RNA, 70 nt, Homo sapiens
ccggaaaccgaaacggggaaaaaaaccgcagggcggagagaccagccccagccccgccccaccacccggg

SEQ ID NO: 75822 - RNA, 87 nt, Homo sapiens
caacacgcagcagccgcgccgccgccgcgggagccgcgcccgaaccccggcccgaacccaggcgaggccggcaccagcaaaccagcc

SEQ ID NO: 75823 - RNA, 92 nt, Homo sapiens
cgcagagaggccggccgcgcggagcacgcggagccgcccaggcagaacaacacaggaaacaacagagaagaaagaagaacacgaacacagac

SEQ ID NO: 75824 - RNA, 71 nt, Homo sapiens
gagacgagaggaaaaagagggaagaccaaggaccaagaacccccgcccggagccaagcgcgggaagggccc

SEQ ID NO: 75825 - RNA, 67 nt, Homo sapiens
gagaagcggcagcggccagggaccgaacagcaggcccaggaccaaagagaagacgccacaaaaaacc

SEQ ID NO: 75826 - RNA, 55 nt, Homo sapiens
aaaccaaaccacgaaggccaagagaggacaaaaaggacccgacagcacaccccca

SEQ ID NO: 75827 - RNA, 81 nt, Homo sapiens
acacgcccccaagacaacgaagggagcccggggacgcagcgagcaaagcagcaagcgggggcggaggcgagccaaccccag

SEQ ID NO: 75828 - RNA, 70 nt, Homo sapiens
accaaaaaaccaagaacggagaacgaaaaacccaccagcaggagacgagcgccaaagacagaagcaagca

SEQ ID NO: 75829 - RNA, 56 nt, Homo sapiens
cgccacacccgacccgccaagaagccgcgagcaccacagcccccgcaaccagcgac

SEQ ID NO: 75830 - RNA, 71 nt, Homo sapiens
gcggaacaccaaacggaggagccagacccggggaggcgcacacacaccaaaggcaccgagcacccgagggg

SEQ ID NO: 75831 - RNA, 85 nt, Homo sapiens
acggacaccggcggccccaccagcagacgcagccgagacaccagcccgaaacaccaccaagggcggagaacggaaaagcaccagg

SEQ ID NO: 75832 - RNA, 71 nt, Homo sapiens
cgccccgcggcggcgccccaggcgcacaaccaaaccagaccgcagcagcacgagagaaacagaggacgacc

SEQ ID NO: 75833 - RNA, 81 nt, Homo sapiens
cagaggggcgcgagccgcgccgcgccaagccagacaacacagggacacaacaaacacaaccgccacagaagcacaggcaac

SEQ ID NO: 75834 - RNA, 57 nt, Homo sapiens
gaagcagcaacgagggccaaccagcagaagagaaagacagcaaagaaaaggagaaga

SEQ ID NO: 75835 - RNA, 84 nt, Homo sapiens
ccacagcaccccagcacccaggcaccgggaaaacgcagaggaacgagggggagccacgaggagaaggccacgcgggcgccccac

SEQ ID NO: 75836 - RNA, 68 nt, Homo sapiens
gagccacgaaacacaaggaaagcgacgacgcacccagccaaacccaggcccgagaagaagaggaaaac

SEQ ID NO: 75837 - RNA, 65 nt, Homo sapiens
ccacggcaggggcaagccgccagaagggccgcaagagacaccacaaaaggacacccgagcgcgga

SEQ ID NO: 75838 - RNA, 82 nt, Homo sapiens
accacgcgcggaagaagacccggagaggaaaacgccgcggcgcgaggcggcggacggggggggacggacggcggggagcacc

SEQ ID NO: 75839 - RNA, 35 nt, Homo sapiens
ccaaggagaggccaaagacccagcaggcgaagaag

SEQ ID NO: 75840 - RNA, 83 nt, Homo sapiens
caacgcccaagcagcggagaaaaggacccaagggggcaaaggcggaaacagcagaggacaccaggagaggcggcagcaggcca

SEQ ID NO: 75841 - RNA, 72 nt, Homo sapiens
gacagagaaagaagggaagaggggaaccaggggcgcaggaaggcacacgagcgcagaaaaccaagagacgcg

SEQ ID NO: 75842 - RNA, 109 nt, Homo sapiens
aaaaaaagaacaaaagaaaaccaaagcagaccagaaaaaacagcacaccaggaagcaaggggccacgcgaaggcacgcgaagccccggagggcaagcccaacacggcgg

SEQ ID NO: 75843 - RNA, 98 nt, Homo sapiens
aggagcgccaagagaagaagaacagaccaggggcggccagacccaggaaaagagggccggacagaggcagcagcccggcgaacaaaggcagggacgag

SEQ ID NO: 75844 - RNA, 94 nt, Homo sapiens
accacgccagccgcaccagccgcccaagccgcacagccgcggcggcagcagcaggagaggggacggcaaaacagaacagaaaggcggagaaaaa

SEQ ID NO: 75845 - RNA, 118 nt, Homo sapiens
agggcaccgcgcgaagcggccaaagccgcccagacggccaccggcgggaggaacaaaagaagcagagagcaggcagcagaagaagaagccacacaccgaaggaaaaaccaaccaagag

SEQ ID NO: 75846 - RNA, 59 nt, Homo sapiens
gcagggacccggaaacgggaaagaggggaggggcgaccccggggcccggccagcacgac

SEQ ID NO: 75847 - RNA, 89 nt, Homo sapiens
gggccccaacacccagagacgaaagcaaagaagccggaccgagaaccgaaggaggaaccaaggaaagcgggaaggagaaggcaaccgag

SEQ ID NO: 75848 - RNA, 80 nt, Homo sapiens
ccagacacaaggaggacgacaccccacggcacgcagaggcggagaaaaccagagagcagcgggcagcacgcagacaggac

SEQ ID NO: 75849 - RNA, 80 nt, Homo sapiens
gggccggcacggcgggcgcaacgcggggcgccaggaggggcgggcgaaccggcagcgcggcaaaagcagaccggaaaacc

SEQ ID NO: 75850 - RNA, 75 nt, Homo sapiens
gcaacaagcccaaccagcagacacggaggggacccccaaaagacaagggcaaaacggaccagacacaaagaggag

SEQ ID NO: 75851 - RNA, 51 nt, Homo sapiens
gaaggaccaagaaccagaacagccaggccgccgcggcagcgagaaagacca

SEQ ID NO: 75852 - RNA, 69 nt, Homo sapiens
ggacaaaggcgcaagcgagaggaaacgggccccaaggcgaccgggggaaggcaggacgcagccggggaa

SEQ ID NO: 75853 - RNA, 68 nt, Homo sapiens
gacgaacgggagaacagcagcagcccacgaacagaaagggaagaagagagggcgaaggaggccacaca

SEQ ID NO: 75854 - RNA, 62 nt, Homo sapiens
ggaaggagggggcgcacaaacgagcaggaggcaaagggaccccaagaaaccaaagggcaaga

SEQ ID NO: 75855 - RNA, 77 nt, Homo sapiens
cccaaggccccggcgggccccgcgaaagaccggcagcccacggggcccgcgaaggccaagcgcacccccaccaccag

SEQ ID NO: 75856 - RNA, 70 nt, Homo sapiens
gggaggcggcccgggacaagggcacgcgccaggcgaagcaacccgacgagggagggggcaacccaaaacg

SEQ ID NO: 75857 - RNA, 72 nt, Homo sapiens
aacccaacggacacggaacaccagggagcgggaaacgcacaacagagaacagaaaagacccgcagacaacgg

SEQ ID NO: 75858 - RNA, 77 nt, Homo sapiens
aaaagagcaaagagaaaacaagagacgcgaccaggacagagaggcagggagcggcaaccaagccgggaaaaaagcaa

SEQ ID NO: 75859 - RNA, 74 nt, Homo sapiens
aaggaccaagaaccagcaagccagaaaccagacgcaccacaggagcaggagccacaaagagagaacaccaagca

SEQ ID NO: 75860 - RNA, 59 nt, Homo sapiens
cagaccagaaagcagcagcccccagcagggggcgccacaggagccgcagaagcaaaggc

SEQ ID NO: 75861 - RNA, 84 nt, Homo sapiens
ggaggaggagaggaaaacaccggccgcaggaaggcagaagaaagaagaggagaaggagcagccggccaagaggaggaggaacga

SEQ ID NO: 75862 - RNA, 82 nt, Homo sapiens
ccagaagccagcccccaggcggaacgcccgccccgcagagagggagaagagcaaccggacacagaaggggaaggaaacccca

SEQ ID NO: 75863 - RNA, 76 nt, Homo sapiens
ccaggggcggccacgaccaccaggcgccagggaagaaaacgccagagaagcagagcagcccggagcgaggggagac

SEQ ID NO: 75864 - RNA, 82 nt, Homo sapiens
ggggacggcacccagaggaccaggcggcgaggaccacccgcacccaggggacgcacggcccaaccccgagcaaggacgccca

SEQ ID NO: 75865 - RNA, 69 nt, Homo sapiens
ggagaaggccgggcgagcgcaaaggaaggcgccgggcccgacccgcgagagaaagccaaggacacgcag

SEQ ID NO: 75866 - RNA, 71 nt, Homo sapiens
ggggcgcgcccgccgacggcaagaagcaagcaaccaggcgccgcaccagaagaggacgcgcaggggagcga

SEQ ID NO: 75867 - RNA, 62 nt, Homo sapiens
ggacaccaccaccccacgagccgcgcccagaccccacagagagggagcaaaacaagacggaa

SEQ ID NO: 75868 - RNA, 52 nt, Homo sapiens
cggcgcaggaggagccgaggcgagccaacagcacgccgaaagaacccggcaa

SEQ ID NO: 75869 - RNA, 83 nt, Homo sapiens
ccggccccgagggaggcgggacgggagacccgcaacgaaaacccccgggcccggagacgcgacaggccaagagcccagggcaa

SEQ ID NO: 75870 - RNA, 68 nt, Homo sapiens
ccaacgcagagaacggaaaacacaccgagggcgacgccaggagcacaccgaaaagaaaggaaaaccgg

SEQ ID NO: 75871 - RNA, 75 nt, Homo sapiens
gcaagccgccacagggaaccagcaaaggccgaagcccagccggcagaggaacgagcccacggaaacagggaagca

SEQ ID NO: 75872 - RNA, 85 nt, Homo sapiens
agccagaaccaagacacacagggagccagcaccgagcccccgggccagcagaacgacaccgaacaccgcacagaaagcagaccaa

SEQ ID NO: 75873 - RNA, 72 nt, Homo sapiens
agcgacaaccaagcaggccaaaccagaaaggggacagcggcgggcagggagcacggaaggaaccacaagggc

SEQ ID NO: 75874 - RNA, 72 nt, Homo sapiens
gggcgggaagcaacacgaaggaggccacgcagcaaaccacaggagaggagagcagcccgacggccaggaggc

SEQ ID NO: 75875 - RNA, 51 nt, Homo sapiens
gcgccgagcccaggcaagagcccgcgagaagaaccacgcgaggggggagag

SEQ ID NO: 75876 - RNA, 70 nt, Homo sapiens
ggcaagaccgaaggcgccggccaaaagagcacccgcagcacgaaggaccacagcgacacagaccagaagc

SEQ ID NO: 75877 - RNA, 78 nt, Homo sapiens
acgccggggaccccggcagccacccaccgccgccgcccccagaacgggcccgccagaagccccccagccgaacacagc

SEQ ID NO: 75878 - RNA, 84 nt, Homo sapiens
acagcagaagagcagaagagggccccagaacccgaggacacggagggaagaaggaagccgaccccaaagcgacccaaaggaagg

SEQ ID NO: 75879 - RNA, 83 nt, Homo sapiens
ggcgccgggcacgagcaccgccaccaggggaagggggaagcgggcaccaacagacaaccagggcaagcagaggcaaaggcaag

SEQ ID NO: 75880 - RNA, 116 nt, Homo sapiens
gagaccccaccaggaggcagccagcgggacccgccccgcgcaggcggcgacagccggacccacgcagaagcccccggggagagacagacagagggacacagagaggaagaaaggag

SEQ ID NO: 75881 - RNA, 55 nt, Homo sapiens
ccacggccacaagcgcagaaaaagaccgagacgggcgagggcccggcagcgacgg

SEQ ID NO: 75882 - RNA, 73 nt, Homo sapiens
gccggccagcgccggaaaccaacaaggccaccaagagcggacgaggcgaaagaggagcccagcggagaaacgc

SEQ ID NO: 75883 - RNA, 64 nt, Homo sapiens
cgaaggcaccgggcccagcacagccagcaccgcacgcccgcaagggaggcaagacccagagaaa

SEQ ID NO: 75884 - RNA, 71 nt, Homo sapiens
ccccccaccacgcagacgacggagaacggagaggccacagacaagagagccccaggccaaccacggacgca

SEQ ID NO: 75885 - RNA, 53 nt, Homo sapiens
ggaagcggacccgccaggagaacccgcaggaccaggagaaccaccacgaacgg

SEQ ID NO: 75886 - RNA, 71 nt, Homo sapiens
cgagcggaccccgaccccgaggcgagacggaaagagcccagcgagcaaaacggaaaaaaaagaccgcgccc

SEQ ID NO: 75887 - RNA, 71 nt, Homo sapiens
caacgcggagacccagccgaagggaggcggaaaggccgaacagccacgacgccacgcaggacccacacccg

SEQ ID NO: 75888 - RNA, 71 nt, Homo sapiens
ccgggagcaccagacgccacccaaccaccaagcccccgcggaggcagcggaaggcggaccccggcagcaag

SEQ ID NO: 75889 - RNA, 74 nt, Homo sapiens
aggccacaaccaagagaaacaaccaagggagggcaagcagaaagcagaggaaaacgaacaacacccaaagccaa

SEQ ID NO: 75890 - RNA, 74 nt, Homo sapiens
acccacagaggagaccaaaaaaaacaacagcagagcaaggaaagccagacaccaaagcgccgagaggaggacac

SEQ ID NO: 75891 - RNA, 81 nt, Homo sapiens
gaaaacccgcgaggaaagggaaggagcaagccgggcaggaaaaaacagaacaaggccggaccaaagacaccgacgacacgc

SEQ ID NO: 75892 - RNA, 75 nt, Homo sapiens
gaaccccaaacaaggaggccgccgcaccccaggaggggagcaacgagaagaagacaacagggcaccggcccaaga

SEQ ID NO: 75893 - RNA, 76 nt, Homo sapiens
gacagacgcagggcgcccccgccccccgccccccccgcagcgcgcagagcccggccaagaacaagcagcagccgaa

SEQ ID NO: 75894 - RNA, 69 nt, Homo sapiens
gaaggagcaaaaggcggacaggcaggaaggccgcggacccccccccccccaccccacaggagaagagac

SEQ ID NO: 75895 - RNA, 74 nt, Homo sapiens
gcccaccacgcgcgcggcccaggcacgagaagagaagcccagagcaaaacaccccaaaccagaccaccgacgcc

SEQ ID NO: 75896 - RNA, 81 nt, Homo sapiens
gccgccaggcagaaggccccccgaacagcaggcgccaccagcccggaggaaccgggacggaagggggaggaccaggcccca

SEQ ID NO: 75897 - RNA, 68 nt, Homo sapiens
cagcggcaggccagggcagccgcggacgggaaaagccagccggcacggccacaaccgaccggacacca

SEQ ID NO: 75898 - RNA, 88 nt, Homo sapiens
gaccggacaagcacaggaggccagcgggccgaggagcccaccgggggacggcacggcaggcggacgcccggggccccccggaccacga

SEQ ID NO: 75899 - RNA, 83 nt, Homo sapiens
accccgccccagcggccgcgacggggaggaggcgcgggccgaggagcgagaaccagccaaaacacacgaacagggaacaagaa

SEQ ID NO: 75900 - RNA, 46 nt, Homo sapiens
agcgacaacacacccagcagaaaaaggcagccgagcagaacgaaga

SEQ ID NO: 75901 - RNA, 73 nt, Homo sapiens
aagagaccacacccaggaagccaggcacgcacagcgacacgggggggaaacaagcacgggcgagccaggacac

SEQ ID NO: 75902 - RNA, 67 nt, Homo sapiens
acacagagcaggcacgaggagcacccagaggccccacaggcgcagagcccaaagcaagggcaagaag

SEQ ID NO: 75903 - RNA, 75 nt, Homo sapiens
gggggacggccggcggcacccgcacccggggacaagcgcgggaacggcgcggaagccaggacacggccaaggccg

SEQ ID NO: 75904 - RNA, 76 nt, Homo sapiens
ggacgcgcccccacacggagcccagcagcccagccagcggacccgacggcgagagagaggacggggacgggcccca

SEQ ID NO: 75905 - RNA, 83 nt, Homo sapiens
gggaccaggcgaagcggccgagcaggcgagcgaacgacggagagaagagacgaggaggaggggagaccgcggcaggacacgag

SEQ ID NO: 75906 - RNA, 85 nt, Homo sapiens
gcacccgcacccgccccgccaggcacccccggaggaggggccaagaagaccaggccgggacggacgaggaggccaccggacagga

SEQ ID NO: 75907 - RNA, 74 nt, Homo sapiens
caccaggacacaccggagggaaccgaggacggaggggggaaacggccaaagggaaacagacgaggacaccaggg

SEQ ID NO: 75908 - RNA, 73 nt, Homo sapiens
gcgcggaacgaaagcgccgcggcaaagagccgcccacccacgcaacccagacagaagagccgggaaagcagca

SEQ ID NO: 75909 - RNA, 60 nt, Homo sapiens
gccaccggcgggaggaacaaaagaggggggcggcagcggaagacaaaccacaacaacaca

SEQ ID NO: 75910 - RNA, 53 nt, Homo sapiens
gaaagaggcgcgggccagagcgcccaaacccaaaagaggagagaagaccaaga

SEQ ID NO: 75911 - RNA, 68 nt, Homo sapiens
cggaaagcaaagaagagaaccgcccagagaagaccacgcagggccccgagacaagaagcggaggccca

SEQ ID NO: 75912 - RNA, 61 nt, Homo sapiens
gaccaggaagagggaccaacagcccggagccagaaaacccagacaagaccccacgaggacg

SEQ ID NO: 75913 - RNA, 37 nt, Homo sapiens
acggggaggaacacccagagagaagaagaaggaggcc

SEQ ID NO: 75914 - RNA, 57 nt, Homo sapiens
cgcggggaccgcggcccgggagcagggaccaagacccccaggcacaaggaccacaac

SEQ ID NO: 75915 - RNA, 73 nt, Homo sapiens
cgcaccagccacagcccccaacagagaccacccagcagaagcccgagccaccccagcaggaaccagcagccca

SEQ ID NO: 75916 - RNA, 84 nt, Homo sapiens
cccgcccagccccggagagcgggaacagggagcaaggggacgcgagagaccacagggagccacagcccggagcggccaagcaga

SEQ ID NO: 75917 - RNA, 77 nt, Homo sapiens
aaggaccaagaaccagcggcccagcccaaccagcaccccccccaaggccccaacaaagacaagcagacagagcggga

SEQ ID NO: 75918 - RNA, 58 nt, Homo sapiens
gaagcagacccccaaggagggaaagaccccgacaaaagacaacaccgggacagacgac

SEQ ID NO: 75919 - RNA, 70 nt, Homo sapiens
aagcagggcccgcgcaggaacgcgcacgggaaccgaagagagccgggcaaccaaaaagagccaagcgaga

SEQ ID NO: 75920 - RNA, 71 nt, Homo sapiens
cgggagaaaaaggaaaacgcggaaaaccgacacaacagaaggacagcaaaaggagaaccagggagaggagg

SEQ ID NO: 75921 - RNA, 72 nt, Homo sapiens
gcagacaccggaggagaaaggggagcccaaaagcacgaagcgccagaggacaccgcggcccgaggacgccac

SEQ ID NO: 75922 - RNA, 72 nt, Homo sapiens
cccggcggagaccgggccccggcaaaagcagaagagggaaggcaccaggagaaggcaccgggaaacagaaag

SEQ ID NO: 75923 - RNA, 75 nt, Homo sapiens
aaacgaggagaaggaagacgaaccagaaaacacgcaaagcccgccaagaccggcccacgggcacgccaaaaccag

SEQ ID NO: 75924 - RNA, 78 nt, Homo sapiens
gagcagagggaaagggaaggagaaggagggacgcaggcgcaggccagaagcggaagcaggaggccagcgccaaaaaac

SEQ ID NO: 75925 - RNA, 68 nt, Homo sapiens
gggagccgacagccggaccgcaacaccgcaacccacgcaggcaagggcagcccgagccgacaggacga

SEQ ID NO: 75926 - RNA, 79 nt, Homo sapiens
gcggcacgaacagagccgggagcaagaagaacacccagagcacgagagaaacagaggacgaccgggaggacaagaagag

SEQ ID NO: 75927 - RNA, 40 nt, Homo sapiens
ccaagcaccacgccggcgggaagagaggaagccgaaacag

SEQ ID NO: 75928 - RNA, 79 nt, Homo sapiens
cgcgaccccggccgcggggccaggaagcggaggagccccggaggcagagcggcgccagggaagcccagaggcacggggc

SEQ ID NO: 75929 - RNA, 59 nt, Homo sapiens
gaagagggagaagcggagacagcccccgggaggcaggcacagaccggccgcagaaggcc

SEQ ID NO: 75930 - RNA, 103 nt, Homo sapiens
gccagcacgcacggacacccgagcacagagacgaagaggaccaggagcaaacagaaagcagaaagaacaagggaccccagagaaagcagcagggaaggacggc

SEQ ID NO: 75931 - RNA, 83 nt, Homo sapiens
cacaccccccccagccaagagcaggcagggagaaggaaggcaggcagcaggcagaaaacaggggcacagacgacagaagccaa

SEQ ID NO: 75932 - RNA, 91 nt, Homo sapiens
gagacaagcaccccgaagcgccgggcgcacccacgacgcgcacaccaccggcagaccggcgccacagcaccacccgacggcagcgcggcca

SEQ ID NO: 75933 - RNA, 69 nt, Homo sapiens
aaacagcaccaagccaggggccccaccaggagccagggaggacgaagaaaggacagggggagaggcaag

SEQ ID NO: 75934 - RNA, 77 nt, Homo sapiens
caggacccccaacaccagcaccgcagaggcaaggggccaccaggaggccagggggcgccagggcccgaggcgcgggg

SEQ ID NO: 75935 - RNA, 72 nt, Homo sapiens
ggacgcagcccaaccagaaggagggcacccaccgcccagccagcggaaccagagacagggcgccggggccag

SEQ ID NO: 75936 - RNA, 77 nt, Homo sapiens
ccccagcaggccgcggacagagaagaggacgcggagacaagagggccaaggcaagaccggcccccaggcccccccgg

SEQ ID NO: 75937 - RNA, 78 nt, Homo sapiens
aagagaaaaaagagaggagcgaaacaagaggacagaacaagcagcagccagagaagggaggagagcggagggcagaaa

SEQ ID NO: 75938 - RNA, 79 nt, Homo sapiens
gcaaggccggcgcggaggaggggagcagcgcgcaagaaagccaacaggcagaccagagacagcgccacgcacccgggga

SEQ ID NO: 75939 - RNA, 69 nt, Homo sapiens
acgggaaccgaagccacgcaacaggggcaaacgcccagaaagaagcgggggcggacacgcgaagagcga

SEQ ID NO: 75940 - RNA, 51 nt, Homo sapiens
caaaaaaggaagcgaaacaagggcccaaaccggacagaaggagaaacacac

SEQ ID NO: 75941 - RNA, 75 nt, Homo sapiens
acaacgggacccagaagagggaaaaaggagccaccacagaaccaaaagaaaggaacaaaccacaaagcggaaaag

SEQ ID NO: 75942 - RNA, 52 nt, Homo sapiens
ggcagcgcccagcagcgcagggcgaggcccggaccgcggcaggacggggggc

SEQ ID NO: 75943 - RNA, 54 nt, Homo sapiens
ggaccagagacacgccaagcagccagcccaggagagacaggagacccaacaccc

SEQ ID NO: 75944 - RNA, 34 nt, Homo sapiens
ccgcacaacaagcgcggaccggcccaccaagccg

SEQ ID NO: 75945 - RNA, 68 nt, Homo sapiens
aaaggacagagacagaggcccacgcacgaagaccaaagggggggaccaaggcaacgaacacaagcagc

SEQ ID NO: 75946 - RNA, 79 nt, Homo sapiens
aagcagcggcgcagcccggggcccgcagcccccggaagccaaagacccccagggacccggccccagcaccgccgggagc

SEQ ID NO: 75947 - RNA, 73 nt, Homo sapiens
gaagaggaagcaaagccaaggagaacgcgccgccggccggggcgcagggacacggggggccaagggaccacac

SEQ ID NO: 75948 - RNA, 76 nt, Homo sapiens
cgccgagcggacccggaccgggggacaaggcacgaggcgcggcgaccaccacagcagagcccggcgaaggaggagc

SEQ ID NO: 75949 - RNA, 83 nt, Homo sapiens
caggcggaggccccagggaagcgcagaaagcaggcgaacccgcggcgcaaaacggacccaaggccagccagccccaggcacca

SEQ ID NO: 75950 - RNA, 75 nt, Homo sapiens
gccagcacgggaccccccaagagaagcgcaagagcaacaccccaccccaaggcaagaagcaagcaaccaggcgcc

SEQ ID NO: 75951 - RNA, 40 nt, Homo sapiens
gaacaaagggaaaaggagaagggaagaaagcggaggcggc

SEQ ID NO: 75952 - RNA, 51 nt, Homo sapiens
gccgggaccaccgcacagcagggggggccgaagaagccagggggaggaaag

SEQ ID NO: 75953 - RNA, 74 nt, Homo sapiens
gaacgacaaagagagcgaggaagcaaagaacagagaacgcgaccagcagcagaagaaccaagacccccgcccag

SEQ ID NO: 75954 - RNA, 71 nt, Homo sapiens
cccaagagaacacgccaaaccagcacaaggaaaacgagagaaacgaaggcgagagaaacagcaaggcccga

SEQ ID NO: 75955 - RNA, 51 nt, Homo sapiens
accaccggcagaaggaggaaccaagacagagggcgacaggacaacggacag

SEQ ID NO: 75956 - RNA, 66 nt, Homo sapiens
agagcgaacacccagaaacggggcaagggcaaagagacagaaaagggacggggccggaggaaacag

SEQ ID NO: 75957 - RNA, 58 nt, Homo sapiens
acagcggcaggggccccgaaccagaagccggccggagcgagggagagcaggaacacag

SEQ ID NO: 75958 - RNA, 65 nt, Homo sapiens
gccggcggagcccacgacgagcggaaaaggggacagagaaagaccagggcagaggaagaacgcag

SEQ ID NO: 75959 - RNA, 104 nt, Homo sapiens
cgcccgggcaagcaaacccgcccagcccgagagccgagagcgggacaaagaggaagaggaaagggccaaccccggaagagaaggggaaagcagccaggccaaga

SEQ ID NO: 75960 - RNA, 76 nt, Homo sapiens
cgccggcaagacaagaggcagccagcggacggggccgagaggacgaaaaaagggccggcccgaaaggggaccagac

SEQ ID NO: 75961 - RNA, 81 nt, Homo sapiens
cagaaaaggaaaaaaaggaagacacagcaaggaagacccacggagagcgcacagagcgaggcaagaaaagcccacaccagg

SEQ ID NO: 75962 - RNA, 69 nt, Homo sapiens
gagaacaagaccaccgccaaagcagggcaccaggaacgcaacaagaccggggacccagcacccaagcaa

SEQ ID NO: 75963 - RNA, 77 nt, Homo sapiens
cccaaggaaagcacaaaagggaaagagacggagaaaagaagaacacgcccaaaacgaggacccgggcgacacagggg

SEQ ID NO: 75964 - RNA, 49 nt, Homo sapiens
gagacgaacaccagaaagagaacaggaaacagaccgaaacaaggacccc

SEQ ID NO: 75965 - RNA, 60 nt, Homo sapiens
cccggaggggcaaccccccacaacacaaaagacaaccgagcacaaaaaaggcacccggag

SEQ ID NO: 75966 - RNA, 75 nt, Homo sapiens
agagggcagaaaggacggacagagagccgggggagcaagaaaggcgggcgccccaggaaagcccccagcagggcg

SEQ ID NO: 75967 - RNA, 86 nt, Homo sapiens
cgcggcggcagcagcaggagagcccgagcgggaagaagccgcagcaagccgcagcggcgcgcaccgggcggcccaggaccgagcac

SEQ ID NO: 75968 - RNA, 55 nt, Homo sapiens
aaaggagacgacgacgaagcccacacaggcgcgccggaacgaaagcggcacggag

SEQ ID NO: 75969 - RNA, 72 nt, Homo sapiens
aaaggcagggcgaccacaggcgcaaggccaagacaggggacagccggccgaacggcagccccgggacccaaa

SEQ ID NO: 75970 - RNA, 80 nt, Homo sapiens
gaggggcggacaaacgggcggggcggccgaccgggagaacgcaaaggacagacggacagacgggggagacgccccggaga

SEQ ID NO: 75971 - RNA, 81 nt, Homo sapiens
cagcagggaaacacacgcgcaaaggagaaccccacaccagaacccagaccaggccagagagcacgcagacacgaccgccca

SEQ ID NO: 75972 - RNA, 80 nt, Homo sapiens
cgggcgccagcggacggagcgcgcgcggaaccggcgccccgccccgcccacccggagggcagggagggaagcggagagac

SEQ ID NO: 75973 - RNA, 74 nt, Homo sapiens
cggggcgagcaccgcgaaggagcaagcagacagaaaacagcacaggaaacacagaagaagagaaaaagcaccgc

SEQ ID NO: 75974 - RNA, 78 nt, Homo sapiens
cgggccgcgcgccccgcgccccggggcgggccgcagcggaagcaccagagcccagagcccacggaggagcgcaggcgg

SEQ ID NO: 75975 - RNA, 74 nt, Homo sapiens
ggaaaccacgcgccacacaaagagccgcgggggcgggacacaaggacaccaggccagagcaggggcggggcaca

SEQ ID NO: 75976 - RNA, 74 nt, Homo sapiens
ccggaagggcaagggggcagggcccagggaccggaaagcaggacgaaccccaacaccagaaggggaccggaacc

SEQ ID NO: 75977 - RNA, 86 nt, Homo sapiens
gccccgggaagcagccaaaaacgcggccgccaccacgccgcgcgcggagggcggaaggggacagaacaagcgagggaggcggcggg

SEQ ID NO: 75978 - RNA, 71 nt, Homo sapiens
gacgaagaaagccaacgaaccacaacagccacaaaaagccaggagaaagaccagaagaaacaacaggcgcc

SEQ ID NO: 75979 - RNA, 88 nt, Homo sapiens
aaacagcccccgaaaacgcacggagcgggcccgggccagaggcagaaaacggacggaagaaaaggcggccgacaaaaggacagcgaca

SEQ ID NO: 75980 - RNA, 70 nt, Homo sapiens
gcacacaacccccgaaagcgaggggagggcgacaggagccaagaaacacaacagcacgaccacaaggaag

SEQ ID NO: 75981 - RNA, 85 nt, Homo sapiens
gcaccggaggcccaggcccggcagcccaacccagcaggacaagagcaagaacgaggccaaggaggagggacacagagacagcgaa

SEQ ID NO: 75982 - RNA, 77 nt, Homo sapiens
agcccgggccaagcgggaggcgccccacgaggcggccccagcgcgggcgacaggccgacacccccagagagccgggc

SEQ ID NO: 75983 - RNA, 72 nt, Homo sapiens
gaagggcggggagcgcggcgggcgcgcgccagagcgcccaaaggacgcggaacagcaccacggccaacaccg

SEQ ID NO: 75984 - RNA, 74 nt, Homo sapiens
cgcacccacgaacgcccaccccccgaacccagccgcaccggaccaaccaaacccgcaaaaccacaccaccagcc

SEQ ID NO: 75985 - RNA, 61 nt, Homo sapiens
cggcgccggaaaggcagccaaaggccagggagaccagggggcaggggaggagcgcccaggc

SEQ ID NO: 75986 - RNA, 81 nt, Homo sapiens
gacgaaggcacaacaggggagaaaacggggacggccccaccgacccaaggccaagcacaaggcagggacaggggggcacca

SEQ ID NO: 75987 - RNA, 93 nt, Homo sapiens
ggagagggggggccaagagcggcagcgggcacagaaagacggagcggccagccaacaggacagcccccggcgcaaggaagaaagaaaacaagc

SEQ ID NO: 75988 - RNA, 76 nt, Homo sapiens
cgccccgcccagagcccaacggcgccggacaccgagcgccaacagacagaagcaacccaacgagagcaaagcgcca

SEQ ID NO: 75989 - RNA, 76 nt, Homo sapiens
ccacagaggggccggcccaaaagccccagggagccgcacacagaccgaccgcggaaacaaggcagaggagccgggg

SEQ ID NO: 75990 - RNA, 69 nt, Homo sapiens
aaagaagaaaaccagcggcgcccccgccacgaaaagggaacaaccaccagcaccgagccagcccaaaga

SEQ ID NO: 75991 - RNA, 56 nt, Homo sapiens
gcaagaaacccagccacaagcccaagacgaacaaggccgggggagacggagaacaa

SEQ ID NO: 75992 - RNA, 73 nt, Homo sapiens
ggaagagcagcccaacccggggaacggcggcgagacaaaggaaaacccaccccggaggagcagaccccgaacc

SEQ ID NO: 75993 - RNA, 56 nt, Homo sapiens
cggagacaagccaggagacgccacacacagaacgacaccacagcgacaaccggcga

SEQ ID NO: 75994 - RNA, 64 nt, Homo sapiens
caggaccaaaagggaaaagcaccgggacaagagaaaaaaagggcgggcgaacaaaaagagcaga

SEQ ID NO: 75995 - RNA, 85 nt, Homo sapiens
gggacgcaccgcaccgagggcgagcccaggggcgacgcgaaaccaggacgaccgaccaggccggccagggaagagcagcgcggac

SEQ ID NO: 75996 - RNA, 61 nt, Homo sapiens
cacagaccagaagagagcaacaggcaaagcggagcggagacccaaacggccaggccgcgcc

SEQ ID NO: 75997 - RNA, 83 nt, Homo sapiens
ggcacaagagccaggggcgcggggacaaacaccacaagggcacgccccaggaacacagggacaacgaggagaaggaccagccc

SEQ ID NO: 75998 - RNA, 78 nt, Homo sapiens
cgagcgggaaaggccgcgggggcaacggagaaaacccggaaccgcgacggcggcagggacggcacagggaaaaaagaa

SEQ ID NO: 75999 - RNA, 84 nt, Homo sapiens
agccagcaagggcggaggccacaccccgggcagaacgacccgaacagcacagaggaggaacccgcacagacaagacagcaacgc

SEQ ID NO: 76000 - RNA, 83 nt, Homo sapiens
ggagacacaaagcagacaaaaacacaggcgacccacaccaccaccaagcgcacaaccgcaaacacgcggggaggcacggccgg

SEQ ID NO: 76001 - RNA, 89 nt, Homo sapiens
cggggggccagcgggcacgggcacacgcggagaagagcaacggagaccaggcaccggagagagaagcggccagcggaaaggccacaacc

SEQ ID NO: 76002 - RNA, 80 nt, Homo sapiens
gagcacaacgaccaggaaacaggacaacccagagacgggcgagcagacacaccggcggagaagcaacaggccaacggcgc

SEQ ID NO: 76003 - RNA, 71 nt, Homo sapiens
cgccaacccaccccaccaaggggggcaggacacacggaacccaaacgcggcggggaacccaggaacgccaa

SEQ ID NO: 76004 - RNA, 57 nt, Homo sapiens
cacgaacaccaagccccgaagcacacagaaaggccaagccgacgccagcgggcgcca

SEQ ID NO: 76005 - RNA, 80 nt, Homo sapiens
agacccacaacaacccaagaagcgcgaccacaggaaaaacgagaccccggcgggcggagggggcggcggccccgaccgac

SEQ ID NO: 76006 - RNA, 68 nt, Homo sapiens
aagagcagcacccagcaagcagcgacaggacagaacagggagaaacagagagcaggcggaaagcggcc

SEQ ID NO: 76007 - RNA, 79 nt, Homo sapiens
cagagaagaacaagcccagagcgggggaagcgcgcacgacccccagagaagccaaggagaccgggagagagacgaagga

SEQ ID NO: 76008 - RNA, 72 nt, Homo sapiens
ggcgcgaggcggccaccgcgacccggccgcgccggcgccgaccccgcgcgccagggaagagagggcagcaag

SEQ ID NO: 76009 - RNA, 102 nt, Homo sapiens
gggccgggagaccaccacggcaagcagcccggaccagccccaacacggaggccaaccgaacgcgggacccccaggacacccggcccccaggccccaggccca

SEQ ID NO: 76010 - RNA, 91 nt, Homo sapiens
ggagaagcaaaaggaaggagcccgggccccccgcagaccagccaaggaagcaacacagcagcgagagaagcagaaaaagcagaagaaaaaa

SEQ ID NO: 76011 - RNA, 76 nt, Homo sapiens
aagaaagaaagagcagcggaaagacgacagcaacccgaagacagggaaaaggcaccaggcgggcaaacccagaaga

SEQ ID NO: 76012 - RNA, 72 nt, Homo sapiens
gcacagcaggggaaaaaacagagcggcgcccagagaaacagaggcgacccgcggcgagagcccccccagagc

SEQ ID NO: 76013 - RNA, 72 nt, Homo sapiens
gagaaacaggcacacaagggaggaggcaaagccagcgcagaaaggccagacagggaccgaacgacacaacac

SEQ ID NO: 76014 - RNA, 50 nt, Homo sapiens
acccagcaggaagcccagaagccagccagacaggcaaaccgacaccagcg

SEQ ID NO: 76015 - RNA, 58 nt, Homo sapiens
cccccaagcgccccgggggcgaccaggaagcaccagaaaggccaaggcacgagaacaa

SEQ ID NO: 76016 - RNA, 86 nt, Homo sapiens
ggacaagagggaaaagcgcggcggcaagaccgccagagaacgaccgaaggcagaaccagagaccacagaagaaggaagggccaccc

SEQ ID NO: 76017 - RNA, 68 nt, Homo sapiens
cccaaaggccacgaggaagagcaacacacgcagaacagaaggcagagggggcgagggaggaaaggggg

SEQ ID NO: 76018 - RNA, 73 nt, Homo sapiens
gccgccccgggccagcgagggcgcgaaagaaggaggccgcacagaggacggccaaagcaagcaccacgacaac

SEQ ID NO: 76019 - RNA, 84 nt, Homo sapiens
gggacaaggccacccacgggagaagcagcccaccacaaagcgcccgcgaggcgcaacaaaaagggaggggggaagacagggccc

SEQ ID NO: 76020 - RNA, 60 nt, Homo sapiens
caaccagccaccgaaaacgaggccacgaagacggcaaggaggaaaggaagaggaagacgg

SEQ ID NO: 76021 - RNA, 71 nt, Homo sapiens
gcggagggggacacccgggcggggcagagcagcccccagccagccgcgaggagcacccacgggaacagccc

SEQ ID NO: 76022 - RNA, 75 nt, Homo sapiens
cccaggaggaggagagggcaacaaaacccacaggacacaccggaacaaagaaaaccaaaacgcaacagaaacaac

SEQ ID NO: 76023 - RNA, 70 nt, Homo sapiens
gaccgcaccaggagcgcagaccagcgagaggagaccgggaaaagaagggggacgccacgcgcacacgcag

SEQ ID NO: 76024 - RNA, 79 nt, Homo sapiens
gcagccccggccaaacggccagacgccgacgcgaccagcagagacgacaggaaccccagagcccagcagaccaggcccc

SEQ ID NO: 76025 - RNA, 80 nt, Homo sapiens
cacagcgcacaagaaacccaagcgcgaggaccccacaaacccaggccgacacaacagcagagaaaacagcagacaagccc

SEQ ID NO: 76026 - RNA, 78 nt, Homo sapiens
acacccgcacggacccgggcgcagggccggagcaggaagcgcacacgccaaaggagagcgcggagaaccaaacccagg

SEQ ID NO: 76027 - RNA, 83 nt, Homo sapiens
gacgcagagccccagcggggaggcgcaacacgaggcgccgcagcacccgcgagcggacgggagcagcggaaggcccagaccga

SEQ ID NO: 76028 - RNA, 77 nt, Homo sapiens
ggacagggaggcccgcacaccccccggggacagaagggccgcccgggcgacgaacaccgccccggaacagcagagcc

SEQ ID NO: 76029 - RNA, 58 nt, Homo sapiens
cccagcccgggccagagaccggagcccgagagaggggagagcacccacacagacagac

SEQ ID NO: 76030 - RNA, 86 nt, Homo sapiens
cgaccaagcgaggcggacccgaagcggaccccgaggaagggaacagcaggccaggagcgacacaccacacaaccccacacagaggc

SEQ ID NO: 76031 - RNA, 84 nt, Homo sapiens
ggaaagagcaggcggcggcggcggaacgccaggcagggacagaaaggcagaagcaaacccacggggcgcccagcaggcggcgcc

SEQ ID NO: 76032 - RNA, 58 nt, Homo sapiens
gcgggaacaccggcgaaggacgacagcaaagggacacaaggacgagcaaaggaggacg

SEQ ID NO: 76033 - RNA, 76 nt, Homo sapiens
gaaacccagcagagacgcagccccaccacccgcagcacaaaaccagggcaaagcgggcgggcaagccacgagggaa

SEQ ID NO: 76034 - RNA, 41 nt, Homo sapiens
ggggaggaccacgacggacagcccaccgggggacggcacgg

SEQ ID NO: 76035 - RNA, 81 nt, Homo sapiens
ccccaagcaaaagggcaaacaagaggcggcagaagcacacaagaagacaccgcagcggcagccacgccacggacagaccag

SEQ ID NO: 76036 - RNA, 80 nt, Homo sapiens
gaaaaagaccaacaaaacgggccacaagagcgcagggagcccaccgggcgggccggccaagaacggccgagcgaccagga

SEQ ID NO: 76037 - RNA, 78 nt, Homo sapiens
ggagaaggaccaagaaccagacaacaggcacaaagagagaaggaacacccacagggcagacagagaaagaacacaaag

SEQ ID NO: 76038 - RNA, 77 nt, Homo sapiens
acggaccgagaccggaccgagagcggaccgagagcgcgaaacgcacgagaagaggaaccagaagacacaaaaagaca

SEQ ID NO: 76039 - RNA, 79 nt, Homo sapiens
aaaaggcgaagagcgaggaagaacaacgaaaaggagaggaacggcaagaaagcaagcagaaaccccgaggagggagacc

SEQ ID NO: 76040 - RNA, 39 nt, Homo sapiens
ggccaccgggaaggacagaagagagacgggcaccagggc

SEQ ID NO: 76041 - RNA, 71 nt, Homo sapiens
caggagagaagaccagaagggaggagaacagcagcgcccaaggacaagccaagcggcccaaaacccacgag

SEQ ID NO: 76042 - RNA, 78 nt, Homo sapiens
ggagggcgcgcggaggggaaaggcgccgaaaacaagccggaagacggagaaagaagaacaaacacaaaacacacaccg

SEQ ID NO: 76043 - RNA, 79 nt, Homo sapiens
ccaaacgccacgccacaggggcaccccgcccacggacagggccccagccccaccccagccccaaaggaggcgcgagagg

SEQ ID NO: 76044 - RNA, 56 nt, Homo sapiens
aaaggaaaacgcggaaaaccgacacaacaggaaccagggaaagagcagagggagag

SEQ ID NO: 76045 - RNA, 77 nt, Homo sapiens
ggaaggagcagcagaacgaaaaggaaacaggaacacgaaagaggaaaaacgcacaagaaaccgaagccaaggaggag

SEQ ID NO: 76046 - RNA, 52 nt, Homo sapiens
aaacaagcagcgaaacgagcagaaagagaaagcaaaacagagaaacaggaac

SEQ ID NO: 76047 - RNA, 83 nt, Homo sapiens
gagccgaggcgccgaaggaccgacgcccgggggaggggcgaccccggggcccggccagcacgaccgaggaggggcggacagcg

SEQ ID NO: 76048 - RNA, 90 nt, Homo sapiens
gcgaccaggacgcagccagcacgcacagacagcgcgaccagagacggaggcgaagccagacacaagagaaaaagcaacccaaaacagaaa

SEQ ID NO: 76049 - RNA, 59 nt, Homo sapiens
ggggccgaccagaaacaaaaaggcagaaacacaagaggaagcggcgcgaggcagccgag

SEQ ID NO: 76050 - RNA, 73 nt, Homo sapiens
caccacgcagaacgcaacaccaaggcacaccaccccagacaacggcaagcggagaagagcaaggccgaaccga

SEQ ID NO: 76051 - RNA, 80 nt, Homo sapiens
acaacaaaaacacaaaacggcgaccaaaaacagggaagggggaccacacaacgagggaagagcgcaccacgcgaaccgcc

SEQ ID NO: 76052 - RNA, 118 nt, Homo sapiens
gcgaaggaagaggcggacggcgggaccacaagacaacgcggagcggcgaagagcaaccagacaagcagaccggaagaccgacggaagaccacaccccgagggagcccaggacaccacg

SEQ ID NO: 76053 - RNA, 78 nt, Homo sapiens
ggagcagagacaggccaagggaacacgggacggccagcagaagcaggcgagccccccgagaaaaagaagaaacgcggg

SEQ ID NO: 76054 - RNA, 79 nt, Homo sapiens
gaggccccaagggcgagcgggaccgaggcggcaagaagcagacgagacggcggcacacaagcaggagcggcgacgacca

SEQ ID NO: 76055 - RNA, 84 nt, Homo sapiens
aggccgccagcagcagaaggccaccagccccaggcgcacagggcccggcagccgccagcagaagggagcaccgaagacgagcag

SEQ ID NO: 76056 - RNA, 48 nt, Homo sapiens
ccggggcagaccaaacggcaagaacccaggagcccccgcagggccccg

SEQ ID NO: 76057 - RNA, 75 nt, Homo sapiens
aaaacacaacaaaagaaaccaacaccgcaaggaggaaccccccaagggagggaagcaggggaacccgcccacaaa

SEQ ID NO: 76058 - RNA, 76 nt, Homo sapiens
gaacccggggccagagacgcgaagcccagccgagcagaggccccgagaccccgagagccgggcagccagccccccc

SEQ ID NO: 76059 - RNA, 79 nt, Homo sapiens
acggggaagcaggggaccgggagaagcacccacaaaacagcaccccggaggagccgggcacaccgagcccagacagaaa

SEQ ID NO: 76060 - RNA, 87 nt, Homo sapiens
gaaagcgggcggcaggcgagggagcccgcgcggcgagagcccacaggcccccacagagcgcacagcgaggaggggggcgcgcagccc

SEQ ID NO: 76061 - RNA, 33 nt, Homo sapiens
aacagaggccgaaaggcaaaggaacagagcaca

SEQ ID NO: 76062 - RNA, 80 nt, Homo sapiens
gcagccacaccacaagcagcagcggagagagaccccaggacacccgagaacaccccagggagaaaggaaaaaaagccaca

SEQ ID NO: 76063 - RNA, 76 nt, Homo sapiens
agcggcacccgggacaaggcagacgggagcgcaaggcgccccaaggccagacaaaacaggccaacacggcccagcc

SEQ ID NO: 76064 - RNA, 87 nt, Homo sapiens
cccagcgagaggccaaccaggccccgaggcgggaggcggcagaagcagccagaggagggcacaggcggcgcggagcgcgccgagggc

SEQ ID NO: 76065 - RNA, 39 nt, Homo sapiens
caacagagcgggccggggacggcaagccccacgggaaaa

SEQ ID NO: 76066 - RNA, 31 nt, Homo sapiens
agcaccccgcgcagcccgaagcaccggccag

SEQ ID NO: 76067 - RNA, 74 nt, Homo sapiens
gggcaaagacgcaagacaggaagcacaagaagaaaagacacaggaaaagaggccacagaacaacacgaacgcaa

SEQ ID NO: 76068 - RNA, 57 nt, Homo sapiens
gagccggccaggacacacaggccgaagggcaagagggcacagaagacggcgccccac

SEQ ID NO: 76069 - RNA, 59 nt, Homo sapiens
cgccaagacaagagcgggaagaaggccccagcaggagcagaccggcgggccgccgcccg

SEQ ID NO: 76070 - RNA, 79 nt, Homo sapiens
acaagcaggacgccccacacacggcccgggcgggaaggacaccccaaaaccagcggggggcaccagaagcacaacaagg

SEQ ID NO: 76071 - RNA, 77 nt, Homo sapiens
cccggccacaccaccaacggggaccccgggaggaaggcaggaaaaaagcccagcggagacgaggccacgaggaaggc

SEQ ID NO: 76072 - RNA, 79 nt, Homo sapiens
ggaaccgagacccagacaagcgagccacccaggacgaggccaggccgaaacgcaccgcaccaggcagaggcgcgggaca

SEQ ID NO: 76073 - RNA, 69 nt, Homo sapiens
ggaaaaagggagaccaaaaacgccaacacaggaacacagccaagcaggccaaagagcacagggacagaa

SEQ ID NO: 76074 - RNA, 76 nt, Homo sapiens
gaagagaccaaaaaaagaaaaaggaagaccacacccccgacagacccggaaaacagaacggagacagaaccgagga

SEQ ID NO: 76075 - RNA, 75 nt, Homo sapiens
aaagagcaagcgagcaaggggcgaccaaaggccaccggcgccagagcaagcccgccccgagccaaaggaagaaaa

SEQ ID NO: 76076 - RNA, 75 nt, Homo sapiens
cggcagggaccgcgcgccccgcgcgcccggcggcgcgggccaagcagaccgcgacccccgcacccacgccagcag

SEQ ID NO: 76077 - RNA, 76 nt, Homo sapiens
gacaggagggagccaccggggggaagcgcaggggacaaagacagccaccgcacggccgacacgacagcaacgccac

SEQ ID NO: 76078 - RNA, 85 nt, Homo sapiens
gggcgggcagcggcgccgggcacaggagggaagagcaagacaggaggaaccacagaccggaggaaaacacccagccaaggccaaa

SEQ ID NO: 76079 - RNA, 71 nt, Homo sapiens
cgccaagagaagggcacccgcacggccggcccggacacagaaagaaggaccaagggaggcgaggacacagg

SEQ ID NO: 76080 - RNA, 73 nt, Homo sapiens
agcccagcaagacccccagcgccgcccccaagccacacccagacaccagcagaagcccccccccgccggcccc

SEQ ID NO: 76081 - RNA, 107 nt, Homo sapiens
gaagggagacagaaggaaaaaggggagaaggaaccagacagcccaaacggggcccggagcagagacgagcggaagagacaggcgacgggaagaagaggagccagagg

SEQ ID NO: 76082 - RNA, 59 nt, Homo sapiens
cgccgacgacccagcagccgccaggccgcccgagaaaggaagcacgcgcgcggacaaga

SEQ ID NO: 76083 - RNA, 68 nt, Homo sapiens
caccccagcaccccaaacaccgcggcccagcaccagaccagcaccagacagcgaaaaagaggacccaa

SEQ ID NO: 76084 - RNA, 100 nt, Homo sapiens
ccacacggaaccgggaaggacacccaggcagacaaagccccccacagaaaaacgcaaagaaggaaccgaagaaaggccagaggcccaagcccaaaggagg

SEQ ID NO: 76085 - RNA, 62 nt, Homo sapiens
agagggagagccaaagaagagacaagggcagagccaagcgccgcccgggcccaagcacccgc

SEQ ID NO: 76086 - RNA, 77 nt, Homo sapiens
gcggcggggggaaaggcggagacggccccaccggcaccgagaaagacaagaggagagaccagcagcaaacccacgcg

SEQ ID NO: 76087 - RNA, 83 nt, Homo sapiens
cgaaccaacggcaaaaaccaagaaagagggggcaagaccggcacgacgcgggaagaggagcggaaaaacaagcaaaagaaaaa

SEQ ID NO: 76088 - RNA, 98 nt, Homo sapiens
gcagaggccagagacgggagccgggcccagagccgagagagcagaaccgcgcagcagaagaggcgcggggaaagacgagacaaacggggggggagcag

SEQ ID NO: 76089 - RNA, 78 nt, Homo sapiens
gacagaaccacacagacggaacggaggccggaggaagcaggcgaaggaaccacaaggcaagacaagagagcaaacacg

SEQ ID NO: 76090 - RNA, 61 nt, Homo sapiens
agaagcggagacaccaaagaaccccaggacaggagccagacaacgaagagaggaaagaagc

SEQ ID NO: 76091 - RNA, 63 nt, Homo sapiens
gaagccccgaggcagccccgcggaggagcagaagccaaaagaccaagggacagggaaaaaggc

SEQ ID NO: 76092 - RNA, 83 nt, Homo sapiens
gagcaccggccaggcgccggcgaccgaggggagagggaacgcagcgaaagcggaacgaaacaagggaaaagaaaggcggcgaa

SEQ ID NO: 76093 - RNA, 75 nt, Homo sapiens
aaacacccccagacaaagaagagggaccgccgggcaccacggcacccagagcacgcgcgcaggcggggagccccg

SEQ ID NO: 76094 - RNA, 73 nt, Homo sapiens
ccagcacacgcagaaacccaccaacgaagagcagcacgcaaaaaggaggccacaaagaagagcccagaggaag

SEQ ID NO: 76095 - RNA, 71 nt, Homo sapiens
cggcggggcgggaggaacgggggagcccacaggagccagggcagaaagaaagcaggaccagggggagggac

SEQ ID NO: 76096 - RNA, 82 nt, Homo sapiens
cccaggccgcccgacccaaagggaaaacagaaacagccacgacgagacaagccccaggagcaccaccaacccgcccgaccgg

SEQ ID NO: 76097 - RNA, 99 nt, Homo sapiens
aaggcgcgaacacaccaacacaagccaccgccaggaagggacaaagggccaggaccacacaaccacgcgaagagaggcacaggaggcacaagagagcac

SEQ ID NO: 76098 - RNA, 68 nt, Homo sapiens
gaacaaggcgacaacacagaagcagcgaacaagggaagaggaaacaacaagaacaaacaggacccagc

SEQ ID NO: 76099 - RNA, 75 nt, Homo sapiens
cgggcagaagaagaaaagaggagaggaaagagaacagcgccccgggggcagcggcccccaccgaggccggccacg

SEQ ID NO: 76100 - RNA, 65 nt, Homo sapiens
ccggagccgggccgcagcgcgaggccgggccgggggagaccgcgcgcaaggaagaagagacgccg

SEQ ID NO: 76101 - RNA, 70 nt, Homo sapiens
aacggagcacggagcgcagccgggggccgggaccccggcgggaaaacggcacaaggcgacgagggagggc

SEQ ID NO: 76102 - RNA, 74 nt, Homo sapiens
caacaacagcaacggaggcgggaccggaacaggcacaccccacacaagcacgccaaggacgcagcaaccaggaa

SEQ ID NO: 76103 - RNA, 72 nt, Homo sapiens
gggacacacccacacaacggccccaggcacagggcgcggacacacaccggagaggccaacccgaaggaccgc

SEQ ID NO: 76104 - RNA, 63 nt, Homo sapiens
gggagggacacacccaagcacggaccaaaggggagagagaagacaggcagagaaacccccgga

SEQ ID NO: 76105 - RNA, 93 nt, Homo sapiens
cggggcccaggcccggacccgcggccggcccggcgcggcccagcgccccagaccccaagaagaagcggaagaggagccgcggaaccaagacac

SEQ ID NO: 76106 - RNA, 47 nt, Homo sapiens
accaagaaccaggcaaaaacgaaccaagggaaggcccgacgaaacac

SEQ ID NO: 76107 - RNA, 57 nt, Homo sapiens
caaggacccagccggagacggggcccaggcgcacccaggcagaaggaggagggcaga

SEQ ID NO: 76108 - RNA, 57 nt, Homo sapiens
caccgcaggacagggaaagaggccaagggggaaacccagggaaagacaaggagccgg

SEQ ID NO: 76109 - RNA, 79 nt, Homo sapiens
ccgccgccgccaagcccggcccggcccgacaccgcgggccgccagacgggaaggcgcgcccggccccgccacccgacac

SEQ ID NO: 76110 - RNA, 78 nt, Homo sapiens
ccgacagagacggcggagaccccgaaggcgcaaacgacaccacccgaccggaagcgggacagggcgaagcagagacag

SEQ ID NO: 76111 - RNA, 41 nt, Homo sapiens
ggaaggagagcagccagcagaaccgcgcacacagaagcgga

SEQ ID NO: 76112 - RNA, 59 nt, Homo sapiens
gcgagccacagacgcaccaggcagcgagaggaagaaaggacacaaagcagaagaaaagc

SEQ ID NO: 76113 - RNA, 82 nt, Homo sapiens
caaaccgggcggggcccacagccagccacacccaccgcccgggcaggccacggcggagagggccgggcgcgcaccccgaacc

SEQ ID NO: 76114 - RNA, 61 nt, Homo sapiens
cggagcacaggagcggccagaccgaggcacaggggcaagagaaagcaggaagaagccaaga

SEQ ID NO: 76115 - RNA, 46 nt, Homo sapiens
ccgaggagcacgggaggagagaggaccccaagaggagagccaaaca

SEQ ID NO: 76116 - RNA, 73 nt, Homo sapiens
gcgcggagccaggaggggaagcgaggcgggcccgcgggaccaaggaaaccgcaagaagcaagcgaacagaagc

SEQ ID NO: 76117 - RNA, 75 nt, Homo sapiens
cagcggaaacgaaggaccaaaccacagaccaggacaggagagacaacggaggcaagaaagacggagaagcgagaa

SEQ ID NO: 76118 - RNA, 79 nt, Homo sapiens
gagaagagaaaagcaaagaaaagaagacaaaagaaaacagcgcaaagcagaagagccggacgagcgggagaggacacca

SEQ ID NO: 76119 - RNA, 74 nt, Homo sapiens
cagcgaaacagcccggccaaaagagcccgaaccgccagcagaagaaacggcacaagggcaggggaggcaggacc

SEQ ID NO: 76120 - RNA, 74 nt, Homo sapiens
ccaccgacgggaggcagccgcaacagccggcaagaccgcaggccccacaccacccccggaaagacagaacgagg

SEQ ID NO: 76121 - RNA, 70 nt, Homo sapiens
cgacacgagcccccaacaacagacaacaacccacagagggagagagccgagccaagagccagagaaccac

SEQ ID NO: 76122 - RNA, 79 nt, Homo sapiens
ccccgagcgccagaccagaccaagacaacgcccgacaaggaccggccgaccggccggagaggagggagaagcgacggcc

SEQ ID NO: 76123 - RNA, 94 nt, Homo sapiens
gacccggggggcgcgcccagagccccgcgcagcccagggaagcacaacaacagcaacggaggcgggaccggaacaggcacaccccacacaagca

SEQ ID NO: 76124 - RNA, 75 nt, Homo sapiens
gcccaaccgcgggaccaaccacccgagcggcgcggacgaagggcggagaacggaaaagcaccaggaagcagagag

SEQ ID NO: 76125 - RNA, 72 nt, Homo sapiens
caggcccggaccccaagaccaagcgcgccacgcgcggcgcgccgacaagcagaccggaagaccgacggaaga

SEQ ID NO: 76126 - RNA, 71 nt, Homo sapiens
gcccggggggacggggggaggcaggaccggaccgcaacagacaagcagaccggaagaccgacggaagacca

SEQ ID NO: 76127 - RNA, 70 nt, Homo sapiens
gcagggaggcccccagaaaggcaaaaggccccagggggaaggaaacagagcgcacccccaggggagaggc

SEQ ID NO: 76128 - RNA, 79 nt, Homo sapiens
caacggacaccgcaacacaagggagccggggcccccagcaagaacgggaacaaaaccgaggcgagagcagcaaggaaaa

SEQ ID NO: 76129 - RNA, 85 nt, Homo sapiens
ccggccgagaggaagacgagccgggaggaacggcccggaaacaggaggaccggggacgacgagcccacggcacaacggaccgaca

SEQ ID NO: 76130 - RNA, 62 nt, Homo sapiens
cccggcgccagccacggacgccacagagggaagaccccaaggagcaggaacccacacacgca

SEQ ID NO: 76131 - RNA, 83 nt, Homo sapiens
cggcaggcgaggagaaagcggcgcgcggagggcggagagcagccggagcccgggcaccccgagccgcgaggcacgggcccaaa

SEQ ID NO: 76132 - RNA, 78 nt, Homo sapiens
aacacccaacaccagcaggcgaagcgcgaaagaggcagaagaagggggagagccaaagaagggcccaacaagaacaag

SEQ ID NO: 76133 - RNA, 78 nt, Homo sapiens
cacgcccacccacccaagagagccagggagggaagccgggcgccaagagccagcccagccagggggggggggggaggc

SEQ ID NO: 76134 - RNA, 81 nt, Homo sapiens
gccaaagcagcgaagaagaggcccaacccccaccccgcccaaggaggcccagcggcgcgggggcaggcagggcgcgcgggc

SEQ ID NO: 76135 - RNA, 76 nt, Homo sapiens
cgcagggcgggaaagccggaggaacccgaacccaaaccgagccaaacaccaagagggcagcgacacccagacccac

SEQ ID NO: 76136 - RNA, 79 nt, Homo sapiens
cagagcaggagcaaacagccagaggagcagcgagccgcgccaccgccgcgaagcacagcgacccaggagcacgccgaga

SEQ ID NO: 76137 - RNA, 77 nt, Homo sapiens
gagcaagagaagggcgggcagccgagcccaggaacgcgccaggagagaggggcggagagcccggaaggagagccgac

SEQ ID NO: 76138 - RNA, 78 nt, Homo sapiens
ccccggagggcaggaagccagggcaggggccgccccaggccgcccagcgggcccggacggcgccagagcggcccgggg

SEQ ID NO: 76139 - RNA, 80 nt, Homo sapiens
aacccacagggcacacagcaccgggcgaaaaggaggaaaagaagccagaccgagggcggagaacggaaaagcaccaggaa

SEQ ID NO: 76140 - RNA, 74 nt, Homo sapiens
gcaggggcgaacgaccagccaacaacgggaccaggagcccaagaggacagagaacgaagcacagaaaagcagcc

SEQ ID NO: 76141 - RNA, 84 nt, Homo sapiens
cggggcgccgcggaccaacagcccaggaggccgagcgcgggaaagcagcggagaaccagggcacagcgcagcggagcgaggaaa

SEQ ID NO: 76142 - RNA, 68 nt, Homo sapiens
agacaaaagcagacccaaccaaggaaaggcacggccacgacagcgacgcagacacgcacgagaacccc

SEQ ID NO: 76143 - RNA, 37 nt, Homo sapiens
gcggacgggcagcggcgcggaagcccggggcggcgac

SEQ ID NO: 76144 - RNA, 70 nt, Homo sapiens
cagcacagccagggacgaaagggcgaaagacacacagaagccaggaaaggaacaaacaaaccacgaacac

SEQ ID NO: 76145 - RNA, 49 nt, Homo sapiens
ggaggccagaggaaggaaggggagaggcaaagcagaaagagaaaagcgg

SEQ ID NO: 76146 - RNA, 35 nt, Homo sapiens
gcgacaagacgagaacacgggcaacacgagacagg

SEQ ID NO: 76147 - RNA, 78 nt, Homo sapiens
ccggggcagggcccggccccgaccccgcggccggacgacccaagcccgcgagcaggagaggagcggccggcggaagaa

SEQ ID NO: 76148 - RNA, 72 nt, Homo sapiens
ggaaggggcaagcgaacaaagcagccccaaccacacccagaggcggagaacggaaaagcaccaggaagcaga

SEQ ID NO: 76149 - RNA, 56 nt, Homo sapiens
gagcgggccgcagcaccggggcacccaagacgaaccgagccaccgcaaaggcagac

SEQ ID NO: 76150 - RNA, 85 nt, Homo sapiens
ggagcaagagcgaaggcgagagagcacggaccaagcgggccacagcacccccgagaaacgggcgaaaaacgaagaaggaagacgc

SEQ ID NO: 76151 - RNA, 75 nt, Homo sapiens
aacccggaagcagaccggaggaaggcgagcgccgcgacccaaggccagccagccccaggcaccagcggacaggac

SEQ ID NO: 76152 - RNA, 70 nt, Homo sapiens
cgaccggaggcccaggagagggaaagaagaagcaagaagaagcgaggaaagaaaaagaaaccacacaaca

SEQ ID NO: 76153 - RNA, 76 nt, Homo sapiens
ccacagcaaagacggcaggagcagcggcgcggccacaccaccgaagcggcagaagcagcgcggaggaagaagacgc

SEQ ID NO: 76154 - RNA, 78 nt, Homo sapiens
ggcacaagaaggaacccgcaggagaccagacccacgacccaccgaagaaggaagaagaaagccagaggagaaagacag

SEQ ID NO: 76155 - RNA, 71 nt, Homo sapiens
ggagcagggcgggaggagaccggaggcagcacggcaggagacgaggagaggacagcaggacacccggaccc

SEQ ID NO: 76156 - RNA, 79 nt, Homo sapiens
cggaggaaacagcacacccagaggagaggaggcaaagcaagagcagccaccagcccaaaagggaagagacgagggacaa

SEQ ID NO: 76157 - RNA, 74 nt, Homo sapiens
agccggcccaccagccggcaagccaggccaaaggcgccaggaaggagggaaagaaaagaggcccggaagagagc

SEQ ID NO: 76158 - RNA, 74 nt, Homo sapiens
gccggacggaaagcgacaagggaggcgccgccagcggccgggaccgaacaggcggccgcaggagggaagcgcac

SEQ ID NO: 76159 - RNA, 68 nt, Homo sapiens
gggggaggaggcaacgccgcgccacagcagacgggggcacaggcagagggaggagagaaccccagccc

SEQ ID NO: 76160 - RNA, 76 nt, Homo sapiens
ggaaggaaaagggacaagcaagagcaacaacagagaaagggcgcaaaaagaaagaaaacaaaagccagccaaaaac

SEQ ID NO: 76161 - RNA, 79 nt, Homo sapiens
gcccaagcgccccccccgccccccaggaggggcgagagggagccgcagcgagcagcacgcaaacaagagaacgggccca

SEQ ID NO: 76162 - RNA, 78 nt, Homo sapiens
acagaacaacagaagaggagagaggaacccgaagaagaaaggacgacagccagagagggaacagccccggccgacagg

SEQ ID NO: 76163 - RNA, 38 nt, Homo sapiens
aacaccagaacaaaaggcagaaacagcaaaccccagag

SEQ ID NO: 76164 - RNA, 66 nt, Homo sapiens
cacccccccccaccgaaccgcggaagacacacgccccggggaaaacgaggcgccggaacaccgacc

SEQ ID NO: 76165 - RNA, 80 nt, Homo sapiens
ccacaggggaccaaggcgagaggggccagggggcaaccaggccccagggaaggcagagagggcaaaaaacacagacaccg

SEQ ID NO: 76166 - RNA, 59 nt, Homo sapiens
agagcacagaagcccccacagaccagaagagagggagaaaccaaaaaagaagagagagg

SEQ ID NO: 76167 - RNA, 79 nt, Homo sapiens
cggaaaccggagcgcgcagcagggcaaagaagacgagaccaacgcgcgggagcgccaaaagcaccaccaccaaaccaga

SEQ ID NO: 76168 - RNA, 78 nt, Homo sapiens
cggggaggcagcgcgggacccagcccaggcggcgcggacggggcgggaagcgccgcaagagaggagggccaagcaaac

SEQ ID NO: 76169 - RNA, 68 nt, Homo sapiens
agcccaccacaaaaacgaaggcggcggggaagaacgcgccgaacaccaagccccaaagaagaaaaaga

SEQ ID NO: 76170 - RNA, 85 nt, Homo sapiens
gccccaggggagagggaccgccaggagccgagcaagaagccagcgaagagagggggaaaaccccagacgccagaaagcgccaggc

SEQ ID NO: 76171 - RNA, 87 nt, Homo sapiens
acgcccgggccaccaagcaaggggaccaaaagaacccagccaacccgcagagggaggggaggggcgagcggaggagagcggggccca

SEQ ID NO: 76172 - RNA, 56 nt, Homo sapiens
accccaagcaagcagggacaccaagaagggcggccgggggggcaacaaccagagca

SEQ ID NO: 76173 - RNA, 78 nt, Homo sapiens
cccacgaaccaaaagggacggacaaaggaacaggaccagggagaaaccggaaaccgacaaggcaacagggcccagcgc

SEQ ID NO: 76174 - RNA, 78 nt, Homo sapiens
ccgacggcagcagcgggaagccaacacagaaaccgccacagggggagccgccaccaaaagcagacggaaaacccacgg

SEQ ID NO: 76175 - RNA, 56 nt, Homo sapiens
gggcccaacccaacggacacggaacaccagacaaagccacagacccaagcagcgga

SEQ ID NO: 76176 - RNA, 68 nt, Homo sapiens
gcacgcagggcgcggaggggccggcccccggagcgacagaaacaagggaagcgggaccaacgaagaca

SEQ ID NO: 76177 - RNA, 55 nt, Homo sapiens
ccggcacgaggaggggccgcgaaagcaccgggaggaaagagagccacacgaagaa

SEQ ID NO: 76178 - RNA, 73 nt, Homo sapiens
agcagaggcgccacccagcaagccagcaccggcgcagggaagaaagaaagacaagcccggagcccgggagaca

SEQ ID NO: 76179 - RNA, 48 nt, Homo sapiens
aagggaggagcagcccaacagaaggacaaggagaggaggagacccggc

SEQ ID NO: 76180 - RNA, 85 nt, Homo sapiens
gcaagcgggacgcccccggagcagccaggacacgcaggcgccaaacacccaaagagaagagcaccaggccagggggccaaaaccc

SEQ ID NO: 76181 - RNA, 72 nt, Homo sapiens
ggccacgaggaaaaagccacaaggaagcgacccggaaccgggaaaccaggcaagaagcaacgaagagaacag

SEQ ID NO: 76182 - RNA, 76 nt, Homo sapiens
gggagcagagcacccgaaagacagccccagggggcgaacaagggacacgagcacgcgacggagacccacgagaacc

SEQ ID NO: 76183 - RNA, 72 nt, Homo sapiens
ccgagccgggaaaagcgggcgcgggaagcaaggaaagagaggcgcggccagcgaagaagacgcagccagacc

SEQ ID NO: 76184 - RNA, 77 nt, Homo sapiens
caggcaccaggacagcggcggcgggccgggcagcccggccgacaaccacgagaaaggacagggacaggaaagaaaga

SEQ ID NO: 76185 - RNA, 82 nt, Homo sapiens
ggggacccaaggaggggacccgaggcccgcccaggagacagccacaacgacccagggggagaaaacacaacgggcgaccagg

SEQ ID NO: 76186 - RNA, 81 nt, Homo sapiens
aaagaaaggacagagagaaccagcagcaaagcaaccagggagagcaccaggagcaccagggagcaggacccagccgacgcc

SEQ ID NO: 76187 - RNA, 76 nt, Homo sapiens
cagccacgcagggccaccaaacagagaccccgaaggggaaaagacaaacccaaacggagaaaaaaaagacaagaca

SEQ ID NO: 76188 - RNA, 88 nt, Homo sapiens
ccgcggcagaggcggacacgggacacgccacagcggcaggggaccaaaagaacccagccaacccgcagagggaggggaggggcgagcg

SEQ ID NO: 76189 - RNA, 79 nt, Homo sapiens
gaacaggcggcgcgcgcggcgcgggacgcgcgcgggcacccacggagccccggggcggcccaggggacacccagcaggc

SEQ ID NO: 76190 - RNA, 80 nt, Homo sapiens
cgcacggcaagaggacgggccaccacgcaaagagcaaagaacacgggccacaggagggacggaaacagacgacgacacgg

SEQ ID NO: 76191 - RNA, 72 nt, Homo sapiens
agacaaaagggccaaagaagggagagagcaaaggcgccagcagagggaggagaaagcccagcagcagcagca

SEQ ID NO: 76192 - RNA, 81 nt, Homo sapiens
acaaccagcccaaccacacgcaacaaccagcagcacagaggaaagaccacagcaagaccacgcccccagccgggggaccag

SEQ ID NO: 76193 - RNA, 86 nt, Homo sapiens
gacgggaagcgcgaccagagccaggagggcgcggggacgcaacccaacagagagggggagagaagagccgaggacaccgaggccac

SEQ ID NO: 76194 - RNA, 70 nt, Homo sapiens
cgaccagcaggaacgggaaacacaaagaagacaccagaagggccagcaccacgacaacacggcgacagac

SEQ ID NO: 76195 - RNA, 74 nt, Homo sapiens
acaacacaagaggcacgagagggaagaccaaggaccaagaacccccgcccggagccaagcgcgggaagggccca

SEQ ID NO: 76196 - RNA, 75 nt, Homo sapiens
cgcccgggaccggcgagaaggccacaaccaagagaaacaaccagcgagaagaggcgacaccagggcccaaagaac

SEQ ID NO: 76197 - RNA, 62 nt, Homo sapiens
cccccaagagcgggaaacagggagggacggcagcaagcgggacaaacaccaaggagccgggc

SEQ ID NO: 76198 - RNA, 78 nt, Homo sapiens
gcgggccaaggccgcgccgggcgggacgggggggcggcccggccccgcagacggggaccccaccgcccacacgcaaag

SEQ ID NO: 76199 - RNA, 62 nt, Homo sapiens
gagcggcaagcagggcgcagacggagcggagcgaccgagagagaaaaggcccaaccagcaga

SEQ ID NO: 76200 - RNA, 76 nt, Homo sapiens
gaaaaaaggaaaaacacgacggagaaaaacggagggagaaaaagcaagaggaaagcaggaggagcgcacgacggga

SEQ ID NO: 76201 - RNA, 78 nt, Homo sapiens
cacaacggcaagggagcccaccagaaacacagccagacacgacgcaaacagcagacggaagaccccacggcaaaacca

SEQ ID NO: 76202 - RNA, 70 nt, Homo sapiens
caagagcacaaacaacaaggcagaagacaaggagagggccgccagacacgagaacacaggagaacagaca

SEQ ID NO: 76203 - RNA, 76 nt, Homo sapiens
ggagaccagcagcccgaggcaccgacgagaggcagaggggcgggcaaaggagaggcacaggaagcagaggcaagaa

SEQ ID NO: 76204 - RNA, 35 nt, Homo sapiens
gaacacgaagccagaaagccgccgaggcacagaga

SEQ ID NO: 76205 - RNA, 87 nt, Homo sapiens
ggcgagcgagaacggagagaaggcggcaagaggcagaagagggaggggacgcacaaccaaggcacagccagagaacaacacacacac

SEQ ID NO: 76206 - RNA, 74 nt, Homo sapiens
ccggaagggcaccgcgacgacaccccggggaggcgaggagagaggccggaggaacaccgagaggggaacaagaa

SEQ ID NO: 76207 - RNA, 71 nt, Homo sapiens
ccccacagaggggcgacgggcaaggaccacgcgagacaacgagggcgcggaccaacagaggggaccccacc

SEQ ID NO: 76208 - RNA, 76 nt, Homo sapiens
cagcagaccaaccacagcccaacagcagcccagcaaaaagccacgccggaaccggaaacacaccagaggcgcagca

SEQ ID NO: 76209 - RNA, 74 nt, Homo sapiens
acaaagcagcccaaccaaagggccgggaacgggaaacgcgcgccgagaagccacccgccgagagggagcggcca

SEQ ID NO: 76210 - RNA, 68 nt, Homo sapiens
cacaccccaccaaaaaacacagaccaggaggagaaaaggaaccaaagaaggagagacgggggcaccag

SEQ ID NO: 76211 - RNA, 49 nt, Homo sapiens
gcagggcgcccccgggcggaccgcagacaagccagcacccaagagaccc

SEQ ID NO: 76212 - RNA, 85 nt, Homo sapiens
cagcggaggcggcggagcggaagaaaccgggagaagccggccaggcaggcacaccccaccacaacgccacacgaccagccaggac

SEQ ID NO: 76213 - RNA, 53 nt, Homo sapiens
aggcggcaggccgagggcgacacaacccaagacacgacagaaggccaacgagg

SEQ ID NO: 76214 - RNA, 78 nt, Homo sapiens
acaagacaaagaaacaaaagaaaagaaccgggaaagcccaacggaaaaagaagaccaccggacagcacggagaaaggg

SEQ ID NO: 76215 - RNA, 80 nt, Homo sapiens
agaccaggacggacaagcacagccggaagaggcggggcaccaggcccagacggcgaacccgagcaagcaaccaccgcccg

SEQ ID NO: 76216 - RNA, 77 nt, Homo sapiens
cagaacgagagccagacaggcaaaagcagaccggaaaacccaccggcaagaccacacccgaggggagcccaggacac

SEQ ID NO: 76217 - RNA, 75 nt, Homo sapiens
gcaccgcgcgcgccccgcacccagggcacgcgcgcccgcgcagccagaaaaggaaccacagaaggagggaggcag

SEQ ID NO: 76218 - RNA, 81 nt, Homo sapiens
gcagccaagaaggccaggggagcggcaggaaggccaccacagggccaacaagcagcgagaaccagacccaaaagagcaaac

SEQ ID NO: 76219 - RNA, 79 nt, Homo sapiens
ccaggcgacgagacccagggcaggcgggccgcccacgaacgggacccgaaaagggggagcacggcaaaaagcacgccgc

SEQ ID NO: 76220 - RNA, 107 nt, Homo sapiens
cagccacagggagcagaagagcacggccaggcgaagcccagaaggaaggaaaaagcaaaagggcccaaggcccgaccaggaacaaagagagaaagacagccaagcca

SEQ ID NO: 76221 - RNA, 97 nt, Homo sapiens
cccccacgacgacccgccagacgaggcgacgccgcaaggacggccacggcagacaagcagaccggaagaccgacggaagaccacaccccgagggagc

SEQ ID NO: 76222 - RNA, 83 nt, Homo sapiens
gggaaggcggggcgacccggggggcgcgcccagagccccgcgcagcccagggaagaacgagagcccagacagagaaagcagac

SEQ ID NO: 76223 - RNA, 87 nt, Homo sapiens
accaccgcggacgccacaaagacaccaggaggaaccaggcggaccccagccaggccacggggacaacaggcagcagcgcagcgcaca

SEQ ID NO: 76224 - RNA, 81 nt, Homo sapiens
ggcccagcagcgcagccgcagccgggcggcagggccccgagccggcccgggcgagaaacggaacaccgggcagagagaaca

SEQ ID NO: 76225 - RNA, 77 nt, Homo sapiens
cggaaaaccgaccgagggaagggaacggaaacagaggaggaccccaggaaaggcaggaggaaggcaaccagggcgag

SEQ ID NO: 76226 - RNA, 40 nt, Homo sapiens
cgaaaaggcaccgaagcacggccccgagcggcagccaggc

SEQ ID NO: 76227 - RNA, 75 nt, Homo sapiens
cacgagcgaaggaacacaggccaccagagaagaaacaaacacccgacaagcaaaaaaggccagagacgcgcacga

SEQ ID NO: 76228 - RNA, 78 nt, Homo sapiens
agcccaccacccacccgagcggagaagcgaggacacacaggaaaacaaagccacggaaaaacgcccggggaaaagcag

SEQ ID NO: 76229 - RNA, 56 nt, Homo sapiens
aagccagagcgaggacgccggcagaaccccggaaaaggagacagaagcgcaagaac

SEQ ID NO: 76230 - RNA, 76 nt, Homo sapiens
gccccggagccaaggcggagaaaacggaagagccaacgcgccaccagcaaaaccagagaaacaggcagagaaagac

SEQ ID NO: 76231 - RNA, 85 nt, Homo sapiens
gcaaaaacagccccacacaaagcagaagaagaccgaagggaagacccagagcccaaggaggaagggcacaagagacaagccccgg

SEQ ID NO: 76232 - RNA, 84 nt, Homo sapiens
acgagcaggaccgcggccacgccccacgggacaacgccagccggaggccacaggaagccgcacagggcagcacacacccaagac

SEQ ID NO: 76233 - RNA, 71 nt, Homo sapiens
ggacccggcgacacggggcaaggggagcgggcgcgcgcgaccgcgccccggaggagaacgaaaacccacca

SEQ ID NO: 76234 - RNA, 78 nt, Homo sapiens
cgagcaggaagacaccaggaagccaggccccaccgcacggcaaggggaggaccgcacacagcagcacagaacacacga

SEQ ID NO: 76235 - RNA, 74 nt, Homo sapiens
ggaggcagccaagaggaacagcaggaaagaccagcaagcgcagagccgggacaaggagggacaccacgaaacac

SEQ ID NO: 76236 - RNA, 79 nt, Homo sapiens
ccggcgggaggaggcgagggcacgggaaaagaacgcaagcacaggaccagaaacgaaaggcagcagaagaggaaagcca

SEQ ID NO: 76237 - RNA, 78 nt, Homo sapiens
cgcgggcaacggcgggacagcaaaaagacccaccaaggaagcagcggccacgccaggacccaaaaggcgggcgaaaac

SEQ ID NO: 76238 - RNA, 80 nt, Homo sapiens
cggccccagcccgccaggaccgaggacgccacgacacaggacagcgccagcccaagccagcagcgcccggggcgggcccc

SEQ ID NO: 76239 - RNA, 70 nt, Homo sapiens
cggacccagccgccgcaacacaggacggggaaagaccgaggcaccgagagcagggaaaccagcagcagag

SEQ ID NO: 76240 - RNA, 65 nt, Homo sapiens
gcagaggaagaacacaaaggagaggcagacaacacacacgcagagcaagaagggaaagaacggca

SEQ ID NO: 76241 - RNA, 85 nt, Homo sapiens
agccggggaagggagcgcccaccagaggagcgaaagagagagagaaccagagagcacagagaaagcgggaaacggccaaacagaa

SEQ ID NO: 76242 - RNA, 74 nt, Homo sapiens
gaggccccccagccagggaaccgcggcacgaagacccgaagaaacacacgggcaggcggaaaggaaagaacccg

SEQ ID NO: 76243 - RNA, 75 nt, Homo sapiens
caacaccggaaaacaccccagaggaaccagacaaaacaccccgaggggcccacaggaagagagaaaacacagcag

SEQ ID NO: 76244 - RNA, 98 nt, Homo sapiens
cagcagaagccggcgcgcggaggggcccgccaccagagcacacagggcggagaacggaaaagcaccaggaagcagagaggaccgcagaagggaaggag

SEQ ID NO: 76245 - RNA, 56 nt, Homo sapiens
aagaaaaaacaccagaggaaacccagcaaaacaaaccgaggccggggcagcagaag

SEQ ID NO: 76246 - RNA, 84 nt, Homo sapiens
cggagccggagaacggccaggcggccccgagcggaacggagaaagcgaggcggccgcacggacccgccggccaggaggacaaag

SEQ ID NO: 76247 - RNA, 73 nt, Homo sapiens
ggccccaagacccggccggcgccgcggccgcggacgcaaacagcagacggaagaccccacggcaaaaccacac

SEQ ID NO: 76248 - RNA, 68 nt, Homo sapiens
gcgcacccccgcgccgcacggggacgagcccgagcgggaagaagccgcagcaagccgcagcggcgcgc

SEQ ID NO: 76249 - RNA, 69 nt, Homo sapiens
ggagcgcgcccggcccgccccccgcaacgagaaccaagagaaaaaccggaagggaaacccgcgacaccg

SEQ ID NO: 76250 - RNA, 81 nt, Homo sapiens
acaaaggagcagggaagaaggaacacgaggcagggggccacacgcaaggggaacaggacgccaggaaagcaggcagagcaa

SEQ ID NO: 76251 - RNA, 74 nt, Homo sapiens
acacgcccacaaagcccagaagaagggcaccagcgaagggggggaacgagagaaaaaacaccagggcggccgaa

SEQ ID NO: 76252 - RNA, 82 nt, Homo sapiens
agacggagcgaacgccacacgggccacgagagaagaaagaaaaagaaaccgccagcccagagacacgaaagggacagagagg

SEQ ID NO: 76253 - RNA, 77 nt, Homo sapiens
ggacagcccccagaaagccagcgccgaggaggcaccaggcacacacagcggacaaaacggggcaaaggacaaagaaa

SEQ ID NO: 76254 - RNA, 74 nt, Homo sapiens
acgggccccaccgagccccagacggcaagcgggaccggacaccggaaaccaccccaagccagcgaagcgggacc

SEQ ID NO: 76255 - RNA, 73 nt, Homo sapiens
gcaagacaccggacaccgagggcccccaaaagggagggggcccccaagcaacagcagcccagagaccagggac

SEQ ID NO: 76256 - RNA, 88 nt, Homo sapiens
agcggccggacagcgccacggcgggccgcgggaggacaccacccacagcaagccccagccaagacccaccaggcaggggaagaagaca

SEQ ID NO: 76257 - RNA, 56 nt, Homo sapiens
agcgggaaaagggaacccacaggcaggcaaacaagagaagaggaacggacaaccca

SEQ ID NO: 76258 - RNA, 76 nt, Homo sapiens
aacacaaacccgaaggacaggacaaaccccaagaagcccggcacggaaaaaggagggaagagaagcagaaacaaac

SEQ ID NO: 76259 - RNA, 58 nt, Homo sapiens
aagaggcagccaccacgggccggggcagaagcaggcacggcagacccacaacagcacg

SEQ ID NO: 76260 - RNA, 83 nt, Homo sapiens
ccgcgccgccgcgccgcccgcggccccggccccaacaggcccgcgcccagagccccgcagggggacaacccacggcacccggg

SEQ ID NO: 76261 - RNA, 75 nt, Homo sapiens
agagccacggccccaccgcaggcaccaccacaaggggggccccgggaggaaaggccgaacaggaaacacaagaga

SEQ ID NO: 76262 - RNA, 80 nt, Homo sapiens
agagaagcagccggaaagcccagaacagcacgagccccgcgggcaaggagaggggcaaaggaaagcccgccccacaagag

SEQ ID NO: 76263 - RNA, 83 nt, Homo sapiens
cccagagcccgacccgcgcgggccgagagccgccccgaacgggggcccccccgccggacagggaccagaccccacaagaaaac

SEQ ID NO: 76264 - RNA, 62 nt, Homo sapiens
cagcagaaccaggaagccacacaagaggaggcaggagcgaacaaccgccggcgcagagacac

SEQ ID NO: 76265 - RNA, 75 nt, Homo sapiens
ggaaaacgcaccaccaccacccccgaaccaacacaagggcaaaccccacaggagaaggaaaagaaggaacacacg

SEQ ID NO: 76266 - RNA, 69 nt, Homo sapiens
cgcccaccccacgaggaagggccacagagcacacagagggggaaccaacgagcagcgagaagagggaga

SEQ ID NO: 76267 - RNA, 72 nt, Homo sapiens
cgcagagcggaaccaggcacccagcacgaaggaggaaccaacaacaacacaaggagacgcaagccgaacaca

SEQ ID NO: 76268 - RNA, 77 nt, Homo sapiens
cacagagaagacgaaggaggccggagaagaaagaggccacggaccgcccaccgggacaccgacccaagcccagcaga

SEQ ID NO: 76269 - RNA, 56 nt, Homo sapiens
aggggaagaggaagcaaagccaagaccccgaccggagcagcggagccgcggaagag

SEQ ID NO: 76270 - RNA, 70 nt, Homo sapiens
aggaacgaacaacccacagcggagcaggaccagcagcagcaaccacgcaaggaggccgagcaggaccaac

SEQ ID NO: 76271 - RNA, 68 nt, Homo sapiens
acaagccaggccgggaaaggccaacagaacaagagagaccaggggagccaaagcagggagggaaaaga

SEQ ID NO: 76272 - RNA, 90 nt, Homo sapiens
ccgcagcccggaagacacaacccccgccagggacgagaagaaggggggcccgccaccccgacgaccagggcggggcgccgccccagcagc

SEQ ID NO: 76273 - RNA, 84 nt, Homo sapiens
gccacagcaccccagcacccaggagagcacaacaggaaagcaaaggaacaaggagaaaaaaggggaagaagcgcggcgaccagg

SEQ ID NO: 76274 - RNA, 77 nt, Homo sapiens
gggcaacgagaaagagacgggggccgacacccagcacggccgaagagaacggcccagcacaacccgcagccacaaga

SEQ ID NO: 76275 - RNA, 75 nt, Homo sapiens
caacacagcgccaccgcggcacccagggcccagagccacagcaaccagcggggggaaccccgcacaacagcacac

SEQ ID NO: 76276 - RNA, 84 nt, Homo sapiens
cacagccaggacaccggaaccgggaaaggggggacagacagaaaagcgaagagcagagggaggagaggacgaccggccacgcag

SEQ ID NO: 76277 - RNA, 74 nt, Homo sapiens
aaccaccccagagggagaaccccaggacacacggccagaagagacgacaggcgccaaacgagccagagcccaca

SEQ ID NO: 76278 - RNA, 58 nt, Homo sapiens
cacagacccgccagagagagggccagcgcgcccggcgggccagccccaggaagcacgg

SEQ ID NO: 76279 - RNA, 63 nt, Homo sapiens
ggaccgagagcgcgaaacgcacgagaagccccgaagaagaggccgaccggacaggaagacaga

SEQ ID NO: 76280 - RNA, 64 nt, Homo sapiens
ccgagcggagggggcgaagagacgccagaagaacgaggaggagaaggacggaacaagggagacc

SEQ ID NO: 76281 - RNA, 33 nt, Homo sapiens
caggagcaggaacccgaggcgaggagcccgagc

SEQ ID NO: 76282 - RNA, 95 nt, Homo sapiens
ggcgacgcggcgcgggcggcgcgcgaggccagagccagggcagcggccagaaccaagccgccacagggagaaaagagcagaggccgaccccagga

SEQ ID NO: 76283 - RNA, 76 nt, Homo sapiens
ccgcaaacaaaacccggccacaacaacgggacggaagagaaaagcaaaagaaaaagaagagagaaaagagcagaag

SEQ ID NO: 76284 - RNA, 77 nt, Homo sapiens
gacagcgggcaaccccggggcccccagcccacacaacccggcccggccgcgccgccccgcaaggcaacggggcccgc

SEQ ID NO: 76285 - RNA, 83 nt, Homo sapiens
cggggcagacaacggagcccgggcacgccaggaaagagagaagaaaaccgaacaacaaaccagaacaagagagacgacaaaca

SEQ ID NO: 76286 - RNA, 54 nt, Homo sapiens
aaacgcgaaaaggaaaccaccaaagaaccagccaaagcagaagaagacgaggag

SEQ ID NO: 76287 - RNA, 83 nt, Homo sapiens
ccaggcccccagccaccgcaggcgggagagagggaagagagaagccccgggcggagagcgaagccaccaacaggaccacacgc

SEQ ID NO: 76288 - RNA, 85 nt, Homo sapiens
ggccccgcagccggcccagccgcccgccaccggcccgcggcgccccagaggaccggccagaacggccgagcgaccaggagaggag

SEQ ID NO: 76289 - RNA, 67 nt, Homo sapiens
acagaagcaccggccagggcaccggggcccggcgcccgggcccgccccggaggcggcggagaaacca

SEQ ID NO: 76290 - RNA, 67 nt, Homo sapiens
aaagaagacggacagggcacacagaaccgaaaaagagcgggcgccaaacagaacagcacaggcggaa

SEQ ID NO: 76291 - RNA, 81 nt, Homo sapiens
caacaagcagccaagcccagacaagccccagggaagccacagcaccccagcacccaggagaaaacgagggaaggaaccaga

SEQ ID NO: 76292 - RNA, 79 nt, Homo sapiens
ggaaaccccgcccacagcacgagggcccgccccaccgggggccaccccagggaggagaagagggacccagaaggcgagg

SEQ ID NO: 76293 - RNA, 59 nt, Homo sapiens
ccagggaaggggcagcacaggccaagcgaccacgcaaaacaaacacgccagaggaaagg

SEQ ID NO: 76294 - RNA, 63 nt, Homo sapiens
cacacaaagggaggccacagaaggaacacaggcaggcgcagaccaagagcagacgaggccgga

SEQ ID NO: 76295 - RNA, 54 nt, Homo sapiens
gaagacgaggcgaaggccgaaccccggcacaacgcagacacaacgccagggacg

SEQ ID NO: 76296 - RNA, 76 nt, Homo sapiens
ggcgcgggggccgcgcgaagacaggaccagggcacggaggaacccggcaccagccgggcaaaaacccaaaccaaca

SEQ ID NO: 76297 - RNA, 76 nt, Homo sapiens
ggacgccggagaggcaggcgcggcccgcggggcgccaggcacgcgaggcccccaggccagccaaccccagcacccc

SEQ ID NO: 76298 - RNA, 76 nt, Homo sapiens
gggcccgcggccgccgcgccccgagggcagccgcacgccaacaagggccgccgcgggcagcggggaagaagaaaag

SEQ ID NO: 76299 - RNA, 65 nt, Homo sapiens
aaagcgggacaaaccaggcagagacacaagcaaaagccccagccaacaggacagcacaagaccgg

SEQ ID NO: 76300 - RNA, 64 nt, Homo sapiens
gccgcgacgaaaccagggccacgcgaaggcacgcgaagccccggagggcaagcccaacacggcg

SEQ ID NO: 76301 - RNA, 84 nt, Homo sapiens
gccagggagagacccaaaggccaccggcgccagagcaagcccgccccgagccaaaggaagaaaagcgagccggagcaaacgcgg

SEQ ID NO: 76302 - RNA, 70 nt, Homo sapiens
gccccacaacgcaggagggggcggggcaccggaaacaccacccagagaccagaaagcaggcaaagagaaa

SEQ ID NO: 76303 - RNA, 74 nt, Homo sapiens
ccagccgcacgccccagagaaggagacccaacaccccggccagacgggccaccaggccggcgccccacgcccgg

SEQ ID NO: 76304 - RNA, 62 nt, Homo sapiens
ggaccgccgggggaccggaacgaaagccacacgcaagcacggcagcccacaggcgccccagg

SEQ ID NO: 76305 - RNA, 59 nt, Homo sapiens
cggcccccggaaccggcccggcggcaccgaaggaccaggcgacgccggaccgcgaagag

SEQ ID NO: 76306 - RNA, 60 nt, Homo sapiens
caccgggcacagcaccacaacaaacagcccggaaaaaaccgaacagaaagaccgaaaacc

SEQ ID NO: 76307 - RNA, 77 nt, Homo sapiens
agagggagcaccacggaccccaaggaagccacggcagacacacaacccgacccgacgagaaaaggacgagagggaca

SEQ ID NO: 76308 - RNA, 66 nt, Homo sapiens
caccgagagcaaccacagcggagacagagggcgaaccaaagaaggaaggcgacccaaaaccacgaa

SEQ ID NO: 76309 - RNA, 73 nt, Homo sapiens
aaagaacgaacccaaaaggagccaggagaaaaaggacagggggggccagagcacagcacgagaacaaaaagcg

SEQ ID NO: 76310 - RNA, 77 nt, Homo sapiens
caaacacccccaccgcccaggcaacaaaggccaaaacagaagaggcaaagcccagccacagcagcagcccagcagca

SEQ ID NO: 76311 - RNA, 81 nt, Homo sapiens
cgcgaacccaggagcgcaaagagaaagaacaagaacacgcagcacggcggagcaggagcaaaggagcaagaaaccagaccc

SEQ ID NO: 76312 - RNA, 76 nt, Homo sapiens
ccccacccacccgagaacaaacagagagaagggcgggagaaaccaaggaaagagaaaagcgggaggcgagggaaca

SEQ ID NO: 76313 - RNA, 80 nt, Homo sapiens
aagcgccccaaggcccccgcgggcagacagacgccgcagccaggagggagggacaccggagaccgaagaacggaagcgca

SEQ ID NO: 76314 - RNA, 55 nt, Homo sapiens
cgcccgcgcggcgcggggaccgcggcccgcaaggggcgaacgccacggggggccc

SEQ ID NO: 76315 - RNA, 78 nt, Homo sapiens
gcgacaagggagagccagaaaaggagacgaaacggagacagaacagacagaaaaaacaacaagaaacccacaaccaag

SEQ ID NO: 76316 - RNA, 79 nt, Homo sapiens
caggcccgcgaacacacgccgccaccgggaggcccagggaagcagacccgcccgggcgcagcaggggcccaaagacgcc

SEQ ID NO: 76317 - RNA, 89 nt, Homo sapiens
gagaagagagaaaaccacggacaagaaagcgccaaaaacaacaccaaaaagccgcagggagcaagcaaaccccgaaaccacaccaccag

SEQ ID NO: 76318 - RNA, 75 nt, Homo sapiens
ccgccaccaaaccgcccgagggaccaggccgcgggagagcgggggcgggaggcgggccccgggggcagcaccccc

SEQ ID NO: 76319 - RNA, 75 nt, Homo sapiens
acgagcgacgaagacagccgggcagccggacgggaccacgaggagcaacggcgagccgcgaagccacccccggga

SEQ ID NO: 76320 - RNA, 72 nt, Homo sapiens
gggcgagggcgacggaaaccaagccaggcggcggccggggcagcgccgcgagccagcaacgggggaaggcca

SEQ ID NO: 76321 - RNA, 74 nt, Homo sapiens
cagaggagaagcaaggcgacgccagaggaggaaaggaagacaagcacccgagggagagcgcaccaccccacgcg

SEQ ID NO: 76322 - RNA, 57 nt, Homo sapiens
agggacagaccaaaccaaggccgggacccccgggagaggggcggaacacagcccaca

SEQ ID NO: 76323 - RNA, 61 nt, Homo sapiens
accggagagacaaaaaagcagcccccagccaaggagaagcgccacacagcaccgagagccg

SEQ ID NO: 76324 - RNA, 75 nt, Homo sapiens
caccgcgcaccggagagcagccgcgggcacagccggggaggagaggggaagcaaggggacaagaggacaagcgaa

SEQ ID NO: 76325 - RNA, 66 nt, Homo sapiens
ccgacgccaggcagcgcccccaaacgacagaggcgggcgagcggacgaaacagacggccacagagg

SEQ ID NO: 76326 - RNA, 52 nt, Homo sapiens
ccgaagagacccaaccaccagagccggaaaggaaaaacaccagaacggaaac

SEQ ID NO: 76327 - RNA, 52 nt, Homo sapiens
gagaggagggggcaccgagcaacgagggcaggccacacaacgagcagaaaag

SEQ ID NO: 76328 - RNA, 77 nt, Homo sapiens
gcaacacggccacggacaagaaggccggagcagccaccccgaaccagcggaacagccggcagcccggagggccgccg

SEQ ID NO: 76329 - RNA, 75 nt, Homo sapiens
ccaaaccgacgcccacaagcggccgcgagggaggcaaagcgaaggaagcaaaggagcggaacgagagcaaagaag

SEQ ID NO: 76330 - RNA, 82 nt, Homo sapiens
ccagaagagcggaccagggcgcgccagcaccgccaccagagcgcccgcgcgggaccccagagggaacacaccacgcaggggc

SEQ ID NO: 76331 - RNA, 74 nt, Homo sapiens
cggaccaggcacgcacaaaaagggcgcgaacagcaagaaaaccagcccagggcaagagggaacaacagacaaag

SEQ ID NO: 76332 - RNA, 74 nt, Homo sapiens
gggcaggaacgcacagaaggcccaaggcccaggcagcgcagacgaaacagcgcgcagaagccaacagaccccgc

SEQ ID NO: 76333 - RNA, 36 nt, Homo sapiens
gcgacgccgcgcgaggggcgagacagagcagccgcc

SEQ ID NO: 76334 - RNA, 82 nt, Homo sapiens
aacacgacaggagggcaagaccgcacggcgaagacaaacacccacagagggccacacaggaccaggcggacaagacgggccc

SEQ ID NO: 76335 - RNA, 46 nt, Homo sapiens
cgacagggaggaaccgggaggggacagggagaggccggcacggccc

SEQ ID NO: 76336 - RNA, 76 nt, Homo sapiens
gccacggccacacgcccagcgagcgccccacacagacaagcagaccggaagaccgacggaagaccacaccccgagg

SEQ ID NO: 76337 - RNA, 70 nt, Homo sapiens
cgcacaagagaccgggagagaaggccagcgacagccgggaggccccggggcagaagagcggcgccgagga

SEQ ID NO: 76338 - RNA, 72 nt, Homo sapiens
caaaaagcaaacggaccagaccgaccaccaaaaacaacacgcaaacggaagaaaaaagccacacccaaaagg

SEQ ID NO: 76339 - RNA, 77 nt, Homo sapiens
ggggcaagaccgccccacagcacaccaccaacgcccccggagagacaccccaccggcagagaaagcaagagacgcaa

SEQ ID NO: 76340 - RNA, 70 nt, Homo sapiens
cagggcccggaccggcacccggacaggaggagccagggcccggcccgaaaggagagccgcccaccaagcc

SEQ ID NO: 76341 - RNA, 52 nt, Homo sapiens
ccggcagacgacagagagcgaaggggaagccaacagcgggacaaacggacag

SEQ ID NO: 76342 - RNA, 69 nt, Homo sapiens
aaccacagcccgcgggaccacagcaggacgaagcaaggaagagaaaggaaccgcccgaacccggaccag

SEQ ID NO: 76343 - RNA, 86 nt, Homo sapiens
acggcaaaagcacaaggaccgcggacagagacaacaccgagagagaaggacaccgaacagaaagggacaaagggacagagagccac

SEQ ID NO: 76344 - RNA, 38 nt, Homo sapiens
gaaagacagcgggacccgaaaagcaaaggcccacccag

SEQ ID NO: 76345 - RNA, 58 nt, Homo sapiens
agagccgcgcacgcacagacaagcagaggaacaccaagacaagaccggacgcacacac

SEQ ID NO: 76346 - RNA, 76 nt, Homo sapiens
acggaaggacgccagcacaacaccggcgcgaggccgacgagaaaccccaccacgcggcaggggccgccgaggaaaa

SEQ ID NO: 76347 - RNA, 39 nt, Homo sapiens
acaaaaaggacgccggcaaccaagaaaaaaaggaacgga

SEQ ID NO: 76348 - RNA, 35 nt, Homo sapiens
aacacccccgccagccagagagacggagcgcaggg

SEQ ID NO: 76349 - RNA, 88 nt, Homo sapiens
gacgcgccgggcagcaggccgagaagcggcacacacgggacccgaagcccagcggcccccgaccccaaggcacggaacaagagaccca

SEQ ID NO: 76350 - RNA, 67 nt, Homo sapiens
gaacgcgaacccgccgcgcccgacagacggcaaagcggcagggaagcggcgaagagacagagggaaa

SEQ ID NO: 76351 - RNA, 74 nt, Homo sapiens
cacccagcagccaacgcccagcggaccagggccacccgcaggcccacaaccgggccaagagacggagcagcaga

SEQ ID NO: 76352 - RNA, 72 nt, Homo sapiens
acagaaaaagaagaggcccaccagacagagaccagcagacgacagagagagggggaagggccaaaagaggaa

SEQ ID NO: 76353 - RNA, 69 nt, Homo sapiens
gaaagagacaaagaagagggacagagaaagacgacaggcaaggacgaagaaaccgaacaagaacgaacc

SEQ ID NO: 76354 - RNA, 80 nt, Homo sapiens
ggacaggcgagaaccaggagccgagcgacgccaaagggaagaacaccacacgcaacgggagccacggaacaaaagcgcgg

SEQ ID NO: 76355 - RNA, 75 nt, Homo sapiens
acaggaaccaccgaaagcggcgcaacgaggggcgagcaccaaagccaaggaagcccagaagaaagagcacccccc

SEQ ID NO: 76356 - RNA, 69 nt, Homo sapiens
ggacaaacaggaaagagacaggcaaaaggacccgggcgaaaccaccagagacagcaagcccgcacccac

SEQ ID NO: 76357 - RNA, 64 nt, Homo sapiens
ccagcgcccccggggcaaacccgagccagaccagagacggaggcaacaacgggcaaaggcagag

SEQ ID NO: 76358 - RNA, 49 nt, Homo sapiens
agacgcgacagagcgagaaccgcaaagaagccaaaaacaacacagacga

SEQ ID NO: 76359 - RNA, 67 nt, Homo sapiens
gccggggccggggcgccgccgggcggccgggcgcggcgagcccagagaggcgggacccaggcagaca

SEQ ID NO: 76360 - RNA, 84 nt, Homo sapiens
gcacagcgcgggagagccgggaccggccgggaagcggccaccgacacgcagcagcggccaggccagcaagacagaaccgccaaa

SEQ ID NO: 76361 - RNA, 78 nt, Homo sapiens
aacaaaagcaccccacgcacaaggagcgagcagaacacacagagccaccaggaaacgcaagcagaaccaaccagaccc

SEQ ID NO: 76362 - RNA, 98 nt, Homo sapiens
cgcaccagaagcaaaaagacagccaacaggcacgagaggaaaaccaacacggggagcaccccaccccacagccaaaggcgcgacccagagcgccaacc

SEQ ID NO: 76363 - RNA, 69 nt, Homo sapiens
acgggacccagcaaaggggcggacagcagcccaccacagacaggagcaacgggaaagcccaccagcggg

SEQ ID NO: 76364 - RNA, 76 nt, Homo sapiens
ggcaccagcacggcacggccccagccggacaggacaaaaggacacaacccacacaagaggagaagagaacaggccg

SEQ ID NO: 76365 - RNA, 80 nt, Homo sapiens
agaaaaagcaaaaacgaaggaccgaagcgaggaggaaccgacgggaggcccagagcagaacgccgcgaaaaaagaaggag

SEQ ID NO: 76366 - RNA, 82 nt, Homo sapiens
agagagcggacgggccaacccaaaaccagggcggcaaaacgagcgggccagccgaggggggcgccgggccacggggacccgc

SEQ ID NO: 76367 - RNA, 75 nt, Homo sapiens
ggacgccagcagcaaaacggcggggaaaaacgcaggaccaaaagaaggcaaaagggagcaaagccacacggccac

SEQ ID NO: 76368 - RNA, 76 nt, Homo sapiens
ggaccaaaggccgggcgcagaacccccagaccacacaaccacgacggcagagacaggagaggagagccacgcccac

SEQ ID NO: 76369 - RNA, 52 nt, Homo sapiens
ggaagacaaagacacacggcgaaagagaaggaacagcaagagacaggcgaag

SEQ ID NO: 76370 - RNA, 70 nt, Homo sapiens
aacccaaccccggggaaaagccccccgccccaaagcgcccccaccagaacgggaagaacacagacaagaa

SEQ ID NO: 76371 - RNA, 43 nt, Homo sapiens
cccgaggcccagaggaggaggccgcgcacgaagcagggccaca

SEQ ID NO: 76372 - RNA, 62 nt, Homo sapiens
ggaccaacagcgcgcaaggaggaagagaagcacaggaaaaggaccagcagacagcgcaagca

SEQ ID NO: 76373 - RNA, 76 nt, Homo sapiens
gaggaagcaggaaggaccacccaagacaccagcggggcagaagaggggcagaaaagaggcacacagcgcgcgcagg

SEQ ID NO: 76374 - RNA, 83 nt, Homo sapiens
agccgggcgcccggcgaaggagccgcggcggggggaaaaggagccccaccaagggacgccgaggaggagacccagagccagag

SEQ ID NO: 76375 - RNA, 74 nt, Homo sapiens
caaagaaagaaacaagcggcaagagaggcaccccgaagaggcgaggagcaacccaggcggcgaaagagaaggga

SEQ ID NO: 76376 - RNA, 75 nt, Homo sapiens
cccccgcaacaacccacaaggggccgccagagcaagaaccaggcacggagaaggaaaaggacccaccagggaaag

SEQ ID NO: 76377 - RNA, 81 nt, Homo sapiens
cgcagaggcggcggggcgagagggcggcgaaggaggcagaggcacagcgcaggcgagaacaggggacccaaaccaacaggg

SEQ ID NO: 76378 - RNA, 58 nt, Homo sapiens
gcagcacgaaaccaagacagggagcccacacccaaagaaagcaccgggaggaaagaga

SEQ ID NO: 76379 - RNA, 66 nt, Homo sapiens
acccagacagagaacggaaccgcaaagaccaacacaccgagcaagacgagacagaacgaaggaaca

SEQ ID NO: 76380 - RNA, 81 nt, Homo sapiens
cccggagcccagggaagcagccgaccagccgcggagccgggggcagggaacagaaagaacagccaaaagagaaagaccggg

SEQ ID NO: 76381 - RNA, 60 nt, Homo sapiens
ggagagaacagggcagaccaaagggagagagaccaggccccacccgacgccaccacagac

SEQ ID NO: 76382 - RNA, 75 nt, Homo sapiens
agcgaaaagggccgggccaagcaggacaacgcacaaccaccgcgaacaggccgcgacagccaccaaagcagcgcg

SEQ ID NO: 76383 - RNA, 59 nt, Homo sapiens
agcacgcagcgagcgagaagaggaggacaacagcacaaccgggggaaacacgccgcacc

SEQ ID NO: 76384 - RNA, 59 nt, Homo sapiens
gggggcggccgggacggaggacgcgcaggccgcaggagggaagcgcacggaaaccgccc

SEQ ID NO: 76385 - RNA, 64 nt, Homo sapiens
aggaacaacaagaaccaagccacagcgggaccagcaccgccgaagggaacagccgggcgaacca

SEQ ID NO: 76386 - RNA, 57 nt, Homo sapiens
ccgccgaggcccagagcgccaggccgcacgcccaaagcggaaacgcggaagagaccg

SEQ ID NO: 76387 - RNA, 82 nt, Homo sapiens
aagaggacgggaggagcaccagccgggggcggcgccccaaccgaacgaacgacagagagacgcaaaagaagaccaccaaccc

SEQ ID NO: 76388 - RNA, 58 nt, Homo sapiens
ccgagcccaacgacaggacacaaggggagacagaagacacaagggagaaagaacccaa

SEQ ID NO: 76389 - RNA, 85 nt, Homo sapiens
ccggagcagccggaccagcccagaaggcagcggcggcccaggccagcacccgcagccgaagcacacgccaacgccgggggagaac

SEQ ID NO: 76390 - RNA, 82 nt, Homo sapiens
agccagaagcgaggccggagagcacaagaggacgcacacggagaaaagcccagggagaccaaccaagaagcgaagaaaagag

SEQ ID NO: 76391 - RNA, 87 nt, Homo sapiens
aaggagggagagcagggccagaggagcggggcacgcggcaacaccagaccagagaagaagcgggggacaggggggaccagacaacca

SEQ ID NO: 76392 - RNA, 87 nt, Homo sapiens
ccacagacagagaacacgcaaagaagaaacaaaaaaagcacaaaacagagcaaggcaagaaggcagcggaaccaaaagacgaaacca

SEQ ID NO: 76393 - RNA, 52 nt, Homo sapiens
gcacaccggaccaggaaacggaggcgggacgccgccagccaccggcgcgaag

SEQ ID NO: 76394 - RNA, 79 nt, Homo sapiens
cccacacgaggccacccagcccaccaaacacgccggaaaccccgcccacagcacgagagacgaggacgcgcacaggaaa

SEQ ID NO: 76395 - RNA, 38 nt, Homo sapiens
cacacaacccgacccgacgaaggagccccggacaaaac

SEQ ID NO: 76396 - RNA, 53 nt, Homo sapiens
gcacaaagagaaggccaaacccaacagacacggaccagagacaggaacacaaa

SEQ ID NO: 76397 - RNA, 57 nt, Homo sapiens
cccaggcccgacagagcaccacgcaccagggcccggacgcccgcccggcgcagcggc

SEQ ID NO: 76398 - RNA, 78 nt, Homo sapiens
ggcagacccgaagcaaagggacaggagaccggagaaagcaaacaaccccgccacagccccacccccgaaaagcgccgc

SEQ ID NO: 76399 - RNA, 77 nt, Homo sapiens
ccacaggccgccccaacaccagggaagagacacacccagcggaagccgcagaaggaccggccagaagcaagccggag

SEQ ID NO: 76400 - RNA, 92 nt, Homo sapiens
cagccaccagcagacagcagcaaccagcaagccccccaggagccaacgaaaccagccccagcaagccccacaaaggaaagagcgggacaagc

SEQ ID NO: 76401 - RNA, 52 nt, Homo sapiens
acaggcaacaccaaggaggcaccagacaagcaacggggcggcacacaaggag

SEQ ID NO: 76402 - RNA, 80 nt, Homo sapiens
cggccgcgacgcaggcgcacggagacccgccggcaagggagagacacagaccaagaacaagccagcaagaggagccacaa

SEQ ID NO: 76403 - RNA, 50 nt, Homo sapiens
aggaccccagaggcaccgaaacagcggaccggagagagacagcaaagccc

SEQ ID NO: 76404 - RNA, 75 nt, Homo sapiens
gaggggaagaggaagcaaagccaagcagagacccccacccgggaagacacggacccccccgcgacagggcagcgg

SEQ ID NO: 76405 - RNA, 70 nt, Homo sapiens
ccgagcaaagaaccaaccagaacacacgacaagagggggcccgcccgcccgacacaaagccccaaggaac

SEQ ID NO: 76406 - RNA, 69 nt, Homo sapiens
gccgcccagggcagggagcaaaaggaagaaacagaagagaagaagacgccgcaaagaacaaagaagcca

SEQ ID NO: 76407 - RNA, 72 nt, Homo sapiens
agcaacaacccgacagagcagggagacaaggcaggaaacaacggcagaccacacgggaggaggagcacacac

SEQ ID NO: 76408 - RNA, 76 nt, Homo sapiens
ggcccggaaaagcaggccgaggaggaacaacggcgccggaaaaacggcacgccgaaaggggacgagacaccaaaac

SEQ ID NO: 76409 - RNA, 75 nt, Homo sapiens
cggacagggacaagaacggaaccgcgaagccaagaccccagccaccccccaagggggaaccaggagaccaagcag

SEQ ID NO: 76410 - RNA, 76 nt, Homo sapiens
ccacggccaacaccccccagcggcccacagaccagaaggcaccagacggggggacacagccagggcgcaggcagcg

SEQ ID NO: 76411 - RNA, 88 nt, Homo sapiens
gccggacgccagcggacacgcgggcgagggagcaccgcggacgccccagggcacaccgcgcaccagcgagaggaggagaaccggccaa

SEQ ID NO: 76412 - RNA, 78 nt, Homo sapiens
gaaacggacaagaacggaccgaaggccacaaaaccacgacacggcaggaaggagaaagacagcaaagaaaaggagaag

SEQ ID NO: 76413 - RNA, 79 nt, Homo sapiens
gccggaagaagggagagcagaagccgcgaaaaaggggggccgaggaaaaaaaggaacggaaccgaacagaagaaagaga

SEQ ID NO: 76414 - RNA, 93 nt, Homo sapiens
cccgagccgcaccgccgaccccaggcagccccgcacgagcggcaaccgaaagccagcagcggaaagcaccgggaggaaagagagccacacgaa

SEQ ID NO: 76415 - RNA, 87 nt, Homo sapiens
gggagcaggacggcgagggccaaacgcgcagcgcaggcacgcccgaggacaagcccaaccagggaccaggccaaaaccagacgccac

SEQ ID NO: 76416 - RNA, 39 nt, Homo sapiens
agaggccaacccaaagaaggcgccaaacaagggaaccga

SEQ ID NO: 76417 - RNA, 59 nt, Homo sapiens
ggaagaggcggcgggcaacccccggagcggccagaagaagcacggcaaaccgccgcacc

SEQ ID NO: 76418 - RNA, 78 nt, Homo sapiens
cggagaacaccagagcaaagccaccccccgaggaaaaacaaagaaggccaagaagacgacacaaaaggagcaccgagc

SEQ ID NO: 76419 - RNA, 82 nt, Homo sapiens
cacccgggcgaggcagagaagggccaggagaggagcacgaggacaggccccgacgaggacaggacaagagaaaaaaagggcg

SEQ ID NO: 76420 - RNA, 74 nt, Homo sapiens
gggcgggaccccgccgcggcgggagggaacagagacgcaggcaagagcgcggaggagagagccaaaagaagggg

SEQ ID NO: 76421 - RNA, 78 nt, Homo sapiens
ccaaccaggccacggcgccgaccgggagaacgagaagacaaggccccagggaaaccccaaggacccccggccacagga

SEQ ID NO: 76422 - RNA, 77 nt, Homo sapiens
ggcgagagcggcagcagcaccagcccaagagaaggcgccggcggcagagcggggagacgagacaaccgccccgccgc

SEQ ID NO: 76423 - RNA, 83 nt, Homo sapiens
gagcgggaacccgggccaacaggggcaggaggcacaaggccacacaacggaccacacaagcagggagcgcaccagcccaccga

SEQ ID NO: 76424 - RNA, 80 nt, Homo sapiens
cgggcccaaggccgcgccgaccgcacgcgcacggaacagcagcaaccccaggaagaaaccgacaagaacaaacgccggga

SEQ ID NO: 76425 - RNA, 62 nt, Homo sapiens
aaggaccaagaaccagggggacaggagccaggccaagagaaagaaacacagaagcgagcacc

SEQ ID NO: 76426 - RNA, 68 nt, Homo sapiens
gggaaagcaaacgccgaagggacaaggaaggaccgaaggaagaggaagcagagaggcaagagggacga

SEQ ID NO: 76427 - RNA, 80 nt, Homo sapiens
gccggcccggcgcggcccagcgccccaggaacggagcacagccaaccccagaaacggccagggaaggccgggcaacagca

SEQ ID NO: 76428 - RNA, 75 nt, Homo sapiens
acaagcccacaagaaagaagaacgagacagacacagcaccaccaaggacaaaggcacaaaacgcacaaaagccca

SEQ ID NO: 76429 - RNA, 74 nt, Homo sapiens
gcccagccagagacagccacaaagggaagcaagagaaaaagaacaacgcggacaaaagacccacaccgaaggac

SEQ ID NO: 76430 - RNA, 75 nt, Homo sapiens
aggggaaggcgccgaagaggacgaagagacggccggcaacaagcgaggggggaggccaggcgcccagaacggccg

SEQ ID NO: 76431 - RNA, 76 nt, Homo sapiens
ggcggcaagagcgccaacaggaggagccggccagcaaccccccagccacacggccgcacaccgccccccaggccgc

SEQ ID NO: 76432 - RNA, 71 nt, Homo sapiens
gaggaaagccaaagagcgaagagagaaacaggcaaaagcggaacaagaaagcagagccaaaggcagcgacc

SEQ ID NO: 76433 - RNA, 79 nt, Homo sapiens
ccaaggaagacgaacgcaccccagagccgacccccaccgcaagggaccaagaaaggcccagggaccaaagcccggacaa

SEQ ID NO: 76434 - RNA, 72 nt, Homo sapiens
gcggccgaccacccggaaaggacacagaaagagggaggacaagaaagggcgaccgcaaaggggcacaaggag

SEQ ID NO: 76435 - RNA, 58 nt, Homo sapiens
ggcccggcccgacaccgcgggccgccagacgggaaggcccgccgcccgcagccaaccg

SEQ ID NO: 76436 - RNA, 74 nt, Homo sapiens
cccccaaggcggacaaccacccggcaacaaacaccggcccaggaggagggcccgggaagacagggcgaaacccc

SEQ ID NO: 76437 - RNA, 59 nt, Homo sapiens
cacagcccagagagccgacgagacgaggaaaacaacggagcacgcaaagcaagccggca

SEQ ID NO: 76438 - RNA, 71 nt, Homo sapiens
ggggcgaggaggccccaagggcgagcgggaccgaggcagagggagcagaagaagggcagaaaggacccgaa

SEQ ID NO: 76439 - RNA, 80 nt, Homo sapiens
gcagccgccacgaccgggagccccgcacccgcccggccccacgggccgagacaaacgaaggaggcccaaccacaaaagga

SEQ ID NO: 76440 - RNA, 84 nt, Homo sapiens
agaaaccagccacccgccgcgccgacgccagggaccccacgccgcgaggaggaaggcgaacaaggaccgcgacaccaacagcga

SEQ ID NO: 76441 - RNA, 56 nt, Homo sapiens
ccaccaacccgccgagccagggaggaggccaccagaaacggccagcgagacccgga

SEQ ID NO: 76442 - RNA, 74 nt, Homo sapiens
accacccaccgagggaccaggcacagaacacaccagaggcggaccaagaccccaggaagccccggggcaggccc

SEQ ID NO: 76443 - RNA, 71 nt, Homo sapiens
gcaaagagcagaagagcagcacacccagccccaagagcaacagacaaggcgcccgcgaagagcccgcggcc

SEQ ID NO: 76444 - RNA, 54 nt, Homo sapiens
acaagcgcaggaacacggcagacgggagagagcccaccaaggaaccacgaaacc

SEQ ID NO: 76445 - RNA, 95 nt, Homo sapiens
gaaaacggcgagaggggcgagaacgccacgcgggccggcgaaagcggacagcccagagcaagcacacggaggcccgggagccagaccgggagccc

SEQ ID NO: 76446 - RNA, 89 nt, Homo sapiens
ggcgaagcgggcgagcggggggacgccggcggagacgcgggcgagacagcaccaggcccgaagcagaaaacagagggaaagaaacagcc

SEQ ID NO: 76447 - RNA, 79 nt, Homo sapiens
caggagagcgccccagggcaagccccgcccggccaacaagcgacagcagcaaacaagggcgccggacgccagcgacaaa

SEQ ID NO: 76448 - RNA, 80 nt, Homo sapiens
gggcgggaccggcggcgcccggagccggcgggcgccacgagggacgcccggcccaagggacgggcgaagagcccgagcac

SEQ ID NO: 76449 - RNA, 76 nt, Homo sapiens
gcagaagagccaaggaaaaacagcaagaacccaaaaggaggcagaaggggggcccaccagcggcacagccggggag

SEQ ID NO: 76450 - RNA, 73 nt, Homo sapiens
ccgacgagcgaagaagcggaggcgcgacccaacagcacgcccccaagaagcgcccaaacccaaaagaggagag

SEQ ID NO: 76451 - RNA, 51 nt, Homo sapiens
gaaccgaaccgaggcaaaagaaagacaacgacaaacgggccagacagagaa

SEQ ID NO: 76452 - RNA, 79 nt, Homo sapiens
gaagacggagccaacagcaagggcggcccgccgcacgcgccagcgcgggcacggggaggggaggccccgggaccagccc

SEQ ID NO: 76453 - RNA, 84 nt, Homo sapiens
caggcgcgaccgaggccccccgaaccccaaggccaacagagagaagagaccagagaccaggccaccagggcgcggccaccgcgg

SEQ ID NO: 76454 - RNA, 70 nt, Homo sapiens
acccccaccggccaggcgagaaaggcaggaccaggcgccccgacccggccaaccaccacggccgagcgca

SEQ ID NO: 76455 - RNA, 57 nt, Homo sapiens
ccccgcacaccggagcacccggacaacgaccaccgcgacccaacaagccaaagaaca

SEQ ID NO: 76456 - RNA, 76 nt, Homo sapiens
cccaaacagagacaacaggcacaccagccaccaacaacaccagggacacaacagcaaggagcagaaaccgaaacac

SEQ ID NO: 76457 - RNA, 82 nt, Homo sapiens
cgggcgcgggcccacgcggcgcagcagagcaccggccagaacaagccaaggagccaagacgagagggacacacggacaaaca

SEQ ID NO: 76458 - RNA, 82 nt, Homo sapiens
cgcggcgcgggcggggcggaggcgaggagaaggaggagcgggccgggaggccgccgccagggccccgcggacgccgggccgc

SEQ ID NO: 76459 - RNA, 81 nt, Homo sapiens
cccagcagcgccagaggcggcacggccagcggcaccacccccagcaccaccccagccccgcgcccgggaacccagaccagg

SEQ ID NO: 76460 - RNA, 41 nt, Homo sapiens
gagaaaaagggacggcagcggaccagcagcaggggccagga

SEQ ID NO: 76461 - RNA, 77 nt, Homo sapiens
cggcagccgacagcggacggcgcggcccagaacagcgaaaccaaggcgagggcgaaaaagagaccgaaacaaacccg

SEQ ID NO: 76462 - RNA, 81 nt, Homo sapiens
gccgagagacacgaagacaggagcaaggagaccgaacccgggccacccagcggagcgggcacggacacaagaacgagagcc

SEQ ID NO: 76463 - RNA, 79 nt, Homo sapiens
gaagggaagcccacgaacacaaagcaggagggagagggccaagaagcagcggacacgaaggaggcagaaagggagcccc

SEQ ID NO: 76464 - RNA, 78 nt, Homo sapiens
ggagcaccgcgcaaaaaaacgggacagcagggaagaacggaaaccagagaaagaaacgcccccacacaaaagcgagac

SEQ ID NO: 76465 - RNA, 55 nt, Homo sapiens
ggacgacccaaacacaaaggcggcaaggaagaggcccggaaagggaaaaaccgag

SEQ ID NO: 76466 - RNA, 81 nt, Homo sapiens
gcaccagcccagacacggggacggaacaccgcgggccaccccaagcgcccaacggggcacccccgacccaggaggcaaaaa

SEQ ID NO: 76467 - RNA, 84 nt, Homo sapiens
gcgacggagagggcagaagaggaggaggaaaaagaggaagcggagaccagggaaggaacgagccaggaagagggacggaaccac

SEQ ID NO: 76468 - RNA, 61 nt, Homo sapiens
cgaaggcagacgggaaagggggccaaggccgggccaccagaggaaggcaggaagcaggccc

SEQ ID NO: 76469 - RNA, 69 nt, Homo sapiens
agagcccacccgagaagcgggagaaggagcaccgagacgacgcaacaccaaaaaggcaaggacagaacc

SEQ ID NO: 76470 - RNA, 76 nt, Homo sapiens
gcccggcgccggcccgggccgccagggcaggcaagcgggcaggggcagaggggaagcaccgcaagaaccggagaaa

SEQ ID NO: 76471 - RNA, 79 nt, Homo sapiens
ccaaccacgaacgcggacgacccggcgagggcccaccacgagcccgaaggggaggagacagagcagaaaaaagaaaaag

SEQ ID NO: 76472 - RNA, 57 nt, Homo sapiens
caaagccagagcacaaaagccagacgccaaacggcacagagcaaggccacacacacg

SEQ ID NO: 76473 - RNA, 81 nt, Homo sapiens
gccgggaaccaggacgcacagcccaagaagaagggggaggggaacaggaggaggaagaaagaagaggccacagagggagac

SEQ ID NO: 76474 - RNA, 62 nt, Homo sapiens
gaaccccaccggaggaggagcagcggacaggcggacccgagccccaaagacagaaaagcccc

SEQ ID NO: 76475 - RNA, 77 nt, Homo sapiens
acagagacacaagaaggagaaggcacagggcccaggccggaggcagggcggaccggccgcacaaccaccaccccagc

SEQ ID NO: 76476 - RNA, 59 nt, Homo sapiens
cccagccagccaccaggggagaggcgaggaggagggacgcgggaggagagacagaccac

SEQ ID NO: 76477 - RNA, 64 nt, Homo sapiens
ggcgggagggcgaggccaagagggagaccaccgggagggcaggggcacaagaccgaaagagcag

SEQ ID NO: 76478 - RNA, 82 nt, Homo sapiens
ccggcccagcgagaccggacaaggagccagaagcagaccacccaccagcaccccaggggaaaaagaaaagggcgaagacccg

SEQ ID NO: 76479 - RNA, 114 nt, Homo sapiens
aaccagcccccaaagaaggcagggagccccccagaagcacaaaagaccggcaagcaggagcgcgggcgcggagacacagcggccagagcagcgaccgcgggcacgaaacacgag

SEQ ID NO: 76480 - RNA, 72 nt, Homo sapiens
caagccgagccaaccgcgaaaggagaagacggaccagggcaaaccgacacaaagcgagagggaacaggacgg

SEQ ID NO: 76481 - RNA, 73 nt, Homo sapiens
caacaagcgggagcccaacacccacacaacacggcaaggaacgccaggagccagaaccccgaggaaaggggaa

SEQ ID NO: 76482 - RNA, 89 nt, Homo sapiens
agaccccggaaggggcccaaaggcgaaggcgccgaccagccagagccaagcgcggcagcaccagccccccagcacagcccacagagcca

SEQ ID NO: 76483 - RNA, 54 nt, Homo sapiens
aagcaccaccgggggcagcaacggacagggcccaaacagacaagggcgacaccg

SEQ ID NO: 76484 - RNA, 77 nt, Homo sapiens
gccccgaacccaagcccaacacccccggccagcccacgcgccaaggcgagccacagccaagaagaagacacacaaag

SEQ ID NO: 76485 - RNA, 61 nt, Homo sapiens
cggaccaggaggcgagcaacagcgcgaagacaaagacacggaagcgcgcacgggagcaaca

SEQ ID NO: 76486 - RNA, 83 nt, Homo sapiens
cagcgggcccgggaccacccccgggcgaggcgaggggccccgaaccgaggaccagcgggaagaagagcggaccggccaggagc

SEQ ID NO: 76487 - RNA, 62 nt, Homo sapiens
gaggaaacgaagaaccaagcgcgaggcgggggaaccgagggacaagcgccccgcgcacgagc

SEQ ID NO: 76488 - RNA, 78 nt, Homo sapiens
cagcccgcacgacccaagcacccccgccagggaaagaggccacggggccccgaacagccggacccccgccaaagacgg

SEQ ID NO: 76489 - RNA, 82 nt, Homo sapiens
cgggaaaccaggcaccggggggcaacacccgagaacggcgggaagagaagacacgagcacaaacgacggagcgcgccccacc

SEQ ID NO: 76490 - RNA, 53 nt, Homo sapiens
aaaagggcaagaagccagaaggacgacgaaggggaaacacccccaaggcaagg

SEQ ID NO: 76491 - RNA, 75 nt, Homo sapiens
cccccccaggcccgggccgagggggggcgcaggccccggaagagggacgcagccaaaaccgaggcagcgacgcgg

SEQ ID NO: 76492 - RNA, 71 nt, Homo sapiens
ccccgccccccccccccacgcggggggaccgggagcggaggcagggcgccccgcgggaaaaaaaggaacga

SEQ ID NO: 76493 - RNA, 76 nt, Homo sapiens
agcaggaccgggccagggcaggacaaggacaaggccaaggaaaaggaacagagagagcagaaccgaaacggggaaa

SEQ ID NO: 76494 - RNA, 70 nt, Homo sapiens
ccgacgcgggcagcgagaacaagcaagagaaggccacgcgcgaagcagaacgcgaggagacaaaggcacg

SEQ ID NO: 76495 - RNA, 86 nt, Homo sapiens
gccaaggcgggcaggccagcccccgcccacgggcagcaaggaaggcccgcaaggcaccacccccacagcccgcgcaccaggggagc

SEQ ID NO: 76496 - RNA, 71 nt, Homo sapiens
acccgggcccagccgggaacccccacgcggccagcgaaaacgcccagcgagacgacgggaccgaaggaccc

SEQ ID NO: 76497 - RNA, 89 nt, Homo sapiens
gcagccccgcaggcaggagaaggggaaagcacaagccaggaaaggacgcgcgaagcgcgggcggcagaggagccacgcacccaggcgga

SEQ ID NO: 76498 - RNA, 53 nt, Homo sapiens
cacccccccgcgcgcgggaccacaggcaaagacacggcagggggcacaaacca

SEQ ID NO: 76499 - RNA, 54 nt, Homo sapiens
gcccaacccccaccccgcccaaggaggcccagcgacaccacgccacccaagaga

SEQ ID NO: 76500 - RNA, 74 nt, Homo sapiens
ggaaaacacacgccccgaaaccgggcaagccgagagggccgcgagggcccggaacaggggcacgcacgaggcgg

SEQ ID NO: 76501 - RNA, 77 nt, Homo sapiens
gcggcgcgcgacccccgcgcagacggcgcccaccccagagacccggagacccggaagaagaggagaacgcccccccg

SEQ ID NO: 76502 - RNA, 70 nt, Homo sapiens
aacagaggcagggcaccgcccgcccccccacccagggaaaacgacccacaggaccgcgaacaaggaggcc

SEQ ID NO: 76503 - RNA, 79 nt, Homo sapiens
aacacagacaccaaaaaaaagccaccaccgaaacgccaaaaagacgggaagaccccagaaaaagaaagagcacgaacgc

SEQ ID NO: 76504 - RNA, 73 nt, Homo sapiens
aggcgccgaagaggcaggccagaaagcagacccagggaggaagcacagccggcacacgggaaggcacggccgc

SEQ ID NO: 76505 - RNA, 69 nt, Homo sapiens
cgggagggcgcagcggggacgcggacgcacgggccaggacggggggcccggagcgagacgaggacggca

SEQ ID NO: 76506 - RNA, 67 nt, Homo sapiens
ggaggcgcggaggacgccccaccgccgacgcccccagccaccaggccccggagccagcgggggccaa

SEQ ID NO: 76507 - RNA, 80 nt, Homo sapiens
ggcaagaccagacgggaacgggagacaagcgcagcgaggaaggcggccccgcagcagaggcgagccgccaggggaagggg

SEQ ID NO: 76508 - RNA, 68 nt, Homo sapiens
cgccaacgcaggagcacccagggggcacccgaggaggaagagggcagggcccacggaaagaagggaaa

SEQ ID NO: 76509 - RNA, 78 nt, Homo sapiens
aacagccgcccccaccccacccaggcccacaccaaggggagagagcaacacgcaccacgggcgaaggaggcgcggagg

SEQ ID NO: 76510 - RNA, 90 nt, Homo sapiens
gcgaagaagccggaagaagagccagggcagcaagaacccagaagaccggacaaggagcgcagaaaacccccaccagcgcagaaggaaccg

SEQ ID NO: 76511 - RNA, 79 nt, Homo sapiens
cagcccagccacggaacgggaggaacaggagcggaaggaacacagcgaagcacggccgaagaaagcgggcaaagcggaa

SEQ ID NO: 76512 - RNA, 82 nt, Homo sapiens
cgcccaggacccgccaccaaaccgcccgagggaccagggaggagaacaccaaacagaggaacaggcggacagccaaggagac

SEQ ID NO: 76513 - RNA, 38 nt, Homo sapiens
ccaccggaacccgccgccacccaaacacccaccaccga

SEQ ID NO: 76514 - RNA, 73 nt, Homo sapiens
gcaacagaacggacccggaacggggggccacgacgggccaaagcggagaagacacaaggcgcagcgcgccaaa

SEQ ID NO: 76515 - RNA, 83 nt, Homo sapiens
agcaaggagccccgccacacacgcaaacgagaaaaggaggagcaaaacgacacccaggagaagccggcagcgagcacacggac

SEQ ID NO: 76516 - RNA, 82 nt, Homo sapiens
gggggaagcccagcccacagccggccccaggaccgcacaccaccccggcaggagccgggacacaggaggaaaggcggcccga

SEQ ID NO: 76517 - RNA, 58 nt, Homo sapiens
gggaaagccacaggagaggcaacgccggggaaacgacgcaaaccagccagcacggggg

SEQ ID NO: 76518 - RNA, 81 nt, Homo sapiens
gcgcaccggcgcagcggcgaccggcgcaccacacgggggacgccccgacggccagaagcgacccagagcaccgcacccagg

SEQ ID NO: 76519 - RNA, 52 nt, Homo sapiens
gggaaaagacggaaagaccaacggagacaaaacagccaagacacgggggaaa

SEQ ID NO: 76520 - RNA, 80 nt, Homo sapiens
ggaaggagcggagacggcgagcgcggcgcgccgagaaagcaggccacaaggaacaacacaaggaaaagggaaaccgaaag

SEQ ID NO: 76521 - RNA, 81 nt, Homo sapiens
cgggcacacccggcccccggacgcccgccccgacaagggaccgggcgggccccgcaggaaacccccaccggcccacacaga

SEQ ID NO: 76522 - RNA, 84 nt, Homo sapiens
ccaaacccggcacggccacaacacagggaccggaagagcacaggccgaaaccccaagaagaaagcaaggaggagacacacggag

SEQ ID NO: 76523 - RNA, 75 nt, Homo sapiens
agaccagcgccagcccacaggagagggcgcagacggaggaggcacagacaacgcgcgaggagagcacagcaccag

SEQ ID NO: 76524 - RNA, 39 nt, Homo sapiens
ggcacgcgacccggacaaacaggggacccccgcccacga

SEQ ID NO: 76525 - RNA, 82 nt, Homo sapiens
aacgaggagacgagacgaggccggcaacccacagaagaaggaggccgaggggagaagaggaaacgagagcgaagacgaggag

SEQ ID NO: 76526 - RNA, 65 nt, Homo sapiens
gagcggggcccaacaggcggagagagaggggagccggcccccgaaagaggagcccaaaaggcaga

SEQ ID NO: 76527 - RNA, 73 nt, Homo sapiens
gaagacggcacgggacccccagcacaggcagcaggccgggagagaaggccacccgcacggcagcaagaggaaa

SEQ ID NO: 76528 - RNA, 76 nt, Homo sapiens
acaggagaaagaagacagccacagaaagcccacagaggaacacaaaaaacaggcgacggggaaacaccaggaggag

SEQ ID NO: 76529 - RNA, 67 nt, Homo sapiens
gcccgcggggaggcgcggccgccccgcgggggacgggcggagaacggaaaagcaccaggaagcagag

SEQ ID NO: 76530 - RNA, 75 nt, Homo sapiens
cccgccccggcgggcagagaccagcaccggagaaggagcgggaacccaaggcaaaagcaaggggaagaaccaaaa

SEQ ID NO: 76531 - RNA, 74 nt, Homo sapiens
gcaagcaggcaagaagaacccagaaccacggaaggaaaccacgacaacgaagagaggaaagaagcggaaaggag

SEQ ID NO: 76532 - RNA, 85 nt, Homo sapiens
aacggcaccaacacgcggagcggaagacggcaacccagacgagagagccaggccagaaggaaagcggggcaaggaggaccgaacg

SEQ ID NO: 76533 - RNA, 70 nt, Homo sapiens
agggaggacccacccccgggggaaaagaacgaggaacacagagacacggcgacggaaggaaggcgggaaa

SEQ ID NO: 76534 - RNA, 66 nt, Homo sapiens
cccagagaaggagaagaaggacgagcagcaaggaacgcccgacccacaaggcagaacaagaagggc

SEQ ID NO: 76535 - RNA, 66 nt, Homo sapiens
cagcgcggccgccagggaaaagagcaaacgaggaaaacagcaagagagcagacgccaaagagacgg

SEQ ID NO: 76536 - RNA, 68 nt, Homo sapiens
cacccagaggagcaaccagggcagaaaagaacagacccagaagaagcgaaaggggagaaagaagaaag

SEQ ID NO: 76537 - RNA, 77 nt, Homo sapiens
gcacacccgaaaagcgccaaggaaaaggacgagaacgccgcgacagaaaacgcaaaacgaagaagcaaggccgacaa

SEQ ID NO: 76538 - RNA, 79 nt, Homo sapiens
ccgcccacagggggaggcacccagcccccccacacccgcaccacagaggcaaccgaaagaggaccccagacaagccggg

SEQ ID NO: 76539 - RNA, 51 nt, Homo sapiens
gaaacaaagagcgcagagacagagacaagaggaaaagggagaaccaacaaa

SEQ ID NO: 76540 - RNA, 83 nt, Homo sapiens
aaagaccagcccgaggaggaagaagcaacaggaaagacggcgagaccacaaacagaggcaccacacgaaccgaggcacaccaa

SEQ ID NO: 76541 - RNA, 76 nt, Homo sapiens
caggacgggggcggccggcccccagaggacacggagggaagaaggaagccgaccccaaagcgacccaaaggaaggc

SEQ ID NO: 76542 - RNA, 52 nt, Homo sapiens
ccagcccagggaggagcgccacacccgagaagccaaaagcagggacgcggac

SEQ ID NO: 76543 - RNA, 78 nt, Homo sapiens
cacggaggcaccagaagaagcaccaggacaaaaacgcggaggggaccagagaccaaaaaaaaaacgcgaacaccgacg

SEQ ID NO: 76544 - RNA, 73 nt, Homo sapiens
cgagggcaacacggcaggagcaagacacagcaggaagagaacagaggaccccacaacccgccacgccgggccc

SEQ ID NO: 76545 - RNA, 76 nt, Homo sapiens
gggccgccccgcacccagcaccaacagccccagcgcagcgcggagaggacaaccgccaacacaccaggagagaaag

SEQ ID NO: 76546 - RNA, 77 nt, Homo sapiens
caccgagagcgacgacgacccacggccagacgccaggagggcaaggagcagcgaggaggacacccccaagcggccaa

SEQ ID NO: 76547 - RNA, 80 nt, Homo sapiens
aggcgcggggaccaaacaccccggagcgcgggccaagccgagccccaaacggaaaccgcagcgaaacaagcaaaagagaa

SEQ ID NO: 76548 - RNA, 74 nt, Homo sapiens
ccggcaagggacaacggccaaccaaaccaaacaggaagcacccaccagccaagagcaacagaacagcaagagga

SEQ ID NO: 76549 - RNA, 75 nt, Homo sapiens
gccgcgcgacgccgagcgcgccgcgagaccccgccccccagaaagaagcccggcgaggccggagggccacccccg

SEQ ID NO: 76550 - RNA, 88 nt, Homo sapiens
gcgggcccaaggcggaggcgccgcccggggccccgcggcgcaggaggcggggagcgcagagcgggcgagcgcgacgcagaaaacagac

SEQ ID NO: 76551 - RNA, 76 nt, Homo sapiens
ggccagaaccaagggggaaagggggaccagccgagcaacgcccgcaggggccagcgggaagaccacacccccgacc

SEQ ID NO: 76552 - RNA, 60 nt, Homo sapiens
cgcggcccgggccgacccggggcccgggaaggaagaaacaagcgagaggaagcacagcag

SEQ ID NO: 76553 - RNA, 77 nt, Homo sapiens
ccggacagcgcagagccaagacggagaaacaagaacaaagcaagcaggacgcgcgcaaagccgaagagagcaccacc

SEQ ID NO: 76554 - RNA, 77 nt, Homo sapiens
cacacaggccgcccccgccgaagagcacgccagcccagggagaaagcaggcaccggggacaaggaagcaagaagcag

SEQ ID NO: 76555 - RNA, 81 nt, Homo sapiens
cgaggcaggagccgaaaccagagcccaaggccaagccagagcggagccgcggagcccgggccagaccacaggaaagcgcag

SEQ ID NO: 76556 - RNA, 76 nt, Homo sapiens
agaggaccaggcgaccagcaccagcccgaccagaaaaacgcaacaacgagcgacaaagcaaaaaaagaagcaaaca

SEQ ID NO: 76557 - RNA, 77 nt, Homo sapiens
agcagcgacgaccggggcagaaagccaaccaccaaaacccagcaggagcagggaaaaggcccacgagacaagaaggg

SEQ ID NO: 76558 - RNA, 72 nt, Homo sapiens
ggaagacgaagccagaaaccaaagggacagagaacgcccaaaacagagaagcagaaaaagagaccgaccaac

SEQ ID NO: 76559 - RNA, 73 nt, Homo sapiens
ggcgcgagccccaagaaccggccaccggccccacacgaccgggcgcggggcagagcacggaggcagcagagag

SEQ ID NO: 76560 - RNA, 70 nt, Homo sapiens
cccgaaaaggcgacccggggaaagacagcccacagccagaaacagccaagggacaaggagacaaagggga

SEQ ID NO: 76561 - RNA, 80 nt, Homo sapiens
gcacagagcaacaaccgggccacaagagaaagagcacgaggaccagagagagaagaaaaccggaccaaacagggggaaag

SEQ ID NO: 76562 - RNA, 76 nt, Homo sapiens
gccccgagcggaaccagagaagcgagggcagcagcccaggagggagcgggaaaggaagagaagacagaagcagaga

SEQ ID NO: 76563 - RNA, 79 nt, Homo sapiens
ccggacccccagaagaggaccgcggagagcgggaccgcaaaccgcccgcagaccagcacgcgagagcgaggacaggagc

SEQ ID NO: 76564 - RNA, 79 nt, Homo sapiens
acggcaaagcgcagcccgcagacagaggggcgacgaccgcacaacagaagaaccgagccaggaccgagggcgccgcacg

SEQ ID NO: 76565 - RNA, 75 nt, Homo sapiens
aggcaaagccggcgacccgcacagccgcaccccaacccccagaaaaaggcacggacaggacgaggggcccgggac

SEQ ID NO: 76566 - RNA, 61 nt, Homo sapiens
gccagagcaaagcacggccaccaggccccgccccaacacaggccccgggaccaaggacacg

SEQ ID NO: 76567 - RNA, 74 nt, Homo sapiens
agcacgagcaggcccgcaagaccgaaaggaccagacagaagggaccgcggaaggaggcaggcgaaccgcaagac

SEQ ID NO: 76568 - RNA, 91 nt, Homo sapiens
cggaaacggaaccgggaggcgacgcacacgagcggaggcgaaggcaaaagcagaccggaaaacccaccggcaagaccacacccgaggggag

SEQ ID NO: 76569 - RNA, 63 nt, Homo sapiens
gggccagaaccaggcgcacagggcgccgacgcacgaagagaaacggcgaggaaagagaggagc

SEQ ID NO: 76570 - RNA, 69 nt, Homo sapiens
ggaccgaagagacaggcagcacgaaggaggcagaaggacagcccccaagcccggagcgagagcgagaga

SEQ ID NO: 76571 - RNA, 53 nt, Homo sapiens
cccaagcaacagcacgggaaacgagagcagaagaggcaagaaacaaaacccca

SEQ ID NO: 76572 - RNA, 57 nt, Homo sapiens
agaaagcaacacacgaagggccaggagccccagacagaaccggaagaagaaaagacc

SEQ ID NO: 76573 - RNA, 79 nt, Homo sapiens
ccccaccagaaagcaaacgagggcacacggcggaccgagagacgaggcacgacccccaggaccccagaaggccgaaccc

SEQ ID NO: 76574 - RNA, 76 nt, Homo sapiens
gagagccacccaagagacaagcagggggagaggcaccagcaacagaccaaccgcagcaagcacagagacaggaagc

SEQ ID NO: 76575 - RNA, 61 nt, Homo sapiens
ggagaagaggaccacgggagaaaggggcccccggccgcgggcccggcaaagaggaccaacg

SEQ ID NO: 76576 - RNA, 71 nt, Homo sapiens
gaagaagcgaaagaaaaagaaacaggaccgcccgcaccaggaggagcagggccacaggccaaagcccaaac

SEQ ID NO: 76577 - RNA, 78 nt, Homo sapiens
cccggaccgcagacgggggacgcagggaggagcgggacaccccggaagcgggaaaggaacgcgaggccggcgcgccac

SEQ ID NO: 76578 - RNA, 81 nt, Homo sapiens
aagagagacaaaaggaaagccgaaaaagaaccaaaacccaacagcacgacccaggcggcccaaaccgggccccaacacgga

SEQ ID NO: 76579 - RNA, 97 nt, Homo sapiens
acgaaacacggcaagaccggaacgacagaccccgggcacaggaagaccgagcccgggccccccagggccgggcgacgcccaggaaaacgcccgaacc

SEQ ID NO: 76580 - RNA, 57 nt, Homo sapiens
ggggaggcgcacacacaccaaagacaggaagggaaggggcggagacgggcggaacgc

SEQ ID NO: 76581 - RNA, 75 nt, Homo sapiens
aacccgggccgggccgaagcaccacacaagaggagagagaaaaggcgagaaagggggacgaccaccagccaggcc

SEQ ID NO: 76582 - RNA, 79 nt, Homo sapiens
ccaccagaagacccaccgaaacaacggagagacaacaagggccacggacgaacgcggaaaacaagaagaagacacccgg

SEQ ID NO: 76583 - RNA, 73 nt, Homo sapiens
cccgcccggcgccgaggacccccgcccgccgacacagccaccaagaaggcacaagcagaacgggaaaaggggc

SEQ ID NO: 76584 - RNA, 62 nt, Homo sapiens
agggaagcgaagccgaaaaaggcagcagcgaaggagccgcccagcaaaacccaacgggaacc

SEQ ID NO: 76585 - RNA, 82 nt, Homo sapiens
cgcacgagacccgcggacagaaagacagaagaaaaccaaggcgaaggggacgcaaaagaggcaccgggaaccccaagaggaa

SEQ ID NO: 76586 - RNA, 81 nt, Homo sapiens
acgggaaccgaagagagccgggcagggaccaaaagaacccagccaacccgcagagggaggggaggggcgagcggaggagag

SEQ ID NO: 76587 - RNA, 70 nt, Homo sapiens
gaagaccacggagcagcgcaggagaaaaacagaaacggggggggagggggacccggaagaggagaaacag

SEQ ID NO: 76588 - RNA, 71 nt, Homo sapiens
ccagccgcgcccgggagagcaaggcgacaagaagcagagccagcacgccgggacaacccaagaagacaagg

SEQ ID NO: 76589 - RNA, 82 nt, Homo sapiens
ccccgaacccgggcgggggccgaggaaaggccaagcggagaccagcgccgcgaggccaagggcggcaaggagaccgagcggg

SEQ ID NO: 76590 - RNA, 62 nt, Homo sapiens
caagaacagagagagaggggacagacgagagaacgagagacaggccaccgcacccaggggag

SEQ ID NO: 76591 - RNA, 78 nt, Homo sapiens
gaggggaacgcaacccaagcaacgaacagaaccaaacacagccacagcagccacagggacaaacagacacaaaacgag

SEQ ID NO: 76592 - RNA, 60 nt, Homo sapiens
ggaccaggggcccgacagcgcaacaggaagaggcagaaacccaggagaccaccgcagggg

SEQ ID NO: 76593 - RNA, 82 nt, Homo sapiens
agggccggcgagcacacgccgaggcccaccagacgaccacgacgaggccggggcacgacagggcagaccgccagcagcacag

SEQ ID NO: 76594 - RNA, 43 nt, Homo sapiens
gacagggacagggcagccgacaggccagaccaagaagaacagc

SEQ ID NO: 76595 - RNA, 71 nt, Homo sapiens
accgaaagcggcgcaacgaggagcgagagaccaacgggcaagcaaccgaggagaaaagagcgggccaccgc

SEQ ID NO: 76596 - RNA, 78 nt, Homo sapiens
gccaaacaagaggcaaggggggaggagcgccgccccccgcacaagaaggagaagaagcaccagccgacgcgaacggaa

SEQ ID NO: 76597 - RNA, 80 nt, Homo sapiens
cggggcgcgggcgggaccgaggggacccagagccgccgggaacagccagagaagaggaacccagacgcagccagcgcggc

SEQ ID NO: 76598 - RNA, 77 nt, Homo sapiens
gcacacgaccccccacagcagccgcaccagacccaccacaccgcagcaggaggccagcccgcccacccagcaagggg

SEQ ID NO: 76599 - RNA, 64 nt, Homo sapiens
agacgcaaggagccaccagcacggaccaggaggcgagcaacagccacgagcacagaccaggaca

SEQ ID NO: 76600 - RNA, 76 nt, Homo sapiens
aagaacccacaggggccaacagaggaaggaaacggaggcgggggcagcccgcccgcaggaacggagcgaggaggac

SEQ ID NO: 76601 - RNA, 78 nt, Homo sapiens
aaagcaaaacagagaaacaggaacagcagaagcaagcagcaacaagacgaaaaacgcgaagaaaaaaccaaacagggg

SEQ ID NO: 76602 - RNA, 75 nt, Homo sapiens
cggccgcaggccaccgacacgagacaaccgggagccggggaaaaccgcaacaggagcaaaaaaggacagcacaca

SEQ ID NO: 76603 - RNA, 71 nt, Homo sapiens
acaacaccggggagcgcggaagagaagagacagagcgaggaagacagagcaaggagccccccaccccaccc

SEQ ID NO: 76604 - RNA, 70 nt, Homo sapiens
caaccgacacagaagcacggagcccaaggaaggagcaagacgagaacaacgacaaaagaaggggcggggc

SEQ ID NO: 76605 - RNA, 73 nt, Homo sapiens
ccgagagccgcccgggccagcggccgcgcacccccggccggaggcaccagcgaaagcacagggaccccaggac

SEQ ID NO: 76606 - RNA, 76 nt, Homo sapiens
cccaggaccccgccccgcagaccaggccccgagggccagccgcgccacggccccggaaagggcagagggccagacc

SEQ ID NO: 76607 - RNA, 84 nt, Homo sapiens
gcgcacacacaccgagcagcgggcaggccccaggggcgagcagggaggcccaaggaggacccagggccgggaggcaggaggggg

SEQ ID NO: 76608 - RNA, 61 nt, Homo sapiens
accagagacgaacccacgccggaccgcaaggccgaagacccagaaaccaccgccgagacaa

SEQ ID NO: 76609 - RNA, 56 nt, Homo sapiens
ggaaggggccagcggagacagcaagcaaagcgagaaggccccaaaccaggaccaca

SEQ ID NO: 76610 - RNA, 76 nt, Homo sapiens
ccccagcgcacgggcaaggcgcccaaaacaagcgaagaacaaacaaagcacggaacgacccagaaacgaagggggc

SEQ ID NO: 76611 - RNA, 82 nt, Homo sapiens
cgcgcccgggagcggcgccaggccggagcgcgacacggagacaggggcagaacagagagaagggcgggagaaaccaaggaaa

SEQ ID NO: 76612 - RNA, 74 nt, Homo sapiens
ggaggaaaaaccgcagagaaacagaacccaagccaggcacccaaaaaaacgaaagccgcagcggggagaagccc

SEQ ID NO: 76613 - RNA, 71 nt, Homo sapiens
acagccagaaacagcacacaagagacaggcagcagaccaagaaccagggaacaacggagagaagcaaaagc

SEQ ID NO: 76614 - RNA, 74 nt, Homo sapiens
aaaaaccaaggaacacggagaagaaaaacgcgcaacaagcaggaaaagagagaccagacggagccgccggccag

SEQ ID NO: 76615 - RNA, 81 nt, Homo sapiens
gcgcgcgcgccgcgcgcgcacgaacgccgcagcccccagccgcgcgcgcgcacccccggacagaaacgaaggaggcccaac

SEQ ID NO: 76616 - RNA, 108 nt, Homo sapiens
gggagaagagccagggcccgaccgcagggagcagaggggacagaggcaccaaggaccccaagacagcacaagagggccagggaccaggggacgcccaagacggccacc

SEQ ID NO: 76617 - RNA, 84 nt, Homo sapiens
ccaggccgacacaagacgggcaccgccaagaacgccagaagcgaccaaccgcgcgcaggaaaagccaacgggacaggaaaacca

SEQ ID NO: 76618 - RNA, 55 nt, Homo sapiens
ggcagcgacaggacgggaacggaacggccgagcgaccaggagaggagcccccgcc

SEQ ID NO: 76619 - RNA, 80 nt, Homo sapiens
gggaaagacaccacacagcgcagcgggaccacgccggagccgaggacacccgcgcacagaggacccaaagacaggaccac

SEQ ID NO: 76620 - RNA, 69 nt, Homo sapiens
aaccggcacaagcagggacagagaaccggcaaacgacagagccagcagcgcagcgcccgcagccacgca

SEQ ID NO: 76621 - RNA, 85 nt, Homo sapiens
cgcgaggacgcaggaggaggagcccggagcgcagccaccggggagccagggggacagagccgggcccgcacaccgcgccaggaaa

SEQ ID NO: 76622 - RNA, 64 nt, Homo sapiens
caccacaaaaccgccaaggacaaacccaagccccgaggaagggggaaacggaccacaacggccg

SEQ ID NO: 76623 - RNA, 80 nt, Homo sapiens
ggcgcacccggccggcggccggagcccgcggcggggaggcgcggcccgggacgccgagcagggagcggcacagccaggga

SEQ ID NO: 76624 - RNA, 78 nt, Homo sapiens
gagcaagagcccccgagccggagggaagacaacgggcggagaaggaagcaaccagagacaaagggcaccaccgaacgc

SEQ ID NO: 76625 - RNA, 81 nt, Homo sapiens
cagagcgagggagcaagagggcggaggccacgaacacgccggagccgccagaggaaacccggacgcgaacccaccaccgcc

SEQ ID NO: 76626 - RNA, 70 nt, Homo sapiens
aagaaggcagaagaaacagggcagcagacgacagaaaagaggaacggggaggagaagagaagagaagagg

SEQ ID NO: 76627 - RNA, 73 nt, Homo sapiens
cagccaaggacccacgggcagggcaggaaaccaggcgcagcccacagaaagacagcccacccaaaggcaccgg

SEQ ID NO: 76628 - RNA, 77 nt, Homo sapiens
caggaggaagacgaacaggacgcgaccccccaagaacccaagaagcaccaaacagagaaagccaaggaagggaggaa

SEQ ID NO: 76629 - RNA, 101 nt, Homo sapiens
gcgggcgccaggccaggcagccaggccggggcccggagaggcccgcacgaacgggagagcgcaaacacggccacagcaggcccggcaacaagcggaaccca

SEQ ID NO: 76630 - RNA, 49 nt, Homo sapiens
ggagagcaaggcccagaaagagagaccacagagcgggcagcaagaagga

SEQ ID NO: 76631 - RNA, 97 nt, Homo sapiens
cgcaggggcgcgcgaaggagcggaagaaggcaggccaaaccaccgaccaggcaaaagcagaccggaaaacccaccggcaagaccacacccgagggga

SEQ ID NO: 76632 - RNA, 56 nt, Homo sapiens
agggaagcgggagagagacaaagggcggcacggccccaccacagaggggaggagac

SEQ ID NO: 76633 - RNA, 85 nt, Homo sapiens
gacgaagacaacgacagcgacggcacgccgaagcaccgccggggggaagccccgcgccggccgcccggcaaaagacgagaggacc

SEQ ID NO: 76634 - RNA, 81 nt, Homo sapiens
gccgaggaacggcaggcggccccgagcggaaccagagaagcgaggaaagcccaagcgcaaaaaaaaggccccaacaaaaca

SEQ ID NO: 76635 - RNA, 85 nt, Homo sapiens
ccagcccaggcggcgcggacggggcggagagaagaagaaggaggccgcggccagaaacccaagaaaaagcgaaggaacgcagagc

SEQ ID NO: 76636 - RNA, 96 nt, Homo sapiens
gaagcgcagaaccaacgaggggccgaaccccaggaacaagacaacaggcacaaagagagaaggaacacccacagggcagacagagaaagaacacaa

SEQ ID NO: 76637 - RNA, 82 nt, Homo sapiens
gaagaagggcccccggaagaaccgaaggacacacaggacggccccgcgccacagggccacacaccacgccggccaggcacaa

SEQ ID NO: 76638 - RNA, 58 nt, Homo sapiens
gcaccaagaccaggccggcgacagcaccaagaacccacgcaggccggcgaggacgagc

SEQ ID NO: 76639 - RNA, 75 nt, Homo sapiens
cccacaccgaggcacccgaagaagagaccaccaaccagcggaacacgggcaacgggggaagacggccagaacaga

SEQ ID NO: 76640 - RNA, 81 nt, Homo sapiens
cggggaagccgcacaccagaggccagcaagcggagggcgggagcgagggcggccagcacccagaaaaagcaccccgaggag

SEQ ID NO: 76641 - RNA, 78 nt, Homo sapiens
ccagacgcagccccaagaaagacgaggcggagaaacaccaacaggaacagaaagacggaacgacaagagagagggacc

SEQ ID NO: 76642 - RNA, 61 nt, Homo sapiens
acacgggcagaagggaagagccccgggagaccgaaacccgagaggagcaggagcaaccgac

SEQ ID NO: 76643 - RNA, 51 nt, Homo sapiens
gaaccgaaagcgcaaacagccaagcggggggaaaaagagccagaacacgag

SEQ ID NO: 76644 - RNA, 83 nt, Homo sapiens
agagccgcggcgccaccgccgcccccagcaacacagaagggaacaagcggacagaaaaagagaacaagccccggccagaaaga

SEQ ID NO: 76645 - RNA, 53 nt, Homo sapiens
gagagagcggaacgggagaaagcacgggaggagagggggggccgaagaagcca

SEQ ID NO: 76646 - RNA, 71 nt, Homo sapiens
gagggaggcccaaaccggagcaggggaaccaaagaacaaagaagggggcaggcgcacaaaggaaccccagg

SEQ ID NO: 76647 - RNA, 71 nt, Homo sapiens
caagccacagccacggggcggacggcggccgccgccgaacccaagaagacacacgcaccaaaggaggacaa

SEQ ID NO: 76648 - RNA, 83 nt, Homo sapiens
gcgcaacggcccgccaacccgcaacagcccccgagaggaccaagggcaccggaggacagcggaccgagagacgggggcaccag

SEQ ID NO: 76649 - RNA, 81 nt, Homo sapiens
acccccccagggggaacgacacaacaagccggaagggaagcaggggagggagcaaagccgcacacggaggggacagcggac

SEQ ID NO: 76650 - RNA, 37 nt, Homo sapiens
caaaagaaagggcacaaggggcggaaagaaacaagaa

SEQ ID NO: 76651 - RNA, 54 nt, Homo sapiens
gagaccaccgcggcgcggcagcgcgcccgagaggaaaggcaagggcagaaaaga

SEQ ID NO: 76652 - RNA, 40 nt, Homo sapiens
acccgggccgcgccggcacaggcacccccgcccccgagag

SEQ ID NO: 76653 - RNA, 77 nt, Homo sapiens
cccgcccaggccccggacaaagggcaccgacgagagggcgcaccgcgccggagcccgaccgcggggacccggagccc

SEQ ID NO: 76654 - RNA, 79 nt, Homo sapiens
agacagcagcgacagggccgggcgccggcgagagccgcaccgccaacccccgagcaagacgggaggagaacaaggccag

SEQ ID NO: 76655 - RNA, 89 nt, Homo sapiens
gaggaggagagagacccacggcgggcgacacacccccccagcaccccagcggcacaggccagaacacaaagcggaaccggaagaaaagc

SEQ ID NO: 76656 - RNA, 78 nt, Homo sapiens
aagaagcaccggagagacagcacagcacccacaaagcaacggagcaagaaacgcagacacagcaagaagaaggcggaa

SEQ ID NO: 76657 - RNA, 90 nt, Homo sapiens
agggcaacgagcacaacaggagcacgaggaggggaccaagaaaggcccagggaccaaagcccggacaaggcccgagcaccaggaccgcag

SEQ ID NO: 76658 - RNA, 77 nt, Homo sapiens
agaggggaagaggcgccgggacagggccggggggggcacagagccccggaagacagcccccagcgaccagacccagg

SEQ ID NO: 76659 - RNA, 80 nt, Homo sapiens
agacagccggacccggggcacaccaagccgcaaaccaccagaacccacccagagcaggaacagccaccaagcaaggggga

SEQ ID NO: 76660 - RNA, 69 nt, Homo sapiens
cagagccggcagcaaagagggaacagccaccaggagagaacgccgcgccgcgcgacaacggcccggcag

SEQ ID NO: 76661 - RNA, 67 nt, Homo sapiens
aaccgcgggagaggggaagagacaagaccaggagaagacagaggagccagaccaagagacagcacag

SEQ ID NO: 76662 - RNA, 74 nt, Homo sapiens
gccaggccaggagagaagaaccgcagaccaaaggacaggagaaacaggggccaaaaaaccaaaggagaagaaaa

SEQ ID NO: 76663 - RNA, 76 nt, Homo sapiens
agcaccggaaacagggcccacacaggaacaggcaaggcagccagggaaggaaaagaaaccgaaccaacgaaggaag

SEQ ID NO: 76664 - RNA, 76 nt, Homo sapiens
aaagaagagaagaagccaggggagagcacggggcaggacaaggaagaggggagccaaagaccaagcaccagagaag

SEQ ID NO: 76665 - RNA, 72 nt, Homo sapiens
caacaggaagaagggcaaacagcagcaagcaccgccacaaacgccggggccgcaaggccaggcgcgcagagg

SEQ ID NO: 76666 - RNA, 75 nt, Homo sapiens
cggagcccacgaccccgaaggagagaccgccaagcccaagagaagaaacaagaagagggccaaaacgccccggaa

SEQ ID NO: 76667 - RNA, 39 nt, Homo sapiens
acacggagacccccagaacaggacaaaccggcgaccaca

SEQ ID NO: 76668 - RNA, 37 nt, Homo sapiens
ccgaccccacaaagggacggccacagacaagagagcc

SEQ ID NO: 76669 - RNA, 58 nt, Homo sapiens
acagagaaaaaaaccagaaacaacccaaacccccaaggggggaggcaaagaaagaagc

SEQ ID NO: 76670 - RNA, 78 nt, Homo sapiens
accagcaccgcagaggcaaggggccaccaggaggccagggggcgccagcagcgggaccagagcacggaccagccaaca

SEQ ID NO: 76671 - RNA, 74 nt, Homo sapiens
aaggagacaccggaggacgaagagggggaggcagcgcaccgcaaaggccccagggagccccgcgccaggcacca

SEQ ID NO: 76672 - RNA, 40 nt, Homo sapiens
caccaagcacccacggagaaaaaggaggcggcaacaggga

SEQ ID NO: 76673 - RNA, 68 nt, Homo sapiens
ggcaccacagcccgaggcccggagcgaccagggcacagacacgggaccacgggacgcgggagcccgga

SEQ ID NO: 76674 - RNA, 80 nt, Homo sapiens
caaccaggaggcaggagcagaaggaggccccaacccgagcacaacagcaaccggccaaacagaggggcgcagcaaacaag

SEQ ID NO: 76675 - RNA, 79 nt, Homo sapiens
gccccgaggagccccaaacgaagaaaacaggcgaaacaaggcacccccagcgccgaacacaggacgccagacccaaaca

SEQ ID NO: 76676 - RNA, 78 nt, Homo sapiens
cacaccagagcgaagcgagcccgagccccggaccgggcaagcggaaagccggaagacgccacacgcggggagagagac

SEQ ID NO: 76677 - RNA, 72 nt, Homo sapiens
gggcaccacagggcagaaaagggagcaaagagagaaaaagcggggaaggggggcaaaaaaaagaagcaagcg

SEQ ID NO: 76678 - RNA, 103 nt, Homo sapiens
gggcaggagagaacccaaaaccccccaacccggccccggcaaaacggccacggaccgacgaaagacggcacccagagaccccgacagaaagaaacaaagaacg

SEQ ID NO: 76679 - RNA, 99 nt, Homo sapiens
ccaccacagccgcacacggagacagacaggcaaacaaaaaaagcaaaggagggaagaaaagaagcaaccagaaagaaaaaacaaccaccacaccccgca

SEQ ID NO: 76680 - RNA, 69 nt, Homo sapiens
gcccaagaacacagcaccacacgcccccaagacaacgaagcagaagcaacaagagagacaagcccgggg

SEQ ID NO: 76681 - RNA, 68 nt, Homo sapiens
cagaaaagaagccggaacaaagcagaaaggggcagaggaacggccaagacaccgaagcaaaacaggga

SEQ ID NO: 76682 - RNA, 38 nt, Homo sapiens
cggagaaaaggggacagcgggacgagccggagggaagg

SEQ ID NO: 76683 - RNA, 81 nt, Homo sapiens
aaaggagaaggaaagcgaaggggaaggcgccgaagaggacgaagaacacgcggaaaaacccaacagccaaggacagaggac

SEQ ID NO: 76684 - RNA, 74 nt, Homo sapiens
gaccgagacgggcggagaggagaagcccggagcgagagcgagagaagggaccagccagaagaaacaaccgacaa

SEQ ID NO: 76685 - RNA, 72 nt, Homo sapiens
gagaacgacgggggaagcagcagccaggaagcagcagcggagaaacaggacaaagcccccagaggaaccggg

SEQ ID NO: 76686 - RNA, 81 nt, Homo sapiens
ggaagaacaggcaggcgggaggacaaggacaccggccagcccagcaggccaaggccccaagggcacaggacaagaaggcgc

SEQ ID NO: 76687 - RNA, 64 nt, Homo sapiens
gccgccgcgccccccccgcccgcgcgaccgcagggcgcccggcaagagccgccgagccccagag

SEQ ID NO: 76688 - RNA, 70 nt, Homo sapiens
cagcgcccagcagcgcaggcccccacagagagcacacaaacaaagcgaaaccacggaagaaaagggcaaa

SEQ ID NO: 76689 - RNA, 79 nt, Homo sapiens
aaacaaaaaagacaacaagcagagccccaaagccaacaccgcagaacacccgccaaaacaccaaacccccaggcaaaag

SEQ ID NO: 76690 - RNA, 53 nt, Homo sapiens
cggaacaggagacgaacacacagaggcgccgcgacccaaccgaggaagcacca

SEQ ID NO: 76691 - RNA, 72 nt, Homo sapiens
caggaccacagggagaggggccccaaacggcgggcggcagggggacaccgcggagaccaccgccagggagaa

SEQ ID NO: 76692 - RNA, 79 nt, Homo sapiens
gaacacagacagcaggccaggcggaaaccaacagccacaaaggagaaagagcacaccagggaggcagacggcgagacag

SEQ ID NO: 76693 - RNA, 46 nt, Homo sapiens
ggagaaaaccgggcgcagccggaacaggaagagagccccgccagcg

SEQ ID NO: 76694 - RNA, 73 nt, Homo sapiens
agcgcccagaagaagggccgcacgaaacaaccaagcgaagacacaggagaaacggacaaagagcaagcagccc

SEQ ID NO: 76695 - RNA, 73 nt, Homo sapiens
gggaaagcaggagagaagaccagaagggaggagagccgcagcgaaggggaaaaggaagcgacaaggacaacca

SEQ ID NO: 76696 - RNA, 72 nt, Homo sapiens
aagggaaggagcagaggcaaagagcgacgcacagggaccagggacacaacgcaacagggcggaagagcgcgg

SEQ ID NO: 76697 - RNA, 82 nt, Homo sapiens
acagcacgggagcaacacgcgccggagcacccccagccagaggagaaggcgccccacggcgaaccgggaaaaggcgcccacg

SEQ ID NO: 76698 - RNA, 76 nt, Homo sapiens
aaaccaagaaagaagcccaggagcgcccagaacagcaaaagcagggccaggaaacaacccagcgcagccaaaacac

SEQ ID NO: 76699 - RNA, 59 nt, Homo sapiens
ccagcggacaaagcggcaaaggagaagaacgacgggcggcagagaagagaagagcacag

SEQ ID NO: 76700 - RNA, 61 nt, Homo sapiens
cggcgcagccggcaaaaaaaaccacgcgcagagcggaaaacgccagcggacaaaagggacg

SEQ ID NO: 76701 - RNA, 73 nt, Homo sapiens
acaccaagaacacaggcacgggagaccgcaagagaagcgccaaggaaagaaaacccagaagacacgagaaaaa

SEQ ID NO: 76702 - RNA, 62 nt, Homo sapiens
ggcgagccagaccaagcgaagagcgcggagcggcaggggcgagcggaccagcgaaaaggaac

SEQ ID NO: 76703 - RNA, 76 nt, Homo sapiens
cgcgccccccggcccgacagcagagcgagccgcacacggcccagcaccaagaacccggcaacaaaccgagaccgca

SEQ ID NO: 76704 - RNA, 71 nt, Homo sapiens
caggcaaacagagcaagccgggagcccaccacacaggagcagacagaggggaaagaaaaagagcccaccaa

SEQ ID NO: 76705 - RNA, 47 nt, Homo sapiens
ggagcccccacagccaagacacagggagaccaaggaccaggagcaac

SEQ ID NO: 76706 - RNA, 72 nt, Homo sapiens
gggggcagggagagaagggagcaacagcgagcaacaggcaacgaaaacagacaaaacaacggaaaagcaggg

SEQ ID NO: 76707 - RNA, 53 nt, Homo sapiens
gacacggcggaaacgacgcaggaggccccgcgggcaagcggggggggacgggc

SEQ ID NO: 76708 - RNA, 69 nt, Homo sapiens
cgaaggaaagacccaccagaaagccaagagcacggggccaaaaaggcacgagggaacgggaaagaacag

SEQ ID NO: 76709 - RNA, 78 nt, Homo sapiens
gcgacaagccaagcgaccaagaagccaaagaacggcaggcaaaaagcaaggacgaaaaggggacagaagaggaagaag

SEQ ID NO: 76710 - RNA, 63 nt, Homo sapiens
gccggcgggcccagggcggcggagaggggacggcacccagagcagcacagcccccagacaaac

SEQ ID NO: 76711 - RNA, 78 nt, Homo sapiens
gaacccagaggcgggaggggccgggaggcagaggggcagggaagcagccaccggaagaggaccggaacccagcggaaa

SEQ ID NO: 76712 - RNA, 55 nt, Homo sapiens
ccgccccccacaccccgccccagacgagcaccacgcgcgcccgagcggacaagag

SEQ ID NO: 76713 - RNA, 56 nt, Homo sapiens
aaaggaagcacaggggagaggcaagcacggaccaggccaagagacggagcagcaga

SEQ ID NO: 76714 - RNA, 70 nt, Homo sapiens
gaagaaagccaacaagaggaagcaggaaaaacaaagaagacccagggcaaacagaagacgggcaaaagag

SEQ ID NO: 76715 - RNA, 89 nt, Homo sapiens
ggcgagcggcggggagcggcgaagccgcgggcgaggacagcccagagcaagcacacggaggcccgggagccagaccgggagcccgcccc

SEQ ID NO: 76716 - RNA, 79 nt, Homo sapiens
cagaagaagccagcccggagcgggcacaggccagggggcccgaaggcaccgcagaacggggcgggacgacaggagccaa

SEQ ID NO: 76717 - RNA, 71 nt, Homo sapiens
gagagagccaacgggcgagaacaagcaaaaccagcaacaagcaccacaggggaggagcggaacgcacgcca

SEQ ID NO: 76718 - RNA, 57 nt, Homo sapiens
aagacgaacagcacgcaagccagaccacaggcaaaagcagaccggaaaacccaccgg

SEQ ID NO: 76719 - RNA, 89 nt, Homo sapiens
aagacaaccagcacaaagcaggacagacacacacgagacgccaggaagccggacgcgcagggaaaacgagaggacccagccacgggggg

SEQ ID NO: 76720 - RNA, 44 nt, Homo sapiens
acgcagcgcgcaacaccccacaggagacaccgccagaagcacca

SEQ ID NO: 76721 - RNA, 81 nt, Homo sapiens
ccacgcgacgcacacgaacagccaacaccagaggcaaaaacagcaaaagaaaagaaaaaacaagaaggagcgacaaaaaga

SEQ ID NO: 76722 - RNA, 63 nt, Homo sapiens
agccgggaggaacggcccggaaacaggaggacaggggggcgggccgagcacccgcaggccccg

SEQ ID NO: 76723 - RNA, 51 nt, Homo sapiens
ccaggaacaggacgaagaccagcgccagggaaagaaggaaccaaaggggag

SEQ ID NO: 76724 - RNA, 78 nt, Homo sapiens
gacgcgagcggcggcgcccggcccgggcgagggcaacagcaggcgggacacggggcgacccacccaaaagccccacgg

SEQ ID NO: 76725 - RNA, 61 nt, Homo sapiens
gcgcggacccgcccggagagagcaccaggacaaaagaagggcagcacaaaggaaagcccca

SEQ ID NO: 76726 - RNA, 81 nt, Homo sapiens
caccgggccggcggacaggagggcgcgaaacggacgggcaaggccggcgagcggccacgacgagagcccgagaagagcgaa

SEQ ID NO: 76727 - RNA, 91 nt, Homo sapiens
gagccccgcccccgccgccgcgcacaaccgcacggcagaggcggagaagaacccaaccaaaaccaggcggcaaccccggggcgacaaaaag

SEQ ID NO: 76728 - RNA, 76 nt, Homo sapiens
cccccacccagggaaaacgaccggcgcacgcagccaccggagaaagagccagcccgcaaagcaggacgccgcacgg

SEQ ID NO: 76729 - RNA, 73 nt, Homo sapiens
ccgcccgcccccgccccacgaagccagaaagaagccacccagagagaaccagggggcacccgaggaggaagag

SEQ ID NO: 76730 - RNA, 81 nt, Homo sapiens
ccgcgccgggcgggacgggggggcggcccggccccgcaggccgaacgaggcggggggcccgagaccacaccacacccacca

SEQ ID NO: 76731 - RNA, 75 nt, Homo sapiens
ccgcgacagcgaacagcgcggccgcaggccccgagccccggccccaaagacccaaaacagagacaccccccagcc

SEQ ID NO: 76732 - RNA, 80 nt, Homo sapiens
aggccccccagccacgggaacgaaaaggccaaagggagccccggacagagaagagcccaaagaaaaacccagaacagcga

SEQ ID NO: 76733 - RNA, 72 nt, Homo sapiens
acacgagccgcagaacagagaagaggaggagggaagacaagagcaccaacggacaagcacaagcaaggaaga

SEQ ID NO: 76734 - RNA, 75 nt, Homo sapiens
ccggccaacacgaggacacgcgggaccgaaaacaaggacacgaggcacaagcacaaaacgagcggcgaccaagac

SEQ ID NO: 76735 - RNA, 33 nt, Homo sapiens
cgcagggaaagacagcgggaaaccccgacaggc

SEQ ID NO: 76736 - RNA, 68 nt, Homo sapiens
gggggggggggcccgccaacgaaccacaggcgagaccgagacaagaagacccacacgaaaaggcgccg

SEQ ID NO: 76737 - RNA, 82 nt, Homo sapiens
ccccgcagagcccgaagcggaccgcagcccaagggacggagggagcgccgaccacccggagcgaggcaaccgcagagcgcga

SEQ ID NO: 76738 - RNA, 86 nt, Homo sapiens
gccgcggagccggcgcgagaggggcgcggccggagcgggcggcgagacaaaggcgacgggccaagaaacagaggagagcccagacg

SEQ ID NO: 76739 - RNA, 67 nt, Homo sapiens
agccacaagccagccgagacgcagccaagggacacaccacccaacagaacccaaggggagcccagcc

SEQ ID NO: 76740 - RNA, 48 nt, Homo sapiens
gagggcgagcagaggacgacaggccgggaggacggggaaggaagccac

SEQ ID NO: 76741 - RNA, 84 nt, Homo sapiens
agaagcgccgagcaaacaaccagagggaagaaaagcaaacgaaaccgggaaacaggcagaacccaagaaggcagaagccagccc

SEQ ID NO: 76742 - RNA, 70 nt, Homo sapiens
ccacaggggcacggggcggagcccaggccacaagggccgcaagccccgccaccggggacaggagaggaga

SEQ ID NO: 76743 - RNA, 66 nt, Homo sapiens
gcgcacagggcgcggcagacaagcaggggaccaaaacaaccccggaagagaggacaaacaacaaag

SEQ ID NO: 76744 - RNA, 74 nt, Homo sapiens
gagagggagccccgaccccaggccccccacagaaaaggaaagccaagcgaaagacagaggcccagccgaaagag

SEQ ID NO: 76745 - RNA, 70 nt, Homo sapiens
cagccaagcaggaccacccaccagccaccagaccagagaggacaaccaaaagcaccgaaccggaacaaag

SEQ ID NO: 76746 - RNA, 70 nt, Homo sapiens
gaacccagccgcaccggcagaagagacaacacagaaaccagggcggaggcaggaacagcagcaaaacaca

SEQ ID NO: 76747 - RNA, 60 nt, Homo sapiens
aacgaagaaaagacgagaagccccccgaggcagaacaaaacgccacccaggcaggaggac

SEQ ID NO: 76748 - RNA, 69 nt, Homo sapiens
cacgaggaacagcccccaaccccaccacccaagaaggagaagaagcaccagccgacgcgaacggaacac

SEQ ID NO: 76749 - RNA, 72 nt, Homo sapiens
acggcgacagcagcacagcacgggagacaaggaacaccaacaaggcagcgagccgagcccaccaggacgccg

SEQ ID NO: 76750 - RNA, 78 nt, Homo sapiens
cgcaggcacaggccgaacagcgcacacgagacaaaccaagaaaccacccaaacaagcggccggacaaaagacgaggag

SEQ ID NO: 76751 - RNA, 55 nt, Homo sapiens
agaaacagaacaaagacaaaggggaagaagggccggcccagggagaacgcaaaac

SEQ ID NO: 76752 - RNA, 54 nt, Homo sapiens
cgcacgagggcagggcggaaggccgcagggcggagaaaaagggaacccgaggaa

SEQ ID NO: 76753 - RNA, 84 nt, Homo sapiens
aggccgaggaacgggccgcgaaggcgccgacaggaggcgaaaaccaagagacacggcccgcccaaggaagaaaaagacacccgc

SEQ ID NO: 76754 - RNA, 60 nt, Homo sapiens
ggagccacgccgacagaacacgggcggaggaggcacggagaccaccagggcagaaaaaga

SEQ ID NO: 76755 - RNA, 94 nt, Homo sapiens
cggaggacggggccgggcgaccgggcaccagcaggacccgaggccaggagccaggggcccagaagggccagaacccgggagcacagaacgggaa

SEQ ID NO: 76756 - RNA, 77 nt, Homo sapiens
ggcgccacgcccgaccccgccccagggaacaagccagccagcaccacccaacaccagccagaccggcagcaaccagc

SEQ ID NO: 76757 - RNA, 87 nt, Homo sapiens
cggggagcagccccccgggccccgagccagcccacgcagccgccccgaaggagccagagagggggcaccccagacaggagaacggga

SEQ ID NO: 76758 - RNA, 80 nt, Homo sapiens
ggggaacagcgagcggagccggcaggaaggggaccgggcggcggagcggcggaagaagccaaggagaccgggagagagac

SEQ ID NO: 76759 - RNA, 77 nt, Homo sapiens
cgagagccaacgcaaccaggcgcaggacacacagagaggaaaggccgagggggacggcaagagcacacaccccggac

SEQ ID NO: 76760 - RNA, 44 nt, Homo sapiens
ggcggggccaggacgcggcaacacccaagggcacccgcacagca

SEQ ID NO: 76761 - RNA, 79 nt, Homo sapiens
gcgggccgcgcgaagcccgagaggagccacaaggagacgccgccgcgcccccgcgaacgcccggaagaaccacaacgcc

SEQ ID NO: 76762 - RNA, 80 nt, Homo sapiens
cccagacgcggcacagagagggccgggagcgcgcagccagacgaacaggaggcagaaccaacagaacgacggggccccca

SEQ ID NO: 76763 - RNA, 65 nt, Homo sapiens
acccagggacagggaaagcaacgcacccaggaacggagggccaaggcaaggaggaaaacaagacg

SEQ ID NO: 76764 - RNA, 77 nt, Homo sapiens
cgggcggcggcggcgcgggccacggccccggccacaaacgcggcaaagacgccagaccccaaccaagggcgagggcg

SEQ ID NO: 76765 - RNA, 76 nt, Homo sapiens
aagcagcgccgccagaaggaagcaacagacgggaccgaaagaccaacagaagccaggcaaggaacgcggagaaaca

SEQ ID NO: 76766 - RNA, 73 nt, Homo sapiens
gaccgcaggagggagaccacagccaagagccaggacccccagaagcagaaaggggagagggcacggaaagacc

SEQ ID NO: 76767 - RNA, 58 nt, Homo sapiens
cgacaacagcgcacgagcgggagggccccaaggcggcagccccgaccgacggggcaac

SEQ ID NO: 76768 - RNA, 73 nt, Homo sapiens
gcaacccagcgcaggagggcacggaggagggaccacagagcccaccacacagcaggccaggacgcgaagggag

SEQ ID NO: 76769 - RNA, 55 nt, Homo sapiens
cgcgcccggagcaccccgcggagcggagcgacagggcgacgcgccacagagcggg

SEQ ID NO: 76770 - RNA, 74 nt, Homo sapiens
gaaggaccaagaaccaggcagccacccccgccccgaccggaggccagggcaagcagccccggcggcccaaacga

SEQ ID NO: 76771 - RNA, 52 nt, Homo sapiens
gagaggggcggaggccggccagcaccagcagcgcgcacccagggcacaggag

SEQ ID NO: 76772 - RNA, 76 nt, Homo sapiens
agagccaggcaccaggacagcggcggcgggccgggcagcccggccgacaaccacgaaacgaaggaggcccaaccac

SEQ ID NO: 76773 - RNA, 79 nt, Homo sapiens
aagagcaaaagccaacacgcaccgcaggcacaggacagcgcgcccgaaaagccacagggcagcagccaggaagacggca

SEQ ID NO: 76774 - RNA, 79 nt, Homo sapiens
ccgagggccggcgggggaggagcccgagcgagaggcggcggcgggcaggagagcgcgcgaaacacaccagcaagcaaca

SEQ ID NO: 76775 - RNA, 80 nt, Homo sapiens
acggagcgcagcggcacgcacgcgaagacagcggcaggcaaaagcagaccggaaaacccaccggcaagaccacacccgag

SEQ ID NO: 76776 - RNA, 80 nt, Homo sapiens
agcggcaagaaaagcccgccccaccaaaaagaaacacggggagacacagcaagacaacaaggaccaacaccaaggaccag

SEQ ID NO: 76777 - RNA, 72 nt, Homo sapiens
aaacccacccagcacaccccgcgaaaggaggaggcacagaagcaagaagaaagagccaccagcacaaaggag

SEQ ID NO: 76778 - RNA, 66 nt, Homo sapiens
gagacagggccggggcggaaacaaaaacagcggaagagggccagaaagacaagcaggacgcacggg

SEQ ID NO: 76779 - RNA, 70 nt, Homo sapiens
acaccccacgaaggcggcaccaaggaacgggacccgaacaacgaaaaacaagcgaacagagaaaagagaa

SEQ ID NO: 76780 - RNA, 82 nt, Homo sapiens
ggagagcccggggggcagcaggggaagggagacgaaaacggaaacagagcccagcccagaaaagaagccccaggccaccccc

SEQ ID NO: 76781 - RNA, 73 nt, Homo sapiens
aaacacacccccaagacagagccaagccagaaacagaacagcgcccacaaaggcggaagcagcgcagcacagc

SEQ ID NO: 76782 - RNA, 78 nt, Homo sapiens
acgcgggaaaaacgggggcaaacaccaagaaacaaggaggacgggacccagaacaccggacagacccgaagcgcacca

SEQ ID NO: 76783 - RNA, 41 nt, Homo sapiens
gacaccccgaagccgagaaagaccgaagaggccaacgaaac

SEQ ID NO: 76784 - RNA, 78 nt, Homo sapiens
agaaccccagagaagaagaccgaaagcaccgcggcgcgccggaaaggccaggacgccccgggccgccaggagcagacg

SEQ ID NO: 76785 - RNA, 78 nt, Homo sapiens
cccccgggcgggagagacccacggccacggccagaggaccccaagaaacaaagagccccgggaaaagaaaaaaaacgc

SEQ ID NO: 76786 - RNA, 83 nt, Homo sapiens
agccgcccccagacggccagccgagcggccggacacagccagcgcaccaccaccgccggcgagcaccaggagagcccccaggc

SEQ ID NO: 76787 - RNA, 53 nt, Homo sapiens
caaacgagacagcgccaaggcaaaggaacacccacaacacaaccagagcagga

SEQ ID NO: 76788 - RNA, 74 nt, Homo sapiens
gaaacagaacccaagccaggcacccaaaaaaacccggaaacgaaacagcgcagccaggaacaggacgaagacca

SEQ ID NO: 76789 - RNA, 35 nt, Homo sapiens
gagacccacccaaacaggaggcacacaaggccaac

SEQ ID NO: 76790 - RNA, 84 nt, Homo sapiens
aggcaaacaagaagagagccgaacagcagcccgcccgaagagggcaccagcccacgaaagacccgcagcagggaccccagcccg

SEQ ID NO: 76791 - RNA, 77 nt, Homo sapiens
gagacacgcagcggcggccagggaccacaaacaacacccaacagcccaaagcaaaggagcaacagcccaggagaaaa

SEQ ID NO: 76792 - RNA, 76 nt, Homo sapiens
cagaccaaaagcggggagaagagggaccgagggcaccggagcagagcgccaccagacagaggagcccggaggaggc

SEQ ID NO: 76793 - RNA, 79 nt, Homo sapiens
gaaaaaggagcagcccgggcaccacagaaaagagccaggacaaaaccaggcagaaccaacacgaacccaagcacaaaca

SEQ ID NO: 76794 - RNA, 67 nt, Homo sapiens
cagggacccacgacacacgacgccggcagccagaaaggggacgagaaccagccccaagagaggaccg

SEQ ID NO: 76795 - RNA, 74 nt, Homo sapiens
gagacagccaaggggagaccacaccaagcgggagacacaccacgccaagggacacgaaagcccaaaccgaacca

SEQ ID NO: 76796 - RNA, 79 nt, Homo sapiens
ccccagcacccccagcggaacgggggcccgccacgggagagcgaaggcacgagcgcccagaagaggaacccagacccac

SEQ ID NO: 76797 - RNA, 73 nt, Homo sapiens
aaaaaagaaccaaagaacaagcagagcaaagggggagaagaagaagcaaccgaaagaaagagcaaaaaaggaa

SEQ ID NO: 76798 - RNA, 73 nt, Homo sapiens
aaagggccaaagaagggagagaggcccggaggcggagccgcacgagccccgaaagacccgagaccccagcgcc

SEQ ID NO: 76799 - RNA, 84 nt, Homo sapiens
ggaaagaagcaccggagagacagcacagcacccacaaagcaacgagacaccaggcgccgagaaggccagcagagaaacaggcag

SEQ ID NO: 76800 - RNA, 72 nt, Homo sapiens
caaaccccaggccaagcaaccaccagcagcccccagagcggaacacagcccaaggacaccaagacgcagaga

SEQ ID NO: 76801 - RNA, 83 nt, Homo sapiens
acgcccgcgcacccaccagaggaagacgacgggcagccccggacccagaccagccagccccaagcagccgcacgacaaagaac

SEQ ID NO: 76802 - RNA, 74 nt, Homo sapiens
ggagaacgaagagaacggagcaacagggaagaggagaaaagcaccggaagagagaaagagggaggaaaaacagc

SEQ ID NO: 76803 - RNA, 52 nt, Homo sapiens
aaccacacccaagacacacgggaggagacaggagacggaagcggaagcacac

SEQ ID NO: 76804 - RNA, 78 nt, Homo sapiens
cacgcccaacgaaagggcagacagacggcagcgcacaagagaaggagaggcacaaacaaaacagaccgaagaagagaa

SEQ ID NO: 76805 - RNA, 58 nt, Homo sapiens
cccggcgccgcgccggcggcggcaaaagcagaccggaaaacccaccggcaagaccaca

SEQ ID NO: 76806 - RNA, 70 nt, Homo sapiens
cgggaagccgcggagcagcgccaagagcagcaagccgcacagagacgaagagacagcccgagaacaagaa

SEQ ID NO: 76807 - RNA, 76 nt, Homo sapiens
accggaaagcaagggagcggcacagccagaagaccgaagcgcgacggaagaacaagggggacgggaggcggagagg

SEQ ID NO: 76808 - RNA, 82 nt, Homo sapiens
ccggaccaggccgggacacaagaaacaaacgaagcacccccaggaaacccgaccgccccaggggcacagcaggaccagcagg

SEQ ID NO: 76809 - RNA, 75 nt, Homo sapiens
agagggcccacagcgggccccggccaggcagaggggcgggcaaaggagaggcacaggaagcagaggcaagaaacg

SEQ ID NO: 76810 - RNA, 79 nt, Homo sapiens
gaagaacagcaagggccaacggaagccagagaaaggcgggggagcgggaggagccagagcacaccgcaccacggccaca

SEQ ID NO: 76811 - RNA, 74 nt, Homo sapiens
ccaaaaccagccgacaaagagggggcccaagaagggacaagggggggcccagcgggacgaggagaaaccaccac

SEQ ID NO: 76812 - RNA, 73 nt, Homo sapiens
ccccgccaggcaaaaggaacgcggccaaccaggagcacggagacggcccccgggcaacaggcccaccagacac

SEQ ID NO: 76813 - RNA, 112 nt, Homo sapiens
agacccccaacccaccgaacgaacacacgggacaaccagcgacgccggagcagcccaacccagcgggcgacgcacgaggcacacaggaaggaggggagcagggacgcgcggc

SEQ ID NO: 76814 - RNA, 73 nt, Homo sapiens
gccaggaaaccacccagagacagaagagcaaaaggaaccgaggaaaagggacccaagggagagagggaacggc

SEQ ID NO: 76815 - RNA, 80 nt, Homo sapiens
ccacccgcaagcagaggggaggacaccaaagacaggcaaaagaggccggaaccaccaggcccacaccgccaccagccacg

SEQ ID NO: 76816 - RNA, 53 nt, Homo sapiens
cgaccaggccggcaaaaccacacagggacaccccagcacgcaggaacagaaga

SEQ ID NO: 76817 - RNA, 75 nt, Homo sapiens
gggccagacacaagaagaaaaacgaaccacgagcggaagcacaacgggaagaaagaacagcagaacgccaaaaag

SEQ ID NO: 76818 - RNA, 73 nt, Homo sapiens
agcagaagcaaagaaggcacaggaaaccagcggcgagagagagcagaccagccgcccggagaagacaggggaa

SEQ ID NO: 76819 - RNA, 80 nt, Homo sapiens
ggagaacacagaaaccggccccagaaccccagcacccagccaaggggcagagcagacccacgggggacggcgggccacgc

SEQ ID NO: 76820 - RNA, 74 nt, Homo sapiens
gccaaagcgggccaaccacacagcacgacacaggggggacgccacgcgcacacgcagacaagccacagaagacc

SEQ ID NO: 76821 - RNA, 79 nt, Homo sapiens
gaggcagaggcgacacaagaagagggcggagcggagacgggagaagaaaagacgcagaccacagggcgcccgccgggag

SEQ ID NO: 76822 - RNA, 90 nt, Homo sapiens
cgccccgccccgcccggagcgccggcggcagaccgacacgccggggcgcccgcgcgcggggaccccacgggaaaggagaaaagaggcgcg

SEQ ID NO: 76823 - RNA, 49 nt, Homo sapiens
gcaccgggagacaaaaagcaagggggacaacgagaagaacgaacagaac

SEQ ID NO: 76824 - RNA, 72 nt, Homo sapiens
gaacaaaccgaagaacagcgggaaagaaggcaaaacacggcccagagaccgagacgcggcgccgagcacgga

SEQ ID NO: 76825 - RNA, 64 nt, Homo sapiens
agggacgcacccggggacgggagggggggccccgcgcaaaggaaacgcacaaaacagcgagcac

SEQ ID NO: 76826 - RNA, 71 nt, Homo sapiens
gcgaggaacggcaaaccccggccggggagaagccaaaacaggcgagcgcaggcacgacagagcagcagcag

SEQ ID NO: 76827 - RNA, 54 nt, Homo sapiens
gaaagccacaaaaggggagaggcccaggaggacaggggacgcgaacccaaacac

SEQ ID NO: 76828 - RNA, 69 nt, Homo sapiens
gagaagcgcgaaaaaaaaaccccaggaaaggaacacggaaaaagcgcggggacaccgcgaccagcacca

SEQ ID NO: 76829 - RNA, 80 nt, Homo sapiens
gggcaacgggccaccacaacacacaggacagcggggcgcgggggcggcccggcacaaggagaacaccgcaccaccgggga

SEQ ID NO: 76830 - RNA, 73 nt, Homo sapiens
aagccagagcgcggcccgacgaacccggccggagcaccgagcccgaagagggcacaagaaggacgaagggagc

SEQ ID NO: 76831 - RNA, 69 nt, Homo sapiens
ccaaccagagacaccagcaggacaggaaaaaaagagggcccaggaaaggccaagagcagccgggaaaca

SEQ ID NO: 76832 - RNA, 78 nt, Homo sapiens
aggacggaggggccccacgcccaccaacaaacgccagaaggaggagacagcaaggaagaagaaaagagagccaaggcg

SEQ ID NO: 76833 - RNA, 75 nt, Homo sapiens
cagcgcgagcgaacgaccaagaggggcgacgcagagccgagcgaagcgggacaagaccccccccagggaagacca

SEQ ID NO: 76834 - RNA, 120 nt, Homo sapiens
ccgcagagagccccagcaggaaggccaccgagggaacccgaccggacccagccccagaagcgcgccccagaccaccggcagggaacagccgagcagaccgaggaggcccaccagcagacg

SEQ ID NO: 76835 - RNA, 65 nt, Homo sapiens
cgcagagcggagggggaccaccccaggaagaagacaacaggcgaagccggccacagccacccagg

SEQ ID NO: 76836 - RNA, 70 nt, Homo sapiens
gaggggggcggagcagggcccgacccgcagagcccggcaggacaggaccaagaagaacaggaagaggcgg

SEQ ID NO: 76837 - RNA, 72 nt, Homo sapiens
gacccagcaggccccacgccaagggaaaggccccccgggcaagccagcaccgagaaaccccaggaggccgcg

SEQ ID NO: 76838 - RNA, 119 nt, Homo sapiens
ggcaccgccacgccgagcgccccggcggcccgagcgcgccccaagcccgggcgccaccgcgccaccccgcgagcgggaggccaccgccccaccagcaggcaacgccacagaccgccagc

SEQ ID NO: 76839 - RNA, 75 nt, Homo sapiens
ccgagccgaccgcgccgcacgggagccagcgggggacaggccccggaacaagaggaggacagaaccaggcgagga

SEQ ID NO: 76840 - RNA, 38 nt, Homo sapiens
cgaaggaggagcccagcaggggcgcacaccacaggccc

SEQ ID NO: 76841 - RNA, 78 nt, Homo sapiens
aggcccgagcgagggacaagacccgacccagccgaccgcggcccgggccgggccaggcggaaagcaggagaagcccaa

SEQ ID NO: 76842 - RNA, 73 nt, Homo sapiens
cagacgcagggcgcccccgcgacacagaccagagagagagagaaccagaagcagacaggagaaagcgcaacac

SEQ ID NO: 76843 - RNA, 68 nt, Homo sapiens
cgacgcaagggcaggaacgcacagaaggcccaaggcgcagagaagcacagagaagccaccaacaaaca

SEQ ID NO: 76844 - RNA, 79 nt, Homo sapiens
gaacaccccgagcgaggccaacccaggaggaggaggccaggcagcgcgaccaaacgaaaaaggcacagaagcgcgcaga

SEQ ID NO: 76845 - RNA, 66 nt, Homo sapiens
gaagcaacgggacggaggcacaccaaaaacagccagaggaaggaaaggagaggcagcaaccgacaa

SEQ ID NO: 76846 - RNA, 82 nt, Homo sapiens
cccggcagagcaagagcacgacgcccccaggccaggcggcacccaacgggccagcagccagacgagcgacgcggagccgccg

SEQ ID NO: 76847 - RNA, 69 nt, Homo sapiens
agaggcagacggggagagcagcaaaagcgagaaggagagaaccaggagaccgaagcaaccaacaagcga

SEQ ID NO: 76848 - RNA, 70 nt, Homo sapiens
gggcaacgagaacaaaggggcccgaacagggcagaagagcacacacaggaaggcgagaacaagagaggga

SEQ ID NO: 76849 - RNA, 78 nt, Homo sapiens
agcggccaccgcacccaggaccgcacgccccgaagcccccagcgaccagacccgacaggacaaaggccaccccgaacg

SEQ ID NO: 76850 - RNA, 85 nt, Homo sapiens
ccaccccgaaccagcaccccaccacaacaggagaacaagaccacggggagacgaggacgaggaggaggaggaggaaggagaagag

SEQ ID NO: 76851 - RNA, 79 nt, Homo sapiens
cccgccccgggggccgagccggagggggcgcagggacgaacagcggggacgccccagcagaccgcccaggagaggaaag

SEQ ID NO: 76852 - RNA, 56 nt, Homo sapiens
gaacaaacaaacacccagaaacaagaggaacgagagcagccgcacccacacacacg

SEQ ID NO: 76853 - RNA, 80 nt, Homo sapiens
gcagccaccgccaggaccccagaaagaggaggaagccaagaacgggagcgaagccacgcagcggcaccaacgaccgggcc

SEQ ID NO: 76854 - RNA, 77 nt, Homo sapiens
cccccagcggggccccaagaagccgagacacgcgaccgcgacccccgcacccacgccagcagggcagccccacgcgg

SEQ ID NO: 76855 - RNA, 89 nt, Homo sapiens
ggaaacagcaagcgaagccgaaaaagcgcccgagacgggcccgccgaaaggcaaaagaaggaccccagcaggaaaagcaaagcaagaga

SEQ ID NO: 76856 - RNA, 73 nt, Homo sapiens
gggagggccgccgcgcccaggagggcgggaagaagcgagagccaagcaagcggcagccacacccggagaagga

SEQ ID NO: 76857 - RNA, 70 nt, Homo sapiens
caggccagaccggcagaagacagcgccaccgcccacacggccacagcggggaagcaaacaaaggcacacc

SEQ ID NO: 76858 - RNA, 76 nt, Homo sapiens
cgccaggccacaaaggaaacccgagagacagcacccccgggggcgcaccaaggagcaggaaccaagggggagccca

SEQ ID NO: 76859 - RNA, 70 nt, Homo sapiens
acaagcagaaacagacaggaccacgcaagcaaggacggggacacaagaccagccagcccagccacagaga

SEQ ID NO: 76860 - RNA, 75 nt, Homo sapiens
gagaggccaccgcacccgagggcagaaaagcaccgagcagaaggcccgaacaggcacgaaaaaacccagcgaaga

SEQ ID NO: 76861 - RNA, 73 nt, Homo sapiens
cccgacagcgggaaccgaaagggggaacccacccgagaaacaccgaagcaccaaacaggggacaaaggcagga

SEQ ID NO: 76862 - RNA, 88 nt, Homo sapiens
ccggagacagcgccccgagggcccccagagacggacagcgaaggcagagagcagcaccaccaagaagcgaagaaaaagagaaaccgag

SEQ ID NO: 76863 - RNA, 76 nt, Homo sapiens
gaagcaccccaaacgaaagccaaacgaccaaagaaaacgcaggagcaacaagaggcccagaggcggcagggcaccc

SEQ ID NO: 76864 - RNA, 66 nt, Homo sapiens
gccccaacaaagggggaacgccccagacaagagggagagaacagaacagccaaaggccacgaacaa

SEQ ID NO: 76865 - RNA, 82 nt, Homo sapiens
gagccggcgcgagaggggcgcggccggagcgggcggcgagacaaaggcgacgaggcaaacggagaggcaagaccagcagagg

SEQ ID NO: 76866 - RNA, 75 nt, Homo sapiens
gcacgaggaggccgagagagaggccggagcccaccaagcgggaaagccaaggaacgaacagggcgggcggaggcg

SEQ ID NO: 76867 - RNA, 78 nt, Homo sapiens
ggcccccccgaggggcccagaggaggaagccaggaaggggaggaaagacgggcggaaccgcaaaggaggggagggaga

SEQ ID NO: 76868 - RNA, 54 nt, Homo sapiens
gagggagaacacagaaaccggccccagggcggagaacggaaaagcaccaggaag

SEQ ID NO: 76869 - RNA, 72 nt, Homo sapiens
gcgggccagaagcacacccgcccggcgcgacaagggccagccccgaacaaaacagaggagaccagaccagaa

SEQ ID NO: 76870 - RNA, 40 nt, Homo sapiens
gaggagaaagcggcagccgcggagaaaagaggaggcgagc

SEQ ID NO: 76871 - RNA, 77 nt, Homo sapiens
aggccgccaaaagaaaagaggacagacacggacccagcaccagggcccaggacagaaggcgggcaaggagcgccccc

SEQ ID NO: 76872 - RNA, 76 nt, Homo sapiens
accaaacccaccgcaagacagggaagcacccaaagcagagagaagagcggcaccgccgagggaccaaccccgcccc

SEQ ID NO: 76873 - RNA, 50 nt, Homo sapiens
cgcggggcccgcccagaacagaaggccaaacacacaggaacgccagaccc

SEQ ID NO: 76874 - RNA, 85 nt, Homo sapiens
aagccgcccagacggccaccggcgggaggaacaaaaggagcaggcaagaaaggacaaaggaacggaaaagcgggaaccggggagg

SEQ ID NO: 76875 - RNA, 78 nt, Homo sapiens
caggaaccaccaggacagagagaaagcccaaggagacaggcaagaggggaaacagaggggccgcgggggagcgaccgg

SEQ ID NO: 76876 - RNA, 76 nt, Homo sapiens
acgcccagcaccaccccgggaggaccgggggagcggccgaggacaagcacaagcagcaccaaaaggcagcacccgg

SEQ ID NO: 76877 - RNA, 61 nt, Homo sapiens
gggcaggggccgaggacgaacacggggaggggaggcaagcaggggggcaaaggaaagaagg

SEQ ID NO: 76878 - RNA, 70 nt, Homo sapiens
accaaggacagcacagcgccccgccagagcgcaaaagacaacccacgaaaaccacacccagggaccccca

SEQ ID NO: 76879 - RNA, 58 nt, Homo sapiens
gcgggagggggcagccagcggcgaaggagaggcaggaccagaaacaaggccgcaccaa

SEQ ID NO: 76880 - RNA, 82 nt, Homo sapiens
caaggacgcgccgacagaagaggggcaacaccggaggacagcaacccccaccgaacaaagaaggaaaaagcgcagcagaaag

SEQ ID NO: 76881 - RNA, 68 nt, Homo sapiens
ggccaagaagcgagcccaacgcaagcaaagaggcagacaggggcaaccaagaccgaagagcaggagag

SEQ ID NO: 76882 - RNA, 71 nt, Homo sapiens
cgcagccacgacgggccgagccgccacagagaacggacgagaccaacgcggaaaccagcaagaaaaccagc

SEQ ID NO: 76883 - RNA, 76 nt, Homo sapiens
ggccgagagccgcccgggccagcggccgcgcacccccggccggaggcaccagcgcggaggcccacgacaaaagcaa

SEQ ID NO: 76884 - RNA, 39 nt, Homo sapiens
ccggaccagcagaaaccagagggggagccgccgcgccca

SEQ ID NO: 76885 - RNA, 71 nt, Homo sapiens
aaacacaaagaaacgagcaagggacagccaaacggaaacaagacgggggcggccagccaggaagaaaccgg

SEQ ID NO: 76886 - RNA, 70 nt, Homo sapiens
agagaaaaggggcgggcggcgacggcggagggcccgaggacgaagccccgggaaccaggcgccagcagag

SEQ ID NO: 76887 - RNA, 71 nt, Homo sapiens
aagggagcagagacgcaacacggcgggccaccaagaaccagccgagagagaggaagcgacacagaacgggg

SEQ ID NO: 76888 - RNA, 89 nt, Homo sapiens
cggacacacaggaacgggggccacgcacggagaagccccccggacagaccacccagcccgacagggaccgcgaggaccagccgcggcac

SEQ ID NO: 76889 - RNA, 76 nt, Homo sapiens
ccacgcacagggccggcgccaggcagaacagcagcaaacggaggcaagcacacacggagacagggaaggaaccggg

SEQ ID NO: 76890 - RNA, 82 nt, Homo sapiens
acgacccagcagccagagagccaggcccaagaagaccagaaaacacggagaagggaagcagcgcacacccagagaaaccgaa

SEQ ID NO: 76891 - RNA, 58 nt, Homo sapiens
gagcgacgggcaggaaggagggggcgcacaaacgagggcgaccagacgaggggagacg

SEQ ID NO: 76892 - RNA, 73 nt, Homo sapiens
gaggcccacaaccaagccacaaaagacacgccacaaccgaagcggagcgcgaaagaaaacagcagaaaggccg

SEQ ID NO: 76893 - RNA, 84 nt, Homo sapiens
aacgagccagcaagcccaaaacggaacaggcacaagacacgaagagcaccccagagcgggacacagacagaaaagagcgagacg

SEQ ID NO: 76894 - RNA, 79 nt, Homo sapiens
gaaccagcagcagcaccaaaaccccagggacggaaaagacaagaaggagccagaagaggaggagccaggaaaaaggcag

SEQ ID NO: 76895 - RNA, 78 nt, Homo sapiens
aaggagcgaccagcaccccaaaagagccagacaacaggcgccaaaaaggagcaagaggcagggcaaagcccaggaaag

SEQ ID NO: 76896 - RNA, 83 nt, Homo sapiens
gcgggcgccaaggggagcagaaggaccggacacagggggcacccgaggaggaagagggcagggcccacggaaagaagggaaac

SEQ ID NO: 76897 - RNA, 72 nt, Homo sapiens
ggacgggaagacggagagagagggcagggcggacgaccggaaagaagcaaacaggggcaggaaaacccaaaa

SEQ ID NO: 76898 - RNA, 37 nt, Homo sapiens
gggaggacgccagaacccaaaaggaggacccgaaaac

SEQ ID NO: 76899 - RNA, 76 nt, Homo sapiens
aagaagaggaaacaacgcgcgccccagccgacccagaaaagacgaggaaacaacccagacagaagagggagaaccc

SEQ ID NO: 76900 - RNA, 106 nt, Homo sapiens
cacccccggcgggcccgaggcggcgagagaggcaggcggagccgaccgggccagcaaggaccagaaggacccaaggacgaaggcaggggaaaggaccccagcccag

SEQ ID NO: 76901 - RNA, 79 nt, Homo sapiens
acaaccaccgcagccggccaaggaaaccggaagcaacaccacccagaggagggccacaaaggcagccccccaggcagcc

SEQ ID NO: 76902 - RNA, 73 nt, Homo sapiens
cagggggccacacgcacgagaaagacagcaaagaaaaggagaagaaaggaaaaaaacaaccccgggcaccccg

SEQ ID NO: 76903 - RNA, 79 nt, Homo sapiens
caggcgagaccgcgcgcgaggagaggagcgcaacagcagcaccaggggaagaaaacgccagagaagcagagcagcccgg

SEQ ID NO: 76904 - RNA, 44 nt, Homo sapiens
cgccaaggcggcgcagcgggcgcccgcgccggcagaggaggcga

SEQ ID NO: 76905 - RNA, 107 nt, Homo sapiens
accggggaggagggaaagagggcccaccacaggaggccagccaggcgagaaaccggagcagggccgcggagggcgcacgggcccagagacgacgcaggacccacagg

SEQ ID NO: 76906 - RNA, 59 nt, Homo sapiens
cccgaggcccccaggaccccaccccaagggaggcaaagaaaaagccagccgaggacggg

SEQ ID NO: 76907 - RNA, 75 nt, Homo sapiens
ccgggagaggccacggccaaccacggcgaggccgcccccaccgaacggggcagcaccacccggcagggggagacc

SEQ ID NO: 76908 - RNA, 57 nt, Homo sapiens
agacaccggccccgcaaaagacagaaccagcacagcaaaaaaggcagcgcaccgacc

SEQ ID NO: 76909 - RNA, 71 nt, Homo sapiens
cccgaggcagcacaacaagaaaaagaagcgaggacacagaccgaacaacaaggccgacgcgcacgaacacg

SEQ ID NO: 76910 - RNA, 74 nt, Homo sapiens
gggaaagccacgggccgcagcaaccccaagggccagcgcgcccggcgggccagccccaggaagcacggccagcc

SEQ ID NO: 76911 - RNA, 71 nt, Homo sapiens
gggacgaggcggacgggaaccccacaaggacaacgaggcaacgcagacccagcccaaaagaaaccagggac

SEQ ID NO: 76912 - RNA, 47 nt, Homo sapiens
cgggcgcgagaagacgaaccaaccagagagagggacccacagcccgg

SEQ ID NO: 76913 - RNA, 62 nt, Homo sapiens
gacaccccgaaacgccaaaagccagcagcacgaggaaggaaaaccgcaacggacaacggccc

SEQ ID NO: 76914 - RNA, 37 nt, Homo sapiens
gaaaaaaaagcgaaaccagagccagccaggagcccgc

SEQ ID NO: 76915 - RNA, 63 nt, Homo sapiens
aacgacccaaagccaagccaaagccaccgagcgaggggcagcagcccaagggcgcacgaacag

SEQ ID NO: 76916 - RNA, 78 nt, Homo sapiens
cgacaggaaaacaacgagagaacgcaggacggagaagagaaaagggaaggcacggaggaagcccgagaccacgaggca

SEQ ID NO: 76917 - RNA, 76 nt, Homo sapiens
acccaagagaagaagaaaagagggacacaacagcagccacaggaaccgagaagccggcgagcaaggggaagcccag

SEQ ID NO: 76918 - RNA, 76 nt, Homo sapiens
accaggaccggacccggacccaaaggccagcaagacagaacgaccgcccggccagcccaccccccgacgaaggcca

SEQ ID NO: 76919 - RNA, 76 nt, Homo sapiens
gacgcaccacagacccaaagcggaaaaacgggacaaagaggcgggaaaaaggaaaggggaggcagacgcagcggaa

SEQ ID NO: 76920 - RNA, 70 nt, Homo sapiens
ggacagccaagaaccaaaaaggaccacgaagggggcacccgaggaggaagagggcagggcccacggaaag

SEQ ID NO: 76921 - RNA, 68 nt, Homo sapiens
caccaaacaacaccaaaggagaaacaaaggagaaaaggaggaaagcagaaacaccacacacggccccc

SEQ ID NO: 76922 - RNA, 73 nt, Homo sapiens
ccgacagcaagcaccggagggagaagacagcaaaaaacccagaaggggagaaagaacacggcgacgacaccag

SEQ ID NO: 76923 - RNA, 70 nt, Homo sapiens
agagaaaacgaggcccccaggacgcacccacaaggcgaagcgaggaacaaggcccaaaaaaacagcacag

SEQ ID NO: 76924 - RNA, 83 nt, Homo sapiens
gggcggcgcgcggcggcggcgccggcgaggaggcgcccggagcggccgccccagcgagacgagagggccccaaagggaccagg

SEQ ID NO: 76925 - RNA, 61 nt, Homo sapiens
cgagggcggcggaaaaagccgccacacgccaaagacggcaagaagaagcgaaaaccgccca

SEQ ID NO: 76926 - RNA, 65 nt, Homo sapiens
gcgggcgccgagcgaacgcgcaacagggccgcacgcaagcgacacacagacagccccacccggcc

SEQ ID NO: 76927 - RNA, 69 nt, Homo sapiens
ggcggggggcccaagcaaggccggaagaagagcgcagagggcgggaacccccacgcaggcaaaacacac

SEQ ID NO: 76928 - RNA, 80 nt, Homo sapiens
ccggcaaaaaaacaggggacaaagagagcagaggccagaaacaaagagccccgggaaaagaaaaaaaacgccccaaacgg

SEQ ID NO: 76929 - RNA, 81 nt, Homo sapiens
aggacggcggaccccgcggcgggaggagccgccccgaggaagccaggagggaagcccagaagacgcacaagagagaccgac

SEQ ID NO: 76930 - RNA, 53 nt, Homo sapiens
ccgggccacggggaggcaccccaccgagcacgagagaaacagaggacgaccgg

SEQ ID NO: 76931 - RNA, 59 nt, Homo sapiens
ggagggcgggaggcccggagcgcccggagccggagagcaaaagcgcagcaccagcggca

SEQ ID NO: 76932 - RNA, 85 nt, Homo sapiens
cacaagggccaggcccccaggccagaaggagggacaaaacaagagaagcacagggcaaagacacgcaaacccaagaacaagaagg

SEQ ID NO: 76933 - RNA, 71 nt, Homo sapiens
agagaaagacaagaagccagaaggcagccgagagaaccagacgacagaaacgcggccccagaacaacgcag

SEQ ID NO: 76934 - RNA, 86 nt, Homo sapiens
gggcaggcggagcagggccggaccccgcggcgcccccggcccggagcaacgagcgcagcgccggagcagaagacagagggaggagg

SEQ ID NO: 76935 - RNA, 89 nt, Homo sapiens
aaaaccgaaagggaagaaggcgcggggcaggagcgacagaggagggaaacgcggagccaggccgagagggcggagaacggaaaagcacc

SEQ ID NO: 76936 - RNA, 64 nt, Homo sapiens
ggaacccaggccccgccgaggcggccaggccaccaacggcggggggcgaggagcgagcaggagc

SEQ ID NO: 76937 - RNA, 79 nt, Homo sapiens
cgggacggcggcgccacagcacacagagaagcaggcggcacggaagacaccggaccccgaggcgcgccccagccagccc

SEQ ID NO: 76938 - RNA, 59 nt, Homo sapiens
gggaccccggagcccagaagacagagggcgaggggcggcgaagaggacccgcaggcgca

SEQ ID NO: 76939 - RNA, 67 nt, Homo sapiens
agaaggaccaagaaccagcgcgcccaggccaaagaccaaaacaccagaaccgccggaagaaaaggaa

SEQ ID NO: 76940 - RNA, 69 nt, Homo sapiens
agaaggaccaagaaccagaacaccagggagggagagccacgaggaacagaggggcgaccaaaggacgaa

SEQ ID NO: 76941 - RNA, 79 nt, Homo sapiens
cgggcccagacccccgccaaacagaagagcgaaagccagggggcgaaacaaaacaaaaaggagcaaaaggagaaggccc

SEQ ID NO: 76942 - RNA, 56 nt, Homo sapiens
agccagaacgcagggaaacagccacagagggaccccgacggagagacaaagaagac

SEQ ID NO: 76943 - RNA, 71 nt, Homo sapiens
acaggaaggcaccagcaaggacaggcgagacagcagccgcaagaaaacgccgaaaaccagccgcgaggagc

SEQ ID NO: 76944 - RNA, 85 nt, Homo sapiens
ggggacagcgacgacgcggaggcagagaagggaacgcccggcccagccccggaggaaaaagcggccaacagggggacgggaaaga

SEQ ID NO: 76945 - RNA, 67 nt, Homo sapiens
aggaaggggccgagagaagaagagacaccaggggcgggagaaacaacgaacgagcaaggaagggcca

SEQ ID NO: 76946 - RNA, 80 nt, Homo sapiens
agaagggaaaagagcagcgcaccagaacagcaaagagaaacaggagaaaccagagagcaagacaaagaaacagaagcgcg

SEQ ID NO: 76947 - RNA, 81 nt, Homo sapiens
gggacgcccacggccgcgaagggcccgagaccccgcgcgcggaggcaagccaaacaaccaaggaaaagaagaaaaggaagc

SEQ ID NO: 76948 - RNA, 77 nt, Homo sapiens
gccggaggagacaaccgacccggcgaccggcagacccaggggcaagacagaccggggagacgagccagagaggcacc

SEQ ID NO: 76949 - RNA, 82 nt, Homo sapiens
aggagccggagacgagaccagaggccgaaccgggcgacaagaggccgggcgccccgcaggacacaaggggacggcagcacac

SEQ ID NO: 76950 - RNA, 69 nt, Homo sapiens
ccgccccaggcgaaaacaaagcggccacgaggcaggaagacaagccgagaccaccaggagcagagcgga

SEQ ID NO: 76951 - RNA, 91 nt, Homo sapiens
ggaggaccaggcgcggcgcggcgcggcgagcagggagagcaacaagccccggccccagagccagccggagagcgcagcccagagacagcag

SEQ ID NO: 76952 - RNA, 77 nt, Homo sapiens
gaacggcgggcacagcagcagggcgcaagagcagagaagaccaagcacgggcgccgccaagaaacccccgaccaaag

SEQ ID NO: 76953 - RNA, 81 nt, Homo sapiens
aaaccaggcgaaaggcgaggcagaggggcaagacaccaggcgccgagaaggccagcagagaaacaggcaggagaggcccac

SEQ ID NO: 76954 - RNA, 53 nt, Homo sapiens
gccagagaaccccagcaggacccccagaggcaaaccagacccaacacgccgga

SEQ ID NO: 76955 - RNA, 77 nt, Homo sapiens
ccgcgcgacgacccgccgccgccgggcggagaccaacgggagccgcaaggacaacagccgcggccagacagcggccg

SEQ ID NO: 76956 - RNA, 70 nt, Homo sapiens
ccggggcgccggacaagaggcgccagagacaaggccacaagcccgacccaagaaggagaagccccgcagc

SEQ ID NO: 76957 - RNA, 79 nt, Homo sapiens
ggcgcgcccgccgacggacagagcgggagccaccagcgccaaagggaagccaggagcccgggggcacggggagaagacg

SEQ ID NO: 76958 - RNA, 75 nt, Homo sapiens
gaggagaaaaaggaacagggcgcggaaaaggcagcccgaccacagcgccccaggaggcggcacggagccaccggg

SEQ ID NO: 76959 - RNA, 82 nt, Homo sapiens
cacacaagaggcaggcagccccaggcaggaggaagaagacagaagagcccgcgaacggaagcggagcggacccagcagagag

SEQ ID NO: 76960 - RNA, 57 nt, Homo sapiens
caagcacgccacccggaagggaagacggcaggaggacgggcggcagcccggcagcgc

SEQ ID NO: 76961 - RNA, 74 nt, Homo sapiens
cagcagaagaaaaacaccaaacccagcaaaaccacgcaagaccacaggcaaaaggccaaacacacaggaacgcc

SEQ ID NO: 76962 - RNA, 47 nt, Homo sapiens
gcacgcgagagcacagcaccggaccaggacgacgcaaagcaggagga

SEQ ID NO: 76963 - RNA, 40 nt, Homo sapiens
gcggcagcccgagaccgcagcagcgcgccaggaggggggg

SEQ ID NO: 76964 - RNA, 71 nt, Homo sapiens
cgaccgagcccaggagcgccacgcgcggaaggcagcgcccagcagcgcagcaaccaagccgggcacgcaaa

SEQ ID NO: 76965 - RNA, 82 nt, Homo sapiens
aagaaaaggacccagaaagcagcgaaagacaccaacgagaaagacagaaaaacaagggggaggagaggcaacagaaagggac

SEQ ID NO: 76966 - RNA, 72 nt, Homo sapiens
ggcacgcgcaggagggaaggggccaagccagggaagggcggaaccccaggagccggcaaacccaccagaacc

SEQ ID NO: 76967 - RNA, 73 nt, Homo sapiens
gcagcccccagagcgggaccacaggaaaccccacagcaacagggagagaaaagccccgaaaacggagaggaca

SEQ ID NO: 76968 - RNA, 66 nt, Homo sapiens
aggcccagaaccaccgcaggcaaaagaacccgcccacacggccagccggaagaaaagacacggcac

SEQ ID NO: 76969 - RNA, 75 nt, Homo sapiens
agcccgcacgcggaagcgccagggaccaaccagcggaaaagcgcgcaggagggcaacccaccggacccgcacgag

SEQ ID NO: 76970 - RNA, 80 nt, Homo sapiens
agaggaggcaacaaccacggcccaggaaccgaaaaggcgaggagaagacggcaaaaaacgcgaacagcgcgagccacaag

SEQ ID NO: 76971 - RNA, 58 nt, Homo sapiens
gcagaccagaaaaaacagcacaccaggaagcaagggaagcgccacgcagagagcaagg

SEQ ID NO: 76972 - RNA, 75 nt, Homo sapiens
aacaccgcaacccacgcaggcaagggcagagcggcgggaaaccaccaacaacacccccaaaccaaaacagccgga

SEQ ID NO: 76973 - RNA, 84 nt, Homo sapiens
ggagcggcgcccagcccaaaggcccagaggggagcagagggccgcgccggggagcagagcagaagcaaaggagaggagagacgc

SEQ ID NO: 76974 - RNA, 65 nt, Homo sapiens
gcggcggccgcagcggcgcagcgaagcaggaacaggaggccgagcaaagcaggaccgggcgggcc

SEQ ID NO: 76975 - RNA, 79 nt, Homo sapiens
gaaagagaccgcgcccggggggcacccaagcgaggacgcggagcaaaagcggcgccaggaaagaacaaaaacgaagcag

SEQ ID NO: 76976 - RNA, 83 nt, Homo sapiens
gaccaggggagggaaggcacaggagcagcccagagcagacgaagaaagagaagcagaacgaagaaggaaaaagcaacacaaag

SEQ ID NO: 76977 - RNA, 79 nt, Homo sapiens
cgggggacagaaagcaagcaccaggggcaagacagcccccagcagcaacagcagcagcaagagggaaaaaccccaagag

SEQ ID NO: 76978 - RNA, 82 nt, Homo sapiens
cgccgcgcacccgcgccagcaccacgcccgcgccgcgccgccgccaccagcccaagagaaagccacagaaagcccgccccag

SEQ ID NO: 76979 - RNA, 94 nt, Homo sapiens
ccaacacggcagacggcaagcccccgagggcccaccggaccacggccacagcggccccgcgagcccgagacacgaccggcaagagcccaccgcg

SEQ ID NO: 76980 - RNA, 75 nt, Homo sapiens
caccggccgagagccaaaggcacagagaccagcccgcaacccaaaaccaaccagacagggaaagaccaggagcag

SEQ ID NO: 76981 - RNA, 71 nt, Homo sapiens
aagaaaggggaaccccggagaaaaggccaagaaggcaggagaagcagaggcacaacaggaggacgacccaa

SEQ ID NO: 76982 - RNA, 53 nt, Homo sapiens
agagccaacaagagccagacaaacagcgcaagccccggggcagagacacagga

SEQ ID NO: 76983 - RNA, 109 nt, Homo sapiens
gaagaggacccgcgaggcgccccccccgcccgggcccaccgcacccagcgccagagacgaagcgggcaccaacagacaaccagggcaagcagaggcaaaggcaagggcg

SEQ ID NO: 76984 - RNA, 56 nt, Homo sapiens
aaacccggggcgaaaaacaaagaggcaccagaccagagccccacagagaggaaacc

SEQ ID NO: 76985 - RNA, 80 nt, Homo sapiens
agaccgcacacggcaaaaacagcaagggagcaacagcggacgcaagacgcgagcaaaaagagaaaacaaagaagcaaagc

SEQ ID NO: 76986 - RNA, 77 nt, Homo sapiens
ccggggacacacaaagaccaggagcgcaggcagcagcccacggaaaaaaagacgacaaacgggaagagagccgggcc

SEQ ID NO: 76987 - RNA, 79 nt, Homo sapiens
gggggagcgagagcgccagagagagaagacggggggcgaaaccaccaccaccgcccgcccgggccaccgagacaaacac

SEQ ID NO: 76988 - RNA, 86 nt, Homo sapiens
agcgaaacagcacggcagaccaccgaagccgaacggaaaccagaacaacggaaccgacaaccagggaagcagaaggcaaggacccc

SEQ ID NO: 76989 - RNA, 74 nt, Homo sapiens
gcgagagacaacagcacagacccaacccagcaggagcagaaaagcgaggcaagggcggcaggggggggcgcaaa

SEQ ID NO: 76990 - RNA, 82 nt, Homo sapiens
acaagcggaacaggagccgacgacccggaccaagaaggggaggcccgcggcaggaacccaggccgcacagcccagggacgaa

SEQ ID NO: 76991 - RNA, 54 nt, Homo sapiens
gcggaaggcagcgcccagcagcgcagggaacagacgaaggcccaagcggggagg

SEQ ID NO: 76992 - RNA, 64 nt, Homo sapiens
caagggcaacaaagaagccaggagcccagcgaccccaagagggaagcgggcgcagcgaaccgac

SEQ ID NO: 76993 - RNA, 93 nt, Homo sapiens
aggagacaggggcaccccgaaggagggcaaagagaagaaggagaagcacaagaccaagacagccaacaggaccccgggaggcggagcaccccc

SEQ ID NO: 76994 - RNA, 61 nt, Homo sapiens
gaggagggaggaaaacaaccgagggcagaccaagggaagagaggggagggaaaaacaaacg

SEQ ID NO: 76995 - RNA, 71 nt, Homo sapiens
cagcaaccaccaagggaacagcacagaacgcggaaccccagagaggacagaagccaacgcaaccagccaga

SEQ ID NO: 76996 - RNA, 62 nt, Homo sapiens
ccgcggagcccagcacggcagaaacagccaagagcagcggaaacagagaaggagagagaccc

SEQ ID NO: 76997 - RNA, 87 nt, Homo sapiens
cggccccggcgaggaggcgcggaaccaggccgagggggcgagggcgaagacgagaccagccgcgaacccgccgaggccgcgagcagg

SEQ ID NO: 76998 - RNA, 79 nt, Homo sapiens
ggccgggcgagcggcacgccggcgaccgggcggcgggaggggcagccgggggggaccaggggaacgccacgagcggggc

SEQ ID NO: 76999 - RNA, 76 nt, Homo sapiens
ggggagcagaagcacacggagaccggaaacgagagaaacgaagacgaagaaacagccgcacacagaagaaaacgag

SEQ ID NO: 77000 - RNA, 68 nt, Homo sapiens
caaacgcacgaagcaagaacaagggaaccgggaaacccacaccacagacgagaaaccccgaaccaaac

SEQ ID NO: 77001 - RNA, 75 nt, Homo sapiens
agaggcggacggaggagcaggcgagaagagaagggccaaaaccacaccaaaaccaagggacagaaacagccaagc

SEQ ID NO: 77002 - RNA, 68 nt, Homo sapiens
aaaaggcggacagcagcgcaggcaaaaaacaggaacagaaaccccaaacaacacgagaacggcaacaa

SEQ ID NO: 77003 - RNA, 76 nt, Homo sapiens
aggccgcccaccaagaaaggaagaacgccaacaaagaaggcccggaaccggaagaggaaccaggacagaaacccac

SEQ ID NO: 77004 - RNA, 111 nt, Homo sapiens
cgggagggcggaggcggcggcgagcacaggcccgccagggcggcgccccgggacccgcagcagcaagagaagagcgacgcggcagcgagagagagagccgcagcaaagcag

SEQ ID NO: 77005 - RNA, 68 nt, Homo sapiens
agggaacggagcgcccccacgcggggggacgcccacccgggccacgggcggccgccggcaggccaccc

SEQ ID NO: 77006 - RNA, 67 nt, Homo sapiens
aaaaccccaaacccacaagagaagggagcccggacaggaccaacggagagcggagcgggaggacgcc

SEQ ID NO: 77007 - RNA, 80 nt, Homo sapiens
ccccagcggaccgaacaggccaagggaccggacaagcgcacaggcaagaccaagggcacggccgcagccaaggaccccag

SEQ ID NO: 77008 - RNA, 80 nt, Homo sapiens
aagcccaggccagggaggagaaggcagaaagcaggcccgcaagaggggacaccacgcgccccggaagcagacggccaggc

SEQ ID NO: 77009 - RNA, 75 nt, Homo sapiens
gagaagagcagaggaaacacagaaagaccccaaggacacagagcacaagcccaggaagaggaccccaaagcaaca

SEQ ID NO: 77010 - RNA, 61 nt, Homo sapiens
aagcagaggggacgagaccccgggcaccagaaaaagagaagcgcagcgaaaagaagagcac

SEQ ID NO: 77011 - RNA, 84 nt, Homo sapiens
gaggcaggcaagcaaagagcagagcaccggaacgggaccccggcaaagacggacaagcgcagcaaaagggagaccacaacagcc

SEQ ID NO: 77012 - RNA, 60 nt, Homo sapiens
cacggcgccccgcaaggagcaaggccgcaagaggacgaaggaccaagacgacaaagcgga

SEQ ID NO: 77013 - RNA, 100 nt, Homo sapiens
gagccgacagggagacagggaaaaaccagccccagaaacaagcacacaaagcacggaggaggaccaggccaaggggaacaaggaccaaaccgcccggcga

SEQ ID NO: 77014 - RNA, 74 nt, Homo sapiens
ccgcggcccgggccgcaccagagcgcccggcccacgacacaggaagaagacagccacacacagacacgagagag

SEQ ID NO: 77015 - RNA, 75 nt, Homo sapiens
ggagcagaacaaacggccaagaagggccaccccacagacggaccgcgacgagaagagcaaaacggagcccaaaaa

SEQ ID NO: 77016 - RNA, 40 nt, Homo sapiens
aacccagcacggaaggccgagccaggaggccgacccgacc

SEQ ID NO: 77017 - RNA, 69 nt, Homo sapiens
cggggagcccgcggcgcgccgccggggggacggcgcgaagaagagaagacaggaacggcaaagcaacca

SEQ ID NO: 77018 - RNA, 83 nt, Homo sapiens
ccgcgcccaccccaggccggggcgcacgcggccccacgcagccagccccgcccacgaccccccagggcaccacaacagaacca

SEQ ID NO: 77019 - RNA, 73 nt, Homo sapiens
caaggagcagaggcgcaagggaagaaagcagacagcaccgacagagagggcaagacaagcaagcacggagaaa

SEQ ID NO: 77020 - RNA, 69 nt, Homo sapiens
aggaaccagggaagagagcggagcgcaagaagaaggccgggggcacgccgcacgcaagaagaggacagc

SEQ ID NO: 77021 - RNA, 53 nt, Homo sapiens
gggccaggcgaagaccggaccgggggcaccggaccgaggagaacggagaaacg

SEQ ID NO: 77022 - RNA, 57 nt, Homo sapiens
aaggccagagcacgagcacgggaagggaccaagaaaggcccagggaccaaagcccgg

SEQ ID NO: 77023 - RNA, 61 nt, Homo sapiens
gaagagacaggaggcagagccaaacacccagggaaccaaaacaggcccgacacgcgacagg

SEQ ID NO: 77024 - RNA, 69 nt, Homo sapiens
aaagccacgcaggcagagagcagcgagaaaccagaaaacacggaacaaagacggacaaaaggacgagga

SEQ ID NO: 77025 - RNA, 39 nt, Homo sapiens
gggcaggggacacaacaggaccaggaacacccaagccag

SEQ ID NO: 77026 - RNA, 81 nt, Homo sapiens
gaaggaggcagaggaagaaccggggcgaagaagaagagaagagagaacagaggggacggagcagagggacaacccagccac

SEQ ID NO: 77027 - RNA, 79 nt, Homo sapiens
aacaaccacacgccgaccggacaggagcaggcagagccacggaggaaaacaaggagaagcgccacgacacaaccccggg

SEQ ID NO: 77028 - RNA, 63 nt, Homo sapiens
ccgggacccggccccggcccacaggggggggcaaacccgagagaacggagagagaaacacaag

SEQ ID NO: 77029 - RNA, 78 nt, Homo sapiens
cagaccgggcgcccaaagaaaaaggcacaaacccagcacagagaagacggcgacaagcaaaagacgacgcagaaagga

SEQ ID NO: 77030 - RNA, 106 nt, Homo sapiens
gaaggcgacgcccggagaagccaccagccgaagcaccaccaagaagcgcaaaccgggaaccagaaccgacgacccggcgacggcgacgccgacaaaagacaggcca

SEQ ID NO: 77031 - RNA, 66 nt, Homo sapiens
accaacaacccggcgcgacccgcgcagcgccacccagggcgggaaaagaaacagcggaaggggagc

SEQ ID NO: 77032 - RNA, 34 nt, Homo sapiens
gcccagcgcaggaaagcagggaggaaggagacgg

SEQ ID NO: 77033 - RNA, 79 nt, Homo sapiens
ggaccccacgcggggggggccaagagacagggcacaccaaacccacggacccaaggccagccagccccaggcaccagcg

SEQ ID NO: 77034 - RNA, 58 nt, Homo sapiens
cgagagcggaccgagagcgcgaaacgcacgagaagaaacacaggggaaacacgagaga

SEQ ID NO: 77035 - RNA, 74 nt, Homo sapiens
cgggcgcggcgggagggcacaccggacggagggcccagcggagcggcccacaggccgcgaggccccacagccca

SEQ ID NO: 77036 - RNA, 44 nt, Homo sapiens
gcacaggcacacagcaaagaggccccgggaccaaggacacgcag

SEQ ID NO: 77037 - RNA, 62 nt, Homo sapiens
cccagcacggcaaagcccggagacaagcgaagaggagaacagccgcacgggcggcgcccggc

SEQ ID NO: 77038 - RNA, 73 nt, Homo sapiens
gcaaggaagaaagcagcccaggcacagagaccgccccagccagcacacccagagcccaacacccccaagacac

SEQ ID NO: 77039 - RNA, 64 nt, Homo sapiens
gagaagcgcccggccagccggcggagcccacgacgagcggaaaaggaagaagacggcacgggac

SEQ ID NO: 77040 - RNA, 42 nt, Homo sapiens
cggcaaagagagggggacaagccggaagcccgaccccaggag

SEQ ID NO: 77041 - RNA, 69 nt, Homo sapiens
ccacaacagagaaggaagagggggaagaggggcccgccacaggcggccaaaaggcaacaggcgacagga

SEQ ID NO: 77042 - RNA, 67 nt, Homo sapiens
accgcggcacggggcaaccgggcggccacgcccgcgcagcacccacccaacagaggagagaaaaaac

SEQ ID NO: 77043 - RNA, 95 nt, Homo sapiens
cagaaaggccagcgacaaaaacgggacgcggaaacacacccgcagggccagaggcacgccccaccggaggaagcaaaaaaagcaggaaaggagaa

SEQ ID NO: 77044 - RNA, 76 nt, Homo sapiens
gcagcagcggaaggcagcgggagccgaaaacggaagggcagacacaaggaacagccagccaggagaaaaacgaacc

SEQ ID NO: 77045 - RNA, 66 nt, Homo sapiens
accaagaaccaggaggagggagacaggggcaaaaaacggcagggaagaggcgagacagaagagaga

SEQ ID NO: 77046 - RNA, 81 nt, Homo sapiens
ggcggccagaccgaacccagaaacagagggaggaagacagccagcaaaaccaaaaacaggcgggagagcaggagaggacag

SEQ ID NO: 77047 - RNA, 65 nt, Homo sapiens
caaagaaaacgaaaggaaagaaaggaccaagaaggcgaacaggaaagcagggaagggcccacgga

SEQ ID NO: 77048 - RNA, 74 nt, Homo sapiens
caccgacacaagcccacgacaccgggcacagccagggcagggccaggaggccacagagaagaggagcccccagc

SEQ ID NO: 77049 - RNA, 80 nt, Homo sapiens
agaggagcaccaggacaaagaacagagagacagccagagcccagaggggagcagagggaggggggaacggacaggacagg

SEQ ID NO: 77050 - RNA, 86 nt, Homo sapiens
cacagccccgaccgagagaaccagcgccaggggcccacccaggaaaaaggacacccagagccaggagcaggccaccgcagcgaccc

SEQ ID NO: 77051 - RNA, 82 nt, Homo sapiens
aggcgggcgcgccccaccaccgccccaccaggacacaaacggcaaagcacagagccaagaaacaccagaaaaccaaggggga

SEQ ID NO: 77052 - RNA, 73 nt, Homo sapiens
ggaagggcagaagaggcagaggaaaccaaaagagcacccaggggggccgggagcggaggggggccacgggcgg

SEQ ID NO: 77053 - RNA, 77 nt, Homo sapiens
aagggggcccaggggggccaggcgacgaagcgccgggccagccagggccccaggccccggggcaaccagccaccggc

SEQ ID NO: 77054 - RNA, 93 nt, Homo sapiens
gcagaccgggaccagaggaacccacccccccaaggagaaggacccaaggagggccaggcgaccgggaacagaggagggaccaccgccccgagc

SEQ ID NO: 77055 - RNA, 80 nt, Homo sapiens
gaaagggccggaaaacacacgccccgaaaccgggcaagccgagaggccggcagcgcgacagccacccgggggagggcaga

SEQ ID NO: 77056 - RNA, 79 nt, Homo sapiens
gccagcagcgcaggcgcgacaaagagaacaaggccgagaaaagaaaggaggaaacagccggcagccagacagcaagggc

SEQ ID NO: 77057 - RNA, 73 nt, Homo sapiens
acccccaacaccagcaccgcagaggcaaggggccaccaggaggccagggggcgccagggccaaccgaaaaaac

SEQ ID NO: 77058 - RNA, 70 nt, Homo sapiens
cgccaacccgaagagacacgaaaacggacaaaacaaagacagccagcacaaaaaaacaaaacgagaacac

SEQ ID NO: 77059 - RNA, 69 nt, Homo sapiens
gccgcgaagcagcccacacagagaggaaccaagacccagggaagaggagccggccccacacacagcacg

SEQ ID NO: 77060 - RNA, 79 nt, Homo sapiens
agagccgacccaggccgccggccccacagggggcaccaccacgaggcgaggggccaaccaaggaggcgaggggcccccc

SEQ ID NO: 77061 - RNA, 68 nt, Homo sapiens
cacagagacaggccagacccgcccccgaaagaccaaacgacccggagacgaaagcaaggaaaagcaga

SEQ ID NO: 77062 - RNA, 74 nt, Homo sapiens
gcacacaaaagaggagaaaaccgggcgcagccgcaaccaacccagggaaaaggacagaccaccggcagaaagca

SEQ ID NO: 77063 - RNA, 67 nt, Homo sapiens
ccaagacagcgccgcagacgaaaaagcaggcagcggggcggaggccgcaccgccgagagcgccagcc

SEQ ID NO: 77064 - RNA, 77 nt, Homo sapiens
acgcggccgacaacagccggcgccgccacggcccggggcggcggcaccggagacagagacagcccccggaggcgcgg

SEQ ID NO: 77065 - RNA, 61 nt, Homo sapiens
caacggggccacacacggcaagggaggcaagcaggggggcaaaggaaagaaggcagaaagg

SEQ ID NO: 77066 - RNA, 79 nt, Homo sapiens
agccaggccgacacaagacgggcaccgccaagaacgccagaagcgaccaaccgcgcgcaggaaaaggccaggaaacgaa

SEQ ID NO: 77067 - RNA, 77 nt, Homo sapiens
gggaacaagggacaggaggaagagaggggcccacgagaagggccagcccgcagagcagcggaacgggggacaggcag

SEQ ID NO: 77068 - RNA, 52 nt, Homo sapiens
ggcacgggccagagccagcgcagcaagccgccagacagacagaaagcgccca

SEQ ID NO: 77069 - RNA, 74 nt, Homo sapiens
gaagagagaagccaccagcaaaagcagcggaggaggaaaggcaggccaacaaccgcacgccgcggacaccaagc

SEQ ID NO: 77070 - RNA, 70 nt, Homo sapiens
aagaggagagagagcaagagaggaagaagaacgacccgcccggggcagcaggcccccccgggcgagccgc

SEQ ID NO: 77071 - RNA, 77 nt, Homo sapiens
cggaggcacccgaaagccaccacaaagggaagccaaaaaccccccacccggggccgagcaagagagggagcacgcac

SEQ ID NO: 77072 - RNA, 77 nt, Homo sapiens
gggaagcccagcgacggagcacgccacgggccacgcccaccggacacggggggccaggcggcccagggcgcgccacc

SEQ ID NO: 77073 - RNA, 75 nt, Homo sapiens
gcgccggcgagagccgcaccgccaacccccgagcaagacggggcccaacaggagcacaagagaccacagacacag

SEQ ID NO: 77074 - RNA, 76 nt, Homo sapiens
gaggaggggcagggcgcaggagaggaaagaccagaagccaccgcagccccggcacaaagcagaccgccccacgggc

SEQ ID NO: 77075 - RNA, 68 nt, Homo sapiens
ggaagcgcaaaaacaagacggggcgccccacagaggggcgacggaaggccgcggaccccccccccccc

SEQ ID NO: 77076 - RNA, 61 nt, Homo sapiens
gaacacgagagccaagagagaagaagcaaaccgggaccggaagcaccaaggagaaaaagga

SEQ ID NO: 77077 - RNA, 71 nt, Homo sapiens
caacaaggagggaaaacggcaagaaagcccgacaaaaaggaagcaaggaagaggaaccccccaaggaggaa

SEQ ID NO: 77078 - RNA, 78 nt, Homo sapiens
cagccaagcaaagcgcccggaccgaagaaaccaaaacgggccaggaaggacaacagcagggccagcggaaaggagcgg

SEQ ID NO: 77079 - RNA, 82 nt, Homo sapiens
ccagggcaaaagacccagacccaacaaaacacaggaaggcgccggaaggaggaagaggaacggaaagccgggaaaagcagga

SEQ ID NO: 77080 - RNA, 64 nt, Homo sapiens
gcaggcagccgccagggcgaagacaccaaaccaccagaacagggcccgccccaccgggggccac

SEQ ID NO: 77081 - RNA, 83 nt, Homo sapiens
ggcagaaaccagcgccggacagagaagcccccaaggagcgcaggaaaagacgagggaagaagaccgacaacaaccaggggaag

SEQ ID NO: 77082 - RNA, 70 nt, Homo sapiens
gcacgcacacgggcagcaacgacaagccgagaccaccaggagcagagcggaggcaaccagccaaaacaac

SEQ ID NO: 77083 - RNA, 73 nt, Homo sapiens
cagagagcggaaaacggcgcagccaacaagggagccgggcagacccgaaaagcggacgacaagggaacagcga

SEQ ID NO: 77084 - RNA, 76 nt, Homo sapiens
aggcaggagagcacgagcagggggaaaaagaaaagggcgaagacccgaagcagcgcaggaacagaagagaagacca

SEQ ID NO: 77085 - RNA, 78 nt, Homo sapiens
ggcgcggcaggcgcgcgggaggcgggcgcggagccggaaaccccccaggcaagaggcgcaggaccgggaagaccaaca

SEQ ID NO: 77086 - RNA, 84 nt, Homo sapiens
gcggagagccagccgaggagccgcgggcgccacacccgccccggagccgggcagcacgaggagacagggcagcaggagcagaga

SEQ ID NO: 77087 - RNA, 61 nt, Homo sapiens
acacccccgcaaccggggaaacggcgaggaaagagaggagccccggaaagaaaaggacaga

SEQ ID NO: 77088 - RNA, 65 nt, Homo sapiens
ggcgccggcgcgggcgcggagcgggggacggagcgcgcaacgcgcggagccagcgcccggcaagg

SEQ ID NO: 77089 - RNA, 70 nt, Homo sapiens
aacaaaaccccagccgcccgcgcggacgcgaggccgagaagcgacagcccggggcgagacacaagagagc

SEQ ID NO: 77090 - RNA, 80 nt, Homo sapiens
ggcgcgcccgggacggcggagaggcgccccccgcagcagaccggagagaacagaaaaaaagcggcccgggaccaggaaag

SEQ ID NO: 77091 - RNA, 80 nt, Homo sapiens
cggcccgccaagaccagagaaggaggagggaccacgcgcgagcccccgcaaccagcgacaaacccgaaggcgagacgaga

SEQ ID NO: 77092 - RNA, 69 nt, Homo sapiens
accccgaggcccacgagaccgcgcgacgacgggcgggccaccaggcagcgggagagaggagagcagaga

SEQ ID NO: 77093 - RNA, 77 nt, Homo sapiens
ccggcagcccacacccaggggaagggggcaagggaggagaggggaggcgaacagcgagccgaggcggcgaccaggag

SEQ ID NO: 77094 - RNA, 75 nt, Homo sapiens
cgaacagacccggaaggacggcgagggccacaggaagggacgggcgcaggaggcagaggagcaggagcacccagc

SEQ ID NO: 77095 - RNA, 79 nt, Homo sapiens
gcaagaccgcgaggcgagacccaacaacacaacccagcccccgccccgagcgcgcggcgacaagcgcccgccagggcac

SEQ ID NO: 77096 - RNA, 78 nt, Homo sapiens
aggacgcccaaggacgcccaaagcccagcagaaaggccagcccaaggaccaagaacgcccagcccgcgggcaccggca

SEQ ID NO: 77097 - RNA, 70 nt, Homo sapiens
aaagcggacacaaaaggacggacaggaggacaacgggaccgccaaagacaccgaaacagggaagaaagaa

SEQ ID NO: 77098 - RNA, 57 nt, Homo sapiens
acaacccaccacaaagagagagaaagcccggggccagcacgaaagcagccaggagaa

SEQ ID NO: 77099 - RNA, 82 nt, Homo sapiens
accccccgacccgggaacagaccaaccgccaaaaaagccaccagcaaaccccccacagcagaacaacacacaagcggaagcc

SEQ ID NO: 77100 - RNA, 130 nt, Homo sapiens
gcggcgggcggaggccggcccccgagagccgccgacagaagaaagacggcggaccgcgggggagaacagcaaccacgggccacgagccgccaaaccacagggaaaaacgggagaggagaagagagcagga

SEQ ID NO: 77101 - RNA, 78 nt, Homo sapiens
aggaagacgacgaggaagagcccgccgaaggaacaagggacaaaccaaagaccaaccaagaggccagagagcaacacc

SEQ ID NO: 77102 - RNA, 77 nt, Homo sapiens
cccccggccagccccgggcgcgggcggaagcagcgcagcacagcgagcaacacgacaaacgcccgggacaggagagg

SEQ ID NO: 77103 - RNA, 61 nt, Homo sapiens
cgcccccgccgccccggcccggcgcgcagggacagagagggaaagccggcccacgagaccc

SEQ ID NO: 77104 - RNA, 55 nt, Homo sapiens
gaagaggcggaacaggcaccaagccggcggggcggacaacggagaccacagcacc

SEQ ID NO: 77105 - RNA, 79 nt, Homo sapiens
ccaggacccacggaagccagaaaggcccaagcggaggcgcaacagaaggccaccgcgcacagaaaacccaagggaacca

SEQ ID NO: 77106 - RNA, 79 nt, Homo sapiens
gggaaagccccggcccggcggcgcgccccgcggcgcccgcgccaggaacaagcagaaagcacgaacaacgagaacaaga

SEQ ID NO: 77107 - RNA, 90 nt, Homo sapiens
ggcggcgagccgcgaagggcgaaggaggaggacaaagagcccccacgagcccgcaagggggcacccgaggaggaagagggcagggcccac

SEQ ID NO: 77108 - RNA, 73 nt, Homo sapiens
gggggggccaagagacagggcacaccaaacccacgggggggccccagcccggccgaacgggcgcacgacacaa

SEQ ID NO: 77109 - RNA, 75 nt, Homo sapiens
cgacgacaaaacccggcgaagccaggcgagccaccacagcacagcaggagagagccaaaacgacaggccagggaa

SEQ ID NO: 77110 - RNA, 73 nt, Homo sapiens
agacaccggccccgcagggcaccaaggccgcgcgccacagcaccggaccccacgcacacccagccaggcggcc

SEQ ID NO: 77111 - RNA, 60 nt, Homo sapiens
ggacagaccgggacaaaggacagccacggaagcccggcccacacggacaagaagaaaaag

SEQ ID NO: 77112 - RNA, 81 nt, Homo sapiens
accaccacagaaggaagaaggggagaccacacccaaaacgaaacgggaggcagccagaaggaagacccacagccagcccgc

SEQ ID NO: 77113 - RNA, 60 nt, Homo sapiens
gggaagaacaagaccccgaacaccacaaggagggggagagacaaccagagcggaaaggga

SEQ ID NO: 77114 - RNA, 77 nt, Homo sapiens
acaaacgaaggacagaacaggaaccaaagaaggacggacaaccccaaaagcacgcaagaggaaccggggggcacccc

SEQ ID NO: 77115 - RNA, 84 nt, Homo sapiens
ggggaaacgaggccgagcgggagagaggcgaggcggagcgagggagagcgcggggcgggagcccgcccgccgcagagaccgacc

SEQ ID NO: 77116 - RNA, 74 nt, Homo sapiens
gggcgagcggcggggagcggcgaagccgcgggcgaggagggaggaagaggcgcggcaagggcgcggcaagaaaa

SEQ ID NO: 77117 - RNA, 38 nt, Homo sapiens
acaaacagaacggcaaaagcccagcaacgggagcagaa

SEQ ID NO: 77118 - RNA, 88 nt, Homo sapiens
aagcgagggcggccgcgccggcccagaccaggggcgcaagggacccacgaaggagaagcgggggccaggccgaaaggcccggaagcag

SEQ ID NO: 77119 - RNA, 81 nt, Homo sapiens
cgcccccgggccagcagcccggcccccgggggacaacaaccggacgacgagaacggcaggagcccagcggacggaggccgc

SEQ ID NO: 77120 - RNA, 79 nt, Homo sapiens
gaagagggccgggggcgcggccgcgcgccgccggcgaaggaggaggcggccggacgcggagaacaacccgagaaaagcc

SEQ ID NO: 77121 - RNA, 56 nt, Homo sapiens
ggaaagccgagcccaggagaccaagaacaaggcaccagacccggaggagcagcacc

SEQ ID NO: 77122 - RNA, 74 nt, Homo sapiens
gcggcgccgcgcgcgcacaaggcggccgaagagggcgcgcgcagcgaaccaccagggaaagacaaggagccggg

SEQ ID NO: 77123 - RNA, 90 nt, Homo sapiens
ggagagccccgcggcagccgcgccggggccaaggacccgccggcggcccgccgccccacccgcccaccagccacaggggacccagaagcc

SEQ ID NO: 77124 - RNA, 61 nt, Homo sapiens
aacacaacccccaccaacagcccggcagacaggacggaaggcgaccacaccaccccagaca

SEQ ID NO: 77125 - RNA, 60 nt, Homo sapiens
cggagggccagcgacccgaggacaggcgggaggaaccagacagcaccaggggccagagca

SEQ ID NO: 77126 - RNA, 70 nt, Homo sapiens
cgccggagcgcccggaggccacagagcacagacaaacccgacccaccaacaaaagagacgggggcaccag

SEQ ID NO: 77127 - RNA, 69 nt, Homo sapiens
ggaggcgccccaaaaggccccccgcgcaggcacacagcaaagggagccaggccagaagaggccgcccag

SEQ ID NO: 77128 - RNA, 42 nt, Homo sapiens
ggacggggaacgacaaacggggccgcagccggccaggggacc

SEQ ID NO: 77129 - RNA, 61 nt, Homo sapiens
aaaacaagagaccacagaagcgaagaaacaggggagaaaccccgcggggaagccgaggaaa

SEQ ID NO: 77130 - RNA, 77 nt, Homo sapiens
ccgacgccaggcagcgcccccaaacggcgccagaaacagagacaaccagggggccgcacggccgcggggagggaaag

SEQ ID NO: 77131 - RNA, 74 nt, Homo sapiens
cgcgcgggggcccagccccgccacgagcacggaacccagaaccccagggacagagagggaaagccggcccacga

SEQ ID NO: 77132 - RNA, 79 nt, Homo sapiens
cccgcacagccacgccgagcagggggggccccgggcaagaacagcagcacaaaaaggagcccaagccccaccaccagca

SEQ ID NO: 77133 - RNA, 72 nt, Homo sapiens
aacggagccaagaacaagagacacacagaacgggaggagggaagaaaagcgccgaccggaaaacagcaccag

SEQ ID NO: 77134 - RNA, 68 nt, Homo sapiens
aaaaaggaacccggacccccagaagaagaggggaacaggccaaaccggaagcaaaagccacaaaaaca

SEQ ID NO: 77135 - RNA, 71 nt, Homo sapiens
ggacaaccggcgggacagcgggcacgcccgggacaggcacaccaaagacgccaccagcacggccccgaacg

SEQ ID NO: 77136 - RNA, 54 nt, Homo sapiens
aaacacccagaaacaagagaacccacaggagggccagaggacaaagcacggcgg

SEQ ID NO: 77137 - RNA, 65 nt, Homo sapiens
ggggggcgcggcgccgggacgcaccgcaccgagggcgagcccaggaacgcaagcacaggaccaga

SEQ ID NO: 77138 - RNA, 82 nt, Homo sapiens
aagagcgacaagccgcggcagccgcggaccaccgccgccagggagccaaaacacaccggaagaccccaccacccccgagaga

SEQ ID NO: 77139 - RNA, 71 nt, Homo sapiens
aggaccaagaaccagaccagaggaaaacagcaagcaacaggggagagcccacaggaagggaaaaagcagcc

SEQ ID NO: 77140 - RNA, 56 nt, Homo sapiens
caaaagcagcaaagcccgagccaacagccgcccggggacccgccgcgcggggggcg

SEQ ID NO: 77141 - RNA, 33 nt, Homo sapiens
agacccccaccaagcaggaagaagagagggcga

SEQ ID NO: 77142 - RNA, 61 nt, Homo sapiens
cacggcagcaacagcagcccaagggaccgacacaagaagcagccagaacagacgggaaaag

SEQ ID NO: 77143 - RNA, 91 nt, Homo sapiens
cagcaacagagaagagaaccccagaaacacaaaacaccgaggggcagaaaaacagggacaccaggggggaaaaaccacacaggcaaagaac

SEQ ID NO: 77144 - RNA, 42 nt, Homo sapiens
gccaaggggggcagacaacaagacaccaggcgccgagaaggc

SEQ ID NO: 77145 - RNA, 68 nt, Homo sapiens
gccgcgaaccccaggaaccagagccagggacaacacacgggagagcacaaaccgaacacacgagccac

SEQ ID NO: 77146 - RNA, 72 nt, Homo sapiens
gggaggccgccggcccccgcgccggggggccccccgcgcaggccgagagaggggcccaggccggggaacggg

SEQ ID NO: 77147 - RNA, 81 nt, Homo sapiens
gagcgagcgccccagcgagaaggagggagaaaggcgggcccgggaacagccacggaacccagaacaggccaagccccacag

SEQ ID NO: 77148 - RNA, 82 nt, Homo sapiens
gcaaagaaccgaagaagaggaggggggcaccggaaacggaacgccaagcgaagaagaacgaaacggaagcacaaagcagcgc

SEQ ID NO: 77149 - RNA, 75 nt, Homo sapiens
gcaccccccagcagccagcaacaccccggggaaagcagaaggacacagacggaagggagggccacccacggcagg

SEQ ID NO: 77150 - RNA, 76 nt, Homo sapiens
gggaccgccaccccagcaacgggacgggccccaccggccgcggacgccccgggccgccaggagcagacgaagcccg

SEQ ID NO: 77151 - RNA, 72 nt, Homo sapiens
aagaggcggccaaggggacgagcaaaggaagcgcgaacagcagcgcagaaaccaaagagccaggcgaccccc

SEQ ID NO: 77152 - RNA, 57 nt, Homo sapiens
gcgcaaaaaggaacaagccagcacaagggccagagcgcccccgagacccacgagcca

SEQ ID NO: 77153 - RNA, 72 nt, Homo sapiens
acccgaggacggacaggagcgccggagacgggagcacacgaaaggcccagcccacgaacgaagcagaagggg

SEQ ID NO: 77154 - RNA, 58 nt, Homo sapiens
caccgacacaaccgcccaggccacaacggacaaaaagacagcagaaagcaaaaagccc

SEQ ID NO: 77155 - RNA, 46 nt, Homo sapiens
acgcagggcgcccccggcaagccacagccaggaaacaccagccccc

SEQ ID NO: 77156 - RNA, 82 nt, Homo sapiens
caagaggcaaaggggaggacgcagcaaaccaccagaagacacgaagggacccgaggccacacccgcagcccccccccacacc

SEQ ID NO: 77157 - RNA, 58 nt, Homo sapiens
ccccaagagcgggaccacagggaccgaaacaacacgaagcgaaaccggggccgaggca

SEQ ID NO: 77158 - RNA, 78 nt, Homo sapiens
agcaagcgggagcggggaaggcacggcgacacgcagcggccgaggcaggggaagagagcggccccggacacgcgagcg

SEQ ID NO: 77159 - RNA, 81 nt, Homo sapiens
gacgggcaccgggccgcggccaaccgaaaaccagggcgaaaaaagaaagcaagagcagaacgaacgaggcaacagcaagaa

SEQ ID NO: 77160 - RNA, 70 nt, Homo sapiens
gagccagaaaacaacagaagaacaaacagcagcccccggaaaaacggcgagggcgagccccgaaccaccc

SEQ ID NO: 77161 - RNA, 61 nt, Homo sapiens
cagcgccggaacaccaccgccaggccaggaagacagagagaaagcaggccgcagaagcagg

SEQ ID NO: 77162 - RNA, 66 nt, Homo sapiens
ccgccggagacagggcaacgagacgacgggaccgaaggaccccgccagagacaaccgagcgccagg

SEQ ID NO: 77163 - RNA, 64 nt, Homo sapiens
aaagcagagaacaaagccaaagcagcaggaaggaacagcccaaagggcacagaacagagagacg

SEQ ID NO: 77164 - RNA, 58 nt, Homo sapiens
ggcagacggaaacgacagaagcagagcggaagccgcagaaggaccggccagaagcaag

SEQ ID NO: 77165 - RNA, 78 nt, Homo sapiens
ccgcagcgccggggcacgacacaaaaacaggcccagccaaggcccggcaccggccacgagcacgcgcccgaggccacc

SEQ ID NO: 77166 - RNA, 93 nt, Homo sapiens
aagagggacaaccggaaaaaaacaagcccaggacccacgacaggcgaacccgacgagcgggaagacacgacccgggcggagaggggggcgggc

SEQ ID NO: 77167 - RNA, 43 nt, Homo sapiens
agcagcccccacagcgggcgggaccaagaaaggcccagggacc

SEQ ID NO: 77168 - RNA, 73 nt, Homo sapiens
cccaacccaaaagaccgaagagaaacaacggaacaaccggaaacaaccggacaggcgaagcaaaggacaaaag

SEQ ID NO: 77169 - RNA, 51 nt, Homo sapiens
gaaacagagaaagccaggaagcgcaaacaagggggaccccgacagacaaag

SEQ ID NO: 77170 - RNA, 79 nt, Homo sapiens
cccgggccacggcagcgcggccacacgagcggcagcccacaagcaggaagaccagccccaggagggaaacagagcaccc

SEQ ID NO: 77171 - RNA, 90 nt, Homo sapiens
ccaaagaacagaagcaacgaggagcacaaacaggaaaacagggccagcacgaagcccgaacaaccgcgacagaagccagaagcggccaac

SEQ ID NO: 77172 - RNA, 61 nt, Homo sapiens
cagcaagggccaacggaagccagagaaaggggggccgaggccaggcagcagacgacggaga

SEQ ID NO: 77173 - RNA, 81 nt, Homo sapiens
aaccacacaagaggcaaggcaagcaaaaggaagacaaccgccccagaaagcgaaagcgaaaggaacaggacggacggcaca

SEQ ID NO: 77174 - RNA, 57 nt, Homo sapiens
gaagaacaaaacaggggaacaaagggacgccacaccggcccacaacaggggaccagc

SEQ ID NO: 77175 - RNA, 63 nt, Homo sapiens
caaaccacggcccggaaaccgaaagaaagacaaggacacggaaaagccaacaccaggagcaaa

SEQ ID NO: 77176 - RNA, 77 nt, Homo sapiens
ggagggaaggcggccggggccgggacgccagccaggaggacccccggggaaaggccccacgcgaagagaagaagcaa

SEQ ID NO: 77177 - RNA, 61 nt, Homo sapiens
aaaagaggccagacgagaaggagcagcgagaagagccagagaagaaaggagaggagaaaag

SEQ ID NO: 77178 - RNA, 76 nt, Homo sapiens
agaaccgaacaagcccagcgaagcgggcacggggcggcaagcagaaccagcaaacggcaagagcaccaacaagaca

SEQ ID NO: 77179 - RNA, 81 nt, Homo sapiens
caaccaggaaagagccccgaagacaaggacagccccgcccaccccccgcacacagagagaagcaagcagaaggcccggagg

SEQ ID NO: 77180 - RNA, 86 nt, Homo sapiens
agagccgagcaacagcgccagaacgagaaggaacgcgaacgcaggcaagcggcgggagaagcgaggccggcccgaacccgcaacca

SEQ ID NO: 77181 - RNA, 81 nt, Homo sapiens
aacccacccaccacacaacaaagggaaagcccacagcgaagccaagcaaaaggagaagcggcaggcagccccacgaccgaa

SEQ ID NO: 77182 - RNA, 87 nt, Homo sapiens
gcccaggcagccgcgccgaaggacgccgccgggagcgcggaggaagacgggacagagggcggcccaaccagaaaggaacaagaaggg

SEQ ID NO: 77183 - RNA, 69 nt, Homo sapiens
cgcccacgcccagcagcagcagcaacagaaggaggaacaaaaacccccggacagccgccgagagagaca

SEQ ID NO: 77184 - RNA, 77 nt, Homo sapiens
accacccgggcacgcccagacaccaagggagccagcggaggagcaagaaggaaagaggaagaggcaagcagagggag

SEQ ID NO: 77185 - RNA, 83 nt, Homo sapiens
gcgacacccccaccaggacagccgacagcccgcccaggaagggacccgagcacggggccggggggccccgcgggcagaagcgc

SEQ ID NO: 77186 - RNA, 76 nt, Homo sapiens
ggaaggcgcgaggaggaaaggaggacgaggagggcaggagaaaggagaaaaagaggcagggagaagaaacggcaga

SEQ ID NO: 77187 - RNA, 61 nt, Homo sapiens
cgcaggcccacgcaccgccggcgccaccgcccacgcaagaaaacagaagacaccccggaag

SEQ ID NO: 77188 - RNA, 77 nt, Homo sapiens
gagacagcgcggacgcgcccgggccaaccggggccgagaaccaccacggggccggccaggacggggccgaagcgcac

SEQ ID NO: 77189 - RNA, 78 nt, Homo sapiens
gacccagcgcggccgccgcggagaggacccggcagacggcaaaaggcggagggaaggggcacgaagaccaaccggcca

SEQ ID NO: 77190 - RNA, 82 nt, Homo sapiens
ggagcccagagccggcggcgcgcgacgcccagagccgcggccggggcgcgggaggcgacgccggaccgcgaagagacgagag

SEQ ID NO: 77191 - RNA, 73 nt, Homo sapiens
gaagcggaagggaggcgcgcgaccagagagcaaagccgagggcaccgaaggaagaaaaacagcgcggccagga

SEQ ID NO: 77192 - RNA, 67 nt, Homo sapiens
agagaagcgaggccggaaaaaccgagccacacgaaggaaggagaacagcacggaccgggcaaacacg

SEQ ID NO: 77193 - RNA, 55 nt, Homo sapiens
ggcggggccggggaacacacaggggagagaaagccaagggcgacaggaggcgagc

SEQ ID NO: 77194 - RNA, 73 nt, Homo sapiens
agaagaaacccacgaaccaaaagggacggacaaaggaacaggaccagggccacgggaaacaggcacagaggcg

SEQ ID NO: 77195 - RNA, 49 nt, Homo sapiens
cgccgaccccccggcgccgcgccggcggcgaacagagagaagggcggga

SEQ ID NO: 77196 - RNA, 55 nt, Homo sapiens
cggacaagagcgcggaacaggacgccccgagccccgggggcgccgagggcacaag

SEQ ID NO: 77197 - RNA, 58 nt, Homo sapiens
gacgggagcaggaaagccagggggacccagcacagaggcccgccagccaccgcagagg

SEQ ID NO: 77198 - RNA, 57 nt, Homo sapiens
ggaggagacccacacgaccagcgccggagggcaccaacccagggaagaaggggggcg

SEQ ID NO: 77199 - RNA, 76 nt, Homo sapiens
gccagagcagggagacaaaagagaaagcaggccacgaaaacacaagcagacaccagacagcaaccagccgcagacc

SEQ ID NO: 77200 - RNA, 72 nt, Homo sapiens
gcccgggaaggcgccggggccagcgcagccgcggcggagacgcacaggcccggaccaaaaccagacgaaaaa

SEQ ID NO: 77201 - RNA, 73 nt, Homo sapiens
gcggcccacgcagaacccgggagaggagaccagaacgaacccccccccccgacaaccgagcacaaaaaaggca

SEQ ID NO: 77202 - RNA, 55 nt, Homo sapiens
cgggaacgcggccggcacaaaggccaaggagaaggcggagacccagggcccacga

SEQ ID NO: 77203 - RNA, 72 nt, Homo sapiens
cccgcgcgcgcccggccccggccccacccgagcggccccaagagagacggggcaccggagccaggaggccga

SEQ ID NO: 77204 - RNA, 47 nt, Homo sapiens
aggaccaggaagagggagaaaccgccagggacacaagggcgcaacca

SEQ ID NO: 77205 - RNA, 74 nt, Homo sapiens
cgaggcaaaccacgaaaccaggggacgcaccaacacgcacaaaaagggcacaccagcagccccggagggacagc

SEQ ID NO: 77206 - RNA, 69 nt, Homo sapiens
gaggaaacgagccgccaaacagggagaccagcacgagccgggcgggacgccggaaggggcacaagacac

SEQ ID NO: 77207 - RNA, 71 nt, Homo sapiens
caacggcagaacacaaagcacgcagaggagacaggaaaaggccaaaggaggaaggcaaccagggcgaggag

SEQ ID NO: 77208 - RNA, 71 nt, Homo sapiens
agaacagcgcccgcgaaagacgccgaaagggacagcaacaggagccgaagaaggcgaaagaggacgaaacc

SEQ ID NO: 77209 - RNA, 77 nt, Homo sapiens
gggacccacccggcgaaagccaacaggcagaccagagacagcgccacgcacccggggagcagaccacgccgggggac

SEQ ID NO: 77210 - RNA, 66 nt, Homo sapiens
caggaaaacagaagaacaggaacaagccgaggccacagacaacgagggggaaccaagggcggacag

SEQ ID NO: 77211 - RNA, 82 nt, Homo sapiens
accgggaaggggaacggggccccaggaccccacaacaccagaacaaaaggcaggacacacagcaacgaagcaggggaggagg

SEQ ID NO: 77212 - RNA, 79 nt, Homo sapiens
ccccaacggcgggcacaccccagcgggcacgaccggccgcacgagagccgccaggagagggaccgcacagagccccagg

SEQ ID NO: 77213 - RNA, 78 nt, Homo sapiens
gcggcgcccacgggggagcgagccggagacaggggaaccagaagaggccaaccagcacgaacgccagcagcacggcac

SEQ ID NO: 77214 - RNA, 77 nt, Homo sapiens
cccccccaccggagaagacagcacgcaggaccccaacgaagcagaaagaacaacacaagcgggaggcaaaacaaaag

SEQ ID NO: 77215 - RNA, 79 nt, Homo sapiens
cggcagacagggcaaagaaaagggacgggaccaacggggaaccccgggagcgaagaagaagcgcaaacgccggcggggg

SEQ ID NO: 77216 - RNA, 72 nt, Homo sapiens
cgaaagggaagcacacggaccagcagaacagaaacaaggcaacggacaacaaccacacagcgcagaagagga

SEQ ID NO: 77217 - RNA, 72 nt, Homo sapiens
ccccccggcgccgcgccggcggcggccgaaaaggaaaaggagccagggcggaccccgcgggacagaacgcac

SEQ ID NO: 77218 - RNA, 85 nt, Homo sapiens
cgacccccccagacccgccccgaaaccgcgaaggaccaaaggcgaccgggcaggaccggggagaccaggagccacagcaaggaca

SEQ ID NO: 77219 - RNA, 73 nt, Homo sapiens
ggcaccaagcccccagacaaaccgaaggcgacagagacagacaagaacgagccagcaaacccgaggagccaga

SEQ ID NO: 77220 - RNA, 75 nt, Homo sapiens
cggggagccggcaggacccgaagacgagaacaaccgccagggaacagcaaaaaacgagagcagcaaagagcaagc

SEQ ID NO: 77221 - RNA, 81 nt, Homo sapiens
aaaacaccgaggggcagaaaaacagggacaaaggagagcagcccagcggagcgagccaagcacacagccacccgcacacgc

SEQ ID NO: 77222 - RNA, 80 nt, Homo sapiens
gggaccccccccagaggagggccccaccacaccaaaggaaacgagacaaggaggccaaagaaaggggacacaaaaccacg

SEQ ID NO: 77223 - RNA, 75 nt, Homo sapiens
ccgcggaggccagggggcgaaggcggcgggggaggaagggggggaccgaaccaacggcgacgaaagcgcaggcag

SEQ ID NO: 77224 - RNA, 75 nt, Homo sapiens
ggccgccgcccacccccgcgccgaacaggacgaggccgcacgaaacccgcggcggcccagaaagaagcagacagc

SEQ ID NO: 77225 - RNA, 70 nt, Homo sapiens
gacaaaggcaaaagggacgaagggaacaagaccccaaaccagacagaggcggccgacgaacagacccccc

SEQ ID NO: 77226 - RNA, 76 nt, Homo sapiens
ggcggccacagccgcagggagaacccgaggcggacgaagaagacacgaacaggggacgaaaaacgagccgggggca

SEQ ID NO: 77227 - RNA, 73 nt, Homo sapiens
gcgacagcaggcacagggacgagggggcggaagcacgcaggaacagaagacacagcagagagcaggccaaggc

SEQ ID NO: 77228 - RNA, 76 nt, Homo sapiens
accaacagaggcccacagagaggaggacagccagcaaaacggcacaaaggggacacagagacgccccacaaccgcc

SEQ ID NO: 77229 - RNA, 81 nt, Homo sapiens
cgccgaggcaccgaggcaccagaggaggacacgaggaggggacggcccgccacaggcacagacgaggagggaagcgaagcg

SEQ ID NO: 77230 - RNA, 73 nt, Homo sapiens
ccagaccgccaaaccagagaaagaaacacccgaacagcgaagagcgccgaaaagcccagaaaacgccgggaag

SEQ ID NO: 77231 - RNA, 51 nt, Homo sapiens
cccacgggaacaagaggggacagaaagcccgccaaggaacccgcggggcag

SEQ ID NO: 77232 - RNA, 77 nt, Homo sapiens
gcaacagggggagacaagcggaacaggagccgacgacccggaccaagaaggggaggcccgcggcagcgggaccagca

SEQ ID NO: 77233 - RNA, 82 nt, Homo sapiens
ccggccgccgccccacacggagaggcccggcggcgcgcccaaccggcgacggaaccaaggacccgaacacggaagaaagaca

SEQ ID NO: 77234 - RNA, 39 nt, Homo sapiens
gaggaggggcaggcccggcgcagaccggggaaccagcac

SEQ ID NO: 77235 - RNA, 52 nt, Homo sapiens
ggcagaagagagagaaaggaggaaacacaaaccaacggcgaggacgcgaggg

SEQ ID NO: 77236 - RNA, 82 nt, Homo sapiens
cgggcaaggcggagaggacggagcggcgagcccccgcggcgacagggaaccagaccgggacagagcccgcacgcggacacgc

SEQ ID NO: 77237 - RNA, 86 nt, Homo sapiens
agagaagacacgagcacaaacgggagcagcagccccgagaaggaagaggaggaagcgagggcccgcgagggcgcaggaccgaggga

SEQ ID NO: 77238 - RNA, 73 nt, Homo sapiens
cccgaccagcaccccgcgccagaaaaaacgcagaacggcaaaaagagggaaggagagaaggagagagacccag

SEQ ID NO: 77239 - RNA, 79 nt, Homo sapiens
ccccccagagccaacacacagaagagaaaggcaagcagggcgagagagcacaccacccgggcaaggaaggacagaggcc

SEQ ID NO: 77240 - RNA, 51 nt, Homo sapiens
ccggagcccagaagacagagggcgagggccgaaacaaaaaaaaaaaccaag

SEQ ID NO: 77241 - RNA, 76 nt, Homo sapiens
gggggccgcgcggccgccaccaccacgcagccccagcgccgacgagggacagggcagaccgccagcagcacagcaa

SEQ ID NO: 77242 - RNA, 68 nt, Homo sapiens
gcggcgaaaggggcgggaaccggccaccgcggagagcagccaacccccccggccaaggagaccaggag

SEQ ID NO: 77243 - RNA, 66 nt, Homo sapiens
acaacagaagaagaaaccaaagacaagaccgcgaccacccacagggaaagaggcaagaccggaaag

SEQ ID NO: 77244 - RNA, 70 nt, Homo sapiens
caaagagcggccacacaacggagagcgcaagcccagcgggacagggaccagaggagaaggaaccacgaag

SEQ ID NO: 77245 - RNA, 77 nt, Homo sapiens
caccggaggacagcggaccgcgacaccggccaagggggccccaggccccggcagacagcgaacacagagaaaagcgc

SEQ ID NO: 77246 - RNA, 75 nt, Homo sapiens
ggagccgcggcggccgcggccagagggggcgaccgggacaaacggcggaggcagaagaggcaaaccagcaaggca

SEQ ID NO: 77247 - RNA, 76 nt, Homo sapiens
ggccgaggaaggaacggcccccccccagcccgccccaaaaggaacagcacaccgagcaagaaacagaaggaaggac

SEQ ID NO: 77248 - RNA, 87 nt, Homo sapiens
gagaggaacccagccgacacgacgccgccggcaggcccgcgcaccagggcgggaagcggggacagcagaggacaccaggccaccagc

SEQ ID NO: 77249 - RNA, 81 nt, Homo sapiens
gacagagagcggacgggccaacccaaaaccagggcggcaaaacgagcgggccagagcagaggccaggaggggcccagcccg

SEQ ID NO: 77250 - RNA, 87 nt, Homo sapiens
cccggagaacgagggaagaggagaaaccaaaaagcaggcgcccgagccccaagcagcaagaagcccgccgagagacagaggggggaa

SEQ ID NO: 77251 - RNA, 89 nt, Homo sapiens
ccaaaaaggagaagaaaccagaccagagagaggaggagaagaagagacaccaggaccgaaggagaagaaggagaaggggaggagaaggc

SEQ ID NO: 77252 - RNA, 65 nt, Homo sapiens
aaagaccagcacgaagggcgacgaaaagcgggcgccaacaagcccaccacaaaccaaacgagcaa

SEQ ID NO: 77253 - RNA, 86 nt, Homo sapiens
gccgcgcggaccagccaagcagcaccaccgggggccgacacgggcgacccacggaagcaggccggggaccaaggggacgcggagcg

SEQ ID NO: 77254 - RNA, 83 nt, Homo sapiens
gccaagcaaaccgggaaaggagaggacccggagccgagccgccccgcaaaacccgacgaagaaacaccgacaccgacgaggaa

SEQ ID NO: 77255 - RNA, 79 nt, Homo sapiens
aaggcgacaagaggaccaggggaaaccgcaccggagcgaagaagaagcgcaaacgccggcgggggaacgggagcggcgc

SEQ ID NO: 77256 - RNA, 83 nt, Homo sapiens
aaaagcacaaggaccgcggacagagacaacaccgagagagaaagagaggcgccacccaacagacgcccacccaaaacagccga

SEQ ID NO: 77257 - RNA, 68 nt, Homo sapiens
cccaaaacagaccccccgaagagggaagcaccacagacaagggggcacgaggacaggggagcgcgcgc

SEQ ID NO: 77258 - RNA, 84 nt, Homo sapiens
cgcagccagaaccaggcggcagaggcgccgccaaggggggcagacaacaccgcggcgagccgcacagggcaacacacgcaccgc

SEQ ID NO: 77259 - RNA, 77 nt, Homo sapiens
accaaggacccccaaaaccacaaacgccacgcagaacagccaccaaggagagcgacaacaccaagaggagacgagga

SEQ ID NO: 77260 - RNA, 92 nt, Homo sapiens
gacaccagaaacaagggcgcccgcggagaagggcagcaaaaccccagaagaggcgaaccgcaggaaaccagagcaagaaacgagcgacaacg

SEQ ID NO: 77261 - RNA, 73 nt, Homo sapiens
ggcgaaaagacaaacgacaaaagaggcagaaaacgcgagaaagagaaacgaaaagagacagcagggcaaaacg

SEQ ID NO: 77262 - RNA, 40 nt, Homo sapiens
cccggcaccacccacgagacggcggccggcgaggacgccg

SEQ ID NO: 77263 - RNA, 89 nt, Homo sapiens
cccgagacaagcgcccagcacaggccaaggaggcggggggcggccacccaaggccaaagcgagaaaacacgcgcacgcgcaaagacagc

SEQ ID NO: 77264 - RNA, 78 nt, Homo sapiens
ccgaccgggcgcccgcccggagaaggcacagcggcgaccgacgccgcgagcgcgaggccgagagacccgcgaacgagc

SEQ ID NO: 77265 - RNA, 59 nt, Homo sapiens
gcgggcggcggcggcgcgggccagacaccaggcgccgagaaggccagcagagaaacagg

SEQ ID NO: 77266 - RNA, 82 nt, Homo sapiens
ccaaccgggccccccagcagacgcgagagcgccgccgcggcccccgggagacgacccccaaaaaggaaacaaggccgaaggg

SEQ ID NO: 77267 - RNA, 71 nt, Homo sapiens
aacgcccaaagaggcaggcaagaacaagggaggaaaagcacgaaggaagccaagcagaacaaaagaaacca

SEQ ID NO: 77268 - RNA, 60 nt, Homo sapiens
caacacaggaaaacagagaaagaaggaaggagggccgagcgcgaagccaggggcaaaacg

SEQ ID NO: 77269 - RNA, 69 nt, Homo sapiens
ccccgacacccagaccaacaaccagaaaacacggcccccccaagaaccgagaaagccaacaagacaggc

SEQ ID NO: 77270 - RNA, 75 nt, Homo sapiens
gacagcgcgcaccacccgcaggaacagccagcaaagacaagagcagaccagcagccgcagcgcgacagccaaaaa

SEQ ID NO: 77271 - RNA, 77 nt, Homo sapiens
gaccacagcacaaaaaaaggagccgagaccagaacggacagagggaggacagggccggcaaacgcaccgggacggca

SEQ ID NO: 77272 - RNA, 57 nt, Homo sapiens
gagcaggcggagcacccaccacggagggaaagaccaggcagccccgaaccagaagcg

SEQ ID NO: 77273 - RNA, 76 nt, Homo sapiens
gcccgggggcaggggaggagacgagggagaaaaaccacaccagagaaaaaggagcacagcagggccaagaggaaaa

SEQ ID NO: 77274 - RNA, 61 nt, Homo sapiens
cccccagccagaaagaccagacggagcacccagaaaagaggaagggcacagccggggagga

SEQ ID NO: 77275 - RNA, 78 nt, Homo sapiens
gagagccggcagccccgcccgcaacaggcagggaagcggcgaagagacagagggaaagcccaagaccagccgggaccg

SEQ ID NO: 77276 - RNA, 64 nt, Homo sapiens
cgggagcccgccgcgcggagcgcggcgcgagggcggcccgcagaagagcacagaaggagaaggc

SEQ ID NO: 77277 - RNA, 72 nt, Homo sapiens
aaagaaaaaagggaaggaagaagaccaagccacggggaaaaggaaggccggaggaggcaacagcggacagca

SEQ ID NO: 77278 - RNA, 74 nt, Homo sapiens
gagagccgcccgggccagcggccgcgcacccccggccggaggcaccagcacgccgacgccccgggaagacccag

SEQ ID NO: 77279 - RNA, 76 nt, Homo sapiens
ccagggaccaggcggaggcgcgcgggagccggggcaccacagagagcggggagcaggcgaagcgagccagggaagc

SEQ ID NO: 77280 - RNA, 45 nt, Homo sapiens
aggagggaggaaaacaaccgagggcagaggcacccgaccgacccc

SEQ ID NO: 77281 - RNA, 71 nt, Homo sapiens
cccaggcgaccagaaagaggaaagagagccgggcgacccaaccaagggaccagggaaacccagacgacaag

SEQ ID NO: 77282 - RNA, 77 nt, Homo sapiens
gggcggccggccaggaaccacccgaaggaaagggcagcggaggcagagccgaagaaagcaacgcagagacacacagc

SEQ ID NO: 77283 - RNA, 75 nt, Homo sapiens
ccgaagcgcaggcaagcccgaggaccggaggagcacagagggccccagggccgcccaggaggccagagccacgaa

SEQ ID NO: 77284 - RNA, 75 nt, Homo sapiens
aggcgaaagcggaacgaggaaagaccacagcaagaccacgcccccagccgggggaccaggccgaacgacccggac

SEQ ID NO: 77285 - RNA, 67 nt, Homo sapiens
ccgcaaaccccacgggagggacagggggagaaacacccgaacgaaggagcacaggagcagggagcca

SEQ ID NO: 77286 - RNA, 58 nt, Homo sapiens
caccaacacaccaccacaacacggagaaggacccgcgccgaagcgacccccgggcagg

SEQ ID NO: 77287 - RNA, 70 nt, Homo sapiens
gcggcaggagcaagccaagaaagaaccgaagacagaaacggaccacaggcaaacaaagaaccacggcaag

SEQ ID NO: 77288 - RNA, 86 nt, Homo sapiens
gaaagcacgaccaagacgcccagccgggccagaaccgaacgggcaggcgggcggagccaggccgcgaaaaccacaacgcaccagag

SEQ ID NO: 77289 - RNA, 87 nt, Homo sapiens
agcgcagacggcgcccagcaacacagaagccgacaaggcgcaagcgaaaacagaccgcgagcccagaggaacgggaagggcacagga

SEQ ID NO: 77290 - RNA, 74 nt, Homo sapiens
gggacacgggccaagggagcgaaaagaacccccaaaaggggcaggaacagagcggaagggagacgggacccgcg

SEQ ID NO: 77291 - RNA, 78 nt, Homo sapiens
aacgcgaaccccggaggggaggcacaacacagcccgaagacccagaagcacaacaggagaaagaagagcaaacgaaag

SEQ ID NO: 77292 - RNA, 76 nt, Homo sapiens
ggccaagaaggcaacaccgcgagcgcgcggcaccccgggcgaggagcgaacagaaaaccaggaccgcagaggaccc

SEQ ID NO: 77293 - RNA, 79 nt, Homo sapiens
cggcggcggacaaacaggcaccgcagccgagccgcgccgccaggaggccgcgccgggcgccggcccggggagggagcgc

SEQ ID NO: 77294 - RNA, 74 nt, Homo sapiens
aagcaacgcgggaagagaagggaagaacagacacagcaccgacacgcgcaaaagcacgacaggaccccgaacaa

SEQ ID NO: 77295 - RNA, 85 nt, Homo sapiens
aaaaccggaaaaagaagccaagaagcaaaaaagggacgcaagaagaaccaccagagccaaaccccagccaccggaagaagaagag

SEQ ID NO: 77296 - RNA, 52 nt, Homo sapiens
ggacagcgcaggcagcagcacaggagcgcccagcagccccaaggaggacgca

SEQ ID NO: 77297 - RNA, 70 nt, Homo sapiens
gggagcacggaggaacggaagagcagaggaaccggacgcagacggaaccgggaggccacgcgaaggcgcc

SEQ ID NO: 77298 - RNA, 72 nt, Homo sapiens
gggaaccggcgcgccggcgcgcggcgcggacaggcccaaacgggacgaacagcggggacgccccagcagacc

SEQ ID NO: 77299 - RNA, 37 nt, Homo sapiens
cgaagaaaccagccagaagaaggacaggagaaacagg

SEQ ID NO: 77300 - RNA, 53 nt, Homo sapiens
ggagaaggcacagagcggccgcgccagcgacaacggggcggcacacaaggagc

SEQ ID NO: 77301 - RNA, 41 nt, Homo sapiens
aagacccggcgcaagcacaggcgggcgagagagaccagacc

SEQ ID NO: 77302 - RNA, 76 nt, Homo sapiens
cgaacacacaggcacccccacccccacaacaggaccgaacgggcacacggcacggacagggcgggacgcagaacca

SEQ ID NO: 77303 - RNA, 84 nt, Homo sapiens
ggaacaggacagaagaggaggaccaccggagcgaggaaccggaccccggcagcgcaccgacgagagggcgcaccgcgccggagc

SEQ ID NO: 77304 - RNA, 71 nt, Homo sapiens
ggagaacccagccaagaaaggaaagggggggaggagggacaacacacaacgcaggcgcacagccgccccaa

SEQ ID NO: 77305 - RNA, 54 nt, Homo sapiens
gccacgccgccccaagggaaagggagcagcaccggccacacccacagcacgacc

SEQ ID NO: 77306 - RNA, 60 nt, Homo sapiens
ggaggaggaggggcccggcggcggggagggggccgcgcccgcccagagcggccgagccgg

SEQ ID NO: 77307 - RNA, 73 nt, Homo sapiens
gagggacggggaaggccggggcgcccggcgccggccgagaaggcagaggcgcccggaggcgcccgaaggccaa

SEQ ID NO: 77308 - RNA, 82 nt, Homo sapiens
cgaggaccagggaagggcaacgccaaagcaagcggccggcacacccacggcgggagacaggggcaaggccgaggggaacagc

SEQ ID NO: 77309 - RNA, 78 nt, Homo sapiens
gccagccccgcggcgaagggaagaggcccagccggcccgcgggggagccccgggagccgcacgcggggacgagagccc

SEQ ID NO: 77310 - RNA, 71 nt, Homo sapiens
aggaaggccggcaggcgccaaaccccaagaggaaacaacaacagggagaaaacgggccggaggaaaagggc

SEQ ID NO: 77311 - RNA, 37 nt, Homo sapiens
caggaacagaaaggacaggcgaggccaggggccaaaa

SEQ ID NO: 77312 - RNA, 78 nt, Homo sapiens
gaccgaagggcacagcacacgaaggggaaacagccaggcccaccgacaacaggacaaccggcagagaaaaccacacag

SEQ ID NO: 77313 - RNA, 61 nt, Homo sapiens
gggagccggagcggaacgaggagggcgcccaaagcgcaggaacccgaccagcccagggccc

SEQ ID NO: 77314 - RNA, 76 nt, Homo sapiens
cgggcccgaggcggcgagagaggcaggcggagccgaccgggccaggcacagggcaacaacacaggcggaggcggcg

SEQ ID NO: 77315 - RNA, 99 nt, Homo sapiens
aggcgccccgccaggcccccgaggagacggcgacaggaagagggacaaggcaggaaggccgcccgggccgccccagcgggccaccggcgccgcaggacg

SEQ ID NO: 77316 - RNA, 78 nt, Homo sapiens
gaagaaggccgcgaaagcggagagaagaggaagcacagcccacgacgacagcagcaccaccggggggcgcagaacaca

SEQ ID NO: 77317 - RNA, 51 nt, Homo sapiens
acagcgcaggcagcagacaacaggcacaaagagagaaggaacacccacagg

SEQ ID NO: 77318 - RNA, 74 nt, Homo sapiens
gcccaaccccaaccacgcagcagaaccaccgcaaccaaaggaaacacaaagaagacaccagaagggccagcacc

SEQ ID NO: 77319 - RNA, 71 nt, Homo sapiens
acagaccagacgaaaaacaggaagaccgcaggaaagcaggaaggcaagaaagccaaggacgaaacccacac

SEQ ID NO: 77320 - RNA, 108 nt, Homo sapiens
gaacccgcccgcgccccgccgcggggcgcgcggcgccggcggcgcgcgacccccgcgcagggcaggaagcgcgggaagcccaggacgggacgacccgggcggaggaaa

SEQ ID NO: 77321 - RNA, 61 nt, Homo sapiens
aggcaagaccaaccaagagagagaccgccccgaagcccccgagagcaaaggcagggagcac

SEQ ID NO: 77322 - RNA, 70 nt, Homo sapiens
ggccgagggcgccgcggccacagggggaaccagaagaggccaaccagcacgaacgccagcagcacggcac

SEQ ID NO: 77323 - RNA, 84 nt, Homo sapiens
ggcggagcagaacggagcaggcgggagaacagagacccaccaagaaaccagaacccggacaagggaagggcccgaggaggacac

SEQ ID NO: 77324 - RNA, 55 nt, Homo sapiens
cccgagcagcgggacacagggagcccacaggagacaaaagccaaaagaaccaccg

SEQ ID NO: 77325 - RNA, 71 nt, Homo sapiens
gggccggaaaagccaacgccggcgaaggcgcagggagcaggagaagcggagcgaaggggcgggcaggcaga

SEQ ID NO: 77326 - RNA, 79 nt, Homo sapiens
acggagagcggaagaccggcccagaagagccaaaaggcggcaacaccaacacccgacaggaaaacacgaacaaaggcaa

SEQ ID NO: 77327 - RNA, 85 nt, Homo sapiens
caaccgggaccagcgagcgacagcaacgacaaagccaaacacaaggaccacaacagcagcggggagccaagcccagcaggcccag

SEQ ID NO: 77328 - RNA, 81 nt, Homo sapiens
gaccacgccgacccaggggacccccaagaagggaccacaggacaaaaccccagccgacgagaaggagacacaggacccccg

SEQ ID NO: 77329 - RNA, 51 nt, Homo sapiens
agggaggcggccacgagaaaggcggaaagcagagagcgcagaagacaggac

SEQ ID NO: 77330 - RNA, 68 nt, Homo sapiens
caggggggggcaaacccgagagaacgggcccccccgggggcgagaagaaacggacggcccccgcgccc

SEQ ID NO: 77331 - RNA, 80 nt, Homo sapiens
gggccggcagggcagccgggggacagcgaggaagagacgaacgcaacagagaggcaacagaccagacaggaaggccgacg

SEQ ID NO: 77332 - RNA, 83 nt, Homo sapiens
gcgcgcgggagccggggcaccacagagagcgggccggggggggcacagagccccggaagacagcccccagcgaccagacccag

SEQ ID NO: 77333 - RNA, 68 nt, Homo sapiens
agacgaaaaaagcagaccgccggggcaacacccagccggacccagacagacggcacgcccacagagga

SEQ ID NO: 77334 - RNA, 120 nt, Homo sapiens
ccgaagggaccaggcagacgggaagaacccagaaagaaaggagcgccccaaaaggaaacaggaagaaagcacgggaaaaggccgggcccacaggggagagcccagaaaaggcacaagcaa

SEQ ID NO: 77335 - RNA, 77 nt, Homo sapiens
ggagcggacgcgggaggaggcggcggcggcgcacgcagaagccagccaaccacgaggccacgaaggggaggccgagc

SEQ ID NO: 77336 - RNA, 69 nt, Homo sapiens
agaagaaaaagaccccaaagacccaaaaccaccagggaccccgacggagagacaaagaagacggagggg

SEQ ID NO: 77337 - RNA, 91 nt, Homo sapiens
cagcaccacaggcacgccaccccccgcaccgacaccccagaccacaggcagccacccagaaccggaaagggcagagaaagcagcggccccc

SEQ ID NO: 77338 - RNA, 78 nt, Homo sapiens
gacccgagagccaggacgcaggaaagccaaccagacggcacagccagggcgaaagaagaccccgccaccggcccccac

SEQ ID NO: 77339 - RNA, 100 nt, Homo sapiens
acacaccgagcccgcacggagccagggagggacagcgcccgagaccagcgccggacacacggcgagggcaaagcaaggggaagacgacagccggaacccc

SEQ ID NO: 77340 - RNA, 39 nt, Homo sapiens
agcagccgcagaaaaaaaggccacagaaccgacccggaa

SEQ ID NO: 77341 - RNA, 71 nt, Homo sapiens
aaaaggaccaaccggcaagggacaacggccaacagcccgcacagcggacgcaaagaaaaagacggcaaaag

SEQ ID NO: 77342 - RNA, 91 nt, Homo sapiens
gagacgagacagagaaaggagcgccagcagaggcgggggaccgaccagcaccagacagcgaaaaagaggacccaaaaaagagagaaaaggc

SEQ ID NO: 77343 - RNA, 79 nt, Homo sapiens
gcgcggccagacgacacccaaccgggccagaagcaggcgccaacagcgggaacaagaggcgggagaagacgggaagcca

SEQ ID NO: 77344 - RNA, 71 nt, Homo sapiens
acagagaggcgcagaggaccacgcagcaaggcgcacacagcgcgaccgcccagggagacggaacccacaca

SEQ ID NO: 77345 - RNA, 78 nt, Homo sapiens
acggaaaaaaaagaccgcgcccgggaaaagaacccgccaaaacacagcgaggagacagagacaacaggcacaaagaga

SEQ ID NO: 77346 - RNA, 114 nt, Homo sapiens
agcgcggacgaccggccacgcgcaccagagcagggcccccgagaaacaccggggccagcggccgaagcgaggccacgcgcagggccgaccgcggaaccccgccgaccagccagc

SEQ ID NO: 77347 - RNA, 123 nt, Homo sapiens
ccgacacaggagcgggcagaggagcagggaggccacaggggccgaaacacagagcaagaccccaagaagaagcggaagaggagccgcggaaccaagacacaaggaacagaagacaggaccagg

SEQ ID NO: 77348 - RNA, 79 nt, Homo sapiens
gaagcagcagaagccgcaacaggaaagcagcccgaaaaagacgcgagaagccacacgggcgcgcagaggaggcggggac

SEQ ID NO: 77349 - RNA, 82 nt, Homo sapiens
aagaccaacaaacacaaggagccacaaggacgggaagcaccaaagcgcgccaagaaggaaaccgagaagggaagccaagcag

SEQ ID NO: 77350 - RNA, 75 nt, Homo sapiens
gccgccaggaccggaaaacagcggcgaccagcagacacgcacgagaacccccagcaacccaaccgaccggagaac

SEQ ID NO: 77351 - RNA, 56 nt, Homo sapiens
ggaacccagaaaccgaaccaaggcggcaggacgaaaccccgacccccgagacacgc

SEQ ID NO: 77352 - RNA, 82 nt, Homo sapiens
cgcgcggaggcgggagcgcggaaacggaaccgggaggcgacgcacacgagcggaggcgaagagacccgcacgggaaggagaa

SEQ ID NO: 77353 - RNA, 79 nt, Homo sapiens
cggcgcagcggcgaccggcgcaccacacgggggacgccccgacggccagaagcgacccaggggagcaaaacgcccacca

SEQ ID NO: 77354 - RNA, 76 nt, Homo sapiens
acggggcggggccggggaacacacagggaaagccaccaggggggggcgagccgggacaccagagcggagccaaaac

SEQ ID NO: 77355 - RNA, 60 nt, Homo sapiens
ccggccccacgcacgacgagagggacagcacggaccacaaggaagcccggccccccacgc

SEQ ID NO: 77356 - RNA, 77 nt, Homo sapiens
aggagaacccagcggcggagcaggacgcggaacacccagaggccagcacaacagaggcagccaccagcaggaggaaa

SEQ ID NO: 77357 - RNA, 72 nt, Homo sapiens
caaggacagagcagaggacgcgcaggggcacccccacggagcccgggccacaaccaaagcgggccacagaca

SEQ ID NO: 77358 - RNA, 74 nt, Homo sapiens
gggcggggccgggcccacacccgggcgcggccacacgcgacgggggagccgcggacagacaacccgcagagccc

SEQ ID NO: 77359 - RNA, 76 nt, Homo sapiens
caagcgaggaaaaacaccaacaggcacagagaaacaaaaccagggcaggagcgggcgaggggggcacagaccacag

SEQ ID NO: 77360 - RNA, 66 nt, Homo sapiens
gccgacaaccggaggacacagccagggcggacgggaaagcagagcccaggggaaagagaaagcgga

SEQ ID NO: 77361 - RNA, 69 nt, Homo sapiens
gaaacaagacaaaggaaaagcggagcggagaccagagacaaggagagcgaccagggggaaccgaaggag

SEQ ID NO: 77362 - RNA, 68 nt, Homo sapiens
aaggaccaagaaccaggccagacagccacccgcaaacgaacgaggaaaaaacggccaggaaagaaaaa

SEQ ID NO: 77363 - RNA, 81 nt, Homo sapiens
agcccagagaaaagaaacccgacaccaaccaggaggccgagacaacaacggcaccgcggcaccgacgagagggcgcaccgc

SEQ ID NO: 77364 - RNA, 75 nt, Homo sapiens
aaaccggaacccggcagcagccaagggccaggaagcagagagaacaggaccaaaggagcaaaaagccaaggaaag

SEQ ID NO: 77365 - RNA, 75 nt, Homo sapiens
gcgcagaccgagacccggacagggcaggaaacaggcacaccggcagcaccacaaaccgacacgcgggcccagacc

SEQ ID NO: 77366 - RNA, 73 nt, Homo sapiens
gaaccggaccagagagcggcagagggaagaaaagacaagacaagaaccacggcgggaaacgccagaaggagac

SEQ ID NO: 77367 - RNA, 73 nt, Homo sapiens
gagggacccagacaaggcggagacaaacccaagcagacagaaggaccaaaaccaggcagagaaggagagccag

SEQ ID NO: 77368 - RNA, 60 nt, Homo sapiens
aagacagagaccccgaggaagacaacggccagacgagcaggcacgcaggagcccgaccca

SEQ ID NO: 77369 - RNA, 33 nt, Homo sapiens
ccccagcacgaacaggaaggcacagcgagcacc

SEQ ID NO: 77370 - RNA, 54 nt, Homo sapiens
ggaaggcaagagccaacccaaaaccaaaacgaaaacaaacggaagagagggcag

SEQ ID NO: 77371 - RNA, 54 nt, Homo sapiens
aagaagacggcgaagcaccaacgccaagggacagagaaagaagcaagaaaaacc

SEQ ID NO: 77372 - RNA, 86 nt, Homo sapiens
ccaccccggacagccagggcgcggccgcccgaagaggagagagcgcgggcccaggaaggcccagaaggggaagacccccagcgaac

SEQ ID NO: 77373 - RNA, 84 nt, Homo sapiens
ccgccgcccgcccgggagcgcggccccggcccgaccacacaagaagaggcgacccgcggcgagagcccccccagagcgccaggg

SEQ ID NO: 77374 - RNA, 72 nt, Homo sapiens
gaccgagagaaccagcgccagcgcccccgcccgcgcgccaccgcccagagccaccgagcccggacccagcgc

SEQ ID NO: 77375 - RNA, 77 nt, Homo sapiens
ggcgaagcacgcacaccgggcagggccgagaggacgccagcggcgcgcaggaagggccccacaccaaaccgccacgc

SEQ ID NO: 77376 - RNA, 76 nt, Homo sapiens
caacgaaagagagaaagaaaagacgggacccagggccaggaacccaacgcaggcagcgacaggaagaggcacaaca

SEQ ID NO: 77377 - RNA, 53 nt, Homo sapiens
acgcagcaagccagacccacggaaaaaaagcagggcgcaggcgaaaccgggcc

SEQ ID NO: 77378 - RNA, 53 nt, Homo sapiens
cgcccgggcaaggacaaccgccagaccagagaacacaagaagaaagacagcac

SEQ ID NO: 77379 - RNA, 76 nt, Homo sapiens
accgccccccgccaaggcgacccccaccgagacgaagcgggcggcgaagacccccggcggccaagacacagcgaaa

SEQ ID NO: 77380 - RNA, 87 nt, Homo sapiens
ggcaagagaacagcagcgccgcccgccgacagccaggcccgggagaaaacagaaggagcggcggacacacagacccccaccaagcag

SEQ ID NO: 77381 - RNA, 76 nt, Homo sapiens
ggcaccaggccaccacagaaacaaaagcaacaaagaggacccagagcaggacggacaccgaaccggcggcgaggcc

SEQ ID NO: 77382 - RNA, 71 nt, Homo sapiens
aggacgacagggaggcgaagggaggcgcgcagaaaggaacacacaggcccagagacagcacggcaggagag

SEQ ID NO: 77383 - RNA, 83 nt, Homo sapiens
gaaggggaagaggcccacccggagaaccccacggagaaccagagcgggcacagagagacccagcgacgagcaaaaggccaagg

SEQ ID NO: 77384 - RNA, 72 nt, Homo sapiens
accgcaaccagaaacaaaggcggagaacggaaaagcaccaggaagcagagaggaccgcagaagggaaggaga

SEQ ID NO: 77385 - RNA, 73 nt, Homo sapiens
cgggccgcacccgccccccgcgcccgccaccggccgccgcccggagaccgcgggccgggccaccggcagggga

SEQ ID NO: 77386 - RNA, 78 nt, Homo sapiens
gacagcaaacgcgaaagagccagagcgcgacagagggagagcacccgccacaggccacaaaggaggcaggcccgggag

SEQ ID NO: 77387 - RNA, 73 nt, Homo sapiens
ccacggcccaggggaagagacacagagcaggacccccagggaaaccacccagacaaagacaagacacaaagac

SEQ ID NO: 77388 - RNA, 81 nt, Homo sapiens
gggagacaccgaagaacaagcacgagcacgacagagaggaggaggcgcacaccaagcaccagcaagagccccaggaagggg

SEQ ID NO: 77389 - RNA, 58 nt, Homo sapiens
caggggggacccgcagaagggacggggaagcgcccgcggggcacgacgcgcagcgcgg

SEQ ID NO: 77390 - RNA, 104 nt, Homo sapiens
gagcggccgggaggaggcggccagccgggcaggaggagcgcgcgcccaaagccaaacaagcagaccggaagaccgacggaagaccacaccccgagggagcccag

SEQ ID NO: 77391 - RNA, 33 nt, Homo sapiens
caccacaggaagccaaaagacgcgccagcaggc

SEQ ID NO: 77392 - RNA, 67 nt, Homo sapiens
ccacacgcccccagccaaacagcacagggaacaccagaggcgggaccacgggcagcgcccagggagc

SEQ ID NO: 77393 - RNA, 71 nt, Homo sapiens
gccagaccacagcacagccgggaaggggagccaccagccccccgacagccagcaggggcagaagcagcaga

SEQ ID NO: 77394 - RNA, 54 nt, Homo sapiens
cgagcgaggcgcccagacaccccccccgcccaggcgaagcaaaaacaccggaga

SEQ ID NO: 77395 - RNA, 67 nt, Homo sapiens
ggccggcgagcgcagcgcgaccgggaggcccagagaccgcagcccacaccccgacggaagagcaagg

SEQ ID NO: 77396 - RNA, 64 nt, Homo sapiens
ccaggcccccacaccggaaacccccccaccacccgagaagaggccaaagacaggggggggaccg

SEQ ID NO: 77397 - RNA, 74 nt, Homo sapiens
gcccacagagcccccggccccccgcggccgccacgcgcagacggagccgagagcagaggccagcaaaggaggga

SEQ ID NO: 77398 - RNA, 51 nt, Homo sapiens
caaaccagccaaaggaaacgccacacccgcgcagacaacagcagcgagaga

SEQ ID NO: 77399 - RNA, 73 nt, Homo sapiens
aagaaaaaaacaacagaggaaagccagccacaaaaggacagaaagaaggaaaaaacgcaagaaggaagaaaga

SEQ ID NO: 77400 - RNA, 80 nt, Homo sapiens
cagacaggaacaagacccggacaccaggccacagccgggaagcagagggagaaaggaggaaaaggcccacacgaccagga

SEQ ID NO: 77401 - RNA, 42 nt, Homo sapiens
ggaaagggacccgacacgaacagcgaggacagacagcgcagg

SEQ ID NO: 77402 - RNA, 81 nt, Homo sapiens
ggagcgcggggcccggcagaaaggagccagcagcgaccacccgagaacggaagggaaaggcagaggccagcagcagaaaga

SEQ ID NO: 77403 - RNA, 80 nt, Homo sapiens
agccagaaccaagcggagagagcagcccggcagacgcagaaccagaaagcgggcggaggaccagaaacagaaggagaagg

SEQ ID NO: 77404 - RNA, 80 nt, Homo sapiens
gagaggacgccagcggcgcgcagaccaggcacgggacgaccacacaggcagagcagggacccccgcaccagaccggagga

SEQ ID NO: 77405 - RNA, 75 nt, Homo sapiens
ccaagccgcaagccggggggccggccgggacgcaaagcaaggagagcgcgagagaacaggggccgaacgagggaa

SEQ ID NO: 77406 - RNA, 73 nt, Homo sapiens
ccgggcgggcggggcggggacgagcgcggcgcgggaaagaccccgacaaaagacaacaccgggacagacgacg

SEQ ID NO: 77407 - RNA, 75 nt, Homo sapiens
agccagccccccaggaccacagccccgaccgagagaaccagcgccaggaacaaggcgaagcccagagcaaaccaa

SEQ ID NO: 77408 - RNA, 66 nt, Homo sapiens
aaaggaggaaacggaaggaggagcgagacgacgggaccgaaggaccccgccagagacaaccgagcg

SEQ ID NO: 77409 - RNA, 77 nt, Homo sapiens
agccaagaggaacagcaggaaagaccagggagaccaaggcaaaggggaaagaagaccacaccacgaggagaaaaacg

SEQ ID NO: 77410 - RNA, 83 nt, Homo sapiens
ggaacgcacaaacggccacgacaaaaagacccccacgcccaaacccaaaagaggagagaagaccaagaaaaaaaagaaacgaa

SEQ ID NO: 77411 - RNA, 75 nt, Homo sapiens
gcacgagcgcagaggcaccccagaacggagaagagaagaagcaggccaagaacaacaacaacagaaaaaacgagg

SEQ ID NO: 77412 - RNA, 75 nt, Homo sapiens
acgccggaaagaaggcccccgcccgggaccaccacacgaaaccaaggaaaaaccgggaacagcagaggccagagg

SEQ ID NO: 77413 - RNA, 72 nt, Homo sapiens
aacccagaacgcccccgaacggagaagagcgaaccgccagacccccagcgcagagagcgagacacaggagaa

SEQ ID NO: 77414 - RNA, 80 nt, Homo sapiens
ccagcgaaggccagcagcgggcgcaggaaggccaccgacaggaaggcccccggaacgccacccaacccacgcccccgccc

SEQ ID NO: 77415 - RNA, 74 nt, Homo sapiens
ggcaaggagaagcaaccggcgccaccagcaaccagagggccagagggaaggacagggcaccgccgaccgaaacc

SEQ ID NO: 77416 - RNA, 49 nt, Homo sapiens
gacaaaagggccaaagaagggagagagacggagccgagccacgcggagc

SEQ ID NO: 77417 - RNA, 84 nt, Homo sapiens
cgcgggacgcgcgcgggcacccacggagccccggggcggcgaccccgcacacacacccaccagccacggcagcccagcggggac

SEQ ID NO: 77418 - RNA, 70 nt, Homo sapiens
ccgggggacggcgcggaagaagcgcgcggagcgcgggagccaaacggaacaaaaccgaaccaacaccaca

SEQ ID NO: 77419 - RNA, 34 nt, Homo sapiens
caaaagcgcaccacgggcacacagagaaaaaaag

SEQ ID NO: 77420 - RNA, 76 nt, Homo sapiens
gaccgaagaccacgggaggaaacaaaaacccccaagcaccgagcagacaccggacccccgagggcccgaggagacg

SEQ ID NO: 77421 - RNA, 82 nt, Homo sapiens
acccacgcagagggcggagcggcagggacaacccgccacaacgacaaaggaccccaaagaccccggaaggcggaccaggcac

SEQ ID NO: 77422 - RNA, 111 nt, Homo sapiens
cccaaaccccaggcagccaggggggcacgacggagagagggccgacccccagaaggccgcgagggaaggagcacaaaggcacccacagccaccagccggagagaaagagac

SEQ ID NO: 77423 - RNA, 82 nt, Homo sapiens
cccgaaccgggcccaccagccgggccacgaagccccccccaggagacgggcagacaacgaacaagcgaagaaccagcagcaa

SEQ ID NO: 77424 - RNA, 81 nt, Homo sapiens
ggcagaggcgaagggcgggggcgagggcccgggacagcgcacccacacaggcacagcagcggccaagggaggaacccgaca

SEQ ID NO: 77425 - RNA, 80 nt, Homo sapiens
aggaaacagcgcaaagggcagagaaaaaagagcagcgaggcgaaagcaaccacaggcgcgcacaacaacaaaaccagaga

SEQ ID NO: 77426 - RNA, 79 nt, Homo sapiens
ggcgacagagcgagcgcggcgcggggccaccagggggcccagccagcacgcaaggaggggccagacagagaagcggcca

SEQ ID NO: 77427 - RNA, 80 nt, Homo sapiens
aaaggagagaaaacaagaagccaaaaacacacgcaaagaagcaggacacagccccacgaaaggcaggaagaggagaggcg

SEQ ID NO: 77428 - RNA, 79 nt, Homo sapiens
cgcggcacccaccacaagccaggaaggagacacggccccccaaggaaaacagggaagcagggcagggcgcagaggaggc

SEQ ID NO: 77429 - RNA, 54 nt, Homo sapiens
acccggaagcagaacccaagaaccgggaaacgagcgaaagcacacgaagaggca

SEQ ID NO: 77430 - RNA, 80 nt, Homo sapiens
cccacccggagaaagggcccccgaaggaaagagaggccggggaaagccggggacaccacaccgcccaccgggaacagggc

SEQ ID NO: 77431 - RNA, 76 nt, Homo sapiens
aaccgcaaggcggcaggcaaaccccgccagggccaccagaaacgaggacaggaggccagggcacgggaaggcagca

SEQ ID NO: 77432 - RNA, 75 nt, Homo sapiens
accacaggcccaagcaaacacaccaaccaagcaaaacccaagcaaaaccagagcacagggcacggaccgaagagg

SEQ ID NO: 77433 - RNA, 55 nt, Homo sapiens
aaagacgggcgccgcgggcagcgcgcggcccgggcagcagggaagcccagaggca

SEQ ID NO: 77434 - RNA, 75 nt, Homo sapiens
aagcagcaccccaagcagggggaggcacacaaagagaaagggaaagaagaaagccagaacagggccggacggaaa

SEQ ID NO: 77435 - RNA, 80 nt, Homo sapiens
gacacgacgacggaaggagcagaacaaacggccaagaagggccaccccacagacgaagcgacaaggacggagcgagaaca

SEQ ID NO: 77436 - RNA, 65 nt, Homo sapiens
gccaacagcccacaaggagacaggcggagaaggaagcgaccaaaaggcaaggcaaagagaacaag

SEQ ID NO: 77437 - RNA, 70 nt, Homo sapiens
ccaggcgccagcagggccaaccgcagaggccgacgggaaggaacccaacgccaccaagcgccagaacacg

SEQ ID NO: 77438 - RNA, 71 nt, Homo sapiens
aaaagaaaaggccccaacagagccccagcaaggccgcagacgaggaggagaaaaaagaaagaaggacgagg

SEQ ID NO: 77439 - RNA, 82 nt, Homo sapiens
acaagcaaaaacaaagagaagaaacaaccccagggcaacaccggaggacagcaacccccaccgaacaaagaaggaaaaagcg

SEQ ID NO: 77440 - RNA, 79 nt, Homo sapiens
gcggcagcgggacccgccggaaggcgagcacagcaccaggacaaaagaagggcagcacaaaggaaagccccaaaccccg

SEQ ID NO: 77441 - RNA, 85 nt, Homo sapiens
ggcgcgagacaaccaccgggggccaggacagagacaccacgggcagaccacggagagcaccggccagaacaagccaaggagccaa

SEQ ID NO: 77442 - RNA, 69 nt, Homo sapiens
aagaaaaacagaggggcgcaaaggaaaagcgaaccagcaggcgcaaaaacgaacccacaaccgaacgac

SEQ ID NO: 77443 - RNA, 78 nt, Homo sapiens
ccaccccgcgccagcagcacagcacgaggccgcccgccccccaagaaaggccagccgaagaaaagcgaaagggagacg

SEQ ID NO: 77444 - RNA, 86 nt, Homo sapiens
gccaacgcgaaggaggaaaaaccaaggcgggcaaaagcaagggccggaaaacccgagaggacggacaccagaagaaaggagagagc

SEQ ID NO: 77445 - RNA, 74 nt, Homo sapiens
gggagaccgcaagagaagggccaaaaagcagaaaaacaaaccagcccaagaagcgacaaagcccgcgaccaaac

SEQ ID NO: 77446 - RNA, 70 nt, Homo sapiens
ggaccaagaaccaggggaaacgggcccagagccgccaagaagcagacagaagaccgggaaaaggaaagac

SEQ ID NO: 77447 - RNA, 77 nt, Homo sapiens
aggacgggccaccgcggcgcccggcacagccacaccgagaagaccggcccaagaaccccaccgcccgaagacagcgc

SEQ ID NO: 77448 - RNA, 78 nt, Homo sapiens
cccgggacaaaggacgacagagccggagcagccgcgacccagaaaccggcaggagagggcgaggagccagacaggcgg

SEQ ID NO: 77449 - RNA, 81 nt, Homo sapiens
gccaagcacccccgcaccagccacacaccaggacgagccgggaggggagacaccgaccccaagcgagagagcagaagacaa

SEQ ID NO: 77450 - RNA, 90 nt, Homo sapiens
agcgcggcgagccgagcggccaggacgacgaggagcagggccgacgcgcaggggggcgacagcgagaacccggggacgacgggcagagca

SEQ ID NO: 77451 - RNA, 80 nt, Homo sapiens
gccgccgccccgcagccccccgcagcacccagccggccacggagggggaagacagagaagaccacacaaccgaaggggcc

SEQ ID NO: 77452 - RNA, 65 nt, Homo sapiens
gcgcgacaggggggccggccgcgcagccgagaggaggcagagagccccgcgacgagagagacaga

SEQ ID NO: 77453 - RNA, 79 nt, Homo sapiens
caagaacgccaagcgccaaaggcaaaaagggcaggaaacgcaaccggacagaagaggaggcaaggaaagcccaaaaccc

SEQ ID NO: 77454 - RNA, 72 nt, Homo sapiens
ggaccagggaaccacccaagggcccgggacgagcggcccagcgacgagcgaagaggcacaaaaccgccagga

SEQ ID NO: 77455 - RNA, 58 nt, Homo sapiens
ggagaacggcaccaggacacacacaaccgggccccccagcgacagggacaagaaaacc

SEQ ID NO: 77456 - RNA, 75 nt, Homo sapiens
cccgggcggagacagaagaggcgccaggacgaaggcccacgggcaagccccacggcccgcccaaaagaaaaccgg

SEQ ID NO: 77457 - RNA, 73 nt, Homo sapiens
gaacgacccacgcccaccagccgaagggcccgacggaaaagaccagccgaggacggcgccccgaacaccaaaa

SEQ ID NO: 77458 - RNA, 84 nt, Homo sapiens
gggccccgggcagccggccgaggccacccgcaggacacaaggaggaggagagaaccgcacacaagaacaagagggaggagaaag

SEQ ID NO: 77459 - RNA, 70 nt, Homo sapiens
agagagaaacaaaagcgccagagccaagaacggagcgagaacagaaggcggccggaggaaggcgcaaaag

SEQ ID NO: 77460 - RNA, 55 nt, Homo sapiens
ccacaacacagaacgaagagaagaagcgagaccgggcagaaaaaaaagaagaagg

SEQ ID NO: 77461 - RNA, 82 nt, Homo sapiens
gaagagcacaagacggaagagaggagcgaccagacggcaggaggccgagcaacaagaaccagacgagacagacacaccagag

SEQ ID NO: 77462 - RNA, 75 nt, Homo sapiens
cagaaccgagaaacgggaccacaaaggagacacgaggaaggccccaaacaggcgggacagggagcaacaccggag

SEQ ID NO: 77463 - RNA, 76 nt, Homo sapiens
cgggcgccggcgaaccaccggggcccgcccaacagaagacccgccacgcagcaccagaaaagggacacagacgcca

SEQ ID NO: 77464 - RNA, 74 nt, Homo sapiens
gacgaggcccacgccggccaccgacaaagagcgcggcagaagcgaaccggacacgcggagagcgggagacggcc

SEQ ID NO: 77465 - RNA, 55 nt, Homo sapiens
caggcagcaacagaagaccagcgcagagaagaaaaagcgggcggaccggacggga

SEQ ID NO: 77466 - RNA, 53 nt, Homo sapiens
ccaacacagagccaagcgccaaggaggcaggcgacaacagaggagaaggcgaa

SEQ ID NO: 77467 - RNA, 39 nt, Homo sapiens
ccccgcagggccagaggcaacgagagacggggcgccagg

SEQ ID NO: 77468 - RNA, 69 nt, Homo sapiens
agagaaccaacaacccggcgcgacccgcgcagcgccagggggcggccggccgcagagcaccgcgcggag

SEQ ID NO: 77469 - RNA, 77 nt, Homo sapiens
cgccgcccaagagagcaagaccgggcccacgagggaggccggccaggaagccaccaagccgaaagcgacggaggcag

SEQ ID NO: 77470 - RNA, 68 nt, Homo sapiens
agacagcgggacagcgcgagaaggacggcggcgaaaagaagcagcagacgggacacgcaccggagaga

SEQ ID NO: 77471 - RNA, 80 nt, Homo sapiens
cgcagccgagcggaaaaaggcgagaagccagagaggccagaggccaggccgcgccacccccagcccgcagagcaagccag

SEQ ID NO: 77472 - RNA, 66 nt, Homo sapiens
gaccgagggaacccacccccacccacgcgcacgcagcgggcagacacacgggaccacccgggcacg

SEQ ID NO: 77473 - RNA, 76 nt, Homo sapiens
ggccgaaggcgaacgccgcggccaaggagccgccaaagccagacggaaccacaggcccggagaaggaccacacagc

SEQ ID NO: 77474 - RNA, 78 nt, Homo sapiens
gcacaggaggcggagcaagcggggagaaaccggcaccggaccagcgggaagccgcacaggaaaaccggagcacaggga

SEQ ID NO: 77475 - RNA, 69 nt, Homo sapiens
ggagaagcccgagaacaacaacggaccccgaccaggaggcgaagccgacgagcccgaacagacgcacca

SEQ ID NO: 77476 - RNA, 76 nt, Homo sapiens
gaaaagccccccccaaagccaaagaccaaaggcaaaaggaaagaggaggaagaaagcagaaggaagacagcagaag

SEQ ID NO: 77477 - RNA, 72 nt, Homo sapiens
gagcacgccgcgcagcccggccgccggcccccaacagcgccgcccgagagagacgcagcgcaaggccggggg

SEQ ID NO: 77478 - RNA, 59 nt, Homo sapiens
cgagaaacccaaaccgaaaaccaggacgccacaggcacaaaaggacacaaaagcggaag

SEQ ID NO: 77479 - RNA, 64 nt, Homo sapiens
gcaccgagccggcacacagggacagccgcaaccggaccggcgagaccggggacgacgacgaggc

SEQ ID NO: 77480 - RNA, 70 nt, Homo sapiens
gaagaacaaacagcagcccccggaaaaacggcgcccccaagcccacagcgaagaagggccacccccgacg

SEQ ID NO: 77481 - RNA, 73 nt, Homo sapiens
aagagcacgggacgcgggagcagccccgcccaccagcgcccgccgcagggggcggaggcagggcacagcggcc

SEQ ID NO: 77482 - RNA, 82 nt, Homo sapiens
gggcagacagcaaggaccaaaccagacccaggcaacgcaaccaccaccgaggccccgaaaagcacggcgcagggagcccccc

SEQ ID NO: 77483 - RNA, 58 nt, Homo sapiens
cgggcgccgccccgcgcggcaggcaagaggagccaggagcacggggggaacaagaccg

SEQ ID NO: 77484 - RNA, 81 nt, Homo sapiens
ggcccgcgcgcccggccaagaggcaaaggggaggacgcagcaaaccaccagaagcaggcggacaccgaccgcaggaaggag

SEQ ID NO: 77485 - RNA, 75 nt, Homo sapiens
ccgacacacgacagcaagaagaagacaacgacgacacaaggggagaaacagccagcaaaaaaacaaacaaacaca

SEQ ID NO: 77486 - RNA, 56 nt, Homo sapiens
gaaagaccccaaggacacagagcacaagcccagaggcgccacaaccaggcaaggag

SEQ ID NO: 77487 - RNA, 80 nt, Homo sapiens
gacaacagccaagagggcgcccagagacaacgagagaacaacaaccgggcaccaggggaggaagaaggagagaggcgcca

SEQ ID NO: 77488 - RNA, 75 nt, Homo sapiens
acggccaccgacacgcggcccccacccgcggggcacaccccccggaccggcgaggaggaggccgagaccagccag

SEQ ID NO: 77489 - RNA, 91 nt, Homo sapiens
gcacacaaggagacacgccaaccagcaaagcggcgaacacaacaagaaacaaaccacaggcccccagaaagaccgggacgaaaacaccaaa

SEQ ID NO: 77490 - RNA, 58 nt, Homo sapiens
acaacaaaagagccacccaagaaaaccagacgagagacagaagacgaaagggcaagaa

SEQ ID NO: 77491 - RNA, 81 nt, Homo sapiens
gaagcggaacgagaaggaagagagccaacccacacagcaggaaacccaccagagaaggcgcggccacccaggacccggggg

SEQ ID NO: 77492 - RNA, 69 nt, Homo sapiens
gagaagaccgacgaaaagacacggaaccaagggaagcggacaggaagggaaacgaaaaaggccaggcga

SEQ ID NO: 77493 - RNA, 80 nt, Homo sapiens
ggcgcaggagaagaggcggcccacaggcacacgagcggccacgagcaaccaagaggagaaggaagcgcacaaaacccaca

SEQ ID NO: 77494 - RNA, 79 nt, Homo sapiens
acccgcagcaacagcccagcagaagccaggacggagagaagacccggggcaggcgcaggaggcacccaaggggaggaag

SEQ ID NO: 77495 - RNA, 94 nt, Homo sapiens
cgggggagagccgaaggagcagcccaggaccgagaccggagcagccggggcggagcggaaaccagagacgaccacaagaacccacaggacaagg

SEQ ID NO: 77496 - RNA, 57 nt, Homo sapiens
caagcaggaccacccaccagccaccagggacaacccgccacaacgacaaaggacccc

SEQ ID NO: 77497 - RNA, 71 nt, Homo sapiens
cgcacaagaaacccaagcgcgagaaagagcacggcacaaaaaaggggcaggacggcgaacaaaggaaagag

SEQ ID NO: 77498 - RNA, 82 nt, Homo sapiens
acggggggggccgcgcccggccccgcgcgggcggacggcggaggcgcccccagacagaagcgaaggggacagggggagaacc

SEQ ID NO: 77499 - RNA, 82 nt, Homo sapiens
gcggccccccggacagggccgacggcgacgagggcgccacacgggccagggcagggccacccagggagcacgagacagcgcc

SEQ ID NO: 77500 - RNA, 70 nt, Homo sapiens
acaggaggcggcgggccccgcccgccgaaggcacccaccgggggcccgggaaggacaaagagagccggcc

SEQ ID NO: 77501 - RNA, 77 nt, Homo sapiens
ggcccacacaggaacaggcaagggaaacccccaaagagaaagaagaagaaaacgagacccaaaagggagaaagaaga

SEQ ID NO: 77502 - RNA, 77 nt, Homo sapiens
gaagggaacgcaaggcccccgaccacacgcccgcgcgaggcggaccggaagcgagcaggagcagagcggaagaccca

SEQ ID NO: 77503 - RNA, 80 nt, Homo sapiens
caaggccaagaccagaaccagcccgggaaaggaaacaacggggagaaacccgaggcccaaaggggaaggaccggaaggag

SEQ ID NO: 77504 - RNA, 73 nt, Homo sapiens
gaaaaaccggaaagacccacaaaggaagccaccgccccgcgccgggagaagcagggcagggaaaaagacagac

SEQ ID NO: 77505 - RNA, 81 nt, Homo sapiens
gccacagccccccagcagcacacgggccacgaccaggcagcgagacccggcagggggccggggggcggcccggagggaggc

SEQ ID NO: 77506 - RNA, 82 nt, Homo sapiens
caaggcaagaccgaacagaaggaacgacgcggaccagaagccagagcgaggacgccggcagggggccgggagcccagcagac

SEQ ID NO: 77507 - RNA, 76 nt, Homo sapiens
agagagcgaaccagacggacccacaaagagcaccagcagcgcgcacccagggcacaggagacagagaggaggagcc

SEQ ID NO: 77508 - RNA, 84 nt, Homo sapiens
gccccagccgagccccagccaggacgagaggagcggagcccgcagaaccccacagcaagaggacgcgcggccgccggagccgcc

SEQ ID NO: 77509 - RNA, 79 nt, Homo sapiens
acgccaaaagacgaacacaaagggaaagaggagaggcacccgaaagccaggccagaaaacagaccgaagcgccggccag

SEQ ID NO: 77510 - RNA, 54 nt, Homo sapiens
gcaaaaggaaaaaaccaaacaagcaggaaaagccagccagcaggcaacaggccc

SEQ ID NO: 77511 - RNA, 72 nt, Homo sapiens
aaagacgagcagacacgcaaagaagcccgaggcgcaagagacaaacacaagacacccaagaagcccagcaga

SEQ ID NO: 77512 - RNA, 84 nt, Homo sapiens
agggcaaaggagagcacaaccacgcagggaagcccaggggcaggagacgaaggccagaggggccaaggacggccgcccgccaga

SEQ ID NO: 77513 - RNA, 57 nt, Homo sapiens
cgcgggccaaaccaaagaacgaggacgaaggcggagcaggagcaaaggagcaagaaa

SEQ ID NO: 77514 - RNA, 79 nt, Homo sapiens
gcccggccgaccagggaccgcccgccgcggcgcccgggcgagcagacaccgcaggaaagggcaaaggacgcggcccggc

SEQ ID NO: 77515 - RNA, 70 nt, Homo sapiens
caaacaagccaggccgggaaaggccaacagaacaagagagaccaggggcaagacaaacagagaacaggac

SEQ ID NO: 77516 - RNA, 75 nt, Homo sapiens
gaggggacacagcacagaggcggagccgcccaggcccaaaccccaaggagcccgaaggccggacgccccacccgc

SEQ ID NO: 77517 - RNA, 73 nt, Homo sapiens
agacggaagaagaaacacagcgcaggggaggcagcgagacagacgagagagaaaaaagcagagggggaaaaaa

SEQ ID NO: 77518 - RNA, 41 nt, Homo sapiens
cccagggcccccgcgcccaggaacaggggggcaaagccgcc

SEQ ID NO: 77519 - RNA, 78 nt, Homo sapiens
gaagggaccagccagaagaaacaaccgacaaccccagccaacacaggcaccggccgccgaccaagacagagcaaggcc

SEQ ID NO: 77520 - RNA, 108 nt, Homo sapiens
cgacggccgagcgaggaggagcggacaagaagacaaccggcgaacggcgcagggagagaccaagagcggaccccggaggacccggagacgaaggcacaagagagcgga

SEQ ID NO: 77521 - RNA, 78 nt, Homo sapiens
cccccaggaagacccgcagcgcagcagaccacaaaggcagacacaaccccagcgaaagaaacgaaggaggcccaacca

SEQ ID NO: 77522 - RNA, 72 nt, Homo sapiens
gcagccaacccacagcaccgaaccgccagcccacaagaagcccggagagcgccccgggcgaagccacacggc

SEQ ID NO: 77523 - RNA, 40 nt, Homo sapiens
cggaggcccacgaaaccaaaaggaaacaggaacacgaaag

SEQ ID NO: 77524 - RNA, 49 nt, Homo sapiens
acacagaaaccgccccgggaaaaggacacgaccaaaccgcccgagcagg

SEQ ID NO: 77525 - RNA, 86 nt, Homo sapiens
gaggggggaggagaggcgcagccagaggagccgccgcagagccccccgcccccgggcgagggacgaacggggaagaagcagccgcc

SEQ ID NO: 77526 - RNA, 71 nt, Homo sapiens
ccgaaacccagacacacccaggagcgcgccagacacacgcgcgaaggagaaggacggaaaagaacccagaa

SEQ ID NO: 77527 - RNA, 63 nt, Homo sapiens
aaggaccgaaacagaaacggaacaccaagagagcggaaccgcaggggaagccccagaagccga

SEQ ID NO: 77528 - RNA, 81 nt, Homo sapiens
acgacccacgagacaggggcccaagaaaaagcaccggacaacggccgagcgaccaggagaggagcccccgcccgaagaccg

SEQ ID NO: 77529 - RNA, 79 nt, Homo sapiens
cacgcgcccccagaggagaagacccgacggaccccagcgccgggcagcgaacaacaggcacaaagagagaaggaacacc

SEQ ID NO: 77530 - RNA, 74 nt, Homo sapiens
ggagagaggacgggagaccagcaggcaggaagaggagaggcggacgcagggccgaacggagaccagagggaaaa

SEQ ID NO: 77531 - RNA, 75 nt, Homo sapiens
cgaagcgaagaaacgggaagcaaggaacaagggcaagagcaccaagcggaaaacgagacgaaggacaagggacca

SEQ ID NO: 77532 - RNA, 74 nt, Homo sapiens
gaagggcgaccgcgaccaagacaggagccccacaccaagacccccgagcacaacaaggagagggagaggggcag

SEQ ID NO: 77533 - RNA, 74 nt, Homo sapiens
ggcagaggcaggcgccagacaaccaggcaagcggaagaaccgaacacacaaaggcaagacagccgccacccaac

SEQ ID NO: 77534 - RNA, 64 nt, Homo sapiens
acggaccccgaggacaggaaaaacagagaaccaacgagagaccacaagggaaagacggcagggg

SEQ ID NO: 77535 - RNA, 74 nt, Homo sapiens
aaggaaaaaccagaaagaagggccccaaacgggcgcccgacagaacgggccagaagaaacgacccagggcccca

SEQ ID NO: 77536 - RNA, 73 nt, Homo sapiens
agggacccagcaaaggagagcaggagaaaaacggcagcagggcccacccaaaaacagcgggcaaagacacaaa

SEQ ID NO: 77537 - RNA, 79 nt, Homo sapiens
gggaagccacggacgaccgccaaaggccggcccggcggccagccccacagcggggggagcgggccggagagaagagagg

SEQ ID NO: 77538 - RNA, 83 nt, Homo sapiens
agcagcagcagcaggcgaggaggaagaggcgggacggcgccggccggggggacgggcacgggcagacgggagagaagcgccgg

SEQ ID NO: 77539 - RNA, 74 nt, Homo sapiens
acagacaagccaagcccaagaacacacaagcaagagcggcacaagagaaaggcaccaagaaggaagacaaagaa

SEQ ID NO: 77540 - RNA, 75 nt, Homo sapiens
gcgcgcgcgcggggccccgcagagcgcaccgggcccaaacacccccaaaaggaccgccagagacgggagggacgc

SEQ ID NO: 77541 - RNA, 72 nt, Homo sapiens
aagaagcaagaaccaggacaagcagcagaaaacagcaacagggacgcgcggacaccgaagcccgaggccaca

SEQ ID NO: 77542 - RNA, 78 nt, Homo sapiens
gcaccgcggagacccgccagccgccggccgcgacccggaacaaaggacccagcgaaagaaccccaacccaagaaacac

SEQ ID NO: 77543 - RNA, 71 nt, Homo sapiens
accgcggcagcacgcggcgggaagaacagcgcaggccgcaacaaggaaccgagccaaaaacgcagacgcgc

SEQ ID NO: 77544 - RNA, 74 nt, Homo sapiens
aagcagcccaggcagaccccagaggcacccgcagaagcagaaaaaccaaacacagcacgaccagaaccaggagg

SEQ ID NO: 77545 - RNA, 76 nt, Homo sapiens
gcccggcaccaggacccggcgccggggccccgggcagacccggccggacaaccgcggcagcggggcaggaacaacg

SEQ ID NO: 77546 - RNA, 81 nt, Homo sapiens
ggcacaagccaaaggacgaggccaagacccacagcagacccagcggcaagaagcaacagaaaggagagacaaagccgagaa

SEQ ID NO: 77547 - RNA, 89 nt, Homo sapiens
agaggccggcagagccgccgagacgccgaagagcccgccgcccgcgcgaggggccccccgccaaagacagccagagaggacggcaagaa

SEQ ID NO: 77548 - RNA, 83 nt, Homo sapiens
aaaagagcccaggcggcggcggccaagcccaacaacccccgggggcacggaccgggggacgcgccgcaggaaaccggagaaga

SEQ ID NO: 77549 - RNA, 69 nt, Homo sapiens
cggagcgccacggccacgccccccgcaacaacccacaaggccagcggcggggcagccgagggcaggagc

SEQ ID NO: 77550 - RNA, 83 nt, Homo sapiens
ccgggaagggggcgacgcacggggcacgcccgagccggaccaccgccagcccccaccacaccacacccacgccacccaccgcc

SEQ ID NO: 77551 - RNA, 75 nt, Homo sapiens
ggacagagaagaggacgggaaaagagagaaggacaaggacggagagaagagacagaggaacggggggccacgacg

SEQ ID NO: 77552 - RNA, 72 nt, Homo sapiens
gccagcaggggggagcggacccacgggaacagagacagaggagaccgcaaaaaagcaccagcacaccagacc

SEQ ID NO: 77553 - RNA, 79 nt, Homo sapiens
cggaagcaaaagcccaaaagccaaggaacgggacaaccgaaagggaggcgcgaaaaagccgagcaccaagggaagcgga

SEQ ID NO: 77554 - RNA, 75 nt, Homo sapiens
gggcagccagaagaaggaccggaagcacacaacaggaaaacaaaagaggagaaaggcggaggcagggcggaccgg

SEQ ID NO: 77555 - RNA, 77 nt, Homo sapiens
cggcagcgggccagacccaggaccgcgacacggcggagaacggaaaagcaccaggaagcagagaggaccgcagaagg

SEQ ID NO: 77556 - RNA, 80 nt, Homo sapiens
ggccagccccgccgccccgcaaccggcagccgccgccgggaagggacacagggcacaggcccacgggcgaggcccgcacc

SEQ ID NO: 77557 - RNA, 79 nt, Homo sapiens
aggacccccagaggcggcagcaggcggggagcaggccacagaacgcaggagaaggccacagcagggagcaaagaacgaa

SEQ ID NO: 77558 - RNA, 72 nt, Homo sapiens
gaagggaaagcagcaggggggccgggccaaccagagccgcaccaggaaagcgcggcccggaaaaagaaaggc

SEQ ID NO: 77559 - RNA, 77 nt, Homo sapiens
gagaaacccgaagcgcggaaaacccagggggcgaacacggaagggaaaggggcccagacagcggagcagcgcaagca

SEQ ID NO: 77560 - RNA, 76 nt, Homo sapiens
aggccccaccagcagaaggccccaccagaggacccgaccaggaccccagccccagaaccgggcgcccgcacacacc

SEQ ID NO: 77561 - RNA, 76 nt, Homo sapiens
ggccaccggcgggaggaacaaaagggggacaaacaccaggaccagggagagggcacgcgccccggggacggccagc

SEQ ID NO: 77562 - RNA, 71 nt, Homo sapiens
caaagcagaagaagaaagacaagcgcccacccacccagaacaaagcaccgggaggaaagagagccacacga

SEQ ID NO: 77563 - RNA, 83 nt, Homo sapiens
gaaagacagaagaaaaccaaggcgaaggggacgcaaaagaggaggaacagaaaagcagccagcaacaggaagaacaagaagaa

SEQ ID NO: 77564 - RNA, 69 nt, Homo sapiens
ggaagcccgggagccacacacgacgggaagcgggagcccagagaaagggggccaggaagccaagacagg

SEQ ID NO: 77565 - RNA, 66 nt, Homo sapiens
gccacgaaagaccacgaaagacgaaaggaagaacaccacacagaacacggggccaggcacaaagag

SEQ ID NO: 77566 - RNA, 51 nt, Homo sapiens
ggcggaagcgagcagaacaggaagcccgggggaagacacagaaccgaccgc

SEQ ID NO: 77567 - RNA, 52 nt, Homo sapiens
ccggggccagacccccgggccggacccgaaaacacaagaacacagcaacaca

SEQ ID NO: 77568 - RNA, 75 nt, Homo sapiens
ccccgacaggcaagaagcagagcgcagagggggaccgggaccgcgccaccccggacgcccgaacaggaccaggac

SEQ ID NO: 77569 - RNA, 82 nt, Homo sapiens
agcaggaaaaacacagagacagacggcggcagaaggacccagaaagagacagaagaagaggaagccaaggggacacaccgcc

SEQ ID NO: 77570 - RNA, 76 nt, Homo sapiens
gcaaccccaagagcggagacacggggaaacgcaggcgggagagagaacggaaaggagccaaggaaaacaaaagggc

SEQ ID NO: 77571 - RNA, 90 nt, Homo sapiens
gcccggcccagagaggagagcgaggaggaagaggacgaggacgacgaggaggaggaggaggaggaaaaagaaagagacccggcagcaggg

SEQ ID NO: 77572 - RNA, 72 nt, Homo sapiens
ccccaagaaagcccaggacgggccaagagagcccgggcccggaaagggcaacgacccgagaaggcggaaacc

SEQ ID NO: 77573 - RNA, 69 nt, Homo sapiens
acaacccgaaaggccaggcagaacagcgcgcacacggcgagcaaggcagcggggccccagcaccgggac

SEQ ID NO: 77574 - RNA, 79 nt, Homo sapiens
agaggccagccgggaggacacacaagcggggaaaaaacagcgggccacacaaagccgggagcccacaggacgcgggaca

SEQ ID NO: 77575 - RNA, 60 nt, Homo sapiens
cgcagaaagggcagacacaggcacaccaagggcggccgaagcaccgacaaggcaagaaca

SEQ ID NO: 77576 - RNA, 82 nt, Homo sapiens
gacccagaagagcagcgcaccaccgcagcggcgccgcgggcacggcgaggggggcggccgcccaccgagcaccgcgcccagg

SEQ ID NO: 77577 - RNA, 66 nt, Homo sapiens
ggacaggcccgggagcgaagaaagcgagcaccgaagaaggaaagacgaaccgcccagagagcagcc

SEQ ID NO: 77578 - RNA, 81 nt, Homo sapiens
cgggacggaccgagaccggaccgagagcggaccgagagcgcgaaacgcacgagaaggaagaggaaggaaacccagaagagg

SEQ ID NO: 77579 - RNA, 74 nt, Homo sapiens
cacggggccacccagagcccgacacggggcagacaaacacagagccccaaaggcccggagagcacgaggagagc

SEQ ID NO: 77580 - RNA, 68 nt, Homo sapiens
aagaggggaaagcaggagagaagaccagaagggaggagaggggcaccaaagcggggggagggcgaaaa

SEQ ID NO: 77581 - RNA, 74 nt, Homo sapiens
gccgggccccgggccccaagacccggccggcgccgcggccgcggagcgacgccgacaaaggaggaaaagaagag

SEQ ID NO: 77582 - RNA, 62 nt, Homo sapiens
aagaacccacgccgacacgacgccgcgggcaggcgcgcgcacccgacaacggcaagcggaga

SEQ ID NO: 77583 - RNA, 76 nt, Homo sapiens
gagcccaggcagcccagcccgcccccagaaaccagaggcgaggagaaaaacaccgacagcacagagcagaggagga

SEQ ID NO: 77584 - RNA, 82 nt, Homo sapiens
gcggcggcggcagcgggcgggccccgagagcagcagcgcaaaagggagaccacaacagccaccaaacagaagaaccgcccaa

SEQ ID NO: 77585 - RNA, 35 nt, Homo sapiens
agcgcgcagaccagcgggagcaggacacgagacac

SEQ ID NO: 77586 - RNA, 69 nt, Homo sapiens
acagccacgagcgcagacaaggcgcgggcacagggagggcggaccacccaggaggagggaggggagccc

SEQ ID NO: 77587 - RNA, 60 nt, Homo sapiens
cacagggcagaccccacaagaaaggggaaacacaccaaggcggagcggaacgcggacacc

SEQ ID NO: 77588 - RNA, 71 nt, Homo sapiens
acggaccccgcagcaagagaaaaacaaaagaaggaccacaacggggccaacgagggaaaacgacaacgcca

SEQ ID NO: 77589 - RNA, 109 nt, Homo sapiens
caagccgggcacaaagaacggaagcgaaagagcagcagaaacgcacccaggaggaagcaccaagaacaaggcaggaaccagcggcgcccagcacgacagaagcaaacca

SEQ ID NO: 77590 - RNA, 71 nt, Homo sapiens
cccagacgccaccacaacccccagacgcaagccaagggaagcaggggcgaaagaagaggagcacccgacag

SEQ ID NO: 77591 - RNA, 75 nt, Homo sapiens
cggggggggaggagaacgacgccaaagagcacgcagagagcccggcaggaaccgaacacagggagggccaagaac

SEQ ID NO: 77592 - RNA, 35 nt, Homo sapiens
acaccggggacagacagggaaagaaaggcaccccc

SEQ ID NO: 77593 - RNA, 73 nt, Homo sapiens
cggacacagaagaggacagagcaaagccggccagacaaggagagcaacacaaggaagcaagggccaccgccca

SEQ ID NO: 77594 - RNA, 38 nt, Homo sapiens
ccacacagcggagaaagaagagacggggcaccagagcc

SEQ ID NO: 77595 - RNA, 78 nt, Homo sapiens
cgcgggcaacagccccccgccggcggccgaacgaggggaggcgagacgggaccaccagaacgggccgggagccagggg

SEQ ID NO: 77596 - RNA, 78 nt, Homo sapiens
caaagcaggggcaacccagaacccccagagccggaagagcgcagaagccggaagagagccaagccaggcccagcagcc

SEQ ID NO: 77597 - RNA, 80 nt, Homo sapiens
gaaaaggaaaccccaaagggaccagaaccacagcgacgcccccgcgaagaaaagcgacaacaaccagcgagaaaaagccc

SEQ ID NO: 77598 - RNA, 85 nt, Homo sapiens
accgcagcccggagccggaggagcgcgcggacgccaaccagcccgcgagcgcccgaggacggaagcacgggaaaccagcaacccc

SEQ ID NO: 77599 - RNA, 69 nt, Homo sapiens
acacacccaggaagcagccagaccaagaacaaccgcggacacggagaggaagggacagcagaccacagc

SEQ ID NO: 77600 - RNA, 86 nt, Homo sapiens
aggcccggggagcaccgccgagcggccgcgcggcaccgcggcggcccccgggaagacggcgaccccgcacacacacccaccagcca

SEQ ID NO: 77601 - RNA, 42 nt, Homo sapiens
acgggccagcagccggaggggacagggcaacagcagaagagc

SEQ ID NO: 77602 - RNA, 66 nt, Homo sapiens
acaccacccagaaccagcaaccccccacgagaacagcagcgggggcaggcaccgaggcaccagagg

SEQ ID NO: 77603 - RNA, 74 nt, Homo sapiens
cgggggacgccgggaagacagagacacgcgcagaagaggcacacaagcagggggggacagccccagagacggca

SEQ ID NO: 77604 - RNA, 54 nt, Homo sapiens
acgcaccaggccaaagaaagagaagacaaaccggcgaccacacacggggacgac

SEQ ID NO: 77605 - RNA, 75 nt, Homo sapiens
gggagaaacacagccagaaggaacaaaccaaggcaacaggaaccaaggaaaaggacccccgaaccacgccgcgaa

SEQ ID NO: 77606 - RNA, 74 nt, Homo sapiens
cgagcacccacgggccgaccacagccaaaacgacagcgagacgcgaggcgagaacgcggacaagcaaacaaaga

SEQ ID NO: 77607 - RNA, 77 nt, Homo sapiens
gagaggcaggcggagccgaccgggccaggcaaaagcagaccggaaaacccaccggcaagaccacacccgaggggagc

SEQ ID NO: 77608 - RNA, 71 nt, Homo sapiens
gagcccaggcagccccggcccccgacgggcaggagggaaagaaaagaggcccggaagagagccaccacgac

SEQ ID NO: 77609 - RNA, 73 nt, Homo sapiens
ccgaccagcgggggcgcggcggccgcgcagccacccaagagggggggaccacagagcagcaggagcgcaccaa

SEQ ID NO: 77610 - RNA, 80 nt, Homo sapiens
cgcggcagggagcgcgggggcccgcgcagcagcgaccacggagggagcaacaacaaggagcaagcacagcgcgagccagc

SEQ ID NO: 77611 - RNA, 105 nt, Homo sapiens
acaaccgcagcagggggcagaacccagaggcgggaggggccgggaggcagaggggcaggggagaaagacagcaaagaaaaggagaagaaaggaaaaaaacaaccc

SEQ ID NO: 77612 - RNA, 72 nt, Homo sapiens
agagggggaccaacaagggcaaaagcccacagagagagccaggaccaaggccgccaaacaccaacaaggaaa

SEQ ID NO: 77613 - RNA, 73 nt, Homo sapiens
gaaaacacgggccaacacggcgcgaaagccagggaagggcagaacccgacaacgacaaccagagagcccaagc

SEQ ID NO: 77614 - RNA, 68 nt, Homo sapiens
ggaagagggaccaagaagagcacagcaagggagaagagaagaccagagaaagaacaaccccgcgcaca

SEQ ID NO: 77615 - RNA, 76 nt, Homo sapiens
gagaggagcagcaccgacccgccgggcggagaacggaaaagcaccaggaagcagagaggaccgcagaagggaagga

SEQ ID NO: 77616 - RNA, 76 nt, Homo sapiens
gagccccgcgcgccgggaacaaagacagcgaggacaccccagcaagcccggaaggaaggagaaagacaaacccaag

SEQ ID NO: 77617 - RNA, 73 nt, Homo sapiens
cagagggcaagaacgaaccaaccccacaacaccgccggagacagccaagggacccggccagaccccaacagac

SEQ ID NO: 77618 - RNA, 77 nt, Homo sapiens
gcggacgccacccgggggcacagcaagggcccaacaagcaggggcagggccgacaggaacgccgccagacgccagcg

SEQ ID NO: 77619 - RNA, 58 nt, Homo sapiens
cggaggaaccggcccgcgcccgcccccgggagcccgcacgggagagagcgaagcaccg

SEQ ID NO: 77620 - RNA, 38 nt, Homo sapiens
gggccgcccgccccgcgcaaggcggagaacggaaaagc

SEQ ID NO: 77621 - RNA, 56 nt, Homo sapiens
gcaccacccaacagcaagagagcagacagaagaaagggagcccccaagaacagcga

SEQ ID NO: 77622 - RNA, 76 nt, Homo sapiens
aggaccagcaacaaaccgggagaacagagacccaccaagaaaccagaacccggacaagggaagggcccgaggagga

SEQ ID NO: 77623 - RNA, 69 nt, Homo sapiens
aacaacgccgagcccacaccaccccggaaagagagggcaaaaaacacagacaccggcgaacaacaagaa

SEQ ID NO: 77624 - RNA, 72 nt, Homo sapiens
gaccaagcccaaagaggagaaagagccaaggagccaggaggccgcacaaccaaaaaacacacccggagaaga

SEQ ID NO: 77625 - RNA, 69 nt, Homo sapiens
gcaaaccaagcgacggcaagaacaggagggaacgacacccggcagaaaaagcaggagcaccagcgcaag

SEQ ID NO: 77626 - RNA, 94 nt, Homo sapiens
ggagcagggcagcaccacgagccagaagcagagccggggcgcagccagggggaagcaggcagccggcaaccggacccccaggccaagggacccc

SEQ ID NO: 77627 - RNA, 72 nt, Homo sapiens
acagcagcacagcacagagggggagagccagcgcggcaggccccgcaaggaacacgaaaaggacggagggaa

SEQ ID NO: 77628 - RNA, 74 nt, Homo sapiens
ccgccgggcaagacccaaggggcggggagcggaccccgggccggggcgccccgacggccgaacgcaggcagggg

SEQ ID NO: 77629 - RNA, 73 nt, Homo sapiens
aaaacagcaacccaaacacagaagcacacgacggcgcccaaaacgagagaggacacgcaccacagacccagca

SEQ ID NO: 77630 - RNA, 56 nt, Homo sapiens
caaaaaccacgggcgggagcaaccgaaggaagaaagccaaggcggagacagaggga

SEQ ID NO: 77631 - RNA, 61 nt, Homo sapiens
cgggcggcacccggccaggaagcggagggcgcgcgaggacagcgaacgggcacgacggcca

SEQ ID NO: 77632 - RNA, 78 nt, Homo sapiens
gcggcgaggaggggaaccggccccacccgggaggggggagcggcgggaggccaccgccagcacgcaccccgcgccgcc

SEQ ID NO: 77633 - RNA, 70 nt, Homo sapiens
gacccgaccccagaaagcacaagggcacagaccagagccagagccacccgacccgcccccgggcccagca

SEQ ID NO: 77634 - RNA, 76 nt, Homo sapiens
acaagcaacagcagcagacagccagcccacacaagcagacaaccaagagcgagaccccacagacgcccacggggaa

SEQ ID NO: 77635 - RNA, 78 nt, Homo sapiens
gagccggccagcgcgccggagccgccgagagagagggggaaccggggaaggcaccggcaaggggggaggcggaccagc

SEQ ID NO: 77636 - RNA, 85 nt, Homo sapiens
ccgggcgagcagcggcgggggcccgaggggaccaagaacgcccagcccgcgggcaccggcagaaaggaggaggaaaacaccccca

SEQ ID NO: 77637 - RNA, 73 nt, Homo sapiens
caccagagcgacgcacacaacaccaaggcaagaaagcagaggaagaacaagaagacagagaaggaaccaagca

SEQ ID NO: 77638 - RNA, 70 nt, Homo sapiens
agccgacgagcacgcgcgcaccggaaaccaaccagaacgggaacccgcccgggacaggagcaggacccga

SEQ ID NO: 77639 - RNA, 75 nt, Homo sapiens
gaaaagaacaccgggacggacggacccaaagaacagggaaacagaagcagaacaaagaagagacaggcacgcgag

SEQ ID NO: 77640 - RNA, 72 nt, Homo sapiens
gcacgcggaggcggcgcccgccaaaccgagcacgaggccagcagcagcaaaagggcccccggagaagagagg

SEQ ID NO: 77641 - RNA, 69 nt, Homo sapiens
gaaaacccgacccaaccagccaaggacccacgggggccaggggaagaaggaagaagaacaggaagaagg

SEQ ID NO: 77642 - RNA, 83 nt, Homo sapiens
gcaggagccccgcgcgcccccgcagcaccgcaccggagggcgagcggacccccggagaagggagaggagcggaagacccgggg

SEQ ID NO: 77643 - RNA, 58 nt, Homo sapiens
ggcggagagacaccacagggcacacagaggcacgagaacggggaacagaacagcccag

SEQ ID NO: 77644 - RNA, 81 nt, Homo sapiens
aacgggaaagccggcaagagggagaaggacaccaggcagaggcaagaccaagggccacaaggggggacgaaccaaagccca

SEQ ID NO: 77645 - RNA, 38 nt, Homo sapiens
ccacgagaggacagcccagggcgaagcgggaagcggca

SEQ ID NO: 77646 - RNA, 67 nt, Homo sapiens
aagcggcaaagggaaaaaggcgggcggagggaaaaggggcggaagaccagcagaggcaacgcaaaaa

SEQ ID NO: 77647 - RNA, 47 nt, Homo sapiens
acgccaccaaaagcaccagaacgccccggaacccaaaccgaagccac

SEQ ID NO: 77648 - RNA, 76 nt, Homo sapiens
ccacaagcaacgcgggaagagaaggcaagaacgccccggcaaggacggaggcaggcaccaccaacagcggggaaaa

SEQ ID NO: 77649 - RNA, 71 nt, Homo sapiens
gaaggaaacagagagcagggagaacacaggaacggaggcgcacgaggccacgcacccaagagaagagccag

SEQ ID NO: 77650 - RNA, 84 nt, Homo sapiens
cgcagaagccgaaacacagacgagagggagggccggagccagggacagccgcccaggccgggaaggcagccgggcccccggagc

SEQ ID NO: 77651 - RNA, 71 nt, Homo sapiens
gcagcgaaggcgaggcaccgccagcaagagcccgagaaagcgggccaccagaagggcagccccggcggaga

SEQ ID NO: 77652 - RNA, 53 nt, Homo sapiens
cccaacggcaagagccgaggagacgagccaaacaaaggccggagacgaagcaa

SEQ ID NO: 77653 - RNA, 75 nt, Homo sapiens
gggaggggacgaaccaggcagcccaaaggagagaacagcacacagaggcgcaaggggaagagaaaagacagaagc

SEQ ID NO: 77654 - RNA, 73 nt, Homo sapiens
cgccccgccagaggaagccgaggccccagcaacgcggaagccgcagaacggagcaacgagagcaaaacaacaa

SEQ ID NO: 77655 - RNA, 76 nt, Homo sapiens
ccgggacacccggaagccaggaaaggagacccacgcaaggagcacccgcgcaaacccaggagcaacagagaaagaa

SEQ ID NO: 77656 - RNA, 36 nt, Homo sapiens
cacagaaaccggccccggcgggccacacccaaaacc

SEQ ID NO: 77657 - RNA, 77 nt, Homo sapiens
gccagggccaccccggcgagagaagagcaagagaccgaccaaaacacaaccgggagccaagaaacagccaagaacag

SEQ ID NO: 77658 - RNA, 77 nt, Homo sapiens
gaagcagaagaagcgaggagaagaagaggaacgcagaagcagacacagcgacacaccggacagcacggcaaagaaag

SEQ ID NO: 77659 - RNA, 32 nt, Homo sapiens
ccggggcccgcacgcggagacgacgcaccaaa

SEQ ID NO: 77660 - RNA, 74 nt, Homo sapiens
caaagcgggacaacgacccagagacaaaagccacgagggaaaccaggcgcccggcacgagaacacgcagagcga

SEQ ID NO: 77661 - RNA, 79 nt, Homo sapiens
agcaagagccgagaaccagcaaccagcaggcagggagagaggggcggaaagaaaagggacacagacgccaggcagccgg

SEQ ID NO: 77662 - RNA, 77 nt, Homo sapiens
gcccagccggcccgcgggggagccccgggagccgcacgagcccaaaaggcagagcgaggagagaagaaggagggaaa

SEQ ID NO: 77663 - RNA, 60 nt, Homo sapiens
accccaacagcaaaccggggcccccccaggacacaggagcaagggaagaccacaacaagc

SEQ ID NO: 77664 - RNA, 79 nt, Homo sapiens
cagcaaaggcccagcaagagccagggcaaaacagcgccccaacaggcccgcaggggaagagacgaccagagggccaggg

SEQ ID NO: 77665 - RNA, 78 nt, Homo sapiens
caggccaggaggcagggaggaaggggggagggggaggagccgaacgagccccagccagggaagaaaacgggcagaaaa

SEQ ID NO: 77666 - RNA, 70 nt, Homo sapiens
gaagggcagaacaccgggaaccgggcccgagggcaggacagcaggcaccggcgaagcacagagaggcgcg

SEQ ID NO: 77667 - RNA, 85 nt, Homo sapiens
gccaccgagacccggaggaggcgaagcgagaggacaggacgcaagagccccgaagaaagagcggcaagggaagagcgacacccca

SEQ ID NO: 77668 - RNA, 75 nt, Homo sapiens
ccaacaggacagcggaggaccaggccggcccagagaagccacagcagcggcaagaacagcaggcggggccgacca

SEQ ID NO: 77669 - RNA, 77 nt, Homo sapiens
agagccggaacgcacccgaacccgaccacccggcggggagcacggagagcaaggcgcggaccaggcgggcgcgacgg

SEQ ID NO: 77670 - RNA, 83 nt, Homo sapiens
aacggaggagaagaaaaagacgacaggggagacaaagagacccgcagcgacaaggaagaagagagggcgaaggaggccacaca

SEQ ID NO: 77671 - RNA, 54 nt, Homo sapiens
aaggaaaacgcggaaaaccgacacaacagagagaagaagaaggaggccgcggcc

SEQ ID NO: 77672 - RNA, 71 nt, Homo sapiens
cgaggaggcaaacgcacagggcgccaccaggacacagggaccgaaggaaacaaaagaaagggcagaagaaa

SEQ ID NO: 77673 - RNA, 82 nt, Homo sapiens
cgcggggggacggcaacggagaaagcaggggcgcaagcgaaaaagagaagcgcagcgaaaagaagagcaccgaggaacggca

SEQ ID NO: 77674 - RNA, 67 nt, Homo sapiens
gaccccccagagccaacacacagaaggaccgcggacaggaaaacaagacaagaaagggaagaaaaca

SEQ ID NO: 77675 - RNA, 73 nt, Homo sapiens
ggcagcccagaccagccgcaggacaggccagccgaccagcacccgcccgacgaaggagaagccgaaagaaaag

SEQ ID NO: 77676 - RNA, 75 nt, Homo sapiens
cggaaccccagccaggggcaggcgagccgggcccccgagcaggagccccgcccgccccagccaccccgcggaagg

SEQ ID NO: 77677 - RNA, 65 nt, Homo sapiens
gacgccggccaccaacgagagccaccgaaggagacgcccgcagccaaggaggccggcgccgagag

SEQ ID NO: 77678 - RNA, 75 nt, Homo sapiens
cgaccacacaccagaaccggaggaggaccgcggagggaacaccgagacgagagggccccaaagggaccagggacg

SEQ ID NO: 77679 - RNA, 70 nt, Homo sapiens
aaaggacgggaagggcgacagcgcaaggagacgaagggaccccgacggagagacaaagaagacggagggg

SEQ ID NO: 77680 - RNA, 82 nt, Homo sapiens
cgacggagggggcggccgggccgcacgagaagagagccagaggggggacgaacccacagccccacacaaggaacgacaggag

SEQ ID NO: 77681 - RNA, 69 nt, Homo sapiens
aaaaaagccgggagacccaggccgagccgagaggcaagacaacacacccagaaggcggacaggagagcg

SEQ ID NO: 77682 - RNA, 81 nt, Homo sapiens
gaggagcagaagagcccaaaaccaacgaaccaaaagcaaccgcgaagagcagccccaaggagggaaaggggggagaggagc

SEQ ID NO: 77683 - RNA, 72 nt, Homo sapiens
cgaaagaagaacagagcaggccaaggaggccccccacaggaaagagcacaacagcggccccacaagccagcc

SEQ ID NO: 77684 - RNA, 65 nt, Homo sapiens
gcaagacaccggacaccgagggcccccaaaagcacagggaacaccagaggcgggaccacgggcag

SEQ ID NO: 77685 - RNA, 74 nt, Homo sapiens
gcagacggaaacaaggcaacagaaagagcaacagcagggcaacaggaacagaggggaagacccaaggaggagac

SEQ ID NO: 77686 - RNA, 85 nt, Homo sapiens
cggcggacgaagaggggagaaggaagcgagaccaacgcaacccaagggcagccccacccacgcacgggacagcgagaggcgggac

SEQ ID NO: 77687 - RNA, 85 nt, Homo sapiens
cgccgccgccccagacggacagccacccaccccacggaagaccagccccagcaggcccagcaccagacgcgaggagccacccgga

SEQ ID NO: 77688 - RNA, 55 nt, Homo sapiens
ccgagaaaaaccgaaagagccagcccgagggaaagcacgacaaacaccgaagcac

SEQ ID NO: 77689 - RNA, 74 nt, Homo sapiens
caccggaggcgaaaaaacaccaacacggaccaaccccgaacgaagccgaggagaagaacacaggacgaaagcca

SEQ ID NO: 77690 - RNA, 80 nt, Homo sapiens
gaacacccgccaaagcagagaaaagagagaccggagcagcgaggagaagagcgacccacaggagcagcgacccgcaccgg

SEQ ID NO: 77691 - RNA, 63 nt, Homo sapiens
gaaggaggaggcacccacaggcgcgggaggagagcaaaggaccaggacacagaccggaaaccg

SEQ ID NO: 77692 - RNA, 85 nt, Homo sapiens
cgacgagccccaccccccaacggacgcccgcccaccgcccgaaccgccggggcccccagcccgccccagacccgagcagacaagc

SEQ ID NO: 77693 - RNA, 50 nt, Homo sapiens
caggacaggagagaaagacggacgccgccagccaccggcgcgaagccaga

SEQ ID NO: 77694 - RNA, 53 nt, Homo sapiens
cccccggaaaaccccccccgagaaacggagaggagaagcaaagggcgaggcac

SEQ ID NO: 77695 - RNA, 81 nt, Homo sapiens
gcgcaccgaaagcccagcagacgcaaggagcagccagagacagaaggaaagccacacaaggaaaagccaaacaaaagaaaa

SEQ ID NO: 77696 - RNA, 73 nt, Homo sapiens
cgcacggaaagacccagaaagccaagacaaaaagccgaggccgccagcgccaagaaaaaaacaaggccaaagc

SEQ ID NO: 77697 - RNA, 72 nt, Homo sapiens
gaccagggccgccgccccaagagagcgaggaagagagaaggcgaaggcacaaaacagagaggcacagagaga

SEQ ID NO: 77698 - RNA, 75 nt, Homo sapiens
cacgggcaccgagcccgcccacgacggagaggagccaacggggcgccgagccgcagcagggccgggcgggggaca

SEQ ID NO: 77699 - RNA, 84 nt, Homo sapiens
aagccaccccgagccgacaagaaggacaaagagacaagccgagagaaagcaagcaaaggaacacgagaaccacgaagcacgaaa

SEQ ID NO: 77700 - RNA, 78 nt, Homo sapiens
gaggcgcgcggggccgaggccgccccgagcgccagaaggagaaacgcagacaccggaaaggaagaccgcccagaaaga

SEQ ID NO: 77701 - RNA, 64 nt, Homo sapiens
ggggaagggccaggccgggcagccgccgacgagcagaggcccccagaagagaaggacaacaagg

SEQ ID NO: 77702 - RNA, 90 nt, Homo sapiens
acggcccgagacacaccaggccggcaggcgagaaaagcgagaccgcggcgaggaccgacaagggaagaaggaccgccggagcgggcacgg

SEQ ID NO: 77703 - RNA, 74 nt, Homo sapiens
cgagagccgcccgggccagcggccgcgcacccccggccggaggcaccagcaacgggccagcggggcgagcagag

SEQ ID NO: 77704 - RNA, 78 nt, Homo sapiens
caaacccggacagggaaagaccaaagcagccaagaagagggaaagaagacaggaaacaagggaaggacgacaaaagag

SEQ ID NO: 77705 - RNA, 76 nt, Homo sapiens
gcagcagcaagaggaaaagggggaagaaaggagacgggggacaagcagaccggaagaccgacggaagaccacaccc

SEQ ID NO: 77706 - RNA, 82 nt, Homo sapiens
cccaggcacccacccccaagaccaggcgggaggagccgaggcccaacaagcgcccgggagcgcgggcagggcccccacgcac

SEQ ID NO: 77707 - RNA, 86 nt, Homo sapiens
ccagggagcgcgaaccgcccgcggaaccacagcccagcacgggaaagccaggccagaagaaggaaggccggggaggggacaggaaa

SEQ ID NO: 77708 - RNA, 80 nt, Homo sapiens
aaggaacccaggcagccggcgcccagaccgcaccaccgacaccaggaacccacccagcggggacccagaagaggcccgca

SEQ ID NO: 77709 - RNA, 77 nt, Homo sapiens
ggacgccccagagaaagcccgccgcaccagcaagcgcgggacaagccacaagcaaaaaacagaaggaagagcgaacg

SEQ ID NO: 77710 - RNA, 58 nt, Homo sapiens
aagacaaaaaaacaggaacgcacagacacagggagggaggccgaagcggcgggaacag

SEQ ID NO: 77711 - RNA, 75 nt, Homo sapiens
ggaaaccagagaagaagagagacggcgaaaccaaaagcaagccgacggggaagcaggccaagaaacaacaaccag

SEQ ID NO: 77712 - RNA, 59 nt, Homo sapiens
aagcaaacggcacaacaagccagaaggggaaggagaacagacaagaagcaacaggaaac

SEQ ID NO: 77713 - RNA, 61 nt, Homo sapiens
ccaagaaacaccaccaacaaaccgccagcaacacccaacacaaagcggaagaacacagaaa

SEQ ID NO: 77714 - RNA, 73 nt, Homo sapiens
gaagaccagagaagagggagacaacccaacaaggacgcaaaacagagaaaagggcgaaccacagccccaagca

SEQ ID NO: 77715 - RNA, 83 nt, Homo sapiens
aacaacaagagaaagacccaggaagcagaagaagcgaggagaagaagagagagacaagagagacaccccaaccgacaaagagc

SEQ ID NO: 77716 - RNA, 74 nt, Homo sapiens
gaaaccacagcgaagggaaaagaagaggccacgcacgggacccagacaaacgaggaaacagaacgcaaccaagc

SEQ ID NO: 77717 - RNA, 61 nt, Homo sapiens
gggcagcagcaggccggcacggcaagaacaaccgcccgaggcccacaaacagccccgagcc

SEQ ID NO: 77718 - RNA, 82 nt, Homo sapiens
caaaagccaagccacgagcggagggcaccgcaggccacggagcagaggaggaaaagaggaagaagagccggaaaagaaccgg

SEQ ID NO: 77719 - RNA, 79 nt, Homo sapiens
cccggcccggccagaaaggacacaggccgaaggcgccggaccgcagggacccaagacgagacacggggcagcgggccgg

SEQ ID NO: 77720 - RNA, 78 nt, Homo sapiens
agcgcgaggaccgcgggggcagggggacgggcagaggggcccggggcagcggggaggaagaggggcccaggacggggg

SEQ ID NO: 77721 - RNA, 79 nt, Homo sapiens
agccgaggcaacagaggaaaacaaacaaacgcaaacgggaacgggaaaccggcaagcagcccagccgagcagccccaga

SEQ ID NO: 77722 - RNA, 81 nt, Homo sapiens
gaccaaccacagacaccacgcagagacacccaggccgggccagcacgaagcccgaacaaccgcgacagaagccagaagcgg

SEQ ID NO: 77723 - RNA, 81 nt, Homo sapiens
gcccgggccagcggccgcgcacccccggccggaggcaccagccgggagggacaggagaacaggcacgaccccaccggcacc

SEQ ID NO: 77724 - RNA, 58 nt, Homo sapiens
gaagaccacacacgggaaacacaaaacaacgaggaaccccagagaggacagaagccaa

SEQ ID NO: 77725 - RNA, 67 nt, Homo sapiens
cgagacaaagcaaaagccggacagcaggacacaaaccaaaacgaggcgaagggaggaggcagcgaaa

SEQ ID NO: 77726 - RNA, 85 nt, Homo sapiens
gcagcgcgggccagagcgcagcgccgagcgcggcccgggcgccacgagccggcggcggacggcaggcaagagaagcacgacccag

SEQ ID NO: 77727 - RNA, 78 nt, Homo sapiens
gggagaggcggccagaagaaaacgaggggcggaacacccgccaaagcagagaaaagaaagggaacacaagaggaaaca

SEQ ID NO: 77728 - RNA, 78 nt, Homo sapiens
acccaggccccagagccgcgaggaggagccgagaaccggagccccgccaggaacagcgagggccagccccgaggccca

SEQ ID NO: 77729 - RNA, 71 nt, Homo sapiens
agaccaggaagagaaagagaaaggacaagcaggaacccccagcgagcaggcgacccaaaagagcgaaggaa

SEQ ID NO: 77730 - RNA, 99 nt, Homo sapiens
aaaggcaggggcgccagggcaccagacgggcgggaaagagaggcccgacccacagcggggccgggccccgaccacccagagaaaggaaaggagccagag

SEQ ID NO: 77731 - RNA, 75 nt, Homo sapiens
cggaaggccggggagcgcggcagcgggacccgccggaaggcgagcacagacagcgaacccacccaacacggcaaa

SEQ ID NO: 77732 - RNA, 77 nt, Homo sapiens
cggacggcgggaccacaagacaacgcggagcggcgaagagcaaccaggacaaaaaggacccgacagcacacccccaa

SEQ ID NO: 77733 - RNA, 86 nt, Homo sapiens
gagccaagaaaaaaagagcggcgggaaaagaaagaacacgagcgaagggaagggagagcgaaacgagaacccaggacaagaaacag

SEQ ID NO: 77734 - RNA, 73 nt, Homo sapiens
gcagaacgcaggaggagaacgacagagacggcagaaaggaaacacgaacgaggaaaaaaagaagaagcagagg

SEQ ID NO: 77735 - RNA, 57 nt, Homo sapiens
cgcccagcgcgaagggaccaggcaacaggacaacgcgggcaccaccgagcaggccag

SEQ ID NO: 77736 - RNA, 62 nt, Homo sapiens
ccgaagggaaggccagcagcgcgcggagaagaacggggagccaggggagccgcgcagcacca

SEQ ID NO: 77737 - RNA, 64 nt, Homo sapiens
gcaggggaaaaccaaggggcaaaccaggcagcagggagaccagaccaggacagaccggcaggag

SEQ ID NO: 77738 - RNA, 70 nt, Homo sapiens
gacaggccgcccgcgacagaaccaccaccaaaaagccgggaacgacacccaggacccccggggccaacac

SEQ ID NO: 77739 - RNA, 38 nt, Homo sapiens
gcacccacagagcgcccacaggacaggacaacaacacc

SEQ ID NO: 77740 - RNA, 74 nt, Homo sapiens
cggaccagcagagggccgacggccagagagaaggcgcgagggcgccacaccaaagcacgcagcacaagcccccg

SEQ ID NO: 77741 - RNA, 113 nt, Homo sapiens
agaaacaaacccaagcagaaggcaaacaggaagcacaaagggaagaggggcagcccagaaaagaacaaccggaacagcccagcgcagccccagcggacgacgcagaagacagg

SEQ ID NO: 77742 - RNA, 59 nt, Homo sapiens
ccgggcacccccaggggaccaacccaggggacgagaacaagcaggcgcgaccgcaacgc

SEQ ID NO: 77743 - RNA, 69 nt, Homo sapiens
aacacccccaccggccaggcgagaaaggcagcgagacgacgggaccgaaggaccccgccagagacaacc

SEQ ID NO: 77744 - RNA, 77 nt, Homo sapiens
ggacagaacaacaacacacagaaggcagggagggaggggaaagacccacaccaagaggcccaggagaaaaaggaaga

SEQ ID NO: 77745 - RNA, 53 nt, Homo sapiens
ccggccgagcgaacccgagggaggccggaagaaaacggggagcccgaggcaac

SEQ ID NO: 77746 - RNA, 79 nt, Homo sapiens
agcacagagggggacccagcaggggcgaggcaaggaggagaagacgaaagaggccaggaggagcgaggaggcagcgagg

SEQ ID NO: 77747 - RNA, 85 nt, Homo sapiens
cgggcagacaagagggcccgcaggcgagaaacggaccaccaccgaaggaacggacaacaaggcaaggaaggcagggccggaaaga

SEQ ID NO: 77748 - RNA, 75 nt, Homo sapiens
ggcacccgcacccggggacaagcgcgggaacggcgcggaagcccggaccaagagacgaggaaaaccccacccaca

SEQ ID NO: 77749 - RNA, 69 nt, Homo sapiens
ccagacacagagcaggaacgcagccggggacaccaaacaggcaccgaccgcacgagcaacccggaagag

SEQ ID NO: 77750 - RNA, 87 nt, Homo sapiens
cgcccacggcagcgcagcagcccaacagcacagggagccgcccccaagcacagcccaagcaaacacagaaggagcgaaaagacagca

SEQ ID NO: 77751 - RNA, 83 nt, Homo sapiens
gcgggggccagcgccccgaggagaggcagacagggccaggccgagggcccgcccggccccaggagaagaaccagccgcagagg

SEQ ID NO: 77752 - RNA, 79 nt, Homo sapiens
gagaagcagaaaagaaagaaccgaccggaaaacaagaccgcaaaagggggagagcacaaggcgaacaagcccccaggcg

SEQ ID NO: 77753 - RNA, 73 nt, Homo sapiens
agcgccgcaccccagagcccacacccgcagagcgaggaccggaaggggacagcacggaaaagagccgccccgc

SEQ ID NO: 77754 - RNA, 85 nt, Homo sapiens
aagcgaaagaggagaagagcggcaaaaaaaaaaaaaaaagccaaaaagaaaaagcccggagaaccagggcagcacacccccgccc

SEQ ID NO: 77755 - RNA, 88 nt, Homo sapiens
ggcgcccgggagccggggaccggcgcagcggcggaggagaccccaaggagcagaaggggccaggaggcgccagggggacccacgaacc

SEQ ID NO: 77756 - RNA, 74 nt, Homo sapiens
caaacaagagaacgggcccacacaacccaggcaaccaacaggaaaccagacgccgccacagagaaggaagacaa

SEQ ID NO: 77757 - RNA, 76 nt, Homo sapiens
gggacacgggcccacaggccccaccgaggcaccaccaaccaaagcggcaacccgacagaccgaaagggaagggaag

SEQ ID NO: 77758 - RNA, 68 nt, Homo sapiens
gaacagccccaacaccgccacacggcccgacaagaagggggagaagggcgcagagacccccgccaagg

SEQ ID NO: 77759 - RNA, 81 nt, Homo sapiens
gagcgaccgcgagaccacaagaggggaagcgacagagaaccacagacggaggcggccacgcgaaggggcgccgaaccgagc

SEQ ID NO: 77760 - RNA, 64 nt, Homo sapiens
cgcgaacgacaaccagcccgcccgccgacgcccgcgccggcgccccgggcaaccagccagaggg

SEQ ID NO: 77761 - RNA, 71 nt, Homo sapiens
acgcggaggcagcaccaccgcccgggcaaggcggccagcaagacagcgacccaagcagcagcggaaagaac

SEQ ID NO: 77762 - RNA, 73 nt, Homo sapiens
agggcccggggccacagggacaggggcaccccggagccgacggcggagcacggagaccacccgcacccccgag

SEQ ID NO: 77763 - RNA, 78 nt, Homo sapiens
cgagccaaggagcacaacgggcagggacaggggccgcaaggccaggcgcgcagaggcacccaacggcacagaccccac

SEQ ID NO: 77764 - RNA, 59 nt, Homo sapiens
gcaacggagaaaacccggaaccgcgacggcggcagcgggggagagcagcggcgccagcc

SEQ ID NO: 77765 - RNA, 86 nt, Homo sapiens
acgagagaaacccacgaagacgcgcggagaaagagaccaccgaggagcccacgaaagggccagcagcccccagaagaagccagaaa

SEQ ID NO: 77766 - RNA, 57 nt, Homo sapiens
gaggaagcaaaccacagaacaggcggcaggaaacaaggaacagagacagacccgggg

SEQ ID NO: 77767 - RNA, 74 nt, Homo sapiens
agggaaaccgggcgcgcggaggaagcgaagccccccagggaaagcccaaccagcagacacgccaaaacacagag

SEQ ID NO: 77768 - RNA, 76 nt, Homo sapiens
cccaggccccacgagcggggccagagaggcacacgcagccagaagcaacaagagaagcagaaaaacagacacgcaa

SEQ ID NO: 77769 - RNA, 72 nt, Homo sapiens
cagaagaggaacaagggggggaaacccaccgggaaaaggcacgaagggcaccggcacggaccaccccaacac

SEQ ID NO: 77770 - RNA, 75 nt, Homo sapiens
agccagacaagggacaagggcaaggggggccacaccgaaccagcacgggaggcgaggcagaagaacacgaggaag

SEQ ID NO: 77771 - RNA, 63 nt, Homo sapiens
acaaagaaggccaaagcaggaaccaggacacagaaagcaacgcggcacaggcaggaacgcagg

SEQ ID NO: 77772 - RNA, 80 nt, Homo sapiens
ccaccccgagcaggccgcggcggagggaccggcccgcgaagggaggcccgggccacgccccccgaccaccaaccccacag

SEQ ID NO: 77773 - RNA, 75 nt, Homo sapiens
cagagcaccaacagccccaacccagaaagcagaggccagagcggagacagacgaaaagcagcgcaccagaggacg

SEQ ID NO: 77774 - RNA, 48 nt, Homo sapiens
aaacgggccccaaggcgaccgggaaacaagccacacccggggaaaccc

SEQ ID NO: 77775 - RNA, 69 nt, Homo sapiens
ccgccagggaaagggccagagcccaaaggcccagaccaacgggccggacagacgacacagccagaagac

SEQ ID NO: 77776 - RNA, 75 nt, Homo sapiens
ggccaggagggcggcgaggccccccggggggagggggcgccacaggcagacggcggggcccggcaacacgcccac

SEQ ID NO: 77777 - RNA, 72 nt, Homo sapiens
agccaaggagcgccgggaacaaaaccagcacccaaggcagccggaaacgaggcagcccgccaaaaaggaaaa

SEQ ID NO: 77778 - RNA, 75 nt, Homo sapiens
ggaacaagagcaagaacaagggacacaacgcgccacgaaggccaggccagggaggcgggcacgaaaggaaagccg

SEQ ID NO: 77779 - RNA, 125 nt, Homo sapiens
acaaccagcgccaggagagggcaacgggaagaccaggaaccacgaacagagcccacgcgcaccaggccgaaaaacgagaaagggaacgaaccgaggaacccggccccacagggcagggggacagg

SEQ ID NO: 77780 - RNA, 79 nt, Homo sapiens
agcagagcaggaaaacgaagaaggcaaaaccaagaggaaaagaggaaagcgaaacacacggaagaaggcagacccagca

SEQ ID NO: 77781 - RNA, 74 nt, Homo sapiens
aggagcgcccgaaggaacggaaaccacgaacacagcggagaggggccagggcaagcgaaaccaggcccaaaaga

SEQ ID NO: 77782 - RNA, 83 nt, Homo sapiens
gacggcccaaaaccagccgacaaagagggggcccaagaagagcccaagagcaggacgcaagcagaaagcaaagaaaagagaga

SEQ ID NO: 77783 - RNA, 114 nt, Homo sapiens
gcaggggggccacaacaaaccaaggccaacagccggaacgcgagaccgggagacggcaggcccgacaagagaacagaaccgacgggacagcaagaaagcaacagggaagagaag

SEQ ID NO: 77784 - RNA, 61 nt, Homo sapiens
gagccagagccagggaacggaggagcgagccacggcggaagcaggccggggaccaagggga

SEQ ID NO: 77785 - RNA, 38 nt, Homo sapiens
ggcccacaaaaccaaacaaagaaaaggccgaggacaga

SEQ ID NO: 77786 - RNA, 71 nt, Homo sapiens
gagggacaacaaaacaagacgcccggacaagaggccgggaacgggaaacgcgcgccgagaagccacccgcc

SEQ ID NO: 77787 - RNA, 78 nt, Homo sapiens
agcgagcgagggggggcgcgccggaaaccggagcgcgcagcagaaaaacaaccaccagcgagcaaaaaggcaaagacc

SEQ ID NO: 77788 - RNA, 68 nt, Homo sapiens
ggggcccagacaccggccccgcagaccgaaggagaagaaggagaaggggaggagaaggcaagccggaa

SEQ ID NO: 77789 - RNA, 85 nt, Homo sapiens
agaaagcagcccaaggggaggagagccacgcaggaccacagcgcagcaaagaacacagagacaagaggcgcaagaagaaccagac

SEQ ID NO: 77790 - RNA, 116 nt, Homo sapiens
acagcgccgcagaggaccaaggaggacccacggagaacaaaacgcaccggaaagagagcaccccagccaagggaaggaccaggaagcaggcaaggcacacgcaaagcaccccgagg

SEQ ID NO: 77791 - RNA, 72 nt, Homo sapiens
gacgaaggggcgcgaaaccaagcgcggcccagaaggggcaagaagaacaggggccgaccaagcagaacccga

SEQ ID NO: 77792 - RNA, 75 nt, Homo sapiens
gcagcccggcggacgccggcacagaacacccggaagcgccgaacaaaaccggaggcccgggccacacgaaggaaa

SEQ ID NO: 77793 - RNA, 71 nt, Homo sapiens
cagaaagacagcaggcaaaacaggacggaaggcgaccacaccaccccagacacggccgaccgccaagcaca

SEQ ID NO: 77794 - RNA, 72 nt, Homo sapiens
aggagaaagcaaaggcgccgaagcgcacgaccccgacacccccaagggcaaagcaaaacagacggcaaaacg

SEQ ID NO: 77795 - RNA, 53 nt, Homo sapiens
cagagaacaagcaccaaagcgaaggagggccgcaagccaggacccgaaaagcc

SEQ ID NO: 77796 - RNA, 70 nt, Homo sapiens
ccgggaaaagaccacccggcgacaccaaagagcaccgcgaagagcaaccagggagcacagaaacggccaa

SEQ ID NO: 77797 - RNA, 60 nt, Homo sapiens
gggaagaaggcaagaacccaaaaaaagacagccagggggacaggaaaacaggaggcagag

SEQ ID NO: 77798 - RNA, 77 nt, Homo sapiens
cagaaaaagccaagccaccgagacccggaggaggcgaagcgagaggacagaaggacagcaaaaggagaaccagggag

SEQ ID NO: 77799 - RNA, 81 nt, Homo sapiens
ggagcgagagcgaggccgagcaacaccgcgagccgcgcggcgcggggccccgcggcggaggagccaacaggaccgcgggcc

SEQ ID NO: 77800 - RNA, 83 nt, Homo sapiens
cgggcacagcagagaccaaaggcagggcaaggaaacggccacaagacccccggacaagcacccaagcaccaggcggacacacg

SEQ ID NO: 77801 - RNA, 82 nt, Homo sapiens
gccgcgccgcgcacggccagcggacaccggccccccgccgcccaggagagaaggccagaccgaaccacgaaggagacagcag

SEQ ID NO: 77802 - RNA, 79 nt, Homo sapiens
cagcaccaaccaaaacccggcaaagaagaaagcaccaccagagcaccaaccgcacgccgacaaaaaggaacagagaaaa

SEQ ID NO: 77803 - RNA, 71 nt, Homo sapiens
cagcaccggagaggaggcaaggccacaagaagcgagggcagagcgagggggacacacagaacagaagagac

SEQ ID NO: 77804 - RNA, 79 nt, Homo sapiens
ccgccggagggccgaaggggaggcagacgccgcccggcccagggcagcgccagagcacagcgaaacacagacaacacaa

SEQ ID NO: 77805 - RNA, 39 nt, Homo sapiens
caaagagggaccgaccggccagaaaaccacaaccgagcc

SEQ ID NO: 77806 - RNA, 83 nt, Homo sapiens
gagcagggaaaggagccaggccagagaagccacaaaagggggcacaagaacgaacagggcaacaacggaaagaaaccaggggc

SEQ ID NO: 77807 - RNA, 74 nt, Homo sapiens
agagcaacggaaacgacgcccagaaaaaggaggaccggacagaaggcaaaaaccagcagaccagccaaacaaac

SEQ ID NO: 77808 - RNA, 73 nt, Homo sapiens
ccggcggaagaaagggagaaggagccgacacggggcccgagagggacgcaacccggccagagaggcaaaccca

SEQ ID NO: 77809 - RNA, 80 nt, Homo sapiens
gcagcccccgccgagccgccccgagcccgccgccacacccgagaacagccagcaaagacaagagcagaccagcagccgca

SEQ ID NO: 77810 - RNA, 67 nt, Homo sapiens
ggggaagaccgcgcccgcggagagcccaaacaccaccaccaaggaaaaagaacagaggccaacccga

SEQ ID NO: 77811 - RNA, 38 nt, Homo sapiens
accgcaaggcgggcaccggcagagcaccaagcggaaaa

SEQ ID NO: 77812 - RNA, 75 nt, Homo sapiens
acaagcgggccaacgagaagaaaagcacaacaggcacaaagagagaaggaacacccacagggcagacagagaaag

SEQ ID NO: 77813 - RNA, 70 nt, Homo sapiens
aagggaagccagaagaggaggaaaaggccacgggaggaagacccaaaagaaaaaaacagaggcgggaaac

SEQ ID NO: 77814 - RNA, 67 nt, Homo sapiens
agcagcacgggcaagcgggcagcgaagagagaggacagaacaaggccggacagagcaaggagcacag

SEQ ID NO: 77815 - RNA, 88 nt, Homo sapiens
cccgaggaccaccggccaaggaaaccccagggcccgcccaggacccccaagccgccgcggacgcaggaggcggagcccgagaacaacc

SEQ ID NO: 77816 - RNA, 45 nt, Homo sapiens
ggcgccggcacccaacacggcccggaccaagagacgaggaaaacc

SEQ ID NO: 77817 - RNA, 66 nt, Homo sapiens
ggccgccccggggccgggcgcacaccaggaacagaaagggccgcacgacccgagacaaacaggagg

SEQ ID NO: 77818 - RNA, 56 nt, Homo sapiens
gcacgagcggcaaccgaaagccagcagcggagaggaggcagagagccccgcgacga

SEQ ID NO: 77819 - RNA, 59 nt, Homo sapiens
cggaagcgagggcacgggcggcagcccgagaccgcagcaggacacaaccagagggaagc

SEQ ID NO: 77820 - RNA, 81 nt, Homo sapiens
cgcggagggagccagccaggggcagccggccgggccccagaagaggcaccggaaaagacccggacgacaaaacgaacgagg

SEQ ID NO: 77821 - RNA, 80 nt, Homo sapiens
agagcaaacaaggagcagacggccgcagcaaaggacaccagaggaccagaacccacgagaaacagacgagccaaccagac

SEQ ID NO: 77822 - RNA, 74 nt, Homo sapiens
cagaagaggagagagagcaagagaggaagaagaacgacccgcccggggcagcagagcgcagggagaagaaacga

SEQ ID NO: 77823 - RNA, 72 nt, Homo sapiens
acaagaggaacagcgggcccaaggcaagcagaaccagcaaacggcaagagcaccaacaagacaaggcacacc

SEQ ID NO: 77824 - RNA, 99 nt, Homo sapiens
ggagacgagaggacgggaccaggcgaagcggccgagcaggcgagcgaacgacggcgccggcgaaagcaacgaagggacgccagaacaagagaaggagag

SEQ ID NO: 77825 - RNA, 64 nt, Homo sapiens
gcagcgaacacgacacagggcccagcacaacacaaaagcggagccccggccgaaaacccggggc

SEQ ID NO: 77826 - RNA, 92 nt, Homo sapiens
gaagcacgacacagaaggggaggggagggaaaggcccaggaaaaagggggcccgggccgcagggggaagaaaaccccacgcaggagacgcag

SEQ ID NO: 77827 - RNA, 74 nt, Homo sapiens
agagacgagcaacccccgggaagccaagccgcagcgcggagccagcgcccggcaaggagcgagcgggagacacc

SEQ ID NO: 77828 - RNA, 77 nt, Homo sapiens
gacaggacgaggcgcacccccgccaggcaaaaagcacggcacccaggccggaggccagggagcgggaggggccaacc

SEQ ID NO: 77829 - RNA, 59 nt, Homo sapiens
gaagaagcagcaaccgcagaagcagcggcaaccagaccggggcaggggaagaacacgga

SEQ ID NO: 77830 - RNA, 90 nt, Homo sapiens
caccgccgccgccacgccaccaggagccgagcccggaagccggcaagacaagcgaggcgccagccgagaaaaccacgacagccaaaacca

SEQ ID NO: 77831 - RNA, 56 nt, Homo sapiens
cccggagagaggagagaaaagccacggacccgccagggggggacccagagagggcg

SEQ ID NO: 77832 - RNA, 63 nt, Homo sapiens
accgaagcccaaagcaggcaggcggaaccaacgaaagccaaagagagggccgaaacaaacaac

SEQ ID NO: 77833 - RNA, 72 nt, Homo sapiens
aaagccggagcgaagccaacccccgagcagccgccacaagcgaaggaagacacgccgcacgcgaggaggggc

SEQ ID NO: 77834 - RNA, 78 nt, Homo sapiens
cagccagccgccgaacagagcccgcccagggaggaggcggacacgccaggcacgaaccccagcccgccgggaagcgcc

SEQ ID NO: 77835 - RNA, 47 nt, Homo sapiens
cccccgacgggacgcaggagacagacgacgagggccgggcacgcccc

SEQ ID NO: 77836 - RNA, 71 nt, Homo sapiens
gacgggaccaagacaccggccaacgaagggcccagcacgacagagacccggaaagcgagcagcaaagaccc

SEQ ID NO: 77837 - RNA, 80 nt, Homo sapiens
gcccggccccaggcgcccaccgggccgcaccccggcccgccccgcccagcaccgccacagcccgcacccccagaacccgc

SEQ ID NO: 77838 - RNA, 41 nt, Homo sapiens
cccgcgcacaacaggcggcgggggccggccccagcccagac

SEQ ID NO: 77839 - RNA, 86 nt, Homo sapiens
gcgccccggcaccacaagcaggacggcgcggacggccccccaggggccccagagcccgcgcgacggaaggacaccagcacaagcgg

SEQ ID NO: 77840 - RNA, 85 nt, Homo sapiens
gcccccgcaccagggcaccgcaggcggacgcgcacagaaaggacacccagagcccaggagaacacgagacccgcacaaaaccccg

SEQ ID NO: 77841 - RNA, 78 nt, Homo sapiens
cagcaaaaagacccaccaaggaagcagcggccacgccagcgacgccgccggaggagagcagcaggaggacaaaccagg

SEQ ID NO: 77842 - RNA, 75 nt, Homo sapiens
cgcacaagagaccgggagagaaggccagcgacagccgggaggaaagagaaaggagaccacaagaccccgcgccac

SEQ ID NO: 77843 - RNA, 82 nt, Homo sapiens
cccccgcccacaccccaagcacccaggaaccggcaacaggggcaaaggagcagagaacgacaagccacacgaggacagcccg

SEQ ID NO: 77844 - RNA, 76 nt, Homo sapiens
gaaagcgagcagagcccgcgaacaagacaagagcagccccagcaggaaaaccaaaccagacaacaggaggagaccc

SEQ ID NO: 77845 - RNA, 81 nt, Homo sapiens
agcagccccagacggaggggccagccagccagcagcgcaaggaaccaccaggaacgaacccaaggacgacgggaccaccag

SEQ ID NO: 77846 - RNA, 66 nt, Homo sapiens
accaaaaaaccaagaacggagaacgaaaaacccaccagcaggagggccaggagcaagagagaccca

SEQ ID NO: 77847 - RNA, 56 nt, Homo sapiens
cgggagcggcggcgaacagcgcgacacaggagagaaagacgaccgccaaccaggga

SEQ ID NO: 77848 - RNA, 55 nt, Homo sapiens
cacaggaagaaaagcaggagggcaaggagcggggcgacagcaagaaggagccagc

SEQ ID NO: 77849 - RNA, 66 nt, Homo sapiens
cagcaaaaaccaaaaacaccgcgcaagggaacacaacgcccccgagaccgaggcacacgggcccga

SEQ ID NO: 77850 - RNA, 74 nt, Homo sapiens
ggacgcagaaccgaaccggggaggcaggaaaaagacacaagacagcaggaccgggaccagcccgaagaccccaa

SEQ ID NO: 77851 - RNA, 79 nt, Homo sapiens
gagcgagggcgccgccagcacgcgcacgccagcaaagacgccgaggaaagcggggaagcgaaggcagaaacacccacaa

SEQ ID NO: 77852 - RNA, 56 nt, Homo sapiens
caccagagcccaaaacaaacagacagaagaaggaagggcaagcggcggagaaacca

SEQ ID NO: 77853 - RNA, 77 nt, Homo sapiens
gccagggcacagcccaaaggccaacccggagggcccagcaaaaggaacggcggaaaaaggaccaggaacagcagcca

SEQ ID NO: 77854 - RNA, 77 nt, Homo sapiens
ggacgggaccaggcgaagcggccgagcaggcgagcgaacgacgcgaaggaagagccaggaaagcaaaagggcacccg

SEQ ID NO: 77855 - RNA, 77 nt, Homo sapiens
agcccccggagaacaagacgcccaccccacaagggcccggccccaccaaaccgggaggggacacaagaccagaaagg

SEQ ID NO: 77856 - RNA, 84 nt, Homo sapiens
ggggcgccaggcgaccggagcgaacgccacgccgggaagacgaccccgacgcaggccaggagccgcggacagaagccgagcacg

SEQ ID NO: 77857 - RNA, 69 nt, Homo sapiens
cagcagcagcaccaaagaagaggcgggggacgggacccagaggaaggcacaggcagggacccgggcagg

SEQ ID NO: 77858 - RNA, 59 nt, Homo sapiens
gcaaaagaacacggccacagagcaacacaccaggaagcagagcggcaacaaaaacgaaa

SEQ ID NO: 77859 - RNA, 83 nt, Homo sapiens
gaaaaccgaagaagaggcccggaccaacagagagaaagccagaaaggagcagcaggagaaagcgcagaacagacgcaggaacg

SEQ ID NO: 77860 - RNA, 73 nt, Homo sapiens
cggacggacccagcacgaggaggcgcgaggagagaacaggccaagacaaccgggaaagcagcccaaggagggc

SEQ ID NO: 77861 - RNA, 68 nt, Homo sapiens
gcccaagcgaaaaagcgggaacgcaggacccaaagcgggagggcacaggcacgaacagacagagaaac

SEQ ID NO: 77862 - RNA, 71 nt, Homo sapiens
ccccagccgaccgagcccaggagcgccacgcgcggaaggcagcgcccagcagcgcagagacggggcacgga

SEQ ID NO: 77863 - RNA, 67 nt, Homo sapiens
accagccgggcacaggaagcgaaagggggcagacagaagagagacgagcaacccacgcaaaaaggag

SEQ ID NO: 77864 - RNA, 79 nt, Homo sapiens
ccagagcgcccggccgcggccagcggagcccgggcggggcaggagccggaacccagagaagacgaagccgggaacggag

SEQ ID NO: 77865 - RNA, 61 nt, Homo sapiens
gaaggggcccacagcacacaagggcaccacgccagcccacagcagccggacagaaggcacc

SEQ ID NO: 77866 - RNA, 107 nt, Homo sapiens
aggagccgcgacggcggcgcacaggacgagggcgaaaaagagcggagagagaagcaagggccaaaagagaaacaggcacgacaaccaaagcggacccaggaaacacc

SEQ ID NO: 77867 - RNA, 80 nt, Homo sapiens
aagaccgcgacacccgaagcgagaaagcaccacgcgcgcccgagcggacaagagcagcgggagcggagagaacggacccg

SEQ ID NO: 77868 - RNA, 75 nt, Homo sapiens
acgcaggcacccaggggccgccccaggacacgccggacccccccggacgacgcagcacagagaggaaacgaggaa

SEQ ID NO: 77869 - RNA, 73 nt, Homo sapiens
cagacccaagcggagggcgacacgagaacaaaaggccaggggcaagcaccacccgagcaagagagcccagagg

SEQ ID NO: 77870 - RNA, 63 nt, Homo sapiens
ccgggagcagggaccgcggcccgagggcaacacccgagaccggcaagagcccagaggaggaaa

SEQ ID NO: 77871 - RNA, 59 nt, Homo sapiens
aagagacaacgggaaacaacgagggcacacgagagcacgaaaaagagaaaaagaagaag

SEQ ID NO: 77872 - RNA, 79 nt, Homo sapiens
gcccggggccggggagaggcggaccggaccacggcgcggagcgccgccagaggagaaggaagcagaacacagagagcca

SEQ ID NO: 77873 - RNA, 81 nt, Homo sapiens
gccggaaagcacagcaagggaaagaacaggaagggaagacccgagaaaaggcagaggcaaaaacaagcaaaccccagacag

SEQ ID NO: 77874 - RNA, 53 nt, Homo sapiens
aggcacagccgaaaggagaggaagagacccagacgaagagcgcacagaaagag

SEQ ID NO: 77875 - RNA, 63 nt, Homo sapiens
aaagcacacacacaccgcaaggcggggacgagagccccggcacaaacggaccaccagaaagca

SEQ ID NO: 77876 - RNA, 76 nt, Homo sapiens
cgacccggaacagacgggccccaagaggccagccccccgagggcaacgagaaagagacggggaagggggaacggag

SEQ ID NO: 77877 - RNA, 77 nt, Homo sapiens
gggcggggacgaccgggggcacccgagcccagcccacaccgggggcacgggccacagcgggcgccacccagggacgg

SEQ ID NO: 77878 - RNA, 75 nt, Homo sapiens
cccaaaaggccccccgcgcaggcacacagcaaagggagccagagcacagagcaccacgaacaaacagaaagcgcg

SEQ ID NO: 77879 - RNA, 83 nt, Homo sapiens
cggcgcaaccaaacacacaagcagagaaggaaaaggcaaccgaccaaacagaccgacagccagggccgccgggccccccccag

SEQ ID NO: 77880 - RNA, 70 nt, Homo sapiens
agccaaccaggggcagaacaggcccgggccaaaacagcaacccaaacacagaagagacaaggccacaggc

SEQ ID NO: 77881 - RNA, 77 nt, Homo sapiens
ccagggccgcaaaaacacagggagagagaagggcgcccaaggagacaccagccgccagcccgaccggaccccggggc

SEQ ID NO: 77882 - RNA, 79 nt, Homo sapiens
gcgaggaagaagaggacgacgacgacgaggaagaggaggcgaggcaaggaggggcaggagcacacccccacaggacccc

SEQ ID NO: 77883 - RNA, 75 nt, Homo sapiens
caagcacgaccaaagacggcagaaccacagcaaagaacaacaggagggccggagagcaggagcggaggcacccac

SEQ ID NO: 77884 - RNA, 74 nt, Homo sapiens
agccagaggcaacaaggcggacaagagaagccgccagaaaccaccaaaccaaaaccagccagcggagcgagggg

SEQ ID NO: 77885 - RNA, 68 nt, Homo sapiens
gccgccgccaccacccacccggacacagcaggaggcaaagggaccccaagaaaccaaagggcaagagc

SEQ ID NO: 77886 - RNA, 42 nt, Homo sapiens
gacggaagaaagggcagccagcagggaaccaggaggagccgg

SEQ ID NO: 77887 - RNA, 78 nt, Homo sapiens
caggcgccgagcgaccaggagccggggcggcgcaggaggagccgaggcgagccaacagcaccgagacgacgggaccga

SEQ ID NO: 77888 - RNA, 80 nt, Homo sapiens
aaaaaggccagaagaaacagaacccggcccaaaggggaggccgggccccaccagcagccggccccaggcccgagccaggc

SEQ ID NO: 77889 - RNA, 78 nt, Homo sapiens
gagccgccggagagcccaggagcaggggagacagagacacgagaccagaagccaagaaacgaggagagccaccaccaa

SEQ ID NO: 77890 - RNA, 35 nt, Homo sapiens
ccgacagccgcagaacaggagccacgcgcccaggc

SEQ ID NO: 77891 - RNA, 80 nt, Homo sapiens
gaaaagcccgcacaaagcgaagagagagaaacgaaaaagaggaaggagcgagggagcacaagcagcggaacggaaccaca

SEQ ID NO: 77892 - RNA, 40 nt, Homo sapiens
aagacagcacgagcacagaaaggaggcgccagcaggaaac

SEQ ID NO: 77893 - RNA, 73 nt, Homo sapiens
gggaagaccggaggggacgaagaacggcaacgagggggaaccaagggcggacagcccaacgacaacaaagaag

SEQ ID NO: 77894 - RNA, 85 nt, Homo sapiens
acaaacaccacgagaaccgcagcccacacgaaaccgggagaagccggccaggcaggcacaccccaccacaacgccacacgaccag

SEQ ID NO: 77895 - RNA, 60 nt, Homo sapiens
accacaagaccgaccaggaaaagaacgccaacgaagccaacgcaaagcaaagcgagcccc

SEQ ID NO: 77896 - RNA, 63 nt, Homo sapiens
agcccgcagacagcagcggggaaaaacaagagcagacagagacccaccaaggggggaaaagga

SEQ ID NO: 77897 - RNA, 71 nt, Homo sapiens
gaaacgccaaaacaccagaaccaaccgcgagacgacgggaccgaaggaccccgccagagacaaccgagcgc

SEQ ID NO: 77898 - RNA, 74 nt, Homo sapiens
cagccggacaacacgcacggaacaaagccaaaagcaaacgaccaaagacaggaagaaaccaaaagacggacccg

SEQ ID NO: 77899 - RNA, 53 nt, Homo sapiens
cggaaaccccgcacagcccagaagcccgaggaaggaagggaacacggacgacg

SEQ ID NO: 77900 - RNA, 39 nt, Homo sapiens
agacaaggccaggagaggaacaggagcagaagcacaagc

SEQ ID NO: 77901 - RNA, 74 nt, Homo sapiens
acacgcagaacgggcggacgggcgcccagccaggcgcgggcacagggagggcggaccacccaggaggagggagg

SEQ ID NO: 77902 - RNA, 77 nt, Homo sapiens
gcacgaagaggcggcgcgaggacgggcccgagcgcgaaaacggggacggacccaggccaggaaagaaagaaccgcca

SEQ ID NO: 77903 - RNA, 63 nt, Homo sapiens
gggccccacagagagcccggcagcgacaagcccaggagaaaccagcggcgcaccgcccaacaa

SEQ ID NO: 77904 - RNA, 89 nt, Homo sapiens
ggagcagccgaaggcgaccaagacgcggcccaagggcccggcggcgcgagcaggaaggagaagaagcaggcacagaccccaagaagacc

SEQ ID NO: 77905 - RNA, 69 nt, Homo sapiens
ggcagggaccgggggcgccagggaagcgggaggcaggcagccagaagcaaacaggggcaggaaaaccca

SEQ ID NO: 77906 - RNA, 82 nt, Homo sapiens
ggagaaggaccaagaaccaggagccgcccggcaaagcgaaagcgcaggaccgaggagaaggagccgccggagcagccgcagc

SEQ ID NO: 77907 - RNA, 74 nt, Homo sapiens
aagaacggcgacagacaagaggcgaagggggagaagggaagcgccaagaagcaacaagcacaggaggagacagc

SEQ ID NO: 77908 - RNA, 75 nt, Homo sapiens
gaggaccagaacacggcagacgccaaaccaccggccaggaggcacaggacgcgacgccagacgaggccaccgcaa

SEQ ID NO: 77909 - RNA, 41 nt, Homo sapiens
cagacccgaacagacaggcaccgacgagagggcgcaccgcg

SEQ ID NO: 77910 - RNA, 86 nt, Homo sapiens
caggagcggcggccaggccagacccgaaggccaggagacccgaccccaagaaccaaaacccgggcagaagaggagaggaggaagca

SEQ ID NO: 77911 - RNA, 80 nt, Homo sapiens
ccaaaaggcaaccaaccgggagagacccagggaaccaccaaacgccacagaggcgcacaagacacccacagcaaggagag

SEQ ID NO: 77912 - RNA, 72 nt, Homo sapiens
cacagaagagcccccacaacggggagaacagcccaaaaaagaacaaaaagagccggagccaagacagccccg

SEQ ID NO: 77913 - RNA, 75 nt, Homo sapiens
agacacaaggacgcgaggaagggccagaggagaagccaaaggccgggagaacaaaacgcacaagcaggagcccca

SEQ ID NO: 77914 - RNA, 69 nt, Homo sapiens
aggagcagagacgccggacagaacacagacggcccaaagaacaagagggaagaaccagaaccacagcaa

SEQ ID NO: 77915 - RNA, 74 nt, Homo sapiens
aggcgaggcaccggaacagacgcaggaagggccaagaaacagaggagagcccagacgcgcaacggagcaaggag

SEQ ID NO: 77916 - RNA, 79 nt, Homo sapiens
gaggcacgaccccacccccgaggcccgaccgaacaccagcaggaaaaaagagcggcagaaggccaaacggccgagcagg

SEQ ID NO: 77917 - RNA, 74 nt, Homo sapiens
gggcaagaccagacggaggagagacacacaccggaacccacaggagggccagaggacaaagcacggcggaagag

SEQ ID NO: 77918 - RNA, 57 nt, Homo sapiens
gaaacacagccagacacggcacagcaagcaacccggccgaggggggcaccccgggag

SEQ ID NO: 77919 - RNA, 71 nt, Homo sapiens
cgcggggagaaggaggggcaggaaagcagcgggaccaggagaagcaaaaagccacgagggacacaaggcca

SEQ ID NO: 77920 - RNA, 71 nt, Homo sapiens
ggggcaagaggaggcgcgagacggcagggccggaccggagcaggagaccagcacccacgagagcggacaag

SEQ ID NO: 77921 - RNA, 74 nt, Homo sapiens
cgagacggagaggaggcacacaccaacgcccagccaagagccacccacccagagcaacaagaagccccggggaa

SEQ ID NO: 77922 - RNA, 60 nt, Homo sapiens
gcgagcagcgcagaagagaaaaaacaggcacccccaaggcagcgaagggacagcgggaca

SEQ ID NO: 77923 - RNA, 73 nt, Homo sapiens
ccaggagccacggacaagaccaaaaggacaacaagggaggaccccaagcacaccgacaagagcacaaggaccg

SEQ ID NO: 77924 - RNA, 73 nt, Homo sapiens
ggggggaggagagaaagggcaacccacgagagaacagagcaagagccgccacaacaaacaccaaagagaaaac

SEQ ID NO: 77925 - RNA, 45 nt, Homo sapiens
gaagcgacggggcaaaaggcggaaagcagagcaccagaaaaaaca

SEQ ID NO: 77926 - RNA, 74 nt, Homo sapiens
gaaccagccacaaagcaaaggaggggagccaacagcccagccagcccaagcccgcccgcacaggagggcgagaa

SEQ ID NO: 77927 - RNA, 76 nt, Homo sapiens
agaacgaagaagaacaagaaacacaacaaaaaagagagggaagcaaagaggacgacgcagcacagagaggaaacga

SEQ ID NO: 77928 - RNA, 50 nt, Homo sapiens
gaacgcgcagaggcgagacaaccccaaggacgccgccagccaccggcgcg

SEQ ID NO: 77929 - RNA, 81 nt, Homo sapiens
aggcaaaagacgcaggcaaaggcacaccaccacaaacgaagagggaaaaaaaggagaaacaaggcagggaggcacagaacg

SEQ ID NO: 77930 - RNA, 138 nt, Homo sapiens
cagggccccggggagcacggacggacgaggagacgaaccgagaaagacggcgacaagaacaacgacggccgcagaccgacgggcggggcgggagccaaaagcgggggccggcagggcgggaggagagaagcaagcgga

SEQ ID NO: 77931 - RNA, 75 nt, Homo sapiens
ggcgcaagcgaaaacagaccgcgagcccagaggagaggagccaagcccaacgggacgggaaaacggccacagcca

SEQ ID NO: 77932 - RNA, 75 nt, Homo sapiens
cgagccgcaaggggccgcccacaaggccacggacccagcggaaacggcgcagaaccggccgaaaagcacaaacag

SEQ ID NO: 77933 - RNA, 73 nt, Homo sapiens
gcgcaaggaagaaacccccagccgacgcccgcgccccccagcaagaacaagcgcaggaggaaagagagcccag

SEQ ID NO: 77934 - RNA, 68 nt, Homo sapiens
aaggaccaagaaccagaaaagaagcgagaacgcccacaacaaccaggcaaacccagaagcgaagaacc

SEQ ID NO: 77935 - RNA, 76 nt, Homo sapiens
ccggggcacacccacaggcaggacgaggacacccccggccagccccgagagcgcagacaggggggccaagccagag

SEQ ID NO: 77936 - RNA, 57 nt, Homo sapiens
aaacaacagcgcccgacaagccaggggacagaagggaccaacggccaaaagccccgc

SEQ ID NO: 77937 - RNA, 86 nt, Homo sapiens
cagagaaaaacgggagagaaagggaaggaaaagaccaagacccaccccaaagggacagggagcaaaaaaaaagaagaaaggaaaag

SEQ ID NO: 77938 - RNA, 72 nt, Homo sapiens
gagggcaagcaaagaccaagagaagagggccacgagcagggaggcaagaaccacaacaaccagccaaacgca

SEQ ID NO: 77939 - RNA, 121 nt, Homo sapiens
accagcgacaagacaccccaagccgagcagaaagcggacggggaaccgaaggcccaaagcggaagcccccagaaggaccaagaggaaaaagcagacgaaaagggcaggagggaccagacag

SEQ ID NO: 77940 - RNA, 71 nt, Homo sapiens
cgcccaagcggaagaagggagccaacaaaaagcaccggacggcaagcacaacaacagaaacgcaacgggcg

SEQ ID NO: 77941 - RNA, 73 nt, Homo sapiens
ccaccccagccccgcgcccgccgcaggagcccaagaggggaaggcgcgcacaaggcaggaacccgaggaggcc

SEQ ID NO: 77942 - RNA, 55 nt, Homo sapiens
gccggcgaccaagcgccacccgggacaccggagaccgaagaacggaagcgcacga

SEQ ID NO: 77943 - RNA, 80 nt, Homo sapiens
ccagccgggaacaaaagcacagcaaaacagagacgaacacagagcgaaaaagaaagccagaaggaacgaacaaaacaaag

SEQ ID NO: 77944 - RNA, 88 nt, Homo sapiens
ggcgcgcccagaagaagggaaggcgcgaggaggaaaggaggacgagaaacggcgaggaaagagaggagccccggaaagaaaaggacag

SEQ ID NO: 77945 - RNA, 105 nt, Homo sapiens
gaggccgcggagccggacgcggggggcgggaagagccggggccgggcgacaggagcagggcaccggcacagacagaagcgcggccccgccagcccgagacccacc

SEQ ID NO: 77946 - RNA, 84 nt, Homo sapiens
cagaagacagccaacgcagcccacagaccaaaccaggacagagcgggagccaccagcgccaaagggaagccaggagcccggggg

SEQ ID NO: 77947 - RNA, 70 nt, Homo sapiens
gaagggcgcagcagaaagcaaaccagcaggcaccaaggaaagcagaagacaaggcaagaaggagagacac

SEQ ID NO: 77948 - RNA, 80 nt, Homo sapiens
cagggagcgcccaacccccccgacagagccagagaaacacgaggaaccccacgagcgggggggaagaaccaagaaacaca

SEQ ID NO: 77949 - RNA, 85 nt, Homo sapiens
gcccgagggcgggccggccgcggcggagggaaaaaggaagaggagaaggaaagcccgaacccgcaggacggcggcgccgccaggc

SEQ ID NO: 77950 - RNA, 82 nt, Homo sapiens
gaaggagaagagcggaggaccgcggcgggaacagcaggccacagagcgcgcggccaagacaaggagaaacaaagacgaacag

SEQ ID NO: 77951 - RNA, 77 nt, Homo sapiens
agcaacccccaccagccccgagagcaaggacacagaacccgggggcacaaaccgaagaccgaaggacaagacagcag

SEQ ID NO: 77952 - RNA, 71 nt, Homo sapiens
agaccggagccgagcggggaccccagaaaaacagaaggaaaagagccgagccagccccgggcaacaaaggg

SEQ ID NO: 77953 - RNA, 76 nt, Homo sapiens
ggaaagcgccgcccagcagccgcagggggcacccgaggaggaagagggcagggcccacggaaagaagggaaacccg

SEQ ID NO: 77954 - RNA, 78 nt, Homo sapiens
caggaccgcacgccagggaagcaaggaagaaagaagcaccacagagagacaggaagagagggggagagaagacgaagg

SEQ ID NO: 77955 - RNA, 78 nt, Homo sapiens
caacgaacacaagcagagcgcagcgaaccggcaaccacaaagcaggggaagcaccccaggcacgaccaggagaaaggg

SEQ ID NO: 77956 - RNA, 104 nt, Homo sapiens
caggagccccccccaccccggggaagcccggcggagcgagccggacgaagggagaacgagaaaacaaaagacagaaaacagcacagaaacagggacaggggaag

SEQ ID NO: 77957 - RNA, 82 nt, Homo sapiens
gcaggacgaagagcagggaaacaccacgaagcagccaagcacagccccgcggcgcccgagccccaccagcggccccgacaca

SEQ ID NO: 77958 - RNA, 84 nt, Homo sapiens
cgcgggcacccacggagccccggggcggaggaacgaagcgcggcccgcccggagcggcagcaaacagcgacccccaggggccag

SEQ ID NO: 77959 - RNA, 60 nt, Homo sapiens
gaaggccaggcaccccaaggcgaaacacagagaaacacgaagggaacaacagaaaaggca

SEQ ID NO: 77960 - RNA, 81 nt, Homo sapiens
gaggaagacccggaaacaggggccacggagccacggccacggccgcaaggccagcggacgcgcaccggcaaaccaggcgcc

SEQ ID NO: 77961 - RNA, 75 nt, Homo sapiens
aagaagccggagaaaaagaccccacaaaggaagaaaaagcacaaacgggacacgccagagaaacagaagcggaga

SEQ ID NO: 77962 - RNA, 83 nt, Homo sapiens
cacaggccccgcggcccgcccaacagagcaccgagagcgcggcgcagaaagcgcccggggaagaaggggacccaaagcaggca

SEQ ID NO: 77963 - RNA, 72 nt, Homo sapiens
ccccccgaaaacgggaagcgccccgcgacagcccccaggaagcgagaccgccccagcaggcgcgcaacccac

SEQ ID NO: 77964 - RNA, 77 nt, Homo sapiens
ggggacgagaaacgaaacaaggcaccgagcacaaaggagaaaaccagggggagggaccaccacacaacaagcgcagg

SEQ ID NO: 77965 - RNA, 73 nt, Homo sapiens
cccaaccgaagaaaacaaggcaaagaagacgacccggacgaagaggacgccaaagaagggagagaagaaggaa

SEQ ID NO: 77966 - RNA, 79 nt, Homo sapiens
gcgcagccccgagcgccgcggacgcgcacgagggacggggaaaggccggggggggcacagagccccggaagacagcccc

SEQ ID NO: 77967 - RNA, 67 nt, Homo sapiens
acccgaaaggagaagccgaagcccaagacgggagcaaaccgagacgagggggaacggcacggggaac

SEQ ID NO: 77968 - RNA, 79 nt, Homo sapiens
gaagccaaaacagcaggaaagagccggaggagccaccaacagaagcaggagccaggaaaccaaaacccacagagaggga

SEQ ID NO: 77969 - RNA, 51 nt, Homo sapiens
aggcaagcccagccgccacaccccgccgggcaggggccacggcccaggcgg

SEQ ID NO: 77970 - RNA, 71 nt, Homo sapiens
cacggaaacgaagcgacacagacacagagcgccgaaccagaagcaagagagcaccaccagaaaccacagcc

SEQ ID NO: 77971 - RNA, 81 nt, Homo sapiens
gaagggccgggaccgaaaccagccccggacgagaagcgcagcaacggcgggggaccacgagagcacggagcgcgccccacc

SEQ ID NO: 77972 - RNA, 72 nt, Homo sapiens
cgagccgggcccgagacagaggggcaggagcagagagcgagccaaggcggaccgcgcagacgcgcaggacgg

SEQ ID NO: 77973 - RNA, 72 nt, Homo sapiens
cgccgcgcgccgcgaccccaagcagaccagagacggaggcaacaacgggcaaaggcagagagaaaggaagcc

SEQ ID NO: 77974 - RNA, 74 nt, Homo sapiens
aagagagacacacaacagcgaagcccaacacgccaggaaaaacccccagcagacccgacacccagacgaaaccg

SEQ ID NO: 77975 - RNA, 75 nt, Homo sapiens
ggcacaaccaagcgagccgcccaaccgccacaccaacaagacaagaaccaaacagaacccacgaagggagaccag

SEQ ID NO: 77976 - RNA, 84 nt, Homo sapiens
gggcggccagccccagccagcggacgagggcaaggcgcacaccgagaacagcagagaacacaacacaggacaagcaagcccaga

SEQ ID NO: 77977 - RNA, 81 nt, Homo sapiens
gcggagcgcccggggcggcccggcgcggcacagcgccgccagcagggccgaccagcacgggcccagacgcagacaaacgag

SEQ ID NO: 77978 - RNA, 68 nt, Homo sapiens
acccggcgcggccccaaccacagcccgcaagcaggggagcgggcacccggagggacgcgcggacaacc

SEQ ID NO: 77979 - RNA, 65 nt, Homo sapiens
aacagcacaccaggagagaagcgacagccgcagaggacccaagaagaccagccgaagcccggaaa

SEQ ID NO: 77980 - RNA, 73 nt, Homo sapiens
gggacaagacaggaagcccaagcagcaaccaaaagagccaaggacccaaaaaccaggcaaacaccgagcaagg

SEQ ID NO: 77981 - RNA, 61 nt, Homo sapiens
ggacggcagcgcgcaggcgcaagacgcgagcaaaaagagaaaacaaagaagcaaagcccga

SEQ ID NO: 77982 - RNA, 80 nt, Homo sapiens
acagaacaacaggagaagccaccagccccagaacgggcgcagaagcaggaacagcagaacggagacagggccaagacgag

SEQ ID NO: 77983 - RNA, 48 nt, Homo sapiens
cagccagcggacccgacggcgagagggacacaccaggacaccaacacc

SEQ ID NO: 77984 - RNA, 54 nt, Homo sapiens
agaaggagcgaagaagagggcaagcaggaggaccaagacgacagcggagggagg

SEQ ID NO: 77985 - RNA, 80 nt, Homo sapiens
cgcaaaggcccccaaggcccagaggcgaagggcccagcgcagggcggcagaagaggggccgcaaggccaggcgcgcagag

SEQ ID NO: 77986 - RNA, 72 nt, Homo sapiens
agcggagacagcaccgacagaagggcacacagagaaaaaaagggaacaaaacacagcaagcagacaaaaggg

SEQ ID NO: 77987 - RNA, 65 nt, Homo sapiens
gagccgccgccaacgcgcagggcagcggcccccgcccgcaggaccgcgaagcccagagcacccaa

SEQ ID NO: 77988 - RNA, 78 nt, Homo sapiens
agcgcacgaggcccagaagcacgcacaaaaaaacaccgggacgccccagggccaccgccagcagacgacagaagggag

SEQ ID NO: 77989 - RNA, 74 nt, Homo sapiens
aaacccacgaaccaaaagggacggacaaaggaacaggaccagggaaaacaggggggcagaagcagcggacagcc

SEQ ID NO: 77990 - RNA, 82 nt, Homo sapiens
agggagacggcagagcaggcagggcggggcgccacccaggcccaggaccacccacccacgcccaaaaaaaggggagacagcc

SEQ ID NO: 77991 - RNA, 82 nt, Homo sapiens
agcggcaaggagagacgcgcgaggggcgccgaagcgaggggaacagagacgccaagcccgggcccggaggcacgagacacca

SEQ ID NO: 77992 - RNA, 73 nt, Homo sapiens
gagagaggcccgcagaggaggagaccagaccagcacccggacccggaggccaaggcccccagaggaaccaaca

SEQ ID NO: 77993 - RNA, 86 nt, Homo sapiens
cccggcccacaggggggggcaaacccgagagaacggaaaggggagcaagaagaaagagcagggaggagggagcgacaggaagaaag

SEQ ID NO: 77994 - RNA, 98 nt, Homo sapiens
gcccaaccagaaaacaaagacaaaaggagacgagaagaagacaagagaagcgacagcccggggcgagacacaagagagcgccgaagaggaaacacgga

SEQ ID NO: 77995 - RNA, 56 nt, Homo sapiens
ccgcgcgcacgccccgacgcaagacgcccggcccggggccgcaggggcgcggcaca

SEQ ID NO: 77996 - RNA, 62 nt, Homo sapiens
aagacgacagcaacccgaagacagggaaaagacgcgcaggggagcgggacgcggaagcggaa

SEQ ID NO: 77997 - RNA, 79 nt, Homo sapiens
gcaagaaagggcagaaccggccaaaacaccagcagagccaaagaagggagaaccacaagggcgagccaagaagagcgac

SEQ ID NO: 77998 - RNA, 77 nt, Homo sapiens
cggcaggccagaagcgagagaggcggaacaccccccccaagaaccgcccagagagcagccaaacgagggccccgacg

SEQ ID NO: 77999 - RNA, 56 nt, Homo sapiens
ggccaggggaacaacagccgacaaaggcaaccccaacggaaaacaccgggaaaggc

SEQ ID NO: 78000 - RNA, 49 nt, Homo sapiens
gaccaagccgaacacccaaaagagggaagcccaagagagggagaaaagg

SEQ ID NO: 78001 - RNA, 71 nt, Homo sapiens
gccagccgaaggccaagacccggcggagggcagagagcgcggagcgcacggggaaggcagacccggcaacg

SEQ ID NO: 78002 - RNA, 80 nt, Homo sapiens
cacagacaccccgagccgaaggacagacaccaagagagcccacagacccagccacgaagaccgcagaaggaagacagaag

SEQ ID NO: 78003 - RNA, 33 nt, Homo sapiens
ggacccggacaccaagagcacccgaagaagaca

SEQ ID NO: 78004 - RNA, 71 nt, Homo sapiens
ggaacaaacccagaagaagggccaccggcgacaacagagcaacgggcaggggggaaaagcgcgggcaccca

SEQ ID NO: 78005 - RNA, 74 nt, Homo sapiens
ccggaaaagccaacgccggcgaaggacggggggcccgggcgaaaccggaccgggcccggaggagcgaacaaggc

SEQ ID NO: 78006 - RNA, 73 nt, Homo sapiens
ccgaacggcacccggcagcccagggccacagccaacccaacaggaaacgagaagaacgaaagagaaacccaaa

SEQ ID NO: 78007 - RNA, 71 nt, Homo sapiens
ccagaacacgggagaaaaaggaaaacgcggaaaaccgacacaacaggagcagagcgaggcagggccccaga

SEQ ID NO: 78008 - RNA, 58 nt, Homo sapiens
ccaagaggaaaaacgcaagaagcgcacagaggaccacagaggggaggaggacagcccg

SEQ ID NO: 78009 - RNA, 69 nt, Homo sapiens
aaaccacacccagggacccccagaaggaacggagacaaaaacggcccggagaggaggcaccagaaggag

SEQ ID NO: 78010 - RNA, 58 nt, Homo sapiens
cgggaagcaggacgcgccgcgccccaagaacaccgcccagccaagggggagggcagcg

SEQ ID NO: 78011 - RNA, 71 nt, Homo sapiens
gagaggccggacaccgccccgagaccacccaaggggccggggggggcacagagccccggaagacagccccc

SEQ ID NO: 78012 - RNA, 74 nt, Homo sapiens
aagggagaagaaacagcagccgcaggaaacaggagccagaaaaaaaaaaagaaaggacaagggaggccaggaaa

SEQ ID NO: 78013 - RNA, 71 nt, Homo sapiens
ggagccagcaaaaacacaaacgagggagcaaggacaccaccagggagccaggagagaacccgggccgagac

SEQ ID NO: 78014 - RNA, 51 nt, Homo sapiens
acacaagaagagcagcagaaaacggggaaagaccacagcaagaccacgccc

SEQ ID NO: 78015 - RNA, 72 nt, Homo sapiens
gggcaccgcagcgaccacccacacaaacccgggacgggccgagagggacggacaacccccgccccacccacc

SEQ ID NO: 78016 - RNA, 85 nt, Homo sapiens
aaaggcggaccggcgaacgaaggaggagccgaggaaggcgccaccacgaccgccgaaccggaaggcaacccgcccggaaccaccg

SEQ ID NO: 78017 - RNA, 71 nt, Homo sapiens
agagaagaagcagaaaacggcaaaaaaggggagcaggcgccaacccaaacgagcgagacacacagaaagga

SEQ ID NO: 78018 - RNA, 96 nt, Homo sapiens
gagaggacgccacgccggcacagggaacagggagcgcaaccagccccaagaagagaccaaagagcgagcgggggacaccccagggaccgggcagca

SEQ ID NO: 78019 - RNA, 52 nt, Homo sapiens
gagggggaagcggcccagggagggcgggaaaacggcacaaggcgacgaggga

SEQ ID NO: 78020 - RNA, 84 nt, Homo sapiens
aaagcagaagaaaagggacgcaagaaacccaggacgagaacagcaacagaggcggcagcagccaccacgaccccaggcccccag

SEQ ID NO: 78021 - RNA, 75 nt, Homo sapiens
gccaaaacacagcgaggagacagagggggagaggcaccagcaacagaccaaccgcagcaagcacagagacaggaa

SEQ ID NO: 78022 - RNA, 68 nt, Homo sapiens
cacccccaaagaagaaacaagacgaagcgcagccgcaaccagagcacacggaagacaaagggcaaaga

SEQ ID NO: 78023 - RNA, 69 nt, Homo sapiens
ggggacaggacgggaaagcaagaaggcaaacaaagcaaagaaacaaccaaggccaagaacccaaagcaa

SEQ ID NO: 78024 - RNA, 84 nt, Homo sapiens
ggcgaaacgaagagaagagagagagagagaagaaagggagaagcgaggagggagacagacaaacaagcccaaaaccaaaaggag

SEQ ID NO: 78025 - RNA, 81 nt, Homo sapiens
cagccacaacaagacccccggcccaagagcccgggagccgccaggcccccaagcaccggggcgcacacccagggcgccgga

SEQ ID NO: 78026 - RNA, 60 nt, Homo sapiens
cccgagcggggggacgcgccaggcacagcagcaggaaaaaaacagggggaagagagaaag

SEQ ID NO: 78027 - RNA, 68 nt, Homo sapiens
accggagcaggacaagcgaacagcaggcgacagagaagagagggacggcgcaaaccagggcgaggcgg

SEQ ID NO: 78028 - RNA, 76 nt, Homo sapiens
cggccacagagagcgggagcaccaaggaaccaagaacagagaccagcacaaccagggaagaagacagaaagggcaa

SEQ ID NO: 78029 - RNA, 79 nt, Homo sapiens
acagcaaaagcacgcggagacaccgccgacgagaaggcggcaaggcaacaccagaagagaaaaagaggcacagagagaa

SEQ ID NO: 78030 - RNA, 37 nt, Homo sapiens
cccacccaaggaaagagcagcaacgaccacagcaaaa

SEQ ID NO: 78031 - RNA, 70 nt, Homo sapiens
gaaacgaaagaaacaggcaaggagcgcccagcaaggagcagcagaaagaccaaacaagcagcgggcagaa

SEQ ID NO: 78032 - RNA, 40 nt, Homo sapiens
aaggcccccaagacaagacagaccccggcggcgacacagc

SEQ ID NO: 78033 - RNA, 67 nt, Homo sapiens
agagcaaaaaaacgaaacaaagacaagaccgggaaccccggacaaaacgcgcaaaaggagccagaga

SEQ ID NO: 78034 - RNA, 78 nt, Homo sapiens
cgggccaaaaggaacgaacacggacacaggacggggaagacggacagcaggagaaggcggcacccccgcgagcggcgg

SEQ ID NO: 78035 - RNA, 85 nt, Homo sapiens
ggggccggggccgcaaggccggagaaggccgccgggcccgggcaggggcggggcaacgcggaagaccggccaacgccccaccggc

SEQ ID NO: 78036 - RNA, 66 nt, Homo sapiens
acagggacacagggagccccagacccacaggaagggaaaaggccgaggcacagcgggaagaccgca

SEQ ID NO: 78037 - RNA, 68 nt, Homo sapiens
gaaccgagcccacacacgccacaaaccgcaagggaagcgaagagggaacaccccaccgacaaaaacga

SEQ ID NO: 78038 - RNA, 81 nt, Homo sapiens
acgacccgcaggcccaccgcgagcaggcggcaggaaccacccagacacccgcacccgggcagccacacagggcggccaccg

SEQ ID NO: 78039 - RNA, 76 nt, Homo sapiens
caggccgcgcgccaagacggccacaacacgacgcacgccagccacaagaaaaccccagagacgcgaggacaccccc

SEQ ID NO: 78040 - RNA, 73 nt, Homo sapiens
ggaggccagagggaagcaaagcagccaacaccagaagaagggacaaaagagccgaggaaggcaccaggagagg

SEQ ID NO: 78041 - RNA, 72 nt, Homo sapiens
cagagcagaagcaaagaagagaccacagacgagcgcgcgggaagcagaaggcgcaggaggacgcggcacacc

SEQ ID NO: 78042 - RNA, 73 nt, Homo sapiens
ccgccgggaaaacgggagaagagaacggccacagcagccagcgcacagagcaggcccgacccggaggcaccac

SEQ ID NO: 78043 - RNA, 74 nt, Homo sapiens
aaaaaaggggcggagaaacaacagaagaacgagcagaaagaacagaccacccgaaagcaccagcccagccacag

SEQ ID NO: 78044 - RNA, 79 nt, Homo sapiens
gagaaggaacaaaccaccaggagacaaaaccagcacagcaaggaggaaacagcaagggaacaacaacaggacgccacag

SEQ ID NO: 78045 - RNA, 59 nt, Homo sapiens
gaggccagggggcgccagcagaccgaaaagggcggaaaaggaccaaggcccgcaaaagg

SEQ ID NO: 78046 - RNA, 62 nt, Homo sapiens
gcacgcgcgcggcacgggggcccagaggaccagccaaggaagcaacacagcagcgagagaag

SEQ ID NO: 78047 - RNA, 70 nt, Homo sapiens
accaacagaaacacacagaagcaaaagggagaccacaacagccaccaaacagaagaaccgcccaacggaa

SEQ ID NO: 78048 - RNA, 65 nt, Homo sapiens
ggaacccacagaaaggagacgcaacaccagggacggaccacaaaacccaacgcggacccggcagc

SEQ ID NO: 78049 - RNA, 69 nt, Homo sapiens
caagacaagggccgcacggcgcaggggacccaccgggcaggaaagcaaccgcgaacgagggagggggac

SEQ ID NO: 78050 - RNA, 79 nt, Homo sapiens
gcagcgggacgccggagaggcaggcgcggcccgcggggcgccaggcacgcgaggcccccaggggcagccaccagggacc

SEQ ID NO: 78051 - RNA, 76 nt, Homo sapiens
gaaacggcaaagcgcagcccgcagacagaggggcgacgaccgcacaacagaagacagacgggaaacgaaagaccgg

SEQ ID NO: 78052 - RNA, 80 nt, Homo sapiens
gcgggccccaacccaccaaaagcacaggcccagagccccgcagggagaaaggaagggccaagaaaagaagaaggacggag

SEQ ID NO: 78053 - RNA, 54 nt, Homo sapiens
agcggaggggacgccacgcaacgccgagcgcgacagagggagagcacccgccac

SEQ ID NO: 78054 - RNA, 65 nt, Homo sapiens
gaaaaagcggagacagccgaagaccaaaggaagggcgcccggcggacacaggacggccaccaggc

SEQ ID NO: 78055 - RNA, 71 nt, Homo sapiens
agaaagaagccacccgaccacgacaaggaggagaaaggagcaaccagggaaaagaagaacgggggacaacg

SEQ ID NO: 78056 - RNA, 77 nt, Homo sapiens
acagcacacgcacccaagcgaaccgaggaacaaaacagccagagcaggcacgaaaagcagaaagaagacaaggacaa

SEQ ID NO: 78057 - RNA, 77 nt, Homo sapiens
gcccccaaaggcggaagacaggagcagccgagagcagcagaaaaaaggaaggaaaacacagagcgccaagacaaaga

SEQ ID NO: 78058 - RNA, 78 nt, Homo sapiens
ggagaagacaagcgaaaacggccaaccccgaaggccaaacggaagaagaagagaacaagcaaaagaaaagccagaaaa

SEQ ID NO: 78059 - RNA, 75 nt, Homo sapiens
ccaacccaagcgaagaagagcggaaaacaaggggagcacagcaagcgggagcaggcagaccaaaggaacagaagc

SEQ ID NO: 78060 - RNA, 104 nt, Homo sapiens
gcgcgaggcaccaaagcgaacgaagagcaccgggagcggcgaagaggcaccggaggaggaaccacgaagcagacggaagaccacagaagcagcgggagaggaga

SEQ ID NO: 78061 - RNA, 61 nt, Homo sapiens
cacgccggaccaggaaccacgaagaaaagggaaaacaccaaagcgaggggggaggcccagg

SEQ ID NO: 78062 - RNA, 84 nt, Homo sapiens
caggcgcacgaagccggcgcaccccacaccgacaccacggaggaggcggccggaggaaggcgaccccggagcccgaaggaaggg

SEQ ID NO: 78063 - RNA, 38 nt, Homo sapiens
gggcggcgacggagcgacgaccaggcagaggagaagcg

SEQ ID NO: 78064 - RNA, 55 nt, Homo sapiens
gaccaggagagggcggccaagcccggaaagagcacaggaaaacccccgaagacaa

SEQ ID NO: 78065 - RNA, 76 nt, Homo sapiens
gcggaaggcagcgcccagcagcgcagccagaagacagcgccagacgaccacaccaacccagagggagagagccaag

SEQ ID NO: 78066 - RNA, 78 nt, Homo sapiens
cgggaccccggagcgacccggacaccgacgcgccacgcggagcccggaaggagggccccggagcagccacaccaccga

SEQ ID NO: 78067 - RNA, 46 nt, Homo sapiens
gcgggaccgacagccgggcagagcgcccgggggcggagaaggccag

SEQ ID NO: 78068 - RNA, 82 nt, Homo sapiens
ggagcccgggagggcggccgcagcgggcgacgcacgaggcacacaggaaggaggggagcagggacgcgcggcggcggggccg

SEQ ID NO: 78069 - RNA, 55 nt, Homo sapiens
acaaaacagagagcagaggcgcggcccgcacgccaggaaagagagaagaaaaccg

SEQ ID NO: 78070 - RNA, 73 nt, Homo sapiens
caccgccgagaccagcccaacaggaccaggagcgggagagggccagcagcacggaacaagagacccaggcacg

SEQ ID NO: 78071 - RNA, 91 nt, Homo sapiens
gaggaaccggaccccggcagcggcggaccccaaggagaacagggggggcaggcgagcggggggcagcccgcacaccagcacgagaggacca

SEQ ID NO: 78072 - RNA, 50 nt, Homo sapiens
caaaggaagccagcaaggagggcgaaagaaacaacaggaacccccaaaac

SEQ ID NO: 78073 - RNA, 72 nt, Homo sapiens
aagcacagcgggcacccgccacggacagggcagcccccccggaagagcaggcaaaaagaaagcacggaaaga

SEQ ID NO: 78074 - RNA, 80 nt, Homo sapiens
agagcaggagcagacgcgcagggagcaacagccaagccaaaggcaccacaggaggcagggaggacagcacgcgcaagagg

SEQ ID NO: 78075 - RNA, 62 nt, Homo sapiens
ccaaaggaaccagggccaccgcagaaaggccgagggccccacccaaccagaagccggaacaa

SEQ ID NO: 78076 - RNA, 67 nt, Homo sapiens
cacgggggccacgacaagccgagaaagagagaaaagggggagcccgacccaacgcccacacggacag

SEQ ID NO: 78077 - RNA, 67 nt, Homo sapiens
ccggacccgcagcaggcacaaggaccagaggagcgagagcagcaagaaccacacccagcagcaagca

SEQ ID NO: 78078 - RNA, 56 nt, Homo sapiens
aaagccccaccacccacccagaccacacaacaaggaaggacgagacgagaccggga

SEQ ID NO: 78079 - RNA, 76 nt, Homo sapiens
gccacgcccggcgcgacacaagaaaaccacaagaacgcaccccccagacccacggcagggcaaccccaccgcggaa

SEQ ID NO: 78080 - RNA, 79 nt, Homo sapiens
aagccaagaggcggacaaaacgccaggcggaccagaaggccagcaaaggccggaggaacgaaacagcaaggagaaccaa

SEQ ID NO: 78081 - RNA, 35 nt, Homo sapiens
aaacagaaacagagggagaagcagacggcacagca

SEQ ID NO: 78082 - RNA, 81 nt, Homo sapiens
agcagccaccaggaggcgcaggcacaaggcaagacacgaagacgccaccggagagagaaaagcaaccgaaggggaaaaaac

SEQ ID NO: 78083 - RNA, 73 nt, Homo sapiens
cacgggagggaagggcaggagaaaaccaagaaggagagaagagcagaacccaggcgaccggcccgaggaccgc

SEQ ID NO: 78084 - RNA, 80 nt, Homo sapiens
gggcgaccggccgccaagagaagggcacccgcacggccggcccgggcccccacagagagcacacaaacaaagcgaaacca

SEQ ID NO: 78085 - RNA, 77 nt, Homo sapiens
gccgaaaagacagagaggggaaaccccgaaaggggggcagggagagaaggacaggcaaaaagacagccgaaaaaggg

SEQ ID NO: 78086 - RNA, 76 nt, Homo sapiens
ccagcgccgaggggaagaccaggcgcccgaaacggaacacagaggggcaaccgggggcagacggcccgggcgagga

SEQ ID NO: 78087 - RNA, 76 nt, Homo sapiens
aaaggggccgggaccccccccagaggagggccccaccacaccaaaggaaacgagacaggggagagcacaaggcgaa

SEQ ID NO: 78088 - RNA, 79 nt, Homo sapiens
cgcccgcgccgccgccggcacccccccggagaccaagacacaccaccccagggggggcccaaccaccaggacgaacaga

SEQ ID NO: 78089 - RNA, 110 nt, Homo sapiens
accaagaggggggagacggggaagacaggccagcgcggccaagacccaccgcaagcaccgcagagggccagaagccggaaacacaaggacaaccggcacccgcaacgaac

SEQ ID NO: 78090 - RNA, 72 nt, Homo sapiens
ggcccgcccaagagcgacagccccagaagcaagagaggaaaacagaagcgggcgcacggaccggaaggggcc

SEQ ID NO: 78091 - RNA, 96 nt, Homo sapiens
agacaaccggagccacgccccacgaccgccaggcaagggcagcaggaaagacgagaccgggcacgccaacaaccgacgaccgcacgacggccgggg

SEQ ID NO: 78092 - RNA, 84 nt, Homo sapiens
gacccaggggcggcaccgcccaggaccagcaggcgggaggcagcccccgcgagcgcaggcgcgcaggcggaggcagaaggacaa

SEQ ID NO: 78093 - RNA, 75 nt, Homo sapiens
gcccagaaagccgggacaaaggggaagaggagccgaaggagacgcgcagcgaaaccacgggagcaaaagggaccg

SEQ ID NO: 78094 - RNA, 87 nt, Homo sapiens
cggccccagagcccaccgggaggagaaggaggaggaacgggaaaggaaaaccccagcgcaagggaaaccaccaagaagcaagaggaa

SEQ ID NO: 78095 - RNA, 72 nt, Homo sapiens
cgcacccgacgccagaagaccaagaccgcagaccgaccccgagagaggacgcggggccacgaccccgacgac

SEQ ID NO: 78096 - RNA, 73 nt, Homo sapiens
ccaggggcgcggggcgacggaccggccaccaaagcacaccaacgggagggggacccacagcccggcgaccacg

SEQ ID NO: 78097 - RNA, 80 nt, Homo sapiens
accaagacacggaccacgaggacggaagagcgcgaccggcccgaggaccgccgcacgaccaaacgcagaacccacacccc

SEQ ID NO: 78098 - RNA, 77 nt, Homo sapiens
cgcggcggcgacaagggcaggaacagaggcggcgagccaggaacgggacgccagagggccgccagagacccgcaagg

SEQ ID NO: 78099 - RNA, 62 nt, Homo sapiens
gggagaagacggggcgaggaagacaccacccagggccggggaaggcgcacgacagggaaaaa

SEQ ID NO: 78100 - RNA, 73 nt, Homo sapiens
cgaaaacacacgggggaagaccaaagcaagggaggagaagccagccccgcggcgggcgggaaggagacagaac

SEQ ID NO: 78101 - RNA, 78 nt, Homo sapiens
gggaagacagacgacccggacccaacaacaacacagaggacaggcgcggaggacgaagggacacaccgcagcagccag

SEQ ID NO: 78102 - RNA, 84 nt, Homo sapiens
cccggcggacgggacagggcgggggacacgcaggagagccccgcgaccacggcacacgcgacaggacgaagaagcgaagaaaaa

SEQ ID NO: 78103 - RNA, 65 nt, Homo sapiens
accgcaaagcccaaagcgagaaaagcgacggaagaggggaggacggaggagaacaacgaacagcc

SEQ ID NO: 78104 - RNA, 93 nt, Homo sapiens
agaaacagaacgaaacaacggaaacgggagacgaccccgaggaagaacagaagagaagaaaaaaagaagaagggaagcgcacgagaacaggac

SEQ ID NO: 78105 - RNA, 56 nt, Homo sapiens
ggagcgccagggccacggcccaccacccggggcacaacgccaagagagaaccagca

SEQ ID NO: 78106 - RNA, 52 nt, Homo sapiens
ggcagcaaagaagaggacacacaagcagagcacaaacccaccagaagggacg

SEQ ID NO: 78107 - RNA, 75 nt, Homo sapiens
aagagaggcaggcagcgacagccacacaacggacaggaaccaagaaagaggaagaagaggagacaaaggaaaaga

SEQ ID NO: 78108 - RNA, 82 nt, Homo sapiens
caacaccccaagaccgagccgaggcccgagccacgcaccccgagaaccggcgacaagggcaccgccagaaaacccgcaggcg

SEQ ID NO: 78109 - RNA, 82 nt, Homo sapiens
cgcggagaccaccgcggcgcggcagcgcgcccgagggcgaaccccacacacccaacccgcccagcggagcaggacagcacgc

SEQ ID NO: 78110 - RNA, 80 nt, Homo sapiens
ggggcagccagggcgggaagggaagaggagcggaaaaacaagcaaaagaaaaacagggaaagaggagaaagaaaggaaga

SEQ ID NO: 78111 - RNA, 81 nt, Homo sapiens
acaacgcgggcgggggcgagggccgcaaacaaccgagcggagcccggccaggaccggcgcgagaggcgccagaccccagcg

SEQ ID NO: 78112 - RNA, 71 nt, Homo sapiens
acaccacacggaagcaagaaaggcgggaccaagaaaggcccaacccgaccaaagggggagaggcaagaagg

SEQ ID NO: 78113 - RNA, 91 nt, Homo sapiens
cgccacggcgccgagccgcggccgaagccaggggcgcagaaggacgcggagcaggagcacagagagagcggagaccaggacagaagcagga

SEQ ID NO: 78114 - RNA, 81 nt, Homo sapiens
cagccagcccaggagaggagaaaccagagagcaagacaaagaaacagaagcgcgagaacagaaccccgaggagccgggaca

SEQ ID NO: 78115 - RNA, 83 nt, Homo sapiens
ccgccgcgggagccgcgcccgaaccccggcccgaacccagacaagcagaccggaagaccgacggaagaccacaccccgaggga

SEQ ID NO: 78116 - RNA, 58 nt, Homo sapiens
caagacacagcccgaggacccaagggaagcgccaaagaagcgacgcgaaagaaagaaa

SEQ ID NO: 78117 - RNA, 82 nt, Homo sapiens
aagaccagagaaggaggagggaccacgcgcgaggacaccagaggaccagaacccacgagaaacagacgagccaaccagaccc

SEQ ID NO: 78118 - RNA, 121 nt, Homo sapiens
cccaaccaagacccagggacacaaacacgcggaaggccgcagggacccgccaggaaagccagcaaggagcagggacaagacaggaagcccaagcagcaaccaaaagagccaaggacccaaa

SEQ ID NO: 78119 - RNA, 55 nt, Homo sapiens
aaggagccccgcaacaaccggacaagaggcagagagggcagcgcccgagggcgga

SEQ ID NO: 78120 - RNA, 98 nt, Homo sapiens
gaacaggaccgaggagagacagcgagggacgccgaggagcacccgaaaagccccaggggaggcacccacgaagacgcgcggcaaaaccaggaagaaga

SEQ ID NO: 78121 - RNA, 69 nt, Homo sapiens
ggacaccggcccgcccgcccacccccccgacaagaccccgcggacgaaggcggaggcaaggggaccagc

SEQ ID NO: 78122 - RNA, 70 nt, Homo sapiens
ggcaacgcaggccagcaaccccagccaagcaagggggcagcacgccgaaggagagaccagacaacaggcc

SEQ ID NO: 78123 - RNA, 65 nt, Homo sapiens
accgcagacagcggccaagaagacacaaaggacggaggcacgcagacgccaaacgaggcagcaac

SEQ ID NO: 78124 - RNA, 73 nt, Homo sapiens
ggacccccaggagggacccgcaggacaccccccaggcacagccacaccccagcggccaaggacgaacggggaa

SEQ ID NO: 78125 - RNA, 74 nt, Homo sapiens
ccggacgccggagaggcaccggaccgacaacaagggagggcacagccaagacaacaaccaagcaccaggaaaac

SEQ ID NO: 78126 - RNA, 72 nt, Homo sapiens
ggcaccaaaaaaccccagagcacgccgggcggcggcgagaaacaccacccgccaccccacagaccaccggcc

SEQ ID NO: 78127 - RNA, 76 nt, Homo sapiens
gcgccccgcgccaccgcggcccgcgcaggagaccgagggcccccgcgaagccccagagccgccaggcagaagaccc

SEQ ID NO: 78128 - RNA, 77 nt, Homo sapiens
gcacagagacgaagaggaccaggagcaaacagaaggaacggagaaagaggagaggaggggaagaacaaagaccaacc

SEQ ID NO: 78129 - RNA, 75 nt, Homo sapiens
gggcccagggaagccacacaccaacagacaagggaccaagaaaggcccagggaccaaagcccggacaaggcccga

SEQ ID NO: 78130 - RNA, 58 nt, Homo sapiens
agccccagcgcagcgcggagaggcaacgagaaacacggaagacggagaaagagaggga

SEQ ID NO: 78131 - RNA, 63 nt, Homo sapiens
acggagccagagaaggcagaagcagcccgagcacgcgcagaccaaggaggagggacagagcgc

SEQ ID NO: 78132 - RNA, 82 nt, Homo sapiens
cacgcgcagccccggccccggcccgccggagaaacagcccccaaaacacaagaggacggagaagcgacgaaagaagccggga

SEQ ID NO: 78133 - RNA, 66 nt, Homo sapiens
gagcagcgggagagacaccaccaaaggagccaccaacagagccaggagccaggaagcagcagccac

SEQ ID NO: 78134 - RNA, 81 nt, Homo sapiens
ccggagccccccgggacccacagcaccccgaggcccgacccaggggaggaccacgaccccgcagggaacacgcccgcgccc

SEQ ID NO: 78135 - RNA, 74 nt, Homo sapiens
cgaagcggccccagcccgaaagcaaccgggcgcaggccacagaagaagaggaagccgaggaaagacaggaaggc

SEQ ID NO: 78136 - RNA, 72 nt, Homo sapiens
gcccacacagcaaacacacggacgagcacgcaaccacgggcccccgcgcgcagggacacacgggaggacagg

SEQ ID NO: 78137 - RNA, 74 nt, Homo sapiens
gcccagaaaacccacgaagaaaaaacagcccccagagggaacaggcacgccccacccgccagccgagcccccga

SEQ ID NO: 78138 - RNA, 79 nt, Homo sapiens
ggaccagagggggacagcaaaacgagaaagacagcaaagaaaaggagaagaaaggaaaaaaacaaccccgggcaccccg

SEQ ID NO: 78139 - RNA, 66 nt, Homo sapiens
aaaagcgcccccaagcccacccaccagggaagcccgcacgcggaagcgccagccaaagcaaacaga

SEQ ID NO: 78140 - RNA, 75 nt, Homo sapiens
agaaagaggcacagccccaaaagaaaggcaggacgagagccacccaccagaagggccaccgcacaggggcagggg

SEQ ID NO: 78141 - RNA, 74 nt, Homo sapiens
ggggggaacgacccgaggggggagagcgcgggggcgacggccgagcaggaaagggagcggccccaccaaacgac

SEQ ID NO: 78142 - RNA, 69 nt, Homo sapiens
acgacgcaccgcaggcagacaaaagggccaaagaagggagagaggggcaaagaaacaggaaagcagaag

SEQ ID NO: 78143 - RNA, 75 nt, Homo sapiens
agaaagcaggccacgaaaacacaaggaaagaaggagaaggaagagaaacaaagagaaaacacgccgagaaaccag

SEQ ID NO: 78144 - RNA, 86 nt, Homo sapiens
cgcagcccgggcccaggccccggcagcgccgggacaagacaaagggcaaagcgccaagcccccacgaaagcacagaaacccacaac

SEQ ID NO: 78145 - RNA, 68 nt, Homo sapiens
agaaaagagccaacaccacacgaggcgcaaagacacacacaccccaggacaaaacgaaaagaaggaga

SEQ ID NO: 78146 - RNA, 109 nt, Homo sapiens
gcgccgcaaggaggccggacggacaggcgacaggcgccgcaagacaggcccaagccccgggccaaggagggcacccggaccccccccaccccgcgcccccccccggggc

SEQ ID NO: 78147 - RNA, 70 nt, Homo sapiens
aacacgcgcaagaagaacaagaaacccacacacagacgccaagacgagaaggccaacggccgccaccaaa

SEQ ID NO: 78148 - RNA, 76 nt, Homo sapiens
agcaagaggaggagacgcgcgagagccggaggcggccggccccggcggaccgagggagaagagaggcaaaagccca

SEQ ID NO: 78149 - RNA, 53 nt, Homo sapiens
ccgccccagcaaagagaccccgcgcccacccaacaaggcaggcgaaacagcag

SEQ ID NO: 78150 - RNA, 80 nt, Homo sapiens
ccacagacccagccagccaccagccggagcaaggagccaaaaaccgaacacccggaaggggacaagggacggcgaacaga

SEQ ID NO: 78151 - RNA, 61 nt, Homo sapiens
aggagggacgcgcaggcccggggccacaacaacaaacggacaggcaccagccccacgggaa

SEQ ID NO: 78152 - RNA, 56 nt, Homo sapiens
ccagccacaggaggcggccgcacaaaggacaaaaaggacccgacagcacaccccca

SEQ ID NO: 78153 - RNA, 78 nt, Homo sapiens
gcccagccccgaagggcacaccggaggccaggcgcgggccaccccacggggcaacaagggccaccagcagggacggcg

SEQ ID NO: 78154 - RNA, 55 nt, Homo sapiens
gggacgccaggagacgagccccgggcaggacagcagaccacagcccggcaggccc

SEQ ID NO: 78155 - RNA, 72 nt, Homo sapiens
ggcagccagaacacacaggcacggccaagagagcgaggccaccaggacaccccgacacaccacacaggaagg

SEQ ID NO: 78156 - RNA, 67 nt, Homo sapiens
aaacgaggaaaggaaaccacaaacaccgaagaggaggacgcagcagagagggcaggcgcaagcaggg

SEQ ID NO: 78157 - RNA, 89 nt, Homo sapiens
cggcccgggcgccacgagccggcggcggacggcaggcccccacagggcaggaagccgccgcccagccaggacggggaggagcagcagcc

SEQ ID NO: 78158 - RNA, 77 nt, Homo sapiens
caaagagcgacgcacagggaccagggacacaacgcaacaggcacggagggcccaggaagcagccaacccccagggaa

SEQ ID NO: 78159 - RNA, 68 nt, Homo sapiens
ggagcggggcgacggccccacccccgagcccagcaccgcgggaagggacagacaggacgagaggacag

SEQ ID NO: 78160 - RNA, 71 nt, Homo sapiens
agcaagacacaaggacgcagcaaagaagagcgacgagagccacaaggagaaaccaccgagagagcaaagca

SEQ ID NO: 78161 - RNA, 85 nt, Homo sapiens
cgccgcccgccacacccgccgccagaacaccagcaggaaaaaagagcggcagaaggccaaacggccgagcaggcgagcgaagaga

SEQ ID NO: 78162 - RNA, 69 nt, Homo sapiens
ccggcaccacacgcagaacgggcggacgggcgcccagccagggaaagaacgccggacaacagcggcgaa

SEQ ID NO: 78163 - RNA, 81 nt, Homo sapiens
cagcaccggggggaccagccagcccgggagggagcgagcccggggaacagggaccgacccggcgcgcgcaacacaacggca

SEQ ID NO: 78164 - RNA, 69 nt, Homo sapiens
gggaagaccgcgcccgcggagagcccaaacaccaccaccaagggaaacacaagaccggaggccacggac

SEQ ID NO: 78165 - RNA, 74 nt, Homo sapiens
caaggcaaagcgcagaaaccacagggagagcaagccacacccagaaccagcagcccgcagaagaaaggcaaacc

SEQ ID NO: 78166 - RNA, 77 nt, Homo sapiens
ggcaccgcccaccaccaggggaacacaagcagcgaggaaaacggaaaaggacaccggagacacaagaaagagaagaa

SEQ ID NO: 78167 - RNA, 66 nt, Homo sapiens
acggcgagcgcgagcggcgcgagaaagcaccgccagggaggagagcggggcacgcgcccaacgcgc

SEQ ID NO: 78168 - RNA, 68 nt, Homo sapiens
gaagaagaggagaagaaaagaccagacgaggcaaaaagggagcgggaccacgcgggcgccccagaaag

SEQ ID NO: 78169 - RNA, 75 nt, Homo sapiens
acccgagccgcaagcagcgcggccaagccacgccaacggaggacaaccggaaacacacaggaacagaccaggcac

SEQ ID NO: 78170 - RNA, 84 nt, Homo sapiens
aggaaacacccaccccgcgaggcccccgggcccgggaaaacacacggccagaggcgaggggacggcggggagcgcaggacagac

SEQ ID NO: 78171 - RNA, 62 nt, Homo sapiens
acggagccggacacgaaacgcccaggcgaggacacaccaggagccgggaaaaggaaggccca

SEQ ID NO: 78172 - RNA, 75 nt, Homo sapiens
gacgaagacaccgacgggcagggccacaccaccgagagcagccaccccaagccacggaacgcccaaaacagccca

SEQ ID NO: 78173 - RNA, 79 nt, Homo sapiens
ggaaagaaaaagccaaagaacaccacagaaagaccgaagacaaaaaccagaagacaagcagcgggaggggccaaaggga

SEQ ID NO: 78174 - RNA, 50 nt, Homo sapiens
agggagagccacccaggaggagagcaagaagagggcgcccccaaaggccc

SEQ ID NO: 78175 - RNA, 64 nt, Homo sapiens
cgaacagacagaaggagaaaggaggaaaaacagccaggcacgcagaagggagcaccgggagaag

SEQ ID NO: 78176 - RNA, 79 nt, Homo sapiens
cgcaagagcagcacaaagaaggaaaaaggaacgaaccaaccaggcgaagacggaaagacaccagaacgaacacgcaagg

SEQ ID NO: 78177 - RNA, 75 nt, Homo sapiens
cagacaccgggggcgcccggaggagcccgaagacagccccgacgaacagagaacgaggaagaaaaggaaacccaa

SEQ ID NO: 78178 - RNA, 74 nt, Homo sapiens
gaacgcagaaagcagcccgagccccagaccagcccaggagacgcagacgcggaaacccgaacaagagcggcgcg

SEQ ID NO: 78179 - RNA, 64 nt, Homo sapiens
caacggaccgccccaaagagggaggacaacaaaaggagagaaaagggagaaaagaaggcaacag

SEQ ID NO: 78180 - RNA, 78 nt, Homo sapiens
gaagccgggacgacggccccagccagcgacggagacgcccgcagagaagggcgcccaaggagacaccagccgccagcc

SEQ ID NO: 78181 - RNA, 86 nt, Homo sapiens
aaagaagagcccgaacaaacaaacacccagaaacaagagacagcagcggagcggagacgcagccgccgcgggcgaaggcagaccca

SEQ ID NO: 78182 - RNA, 109 nt, Homo sapiens
ccagaagagcagggcaggggacccccgagcgggggcggcccacggggacgagaaaggagggaggaagaggcgcggcaagggcgcggcaagaaaaccggggccgccccac

SEQ ID NO: 78183 - RNA, 72 nt, Homo sapiens
ccgacggaccccagcgccgggcagcgagcaaaaacagcaaaagaaaagaaaaaacaagaaggagcgacaaaa

SEQ ID NO: 78184 - RNA, 81 nt, Homo sapiens
cgaagcggccaaagccgcccagacggccaccggcgggaggaacaaaaggcacagcgccgaggcccagagagaccccagaag

SEQ ID NO: 78185 - RNA, 77 nt, Homo sapiens
ccgggccccaacaacccggcacgggcccagacgcagacaaacgagaagagagaagagggacagaaagagcagcaaaa

SEQ ID NO: 78186 - RNA, 69 nt, Homo sapiens
gacaaacccagaacgcagaaccacggacacaaaagcgaaagccggacacaccaaacgcagcccagcaag

SEQ ID NO: 78187 - RNA, 68 nt, Homo sapiens
gggaagacgagagagagagggaggcaggcgacaacagaggagaaggcgaagaaaacagccaagcacca

SEQ ID NO: 78188 - RNA, 58 nt, Homo sapiens
ggccagggagagacccaaagccaacagcaggcaggggcgcacccagggacccagaggg

SEQ ID NO: 78189 - RNA, 71 nt, Homo sapiens
ccacggcccccgccaccggcgaaagaaggagacccgagggacagcagaccacagcccggcaggcccaaaaa

SEQ ID NO: 78190 - RNA, 73 nt, Homo sapiens
agggaaggaagagaagaaagcagacagcgacgaaacagggaagaaagaacagaggcaaggccagagaaggcgg

SEQ ID NO: 78191 - RNA, 70 nt, Homo sapiens
ggaaccacgagaacaaaaaccaggcgaaaggcgaggcagaggggcaggaagggaagagaagaagaccagg

SEQ ID NO: 78192 - RNA, 86 nt, Homo sapiens
cggcaggagcaagccaagaaagaaccgaagacagaaacgaacaggagagagcagccgggcggcccagccaaacaggccccgagagc

SEQ ID NO: 78193 - RNA, 75 nt, Homo sapiens
cagaccaccagagaagggaggcagggcaacgggggaagggccagaagacagcgaggagccaaggacccaagagga

SEQ ID NO: 78194 - RNA, 77 nt, Homo sapiens
gacccaacagagcacgcaaaggacaacgaagaaaggagcacaaaagaacaaacacacgagccaaaagcacaaacaag

SEQ ID NO: 78195 - RNA, 80 nt, Homo sapiens
accaaccaacaccgaggagcaaccaggcacacgaccaagacgcaagcggcagccgcagccgccgcaaagggacgacgaag

SEQ ID NO: 78196 - RNA, 78 nt, Homo sapiens
gaacccaacagagacccgcccacgcagcggaaacagaaggccggcaagccgcgagggacaacaagaaggcccggaagc

SEQ ID NO: 78197 - RNA, 78 nt, Homo sapiens
caaacccccgacagcgccaggcccagacgccaacgcaggagcacccagggagacacagcacagaaccgcccggaaacc

SEQ ID NO: 78198 - RNA, 78 nt, Homo sapiens
cgcaaacacagacaaaaggagagacgccagaagcaagaggacagcacaaaaacacaccaagagagcgcgacagacgca

SEQ ID NO: 78199 - RNA, 75 nt, Homo sapiens
ggcaggagaggccggcgccgccgaccgggagggcggagaacggaaaagcaccaggaagcagagaggaccgcagaa

SEQ ID NO: 78200 - RNA, 84 nt, Homo sapiens
gcagagggggcacaggaccggagccgggcgggccacagagacagagacagacgaggagaaggcagagcccccccaggcagaagc

SEQ ID NO: 78201 - RNA, 71 nt, Homo sapiens
gagcaggaaccggagcaggcggccgagagcaggaggcgggcgcgcagccccgccggacggcccgggagagg

SEQ ID NO: 78202 - RNA, 80 nt, Homo sapiens
accggagggggaagaaaacaaccaacagagcccgcagagcaccaggcccaccggaaaggaggaaaggaaccaggaaacac

SEQ ID NO: 78203 - RNA, 63 nt, Homo sapiens
cagccggacgccaccccaggcaacgcccgaggacggaaagagagcgcccgcgcccaggcggag

SEQ ID NO: 78204 - RNA, 77 nt, Homo sapiens
gagcaaagcacccaccagaaagaggcacagccccaaaagaaaggcaggaacaagacccgcagaggagaagacaaggc

SEQ ID NO: 78205 - RNA, 64 nt, Homo sapiens
agccaaggaaccacccacaacgcagcgagcgaggggaaaaggaaggaaaccgggccagggagac

SEQ ID NO: 78206 - RNA, 79 nt, Homo sapiens
ccacaagcgcggaggccccggagagaggcggaggaccacgaaggcagggaagaacaccgcgcccaggcgcgaagccaag

SEQ ID NO: 78207 - RNA, 72 nt, Homo sapiens
cgggcgcccggcgcaacacaggcaagagggcccgggaagggagggggacacaagaacaaccagaggaaaccg

SEQ ID NO: 78208 - RNA, 80 nt, Homo sapiens
cggcccccaaagagcgggaacagacaaaagaggagggggagccgcgggccaggacccgagacaacaccaagaagaaaccc

SEQ ID NO: 78209 - RNA, 75 nt, Homo sapiens
cgcccgggcgcccaccgaacgaccagacccagaccccggcacggaccacgccggaaacaacgaagcaagcccaag

SEQ ID NO: 78210 - RNA, 77 nt, Homo sapiens
ggggagcaaaaccaacgccggccggagcagcagcccgagcgcggaaaccgcggccggcacaaaaccggcacacaaaa

SEQ ID NO: 78211 - RNA, 77 nt, Homo sapiens
gcgcagagaagccgagcaagaagaggacaaggaggccaagcagcgacgccagcagcccccacaggcagaagacacaa

SEQ ID NO: 78212 - RNA, 72 nt, Homo sapiens
caagccccaccagccagaagcacagacagcgggggaccaagaggaccaccaacagcaaggaaaccggcagcg

SEQ ID NO: 78213 - RNA, 76 nt, Homo sapiens
agcgagcagacgacaagccgggagcgggcggccaaccaggagggagcaaaggacggcacgggaaaaacgccaaaag

SEQ ID NO: 78214 - RNA, 80 nt, Homo sapiens
ccgcggggacggcccccccccgcccggggggacgcgcacgagccgggaccaagaggcgacagagagaaaacagagcagga

SEQ ID NO: 78215 - RNA, 76 nt, Homo sapiens
aggaccaaaagaggaagaagcgggacccgcagggcaaaggggggaagaacaagggacgcaacccaccacgaagcgg

SEQ ID NO: 78216 - RNA, 77 nt, Homo sapiens
caggagccggggcggcgcaggaggagccgaggcgagccaacagcacgaccgcgcgaagcggccaaacccccacccac

SEQ ID NO: 78217 - RNA, 84 nt, Homo sapiens
gccacagaaccgcccaaaaaggcaaagaaaccacgaggacaagccagggagacacgaccaccgcccgagcgaagcaggccggga

SEQ ID NO: 78218 - RNA, 70 nt, Homo sapiens
gagccaagaacacggccacccaacagaagcaccacacccccaaggcaagggcgcaaagccaacaacgagc

SEQ ID NO: 78219 - RNA, 54 nt, Homo sapiens
cagaagccaaagggcagcgggggcggaacaccaaccaggaccacccagcaagca

SEQ ID NO: 78220 - RNA, 86 nt, Homo sapiens
ccgggcccaaggccgcgccgaccgcacgcgcacggaacagcagcaaccccaggacaccagccgcaccgccgccgcggccgcaccgc

SEQ ID NO: 78221 - RNA, 64 nt, Homo sapiens
ggacgaacaggaggcagcccaaacaacggcaagcggagaagagcaaggccgaaccgagaggaag

SEQ ID NO: 78222 - RNA, 53 nt, Homo sapiens
agcagaaccgaaccccaacaccaaagcagaaagggccgccaaaacagggagag

SEQ ID NO: 78223 - RNA, 84 nt, Homo sapiens
cgaaacccagagaaaaagaaagccaccacccgggccagacccagagcccaccacaggaaaaaccagaagagaaaaaacaaaggg

SEQ ID NO: 78224 - RNA, 82 nt, Homo sapiens
cggggcccgcagcccaccagcaccgacgcgggaagaacgccagcggaccggaaggaaaccaccaacagccggcccagagagc

SEQ ID NO: 78225 - RNA, 54 nt, Homo sapiens
gaccagcaccagcccgaccagggagggggggcagcacaaacgggcgggggagga

SEQ ID NO: 78226 - RNA, 74 nt, Homo sapiens
cgggacagaaggaaagcggggaagaaaagcaggggcggcaggacacaaacccaggggagacaacaacaagccga

SEQ ID NO: 78227 - RNA, 56 nt, Homo sapiens
aagcagcgggggggcaggcgacgaagaaagaagcccggcgaggccggagggccacc

SEQ ID NO: 78228 - RNA, 47 nt, Homo sapiens
aaggcggggaagacccagaaaaacaagcgaagcaaacaggggcagga

SEQ ID NO: 78229 - RNA, 47 nt, Homo sapiens
gggaccagccggcaaaaacacccccgacagagaggcgcaggcaagac

SEQ ID NO: 78230 - RNA, 63 nt, Homo sapiens
cgccgcggcggcgcggagcacgggcagaaaggagccggagccccagccccaaaagcacgcacg

SEQ ID NO: 78231 - RNA, 62 nt, Homo sapiens
cagaagagcccggaaagacaaggccccagcagcaggcaaagggaaggcacagcggacgaggg

SEQ ID NO: 78232 - RNA, 76 nt, Homo sapiens
gccaggccggagaccccccccgcagggccagaagaacgaccaaaggaaaggaggacggcggacgaaggagccaaag

SEQ ID NO: 78233 - RNA, 82 nt, Homo sapiens
aaacacgacccgaagacggccaacgcagacaccagaagggcgggaggcagcggcccccacagagaaccaggaggaacacgga

SEQ ID NO: 78234 - RNA, 77 nt, Homo sapiens
cgggggccgcggccggaccgagcgcccgacccggcgaggggacaacagagccgacacagccaagaagcagagcaaaa

SEQ ID NO: 78235 - RNA, 90 nt, Homo sapiens
caaaagaaaacccaggcacacaaacgaagggagccggcaacacagcagccgcgaacccccagaaccgaaacgaccaccgagacgcccagc

SEQ ID NO: 78236 - RNA, 77 nt, Homo sapiens
cacaaggcccagaccggcgcggcagcccggagcgagagcgagagaagggaccagccagaagaaacaaccgacaaccc

SEQ ID NO: 78237 - RNA, 53 nt, Homo sapiens
caagggaggagccggaccggaaccaggacaggcgcaacagccagacccgccga

SEQ ID NO: 78238 - RNA, 84 nt, Homo sapiens
aagacaggcagaaaacgagaggccaccgcagcggcaggacgaaggaggcagagaccaacagaccagcaacaggccggcagggca

SEQ ID NO: 78239 - RNA, 75 nt, Homo sapiens
aagagcaggacagcacgagcagacagacacacgagacacgagacaggagagaaaggagagacaaaggaccagaca

SEQ ID NO: 78240 - RNA, 34 nt, Homo sapiens
acaaagaagacaaagcacgcgcccacgggacccc

SEQ ID NO: 78241 - RNA, 77 nt, Homo sapiens
agacggcgacgaagcagccaaacaccacacaggacaaagcagaaaacggagaagaagagcagggccaaggcaggccc

SEQ ID NO: 78242 - RNA, 87 nt, Homo sapiens
ccgagcaggcgagcgaacgacggcgccggaccgaaggcgcgaccacgacgagaagcgggggccgcagcggggcaccaacgcagggac

SEQ ID NO: 78243 - RNA, 80 nt, Homo sapiens
cgggggccgaggggccaaccagcgaagagcgacaagccgcggcagccgcggaccaccgccgccagggaccaagaaaacgg

SEQ ID NO: 78244 - RNA, 74 nt, Homo sapiens
agcaaagccagcgacagaagccagggggggggcgcagcaggcccagcaccagaagggcgagcaaagggaagagc

SEQ ID NO: 78245 - RNA, 79 nt, Homo sapiens
gcgccgggagccgcggcgagcgccccagccaggccgcgccggcaccccgaggcgagaacgcggacaagcaaacaaagag

SEQ ID NO: 78246 - RNA, 77 nt, Homo sapiens
caagcaaccacgcggggagccgacgccgaggcccaccgccaccgacggagcgcgccccaccgcggccgccggggaca

SEQ ID NO: 78247 - RNA, 59 nt, Homo sapiens
cgggagccgggggcagaggcgcggagccccagaagggcggacagcaaaaggagaaaaac

SEQ ID NO: 78248 - RNA, 59 nt, Homo sapiens
cagaaacggaggacaagaagccggacacaaggcgccacggcagcgacggaagggcgaaa

SEQ ID NO: 78249 - RNA, 77 nt, Homo sapiens
ccgcggaacgcccaccgcggagagcagcacgaccccagcacagcagggcagaaaagaacagacccagaagaagcgaa

SEQ ID NO: 78250 - RNA, 81 nt, Homo sapiens
gcaaccagcggggcaccgggacgggccgagccgagcagaaggaagccaaccgggggagcgaaagacccgcaggcgccgaag

SEQ ID NO: 78251 - RNA, 59 nt, Homo sapiens
gaacgccacgagcccccaggggacggcgaacgcaggacgacgggggacagaagaggaaa

SEQ ID NO: 78252 - RNA, 74 nt, Homo sapiens
ggaaacgagggacaacacagacccaccagcagagacggaaaaaggaccagacaaagaaacaaagaaaaaacgcg

SEQ ID NO: 78253 - RNA, 81 nt, Homo sapiens
gccaggaggacggaaaagaagcacagaaaaggagacgcacccagagaaagaggccacacgcagagagggagacggggcggc

SEQ ID NO: 78254 - RNA, 59 nt, Homo sapiens
gggacaagacccacagcaaagccagcgacagaagccaggggaaccgcccaaaagcccgc

SEQ ID NO: 78255 - RNA, 77 nt, Homo sapiens
gcggcggcgggaacgagggcgagcagaggacgacaggccgggagcgaaggaagaggacaccccaagacaaaacagcc

SEQ ID NO: 78256 - RNA, 62 nt, Homo sapiens
aaaaagcgggaaggccggaaaggaccagaccgcccaggaaacgccccaggcagaagaacaag

SEQ ID NO: 78257 - RNA, 73 nt, Homo sapiens
acagcacgggccaggcaacaccggcggccagcaccggacaggaggagggaggaagaggcgcggcaagggcgcg

SEQ ID NO: 78258 - RNA, 81 nt, Homo sapiens
cggggaaccaccaggacccagcaggccccagaaagaccaccaggagcacacggacaggcccaaggcaagccacccccccgg

SEQ ID NO: 78259 - RNA, 36 nt, Homo sapiens
gcgaccgcacggagcgaagagagagaggggcgccag

SEQ ID NO: 78260 - RNA, 75 nt, Homo sapiens
cgagaggaggaagaagaagaagaagaaaaagccaaccagagagcgaccagaaagaaacacggcgcaaacggccga

SEQ ID NO: 78261 - RNA, 78 nt, Homo sapiens
gaaaaggaagaacagaaacgggcgccccaacagcagacaaggcagcgcaggaaccaggaccgggacaaaacagaggag

SEQ ID NO: 78262 - RNA, 74 nt, Homo sapiens
ccgggcccgccccggccgcggccgggcccagcaccaggacaaaagaagggcagcacaaaggaaagccccaaacc

SEQ ID NO: 78263 - RNA, 73 nt, Homo sapiens
gccaagcggggagcgcccgcgacagaggagggaggaaaacaaccgagggcagagagcccagccccaagcagca

SEQ ID NO: 78264 - RNA, 70 nt, Homo sapiens
ccaagggagcgcacgacccacgcggaacgagggagggcaacaaagagaaaccaaggagagcaaacaggaa

SEQ ID NO: 78265 - RNA, 82 nt, Homo sapiens
agccaccacgcaccgcccccacccccacaccccgcgcccgcaacccagaccaagggcacaaggagaagacgaccccgacgca

SEQ ID NO: 78266 - RNA, 87 nt, Homo sapiens
ggagagaaaacgcaaggaaaggaacaggaacagaggcccaagaacacgacgaacgcagacacccgagcgacacaggaagaacaagaa

SEQ ID NO: 78267 - RNA, 74 nt, Homo sapiens
agcccgaacgcagaagacacacaaaccaggccaagaggaggaccagaaggaacaggcaggaaaacgacccaaaa

SEQ ID NO: 78268 - RNA, 78 nt, Homo sapiens
accgggacagggaccgaccaggggagggaagcccagaacagcagggcagaaaagaacagacccagaagaagcgaaagg

SEQ ID NO: 78269 - RNA, 73 nt, Homo sapiens
gggaggaggccccaaagggcgagagaccacaggaccgacgcaaacgcaagcaacaccacggaaaaagcaaagc

SEQ ID NO: 78270 - RNA, 58 nt, Homo sapiens
accagccaaggacccacgggacagcaagaagaaagccagaggaagccagcccacgcgc

SEQ ID NO: 78271 - RNA, 54 nt, Homo sapiens
cgcgagcgcaagaaacggacaaggcaaaaccagcaagcggacccagacaaaagg

SEQ ID NO: 78272 - RNA, 68 nt, Homo sapiens
ccagaacgacgaaggggacacacgggccacaaacagcgcgagccacaaggcaaggaagcaggcggcac

SEQ ID NO: 78273 - RNA, 74 nt, Homo sapiens
cgagcgcgcggaggcggaggcgggacgcagaaaacagacacacagcggagacaagcagggccggcaggaggcgg

SEQ ID NO: 78274 - RNA, 77 nt, Homo sapiens
cgccccagaaccggcgaaaaccggagagggacaccggccaggcgcagcagacccaccagaggaggaagaagagaagg

SEQ ID NO: 78275 - RNA, 80 nt, Homo sapiens
cgcgacagaggagggaggaaaacaaccgagggcagagcgaagccgacgagcccgaacagacgcaccagcgggaggaagag

SEQ ID NO: 78276 - RNA, 82 nt, Homo sapiens
gaggcagcccaccagggaccgcccaggaaaccagcagagcccaggcacgggaagcgcccacgggagagccgcagcgaagggc

SEQ ID NO: 78277 - RNA, 50 nt, Homo sapiens
ggaccaaaaacccacgccaggcgggcgagaaggaggaaccggccaaagcc

SEQ ID NO: 78278 - RNA, 81 nt, Homo sapiens
aacagcaacacacagaggcccacagcaccggaaaggagaggggcagaccaggagacccccagcccccggaagaaaagggcc

SEQ ID NO: 78279 - RNA, 80 nt, Homo sapiens
gccaagccccccaggagaaggagcaggacacgagacacaggccgcacgcacgcgggggaccccaagggaaaccggccgca

SEQ ID NO: 78280 - RNA, 70 nt, Homo sapiens
ccgcccgacgcccggcgcacggggcgcacaccacggcccgggggcaaagaaaaaggagagaaaaagaggc

SEQ ID NO: 78281 - RNA, 80 nt, Homo sapiens
ggccacagaaagcagcccaccagcaggcgggacccgcaccggaaggccacgccaagaacaccggaagaacagacacacag

SEQ ID NO: 78282 - RNA, 72 nt, Homo sapiens
caaaaccaaccacaaggcagcccagacgcaggagagagagacgccggaagaaagaaaggagacggaagcaac

SEQ ID NO: 78283 - RNA, 94 nt, Homo sapiens
caacaacgcgacaaaggagagaaacagccaaaacagcacaacagcgagaaggaaagagcagcgaaacaaagagaacagcaacacacagaggccc

SEQ ID NO: 78284 - RNA, 55 nt, Homo sapiens
agcaaacgcaaagagcggaaaaaaaagggaggaaagcaccggggaagaaaacagc

SEQ ID NO: 78285 - RNA, 78 nt, Homo sapiens
caaccgccgcgaaacccaagccgccgcgaggagcggcgcgggccccccccaccgcgcgggaaagaaaaacgagaggac

SEQ ID NO: 78286 - RNA, 77 nt, Homo sapiens
caggagccccagaggcagcccagcagcaggagcagggcgcagaagccgagaacgggagaaagcgggacaacggaggc

SEQ ID NO: 78287 - RNA, 75 nt, Homo sapiens
accaaggcccgggaaaagggaagcccggacggccccggacaccaggaaacaggagaaccggggcaagagacggca

SEQ ID NO: 78288 - RNA, 61 nt, Homo sapiens
gaaagagcaacagcagggcaacagggacaagacggacagaaacgaacagcgggcgagccag

SEQ ID NO: 78289 - RNA, 94 nt, Homo sapiens
cgcaaacgacacccagggacaaagagacggacagaacgccggacaggggcaaccggacgcaagggcgccgagccccgcggaacaacacgagaga

SEQ ID NO: 78290 - RNA, 78 nt, Homo sapiens
ggcagggccaccggccgcgccaggacgggccgcgccgcgcggcgccgggggccacaggcaccacaagcacggaagggg

SEQ ID NO: 78291 - RNA, 80 nt, Homo sapiens
acaggccagcgcggccaagacccgccgcaagggcgaaaagccaggagcaaaagacgagcgcgacgccaccagcaacgaac

SEQ ID NO: 78292 - RNA, 70 nt, Homo sapiens
aacccgaccgacggagaggggaaaagccacggcaggacaaggggcagaccacaaggagagaagagaggga

SEQ ID NO: 78293 - RNA, 81 nt, Homo sapiens
aaagggaacccagacaccagaagcgcaagcagaagcaagggacaagggccacacccccagcggacaggcaagacaggccac

SEQ ID NO: 78294 - RNA, 82 nt, Homo sapiens
accgaccgggcacgaggagaagaggcagccgagcagagcgggagaggggagccggcggcagagcgcggccgcccgcagggcc

SEQ ID NO: 78295 - RNA, 79 nt, Homo sapiens
acgcagggcgcccccggcccaccagaagagccgacaagccggcagaaggcagacacaaacaaaagggcagccacacgag

SEQ ID NO: 78296 - RNA, 89 nt, Homo sapiens
cacgcgcgggcgggcagccccgggccaggccgcggccggggcaggagcgcagacacacggcagggaaccccaccccggaaggcggggac

SEQ ID NO: 78297 - RNA, 72 nt, Homo sapiens
cgagggagaacaggcgggcgccgagcgaacgcgcaacagggccgcacgcaaggggacaaggaccacaggcag

SEQ ID NO: 78298 - RNA, 90 nt, Homo sapiens
cccagcgccaccaccacgccagccgcaccagccgcccaagccgcacagccgcggcggcagcagcaggagagggcggagggggcagggcag

SEQ ID NO: 78299 - RNA, 80 nt, Homo sapiens
cgccccagcgaggaagaggacaggagcggagagaaacggaacaccgggcagagagaacagagagacaaacagagacgaaa

SEQ ID NO: 78300 - RNA, 80 nt, Homo sapiens
accgagagaggaggagccagacgacaagcacacacaggcgcgaaacggaaaaaggaaaaaagcagagagaacacaagcca

SEQ ID NO: 78301 - RNA, 51 nt, Homo sapiens
ggaagaacgccagcaggcggacaggagagacaacggaggcaagaaagacgg

SEQ ID NO: 78302 - RNA, 59 nt, Homo sapiens
aacccagccgcaccgcccgagaaaagcacagcacccgcaggccaacacaggaccaacag

SEQ ID NO: 78303 - RNA, 76 nt, Homo sapiens
ccaaagaaccaacgacccgaggaccccaggaacaccaacagagaacagcaaaccacaccggacaagcaggggagaa

SEQ ID NO: 78304 - RNA, 79 nt, Homo sapiens
ccgggaaccgaccgcggcgcgccacccggccgcagcaaagccagcccaaagcgagaggacagaccagcgaaagggggag

SEQ ID NO: 78305 - RNA, 79 nt, Homo sapiens
ccagaacggccacgcagcgcggacccggcggcggggcccaggggccacacgcagggaacgagcgcagaggacaagaccc

SEQ ID NO: 78306 - RNA, 81 nt, Homo sapiens
cccaacgcacagccagggagccaagcgccgcccggccggcggagaacggaaaagcaccaggaagcagagaggaccgcagaa

SEQ ID NO: 78307 - RNA, 77 nt, Homo sapiens
ccccagcaggaccaaccaggccaaaaccaggcacagcaagcaacccggccgaggggggcaccccgggaggaagcaac

SEQ ID NO: 78308 - RNA, 72 nt, Homo sapiens
ccagaacagaaagaaaggcagaaggcaaaaggcaaaccggcggaagcggagaagacccagcgaggagcaaga

SEQ ID NO: 78309 - RNA, 43 nt, Homo sapiens
cccccgagggcgggaacagcgggggaaaagccacgcagaaaaa

SEQ ID NO: 78310 - RNA, 56 nt, Homo sapiens
cgagaacagccagagagggagaagaaaaagcagaaaggaacagaaaacaaaagaac

SEQ ID NO: 78311 - RNA, 66 nt, Homo sapiens
acaagggagacacgagcaaaaacagccacccaagcccagcaaggacaaagggggcaaaaaacaccc

SEQ ID NO: 78312 - RNA, 85 nt, Homo sapiens
gaggccgcgggacccgaaagccgcgggaaaaaccgggaaaaccggaggccagcccacccagagaggccgaaaaccggcgacgagg

SEQ ID NO: 78313 - RNA, 75 nt, Homo sapiens
ccaaacgacaacagggcaaaaaaagggcggaaaccgcacaggagacgagaaaacccccgaaacagagaaaccagc

SEQ ID NO: 78314 - RNA, 82 nt, Homo sapiens
agccgcgggaccacaaagcacgacggcacccgggggccacacgcaggccccgcgccaggcgccaggaaggaggagccaagac

SEQ ID NO: 78315 - RNA, 78 nt, Homo sapiens
cgcggccaggaggcacacccgcccgcagaagagagcgaccggagcggggaacacgggggcacggggaagaaagccgag

SEQ ID NO: 78316 - RNA, 73 nt, Homo sapiens
cccagaggagggccccaccacaccaaaggaaacgagacagagagaaaaacaggccaggaagagcaccaagcac

SEQ ID NO: 78317 - RNA, 66 nt, Homo sapiens
gcgaacacgacacagggcccagcacaacacaaaagagaagagcaccaggccagggggccaaaaccc

SEQ ID NO: 78318 - RNA, 115 nt, Homo sapiens
agccgcggccaagaagcagaagcgagcaggacgagaacagcaaccagaccccggagacgagaaggcaaacagcgcacagcaagggcagaggaaaaggacaccgaagaaagacaac

SEQ ID NO: 78319 - RNA, 77 nt, Homo sapiens
acacgcggcggcgcgggggccggccgcgcggacgaaggagacgaagggcggagaacggaaaagcaccaggaagcaga

SEQ ID NO: 78320 - RNA, 75 nt, Homo sapiens
aacagggacgccagccgcagaggaagacccggacagagcgggagccaccagcgccaaagggaagccaggagcccg

SEQ ID NO: 78321 - RNA, 82 nt, Homo sapiens
ccaggagagagcagccagagggcgcagcccgaggacgagagaccggcgcaggagggcgccagcccggcgcgacagcagcaca

SEQ ID NO: 78322 - RNA, 69 nt, Homo sapiens
aaaaagaccaaacgagaagaggccagacagaaacccaaagaaccaaagccgagagggaaaagacgggcc

SEQ ID NO: 78323 - RNA, 82 nt, Homo sapiens
ggagcccgacgagccgacgaccgacccgcacggcacgccgaccccgggagcagcgcaggagaccagaccacagaagagccgc

SEQ ID NO: 78324 - RNA, 79 nt, Homo sapiens
cagccccaacgggaagcaccgagaccagaagaaagcccccgggcacaggaaagcggagcgacaaaagagaagaccagaa

SEQ ID NO: 78325 - RNA, 55 nt, Homo sapiens
gacagcaaaaacgcgcaggggaaccggagaggacacagcagaagagaacacgccc

SEQ ID NO: 78326 - RNA, 61 nt, Homo sapiens
gcgcgcgcgcgcgcgcagcaccaggagaggagggaacgcggagcggccggagcagacagcg

SEQ ID NO: 78327 - RNA, 79 nt, Homo sapiens
cccaggggcccggagcccggaccggcggcagcggacggagccccggcgagcccaagccgaaggacaagggccaggagaa

SEQ ID NO: 78328 - RNA, 65 nt, Homo sapiens
cagccccgcaggagaagcgaaaagaaacccaagaaggaggacccgcagacacaacggaggcccga

SEQ ID NO: 78329 - RNA, 53 nt, Homo sapiens
gcaacaccccggaaacacgacaagccaaagcaaagcgcagaaacggagggcag

SEQ ID NO: 78330 - RNA, 83 nt, Homo sapiens
gagaggaggcggcgcacagggagaagagggcggagagagacgaacccaagcccaccaggggcaacagaagaagcccgaggagc

SEQ ID NO: 78331 - RNA, 73 nt, Homo sapiens
caaggcaaaggcggcaggcacagaggcaaggacagggacaagcgcacagcggagaaagcagcgcggccaggag

SEQ ID NO: 78332 - RNA, 88 nt, Homo sapiens
ggccccagcacggagacacacagacccaggcagcccaggcggcagggaaaaagcccggagccgacagcaacgaccgcaggccagagca

SEQ ID NO: 78333 - RNA, 70 nt, Homo sapiens
cgcgcggacagcaagcaccaaggggggacacagcgagccacgcgccaggaagcccggccaaggagccaac

SEQ ID NO: 78334 - RNA, 77 nt, Homo sapiens
gaaggacccaccgagaggagggagaacacaggaacaggcgcgggggagcgacagaaaagcagcacaacccccggaga

SEQ ID NO: 78335 - RNA, 69 nt, Homo sapiens
aggaccaagaaccagccaggaagcacccaacaggaggaagagaaaagcaaaggaacaagggacacccac

SEQ ID NO: 78336 - RNA, 114 nt, Homo sapiens
gggcagccagaagaaggaccggaagcacacaacaggaaaacaaaagaggagaaagcgaagacacaggagaaacggacaaagagcaagcagccccgagaagaagaaccaaagcga

SEQ ID NO: 78337 - RNA, 74 nt, Homo sapiens
gggagcagggagccgcgagcgcgggaagacgccgcgaaagcagcgggagggcaacaggcaccgacagaggcgag

SEQ ID NO: 78338 - RNA, 86 nt, Homo sapiens
ccccccagaaggcaccaccacagccgcccaccggaaggccaccccgcaggccaagcccgcaggccacgcaagcgggccaggcagag

SEQ ID NO: 78339 - RNA, 73 nt, Homo sapiens
gcagacgggaagaacccagaaagaaaggagcgccccaaaaggaaacaggaaacccagacgacaaggaaggcca

SEQ ID NO: 78340 - RNA, 70 nt, Homo sapiens
gcccggagccaagacgcaacaggagggccagacaaggggaacacaagaggagagaaggggaccgcaggga

SEQ ID NO: 78341 - RNA, 72 nt, Homo sapiens
gagacaggccagaacggccaaggacgagggcgagaggaccggacacagacaaaaaaaggcagaaagacacca

SEQ ID NO: 78342 - RNA, 83 nt, Homo sapiens
gagaagccccgcacagcagagagcaacccgaaaagagccaccaaaaccggcaaaggccgcgaggaaccacgaagagacaaaag

SEQ ID NO: 78343 - RNA, 77 nt, Homo sapiens
aagccagaaaccggccaaggccgagaggaaggaaacacaggggacaacaagcgggaaagagaacagggcaggaaagg

SEQ ID NO: 78344 - RNA, 73 nt, Homo sapiens
cacgaaagccacaaaaggggagaggcccaggaggacaggaagcgggacgaccaggacacaccacgaggaggac

SEQ ID NO: 78345 - RNA, 72 nt, Homo sapiens
cacagaagcccaacaggaggcaggggaagcacaaaagcgcacccgcgccagcgaggaccggaacgggggaag

SEQ ID NO: 78346 - RNA, 77 nt, Homo sapiens
gaaaacgaccacacggaccaacaggaggcaaagggaccccaagaaaccaaagggcaagagccgcagcccggcagaca

SEQ ID NO: 78347 - RNA, 56 nt, Homo sapiens
cgccgacggcgacggcaccgggagaaaggcgaacaagaggcgccagcgggcgcgcc

SEQ ID NO: 78348 - RNA, 70 nt, Homo sapiens
cggcgaggcaccccaacagcagagaaacaaggggggggaagcagggaaaggccggagagaggaagcggcc

SEQ ID NO: 78349 - RNA, 74 nt, Homo sapiens
agggcaacaccaaaaacaaaacgaaccaggacggcaaaaccaggagaggaagcacaggacgagcaggccagcac

SEQ ID NO: 78350 - RNA, 70 nt, Homo sapiens
cagcgcacaagaccaaaggaacgggcacaaccacggggcagaggcgcgcgcacggcgccaccccccgccc

SEQ ID NO: 78351 - RNA, 66 nt, Homo sapiens
gggaggagagagggagagccaaagaagaggcggagaagaacccaaccaaaaccaggcggcaacccc

SEQ ID NO: 78352 - RNA, 72 nt, Homo sapiens
cagcggcggcgccagcagccagccggcacgccaccgacaagcaagccgaagagaaagagggaagcagagacg

SEQ ID NO: 78353 - RNA, 74 nt, Homo sapiens
cccacaacccaagacagacacacagaaacagggaacacaaaaacagagagcagaccaccaaaacccccaaacaa

SEQ ID NO: 78354 - RNA, 72 nt, Homo sapiens
ccagcggccgcgcacccccggccggaggcaccagcgcaccgacgagagggcgcaccgcgccggagcccgacc

SEQ ID NO: 78355 - RNA, 70 nt, Homo sapiens
gcaaaagagcagaaaccgaggcaagacgagagcagcacaaagcaaggggcaggcccggacccaggggcgc

SEQ ID NO: 78356 - RNA, 83 nt, Homo sapiens
gagacgcagagggagaggcgaccgcgcgcgggggaacagcggagggcaaggcgggaacaccaacccccaggaccgggcagacg

SEQ ID NO: 78357 - RNA, 56 nt, Homo sapiens
acgagaaaagacggagccaggcaaagcaagaaagaccacacagggaaacgaccagg

SEQ ID NO: 78358 - RNA, 75 nt, Homo sapiens
cgaggccagcacgggaacgcgaagcgccaaagccagacaaacccaagcaggcgccagcccgaggacggggcaaga

SEQ ID NO: 78359 - RNA, 69 nt, Homo sapiens
cccagggccaggcgccgccagaacgggaacacgagccaagcgaggagaagaacccacaagagcgggaga

SEQ ID NO: 78360 - RNA, 77 nt, Homo sapiens
cagcagcgagcaccgccaagcggccaccggacgagccgcgagaaggggccagcaaagacggagcgggaagaaggggc

SEQ ID NO: 78361 - RNA, 68 nt, Homo sapiens
cgaggagaagcgcagcgacggcgcgggagagcgcgccagccggccgcgagagaccccccggcgaaggg

SEQ ID NO: 78362 - RNA, 76 nt, Homo sapiens
caccagaagggacagggccagccccagagagaaaagcagaaacaccagaagggaggaagacgggcaaaggagccga

SEQ ID NO: 78363 - RNA, 75 nt, Homo sapiens
caaagggcgaaacacccaaggcggcgcaaaggcggggcaccaggcccagacggcgaacccgagcaagcaaccacc

SEQ ID NO: 78364 - RNA, 72 nt, Homo sapiens
gaaagaggacaacagacgggagcgagcaacaacggccaaaaccgaggaacaacagggacagacagggcaccc

SEQ ID NO: 78365 - RNA, 60 nt, Homo sapiens
agaacaaaaggagcaagcccgccgacccgaaggaaacaggccggacagcacgcacgacgg

SEQ ID NO: 78366 - RNA, 75 nt, Homo sapiens
caaaagcaggcaaaggagcggggaacaccaccagccagcgggaggaagcgcacaccgccccacaccccagcaagg

SEQ ID NO: 78367 - RNA, 71 nt, Homo sapiens
ccagaggaaggcagcaccaggaagacaggggaacacccccagagagagagaaggcagcaggaagaaacagc

SEQ ID NO: 78368 - RNA, 76 nt, Homo sapiens
caggcacccgggcccagccgggaacccccacgcggccagcgaaaacgcccagagaagacggaacaagaaaggacca

SEQ ID NO: 78369 - RNA, 73 nt, Homo sapiens
acgaacagacaaagagcacagcgccacccagagccacgcggaacaaaggagcaggaagaggaggaagagaacc

SEQ ID NO: 78370 - RNA, 81 nt, Homo sapiens
gcaccagacaggaccacgacaaagggcaccgaggaggccggaaggaaccaaggaggagaccccaggcacagaggggagaag

SEQ ID NO: 78371 - RNA, 73 nt, Homo sapiens
acccgggacaaggcagacgggagcgcaaggcgccccaaggccagacaaaacgcacgcacagcggggaaaagga

SEQ ID NO: 78372 - RNA, 82 nt, Homo sapiens
ggcggagagaaccagcgaggacgaggaacccggacgccaaaaagcaccccaacggcagcccccgcacacagcagggccccgg

SEQ ID NO: 78373 - RNA, 74 nt, Homo sapiens
cagccaagcagcgggaagccagcccaccagagaggcaccgagcacccgaggggcggcgggaaaacaggaaaagc

SEQ ID NO: 78374 - RNA, 58 nt, Homo sapiens
gggcagaggcggaggcggcagagggaggaggccaaggagaggggaaaagagagaggca

SEQ ID NO: 78375 - RNA, 82 nt, Homo sapiens
ggggaccggaagcccgaccaacaaaggaacaaccagagaagacgcgagcagaaagcaaggacggccggccacgcccacagag

SEQ ID NO: 78376 - RNA, 85 nt, Homo sapiens
agcgacaacggcggagaccaagaagaggcgacgagggagccgcagggcacaccaagaaagcaagacaggcaaagggacaacacca

SEQ ID NO: 78377 - RNA, 75 nt, Homo sapiens
gaccaaggaagcaacaagaccaagccgccgcgaggcacaaaaaacacaagaagacaggagaaaggggccacaaac

SEQ ID NO: 78378 - RNA, 69 nt, Homo sapiens
caggggcagcaaccgacaggcagccggcacccgcacaacccagggggccgaacccagaccaacaaaagg

SEQ ID NO: 78379 - RNA, 65 nt, Homo sapiens
cagagcccaggagaaaccggacgcgacggggagaaaaggacgacggaaccaccacgaaaaaaagc

SEQ ID NO: 78380 - RNA, 57 nt, Homo sapiens
cacagcccggacccacgaccccccggccagacaagggaagcggccaaagccagcaga

SEQ ID NO: 78381 - RNA, 79 nt, Homo sapiens
gcggaaacagaaggggagaggcagcgaaaagcccccagcacaacgaaccgcccagaggaaggaccccagcagacaggcg

SEQ ID NO: 78382 - RNA, 81 nt, Homo sapiens
gcagcggcggccagggaccagaacgcaagcacaggaccagaaacgaaaggcagcagaagaggaaagccagaaagacgagca

SEQ ID NO: 78383 - RNA, 76 nt, Homo sapiens
cccgccagacccacggccggcggaccagacgcccgcccgccccggccaaggcccaggagcccgggaaggggagcac

SEQ ID NO: 78384 - RNA, 60 nt, Homo sapiens
agcagagcaggaacacagggacgccacgaaccggagagagcagcccccaggcaggagagc

SEQ ID NO: 78385 - RNA, 85 nt, Homo sapiens
cggcggcccggccccggcgcagcccggaaagccggcaagacgagaaagcaggacccaaagacaggaccacgcaccagcagagaag

SEQ ID NO: 78386 - RNA, 59 nt, Homo sapiens
gggcggcgaacggcggaggcaggaccgcacaggacgagcgaagacagggaaaagaaaag

SEQ ID NO: 78387 - RNA, 78 nt, Homo sapiens
caagagagccgcagccgccagggacgggggccaccggacagcagcgccgcccaagagagagaagagaggcgcgagggc

SEQ ID NO: 78388 - RNA, 78 nt, Homo sapiens
acagcccaggaaacaacaacagcggcacgccgagcaagccgaacacccaacaagaaggcaacgacaaacagccaagca

SEQ ID NO: 78389 - RNA, 88 nt, Homo sapiens
aggccgcaggaaccccagagagcagacaggagaccgggcacggagcagccaggccaggagcaggaggagaagaaaccccaagaccaga

SEQ ID NO: 78390 - RNA, 78 nt, Homo sapiens
ggacgggcccagaggcccagggaggcaggggcagaaacagagaaggaacagagcgaaggaaggccgacgggcaagaac

SEQ ID NO: 78391 - RNA, 73 nt, Homo sapiens
cgcaggagcaggcagacgggcacagcgagagcccgccacgccacaccggaagagagaagacagcagcgaacaa

SEQ ID NO: 78392 - RNA, 77 nt, Homo sapiens
cccaccgcccccccaaaccaaagggccgcccccaaagccaaccaaggagaggagaggaagagcagcggggcagagga

SEQ ID NO: 78393 - RNA, 73 nt, Homo sapiens
cccaggcagggaaggccgggacgaggcagcgagcccacgaccaaggaacagagacagacccgggggcccccaa

SEQ ID NO: 78394 - RNA, 70 nt, Homo sapiens
gcccggcgcgcgcggggggacggacccgggcacaggccccgggggcgccgagggcacaagggcaacgaca

SEQ ID NO: 78395 - RNA, 41 nt, Homo sapiens
cgaggagagcggaggaggggcggcccccaaagacaaaccaa

SEQ ID NO: 78396 - RNA, 52 nt, Homo sapiens
ggggaggcaaagggaggaggaggaccggaggggagaagcaaacgacgcagac

SEQ ID NO: 78397 - RNA, 75 nt, Homo sapiens
gaggaggcggcaaaaaagcaaacacgaggccacggggaaacacagcagaacacagccgcaggcaccaagaagacc

SEQ ID NO: 78398 - RNA, 84 nt, Homo sapiens
agcaagcaggcccaacggccccagaacaaacagggagcagaagggagaagggaggcagaaacggggacacaagcgaaaggcaac

SEQ ID NO: 78399 - RNA, 66 nt, Homo sapiens
ccacggccaccccgccgcgcaggagcgggcaccacccaaagaagcggggcggggagcaagaccacc

SEQ ID NO: 78400 - RNA, 65 nt, Homo sapiens
ggcaggccgcaggaggcagcagccccgaagagaaacacacggacaacaaacgaggagcacgcgcc

SEQ ID NO: 78401 - RNA, 80 nt, Homo sapiens
agaccggaccgagagcggaccgagagcgcgaaacgcacgagaagaggccccaaagccggggaagaccagccgaaacccgg

SEQ ID NO: 78402 - RNA, 80 nt, Homo sapiens
gccgcgcgcgcagaccgcaaacggaagcggacgcgggaggacggcacaccgcggcggaccgggagcggcccaacaggaag

SEQ ID NO: 78403 - RNA, 69 nt, Homo sapiens
aaccaggggaaaaaacccagaaggggacaagacggacagaaacgaacagcgggcgagccaggggagcca

SEQ ID NO: 78404 - RNA, 61 nt, Homo sapiens
gcgaaggagccggcggaacaccaccgagcacgaagagacccagacgaagagcgcacagaaa

SEQ ID NO: 78405 - RNA, 83 nt, Homo sapiens
caaccggacgaagagaggcaccccgacacggaccgggccaaggggggggaagaagcggaaaggaggggccccggcacgcggca

SEQ ID NO: 78406 - RNA, 78 nt, Homo sapiens
cgggcgccgaaaacagacagaacagaacccaaaagccgacaaccccagaaacaggcagaagacaacaggagcgaggca

SEQ ID NO: 78407 - RNA, 91 nt, Homo sapiens
cagggcgcaagaggcagacagacaggcgacgggcagccaacaagaaacgacacccagcacagaaaacacgaaccccggaaggaagagcagg

SEQ ID NO: 78408 - RNA, 73 nt, Homo sapiens
caccggagaagcgacccgggcacacgcgcaccaggacagcagaggcacacaaacggaaccgcacaaagcagac

SEQ ID NO: 78409 - RNA, 59 nt, Homo sapiens
ggcgggcggcgggcaagcacacaagaagagaggcaagcaaccccggggaagaggccagg

SEQ ID NO: 78410 - RNA, 78 nt, Homo sapiens
ggagggcgcagcggggacgcggacgcacgccgagggccggggagcaggcaggcccgggaagacgggacgggcaaaccc

SEQ ID NO: 78411 - RNA, 37 nt, Homo sapiens
ccagaaccggcacccaaagcgaagaggagaggaaggc

SEQ ID NO: 78412 - RNA, 75 nt, Homo sapiens
acacaccaccaagagaggacgagagaacggaacaccagaggcaccaccgcacggaaagaacccagagcgccaaaa

SEQ ID NO: 78413 - RNA, 68 nt, Homo sapiens
gcccgaaaaggcagcaccggcagcaaaccggccgcacgacgcgcagaggaacaagcaagaaaacagca

SEQ ID NO: 78414 - RNA, 70 nt, Homo sapiens
cgcgcgggcgcaagacaaagagggcagcccagagacgaaaaagagaccagaaggcccagcgcaaagcaga

SEQ ID NO: 78415 - RNA, 78 nt, Homo sapiens
aggcagcggccaacagggcaaacaaaaggaagaggagaaaacaaaagaagagcagaaagcacgaaaaaaaggaaaaag

SEQ ID NO: 78416 - RNA, 70 nt, Homo sapiens
gcacaaggcgaggcggaaagaggaaagcggggaaaaggcccgagcagcccggccacacaagaaagcacca

SEQ ID NO: 78417 - RNA, 53 nt, Homo sapiens
accgcgacaccccaacaaacaccagcgcggcggcgggagaggaaggaaaggaa

SEQ ID NO: 78418 - RNA, 73 nt, Homo sapiens
gagcggggcgcgccgcagagcggcaccgaaggacaggagacaggaaacagcaccaaaagggacaccaggccga

SEQ ID NO: 78419 - RNA, 58 nt, Homo sapiens
gcggccccggaaaagacagagggggggagccgcacgacccgaacgccagagacaaaac

SEQ ID NO: 78420 - RNA, 81 nt, Homo sapiens
gaggcgaggagggcccaaccccaggacaccccgagagcccaaaaaaaggcaggaacaaggcacccaccccagcaagaagag

SEQ ID NO: 78421 - RNA, 81 nt, Homo sapiens
ccgaaacgaggacaaggcccgccgccagcaaagacaaccagacggcacccggccaggcgaggaaaaccaccacacagggga

SEQ ID NO: 78422 - RNA, 57 nt, Homo sapiens
gagaccggagcgccacggccacggcccccacaagaagaacagggaaccgagaacagc

SEQ ID NO: 78423 - RNA, 58 nt, Homo sapiens
cggaccgaggaaggggaagcgcggaagcacagacccgccagagaccaagcgagacggc

SEQ ID NO: 78424 - RNA, 48 nt, Homo sapiens
gggggaaaggacaaagaaccgagacacaggcggagaccgggagacggg

SEQ ID NO: 78425 - RNA, 80 nt, Homo sapiens
gggagaacacagaaaccggccccagacccggacaagaaggaaaagaaacagccgaggaaaagccaaaacccaaaaaccgg

SEQ ID NO: 78426 - RNA, 77 nt, Homo sapiens
cgcccgccgccgccgcgcgcgcccgcgcgcggcgcgagcaaggaaccccgggccccgccacccacgcgaccagccca

SEQ ID NO: 78427 - RNA, 78 nt, Homo sapiens
cgaagagcaacagagagggcacacaggccccgagaaccaagagaacccccaccaaccaggcccggccaacggccccaa

SEQ ID NO: 78428 - RNA, 81 nt, Homo sapiens
cagagagcaaggaacggcggagccgaggacagcagacgccggaacaagaaccaacacgcaaagaagaaaaggacacaaaca

SEQ ID NO: 78429 - RNA, 75 nt, Homo sapiens
cgcgccccagaagaagagagagggaaaaaaggagagcgcccagcgcggcggaggcaggacccagaccggacggga

SEQ ID NO: 78430 - RNA, 75 nt, Homo sapiens
ccacagcccacaaggccagaacaccagagcaaccacacgccagaccagaagaggaacgcaaggaagaaaagggaa

SEQ ID NO: 78431 - RNA, 80 nt, Homo sapiens
ggccggggcgacgaagcccgaggaagggcagaaggaagcagcccaagcgaagacaagggacaacccgccacaacgacaaa

SEQ ID NO: 78432 - RNA, 86 nt, Homo sapiens
ggacaagacagggcaaaggacagaccagggaaaggcagcagaagcaacgcagcaagaaacgaagcggacgaggccaaagggcccgg

SEQ ID NO: 78433 - RNA, 77 nt, Homo sapiens
gaagggcagcaaaacaaaaaggcgcggagaaaagaggggaaacaagagcgggcaaagagcagacccagaaagaaaaa

SEQ ID NO: 78434 - RNA, 67 nt, Homo sapiens
gaaccaaaaaggaccacgaaggaagaccgcaggaaagcaggaaggcaagaaagccaaggacgaaacc

SEQ ID NO: 78435 - RNA, 68 nt, Homo sapiens
accccccaaacgacgcagccacggagagggagagaaggcgcgcaggagagcgcagagacccgcccgga

SEQ ID NO: 78436 - RNA, 82 nt, Homo sapiens
aggaggaggggcggcggcgggaagagaaaagcggccaggaccaccaggcggccacgggcccccagcaccaccgcaccccacc

SEQ ID NO: 78437 - RNA, 68 nt, Homo sapiens
ggaccaccaaacgccaggaaacagggcgggcaccagccggaccccaagcagagaacaggaggcaccca

SEQ ID NO: 78438 - RNA, 79 nt, Homo sapiens
acaacaccgcccccagccgggcgagcccacgcaggagacgggaggagcgacaacggagcacacccaccccgcgcaaggg

SEQ ID NO: 78439 - RNA, 73 nt, Homo sapiens
gcaagcacagagcacaccaagggcaaggagccacaagccacgacccagaaggcagcggggaccaaacaacagc

SEQ ID NO: 78440 - RNA, 68 nt, Homo sapiens
ggggagcaaaccggcaacgggcaccgaccaacaacagcccgcgcaaagcaccagaaggacaccccgag

SEQ ID NO: 78441 - RNA, 85 nt, Homo sapiens
agaagccagcggcaggaccagcgggcgggggcccacgagagcagcagccggcccggcgccagcaggaaaacagaaggagccgggg

SEQ ID NO: 78442 - RNA, 78 nt, Homo sapiens
aggagaacaaagaaaacgcgaggacagagccacggaccggaaggccaaaacaagggaagcaaaggaaacggagagaca

SEQ ID NO: 78443 - RNA, 79 nt, Homo sapiens
gcggcccgcccccccgggccccagcggccccggggcgcgcgagcaaaccaagaggagagagggaaaccgacgagcaagg

SEQ ID NO: 78444 - RNA, 78 nt, Homo sapiens
ggagcacccaccacggagggaaagaccaggcagaggacacggagccacagcagaggagacgccgagaaccgcgcgacc

SEQ ID NO: 78445 - RNA, 80 nt, Homo sapiens
gccaagcgccccgggaaggagcggcgcagcgcacgcccccggacgagagaaacgacaccaagaacgagcgcgaaggacaa

SEQ ID NO: 78446 - RNA, 77 nt, Homo sapiens
agcgagcgagggggggcgcgccggaaaccggagcgcgcagcaggcagggaacaaacggaagcggagaaagagaaaac

SEQ ID NO: 78447 - RNA, 85 nt, Homo sapiens
caggaccaaggagccacagaggaccgacgcgcgcaggcagaggagaaggcagcggacaaagagggcaaggccagagaaggcggga

SEQ ID NO: 78448 - RNA, 81 nt, Homo sapiens
gggaacaagcggccgagcacggcagaccccggggaggggcagggacaagaagagcccggacccccggcgggcgaacaaaga

SEQ ID NO: 78449 - RNA, 60 nt, Homo sapiens
cgacccacaggaagaaacgacaagaaggagaggagcaggggccgggcccagggaaagcac

SEQ ID NO: 78450 - RNA, 37 nt, Homo sapiens
gcgaacccacaaggagggacccagcaggcgaagaagc

SEQ ID NO: 78451 - RNA, 84 nt, Homo sapiens
acccgcgccgggaccaggccacgaccagggcccggcggggacgagcaggaagcgcggcgagcggaccagaccccagcagggaaa

SEQ ID NO: 78452 - RNA, 82 nt, Homo sapiens
cccccgcgccgggggccgcccgccgcagacacgggacccgccgaggccgcggcgccaaaccgaggggaggcgccaggcaagc

SEQ ID NO: 78453 - RNA, 78 nt, Homo sapiens
accaggcaagggcagcaccgagaagcggggaccaacagaggccgagggagccaaccggagcaacaccccgaaccgggg

SEQ ID NO: 78454 - RNA, 96 nt, Homo sapiens
aaaaaggacacccaaggagcacaagagcgccccaagcaaggaagcgacaggcacggcagacacaccgaccagaggaaggcgaacccgccacgcagc

SEQ ID NO: 78455 - RNA, 81 nt, Homo sapiens
cgccgccccacacggagaggcccggcggcgcgcccaaccggcgacggaaccaaggcggcgcccagcggccacacgccccaa

SEQ ID NO: 78456 - RNA, 41 nt, Homo sapiens
gccggaggcggccgcaccgggacccccgcagagagagcagc

SEQ ID NO: 78457 - RNA, 69 nt, Homo sapiens
ggacccggccagcgacgcaccgagaaaggaaggaaaaccgacgacacgcagcagagagcaaaagaagac

SEQ ID NO: 78458 - RNA, 117 nt, Homo sapiens
gaccgcgccgccccgcgagcacagagcccgccgccgaccgccgcccgccacacccgccgccagaccccaagaagaagcggaagaggagccgcggaaccaagacacaaggaacagaag

SEQ ID NO: 78459 - RNA, 86 nt, Homo sapiens
cgcagcgacaagaacgcaggacggccgcggcaccgaaccacaaggaggacgagccacacccaccgcccgggcaggccacggcggag

SEQ ID NO: 78460 - RNA, 106 nt, Homo sapiens
aaaggggagcgcggagaggaggcggaagaggaagagccagcacagacccgagggaggcccaacagcaggccgaggccgaggccggccccccaccaaagcaggagcg

SEQ ID NO: 78461 - RNA, 105 nt, Homo sapiens
ggagcagcagcccccacgcgcacagaggcagccggcgcaggagcagcagcgcaggagcacacagggagcccccacggcacccggggcgcggcacaggacaaagaa

SEQ ID NO: 78462 - RNA, 77 nt, Homo sapiens
agacgccagcgggacgaggaccgagaccgcggccgggaccgaggggccaaccgccccccagcagcaggcacgggcga

SEQ ID NO: 78463 - RNA, 79 nt, Homo sapiens
cgccccgggaaaacgcgcaacacacggggagaaccgccagcgacgggaaggcaggacccacgcacgagcaacgagaaga

SEQ ID NO: 78464 - RNA, 88 nt, Homo sapiens
cgggcgcaggagaagaggcggcccacagaaggagagaggcgccgggggagacccaaccagaccagcggcaacgcaccagcaaaccaaa

SEQ ID NO: 78465 - RNA, 40 nt, Homo sapiens
ggggcagacaggagcccaaggagaaagacgcagaaagagg

SEQ ID NO: 78466 - RNA, 84 nt, Homo sapiens
ggccgcagagcccagagagggagaagcggcagcgcacccgaggagaaagacagcaaagaaaaggagaagaaaggaaaaaaacaa

SEQ ID NO: 78467 - RNA, 84 nt, Homo sapiens
ccggcagggcagccagcggccaggggggcccgcgggccagccaccgggccggcagcaccgggaccggaggcccagagcgacgga

SEQ ID NO: 78468 - RNA, 39 nt, Homo sapiens
gaggggacagccccggcggcggcccccccacgcgacccg

SEQ ID NO: 78469 - RNA, 64 nt, Homo sapiens
gcccgcgccgagcgcgcaagcaaaaccaaagaggcaaaggcaaaaacagcaaaagaaaagaaaa

SEQ ID NO: 78470 - RNA, 40 nt, Homo sapiens
aaacccacgacaagaaggcaccaggcggggcaccaggccc

SEQ ID NO: 78471 - RNA, 39 nt, Homo sapiens
aaaacgcaacaacagacgagccggagacgaaaagacgga

SEQ ID NO: 78472 - RNA, 79 nt, Homo sapiens
ggccgccgcccacccgcggcgcggggaaaggcgcgagacccagaggccgcggccgaacggccacagggacaggaaccca

SEQ ID NO: 78473 - RNA, 93 nt, Homo sapiens
gagcgcgcggcggacgcgcccgggacgcgcggcggcaccgggaggccgggccgagcgagaggaaaagaggcccaaagaaggagccacggaagg

SEQ ID NO: 78474 - RNA, 79 nt, Homo sapiens
gacacgaaaaggccaggcggagagaacacaaagaaaacccggcaagggaaaagagcccagagcacaagcagaaaaagga

SEQ ID NO: 78475 - RNA, 73 nt, Homo sapiens
cggaaccaggggagagcgacccaaacaaaggcacggagccagcagcagcaagcagcgggcaagacccgcgccg

SEQ ID NO: 78476 - RNA, 59 nt, Homo sapiens
gggggcccgggcggcgccaagacgacacccagaggcgcaacccagagagaggaagagac

SEQ ID NO: 78477 - RNA, 70 nt, Homo sapiens
aggagcgcgcagagggacccggaaacgcccagaggggaggccacaccggcggacagcggaaagagaccac

SEQ ID NO: 78478 - RNA, 76 nt, Homo sapiens
caggagccacagacgaccggcacacagcagagagagagagaagggcgcagcaccgagcagcaggagcgagaagagc

SEQ ID NO: 78479 - RNA, 74 nt, Homo sapiens
agagaagaacaccgaaaccagaagggggggggggcggaggcgaaggccagaccgcagaaaaacagcacagccaa

SEQ ID NO: 78480 - RNA, 63 nt, Homo sapiens
cagggcgcccccggagggccaaaaccaggcgagaaccaggagaagcggggggaagagaaaaaa

SEQ ID NO: 78481 - RNA, 58 nt, Homo sapiens
ggggaaaaggcaaaaacccacaccgcaacccagcgagagaaagcgaccggacagaaga

SEQ ID NO: 78482 - RNA, 71 nt, Homo sapiens
gcccccccaagcgccgacccacacacgcccacggaggaccgggcagaggcgcgggcgggagaacgggcgca

SEQ ID NO: 78483 - RNA, 50 nt, Homo sapiens
gacacacagcagcccagccagcccgagcaagaaagagaaagaggcagcag

SEQ ID NO: 78484 - RNA, 68 nt, Homo sapiens
gcacaaccgaaggaaagcaccagagcccgaacgcgaagccgcacacaagggagaggaagagaaagcag

SEQ ID NO: 78485 - RNA, 82 nt, Homo sapiens
cacgaaagcagcaacaggcaaccacgagaaaacggaaccgaaagcaagaggacaagaagaggggaaaacaagaaaagggaaa

SEQ ID NO: 78486 - RNA, 83 nt, Homo sapiens
cacaggcagaaacaagggagacagccgcccggccaagcacccgcagcaggccaaaacagaagaggcaaagcccagccacagca

SEQ ID NO: 78487 - RNA, 98 nt, Homo sapiens
ggagcaacgagaagagagcagacggccacaaacagcgcacaggcccagaaaccggaagaaagcacgaccaagagggaaggaaaaaccaagccaaggac

SEQ ID NO: 78488 - RNA, 82 nt, Homo sapiens
aagccccccacacccccggagaagccacagcggaccgggacagagggggcgccgagggggagcggcggcacccgacagaccg

SEQ ID NO: 78489 - RNA, 73 nt, Homo sapiens
caaaaaaccggcaggagcccaagaacgcaaaggaggaagggccgcccgaaaaggggaagaccggggcgagcga

SEQ ID NO: 78490 - RNA, 69 nt, Homo sapiens
cacccaaagaagaggagagcggggggacccaaaaagggcagaaaggcgacacaccaaagaaaaaacaca

SEQ ID NO: 78491 - RNA, 71 nt, Homo sapiens
aggaaagaaacccacgggcagagcgaaaaagggacaaggacagggcagcccagagggggagagagacggac

SEQ ID NO: 78492 - RNA, 70 nt, Homo sapiens
acaaaaggcaaacaacccaaaacgcagacggagaaagaagaacaaacacaaaacacacaccgagcagaac

SEQ ID NO: 78493 - RNA, 86 nt, Homo sapiens
acaaccgcccaccacgccagccaccacgcggcgcacaacgcaggaacaccgcacgcgcggaggaggcccaaaggggggacagagac

SEQ ID NO: 78494 - RNA, 80 nt, Homo sapiens
gccaaggaagcgggagccgaaagagaaacacagccaagcagggaggcccagggagccagcgacagcgagaggacaacagc

SEQ ID NO: 78495 - RNA, 60 nt, Homo sapiens
gcagagccccgcgcccccgaaacgcccaggaaaaaaaggaggaaaccggaaaagaaaagc

SEQ ID NO: 78496 - RNA, 58 nt, Homo sapiens
gcccgggcccgccaacaaaccggacacggacgacaccgagcccaaccgaccaaccaca

SEQ ID NO: 78497 - RNA, 72 nt, Homo sapiens
gcgcgccaacggggacaaagggagagagacagaagaaggcgccagacgcgggcccccgaagacagggcccca

SEQ ID NO: 78498 - RNA, 75 nt, Homo sapiens
cacacaggaagccgaggagagccgaggaggacaccaggaggggggaaggagacgcacacccacaccgggcaacag

SEQ ID NO: 78499 - RNA, 32 nt, Homo sapiens
gagccaaagaacagggggagacacagccagag

SEQ ID NO: 78500 - RNA, 72 nt, Homo sapiens
gagacgagaacgcgacgcggaggcacgacgcccaccggacgaggccaaaggggccgccacagcgggacagcg

SEQ ID NO: 78501 - RNA, 33 nt, Homo sapiens
caaacaccaccaccaagacgccaagccagcaca

SEQ ID NO: 78502 - RNA, 57 nt, Homo sapiens
gccaagggagccgcgcaaaggccccggcaagaagccggcaggagcggacaacggagg

SEQ ID NO: 78503 - RNA, 79 nt, Homo sapiens
ggacgcaagccgggagacgcacagcaagagcccggacaccggaagcgggaaaggcggagggaaggccggagaggccgca

SEQ ID NO: 78504 - RNA, 74 nt, Homo sapiens
cggacaaccagaggcagccagcagggggagggagcgggaggccggagaaggagcacgaacagggagagcaggac

SEQ ID NO: 78505 - RNA, 70 nt, Homo sapiens
cccaggagcacgccgcacaggccgcgaacggggcaaaggaggagaaaaccacaacccagagcaagaaaag

SEQ ID NO: 78506 - RNA, 81 nt, Homo sapiens
aaaagggagcggccaaccaggagagaagggacgccgggcccagggcccaccaaaacgggggagaaggaggaacacaaagag

SEQ ID NO: 78507 - RNA, 73 nt, Homo sapiens
aagaggacgggacacgggccaagggagcgaaaagaacccccaaaaggaggaagcccaaaaggaaagaaccaga

SEQ ID NO: 78508 - RNA, 80 nt, Homo sapiens
ccaacgcaagcgggcgggggacgaggacgacaccgaccccgccgagcggcggaaagcgccaggaccccacaggggacaac

SEQ ID NO: 78509 - RNA, 121 nt, Homo sapiens
cggaacaccccagccccgacgcaaaacagaccaggaggagaagaagggaggcagagaagcgggagcaacagagagacaaacgccaggaagacgacaacacagcaaaggggaacgccaaacc

SEQ ID NO: 78510 - RNA, 55 nt, Homo sapiens
acacacagaccagaggggggacggggaggaacacccaggcccgcaggccgcacgc

SEQ ID NO: 78511 - RNA, 85 nt, Homo sapiens
gacgacgcggccgccccggccaggacgcgggagcgccgcgggaagggcggggagcggagccaggccccgaaaaacgagcacaacg

SEQ ID NO: 78512 - RNA, 73 nt, Homo sapiens
ccggcgcgaggagaccgacggcgacggcgcagacaccaggcaagaacaaggacagccagggccgccgggcccc

SEQ ID NO: 78513 - RNA, 92 nt, Homo sapiens
gcgagggaggccgcggcccgggccgcaccagagcgcccggcccacgacacaggaagaagacagagggacaggagcaaaaagcccaaggacca

SEQ ID NO: 78514 - RNA, 72 nt, Homo sapiens
caagcgacacgaccagcccccaagaggaggaccacagggacagggggaaagcccaccgacacccagaacggg

SEQ ID NO: 78515 - RNA, 57 nt, Homo sapiens
gaccaacaacgcccgccggggaacgaggcaagccacagagaggaaccaggcccggca

SEQ ID NO: 78516 - RNA, 69 nt, Homo sapiens
agaaacagacccaaacacgaggcaaagaggggagaaaaaagaagaagcaaggggaagaaagaagccagc

SEQ ID NO: 78517 - RNA, 67 nt, Homo sapiens
ccagagcaacacggcgcaaagaagccacaccagggaaacccagacgacaaggaaggccaagggaccc

SEQ ID NO: 78518 - RNA, 57 nt, Homo sapiens
gagcagcccgggcaccacagaaaaggccggaaggggggcgacgcggaaggcacaaca

SEQ ID NO: 78519 - RNA, 86 nt, Homo sapiens
gggagcgagcgggcagcgcgaaccaagccgccacagggagaaaagagcagaggccgaccccaggacacgacgggggccccggaaaa

SEQ ID NO: 78520 - RNA, 77 nt, Homo sapiens
cggcggacacggccagcgaggacagccaaacagcgaacaccaggcccggacaccgaagaacacaaccaagaaagaaa

SEQ ID NO: 78521 - RNA, 59 nt, Homo sapiens
ggaggagccgagagaacggggcaaacgccgaaagacagggcgggaccaccaggagcaga

SEQ ID NO: 78522 - RNA, 71 nt, Homo sapiens
gcagaaggggacagaacagaggcaagcgccaggaccgcggggggcgagccgccgcgccccaggccgcagcc

SEQ ID NO: 78523 - RNA, 52 nt, Homo sapiens
ggcaaccgcaagacaaaagaggagacgaaaaagagccacgcccccacgagcg

SEQ ID NO: 78524 - RNA, 46 nt, Homo sapiens
gaacgggagaaagcacgggaggagaggcaggcacgcggaaagcgaa

SEQ ID NO: 78525 - RNA, 65 nt, Homo sapiens
ccccagcacggcaaagcccggagacaagccagaaagcgaagcagaagccgagaacagcggcgagc

SEQ ID NO: 78526 - RNA, 82 nt, Homo sapiens
cggcaggaagccaaggcaccgggacgcgcacccccgcgccgcacggggacgagaccgcgcgaaacgcccagaaaccaagaag

SEQ ID NO: 78527 - RNA, 76 nt, Homo sapiens
gggagcaggcccagcaagaggagcagccagcggcagaccaccagccccgccagagaaggagacgccgagagcagaa

SEQ ID NO: 78528 - RNA, 75 nt, Homo sapiens
ccacagacgagacaggacgcacggcagcaagacgaaaaagagaagagagccaagagacaagggaggcgaggacgg

SEQ ID NO: 78529 - RNA, 69 nt, Homo sapiens
ccccccgccacaacggccgcagggccgaggagacaggagaaggagagccgccaggggcaaagagcaaac

SEQ ID NO: 78530 - RNA, 81 nt, Homo sapiens
ccggcccgaccccgacccggcccggcaggccccaaccagcacacggcggcggcgaagccaagacacgggcccgccgagggc

SEQ ID NO: 78531 - RNA, 57 nt, Homo sapiens
cgcagggcgcccccgagaaaaccgccaagagaaaaaaggcaacacaagaaggagaga

SEQ ID NO: 78532 - RNA, 112 nt, Homo sapiens
aagggcgaagaaagagccagaggccgacggccccaggggaccaggggacgaagggaacaggcgggccagaaaaagggaaaaccaaaagaaaggaggaaaccaaagcaggcgg

SEQ ID NO: 78533 - RNA, 69 nt, Homo sapiens
gagagaggacccccccccccccccaagggcccagaccaagccccaccaacagaagagccccacacacag

SEQ ID NO: 78534 - RNA, 78 nt, Homo sapiens
agggaaccacgaaagacaacagaaacacaggccggccaacaggacggaaaaacagaaaacaagaagcgcgaagcccag

SEQ ID NO: 78535 - RNA, 71 nt, Homo sapiens
ccaaagccgagaaacggcgcaggaacagcgaagggccagagcaaggcaccgcggcaccgccaccacagagc

SEQ ID NO: 78536 - RNA, 82 nt, Homo sapiens
gcccgccgaggagcgaaggcccagagccgggggagacaagagaggacagaaagcagcaacacgcccagggagcagagaggac

SEQ ID NO: 78537 - RNA, 72 nt, Homo sapiens
acgacacgcggcccggcgggccagcagccacaggaaaccgaagaaccagccccggggacgaaagagacggca

SEQ ID NO: 78538 - RNA, 108 nt, Homo sapiens
gcggacgcgggacagccgaccccccgacgcccggaaaacagccaaaggccagcggaaaccagacgccgccacagagaaggaagacaagagaacaagggccagcaaaga

SEQ ID NO: 78539 - RNA, 37 nt, Homo sapiens
cccgagaggggaacaggcggaggcagaggcgaccggc

SEQ ID NO: 78540 - RNA, 75 nt, Homo sapiens
gagcaagggaccccaaggggccaaggcaacaccacaaaaccagacccaaaggccggcgacagaaaggccccaaac

SEQ ID NO: 78541 - RNA, 95 nt, Homo sapiens
agaagacacaagccagaaaaagcgggccaaagaagccacagaaaccaccccgccccgcgggacagcaagggaggcagcagacgggaagaagagag

SEQ ID NO: 78542 - RNA, 85 nt, Homo sapiens
gggacaagagagccgaggcgcccccaccacccacaagacaagaagaggaccggagcggagcagcagcgcggagagaccggagagc

SEQ ID NO: 78543 - RNA, 78 nt, Homo sapiens
agaaagcggcggggagcggagcgcgggacacggaagaagcaccaagccgcccgcggagcacaacagaaaagggagaag

SEQ ID NO: 78544 - RNA, 73 nt, Homo sapiens
agaccgcacgaagaccaagacggacacggaaaaaaccaggagccaacagacagcagcaaaacgggaagaggga

SEQ ID NO: 78545 - RNA, 70 nt, Homo sapiens
cgggaagcgaccgcaggcgggcccccgaccggaaagcaggcagcgagagggcaacggagacagaaaccag

SEQ ID NO: 78546 - RNA, 84 nt, Homo sapiens
cgcacacggagaaggaagccggcagccaggaggcaggagcagcgggcgacaggcgggcccgggcgggccccgcgcaggcaaagg

SEQ ID NO: 78547 - RNA, 74 nt, Homo sapiens
agacgagacgagaggaagagacgagaacacacaagaaaaacccggggaaggcaagacggggacgccagagagaa

SEQ ID NO: 78548 - RNA, 86 nt, Homo sapiens
gaaaacggaagacaaaacacagaaaagggggaaggggacaggacgaaaaccgcccaggagccaccaggaaagaagaagggggacaa

SEQ ID NO: 78549 - RNA, 80 nt, Homo sapiens
gggaaacagagagacccccaccgacccaccaacaacacagaaacggcgaggaaagagaggagccccggaaagaaaaggac

SEQ ID NO: 78550 - RNA, 84 nt, Homo sapiens
gcggccgggggcgcgggcggcggcgccggcaggaagaaggagccaaaaaggggagaggaagaaagaagagaggaggcagcagga

SEQ ID NO: 78551 - RNA, 73 nt, Homo sapiens
acacgcccgggcgggacaagcggcaagagcccaccgaagacacaccccacaggaccccagagcgacagcccgg

SEQ ID NO: 78552 - RNA, 77 nt, Homo sapiens
gagccacgaacacaaaggagggacagcagcaagagccccaaagccaccagaggaggaaggaccgagcgcaggaacca

SEQ ID NO: 78553 - RNA, 72 nt, Homo sapiens
gcagcaacagcagcagcaacagccgaaggcgaccccgccagaacacccaggcgacagggggcaaaaaacacc

SEQ ID NO: 78554 - RNA, 111 nt, Homo sapiens
acaaggaagaccgcaaagcaaaacaccgaagccggaaagaaaaaacaccgacagcgcccagaggggggagccaggaccgcccaacgaggaccagcaccgagaccccgaacc

SEQ ID NO: 78555 - RNA, 68 nt, Homo sapiens
cgaccccaagccccaacccaggaggaagagcagaaggccggcaagagacaacaggcacaaagagagaa

SEQ ID NO: 78556 - RNA, 77 nt, Homo sapiens
gaccagcaccgacccagccggcagagccacgcgacgcacaacccgagacccgggaggaaaaacaccaagagagagca

SEQ ID NO: 78557 - RNA, 72 nt, Homo sapiens
ggaaaaggagccccaccaaggagcacaacacgaagcgaagcagccagaggaccagaaagccaccgaaaccca

SEQ ID NO: 78558 - RNA, 79 nt, Homo sapiens
acagagcgcgcggccaagacaagcagccaagaagagggaaagaagacaggaaacaagggaaggacgacaaaagaggacc

SEQ ID NO: 78559 - RNA, 54 nt, Homo sapiens
aggccaggagggggaagagagcgaccggacagaagacagaccgacagacgccaa

SEQ ID NO: 78560 - RNA, 79 nt, Homo sapiens
aacaaacgagggcccgggaggaccgacgcagccagcaccagggcaagagcgcaagacaaggacggacgggcaggcgggg

SEQ ID NO: 78561 - RNA, 66 nt, Homo sapiens
gcacacagaagcggaagcgagccacgaaacacaaggaaagcgacgacggcacaccagaaaaggaag

SEQ ID NO: 78562 - RNA, 78 nt, Homo sapiens
gccgagggaggaggcgcccgcagacccggcgcgccgcggagaagccaaacggcagggcacaagaaaaaggacaccgca

SEQ ID NO: 78563 - RNA, 106 nt, Homo sapiens
agccaggaagggcggaggaggcagaggccaacgcccgggcgcgcgaggccagagagggggagagggcggaagccaccaaaaccagggaaacaggagaaacaagagg

SEQ ID NO: 78564 - RNA, 55 nt, Homo sapiens
ggcagggccaaggaggcggaggccgacaaccaacaagaagagaagcgaagggcag

SEQ ID NO: 78565 - RNA, 71 nt, Homo sapiens
gggccacaccaaacccacccagaagcgaggggaccagaagaaggagaacccacgacgaaagcaacaaccaa

SEQ ID NO: 78566 - RNA, 70 nt, Homo sapiens
gaccaacgggccgaagcgggagagcccgccaggagggagggacccagcagagcgcagccgaccccaagcc

SEQ ID NO: 78567 - RNA, 76 nt, Homo sapiens
agcagcagagcagccacgagagacagcaggccgagcccgagcgcgggaagaaaggcaaacccaagacggaaaaggg

SEQ ID NO: 78568 - RNA, 55 nt, Homo sapiens
gagaaaacacaaccgagacaccaaaaagggagccgcaaaacaaggggagcacaga

SEQ ID NO: 78569 - RNA, 78 nt, Homo sapiens
ccggacagcaccaacggaaccaaaaagcgaaaacagggggcaagggaagccccagacaaggagccaaaagaaaaccag

SEQ ID NO: 78570 - RNA, 81 nt, Homo sapiens
ccgacaggcccgagggcccgagagcaccgcgccagacagacacggaaccgagggacacgggcggccgaaggaggcagaagg

SEQ ID NO: 78571 - RNA, 76 nt, Homo sapiens
ccagaccccgcggcacacaggggaaccaagaggcaacagcggacccaggccagcgggagcgccggcgcagcgcacc

SEQ ID NO: 78572 - RNA, 76 nt, Homo sapiens
aacgaggaggaccaccgcgggcacccagcagaaggggggcaacagaaggagggagggcgagacgggccagggcggc

SEQ ID NO: 78573 - RNA, 71 nt, Homo sapiens
gacagcaaaagagaaagcgcccgcaaaccccaccaggaacagggggaagcagaccaagaagacagaagggg

SEQ ID NO: 78574 - RNA, 83 nt, Homo sapiens
cgaagacggaaacgaggaaaccgggaaagccaccgaaaagaaacaacgaacgagcaaggaagggccaaggcagaccccacacc

SEQ ID NO: 78575 - RNA, 68 nt, Homo sapiens
gcagcgaaaacccaacgagaccaaagaggcaagaaggaagaaaccaaacgaaacacaacgaccaacgg

SEQ ID NO: 78576 - RNA, 67 nt, Homo sapiens
cccccggacacaggcaaccccccccggcccacacccagcaggacagggcgaaacaaccaaggccgac

SEQ ID NO: 78577 - RNA, 39 nt, Homo sapiens
ggacaagaccacgagccagacaggaggccccgaccaccc

SEQ ID NO: 78578 - RNA, 83 nt, Homo sapiens
gggcgaggccgggcggcgccgccccaccggacccgcaggggcacgcccacggaagccccccaaagcgagggacacaagacccc

SEQ ID NO: 78579 - RNA, 87 nt, Homo sapiens
ccccgaggaagcaaggccgcggggggagaccccaccaccggcccagcgagagccagccggaggacccagcagcaggccacccaggcc

SEQ ID NO: 78580 - RNA, 89 nt, Homo sapiens
gcggcccgccagagaacgcacccaggggacgggggcaaccggacagagaagcccaagagaagcaggaggagcagcgcagcggcagggcc

SEQ ID NO: 78581 - RNA, 77 nt, Homo sapiens
accgcaggacccaggccagaccggagcagcggggacaggacaacccaaaaggagacaggagaagaaccaagcgggca

SEQ ID NO: 78582 - RNA, 79 nt, Homo sapiens
cagggcagcccaagagaaccgccagaagaaaagcaaaaaaacaaggaaagccgcaacagaagaaggagcacgagccgac

SEQ ID NO: 78583 - RNA, 77 nt, Homo sapiens
agacagcccgcagcacgaccagcaggaacgaacggccgagcgaccaggagaggagcccccgcccgaagaccggggag

SEQ ID NO: 78584 - RNA, 56 nt, Homo sapiens
ccggggcgccccccgggcgcgcccggcccgcaggcgggggcgggcgggggcagagc

SEQ ID NO: 78585 - RNA, 80 nt, Homo sapiens
aaaagagggaaaccaggacaggaagagagaagggcacagaccaagacaacgaaccccggccaggacaggcccccacggaa

SEQ ID NO: 78586 - RNA, 56 nt, Homo sapiens
aggaggaggaggaggacgacgacgaggggaacggcgggcaacacaacaaggcgcgg

SEQ ID NO: 78587 - RNA, 84 nt, Homo sapiens
cagcaaccgagggagaaggacacacacaagagggagagggcccaaacgacaccccaaggcgaagagcaagcagcagaccaaaaa

SEQ ID NO: 78588 - RNA, 61 nt, Homo sapiens
gaacaaggcaacgcaaccaggagaaaagacagcaaggaccgagggccaccagaggaccaag

SEQ ID NO: 78589 - RNA, 77 nt, Homo sapiens
caaccgcaccccagccacaaccgcggaggcaaccgcgcccccagagcccaggcagaagcccccggggagagacagac

SEQ ID NO: 78590 - RNA, 50 nt, Homo sapiens
cgagcccgcacgcccgcaacccagaaaggaagaaggccgcaaagccaaag

SEQ ID NO: 78591 - RNA, 81 nt, Homo sapiens
acgccccgcccgccagaaccggcccccacagcccacggcgcgccccggacccccaagacgaagggaacgcacgggaaagcg

SEQ ID NO: 78592 - RNA, 35 nt, Homo sapiens
ccggccgacaaccacggcgcgggcgggagaacggg

SEQ ID NO: 78593 - RNA, 73 nt, Homo sapiens
gaaacaggagacaggagagagagaagaagagacagcagcccgacggccaggaggcgaagagacgaggaagccc

SEQ ID NO: 78594 - RNA, 55 nt, Homo sapiens
agccaaggccgagaagcgacggcggaaagaagggcggagaacggaaaagcaccag

SEQ ID NO: 78595 - RNA, 68 nt, Homo sapiens
agcgacaccccagaccacggaaagacggacagccaagcaacgaaggcaagaacaacccaagaaggaca

SEQ ID NO: 78596 - RNA, 81 nt, Homo sapiens
ccaagcagcccacccgcagccacgcaccgaccacggagaaagaagaaacaaagagggacccagccaccaaaaggaggcgaa

SEQ ID NO: 78597 - RNA, 82 nt, Homo sapiens
ccgcgggacgccgccgcggcccggacgaccgcccagaagggcacaaaggagccagaggaggcgaagagccacgccaagaccg

SEQ ID NO: 78598 - RNA, 65 nt, Homo sapiens
ccaaagggaaacaggccacagcgacaggagaggcaggacaacccgcccgccgccccggggcacgc

SEQ ID NO: 78599 - RNA, 86 nt, Homo sapiens
aagcagggcgccgccacgccgcaggaggcggagaccccaagaagaagcggaagaggagccgcggaaccaagacacaaggaacagaa

SEQ ID NO: 78600 - RNA, 77 nt, Homo sapiens
cacggagacaacgagccgcagagagccggacaaaccagacacgggagaacgccccggaacccaaaccgaagccacgg

SEQ ID NO: 78601 - RNA, 74 nt, Homo sapiens
cgacccacaggccagagaggccccgggggcgccgagggcacaagggcaacgacagaagggcgaagccaacgcca

SEQ ID NO: 78602 - RNA, 87 nt, Homo sapiens
gagagccggggggaagggcgcgcgcccggacgccacgcacccgcgcgagaagaagcacaccacaggaagagcaagaaggaagggaag

SEQ ID NO: 78603 - RNA, 71 nt, Homo sapiens
gcacagaaacacaccagaggagaacgaacccccaacaggcagcacaggggaccaaaacaaaacgagagcaa

SEQ ID NO: 78604 - RNA, 57 nt, Homo sapiens
caaaggaacaacacaccaccaccaagaaggaggggcacagaacacccccagcccaac

SEQ ID NO: 78605 - RNA, 78 nt, Homo sapiens
accagaggaggaagagcaagcgggggaccgaacaaggcaaaagggggacaagagaaaaaaagggcgggcgaacaaaaa

SEQ ID NO: 78606 - RNA, 50 nt, Homo sapiens
cgccccagcacccccagcgggcagagcgggccaagcaccagcagggcacc

SEQ ID NO: 78607 - RNA, 79 nt, Homo sapiens
gaacggcccccccccagcccgccccaaaagccccacaccaggagaagcacagcaccggaacgcgagaaagcagggcacc

SEQ ID NO: 78608 - RNA, 66 nt, Homo sapiens
cccgagagcgggacacaggcgccaaacaagggaaccgacccagagaggaaagaaacaaggcagaaa

SEQ ID NO: 78609 - RNA, 76 nt, Homo sapiens
gcccccccccccgacagagacggcggagaccccgaaggcgcaaacgacaccacccgaccggagagagaagaagcaa

SEQ ID NO: 78610 - RNA, 80 nt, Homo sapiens
aaggggagcgggaagaagaagcccacaccacgggaggggcacaccgggagcagcccggcacaaggaggccgggcaccgcc

SEQ ID NO: 78611 - RNA, 78 nt, Homo sapiens
ggaccccaccccaagcaaggccaggaggagccgggaaaccgaagaaggcagagaaggcaaacaggaggcgcgggacag

SEQ ID NO: 78612 - RNA, 78 nt, Homo sapiens
accggcgggaggaacaaaagaaggaagaaccgccaaaaagagggaaaaacgggcgccaggaacccggacagcacagag

SEQ ID NO: 78613 - RNA, 72 nt, Homo sapiens
gcgagagaggagagggcagacggacaagagcgcggaacaggacgccccgaggagcgaggcggccagggcccc

SEQ ID NO: 78614 - RNA, 71 nt, Homo sapiens
acggaaaacaaggcccaagccggggggggggagaagagacgacccggaacagaaacggcgaggaaagagag

SEQ ID NO: 78615 - RNA, 36 nt, Homo sapiens
cgacagaagagggagggaagaagaagacaacgacga

SEQ ID NO: 78616 - RNA, 70 nt, Homo sapiens
cgccggcccgcggaaaggccaaagcccagccccaggcacagaccccagcgaggaccaggacgaacccaaa

SEQ ID NO: 78617 - RNA, 62 nt, Homo sapiens
cggcgccggggacgaggagaggaccaggaggaggaggcagagaagggaacggaaggaaagcc

SEQ ID NO: 78618 - RNA, 74 nt, Homo sapiens
agagacacaaggcagcaggaacaggagaccgagcacgagaaagagcgccagagaagaacagaaggcaggccaca

SEQ ID NO: 78619 - RNA, 85 nt, Homo sapiens
gcggcgcaggcaccaggaccgagcccccacggagcaggccaccaaaccacagcgggcaaagcaggacagcgaggcgcgcgaggcc

SEQ ID NO: 78620 - RNA, 80 nt, Homo sapiens
cagcaggaccagcgagagccccgcccccgcccgcagggcggagaacggaaaagcaccaggaagcagagaggaccgcagaa

SEQ ID NO: 78621 - RNA, 64 nt, Homo sapiens
ccgccgccgccgccaccacgccaccacggcgccgccacagaaggcccgggggaagaggaaaagg

SEQ ID NO: 78622 - RNA, 81 nt, Homo sapiens
gaaaaaagagacagaagcaagaaaaagacaagaaggccaacaggcagcggggcaggaacaacgggccaaaggccacacaca

SEQ ID NO: 78623 - RNA, 87 nt, Homo sapiens
cgacccacaaaaggaagcaaaaagagaaccgagaggcacaaaggcgccaaacggaacggcgagagaagacacaaacaaaccaggcac

SEQ ID NO: 78624 - RNA, 77 nt, Homo sapiens
caacagaaagaagcagaaaggagcgcagcacacagagaccccacaggcacgcaaagaacgcccacaaggcccagaag

SEQ ID NO: 78625 - RNA, 79 nt, Homo sapiens
gaaacgcgaggcgcggcccgcggggggggaccacaagaccgacgcaagagagacaggcagaaaagacgacccaccacac

SEQ ID NO: 78626 - RNA, 85 nt, Homo sapiens
ggaaacgggcgaagcgacgagccgcgaggaggcgaaggccagagggggacggccccaaaccgaccggacgcagaggagcggagaa

SEQ ID NO: 78627 - RNA, 72 nt, Homo sapiens
agacaggccacagacgccgcccagccacacagacccagacaaccagcggaggcccacccgcacaggccggac

SEQ ID NO: 78628 - RNA, 78 nt, Homo sapiens
caggcgagagaggaggacacgaccgaaaaccggcgcagagccaaaaggaaccgaggaaaagcaggggaaacgacgcag

SEQ ID NO: 78629 - RNA, 61 nt, Homo sapiens
cacaagaggggaagcgacagagaaccacagacggaggcggccacgaggcgcagcaccagag

SEQ ID NO: 78630 - RNA, 78 nt, Homo sapiens
ggcgggagcacgggagaaggagccggaggcggggagaccccgcaccaggacagcggagaaagcgccacaagaacccag

SEQ ID NO: 78631 - RNA, 79 nt, Homo sapiens
cggaagccaagcaaagggaccggagccccgcaaccccccacgccagccaggagccccccacgccggcacgggcccgggg

SEQ ID NO: 78632 - RNA, 73 nt, Homo sapiens
ggacaaccgcgcgccccaccccccacgggccgcgaagaccggcccgaccgagggggaggcacaccagcgaagg

SEQ ID NO: 78633 - RNA, 77 nt, Homo sapiens
gacgagaggacgggaccaggcgaagcggccgagcaggcgagcgaacgacggaacccggcaccagccgggcaaaaacc

SEQ ID NO: 78634 - RNA, 54 nt, Homo sapiens
cggcccgcgggggggcgaacacgccgcggcccgcggggcaggaccacgccgaac

SEQ ID NO: 78635 - RNA, 73 nt, Homo sapiens
gcaaacaagagaacgggcccacacaacccaggcaaccaacaggacaaaggcgacggggaaaccacccgaacaa

SEQ ID NO: 78636 - RNA, 66 nt, Homo sapiens
acccaaaccagccgaaagcgaaagcaaccaagcgggagagacaaagcgaaagaaacccgcacagag

SEQ ID NO: 78637 - RNA, 107 nt, Homo sapiens
accaagagcgacgacgaccaccacccggggcccccccagccgcaccaccaaggcccggagcgccaccacaggcaagagaagcaccaggcgccaccaggaagacggga

SEQ ID NO: 78638 - RNA, 69 nt, Homo sapiens
aagaggaaccgcgccccagaaggcagaggaacacaacagggggggaggacgcaccgcgggcggccacgg

SEQ ID NO: 78639 - RNA, 82 nt, Homo sapiens
gcaggccggccaggcaggcacgagaaggggaggagccgccaggggaggaaaaagcagcgaaacagacaaccccccacacaac

SEQ ID NO: 78640 - RNA, 40 nt, Homo sapiens
ggaagcacacacagaggggcacaagcaccccggcaaagcc

SEQ ID NO: 78641 - RNA, 70 nt, Homo sapiens
cagaaaggcaaaccaagcggaccaagcccaggaagagaagaaagaaccaacaaaggccggacccaaccaa

SEQ ID NO: 78642 - RNA, 83 nt, Homo sapiens
gaagagggagaaaaacaggcagggacacggaagaaccaggaacaaggcagaggaagacccagcaaaaaaacacaaaacaggcc

SEQ ID NO: 78643 - RNA, 73 nt, Homo sapiens
gaaaaagcccgaacgaggaaaaacagccaagacggcaaagccccccagaagaccagcgcaccccccggaggcg

SEQ ID NO: 78644 - RNA, 73 nt, Homo sapiens
gccgggccgcaggcaggggggacccgcccaaccccggcaaacagcccaggaaggcaaggggagcggcgcggag

SEQ ID NO: 78645 - RNA, 71 nt, Homo sapiens
cgagggaccagccacgcgcacgaccagaaaagcagaggacaggagagccaccaggcaaaaccgccccggga

SEQ ID NO: 78646 - RNA, 79 nt, Homo sapiens
caagccaggcaccccacacagacacaaggggacccccaaaagacaagggcaaaacggaccagacacaaagaggagggcg

SEQ ID NO: 78647 - RNA, 76 nt, Homo sapiens
acagcaagggagcaaagacaacagcagccaggaacacaagcggaccggaagcgagcaggagcagagcggaagaccc

SEQ ID NO: 78648 - RNA, 62 nt, Homo sapiens
cggcaagcacaagacacacaaggacgaccaggccaagcaagaagacagggagagcacccgcc

SEQ ID NO: 78649 - RNA, 81 nt, Homo sapiens
aaccccccaggacgggcggaggcggggggaccggcgggcgggcagcgcacccagacaccggggcccaaggaggggacacgc

SEQ ID NO: 78650 - RNA, 60 nt, Homo sapiens
cccagaggcgggaggggccgggaggcagaggggcagggggcaggaaaggagggcgaaaca

SEQ ID NO: 78651 - RNA, 89 nt, Homo sapiens
agcccacacgagacccgggcggcgcgcgcccgaggggagcaaggacagggaccaggccggcacgacaagacccaggcacagcacacaag

SEQ ID NO: 78652 - RNA, 88 nt, Homo sapiens
gccaggccccagacacagacgagcaggggaaggagccccggcacaaaggaagaagaaagaagggagcaagagcaaaaaagaagaggag

SEQ ID NO: 78653 - RNA, 71 nt, Homo sapiens
aaggagcagcgcagaaaaaaggagagagcgaagcaccgcgcagaccgaaaggcacacggagcgaaacccaa

SEQ ID NO: 78654 - RNA, 65 nt, Homo sapiens
aagggggaacaacgaggcaaggcagcaccccgacgacaagacaccccgagacaagacagccacca

SEQ ID NO: 78655 - RNA, 86 nt, Homo sapiens
agaagggcgacacacgaggcgcaccagagaccggacccgccagggcgaagcggccaggcccgggcggacgcagagccagagcgccc

SEQ ID NO: 78656 - RNA, 76 nt, Homo sapiens
cgggaacaggcacgcgccaccaccccagcccagagcaggagcgcagcaggcccaccccaggaaagggaaaagaagg

SEQ ID NO: 78657 - RNA, 60 nt, Homo sapiens
accgccccaacccacgagaggacagcccagaacaaacggacccaggacaaaacgacacca

SEQ ID NO: 78658 - RNA, 80 nt, Homo sapiens
gagggccccagacacgacagcacgcggagcacaggggccagcggagcccaccagaggccaccagcgggagaggaagcgaa

SEQ ID NO: 78659 - RNA, 69 nt, Homo sapiens
gccgaccagagaagcagagcccgcaaagacagacaaagccagagccaacgggcgaagcggcaggaccgg

SEQ ID NO: 78660 - RNA, 75 nt, Homo sapiens
aaccgaagaaagaaaaacacggccaagggaaaaaagcaggggggagaaaaagagcagacgagaagacgcggcgaa

SEQ ID NO: 78661 - RNA, 68 nt, Homo sapiens
agcagccagggcaacagagggaaaacggaccacaccaacaaggcacacacacaccagagcagagcggg

SEQ ID NO: 78662 - RNA, 80 nt, Homo sapiens
ggcacggggaacgcagggcagacaaccgagcacaaaaaaggcacccggagaacagacagaccagccgaacccagaagccc

SEQ ID NO: 78663 - RNA, 57 nt, Homo sapiens
gccgcccaagagagcaagaccgggcccacgaggcacaagcagaggaaccagggaacc

SEQ ID NO: 78664 - RNA, 75 nt, Homo sapiens
aaccggcccaccgccgcccaaccgcggaccgagagaagaaccacgcccagcgccaggacaagagcgcccaagcgg

SEQ ID NO: 78665 - RNA, 62 nt, Homo sapiens
gcgggaccacaagacaacgcggagcggcgaagagcaaccagcaaggagcagggacaagacag

SEQ ID NO: 78666 - RNA, 66 nt, Homo sapiens
acaagggcagggccggggaagcaccaaaggccggaggcaccacaacacggaagacacaggaagcgc

SEQ ID NO: 78667 - RNA, 74 nt, Homo sapiens
agaagacccaccgagcgcaagggcggagaacggaaaagcaccaggaagcagagaggaccgcagaagggaaggag

SEQ ID NO: 78668 - RNA, 88 nt, Homo sapiens
cagagcccggaaacaagggaaaagggagcgggacaaccacaccgaaggccaccccaagaagaggggacagaaagacagacagaagaaa

SEQ ID NO: 78669 - RNA, 63 nt, Homo sapiens
agccggaaggacaccaagagcggaccgggccccgcggagaccaggccaaaaggagggaaaacc

SEQ ID NO: 78670 - RNA, 67 nt, Homo sapiens
ccaagggcagaaggaaaggcagaaaaggcagccgaaacgggaaacgacaaggaggaaagacgacggc

SEQ ID NO: 78671 - RNA, 84 nt, Homo sapiens
gaggagccaggacgcagcccggcggacgccggcacagaacgacgcggcagagcgcaagccgacacgaggcgggccacagccacg

SEQ ID NO: 78672 - RNA, 74 nt, Homo sapiens
ggaagcccccccggcacgacaccgccccaacccacgagaggacagcccagcagcgcacccacaccagaaagcgg

SEQ ID NO: 78673 - RNA, 71 nt, Homo sapiens
gagcgacacaccagagaaaccaccgcgcggcagaaagcccagaacggccgagcgaccaggagaggagcccc

SEQ ID NO: 78674 - RNA, 75 nt, Homo sapiens
cccgccccaggcacaaccagaacggacgagcccggagaaaaccggaagagaaaggccgggaagcaggaaagaaaa

SEQ ID NO: 78675 - RNA, 72 nt, Homo sapiens
agacaaaggcaccaggccaccacagaaacaaaagcaacaaagagggaagaaccgagcgccagaacacgggcg

SEQ ID NO: 78676 - RNA, 79 nt, Homo sapiens
cccacaaacaggcccgagacacccagcccgcgcacgagaggagagaaaggccgcgccagaagggaagaaaggcggaacg

SEQ ID NO: 78677 - RNA, 38 nt, Homo sapiens
aaaggaacccgccccggggacagggacacagggagggc

SEQ ID NO: 78678 - RNA, 80 nt, Homo sapiens
acaaggacagcagcgacggggcccgcaccccaggagccaagaggccacgacagaagaacagcaacagaacacaccaagag

SEQ ID NO: 78679 - RNA, 66 nt, Homo sapiens
gggcccggggggacggggggaggcaggaccggaccgcaacagagaaagagcgcgcacgaaagcaca

SEQ ID NO: 78680 - RNA, 57 nt, Homo sapiens
cacggcgagaagaacagccaccggaaaaccggcgcagagccaaaaggaaccgaggaa

SEQ ID NO: 78681 - RNA, 73 nt, Homo sapiens
cgagcggcgcagaggagagaaggaggacgacgcccagaaggcgcagcgccaggccaccagaccgcgacaccag

SEQ ID NO: 78682 - RNA, 81 nt, Homo sapiens
cggaccaggaggcgagcaacaggaccaggccaaccggagcgcacccacgccacaagccggacggcggcagcgcggccgggg

SEQ ID NO: 78683 - RNA, 79 nt, Homo sapiens
aaaagaaacgggccccgacgaaaggccagacaaccggacggacggcccggcccccaggcggccaccggacagggaggag

SEQ ID NO: 78684 - RNA, 79 nt, Homo sapiens
aaacgggaaagccggcaagagggagaaggacaccaggcagaggcaagggggggccgcccgcccaaggcaggaagagggg

SEQ ID NO: 78685 - RNA, 91 nt, Homo sapiens
acaacccgacgaggaacgaagggacaagacccgccagaacaggagccccagagccaggcagggggagaaccgcgagggagccccgggaaga

SEQ ID NO: 78686 - RNA, 76 nt, Homo sapiens
gcggcaggagggagaaaagcaaagggagggccgaacaggggggaacgacaaacaaggccccagaagcaggggcgac

SEQ ID NO: 78687 - RNA, 72 nt, Homo sapiens
accccgaagagcaacggaaccagcgccgagcgaacaacccagccgccagcccagcccagcccagcccagcca

SEQ ID NO: 78688 - RNA, 81 nt, Homo sapiens
ccaacccacccacgcggcccagaacaaggacccggcaccaacagaaagaaggaggaacgaaagaaacaccagaccagaggg

SEQ ID NO: 78689 - RNA, 57 nt, Homo sapiens
aaccaaggacacggcaccacaccaaccccggggcacgagggcggggaagaggaccag

SEQ ID NO: 78690 - RNA, 63 nt, Homo sapiens
ccggcccgacaccagccgcgagacgacaccaagaggaaaaaccaggcaaggaagcacaagcga

SEQ ID NO: 78691 - RNA, 69 nt, Homo sapiens
gggcgagccacagcgcacaacacaaaaccgaaacgcagagggggagacaaccaacaagaagggcgaccc

SEQ ID NO: 78692 - RNA, 71 nt, Homo sapiens
aggacccggaagccacaaagcaaaacggcacgggagagggcaaacacgaagaccgagggaaacgggagaac

SEQ ID NO: 78693 - RNA, 72 nt, Homo sapiens
gccaggccagaaaacagacccagcagccacaacgagcgaccggaggaacagaggaaaaaagaacaaagagaa

SEQ ID NO: 78694 - RNA, 60 nt, Homo sapiens
gcccaccagacggagcgaaccaccgaagagggagaggagaggagaccggaggaagaacac

SEQ ID NO: 78695 - RNA, 78 nt, Homo sapiens
cgagaggcggcccgggcgcagcgggcacccgggggacgcggggacaccacaagcacgaagcgcgcaagacgcaacaca

SEQ ID NO: 78696 - RNA, 77 nt, Homo sapiens
aacgggcacagcagcggaaaaacacagagggcacacggcacagaccagagacgcagcgaacgcagccaaagaaaccc

SEQ ID NO: 78697 - RNA, 77 nt, Homo sapiens
agaaaggaggaagggaaagcagcaacacaaccagggcaagaaacgcgcaaaccaagcaaagaaaggcaggccagacc

SEQ ID NO: 78698 - RNA, 89 nt, Homo sapiens
ggagcggcgcgggccgggggccgccacggcgaggggccgggccaggccgggcggagccaaaacggacaagccaaggcacgagccaaaga

SEQ ID NO: 78699 - RNA, 89 nt, Homo sapiens
ggaaggccagcagaggcagcagaaacagaaagcgcacaagaacgaaaagccgaaagcgaacaaggaagaagagaagcaaaagggagaac

SEQ ID NO: 78700 - RNA, 78 nt, Homo sapiens
agcccccaaagccgcgcgagaggagccgggacacgccagcgcgggcccagccagcaggacaggcacacccgggcagcc

SEQ ID NO: 78701 - RNA, 70 nt, Homo sapiens
cccggccgagggcggccggacccccccccggcgcccaagcggaagccccagccggaaaccagagcccacc

SEQ ID NO: 78702 - RNA, 81 nt, Homo sapiens
ccgcgggcggcgcggccaacaacaaggagacacgccgccggccgccggcggggaccggcacggaaacccccaaagagaaag

SEQ ID NO: 78703 - RNA, 75 nt, Homo sapiens
acaaaggcaccaggccaccacagaaacaaaagcaacaaagaggagacacagaagggaaaaacgagcggaaacaaa

SEQ ID NO: 78704 - RNA, 66 nt, Homo sapiens
caaaagcgaaagggcacaccacagagagacagggccagagggagagaggcccccagcagacgccca

SEQ ID NO: 78705 - RNA, 70 nt, Homo sapiens
agggagccgagcgagaccacgcaccacgggcgccaacagaaccggagagcgccgaaagcaccgcagagcc

SEQ ID NO: 78706 - RNA, 74 nt, Homo sapiens
ggaccccggagcccagaagacagagggcgaggaacagaggagcggaaacgcaggaggagagagacggacccacg

SEQ ID NO: 78707 - RNA, 63 nt, Homo sapiens
gcccccagccccccgcccggggagggcaccaggagggaagcggacacacaggacgagaaaccc

SEQ ID NO: 78708 - RNA, 72 nt, Homo sapiens
caccgccggcaggaccacgcccggcgccaaccgaacgcaacaaccaagggaacaggcaaacggaaggggggc

SEQ ID NO: 78709 - RNA, 69 nt, Homo sapiens
caagaaggaagaagaagaagcgcaaagaagcaacacaaagggccaaggagaccgcacgccggacggagc

SEQ ID NO: 78710 - RNA, 79 nt, Homo sapiens
aaagagaccccacacgcagccgccgacgacgcccaccacgccagcagaccggccgcccgacacgaacccaccaacccga

SEQ ID NO: 78711 - RNA, 72 nt, Homo sapiens
gcgggcgagccggagggcggggggggaggaggcgaccggagcagcacggaagacacgggcgacgagaggcca

SEQ ID NO: 78712 - RNA, 51 nt, Homo sapiens
ggacacgaaaaccacagggacgggccaacgcacggcccggcagagccagca

SEQ ID NO: 78713 - RNA, 110 nt, Homo sapiens
ccagcaagaggcacagcccagccgaagggaggacggagccaggcggcagcacagggacagagcgaagaaccccccaagaagacgaaacccccgggccacaagaagggggg

SEQ ID NO: 78714 - RNA, 62 nt, Homo sapiens
caagcagcagaagagccaaggaaaaacagcaagaacccaaaaggggcacgagccaagaaaac

SEQ ID NO: 78715 - RNA, 80 nt, Homo sapiens
agagaggagcacacggccagggcaggcggccggcagagcgagaccagcccagagagcagggaggaggaggaggcagagcc

SEQ ID NO: 78716 - RNA, 54 nt, Homo sapiens
cgcacaagcccggaacaacaccagacgacaggcccaccaagaacagaaggcgag

SEQ ID NO: 78717 - RNA, 81 nt, Homo sapiens
cgcccagcaaggccaaccagccggagaccgagaaccagcccaaaccagggacacggaacccaaggagacgaagcgaagcag

SEQ ID NO: 78718 - RNA, 79 nt, Homo sapiens
cccggggcgcgccccgagagaacgaggaggagccccacccgcgcagcaccccgagcccggagaggacccacgcggaccc

SEQ ID NO: 78719 - RNA, 117 nt, Homo sapiens
ccgccgcacgcgggggggaggacacgacaccaggcgaaccggccacgcacccccgaagccgcaagcagacccgcaggacgccacgaccagcacccaggcaccacacagccccagaaa

SEQ ID NO: 78720 - RNA, 65 nt, Homo sapiens
acaagaagcaacgaagcagcaaaaagcggaaaaaaacaacgggaaagcaccgggaggaaagagag

SEQ ID NO: 78721 - RNA, 74 nt, Homo sapiens
ggccgggggacgccaaagcaagcgccaagcgccgccaggcggcaaagagaacccagacggacacagggaaaaac

SEQ ID NO: 78722 - RNA, 110 nt, Homo sapiens
agacgaggggcgagagacggcggcggccgaaagcggagagagcgggcgggcggccgggagacccacagaaaaaagacagggccaggcccagcccaggacccccacaaacc

SEQ ID NO: 78723 - RNA, 74 nt, Homo sapiens
acaaaaagacacacgacacggagaacagagaaggccaaccaaagagaggcacaacacagaaaagggcccaagga

SEQ ID NO: 78724 - RNA, 84 nt, Homo sapiens
cggacgaggccagcggccaagggggaccacggaccaggagagagaacccagagggagggggggcaggcgagggacaggagggcc

SEQ ID NO: 78725 - RNA, 72 nt, Homo sapiens
aaacggaaagagaagcaaaaggaaacaacaggggacccaggaaggaggggaaacacgcacacccagcaagcg

SEQ ID NO: 78726 - RNA, 79 nt, Homo sapiens
cggcgggcggaggccggcccccgagagccgccgacagaagaaagacggcggaccgcgggggagaacgacaaggcacgag

SEQ ID NO: 78727 - RNA, 84 nt, Homo sapiens
gcacccgagcaaaccccagcaagagcggaggcgcccggcggagcagaggaaccacacgcgacagggccagcaacgccacggacg

SEQ ID NO: 78728 - RNA, 77 nt, Homo sapiens
accgccaggagcggcagacggcaggccagcgcggcggcaccccaccgcccagccacagccccccccacaggagcacc

SEQ ID NO: 78729 - RNA, 78 nt, Homo sapiens
ccaaggaagccacggcagacacacaacccgacccgacgagcccacgaaaccccgggggaggacagagccagcacgcgc

SEQ ID NO: 78730 - RNA, 66 nt, Homo sapiens
aacagggagaaacacagccagaagaggacgaaacacacaaagcaggaccaggaaaacggagcgcaa

SEQ ID NO: 78731 - RNA, 79 nt, Homo sapiens
ggaacagggccaccacaggcagagaagcagggggaaccaggggccccacggggaaaaagagcaggaaggaacagaaggg

SEQ ID NO: 78732 - RNA, 71 nt, Homo sapiens
gccccgcccaaaagaccaccgcccaacacaacacgcaggggcacagagcagaggacaccacaggaaggagg

SEQ ID NO: 78733 - RNA, 53 nt, Homo sapiens
ccacaggagcggaagaagggagaaggggaaaccaggagacaaggagagacgga

SEQ ID NO: 78734 - RNA, 72 nt, Homo sapiens
acagcggaacagcaaagaagagaagaggaggcaaggcagcgcccagaagagaggacgggagagcgggaaaca

SEQ ID NO: 78735 - RNA, 85 nt, Homo sapiens
cagaagccaccgcaagggccacgcgggcagaccgacagaagacccaccaccaagaacacgacgcagaacgaccgcaggccgggca

SEQ ID NO: 78736 - RNA, 111 nt, Homo sapiens
acgagcaaggaggagccccgaaaagcaaagaaaaaggaaggacgaacgcaccggagagacgaagaggagcagaaccagaagggacacacaggacggcaggaaggccagcca

SEQ ID NO: 78737 - RNA, 67 nt, Homo sapiens
gcaaaccgaaagcggcgccaagaaccgagagcccggagaagcagaaaagcacaaagaaggacggacc

SEQ ID NO: 78738 - RNA, 49 nt, Homo sapiens
caagaagggccagccggaagaaacacacaaacagcgaacgcagacgaaa

SEQ ID NO: 78739 - RNA, 72 nt, Homo sapiens
cggggggggcggcccgcagcgaaggaccgggcagcgcaagccacaggaacgagccacgagaagccccaacaa

SEQ ID NO: 78740 - RNA, 81 nt, Homo sapiens
ccccccagcagcccgccggggcacacagccaccacagcaccgaagccgggagagggccgaggggcagcgcgcggaagggcc

SEQ ID NO: 78741 - RNA, 79 nt, Homo sapiens
aggccaaggagcacgcaaagccgggaagacaaaggcccaagcagccccaagggggagcaccgccacaagagacagaccc

SEQ ID NO: 78742 - RNA, 79 nt, Homo sapiens
gaaaccgccgaagacgaagggccaggaacaccaggcaacaaagacgcggccgaccagcagcccaaaaaccacaccagcc

SEQ ID NO: 78743 - RNA, 51 nt, Homo sapiens
gaccagggagcagcaacaaacaagccacacccgggaaacacacccaagcac

SEQ ID NO: 78744 - RNA, 101 nt, Homo sapiens
aaacgaaaagaaacagcgccgcacccaaccagacacccagaaggagcccaggcaaacgacggaaaaaaccagaagggggggaaagaagaaaggccaaaggg

SEQ ID NO: 78745 - RNA, 50 nt, Homo sapiens
gccgaccaggaaaaccaagagagagccggaggaggaggacgaggaggagg

SEQ ID NO: 78746 - RNA, 74 nt, Homo sapiens
gagcgggccacaaagaagacgacaagccaaccaagggaaagcaacccggaggggaaagccggaagccgagaggc

SEQ ID NO: 78747 - RNA, 58 nt, Homo sapiens
gagccgcggcgggcagccagagcccagcggcagcaagcaaaacccagaaccagagggc

SEQ ID NO: 78748 - RNA, 80 nt, Homo sapiens
aggaaacacccaccccgcgaggcccccgggcccgggaaaacacacggccaggggcgaacagaacggacaggaccaggagg

SEQ ID NO: 78749 - RNA, 78 nt, Homo sapiens
cgaaggccagcaggaacaggccagcgaaaggggcggccccccgcagggcagaaaggcaaaggcagaggcaaggcggac

SEQ ID NO: 78750 - RNA, 79 nt, Homo sapiens
acaccgggcccgcgggagagcaagggaaaggcacaagcagaggaaccagggaaccgccgccagcaaccaacaggcacga

SEQ ID NO: 78751 - RNA, 74 nt, Homo sapiens
ccaccccaggaagaagacaacagaaagagaccccaaaccagggccacaggaaagcgggagaacgacaaggggag

SEQ ID NO: 78752 - RNA, 78 nt, Homo sapiens
ccaagagaagagcgagccgcagccgacaaaggagggagaaaacgcaggacacaaggaagaagaaggaccagaggaaaa

SEQ ID NO: 78753 - RNA, 72 nt, Homo sapiens
aaccgccaaagcccgggcgcggaagaagccaagggcgggcaggggagacaccaggcggcaaaaaagaacagc

SEQ ID NO: 78754 - RNA, 73 nt, Homo sapiens
ggcacaagaagacgcccccacccaaaccggggagcaggagagacaacgaagagaggaaagaagcggaaaggag

SEQ ID NO: 78755 - RNA, 77 nt, Homo sapiens
gaagagcgcgccgcccccgcccacccaggaaggcggcgcagaagaaggcacagggaagagggaagcgagcgagcaaa

SEQ ID NO: 78756 - RNA, 54 nt, Homo sapiens
gcgccaacaaaaggggcggaagccaaggcccgggagcaagcaccgcacgcgccc

SEQ ID NO: 78757 - RNA, 68 nt, Homo sapiens
cggaaaaagagaccggccgcgcacagagcgagacacagaaacaacggacacccccgggaacccaccaa

SEQ ID NO: 78758 - RNA, 80 nt, Homo sapiens
ccggggccgacccggcccgaggggaagcagccaggaccaaggggcaacaaacgaacaggacaagaagaacaggcaagcag

SEQ ID NO: 78759 - RNA, 72 nt, Homo sapiens
gaggaaagaaacggaacgacccaagggggggagacacggcaacagacagccgccaggaagcaacgcagcgcg

SEQ ID NO: 78760 - RNA, 76 nt, Homo sapiens
gaacagagagaacaaaagagcaggggacggcgaagagagcggagaggaaccagaggaccagagcaggcccgcccac

SEQ ID NO: 78761 - RNA, 76 nt, Homo sapiens
aggaagaagacagcacgagaccaaagagaagacaccaaaagccaaagcaacagcaagcccaaggggaacaaccaga

SEQ ID NO: 78762 - RNA, 81 nt, Homo sapiens
caggccgagaaccacaacgagcacggaacaccgaccacgccagcggccgccccggacccaggggcaccccagaggagcccc

SEQ ID NO: 78763 - RNA, 61 nt, Homo sapiens
gacagcagcccacccgcagcgggaacagggaaagaaccccgggagcgaagaagcggaacga

SEQ ID NO: 78764 - RNA, 80 nt, Homo sapiens
cgcccgggcagggcccaccccgcgcccgacagcgccccagcaccgcgcaccaaggaagacacaagaacaaggagggcagg

SEQ ID NO: 78765 - RNA, 62 nt, Homo sapiens
gacgcagggcgcccccgggccgaccgaagacagagccgccgcccaagggcagccagagaaca

SEQ ID NO: 78766 - RNA, 82 nt, Homo sapiens
agacaagcaagggacccgagagaagacaggagagcgagaccgcggacaacagagagagagaaaccaacagggaaaagggcaa

SEQ ID NO: 78767 - RNA, 81 nt, Homo sapiens
cggacggggagcgaacgggacagcccacacccggcgcggaggaaaccgggagaagccggccaggcaggcacaccccaccac

SEQ ID NO: 78768 - RNA, 73 nt, Homo sapiens
cggacggacgagggaacaaaacgggacaaacgcagccgggccacggcgggccgagcacccgggccgggggcca

SEQ ID NO: 78769 - RNA, 84 nt, Homo sapiens
ccacggacaacaacaagggccaggggccccagggccccagacccaagcccccaggcaggcgcccacgaggcccccgaggaacac

SEQ ID NO: 78770 - RNA, 106 nt, Homo sapiens
cggaaaaggagagcagaaaagaaccaacaagagaaaggcgcagaaccacagagcacggcaaaacacaagacaagcaggagaaggaagcgcgaagaaccaagaaaag

SEQ ID NO: 78771 - RNA, 72 nt, Homo sapiens
ccacaacagagggcaagaacgaaccaaccccacaacaccgccggagacagccaaggagcgcggcgcccaggc

SEQ ID NO: 78772 - RNA, 83 nt, Homo sapiens
gcgaggcggacgaaacccgaccggacccaaaacacgcgcaaagaagccggaccgagaaccgaaggaggaaccaaggaaagcgg

SEQ ID NO: 78773 - RNA, 87 nt, Homo sapiens
gccgcgcccgcgcccagcccgggccccgcgcacagccccagcgcaggaagacagcgagaagccacgcccaggaagaaaggaccccag

SEQ ID NO: 78774 - RNA, 87 nt, Homo sapiens
cccagacccggagcccagggaagcagccgaccagccgcggagccgggggcagccagagcccgggcgcgggaagagacagaccgggag

SEQ ID NO: 78775 - RNA, 77 nt, Homo sapiens
cgaacccaaccacaggagcaaaacccacacagcgaacccccgggacggcccggagaagaagcggcccaaagccacag

SEQ ID NO: 78776 - RNA, 71 nt, Homo sapiens
agagagccagcaagccccagaacaaccacccaaaccgccaggaaaacgcaaaaccagaagcgcgccgacac

SEQ ID NO: 78777 - RNA, 63 nt, Homo sapiens
cggccgccggccacacccccaccgccccgcgcagagaggcccaccgaggacaccgcgccagcg

SEQ ID NO: 78778 - RNA, 79 nt, Homo sapiens
cgcagacccaccgggagggccggacaacagcgacgccaagcaccaccaagagccacaccggaccccaacaggaaccccc

SEQ ID NO: 78779 - RNA, 91 nt, Homo sapiens
aaagagccccgaagcaagagccccccagcgcagcccaccagaacgagcgacggacacaagaggcccaagggagcaaaccgaaagccagagc

SEQ ID NO: 78780 - RNA, 77 nt, Homo sapiens
ggcgacacaaagaagccaacaggagacaagaaccagagcccaaaggcagaggagacgaagaaacaaaaaaccacgag

SEQ ID NO: 78781 - RNA, 60 nt, Homo sapiens
ccaaacgcaggcacaaggcgcagggggaaaggcacccacagaaggagaacaagcagagca

SEQ ID NO: 78782 - RNA, 66 nt, Homo sapiens
ccccagcgaccagcaccgccgcccaccacccgacccagagcccccgcccgggcgccgacccaggca

SEQ ID NO: 78783 - RNA, 63 nt, Homo sapiens
cagcgagcgaggacgaggaacggcgacaccgaaaacgagaaacgaaagagacacgggggcaca

SEQ ID NO: 78784 - RNA, 83 nt, Homo sapiens
aaccaggcgaaaggacgacacgaggggcacgcagcacgggggcaggggccgacccagaacgccagcgccgcaaggaaaaaaac

SEQ ID NO: 78785 - RNA, 71 nt, Homo sapiens
aggaagagaacacccaccggcacaacacacaaagcagacaaaacggcgacacaaaaagagcgaaagagaga

SEQ ID NO: 78786 - RNA, 70 nt, Homo sapiens
gccagaggcgcggggcgccgccgcgcagcgccgcgcgacacaggcaagggaaccggggcccaaacccaga

SEQ ID NO: 78787 - RNA, 43 nt, Homo sapiens
ggaccacacagcccagcaccaaaagaaggaagaacgaggaaaa

SEQ ID NO: 78788 - RNA, 95 nt, Homo sapiens
ccagaccccggaaaagggaaccgcacaaccagcagcgccaacaagcaccgagggcgaaccaaagaaggaaggcgacccaaaaccacgaagcacag

SEQ ID NO: 78789 - RNA, 104 nt, Homo sapiens
ggacggccaacaagacgcacccgccaccgggaccgacgggcacgggggagaggccggcaagacagcggccagggcggccgggagaagcggagccgccgcgaacc

SEQ ID NO: 78790 - RNA, 82 nt, Homo sapiens
aaaagaaggcaccccccgaccagcagaggccacagaagaaggaaaaaaggagaaagaaacaaggcccagacaagccgacacg

SEQ ID NO: 78791 - RNA, 70 nt, Homo sapiens
cacaagacaacgaaagccaggaaagagaaaaccaggcaaaagggagaggcgcggaggcggaggccaccca

SEQ ID NO: 78792 - RNA, 81 nt, Homo sapiens
gcgccaggagacggccgacccgccagaggaggccccccagccacggaaacagcagcccgacggccaggaggcgaagagacg

SEQ ID NO: 78793 - RNA, 67 nt, Homo sapiens
gagaaaacacaaaccgaaaggaaagcgggaaggcaaagaagaagcgcccacagaaggaagcgcggga

SEQ ID NO: 78794 - RNA, 69 nt, Homo sapiens
aacagggccggagggagaacacaggaaccggagcgggcaggcccgcgcgggagcgacacgacaacaacc

SEQ ID NO: 78795 - RNA, 70 nt, Homo sapiens
cgggaaggagagagaaaacagcggagcgggccaccaaaggagcgagacccgggcgcccgagaaagagagc

SEQ ID NO: 78796 - RNA, 74 nt, Homo sapiens
ccgacgccaccccgcgcgcgcgcccccgcgcgcccccaggccgggagacccggacagacaccagggagagaaga

SEQ ID NO: 78797 - RNA, 83 nt, Homo sapiens
cggggacagaccagacacccgggcgggggggaggacccccagccacagggaccccagccggggaaaacgaggagcgaggcacc

SEQ ID NO: 78798 - RNA, 36 nt, Homo sapiens
ggacaagaacaacacacgaacggcagggacgcaggg

SEQ ID NO: 78799 - RNA, 69 nt, Homo sapiens
gaggagcggagaaccggagcggccaacggcaggagaccaagcgagacagaggcaaggaaaaagaacacc

SEQ ID NO: 78800 - RNA, 50 nt, Homo sapiens
ggagaaggaccaagaaccaggaaaccgaagaaccagccccggggacgaaa

SEQ ID NO: 78801 - RNA, 84 nt, Homo sapiens
ccaaacgcagcgcagaccgcgcccgccgaggggacagaccagagcaggaccaaaggcgcacagagccgaaccccaccaggggcc

SEQ ID NO: 78802 - RNA, 80 nt, Homo sapiens
ccccaaccaggacgcaggcgacaacagcccagacccacgagaaacgcaccgcccagccgaaaacaaaccagaaagaagcc

SEQ ID NO: 78803 - RNA, 72 nt, Homo sapiens
gccccaagagcacagaccagcagccgccaaagggccgagaagaagcggggacggcaaaacagccaacggaac

SEQ ID NO: 78804 - RNA, 73 nt, Homo sapiens
ggcgcaggagaagaggcggcccacagaaggagaaacgcagacaccggaaaggaagaccgcccagaaagagcag

SEQ ID NO: 78805 - RNA, 88 nt, Homo sapiens
ggcccagcggcagcccagcgggaggacggagacagccaggagcacagaggacgcccaccaccccagccgagaggagggggccacagcc

SEQ ID NO: 78806 - RNA, 73 nt, Homo sapiens
ccggaacgggaccaaggcaccgccaggaacgggcgcaccacgccaccccgccacgagagcaggaaacggaacg

SEQ ID NO: 78807 - RNA, 64 nt, Homo sapiens
acggaaagacccgccaagagagaaaccaacaagcggacaacggcaagcggagaagagcaaggcc

SEQ ID NO: 78808 - RNA, 73 nt, Homo sapiens
cgacgaagaaacccagaaaacggaggagaggccacgcccccaagaggcccgaacgacaaggaagcggaaagaa

SEQ ID NO: 78809 - RNA, 75 nt, Homo sapiens
cgagagccacaaggagaaaccaccgagagagcaaagcaacgaaaccaggcaccaggcagaaagacagaagcgaaa

SEQ ID NO: 78810 - RNA, 84 nt, Homo sapiens
gccagccgggcggggcccggcggagcccggacgggcgccacaccaacaccacggaaccagaaggacgcccagagaccggcagcg

SEQ ID NO: 78811 - RNA, 89 nt, Homo sapiens
gaccggccacgaaaaaccagaggaaaaaccacaggaggagacacgagccgaaaggcaagacacgcaaaggccggccacaaggacaagac

SEQ ID NO: 78812 - RNA, 78 nt, Homo sapiens
ccggacccggcacagacgcggcggggcgcaaaccgagacaagcaccccgaagcgccggacagagcgggagccaccagc

SEQ ID NO: 78813 - RNA, 76 nt, Homo sapiens
acggacgaggcggcggagaacaagcggcagggaggacagccaggcagagccacacgggaggaacacggagccaaga

SEQ ID NO: 78814 - RNA, 59 nt, Homo sapiens
cgacggcggcgccacacacgcgcaggccggcgcggaagaggccggcggcgggacggccc

SEQ ID NO: 78815 - RNA, 75 nt, Homo sapiens
cagaggggagcagcgccggggccgccgaccaacacccgaggcggacgcagagacagagacccagagaacaacaca

SEQ ID NO: 78816 - RNA, 62 nt, Homo sapiens
gaggaagccagccggaggccccaggagacggaagcggaagcacacgccagacgccagcaggc

SEQ ID NO: 78817 - RNA, 75 nt, Homo sapiens
gagaggcggcgccgaggacagagcgacgggcgcaagccccagcccggaagaaagcgggacccccgccggagcaga

SEQ ID NO: 78818 - RNA, 75 nt, Homo sapiens
gggggccagaggggagcacagagcgagaccaggaaagaagggggcagaagagggcaaaccaaccaaaggaaacaa

SEQ ID NO: 78819 - RNA, 111 nt, Homo sapiens
gaccaaagagcgaagcgcagaagcccgaagaaaacagcgggaagagacagccaagaaaaccccacccgggcccagcgacccgcccagcccccacacaagagggaaacgaag

SEQ ID NO: 78820 - RNA, 68 nt, Homo sapiens
cggcccccagggccacggcagcgggcgcggacaaaccggcgaccacacacggggacgacggggaagcc

SEQ ID NO: 78821 - RNA, 54 nt, Homo sapiens
gaccacacagaaacgaccagaagccccggccccgccccccccagccaccccaga

SEQ ID NO: 78822 - RNA, 100 nt, Homo sapiens
agcccagcacgcggagcagagggagccgcccccgcggggcgcccggagccggccagcgcaccaaccagcccaccaagaaaacacagggagcgcaacagag

SEQ ID NO: 78823 - RNA, 52 nt, Homo sapiens
cccccgggcgcagcgggcagagacgccacagcggaagccgcagaaggaccgg

SEQ ID NO: 78824 - RNA, 77 nt, Homo sapiens
caaagggaagaagacgaaacggaggacagcccaagcacaaaacaacccaaaagaagagccggccaaaggaaaggcgg

SEQ ID NO: 78825 - RNA, 49 nt, Homo sapiens
cccacgcacgaaagcccaggccaaaaagaggcggcccaaccgggggagg

SEQ ID NO: 78826 - RNA, 79 nt, Homo sapiens
gaagaagagaagcacgaaagcgggagagggaccggaacggcggcgacaaggggcccgaacagagggggggaccccaagg

SEQ ID NO: 78827 - RNA, 70 nt, Homo sapiens
caaggcgacccccaccgagacgaagcgggcggcgaagcgacaggcgccacccgacaaaagacaaacggga

SEQ ID NO: 78828 - RNA, 95 nt, Homo sapiens
caagaggcagcccccaacccaagggccgacgagggggcggggcggcaggacccgaccagcaagggggggaggacgggcaagccacaagaacggaa

SEQ ID NO: 78829 - RNA, 107 nt, Homo sapiens
cagagcccaaaccccaggccaagcagccaccagcagcccccagagcgggaccacagaccacgaacagcgaccgaacgaaccgcccaaagagcagagggcaacaaacc

SEQ ID NO: 78830 - RNA, 84 nt, Homo sapiens
gagacgagaccagaggccgaaccgggcgacaagaggccgggcgccccgcaggacacaaggagggggaagacagagaagaccaca

SEQ ID NO: 78831 - RNA, 77 nt, Homo sapiens
cgaggccacccacgggagggagacggagagcagaccgcacagcccccgggcgagcgccaggcgggcagccaggggcg

SEQ ID NO: 78832 - RNA, 110 nt, Homo sapiens
ccgagaaaccggacagcagaggaaacgagggacaacacagacccaccagcagaggagacagagcgaaagcgcccggcaggaccaagaaggaaagacagaggagaaaacac

SEQ ID NO: 78833 - RNA, 95 nt, Homo sapiens
gagagaaaaaggacaaaagccaagaggaggacagcgcacacagcaagcacgagggcggagaacggaaaagcaccaggaagcagagaggaccgcag

SEQ ID NO: 78834 - RNA, 70 nt, Homo sapiens
aggaccaaacggagaaccagggcggagaacggaaaagcaccaggaagcagagaggaccgcagaagggaag

SEQ ID NO: 78835 - RNA, 72 nt, Homo sapiens
gagagagaagaggagagagaagagcagcaggagaaacgagaagaaacagacgcgcgaggggaaacgagcaga

SEQ ID NO: 78836 - RNA, 79 nt, Homo sapiens
aaacaagcgccaagggcagaaccaccaggccccgaaagagccagagaaggaaggagggaaacacggcaagcaagcagag

SEQ ID NO: 78837 - RNA, 78 nt, Homo sapiens
ccagccggcgcgcccagggaccaagcgccgcagccagcgccaaaagaccaagaggcagaggaaaacacgacagagacc

SEQ ID NO: 78838 - RNA, 79 nt, Homo sapiens
gcgcgcgccacgagggacccaggccaacggaaaggggagggcgaaggcggggagccaggaacgggggacaaggagaggc

SEQ ID NO: 78839 - RNA, 68 nt, Homo sapiens
caagagcgcacgggggaaacaagcgaaaaacaggcaagggaacaagcgggaaacggagccaccaacaa

SEQ ID NO: 78840 - RNA, 81 nt, Homo sapiens
cgaaggcaaagaggacaaccaggagccccgggcaggagagacaacaaagcgcaaccaaggcacagaacacaccagcgcaga

SEQ ID NO: 78841 - RNA, 75 nt, Homo sapiens
cgacaaggagagaagcgcggagccccaaggcacacggaagacaaagggcaaagaggggaccgcgacaagccccgg

SEQ ID NO: 78842 - RNA, 73 nt, Homo sapiens
gaaaaaagggaaggaagaagaccaaggaagcgagaccagccaacagaagagaaacggacagcggacaaagaaa

SEQ ID NO: 78843 - RNA, 80 nt, Homo sapiens
gagagcagcccccggaaaaagcaagcgaagacacaagaagaccgagcaaagagaccccggaacggacaagagaaaaaaag

SEQ ID NO: 78844 - RNA, 77 nt, Homo sapiens
gccaggggggccccacagggggcagaaacacgggggcaaggcggacaacccagaaaagaaaaggccaggggcgccga

SEQ ID NO: 78845 - RNA, 57 nt, Homo sapiens
ggcgcgccgaaagcggaaggccgaggaggccacgcgcagccccggaagagccaccca

SEQ ID NO: 78846 - RNA, 75 nt, Homo sapiens
aacacagggggaggacagcccaagaacaccggcgaagccaacccaccgccaccaccccaccagagacacccagga

SEQ ID NO: 78847 - RNA, 80 nt, Homo sapiens
caccgccgccgccgccgcccccagcgccgccagacgaccgcgccacccgcagcggaagagagcgggcacgcaaaagaaac

SEQ ID NO: 78848 - RNA, 75 nt, Homo sapiens
acgaagagccccccccccaacaccgcgacacgcaggcccccaaaggaccaaaacgcaaccaaggaaaagcgcaga

SEQ ID NO: 78849 - RNA, 78 nt, Homo sapiens
ccggccgccccaacgggggcacgaagggggacacaggcgagaccccggcaaaggaaagaagcaggaaggggccagagc

SEQ ID NO: 78850 - RNA, 87 nt, Homo sapiens
cagcacccagcagcgccccggggccccgcgggaccgcggccacggacggaacccggagggcggaccacaaggaagaaaggaaggggc

SEQ ID NO: 78851 - RNA, 87 nt, Homo sapiens
gcgacccggggggcgcgcccagagccccgcgcagcccagggaagggcggaaaacaccccaaaagccaaaagggaaaggaaaagacca

SEQ ID NO: 78852 - RNA, 74 nt, Homo sapiens
ggcaaccacacagggaccgcaaaggagacgccgcgagcagaaggcaagaaagggagaagccagaaaagcagaaa

SEQ ID NO: 78853 - RNA, 82 nt, Homo sapiens
ggggcccaccggaggaggggggagggagccacccggggacacggcaccaggcggccagcgcaagacccgaacccgagaaccc

SEQ ID NO: 78854 - RNA, 73 nt, Homo sapiens
cagccgacagcccgcccaggaagggacccgagcacggggggagcgacacccaacaggaagaagacccccgaag

SEQ ID NO: 78855 - RNA, 57 nt, Homo sapiens
cggcaagagcggcaggggcgcaggagaaagagaaacgggggggaaggacaccccgag

SEQ ID NO: 78856 - RNA, 60 nt, Homo sapiens
accgagagcggaccgagagcgcgaaacgcacgagaagggcaaacgaagaaaacgacccag

SEQ ID NO: 78857 - RNA, 75 nt, Homo sapiens
gccaagaagaggacaagagggcagaagaagaacgcggcagaagaaacacacaggagaacccccgagaacagagag

SEQ ID NO: 78858 - RNA, 83 nt, Homo sapiens
agcacccccagggggaccgggggacgccggcggcagagagagcaccaacgcagcagcaaagaacacaccaagagacagaaacc

SEQ ID NO: 78859 - RNA, 73 nt, Homo sapiens
caacgaagagcagacacagcaaagagcggggagccggcccgccgaggccaggagaccgcagacaacacaagag

SEQ ID NO: 78860 - RNA, 84 nt, Homo sapiens
gaccggccgcgggcccagcgagggcgagccgggcgggggaggacccagcggacgcccgcagcccggaacagaggacagggcggc

SEQ ID NO: 78861 - RNA, 67 nt, Homo sapiens
aacagggcccaccaccgaaccccaacgacaccacggaagagcacccggggagagcgagccgagcaga

SEQ ID NO: 78862 - RNA, 80 nt, Homo sapiens
ccgagaggaaggaaacacaggggacaacaagcgggaaagaggcgaccccgaggcgccaaccggaacaagacgcccgcgcc

SEQ ID NO: 78863 - RNA, 89 nt, Homo sapiens
cggaggccccagggaagcgcagaaagcaggcgaacccgcggcgcaaaacggagcagagcagaagcaaaggagaggagagacgcacggac

SEQ ID NO: 78864 - RNA, 63 nt, Homo sapiens
aggaaaaaccgccaaacgcaggcacaaggcgcagggggaaaagacaggaggcaggggacaaaa

SEQ ID NO: 78865 - RNA, 63 nt, Homo sapiens
cagaccagcaccccgcccagccacccaagaagcgggaccacagggcagcaaacaagccagcag

SEQ ID NO: 78866 - RNA, 76 nt, Homo sapiens
gacgcccagccaaacaaaaaggaaaggagacaagcagagacgaaccaggcaaagggacggaaaaggcgcacacgac

SEQ ID NO: 78867 - RNA, 81 nt, Homo sapiens
ccagccgcgccgaccgcacgcccgcaccccagggagcgcgcgaacacacaagaagcccggaccggagccaagagaaggaga

SEQ ID NO: 78868 - RNA, 79 nt, Homo sapiens
gcgaagcggccaaagccgcccagacggccaccggcgggaggaacaaaaggaccaagagagcccccgaggaccgccccca

SEQ ID NO: 78869 - RNA, 38 nt, Homo sapiens
agcccccagagcgggaccacaggaacgagcacggcaac

SEQ ID NO: 78870 - RNA, 71 nt, Homo sapiens
cacagaagaccggaggagagccccaggagaccgaaaagacgcaggcaacaggaagaagaacccacaggggc

SEQ ID NO: 78871 - RNA, 74 nt, Homo sapiens
gagcgacagggaccaccagagaacaaggaagccccccagaaaagaggcgaggcaccacacaacaaaggaacgga

SEQ ID NO: 78872 - RNA, 77 nt, Homo sapiens
ggcgagcggggggacgccggcggagacgcgggcgagggacggggacaccagacgggaaaacacccgaagacgcaccg

SEQ ID NO: 78873 - RNA, 76 nt, Homo sapiens
caagggcagcagcggcgaccccaggacgggaaaccaggaagacagaggaacggccgagcgaccaggagaggagccc

SEQ ID NO: 78874 - RNA, 80 nt, Homo sapiens
gaacgcacaggccgcgcagagcgggaccacccgggcacagcaggcacggagcaggaccggcaagccgagcgacccggcgg

SEQ ID NO: 78875 - RNA, 49 nt, Homo sapiens
gagcgacaacgggacgggaaacgcaaaccgacaccagcgacacaagcgc

SEQ ID NO: 78876 - RNA, 79 nt, Homo sapiens
gcgagcgccgcacaaaaagcagagagagagaagcacacccagcacccaagcgaagagaaaacgacccaggccccacaag

SEQ ID NO: 78877 - RNA, 64 nt, Homo sapiens
gacaagggcagagggaacaggcagcaggaagcacggcgggcgaaacagcggccaaacgcagccc

SEQ ID NO: 78878 - RNA, 74 nt, Homo sapiens
agcaaggcgcgcggcaccccggccaccggcaggccaagggaggaaaaagcggcacagaggaagaggcccacccc

SEQ ID NO: 78879 - RNA, 76 nt, Homo sapiens
ggaacggacccagcagaaaagaagcgggcaacccagcgcaggagggcacggaggaggacccaaagcaaacggaacg

SEQ ID NO: 78880 - RNA, 69 nt, Homo sapiens
gaaaacaggaccaagaagaagaaccagcaaaaaccgaaaccaagagaccagacagaagaggaagaacac

SEQ ID NO: 78881 - RNA, 54 nt, Homo sapiens
cccgccgcagcaagcagaggcaaagaagaggacacagagggagacccacggacc

SEQ ID NO: 78882 - RNA, 78 nt, Homo sapiens
gggcacgacccccccagaggcgagggccacccgcaagggcaggagaaagcaacacaccgcaacgaaggcccagcgccc

SEQ ID NO: 78883 - RNA, 79 nt, Homo sapiens
ccagagcaccggaggcacaacccgggccgaggagccacagaggagggcccgggaaggcaccgaccgcacgagcaacccg

SEQ ID NO: 78884 - RNA, 84 nt, Homo sapiens
gccgagcccggcacagcgccgcgccgccgccgcggggcagcagcagccggcagcagcagcgggcgccggggaaggaaccagaac

SEQ ID NO: 78885 - RNA, 75 nt, Homo sapiens
gacagccaacgcccagagaaaaacagcgaggaaagagggcgcagaagaggaggaccgggccgggagaggaaggcc

SEQ ID NO: 78886 - RNA, 82 nt, Homo sapiens
caacaaccggccgcggaggcgccaggagggcggcgcaggaggcaaagggaccccaagaaaccaaagggcaagagccgcagcc

SEQ ID NO: 78887 - RNA, 78 nt, Homo sapiens
cggagggggaagcccaccggaggagccaacaaccagcgggcacggacccccacccggagcagcaagcagagacagaga

SEQ ID NO: 78888 - RNA, 82 nt, Homo sapiens
ccagccccggcagccgggcggcaggaccgggggccgaggcgccggggaccccagaaggcccaaacgggggcccccagacaag

SEQ ID NO: 78889 - RNA, 54 nt, Homo sapiens
gaccgcagaagggaaggagacgggaggccaccgccccaccagcaggcaacgcca

SEQ ID NO: 78890 - RNA, 55 nt, Homo sapiens
ccccgaggccggcaacggagacccaaggaagaagagagggcgaaggaggccacac

SEQ ID NO: 78891 - RNA, 86 nt, Homo sapiens
agaagaggcccaacccccaccccgcccaaggaggcccagcgaagcagaagaaggacaccccacaccgaaacagaccccagagacag

SEQ ID NO: 78892 - RNA, 85 nt, Homo sapiens
gagcagggagcagcgcagcgcgcgcagagcgcgccagcagcggcagggcaaagacagccggccccccagcagggcaggaggccag

SEQ ID NO: 78893 - RNA, 80 nt, Homo sapiens
accagcaaggcggcagagcaaggggcacgcagaaggaccggccacgggcgccggccgagcccgggaaaacgacagcagca

SEQ ID NO: 78894 - RNA, 76 nt, Homo sapiens
ccgggacacgaccaccccaagcgccacacggcgacagcggacgagaacccccgcgaaccagaggaacccagcgagc

SEQ ID NO: 78895 - RNA, 62 nt, Homo sapiens
gcgccgcggggcggccgccagcacaagcgcacccgcacagggacaagcaaggggccaaggag

SEQ ID NO: 78896 - RNA, 55 nt, Homo sapiens
aggacccacacaccaggcgaaaggggacggaacccagccgaagacccggcgaaag

SEQ ID NO: 78897 - RNA, 66 nt, Homo sapiens
cgaggcagacagaagagaagccggccagaacacacagaaaagggccaaaggaagaagaagggagcg

SEQ ID NO: 78898 - RNA, 78 nt, Homo sapiens
cgccaccaacagagaagacagagcaccaacgagggaggcaaaacagcaggcgggacagagggaagaaggccggagaga

SEQ ID NO: 78899 - RNA, 77 nt, Homo sapiens
cagaagccaaacaggaggaggaagggaggaacccacaggacccggaaacagggacaccgaaccacccaacagcaaaa

SEQ ID NO: 78900 - RNA, 74 nt, Homo sapiens
ggagcaccgcaccgccccgggacagggcaccaccagcagcagcggagaccgcgggccgggccaccggcagggga

SEQ ID NO: 78901 - RNA, 82 nt, Homo sapiens
aggcggcggggcgagagggcggcgaaggaggcagaggcacagcgcaggaccaaggcagaagcagacgcaggcaagagccaag

SEQ ID NO: 78902 - RNA, 82 nt, Homo sapiens
gagccggccggggggaagaaagagagcacaagcccaggaacggggagaaacgccagacgccccgaccaagaagaaacgagaa

SEQ ID NO: 78903 - RNA, 75 nt, Homo sapiens
gacgcgccgagagcaaaaccgccggccggaccagaccggggggaaaggcgcccgagaacacgaaacaaggaagaa

SEQ ID NO: 78904 - RNA, 69 nt, Homo sapiens
gggaaagaagaacagcacaaagggaagagcgggcggggcgcacacagccagcacccaggaggcagaagc

SEQ ID NO: 78905 - RNA, 64 nt, Homo sapiens
cgcgagccacaaggagagcgaagcaaggcccggcgcaaggccaggacgggcacccgcgcccccg

SEQ ID NO: 78906 - RNA, 76 nt, Homo sapiens
ccgcacaagcgcagcacgacagagggacaggcaaaagcagaccggaaaacccaccggcaagaccacacccgagggg

SEQ ID NO: 78907 - RNA, 70 nt, Homo sapiens
aaagaggaagaccacggagcagcgcaggagaaaaaaacagacgacgagggcacgggcaaacacccaacaa

SEQ ID NO: 78908 - RNA, 44 nt, Homo sapiens
ggaccagaaagggccaaggaggcaaagcagagaccagacgaaac

SEQ ID NO: 78909 - RNA, 68 nt, Homo sapiens
gaaaaacacacgggccaggaaaaggagagccacgccagccaagacaggagaccaggaaaaacagggaa

SEQ ID NO: 78910 - RNA, 76 nt, Homo sapiens
ggaagaacacgagagggagagagccgggagcaaagagcgcacagaacaggagcacgcgaggcgcaaacagagacca

SEQ ID NO: 78911 - RNA, 75 nt, Homo sapiens
caaggcaaaacacccacacaaaccccagggggcaagaagcacagaaacgccgagagaccccagaaccgagcgagc

SEQ ID NO: 78912 - RNA, 53 nt, Homo sapiens
cgcagaaagggagaaagaggaacaccgggccaggcggcggagccgaccaagcg

SEQ ID NO: 78913 - RNA, 62 nt, Homo sapiens
gaaggaccaagaaccaggaaggaagggaacacggacgacgagacacgaccaacacaggcgac

SEQ ID NO: 78914 - RNA, 53 nt, Homo sapiens
agcgaggaaaagccagaaccaagacagagagcaagacaaacagagaacaggac

SEQ ID NO: 78915 - RNA, 58 nt, Homo sapiens
ccggcccccaggcggcaagagaggaagcaggcagggaaggcaacgaggggaccaccgc

SEQ ID NO: 78916 - RNA, 52 nt, Homo sapiens
aaagaaacaccggagaagaacgcaagcagaggagaggcgcggccgcacaacc

SEQ ID NO: 78917 - RNA, 77 nt, Homo sapiens
acacagccaccggcagcgcaagaaagccaacccagcgaaggaacaagcaaaccccaagcggcaagagaccgacaaac

SEQ ID NO: 78918 - RNA, 75 nt, Homo sapiens
aaagcccagaagcacgcccaagacccaggaccgaagaaacagacaagcaggagccccaacccgcgcaagaacccc

SEQ ID NO: 78919 - RNA, 65 nt, Homo sapiens
gggaacccgcggggagcgggacacgaacgggagccggaccagaccgccggagcacgccgagacca

SEQ ID NO: 78920 - RNA, 37 nt, Homo sapiens
ggcaacacacagaaacagagaagaaggaggccgacca

SEQ ID NO: 78921 - RNA, 47 nt, Homo sapiens
ggcagacaaaagggccaaagaagggagagagagggcgaagacaggac

SEQ ID NO: 78922 - RNA, 69 nt, Homo sapiens
gccacggcgggccgcgggaggacaccacccacaggaccgcggcaagcgggagcggacccacccaagcca

SEQ ID NO: 78923 - RNA, 65 nt, Homo sapiens
gggcacgccccacaacaagccaaaccagccaagagccaccggaacaaggaaccaagaacagagac

SEQ ID NO: 78924 - RNA, 94 nt, Homo sapiens
aagcagccgggacagaacgaacaggcaaagcccaaaaggcaaggcacaagccaaccaggaaaccgccagacggccgcaccagaaggaaaggcga

SEQ ID NO: 78925 - RNA, 72 nt, Homo sapiens
gaaaccagcaggaaggcaagcacccaaaacagagagaagggcgggagaaaccaaggaaagagaaaagcggga

SEQ ID NO: 78926 - RNA, 78 nt, Homo sapiens
gacacaccccacaggaccccagagcgacagcccgggacaccaagaaagaacggagccagaagaggggagaggaccgga

SEQ ID NO: 78927 - RNA, 66 nt, Homo sapiens
ggaaagcccaaccacgccagaggcaggaccaaccagggaaggcgaggagcggaaggcgagcggagc

SEQ ID NO: 78928 - RNA, 63 nt, Homo sapiens
gagggcgcccggaaccaagggccacgggaaaggccgaaacagacagaggacaagcaacagcag

SEQ ID NO: 78929 - RNA, 72 nt, Homo sapiens
cggggcgggcgccgcgggacccccgggccagggcccacagacaagccgcccccccacccgacggagcggcga

SEQ ID NO: 78930 - RNA, 65 nt, Homo sapiens
ccaaagccacccgacgagagcaacccaggggaggacggaaagggagacaaccaacgcgaggcccc

SEQ ID NO: 78931 - RNA, 80 nt, Homo sapiens
gcggaaaaacacagagggcacacggcacagaccagcaacgggaacagagaggagagccagagcagacagccaaacgaagg

SEQ ID NO: 78932 - RNA, 79 nt, Homo sapiens
cagagacagaaagaacccaaggaccaagcccaggacccagcagcccccaaggagaacagaaacggaacccaacaagccc

SEQ ID NO: 78933 - RNA, 58 nt, Homo sapiens
aggagggacggaacggaggaccaagagcagggagcaacgcagagcgcggaagcacagc

SEQ ID NO: 78934 - RNA, 67 nt, Homo sapiens
aggcacaggcgaccaccccaaaagcaccggccccgcacagcaaaccagggggagccccccagacccg

SEQ ID NO: 78935 - RNA, 72 nt, Homo sapiens
ccccacccagcaggaggcaccagagccacagacggggaggccccgaccgcccacacacacaaccgaaagcca

SEQ ID NO: 78936 - RNA, 58 nt, Homo sapiens
ggggcgacaacggcaccgggaccacacgaaggggcagaagagcacaagacggaagaga

SEQ ID NO: 78937 - RNA, 65 nt, Homo sapiens
agaaagggacccaggaagagaagaaagaggacaacagacgagcggcaaaggccccgcaagaaccc

SEQ ID NO: 78938 - RNA, 72 nt, Homo sapiens
acaccagaaacagcgcaccacccgcagacaagccagcgccagggagcacaaccacaagcccaggagagccca

SEQ ID NO: 78939 - RNA, 74 nt, Homo sapiens
caacagggccgcacagaaggaaaacggaacgccaggagcgccgggagacacacgcaaaaagaaaaggaagaaaa

SEQ ID NO: 78940 - RNA, 80 nt, Homo sapiens
cgcgggaggagagccagggacgggcagcaaggccggcaaaaagcacgaaggaggggggagcgagccggaaaagaaccaca

SEQ ID NO: 78941 - RNA, 50 nt, Homo sapiens
agcgacgacggacagcaaggaaccccgacagccaagcccccggcccccac

SEQ ID NO: 78942 - RNA, 51 nt, Homo sapiens
aggagagcagaccaacaagacaaaggggacagcccaccacaagcaggcccc

SEQ ID NO: 78943 - RNA, 79 nt, Homo sapiens
gcgacaggccgaacacgcccagaagaacaggcggcgggcagagcgaggcagaaagaggagaagagccggaaaaagcggg

SEQ ID NO: 78944 - RNA, 77 nt, Homo sapiens
cggacgggggaggaggcaacgccgcgccagcacccggcggagcccgaggaaacgaccggcagggcgagacaccccag

SEQ ID NO: 78945 - RNA, 73 nt, Homo sapiens
cccccagaacagagccaaggcggaagagggaaagcaggcaaaccacagggaccgaccaagagaagagcgcgag

SEQ ID NO: 78946 - RNA, 84 nt, Homo sapiens
gcgacccacccaggggccccgacagcccaaaggaccagagcccgccgaggggaccgaaacccgccacacggaaccgaaggagcg

SEQ ID NO: 78947 - RNA, 32 nt, Homo sapiens
ccgggggcaacgagaccgcccagggcgaagga

SEQ ID NO: 78948 - RNA, 70 nt, Homo sapiens
cacacaacgggaggagaacaccgcgggaccagcgacgacgcagaagagaggcacagagagaaagaaggaa

SEQ ID NO: 78949 - RNA, 74 nt, Homo sapiens
cccacaaccccaccaaaaccacaaaacccggggcgcaaacgcggcacaacagcaacgccagaaagagacggccc

SEQ ID NO: 78950 - RNA, 69 nt, Homo sapiens
caggaaggcccaaaaggaccacggaagagaggccaacagaccacagaagggcagggcaagaacccgcca

SEQ ID NO: 78951 - RNA, 80 nt, Homo sapiens
accaagggagccagcggaggagcaagaaggaacagcacaagccagaagaaagaggaaacgaaaacgaagcaagaaaagga

SEQ ID NO: 78952 - RNA, 64 nt, Homo sapiens
aaccggagaccagggcaacccagacccaggggcacagaagggaccacaaacgagggccaagagg

SEQ ID NO: 78953 - RNA, 84 nt, Homo sapiens
cgccaggagcacgcacgggggcccgggccgaccgagcaccaggcgaaagccaacaggcagaccagagacagcgccacgcacccg

SEQ ID NO: 78954 - RNA, 68 nt, Homo sapiens
cagcgacacggcaacgagaggagggagacaggggcaaaaaacggcagggaagaggcgagacagaagag

SEQ ID NO: 78955 - RNA, 60 nt, Homo sapiens
ggacgcggacgcacgaggcagagcaacagggacacaagcaagaagaaagggaccgacagc

SEQ ID NO: 78956 - RNA, 74 nt, Homo sapiens
gaacacgggcagcggccccacgagcccaccagaaacgagccagcaggaggacacgcccaccaagaaagaaccgg

SEQ ID NO: 78957 - RNA, 83 nt, Homo sapiens
cccaagccccagcccccgggcgaggcacaccccggagccaggagggagcaagagcagccaccgaggcaggggggcccgccacc

SEQ ID NO: 78958 - RNA, 64 nt, Homo sapiens
aagacaaagaggggggccccggagagaaggcagacggaacagaaggacacgccagccccaagga

SEQ ID NO: 78959 - RNA, 83 nt, Homo sapiens
cgagagaagcggcggaggacgagcccgggagcgacccgcgcaaacaaacaggaagcaggccggggaccaaggggacgcggagc

SEQ ID NO: 78960 - RNA, 65 nt, Homo sapiens
gaagagaacccacgccaaagaggaagcccaccacaaaaacgaaggcggcgggccccacagcccac

SEQ ID NO: 78961 - RNA, 56 nt, Homo sapiens
gggacgcggacggggagcaccgaaagccaggaaaggaacgaaagcggcacggagaa

SEQ ID NO: 78962 - RNA, 75 nt, Homo sapiens
cagggggacgccccagcccgaagagaaacgcaccacacccggaaccgcaggcgaaaccgggagaccgaggaaccc

SEQ ID NO: 78963 - RNA, 82 nt, Homo sapiens
cggccgagcgacggccccggcccagaagccgcgcgcccaggcggagggcacgaccagccacgcagccccaccccagggcaag

SEQ ID NO: 78964 - RNA, 55 nt, Homo sapiens
aagcacgaaagccccacccgccgcagcaagcagagacgcagccagcaaaggcccg

SEQ ID NO: 78965 - RNA, 86 nt, Homo sapiens
gacacagccacaagaaggcagcaaaccaagcaaccaggaaccaaccgggagccccccaagagacccaggggaagacccaaaggcag

SEQ ID NO: 78966 - RNA, 86 nt, Homo sapiens
gcggaggcgcaggcagcaacgaggcagcggcaggccagggcagccgcgggccaaaaagcagaaaaacaaaccagcccaagaagcga

SEQ ID NO: 78967 - RNA, 52 nt, Homo sapiens
ggacacccaacgagaagcggggaaaaaggaccacggcagagagcccaaggac

SEQ ID NO: 78968 - RNA, 75 nt, Homo sapiens
ggagcccggaagacccgcaccggagcaaagacaggccggacacaaccacaaacgagccacgccaaagggcccggc

SEQ ID NO: 78969 - RNA, 82 nt, Homo sapiens
gggaggaggccggggccgcgcgagggcgcccagcggggccaaggcgacagcaaaacggagaaagaggagagggcaggggccg

SEQ ID NO: 78970 - RNA, 41 nt, Homo sapiens
agaccgacacgacgcagcaccaccgagcgagagcgggcagc

SEQ ID NO: 78971 - RNA, 70 nt, Homo sapiens
gaaacccaagagcagcggcagaccacaagaagggcgggggccccgcagacccagcagcgggcagcgaacc

SEQ ID NO: 78972 - RNA, 64 nt, Homo sapiens
cggcaccgaacgcggccaagggccggccgacaccgagaggggaagccgagagcacaagcgggaa

SEQ ID NO: 78973 - RNA, 75 nt, Homo sapiens
agcacacgagaaggagacacgagacaagaaccagagaaacagcacaagacacccaccaggagccgcccacaccca

SEQ ID NO: 78974 - RNA, 76 nt, Homo sapiens
gcggcacgaagaggacaggagaggagacgccggagcgggacgaccagagaccgagagcggcgcgcaccgcggcacg

SEQ ID NO: 78975 - RNA, 77 nt, Homo sapiens
gcagaaagcaggacagccccagaagaagagccgggcaagggcacccaaaaaccgaagacggggacgggagggaggac

SEQ ID NO: 78976 - RNA, 69 nt, Homo sapiens
cccgcgcggggcgcgggcgcggccggaccgcagccgcaaggcgaccggcccgaggaccgccgcacgacc

SEQ ID NO: 78977 - RNA, 77 nt, Homo sapiens
acaaggagaacacgccgaagagaacaagacgggaagaccagggaggagcaagaagacacagcaacaagacagaaacc

SEQ ID NO: 78978 - RNA, 80 nt, Homo sapiens
caggaacccgcgcacccacagcgcgccagccgagagggagccagcaaaaccaaccaggccccgggaccaaggacacgcag

SEQ ID NO: 78979 - RNA, 64 nt, Homo sapiens
agggggagggacaagaggaccaaaccggccaggcgagagcaaaagggaacagcccgggggaggc

SEQ ID NO: 78980 - RNA, 74 nt, Homo sapiens
cgccacccggcgcgaccgcccggcaccgggagaaccaccgccaccgccaccagacagaggcacaaaaggagaaa

SEQ ID NO: 78981 - RNA, 65 nt, Homo sapiens
ggaacaaagaccggagcagcaacgcaagacaccggcacgcaacaggggaacgacacagccgcaca

SEQ ID NO: 78982 - RNA, 75 nt, Homo sapiens
gggccgcggcccacgcccgcggagcagccggccccccggacagccagagaaccaaaggcagaccacacggcacac

SEQ ID NO: 78983 - RNA, 73 nt, Homo sapiens
cgagaccccacaagacgcaccaacgcaagggcacccgcacagcaccaagcaccgggacacagaagaaaaaaag

SEQ ID NO: 78984 - RNA, 59 nt, Homo sapiens
agaagggagagagaccaaagacgagaggggcggcaccaggaaaaagaaagacggcacag

SEQ ID NO: 78985 - RNA, 75 nt, Homo sapiens
gccaccagcacggaccaggaggcgagcaacagggaagacacaggaagcgccgaggaaggaaaccagcccagaacc

SEQ ID NO: 78986 - RNA, 98 nt, Homo sapiens
cacccgcgcaaacccaggagcaacagagaaagaagagagagaacaaagcgagggcgcagccccggagaggccacagaaacgcagcgcccacacacgcc

SEQ ID NO: 78987 - RNA, 84 nt, Homo sapiens
aaacccagccgaagcaaaaagggaacaaccaccagcaccgagccagcccaaagacccaaacacaaagaagaacgggacccacca

SEQ ID NO: 78988 - RNA, 75 nt, Homo sapiens
aagcggaagaaccgaacacacaaagacacggccacacagaccgaacacaaacagccaacaggacaaaggacaccg

SEQ ID NO: 78989 - RNA, 76 nt, Homo sapiens
aaaggaaaacaaaggcggaggcacaaaaagaacaaccagaaggaacgcagagaccgacggagagcagccacaagac

SEQ ID NO: 78990 - RNA, 53 nt, Homo sapiens
acgcgcggaaggcagcgcccagcagcgcaggcgagagccacagaaggaggagg

SEQ ID NO: 78991 - RNA, 57 nt, Homo sapiens
aaagacacgggagaagggagaaggagaagagaaaagggaaggcacggaggaagcccg

SEQ ID NO: 78992 - RNA, 38 nt, Homo sapiens
gacagcaaaagcggaacagacagggcccccgcccccac

SEQ ID NO: 78993 - RNA, 38 nt, Homo sapiens
gccagaacggagaaacagggaggcaagaccaaacgaga

SEQ ID NO: 78994 - RNA, 81 nt, Homo sapiens
aaccaagaccacaacaccaggagagagcccaccaaggaaccacgaaaccaccgcgcagaaaaaaagcccacggcagacagc

SEQ ID NO: 78995 - RNA, 76 nt, Homo sapiens
ggccacccaaagcacgggggcaacagaggagaaaaggacgacggaaccaccacgaaaaaaagcacacccaagacac

SEQ ID NO: 78996 - RNA, 80 nt, Homo sapiens
caacacaccccaacgggaaccggaccccgggcagggggcgggggggcccacgagaagagcaggcgacgggggagagggag

SEQ ID NO: 78997 - RNA, 41 nt, Homo sapiens
gggggcccccccgccggacagccaccacaaagaacagacga

SEQ ID NO: 78998 - RNA, 74 nt, Homo sapiens
aaacagacaggcacggaggaagcaggaaggaccacccaagagacaccgcaaacaccaaaaagcgcgcaagaaaa

SEQ ID NO: 78999 - RNA, 72 nt, Homo sapiens
cgagcacacacaacgcgagcacacccccagaaggaagacccagaaggggaaacggacagaggggaacccgga

SEQ ID NO: 79000 - RNA, 53 nt, Homo sapiens
cggaaggcagcgcccagcagcgcaggcagcacaccgcgcccacaggacgaaac

SEQ ID NO: 79001 - RNA, 79 nt, Homo sapiens
acagagacagcagccaaacccccaggcacaggggaacaagccaggaacagagcagaccaagaagcgaagacaccggaag

SEQ ID NO: 79002 - RNA, 41 nt, Homo sapiens
ggacccgccgcgagggacccggggagccacggggcccgcgg

SEQ ID NO: 79003 - RNA, 71 nt, Homo sapiens
gacagcaacaagacacggagcaaggaggaaaacacacgggagggacagcgggccccagaccggggaggggg

SEQ ID NO: 79004 - RNA, 74 nt, Homo sapiens
ccggccgggaggaaaccaggacgcagagggagcagccaaggacccaccccaagagacgacagaaaggcagagaa

SEQ ID NO: 79005 - RNA, 97 nt, Homo sapiens
gaagcaggaaacaccaagaaaaagccaaagcaagagcaggcgacacgcaggagggacacgggaacacagaggagccaagcgcccgccggacaacaag

SEQ ID NO: 79006 - RNA, 77 nt, Homo sapiens
ccggccccaagaacgccgccgccccggagccgccaccgaagcgccggccagaccaggcgagccgagagagaggacac

SEQ ID NO: 79007 - RNA, 70 nt, Homo sapiens
cggacagagacaacaccgagagagaagggaccgggaggagggcgccaggagcaccaacccgggcacaaac

SEQ ID NO: 79008 - RNA, 59 nt, Homo sapiens
gaagccgcgccccgcaggcacccgggcccccgcccggggggcccaccacgcccagcgac

SEQ ID NO: 79009 - RNA, 82 nt, Homo sapiens
gcgcgagggacccggccagcccaggggacagagaaagaccagggcagaggaagaacgcagggaaaagaaaaaaaaaaagcaa

SEQ ID NO: 79010 - RNA, 69 nt, Homo sapiens
cagccacacgaggagacggaaccggagaaaagggagaaaacaagcccagccggaaacacaaagacgaaa

SEQ ID NO: 79011 - RNA, 35 nt, Homo sapiens
ccgcagccgaagggcgccaaagaccccaagacaga

SEQ ID NO: 79012 - RNA, 57 nt, Homo sapiens
agggcaagacaagggaagaggaaagaaacacaccagccgagggaacaaaaggcccga

SEQ ID NO: 79013 - RNA, 85 nt, Homo sapiens
cagacaccgccccgagacgagagacaagaggagcagcagcggcaccgcccccacccggagggccgacaaccacagggacccgccc

SEQ ID NO: 79014 - RNA, 87 nt, Homo sapiens
gcgggcgcggggagggggcgccgcgccgcgggggccaggcggagccaggaagccgggagccgagacccgggcagccaaacgggccgg

SEQ ID NO: 79015 - RNA, 86 nt, Homo sapiens
gggaggcgcgcacagaacaggcggggcaccccgcccggccgagcccggaccagacagggcaggagaaacccagcgggcccagagac

SEQ ID NO: 79016 - RNA, 84 nt, Homo sapiens
ggacgaaggaccgcagcacggagcgcagaaccggccgcgcccgagggaacagaaagaggaaagaacaaaggaaaagggcaaaaa

SEQ ID NO: 79017 - RNA, 69 nt, Homo sapiens
caaggaggagacaggccagcccaaggcagcagccacgacacccaagccgcacaggccacgccgggccag

SEQ ID NO: 79018 - RNA, 113 nt, Homo sapiens
cgaggaggaaaacgcgcccaccgacggcaggggagcccgcacccggcgaagccggccaagggaaacaggccaagaagagccgaggacaccaggcccaacgagaggcaaggaag

SEQ ID NO: 79019 - RNA, 75 nt, Homo sapiens
ccgccggcgcccgggccgcgcccgccaggggggacacggcaaccgagaaacagcaccaggacacgcccgccggcg

SEQ ID NO: 79020 - RNA, 74 nt, Homo sapiens
gaaaccgcgcaaaccacaccaggaaagaccgaaacgcaccgagcaccaagccagcaggagcagaagagcgaaga

SEQ ID NO: 79021 - RNA, 77 nt, Homo sapiens
aggagaaaccaggaaagggcaccaaagcgccacgaagaaacggagaaggcaagaaaagaccgaagacaacgaccgga

SEQ ID NO: 79022 - RNA, 76 nt, Homo sapiens
acacaaggcagccgccgggagccagaagcacaggcccgggcgaaggggccacgcgacgcagccagcggaaggacac

SEQ ID NO: 79023 - RNA, 54 nt, Homo sapiens
cgcccagccccaaaggcggaaacaggggcagaccgaccaaacagggagcagcgg

SEQ ID NO: 79024 - RNA, 74 nt, Homo sapiens
ggaagggagcgcccaccagaggagcgaaagagagaggacggaagggaaaccggcgcaggaagcccaacagacgg

SEQ ID NO: 79025 - RNA, 72 nt, Homo sapiens
acaagacacaaagcacgagccaaaagaacaagggaagaggagcccagagccccagaccagagacaggagaca

SEQ ID NO: 79026 - RNA, 49 nt, Homo sapiens
aaaaacgcacagacaacgaggaccgacagcaagaaaaggagaaaacaag

SEQ ID NO: 79027 - RNA, 80 nt, Homo sapiens
ggagaaggcgcaacgcggcgcaagacgaccccgacgcaggccaggagccgcggacagaagccgagcacggccgagacaaa

SEQ ID NO: 79028 - RNA, 82 nt, Homo sapiens
cgcgggggcgaaggcggcgcggcggggggcccgcggcgggacccgggcggcgagagcgaaggacagaaaacgggccccagac

SEQ ID NO: 79029 - RNA, 80 nt, Homo sapiens
ccacggcacggacccgcccgcacaggacacgaggcgcgacgccacagaccacggcccagaggaaaacacaagacacccac

SEQ ID NO: 79030 - RNA, 77 nt, Homo sapiens
aagcagacgccaacacagccgccagggaacacaccacacagagaaggggcagaccaacaccacccagcaaaaacccc

SEQ ID NO: 79031 - RNA, 54 nt, Homo sapiens
ccaaacccacggggaacgaacaacgggacaaggaggacaaccccgacgaagcag

SEQ ID NO: 79032 - RNA, 76 nt, Homo sapiens
ccgaggcccacgagaggacagagcgggagccaccagcgccaaagggaagccaggagcccgggggcacggggagaag

SEQ ID NO: 79033 - RNA, 53 nt, Homo sapiens
aaggcaaccacagagagagagagggaggggacgaacacaaaggggcagcaaca

SEQ ID NO: 79034 - RNA, 53 nt, Homo sapiens
cccaaccaaggcccaccgaaggagacccggaggacaggcgaggccggcaccag

SEQ ID NO: 79035 - RNA, 68 nt, Homo sapiens
agagcgaacaagcgcagcacaggcaaagagcgagaggaacaggcaaaaaggcccccaggcggccgcca

SEQ ID NO: 79036 - RNA, 74 nt, Homo sapiens
ccagcgagagcacagcccggcagaagccaggaggcccaggcgaacaacaagagggacccgaacaaagaggccaa

SEQ ID NO: 79037 - RNA, 69 nt, Homo sapiens
cgccaccgcaccccggccgcccccacggccccggcggccaaacaccgaagacaacgaggcaagagagca

SEQ ID NO: 79038 - RNA, 85 nt, Homo sapiens
gagcagggcagagcacgcgcgcagcgaagcccagggaggccaccagacgaaggggaggaccaggcggcgagaagagaagagagaa

SEQ ID NO: 79039 - RNA, 74 nt, Homo sapiens
acacagccgacagacgccaccaaaagcaccaggcagacggcagaaaacagacgaagcaacagcgaacaaaaaag

SEQ ID NO: 79040 - RNA, 94 nt, Homo sapiens
ggggggcgggccccaccgcagggccccgcggacacagagccccgaagccaggacaggagacggcagcagcagccccgaaccacgccgcaggcag

SEQ ID NO: 79041 - RNA, 80 nt, Homo sapiens
agcgaagaaccaggagaaggaggagagaaggccccaagaaaagcccccaaggcaagagcaaaggcacaacaccacgccca

SEQ ID NO: 79042 - RNA, 78 nt, Homo sapiens
gggaagaggcccacccggagaaccccacggagaaccagagaccacacgaaggggcagaagagcacaagacggaagaga

SEQ ID NO: 79043 - RNA, 94 nt, Homo sapiens
gcagagagccgggccagagccaggggccgggagggcgccagccggcagggccgcggaggacgcgggggagacaggcgcccggcggaggggaagc

SEQ ID NO: 79044 - RNA, 78 nt, Homo sapiens
cgggcacagccggaaagcaggaccgcgacggcagcagagcagccagcacagagcagcaaggaaaacccagaaaggcgg

SEQ ID NO: 79045 - RNA, 68 nt, Homo sapiens
aacggaggagcgccgagccagggcaacccaccagaacgcaaaggcaaaaaaaccacaaaagaagcaga

SEQ ID NO: 79046 - RNA, 59 nt, Homo sapiens
agaccgggcgacgaggcacagcgcgcaagaagggagaccacaaggaaaccaccacacag

SEQ ID NO: 79047 - RNA, 52 nt, Homo sapiens
cccagcgcagcagagcgccaagacgggcccaaaacacaccaggacaaaacag

SEQ ID NO: 79048 - RNA, 76 nt, Homo sapiens
gaaagagacggcacaggaagaaagcgcaggcgagcacacagagaggggaagggcagcagcagcagagaaccaaacc

SEQ ID NO: 79049 - RNA, 100 nt, Homo sapiens
aggccaacgccgaccggaaggaagaccggacggaccagaggcagcgcgcacagcaaggcgaaccgcaacgaccgagggcccacggaccgcccgccacggc

SEQ ID NO: 79050 - RNA, 82 nt, Homo sapiens
gagccgccgcacggaagagacgcccccggacagaaagaaggaaaaaacgcaagaaggaagaaagagagaaagcaaggaaaac

SEQ ID NO: 79051 - RNA, 83 nt, Homo sapiens
acaagcgaagaccgaagcccaaagcaggcaggccagacggcacccgacagaagcagcaccaaacaacgcaagggaggggcagc

SEQ ID NO: 79052 - RNA, 72 nt, Homo sapiens
agagcggaagagagccgcagagaacaggagggggacagccaacagccgagccagcagggccccgagaaaggc

SEQ ID NO: 79053 - RNA, 77 nt, Homo sapiens
ggcacacaaaagaccgcagaaaaggaagcggggaaaaagagaaagagccgaggaaacccagacccaagaccaaccga

SEQ ID NO: 79054 - RNA, 44 nt, Homo sapiens
gcccgaaaaaaacccaggcggcccagggacaacgccgagacaag

SEQ ID NO: 79055 - RNA, 76 nt, Homo sapiens
accaggagccggggcggcgcaggaggagccgaggcgagccaacagcacccgagggaagacccaaaccagacccaac

SEQ ID NO: 79056 - RNA, 75 nt, Homo sapiens
caagaaagagccgaaggcaacggggacacccgagcccggaaacggcgcccacagaggaaagcgccaagaggaaga

SEQ ID NO: 79057 - RNA, 40 nt, Homo sapiens
cccgagcagcgggaacagcaggcaggaaccagcaaccccc

SEQ ID NO: 79058 - RNA, 84 nt, Homo sapiens
acacagccgggcccggaaggggaaggaacgggagcagacgacgaagcaagggaaccacggcagagaacgaacaacagcaaagga

SEQ ID NO: 79059 - RNA, 79 nt, Homo sapiens
gcccaggaacggccggaggacaggaaagaggagggagggagggcaggccgcagcccgagcccgccgcaggcggaagaga

SEQ ID NO: 79060 - RNA, 94 nt, Homo sapiens
agaaggaagagaaggaaaaagagaacaccgacacacagaagaacggaacgcacccaacacgagaggaacacaacagccccggccgcaaccacga

SEQ ID NO: 79061 - RNA, 57 nt, Homo sapiens
cgaaagccagggcccgcccgcaggggccgcaaggccaggcgcgcagaggcacccaac

SEQ ID NO: 79062 - RNA, 80 nt, Homo sapiens
aggcccggccaggcacaagggcaccacaaagggagcaacagcgagcaacaggcaacgaaaacagacaaaacaacggaaaa

SEQ ID NO: 79063 - RNA, 71 nt, Homo sapiens
cacggccaggacaaccggcaaccaacggaacagcgacgaacaaccgagaaagacaaagacaggccaagacc

SEQ ID NO: 79064 - RNA, 77 nt, Homo sapiens
gcgggaagaggcggcgggcaagcagcgccccaaccccagaaccgcgcgggacggacaccgcgcaagaggggaaggca

SEQ ID NO: 79065 - RNA, 75 nt, Homo sapiens
accaaaccgacaaaggcaacaaaagaaacggaagcaaacgcagacaaagaacaagcacaccagcccagcgacgcg

SEQ ID NO: 79066 - RNA, 75 nt, Homo sapiens
ccacggacgggccggccgcccaccgccagacaagagccccgaggcccccagaagcagcgcaggcggaaaccaaga

SEQ ID NO: 79067 - RNA, 69 nt, Homo sapiens
aggaaagcccggcacggcccagccccaaagacagggccacgcagccagcggcacggacccggcccaagg

SEQ ID NO: 79068 - RNA, 81 nt, Homo sapiens
gcgggccgggaccaggacggggcgaaccgagcaccaggaaacaaacagaagcgcacgagaacccaggccgcaaggaacgaa

SEQ ID NO: 79069 - RNA, 80 nt, Homo sapiens
ggagcaacgaggcgccgggaccggcgcagagacaggcgcgaggagacaccgcaggggggagccacacaaacggagacgcg

SEQ ID NO: 79070 - RNA, 81 nt, Homo sapiens
caaaccaagaggcggccagcaggaggcgagaagggcacacaggcccgagcacaaacacaagaaacgcacgcccgccagcga

SEQ ID NO: 79071 - RNA, 77 nt, Homo sapiens
cggccgggggccaacgagagaacgggcacgcaggaggcaaacggagcgcccgacccccagcgggggggcacccagga

SEQ ID NO: 79072 - RNA, 91 nt, Homo sapiens
cagaaggcagcggcggcccaggccagcacccgcacaagaggagccaggagcacggggggaacaagaccgccgggacggaagacgggagcgg

SEQ ID NO: 79073 - RNA, 75 nt, Homo sapiens
gacacgggaccaagaaacagcaaagcaaagaccaggccaagacagaggcagaaccccgcagggaaaaagaaaaaa

SEQ ID NO: 79074 - RNA, 57 nt, Homo sapiens
cagaacagagcagcagagacgggacaaaaccgaccacaggcccgcaggagagagaag

SEQ ID NO: 79075 - RNA, 72 nt, Homo sapiens
cgaagcaagccacacccccaaccccccaagcacgggacagaggccacgcacgggacccagacaaacgaggaa

SEQ ID NO: 79076 - RNA, 54 nt, Homo sapiens
ggccgagaagaagacagcggcagaggagaaagagcacaaaagaggcgggaaccc

SEQ ID NO: 79077 - RNA, 78 nt, Homo sapiens
caaagcggggacccagacccggagcccagggaagcagccgaccagccgcggagccgggggcaggggacaaagcaaaaa

SEQ ID NO: 79078 - RNA, 73 nt, Homo sapiens
ggccgcgcggagcacaaaagagcccgcggggaggcgcggccgccccgcgggggacgagagccggagaacaagc

SEQ ID NO: 79079 - RNA, 72 nt, Homo sapiens
aagccaacaaagaagcggaaagcagaggaccggagggcaaaggagaacgagaccaacgagaaagcaaggaag

SEQ ID NO: 79080 - RNA, 67 nt, Homo sapiens
aacgcagcaaagccacgggggagaaggaagcagaaagagacgccaaaacacaagagagacgagaaag

SEQ ID NO: 79081 - RNA, 71 nt, Homo sapiens
ccaacggcggcgagcgcccgggaaccccaggcccgggggcacaaggggcaggcgcgggacaaccaacacaa

SEQ ID NO: 79082 - RNA, 81 nt, Homo sapiens
acacagccgacccccaagagcgaccgggggaacaacaacgagacccaggggcgaggaagggcggagggaggaaggagggag

SEQ ID NO: 79083 - RNA, 82 nt, Homo sapiens
aggcggcccagcagcgagacacagcacccaggccaggccaccaccgccgcccgaccaggcccggcccgacgccgggccaggc

SEQ ID NO: 79084 - RNA, 77 nt, Homo sapiens
ggaaagaagagcagcagagagaccgaaagaaagacaacccgaaagaacaccgaaccagggcagcccccccggaagag

SEQ ID NO: 79085 - RNA, 73 nt, Homo sapiens
gaccgccccggccgccccggccgaaggcccgcgccgggcgcgggcccagcgaacacgccaagacaaccgcagc

SEQ ID NO: 79086 - RNA, 71 nt, Homo sapiens
aagacaagacaaggccgcgggagcaggcgaagcgagccagggaagcgaaccaggcgaacaagacgacaccg

SEQ ID NO: 79087 - RNA, 50 nt, Homo sapiens
agacgacggcgagaaacacgacgccagcccaacgcagcgaccaacacgcc

SEQ ID NO: 79088 - RNA, 38 nt, Homo sapiens
cgacacacgacagcaaggcagccgccgcaaagggacga

SEQ ID NO: 79089 - RNA, 75 nt, Homo sapiens
caaagggacagaaccaaaggaagcagccgacacgagcggcaaaaacagcgaaaggagagcacaccccggagaacc

SEQ ID NO: 79090 - RNA, 45 nt, Homo sapiens
cagagggccccagagggcagaggagggaccagcaagaacagagac

SEQ ID NO: 79091 - RNA, 76 nt, Homo sapiens
aggaccccacgcgacgggaccgagagaccgcgacacgggggccagaaggaaagcaagcagcccaggggcacgggca

SEQ ID NO: 79092 - RNA, 63 nt, Homo sapiens
gcgagaaccgcgcggacaagagggccgacgaggaccacgacgggggcaagagcagcaagagcg

SEQ ID NO: 79093 - RNA, 72 nt, Homo sapiens
ggggaacgggaaaggaacaacgggcaagaaagacgcagaaaacagacacacagcggagacaagcagggccgg

SEQ ID NO: 79094 - RNA, 75 nt, Homo sapiens
agcggaaagcgcgagagacgcggccaaacaaagacaggaaaaagggaaggaccaagagcaaccaagggaaaacaa

SEQ ID NO: 79095 - RNA, 75 nt, Homo sapiens
gaccgcgcgggcccaagcaccgagaggcgagggaggcacccccagcaggacagcacacccaaccagacacaccac

SEQ ID NO: 79096 - RNA, 70 nt, Homo sapiens
agcaacagaaaccccccacaggaaaggagggaagccagaggccaaaggcaggagagacgccaaggcccca

SEQ ID NO: 79097 - RNA, 79 nt, Homo sapiens
cgcaccacccaccaaccacaggaagagaaaggcaggaacacacggacagagcgcaccgcccccgggaacacccacagaa

SEQ ID NO: 79098 - RNA, 72 nt, Homo sapiens
cggcccgaggggaagcagccagaaacgggagaaggccacacggcacagacagaacggccacacaaaccagac

SEQ ID NO: 79099 - RNA, 84 nt, Homo sapiens
cagcggggccgggccggagcgccacagaccacgagaaaagaccagggggcccgagagaccacaaaacaagagacccgccgcaac

SEQ ID NO: 79100 - RNA, 94 nt, Homo sapiens
agccacccagaagggcggacccgaagaaggacggcgacccgccgaagcaccgcgggcgcgcggaagaggccccaggaccggcgaggcccccccc

SEQ ID NO: 79101 - RNA, 84 nt, Homo sapiens
acagaaaaccccaaaccgagggagaagagagggaaaaacaaagaagaccgggaagcccgccagaagaagagacacaggaccgag

SEQ ID NO: 79102 - RNA, 76 nt, Homo sapiens
gacacccgacccccaaaccccacagcacaggaaggacacagcgagccaaaaaggaccgcgacgagaagagcaaaac

SEQ ID NO: 79103 - RNA, 71 nt, Homo sapiens
agagcagccgagaagacagaaaagcaaagcaaacgccagaaggacaaggccgccagaggcggcaccaggcg

SEQ ID NO: 79104 - RNA, 69 nt, Homo sapiens
aaagcaagaggaaagcagaggagggagacaggggcaaaaaacggcagggaagaggcgagacagaagaga

SEQ ID NO: 79105 - RNA, 73 nt, Homo sapiens
aggagagagccagagcaagagcggaccgccgcacagaaaacgaacgagaaacgagggagaagaagcagaaaaa

SEQ ID NO: 79106 - RNA, 79 nt, Homo sapiens
gagggggcacccagcacacccaagacgcggcaacagacagacaccccaaacaaagcaggcccagcggggcgagggagaa

SEQ ID NO: 79107 - RNA, 78 nt, Homo sapiens
gagacccgcaccagccccgccccacgaagagggcccaggcaccggccggcccgcgggagagacgggcacgagggccgg

SEQ ID NO: 79108 - RNA, 70 nt, Homo sapiens
cgagacaacagaggacgaggcaccccacagcacccggcaggacgacgcaaagcaggaggaaaagacgaaa

SEQ ID NO: 79109 - RNA, 54 nt, Homo sapiens
gcccccaaagacgggaacaggagggcaaaggagaacgagaccaacgagaaagca

SEQ ID NO: 79110 - RNA, 73 nt, Homo sapiens
gaaacggacaaagggaaaaacgccaacgagacccgaaacagagcgggcggcagaaagagccggaagggaagac

SEQ ID NO: 79111 - RNA, 81 nt, Homo sapiens
cggggaccgagcccccagcagcaggaagcgcggccagggagaacaaggagcggcccagagcaaaacagaggaacggacacc

SEQ ID NO: 79112 - RNA, 55 nt, Homo sapiens
cagaggagaccagccggggaggcaagcaggggggcaaaggaaagaaggcagaaag

SEQ ID NO: 79113 - RNA, 75 nt, Homo sapiens
ggcaaggcaccaggagggcgagcaacgggggcccaacccccagagccaggacgcgcacacaaacagccggaaacg

SEQ ID NO: 79114 - RNA, 79 nt, Homo sapiens
ggagcgggccaggcgcggagaccaacacaggcaccgaagaacggagcaggagacaccagacaacaaaacccccgacacg

SEQ ID NO: 79115 - RNA, 75 nt, Homo sapiens
agcaaaacaccaaccccccagggcggcagaacaggacaaaaaggccgggaagcacgcggaaaacgcagcgggagc

SEQ ID NO: 79116 - RNA, 77 nt, Homo sapiens
gaagcgggccaccccaagcccgaacaacggcccaagagcacagagaagaccaagggccgccagcggggccgccagcc

SEQ ID NO: 79117 - RNA, 55 nt, Homo sapiens
agcaaacaaaaccagacacgcaacgggacggacaagggagggccaagaacccgga

SEQ ID NO: 79118 - RNA, 73 nt, Homo sapiens
cggggccaaacccaagcaggcaagcaacacaggggcggccacaccgaagaagaagagagcccccggcccaggc

SEQ ID NO: 79119 - RNA, 73 nt, Homo sapiens
gcgcccggacagggaggcacaaggcaagagagagaagaagccggcagcccggcccaggccgagaaaaaagaga

SEQ ID NO: 79120 - RNA, 76 nt, Homo sapiens
aaggaccaagaaccagggcagccacacaaaagggaagcgggcagaaccgagaaaaacagcagagaccaggggccaa

SEQ ID NO: 79121 - RNA, 48 nt, Homo sapiens
cgcagggcgcccccgaaccgcccagagaagaccacgcagggccccgag

SEQ ID NO: 79122 - RNA, 96 nt, Homo sapiens
aaacaccggcccaggaggagggcccgggcgaagagagagaaacgaaaaagaggaaggagcgagggagcacaagcagcggaacggaaccacagagga

SEQ ID NO: 79123 - RNA, 56 nt, Homo sapiens
accacgggcggcgccaggccggcccaggcgcgacaagagacggacaaaaagacgag

SEQ ID NO: 79124 - RNA, 58 nt, Homo sapiens
cgcaagaaaaggagccggaaacggacaaacagggggaaaccgaaaaacaaaaagccgc

SEQ ID NO: 79125 - RNA, 68 nt, Homo sapiens
gcgcccaggggcccgcaccaaacacgaagacagcccggggcacgagcccggaaaaccacgggcaccga

SEQ ID NO: 79126 - RNA, 57 nt, Homo sapiens
cagggacagaacccaaaacaaaaagcaaccaagagaaagaagccaaaaagaggcccg

SEQ ID NO: 79127 - RNA, 60 nt, Homo sapiens
ggccaagaagcagaccacaacagacccagaagcgaggcgaagcagcggcgagaaacgaga

SEQ ID NO: 79128 - RNA, 41 nt, Homo sapiens
ggcagaccacgagaccggcagggggcagagagcagccaggc

SEQ ID NO: 79129 - RNA, 67 nt, Homo sapiens
gaaaaggaacaacggaggaacaaagcaaagcccaaacaaaaagaggaagccgaaaacaccgcaggga

SEQ ID NO: 79130 - RNA, 86 nt, Homo sapiens
ggaacaggcgcccaaaagcccacggcgagggacagaagaggccccggggaagggaagcaggggcggggcgggcccagaagcagcag

SEQ ID NO: 79131 - RNA, 79 nt, Homo sapiens
gaaggcgcgaggaggaaaggaggacgaggacgaagaagcgaagaaaaacaggacaggagaaaccacagaacagagacac

SEQ ID NO: 79132 - RNA, 40 nt, Homo sapiens
agcccaccaagaacaagagcgccacaaggagaagagaagg

SEQ ID NO: 79133 - RNA, 86 nt, Homo sapiens
agcccagccagcggacccgacggcgagagggcaaaggcaaaccaaacgcaagaccagggcggagaaaagcaaggaccagcccgacg

SEQ ID NO: 79134 - RNA, 73 nt, Homo sapiens
ggaccaggggacacggaccgagccccgaacaccggagcaaggcaaaccaaagcagcgcagaagacaaagaaac

SEQ ID NO: 79135 - RNA, 82 nt, Homo sapiens
ccgcccggccgagaccccgcgggaggcgggagacacaacaacggcaagccccaagggccaagaagccgaaggacagacacac

SEQ ID NO: 79136 - RNA, 61 nt, Homo sapiens
ggcgcgccccccccaggcccgccgcccccgccaaggccgccaggcacagagaaggcaaacg

SEQ ID NO: 79137 - RNA, 78 nt, Homo sapiens
gcccgagacggggccacgaccgccggaccgcacgcccaggcagccacagggcagccccgggcagcgggcaccagcccc

SEQ ID NO: 79138 - RNA, 67 nt, Homo sapiens
gccagggcgacagggcgccccacaaggcggcaggacacaagcaggggaggaagaagacgacagaccc

SEQ ID NO: 79139 - RNA, 34 nt, Homo sapiens
caaaagcagagaggcgcgcaccgaggagcaacac

SEQ ID NO: 79140 - RNA, 67 nt, Homo sapiens
caacaagggcacacgaaggccgcaaagacggagaagagcaggcggggccggggagccccgggccaga

SEQ ID NO: 79141 - RNA, 86 nt, Homo sapiens
gagcgcagcgccgagcgcggcccgggcgccacgagccggcggcggacggcagcgcgccgggggcccggaaagggacgcgcgcccag

SEQ ID NO: 79142 - RNA, 68 nt, Homo sapiens
ccaggcccagacgccaacgcaggagcacccagaggcgcgggccagaagagccaaacacaacaaaagac

SEQ ID NO: 79143 - RNA, 57 nt, Homo sapiens
agaaagagaaagaaggaagaaccaggcgcaggagacacagaaagagacggcgccgag

SEQ ID NO: 79144 - RNA, 69 nt, Homo sapiens
agacaacaagagccaagaccgggcgcaaaggacagacaaaagagaacgaacgcagaccgggaaaaccaa

SEQ ID NO: 79145 - RNA, 72 nt, Homo sapiens
ggacccaccgccagccacccacgccagcagagggggaacaccaggcaggaaaacaagcaacacgcccacgac

SEQ ID NO: 79146 - RNA, 65 nt, Homo sapiens
gacacgaaaagaagcaagaaggacagaaagcgggacacaagcaggagcacagaccccgaaaaggg

SEQ ID NO: 79147 - RNA, 68 nt, Homo sapiens
aaaaggaagaaaaaagcaacggccaaaaaaaagaacaccaaaaggccggcacacaaagaaagcccccc

SEQ ID NO: 79148 - RNA, 72 nt, Homo sapiens
gccagccacacgaggagacggaaccggagaaaagcccgaacaaccgacgcaccagcggacgaagcgagaagc

SEQ ID NO: 79149 - RNA, 78 nt, Homo sapiens
cagaagaccaagacaacagcccagaggaggccccagcaccgcggccggcgcagcaacaagaaaaccagacgagagaca

SEQ ID NO: 79150 - RNA, 85 nt, Homo sapiens
gccccacgagcgggcgcgcggagccgagcgcccaagcgcgaggcccgcccagcgcagacccccaggcggaggaccagccgccccc

SEQ ID NO: 79151 - RNA, 80 nt, Homo sapiens
ccgccgcccacgccccgcgggcagaccagcggcgccgcgccccccaaccgggcgccgcgaggccgcggccaggccgagcc

SEQ ID NO: 79152 - RNA, 72 nt, Homo sapiens
gccagcgacaacagaaccaacaagggccaagcccacagaaaaagacacgccccaagggccaccccacccgag

SEQ ID NO: 79153 - RNA, 80 nt, Homo sapiens
gccccgcaggggccagggcacgcacgcaggccaggaaggacgcccagagaccggcagcgcaaacacccggggaggaagcc

SEQ ID NO: 79154 - RNA, 73 nt, Homo sapiens
ggcgcccagccggccaaaagagggcgaaacagagaaccccagggcccacgcgccccgaacgggaccggaaccg

SEQ ID NO: 79155 - RNA, 81 nt, Homo sapiens
gcgcgggccggccccgcggggagcgcccccggcgcgagccccaggaaagggacacaaagcgcgggaaagaaccccgcaccc

SEQ ID NO: 79156 - RNA, 75 nt, Homo sapiens
accaagccgcagaaccgaagacgccacggaccccccagcaaccccgagacgaaagcgggaccggggcgggacgag

SEQ ID NO: 79157 - RNA, 57 nt, Homo sapiens
ccagccggagacggaaagcggacgccggaagcggagaagaagggcagggccgaccag

SEQ ID NO: 79158 - RNA, 72 nt, Homo sapiens
gcgccagcggaacgggagaagagacaaaggcccagcaacagagcagccccagacaaggaccaaagggcaaaa

SEQ ID NO: 79159 - RNA, 40 nt, Homo sapiens
ccgaacccaagaggggaggaacaaggacggggacggaagg

SEQ ID NO: 79160 - RNA, 71 nt, Homo sapiens
aaccaccaaggaaccagcaaacccccgcacaaagaagcgagccaggacagggcacacagaggcacgagaac

SEQ ID NO: 79161 - RNA, 79 nt, Homo sapiens
aaagcgaaggcaacaggagcgggaaacggcaaaagcagaccggaaaacccaccggcaagaccacacccgaggggagccc

SEQ ID NO: 79162 - RNA, 68 nt, Homo sapiens
ggcagacacaagcgaggccaggaacagcacgaacgcccgcgccaagcgggggcagcggggacggccac

SEQ ID NO: 79163 - RNA, 70 nt, Homo sapiens
agggcgcagcagaaagcaaaccagcaggcaccaaggaaagcagaagacaagagagaacaaaaggggcaca

SEQ ID NO: 79164 - RNA, 68 nt, Homo sapiens
gggaggacaggcgccacgaaccaaaggccggccgagcaccccgcgccgcgccagcgcggcaccaccgg

SEQ ID NO: 79165 - RNA, 92 nt, Homo sapiens
gccggacagcaagagaggcacacagcccccaccgccaacaagcacaagccaggagaggcagagaccagggcacgcaggagaagacaacacgg

SEQ ID NO: 79166 - RNA, 85 nt, Homo sapiens
gccagcaagaagaccgcgcccgagcccagcccccgggcgcgccggacaggccgccgcggcgggacagcggccccaaggaccgcgg

SEQ ID NO: 79167 - RNA, 72 nt, Homo sapiens
gaacaagagggcaaaaccggcacagacgcaagggaaggagagaagagcaccaaagcgccccggcaaggccac

SEQ ID NO: 79168 - RNA, 85 nt, Homo sapiens
agcggcgaggaggggccccagcagcccccgaaggcccacaggacaggagagaaagacgggggggccaccaacaccccccggagga

SEQ ID NO: 79169 - RNA, 69 nt, Homo sapiens
aacagcgaggaaaaggccaggaaggaccaacgagacgacaggaagaaaggaacacaccaggaaggccca

SEQ ID NO: 79170 - RNA, 51 nt, Homo sapiens
ggggggaacaaaggcagaaacgcaggccaacaaaacgagcaaaagggaccg

SEQ ID NO: 79171 - RNA, 72 nt, Homo sapiens
gcaaagccggcaccgcccggcccgccagcgccagcggcacggcccgccgcccaaggggggacacaggacaac

SEQ ID NO: 79172 - RNA, 85 nt, Homo sapiens
gcagagagaagggaaaaccaaacaggcccccagaagagcggagagacgaaagagcacccacagcaggacccaggagggacccagg

SEQ ID NO: 79173 - RNA, 69 nt, Homo sapiens
cgggcaaccacggggcggcgccggccccaaggagacagaggaagcgcaacaagcggcgaggaccacacc

SEQ ID NO: 79174 - RNA, 86 nt, Homo sapiens
gggcagcgcccggaccggccgagaggaagacgagccgggaggaacggcccggaaacaggaggacggccgggccaggcggaaagcag

SEQ ID NO: 79175 - RNA, 73 nt, Homo sapiens
aggaacccaagcagggcgaagggaacgcaaggcccccgaccacacgcccgcgcgagcacccgagggagagcgc

SEQ ID NO: 79176 - RNA, 60 nt, Homo sapiens
cgcgagcgacccaccgaagcagcggccccggggagcccgagaacgggagagaagcgacgg

SEQ ID NO: 79177 - RNA, 73 nt, Homo sapiens
cagagaacacacccgaaagcccgcggggcaaccagaagaacagaggggaaaggagaaaggaccgcacagaccc

SEQ ID NO: 79178 - RNA, 108 nt, Homo sapiens
gcccggcacagccccagcggagcgacgcagaagacggggacgcaccacgagccgcaggggcacggacggggaacaagagacccggcaacccgccgcacaacaagcgcg

SEQ ID NO: 79179 - RNA, 86 nt, Homo sapiens
accaaaacgcgagcagcgcccaggaaaccccggcggcgacgcccccaagcgcgagcagccgggggccgggggccggagcgcgccga

SEQ ID NO: 79180 - RNA, 32 nt, Homo sapiens
ggaccaagaaccaggggcaagaaccgaagcaa

SEQ ID NO: 79181 - RNA, 76 nt, Homo sapiens
acagcacaacacaaccagggcagggggagccccccagacccgaaaggagacaagaggacagccgcacggaacacaa

SEQ ID NO: 79182 - RNA, 68 nt, Homo sapiens
gggccaaaaaggcacgagggaacgggaaagaacagagaagcccaaaagaagacccccagaaacccgga

SEQ ID NO: 79183 - RNA, 42 nt, Homo sapiens
ggcagcacgggggcagacccgagccccaaagacagaaaagcc

SEQ ID NO: 79184 - RNA, 76 nt, Homo sapiens
caccaacaaccacaagaaaacggccagagcaaaagcagacaggaggaagaggccaccaagagagaccaggagcaga

SEQ ID NO: 79185 - RNA, 88 nt, Homo sapiens
gagaggcaagcaaacccaccggggagacacagaacagcccgggcccccacagcccagcccaaagccccaccccaagaacccccagcgg

SEQ ID NO: 79186 - RNA, 67 nt, Homo sapiens
agaaaggcggcaggaaagcagaacgcggccgccaccagaggacagcgccccgccaaccaggacccgc

SEQ ID NO: 79187 - RNA, 75 nt, Homo sapiens
gcaaagccaccccccaaaaggcagggaaaaggaagagaagccgcgacccaaaggaaaccaccccacccaaccccc

SEQ ID NO: 79188 - RNA, 50 nt, Homo sapiens
aagggaaaaaacgcagcgagacggaaaagaagaaaacagggaaaggaggc

SEQ ID NO: 79189 - RNA, 80 nt, Homo sapiens
acagagcaagagaaagagcccggaggaagaaagaaacaagcagaggaccagggccgcccaccgccccaacccaggacccc

SEQ ID NO: 79190 - RNA, 78 nt, Homo sapiens
gaaggcggcgaccgagccggagcgccgacgaccaagaggcgaagagagagccaacggaccacaacagagaaccaagga

SEQ ID NO: 79191 - RNA, 59 nt, Homo sapiens
aagcccacagagaggaccggagcaagagagaagagaaggaaaggacggcgaacaaagca

SEQ ID NO: 79192 - RNA, 82 nt, Homo sapiens
gccgaaacacagagaggcggaaaggcaccggagacagaggcggaaccaaaagcagggaaaccggcacaggaaagagaaaagc

SEQ ID NO: 79193 - RNA, 51 nt, Homo sapiens
aaagcgcaacagaaacagagagacgagacaggagggccaagaagaagggca

SEQ ID NO: 79194 - RNA, 69 nt, Homo sapiens
gcccaagaggcacgcaccccacaaaaaaagacgaaaaggaaaggagaagacaaagcaagaagcgggccg

SEQ ID NO: 79195 - RNA, 79 nt, Homo sapiens
cccgccacaacggccgcagggccgaggagacaggagaaggggcggagaacggaaaagcaccaggaagcagagaggaccg

SEQ ID NO: 79196 - RNA, 85 nt, Homo sapiens
gcccggccccggcggcacggcgccgaccagcaccaggggaagcgggacaacgggggaagaccgaggagcagggagcaaccacaag

SEQ ID NO: 79197 - RNA, 70 nt, Homo sapiens
ccaaacagccccgaggcgaccaacagaagcagccaccggaagaggaccggaacccagcggaaaaacgaaa

SEQ ID NO: 79198 - RNA, 76 nt, Homo sapiens
cccagaccagagcggaggacagaagagaagaccgccccaagaggaaaccagaaggagggcccacaccccaccggcg

SEQ ID NO: 79199 - RNA, 85 nt, Homo sapiens
cgggcgggaggccggcggcgggcggcagcagcggggcggggcgaagaagcagcacaaggcgagccaggagcccagaccagccaaa

SEQ ID NO: 79200 - RNA, 82 nt, Homo sapiens
gaagagcggggggacccgcgcagaggcgacagagggaggcagggccaggagccagcacggggcacccacgagccaggccggc

SEQ ID NO: 79201 - RNA, 57 nt, Homo sapiens
agggcagggagccagacgcaggcacgggccacagagacgagaccccaacaacaaaac

SEQ ID NO: 79202 - RNA, 57 nt, Homo sapiens
gcagccaacaggacacccaccggccacagaccggaaccacgaagaccacacccggaa

SEQ ID NO: 79203 - RNA, 116 nt, Homo sapiens
caagcgcgcaccgcggcgccgacacaaacgccaagggacggaccacgcccgcaccaggcagagagacgaagagagaagcagggcagaaagagcggaaacgagaagagcaaacacaa

SEQ ID NO: 79204 - RNA, 80 nt, Homo sapiens
cgggaggaccaaaccagagggacagagccgggcccgccgaggcccggagggagagaagagaaaccaggcggggaacaagc

SEQ ID NO: 79205 - RNA, 98 nt, Homo sapiens
gcagacggcgcccagcaacacagaagccgacaaggcgcaagcgaaaacagaccgcgagcccagagggggcgaggaagagacaggcgggggagaagaag

SEQ ID NO: 79206 - RNA, 99 nt, Homo sapiens
cgacgcaggaagccaccgagacggcgaccgggcgccgagacaccagagccacaagggcagccccgggcaaccagcaagcccagagaacccacagaaacc

SEQ ID NO: 79207 - RNA, 73 nt, Homo sapiens
ccagaaacgcacacaagaagaaacgaccggccagagcacgggaagcagacccaagccaccaaacggcccaagc

SEQ ID NO: 79208 - RNA, 76 nt, Homo sapiens
ccaacaccaaacaaagggaaggagaaagaaccaacgggacccaacagggacaagagccacaagaaaaaccgaggcc

SEQ ID NO: 79209 - RNA, 74 nt, Homo sapiens
gcgaccggggagaagcagggcgggggcccaagagaagaccaccgaaacgagcaagcagaaccgcaaaggcagaa

SEQ ID NO: 79210 - RNA, 80 nt, Homo sapiens
ccaaaaacgacaccgacagcaggaaagaagggggaacaacgaggggccagcagacccagcggggcggagcagggaggaac

SEQ ID NO: 79211 - RNA, 86 nt, Homo sapiens
cgcgaagccggggcggagcacgcgagcaggcgccgcgggccccgcccaccccccagcagccaggagggagccaggcggcagcggaa

SEQ ID NO: 79212 - RNA, 70 nt, Homo sapiens
gaggaccgcaaaggcgaacagaaccagggggaaggccccgggcagccgagcgccagggaaacaacccacg

SEQ ID NO: 79213 - RNA, 68 nt, Homo sapiens
ccgaaacacacccagacgcacaccgccaagcaagccaccacggacaccaggggggaaaaaccacacag

SEQ ID NO: 79214 - RNA, 74 nt, Homo sapiens
ggacgcagcggcgcgcacggaacacaggccaggagaagacgcagggcagcaagaaaaagagaaagacgaaacac

SEQ ID NO: 79215 - RNA, 78 nt, Homo sapiens
cccaaggaaaacaaggagaccagggaccggacaggaaaggaacacagacagagaggaacaagcagcagaaaaaagagg

SEQ ID NO: 79216 - RNA, 81 nt, Homo sapiens
aagaaaaaagagagagaaaaaggacaaaagccaagaggaggacagcgcacacagcaagcacgagaacaggccaagacaacc

SEQ ID NO: 79217 - RNA, 72 nt, Homo sapiens
gcgcccggcacaggggacgccaggaagccaagaacggcaggaaacagcagcaacggaccgcaagaacaacag

SEQ ID NO: 79218 - RNA, 73 nt, Homo sapiens
aaggaccaagaaccaggggaacaacagaaacacagacacaagagaaagagagaaccagcgagcagaaagagaa

SEQ ID NO: 79219 - RNA, 75 nt, Homo sapiens
gacgggcccgcggcgagcgagcccgaggacggcgcgggaacccaggagaaacgagagggacagcaaggaagacgc

SEQ ID NO: 79220 - RNA, 64 nt, Homo sapiens
gcccaacgcagaccgaggcgaagcgcgcagcgccggggccggagcgagggagagcaggaacaca

SEQ ID NO: 79221 - RNA, 53 nt, Homo sapiens
caaagcacggcaccggacagaacccagaccacccaggcaccccacaccagccc

SEQ ID NO: 79222 - RNA, 71 nt, Homo sapiens
ggcacacaacgacccggacagcgaccgcaagacgccaaacacacccccaagagaggacaaaaaggacccag

SEQ ID NO: 79223 - RNA, 77 nt, Homo sapiens
ccggacccggacccaaaggccagcaagcgcaaggaagaagagacgccgcgcggcagacaaggcccggcaggcaaagc

SEQ ID NO: 79224 - RNA, 68 nt, Homo sapiens
gaagaagaggaagagagagagagaaagagagagaacaacgacggaacaaagagagaacgccgggggaa

SEQ ID NO: 79225 - RNA, 70 nt, Homo sapiens
ggcaggcggaagggcacagaggacacagccacgaggcccagggaacccggaccacagaaccaagaaagag

SEQ ID NO: 79226 - RNA, 72 nt, Homo sapiens
aagcaggacggaggagcgaccaccgggcggagaacggaaaagcaccaggaagcagagaggaccgcagaaggg

SEQ ID NO: 79227 - RNA, 71 nt, Homo sapiens
aagccgcccacacccagaaaagaaggaacccgacaagagcgggaacaggaacagcaagccaaagagcggcg

SEQ ID NO: 79228 - RNA, 75 nt, Homo sapiens
acaaaacaccaacacggggagaggagcgagggcagaaagggcccagccggcagagggaccggagaacgccgcagg

SEQ ID NO: 79229 - RNA, 61 nt, Homo sapiens
gaccgaccaagagcaccgggggggagcggccacacaacccgcggggccccccgacggggag

SEQ ID NO: 79230 - RNA, 76 nt, Homo sapiens
agagacagccaacaaaaacaggcgagaaacgaaaaaggcagaagaacgcagacagaagaaggaaacaagaggcaag

SEQ ID NO: 79231 - RNA, 73 nt, Homo sapiens
ccggcgccggagcgaaacacgacggaagagaacaagcagaggaaagacacgccagagaagaacaggacacaac

SEQ ID NO: 79232 - RNA, 81 nt, Homo sapiens
gagaggcgccagacagcccagagaagccgcaaaggccagcaagagaagccaagccaaacgaaaagcggaggagagaaaaag

SEQ ID NO: 79233 - RNA, 79 nt, Homo sapiens
cgcacagcggcccggggaaggaagcggagaacgcgggcagccgcaaaagaagaagcacgaaccgaaggaacaaaaaaac

SEQ ID NO: 79234 - RNA, 79 nt, Homo sapiens
gccgcagcagaaagccaagaaccagcggaccaggcgcaaggaagaagagacgccgcgcggcagacaaggcccggcaggc

SEQ ID NO: 79235 - RNA, 83 nt, Homo sapiens
ggaagacggggacaagaggaggagacggagcacgccaaaggacagcccaccgaggaagaccaaaggaccaaccaacaagaagc

SEQ ID NO: 79236 - RNA, 72 nt, Homo sapiens
ccgagaagaaaaggccaccccggacagaccggcaaagcgaagaggagcccagacaaagacgaacgaacaaga

SEQ ID NO: 79237 - RNA, 70 nt, Homo sapiens
gaagaaagacgcaacgccgcccaccgggagccgggacaggaaggaaaacgaaaaggaaaggaggccagac

SEQ ID NO: 79238 - RNA, 69 nt, Homo sapiens
aagagagacgcccgcagaacaggaccgacacaaaggacaggcgccccgcgggaagcggcagagcccaga

SEQ ID NO: 79239 - RNA, 74 nt, Homo sapiens
ggcccagaccaggcagagaacggcacaggggcaggacgaaagacgagggcgccgggccacaagaggagacagca

SEQ ID NO: 79240 - RNA, 60 nt, Homo sapiens
caccaccaaagaccccgcacaggaaaacgcccaagccgagaaacaagccacccccgaaag

SEQ ID NO: 79241 - RNA, 79 nt, Homo sapiens
cagagcgcgcgcacccagaagcacggggaacgggcggagagagggacgcaggaaaggaggcccccaaacgccagcaaga

SEQ ID NO: 79242 - RNA, 77 nt, Homo sapiens
gcaacgaagcaaaacacaacacacgcaaaacagcgagggggacagccccaggaagaaaacaggcgaaacaaggcacc

SEQ ID NO: 79243 - RNA, 87 nt, Homo sapiens
caccgacgcacagcgaccaccaacagaccgaagaaagccaccccacccggggccccagcaccagccgacggcccgcagcccccaaag

SEQ ID NO: 79244 - RNA, 74 nt, Homo sapiens
ccaagggcaagcccaaaaggaaaaccccaggcaaccgcacaaaaacgcccgggagaaaaaggagagaacccagc

SEQ ID NO: 79245 - RNA, 80 nt, Homo sapiens
cgccaccccgaccgcgagccgccagagacaggggccaggccaggggcaggggaagcacccaaccaacgagcgggccacac

SEQ ID NO: 79246 - RNA, 71 nt, Homo sapiens
ggaggagccgaacgcaaggaaacaggaacccaaagccggccacacgaacagcagccgagcagaacaaaaca

SEQ ID NO: 79247 - RNA, 78 nt, Homo sapiens
ggggggggggggagcagggaagacgccgcgccaccgagccggaccggagacggggccaacagagccaccgcaaccagg

SEQ ID NO: 79248 - RNA, 75 nt, Homo sapiens
gacagagcaaccaggaaagaagaggggcgggaccgggcccccaacccgggcacccaggcgaggagaaacacagga

SEQ ID NO: 79249 - RNA, 80 nt, Homo sapiens
acagagcagggcggagacaaaggaaagaccacagcaagaccacgcccccagccgggggaccaggccgaacgacccggaca

SEQ ID NO: 79250 - RNA, 59 nt, Homo sapiens
aagaagaacaaaacaggagcgagcagaaacccacacgggacaaaaacccgggagcacag

SEQ ID NO: 79251 - RNA, 71 nt, Homo sapiens
ccgcccgggccagcggccgcgcacccccggccggaggcaccagcggccggccgcgcacccagacccgagcc

SEQ ID NO: 79252 - RNA, 72 nt, Homo sapiens
ccgagcaaaggaagaaccaaagaaaacaagagggccagaggaggacagcaccagagcaacacaccaggaagc

SEQ ID NO: 79253 - RNA, 77 nt, Homo sapiens
ggacccgcgggccccggcccagcaaccgacaacgcggcccggaaccagcaccagacagaagacgcagaagagcagcg

SEQ ID NO: 79254 - RNA, 76 nt, Homo sapiens
ccaggggaaaaagcagcaagggcaacaaaggaaagaccacagcaagaccacgcccccagccgggggaccaggccga

SEQ ID NO: 79255 - RNA, 57 nt, Homo sapiens
ccgacacacagccgcgccagcggagccggagcgaggcgggggaggcagcagaagccc

SEQ ID NO: 79256 - RNA, 76 nt, Homo sapiens
ccaaagcagcggcgccggccgccccaccggcggaacccagcaaggagaggagccaagcccaacgggacgggaaaac

SEQ ID NO: 79257 - RNA, 80 nt, Homo sapiens
accagaggacggagcacagccgaggcccgcgagggcgaggccgggagagggagaggagcgggaaggccccgcacccggag

SEQ ID NO: 79258 - RNA, 73 nt, Homo sapiens
gaaagaagagcgcaagccaagaccagccagccgaagggcagaacaccacagcaaagcaaaaaagccacacaga

SEQ ID NO: 79259 - RNA, 53 nt, Homo sapiens
caggcgggagcgagggggcggagaccgcgagagggggcccaccacacgcccgc

SEQ ID NO: 79260 - RNA, 80 nt, Homo sapiens
acgggcggccggccgacccccgcgcgacggcgacgcgggaggccagggcccccgaaaggccgaggccggggcagcaccga

SEQ ID NO: 79261 - RNA, 76 nt, Homo sapiens
acggggcaaaccgaggaccacagaaggaacaggaggagaacaccaaacagaggaacaggcggacagccaaggagac

SEQ ID NO: 79262 - RNA, 69 nt, Homo sapiens
gaaaaagagagccgaaaagcgagcagagaacagccgcaccggagagggacaagaaagccggaccgccca

SEQ ID NO: 79263 - RNA, 86 nt, Homo sapiens
gaagaaggaaaagacggccaagcgaccccaacgccaccagacgcacggagagcgagaagcaacccccagccacaacgcgaaccggg

SEQ ID NO: 79264 - RNA, 62 nt, Homo sapiens
caaacgaaagagagcagcgcaaccagggaccgagcgcggacgagccaagcaggcacaaccga

SEQ ID NO: 79265 - RNA, 74 nt, Homo sapiens
gacccgagggagcgaacggacacgaaagcaagagaacaaagcacgaacaacgacgaagcacaacaaggggacga

SEQ ID NO: 79266 - RNA, 76 nt, Homo sapiens
aaaaccgaggaaggacagacggccagccagcacaaacccaagaccaaaagaccaaggcagcacgaacaggccggag

SEQ ID NO: 79267 - RNA, 87 nt, Homo sapiens
agcaagaggaggacaggagagaagaagaagaaaccggagaaggaacagaccccggaggagccacaaacccccccacgacaccgaagc

SEQ ID NO: 79268 - RNA, 73 nt, Homo sapiens
caaagaaggcagccaaacgagaccaagaaaagggcgccaacacgaaaaggaaagaacagccaaagggaagcgc

SEQ ID NO: 79269 - RNA, 102 nt, Homo sapiens
gagaagaagcggaaaaaagaaaaccagaagcggagcgggggcccgagaagccgacggagaggagccacaaaaccgacaggagggccgccgaaggcagacgcg

SEQ ID NO: 79270 - RNA, 67 nt, Homo sapiens
ccaacgcacaccagaggaaggggaccaaaagaggcccggcacacagagaaaaaaagggaacaaaaca

SEQ ID NO: 79271 - RNA, 76 nt, Homo sapiens
gaggccgcaccgcagcgaggccaggaacccggggagaccccgacgggaggccgagacagcgaacccacccaacacg

SEQ ID NO: 79272 - RNA, 77 nt, Homo sapiens
gagcccccgcgcgcccggccggcccggagcaccgagccgcggcacggaggagacaccacgccacccaagagagagca

SEQ ID NO: 79273 - RNA, 75 nt, Homo sapiens
gcccacgacaccaccccgcacaggagccgacacggggcccgagagggacgcaacccggccagagaggcaaaccca

SEQ ID NO: 79274 - RNA, 65 nt, Homo sapiens
gaagccaggagcaggacgcagaagacgcagggccaagggcgaccagacgaggggagacggacggg

SEQ ID NO: 79275 - RNA, 75 nt, Homo sapiens
ggggccccgacacgcccggggagcccagcacagcagggggcacgcccgagacaaagacgccgaaaaacaccaacc

SEQ ID NO: 79276 - RNA, 71 nt, Homo sapiens
acacagccggccaggagaaacggggacgagagaggcaaaccaagaagggaaggggaaaaaaaaccgaaaca

SEQ ID NO: 79277 - RNA, 76 nt, Homo sapiens
ggaccccaccaggaaccacacgccagcaccgacgaacccagccccagaacgcggagcaacaccccgcaccgggaac

SEQ ID NO: 79278 - RNA, 77 nt, Homo sapiens
aaagagaccgcagagacagccaacacggcacccacaggggacaggccgcgcgcggggcgaccaaaccggagagacag

SEQ ID NO: 79279 - RNA, 77 nt, Homo sapiens
gaaaacgccgaaagaaaaacaccaaaccaaacaccaaagagccccacggcaaggcacgaacaccaagcggcaaaacc

SEQ ID NO: 79280 - RNA, 80 nt, Homo sapiens
acccaaaaggaagacaaggagaaccggcaacgcaagagaaaacacgagaccagggcaagcaccgcccaaggccacacaac

SEQ ID NO: 79281 - RNA, 79 nt, Homo sapiens
ccggccggagcgcggcaggacggcggaggcacagcaagcaacccggccgaggggggcaccccgggaggaagcaacgggc

SEQ ID NO: 79282 - RNA, 73 nt, Homo sapiens
ggcgccgcccccccggcccccgggacggcccaaggccagcccgcaggaaaagggggccaggaagcaaaaagac

SEQ ID NO: 79283 - RNA, 69 nt, Homo sapiens
agacaaaaaggaccagcccccagcagcggagaggagcaggaacacaaacaccgaagcacgggcccaaca

SEQ ID NO: 79284 - RNA, 95 nt, Homo sapiens
ggagaaaaggagagaaacacggagacagcaccaaacccacagaggcacgaggggcacgagggagaggccgagaagaaacagggaacggagcccgc

SEQ ID NO: 79285 - RNA, 77 nt, Homo sapiens
ccgcgcaccgacccgacgcgccggcccacgcgcggccaagacgcaaacagcagacggaagaccccacggcaaaacca

SEQ ID NO: 79286 - RNA, 83 nt, Homo sapiens
aaagcacccggagaggaggaaaaaaaggaccaccccaacaggaaacaagaaaagccccaacacccccaaccaccgggcagcca

SEQ ID NO: 79287 - RNA, 40 nt, Homo sapiens
ccagacccacagcgggggcgcaggaagacagcgcggacgc

SEQ ID NO: 79288 - RNA, 81 nt, Homo sapiens
gaagggaaacccgagacaggccagaacggccaaggacgagggcgaggacgaaggacagagagggacgggcagacgccccga

SEQ ID NO: 79289 - RNA, 71 nt, Homo sapiens
acgggccgagagccgcccgggccagcggccgcgcacccccggccggaggcaccagcacaaaacagaggaga

SEQ ID NO: 79290 - RNA, 86 nt, Homo sapiens
cggaggcgggacacccagcaccccacgcccggccgacaagcacgcaaggccccccgggccggccgccggacgacacagcccgccgc

SEQ ID NO: 79291 - RNA, 78 nt, Homo sapiens
acccggccggagcgccacaccaaggccaagaacgggcaccggcgggaacagagacagacccgggggcccccaaggaga

SEQ ID NO: 79292 - RNA, 85 nt, Homo sapiens
aaagaggagggcaggaaccccagaggcggagagcgcgccccagaccaccggcagggaacagccgagcagaccgaggaggcccacc

SEQ ID NO: 79293 - RNA, 67 nt, Homo sapiens
ggcaacgagcgggaaaagaaaaaccagacaccacaccagacgagagagaccgagcgggcccgccccc

SEQ ID NO: 79294 - RNA, 75 nt, Homo sapiens
gggccgagaacccgcggagcgacgggcacggcgcagcgcgcgggcacaagccaccaggagagaacgccgcgccgc

SEQ ID NO: 79295 - RNA, 77 nt, Homo sapiens
cgacgccaccagccaggcccgagcgccaggaggaggaagaccgaccgccgccgcgcaccgcgagcaacgacggagcc

SEQ ID NO: 79296 - RNA, 84 nt, Homo sapiens
gaaagggaaaacggccggccaaacgcaggaaagccagccaggaaacgcagccggacgggcgcccggaaaagacgacagaagcca

SEQ ID NO: 79297 - RNA, 80 nt, Homo sapiens
gccaccccggggagccaaccaggaaaagagcgaccaaggacaacagagcaaagacacgcacaacagggcagaaggggaac

SEQ ID NO: 79298 - RNA, 85 nt, Homo sapiens
agcgccaagagagaggcccaggcggggaggagcgcgaggaagaggcggaaggcgccggaagacaacaccggcagagagacaagaa

SEQ ID NO: 79299 - RNA, 78 nt, Homo sapiens
ggcccgaggcggcgagagaggcaggcggagccgaccgggccagggacaggcgagggaggacggggccaccaagaggag

SEQ ID NO: 79300 - RNA, 113 nt, Homo sapiens
gggcgcggccgaccgccgggaccggagggaggaagcgggacacccgggagcaggaaagaccacggaaaaaccagcaaagccaccccggagaagcagagcacaccaaagaccac

SEQ ID NO: 79301 - RNA, 87 nt, Homo sapiens
ccggcccgcagcaagaggcggacgagaaggacagggaaggagcaggagcaggaccaccgagaacacccagcgggaggacaagagaaa

SEQ ID NO: 79302 - RNA, 74 nt, Homo sapiens
acaccgggacgcccacaggagccaggggcgggggccgaccccggaaccagcgggcacagaaagcgagagagcca

SEQ ID NO: 79303 - RNA, 62 nt, Homo sapiens
acacccgagccggcccggcgcagcgggcgcggagggcaccccagaagccgaaaagcaaggcc

SEQ ID NO: 79304 - RNA, 108 nt, Homo sapiens
cgcccaagcggacccccggacagaggcgagggccgccgccgccgacagaaggcgcccgcgccggcagaggaggcgagcacccgccagggagaggaacccccgcgcacc

SEQ ID NO: 79305 - RNA, 112 nt, Homo sapiens
gggcccgggcgccgccccagcggagggcagccccgagccaggcccgccgccgagcgaggggacaaagccgcgaaaaggaacccacaaacaccacacaagaggaccagcaacc

SEQ ID NO: 79306 - RNA, 54 nt, Homo sapiens
ggcccccaaagggggaacagaccaggggagcaacccaccaacaaacagcgggga

SEQ ID NO: 79307 - RNA, 64 nt, Homo sapiens
gggcggccgcgcggccgggggcgcgggcggcggcgccggcaggaagagccggcagcgcccgagg

SEQ ID NO: 79308 - RNA, 67 nt, Homo sapiens
aggaaaaggccaagagggcacaggcacgccccaaaacagacaacaacccaacccaagagggcaaaag

SEQ ID NO: 79309 - RNA, 69 nt, Homo sapiens
aagacagaacgggaaacggcgccacccagaagcagccaggaagaggcgcccccgcccgccagacaagcc

SEQ ID NO: 79310 - RNA, 93 nt, Homo sapiens
ggagcaggggcgcagcgcggccgcggagacagggagacccggggcggagaggggagaggaacggcggcgacaagcaacgagccaagaaccagc

SEQ ID NO: 79311 - RNA, 73 nt, Homo sapiens
ggacggaaccgggacccgggcgcccgcgcccgccccaacccagccacaggacgagaacccccgcgaaccagag

SEQ ID NO: 79312 - RNA, 85 nt, Homo sapiens
agacgcccaccggaacagaagcagggaacagacacgggaagcccgaggagacacacccgagccaaccacagagaagaggacaaaa

SEQ ID NO: 79313 - RNA, 61 nt, Homo sapiens
cacagagcccgccgccgaccgccgcccgccacacccgccgccagcccggaccaagagacga

SEQ ID NO: 79314 - RNA, 73 nt, Homo sapiens
acggagagcgggccccaccccaccgcccacaccggaacggcagcgcggagggggccgcacggaggacacgcac

SEQ ID NO: 79315 - RNA, 76 nt, Homo sapiens
gcaggcccggccgacggccacacggcggccgcagggcgccggagccccccagcaaaaggagcccgaaggacgacaa

SEQ ID NO: 79316 - RNA, 68 nt, Homo sapiens
cagccgcccacgggccacggccaggcccaggagaacaaacgaggcgaaggcgaggaaggaaggaacag

SEQ ID NO: 79317 - RNA, 76 nt, Homo sapiens
gcgagcggaggaggacgaggacggaaggccggcgggccgggaaacaccagcggcagaacagccaccaaggccgcaa

SEQ ID NO: 79318 - RNA, 69 nt, Homo sapiens
acagcgacccccgcaaggaaaggcccagaaaggggccaacaagcgaagaacacgggacacccaaaccag

SEQ ID NO: 79319 - RNA, 65 nt, Homo sapiens
gcacgcgcacggacggcacagcccgccgaacccgaaaggaggggcggcaccaggaaaaagaaaga

SEQ ID NO: 79320 - RNA, 66 nt, Homo sapiens
cccggcaccacccaccccacaccccacagggcgcacagccgcggcgcagcaacccggccaaccaga

SEQ ID NO: 79321 - RNA, 80 nt, Homo sapiens
cagcaacacagaagccgacaaggcgcaagcgaaaacagaccgcgagcccagaggccaggcagcgcgaccaaacgaaaaag

SEQ ID NO: 79322 - RNA, 68 nt, Homo sapiens
ggaggaaggggggagggggaggagccgaacgagccccagccaggcagagagagacacagccgaaagcg

SEQ ID NO: 79323 - RNA, 77 nt, Homo sapiens
gcgaaaccgcaccgcaaaccaacgcgggccgggcaacacgcagccgagcgggaggagagagcgaggccacccagaag

SEQ ID NO: 79324 - RNA, 86 nt, Homo sapiens
cgcccgccccgcgcgcggccggcggcccaggcgcacaccgcgcccgggcgcgccaggcacagccaagagcggaccggcagcggcca

SEQ ID NO: 79325 - RNA, 84 nt, Homo sapiens
cacccccgccagcagccgccggagccagccaacgagcggaagagagaccaggagagggcccaggaccagacccacaaccacaga

SEQ ID NO: 79326 - RNA, 82 nt, Homo sapiens
aggagcgagcagacgacaagccgggagcgggcggccaaccagagaacagacccccaagagcgaccccaccgccagcaacccg

SEQ ID NO: 79327 - RNA, 87 nt, Homo sapiens
agagaaggccaggcagggaggagaaacacagaagcagggaaaggccacagaaacacacagaaggggagcaagaggaaccacacaaca

SEQ ID NO: 79328 - RNA, 101 nt, Homo sapiens
gaacccgcaggaggaccgagcgacagcgcacggcagcggcaccacggcgacgcacaaggagaccagcagcagacacccaccacggagacaaggaagacacg

SEQ ID NO: 79329 - RNA, 86 nt, Homo sapiens
aagaaccgccgcgcagccgagaacgccgcgcgcgcacccaacagcgaccgagcgggagcaggaagaagagagccaagcgaacgccg

SEQ ID NO: 79330 - RNA, 59 nt, Homo sapiens
gcagaagagacgcggaccacggaacagggcgagacgaacaacgcgcgcaggagaccacc

SEQ ID NO: 79331 - RNA, 70 nt, Homo sapiens
agaggcagccagcagggggagagggcgaaccaaagaaggaaggcgacccaaaaccacgaagcacaggcag

SEQ ID NO: 79332 - RNA, 67 nt, Homo sapiens
aaagaaggaaagacaaaacagacaacggcaagcggagaagagcaaggccgaaccgagaggaagggca

SEQ ID NO: 79333 - RNA, 54 nt, Homo sapiens
gaagaagaaggagccccagcaggcacacagagaaaaaaagggaacaaaacacag

SEQ ID NO: 79334 - RNA, 81 nt, Homo sapiens
caggagaaaagccagcaacccagaaaacagcagacggcagccaacgggcccccaaagcccccagcgcaccaccgccagaaa

SEQ ID NO: 79335 - RNA, 55 nt, Homo sapiens
cgcaacggcaaggacccgcccccaagacgggaggcagggaaagcgcacggaccca

SEQ ID NO: 79336 - RNA, 53 nt, Homo sapiens
cccaacggggcaaaagaagggcacgggagccggaacaggggaggccacaagcg

SEQ ID NO: 79337 - RNA, 73 nt, Homo sapiens
aagacgaacaaaccgaagcagaaagacccggaagcaagaagacaaacgaggggagaaagaaggggaaggacgc

SEQ ID NO: 79338 - RNA, 90 nt, Homo sapiens
aaaaacgccccaacacgcgagcacacacaacgcgagcacacccccagaaggagaaggaaagagcagcgaaacaaagagaacagcaacaca

SEQ ID NO: 79339 - RNA, 58 nt, Homo sapiens
gccccaagaggcggcgcagaggaggagcgcgcagagaggcccacgcggaccggcagcg

SEQ ID NO: 79340 - RNA, 72 nt, Homo sapiens
aaaaggcagaacaccacacaagggggcagcgggacgacaaaaggggaaaacgacccccaggaaaaagaaaag

SEQ ID NO: 79341 - RNA, 81 nt, Homo sapiens
ccggccgggacccgaaaccccgaccgcagccaggccgacccgaccggaccagacaaggcggcaggagggaaagcaaggaaa

SEQ ID NO: 79342 - RNA, 75 nt, Homo sapiens
cggcacggcggcagggcggaggcccgccgccgcagagcacccaacggcgccggagaaggggacaacagagccgac

SEQ ID NO: 79343 - RNA, 82 nt, Homo sapiens
cacggggggccaagggaccacacgagggacgcacaccgagacgaacacagaacagcacgaccagaggggaagccaagcaaac

SEQ ID NO: 79344 - RNA, 76 nt, Homo sapiens
agggaccggacaggaaaggaacacagacagacccgccgacacagccaccaagaaggcacaagcagaacgggaaaag

SEQ ID NO: 79345 - RNA, 56 nt, Homo sapiens
ccaccccaaagaacacagaccaccaaggagagagaacggagaccaaccgggcgaag

SEQ ID NO: 79346 - RNA, 85 nt, Homo sapiens
cggagggggcaagggaccagcaaggcggcagagcaaggggcacgcagaaggaccggccacgagaagacggaacaagaaaggacca

SEQ ID NO: 79347 - RNA, 61 nt, Homo sapiens
aacaagaggcaggacaggcgcagaaggaggcgagacggcacgccagccgggccacggagca

SEQ ID NO: 79348 - RNA, 81 nt, Homo sapiens
aagagaacgcaagagacgaagccagcgagaagaccgagaggccgcgacccaacaccgcaacgcgccgcagggaccacagca

SEQ ID NO: 79349 - RNA, 59 nt, Homo sapiens
aaccacgccagcggaacgaaacacacaagacaaggacacagagcaggacacgcccaggg

SEQ ID NO: 79350 - RNA, 79 nt, Homo sapiens
acacgcaacagcaacagcagcagcagaggcgagaaacagaaagcagccggcaagaacaaagacaagaagcaccagaagc

SEQ ID NO: 79351 - RNA, 67 nt, Homo sapiens
acacggagcaaggaggaaaacacacggaacagagacagacccgggggcccccaaggagagggaagaa

SEQ ID NO: 79352 - RNA, 69 nt, Homo sapiens
gggccgggagcccgcaccgggccggcaggccggcagagcaagacggcaaggagaaaacggaacgagcca

SEQ ID NO: 79353 - RNA, 79 nt, Homo sapiens
cccgagggcggggaccggcggcgcggaggagcgaggcagcgacaggacgggaacggcaagcccgagaagcaagaccgcc

SEQ ID NO: 79354 - RNA, 76 nt, Homo sapiens
gccccgccccgaaccccgcgggcgacaggcaaagaaggcgccgcggcacggaacagcgaaaaagagagcagcgagg

SEQ ID NO: 79355 - RNA, 91 nt, Homo sapiens
caaccggaacgaaagggcaagccagagaccagaaacccgcgaggccggaagagcgggagcgggagccaggcagaaggccaaccaaccccag

SEQ ID NO: 79356 - RNA, 78 nt, Homo sapiens
gcgagccccaagaaccggccaccggccccacacgaccgaaaaacaagagcggaccagaggagaccaccggcccccggg

SEQ ID NO: 79357 - RNA, 82 nt, Homo sapiens
cgagaagaaggggcgcacgggaggaagcaaccaaggcaagaggggacgagcaagagagagccacgaggagggagaaccgagg

SEQ ID NO: 79358 - RNA, 73 nt, Homo sapiens
ccgcccagcccccgacagcgggaacaggagggaagaacaagagacagagaaaacaaaaccaccacccccccca

SEQ ID NO: 79359 - RNA, 90 nt, Homo sapiens
gcaagcagcgccgagcccaggcaagagcccgcgagaagaacccaggacgagaaaaaacagagcggaacaagcggcccaagagaaagcagc

SEQ ID NO: 79360 - RNA, 78 nt, Homo sapiens
gcaaaagaagagcagcgggcagcaaccagcgcggagcgggaagccaagaaaagagccagcagaaggcgggagggccag

SEQ ID NO: 79361 - RNA, 81 nt, Homo sapiens
agagcccacccccaggcaggcggagccgggccccagcgcaaagcccaaggccacaccaggacccagcacgccccgggggca

SEQ ID NO: 79362 - RNA, 55 nt, Homo sapiens
gcggacgcgaggccgagggaaagaaaggcaaagcgagcaagagggagaccaacca

SEQ ID NO: 79363 - RNA, 73 nt, Homo sapiens
gagggaggaggacccagcccgaagagggcgcgacagcgccaaaagcagggcccgacacgcaaacgccagcgca

SEQ ID NO: 79364 - RNA, 64 nt, Homo sapiens
ggagccgaagcggccaggagaacaacacacaaaaacgcgaacccaacaacagacgccaaaacca

SEQ ID NO: 79365 - RNA, 54 nt, Homo sapiens
ggcggaccggcgcccagaagccccgggaggccaccagaacgaggaggaagaaaa

SEQ ID NO: 79366 - RNA, 84 nt, Homo sapiens
cggaaccgagccccgacaggcagacgagcgaagcggccgacagaagcagaggcaggcaagcgagcgggccccgggagaggaccc

SEQ ID NO: 79367 - RNA, 70 nt, Homo sapiens
ccacggcccaaacacacccaggcccaggaagaagggccaggaaaccgacggcgcacaggacgaaaaaagc

SEQ ID NO: 79368 - RNA, 79 nt, Homo sapiens
ggagcgcgaaggccgggacccggccccggcccacaggggggggcaaacccgagagaacgggccggcccaagcccccaag

SEQ ID NO: 79369 - RNA, 60 nt, Homo sapiens
ggcagaaacagagaaggaacaggggcaagggggggaaagagaaacccaaggagcgacccc

SEQ ID NO: 79370 - RNA, 35 nt, Homo sapiens
ggcgcgcaggagccaagagaccacggccggccaca

SEQ ID NO: 79371 - RNA, 92 nt, Homo sapiens
caaaaccaggccccaaggccggaagaagggagagcagaagccgcgaaaaaggggggccgaggggcggccgagcccgggggaggccccggagc

SEQ ID NO: 79372 - RNA, 82 nt, Homo sapiens
ccagcgggccggacggggcggggggaacggaggaaacagggcgaggggacacgggcacaacacggcacacagacaagcggcg

SEQ ID NO: 79373 - RNA, 75 nt, Homo sapiens
gggaaagaaagacccaacagaaacacggaccgaaagagggccaaagagggcacagcaagcaacccggccgagggg

SEQ ID NO: 79374 - RNA, 82 nt, Homo sapiens
agggaacggaaacagaggaggaccccaggaaaggcagccagacagacacagcacagcagccacgaagagcaaagcaagccga

SEQ ID NO: 79375 - RNA, 82 nt, Homo sapiens
gccccaagaccccacagcagaaaccaccccacccaacccccgacacagaagaggagaaaacggaacaacaggagggcaaccc

SEQ ID NO: 79376 - RNA, 70 nt, Homo sapiens
caaaccaaggcccaggaaaagagcacagaggaagaaaggcggggacgaagccagaaccaaaccgggagcc

SEQ ID NO: 79377 - RNA, 78 nt, Homo sapiens
gcagcagcggggaggagccaaagcccggcgccaccaagccgcagggagaacacccaacgggagccagacaccgccggc

SEQ ID NO: 79378 - RNA, 54 nt, Homo sapiens
accgaggagagaaaaaaaagcggcgaaccaggggccccccgccaaagacagcca

SEQ ID NO: 79379 - RNA, 81 nt, Homo sapiens
gagggcgcggggagcccgcacgagcagcgaacaggcgcaaggaagaagagacgccgcgcggcagacaaggcccggcaggca

SEQ ID NO: 79380 - RNA, 74 nt, Homo sapiens
agacccgagcaccccaacgggcaggaccaagccagcccagggacgcaacaaggaggggaaccccccagcagaga

SEQ ID NO: 79381 - RNA, 72 nt, Homo sapiens
cgacggaaggaggaccaaaacggcaaccggcacgcaccagagcagcccacaggacggcacccgccccacagc

SEQ ID NO: 79382 - RNA, 67 nt, Homo sapiens
gaccccggacgcgggaaaggaaaacacagcggagcacgacagcaagagagcaagaacacgcgggccc

SEQ ID NO: 79383 - RNA, 76 nt, Homo sapiens
ggacaacagcgcacggcaaggcagcgccgaagggcgagcgggccacgacgccccgggcgcaccagacgccgccgcg

SEQ ID NO: 79384 - RNA, 76 nt, Homo sapiens
aaacaacagaacagcaaaagcgaagggaaaaccagacaaggaaaacagaaggagaaaacagccagcgcaagggaag

SEQ ID NO: 79385 - RNA, 70 nt, Homo sapiens
cgggacccagcccaggccgcacggacggggggggggaaaaggaaaccagaagagggacgaagaaaacagc

SEQ ID NO: 79386 - RNA, 85 nt, Homo sapiens
acacaaaaaaaaggaggcggaggaggccagcgcagcggggccgcgccagaacagggggaaggagggcgaaacaaaggaccagcac

SEQ ID NO: 79387 - RNA, 77 nt, Homo sapiens
agacgggcagcgcaggggcgggaaagacccaggagaagccgcccaaagaacggaaccacggccccgaaaggcaccaa

SEQ ID NO: 79388 - RNA, 80 nt, Homo sapiens
aaaacgcccggcggaccacggccgcagcacgaaaggagaaaagaggcgcggaccaggggaaggcaaaaggcccgggaaac

SEQ ID NO: 79389 - RNA, 61 nt, Homo sapiens
agccaaccaagccaggcacacagaacggcggccaaagcgccagacaagggccgagccccgg

SEQ ID NO: 79390 - RNA, 41 nt, Homo sapiens
caaagccaacaagagaccacgagagacgggacaccggagcc

SEQ ID NO: 79391 - RNA, 59 nt, Homo sapiens
acacccgggaaaggaagcgcacaggaagccggaaacgagacgaggacgcgcacaggaaa

SEQ ID NO: 79392 - RNA, 41 nt, Homo sapiens
caagcacgcaaagcagagaggcggaggcagcggcgcgaccg

SEQ ID NO: 79393 - RNA, 41 nt, Homo sapiens
ccccgagggcgggaacagagaccggccagagcaagacaaaa

SEQ ID NO: 79394 - RNA, 76 nt, Homo sapiens
gcgagaggaagacacccgaccgacaaaaggggaagaacccaagacacacacagcggagcaacaaggagggaagcca

SEQ ID NO: 79395 - RNA, 80 nt, Homo sapiens
cgaagaaaagagaaggaaaaacagaacggcaaaccggaaaaaaacgggaacaggaggcccggacccccagcacaagcgca

SEQ ID NO: 79396 - RNA, 79 nt, Homo sapiens
aggaagaccgaccgccgccgcgcaccgccaaccgccccacggaaaaccagaacacagccccaaacccaaggaccagccc

SEQ ID NO: 79397 - RNA, 70 nt, Homo sapiens
caggggcacgagagacggcaggagggacgccgccagccaccggcgcgaagccagaccagaccagcagggg

SEQ ID NO: 79398 - RNA, 81 nt, Homo sapiens
ggaccgggccggaacgagacgcacggggcaaagaaaaaggagagaaaaagaggcaaaacaacaagaagaaaagagaaaaaa

SEQ ID NO: 79399 - RNA, 83 nt, Homo sapiens
gagaaccggagggcaccggaggccaagaaaaggagacggggcggcgcggccaaagcagaaaccaagaggaggaggagcggagg

SEQ ID NO: 79400 - RNA, 71 nt, Homo sapiens
accgccgaaagcccgaaaaagcaaagagagagagagaaagagccgcagaaagcaacaaagcgagagcacaa

SEQ ID NO: 79401 - RNA, 57 nt, Homo sapiens
ccaaaggggacccacgcaaaaagacgacacccggacaaaaagaaggacacagaaagc

SEQ ID NO: 79402 - RNA, 48 nt, Homo sapiens
gccaggaagcagcagcggagaaacagcgaccggcccgaggaccgccgc

SEQ ID NO: 79403 - RNA, 52 nt, Homo sapiens
cccgcgggcgggcggagacccagaggcccggccaacggaccacaccaaaagc

SEQ ID NO: 79404 - RNA, 67 nt, Homo sapiens
gacaccaccccccccgccccaaagcgcgggaggaccaggcgcagagccgaagaagacgaaagcaaag

SEQ ID NO: 79405 - RNA, 76 nt, Homo sapiens
aaccgggcgcgcggaggaagcggcccgaagaggaaaggaggagacccaccgaaggcagggaccgaaggcagggaag

SEQ ID NO: 79406 - RNA, 63 nt, Homo sapiens
gaccggcgggcccaccgcaaccggcccgaacgcgagaggagggggcgcagcaaaggggggagc

SEQ ID NO: 79407 - RNA, 77 nt, Homo sapiens
gccagccaggcaggggagccaggggagaacagacaaaggaaccaaagaaccccaaaacgaaacaagcaaacaggaga

SEQ ID NO: 79408 - RNA, 83 nt, Homo sapiens
gcggcgagccggagcgcggagcccggccccgcaccaggaggaggacgacagcacgccaaacggaacaaaaccgaaccaacacc

SEQ ID NO: 79409 - RNA, 51 nt, Homo sapiens
ggggcacacgacagcccaaccgccacagggaggagacaaaagagaacgaac

SEQ ID NO: 79410 - RNA, 74 nt, Homo sapiens
caaggagacagcaggcgcgcgaaccgagcgcaagggaagaaaagaagacagccaggaaacagcagaagaaagaa

SEQ ID NO: 79411 - RNA, 79 nt, Homo sapiens
cccggaccgcgcagaaccagggcggcggccagcgccacgcccgaaaagacgaggcgaggaggcgagacacccaacccac

SEQ ID NO: 79412 - RNA, 89 nt, Homo sapiens
cgcccagccgcgggagcccccggccgggaaggcggggccggggcgcagggaggcaggcgggccccccgcccgccaccacgacaccaagg

SEQ ID NO: 79413 - RNA, 85 nt, Homo sapiens
accgacaagcccaaacggaagaagaggaagccaaagcacagagccaaaagggacaggaagggaacgacacagccgcacagagcgg

SEQ ID NO: 79414 - RNA, 78 nt, Homo sapiens
caaacaggaggcaacaccgaaaccaacccaggcaagaaggccagaccaaagaaaagggagagaccaaggcggagagca

SEQ ID NO: 79415 - RNA, 38 nt, Homo sapiens
gcggggggccacgcgacaaggggagccagcacacaaac

SEQ ID NO: 79416 - RNA, 44 nt, Homo sapiens
agagcacaaagaggagaccccaaaggacgacacccgcgggccag

SEQ ID NO: 79417 - RNA, 73 nt, Homo sapiens
cgaaggcccacaacggcagcacaggaggaagagaaaagacacagacgacccagaacgaaggaaggaaagacga

SEQ ID NO: 79418 - RNA, 72 nt, Homo sapiens
ccacaccggcggcaagggaagagaccgagaagacaggaggaaccccagacaaagcaccaaaaacagagagaa

SEQ ID NO: 79419 - RNA, 56 nt, Homo sapiens
cgaaaaagcgaggagaggaccagagcaacacaaaagagagacggggcacgagggcc

SEQ ID NO: 79420 - RNA, 88 nt, Homo sapiens
accggaacggagcgcagggccggagccggcggcgcgagggccgaagcggcggcaggaggagagcgacaggacgccacggcccgccgaa

SEQ ID NO: 79421 - RNA, 80 nt, Homo sapiens
cccacacgccaggcgcggcccaaggccagggagcggagaagggaggcgggacgcaccacccggggaaagcagagggcccc

SEQ ID NO: 79422 - RNA, 69 nt, Homo sapiens
accgacaacgcggcccggagcagcgacgcaaaagggcacaggcgaagacggaagcccgggacaagaaga

SEQ ID NO: 79423 - RNA, 103 nt, Homo sapiens
accccgagaacacgcacgggaagggcacacccccgcagagacgcaccccgcggagaaaagacgaagggaaaaaagcagagcccaggagaaaccggacgcgacg

SEQ ID NO: 79424 - RNA, 75 nt, Homo sapiens
gagaaggcggcgcgcgaggcaagcgcgcgccggggagggcacaggcacgaacagacagagaaaccaaacaacagg

SEQ ID NO: 79425 - RNA, 52 nt, Homo sapiens
ggaagacgcacgccggaccgagaaagagcccaggacagaaaaacacacagag

SEQ ID NO: 79426 - RNA, 60 nt, Homo sapiens
gcacgcccggcccgccgagaggcgccgaccccgcaggggacacggaaaacgacagaacga

SEQ ID NO: 79427 - RNA, 89 nt, Homo sapiens
ggaagcccccggaccaacggagcgagcggaaaccacagagaggcagaaaccgacaggacaaaggaaagaagccacagcaacgagacaga

SEQ ID NO: 79428 - RNA, 71 nt, Homo sapiens
ggaacgcaggaccagcgcagggaagagcagcccaacccggggaacggcgggcggcagggcacaagaaaccc

SEQ ID NO: 79429 - RNA, 67 nt, Homo sapiens
caccaagaagcaccgggggggggcgaagacccaggacagggcgcaaacagaagagagagacccaaag

SEQ ID NO: 79430 - RNA, 86 nt, Homo sapiens
cgcagcgggagggcgccaccacagggcacacgcccccagggacgcggagggggacaaggaaagggagcgggagacgagggggccgg

SEQ ID NO: 79431 - RNA, 73 nt, Homo sapiens
cgcgggagaaacgcagaacaagagggaaaagcccacgaagggagaccaggacgggagccgggagaggagccca

SEQ ID NO: 79432 - RNA, 64 nt, Homo sapiens
caggaccaggcacccgggaagggcacgccagccaaaacggccgcggaaacgaaaacggaagaca

SEQ ID NO: 79433 - RNA, 58 nt, Homo sapiens
gggacgaggaggcgaaggaccgccccgccagggacaacaccgggaacgcgagcccaga

SEQ ID NO: 79434 - RNA, 80 nt, Homo sapiens
gcgcagggcagccccagcgagcacccgaggaagcgcgaaaagagaagcagaagacacaggccgagagccacaacagaagc

SEQ ID NO: 79435 - RNA, 72 nt, Homo sapiens
cgggagcgcaaggcgccccaaggccagacaaaacgccaaacaccaaacaagaagcccagcggcgccaaccac

SEQ ID NO: 79436 - RNA, 81 nt, Homo sapiens
gacagagaggagggagaacaagcaacggcggggagcccacaggacaggcagaaggcgccaggaaggaaacacaggggagag

SEQ ID NO: 79437 - RNA, 71 nt, Homo sapiens
cgagaacgaggggcccaccagacagcgaacagaggcagaacaaggaagcgcggacgcccccgaaaagcagg

SEQ ID NO: 79438 - RNA, 70 nt, Homo sapiens
gaagccaaaagcaccgaacaccacaccccaaaagaagagaagcgaaggacgacagccaggggaggacacc

SEQ ID NO: 79439 - RNA, 57 nt, Homo sapiens
cggagacccacacggcaggggcagccagcccacaggcaggcaaaaaaaacagcggga

SEQ ID NO: 79440 - RNA, 37 nt, Homo sapiens
caccccggcgcccccggagaccgccgggcgaaggggg

SEQ ID NO: 79441 - RNA, 79 nt, Homo sapiens
caagagccagagacacggagaggcaaggacccaacgccagcccagcagccagggccacaccacaagaccccagcaccca

SEQ ID NO: 79442 - RNA, 82 nt, Homo sapiens
cggacgcgccgcggggcgcgggccggccccgcggggagcgcccccggcgcgagccccaggaaagggcggagaacggaaaagc

SEQ ID NO: 79443 - RNA, 70 nt, Homo sapiens
gcacaaccaccagaagaacgacagagaggagggagaacaagcaacggcggggccggaaacaaagaaacga

SEQ ID NO: 79444 - RNA, 33 nt, Homo sapiens
cgcgcgcgaggcgcggcggagaacggaaaagca

SEQ ID NO: 79445 - RNA, 64 nt, Homo sapiens
ccgacgccaggcagcgcccccaaacgagcccgggacagaagaggggcggaacgcagagaaggcc

SEQ ID NO: 79446 - RNA, 73 nt, Homo sapiens
gaagcggagagcaacagcgcgccgggaagcggcaggagcaaaacggaccaaggagaacaggcgccaggagacc

SEQ ID NO: 79447 - RNA, 67 nt, Homo sapiens
acagcccaaagaacagaacggcaagccacagaacccaacacagagccaaagggggaggggggcgaaa

SEQ ID NO: 79448 - RNA, 40 nt, Homo sapiens
acccagaccgcgggacaagggaggcacaccggggaaggag

SEQ ID NO: 79449 - RNA, 78 nt, Homo sapiens
aggcaaacgagaaaaagccgagaaggccagacgaaggaaggcagagcccacaaacccaagcagcaaagaaagagccaa

SEQ ID NO: 79450 - RNA, 76 nt, Homo sapiens
cgaggaggacagagacgcaagggcaacgaggaacaggccaagaaacaacacagccaaggccagcgccacggcggga

SEQ ID NO: 79451 - RNA, 75 nt, Homo sapiens
gggcccaagacagggaaaaggccagcaacaggagagacacacaccacgccaagaaccggaccccaaaggcacaga

SEQ ID NO: 79452 - RNA, 74 nt, Homo sapiens
gcccccaccgacaggaacacaaaacgcggcccgcgcaaacagggacgacacaaaggagggcaccggcgcacccg

SEQ ID NO: 79453 - RNA, 81 nt, Homo sapiens
gaaacccaggaaacgagaccagaccccagagaggaggcacagaaggaacaccaggccgagagaaaccaaagcgagagaaaa

SEQ ID NO: 79454 - RNA, 78 nt, Homo sapiens
cgcccagggcggggaacggaggagcgccgagccaggacacggggggcccacacaagcccccacccgaagcaaccacac

SEQ ID NO: 79455 - RNA, 70 nt, Homo sapiens
agggcgcgccaccgcaaaggcccgcgcaccgccagggaagaaacggcaagaacggcagaaggggaaaaga

SEQ ID NO: 79456 - RNA, 76 nt, Homo sapiens
gcaaagggggacagaaaaacagaccaaagaaccggagagccggaaacagaagaacgaaaacaaacggaagagaggg

SEQ ID NO: 79457 - RNA, 49 nt, Homo sapiens
cccacagccagcaacaccagggcccccaaggaagacagcacgagggaac

SEQ ID NO: 79458 - RNA, 36 nt, Homo sapiens
cgaacccagcacccggagacagagcccgcacccagg

SEQ ID NO: 79459 - RNA, 60 nt, Homo sapiens
ggaagagccagcacagacccgagggagcaggaggagaagaaaccccaagaccagagggca

SEQ ID NO: 79460 - RNA, 78 nt, Homo sapiens
ccagccggaagcccgagggcagcgcccacggccgcgaccggccgcgcccggggacagcccggacgaagaggaccgagg

SEQ ID NO: 79461 - RNA, 80 nt, Homo sapiens
cccagccagcggaagggccggccgagaacgaggagaacaaggcaaggccaagacaggggacagccggccgaacggcagcc

SEQ ID NO: 79462 - RNA, 66 nt, Homo sapiens
cccacgaccggacgcccacgaccccagcaggggaaggacagacgcaaagagacaggagggacggaa

SEQ ID NO: 79463 - RNA, 42 nt, Homo sapiens
ccgacagccgcagaacgaccccggaggaaaagcggaagcggc

SEQ ID NO: 79464 - RNA, 75 nt, Homo sapiens
gcaacgcccaaccaggaggcgaacccccgggacggcccggagaagaagcggcccaaagccacagaaaaaccggaa

SEQ ID NO: 79465 - RNA, 75 nt, Homo sapiens
acaacgcagagaaacacggaaacaggaagaggaaaaacacgacaaaggcggagaaagcaaacaacgcccccggaa

SEQ ID NO: 79466 - RNA, 52 nt, Homo sapiens
acaccgcacacaccacggacaggccgccagggggacagaaggagcaggcaaa

SEQ ID NO: 79467 - RNA, 50 nt, Homo sapiens
gaacccggagaccacacccgaggagcggcgacaagccacacaccaaaccc

SEQ ID NO: 79468 - RNA, 97 nt, Homo sapiens
ccggagcggcacgccaaggagcagcaggagcagacggccgaggaaagacgaagaagagggaccagacgcggcgcacaagagaacaaacaacgcagac

SEQ ID NO: 79469 - RNA, 40 nt, Homo sapiens
cagggggggaaaccaccgagacggccgccacagcccagac

SEQ ID NO: 79470 - RNA, 73 nt, Homo sapiens
ccaccggcggaacccagcaagccggaaacgaaacagcgcagccaggaacaggacgaagaccagcgccagggaa

SEQ ID NO: 79471 - RNA, 80 nt, Homo sapiens
ccagaccgggcacgccggcggcgcggaccacaagccccgcccccggagagggaacagaagggaggaaacaaaagaagcag

SEQ ID NO: 79472 - RNA, 84 nt, Homo sapiens
ggccgccccaacaccagggaagagacacacccaggaacacccacaaaagcagaagcagaaacgcagagcccccgcagcccccac

SEQ ID NO: 79473 - RNA, 71 nt, Homo sapiens
ccgcgcgggccaccccggcggaccacaccggacagcagccaaagccaggacacggccaaggccggcgagaa

SEQ ID NO: 79474 - RNA, 35 nt, Homo sapiens
gagccgaaagacgggacgaccaaccagggaagcaa

SEQ ID NO: 79475 - RNA, 33 nt, Homo sapiens
agacagaggaagacgcggaggagagaacagaga

SEQ ID NO: 79476 - RNA, 88 nt, Homo sapiens
cagccccgcgccgccgaccccccggcgccgcgccggcggcgagagcgggacgggcagaagaaaacccaccaaggggcaacaagcaccc

SEQ ID NO: 79477 - RNA, 76 nt, Homo sapiens
gcagccagaccaagaacaaccgcggacacggagaggaaggagacgaggacgcgcacaggaaaggacgcggaacaag

SEQ ID NO: 79478 - RNA, 81 nt, Homo sapiens
caagcccgaaggaccagagcaaggaggacggaagggaccccacaccacaaaccgaggaaagaagggacagcagaaaacgca

SEQ ID NO: 79479 - RNA, 83 nt, Homo sapiens
cgcccgggagcaggaggagagccgcaggcaccggaagacggggacacgagcggaggagaggaagcgcgacggaaggagagcgg

SEQ ID NO: 79480 - RNA, 60 nt, Homo sapiens
gcccccccggagcggacagacccccaggccccagcagaaaaagggacagggcaggcgaag

SEQ ID NO: 79481 - RNA, 76 nt, Homo sapiens
caccccgagccaccccaggcgcccagaccaagggaacgggaaacaggaacacgaaagaggaaaaacgcacaagaaa

SEQ ID NO: 79482 - RNA, 61 nt, Homo sapiens
gcaccagggccggacaacagacccgggggagacgccgccaaggcgccggcggcagagcggg

SEQ ID NO: 79483 - RNA, 77 nt, Homo sapiens
gccccgagggcccccagagacggacagcgaaggcagagagcagaagaagccacacacagaagacccaaagagaacac

SEQ ID NO: 79484 - RNA, 58 nt, Homo sapiens
agccaggcaaccgagaggccccggaccccagccaaaggaccaagaaaggcccagggac

SEQ ID NO: 79485 - RNA, 67 nt, Homo sapiens
aagcaaaagcaggacaccagggaagaaaaggacccccagagagcaaaaacaaacaaaccaagcggac

SEQ ID NO: 79486 - RNA, 76 nt, Homo sapiens
ccgcgaagagacccgacagaggacacaccaaaaaggaagaaaagaaaagggcaaagcgcgcacgaaaccgcacaag

SEQ ID NO: 79487 - RNA, 69 nt, Homo sapiens
agcccagagcccaaggaccagcagcagaggagaccagggagacaaaccggaacacgacagaagccacag

SEQ ID NO: 79488 - RNA, 49 nt, Homo sapiens
aaaggaaccagaaggaggagcgagcgaaagcacgcaggaagcgcgagca

SEQ ID NO: 79489 - RNA, 74 nt, Homo sapiens
ggacagaacaggaaacccgccccggaggcggcacagggagaacacagggccccaccgcgccccacagaaaacga

SEQ ID NO: 79490 - RNA, 78 nt, Homo sapiens
cacgccgagaccggagcagccaccgccgcaacaggaaaccgagaggaagaaaggccagaacgaacggaagggccacac

SEQ ID NO: 79491 - RNA, 73 nt, Homo sapiens
acaacgaagcagaccaaaccgacagaagccgggacaccacagcaagaggaacgggcacgccagaaaagaccag

SEQ ID NO: 79492 - RNA, 98 nt, Homo sapiens
ggaaggcggcccacccgaagcgggcgacgcagggcccacaggacgagaacccccgcgaaccagaggaacccagcgagcgagagcggaccagaggacgg

SEQ ID NO: 79493 - RNA, 55 nt, Homo sapiens
cccccgagcgaaccccccagccaaagcgaaaagggcccaaagcacaagcgaccgc

SEQ ID NO: 79494 - RNA, 91 nt, Homo sapiens
agaaaggcaggcgcgcgagacggagacggcaacgcaccggggccgccaacaggacgagagaggagcgcgggccgagagcggagagcgggac

SEQ ID NO: 79495 - RNA, 78 nt, Homo sapiens
gggccgaacaaacagggcacagggagacggaaaacgagaggaacaagccaagcagggaggccaagaggccagggagag

SEQ ID NO: 79496 - RNA, 68 nt, Homo sapiens
ccgagacaccacccagacccaccacccccaaggacgcggagcgaaaaagggcggaccagacaccggaa

SEQ ID NO: 79497 - RNA, 64 nt, Homo sapiens
agcaaaaacagggcgagagcagcgaaaaggacaaacacggcccgcgacccaaaaggcccagacc

SEQ ID NO: 79498 - RNA, 77 nt, Homo sapiens
acgggggcggccgggacggaggacgcgcagacaaagggagccaaaggaaaaaagaccccagacccgcagaaaaccac

SEQ ID NO: 79499 - RNA, 59 nt, Homo sapiens
cggcacgccgccagccccgggggccacgagcgggcggcaggagggaaagcaaggaaacg

SEQ ID NO: 79500 - RNA, 62 nt, Homo sapiens
gaaccggcaccggcccgccgaaaacagaacgcccgaggacgggacgacagcagcccgcagca

SEQ ID NO: 79501 - RNA, 74 nt, Homo sapiens
ggaaaaaaagcagagccgagaaccggggaaagagggagagagaaccggagcaagcggagcagacgcacagacgg

SEQ ID NO: 79502 - RNA, 81 nt, Homo sapiens
ggcagacgaggccacagcccaggcacaggaaaggccagccgcccggacccacacgcccgcagacgggggcgcccccgcagc

SEQ ID NO: 79503 - RNA, 48 nt, Homo sapiens
agcaagaagacgagcaggcgccaacggagcaaggaaagagcagaagcc

SEQ ID NO: 79504 - RNA, 83 nt, Homo sapiens
gaggagcgggcacagggcaaggcggcggacggcgcgcgcccgaggcgaggaggagcgcggcgaggagaagcccaggacgcggc

SEQ ID NO: 79505 - RNA, 64 nt, Homo sapiens
gcgagacaagggccgccccgcgcacggcaccaagggcaggggaagagacgaccagagggccagg

SEQ ID NO: 79506 - RNA, 71 nt, Homo sapiens
gccgagaaggaccgccgacccgcccaccacgccagcagcgcgacggcaggacggggaaggaagccacaccc

SEQ ID NO: 79507 - RNA, 71 nt, Homo sapiens
agaccaggcggcggaagagagccgggcccgccgggcgaagccgaacagaggggaaccacgacccaacaaaa

SEQ ID NO: 79508 - RNA, 74 nt, Homo sapiens
caccgacgggccgcgaggggaagaggaagcaaagccaagaagagggagaaaggggggggaggaaaagagcaccg

SEQ ID NO: 79509 - RNA, 72 nt, Homo sapiens
cccacgccccaccacaacaaacgaggaaccagcacaagacaagaagagacccagacgaagagcgcacagaaa

SEQ ID NO: 79510 - RNA, 79 nt, Homo sapiens
cggagcgcaggcgccgagacgacaacgcggcccacagaaaaggcaaccccacggcggcggcggcggcaggaggcacccg

SEQ ID NO: 79511 - RNA, 79 nt, Homo sapiens
cacggagagcggccgccaacggcaaaccagaggagacgccaggccccagccaacccagaagcacgacgacaggacccag

SEQ ID NO: 79512 - RNA, 89 nt, Homo sapiens
cagacgaggaagacccggaaacaggggccacggagccacggccacggccgcaagggcaccagcaaacacaaaagggccaaaccaccaac

SEQ ID NO: 79513 - RNA, 75 nt, Homo sapiens
accgcaccgagggcgagcccaggggagccgccagcgaccgaggccggcggagccagccccgacgccacaaccggg

SEQ ID NO: 79514 - RNA, 78 nt, Homo sapiens
ccgcaggcgcaaggccaggcgacccgacgggccaccggagaggagccaagcccaacgggacgggaaaacggccacagc

SEQ ID NO: 79515 - RNA, 76 nt, Homo sapiens
acgggaggcagccgcaacagccggcaagaccgcaggccccacaccacccccggagagccacccgcacgaggcccgc

SEQ ID NO: 79516 - RNA, 61 nt, Homo sapiens
gccgcccgccgcccgccgcaggccacccgggaacggaggagggggcgccaacccccaaccc

SEQ ID NO: 79517 - RNA, 58 nt, Homo sapiens
cgcgaaacgcacgagaaggccgggaagagaacccagcagggcagagccaccagaagga

SEQ ID NO: 79518 - RNA, 59 nt, Homo sapiens
caaaaggcgcccacagccacgggaccggcgcagaccgacacacaagggagaacagggga

SEQ ID NO: 79519 - RNA, 75 nt, Homo sapiens
gggcccagaggcccagggaggcaggggcagaaacagagaaggaacaggcaaccacccgaagaccaagcgcacccc

SEQ ID NO: 79520 - RNA, 81 nt, Homo sapiens
cccgaggacgaggacacgagagccgcggcccgaggaggagaagccagccaagcacaagaagaaacaccccgccccccacaa

SEQ ID NO: 79521 - RNA, 60 nt, Homo sapiens
gggggcaaccagaggggccaacggacgacagacacgagaggcgagggacgacagagcaag

SEQ ID NO: 79522 - RNA, 71 nt, Homo sapiens
gcagcgcaaccggggagaagagggaccacaaggcaccaagcgggggggagccaaagaacccccggccccag

SEQ ID NO: 79523 - RNA, 77 nt, Homo sapiens
cggcgcgcggagggcgaggccgcgagcccccgccgcgccccacgccggcacacacacagaggaaaaccaacaaggaa

SEQ ID NO: 79524 - RNA, 52 nt, Homo sapiens
gaagagcgccgacaaggcagcccagaaacaggacagcacgccggaagaagaa

SEQ ID NO: 79525 - RNA, 73 nt, Homo sapiens
caacaagcgcacggagccccaagacaagacaaaggcagaagcagggaaggcccacccagcagaacacacacca

SEQ ID NO: 79526 - RNA, 82 nt, Homo sapiens
ggcgcgcggaagacgaggagcgcgcggcgccggggggcgcgccgcgaccgcccgccggaacaagcgggagccggcaggaaag

SEQ ID NO: 79527 - RNA, 68 nt, Homo sapiens
cagcggggacgcggacgcacgacaggggcaaggccgaggggaacagcacacagagaggaggcggaagc

SEQ ID NO: 79528 - RNA, 73 nt, Homo sapiens
gaaagccaaggaaaaacggagagccacaaaaaaggaagcgaaaaccggaaggccaaaacaagggaagcaaagg

SEQ ID NO: 79529 - RNA, 80 nt, Homo sapiens
agaaaagcacaagagaaagaaggaagcggcgccgaaaaaaaggcacgcgagaaggggagggggagaaagaagaggaagaa

SEQ ID NO: 79530 - RNA, 93 nt, Homo sapiens
cacaggagggccacgggccgggcgcggcaccacgcccgccccagcggagaggcgaaggagcacgcaagcagggaaaagggcaggaaaacaccc

SEQ ID NO: 79531 - RNA, 76 nt, Homo sapiens
cgagcacccccgcggcggagccgagccgaggcccggcggcgcaccgggcggcaggcgggagacaggaaaggaaaac

SEQ ID NO: 79532 - RNA, 60 nt, Homo sapiens
gcgacagcaaccaaggaacaagagagcaagaggacgaacccgcgcccagaagggaaggcc

SEQ ID NO: 79533 - RNA, 60 nt, Homo sapiens
acgggcgaagcgacgagccgcgaggagaaccagcaacacacaagaaacccagccaccaag

SEQ ID NO: 79534 - RNA, 55 nt, Homo sapiens
gcgggccggcccggcacaggggcgaccaagcaaaaggggggcgcggcccagccgc

SEQ ID NO: 79535 - RNA, 86 nt, Homo sapiens
ggggcacccgggcacaccaagcacgcagacacccaggaacagcggaggaggacagaagcacccaacaggacgccaagccaccgcga

SEQ ID NO: 79536 - RNA, 69 nt, Homo sapiens
cagcccacgggaacaagaggggacagaaaggacccaaagacaggaccacgcaccagcagagaaggaaag

SEQ ID NO: 79537 - RNA, 71 nt, Homo sapiens
acgaagcgggcggcgaagaacaggccaagacaaccgggaaagcagcccaaggagggcgacacacgaccaac

SEQ ID NO: 79538 - RNA, 79 nt, Homo sapiens
gccaggagagaagacgagaccaaagaggaacacaaacggcgcacaggagagggaagagacgacgcaaccaaagggggga

SEQ ID NO: 79539 - RNA, 77 nt, Homo sapiens
cggaaggacaccaagagcggaccgggccccggcagccgcgaacccccagaaccgaaacgaccaccgagacgcccagc

SEQ ID NO: 79540 - RNA, 55 nt, Homo sapiens
cgaaacaccgagagagaccagaaaagacgagaaagcacaggggaggagagagagg

SEQ ID NO: 79541 - RNA, 67 nt, Homo sapiens
aagagaaagagcaggggcaaaaagagagaagaggacccgggaagaaagcgccaacgaacccgggaac

SEQ ID NO: 79542 - RNA, 74 nt, Homo sapiens
aacaaaagaccccccggggaccggaggaggacccagcaagaagggaacgcacagcgaagacaccccaacgggac

SEQ ID NO: 79543 - RNA, 79 nt, Homo sapiens
ggcgccaacaaaagcagacccgaaggagggacgaagggggacacagaagcgggagggacaggagaacaggcacgacccc

SEQ ID NO: 79544 - RNA, 78 nt, Homo sapiens
ggaccaagaaccacggacaagaccgagacacccaccacagcagcagggcccccagaaccacagcaacaccggaccgcc

SEQ ID NO: 79545 - RNA, 78 nt, Homo sapiens
ccggcccgggccgggccaggaggacacgcgcagggcccacgacgagacaaccaacaagagagcggaaacacccagacc

SEQ ID NO: 79546 - RNA, 44 nt, Homo sapiens
ggaagaggaagcaaagccaaggagcgaggaaccggcccagaacg

SEQ ID NO: 79547 - RNA, 80 nt, Homo sapiens
gaggaggcagacgggcgacagaggaacgggggagaggagacaagcgcaagcagccagagcccgggcgcaaagaaccaggc

SEQ ID NO: 79548 - RNA, 66 nt, Homo sapiens
cccgcagcacccagccggccacggccaggcagagcagcccaccagggaggggagggggggaggcgc

SEQ ID NO: 79549 - RNA, 83 nt, Homo sapiens
aaggaacgacaaacaggaccgccaaacccaaaccggagccggcccaggagcagcagggaggcgggaacgcccagggagccccc

SEQ ID NO: 79550 - RNA, 77 nt, Homo sapiens
aggagcgagaggcgggagaagcggcaagaacagagcaaggcggcgggggagaaggggggaagaaaacagacagaaac

SEQ ID NO: 79551 - RNA, 76 nt, Homo sapiens
caagggcggcaagcaaccggggaggaaagaccacagggagcgaagcagggcacagaccccagggggaacaggcgaa

SEQ ID NO: 79552 - RNA, 64 nt, Homo sapiens
cgcggagcagagccgccggggagggagccagaagcaacgagagccaccaaaaccggcaaaggcc

SEQ ID NO: 79553 - RNA, 75 nt, Homo sapiens
gccaggacggccaacaaccagggaacaaggaccgcagaaggaagcacaacccaaccaacaccaggaaagcccagg

SEQ ID NO: 79554 - RNA, 85 nt, Homo sapiens
gacccacagcgaaagcaacagaggagaggagacgccggagcgggacgaccagagaccgagagcggcgcgcaccgcggcacgcggg

SEQ ID NO: 79555 - RNA, 99 nt, Homo sapiens
ccgggaccccggaaaccagaaagccacgagagaagaaagaaaaagaaaccgccagcccagagacacgaaagggacagagagggggacagaaggaaggca

SEQ ID NO: 79556 - RNA, 79 nt, Homo sapiens
cggccgggccccgagacggggacgcaccgcaggcagcagaagaccggaggaccggggcgagggaccgagaagaccccag

SEQ ID NO: 79557 - RNA, 87 nt, Homo sapiens
gcacaccgcgacggcgcgcggcgcgaggagagggagcggagcgcagaaggaacagcggcggcaggaggagaacgacaagcgcgccag

SEQ ID NO: 79558 - RNA, 82 nt, Homo sapiens
gaggccgaggacccggggccgaggagcgggaagaggcgggaccgagggcagcagccaggaccccgggccccccaaaacgcag

SEQ ID NO: 79559 - RNA, 83 nt, Homo sapiens
ggcggcgcgcgcggcgcgggacgcgcgcgggcacccacggagccccggggcgccagggcgcccaccacgacagccggagagcc

SEQ ID NO: 79560 - RNA, 72 nt, Homo sapiens
ccaaggacacgcagcaaacccaggacagccccaagacccagaaaagcaacgaacgaagacaaagcaaaacca

SEQ ID NO: 79561 - RNA, 50 nt, Homo sapiens
caaacccagcaacacggagacacagggcccggccagaaaggcgcgaaacc

SEQ ID NO: 79562 - RNA, 78 nt, Homo sapiens
aagggcgcgccaccgcaaaggcccgcgcaccgccagggaagaaacgggcgcgcccccaccacgcgagcggagcagcgc

SEQ ID NO: 79563 - RNA, 69 nt, Homo sapiens
aggacggcgaggcgaaacgaagagacaggcaccgcgcgccgcgcccccccaccagccccgccgggcggg

SEQ ID NO: 79564 - RNA, 72 nt, Homo sapiens
aggaaaaggacaagccgacaggccaagagcagcagggaacgagagcagccacccagagcacagccggcccga

SEQ ID NO: 79565 - RNA, 79 nt, Homo sapiens
ccgacagccgcagaacgcaaaggagaaagccgagagagacgacaggagggagccagagccagaaaaaaggagaaaagca

SEQ ID NO: 79566 - RNA, 76 nt, Homo sapiens
ccaggacacacagacaaggcagaaacagaggcgggccgacaagagcacaaccacaggaaaacggagagcgaagagg

SEQ ID NO: 79567 - RNA, 84 nt, Homo sapiens
gagacaggccaacacgcgggcagcgaacaagcgggagcaaggagggcgaagagcgaggagaagaaggaaccagcaaagcgccac

SEQ ID NO: 79568 - RNA, 77 nt, Homo sapiens
gggaacaccaccacccaaggagaaggcagcgccgacacccgacggccacgaacccgagggaccaagcaaggaaccag

SEQ ID NO: 79569 - RNA, 85 nt, Homo sapiens
aggaggcccaccgcagcgggggcacgaacgaaggagagacgagcgcaaacgacaagggcaggagccgccgccggaagcagggaag

SEQ ID NO: 79570 - RNA, 75 nt, Homo sapiens
aacggaccagaccgaccaccaaaaaccaagacacccaggagaaagacagcggggaaaagaaaaaggagggggcaa

SEQ ID NO: 79571 - RNA, 72 nt, Homo sapiens
cgggagggcgcagcggggacgcggacgcacggcaccgccccgggaagaagacagagaggacaagcaccacaa

SEQ ID NO: 79572 - RNA, 82 nt, Homo sapiens
acaacaccaggaggaccagcggacgacccccgggacagggcaggacccgaggcgccagcagcagcaagaccgggggaccagg

SEQ ID NO: 79573 - RNA, 76 nt, Homo sapiens
accaagaaccaggaggagacacacagccccagacgggaggaaaaaaggaaggaccgcgacgaacacaaccaaagaa

SEQ ID NO: 79574 - RNA, 75 nt, Homo sapiens
gaccccccgccggaccccacagcaacaaggccaagagcacagcagccccccagcaaacaaagccacagggaggcg

SEQ ID NO: 79575 - RNA, 75 nt, Homo sapiens
gcgggcccgggagacccaggcgggacagagggagccaggcagagcaacacccccagggagcgggggcggaaacac

SEQ ID NO: 79576 - RNA, 55 nt, Homo sapiens
agccaaagaacccacacaaggacaaggagaaggcagcaggaagaaacagcgaacc

SEQ ID NO: 79577 - RNA, 75 nt, Homo sapiens
gccgcacgacgcacggcccaggaccgcacaagccgcgggcagacgaagcggcgggccggagaagagaccaagcag

SEQ ID NO: 79578 - RNA, 78 nt, Homo sapiens
gacgggcaccaccaggaggcggcacacaacaacgccagagagaggggccgaggggagaggcacgcccccagacgccca

SEQ ID NO: 79579 - RNA, 75 nt, Homo sapiens
cccgaggaggacacgaagccacccagggaccccaagcgacgcacccgaagagcagaaacaaagagccccgggaaa

SEQ ID NO: 79580 - RNA, 78 nt, Homo sapiens
cccaagggcaacaacgacaccaaggaaaggcgcaccaaggaacacgaccaggaggcaaagggaccccaagaaaccaaa

SEQ ID NO: 79581 - RNA, 67 nt, Homo sapiens
aaaaggccaagaccacggagagaaccccgaccccgaaaccgacagcccaggagcccgacagagaaag

SEQ ID NO: 79582 - RNA, 70 nt, Homo sapiens
ggacgccgccccacagcaaaaaggagagaagagcaagagaccgaccaaaacacaaccgggagccaagaaa

SEQ ID NO: 79583 - RNA, 76 nt, Homo sapiens
cgcgaggggagcaccaggaccgggccggaacgagacgcacgggagcggcaggggaggcgaagaagagcccggacag

SEQ ID NO: 79584 - RNA, 110 nt, Homo sapiens
gggacggaccgagaccggaccgagagcggaccgagagcgcgaaacgcacgagaaggcacggcagacacaccgaccagaggaaggcgaacccgccacgcagcaggagcagg

SEQ ID NO: 79585 - RNA, 69 nt, Homo sapiens
ccccacgcggccagcgaaaacgcccagagagggagagaccagaggcgcccccacgcgcggaaaggaaaa

SEQ ID NO: 79586 - RNA, 77 nt, Homo sapiens
caggcgaagaagcgcagccgcaccggccaagggaggaaggcagagaaaaaaggagggccaaagacaagcagcaacag

SEQ ID NO: 79587 - RNA, 75 nt, Homo sapiens
cagaaccgacggggaaaggaaagcagcccgaaaagaagaacggagaagagcccggaaaaagggaagaaggaaacc

SEQ ID NO: 79588 - RNA, 70 nt, Homo sapiens
gaccggaccgagagcggaccgagagcgcgaaacgcacgagaagacagcagggggcggaggaagcgccaaa

SEQ ID NO: 79589 - RNA, 76 nt, Homo sapiens
cgggaccacaggccccggcccagagaaagaccacagcaagaccacgcccccagccgggggaccaggccgaacgacc

SEQ ID NO: 79590 - RNA, 74 nt, Homo sapiens
gaagcagaacgcaggaggagaacgacagaggcgaacagaaaccggacccccccgaccaacggagacagccccgg

SEQ ID NO: 79591 - RNA, 79 nt, Homo sapiens
gaaaagaaacagcgaaggagaaggagccagggcgaaaaaaaagaccaaggagccaaacaccaaggccgcaccgagcgag

SEQ ID NO: 79592 - RNA, 62 nt, Homo sapiens
aggagggagacggcggacacacggaggcgcgggccacgagagaagaaagaaaaagaaaccgc

SEQ ID NO: 79593 - RNA, 93 nt, Homo sapiens
cccggaaaaagcaagcgaagacacaagaagaccgagcaaagagaccccggaacggacaccgaacagaaagggacaaagggacagagagccacc

SEQ ID NO: 79594 - RNA, 76 nt, Homo sapiens
gagagcacacaaaaaaagggggacgaaggccaccaagaaacaagaaggaggagaagagaaaaacaaccgggaagaa

SEQ ID NO: 79595 - RNA, 90 nt, Homo sapiens
ggggaggccgagaaccgcagggacggccgaggggcaaagaaaaaggagagaaaaagaggcaaaacaacaagaagaaaagagaaaaaagag

SEQ ID NO: 79596 - RNA, 56 nt, Homo sapiens
ccgaaacccagggacggcgcaccacagcccaggaacagcgccgaagccaagaagcg

SEQ ID NO: 79597 - RNA, 62 nt, Homo sapiens
ccaccacgccccggagcccagaagaccgagaaggacaccgcgcgaccgagcggaggaaccag

SEQ ID NO: 79598 - RNA, 79 nt, Homo sapiens
gaaaggcgcagccgcaagaggggcacacgcccgcacgagcagcggagaagacaggagacccaacaccccagccagacgg

SEQ ID NO: 79599 - RNA, 72 nt, Homo sapiens
ccacaacccgggcaagggagcacacagccgcggcagggaaaggaggccagagaggagcccacccccaacaga

SEQ ID NO: 79600 - RNA, 69 nt, Homo sapiens
ccgcgcagaaagagcgaacaccggcagcgagacaggagccacagccgggcccagcaaccggcgcagaca

SEQ ID NO: 79601 - RNA, 85 nt, Homo sapiens
ccgccgcgcaccgcccgccccgcaccgagcccgcggcgagggagggagaaacaagacccaggaccaccaccacgggacgcgcgga

SEQ ID NO: 79602 - RNA, 75 nt, Homo sapiens
acccaccccaaccagagagcagcaaaaaaccccccacaacacaaccacagcccagggcagagcccggagggacag

SEQ ID NO: 79603 - RNA, 95 nt, Homo sapiens
cgagaccggaccgagagcggaccgagagcgcgaaacgcacgagaagccggaaggaggcggccaaccagggcacggacgcccgccacagcaaggac

SEQ ID NO: 79604 - RNA, 78 nt, Homo sapiens
ccaccgcaccgcgacggcgaccggggcgaaacggaagaggaaagcagacaagccagcggagaaagaccgcccccaaac

SEQ ID NO: 79605 - RNA, 75 nt, Homo sapiens
cccacagaggccaaggcaagccagagaacacccgccgcgcaaaagcagaccgaaaagggcggaaaaggaccaagg

SEQ ID NO: 79606 - RNA, 83 nt, Homo sapiens
ggacaccaggcaggccagagcagcaccaggccagagccagaacaacagcagagaggaccccaccacagcagccggagaaggag

SEQ ID NO: 79607 - RNA, 76 nt, Homo sapiens
agaaacccccagcacagaagaaccaaggagaggaacagcaaagagaaggacggagaagcgaaagccagaccggcaa

SEQ ID NO: 79608 - RNA, 67 nt, Homo sapiens
ccgaggcgcgggacgcgaagcaacaggcgcgccacaggagccgcagaagcaaaggcaccgccaaacc

SEQ ID NO: 79609 - RNA, 53 nt, Homo sapiens
aaagggcggaagagaggaagaggggccaaaaggaggaccgacagcacgaggag

SEQ ID NO: 79610 - RNA, 80 nt, Homo sapiens
caacagccccgcggccacagcgcaagagacagggaagaacgaggcagcaccacagcgccaacaagaagcaggaagagaca

SEQ ID NO: 79611 - RNA, 55 nt, Homo sapiens
cgaaccaccgaaggccaagagaaggggggaagagaacaaaggggaaggacccccc

SEQ ID NO: 79612 - RNA, 56 nt, Homo sapiens
acggagcagccgaggacgggaccccagggcagcgaagcagaggcaaggaagaccgg

SEQ ID NO: 79613 - RNA, 55 nt, Homo sapiens
cccagagcgggaacagcaacaagagaggggacgacagagccagcgagcgaaccag

SEQ ID NO: 79614 - RNA, 79 nt, Homo sapiens
gcacagaacaaagggccaagaccagggagaagccaaaggccagggagggaggagggcggcacgaagcgagagccacgag

SEQ ID NO: 79615 - RNA, 69 nt, Homo sapiens
agccaagaggcggccaaggggacgagcaaaggaagcgcgaacagcagcgcaggcaaagagcacacgccg

SEQ ID NO: 79616 - RNA, 77 nt, Homo sapiens
gcgcagaccagaccgccgaccggcgcccgccggacccaaagacaggaccacgcaccagcagagaaggaaagcaaacc

SEQ ID NO: 79617 - RNA, 71 nt, Homo sapiens
agcgcacgggaacacaccgcccagccacgcggccacacgcaggaggaaccgaaggaggagaacggagcgca

SEQ ID NO: 79618 - RNA, 83 nt, Homo sapiens
ggagaacacagaaacccgccccggaaaaacaagagcggaccagaggagaccaccggcccccgggagcaaccccggagaggcca

SEQ ID NO: 79619 - RNA, 34 nt, Homo sapiens
cagggcgcccccgcagggacacgcaggcacagaa

SEQ ID NO: 79620 - RNA, 61 nt, Homo sapiens
ggaggccccccagccacgggaacaccgacagagcgccaggccagagcgaaaccccccgaga

SEQ ID NO: 79621 - RNA, 80 nt, Homo sapiens
ccaacaccgcgacacgcagaacgccaaaagacgaacacaaagggaaagaggagaggcacccgaaagccaggccagaaaac

SEQ ID NO: 79622 - RNA, 76 nt, Homo sapiens
acggacggcgggcaccggccgacggagaccgcaagcagagcgacaagcaacgcaaaaacaggcggggcgcgcgcgg

SEQ ID NO: 79623 - RNA, 71 nt, Homo sapiens
aaagaaagagaacggcgagagaaaccagacggacaaagcacaacaagccccagcaggaggcaacgagggaa

SEQ ID NO: 79624 - RNA, 79 nt, Homo sapiens
agagaaggaaaaaggaaccaaagcgaacagaggccacccagagagaggggaacgcaacgaaagcgggagaagacacggc

SEQ ID NO: 79625 - RNA, 61 nt, Homo sapiens
cgagggcggacgggccccgcggccgcccgagcaggaggacgaacagaggagccaccgcgcc

SEQ ID NO: 79626 - RNA, 86 nt, Homo sapiens
gaccaacacaagggggccgcaaggaacaagacgccaaggagacgccgcagagacccccgggagcggagccgcagccccacgagcgc

SEQ ID NO: 79627 - RNA, 86 nt, Homo sapiens
gaacccagacaacaggacgccgccaagagaccgaaggagcagacgaggcacgagcgccagcgcgagacagacggggcgcagaagcg

SEQ ID NO: 79628 - RNA, 78 nt, Homo sapiens
agcccagacaagccccagggaagccacagcaccccagcacccagaaggacaggagaaacaggggccaaaaaaccaaag

SEQ ID NO: 79629 - RNA, 86 nt, Homo sapiens
gccagggccggggaggcgcagcaccccaacagcccccaggagagcgcccccacccccaggcccgagggacaggagcagggaccaga

SEQ ID NO: 79630 - RNA, 74 nt, Homo sapiens
gacccaaggaacgacccccagcgaagacacgaaaaccggagaaggaccagagcacggacagagggaagggaacg

SEQ ID NO: 79631 - RNA, 37 nt, Homo sapiens
agagcacgagagagcaagagcacacgcagccagaagc

SEQ ID NO: 79632 - RNA, 77 nt, Homo sapiens
gggaggggagcacacagaagggccaaggaaaaacgagcagaaagaagccaggcagcaggaggagccagagcagggca

SEQ ID NO: 79633 - RNA, 79 nt, Homo sapiens
gcaaggaggccccagcggaccgaacaggagaaaagaaagccagaaggaaggaagcaacgaaccaagaaaaaacggaaca

SEQ ID NO: 79634 - RNA, 55 nt, Homo sapiens
gaaagaggccagacaggagggagaaagaagagagaccagaaacgagaggagaaga

SEQ ID NO: 79635 - RNA, 80 nt, Homo sapiens
cagagagcgcacggcagaggaggaacaagggcgaaccaccagcacagcagcagcggcggccaaggacaggaccaggacga

SEQ ID NO: 79636 - RNA, 98 nt, Homo sapiens
ccgcaggagagacacgcgggccgaccccagagcggcgcggacagaacccaggagaaacgagagggacagcaaggaagacgccagagagcggcacaccg

SEQ ID NO: 79637 - RNA, 75 nt, Homo sapiens
ccacaagaaggacgcggggaccggggccacggacaggagaaccaaccgacgccaagccagcagaagccggagcca

SEQ ID NO: 79638 - RNA, 57 nt, Homo sapiens
ggggccgaaacacagagcaaggacgaacgcaaccccaagcagaaaaggcaacgccga

SEQ ID NO: 79639 - RNA, 50 nt, Homo sapiens
aaggacggaaggacgggaccgaggagacccacagcaaggacccaggaaag

SEQ ID NO: 79640 - RNA, 73 nt, Homo sapiens
cgccgcagcccaggcgcgggggcgacgacaggacccgagacagaaggccaaagagacagcagccagggcaaca

SEQ ID NO: 79641 - RNA, 84 nt, Homo sapiens
ccggaggggagagagcggaggacagccgagaggagggcggcgcggcgggaggacacccggaggagggacgggccaagggagcac

SEQ ID NO: 79642 - RNA, 73 nt, Homo sapiens
gcccagacaccaagggagccagcggaggagcaagaaggggaccgacagcaagaaaaggagaaaacaaggccgc

SEQ ID NO: 79643 - RNA, 80 nt, Homo sapiens
cgagcccaccgcgccaggagagccacggcagcaggaacgggcacgcgccaccgggccgacggggagccggcggaagagcg

SEQ ID NO: 79644 - RNA, 72 nt, Homo sapiens
cggaaaaagccacagacggagcagaacaacagaagcgaaagcgggaagcaaacacagaaaaaccagcacagc

SEQ ID NO: 79645 - RNA, 78 nt, Homo sapiens
gcacacaagccaacaacaagaacaaaaccagccaagcagaggagaaaaagacagcaccccagagccagaaccagagga

SEQ ID NO: 79646 - RNA, 63 nt, Homo sapiens
gcagagggcagccgggaaagccgcaaagggagcaggcgaagcgagccagggaagcgaaccagg

SEQ ID NO: 79647 - RNA, 62 nt, Homo sapiens
gaccaacagggcggaacagccacagcgcaagccggcacacagggaggcaggcccgggaccag

SEQ ID NO: 79648 - RNA, 82 nt, Homo sapiens
ccgcggggcgcgccaaaaaacccagcgggaggagcgggagcgcgcgggcagccgggggaccggaaagacacggccgagacgc

SEQ ID NO: 79649 - RNA, 84 nt, Homo sapiens
cggagcagagccgcgggcgccggagccgaggcgagcgccgcgcgcaccacgacgcagaaaacagacacacagcggagacaagca

SEQ ID NO: 79650 - RNA, 82 nt, Homo sapiens
cggccggacaagcccaggagccgaccagagagcaggcaccacccccccaacaccccacagagcagaaacccggaggagcggc

SEQ ID NO: 79651 - RNA, 70 nt, Homo sapiens
ccgaccccccaccagaacgaggcgccccgccagaggaacaccagggacaaggacgcgccacacacggaca

SEQ ID NO: 79652 - RNA, 80 nt, Homo sapiens
acacacccgaccccgccgacaccgcccccgggaggaggaggcccagacccaggaaagggccgcaagggacgcccggaagc

SEQ ID NO: 79653 - RNA, 87 nt, Homo sapiens
acaacgacccaccggaaggggacgaggaaggaaacaggaaccaggcagaaacgagaagagagcgaagcggagcagaacaggagaaga

SEQ ID NO: 79654 - RNA, 64 nt, Homo sapiens
cggggagacccggggacccccgacgccaggcagcgcccccaaacgacagaagacaggagccaga

SEQ ID NO: 79655 - RNA, 70 nt, Homo sapiens
gaaccagaaaaccaccaggcccccaagagaccaggccccggaagccagaacacccaggccacaaacagga

SEQ ID NO: 79656 - RNA, 75 nt, Homo sapiens
caagacagggcccggaggcgacaaccccggccaggaacaagggagcccgccagccagaggagaccgaagaagacg

SEQ ID NO: 79657 - RNA, 53 nt, Homo sapiens
gccgcaggggcgaacgaccagccaacaacgggaccaggacgcagagagcggga

SEQ ID NO: 79658 - RNA, 63 nt, Homo sapiens
cgcgggcccaacggggggacccccaccgcaaagccaggaagcggcggagaggagggggggagg

SEQ ID NO: 79659 - RNA, 73 nt, Homo sapiens
accgcacccggccagcccccccccagaccacaccggggcccgccggacacacggacaaccggaagagaccgcg

SEQ ID NO: 79660 - RNA, 110 nt, Homo sapiens
gaggagccgcccggacccgaagcgggagggcggagaggaggacacagcaggccggacacgagcccaccccaaagagagaagccagaagcgcaaaagcaaaaggacaggag

SEQ ID NO: 79661 - RNA, 77 nt, Homo sapiens
gcgggagagggccaccgcccgccacccgcgcgccgccgccgaggagaaagggcgaaccgaccaagaacaacacccag

SEQ ID NO: 79662 - RNA, 82 nt, Homo sapiens
agcacccgagcaaaccccagcaagagcggaggcgcccggcggagcagaggaaccacacgcgacaggaacaggacacccaacc

SEQ ID NO: 79663 - RNA, 83 nt, Homo sapiens
caggagccccacggagcgcgcggagcgaacccaccccagggcgcaaggccgcaccgcgaggaacccgagcccaccggcagcac

SEQ ID NO: 79664 - RNA, 71 nt, Homo sapiens
gaagagaaaccgagaaggagggcgccaaggaaccaaggcaggaacacgcaggagggagcagcaacaacagc

SEQ ID NO: 79665 - RNA, 52 nt, Homo sapiens
aaaccccgaaaaaggcaaccacagccgccagagccagagcaggggaaagaag

SEQ ID NO: 79666 - RNA, 72 nt, Homo sapiens
aaacaaaacgaaccaggacggcaagcagccggcacccgcacaacccagggggccgaacccagaccaacaaaa

SEQ ID NO: 79667 - RNA, 78 nt, Homo sapiens
gacaccaggaaaaacacagagagccgacggcaacgggaagaccccagaaaaagaaagagcacgaacgcggagaaagac

SEQ ID NO: 79668 - RNA, 65 nt, Homo sapiens
ggagcgggcgccagcccagagacagagggagcgcaagacaaacggcacagccagagaacaacaca

SEQ ID NO: 79669 - RNA, 76 nt, Homo sapiens
gggccacaaaaggagagggagaacagggggaagaccaggccacaaagaacccagccggggcagggagccagaagca

SEQ ID NO: 79670 - RNA, 73 nt, Homo sapiens
aagcacacccgaaaagcgccaaggaaaaggacgagaacgccgcgacagaaaggacaagggagaagaagccaca

SEQ ID NO: 79671 - RNA, 52 nt, Homo sapiens
ggaaaaagccgccacacgccaaagggaggaagaagagacagaaagcacagag

SEQ ID NO: 79672 - RNA, 51 nt, Homo sapiens
aggcagcgcacgacagcaaaagacacacacccacgggaaggaagaaagcag

SEQ ID NO: 79673 - RNA, 77 nt, Homo sapiens
cggccagcaccaaaacaaggagaagggcaagacgccggggacccgaccacaggggcgagaggaagagcacgaggccc

SEQ ID NO: 79674 - RNA, 80 nt, Homo sapiens
gcggaggcgggaggaggccaggaagcccagggacagccaggcaggccgggaaaaaccacaaagaagacaacaaccccaag

SEQ ID NO: 79675 - RNA, 57 nt, Homo sapiens
agacaagcgagcgccgcacaaaaagcagagagaacagcaggaacaggaacaccacaa

SEQ ID NO: 79676 - RNA, 75 nt, Homo sapiens
gggcgccggcgcacagcagagaaaacgacagaagcacgacaacaacgggcagcaagccacaacggaaaggaggag

SEQ ID NO: 79677 - RNA, 78 nt, Homo sapiens
agcccgcaagaagaacagagacagcagccaaacccccagaggcgaaagcgcacacaccagggggggaggaaaagacag

SEQ ID NO: 79678 - RNA, 98 nt, Homo sapiens
aggaggccaaagccaaagggaccaagaccaagaccagaaaaagggacaccaagagggcccccgccacccagcacccaccgaagacgaaaagcacacga

SEQ ID NO: 79679 - RNA, 78 nt, Homo sapiens
gcgagcgagggggggcgcgccggaaaccggagcgcgcagcagacgaaaagaccccgcacacccccgagcagaggcaga

SEQ ID NO: 79680 - RNA, 73 nt, Homo sapiens
gagaagaagacccaaaaaaaagaggagcagcaggcacagcacgggcagagccaggacagcagaccacagcccg

SEQ ID NO: 79681 - RNA, 54 nt, Homo sapiens
gggccagggcgccacaaagagaaaaggcacacacacccgcaggagagcgccgga

SEQ ID NO: 79682 - RNA, 83 nt, Homo sapiens
gacggccgagcacgccggacagcgcccccgacgccgcgcaccccgcccgacggaagaggaagacaaagggacaaagcccagaa

SEQ ID NO: 79683 - RNA, 77 nt, Homo sapiens
ggggagaaggccgagggccgggagcccgcaccgggccggcagcccagaaggggaagaccccagcccgggaccacgaa

SEQ ID NO: 79684 - RNA, 77 nt, Homo sapiens
gcgcacccggccagggcagcccagccgaaccgcgcgggcgaaccgaggccagggcacaaaagaccaaagcagacgac

SEQ ID NO: 79685 - RNA, 60 nt, Homo sapiens
cgacaaccccagccaaagaggagcgggaaggccccgcacccggagaccgggggaagacaa

SEQ ID NO: 79686 - RNA, 58 nt, Homo sapiens
ccgggccagccacagcaccccgaaggagcgcgccccccagaaccgcccacagcccacg

SEQ ID NO: 79687 - RNA, 54 nt, Homo sapiens
aggcaccgggagagggaaacaaggcagcgggagaaagggcgcaaaaagaaagaa

SEQ ID NO: 79688 - RNA, 66 nt, Homo sapiens
ggcggcgcccgcgccacagccaccagagccggcagcaaagagggaacagacagcaaaaccgccgga

SEQ ID NO: 79689 - RNA, 49 nt, Homo sapiens
agggaagaagacggcgaagcaccaacgccaagggagccccaagagcaca

SEQ ID NO: 79690 - RNA, 78 nt, Homo sapiens
acccggagcccagggaagcagccgaccagccgcggagccgggggcagaggccgcggaacaccaccggaacggcgcgcg

SEQ ID NO: 79691 - RNA, 70 nt, Homo sapiens
ggccccaccagcccgggacgcaacaaagaaccgccgggggaaaacggccagagacacaagccaggacggg

SEQ ID NO: 79692 - RNA, 68 nt, Homo sapiens
cgcaagagaaaacgacgaacagaacgaacagaaagagaagcgggcgacgggacaaacacaggaaggaa

SEQ ID NO: 79693 - RNA, 83 nt, Homo sapiens
accagggaagcccgcacgcggaagcgccagccagaacgcaaagcagagcaaacgagcaggacagcagggcgagaaggaggccc

SEQ ID NO: 79694 - RNA, 36 nt, Homo sapiens
cccgaaaaccagcagcaggggcggaagcagcagagg

SEQ ID NO: 79695 - RNA, 80 nt, Homo sapiens
gagcgacgggcaggaaggagggggcgcacaaacgaggaggcaacgcacgggccacaggcagccgcagaacaggccgggga

SEQ ID NO: 79696 - RNA, 75 nt, Homo sapiens
gcccagaacggagccgccggcccggggccccacaccaacggccccacacaccccacgaagagaccagaacaaagg

SEQ ID NO: 79697 - RNA, 71 nt, Homo sapiens
aacagagcgggagccgcggaggcccacggcggcgaccaggacccggcccaacgagcccacgaagaacacac

SEQ ID NO: 79698 - RNA, 74 nt, Homo sapiens
cgagcaccgcaagccggcagagccgagaacagcgggcagcaaggccagaagccagacgccgggaaggccaaacc

SEQ ID NO: 79699 - RNA, 60 nt, Homo sapiens
aagagaccacccgcaccagagagaggacagccgccgcgggccccgcgccccaccgcccag

SEQ ID NO: 79700 - RNA, 79 nt, Homo sapiens
caacacagccaccagagagaggcgagggccagaaggcgccacaagcaaaccagccgcagagaagccacaagccagaaag

SEQ ID NO: 79701 - RNA, 50 nt, Homo sapiens
ccccaggagaaacgaggagcgcggccaccccccggacaggcagccgcaac

SEQ ID NO: 79702 - RNA, 113 nt, Homo sapiens
caacaccgcacaaacaccaacgcacagagagaacccaagaccgcaaggagcagagccgaggcacaacacaaaaccaaaggcacgagcgaaaacggagagccacaacgaccgaa

SEQ ID NO: 79703 - RNA, 82 nt, Homo sapiens
gcaagcggaagcgccccaccgcgggcgccaaggggagcagaaggaccggacacagccgggcaaccacccgcggcgcgcgccg

SEQ ID NO: 79704 - RNA, 129 nt, Homo sapiens
ccggaggcgccggcggggcgccgcggaccaacagcccaggaggccgagcgcgggaaagcagcgcgagcgacgcgcccacggaggaggcgggggccccacaagaagaccaacaggaaggcgaggagcggg

SEQ ID NO: 79705 - RNA, 82 nt, Homo sapiens
cgacggggaggagacccgggcagaagaacaccggcggcggccagcccgacacagggaagcaacaggagcaaaaccgagaagc

SEQ ID NO: 79706 - RNA, 76 nt, Homo sapiens
ggagagcgaccagggacaaaagaccaaaaaaccaaggacgacgggaaaccggacccgcaaagaggaaacaaaagaa

SEQ ID NO: 79707 - RNA, 56 nt, Homo sapiens
aacccggcaccgccccagacaccgcaagccccacccggcacagccgcgcagaacgc

SEQ ID NO: 79708 - RNA, 90 nt, Homo sapiens
gacgcgggcgccaggaccggccgaacgcagagggccgcccccaaagccaaccaaggagaggagaggaagagcagcggggcagaggacgca

SEQ ID NO: 79709 - RNA, 64 nt, Homo sapiens
gaaggcggcccgccggcagagcgaggagggaaacaagacaaaggaaaagcggagcggagaccag

SEQ ID NO: 79710 - RNA, 78 nt, Homo sapiens
cccccgccaggcgccgaccaccccagcaccagcccagagggaaagcacaccaccccagccagacccgcccgaaaagag

SEQ ID NO: 79711 - RNA, 95 nt, Homo sapiens
ggggccgagagggggggaggaggaagacggagccaagaccgaaaagagaaccgccagcaagagcgcgcacgcaaacgggagagccggaaacggga

SEQ ID NO: 79712 - RNA, 74 nt, Homo sapiens
ccccccaaacgacgcagccacggagagcacccggaggagaagaggcgcggaacaagcgggagagcaaggaaagc

SEQ ID NO: 79713 - RNA, 80 nt, Homo sapiens
gggaaggcaaccgggcggagccagccgggccagccccgcgacggcccacgagccaagcccagggccggggaaggcgcacg

SEQ ID NO: 79714 - RNA, 81 nt, Homo sapiens
caccgaggcgagcgacgcaggacccacagggcggggagcagaaaccaccgccaggagacagcacccccgcggagagaacac

SEQ ID NO: 79715 - RNA, 71 nt, Homo sapiens
aggcaggaaggccggaggacccccaaaagcaaagacggaaaacacaggccggcccagggagaacgcaaaac

SEQ ID NO: 79716 - RNA, 61 nt, Homo sapiens
ccgagagcggaccgagagcgcgaaacgcacgagaaggagcagacaagggcccacaccaaag

SEQ ID NO: 79717 - RNA, 70 nt, Homo sapiens
gggggggaagaccccaggcgaccacaccagacacagacccggaggaaagcccagagggaagcgcaagaag

SEQ ID NO: 79718 - RNA, 54 nt, Homo sapiens
cgccgcgggcagcgcgcggcccgggcagcagaccacacgaaggggcagaagagc

SEQ ID NO: 79719 - RNA, 75 nt, Homo sapiens
acccgaggccagaagccgcgcaaacaccgcaaggcaccgagcacaggcccggcaacccaccagcaacagaacagg

SEQ ID NO: 79720 - RNA, 79 nt, Homo sapiens
gccaacgacgcccccagaggaaacggcccacgggaccacagcagagaggcaagcaaccccggggaagaggccaggcagc

SEQ ID NO: 79721 - RNA, 80 nt, Homo sapiens
cggcgagacagccgaggcaggaagcccggcggacggaagacaggacccgcccacagaaagccagcaagaaaaacaggggc

SEQ ID NO: 79722 - RNA, 68 nt, Homo sapiens
aagaagcgacaagggagggaggcacacaaggaaggaacaacgacgagagagcagaaaaccaccacaag

SEQ ID NO: 79723 - RNA, 85 nt, Homo sapiens
cgccggcccccaagcgggagcgcgacacaacagccgggccgcccaccacagcccaccgggagccggaaccccgggccgaaccccc

SEQ ID NO: 79724 - RNA, 76 nt, Homo sapiens
ggggcagccgcgagccccgcaccccgagagcggagaagcccaacaaagaaccacggacagggcaggaccagaaaaa

SEQ ID NO: 79725 - RNA, 75 nt, Homo sapiens
ccaaaaagaaaccagcaacaaaaagaaagcgcgaaggcaaagcagaggaagaacagagaggaaaccagcacacac

SEQ ID NO: 79726 - RNA, 75 nt, Homo sapiens
aagaggcggacggggagcgaacgggacagcccacacccggcgcggagggggccaggaaaaccaggaaggcacaac

SEQ ID NO: 79727 - RNA, 72 nt, Homo sapiens
cgaaccaggacggcaagaaacgaaaagagacagcagggcaaaacgggccacacacagggcaaaaagaacggg

SEQ ID NO: 79728 - RNA, 73 nt, Homo sapiens
caagagaggaagaagaacgacccgcccggggcagcagggaacgcccccaagcccaaggaaacacggaggcccc

SEQ ID NO: 79729 - RNA, 82 nt, Homo sapiens
ggcggcccaccaacaggaacagggcagacgagcggaggacacccaacccgggaggggggaccccgcccagggcccagaggac

SEQ ID NO: 79730 - RNA, 91 nt, Homo sapiens
gagcagcgcgggcggcagcccgggggaagcgacaaaaggagccacggagaaagaaaaaagaaagaagcccgaaccggaaccggagaagaag

SEQ ID NO: 79731 - RNA, 91 nt, Homo sapiens
gcggcggagcggccggccacggaggagggcaccagccggggaaaggagcgcagcgcccgggcggaggagcagaaaacccaacacgacccgg

SEQ ID NO: 79732 - RNA, 75 nt, Homo sapiens
ccacagccaaggcgggagccacgggcgaggaggccgcggacgaaagaagaacaacaggaccccccacaagcacac

SEQ ID NO: 79733 - RNA, 58 nt, Homo sapiens
ggagacgcaacaggaaagccggcacagggcgggcagccccaggcccagagacggcgcc

SEQ ID NO: 79734 - RNA, 66 nt, Homo sapiens
cgaaaccgaacaaagacgacaggcgccaacccaccccagagggacaagacggacagaaacgaacag

SEQ ID NO: 79735 - RNA, 56 nt, Homo sapiens
gaaaggaaggcgaaaagagcaaaacaccaaaaccaagcaaggaaccagcgagcaaa

SEQ ID NO: 79736 - RNA, 78 nt, Homo sapiens
aaccagacgccagcgggacgaggaccgagaccgcggccgggaccgaggaggaagaccagcacaggacgcccgaaaccg

SEQ ID NO: 79737 - RNA, 80 nt, Homo sapiens
gccaaccaaagccgacaaaagcacgggaagggacgaggagcacaaccagacagggccaccgcaggggagagcaccgccca

SEQ ID NO: 79738 - RNA, 75 nt, Homo sapiens
gcccgggcaacgacggcgacaggaaacaggcgccaaagggacccaacagggaggaacaaccgcaaacagcgcaag

SEQ ID NO: 79739 - RNA, 80 nt, Homo sapiens
cgacaagccgcggcagccgcggaccaccgccgccaggccacagaccggaccggagcccgagagaccaccaccacacgacg

SEQ ID NO: 79740 - RNA, 67 nt, Homo sapiens
ccaacaacaacgcagaacacccaccaaagacccggcaccaacagcgaaagaggcagaggaagagcca

SEQ ID NO: 79741 - RNA, 58 nt, Homo sapiens
gaaaacagaaaagacaagccacaaaacgcccagaagcaaaaggaaggacacagacaaa

SEQ ID NO: 79742 - RNA, 90 nt, Homo sapiens
cggaccgggccgcgcacgccgcccaggcagaggggaggagacacgaagcgacgcagagccagaagggaggcagggaacacgcggaacaca

SEQ ID NO: 79743 - RNA, 82 nt, Homo sapiens
caggcgcagacccccaagaggagggggggccgaagaagccagggggaggaaagcagacagacccaccaagagggcgggagaa

SEQ ID NO: 79744 - RNA, 63 nt, Homo sapiens
gcaggcccgaacccccaggccacagagaggaagccccaggaccagcgggagcgggcacacacc

SEQ ID NO: 79745 - RNA, 74 nt, Homo sapiens
acgaggagggcgcgagaagacaaagccgccaccgcaagagaaaagcgggcccgagaaccaaagaagcccaccca

SEQ ID NO: 79746 - RNA, 76 nt, Homo sapiens
gagcacagcaggaggaggaacagagaagacagcgaggaagaaacgggaagagaagccgaaaacagaggccacagaa

SEQ ID NO: 79747 - RNA, 84 nt, Homo sapiens
ggacggaggaggccgcgccgagaaccgaccgaggcgaagggagggccgccccaaccgacgcaccagccggaggaggagggacag

SEQ ID NO: 79748 - RNA, 74 nt, Homo sapiens
gaggccacaccgaagaccaccagagccggaccaggagaacggcggcggcaaggaggcggaaaaaacaaagagag

SEQ ID NO: 79749 - RNA, 58 nt, Homo sapiens
caccgccgaggacccagcacaccgagggacggggggcccgggcgaaaccggaccgggc

SEQ ID NO: 79750 - RNA, 86 nt, Homo sapiens
gacgcccgaggacccagaggaaacccagccgccggggccccggcggcaggacccaaggccagccagccccaggcaccagcggacag

SEQ ID NO: 79751 - RNA, 77 nt, Homo sapiens
gcaggcccgcaggagagcgagaaggccagggaaacacaaggagaggaagggcacaggagaggcgcaaacaccgaagc

SEQ ID NO: 79752 - RNA, 66 nt, Homo sapiens
cgaggcgagagaggcccacacaggaagaaagccaaggaagagaaaccaccagagaagaggccgacc

SEQ ID NO: 79753 - RNA, 75 nt, Homo sapiens
aagccggaaagagggccacgcaaaaacagaacaacacccgaaagaggaagaagaggccaagagacagacaccaaa

SEQ ID NO: 79754 - RNA, 75 nt, Homo sapiens
cacgacagggaagaagcacaaggaaaaccaccgaccaccagacaacaggaacggagaaggaacaccacgcccagc

SEQ ID NO: 79755 - RNA, 68 nt, Homo sapiens
ccgggcgcgccggagcgcaggccccgaagggggacggaagcggcagcgggcagccggcccagcacagg

SEQ ID NO: 79756 - RNA, 73 nt, Homo sapiens
accggcaagacgccagggccagccgagaggagggcagcccagagccggaagccccagggcaccaacaacacca

SEQ ID NO: 79757 - RNA, 82 nt, Homo sapiens
agacggccaccggcgggaggaacaaaagaggaggagagaaagaaagccagcgcaacgagagaaccagcagaaaagaagccca

SEQ ID NO: 79758 - RNA, 78 nt, Homo sapiens
agcaaggagccaacggcccaacccaagagcgcacaaggagggggggaccacggcggggaagcgcgcaagacgcaacac

SEQ ID NO: 79759 - RNA, 58 nt, Homo sapiens
cgaggacgcggagcccagcaaggaggacaaagacacgacaccaaagagcccggagacc

SEQ ID NO: 79760 - RNA, 74 nt, Homo sapiens
ggggagccggaccgcccccagccgacaggggaaaaagaaaagggcgaagacccgaagcagcgcaggaacagaag

SEQ ID NO: 79761 - RNA, 80 nt, Homo sapiens
aacaaggacagagcccaacagaccacaaaaggacacaaccccaagcagacacagccccgggaccaaggacacgcagaccc

SEQ ID NO: 79762 - RNA, 61 nt, Homo sapiens
gcccgggcaaagccggcacaagggcccaacggaaccacacggccacacgaaaacgacggca

SEQ ID NO: 79763 - RNA, 70 nt, Homo sapiens
caccgacgaggggcccggcgcgccgggcgaggacgacaaaacggaacaagggcccaagaaacgaggaacc

SEQ ID NO: 79764 - RNA, 73 nt, Homo sapiens
gacggcgacgggcggccggcgcgaggcgagcaaagggcacaagcccccgaagacaagaggccggggagaccga

SEQ ID NO: 79765 - RNA, 75 nt, Homo sapiens
gggcgggagcagcagcagaaacagggaagcgagaaccaggaacgaagaacaaaggggaaaggcaacaagacagcg

SEQ ID NO: 79766 - RNA, 67 nt, Homo sapiens
aagaagggcgcgcgacaggggcaggcggcacaggagagaccccggccggacggccccaggaggaaac

SEQ ID NO: 79767 - RNA, 58 nt, Homo sapiens
acagcgaaaccccgagaagaacccgaagagcccaagcagccaagaaaaaggcaaaaaa

SEQ ID NO: 79768 - RNA, 82 nt, Homo sapiens
gagaggcagagcaagacgccggacacccacaaggagcagcggagcgagagaggaagacaacccccaccccacaccgcacaga

SEQ ID NO: 79769 - RNA, 78 nt, Homo sapiens
aaaggcagcacaaaggaccaacaggccagccaggaacagcgagcgcggagccagcgcccggcaaggagcgagcgggag

SEQ ID NO: 79770 - RNA, 100 nt, Homo sapiens
ggcacgagcaggcccgggcgcgacacccggagcccgaggcgcggcgaccacgagaagggaggcggagaagagaggaaccaggcaaggcaccgagcaaggc

SEQ ID NO: 79771 - RNA, 85 nt, Homo sapiens
ggacgggcagggagacagaagccaaacaggaggaggaagggaggagagcgccagaaagagcaaaacacagagacgcggccaacag

SEQ ID NO: 79772 - RNA, 80 nt, Homo sapiens
gcacacaccaaggagcagaagccacgagacacgggccgcgaaagcaagccgccaagacgggcccagcccggaaccgccaa

SEQ ID NO: 79773 - RNA, 74 nt, Homo sapiens
accggggagcgacagaagacaaacagcaaggggcaaaggccgccaaggcgagaagacaaacacaaggagggccg

SEQ ID NO: 79774 - RNA, 60 nt, Homo sapiens
cgcggcccggcccggccccgaggccggcaacggagacccaaggaagcgggcaccaacaga

SEQ ID NO: 79775 - RNA, 73 nt, Homo sapiens
acgcgaaggcccggagaaccaagaacccaccacccagcagcagggcacaagagcccaaaaggcagagcgagga

SEQ ID NO: 79776 - RNA, 68 nt, Homo sapiens
aaggggaaaaagagagaaagcaggagaggcaaccggaaagaacgcaagagcagaaccgggccaccgag

SEQ ID NO: 79777 - RNA, 76 nt, Homo sapiens
aggcggagccagccgaggggagaagagcccagagagcggcaccaggacgccgaaaagcgaccggacgcaggcacag

SEQ ID NO: 79778 - RNA, 73 nt, Homo sapiens
gagcgcggcagagcggcgagggggcgcggcccggcccggcaagaacggaagcacgggcggaggaaagcacaag

SEQ ID NO: 79779 - RNA, 73 nt, Homo sapiens
cacaggacagagggagaagaaaggacggcagacagaaagcacagaaagaggcagcgccaggccaacccccagg

SEQ ID NO: 79780 - RNA, 68 nt, Homo sapiens
acagcagcaacagcggcagacgggccccagcaccccacaacaggggaaccgagaccagagcacaacga

SEQ ID NO: 79781 - RNA, 83 nt, Homo sapiens
accgggacggaccgagaccggaccgagagcggaccgagagcgcgaaacgcacgagaaggcagcaagcaaagacggaggagcag

SEQ ID NO: 79782 - RNA, 90 nt, Homo sapiens
ggacgccgaggagggggacccacgcccggcaggagagacccagggagaacccaccacgagaggcaaaagccaggaagcgcagaaaaacaa

SEQ ID NO: 79783 - RNA, 81 nt, Homo sapiens
gcccagccccaagaacgggacacagcaccggcggccaccgggaagcacagcgaggccggaggcccggagaaggaacaagag

SEQ ID NO: 79784 - RNA, 80 nt, Homo sapiens
ggcagagaaaaaggccaccgagaggccagagcccaggccgaggcgaaaggagaaaacgagaagaaagcagaagcgaacca

SEQ ID NO: 79785 - RNA, 71 nt, Homo sapiens
gaaggaccaagaaccagaaaggggagcaagaagaaagagcagggaggagggagcgacaggaagaaagaaac

SEQ ID NO: 79786 - RNA, 36 nt, Homo sapiens
cccgaccggacaccaaacagggaagaccaaaagcga

SEQ ID NO: 79787 - RNA, 84 nt, Homo sapiens
ccaccacggggccacccgacgcggggaggcgcccgggagcgcggccgggacccaggaggaaaccagcagccgcaccgcccgaga

SEQ ID NO: 79788 - RNA, 35 nt, Homo sapiens
agacacagggaaagcggagggaaggaaccacacca

SEQ ID NO: 79789 - RNA, 75 nt, Homo sapiens
gggccaggaggacacgcgcagggcccacgacgagacaaccagagccaagccggagaccgagagacgccccacaga

SEQ ID NO: 79790 - RNA, 74 nt, Homo sapiens
ggagggccgagccagccgcggccggaggagcccccaggcccccaaaaggaaccagcccgagacaagagaggaag

SEQ ID NO: 79791 - RNA, 79 nt, Homo sapiens
aagacgccccaccacgaggccagcacgggaacgcgaagcgccaaagccagacaacgcggccaggaacaacagaagagaa

SEQ ID NO: 79792 - RNA, 78 nt, Homo sapiens
cacaaaagcaacacagggaaaagccaaccggcccgaagaacacagggccgagccgcagcggcccaccccgcacaacca

SEQ ID NO: 79793 - RNA, 62 nt, Homo sapiens
ccggcccacaggggggggcaaacccgagagaacggggggaccagcggcgacgccgggacgcc

SEQ ID NO: 79794 - RNA, 70 nt, Homo sapiens
caaggaggccccagcggaccgaacaggaacagggaagagccaggccggcggggcacgcccgaacggaccc

SEQ ID NO: 79795 - RNA, 73 nt, Homo sapiens
acggccaaccggcaagaccagacgggaacgggagacaagcgcagcgaggggacgaagggaacccgccgggcgg

SEQ ID NO: 79796 - RNA, 62 nt, Homo sapiens
caagaaccccacaggccgaggagcagagacagaagagcagcacaggggaagagacagaaggc

SEQ ID NO: 79797 - RNA, 59 nt, Homo sapiens
cagaaacggaacaccaaggccagcagcacgaggaaggaaaaccgcaacggacaacggcc

SEQ ID NO: 79798 - RNA, 46 nt, Homo sapiens
ggcgaggcagggccagcagcaggcgggagcaaaagagccaacaccc

SEQ ID NO: 79799 - RNA, 49 nt, Homo sapiens
cagcgaaacgcagcagagcgaagcgagaaaccagaagagacaccagccg

SEQ ID NO: 79800 - RNA, 75 nt, Homo sapiens
gagacggccaagaggagcaagcgaagccagccgccaccacaaagccaccgacacccacgagccgccgcacccagg

SEQ ID NO: 79801 - RNA, 80 nt, Homo sapiens
cagagagcgcggccggaggacagggagagaacagcacacagaggcgcaaggggaagagaaaagacagaagcaccaaacag

SEQ ID NO: 79802 - RNA, 65 nt, Homo sapiens
gaaggaccaagaaccagggaccgacagcaagaaaaggagaaaacaaggccgcgggcacacagcaa

SEQ ID NO: 79803 - RNA, 74 nt, Homo sapiens
ccaacgaacagaccgcccagaacacagagagagcgcacgccacgaggagcagggggggcgccgcgcgaagcacc

SEQ ID NO: 79804 - RNA, 75 nt, Homo sapiens
ccaaaggagcaggcagggccaacaggaacagccaccagcaggaacagaggagcggaaacgcaggaggagagagac

SEQ ID NO: 79805 - RNA, 59 nt, Homo sapiens
gcccagcccccgaaagcgggaacaggcaggaaggaaaggggaggcccgcacaggaggag

SEQ ID NO: 79806 - RNA, 36 nt, Homo sapiens
gcgggcggccggcggggacagaagcagcgaacaagg

SEQ ID NO: 79807 - RNA, 89 nt, Homo sapiens
gagaagcacaaaacagcagacccaagagcagcggaaaagaccagcacaggagaaagacagcaaagaaaaggagaagaaaggaaaaaaac

SEQ ID NO: 79808 - RNA, 72 nt, Homo sapiens
ccggaaagacgccaaaaacagggaaagggccagcacaggagagagggcaaaagcggcccaaaaggggccagc

SEQ ID NO: 79809 - RNA, 85 nt, Homo sapiens
gacacccaggaaggggacgcagaggaagccagaggacggggggaccagagggccgacagccgcccacacgcaagcgcagcaacgc

SEQ ID NO: 79810 - RNA, 78 nt, Homo sapiens
gcgcggggcaagaggaggcgcgaggacaagcccaaccagggaccaggccaaaaccagacgccacgccccacgggcccc

SEQ ID NO: 79811 - RNA, 60 nt, Homo sapiens
aaaagaagggaacccaaggagacaaacagaaagcacagaacgcccaaccggcccggagcc

SEQ ID NO: 79812 - RNA, 70 nt, Homo sapiens
aagacaagacgaagccaccgcagaaggggagacacaagggcacgaaggggagaagcccgaaccaacacaa

SEQ ID NO: 79813 - RNA, 73 nt, Homo sapiens
aaagcagccaaacagacccagcccccaacgaggaaggaagggcggaacaccaaccaggaccacccagcaagca

SEQ ID NO: 79814 - RNA, 83 nt, Homo sapiens
cgccagccccccgacgccgagcaccccagaaccgcccagcggcggaagaggcgacagccaccggccggagaacaaggaaaacg

SEQ ID NO: 79815 - RNA, 78 nt, Homo sapiens
ggccacaaagccccccggagacgcaaccaagagcgccccaaacccaagaaggaagcccagagcccaaagaaaaacagg

SEQ ID NO: 79816 - RNA, 78 nt, Homo sapiens
acaaaacccgagcacagaaaagaaaaggaccggagacccaggcgcgacggccggggccggcaacagcacagccaggac

SEQ ID NO: 79817 - RNA, 74 nt, Homo sapiens
gaagggcgaaagcaccaccggggcagagaccgggcacaaccagccagcaacccgcccgggccaagcaccgccca

SEQ ID NO: 79818 - RNA, 76 nt, Homo sapiens
gaccccggaagccagaaaggagaccggaaaccgagagaaacgaagacgaagaaacagccgcacacagaagaaaacg

SEQ ID NO: 79819 - RNA, 79 nt, Homo sapiens
caggagaaggcagagcggggcacccacccaaggcaccagagcgcgggcggagacccacggggagagacccagaagagcc

SEQ ID NO: 79820 - RNA, 36 nt, Homo sapiens
ccagaccgggcgacccgccggcaagcaagaaaaacc

SEQ ID NO: 79821 - RNA, 85 nt, Homo sapiens
gacccagagcccagggcaggagccccagaggcagcccagcagggcgaaaagacaggagggaggaacagacaccgagccagcaagc

SEQ ID NO: 79822 - RNA, 76 nt, Homo sapiens
aacgaggaaaggaaaaagccaggaggaaaaggaagagaacagcccagggacgcccggcggccagaagagggccggc

SEQ ID NO: 79823 - RNA, 108 nt, Homo sapiens
ggcgcagccgcgggcagaggcgggccgccgagcggacccggaccggggaggccggaagagcgggagcgggagccaggcagaaggccaaccaaccccaggaaaagccaa

SEQ ID NO: 79824 - RNA, 65 nt, Homo sapiens
ggacacagacagacgaagcaccgcgaaaacgcgaaacgcagcaaaggacccgcgaccggggcagg

SEQ ID NO: 79825 - RNA, 72 nt, Homo sapiens
gaagcaggaaagaacgacgccagggaggacgcagacgaggcacggagcaccaagagaagcgccagcaaccag

SEQ ID NO: 79826 - RNA, 69 nt, Homo sapiens
caggaagacacgcgacacccaaaaaggacgcaaggaaaagggcgggaaccacccccgaagcacggcgca

SEQ ID NO: 79827 - RNA, 67 nt, Homo sapiens
cacgcaccggccccaaagacaggccaacaccgcacccaggacccaagagaccagagagaccggcaga

SEQ ID NO: 79828 - RNA, 70 nt, Homo sapiens
ggcccaacaccccaacaagaacagggaccccgacggagagacaaagaagacggagggggggccagccacc

SEQ ID NO: 79829 - RNA, 60 nt, Homo sapiens
gcaacagagagacacgcacaaacccaggaacacggacccgagaagaagaagaagaagggg

SEQ ID NO: 79830 - RNA, 59 nt, Homo sapiens
ccggacgccggagaggcaccggaccggcagggccacacccagcacaccggcccggccac

SEQ ID NO: 79831 - RNA, 81 nt, Homo sapiens
aaagggaaggagaaggagggacgcaggcgcaggccagccagaggacaaaacccagccggcacaaaccaggaaaggaagccg

SEQ ID NO: 79832 - RNA, 78 nt, Homo sapiens
gcaggcggcccacggcagcgaggggaacgcccgcggacggcagggcgcgacaagaagcgcccgcccgacgagcggccc

SEQ ID NO: 79833 - RNA, 59 nt, Homo sapiens
cgaggcgaggcgaggggcccgacgcaagagccacaagggcgcagaagccggcagagccc

SEQ ID NO: 79834 - RNA, 81 nt, Homo sapiens
gagcgcgacggcagggcgaggcacggggagggacgaaggggccgaccccagaggcacaccacggagacagagacggcgagg

SEQ ID NO: 79835 - RNA, 66 nt, Homo sapiens
caaagagcaaagaagaggccgcaaagcgacaagagacagcaggcccaggacagacccacgcccaga

SEQ ID NO: 79836 - RNA, 83 nt, Homo sapiens
caaagccggccccggcaaggaggaaggggcaagagcgaaagccagggggcgaaacaaaacaaaaaggagcaaaaggagaaggc

SEQ ID NO: 79837 - RNA, 66 nt, Homo sapiens
gcgaaagacccaggccccaaccaaccgggcggcggcgagaaacaccacccgccaccccacagacca

SEQ ID NO: 79838 - RNA, 83 nt, Homo sapiens
gaggagaccaaccgcacccccgagaccccgagggaacagcacgcaaagagcggaccgagggcaccaccaaagaggaccagagg

SEQ ID NO: 79839 - RNA, 69 nt, Homo sapiens
ggagaagagagcaggagggcagcagagaacacgggcacacagggagagaacagcacacagaggcgcaag

SEQ ID NO: 79840 - RNA, 54 nt, Homo sapiens
gagccggccggcggcaaagccgccccacccccacagcccccggcaagcgcgcgc

SEQ ID NO: 79841 - RNA, 85 nt, Homo sapiens
cccccacaagaacgaagccaggacaggggaggggcgaccccggggcccggccagcacgaccgaggaggggcggacagcggaggag

SEQ ID NO: 79842 - RNA, 81 nt, Homo sapiens
ccccccaggaaccgacagaaccacaggagaaccccgcccaggaggcaaaaagccccgcacagagaccccgggcccccccaa

SEQ ID NO: 79843 - RNA, 77 nt, Homo sapiens
agacaagcagggaagcgcagagggccgaaacaaaaagaagcaccaagccaacaggcaggagacacacacaaggaacg

SEQ ID NO: 79844 - RNA, 71 nt, Homo sapiens
cgcgcaagccgcgagaaccaacccaaagggggggggggaggccaggagaagggcacacggcacccgacaaa

SEQ ID NO: 79845 - RNA, 72 nt, Homo sapiens
ggagaggccaggaaccaagcacaggacgaccacaccaaagaagggggccaccaagcaagcgagaagaagaca

SEQ ID NO: 79846 - RNA, 42 nt, Homo sapiens
ggggcccccagcgggaccaaggcaaggacggggacacaagac

SEQ ID NO: 79847 - RNA, 72 nt, Homo sapiens
caaccagcccgcgagaaaggcaaacaggcaacaggcccaagcgaggaccaggacgcaacccaccacgaagcg

SEQ ID NO: 79848 - RNA, 73 nt, Homo sapiens
ccaccaagagccaaagagcgagaggaaagggagagcaggacacgagacgcgggccggagagagaagccaagag

SEQ ID NO: 79849 - RNA, 118 nt, Homo sapiens
gagaggcagagaccagaggaccggaagcgaaagaaacggacagcccccacaggaaagggcaccaggggccagggaggcccaaccagagcgcgcgggccgcgggaagaaacaaagggaa

SEQ ID NO: 79850 - RNA, 75 nt, Homo sapiens
ggagccgcacgccacagcgaaggcgcgagggacaagagcagacgcagacaggaagccaggagagcagcaagggcc

SEQ ID NO: 79851 - RNA, 114 nt, Homo sapiens
cacccagaggaccgcggcgaagcaaaggaacgcgccggaagaaaaggccgcgaccccgcgccaggaggagcagcgaacgaacggagcgcgaggagaagaggggaggaggcggag

SEQ ID NO: 79852 - RNA, 77 nt, Homo sapiens
gccggcgaccacggacccagcccagccgcagaaggccaaacgaccaagaaagcgggacgcggaaaacgggacccgca

SEQ ID NO: 79853 - RNA, 50 nt, Homo sapiens
agccagaaggccgcgggcccccaagcaaggacgagcggaacacggggaaa

SEQ ID NO: 79854 - RNA, 78 nt, Homo sapiens
ggcgggagcccagagagaacccgggagaaaggcggagaagaggaaggcccgaacaagacaggaacgccggcccggacg

SEQ ID NO: 79855 - RNA, 62 nt, Homo sapiens
cgcaccacgggaggccaacaggggcgcccaagaagccaaaagggaagcacgagaagcaggca

SEQ ID NO: 79856 - RNA, 65 nt, Homo sapiens
aagacacgggcagcgaacggaagcacgggcccgggacacccagacagagagagcgcacgaagaag

SEQ ID NO: 79857 - RNA, 43 nt, Homo sapiens
acccgggaaggaggcgacaggaggagcgagggcagaaccagca

SEQ ID NO: 79858 - RNA, 51 nt, Homo sapiens
caagggacaacagaaggcccagagcgcggcccaggggccaacggacagagg

SEQ ID NO: 79859 - RNA, 75 nt, Homo sapiens
aggccggcagcgagaccccggggccaagaagcggggcggagagaagcgcagaaccggccgaaaagcacaaacagc

SEQ ID NO: 79860 - RNA, 73 nt, Homo sapiens
cgcgggcgcgaagaagaggaaacaggaccgcccgcaccaggaggagcagggccacaggccaaagcccaaaccc

SEQ ID NO: 79861 - RNA, 74 nt, Homo sapiens
agagccagagagagcggacgacagaacccggccgacccggaccaacaaccccaaggcgggccacgaaaacgcca

SEQ ID NO: 79862 - RNA, 69 nt, Homo sapiens
ccaagcggcgagacgcaggaggacaagcagaccaggaccggagaaaacgggacaacaccgaccagaaaa

SEQ ID NO: 79863 - RNA, 54 nt, Homo sapiens
ccacgaacacgccggagccgccaggaaacaccagacacacccccagaccggacg

SEQ ID NO: 79864 - RNA, 43 nt, Homo sapiens
gaccaaccgcaggcgcaaagcagagcaaagcggcagccccgga

SEQ ID NO: 79865 - RNA, 58 nt, Homo sapiens
cggcagggagcgcgggggcccgcgcagcagcgaccacgagagagcaggagacggaggg

SEQ ID NO: 79866 - RNA, 71 nt, Homo sapiens
ccccccccccccccccccccggggggcccccagccgcagcccggagggggaagaagaacggacacgcagcc

SEQ ID NO: 79867 - RNA, 76 nt, Homo sapiens
gcacgcacggaagccggacaaagaagaggcggaagggaaagaacgcacaacacccgaacaaaccacggagggaggg

SEQ ID NO: 79868 - RNA, 78 nt, Homo sapiens
agagaagaagaagacccgggaaaagagacacaaaccaggaaagcgacagagccaggccccccagcacagcacacgcga

SEQ ID NO: 79869 - RNA, 89 nt, Homo sapiens
aggaaaacaagcagggccccacgacacaagggcggcacaaaacccacgcaggggggaccggccagcacggaccaccccggggcaagcgc

SEQ ID NO: 79870 - RNA, 62 nt, Homo sapiens
agaggccaacgcaggggagaaaccaaaggagaaacaccccagacaacccaagaaaaggcaac

SEQ ID NO: 79871 - RNA, 51 nt, Homo sapiens
acaaagcacgcagaggagacaggaaaaggccaaagacggcaaaggaacacg

SEQ ID NO: 79872 - RNA, 66 nt, Homo sapiens
cccccccccccaagggaccaccacacgaaaccaaggaaaaaccgggaacagcagaggccagaggaa

SEQ ID NO: 79873 - RNA, 49 nt, Homo sapiens
cacggaaaaaccacagaaagcagggccaaaaacaaacaaaaaagaaccc

SEQ ID NO: 79874 - RNA, 73 nt, Homo sapiens
gaagccaaagaaacggaaaaaaggaaggaacaggggaagaggcgcaaaggcccgggcggaggcaaggcggacc

SEQ ID NO: 79875 - RNA, 72 nt, Homo sapiens
gaacgggaggagggaagaaaagcgccgaccggaaaacagcaccaggaggcagcaacacgcagaggggcgggc

SEQ ID NO: 79876 - RNA, 74 nt, Homo sapiens
gaaggaccaagaaccagagagcgaccaaacccccacaacaaggacaaagggacccaaggaccagcagcacgcgg

SEQ ID NO: 79877 - RNA, 71 nt, Homo sapiens
gcacacaacccccgaaagcggccaagggcagggagaagggacaacacagaacacagaccagggcaggacca

SEQ ID NO: 79878 - RNA, 65 nt, Homo sapiens
ggaagcggagaaccacaaacgagcggggggcggccgagccccgggagggaagggaacgccagcga

SEQ ID NO: 79879 - RNA, 81 nt, Homo sapiens
ggcagccgaggccgcgaacgcacaggagccaagacaagcaaacccaggaacacccggccggcccggcgccccggggcccga

SEQ ID NO: 79880 - RNA, 71 nt, Homo sapiens
ccccgcgccgccgaccccccggcgccgcgccggcggcgagccagccgccgcgccaagaaacgcgcggccgg

SEQ ID NO: 79881 - RNA, 78 nt, Homo sapiens
acccccaaagccacaaaagaggaggcaggaccgggcaaaaaggcagcaccccagagacacagggaagaaacccaccag

SEQ ID NO: 79882 - RNA, 74 nt, Homo sapiens
gccgccaccgggaggcccagggaagaaaccagaggacggaaccggcacagacacaaaccacaagacacaacgac

SEQ ID NO: 79883 - RNA, 58 nt, Homo sapiens
gccggcccgcgcccagcagaggaggaagagggagagggagaaccacccgcagcccggg

SEQ ID NO: 79884 - RNA, 83 nt, Homo sapiens
cccacacaggacgcggacaagggcggcagggaaacagggcggcagcagcaggaggacggacaacccacacaggagagaccaag

SEQ ID NO: 79885 - RNA, 79 nt, Homo sapiens
aagaaaacaaccaggcaaagacacagcgcacgaaggcagcccaagagaacgaaagcaaaaagcgccgaccagccgcaaa

SEQ ID NO: 79886 - RNA, 93 nt, Homo sapiens
cagaaccaaccaaaacaaggacagacagaagccaaggaggggcacagaggcaggaggagacacacagccccagacgggaggaaaaaaggaagg

SEQ ID NO: 79887 - RNA, 81 nt, Homo sapiens
ggagcggccaacggcaggagccacagagcccgaccggcccacagccacccgacggccacaggagggcacaccgagccacag

SEQ ID NO: 79888 - RNA, 75 nt, Homo sapiens
cggaaacacccaacaaggaagcgacaagaggcagggccggcagacagccggaggcagccgagacccagaccccaa

SEQ ID NO: 79889 - RNA, 76 nt, Homo sapiens
cccaccgcaggagcacaacaagaggccagcccaggaaagaccacagcaagaccacgcccccagccgggggaccagg

SEQ ID NO: 79890 - RNA, 67 nt, Homo sapiens
gagaagagccggccagggaggaagaagccaagcaaacagagcgccagaggccgggcgaacagcaaaa

SEQ ID NO: 79891 - RNA, 78 nt, Homo sapiens
acggcccggggcaaggcaacgaagagagcccccagccccaggaggggcggagcagcccgccagcccagccccccccag

SEQ ID NO: 79892 - RNA, 73 nt, Homo sapiens
ccgaagaagacggagggaaaaagaaagagaaccacaaaggaccaggccaagaggaggccgacccgccacgagg

SEQ ID NO: 79893 - RNA, 69 nt, Homo sapiens
cacacaggaggggacccagggcacccacgcacagagagacgacaaaacaccggggcccacaggacagcc

SEQ ID NO: 79894 - RNA, 44 nt, Homo sapiens
ggaagcagcacgagagcgggacggaaaaaccggacaaccagcca

SEQ ID NO: 79895 - RNA, 76 nt, Homo sapiens
cagaacgcccagccaaagaaacaagccgggaaagggacaagaagggcaaagccgaaggaaagaccaccccagaaca

SEQ ID NO: 79896 - RNA, 56 nt, Homo sapiens
ccccgcgaggacgacccccaaaccagccggcgggcgccacaacggacgacgaaaac

SEQ ID NO: 79897 - RNA, 34 nt, Homo sapiens
cgaaaaaagcagggaagaagccccccccccccac

SEQ ID NO: 79898 - RNA, 118 nt, Homo sapiens
gccggggggcgccgacccccaagcggaggagcgcacggacacgaggagggcgcgaagaaccagggccaggccccccaaacagccaagagaaggcacgggccggcgccaggaaaccgcg

SEQ ID NO: 79899 - RNA, 86 nt, Homo sapiens
ggggaggccggggccggaggagggggggccccgcggaggccgagaggcaaggaggcacgcacagaggcgggcgcggccagagcggc

SEQ ID NO: 79900 - RNA, 73 nt, Homo sapiens
aagagcagagagaaggcagggcaaaccagaaagacgaaggacaggagaaacaggggccaaaaaaccaaaggag

SEQ ID NO: 79901 - RNA, 61 nt, Homo sapiens
ggacaggcagagcccgcgggcaaggaggcagggccggcagacagccggaggcagccgagac

SEQ ID NO: 79902 - RNA, 94 nt, Homo sapiens
caagcggggagcgcccgcgacagaggagggaggaaaacaaccgagggcagacagggacaggaccagaaggagagagagacagagggaaccggca

SEQ ID NO: 79903 - RNA, 83 nt, Homo sapiens
cggagggcacaccagagggacggagaaagaagggccaaggcggacagcccagaccccgagcggacgaccgaggcacagcccga

SEQ ID NO: 79904 - RNA, 75 nt, Homo sapiens
gagcacgccacccccacccgcacaggaccaaggggccgcaaggccaggcgcgcagaggcacccaacggcacagac

SEQ ID NO: 79905 - RNA, 69 nt, Homo sapiens
gcagacaaaaaaagcaggaggaaaccccacccaaccagaagcagaagagccacgcaaaagagacccagc

SEQ ID NO: 79906 - RNA, 86 nt, Homo sapiens
gccgccaggcagggacgggagagaggccaaaggagacccggcccccagggacagacccggcgaagcaggacgggagcggcccgagc

SEQ ID NO: 79907 - RNA, 71 nt, Homo sapiens
gcacccaaggaacagacaacaagaaaaaagaaaaccagggaaaccaggaggcaaagccaaccacgccgaac

SEQ ID NO: 79908 - RNA, 71 nt, Homo sapiens
caagcggccgagccgaggaaccccgaaagaagagcgaagggccagaagcccccaaagagccaccagcggca

SEQ ID NO: 79909 - RNA, 74 nt, Homo sapiens
gaacagccgggaagccaaaccagcaaaacccagaaagacggagaaaaaaaaaaaaaaaagcagagggaaaacca

SEQ ID NO: 79910 - RNA, 113 nt, Homo sapiens
gaagcggcaggccccgaggacgcccgacggcacaaccagcaggaggacccagcgagggcgccgaaaagaaccaaccccgggacagcccacagaccgcgggggcccgaggacac

SEQ ID NO: 79911 - RNA, 62 nt, Homo sapiens
cggaggagcgcagcagcccaccgcgcaggccacgaaaccccggaacgacgcagagggcagcc

SEQ ID NO: 79912 - RNA, 83 nt, Homo sapiens
gccgcccagccaaacaagaggacaagccgaggcgggagccgggcaggaggaaggagccccccagggcgggaaccagacccacc

SEQ ID NO: 79913 - RNA, 79 nt, Homo sapiens
ggcgacgccgagcacgccggacaaggagaggagaccgccagagcggaacgaccccagagcgagcccgcagcagcccaga

SEQ ID NO: 79914 - RNA, 44 nt, Homo sapiens
gacgaagccacaaaagagcaagagcccagaggccacaggacgaa

SEQ ID NO: 79915 - RNA, 74 nt, Homo sapiens
aaaaggccagaaagaggagcagagacgccggacaggcccccgcgggcgcacacaggaaggcggagggaagaagg

SEQ ID NO: 79916 - RNA, 76 nt, Homo sapiens
gaaaagcccacgagcacagagggccccagagggcaggcaccccggaggcggccgccgagacggcggccacgcgcga

SEQ ID NO: 79917 - RNA, 77 nt, Homo sapiens
cggacaccgggaacggagaggccacgaagacggcaaggaggaaaggaagaggaagacggcaagaagcgaaaaagacg

SEQ ID NO: 79918 - RNA, 45 nt, Homo sapiens
gcaccccgaggcccgacccagcaaagccgaggcgcaccaggacga

SEQ ID NO: 79919 - RNA, 74 nt, Homo sapiens
gaaaggagggaccgggcggggaccggaccccgccccgcaacgcaaggggacccaaccgcgccacaaagcgaaca

SEQ ID NO: 79920 - RNA, 74 nt, Homo sapiens
cggagaagcgggaggagaccacccaaacgcggcacgggaggaaggcccgccgaaggagaagggcaggaagaccc

SEQ ID NO: 79921 - RNA, 76 nt, Homo sapiens
gggcggaagcccgccccagagcagggagaacacaaaacaggccaaaagggcagaaaacaaaagacagaagacgcag

SEQ ID NO: 79922 - RNA, 78 nt, Homo sapiens
ccgaaagcagaagaaaagggacgcaagaaacccaggacgagaacagcaacaggccagaagcggcgacagaaaagccga

SEQ ID NO: 79923 - RNA, 81 nt, Homo sapiens
gggaaagaaggcaaaacacggagagcagcccgagcccaggaccaacagagcccaccggacccccagggcaacggccaagaa

SEQ ID NO: 79924 - RNA, 76 nt, Homo sapiens
accgggcacaacccccagcagagggccacccgccccaaggaggcgaccgaagagaaaccaaaacaccagagaggca

SEQ ID NO: 79925 - RNA, 79 nt, Homo sapiens
ggacaaaaggaagcaggggagggccaaggaagaaagaagagaacaaagaacgcacaaggggagccgccaccaaaagcag

SEQ ID NO: 79926 - RNA, 73 nt, Homo sapiens
accacagggcaggaggaacaaaggcggaaacgaaggggaggacacagaaggccggagcaaggaagacagaacg

SEQ ID NO: 79927 - RNA, 84 nt, Homo sapiens
cggaggcggcgagggcgagccgcaccagcaggcagcggcccggggggacgggcccaggcagaagcacagccccccgaccgccca

SEQ ID NO: 79928 - RNA, 80 nt, Homo sapiens
acaaacgcgagccgccaagcaacagccacggaagaaagcaggcaagagcaacgaaccaaagcaaaggaggccgggggaag

SEQ ID NO: 79929 - RNA, 57 nt, Homo sapiens
cgcaaaaagaagcacggcaccagagaagcacaggggggggcccacgcggaggacgca

SEQ ID NO: 79930 - RNA, 70 nt, Homo sapiens
agagcgcggagcgggcggagcggcgagagcccccacggacacaagcgggacggaagaggcccggcgaccg

SEQ ID NO: 79931 - RNA, 84 nt, Homo sapiens
ggaggcgcaggagccggcagaggacacagaaaagcccacgaggaaaaacggccaacaaaaacacagcgcagacggacagaaaca

SEQ ID NO: 79932 - RNA, 41 nt, Homo sapiens
gccgcgcaagcccccaaagccagaagcagaggaggagggcg

SEQ ID NO: 79933 - RNA, 84 nt, Homo sapiens
gaaaggaggaggaaccggagaccccgaaaacggaagcgcagggagaaggaagaggggaaaaggccggggggggcacagagcccc

SEQ ID NO: 79934 - RNA, 80 nt, Homo sapiens
aggaacccccggcaagaagcggcggggaccgaggacaagcagaccggaagaccgacggaagaccacaccccgagggagcc

SEQ ID NO: 79935 - RNA, 78 nt, Homo sapiens
cgaagcagcaaagaccagcaggacgacacaaccaccggaacccgccgccaccccggacagaaggcacgggggcccgca

SEQ ID NO: 79936 - RNA, 75 nt, Homo sapiens
aacaaaggagaacaggaggacgcaggccaaacaaaacggaccgagcaccgagacagaagacacccaagagacgga

SEQ ID NO: 79937 - RNA, 80 nt, Homo sapiens
cccggaggacaccaccgcacagcgaccacccggagcgcgcggcagagaggacccccaggcccggggcccggagccacagc

SEQ ID NO: 79938 - RNA, 87 nt, Homo sapiens
aggccaggcggccgcccgggagcgagcggaggagcaggcgccggagccccaaaaacgacaaaacaacgaaaagggaaaaggaagaga

SEQ ID NO: 79939 - RNA, 69 nt, Homo sapiens
gaccaacagggcggaacagccacagcgcaagccggcacacagggagaaaagaggacagccaacccccaa

SEQ ID NO: 79940 - RNA, 76 nt, Homo sapiens
ccagccgcagaaccaccaggcagccggcccaggccccccagccacccagccccaagagggagcgcgcgcgcccgca

SEQ ID NO: 79941 - RNA, 131 nt, Homo sapiens
cgagaagccgcagcaagcgggcggcaaagagagaagagagcagacagaacgacaagacagacaccagacaccaacgaaaggaaaaaagcaaagaagagccacccaagaaagagccgccgggcacccaacca

SEQ ID NO: 79942 - RNA, 73 nt, Homo sapiens
acacccggcagaaggacgagacagaggcccggacgaggcaggccggaaaggaaaaacaccagaacggaaacag

SEQ ID NO: 79943 - RNA, 46 nt, Homo sapiens
cggggcacgcgcgccccgcgccacaggaggacaggaagcggaagaa

SEQ ID NO: 79944 - RNA, 77 nt, Homo sapiens
aaaaaacccagagaaaccagaaaaagacgacgcccggaagaggcgaaacggccaaagaggaaagagacagcaacaga

SEQ ID NO: 79945 - RNA, 77 nt, Homo sapiens
aacaccacccgagagccccaagacaagggaggcgaggacggacaaaaggaaacggacgggaggccagccagcagaag

SEQ ID NO: 79946 - RNA, 73 nt, Homo sapiens
gcggcggcccagcaagagaaaagagcagacgccacggggccgcgccaagccagaggggagccagaggcgaacc

SEQ ID NO: 79947 - RNA, 81 nt, Homo sapiens
acaccaggcacccgggcccagccgggaacccccacgcggccagcgaaaacgcccaggaagagccagggacggagagaaaaa

SEQ ID NO: 79948 - RNA, 69 nt, Homo sapiens
gacagacccagcagaaggagggccgcggcagaaaccgcaggcagaagaaacacaagagcagaagcaagg

SEQ ID NO: 79949 - RNA, 73 nt, Homo sapiens
cgcagggcagcggcccccgcccgcaggaggacagcgaacggaggagcgacggccagcgcgcacaggcagcccc

SEQ ID NO: 79950 - RNA, 74 nt, Homo sapiens
ccggcgcgcccgcgggaccgcacgaccgccggagccaggccgagaaagggaggagacgccaggacgcgcaggag

SEQ ID NO: 79951 - RNA, 68 nt, Homo sapiens
aaacggagaaggaaacaaccccaaggaccagggacgaacgacacacaaaacaaaacgaccgaagacaa

SEQ ID NO: 79952 - RNA, 70 nt, Homo sapiens
acgggccaacccagccgccccggaccggcagaagggcgggaggaccgaggagagcacagagcaacgaaga

SEQ ID NO: 79953 - RNA, 37 nt, Homo sapiens
agaaggaaaagagccggagaagaggaaaacggccaca

SEQ ID NO: 79954 - RNA, 74 nt, Homo sapiens
gaacaacaccgcacgagaaggaagaaccgccaaaaagagggaaaaacgggcgccaggaacccggacagcacaga

SEQ ID NO: 79955 - RNA, 55 nt, Homo sapiens
gccgggccggccagcgccggaaaccaacaaccaagaaaacagagaacaaaacaag

SEQ ID NO: 79956 - RNA, 67 nt, Homo sapiens
aacaccggcagccggagccgcccgacaccggacggccaccgcccgagaagaccccgaggagcacagg

SEQ ID NO: 79957 - RNA, 76 nt, Homo sapiens
ccgcccaccggcacagcggaccccgcccgaaggcagcaggggacacgaggagaggagagggacaccaggagcagaa

SEQ ID NO: 79958 - RNA, 65 nt, Homo sapiens
gacaaaagcaccaaaacgcggcagaacggaggcaggcagcacgagacacaccacaagagggacag

SEQ ID NO: 79959 - RNA, 71 nt, Homo sapiens
gcaaggaagagaggcgggaagaggacaggcccacggcggcagaagcagcagggaaaaaggcacacaaggag

SEQ ID NO: 79960 - RNA, 74 nt, Homo sapiens
aacccgcgaaaagagaaagaagaagaacccacaagagccccagaaaagagcagagaccccaacaggcccgacca

SEQ ID NO: 79961 - RNA, 82 nt, Homo sapiens
gacccgggaccgggccccccgaaccgggcagccccagcacccgacaggaggacgcccgccaggggagcagacagaacacccg

SEQ ID NO: 79962 - RNA, 56 nt, Homo sapiens
aaaaacacgacaaaggagaaagacagcaaagaaaaggagaagaaaggaaaaaaaca

SEQ ID NO: 79963 - RNA, 84 nt, Homo sapiens
cccggggaagagaccagcgcagacaacgccgacgagaggacgaacaggcaaccaacacaaaaggccggaccaggggggagagcg

SEQ ID NO: 79964 - RNA, 85 nt, Homo sapiens
agcaacccagccccgaggggcagcgcgcacccgcacccgcaggccgagggacggccaagaagcgcaagaaccaccgcgcccaggc

SEQ ID NO: 79965 - RNA, 73 nt, Homo sapiens
accagcaaaggcccgcaaaagagggggaggcccaagaagagcacaggagaccaacgcccccgacaaacaagac

SEQ ID NO: 79966 - RNA, 83 nt, Homo sapiens
gcccgggacgggaagggccaaggaacgaccaaccaccccagaggaaagccaggcccgcggggacagcggccgaagccagagcc

SEQ ID NO: 79967 - RNA, 81 nt, Homo sapiens
ccgaagggccgggaggggcaacaaggggcccgccccaccgggggccaccccagggaggagaagagggacccagaaggcgag

SEQ ID NO: 79968 - RNA, 55 nt, Homo sapiens
ccaggcaaacagccacaggacagaaaacaccgaggaaagaccagcacaccagccg

SEQ ID NO: 79969 - RNA, 80 nt, Homo sapiens
cccccgccggagcgcccgacccgcgggccgggcgcagccgccgccccgccccagaagaaacagaccaccccaggaaaaga

SEQ ID NO: 79970 - RNA, 72 nt, Homo sapiens
aacgcggcagcccccgccaggcccaccaaggggagaagcccgacagagaaaggagaaaaggccgacggagag

SEQ ID NO: 79971 - RNA, 36 nt, Homo sapiens
gaaagcaacgaaaagagaacagcaaccaccgaaacg

SEQ ID NO: 79972 - RNA, 86 nt, Homo sapiens
acccggcggagagcggccccggcacgccggcgcccgcaccccggggcccaggaagggcggcccagggaccgggcggccacaagggg

SEQ ID NO: 79973 - RNA, 68 nt, Homo sapiens
gagacccccagcgcgcgccccgcccccccccagagcaagcggccgcgagaaccgggcagagcagcccg

SEQ ID NO: 79974 - RNA, 62 nt, Homo sapiens
gaaagaaggaagaaaacacaggagccggagcagaagcaaagagagcagggccggggaccggg

SEQ ID NO: 79975 - RNA, 83 nt, Homo sapiens
gaaagagcggaaaacgggccaaagcaggaaacgcccagaagcaccgagcgagagcgggcagcccagcagcagaaagaaaacag

SEQ ID NO: 79976 - RNA, 70 nt, Homo sapiens
caaaaagaaagcgcgaaggcaaagcagaggaagaacagagcaagccggggaagccccgagcaaccagcag

SEQ ID NO: 79977 - RNA, 77 nt, Homo sapiens
acgccgaccgagagacccaggcacccagggaaacgagaggggagaaggggccaccacagagcccgcagggacacagc

SEQ ID NO: 79978 - RNA, 61 nt, Homo sapiens
gaagccccgccgcgcgagccagcggaacgaaagagggaaaccgcaggaggaccaacggacc

SEQ ID NO: 79979 - RNA, 81 nt, Homo sapiens
cgggaacacggagaccgacaacgacgcaccgcgcggccgccggacagagaagacgacagaaagaaaaaagaaagagaagaa

SEQ ID NO: 79980 - RNA, 84 nt, Homo sapiens
cggaggagggacccacgaaccaggagcaggcgagccgacggggcgcaggaggacagcaggacgaccgggcagcccgacacaaga

SEQ ID NO: 79981 - RNA, 80 nt, Homo sapiens
ggacgcccggcggccggggagccggcccaagcgggcaggaacagagcgagaggacagccccagaaaagacacaccagaag

SEQ ID NO: 79982 - RNA, 83 nt, Homo sapiens
cggcggcgaggaaagcaggaggaggggcggcggcgggaagagagggccccaaggaccgagagccccagagcagagccaggcaa

SEQ ID NO: 79983 - RNA, 74 nt, Homo sapiens
acgaagagcaaaggcagggagcaagacaggagaggagcggaggaccagaagaagcccccccaaccgcggaaccg

SEQ ID NO: 79984 - RNA, 79 nt, Homo sapiens
cagcaccgggagaaacaacaacgcacacgggaggagccaacagcaggaaggcagggcagcgcaagaccccgcacggaag

SEQ ID NO: 79985 - RNA, 82 nt, Homo sapiens
gaccaggcccgccacaccccggcgccggaaaggcagccaaaggggaggacgcgagcggaagagaagcaaaaagacaaggagg

SEQ ID NO: 79986 - RNA, 68 nt, Homo sapiens
gggggcagccagcccaccacagggggggcgggacagacaaaacggaaagaacagcagagaacaaagga

SEQ ID NO: 79987 - RNA, 64 nt, Homo sapiens
gaacagagcacacccccggggagaacccaagaaggcagaagccagccccgcaggccgccacccg

SEQ ID NO: 79988 - RNA, 79 nt, Homo sapiens
agggacaagcccagacaaggcaagcaagacagggagaagaggagaaggcagagcccccccaggcagaagcccgagcggg

SEQ ID NO: 79989 - RNA, 70 nt, Homo sapiens
ccaaggaccaagaagaccaaaacaaagccacggaaaaacgcccggggaaaagcagggcggccagagcagc

SEQ ID NO: 79990 - RNA, 79 nt, Homo sapiens
acggcaccagcacaaggcacccccaacagcgcggacaccagggccccggaacgcggaaaaggaacagaagaggaaccga

SEQ ID NO: 79991 - RNA, 75 nt, Homo sapiens
ccccggaggccccgcccggggaccccagcacccacacagcagcggagccaaggacacgggcccccggccaccgcc

SEQ ID NO: 79992 - RNA, 73 nt, Homo sapiens
gcaccaggccaccgccacgggccgagacacgcagcggcggccagggaccacaacaaggcggcaggagagaagg

SEQ ID NO: 79993 - RNA, 89 nt, Homo sapiens
gacgggcccggcggcggcgagccgcgcgcgcagccgacgcgggaagaagcgggcgcgggcagccgcagggaggagaagaagagaaccac

SEQ ID NO: 79994 - RNA, 74 nt, Homo sapiens
gcccccgagggcgggaacaggaggaccacagacggccgccggcaaagaagacaaaccccaggccacaagagaaa

SEQ ID NO: 79995 - RNA, 73 nt, Homo sapiens
gagagcgggccagcaaacccgcccgagggcaccacgccaccgagagagacaacaggcacaaagagagaaggaa

SEQ ID NO: 79996 - RNA, 80 nt, Homo sapiens
gcaaggaaaccgggggcaccggggaagagagggcagacagaaggaaacagcaaggcccgagcggagggaaacgccgaagc

SEQ ID NO: 79997 - RNA, 75 nt, Homo sapiens
ggggaggaagcaacacagaagagacaacagccacaagggacaaaaggaagacaagggagaagcacacaggagaaa

SEQ ID NO: 79998 - RNA, 64 nt, Homo sapiens
ggacggggaccgcacacccaagccggccccgagcgaggcaccggacccgacacccccggcacca

SEQ ID NO: 79999 - RNA, 51 nt, Homo sapiens
gaggaagcaaagccaagggaagaaagcacgggaaaaggccgggcccacagg

SEQ ID NO: 80000 - RNA, 80 nt, Homo sapiens
gggagacaaggacgaaaaccaaacaagaaccagagacaaacgggcaaggccagcagagcccaagggcgccagccaccacc

SEQ ID NO: 80001 - RNA, 77 nt, Homo sapiens
aagggagccagacagaccagcgaaccgggacacaggagaaagagagcacaaaggagccgaaaggaggggcagcccgg

SEQ ID NO: 80002 - RNA, 85 nt, Homo sapiens
cggaggaacaccaaaggaaaaacaggacccagaaagagacagaagaagaggaagccaaggggacacaccgcccagcaggaccagg

SEQ ID NO: 80003 - RNA, 64 nt, Homo sapiens
ggacacaagacccgcgcggccacgaccgggaggccccaccgccacccggcgcggcccacaagac

SEQ ID NO: 80004 - RNA, 85 nt, Homo sapiens
ggcacagcacaccaggcaccaagccgacaccgagacaagccagcgccagggagcacaaccacaagcccaggagagcccaggacgg

SEQ ID NO: 80005 - RNA, 75 nt, Homo sapiens
caaggccggaaggaagggaaaccgggggccccggacaacccgagcagaagacgaccccgacgcaggccaggagcc

SEQ ID NO: 80006 - RNA, 60 nt, Homo sapiens
gcggggagcggagccaggccccgcaggggccaaggcgacagcaaaacggagaaagaggag

SEQ ID NO: 80007 - RNA, 77 nt, Homo sapiens
gccggagcggccggagcgaggcacacaagcgcaccagccaaccgagaacaagaacccagccgggccaacagaccagg

SEQ ID NO: 80008 - RNA, 62 nt, Homo sapiens
caccgcccccggcccgaccagggcggccaccgagaggaagcgaacgaacaggccaaaggacc

SEQ ID NO: 80009 - RNA, 78 nt, Homo sapiens
acccaccaacagcagggaccagaagacacggaacggacaggcgaagcagagaagcccaaaaaggcaaaaaagcagcaa

SEQ ID NO: 80010 - RNA, 71 nt, Homo sapiens
ggaaagcgaaggaaagagccaaagagggaagcccaacccagaaaggaagcgaaagggggcagacagaagag

SEQ ID NO: 80011 - RNA, 80 nt, Homo sapiens
gaagcgcacgaaacaccaagagccagagaagaggcagaagggcaaacaggagcaggccaagagcaggccagaagcaacga

SEQ ID NO: 80012 - RNA, 127 nt, Homo sapiens
gccaggaacagcaggaagaccgggaggaaagacagcggcacacgggggagccggaaacaggaaccaggcggacggaggaagccccaagaccacaaagacaaaaccagcccgagcacacaacccacac

SEQ ID NO: 80013 - RNA, 62 nt, Homo sapiens
aggaggaccaggcagcacaaccgccagaaggaagacaaggggggagcagccaccccggaacg

SEQ ID NO: 80014 - RNA, 78 nt, Homo sapiens
gcacaggagggcgcaagggcccaaggcgacccaggacagagagcggcgggccaccgagagggcaggcggcaggagagg

SEQ ID NO: 80015 - RNA, 80 nt, Homo sapiens
cgggagcggcgaaaaaacccgagaggaaaaggcccggcagggcgcccccaagcccacagcgaagaagggccacccccgac

SEQ ID NO: 80016 - RNA, 74 nt, Homo sapiens
aggacggcgcccacccgccggagcagcccgaggccccagccagcgaacgagagggccaagccggaagaagccag

SEQ ID NO: 80017 - RNA, 64 nt, Homo sapiens
cagaagggaggggcaagagccaccagaaggacccgggaacggacgcgggacacgacaagaaaaa

SEQ ID NO: 80018 - RNA, 70 nt, Homo sapiens
aaaaaccggcacgaaaggggcacagaaaggcgccacgggggcaggaccgccagaacgcgcgggccaggaa

SEQ ID NO: 80019 - RNA, 77 nt, Homo sapiens
aaaaacaacccaaccacggggaaaaggcaaaaacccacaccgcaacccagcgagagaaagacaccccagaacccacg

SEQ ID NO: 80020 - RNA, 71 nt, Homo sapiens
aaggcaacaggcgcagaagggagccaaacaggcaaacaaagaaccccccaagaacaccggaaagaaaacag

SEQ ID NO: 80021 - RNA, 63 nt, Homo sapiens
cagcgcaggaaaagacccaccccaaggcggcagcgcgggcagcgacaggagacgagacaagag

SEQ ID NO: 80022 - RNA, 74 nt, Homo sapiens
gagcccagagcagggaaccaggcaaaaacgacaaggaacagacccgggaagaaaccaaaaaagacaaaaaagca

SEQ ID NO: 80023 - RNA, 49 nt, Homo sapiens
aacagcgagggggacagccccagcaagcccaagccacagaccaaaaaga

SEQ ID NO: 80024 - RNA, 75 nt, Homo sapiens
gccgcaagaggcggagccgaccaggccgacgagagaacagagacgcaggcaagagcgcggaggagagagccaaaa

SEQ ID NO: 80025 - RNA, 64 nt, Homo sapiens
cagcgccgcgcccggggccggcgcccgggccaccggccgcagggcaagagacgcagacgacgga

SEQ ID NO: 80026 - RNA, 56 nt, Homo sapiens
gacgcgcccggggacgggaccagcggagaagggcccgcagcgcaaagggcacaagc

SEQ ID NO: 80027 - RNA, 84 nt, Homo sapiens
gcccgggaacacacgcgcgggacccacgacgccgggaccggccaagggcccacacaccaagaccaagggccagaaacacaggga

SEQ ID NO: 80028 - RNA, 57 nt, Homo sapiens
cagcggggagcacggcgagcagccaggccaggagaggaaaaccagagacccagacac

SEQ ID NO: 80029 - RNA, 67 nt, Homo sapiens
cggcaggcagaagccagggaaggcggcccagcagcgagacacaggacggccagcagaagcaggcgag

SEQ ID NO: 80030 - RNA, 67 nt, Homo sapiens
aacccaaaacaacagccagaagaggcgaaccaggacagcccgagaacacgaccaacggccccaaaaa

SEQ ID NO: 80031 - RNA, 75 nt, Homo sapiens
ggaacgcagggcgccgaggccagccagaccccagcgccccccgcccacggacggaccagacgaccccagaccgcc

SEQ ID NO: 80032 - RNA, 87 nt, Homo sapiens
ggcaaggcggcagaccgcagaacaagcgccccggcccgcgggcacgccagcgccacagggccccgagccagccccagaggagagcgg

SEQ ID NO: 80033 - RNA, 80 nt, Homo sapiens
ccaaggcccgccgcccagccgacgacgcaggcacggggcggcacagagagaagaccgaccaggacaggacccgcaggaga

SEQ ID NO: 80034 - RNA, 102 nt, Homo sapiens
ggacccgcggccgacgccacaacaccgagcaagaacacccgcaccaacgagaagggcagcagcgggccaaaacgggaccagcccccggaggagcagagcaag

SEQ ID NO: 80035 - RNA, 56 nt, Homo sapiens
aagagagcaagaggacgagagacagcccagaagcccagccgcacgaagcaaggggg

SEQ ID NO: 80036 - RNA, 82 nt, Homo sapiens
ccaagagggcgagcaggacgaagcgcccgccaccaagccgggggccacaagaaagaccacaggaccacggacaaaagaacac

SEQ ID NO: 80037 - RNA, 76 nt, Homo sapiens
gagagcccgacccggggcacccgcgccgccccgcacggcggacccggaacaggacacccaaccgcgagaccagcaa

SEQ ID NO: 80038 - RNA, 69 nt, Homo sapiens
acgggggggcaggccgacagaacagaaaggcaaaaagagacacacagggaaggcagagaaaaaaggaaa

SEQ ID NO: 80039 - RNA, 69 nt, Homo sapiens
caggacacaaccagcaccacccaacacagaccgaacaacggaacacgaaagggaccagaccaaagagga

SEQ ID NO: 80040 - RNA, 83 nt, Homo sapiens
aggggcccagagacggggggaacgcccgcggacggcagggcgcgacaagaagcgcccgcccgacgagcggcccgccaccaccg

SEQ ID NO: 80041 - RNA, 79 nt, Homo sapiens
cggaacgaaccagagagagcccaaaagcaggcaacggccagacacagggaaagcggaggggaaagaacgccggacaaca

SEQ ID NO: 80042 - RNA, 73 nt, Homo sapiens
accccgagggcaccgggcaccacaacccacggaggccaggagcaggcaacaaggcaccaggagacacccgaaa

SEQ ID NO: 80043 - RNA, 78 nt, Homo sapiens
aggacgacggggcgagaccccgcccggaccgcaggcccagaagaggccacaaggaagaagcagcagcgccaaggaccc

SEQ ID NO: 80044 - RNA, 61 nt, Homo sapiens
gagggagaggagaaggcgaaccccaaaacggcgacaccacggagacccaggccccaggccc

SEQ ID NO: 80045 - RNA, 79 nt, Homo sapiens
gagacccgccaggagcaaaggcagacccaacaccaacacgaggagaaggcagccccaggggcccagccagagagagccc

SEQ ID NO: 80046 - RNA, 41 nt, Homo sapiens
caggggaggaccggaacccaggagagaccgcacgcagggcc

SEQ ID NO: 80047 - RNA, 75 nt, Homo sapiens
aacaggaaagcaagggagaacagaacacgagcgagaaaacagagcagacagagacaaaaaccagcacagaacaga

SEQ ID NO: 80048 - RNA, 90 nt, Homo sapiens
cccgcagccagaagaacaagaagaggcagaccccgccagaccaacaagcggagcaaagcaccacaggggaaaacaagcagaaccggggac

SEQ ID NO: 80049 - RNA, 85 nt, Homo sapiens
cgggagacaagaagacgccaacgagcggcgcggacggcgcgcggacaccaggcggcagagaagagacagcgggggcaaggaggcc

SEQ ID NO: 80050 - RNA, 89 nt, Homo sapiens
agaagggaggcccacgaacgcaaagcaggagggagagggccaagaagcagcgacacagaggagcgggaaggccccgcacccggagaccg

SEQ ID NO: 80051 - RNA, 71 nt, Homo sapiens
cccaaaccgaccaggggggcccagggggacggaagcggcagcgggcagccggcccagcacagggagcagaa

SEQ ID NO: 80052 - RNA, 84 nt, Homo sapiens
gccagggccaaccacggggaacagcgcagacgcccagagcgccacggagaagccgccgaagagggaggcggaaccaacccccgg

SEQ ID NO: 80053 - RNA, 86 nt, Homo sapiens
ggggaggcgcagagacacaagggaacagggcaaccggagaaacgcgaagaagaagaacagaggaagaagcgacaaagaaccagcca

SEQ ID NO: 80054 - RNA, 70 nt, Homo sapiens
agaacaaggacggcacaaaccagagcagggcagagaggcagaaccagaagggaggagggcagggaagcag

SEQ ID NO: 80055 - RNA, 77 nt, Homo sapiens
ccgaaagcggagagagcgggcgggcggccgggagacccacagcaccagaccagcgaagcaaagaagcaacacgaaaa

SEQ ID NO: 80056 - RNA, 78 nt, Homo sapiens
cccccagccagggaacgccagaagggacaaccaggcagcagccccacgagagagagaaggagcccagcaagacacggc

SEQ ID NO: 80057 - RNA, 77 nt, Homo sapiens
cggggcgggcccgggcgcggcgggcgcgcccgccagcgcccggagaacgggacgaaaacccgaggcaccggacagaa

SEQ ID NO: 80058 - RNA, 72 nt, Homo sapiens
gacacgcaaggagacaaggaaaggcccaccgaaccacacccagaccggaaacagaacgccaagagaggaagg

SEQ ID NO: 80059 - RNA, 69 nt, Homo sapiens
agaaggacgggagaacaccccacagggaagaggcgcacacaagagagggccgggcgggaagaaaggaaa

SEQ ID NO: 80060 - RNA, 62 nt, Homo sapiens
aacgggccaggcaggaaggggccaggaaaaccaggaaggcacaacaacacggccagagcggg

SEQ ID NO: 80061 - RNA, 89 nt, Homo sapiens
gccgcggccccaggcgcgcggagagcaggcaaaaagggcagcagcgagaaagagcaaacaagagaagagccgcagcgaaaacgggaagc

SEQ ID NO: 80062 - RNA, 66 nt, Homo sapiens
ggacagaagacagccgcaaccaaagggggcagaaacgggacgggagcgccacggggggaagagagg

SEQ ID NO: 80063 - RNA, 76 nt, Homo sapiens
ggaccccggagaagcagaggaaaagccaaggagggaccccaagaaagcaagcaagaggagaacacggggaagacac

SEQ ID NO: 80064 - RNA, 72 nt, Homo sapiens
acaggaggcggcgggccccgcccgccgaagggaggcccacaagcggcacccaccaagacaaaccagcaaggc

SEQ ID NO: 80065 - RNA, 76 nt, Homo sapiens
agcgaggcggcgggccgagggggcgggccggcggggcacggggggcgacggccaagcgaaagggcagcaagacacg

SEQ ID NO: 80066 - RNA, 76 nt, Homo sapiens
cacagcaccgaaaacaccaggaaagacaggagaccaaaaagcagcacagcagaccgcgaagacgccaagaagcaga

SEQ ID NO: 80067 - RNA, 71 nt, Homo sapiens
gggggcccagacagggggggcccagaagcccccggggagagacagacagagggacacagagaggaagaaag

SEQ ID NO: 80068 - RNA, 59 nt, Homo sapiens
cgcgaaacgcacgagaaggcaaagcagagagcagaggccagccacgcaacggcccgaac

SEQ ID NO: 80069 - RNA, 69 nt, Homo sapiens
aagcaggcagggagaaaagccagcaagaaaggaggcaaacgaccaaacacggcccccccgcaccgcgcc

SEQ ID NO: 80070 - RNA, 84 nt, Homo sapiens
ggcaaggggacgccccagcccaaagcagcgacaccagaggaccagaacccacgagaaacagacgagccaaccagaccccaggag

SEQ ID NO: 80071 - RNA, 60 nt, Homo sapiens
ggggacccacggcaggaggcaaggaagaacaacacccacaggaggaacaaacccccccag

SEQ ID NO: 80072 - RNA, 91 nt, Homo sapiens
gagcgagcgagggggggcgcgccggaaaccggagcgcgcagcagcccccagaaacccacaaagccccgaggggcagggagcccagagggaa

SEQ ID NO: 80073 - RNA, 77 nt, Homo sapiens
acaaaaccgccaaagccggccccggcaaggaggaaggggccagccacccacgcacccgcggccaaaacacgacaggg

SEQ ID NO: 80074 - RNA, 87 nt, Homo sapiens
cccgaaggccccagcccggccagcggccgagagcgagggaggagccccccgacccagcaggaggcaaagggaccccaagaaaccaaa

SEQ ID NO: 80075 - RNA, 76 nt, Homo sapiens
agaccaaaggaaaagagcaaagaaaaacggcccaagacacagggcaccaaccagcggacacacggaaaagggacgg

SEQ ID NO: 80076 - RNA, 89 nt, Homo sapiens
cggagggccgagggagggccgagccagccgcggccggaggagcccccaggccaaaaaggaccaggagaacacgaaaaccagggacaaaa

SEQ ID NO: 80077 - RNA, 79 nt, Homo sapiens
ccagagcccgacccgcgcgggccgagagccgccccgaacgggggcccccccgccggacaggacccaaagacaggaccac

SEQ ID NO: 80078 - RNA, 69 nt, Homo sapiens
aaaaagcccgaccaccaagaaggggggacaaacagagagacggcgaagagcagacgcggagaaccccgc

SEQ ID NO: 80079 - RNA, 61 nt, Homo sapiens
gaaggcccacaggacaggagagaaagacggggagccgccaccaaaagcagacggaaaaccc

SEQ ID NO: 80080 - RNA, 60 nt, Homo sapiens
gcacccccaggggaccaacccaggacgagcagggggaggaacaaagcgaggaagggaagg

SEQ ID NO: 80081 - RNA, 70 nt, Homo sapiens
cagcgcccggcgccgcgcgccacccccgaacaacggcaagcggagaagagcaaggccgaaccgagaggaa

SEQ ID NO: 80082 - RNA, 73 nt, Homo sapiens
aaaacaaggaggcccggaacaaagcacaacaggcaaagaccagcaaggcaccaacagaaaaacaacgccggaa

SEQ ID NO: 80083 - RNA, 77 nt, Homo sapiens
aagaagcaaacaaaaagagaggaacagcaacaggccagagaaagggaagccggaggaaaggaaaaaagaaaccacag

SEQ ID NO: 80084 - RNA, 72 nt, Homo sapiens
ccacagccacagaggacggagcgccgccgccgggaccccgcccagcaggggcgcgggaaggacaacagcccc

SEQ ID NO: 80085 - RNA, 80 nt, Homo sapiens
gcggaaggcaggggggaccaaaaggccagaaagccaccgacccgggcgacccaagaaggaagagagcaagagcgaaagag

SEQ ID NO: 80086 - RNA, 75 nt, Homo sapiens
acccgcgagcaggaaccccaggaaacggccagggaaaccgaaaagaggccgcccagaagacaaggaggagcaaga

SEQ ID NO: 80087 - RNA, 81 nt, Homo sapiens
cgccccaccacccaggccggggacgcccaacccgggcaccccaggcacaaggaagggggcagccagaccgccgaagacagc

SEQ ID NO: 80088 - RNA, 49 nt, Homo sapiens
gcggaccggacggccgaggaaaaggaagggaaaacaagaggaaaaaacc

SEQ ID NO: 80089 - RNA, 74 nt, Homo sapiens
ggcacacccaacaaaaagagcgcgcaaaggaccaggaaagcgaccgaaagaaaaacaggagaaggcaacgacca

SEQ ID NO: 80090 - RNA, 79 nt, Homo sapiens
ccccggcgcggagaggaagccagccaccagccaggaaacgaagggcaaaggcaaagggcagcgaggggcaaccaacggg

SEQ ID NO: 80091 - RNA, 59 nt, Homo sapiens
gcagcaccacgcaaggcgacaagcggccgagcgagcggccggcgaggaaaggacaccga

SEQ ID NO: 80092 - RNA, 78 nt, Homo sapiens
gccacggaccagaagaaacacgggccggcccaccaagagccgcggaccacacggcgaggcccgagcggcgcaccggcg

SEQ ID NO: 80093 - RNA, 58 nt, Homo sapiens
ggggccgcggcggcggagcgaacaaaaccagccaagcagaggagaaaaagacagcacc

SEQ ID NO: 80094 - RNA, 72 nt, Homo sapiens
gggcagaagagaccaacacagagcagcggaaccagacaggcaggaaaagacagggccgccgaccaggcggag

SEQ ID NO: 80095 - RNA, 72 nt, Homo sapiens
cgcccgagggacccacaaaagcgccagcagaagccgaagccgagaaagccagggccgacagcagcagacagc

SEQ ID NO: 80096 - RNA, 87 nt, Homo sapiens
caggaccccagagcgacagcccgggacaccaagaaagaacaacaaacggacccaggacaaaacgacaccagccaaaccagcagcccc

SEQ ID NO: 80097 - RNA, 74 nt, Homo sapiens
aacaggcccgggccaaaacagcaacccaaacacagaagacacacaacaacaggaggcaaacccacagccgaaaa

SEQ ID NO: 80098 - RNA, 72 nt, Homo sapiens
aagaggcacgcaccccacaaaaaaaagcgccgagaacggacagacacgcgggagacgcgcggaggggagcgc

SEQ ID NO: 80099 - RNA, 64 nt, Homo sapiens
gaggccaaaggcaggaggggcgaaggagccagggaggcagccgagggagaccaacgcaaaaaac

SEQ ID NO: 80100 - RNA, 68 nt, Homo sapiens
cagaaaacgcagagaaacgcacagaaccaagggaccaaaccacagcgccggaaaaacagggcacaaaa

SEQ ID NO: 80101 - RNA, 60 nt, Homo sapiens
caagggaaagaccagggaggcacagcgagaagggaaggaagcccaggaggacacgaagaa

SEQ ID NO: 80102 - RNA, 73 nt, Homo sapiens
gagagacgcacgcgcgccaacgccaaggccaaggagagagcgaagcacaaggggcgagacaacacggaaagga

SEQ ID NO: 80103 - RNA, 117 nt, Homo sapiens
ccacccagcaggccacggggaagacgcggccgcggcgccgggccgcagcggcccggacccgagagccaggacgcacaagaggacgaggaacgcggaggaggaaagaggaagccagac

SEQ ID NO: 80104 - RNA, 80 nt, Homo sapiens
cgagccgaccgcgccgcccagccaccagcgggcgccgcagagggaccgcggccacaacaagaagaggaagaacacaaggg

SEQ ID NO: 80105 - RNA, 80 nt, Homo sapiens
ccagggaagagacacacccagacccaccccccaaggcacaggcgggcagaccggacgacccgacccaaaagggcagcacc

SEQ ID NO: 80106 - RNA, 73 nt, Homo sapiens
cggagccgccggaagggcgcccgcagccccccacgaaacagccaacccgcaacaacggcagaagaaaagcccg

SEQ ID NO: 80107 - RNA, 71 nt, Homo sapiens
cacaggagccgaccaggccagggcaccacaccaggggaagggggccagacaaccagggaagcacagacacg

SEQ ID NO: 80108 - RNA, 38 nt, Homo sapiens
ccccgagcggggcaaagaggcacacgacaagaaacaga

SEQ ID NO: 80109 - RNA, 69 nt, Homo sapiens
accgaaagcagacacaaagaaaccaacgaaggaaacaagacgcagaaaacagacacacagcggagacaa

SEQ ID NO: 80110 - RNA, 53 nt, Homo sapiens
caaccaccagcagcccccagagcggaacacagaaagccacacacgaggagggg

SEQ ID NO: 80111 - RNA, 44 nt, Homo sapiens
gagcggagcagaccgaaagaggagagccacgagccaagggggca

SEQ ID NO: 80112 - RNA, 79 nt, Homo sapiens
ccacggagaacaacagacgggagacgaacgagaccacagggggggagacagcgacaaccaggacccaagagaggaggcc

SEQ ID NO: 80113 - RNA, 42 nt, Homo sapiens
aaggggcggccgggcgcggccgggcggagaacggaaaagcac

SEQ ID NO: 80114 - RNA, 77 nt, Homo sapiens
ccgacccgagccaggccgaccccgacccggaccggacaaggacgcccgggagagaagagagggccccagaagaagca

SEQ ID NO: 80115 - RNA, 60 nt, Homo sapiens
gggggcacggagcaacaggaaaggggcaaaaccaacggggcgcagaccaagccaggcgga

SEQ ID NO: 80116 - RNA, 71 nt, Homo sapiens
caccccggcaagaaagggaaaccaaagagccaggcgacccccgcgcccgaggcccagaaggggacaagcgg

SEQ ID NO: 80117 - RNA, 80 nt, Homo sapiens
caggcaccgccagcacgcgccgccccgcgcgcgagccacgcagcccccaggaacccagaagacccggagccagcgacgac

SEQ ID NO: 80118 - RNA, 49 nt, Homo sapiens
aacggaccagaccgaccaccaaaagcagcaagaaaacacggcaggggaa

SEQ ID NO: 80119 - RNA, 86 nt, Homo sapiens
cgggacccagggagaaacaggggggcgagaagagaaacagggcacccgagaggaacacagcagagaagcaggagacgaacaacgga

SEQ ID NO: 80120 - RNA, 82 nt, Homo sapiens
caacggcccacgaggcgcacgaggagggcacacccacccagagcggcggggaaggccacccaggcaggaaagagggagcggg

SEQ ID NO: 80121 - RNA, 53 nt, Homo sapiens
aaacagggcccggaaaaggggaaccggggggggcggggcacgcggccacggcc

SEQ ID NO: 80122 - RNA, 63 nt, Homo sapiens
ccagccagggcccggccccccgcgcgccccagacaccgaaaacgagaaacgaaagagacacgg

SEQ ID NO: 80123 - RNA, 72 nt, Homo sapiens
cgaggcgggcgggccggcgagcgcagcgcgaccgggaggcccaggcggaggcgaccgggaaggagagcccgg

SEQ ID NO: 80124 - RNA, 71 nt, Homo sapiens
aggccggagcgacgcgcggagcgagaggagccgcagagacaacaccagaaggaagcccaagcaggaaagac

SEQ ID NO: 80125 - RNA, 68 nt, Homo sapiens
cgccaaagccgccgggcaagaaggacagaaaacgggccccagacacaagccccaccaagaggacaccc

SEQ ID NO: 80126 - RNA, 68 nt, Homo sapiens
gaaggaaggcagcgcaaaaccaccgcaccagaagaagaaggccagaaaaaacagggccaccgcaccca

SEQ ID NO: 80127 - RNA, 86 nt, Homo sapiens
cccagggggcgccccccgcgagccgcaggcccccagacggcaggacgcggcgggggaagggaggagggcgagggaacgggcaggag

SEQ ID NO: 80128 - RNA, 97 nt, Homo sapiens
aagaagcaggagaaggagcagggacaggccaggagccagacaagcccagcaagaccaaacagccaaaccagacaggcggaggcagggcgggaccggc

SEQ ID NO: 80129 - RNA, 80 nt, Homo sapiens
gagcggagcgccccacaaggagcgagggaggcccgggggccccagccgggcagaaccagagaccacagaagaaggaaggg

SEQ ID NO: 80130 - RNA, 81 nt, Homo sapiens
caccgccgcccccccagacaagaggacaccgcggaggaagcagccacccacgcacccgcggccaaaacacgacaggggcca

SEQ ID NO: 80131 - RNA, 73 nt, Homo sapiens
agaggcagaaggcagggggcgaggcgggggaccacgggggcaaaccccacagcgggaaccaaagggcacccgc

SEQ ID NO: 80132 - RNA, 80 nt, Homo sapiens
accgcaaccagacgccagcgggacgaggaccgagaccgcggccgggaccgaggccaaacggaggaaaaggacgccgaaaa

SEQ ID NO: 80133 - RNA, 43 nt, Homo sapiens
aaacggaccagaccgaccaccaaaaggaggagcgggagcaccc

SEQ ID NO: 80134 - RNA, 67 nt, Homo sapiens
gaagaccacaaaggcagacagggaccagcgggacaaggagaaccagggccaccacccagcgagaaag

SEQ ID NO: 80135 - RNA, 50 nt, Homo sapiens
gaaccaaaaggcggcgccaggacaaggaggcaggggaagcacaaaagcgc

SEQ ID NO: 80136 - RNA, 74 nt, Homo sapiens
ggggaggcgggaccagacgaggaacagcaaaaaggcaagaggaggaacgacgagaagagaggaagagagagacg

SEQ ID NO: 80137 - RNA, 78 nt, Homo sapiens
gacaacaccgcgcggaccacaaaccgcgccagaaaaagggccaggcagcacaggaggaaccaggagcggacgcaaccg

SEQ ID NO: 80138 - RNA, 75 nt, Homo sapiens
aacaaccagaagacccagaaggacggaaggcgggagacagagggaagcaccacacaccaccacagcccagggggg

SEQ ID NO: 80139 - RNA, 68 nt, Homo sapiens
aagcaaggagagaaaaacggagggcgacaagaagagcgaggaaacaggccacaaaggaccagaggaaa

SEQ ID NO: 80140 - RNA, 85 nt, Homo sapiens
ccggcaaagaagacagaccaggaaacaggaacacgaaagaggaaaaacgcacaagaaaccgaagccaaggaggagaggaggagag

SEQ ID NO: 80141 - RNA, 69 nt, Homo sapiens
cagacccacaacaccaggcgccagccaccccccacggaaggcccagaagcagcccagaacaaccagggg

SEQ ID NO: 80142 - RNA, 84 nt, Homo sapiens
gcccgggcgcccgcaggcggcaggaaccccccggcgaagagacaccaggcgccgagaaggccagcagagaaacaggcaggagag

SEQ ID NO: 80143 - RNA, 70 nt, Homo sapiens
gaggacgggacacgggccaagggagcgaaaagaacccccaaaaggagaaagacgaccgccaaccagggag

SEQ ID NO: 80144 - RNA, 84 nt, Homo sapiens
cggcggcgacagccaggcccggaagcgagggcggccgcgccggcccagggcagggaggcgcccgcacagcgagacgccggccgc

SEQ ID NO: 80145 - RNA, 80 nt, Homo sapiens
gagcccaggagcgacgacaagccgaccaaagcagcaagaccaagaacggaggaccggggaagcgaggagagcagggggag

SEQ ID NO: 80146 - RNA, 74 nt, Homo sapiens
ggacgaagcgcacagcaaacagcgcacggcggaaggaccgggggaggccccaaaggcgagccacacggaaaaga

SEQ ID NO: 80147 - RNA, 80 nt, Homo sapiens
agcaaaacagagcggaacgaacaagggaaccaaaggacgcagacacaccaaggaaagcaagaagccggacagggagcaag

SEQ ID NO: 80148 - RNA, 66 nt, Homo sapiens
aggcaaagcacacaggggcaccagaagagcacaacacaagaaaacaaggcacgggcaggagacaac

SEQ ID NO: 80149 - RNA, 93 nt, Homo sapiens
agggggcgaaacggagaaccccgacagaagccaaagggcagcgggaggagccaggaggagagaacaagaaaagcgcggaaacgcaacaaaaga

SEQ ID NO: 80150 - RNA, 79 nt, Homo sapiens
aggccagagccgaaccaaagagcagcaggagacagccaacgggacccaggggagcgacagccaaagcaacaagcccgaa

SEQ ID NO: 80151 - RNA, 59 nt, Homo sapiens
gagaaccgaacaagcccagcgaagcgggcacggggcgggcacgcggaccacccacccaa

SEQ ID NO: 80152 - RNA, 73 nt, Homo sapiens
ggccgagagccaggggaaaggccagcgcagaaacgcagaggcagacgccagcagacacacagccgggcacagc

SEQ ID NO: 80153 - RNA, 77 nt, Homo sapiens
gagcacacggaacaaagccccaggaggccaagaacccaaagcaaggcgagacaaggggccaaccagccagggccaac

SEQ ID NO: 80154 - RNA, 74 nt, Homo sapiens
aaaacgaaccacgagcggaagcacaacgggaagaaagggacagacagccagagggaaacgagagccagaaggga

SEQ ID NO: 80155 - RNA, 92 nt, Homo sapiens
aacgcgggcccgccaggggcgaagggaggcgagggaaaaagcgggaggaggcgggccagaacacgaccggggcacaggcaaggacaagcaag

SEQ ID NO: 80156 - RNA, 60 nt, Homo sapiens
ggaaacgcccgcgagggaaccgcagacagaagcccggggcggcgacggagcacgacccaa

SEQ ID NO: 80157 - RNA, 68 nt, Homo sapiens
gccagacccggggaggcgcacacacaccaaagaaaaagccaccacaaggggacaacggagcaggcccc

SEQ ID NO: 80158 - RNA, 76 nt, Homo sapiens
acgagcggagaaaccaaaacgcaaagccagccgaaacaaaaaaacgagcaaaggcagaaaaaggaacggaacagcg

SEQ ID NO: 80159 - RNA, 84 nt, Homo sapiens
cgcccgccggccagacaaacagcccgcccgaccccgcccgacccggccgccccgagcggagccggaggggcccccggagggcca

SEQ ID NO: 80160 - RNA, 64 nt, Homo sapiens
cgaggcagacggagcggacggaaaggggcgacaggagacaagagaggaaaagaggaaaggacag

SEQ ID NO: 80161 - RNA, 65 nt, Homo sapiens
aaggcaaaccaacccagcacaaacccgaaaaacgacggaccagcagacaacaggacaggcaacaa

SEQ ID NO: 80162 - RNA, 64 nt, Homo sapiens
cggggaggcagcgcgggacccagcccaggcggcgcggacggggcggggccccaaaagagggaag

SEQ ID NO: 80163 - RNA, 75 nt, Homo sapiens
agaggagccaggaggaaaacacaccaagaggagcgccggcccaggcggaagcaaggcagaccggccacgcaaccc

SEQ ID NO: 80164 - RNA, 77 nt, Homo sapiens
cacagagaccggagagcacacgacgagagcgcgaaacacaacaaagaaccgcaaggccaacagagggaaggaacaaa

SEQ ID NO: 80165 - RNA, 70 nt, Homo sapiens
ccccacggacggacgccagccccacaacaagccagccagggacgaccgacggagcgccaggcagaaccag

SEQ ID NO: 80166 - RNA, 74 nt, Homo sapiens
ggcggcggggggagcgggaagacgccacccagagcagccgaacgccaaagaaaccagcaggcggcagaccagga

SEQ ID NO: 80167 - RNA, 88 nt, Homo sapiens
gccgacaaggcgcaagcgaaaacagaccgcgagcccagaggaaaagaggaaagcacgcaaaaagacaagaggaagaaagaagccgcag

SEQ ID NO: 80168 - RNA, 74 nt, Homo sapiens
caagcagaccacgcaggcaggcggcggcgacggcagccaaaaaggggaaaggacccacgaccgagaacaaacga

SEQ ID NO: 80169 - RNA, 131 nt, Homo sapiens
agaggggggcggcgcgccaagacccggagcaccgcacaaacacgccacgcgcaggagcacacacggagaaaggagacacggcgcgccgcagcagggggaagaagagaaaacgaggacccaagaagcagaag

SEQ ID NO: 80170 - RNA, 77 nt, Homo sapiens
gaagcagcagaaaggccgcggcagggcggcgcggccgaggggccgcaaggccaggcgcgcagaggcacccaacggca

SEQ ID NO: 80171 - RNA, 35 nt, Homo sapiens
gaacagcccaaaaaagcccccaggagccgcggcaa

SEQ ID NO: 80172 - RNA, 62 nt, Homo sapiens
cggagggcagggccgacaccacaacgggcagcccagccccggaccagaacccagcacaacga

SEQ ID NO: 80173 - RNA, 80 nt, Homo sapiens
gcagcagcggggaggagccaaagcccggcgccaccaagccgcagggagaacacccaacgggagcaaagaaagagacagaa

SEQ ID NO: 80174 - RNA, 74 nt, Homo sapiens
gccaaaccaacgagagggaggaacagcaccgaccagcacggaggcaaacagaagcccacccccaacggggcaac

SEQ ID NO: 80175 - RNA, 72 nt, Homo sapiens
cagccgacaaaggcgccgcacaccgcgacggcgcgcggcgcgagggaccagccaccacggcccaagaacggg

SEQ ID NO: 80176 - RNA, 57 nt, Homo sapiens
aaaaccaggagggccccccacccggggaagaagagcgcaccgaaggcacaagggaaa

SEQ ID NO: 80177 - RNA, 53 nt, Homo sapiens
cccccgccggaccaccaagcaggagcccaaagagaaggaaaagccaaaaccca

SEQ ID NO: 80178 - RNA, 72 nt, Homo sapiens
caagccccgagggacacggaaagcagcagacgaaccccggagggcgaccccccccagcaaaaacggccggag

SEQ ID NO: 80179 - RNA, 65 nt, Homo sapiens
gcccaggacagcacgagaaaagggaacaaccccaaaaaaccgacacccgggagaagaaaaaaagc

SEQ ID NO: 80180 - RNA, 78 nt, Homo sapiens
caaccacagcagagacgcagcagagcgcgccgcgcgccgggagaggcccggggcccgccggcgcccggagcccgcgcg

SEQ ID NO: 80181 - RNA, 54 nt, Homo sapiens
cccaaggcggccaagaggcgcgcggccgcaagaaaaggacagacgcaacacagg

SEQ ID NO: 80182 - RNA, 80 nt, Homo sapiens
cgacggaccagaaggacgaggagccacggcgcgcacccccgggagccgcgcaaggaaagaccgacagagaagccccaacg

SEQ ID NO: 80183 - RNA, 79 nt, Homo sapiens
gaggccagcgagggccgggcggcccgcggcggggacaggaaggaggacagcggcaggccaagccgacgccagcgggcgc

SEQ ID NO: 80184 - RNA, 54 nt, Homo sapiens
gggagcggcccacgacacccgcaacaccacccaggcgggcaaggcacacaagga

SEQ ID NO: 80185 - RNA, 75 nt, Homo sapiens
ggggcccagcccggggccggcgcagggcggaaggacaacagcccgacaaccagaaggccaagagaggccaacaga

SEQ ID NO: 80186 - RNA, 52 nt, Homo sapiens
aaccaggccggcggcagcaagaagaacgcgaaagaacccacaccccaagaaa

SEQ ID NO: 80187 - RNA, 134 nt, Homo sapiens
gcgacaacggcccgaaaccccggacgggggcgcacgagaccccgagccggagcggaaaaacccgggaaggagggagccccaggaacaggagcccaccgaagaacgcccgacagaacagagacccccaccagggc

SEQ ID NO: 80188 - RNA, 77 nt, Homo sapiens
aaaaacacagagacaccacaacagaaaacagcacaagcagcagcagaagggccgggaacagccagggaagcacaagg

SEQ ID NO: 80189 - RNA, 76 nt, Homo sapiens
agaacgcaagccagcgccgcccgcacaggccacccaccccaccagagccggacaccagagccggacaccagggagg

SEQ ID NO: 80190 - RNA, 83 nt, Homo sapiens
cgaccaacccaggaccgcacagagagcggcggacccgacgccgccagcccccaggcccgcccagcaagcacggagaccgccac

SEQ ID NO: 80191 - RNA, 74 nt, Homo sapiens
ggcccacccccaagagagccgcagccgccagggacgggggccaccggacagggcagcggggaagaagaaaagga

SEQ ID NO: 80192 - RNA, 64 nt, Homo sapiens
ggcgcagagccacaagcaaccggggacgagaaggaagaaacggagcgacagagaagagagggac

SEQ ID NO: 80193 - RNA, 69 nt, Homo sapiens
ggaacaagaaccacgcccgcaccagccacaacagcgcgagccacaaggcaaggaagcaggcggcaccac

SEQ ID NO: 80194 - RNA, 75 nt, Homo sapiens
agccgcacggccggcgcggccgacggcgcgcgcccgcgcgcgcggcgggcgccgaaaagaaccaaccccgggaca

SEQ ID NO: 80195 - RNA, 84 nt, Homo sapiens
ccggggcccagcagcaaccagccacccgcccccaagaaggaagcacagggccggccggaacagggcggagggggcagggcagaa

SEQ ID NO: 80196 - RNA, 75 nt, Homo sapiens
cgcccaccgcgccgcaccagcgagaacaggaaaagggaggcaaagacaaccagaaacccgccacgcagcaggacg

SEQ ID NO: 80197 - RNA, 70 nt, Homo sapiens
agaacagaaaacagcggggacaaaagggcgccgcgccccgaaggcaaaccgacaccagcgacacaagcgc

SEQ ID NO: 80198 - RNA, 81 nt, Homo sapiens
cacgcagccacgcgggcgagcggcggggagcggcgaagccgcgggcgaggggcagggaccccacacaaacaaagaaaggaa

SEQ ID NO: 80199 - RNA, 81 nt, Homo sapiens
ccccaggacgggcggaggcggggggaccggcgggcgggcgcaaggaagaagagacgccgcgcggcagacaaggcccggcag

SEQ ID NO: 80200 - RNA, 74 nt, Homo sapiens
ggcccggccaagcccaggcggcaccaggagcggagaagccaggccaaaagaagcgagggagaaccaccaacaaa

SEQ ID NO: 80201 - RNA, 72 nt, Homo sapiens
acaccacacacacacagcgaacgccggggaaggacgaagcacgggacagcgaaacgggaaacccacgaccag

SEQ ID NO: 80202 - RNA, 86 nt, Homo sapiens
cgcccagcccaaaccaggagagcgagggagcgagcgggcagcgcggaaacccaccagagaaggcgcggccacccaggacccggggg

SEQ ID NO: 80203 - RNA, 66 nt, Homo sapiens
gccgcacaggccgcgaacggggcaaagggcgaaccgcagaagaagacgaacagaaggaaaaaaaaa

SEQ ID NO: 80204 - RNA, 37 nt, Homo sapiens
caagaagcccagccaccaagagggaaaagaggacgag

SEQ ID NO: 80205 - RNA, 70 nt, Homo sapiens
agggggccggcgccgacggcggcacggcgagccgaagagagaaacccccaaagaagagccccccaaagca

SEQ ID NO: 80206 - RNA, 47 nt, Homo sapiens
ccggagggcagggggcagggcggcagaggaaaggggaggaaaagcca

SEQ ID NO: 80207 - RNA, 75 nt, Homo sapiens
aaaagggaccaagacaaggacaccaaaggccaagcgaccacgcaaaacaaacacgccagaggaaaggccagacca

SEQ ID NO: 80208 - RNA, 71 nt, Homo sapiens
gcagcgaacaaggagaaagccacaacagggcggcaacaggggcgagaaaggcaccagaacagaagaggaac

SEQ ID NO: 80209 - RNA, 76 nt, Homo sapiens
gaaggcaagagcagaggccccagaccgccaagaggcacagggcgacacaggaggggagaaccacccaaagaacaaa

SEQ ID NO: 80210 - RNA, 69 nt, Homo sapiens
ggaaccacgcaccagacaacacaggagagggggaccggccaggcggcaaacccgagcgagcaacaccca

SEQ ID NO: 80211 - RNA, 80 nt, Homo sapiens
cccaggggaccccaagaagaccacagagggacccggacaaccagaggcagccagcagggggagaaccgaggggcgaagcc

SEQ ID NO: 80212 - RNA, 81 nt, Homo sapiens
agaccacacaccagccggacggcggggccgggcccccggccgcaagcaggccacggcgagccccgaggacggggccgaccg

SEQ ID NO: 80213 - RNA, 77 nt, Homo sapiens
aagaagcagggcagaggaccaggacgcgacagggcacccaaaaagagaggcgagaacacggaaagcccagcagcaaa

SEQ ID NO: 80214 - RNA, 71 nt, Homo sapiens
aggcccagaagcgcaccaagaaacaagaaccaacaccaggaacggcgagaacgcggacaagcaaacaaaga

SEQ ID NO: 80215 - RNA, 93 nt, Homo sapiens
ccgcgggcccggcccgcgggcgccgggggcccggaccccggcgcaggagcaaaggagcagcaaaagggggacaagccaaaggaggggagaaag

SEQ ID NO: 80216 - RNA, 84 nt, Homo sapiens
cggccggagggagaccgcggccggccgagcggagcgcgaggaccaggccaaccggagcgcacccacgccacaagccggacggcg

SEQ ID NO: 80217 - RNA, 59 nt, Homo sapiens
cggagagcggccgcgggcgacgggccgaggacagcagagccggacccaggcggcagcag

SEQ ID NO: 80218 - RNA, 68 nt, Homo sapiens
cgggagccggaaggaccgacgcggcccccgcagccgccacgaccggcaccgagaccagacccagcgga

SEQ ID NO: 80219 - RNA, 40 nt, Homo sapiens
cgaggcgaggaggagcgcggcggcccccccagccggcgac

SEQ ID NO: 80220 - RNA, 51 nt, Homo sapiens
ggaaaccaagacagcccaaacgccccacgaccagggagggagcagaccagg

SEQ ID NO: 80221 - RNA, 37 nt, Homo sapiens
ccgggggcccacaacaggccccgggaccaaggacacg

SEQ ID NO: 80222 - RNA, 52 nt, Homo sapiens
cccaaagggaaaacagaaacagggccgccccccgggcgaggcagagacgcca

SEQ ID NO: 80223 - RNA, 77 nt, Homo sapiens
acggacccaacagaacacgcagcaaaggagccagcaccaccaacaacagaacaggggagccaacagacagacagcga

SEQ ID NO: 80224 - RNA, 78 nt, Homo sapiens
gaacaaaccgaagaacagcgggaaagaaggcaaaacacggggcgaaccccacacacccaacccgcccagcggagcagg

SEQ ID NO: 80225 - RNA, 54 nt, Homo sapiens
aggacacgagaacgcgaagagccaaagaaagaggaacccgcaagccgccgaccc

SEQ ID NO: 80226 - RNA, 76 nt, Homo sapiens
agcagccggacccggaaacacgcggcaagcaagaaaacaggaagggagccccaaaggaacgcacaccagcaccagc

SEQ ID NO: 80227 - RNA, 55 nt, Homo sapiens
aaccagagcggagcgcagaccgaggaaaaggagagaggggaagaagagggaaggc

SEQ ID NO: 80228 - RNA, 38 nt, Homo sapiens
ggcaacacggcaggagcaagaccgggcggggggcgcgc

SEQ ID NO: 80229 - RNA, 70 nt, Homo sapiens
acgccgagaggagcagagggcccagaccgcaaccacaggcaccccaagaaaggcaccaaaaccagcacag

SEQ ID NO: 80230 - RNA, 65 nt, Homo sapiens
gccggccgccggcaggcgcagccgggcccggccccagccgacgaaccaggagccccagcgagaac

SEQ ID NO: 80231 - RNA, 81 nt, Homo sapiens
ggcgcagaaagaggagcgaggggcagaaacagaaacgcagccagaccacgcacgcacccggaagagcccgccaacgggacc

SEQ ID NO: 80232 - RNA, 84 nt, Homo sapiens
cgaaggaggccaagcacacgcgaggacagaccgcaaaagaagaggagaccggaggcaggccagccaggaacagcaggccagggg

SEQ ID NO: 80233 - RNA, 103 nt, Homo sapiens
gacccgcccaacagaaaaagagaggagggagaacacagaaacccgccccggaacgaaaacaaacggaagagagggcagcaagaaagaacaagaaagcgaacgg

SEQ ID NO: 80234 - RNA, 69 nt, Homo sapiens
ggaggagccaccccaagccacagggccgccgacagcagagacaggaagagagaagggcacagaccaaga

SEQ ID NO: 80235 - RNA, 72 nt, Homo sapiens
cgccccaaaacgaaagggaaaacaggaaaccaagcagagcgggacaaacgaagggaagagaggagaaaggcg

SEQ ID NO: 80236 - RNA, 70 nt, Homo sapiens
aaagagaaaggaagcaggcccgggaagggggcaggacagacaagaggagaacaagcagagagaagaccga

SEQ ID NO: 80237 - RNA, 76 nt, Homo sapiens
aggaggggaaaaagacaagaaaagaaagaaagccacaccaaaagccaaggcggaaggaaacggaggagacacacgg

SEQ ID NO: 80238 - RNA, 60 nt, Homo sapiens
cgcacgagggacggggaaaggagagaccgcacgcagggccacagcagcacgaggacagcc

SEQ ID NO: 80239 - RNA, 81 nt, Homo sapiens
acaggcccgcagaaaagggagcagacaggccacagcaaacacaggggcaggaaccggcaggaagccagggagccgggaggc

SEQ ID NO: 80240 - RNA, 70 nt, Homo sapiens
aaggaccaagaaccagggacaaaggccagaagcaggagagcacagacacaaagaccaaagccgagcaaaa

SEQ ID NO: 80241 - RNA, 76 nt, Homo sapiens
cgcccgccgcggcgcccgggcagaacagcgaacaaccaccccccaaccacgggagcggaagacccggaggaagaga

SEQ ID NO: 80242 - RNA, 67 nt, Homo sapiens
cccgcggcgccacccacaaacagggcgccaccccggcccagcccgagagcgaccaaacccccacaac

SEQ ID NO: 80243 - RNA, 78 nt, Homo sapiens
ggcggcgcgcgcggcgcgggacgcgcgcgggcacccacggagccccggggcggccgccaggcacagagaaggcaaacg

SEQ ID NO: 80244 - RNA, 74 nt, Homo sapiens
cacagagcaagcaagccgcagacaggaagagagcccccgccgagaaaagacgaagaagcgcaccagacacacaa

SEQ ID NO: 80245 - RNA, 84 nt, Homo sapiens
acggcccaaccaggagagagaccagaccgagaggaaacaaaacagagaggagagagagcggaggaaaaggcagacaaggaggag

SEQ ID NO: 80246 - RNA, 70 nt, Homo sapiens
aaagaaccacagggcaaaccaggaacgcgaagaggaccaagcagccaaaacggagaaggaccaagaacca

SEQ ID NO: 80247 - RNA, 71 nt, Homo sapiens
gaaaaacaagaaacagcagccaaccaggcccgagacaaaaaggacgaacacaaaggggcagcaacaccaga

SEQ ID NO: 80248 - RNA, 73 nt, Homo sapiens
gacgacggggcgagaccccgcccggaccgcagaagcaaacaggggcaggaaaacccaaaacgaaaaacaaagc

SEQ ID NO: 80249 - RNA, 70 nt, Homo sapiens
agacaagcggaagggaaaacgaccgaagagaacagaaaaagacacccgaggaccacacaccccgaccaca

SEQ ID NO: 80250 - RNA, 88 nt, Homo sapiens
gaggcagagcgcgagagacccgccgccccagccgcgcgggccaggagaaaagaccgccagagcggaacgaccccagagcgagcccgca

SEQ ID NO: 80251 - RNA, 83 nt, Homo sapiens
gacggcaaggccacagaccacaacaccaggaggaccagcggacgacccccgggacagagcaaccgcaagcaacaaggccagca

SEQ ID NO: 80252 - RNA, 70 nt, Homo sapiens
gggggagaaaaggaccagacagcaaagcaagccaagagggcccagccaagaagcacggcaagagcagaaa

SEQ ID NO: 80253 - RNA, 72 nt, Homo sapiens
ggccacccccaaagaaaagaaccccgcgggaggcgaggagaaagcccacaacgcgccgccagggcacgcggc

SEQ ID NO: 80254 - RNA, 81 nt, Homo sapiens
aggaacgggcggaccagggcgagcacgagcacccgccccaacgagaacgcagacccccaaaggagacagaccccacagaga

SEQ ID NO: 80255 - RNA, 80 nt, Homo sapiens
acacgagaaaacaccacacaacagaagaaggggccaccgagacaaacacgggaaaaaagaaaaacaaagaaaaaaagaga

SEQ ID NO: 80256 - RNA, 77 nt, Homo sapiens
cggaagaaaaagaaggaaagaaaaaacaagggcgcagcagcaagagggaaggcggggcgaggaccccagagacacca

SEQ ID NO: 80257 - RNA, 80 nt, Homo sapiens
cgcgggggcaacggagaaaacccggaaccgcgacggcggcagacacggaacgagaaggaacaaggcagaagggaagagcc

SEQ ID NO: 80258 - RNA, 60 nt, Homo sapiens
gagcagggggaagcggaggagcccacgcagcaaggcccgcagccggacacgcaacgaacc

SEQ ID NO: 80259 - RNA, 109 nt, Homo sapiens
ccaaagaaaaccacgggaaaacgaagagagcagaacagcaccgagaccaggaaaggagaagcagggcccaacaagagagggaagcaggaaaagagcgcaaaacgcaaag

SEQ ID NO: 80260 - RNA, 75 nt, Homo sapiens
gaacccagaacaaggaggagggggacaggagacagaggcgaaagccgagaaaggagacccacaggagaaacacca

SEQ ID NO: 80261 - RNA, 69 nt, Homo sapiens
cgggacaccaagaaagaacgcagaggcggaccggcgccagggcccggaagacacgcccccaccaccacc

SEQ ID NO: 80262 - RNA, 62 nt, Homo sapiens
acccggaaagagagaaaccaggaacaggacacgcacggagcaaacgagcaggagcacgaagg

SEQ ID NO: 80263 - RNA, 126 nt, Homo sapiens
ggggacgcagggggagggccggggaacaggcccgcaccgcaggcccagaggacagagcagggcacacgggccacagaggaccagcaaggagaagaaaggagcagcacagacgggggcagcgcggac

SEQ ID NO: 80264 - RNA, 76 nt, Homo sapiens
cggagcggaagacggcaacccagggagggcaacagagagaaaagcgaacacccaggcgcgcagagaccgacaagga

SEQ ID NO: 80265 - RNA, 69 nt, Homo sapiens
aagccaaaagccgagcgccgaggccgaaacaagcgcagaaccggccgaaaagcacaaacagcaagaaag

SEQ ID NO: 80266 - RNA, 84 nt, Homo sapiens
gagcccaaggccaaggacccccgccaccgcccaagagagccaacgccggcggaccccagcgacacagcagaaccagcagcacca

SEQ ID NO: 80267 - RNA, 87 nt, Homo sapiens
gaaaggcagacgaccggagacgaggggggagaaccagccgacggagcaggcagcagcccagaacaagcaggaacagcaacgaagaag

SEQ ID NO: 80268 - RNA, 82 nt, Homo sapiens
gcgcggggcggcgcgggcggaggcggcggagcgcgagagccgagcggaccaggcggcagaggagaaagagcacaaaagaggc

SEQ ID NO: 80269 - RNA, 71 nt, Homo sapiens
acagcaacagccccaccccgaaacgccccgaaaagacgggcaacaggaggagccaagcgggaaaaggggca

SEQ ID NO: 80270 - RNA, 78 nt, Homo sapiens
gcacgccacagcgaaggcgcgagggacaagagcagagcggccaaggaacaagacacagaaggaagaaggagcccaggc

SEQ ID NO: 80271 - RNA, 67 nt, Homo sapiens
accggaggcacacacaagaccgcacgacaggcacaggagagcgcgcgccgcgcgcccgcacaaacgc

SEQ ID NO: 80272 - RNA, 85 nt, Homo sapiens
caccaacaggaacagggcagacgagcggaggacacccaacccgggggcggcgaagaggacccgcaggcgcaaggagcaacagcga

SEQ ID NO: 80273 - RNA, 74 nt, Homo sapiens
ccaggggaaaagcaaaagaagccacaaaaaggcagcaggaaaacagacggcagaaaaggacgaacgagaaacag

SEQ ID NO: 80274 - RNA, 58 nt, Homo sapiens
gccgccggcgcccgcgagcgcagcgacaagacaagccccagcccagaaaccaccccgg

SEQ ID NO: 80275 - RNA, 89 nt, Homo sapiens
ccccacaggcgggaacagagcaggagccaggcccaaggacgccccggccacccgacgcaccccccaacacacgaggggggccggggccc

SEQ ID NO: 80276 - RNA, 58 nt, Homo sapiens
ggagaaggcagagagcagagacacccgacggggaaagacgccggggcccggcgccacc

SEQ ID NO: 80277 - RNA, 79 nt, Homo sapiens
gcccaagcaagagcgacgcaagaggcagccaccacgggccggggaaccaagcccaccggaggcccccccaccccacacc

SEQ ID NO: 80278 - RNA, 88 nt, Homo sapiens
cgcggagcccagcacggcagaaacagccaaggaagccaccccagaaagacccacacacgccggggccggcgacgagcgcaggaaggga

SEQ ID NO: 80279 - RNA, 72 nt, Homo sapiens
aaaggagaaaaaaaaccgccgaacaggcagaggacagacacaaaaagacgacgggagcggggcgccaagcac

SEQ ID NO: 80280 - RNA, 65 nt, Homo sapiens
cggagacgcagagggacgaaagaagcgcagcggaggaaggcgaggccaggcagcgccaaggaccg

SEQ ID NO: 80281 - RNA, 88 nt, Homo sapiens
cagaaaacggacggaagaaaaggcggccgaacaagcgcaggaggaaagagagcccagagaaaaaaaaagaaaggaccgagaaacaaac

SEQ ID NO: 80282 - RNA, 84 nt, Homo sapiens
aagaacaagcagaggcaagacacgacggaagagaagaagcagaccgggaacacacaggacaaccggacccgacaggaccagcgg

SEQ ID NO: 80283 - RNA, 64 nt, Homo sapiens
ccccccggggcaacccagacggcaacaaaggcgaggcagaaagcaacagaagcagaagaaaggc

SEQ ID NO: 80284 - RNA, 76 nt, Homo sapiens
caggacccaacgagggaggagcgaccccaaagaccagacccagaaggcagacggaacaagacccgcggagaaccac

SEQ ID NO: 80285 - RNA, 36 nt, Homo sapiens
cgaaacccacggcgacaggaggcgggggcgccgaca

SEQ ID NO: 80286 - RNA, 79 nt, Homo sapiens
cccaccaggacagccgacagcccgcccaggaagggacccgagcacggccggaggcaggggcccaaaaccaaggaagagg

SEQ ID NO: 80287 - RNA, 77 nt, Homo sapiens
ggcaccaacagaaggcgcaaggcgagagcccacccaggaccaggagcaaaggcaggaaaacagagggcaagaaaggc

SEQ ID NO: 80288 - RNA, 56 nt, Homo sapiens
ccccggaggaaaacaggcgaaggagcggggccggcgacccaaagaacaacaagagg

SEQ ID NO: 80289 - RNA, 53 nt, Homo sapiens
caaacgaagggcaagaacaaaaaaaccagaggggcaaagggggcaccaagaag

SEQ ID NO: 80290 - RNA, 71 nt, Homo sapiens
caacccacagacgcccagaggacaaaaggggccgggcaccacaaggacaaacccagaaagacaggaaacaa

SEQ ID NO: 80291 - RNA, 76 nt, Homo sapiens
agaagccagcacgccgggagcggacacagcccagggagcaggcgaagcgagccagggaagcgaaccaggcgaacaa

SEQ ID NO: 80292 - RNA, 84 nt, Homo sapiens
cccgggggagcggcgcggcggcgcgggaggacaggccggcgaggagagacacgacaagacaccgaggaggagcaccccggcgcc

SEQ ID NO: 80293 - RNA, 71 nt, Homo sapiens
gaggagaggccaagcgcggcagggcccccaccggccgaccgcgcgccacgaccccgaccgccacggacccg

SEQ ID NO: 80294 - RNA, 77 nt, Homo sapiens
cacccgggccagcacacccacccacaggaaacagcgagacagaaaaacgcaacaacgagcgacaaagcaaaaaaaga

SEQ ID NO: 80295 - RNA, 79 nt, Homo sapiens
cgacgcagcacgacaagggcccgcggaccggcgaacccaggcacccagagacggagcggaaaccaaggaagaaaagcca

SEQ ID NO: 80296 - RNA, 74 nt, Homo sapiens
cggacgcaccccacgggaacccacgaccaaagcggaaggccgggaacggcacagggaggggacagaccaaccgg

SEQ ID NO: 80297 - RNA, 73 nt, Homo sapiens
gagagcggaccgagagcgcgaaacgcacgagaagcggaacgcaaaaacaagcaggcccagagccagggcaccg

SEQ ID NO: 80298 - RNA, 80 nt, Homo sapiens
cccaacccagggagcggcgcagaccgagacccggacagggcaggaaacaggacgcaaagaccacagcagcgcgcagaccg

SEQ ID NO: 80299 - RNA, 85 nt, Homo sapiens
gagcaaaccccagcaagagcggaggcgcccggcggagcagaggaaccacacgcgacagaccagagacaaggccccgagggaggag

SEQ ID NO: 80300 - RNA, 83 nt, Homo sapiens
ccgccagccaccggggccgccgcgccgccggacgacaccccacagcagaggaggagcagcgcggaggaggaagccccccggcc

SEQ ID NO: 80301 - RNA, 85 nt, Homo sapiens
gccagaggaggaaaggaagacaagggagcgccccggacgacaccaccccgaccgggcaagcccagagccgccggaaggcccccgg

SEQ ID NO: 80302 - RNA, 84 nt, Homo sapiens
cgccgaccgggcggcgaggaaggcgccccggaaaaggacccaagggggcaaaggcggaaacagcagaggacaccaggagaggcg

SEQ ID NO: 80303 - RNA, 74 nt, Homo sapiens
acacggcccaggggccaacgccaaaggccgagacaggccagagcagcacaaacaaaagagacagggaagaaaac

SEQ ID NO: 80304 - RNA, 73 nt, Homo sapiens
ccccccccaggaccccaggcaggcggagacacgaaaacagggagccgcagaagccgccgcgggaagcaacggg

SEQ ID NO: 80305 - RNA, 31 nt, Homo sapiens
ccagcaacacaccccacacagaacacaagag

SEQ ID NO: 80306 - RNA, 78 nt, Homo sapiens
agggagaaacaagaacccacagaaggacaaagccgcggagaaccgaaccaacagccagccaaagccaggcagcacagc

SEQ ID NO: 80307 - RNA, 45 nt, Homo sapiens
ccgcagcggaaagcaggagcacagacaagaggaaacccggaagca

SEQ ID NO: 80308 - RNA, 76 nt, Homo sapiens
gcgagcggaccccgaccccgaggcgagacggaaagggcagagggccagacccccaacaaagccaaaggagaaacgg

SEQ ID NO: 80309 - RNA, 38 nt, Homo sapiens
gcagacaacggcgcaaagcgggcggaggcagggcagac

SEQ ID NO: 80310 - RNA, 73 nt, Homo sapiens
cagagagaagaacaggacgagcaacaacagcacagaacagacccaggaaagcacagcagagcgacaggcaggg

SEQ ID NO: 80311 - RNA, 80 nt, Homo sapiens
gcagcagcagcaccaccggacgacgcccgcggcggacggagcaccacccccacacccaaacggccggcgcggaggagacc

SEQ ID NO: 80312 - RNA, 52 nt, Homo sapiens
aaacaaggaaaacggcgcgacagacggcaagaaagaacagaaacaccccgga

SEQ ID NO: 80313 - RNA, 72 nt, Homo sapiens
gaaagacaccaagaacacaggcacgggagaccgcaagagaagacgaggagcgccaggaaagaggcagagacg

SEQ ID NO: 80314 - RNA, 79 nt, Homo sapiens
gccccaaggaagccaggagagagcgaccagccgacggagcggcagcccacaagcaggaagaccagccccaggagggaaa

SEQ ID NO: 80315 - RNA, 65 nt, Homo sapiens
agaagacaacagcgggaaaacacaccaacaaagcaggaagagagaaccaacccgggccaagcaaa

SEQ ID NO: 80316 - RNA, 73 nt, Homo sapiens
caaagccacagcgagccagaggcagaaagaacagccgcgacacaaaggcgcaccagagggaacagaacaccgc

SEQ ID NO: 80317 - RNA, 84 nt, Homo sapiens
ggcagcccccagcgagcgcaaagccaagaaaccacgggaggcagccggagaaggcggcccggagagacagagaccaccgcaaca

SEQ ID NO: 80318 - RNA, 37 nt, Homo sapiens
ccccacagaaagggcgaggcaaaggcagcagcacaac

SEQ ID NO: 80319 - RNA, 64 nt, Homo sapiens
gaaaggggaacaggagacaaccacagcgcggcaggcggacgccagccgaccgggcgaggcaggg

SEQ ID NO: 80320 - RNA, 80 nt, Homo sapiens
ggccacaggcggacccagccaggaggacacacgggcgggaggccaggcagcacgcagacaagaagcgcaggacaggcgca

SEQ ID NO: 80321 - RNA, 71 nt, Homo sapiens
gaagaaacgaaggggggaggcccaggccaaaagagggaaccggggggggcggggcacgcggccacggccag

SEQ ID NO: 80322 - RNA, 37 nt, Homo sapiens
ccaggagcagagaaaaccgacaaaacgacagaagcac

SEQ ID NO: 80323 - RNA, 74 nt, Homo sapiens
ggaaccgcggcgaaccggcgggaccccaacgagacggcacgccagccgggccacggagcagagaggcaacaagc

SEQ ID NO: 80324 - RNA, 81 nt, Homo sapiens
gggcagccgccgccaccccgcggccgcacccccgccccagagcgagaagaggcgacaccagggcccaaagaacaaccgaaa

SEQ ID NO: 80325 - RNA, 81 nt, Homo sapiens
cagacgcacggaaccacagcccgccaagaggcgagcaagcggccaagagggcgaacacaacacggggaagagacgagacca

SEQ ID NO: 80326 - RNA, 81 nt, Homo sapiens
ggaggcgcggggagagaggggcgggcgagcagaggggaagcggcggagcaggaggagggcggcaagaacggaagcacgggc

SEQ ID NO: 80327 - RNA, 74 nt, Homo sapiens
ccccagagagccagaaagaagcccagagaacagcggggagcgcccgcaggcccccaaggcggaaccaggccgac

SEQ ID NO: 80328 - RNA, 81 nt, Homo sapiens
cacgaaggcaccgacgcacagcgaccaccaacagaccgaagagcaaccgaaaaagcggacccagaacagcagccggaaaga

SEQ ID NO: 80329 - RNA, 65 nt, Homo sapiens
ggcgcagccacacagccgcgccccgcagagaagacgccaagccacgaacccgcgaccaggcggag

SEQ ID NO: 80330 - RNA, 79 nt, Homo sapiens
cgggcgcgccgcagacggccaaagcgggcgccaccgggaccggcgggcgggccggaggcgacaggcggaccggacaaag

SEQ ID NO: 80331 - RNA, 57 nt, Homo sapiens
ggaagacagccccgaacggcgcagaaaggggcccgggaccgacggaagaagcggacg

SEQ ID NO: 80332 - RNA, 70 nt, Homo sapiens
aaacaaaagacaaccgcccagaaacggccaggacacggcacgagaacagggcggagaaaggagccaagag

SEQ ID NO: 80333 - RNA, 77 nt, Homo sapiens
aaaaaacacagcgggccgggaggggaaggagcagcaaacaacacccaacagcccaaagcaaaggagcaacagcccag

SEQ ID NO: 80334 - RNA, 59 nt, Homo sapiens
aacacaacaggaggcggaggcgaaagcggaacgagagagcccagaggaccggcggcccg

SEQ ID NO: 80335 - RNA, 68 nt, Homo sapiens
ggacgggcgcccagaacgcggcagggacaggaagagggagcagaaccggacagcgagaacgcggacaa

SEQ ID NO: 80336 - RNA, 55 nt, Homo sapiens
gggaagggcaagggggccgaagcaaccagagcggagggaccagagaaagcgcaga

SEQ ID NO: 80337 - RNA, 61 nt, Homo sapiens
agaagacggaggcccaaccgagccacacccaccgcccgggcaggccacggcggagagggcc

SEQ ID NO: 80338 - RNA, 59 nt, Homo sapiens
aaagagaaagggccaacgcagcagccgcccaaaacacaaaccaaagaagaaacccgaag

SEQ ID NO: 80339 - RNA, 69 nt, Homo sapiens
gggaagaccgcgcccgcggagagcccaaacaccaccaccaaggaaagaaccggaggcgaagcaggccaa

SEQ ID NO: 80340 - RNA, 92 nt, Homo sapiens
gcagccgcgcgccgagaagcacccgcgacccagaagggagcgagcacaaacgacacacgcaaaccacaaagcccagcaacccgaagagaggg

SEQ ID NO: 80341 - RNA, 60 nt, Homo sapiens
gaacaccgaagacaagcccaaagaaagcaccagaagaaaggagagagccgaaagagaaaa

SEQ ID NO: 80342 - RNA, 65 nt, Homo sapiens
agggcggggagcgcggcgggcgcgcgccaggacaccaagcagggcggacagaccagccagaccag

SEQ ID NO: 80343 - RNA, 78 nt, Homo sapiens
gacgaggaacggcggagcagggagcccaaagaccccggagacagacagcaaagcaagccaagagggcccagccaagaa

SEQ ID NO: 80344 - RNA, 81 nt, Homo sapiens
cacgggggcgccgcccaagagaggagccccggccgcccggacgagcgagaccgcaccagaggaaaccccagacagccagca

SEQ ID NO: 80345 - RNA, 79 nt, Homo sapiens
ggggaaaacaacccacacacacaccacaggaacagccaaagggagcagcaaacacggagaaccacggggaccaagaagc

SEQ ID NO: 80346 - RNA, 85 nt, Homo sapiens
cggcagaagaaagcaagacccaggacaccccgaagccgagaaagaaaaagccaccagggccagaggaagagcaacaaaggcggaa

SEQ ID NO: 80347 - RNA, 77 nt, Homo sapiens
ggcgcacaagcagagggccagaaccaccgccagagccggagggagcgggaacgcgccgaaccgagccacacgagagc

SEQ ID NO: 80348 - RNA, 69 nt, Homo sapiens
ggacaaaaacaaagcgcgcagaaagggcgaccaccaaaaaaacgggcaccccgaagggcgagaagcaga

SEQ ID NO: 80349 - RNA, 74 nt, Homo sapiens
aaccaaaccagggaacggagcagcaagaaggagcccaaggaaacggggagcagaaaagggaaccaacaacaggc

SEQ ID NO: 80350 - RNA, 43 nt, Homo sapiens
ccacccagcccaagagaccgcccccgcagccaccgccacccag

SEQ ID NO: 80351 - RNA, 77 nt, Homo sapiens
aggcacaacaaccaagaaaaacgggggccgccgccaagcgaagagagagaaacgaaaaagaggaaggagcgagggag

SEQ ID NO: 80352 - RNA, 85 nt, Homo sapiens
aaagaaccgcgcgggaagccccagcccgcagccccggggccgggcagacgcccgaaccggcagaaaccggaccacgcacaaccgg

SEQ ID NO: 80353 - RNA, 75 nt, Homo sapiens
gcgcgccaacgcaggaccgaaggcccgccacgcccgggccgcagaaggaacggcagccacacagcccggcaacac

SEQ ID NO: 80354 - RNA, 84 nt, Homo sapiens
gcggaaggggcaggggacgggcggaagcacagcacggacggagaacacggaggcgaggcgaggggccccgaaccgaggaccagc

SEQ ID NO: 80355 - RNA, 52 nt, Homo sapiens
aggaacccacgaaaaggagggagccaaagggggggcgaaagcgaaaaccgac

SEQ ID NO: 80356 - RNA, 73 nt, Homo sapiens
ccagccgcgccagcgcccggcgccgcgcgccacccccgacacagacgaacagacggaaggaacagacagacgc

SEQ ID NO: 80357 - RNA, 107 nt, Homo sapiens
ccgccgccaccgcccaggaccgccggccgggggacgagccggagcagcagccagaccaagcaaggaaccagcgagcaaacgcaaacacaacagaaaaaagaaaacac

SEQ ID NO: 80358 - RNA, 85 nt, Homo sapiens
cgacgcgcgcaggcagaggagaaggcagcggacaaagagcaacagccaaccagaaaaccagaaacaccggcagggagcaaacccc

SEQ ID NO: 80359 - RNA, 72 nt, Homo sapiens
gccccccaaagcagaagccacccaacccgccccgcaaagcagaccgacagcaccgacggaacagcggacgcc

SEQ ID NO: 80360 - RNA, 52 nt, Homo sapiens
aaggccaagaaggcagagaggaacaccgggccaggcggcggagccgaccaag

SEQ ID NO: 80361 - RNA, 72 nt, Homo sapiens
gcgcaaagcacagaaaaggaagagcacagagagaccaaaacaaccacgaaaaaaagaagaagcagaagcaac

SEQ ID NO: 80362 - RNA, 64 nt, Homo sapiens
aaaggagagcccgcaagcggaaaaccacaagcaggccaaagagagaaacgaagaggggcacaag

SEQ ID NO: 80363 - RNA, 111 nt, Homo sapiens
cgacagcgcggggcccggagaagcccacccccgcggcgccgcgccccagaccagagcagccggcccagcccaccccaggcccccccagcccagcaccaccagcagaaaaca

SEQ ID NO: 80364 - RNA, 79 nt, Homo sapiens
ccaggcgaaccggccacgcacccccgaagccggaaaagcccggaaaagcagccaagcggaagacagagccgcaaagaga

SEQ ID NO: 80365 - RNA, 69 nt, Homo sapiens
accagaacaggggcagaaagaggaccaaacaaccagaagccacaccgccggcggccggcacacagaaac

SEQ ID NO: 80366 - RNA, 76 nt, Homo sapiens
gcccggagccggccagcgcaccaaccagcgccaccccaagcaccggcacagcaaaagaagggaaagaggaaaaccc

SEQ ID NO: 80367 - RNA, 65 nt, Homo sapiens
ccacccacggcgcaggccccgcgcccgggggaagaccccagggcagaaacggcgcagcgagcggc

SEQ ID NO: 80368 - RNA, 80 nt, Homo sapiens
caggaccagacacggccggacagaaacgccaaggacccaggcgacccaacaaaaggccaaaaagggccgaacacaaggac

SEQ ID NO: 80369 - RNA, 73 nt, Homo sapiens
cgggcagaacagcgcggcagggggcacccgaggaggaagagggcagggcccacggaaagaagggaaacccggg

SEQ ID NO: 80370 - RNA, 76 nt, Homo sapiens
aacacacacccgcagacaagaacggagagcacgcagaggggcgggcacgcacgacagcgggcagagcgcacaaaca

SEQ ID NO: 80371 - RNA, 52 nt, Homo sapiens
ggaccgcggcggcgaacacaggggccgggagaggaaggccccaagcagccag

SEQ ID NO: 80372 - RNA, 74 nt, Homo sapiens
aaagagcgccccacgagagaacggcacacgcgagcggaacagcggaagagaccaagaaaggggggaccccagcc

SEQ ID NO: 80373 - RNA, 77 nt, Homo sapiens
gcacaaagacggagacacccaacaccaaccaccacgccaggagggaagcagcgcccaaacccaaaagaggagagaag

SEQ ID NO: 80374 - RNA, 75 nt, Homo sapiens
gaagggcaaaaacgaagcacagcgggcacccgccacggacaggaggaacagcacagcagcgggccggaaaagcga

SEQ ID NO: 80375 - RNA, 72 nt, Homo sapiens
aacccgcccagcggccgagccgacaaccccggaacgcgggcaaaaggccccaggggaccgggggaggcccca

SEQ ID NO: 80376 - RNA, 72 nt, Homo sapiens
cgaaagccagaggccgagacccccaccaccgcaggcagcccagggacgccagaggggaagccgcacgaggga

SEQ ID NO: 80377 - RNA, 86 nt, Homo sapiens
gcggccagggaaggaagcaaagcaaaggagaaggcagcgggacggacaggcagggaagcaacgcagaggaaagaccacagcaagac

SEQ ID NO: 80378 - RNA, 87 nt, Homo sapiens
caaaggcaaggcaagcagaccaagacacccaggagaaagacagcggggaaaagaaaaaggagggggcaaaagggggcaaggaagggg

SEQ ID NO: 80379 - RNA, 69 nt, Homo sapiens
aaacacccagacccaaacacgaaggcacaggcaaaagaaggggagcaggggcggaacgacagaaggggc

SEQ ID NO: 80380 - RNA, 73 nt, Homo sapiens
acacggggcccggggacggccaaagaagacccaaaggcccagccagcagagccacgccagagcaccggggaca

SEQ ID NO: 80381 - RNA, 92 nt, Homo sapiens
cgggcagccgccgccaccccgcggccgcacccccgccccaggccaccagcggacccccgggggccacccaaaacggccaccacgcccaaagg

SEQ ID NO: 80382 - RNA, 72 nt, Homo sapiens
cgaaaaacaaaaccaccacccggggaggcacaaggcaaggaaaaaagaggggcacggcccgaaacaccagcg

SEQ ID NO: 80383 - RNA, 70 nt, Homo sapiens
cgcccgccgcgcgccgcccacgccccgggaccggaccccgcgccgcccgcggagcgggggccccccccgg

SEQ ID NO: 80384 - RNA, 82 nt, Homo sapiens
cagaccgccgggcaagcaccagagagggacaggaagagcacccaagcgcaagcaaaagaaggcccccccagcagagccaccc

SEQ ID NO: 80385 - RNA, 78 nt, Homo sapiens
cacagaggacagcaggacccaaggagagcagcggaggcgacgcgcccagaaggcagggaaaaaccaggacaaaaagca

SEQ ID NO: 80386 - RNA, 58 nt, Homo sapiens
gccccgggagcgggacacaggagggaaaccaagagcacaagagaagccagccaaaaga

SEQ ID NO: 80387 - RNA, 85 nt, Homo sapiens
agcgagccggagagcgggccaccacgggacccaccgcccggcgccccagccgccccggacgcgccaaggcgcagagaacaccgag

SEQ ID NO: 80388 - RNA, 76 nt, Homo sapiens
aacggaagcacgggaagaagaggagggggaagcagaagaaggacaccccacaccgaaacagaccccagagacagag

SEQ ID NO: 80389 - RNA, 70 nt, Homo sapiens
ggccgcgaccaaggaagcaagagcccgggaagcgcagagggaacacggccacgaggggaacgggacagag

SEQ ID NO: 80390 - RNA, 56 nt, Homo sapiens
ggagccgcaggcagccaagaccagggacgaggagcacaaccagacagggccaccgc

SEQ ID NO: 80391 - RNA, 76 nt, Homo sapiens
gcgggaagcggggcggcgccggacgccggccccgcgggagcaccaaaacagacggaacagccccaagccggaaacc

SEQ ID NO: 80392 - RNA, 81 nt, Homo sapiens
gccacaacccacgaggacaaaagcaacgaccgaggcaaaggcagccgagcaccacgacggagcaagacagacacacgccca

SEQ ID NO: 80393 - RNA, 52 nt, Homo sapiens
gggaagagaacacacggaccgagagagagcagcccgacggccaggaggcgaa

SEQ ID NO: 80394 - RNA, 82 nt, Homo sapiens
cgccggcaagagccgggcggagaaccggggccggagaccgaggacaggccggacaccgcagcccaaaggagagagggcccgg

SEQ ID NO: 80395 - RNA, 76 nt, Homo sapiens
gagacacggaacacaaggaagcaaaagcccagaagacaggcaaccacagagagagcagcccccccccggaggccca

SEQ ID NO: 80396 - RNA, 71 nt, Homo sapiens
ccccgggcaagcaacccgcccagccccaagagcgggacacaggcccggggaaaaacagagaaaacagaagg

SEQ ID NO: 80397 - RNA, 77 nt, Homo sapiens
ccaacagcaggccaggaaggggaaggaacaaagcagagaaaccaaaaggccagacgaacacgagagggagcgaaaag

SEQ ID NO: 80398 - RNA, 65 nt, Homo sapiens
agcacaagcgcacccgcacaggaaggggaggagcacagaacgccaggaccaaaacagggagaaac

SEQ ID NO: 80399 - RNA, 78 nt, Homo sapiens
cggacgcgaaccgcccgggggacagggagaaccgaacaagcccagcgaagcgggcacggggcggagagcgcgcgccgc

SEQ ID NO: 80400 - RNA, 77 nt, Homo sapiens
gcagcaagagggaggaccccaggaaagagcagcaaggccggccgacaacaccgagcaaagaaaaaggggggaccgga

SEQ ID NO: 80401 - RNA, 72 nt, Homo sapiens
ccgcgaaaagagccacggggccaagaagggaagaaaagagacaggaagaagggcagccgggacagcacgaga

SEQ ID NO: 80402 - RNA, 76 nt, Homo sapiens
ggggcgccgcgcggcccggagaccaagccacccaccaacacggggccggcacaacccggagccacccaccgagggc

SEQ ID NO: 80403 - RNA, 75 nt, Homo sapiens
cagcccgccaacgccagcacgcccgccaccggagacagggggggagaaaaaaccgaagagcaagcgcaccaaagg

SEQ ID NO: 80404 - RNA, 77 nt, Homo sapiens
gcgacacgcggccgcggagaccaccgcggcgcggcagcgcgcccgaggaaggcccagggcagccggaaccaagggac

SEQ ID NO: 80405 - RNA, 72 nt, Homo sapiens
cggaccaaaagcgaagaagcgagaaggagcaagcagacagaacaacgaagagaggaaagaagcggaaaggag

SEQ ID NO: 80406 - RNA, 68 nt, Homo sapiens
aagacacaagagacagcaacaaagcaaccggaaagggaccgcaacccaccaaggagcacaggacgaag

SEQ ID NO: 80407 - RNA, 85 nt, Homo sapiens
ggggagggcgaaaaaaaggaagacacaagaaacagcccaagcggagcagggaccaagaaaggcccagggaccaaagcccggacaa

SEQ ID NO: 80408 - RNA, 71 nt, Homo sapiens
ggcgaaaagggaagaacgggagcaaaggaagaaaccgagagaacaacgacacgcaccacaagagagaacag

SEQ ID NO: 80409 - RNA, 81 nt, Homo sapiens
ggcccaggaagaagagcaagaaccagagcaaccagagaaagaagaaacaaagagggacccagccaccaaaaggaggcgaag

SEQ ID NO: 80410 - RNA, 84 nt, Homo sapiens
gacgccgagagccagagagagcggacgacagaacccggccgacccggaccaacaaccccaaggaccggaaggaaaccaccaaca

SEQ ID NO: 80411 - RNA, 70 nt, Homo sapiens
ggcgggcggcgacggcggagggcccggccaagaccggcccagacaggagggcggcagggggggcagggcc

SEQ ID NO: 80412 - RNA, 74 nt, Homo sapiens
ccggcacagcggaccccgcccgagacgaagccggaaaggaaaccgagcagagagaaacacaagcacaagaaaac

SEQ ID NO: 80413 - RNA, 70 nt, Homo sapiens
agacgacgcaccgcaggcagacaaaagggccaaagaagggagagaggacagagggccgcccagcagggca

SEQ ID NO: 80414 - RNA, 82 nt, Homo sapiens
gcggcgcgccgcccggcgagcgggccggaggaaaagaaagcgggcacagaaagcgagagagccaaagacgagaggagaggaa

SEQ ID NO: 80415 - RNA, 81 nt, Homo sapiens
cccgggcacgaccccggacacgggcaggcagacaaaacaacgagggcagaaccagagaggggagaggcccgcaaaccagcc

SEQ ID NO: 80416 - RNA, 63 nt, Homo sapiens
cgggacgggcggacgcgcgagaggaggggacacaaaggaagaggcagccagacagcaccagcg

SEQ ID NO: 80417 - RNA, 52 nt, Homo sapiens
gcgcgggaagacgccgcgaaagcagcgggagagcggaggagaagaagggaaa

SEQ ID NO: 80418 - RNA, 73 nt, Homo sapiens
ggcccaggcacacacagagacaccgaaaccgggagagggccagacaacgaagagaggaaagaagcggaaagga

SEQ ID NO: 80419 - RNA, 73 nt, Homo sapiens
gcgcccgcacccggccgccggggccgcccaggcccccaccacggcgaagccacaaggccggcccagccacaca

SEQ ID NO: 80420 - RNA, 77 nt, Homo sapiens
acggcgcagcggcgacacgagcgagcaccgaagacccgcccgccacaacgcccgggagccccgcccggccaggaccc

SEQ ID NO: 80421 - RNA, 69 nt, Homo sapiens
gcagccgcgggagcgcgcggaagaggcacgcccacagggcagcccgacggcaaccagacacgaagaaaa

SEQ ID NO: 80422 - RNA, 81 nt, Homo sapiens
accaagggaaaccgagaaggccaggagcaacaggggcaagcccaaaaggaagagaagaagaagggagggaaccgagaaagg

SEQ ID NO: 80423 - RNA, 74 nt, Homo sapiens
gcccgccgccacacagcaggagcggagcaggaggaggagagcacagaaggggacaacacccggcaagcccaggg

SEQ ID NO: 80424 - RNA, 62 nt, Homo sapiens
cggaggggaggcgagagcgagaggacccagcccacaccccaggagaccggaaacgagagaaa

SEQ ID NO: 80425 - RNA, 72 nt, Homo sapiens
aggcccggaccgccgggcgcgcggggccccgggccgagaagcacgccaaccggaacacaagccccgggcgcc

SEQ ID NO: 80426 - RNA, 84 nt, Homo sapiens
gacaagaggaagagaagagaaggaagacgcgccgagccacggcccacaggacagcaagccacagaaccaagacaagcaaaccca

SEQ ID NO: 80427 - RNA, 76 nt, Homo sapiens
gggcggggcagagcagcccccagccagccgcgaggggccagccggggagcaaggggagcagcggacgcagcccccg

SEQ ID NO: 80428 - RNA, 81 nt, Homo sapiens
cgaaggaccaccccgagagacagagcgccgcggcgagcagacaaggagacaagggagcgagagcgacgaagagggcaacgg

SEQ ID NO: 80429 - RNA, 76 nt, Homo sapiens
acagcaaccgaccccacccaaacaagaacaacggcagaaagaagcgagaaaaagacagaaggaggagcagcaaaca

SEQ ID NO: 80430 - RNA, 83 nt, Homo sapiens
cggcgggagcgcgagggaggcacgagaagcccggcgacggaggaacgcaggcgcgccagggacccaccaggccacacccagcg

SEQ ID NO: 80431 - RNA, 79 nt, Homo sapiens
ccgcgcgcccgcgcagcccccggaggcaccaaggaggccgacaggcaccacacgaaccgaggcacaccaaaggcggaag

SEQ ID NO: 80432 - RNA, 74 nt, Homo sapiens
agaaagccaggagccacgcaggaggggacaggagagggcagagaaaagcccaccgaaacgaccgccccaaaagc

SEQ ID NO: 80433 - RNA, 75 nt, Homo sapiens
cagaccaagacacacaaccaaacaggagaaaaaggaaagaccacagcaagaccacgcccccagccgggggaccag

SEQ ID NO: 80434 - RNA, 114 nt, Homo sapiens
acgcaacagaccacgcgccgcgacggccggccgcgccaccgcaccgccaccggcccgacccacacgagccagggagccgccgggaccggcccgggagacgacaacccaaaccga

SEQ ID NO: 80435 - RNA, 69 nt, Homo sapiens
ggaaggaagaacagaaacacgaccaagaaggccgcggacccccccccccccaccccacaggagaagaga

SEQ ID NO: 80436 - RNA, 78 nt, Homo sapiens
ccccccgaagaagaccccccacacgggcaaaagcagaccggaaaacccaccggcaagaccacacccgaggggagccca

SEQ ID NO: 80437 - RNA, 74 nt, Homo sapiens
aggcgggaagaggcgaaggccagagcacgagcacgggaaggaggcaacacggaaaccgaggagcaccacaaccc

SEQ ID NO: 80438 - RNA, 70 nt, Homo sapiens
accaggcggcaggggcaaccagacgggccaaggaccaaggacgagcacaaggcaagaccgaagcaggccc

SEQ ID NO: 80439 - RNA, 71 nt, Homo sapiens
agcccggaaaggcccgcggcgaggagcgagcagaggcaaagaagaaagaaagaaagaagaagagacaagca

SEQ ID NO: 80440 - RNA, 84 nt, Homo sapiens
gcggcgaccgagccggagcgccgacgaccaagaggcgaagagaagacgcccccgcaaggacgggcacggaccgcagcgagcgca

SEQ ID NO: 80441 - RNA, 115 nt, Homo sapiens
cggacagagggaagggaacgcccaagagaccaaacggacaacagcaccaggagaagcaaacgaagcaaaaaccgaagcaagagacagcaaaaagaagcacagaaaagcgaacaaa

SEQ ID NO: 80442 - RNA, 73 nt, Homo sapiens
aagccgaaaacacccgcaaccagacaggcgaacaagaggcgccagcgggcgcgccggaagaacagcgccacgc

SEQ ID NO: 80443 - RNA, 69 nt, Homo sapiens
ccagcaggccaacaccacagaagacaggacacaaagcacgcgacaggaaccaggacccgaagacaaaac

SEQ ID NO: 80444 - RNA, 71 nt, Homo sapiens
gccgcgcaccgacccgacgcgccggcccacgcgcggccaagggaggaggacaggagaacgggcggggcgaa

SEQ ID NO: 80445 - RNA, 53 nt, Homo sapiens
ccggccaggcacaagggcaccacaaaggaagaagagagggcgaaggaggccac

SEQ ID NO: 80446 - RNA, 73 nt, Homo sapiens
ggaaacgagcacgggcgaccaccgaagcaacaaggggaaggggcaaaagagcaggagcggaaacccaggagcg

SEQ ID NO: 80447 - RNA, 72 nt, Homo sapiens
cacggcgaagagaagcacaaaaagccgaggaagcacacggaagaccagcacaagagaaggaaaaggaccagc

SEQ ID NO: 80448 - RNA, 78 nt, Homo sapiens
gcgcaaagccggcaccgcccggcccgccagcgccagcggcacggcccgccgcccaagccaacgcaccaaaaggaacac

SEQ ID NO: 80449 - RNA, 88 nt, Homo sapiens
ccagcgccaccaccacgccagccgcaccagccgcccaagccgcacagccgcggcggcagcagcaggagagagaagacggaacaagaaa

SEQ ID NO: 80450 - RNA, 100 nt, Homo sapiens
cgagccgggaggaacggcccggaaacaggaggacgggcggccgagcccgggggaggccccggagcgcagccgggcccagcccaccccgcgccggcggcca

SEQ ID NO: 80451 - RNA, 67 nt, Homo sapiens
aaaaacaaagaagacccaggcacagcagaagaagcacacaaccacagcagcggggacgggcaaccac

SEQ ID NO: 80452 - RNA, 81 nt, Homo sapiens
cggaggcgggcgcgccccaccaccgccccaccagcacagggagaggaacaagcagaagaaggcaacaagacggagcaccgc

SEQ ID NO: 80453 - RNA, 76 nt, Homo sapiens
gggaggacaaccagaccccaacgcacgaagccaccaaaggacaggagaaaagaaagcaaccagccgagacaagcag

SEQ ID NO: 80454 - RNA, 83 nt, Homo sapiens
ggagacgccgggcagccgaacggagggcgacggagggaggcgggagcagcggaagacaccaaggccagggagggccaccgcac

SEQ ID NO: 80455 - RNA, 75 nt, Homo sapiens
aaaggagacgaagaaagaagagaaagcagcagcacccaaaccggggagaagcaacccccagccacaacgcgaacc

SEQ ID NO: 80456 - RNA, 85 nt, Homo sapiens
gccgaggcgcccccaccacccacaagggagccccacccagagccccaggccgcaggcccagacccacagccgggccaccgaggac

SEQ ID NO: 80457 - RNA, 82 nt, Homo sapiens
agaggaaggagcggcgcggcgcgcgcggaagaggccaggacaacggccacagagaagccggaagacacgggcgccgggaccg

SEQ ID NO: 80458 - RNA, 82 nt, Homo sapiens
aggaggacgacgggaccgggaccgcgcggacccggccgggagaagcagcagcgcaagaacgcggcagaacggaggcaggcag

SEQ ID NO: 80459 - RNA, 60 nt, Homo sapiens
cacaccggaccaggaaacggaggcggaagggaccagccaagggaagcagagaacgacgaa

SEQ ID NO: 80460 - RNA, 75 nt, Homo sapiens
gccgacagacaaccaggggaggagaggacccccagacggcgaaccaccaaaagggaccagagcgggcacccacaa

SEQ ID NO: 80461 - RNA, 79 nt, Homo sapiens
gccaccggcgggaggaacaaaaggccccagggcaggggcccggagagcgcgccccccaggacccagaccgagccccgca

SEQ ID NO: 80462 - RNA, 84 nt, Homo sapiens
aacagaacagcagaagcagcaccaggaggcagccaaagaagacccagaggacacaaccaagaggaggcgcggaggaggaggagg

SEQ ID NO: 80463 - RNA, 72 nt, Homo sapiens
aaaaccgaccagggcaacaccaaaaacaaaacgaaccaggacggcaacgccacgcagagccccgccaggaag

SEQ ID NO: 80464 - RNA, 71 nt, Homo sapiens
gggaggaggagggggaacgaagcagagcccaacaggggagccgagaagccgaagcagaaggaaaccagccc

SEQ ID NO: 80465 - RNA, 75 nt, Homo sapiens
agaaaacaagggcgcaggaccaaccccccggagccagagagaaaccgaagaaggcccacacacacaggaaggcag

SEQ ID NO: 80466 - RNA, 78 nt, Homo sapiens
caaacaacaccaaaggaaagaaggaaccagcaaagcgccacgaagcacaagcaagaggaccagccaaaaccacacagg

SEQ ID NO: 80467 - RNA, 76 nt, Homo sapiens
gagaccacaccggagacgcagacagcaccccgagggagagggcccaggagcagccgcaacagcgcaccgacacaag

SEQ ID NO: 80468 - RNA, 82 nt, Homo sapiens
gaaccacggaaacaacaggcgagaccggagaggaccggacggacgggacaaggaggacaaccccgacgaagcaggggagcgg

SEQ ID NO: 80469 - RNA, 80 nt, Homo sapiens
cagaaaacccggccagggacaggaaagaaggacaagcccgagaagcaagaccgccccaaaaagcaagaaaagaccggagg

SEQ ID NO: 80470 - RNA, 54 nt, Homo sapiens
agagcccccccagcggccaaacccaaaccccaccacaaaccaaacgagcaagaa

SEQ ID NO: 80471 - RNA, 74 nt, Homo sapiens
ggcagcgcgggacccagcccaggcggcgcggacggggcggcaccagaggcggggcaaagccccccagcgacacc

SEQ ID NO: 80472 - RNA, 69 nt, Homo sapiens
gggcaaaggcacgaacaaaggcgacccagacaacgcccagcgaaccgccagggagccagaagcaggggc

SEQ ID NO: 80473 - RNA, 85 nt, Homo sapiens
gcacaagagggggaacgaaccacccaccgccaggaggaagaagaggaggagaggaggcgcccaaggacagcccagcacgaggaag

SEQ ID NO: 80474 - RNA, 67 nt, Homo sapiens
cccagcggcccagccggaagagcacaacacagaagaaacggcaagcaaggacgaacacacaagccga

SEQ ID NO: 80475 - RNA, 70 nt, Homo sapiens
agcacgggcggagcgaacgaaaccccgagaaaacgagcacaacaaccgaaggaagcaccacccagccaga

SEQ ID NO: 80476 - RNA, 85 nt, Homo sapiens
gcccgaccggaccgcggagggagcgggagcgaggcgaggagaggggagcggggggcgccgcgccaagggaacccgcgcccagaag

SEQ ID NO: 80477 - RNA, 74 nt, Homo sapiens
gcgccacggggacccggccagccagcaccaggcgaggacaaagacgggacaaggaggggagaccaccccaagcc

SEQ ID NO: 80478 - RNA, 66 nt, Homo sapiens
cgcgccaccccaaggaggacggcggacacggccagcgaggacagcccccacagccagaaaaaagac

SEQ ID NO: 80479 - RNA, 51 nt, Homo sapiens
gggcccccccagacagcacgaaaggcaagagcaggcaccaagccagcaagg

SEQ ID NO: 80480 - RNA, 67 nt, Homo sapiens
agcagcagcggaagagccggaagaccaggaaggagccggggcggaaggccaggaacgggaccagaac

SEQ ID NO: 80481 - RNA, 35 nt, Homo sapiens
agccagcaacaccgggaaagagggaccagcgcagc

SEQ ID NO: 80482 - RNA, 69 nt, Homo sapiens
gaaccacggaaaggaggaagaagacaccggggacagacaggcggcaggggcgagcggaccagcgaaaag

SEQ ID NO: 80483 - RNA, 59 nt, Homo sapiens
gacaaggcaccgcccagggccagccgcccaccccagccggaagagagagagagacgagg

SEQ ID NO: 80484 - RNA, 58 nt, Homo sapiens
cccaccaaaccggagggggaaaaaacccaaggcgcaaagaacgccagaacaaacagcg

SEQ ID NO: 80485 - RNA, 86 nt, Homo sapiens
gccgcggcggggcgacggccgcggggaccggagcgagaggagcgcgccggaccagcgcggcgacaaaaccagacccccgacgccgg

SEQ ID NO: 80486 - RNA, 107 nt, Homo sapiens
acagagcccaccccgaaaagaggcaaaacagggggagcaaaaaggccagaaagggggagggcgaacccggccagaaccaaaaaacccaacaaaacgaaaaacgaaac

SEQ ID NO: 80487 - RNA, 51 nt, Homo sapiens
gaaagaccaacggagacaaaacagccagcacagcaaggcggggcgggcaca

SEQ ID NO: 80488 - RNA, 84 nt, Homo sapiens
cgggaaaacacaccggagacggggggaaacaggcgaggcggcggcgcccggagggcagcgagggccggcccagggagaacgcaa

SEQ ID NO: 80489 - RNA, 71 nt, Homo sapiens
gaaccgccagcaaaccacacagaaaaaccagacaccaaaggaagcaggaaaagccgaacaaacgagcccgc

SEQ ID NO: 80490 - RNA, 84 nt, Homo sapiens
gaggcagaaggagcaggccgcgggaggggagcaccgaagagagccagcagccagaggagaccgaagaagacggagaccaaacag

SEQ ID NO: 80491 - RNA, 66 nt, Homo sapiens
agaagaaaagacacgcagcccacccgcaaggaccggagagcgagacgacaacagggaccagaaagg

SEQ ID NO: 80492 - RNA, 65 nt, Homo sapiens
gagaccagaaacacacagaccaaagcgggagagcccagagacaagcaaagaggcaggacagaacc

SEQ ID NO: 80493 - RNA, 79 nt, Homo sapiens
caaacggagagagccgaaaacgcaaggccgaagccaaagccagagggaacagaggcacagaaaagaagggagacggcaa

SEQ ID NO: 80494 - RNA, 83 nt, Homo sapiens
aagaccagagccgggaccccagccaggggcagggggacaggaagcagccagcccagccgggagaggccaagggcgccccacag

SEQ ID NO: 80495 - RNA, 41 nt, Homo sapiens
accagcggcgagagagagcaagcagcccgacggccaggagg

SEQ ID NO: 80496 - RNA, 37 nt, Homo sapiens
cgggaagaagcagacacaaggccgaagaccccaagaa

SEQ ID NO: 80497 - RNA, 88 nt, Homo sapiens
gacagcggaagaccaaagaggagagaaggacgacaagcccaccgaggacaaagcagccaaccagagaaaagaggaagggcacccgacc

SEQ ID NO: 80498 - RNA, 77 nt, Homo sapiens
ccggagacggggccaacagaccacacgaaggggcagaagagcacaagacggaagagaggagcgaccagacggcagga

SEQ ID NO: 80499 - RNA, 72 nt, Homo sapiens
agagcagagcaaccgagaccaagacacccaggagaaagacagcggggaaaagaaaaaggagggggcaaaagg

SEQ ID NO: 80500 - RNA, 73 nt, Homo sapiens
gcgagaaaaaacacagagacgaacaagacgcaacagggacaagcagaggccgagggcggggcacagaaggggc

SEQ ID NO: 80501 - RNA, 80 nt, Homo sapiens
acgccagcgggacgaggaccgagaccgcggccgggaccgagggacgaagccggaaaggaaaccgagcagagagaaacaca

SEQ ID NO: 80502 - RNA, 50 nt, Homo sapiens
cggcccaggacagaaaccagagcagagaagaaccacacggccccaagagc

SEQ ID NO: 80503 - RNA, 100 nt, Homo sapiens
gccgggagccggagcgggcgcggacgccgaggcaccgaggcaccagaggagggcccggccaggccccaccgccacaagcaggggaacaccgccaacccca

SEQ ID NO: 80504 - RNA, 71 nt, Homo sapiens
cccacaaaagcaagagacacgccggagacacgccggccgcccgggcgcggaggcgccggagacaagcgcag

SEQ ID NO: 80505 - RNA, 74 nt, Homo sapiens
cacgcgcccggcgcccagcccaccagcacggcagcaaaggacaaccacagggcgcacccccccgcccaaccggc

SEQ ID NO: 80506 - RNA, 70 nt, Homo sapiens
aaaaagaagaagagacgagaagagaaagaagcaggagcggcccccaggacaaagacaaggaagcgaaaga

SEQ ID NO: 80507 - RNA, 69 nt, Homo sapiens
cgcaagcccagcgggacagggaagaccaaagcaagggaggagaagccagccccgcggcgggcgggaagg

SEQ ID NO: 80508 - RNA, 60 nt, Homo sapiens
aggggccgggggccagacgcacgcccacagggaagggaccagcagaccgcaccggaaccg

SEQ ID NO: 80509 - RNA, 78 nt, Homo sapiens
acacggaagagggaagaaagaagcagcgccagcacccagaggccccacaggcgcagagcccaaagcaagggcaagaag

SEQ ID NO: 80510 - RNA, 77 nt, Homo sapiens
ggggagcgaacgggacagcccacacccggcgcggaggcccagagggaacccaccagaaaacgacacacaaacgcagc

SEQ ID NO: 80511 - RNA, 64 nt, Homo sapiens
gagagacaagcaggacacagaccaaccaagaagcgaagaaaagagaaagaaacagacaagcgag

SEQ ID NO: 80512 - RNA, 63 nt, Homo sapiens
aaaacacccaggaaaaagagcgagacagcggccagcgagggcgcgacgcgggcccccagccag

SEQ ID NO: 80513 - RNA, 38 nt, Homo sapiens
caaggagaacccagcccgacggagagacggggcgccgg

SEQ ID NO: 80514 - RNA, 71 nt, Homo sapiens
gccagcgaaaacgcccagccaggaaggagaccgacgagacaggaaccgcgcgcccccacgggcaggcgccc

SEQ ID NO: 80515 - RNA, 78 nt, Homo sapiens
aggagaaccgccccgccaaggagacgccccacgaggcccaaaccgccaagccagcgaggggggccggggcaaagaccg

SEQ ID NO: 80516 - RNA, 75 nt, Homo sapiens
gccaggaccccagcacacccagcagcacaccgcacagaccaggacgcgccgccaggaggaccccccgcggaggga

SEQ ID NO: 80517 - RNA, 78 nt, Homo sapiens
gcggagagcggccccggcacgccggcgcccgcaccccggggcccaggaagggcggcccagggacagagagccgaaagc

SEQ ID NO: 80518 - RNA, 85 nt, Homo sapiens
agcagaagcgggcccgggcggaccgggcgccgaagcccgaggcagaggaaccggccccagaaagaccacacagggaaacgaccag

SEQ ID NO: 80519 - RNA, 78 nt, Homo sapiens
ggccacccaccaggacaccaccccagagcacgcagcggaaagccagagagcccggagccgaggggggccggggcgggg

SEQ ID NO: 80520 - RNA, 76 nt, Homo sapiens
cagcgccaccgccgaccgaagccgcaaaacaccgagaaaagagaggaaggcccccaagcaacggacgggagcgaag

SEQ ID NO: 80521 - RNA, 71 nt, Homo sapiens
aagcccggcagaagacacaccgcccggaagaacgccagagaaagaaaggagaagacggacacagacgcgca

SEQ ID NO: 80522 - RNA, 81 nt, Homo sapiens
gcccgggcggagagaaccaacggggccgccagacacccgcggcgaaggcggccgggccgggcccggcagaacaagaagggc

SEQ ID NO: 80523 - RNA, 81 nt, Homo sapiens
gacaccccggagacccgaaggccgcggcccgggggggagcggaagagcccagaggaagcgaccaggcccggcagaaggcag

SEQ ID NO: 80524 - RNA, 65 nt, Homo sapiens
aggcgcaaaagacggaagagcgaccagggacacaagaagcacaaccccaacggggcggcagaagg

SEQ ID NO: 80525 - RNA, 73 nt, Homo sapiens
ccggccgccccaccggcggaacccagcaagagcaaaggcagcgcgagggcggggggccaagcccccagccccg

SEQ ID NO: 80526 - RNA, 79 nt, Homo sapiens
gaccgagagcgcgaaacgcacgagaaggaggaccggcgggagccagcaaccccaagcaagccggcagcccggccccagc

SEQ ID NO: 80527 - RNA, 71 nt, Homo sapiens
gggggccgaagaggaaagaaaagcggggcccaaaacagcccgagacgaagggacaaaccggcgaccacaca

SEQ ID NO: 80528 - RNA, 61 nt, Homo sapiens
aggaccggcaacagaggggaagggagcccaaaacaggagcgcagcaagcaccgaacaaggg

SEQ ID NO: 80529 - RNA, 69 nt, Homo sapiens
ggccggaaccagaaaaccaccaggcccccaagagaccaggccccgcggaacgggcacaaagaaggcgca

SEQ ID NO: 80530 - RNA, 43 nt, Homo sapiens
ggacacaaccggaaccgcagggcagcgccaacggcaagccgcg

SEQ ID NO: 80531 - RNA, 82 nt, Homo sapiens
ggacagcgcgggagaggaggggccgagccgaggggccgcgcccgccggcggggccccacccagcaggccggggggggcacag

SEQ ID NO: 80532 - RNA, 81 nt, Homo sapiens
ccaggacaaccaagcacagaaacaaccccaaaaaaggaagggaaccaccaggaaaggggcaccccccaccacgccaaggag

SEQ ID NO: 80533 - RNA, 95 nt, Homo sapiens
gagacgagacacggcagcaggcgcgcgccccccgagcaggaggaggccagcggggaggacgcgaggccgggcagccgaagagcccaaggaagcag

SEQ ID NO: 80534 - RNA, 85 nt, Homo sapiens
ggcaggagggccgcacaaagcgccagcagcccgggggcgacgacgaggaccaggagccaggggcgggggaacgaggagaagccgc

SEQ ID NO: 80535 - RNA, 78 nt, Homo sapiens
cgcccccgggcccggcccggccgcggcccccgccgcggcacgaccccacagaacagcgcgagccacaaggcaaggaag

SEQ ID NO: 80536 - RNA, 73 nt, Homo sapiens
agccgccacaagagcggccaacaaaacgaggagcccaccacagcaagggagaccaggcacggaccaggaagcc

SEQ ID NO: 80537 - RNA, 52 nt, Homo sapiens
agcagagaccagggcgacgcgggaccagagcggaacagccggacacaagagg

SEQ ID NO: 80538 - RNA, 57 nt, Homo sapiens
gccgggagcgcggggcgggggcgcccgccgcgccgccacgagagcagaacaccggaa

SEQ ID NO: 80539 - RNA, 74 nt, Homo sapiens
gacgccagaagaccaagaccgcagaccgaccccgagagaggacggccagccagaccaaggacagccaaggaagc

SEQ ID NO: 80540 - RNA, 72 nt, Homo sapiens
cgggggcggcggggcaagcggcgccaccaccagcaccagaagccaggaagggaaagacggagacaacagaga

SEQ ID NO: 80541 - RNA, 83 nt, Homo sapiens
cgggcacccgcagcgcagaaggaaccggcaaagcgcaggaacgggaacgcaggagcgaccaggacccgaagacaaaaccaccc

SEQ ID NO: 80542 - RNA, 75 nt, Homo sapiens
accacgccaaacagaagccagaacgcggacccccgcaggaaagaggagccgaacaaccaaaaaccaagggagcaa

SEQ ID NO: 80543 - RNA, 71 nt, Homo sapiens
gcccccgcgacccggaccaccgggcgcggcgccccagccgcgcggcccgagccccaggagagccgaggacc

SEQ ID NO: 80544 - RNA, 75 nt, Homo sapiens
gcgggaggacaccacccacagaaacagagggaggaccaagccacagggggcccaagcccacgaaaacacagacag

SEQ ID NO: 80545 - RNA, 42 nt, Homo sapiens
gaaggaccaagaaccagaaaggggccgccccccaacgagcag

SEQ ID NO: 80546 - RNA, 76 nt, Homo sapiens
aaacaggagaccgcggccgaccagagaacaggagcagggccaggacgaacaaagccggagcggagacaaagcagag

SEQ ID NO: 80547 - RNA, 79 nt, Homo sapiens
cacgcacacggccccgaccggcgggccccgggcacaccaacaagccacgaccggggagcagggcgaaaaaacgagaaag

SEQ ID NO: 80548 - RNA, 76 nt, Homo sapiens
acagcccagagaccagaaggccgagacagagcgccccaggcggggccgcgcagcgcgcggagaagggacacacgga

SEQ ID NO: 80549 - RNA, 80 nt, Homo sapiens
agaggcgggacgacgacacacacaccaccccaagcaggagccaaaaaccgaacacccggaaggggacaagggacggcgaa

SEQ ID NO: 80550 - RNA, 67 nt, Homo sapiens
aaggccacacaacagagccaaaaagacccgacgcgagaaacagccgaagccaacaagaaagggaaac

SEQ ID NO: 80551 - RNA, 75 nt, Homo sapiens
ggcggggaaaagggaaggaaaagagacgcagcccgaaggagggacccagacacccccgcagcacgcgaaggcaca

SEQ ID NO: 80552 - RNA, 62 nt, Homo sapiens
cagggaagaccccgaaggaccaagccccggagcccgccgcccgccaccaggccagcagcgaa

SEQ ID NO: 80553 - RNA, 72 nt, Homo sapiens
gcgcggacaagacccccagcacaacacaccggggcccccgaaaggccgaggccggggcagcaccgaggaagg

SEQ ID NO: 80554 - RNA, 83 nt, Homo sapiens
ccgggcggcggggcgccgccgcggccggcgcgggaaggacgagcccccgcggagacagcccgaagaacccgaacgcaagcggc

SEQ ID NO: 80555 - RNA, 33 nt, Homo sapiens
cgaaagacccaccagagcaccaggacaaaagaa

SEQ ID NO: 80556 - RNA, 72 nt, Homo sapiens
cagacaaccggagccacgccccacgaccgccagaaggagaacaggaggaggaaaacagaacagccgagcggg

SEQ ID NO: 80557 - RNA, 121 nt, Homo sapiens
ccgaggcgaaggaagaggcggacggcgggaccacaagacaacgcggagcggcgaagagcaaccagcggaggcacccaccacgggccaggcgggccagaggcaagccgcgggagccacgccg

SEQ ID NO: 80558 - RNA, 66 nt, Homo sapiens
caagcaggaaacaagaaacaccaacacaaaaaaaaccaacagccccccaggacgccgccagccacc

SEQ ID NO: 80559 - RNA, 41 nt, Homo sapiens
cggcacgcaaaacggccgcccaagaacgagcccgacccagg

SEQ ID NO: 80560 - RNA, 51 nt, Homo sapiens
aaagaccaggacggacaagcacagccggaaggaggggaaagggaaggaacg

SEQ ID NO: 80561 - RNA, 59 nt, Homo sapiens
acaccaggaagagaggaagcgggggccgagaccacacagcaaaaaagacggggaacaac

SEQ ID NO: 80562 - RNA, 111 nt, Homo sapiens
gcgaaccgacgccgggcggaaaaccaccaaaaccggcagcgagccgagcaaaaaaggcgacggcggagacagaagagaggagagcccacaaacggcaacagccagggacag

SEQ ID NO: 80563 - RNA, 65 nt, Homo sapiens
ccccgggagccaccgggggcggaggagggagccagcacagaaccggcggggcgcggaggaccgac

SEQ ID NO: 80564 - RNA, 34 nt, Homo sapiens
ccagaaccacagagggccgcgaagagcagcagcc

SEQ ID NO: 80565 - RNA, 50 nt, Homo sapiens
gccggccaaaccgaacacaccaagcaacggagcaaggaaagagcagaagc

SEQ ID NO: 80566 - RNA, 72 nt, Homo sapiens
gcgcggcacgagggacccccacaagcaagcacaaggcaggaaacaaagagaaacggggacacgccgagagac

SEQ ID NO: 80567 - RNA, 54 nt, Homo sapiens
cacaggaaaaaagaaggcacgaaggccagggcggaaggaaaaggagcaacacgc

SEQ ID NO: 80568 - RNA, 75 nt, Homo sapiens
aagaacggacaagcagagcccagccccagaaaggacgaaacggaaaagaagaacgacacagcagcaaaggaggcg

SEQ ID NO: 80569 - RNA, 80 nt, Homo sapiens
gacccaccccccaacccagggagcggcgcagaccgagacccggacagggcaggaaacaggccgaccccgggacacaccca

SEQ ID NO: 80570 - RNA, 41 nt, Homo sapiens
acgaaggccaccacaaaagcagggagaaaacgagcggagag

SEQ ID NO: 80571 - RNA, 85 nt, Homo sapiens
cgagcggcggcgggggccagcccccagcccggagaagccaaaggcaaagccagcagaaaacgagcccggcacagagaacggcaga

SEQ ID NO: 80572 - RNA, 75 nt, Homo sapiens
cccgcacagccgcagggagagcaggaggagaccaaacaccagacggaggccggcacagacgagaaagaggagccc

SEQ ID NO: 80573 - RNA, 81 nt, Homo sapiens
gccgagccggacggccgcgaagaggcgggccggccagaacaagccgggagaggaacagcgcgccgggcgcacgaacagcag

SEQ ID NO: 80574 - RNA, 83 nt, Homo sapiens
gggagcgccggaaacccgggccccggccccaagggcaccgggacagaagccaaaaagccacccaagcaggcacagaacaggaa

SEQ ID NO: 80575 - RNA, 43 nt, Homo sapiens
cagggccaacagccagggaccgagccaggaggccgacccgacc

SEQ ID NO: 80576 - RNA, 63 nt, Homo sapiens
cacacacaccggagagcacgagaaggggaggcaagcaggggggcaaaggaaagaaggcagaaa

SEQ ID NO: 80577 - RNA, 74 nt, Homo sapiens
ccgagaaagcaaacagaaaggccaaaacccccaagaacacgcgccggaagaagaggaagccaagccaggaaaaa

SEQ ID NO: 80578 - RNA, 65 nt, Homo sapiens
gacggcaaaaagggcagaaccaagcaggggcgcggagcccagggagaaagcggacggccacaccg

SEQ ID NO: 80579 - RNA, 56 nt, Homo sapiens
gccagcgaaaacgcccagacacaaaagccaggaagacaagagcagaagaaacagac

SEQ ID NO: 80580 - RNA, 115 nt, Homo sapiens
ccagccggcagacaagcggcccagggccacggcagcacgagaagacggaaagcgacgggacggaaggccacacaaaagaacacgaaagacaccagcccgggcagagagaagggac

SEQ ID NO: 80581 - RNA, 90 nt, Homo sapiens
cggggccggcggcgggcgccgagggacgccgaggcccgggcgggggcggcccggggccaggcggaggcggcggggaaaccaaccccgcgg

SEQ ID NO: 80582 - RNA, 73 nt, Homo sapiens
gcccggcacgaccgcggggcagcaagagggccccgcgaccaggggcgcaggcccgggagcgagacgcaacaga

SEQ ID NO: 80583 - RNA, 69 nt, Homo sapiens
caagagaaggaaaaggggagaagcgcaccaagcgccaggcagccagagccagcagacccaccaggccgc

SEQ ID NO: 80584 - RNA, 76 nt, Homo sapiens
agaagaagagcgcaacaaccagagaaccccaaagacaaaagagcgaaaacaggcaagacggagcgggacgggaacc

SEQ ID NO: 80585 - RNA, 74 nt, Homo sapiens
aaccgacacaccgagacgcgccaggaaagacaacggaccgggggacagaggaccggaaaaaaaacaaaacgaag

SEQ ID NO: 80586 - RNA, 60 nt, Homo sapiens
ccaagaccgggcaaagcacaggggcgacgcgaaagcccagagagagaaaaggcaaagcag

SEQ ID NO: 80587 - RNA, 75 nt, Homo sapiens
aagcgccccagaggacacacgccaagggcgcacgaaggggaaccgaagcgaacacagcgaccagagcacaaaggg

SEQ ID NO: 80588 - RNA, 76 nt, Homo sapiens
acaagaaaagaagaagaagagaagaaagagaaaccgagccccgacaggccggggagaacaggcaggagaggccgcg

SEQ ID NO: 80589 - RNA, 68 nt, Homo sapiens
caaaaacagccacgaacacagacccgacagaagcaaggggagacaggcgcccgccgcccccccaacag

SEQ ID NO: 80590 - RNA, 57 nt, Homo sapiens
caaggacagagcaggaccaaaagaagcaaagaacacagaaccggagagacacacagc

SEQ ID NO: 80591 - RNA, 65 nt, Homo sapiens
gggggccaggcgaagaccggaccgggggcaccggaccgagaacacgacccgggccgcagccgacc

SEQ ID NO: 80592 - RNA, 43 nt, Homo sapiens
gaggaaaacaaccgagggcagaagaaacaggcaggccagaaag

SEQ ID NO: 80593 - RNA, 91 nt, Homo sapiens
cgagccagcgcccggagcaagcggagccccccaagagccggaaagggggaaggcggcaaggacacccgaaacccaagagacagagcagaca

SEQ ID NO: 80594 - RNA, 77 nt, Homo sapiens
gacaagagcgcaaggagaacaaaacaggcagggaggagaacggaccagccgaagaggaacaaccccacaggaagaga

SEQ ID NO: 80595 - RNA, 70 nt, Homo sapiens
agcggacaggcacagacaaccagccccacaagacacggacacaccaagcccgggccaaggagacccacaa

SEQ ID NO: 80596 - RNA, 73 nt, Homo sapiens
gcagagcaggcaggcaaacggccaaccagaagacggagcaggcaaaggagaaaagccaagaagaccgaacaga

SEQ ID NO: 80597 - RNA, 85 nt, Homo sapiens
cggggccgaggagcgggcacagggcaaggcggcggacggcgcgcgcccgaggcgaggaggagcgcggcgcgaacacgccaagaca

SEQ ID NO: 80598 - RNA, 74 nt, Homo sapiens
cacacaaaaccaggcgaacgaagaagcgggccacccacaaaagaaagccaacccagcgaaggaacaagcaaacc

SEQ ID NO: 80599 - RNA, 73 nt, Homo sapiens
aaggccacggaagcagagaaaccaccccacccaacccccgacacagaagaggagaaaacggaacaacaggagg

SEQ ID NO: 80600 - RNA, 75 nt, Homo sapiens
cgcagaggcagaagcccccaagaaagcggggcagccccgcaggcacaggggagcgggacgggcggcgagcggacc

SEQ ID NO: 80601 - RNA, 35 nt, Homo sapiens
caggcggcgcggacggggcgggggagaaagacccc

SEQ ID NO: 80602 - RNA, 78 nt, Homo sapiens
aggcgggcaaaccccacgaggcagcccaaaaaaggagaaccccaaggcaaaacaagagaggaacgcagcaccacagag

SEQ ID NO: 80603 - RNA, 68 nt, Homo sapiens
cagaggaaggagcagcgcaaggccaacgagggacggacagcgcgacagggcccgagagcaccacagga

SEQ ID NO: 80604 - RNA, 38 nt, Homo sapiens
accccgagggcgggacacaggacagacgagaaaggcgg

SEQ ID NO: 80605 - RNA, 76 nt, Homo sapiens
ccaggagcgcccccggccacggcccaggcacggcccccagcgcagccgcagccaggcaagcgaagcccgagggaaa

SEQ ID NO: 80606 - RNA, 77 nt, Homo sapiens
ccgacgccggcaggcggggccgcgccacccgcaaacagggcagcacaacaacagcaacggaggcgggaccggaacag

SEQ ID NO: 80607 - RNA, 92 nt, Homo sapiens
ccggaaaccggaaggagaaggccaccgggggagcggggggacaggaaagcagacgcccagaagagcacaaagaaccaacgccaaggcagcgc

SEQ ID NO: 80608 - RNA, 69 nt, Homo sapiens
agagaccaaagcgccccagcgcacgggcaaggcgcccaaaacaagcgaaggcgaccagaagacggaaga

SEQ ID NO: 80609 - RNA, 68 nt, Homo sapiens
gcgacaggacgggaacggcagaagcacacccaacacccgggaggcggggaagcgaaggcgccaaaaca

SEQ ID NO: 80610 - RNA, 58 nt, Homo sapiens
aagcaaagaaagaagcaccgaagcgccgggaccagggcagggaccccggaaccgaagg

SEQ ID NO: 80611 - RNA, 80 nt, Homo sapiens
ggaagggaggagacccgaccccagaagacaagggccgaacaccaacagaggaagaaaggagagccgcagaagcaagagaa

SEQ ID NO: 80612 - RNA, 79 nt, Homo sapiens
cccggggccccgacagaccaccccgccaacgcggcaccgcagaacgccacaaccagcggcggagggggcagggcagaag

SEQ ID NO: 80613 - RNA, 35 nt, Homo sapiens
cgcgggccagccaccgggccgaagaaggggaccca

SEQ ID NO: 80614 - RNA, 77 nt, Homo sapiens
gagcgaaaaagggaggagagagagccaccagccaggggacccacgagcagccaaaaaaagaagcaaaagacgcagaa

SEQ ID NO: 80615 - RNA, 80 nt, Homo sapiens
acggcgagccgggcgacagcaacgcggccgcggcaccgcccaagggagacagacaacaaaaacacggacccaacccacaa

SEQ ID NO: 80616 - RNA, 70 nt, Homo sapiens
gggcgaaggcgcaggaagaaggaggggaagaacgaaaagacaacaaagaccggaaccaaacagagcaaga

SEQ ID NO: 80617 - RNA, 67 nt, Homo sapiens
accacacgcccgcgcgaggagacaaagacgaaacgaacgcaggaaacgagaagacaacggccgagaa

SEQ ID NO: 80618 - RNA, 70 nt, Homo sapiens
ccggggcagaccaaacggcaagcagaaccgcggaggcccacccaaccacaggggacccagcccacacccg

SEQ ID NO: 80619 - RNA, 77 nt, Homo sapiens
gggggcgggaggccgagggggcggcgggggccgaggcgaggcggaggcagaggccgggaggaaagaggcgggaggcc

SEQ ID NO: 80620 - RNA, 40 nt, Homo sapiens
cagcccgcccaaagaaagaaggaggggccgggagaggaag

SEQ ID NO: 80621 - RNA, 61 nt, Homo sapiens
agaaagggaagaagggagacaaaggaaaacaaaggcgcgcaaaccagcaaaagcagaaagc

SEQ ID NO: 80622 - RNA, 63 nt, Homo sapiens
gcccgcgccggcaccggggcggccggccaaagccaggacagagcgggagccaccagcgccaaa

SEQ ID NO: 80623 - RNA, 83 nt, Homo sapiens
ccgaacaaacaaacacccagaaacaagagcaacccacaaggacagaagcgccaggaacaaggagaagacgccccccccacccc

SEQ ID NO: 80624 - RNA, 69 nt, Homo sapiens
acgaagcaacccaaaaaggcgcaagaaccaaaaacaaaccaacagaagggccgaaacggagcaggaacc

SEQ ID NO: 80625 - RNA, 71 nt, Homo sapiens
gcgggcggaagacgaggccacagacaccgaaggaagaagcacaaggaccgaggaaccacgccagggcccca

SEQ ID NO: 80626 - RNA, 72 nt, Homo sapiens
gacggagcggaaagcccacgggaacgaagcagagcccaacaggggagccgagaagccgaagcagaaggaaac

SEQ ID NO: 80627 - RNA, 72 nt, Homo sapiens
cgcacacgccggggagcgcgcgaacgacgcagcaccgggggaacacccacccggagaccggaccgaaggcag

SEQ ID NO: 80628 - RNA, 81 nt, Homo sapiens
agcgaacgccgcagcagaaagccaagaaccagcggaccaggccaccgggacccggagcgcagccgcccgggagaagcacga

SEQ ID NO: 80629 - RNA, 80 nt, Homo sapiens
accaagaagcaccgggggggggcgaagacccaggacagggcaccacccaaaagagggaggcagaagaacccaccgaggcc

SEQ ID NO: 80630 - RNA, 78 nt, Homo sapiens
gacgaccgacaggggggaaaggccagccaccgcggcagcgcagcagcccggccaggagcaaccgccagacggagacag

SEQ ID NO: 80631 - RNA, 84 nt, Homo sapiens
cgaggcggcggcggcagcagcgagagccccggagcagggagcgggcacggacagcggggcggaccccgagccaggaccgagccc

SEQ ID NO: 80632 - RNA, 74 nt, Homo sapiens
aaccgaaaaacaagaaggaaaaacgccacgcaccggagagagcacagcccaggcgaagggagagcggggagccc

SEQ ID NO: 80633 - RNA, 53 nt, Homo sapiens
gggaggcaaagggaggaggaggaccggaggggaccccacaccacaaaccgagg

SEQ ID NO: 80634 - RNA, 83 nt, Homo sapiens
aaccgcaaccagacgccagcgggacgaggaccgagaccgcggccgggaccgagggaagcccggggcggcgacggagcacgacc

SEQ ID NO: 80635 - RNA, 59 nt, Homo sapiens
accggcaggccaccggggagggaaccaggacggaggggggaggagcaggcccccaccgc

SEQ ID NO: 80636 - RNA, 72 nt, Homo sapiens
cccaccccccgcccagacaacccaaaacaacggaaaagcaaggacaaggccagcgacccacacagcagcggg

SEQ ID NO: 80637 - RNA, 66 nt, Homo sapiens
gaacgagacagaacaggaaaaagggcgaggaaaaccaccacacaggggaaacacccagacaacaca

SEQ ID NO: 80638 - RNA, 74 nt, Homo sapiens
aagcaccaggacccggcagacgaagcaccggacaagagcagagaaagagacgaggaggggaccccaaagcagcc

SEQ ID NO: 80639 - RNA, 53 nt, Homo sapiens
acagaacagcgcccgcgaaaggagacgcgcaagacccacagcaagccagccgg

SEQ ID NO: 80640 - RNA, 83 nt, Homo sapiens
ggccaaaaccacaggaaagaacaagacaggaaccaggcggacggaggaagccccaagaccacaaagacaaaaccagcccgagc

SEQ ID NO: 80641 - RNA, 79 nt, Homo sapiens
accgcacaacgccacccccagagcaggagaagcgagcccggacagaccaaccgcaggcgcaacggagaggcagggcgaa

SEQ ID NO: 80642 - RNA, 74 nt, Homo sapiens
gagaaggccgggcgccgagccggaccggagagcacaagccggccacggcacgggcgaaggccagaaccgagagg

SEQ ID NO: 80643 - RNA, 78 nt, Homo sapiens
ggaaggccaccagaggcgcaggaagcacaaaagggccccggaaaaaagaccaggaaacgggaagccgcgggaagacag

SEQ ID NO: 80644 - RNA, 69 nt, Homo sapiens
acgcaaggagccaccagcacggaccaggaggcgagcaacagccagacgggaggacagaccgcacccagg

SEQ ID NO: 80645 - RNA, 83 nt, Homo sapiens
cggcgcacccgcggcgagaaccggaggagaaggagacgcaaggaaggcccagcgcagcccccgggaccggcccgacagagccg

SEQ ID NO: 80646 - RNA, 81 nt, Homo sapiens
aacaacaaggagacacgccgccggccgccggcggggaccggcacgcaccgccccggagccacagcaaagccacccaaggca

SEQ ID NO: 80647 - RNA, 59 nt, Homo sapiens
gccaagcacgccacccggaagggcaacccaacaacagccaccgggacacccgcaggccg

SEQ ID NO: 80648 - RNA, 73 nt, Homo sapiens
aagcaggcgagaaccaaccccgggcgggaccgcgccagaacaagcaaccacaccagagaggccagcagacagg

SEQ ID NO: 80649 - RNA, 70 nt, Homo sapiens
ggagccagaaacaaccgcaaccacccaacaagaggagcggcgagcgcgaaacgcagccaagaaaaggcca

SEQ ID NO: 80650 - RNA, 67 nt, Homo sapiens
cgcaggcagacaaaagggccaaagaagggagagagcagacgaagggcaggaccgaaccggaaagggc

SEQ ID NO: 80651 - RNA, 57 nt, Homo sapiens
gaccgggcaacagaagaacaacagcaaaacgagcgccaaggaaagaaaacccagaag

SEQ ID NO: 80652 - RNA, 54 nt, Homo sapiens
gacccgggggaggacccccgagccaggaccaacagacccaaagaggacgacccc

SEQ ID NO: 80653 - RNA, 80 nt, Homo sapiens
ggcgccgcgggacgcagaggagagcaaacgccacgcaccgaaaaaggggaaaagagggaccagcacagagaccaacggga

SEQ ID NO: 80654 - RNA, 54 nt, Homo sapiens
cggaaaaaacaacaaagggagaaaggggcaaaacaagccacaaaggaaccaacc

SEQ ID NO: 80655 - RNA, 77 nt, Homo sapiens
gccaaaaaccggacagccaagcaacagcccagcaaggagaaacagcaccaggacacgcccgccggcgccgacaccag

SEQ ID NO: 80656 - RNA, 66 nt, Homo sapiens
cgcgcggaaacggagggggaagaagaaaagacaacacagacaagaaaaaccaaaggacgcaaaaaa

SEQ ID NO: 80657 - RNA, 75 nt, Homo sapiens
cgacgccgcgcgggccgcgcgcgcgcgcccggaaaccgccagaggagcaggccgaccagacacagagaggacgga

SEQ ID NO: 80658 - RNA, 69 nt, Homo sapiens
aaagagaggagggagaacacagaaacccgccccgggcagcaggagaaacgagaagaaacagacgcgcga

SEQ ID NO: 80659 - RNA, 79 nt, Homo sapiens
cacaagcgcaccagccaaccgacaacaggaccccccgacaaagggcaaccaacacgacagggcagagaccgggcaaaag

SEQ ID NO: 80660 - RNA, 75 nt, Homo sapiens
gggagccaggacaacagcgcacggcaaggcagcgccgaagggcgagcgacagaacagagacacccaacccagaag

SEQ ID NO: 80661 - RNA, 81 nt, Homo sapiens
aggggaaccccgacccagaagggaagacaaggacggccggagcagcagaacaagagcggagaccaagggagccccgcagca

SEQ ID NO: 80662 - RNA, 97 nt, Homo sapiens
cccgggaagggaacagagcagacccggacggaacaggcaaaagaggcccacggccccacggggcgacgagccacgggcgggcccaccgcagggggga

SEQ ID NO: 80663 - RNA, 72 nt, Homo sapiens
caagaaccaaaaggcggaaccgaacgcaagaaaagcccacgcccagggggacgaaggcgccaggaccgaaag

SEQ ID NO: 80664 - RNA, 67 nt, Homo sapiens
cgggcgagagagggagcgccgaaaccaggaggccgcagacccaggagagaacaccgaccgcagaacg

SEQ ID NO: 80665 - RNA, 80 nt, Homo sapiens
gccccgaagggcacgcagcagacagccccgggcaccaggcagcaacaggcgcgcacaccaccgggacgcagacccacgag

SEQ ID NO: 80666 - RNA, 57 nt, Homo sapiens
aacagcaagggccaacggaagccagagaaagacacagccaggaacgacaaccgcgcc

SEQ ID NO: 80667 - RNA, 75 nt, Homo sapiens
cgggacaaggaaggacaaagcaacaagcgccgccagggcacaggcaggcggaagggcccggccaggccccaccgc

SEQ ID NO: 80668 - RNA, 64 nt, Homo sapiens
agcgggagaagaggacaagagaaagccgggcgacggccaccaccggcagcaggagaaacgagaa

SEQ ID NO: 80669 - RNA, 87 nt, Homo sapiens
cggacagaagcgcaccggggagcgcaccgggaggcgaagagaagcacagaagcccccgcgacgagcccccaacgagccaccaacagg

SEQ ID NO: 80670 - RNA, 66 nt, Homo sapiens
gacaaaggcgccgcagcaccccccggacccagccccggggagcacaaaagaacaaaagggaaaaaa

SEQ ID NO: 80671 - RNA, 71 nt, Homo sapiens
gggaccgcagggccacaagggcagggaagaccagaaaaaagaaaacagccaaccagaagagaagagccggc

SEQ ID NO: 80672 - RNA, 78 nt, Homo sapiens
aaaggaaagaaagaggaacagagagggaaaccagaagcccaggacgacagaggagaacacagcaacagaagagaccaa

SEQ ID NO: 80673 - RNA, 93 nt, Homo sapiens
aaaaagaggcgagacaaagaagacagcgccggaagaccagagcagaccaaaggcaaaaggaaagaggaggaagaaagcagaaggaagacagca

SEQ ID NO: 80674 - RNA, 74 nt, Homo sapiens
ggaagcccgggaagggaccggcccaggccccccgccccgcgcagcagaccagaggaacccgagcaggaacaccc

SEQ ID NO: 80675 - RNA, 61 nt, Homo sapiens
aaccacagaaaaaccagcaagaacagaagaccggggaccagaagggagaagaagcaaaagg

SEQ ID NO: 80676 - RNA, 66 nt, Homo sapiens
acaaggggcgaaggaaggaagacagagacagaaaagcgggcaacaggggcacacacacgagaaaga

SEQ ID NO: 80677 - RNA, 61 nt, Homo sapiens
gaaggggagcgaccacacgccagacccaggggagaaaagggccagcgcgcccggcgggcca

SEQ ID NO: 80678 - RNA, 68 nt, Homo sapiens
ccgcccaggaccagcaaaccccacacggagcacagcaagcgggagcaggcagaccaaaggaacagaag

SEQ ID NO: 80679 - RNA, 77 nt, Homo sapiens
caccagcaggggggcaacagccagccagccagcgccccgcacccacgaccaggacggagcgccgccccaggcggagg

SEQ ID NO: 80680 - RNA, 81 nt, Homo sapiens
ccccccgcccgggcccaccgcacccagcgccagagacgaaagccaggcccggcccggcggaaaaggagaggcagacccaag

SEQ ID NO: 80681 - RNA, 73 nt, Homo sapiens
aggggcagacagcacaaccagcgccacaaggagaagagaaggagcgcgggcgcgccacgcccgccacacacag

SEQ ID NO: 80682 - RNA, 118 nt, Homo sapiens
ggcagcgagggcagacacgcccgagcccagagaacaagaagacccaggaccagacagaacggagcgagcacaaacgacacacgcaaaccacaaagcccagcaacccgaagagagggcg

SEQ ID NO: 80683 - RNA, 105 nt, Homo sapiens
cgaacgggaaggaggcggccacagggagaggagcgaaacggccaggacaggaaggagaggccacagcccgggaagacagccacaccgagagggacaacaaggacg

SEQ ID NO: 80684 - RNA, 65 nt, Homo sapiens
agaaaggggaaggaaaaccaagaaagaacgagggcagaggccgccacagcgagagacaacagaaa

SEQ ID NO: 80685 - RNA, 80 nt, Homo sapiens
gaggagagggacgacacagcagcacaggcaaggcgcgggggaccggcggcagaggccgacacgaacggacaacaagcagg

SEQ ID NO: 80686 - RNA, 65 nt, Homo sapiens
agaaccggaagagaaggggagaggcgacagggacaacagaacaaaggaagggggcgaccgacaga

SEQ ID NO: 80687 - RNA, 81 nt, Homo sapiens
cggaagcacacaacaggaaaacaaaagaggagaaagagaggggcccacagcccaggcggcgaacgcgggccaagcaacccc

SEQ ID NO: 80688 - RNA, 74 nt, Homo sapiens
gcgaagaaccaagaaaacaaaccgcccgacggggaccagccgggagagcacagcaccacaaaagacacgaaaaa

SEQ ID NO: 80689 - RNA, 71 nt, Homo sapiens
gcacaagacacagcaccagaaaaaagcccggcaagagcaaacaggacagcgagaaggaaaaaccaagcaaa

SEQ ID NO: 80690 - RNA, 80 nt, Homo sapiens
acagaacagggacaccagcagaaccggaggcacccgcagccagaaaggagaaacagaacgaaccgaagacacaccccagc

SEQ ID NO: 80691 - RNA, 78 nt, Homo sapiens
ccggccgggcccacgcaccgggagcggcaagaacggcagacgcagccgccggagggcgcggagcggggaccgcacacc

SEQ ID NO: 80692 - RNA, 80 nt, Homo sapiens
caaccgaaaacaaccgaaccggcaggccacgggaggaaaaacaagccgccaacaagagaacaaaagagcagaagagaaaa

SEQ ID NO: 80693 - RNA, 70 nt, Homo sapiens
acccaagaacacgggagacacacacaaacggagaaaacgggaaacggaaaaagagcgcagaggaaggcca

SEQ ID NO: 80694 - RNA, 37 nt, Homo sapiens
aagacaagagaccggaagagggaaaccccggaacaaa

SEQ ID NO: 80695 - RNA, 74 nt, Homo sapiens
aacaacagacggaagacggacaccaaaaaggggaaacccggcacaggagacgagggaagccgcagcagccagag

SEQ ID NO: 80696 - RNA, 83 nt, Homo sapiens
gaccccgcgagcaccagagcggcgaacacgccgacaggcacccacaaaagcgaaaagccagacaggaacaccagacagaagaa

SEQ ID NO: 80697 - RNA, 66 nt, Homo sapiens
aacaaaagagagcgcacgaccagccaaagcagacccccaagcgagcggagcggaaggagcgcgccc

SEQ ID NO: 80698 - RNA, 81 nt, Homo sapiens
gccgcggcggggaagagcagcgagagcgcggagcgggcggagcggcgagagcccccacggacccggaagcgccgaacaaaa

SEQ ID NO: 80699 - RNA, 80 nt, Homo sapiens
cagcgccaccagagcaggagagaggaacgacggcaggagacagccacaccgagcgcagccgggaccgggaacagcaaccc

SEQ ID NO: 80700 - RNA, 59 nt, Homo sapiens
ggcggcccaccgcccacgggggcggaagcagcagagggaggggcaaacacgcagcgagg

SEQ ID NO: 80701 - RNA, 71 nt, Homo sapiens
agacggcccaggaagagaacggaaggagaagaaaagagagcaccaccgacaccgagaagcagagagggcgc

SEQ ID NO: 80702 - RNA, 64 nt, Homo sapiens
gggcccgcgcagcgcggcagacaagggagagacagagcgacagagagaaaacacgagggagaaa

SEQ ID NO: 80703 - RNA, 78 nt, Homo sapiens
ggaccccgcggaccggcccggggcgccgggcacgggccagaggacggggagccggaagaagggccaaaggagagcccg

SEQ ID NO: 80704 - RNA, 58 nt, Homo sapiens
cgcaaacgacaccacccgaccgggagcgggaaacgcacaacagagaacagaaaagacc

SEQ ID NO: 80705 - RNA, 66 nt, Homo sapiens
cgcgcggaggggaaaggcgccgaaaacaagccggaagggaacgacagcgggagagagccaccgacc

SEQ ID NO: 80706 - RNA, 76 nt, Homo sapiens
agcgccgcgaaccagccacggcaaggaaagcccaaaccacacagcaaagccggaaacagaacgacagcccgcaccg

SEQ ID NO: 80707 - RNA, 72 nt, Homo sapiens
ggacccgacggacacaacggcagaccgcagaacacccagccaggggaaaccagcccagagaagacgggagcc

SEQ ID NO: 80708 - RNA, 72 nt, Homo sapiens
agaggaaaaagcaaacagagcccacaaaaagaccagagcccaaaaggcagagcgaggagagaagaaggaggg

SEQ ID NO: 80709 - RNA, 57 nt, Homo sapiens
cggcgagacgccccggcagcccggccccacaccggcagacccagaaaccaaggccaa

SEQ ID NO: 80710 - RNA, 72 nt, Homo sapiens
ccggcgcgcgcgccccgccccaagcaccgcaggaccgcccaagacgacagacagaagaacgaacgaaggaga

SEQ ID NO: 80711 - RNA, 77 nt, Homo sapiens
ccgcagaccagaccgggaggagcagccgcgcgccgagaagcacccgcgacccagaagggccaagggcagggagaagg

SEQ ID NO: 80712 - RNA, 57 nt, Homo sapiens
cccggagcccagccagagggggccgacacacggcgaaggagagaaccaggagaccga

SEQ ID NO: 80713 - RNA, 56 nt, Homo sapiens
ggaacgggggacaggaaaggggggaaaaaaaaggaggcgaggaagaccaagacgcc

SEQ ID NO: 80714 - RNA, 76 nt, Homo sapiens
ccgagggcgaggcggacgcgcggcgcgcagcgacggcggcccagacaccccgagcagagcaaacgcagaccaggcg

SEQ ID NO: 80715 - RNA, 71 nt, Homo sapiens
cagaagcaggcccccagccgcagccacaacaccggcaggaaccaccaggacagaagagggccacaggccga

SEQ ID NO: 80716 - RNA, 40 nt, Homo sapiens
ggagagaaagcacgaaacacaaccgaaaccagcaacagag

SEQ ID NO: 80717 - RNA, 77 nt, Homo sapiens
ccgccagaagaggaaaaaggccggcacacaaagaaagccccccagcgacccgcggagcgaggccacaccagaaaaag

SEQ ID NO: 80718 - RNA, 101 nt, Homo sapiens
acgcggccgagacaaaggcaccaggccaccacagaaacaaaagcaacaaagaggaggaaagcagcagcagagcaacacccaccaggggacacacgaacacg

SEQ ID NO: 80719 - RNA, 59 nt, Homo sapiens
ggagaagaaggacaagcgcgcccccaacagggaacagcggggcacacaggcgggaaaac

SEQ ID NO: 80720 - RNA, 72 nt, Homo sapiens
gacccgcaagcgacccgacagaggcacaaaaagcggggaccacaccacacagcaccccagagcgaaaggcgc

SEQ ID NO: 80721 - RNA, 31 nt, Homo sapiens
cccccccccccggaccacgaccagcggggca

SEQ ID NO: 80722 - RNA, 81 nt, Homo sapiens
gacccccaagcagcagagagaagaagaaggaggccgcggccagaaacccaagaaaaagcgaaggaacgcagagcgaagaca

SEQ ID NO: 80723 - RNA, 61 nt, Homo sapiens
agcaagcggaaaaccgacaaggagcggaagaggaacgaaaagccgggcagacgcccgaacc

SEQ ID NO: 80724 - RNA, 78 nt, Homo sapiens
cagccggagagcgaagcagcagcccgcccagaagccacgggcacaaccaaaacccccaccggcacagacaacaaagaa

SEQ ID NO: 80725 - RNA, 77 nt, Homo sapiens
caggcgcaggaagggggcagcgcgggcgcgcggccggccggagccagcagcaggccgggcagagcgaaacgggaggg

SEQ ID NO: 80726 - RNA, 65 nt, Homo sapiens
agccgacaaccacaacaggccagaggcgcagaggacaggaggcgaagcacaagggacccagccac

SEQ ID NO: 80727 - RNA, 79 nt, Homo sapiens
agaccaccgccgcgccccacacgcaaagacaaggcaaggaccagcccgccagcaaagggaacgaagcccaaaaggcaga

SEQ ID NO: 80728 - RNA, 76 nt, Homo sapiens
ccgcagggaagagaaagacggacgaagaggccgggagccagcaggaagaccggcaacggagacgcagccggacacc

SEQ ID NO: 80729 - RNA, 74 nt, Homo sapiens
ccaggaggacccaagccgccggacagggggcccaccgggaaggaaagaacaggccgggcagcggacgcgagaac

SEQ ID NO: 80730 - RNA, 80 nt, Homo sapiens
cgagaccgaccgcagacaacacacaagggccaagccaggcccggcaaaggccaacagcaaaaaagcaaggagaccgggga

SEQ ID NO: 80731 - RNA, 68 nt, Homo sapiens
caaccagggcagaagccgaacacgacagaaagaaaggccaaagcagcaggagaaagcgcagaacagac

SEQ ID NO: 80732 - RNA, 62 nt, Homo sapiens
ccccagaagcagcagacggcacacgcagcagaagcccggagagggaaaagccgaacggggac

SEQ ID NO: 80733 - RNA, 82 nt, Homo sapiens
gcgcggaggccccggagagaggcgaggcaccccacaccagcgagcccgccaagagaaaccgaagaagaaggagcagaagaga

SEQ ID NO: 80734 - RNA, 79 nt, Homo sapiens
cccggcccccaaccacaggcggaccacggggcgccagcccgggaagacaccagggaagaagaccaagacggagaacccc

SEQ ID NO: 80735 - RNA, 65 nt, Homo sapiens
aaccaggggagagcgacccaaacaaagacagcgcagaagccgcacagcggcaagcagaccgagaa

SEQ ID NO: 80736 - RNA, 82 nt, Homo sapiens
ccccccgagcggcagagcaccccaagaggagggcccccgccgcggaagcacggagagcaagagacaggccagaccccccccc

SEQ ID NO: 80737 - RNA, 73 nt, Homo sapiens
gaagcacagcgacaagaagaggacgaggggacgcaaacccaacaagagcggcaggcggggcagaagagaccga

SEQ ID NO: 80738 - RNA, 82 nt, Homo sapiens
gcggccaaggcacggaggccgcgagaaacagcaccaggacacgcccgccggcgccgacaccaggaccagcaaagaagcgcgc

SEQ ID NO: 80739 - RNA, 41 nt, Homo sapiens
cgcgcccaggggcaggcgggcagccacacaaaagggaagcg

SEQ ID NO: 80740 - RNA, 57 nt, Homo sapiens
agcacacccaggacagacagccccaggagaaacgccaagggaccacggaacagcgca

SEQ ID NO: 80741 - RNA, 72 nt, Homo sapiens
agaaaaaggaaaacgcggaaaaccgacacaacagagcacaagacccagaaaaaaaggagaaagaagagaaga

SEQ ID NO: 80742 - RNA, 77 nt, Homo sapiens
cagcaaagaggccccagggcagacagcagaccgggaagccggaagcaggacgccgcccgaagcgggaacgcccggac

SEQ ID NO: 80743 - RNA, 81 nt, Homo sapiens
cgccagcagccccaaggcacgggaggaaggccgccgacggcccgcacagggagggcacagcaagcccacgagcaagcagag

SEQ ID NO: 80744 - RNA, 77 nt, Homo sapiens
accgccaggcgggcccccgcggcccgggcgagcccggagaagaggaagggggggccccagcccggccgaacgggcgc

SEQ ID NO: 80745 - RNA, 74 nt, Homo sapiens
cccccggcagacaggaccacgaagacccgaacgacaaaacgaacgaggcgacggccaccgccccccagccacgc

SEQ ID NO: 80746 - RNA, 78 nt, Homo sapiens
aagccgcccagacggccaccggcgggaggaacaaaaggcggggcggcaccaccgagcccacgggcacggcacccggca

SEQ ID NO: 80747 - RNA, 83 nt, Homo sapiens
agggcccccagcaccacacgacccgcgcccaagccagacagcgagccgaggaacgagcggggcccggcgcacccaccaccgcc

SEQ ID NO: 80748 - RNA, 69 nt, Homo sapiens
gggagcccgcgcccgccgcgggagagagagggaaggggaacaggaccggccacagacagccccccaggg

SEQ ID NO: 80749 - RNA, 69 nt, Homo sapiens
gcgacccgcgccgccaggaacacagaaacgccccgggccagccgccaaggccgcccagagccccagcac

SEQ ID NO: 80750 - RNA, 71 nt, Homo sapiens
cacaccagaaccggaggaggaccgcggagggaacaccggaaacacaaagaagacaccagaagggccagcac

SEQ ID NO: 80751 - RNA, 73 nt, Homo sapiens
gaaaggacaaaacaccacaggaggaggcgaaagcgcgccaagagccggacgagccgaggagccagggggccgg

SEQ ID NO: 80752 - RNA, 85 nt, Homo sapiens
ccacggccggcgcacccgcacagggaccagcgaagcaggccccggcagcccacgaacccaaggacacgacaccccggcacgaagc

SEQ ID NO: 80753 - RNA, 75 nt, Homo sapiens
gcccgagagcgcgggcccacagcagcacacgcaagaggaacaggaggcccggacccccagcacaagcgcaggcca

SEQ ID NO: 80754 - RNA, 77 nt, Homo sapiens
cccagcgacccagccacaggaacagagacagcgccgcgggcaaggaaacggcaaaacagaaagccccaagaagaagg

SEQ ID NO: 80755 - RNA, 51 nt, Homo sapiens
agagcaagcgggggaccgaacaaggcaaaagggccacgggccccgccagca

SEQ ID NO: 80756 - RNA, 81 nt, Homo sapiens
acagacgccccacaagcggggagacggcgaaggaagaccagggaaacagagcaaagcgggagcgacaggacaaccaaaccg

SEQ ID NO: 80757 - RNA, 74 nt, Homo sapiens
aagcggaagaccagagcaaccacacacacccagacccaggaacagggaggccaggcggcagcagccagagggaa

SEQ ID NO: 80758 - RNA, 41 nt, Homo sapiens
aacacagcgaggagaaacaggggggcagaagaaaaagcagg

SEQ ID NO: 80759 - RNA, 70 nt, Homo sapiens
cccgccgcgggagagaggacccccccccccccccaaggccgagcagggcccggcagccaagccggcaaca

SEQ ID NO: 80760 - RNA, 73 nt, Homo sapiens
ggcacagagaccagccggaccgcccgccagggagacaacagggcggaaaaccccaggccaagggaggcagcgc

SEQ ID NO: 80761 - RNA, 74 nt, Homo sapiens
aggcaaagcccaaaaggcaaggcacaagacgaaagcgcgcgcgcagggagcagcacccccaccgcaggggcaga

SEQ ID NO: 80762 - RNA, 73 nt, Homo sapiens
gacgggcgccaccgacgccgcccaccggcacagcggaccccgcccgagcaaggcagccccggcagaaccagag

SEQ ID NO: 80763 - RNA, 68 nt, Homo sapiens
cgagaagaaaacagggagggcaggagaaaggagaaaaagaggcagggagaagaaacggcagagacaaa

SEQ ID NO: 80764 - RNA, 76 nt, Homo sapiens
accaacggagacccagacggaagggccagggggaggacggcagcagaggaagaggaggaaaaaagaggaggagaaa

SEQ ID NO: 80765 - RNA, 75 nt, Homo sapiens
gaaaaaaaccccgaggccgaggcacaccagaggcagaaccacaacccacccaaggagaaggagacaaaccaagag

SEQ ID NO: 80766 - RNA, 73 nt, Homo sapiens
gaaggccggggcgcccggcgccggccgagaaggcagaggcgcaaaagcaaacagacccccccagccaaaggac

SEQ ID NO: 80767 - RNA, 87 nt, Homo sapiens
cagaacccggccccaccgccccaccaccccaccagacggcgccccaagaccaaccgagaaggacaccgcgcgaccgagcggaggaac

SEQ ID NO: 80768 - RNA, 70 nt, Homo sapiens
caggaagaaacaacggcaaaacggaaacccacagggcggaggcccggagcgggcggggcaggagcgaaaa

SEQ ID NO: 80769 - RNA, 79 nt, Homo sapiens
aaggaccaagaaccagcggcaagagcgcccagagggagagaaagaaagagaaggggccacccagcaaccaaagacccga

SEQ ID NO: 80770 - RNA, 80 nt, Homo sapiens
aagagaagccacaaaaacaaaccagaagacccaacaaggaagaccaaagcagcgcagcaaaagcaacaaccagcaaggag

SEQ ID NO: 80771 - RNA, 59 nt, Homo sapiens
gaggaggggaggcgcccccggagccgccccggaggagaaggccagagcacagagaccaa

SEQ ID NO: 80772 - RNA, 62 nt, Homo sapiens
cagcaggcggggaagagaaagggcaaacaagcagcaaggaccagcacgggagaacaaacgga

SEQ ID NO: 80773 - RNA, 81 nt, Homo sapiens
aaaagaggaaaacaaacagggaagccacggacgaggcggcagacgagccaaaacaggcgaagaaaagggacggccagagcc

SEQ ID NO: 80774 - RNA, 79 nt, Homo sapiens
ccaccgcggccgcaccgccacgaccgggagaccggagaccgaaggaccaccggcagcgggaaaaaacgaccaagacaaa

SEQ ID NO: 80775 - RNA, 57 nt, Homo sapiens
cgggaacgggggcggccgggacggaggacgcgcaggggggcaagagcagacggcggc

SEQ ID NO: 80776 - RNA, 98 nt, Homo sapiens
gccgggagaagcagggaaggaggccgagccgggaccaggcccgggggcggcggccacgccaaggacgggccccagggaaaggaccgaggcaggaaaga

SEQ ID NO: 80777 - RNA, 84 nt, Homo sapiens
cccaaacccggaaacccagcggcccagccgggagccggaccagaccgccggagcacgccgagaccaccgaggacacaaccgccc

SEQ ID NO: 80778 - RNA, 79 nt, Homo sapiens
gccgagcagaggacaaaacaagagggccagcagaccagccagccccaagcagccgcacgacaaagaacgaagacaagag

SEQ ID NO: 80779 - RNA, 78 nt, Homo sapiens
agcagaagacaagaagaggagggacaccacccccccgaggccaccaggaggccccacacaccgccacccaaaggaaac

SEQ ID NO: 80780 - RNA, 78 nt, Homo sapiens
cgcagcaaggccgcacaggaacaggagggcgagccccaggggacccaagggagagagggaacggcgaaagggcagccc

SEQ ID NO: 80781 - RNA, 76 nt, Homo sapiens
gcgggcccccgcggcccgggcgagcccggagaagaggaagaacagccagcaaagacaagagcagaccagcagccgc

SEQ ID NO: 80782 - RNA, 75 nt, Homo sapiens
aagcaagcgcaggcacaaccggcagccaagccaccgaccaaccaaacagcaaaccaggggacagggaaagcagaa

SEQ ID NO: 80783 - RNA, 53 nt, Homo sapiens
aacagcagcccgcccgccccgaccacgacccgcgggagaacaacgaccgaaca

SEQ ID NO: 80784 - RNA, 79 nt, Homo sapiens
gaagaagaaaaaagcaccaacaaaccagaccacccaaaggagaaacaccaaaaggaaccgcagaggagcaagagggggg

SEQ ID NO: 80785 - RNA, 86 nt, Homo sapiens
agaggccaggccgaggcccacgcagggccaggggggaagaggcagggggggcggcgaccgagcaccaggccaagacggcaaacggg

SEQ ID NO: 80786 - RNA, 89 nt, Homo sapiens
gcgcggggaccgaggcaagacgacaccgccaggacgggaccagagaaacaggagcagccaccggaggaagaacaagaagcaggggacga

SEQ ID NO: 80787 - RNA, 55 nt, Homo sapiens
gcccaagaggagacgacgaccagggagcggcgcccccagagccagcaccgagcgg

SEQ ID NO: 80788 - RNA, 55 nt, Homo sapiens
ccggccgcgccaccgcaccgccaccggcccgacccaagcgccgaggcggggccag

SEQ ID NO: 80789 - RNA, 79 nt, Homo sapiens
ccgcgccgcccgagcacgccgcgcagcccggccgccggcccccaacagcgccggcacggaggccccagcccaacccagc

SEQ ID NO: 80790 - RNA, 67 nt, Homo sapiens
agagacagaaaaaaggagcagacgagaggaccaggcagcaaacagaagaaacagagacggacaaaag

SEQ ID NO: 80791 - RNA, 78 nt, Homo sapiens
agagaaccgcggcagaagccgagcaacaccccggccaccgacccacaagcagcccccgcgacgagcccccaacgagcc

SEQ ID NO: 80792 - RNA, 79 nt, Homo sapiens
agcagaagaccgagacacacacccaacacccaacccagcggcaggaaaagcccggaaaagcagccaagcggaagacaga

SEQ ID NO: 80793 - RNA, 70 nt, Homo sapiens
ggaccgaaacagaaacggaacaccaaggccgacaccggaccaaccgcggggggggggagcggagggcaga

SEQ ID NO: 80794 - RNA, 82 nt, Homo sapiens
gaccgaaggagagcggacaccaacaaggacccaagcggaggccagaagaggagggcggcgcagacggggaagcggagccaac

SEQ ID NO: 80795 - RNA, 79 nt, Homo sapiens
cggaaaggcaggaggaggaacggacaagaagacagaaaccggggcaaaaaggcgaaggccaaccgacaacacaaaccaa

SEQ ID NO: 80796 - RNA, 80 nt, Homo sapiens
gacgccacacagcacaacacaacacgccccgaagggcagagaagacgggggagaaggcgggaagaggaaaagaggaaggg

SEQ ID NO: 80797 - RNA, 77 nt, Homo sapiens
aggcaaaagcaagaaaaagggaagcacaagaaagcagagagagagaccccaggaaagagcaaggacaggaggagcag

SEQ ID NO: 80798 - RNA, 77 nt, Homo sapiens
ggcaacccggggccacccagaaagagaagacaaccacggagccgagaaccaggaacaagcaacggaccgaaacacac

SEQ ID NO: 80799 - RNA, 52 nt, Homo sapiens
gagccggcagcaaagagggaacaggaaacccagcggcggcagaaccagccgg

SEQ ID NO: 80800 - RNA, 53 nt, Homo sapiens
ccgaccagcggcgggagaggagaggaggccaagcaccccagagcaagagaggc

SEQ ID NO: 80801 - RNA, 94 nt, Homo sapiens
gcccgccaggcgacaggggaacagacagaaggagcaggaaccaaagggggaccccacaccacaaaccgaggaaagaagggacagcagaaaacgc

SEQ ID NO: 80802 - RNA, 73 nt, Homo sapiens
ccggaccaggcgcggcgacagccccccaggcccaaaccaaagcaccacccgccaaaaaacggagaggagagga

SEQ ID NO: 80803 - RNA, 79 nt, Homo sapiens
gagacacaagcacacgaccgggagcgaggagccccgagaagcaagaggagcccagaggacagaaccccagcccagagcc

SEQ ID NO: 80804 - RNA, 76 nt, Homo sapiens
cagaccggggacagcaacaaaacacagagaagaagaaaaaaagagcacaaaaacacagccacgcacagagaagaaa

SEQ ID NO: 80805 - RNA, 59 nt, Homo sapiens
ggacccagccaggcagaccccgggcagcaggggcgcgccgcagccgggagaagcggccg

SEQ ID NO: 80806 - RNA, 82 nt, Homo sapiens
ccaccgggcacagcaccacaacaaacaggcccagggcgacgggccccagggcgcagggagagcggggcggaggacgccgggg

SEQ ID NO: 80807 - RNA, 82 nt, Homo sapiens
ggaaaagaaagacggaagcgcaggaagaccgccccggccccaacaggcccgcgcccagagccccgcagggggacaacccacg

SEQ ID NO: 80808 - RNA, 52 nt, Homo sapiens
gcaggccagggccgaggggcggccaaggaaggcgaaaaaacgaagcaaggga

SEQ ID NO: 80809 - RNA, 72 nt, Homo sapiens
cagaagcagaggcgcaaagaagcgaaacggaagaaggaacggcaaacagcaccaaaggaaaacgagggagcc

SEQ ID NO: 80810 - RNA, 84 nt, Homo sapiens
cgaaacgccgggcaccagggagaccagccacaacggggcgacacaggacccggaggacgagggccccaagggcacccaaacaga

SEQ ID NO: 80811 - RNA, 73 nt, Homo sapiens
ccgccaaacccaggccagagcacagccagcaccgcaagaagcggaagcgccacagagggagagccgagaccgc

SEQ ID NO: 80812 - RNA, 35 nt, Homo sapiens
acagaccagagacccaaccggagcacccaccagca

SEQ ID NO: 80813 - RNA, 80 nt, Homo sapiens
gcacgagcagaccggcccgaccgcccacagacccaaacaaaggaggcacggcacaaaggcccgacgccggcgaaagacgg

SEQ ID NO: 80814 - RNA, 54 nt, Homo sapiens
ggcggccaggggcgcgaccccccggggaacacaagcccaaacccagaacgcccc

SEQ ID NO: 80815 - RNA, 73 nt, Homo sapiens
agaagaaaaaggcaaaaacccggagagcaaacaacacgacgggccaaaaagcagaaaaacaaaccagcccaag

SEQ ID NO: 80816 - RNA, 76 nt, Homo sapiens
gaggcgcggacacagcccagcaccggggccccacagacgaaggagcgagaaaagcaaaaaccaagcagcgaaagcc

SEQ ID NO: 80817 - RNA, 85 nt, Homo sapiens
ccaagaagaccccagcgccgggcagaagcggagcggacggaggaggcacccgcaggagagacagaaacagcccgccagcaagaaa

SEQ ID NO: 80818 - RNA, 81 nt, Homo sapiens
agacaagccgccgccgaggccagcacccaagggggcaagggcggagaaacaagaacaggccaaggaagcacgggaagaaca

SEQ ID NO: 80819 - RNA, 72 nt, Homo sapiens
gagcagacggagaaacaggaccaggacaaaagaacaccgaaaacaacaggagacgggcagacaacgaacaag

SEQ ID NO: 80820 - RNA, 87 nt, Homo sapiens
gacacagaggagccacacccccagccggaaggggcgaccggaccgggagaagaaggcgccgaggcaaggggacagcacgggagcggc

SEQ ID NO: 80821 - RNA, 82 nt, Homo sapiens
gaagcgcggggcgggcccgggcgcggcgggcgcgcccgccagcgcccggagaacgaggagccccggccaaccaccaacccac

SEQ ID NO: 80822 - RNA, 76 nt, Homo sapiens
cccacagaggggcgacggcggcagacgcagacaaacaaaacaagaagccgaagaagaccggggaggcgaagagaaa

SEQ ID NO: 80823 - RNA, 36 nt, Homo sapiens
gacagggggcagcgagggcgggacagcagccacgcc

SEQ ID NO: 80824 - RNA, 68 nt, Homo sapiens
ggaggacaagagacagcggaaacgaccgagaagaagggggaaacagcagcacagacagacaagaggca

SEQ ID NO: 80825 - RNA, 77 nt, Homo sapiens
ggaaagaggggagaagcggaaagcgcgagagacgcggccaaacaaagccgggacagaccggagcggggaggagcgcc

SEQ ID NO: 80826 - RNA, 39 nt, Homo sapiens
cagaagcaggccagaaacagagacgggcaccaggcccag

SEQ ID NO: 80827 - RNA, 78 nt, Homo sapiens
cgggaggaagagggggacgccccggcaacccaggggcggccacgaccaccaggcgccaggcagaagcacaggcagaac

SEQ ID NO: 80828 - RNA, 71 nt, Homo sapiens
caaccggaaagcacaccaaggagacgggccccaagagcgaccgcagcacgggggcagaccgcaagccagcg

SEQ ID NO: 80829 - RNA, 95 nt, Homo sapiens
ggagccccaggcggcgggagcggcgggaggagcacaggacagaggcacgagcaggggaggcaagcaggggggcaaaggaaagaaggcagaaaggg

SEQ ID NO: 80830 - RNA, 81 nt, Homo sapiens
aaggagaagcaaccggcgccaccagcaaccagagggccagagggaaggacagaccagcagggacacagcaggacaagaacg

SEQ ID NO: 80831 - RNA, 81 nt, Homo sapiens
cccgaacgccccagaagccccgggagcaccgagaagcggagaagaccggaaacaggcacagaacagaaggaaaggacgaag

SEQ ID NO: 80832 - RNA, 54 nt, Homo sapiens
cacccagcacacccacgagagacaaacccgagagcaaaacaaccagccggaacc

SEQ ID NO: 80833 - RNA, 72 nt, Homo sapiens
gggacaagcaagagcaacaacagccaaaagaagaacccggacccgaccgaagcaagaacgcaaaaggcacaa

SEQ ID NO: 80834 - RNA, 77 nt, Homo sapiens
ggggacagggggacggacacgcccagccccgggcacggaaagaacgaagcaaacgcggagaaggccagggagggcca

SEQ ID NO: 80835 - RNA, 75 nt, Homo sapiens
gggcccggcggcggcgcccgcagccagcaagggaaggggaagcaggccaacccagaacacaccccagcggggaag

SEQ ID NO: 80836 - RNA, 65 nt, Homo sapiens
gacagcaggaaagaggaacacaacaggaaccccggagagcgcagccgggagaggacgacaaaagg

SEQ ID NO: 80837 - RNA, 75 nt, Homo sapiens
agagcccgaccgaagaagccccgccccaaagcccccacgcaacaaaaccccgggaacgggcggaaaaaggagggg

SEQ ID NO: 80838 - RNA, 57 nt, Homo sapiens
gagacgacagaccagaccaagcaacagggagagaacagcacacagaggcgcaagggg

SEQ ID NO: 80839 - RNA, 72 nt, Homo sapiens
gagaggggacacggaaggacaccagcgcggaagcggcggcagaagggggagaagaagcagagaacgggagca

SEQ ID NO: 80840 - RNA, 74 nt, Homo sapiens
cggccgccccaccggcggaacccagcaaggcagaagaccccgggagcaacacgagaggcgggggaccagggaga

SEQ ID NO: 80841 - RNA, 73 nt, Homo sapiens
aggaagcagccccaagacagccccaaggaagacgcagggccgcgagggcccggaacaggggcacgcacgaggc

SEQ ID NO: 80842 - RNA, 80 nt, Homo sapiens
cgcacgggagccagcgggggaggccgaccacgcacgcgcagcccaaaaaggccaggccggcggcgcaaaggaggaccgga

SEQ ID NO: 80843 - RNA, 79 nt, Homo sapiens
gaggaggaggaggacagggaaaggagcggggagccccgcgccacagacgaccaaagcaaaaaaaaggccagaggacagg

SEQ ID NO: 80844 - RNA, 72 nt, Homo sapiens
acggaaaaaggacagcggagacacggaacccccgaggagaggcggagagcgagcgacaccgaaaagcggaaa

SEQ ID NO: 80845 - RNA, 79 nt, Homo sapiens
ggccgagcgaggcggcgcggccagaaggagaccggaaaccgagagaaacgaagacgaagaaacagccgcacacagaaga

SEQ ID NO: 80846 - RNA, 58 nt, Homo sapiens
ggccaggggcggaaacgaaagcccgggagcgaccagagaagaggaacgaggaagaaag

SEQ ID NO: 80847 - RNA, 74 nt, Homo sapiens
cgacagcgacgacagagcccagccacagagcgagaaggaaaaaacagggaagagaaaaagagcagaaggcacgg

SEQ ID NO: 80848 - RNA, 77 nt, Homo sapiens
aggcggggggcggagaacccgaagcacccccggcgccgggacgcccggaccaaccaagaagaaacaacgaccaccac

SEQ ID NO: 80849 - RNA, 83 nt, Homo sapiens
gcagcgcgcgccgcggacccaggcccagaggcggccaaggcaggagaggaggagggcccgccccggcggccacaggcaagccc

SEQ ID NO: 80850 - RNA, 70 nt, Homo sapiens
ggcagacaaaagggccaaagaagggagagagacgaggagcagaccaccaagcaccggagggacgcgggag

SEQ ID NO: 80851 - RNA, 86 nt, Homo sapiens
ggggaccgccggcacgcgacccccccgggcccaaagaggcaacacggaaaccgaggagcaccacaaccccagggacagaagaaggg

SEQ ID NO: 80852 - RNA, 80 nt, Homo sapiens
accgcaaccagacgccagcgggacgaggaccgagaccgcggccgggaccgaggcacaaggacaagagcgagggggcgcca

SEQ ID NO: 80853 - RNA, 57 nt, Homo sapiens
gagagacagccggaggaacggaaacaaaccaaaccagacgccgggcccccagcaggc

SEQ ID NO: 80854 - RNA, 71 nt, Homo sapiens
aggcggcggcggcggccggagccccagccgaaggacagggcgaaccccgcgccccgcagcggagagcgcgg

SEQ ID NO: 80855 - RNA, 73 nt, Homo sapiens
ggagccccccaagagccggaaagagaaagggaaaaccgccgcaaacaacgaaaaagcgcaagaaacgcggccc

SEQ ID NO: 80856 - RNA, 93 nt, Homo sapiens
gcccacccaaggccgcgcacacagccgaagcgacccgggcaagcacggggaggggaggccccgggaccagcccccccgagccgccagacgcgg

SEQ ID NO: 80857 - RNA, 66 nt, Homo sapiens
aggcaaacgcgcaacggccacagggggacggcggaaagcaaggagcaccaagaaaggaacaggaag

SEQ ID NO: 80858 - RNA, 75 nt, Homo sapiens
cggacagccgggcaaaacaagaaagccaaggccagaccacaagccagagccacagcccaaggagacaaaggcgcc

SEQ ID NO: 80859 - RNA, 75 nt, Homo sapiens
agagaggagcgaccagacggcaggaggccgagcaacaagaaccagacgagcgcagacaggagaaagccagcacgg

SEQ ID NO: 80860 - RNA, 70 nt, Homo sapiens
cgagccagccccgacagcgggaaccaacccgcaggcacgagaacagaagaaagaacccgaagggccagac

SEQ ID NO: 80861 - RNA, 71 nt, Homo sapiens
caggcccaggacgagaaaggaacaagccacaacaccaacaagcaaggcaaaccgacaccagcgacacaagc

SEQ ID NO: 80862 - RNA, 48 nt, Homo sapiens
ggggcgccaggcccagcgcccgagcggcgccgacacgggaagagacgc

SEQ ID NO: 80863 - RNA, 77 nt, Homo sapiens
ccccggacccacgccgccagacccacgcggccggaagccggcgggaggccaccgccccaccagcaggcaacgccaca

SEQ ID NO: 80864 - RNA, 71 nt, Homo sapiens
gcgcgcaggagccaaggaaagaacgaccccgggggccaacaaaggaaaccaaagggccagcgaaacaaacc

SEQ ID NO: 80865 - RNA, 41 nt, Homo sapiens
gaagaggggccgcaaagaagacgagcgcggggcccaggcgg

SEQ ID NO: 80866 - RNA, 63 nt, Homo sapiens
ccgcggggacgcgggcggcgcggccgcgccagacagagaccgcacccgagcaggagggggagc

SEQ ID NO: 80867 - RNA, 55 nt, Homo sapiens
ccagagccgcggccggggcgcgggaggaaagaagccaaaaagaggcccggaacgc

SEQ ID NO: 80868 - RNA, 58 nt, Homo sapiens
ggaacagcgggacccagaagaagcacagacgagaaacaaggcaagaaggcagccgaga

SEQ ID NO: 80869 - RNA, 65 nt, Homo sapiens
ccggggaacggcccaaccgccacacagagccgacaaggccgaccggcgagacgacgggaccgaag

SEQ ID NO: 80870 - RNA, 74 nt, Homo sapiens
cgcggggggaggagagccaaccagcaggcccggacaggccgagaccccacaagccagcaggcagacccaccacg

SEQ ID NO: 80871 - RNA, 72 nt, Homo sapiens
ggggcgcgggccgccagcccggcaccgcccccccccgcgagacaagcagaccggaagaccgacggaagacca

SEQ ID NO: 80872 - RNA, 86 nt, Homo sapiens
caagacccaagaagaagaaggcgaaggaccccaacggggaggccaacggaagaacccagagccgaccaccgcgaggcgcgggccgc

SEQ ID NO: 80873 - RNA, 84 nt, Homo sapiens
caccacgcagaacgcaacaccaaggcacaccaccccaggacaacacaccgcccaaccgggacaaagaaaggaaaagagaagaac

SEQ ID NO: 80874 - RNA, 72 nt, Homo sapiens
gcgagagacgaagccaagaggaaccccaggccacaccaacgggaacgcccaaggagaggcccacaccacaag

SEQ ID NO: 80875 - RNA, 79 nt, Homo sapiens
ggcccccaacgaggacagcccgaagaaggagacaggagaagagcggaagaagcacaagagaaaggacagaaacgcagag

SEQ ID NO: 80876 - RNA, 77 nt, Homo sapiens
cgcgggcacccacggagccccggggcgacgacgacacgcggaggcgccggaagcccccacccaacaagaccccaccg

SEQ ID NO: 80877 - RNA, 76 nt, Homo sapiens
cgcagcgccacaaaggaggacaaggccaaaccgcccaggcccccaggcgggcacggggccaggcagagcagaggcc

SEQ ID NO: 80878 - RNA, 79 nt, Homo sapiens
gaagaaaccggagaaggaacagaccccggaggaggcgaagggagggccgccccaaccgacgcaccagccggaggaggag

SEQ ID NO: 80879 - RNA, 82 nt, Homo sapiens
cgccagggggcagcagcgcaccccaccgaccagcggacacggggacgcggcgcacggcgcggaggggccgagggcagggggg

SEQ ID NO: 80880 - RNA, 83 nt, Homo sapiens
gcagcgggcagcgaggaccaaggaccgggcgcagaggggcgagcaccccaacagcgccacgcccagagcagaggacggacccg

SEQ ID NO: 80881 - RNA, 68 nt, Homo sapiens
agaccaacgcacaaaagaaccacaccaccagggggggaggagggacaacacacaacgcaggcgcacag

SEQ ID NO: 80882 - RNA, 62 nt, Homo sapiens
ccggccggaccccgcgcggaaaggcgacaaaagaagacgacccggggcaacaccagagaacc

SEQ ID NO: 80883 - RNA, 63 nt, Homo sapiens
gaagaggaggagaccaagcgcacagccagcggagaagagagcggaaagagcaacaggacaaga

SEQ ID NO: 80884 - RNA, 98 nt, Homo sapiens
acgaggcacccccggaccagaacggcacggccacgggcgggcaggcaaggaagaagaaaggcgaggcacgagccaaaaaagaggaagagaagaagcgg

SEQ ID NO: 80885 - RNA, 77 nt, Homo sapiens
caggaacaaggagaagaccaggaagagaaagagaaaggacaagcaggaacccccagacagccgaaaaaaaaggagac

SEQ ID NO: 80886 - RNA, 57 nt, Homo sapiens
cgcgggacccagcccaggcggcgcggacggggcggggaacagacgaaggcccaagcg

SEQ ID NO: 80887 - RNA, 41 nt, Homo sapiens
agagggaccacagacaaagagacgggcccgggacacccaga

SEQ ID NO: 80888 - RNA, 63 nt, Homo sapiens
ccgggcccgaggaggcagccaagccgagccgccacccggcaaaacccccaccagcgcagaagg

SEQ ID NO: 80889 - RNA, 83 nt, Homo sapiens
cagaggccgcgcagcagcaaaggagagcggaaccggaaaaggaggcagaggggacacaagaagaacgggacccacaaagagaa

SEQ ID NO: 80890 - RNA, 79 nt, Homo sapiens
ggaacagaaacaagagaggaacggagcaagaagcgacacaaggagaaaaggaagacgaaggaagcaagccccaaggcaa

SEQ ID NO: 80891 - RNA, 83 nt, Homo sapiens
cccccgcccgccgcgcccagcccgccccgccgcccgcaccgccgcccgcgccccaccagggcgcggcagcccggagggcagcc

SEQ ID NO: 80892 - RNA, 78 nt, Homo sapiens
gccccccaaccccaccacccaccaaagggggcgcgaccgagagagccaccagccagcaccgccggccaggaggagagc

SEQ ID NO: 80893 - RNA, 89 nt, Homo sapiens
acacagcaccaaaggacaccacagaacccgagaaaccacggcgccggagccgagagcgccgcgcggcgcgcccgcacaccccccggcgc

SEQ ID NO: 80894 - RNA, 74 nt, Homo sapiens
ggaccggaggagcgaaggcggcggcagagaacgccgggccagcgaggcacccccagcaggacagcacacccaac

SEQ ID NO: 80895 - RNA, 58 nt, Homo sapiens
gccaaagcaagagcaggcgacacgcaggaggaggacgcacccagacccagccaacgag

SEQ ID NO: 80896 - RNA, 65 nt, Homo sapiens
cgcccagcagcccaggccgagacgaaaggcagacacggccacacagaccgaacacaaacagccaa

SEQ ID NO: 80897 - RNA, 38 nt, Homo sapiens
gcggcggagacagcggaaggaacggacacagggaggac

SEQ ID NO: 80898 - RNA, 74 nt, Homo sapiens
caccaccagaccaaagagagcgagaaccaaagaggccgcaaaaggagaaacacagcccaaagaaacacaccccc

SEQ ID NO: 80899 - RNA, 80 nt, Homo sapiens
gcaagcaagggagagccgccggaagagacggaaagcgaaaccacagggacagcagaaacgcccggaaacaccggagggca

SEQ ID NO: 80900 - RNA, 82 nt, Homo sapiens
cacgcggccgcggagaccaccgcggcgcggcagcgcgcccgagggggccgacgacgagccccgcgaggagcgcagcggagag

SEQ ID NO: 80901 - RNA, 85 nt, Homo sapiens
cccgcggccggcgccggagcaggcggacccccagagcgcccgccccccaaagcgaagccaaagcgaaggcaaaggccaagaaggc

SEQ ID NO: 80902 - RNA, 80 nt, Homo sapiens
gggcccgagccccgcaacaccgcggcccacgggacccccaggagggacccgcaggaagggaggcagaaggaaaccgagga

SEQ ID NO: 80903 - RNA, 72 nt, Homo sapiens
agcaaaagaacccaacaggacccacaacaaagcggcacaggaggagaggaagcggcggcagagaagcgaacc

SEQ ID NO: 80904 - RNA, 74 nt, Homo sapiens
aaagggccaaagaagggagagaggaccgggacggaggaccccacagacagcaggaggcagggcgcaacaagcac

SEQ ID NO: 80905 - RNA, 81 nt, Homo sapiens
ggcgagcagcaggagcaccggcccaagaaacagagagcccacgaacggcgggaacagaaagccagaggccggagagcgcag

SEQ ID NO: 80906 - RNA, 80 nt, Homo sapiens
cgccggggaccccggcagccacccaccgccgccgcccccagagcggggcccggcgcacccaccaccgccgcccacggcag

SEQ ID NO: 80907 - RNA, 60 nt, Homo sapiens
caaaggcgccagcccccgacgcccgaggcccaggccggccagccgacccagccaggccca

SEQ ID NO: 80908 - RNA, 72 nt, Homo sapiens
gagaagccccgagcaccccacaggggacaagaaggccccgacgccgcgcggaaccgccagagcagccgcgcc

SEQ ID NO: 80909 - RNA, 81 nt, Homo sapiens
ccgggaccgcgcggacccggccgggagaagcagcagcgcaaggaccgcggcaagcgggagcggacccacccaagccaccga

SEQ ID NO: 80910 - RNA, 78 nt, Homo sapiens
cagccagaagcagccggcccacccagggccacagggcaccagacagcgacgagaaggggccagaggcgccggaaggac

SEQ ID NO: 80911 - RNA, 53 nt, Homo sapiens
aggaccccggaacgggcgggcggcccccgcgcaagccccggggcagagacaca

SEQ ID NO: 80912 - RNA, 79 nt, Homo sapiens
cagagccccagcggggaggcgcaacacgaggcgccgcagcacccgcgagcgcacaaaaaaacaggaaaacggaagacgg

SEQ ID NO: 80913 - RNA, 80 nt, Homo sapiens
cacgggccggcgcgcgccgggcacccccagaaggcgccagagcgcgagggggagagcagacagaagccacccaggaaaag

SEQ ID NO: 80914 - RNA, 64 nt, Homo sapiens
ccggacaggggcccaacaggagaggacgaaggacagagagggacgggcagacgccccgacacgc

SEQ ID NO: 80915 - RNA, 94 nt, Homo sapiens
cccaacaccgagccagggaagggccccgaaaggaaggagcacaagccaaggacgcaagaaaacacgagaccagggcaagcaccgcccaaggcca

SEQ ID NO: 80916 - RNA, 90 nt, Homo sapiens
gggaggaggagcacccgcccggccacgaccccgcgggagccgaaaacgaaagccgaggacgggaggaccagaagcaccggagaaacgacc

SEQ ID NO: 80917 - RNA, 102 nt, Homo sapiens
aaggcgcggcccagacgcccaccaacccagcaggcccacccaccccggccaagcccacaggaacccgcccacgccagcgaagccgacaggaccaacgacagg

SEQ ID NO: 80918 - RNA, 68 nt, Homo sapiens
aacgcccccccagcacacagaggagagcgacgagaagaaccaaaggcaagaaccggagcaggagaaaa

SEQ ID NO: 80919 - RNA, 65 nt, Homo sapiens
agaacaccagccccagcaccaccggggaagaaccagcgccagaaaccagaggacggaaccggcac

SEQ ID NO: 80920 - RNA, 75 nt, Homo sapiens
ggccacggggcaacggcagcagaggcacaccacggaaggccccacccccaaccaaccccggggccaacggagcgc

SEQ ID NO: 80921 - RNA, 76 nt, Homo sapiens
cgggccggccccccagggcacacaggccccgagaaccaagagaacccccaccaaccaggcccggccaacggcccca

SEQ ID NO: 80922 - RNA, 74 nt, Homo sapiens
gggacccgacacccccccccaccgaaccgcgcacccagccaccaggcaacccacgaagaaggcgagaaagaaag

SEQ ID NO: 80923 - RNA, 40 nt, Homo sapiens
ggcgcgcccagagggcggagacaggagcgcgaaaggggaa

SEQ ID NO: 80924 - RNA, 123 nt, Homo sapiens
gaccccccgccaggcgccgaccaccccagcaccagcccagagggaaagcacaccaccccagccacggaagcccagaggagaaggcccgagccagacgggacagaacgggagcagaacgaaccg

SEQ ID NO: 80925 - RNA, 82 nt, Homo sapiens
agaaaacccacccagcggcccgaaggacaggcgaaaagaagaagccagggcgcacccacgacgcgcacaccaccggcagacc

SEQ ID NO: 80926 - RNA, 77 nt, Homo sapiens
gccgcgggagggcccggcgcagggaaagacaaaccaaggaacaggaccacaacaacccaaagcaggcaccggcagcg

SEQ ID NO: 80927 - RNA, 87 nt, Homo sapiens
gaagaaaaacgaagacccggaagcaccacagcaaacaacaagcagccacccagggaccaagaaaggcccagggaccaaagcccggac

SEQ ID NO: 80928 - RNA, 76 nt, Homo sapiens
ccgggcggcggcgcggggaccgcgcgacaggccggggaagagaaggaggggccaagggagaagaccgcaagaggga

SEQ ID NO: 80929 - RNA, 74 nt, Homo sapiens
cgccaaaagcgacagcaccaagacggccacgagcggcacaggacagaaccgcaaacaacggagccagaaacggc

SEQ ID NO: 80930 - RNA, 73 nt, Homo sapiens
agggacgacggaccgaaaaggacccagggcaccgccgggaaaaaagaggcgacaaaaagcaggaaaacagagg

SEQ ID NO: 80931 - RNA, 71 nt, Homo sapiens
ccaaaccggacgaacgcagaccgaggccaaaagaaaggaagaaaacccccaaaaagccaaaaggccaagac

SEQ ID NO: 80932 - RNA, 53 nt, Homo sapiens
gagcggccccaaccaagggcgaaggcgccaccggcgagaagacgcggggacac

SEQ ID NO: 80933 - RNA, 57 nt, Homo sapiens
gggcgggcgacagcgaccgacgccacacgcacaggagcgcccagcagccccaaggag

SEQ ID NO: 80934 - RNA, 70 nt, Homo sapiens
accccaaagggccagagagcaacgacccagggccggaagaaggagcccgggccggcccgccgccaccagc

SEQ ID NO: 80935 - RNA, 86 nt, Homo sapiens
ggagcagaggaggacgagacgcagaggaccaggggagcggacgcaggagacgcagggcccgcgcgcggaggccggcccggagggag

SEQ ID NO: 80936 - RNA, 60 nt, Homo sapiens
caaccgaggagccggggagagcggacaagagaaaaggcggggccagcgccgacagaaccc

SEQ ID NO: 80937 - RNA, 85 nt, Homo sapiens
cgcgcgccgccgccgcccgggcgggagccaggagcgacgcaccgccaggcaggcacaaagcccccagaaggccgagcacgcgagc

SEQ ID NO: 80938 - RNA, 74 nt, Homo sapiens
acaagaaccgagaggaccaacaccgcagacgaagggaaagagggaacgagaaaacccagacaggcgggccagcg

SEQ ID NO: 80939 - RNA, 79 nt, Homo sapiens
gaaagagcgggcagagacgagcgcgccacgcgccgggagaggcccggggcccgccggcgcccggagcccgcgcggcccc

SEQ ID NO: 80940 - RNA, 75 nt, Homo sapiens
gagacaaccgccgaccccaagaaacacgaccccccgagagcacccgcgcaaaagaaaagaaggacaacgaggaac

SEQ ID NO: 80941 - RNA, 59 nt, Homo sapiens
ggaaaggaaagcagcccgaaaagaaggcaagcgaacagcagaaaccagaaggcagccca

SEQ ID NO: 80942 - RNA, 88 nt, Homo sapiens
cagggaccaggcggaggcgcgcgggagccggggcaccacagagagcggggaacgccgcagaaagaagaaggggcaagaacagccacag

SEQ ID NO: 80943 - RNA, 70 nt, Homo sapiens
cagccgcacagaacaccaagaagccccgacacagaagaagccgaaaagccagcagccgcacccacaggac

SEQ ID NO: 80944 - RNA, 78 nt, Homo sapiens
caggcccagacaggagcgggagaaaagaaccgacccacaccaagggcgacccagcaacgcggccggccaggggcaagc

SEQ ID NO: 80945 - RNA, 75 nt, Homo sapiens
gaaagagcccaggacaacacaggcaaaggggaaaagagggacgcagcacagaaaggaaagaccacaaggaaccaa

SEQ ID NO: 80946 - RNA, 73 nt, Homo sapiens
aacggcacagcgggagcagagccccgagggggaaacaccgacaagaaggcgaagcggaccggagcgagaaccc

SEQ ID NO: 80947 - RNA, 94 nt, Homo sapiens
aaccacgacggcccgaccgcagcccgcacgacccagagaagccagccccagacaaccgggaaagcacggcaagaagacccgcgacgagcagcac

SEQ ID NO: 80948 - RNA, 52 nt, Homo sapiens
gggccagcaagacacagcgccgggagccgcgccccacagccccgcgggaccc

SEQ ID NO: 80949 - RNA, 50 nt, Homo sapiens
gcagggaaaacaggaaggaaccagccaaaaagcaagacaaaacagaggag

SEQ ID NO: 80950 - RNA, 77 nt, Homo sapiens
gcaggggaccccgacccaggacggaccggaaggcccagaaccaagagcccgagcagaaggccaaccccgcccaaccc

SEQ ID NO: 80951 - RNA, 89 nt, Homo sapiens
cccgccgcaggacaaggggcgggcggccaagacaccgggaagcccacgggaccccaggcgggcaggagaacgacggcacaggaccaccc

SEQ ID NO: 80952 - RNA, 89 nt, Homo sapiens
acgccgccccagggaaccgcacagggaacaggcgcggaacagcccggaggagaggaccgaagaagaggaggggccccaggccaaaccgg

SEQ ID NO: 80953 - RNA, 91 nt, Homo sapiens
caggagcggcggggcgcgcgccggcggcgcggagcggcagccccggccccaaccccacaagccacccaccgaaacagagaagaagaaagca

SEQ ID NO: 80954 - RNA, 52 nt, Homo sapiens
gcaaacacaaacaaccccggcagcgggagagaggagagcagagagcagaaac

SEQ ID NO: 80955 - RNA, 70 nt, Homo sapiens
ggggcgcacagcgccccaccccagaggcgcggagcgccccagggggacgggccagcggggaacaggggga

SEQ ID NO: 80956 - RNA, 55 nt, Homo sapiens
ggcaggcagagcaccagggcagacccagagcgaagagcggaaggagagccagcaa

SEQ ID NO: 80957 - RNA, 103 nt, Homo sapiens
ggaagcaaaagggcgcgaggagcaaacacaagcgagccacagcgcggcacaagacaggaccaagaaaacggggaaaaacacagagaaggccgcagagcagacg

SEQ ID NO: 80958 - RNA, 81 nt, Homo sapiens
gggcaagggcgcccgcggcgagccagccagcgggaacaagagaacaaagcccgggagaagacaccgaagggaagcccccag

SEQ ID NO: 80959 - RNA, 73 nt, Homo sapiens
gagaaggaacccgaagggagacagcagcacaagaaaccaggcaagcagcagggacgcaccaaaacggacagcc

SEQ ID NO: 80960 - RNA, 54 nt, Homo sapiens
gaacaccccagaagcaggaagacacgcagcagagaagaccagagaaacacacag

SEQ ID NO: 80961 - RNA, 82 nt, Homo sapiens
cacgaggcacccccggaccagaacggcacggccacgggcgggcaggcaaggcagcgagagcccagagaagggaagaaagcgg

SEQ ID NO: 80962 - RNA, 73 nt, Homo sapiens
cagccccgcagccagggcgaacccccgcagggcacaccaaagggaaccaagaagggacccaaaaagacggaca

SEQ ID NO: 80963 - RNA, 35 nt, Homo sapiens
ggcgccgcgcccggaacgaacccaccaagaccgaa

SEQ ID NO: 80964 - RNA, 78 nt, Homo sapiens
gggagggggcggccgggcggagagaaccagcgaggacgagggggcaaaaaacaccccccgcacaaaagacagaaagca

SEQ ID NO: 80965 - RNA, 73 nt, Homo sapiens
cagagcagaggaagaaaagaggagccgagcgggaaggaaaagcagccgaggaagaagaaggcagcagaaaaga

SEQ ID NO: 80966 - RNA, 75 nt, Homo sapiens
ggaacacgcacaaaaaagggcagaagagaagcaggaaggaggcagaggcacaccgaaaggccgagaccccacaag

SEQ ID NO: 80967 - RNA, 82 nt, Homo sapiens
gacggcgacgagaagagcagccagagaccacagcgccgaagccagcgaagagagggggaaaaccccagacgccagaaagcgc

SEQ ID NO: 80968 - RNA, 79 nt, Homo sapiens
cgcccgaggacgagcccccgggaagcccccagcggaggagaaggaaaagaaggcggaggggggggggacacggagacgg

SEQ ID NO: 80969 - RNA, 95 nt, Homo sapiens
cagcgaagagacaaggccagagaaccaagaggcccgggccgcacaacgcggagcggaagagcgcggcgggcgcggccgacacaagacggcgacgc

SEQ ID NO: 80970 - RNA, 77 nt, Homo sapiens
caccggaccacgagaccggagcccaaggagcaacagagaccgcgagagcaacaaggcacaccaagccagaaggcgag

SEQ ID NO: 80971 - RNA, 80 nt, Homo sapiens
gacaaaaccaaccccccccaaaagccggcaaggagggagacggcgagcagaggcgccccaccacgccacccccaacccgc

SEQ ID NO: 80972 - RNA, 78 nt, Homo sapiens
ccagaccggcaccgaagaccgagaagacaccacacccccaccggaaagccccccagacaaagaagaaaacaacaaaca

SEQ ID NO: 80973 - RNA, 70 nt, Homo sapiens
aaggaagagagagcacaagccagcgcaagaaaggggacggacccccccgagccgcgccccagccacgcac

SEQ ID NO: 80974 - RNA, 63 nt, Homo sapiens
ggggcgcacaccaccggacaaccgacaaaagcagaagagcccgccaaaagcaagagccgaagc

SEQ ID NO: 80975 - RNA, 68 nt, Homo sapiens
ccgccccagaaagagacaacacaggaacaagcaccacagaggaagacagaccgcgaggccacacccaa

SEQ ID NO: 80976 - RNA, 77 nt, Homo sapiens
acccggggaggcgcacacacaccaaagcccggggcaagacggcagcccggggcagaagaggggacacgccagaagca

SEQ ID NO: 80977 - RNA, 74 nt, Homo sapiens
aagggcgaggcgccgcggacaccccgagacaggggaagaaaggaaggacacccagccgcagccagaccacggag

SEQ ID NO: 80978 - RNA, 62 nt, Homo sapiens
gccccagagggcgggaacaggcaggcacccgggagagcagcagagagcacagaacacgcacg

SEQ ID NO: 80979 - RNA, 76 nt, Homo sapiens
ggagccaagcaaacagaagcgcggccaaggcggcgccgaggaagagcagaaggaggcccaagggccagggacgaag

SEQ ID NO: 80980 - RNA, 83 nt, Homo sapiens
cagcaaaaaccagggcccacagaggagggcaccagcagcggagggcgcagccaggaggggaagcagggcagcgcagcggccgc

SEQ ID NO: 80981 - RNA, 80 nt, Homo sapiens
aaagcacaagcagggacacacggacaccagaagagagacaaggggccccgggaacacagcccggggggccggggagagaa

SEQ ID NO: 80982 - RNA, 55 nt, Homo sapiens
acggaccagaccgaccaccaaaaacggaacagaaccggcaagagcaaaccgagga

SEQ ID NO: 80983 - RNA, 74 nt, Homo sapiens
caaaaacaagacggggcgccccacagaggggcgacgggcaacggagaaggcacgaagcccacgagacacaccgc

SEQ ID NO: 80984 - RNA, 73 nt, Homo sapiens
cagaaaacgacacgagagcaagcgcagcccggcgccgaacagaagggcaccacgggacaagacacgcaaaaac

SEQ ID NO: 80985 - RNA, 72 nt, Homo sapiens
ggagggaggggaaagacccacaccaagagggaagagcggagggccaggcgggggaccacagcccaagccaga

SEQ ID NO: 80986 - RNA, 72 nt, Homo sapiens
gacaaaaaacccaagaacccaaggaaggggaagcaggccaacccagaacacaccccagcggggaagaccaac

SEQ ID NO: 80987 - RNA, 69 nt, Homo sapiens
gaagaagacaggcacacaaggcggcgggaaaccaacccgcaaggcagaaccagcaagggaagggcgaaa

SEQ ID NO: 80988 - RNA, 69 nt, Homo sapiens
aacccaggacaacagcaacccacacagggacaccacggacagaaggaaaaagccaacgccagcgggaga

SEQ ID NO: 80989 - RNA, 80 nt, Homo sapiens
gaggcagacagggggaggaagaagccggcacagcccaggaggaccaccgcggaagagaagaacgacgagaaggcaccgga

SEQ ID NO: 80990 - RNA, 69 nt, Homo sapiens
cggagacgaccgagcccagaggaccgcaacaccaggacagaacaagacaacccgaaccaccaccagcag

SEQ ID NO: 80991 - RNA, 75 nt, Homo sapiens
caccggccggccgagcgaacccgaggcccgaagagccaaccacaggagggaaaccacgcaggcaaacgagaaaaa

SEQ ID NO: 80992 - RNA, 84 nt, Homo sapiens
acccgagaacggcgggaagagaagacacgagcacaaacggccggcgcggaagaggccggcggcgggacggccccacgggacccg

SEQ ID NO: 80993 - RNA, 80 nt, Homo sapiens
gaaagagcgcgagcgagcgaggccgggccgccgaggagggagacagagggggcacccagaggccggggaccgccaacccc

SEQ ID NO: 80994 - RNA, 77 nt, Homo sapiens
gcccccgccgcccaccacgacgcccccagagcaacaaggcacgcccacacaaaagccgcaacaacgggaacgacaag

SEQ ID NO: 80995 - RNA, 53 nt, Homo sapiens
gagcagcccccagccagccgcgaggacccacccaggaggcagaaacacgccgc

SEQ ID NO: 80996 - RNA, 85 nt, Homo sapiens
gcaaagcgaggcgaagaaggccaaggcgcagaagccaaagccacgggcggcccggaggaggccaacacgagcggagggaagaccg

SEQ ID NO: 80997 - RNA, 47 nt, Homo sapiens
cgcagggcgcccccggagcaacacagcaagagaacaccagccaaacc

SEQ ID NO: 80998 - RNA, 88 nt, Homo sapiens
gccgccccaagagcgcagacggccagccgaaaccacgacggcgccaccggggccccccgcccgggacgggacagcaacggcagcaccg

SEQ ID NO: 80999 - RNA, 112 nt, Homo sapiens
cgcccagggaccgaagaaaagcagggaacaagaaaggaaaaggaccaggaacaacggccccccagcacccaggcggaagcagggcgccacgacagcaaccgccccgggcgaa

SEQ ID NO: 81000 - RNA, 73 nt, Homo sapiens
cgacccaccccgaagagcaacggaaccagcgccgaggaacgaacagcaaagcggagcaagaaacaaacgggga

SEQ ID NO: 81001 - RNA, 66 nt, Homo sapiens
acaccaagaacacaggcacgggagaccgcaagagaagaaaccagaggcaagcgacgggaaggacca

SEQ ID NO: 81002 - RNA, 90 nt, Homo sapiens
ccccacacacgcgcacaagccaaacgaaaccaagaagcccagagacgggaggaaagcagggacgcacaccgagacgaacacagaacagca

SEQ ID NO: 81003 - RNA, 72 nt, Homo sapiens
cgccagcagaccaccccgggagggaggacggacaaggaaagaagggacaagcaggaaacaagaaacaccaac

SEQ ID NO: 81004 - RNA, 68 nt, Homo sapiens
cggaacccgggccaaaccacccccacccagcccggaggaaacacacggaagcaagaaagggaaagccc

SEQ ID NO: 81005 - RNA, 76 nt, Homo sapiens
agaaagaggacagaacagagcaaaaaacagacaacagcaaaaggcagagggggcgagggaggaaagggggcaaaac

SEQ ID NO: 81006 - RNA, 82 nt, Homo sapiens
gagcccaaaaaaggaggagggcgccagcgagcccggccggagaagccggcccagccacacagacacagcagcccacgcagca

SEQ ID NO: 81007 - RNA, 77 nt, Homo sapiens
acgcacacgccggcgcgcgaccgcgcaaaacgggaaacacaaagaagacaccagaagggccagcaccacgacaacac

SEQ ID NO: 81008 - RNA, 107 nt, Homo sapiens
aagcaccaaaccaggaaagagagaggaaggcggaccaggggaggggcaggacagaaggcaaagcaacaaccccagaaaaacagagaggacaaaagaggagaaacagg

SEQ ID NO: 81009 - RNA, 68 nt, Homo sapiens
ccgaaaacacggggcaccagcaaaacaaacggagagaggagggagaaacaaaggccaaagacgcagga

SEQ ID NO: 81010 - RNA, 59 nt, Homo sapiens
cagccggacggcggggccgggcccccggccgcaagcaggaacgcccaaaacccgccgga

SEQ ID NO: 81011 - RNA, 82 nt, Homo sapiens
gcaggggagccgcccgcacagcggcccggggaaggaagcggagaacgcgggcagggacccccgaacccggaacaggcaccca

SEQ ID NO: 81012 - RNA, 82 nt, Homo sapiens
ggagccgggagccgccgaagcggcgacagcggccggggcgcaggcgcccggcggaaggcaggaggcaaaacccaacgaggac

SEQ ID NO: 81013 - RNA, 79 nt, Homo sapiens
agcaccggaaaggaaacaaaacgagcaaacacaggaacccaacgagccaaaggacgaccacgagcagagcgagaaaaga

SEQ ID NO: 81014 - RNA, 75 nt, Homo sapiens
gaagggaggcccaagacccacaacaaaagccccagcacaagagaaaacagacagcagaacgaaaagcccagagac

SEQ ID NO: 81015 - RNA, 76 nt, Homo sapiens
cccccggcccgggccgccgccgcggaaccgcggcgcagacagccaaggagacggacccaaggaacccgaagaaacg

SEQ ID NO: 81016 - RNA, 73 nt, Homo sapiens
gaagacaacgcagcggcagaaacaaggcgcagcaacccacagagagagaggaaacgaagggagcgacacacac

SEQ ID NO: 81017 - RNA, 67 nt, Homo sapiens
ccaaccgcacccaaccgcgccgggccacgccggccacccccaaaaacagccggcagacaagccacac

SEQ ID NO: 81018 - RNA, 37 nt, Homo sapiens
aaggaaaaaacagaggagcgagcaggcgacccaaaag

SEQ ID NO: 81019 - RNA, 70 nt, Homo sapiens
aacaagacaagcccacacagagcaagcaagggaacaaccaaagaacaaagaaggggacaggcgcacaaag

SEQ ID NO: 81020 - RNA, 82 nt, Homo sapiens
ggaccgggcgccgcgagccgcccaccggcgccacgcaagggcgaggcagccccaaacaccgagaggacagaaagcagcaaca

SEQ ID NO: 81021 - RNA, 76 nt, Homo sapiens
gggcgcgagcggggacaaagcgaacagaacgaaggggaagaacaccgagaaagcgcaagagcggcaggcacggcag

SEQ ID NO: 81022 - RNA, 69 nt, Homo sapiens
caaacaagccggagacccaagcaccggaagcaacagacacaaggggaacggcgagggaacccaggaagg

SEQ ID NO: 81023 - RNA, 79 nt, Homo sapiens
agcacaagcccgaagacgggagaggaagagaggggggccagcagcaagaacagagagagcagagagagccagaaggccg

SEQ ID NO: 81024 - RNA, 80 nt, Homo sapiens
ggagcgagacaggcgggggaaaagagggggagacacccgccccccaaagcgaagccaaagcgaaggcaaaggccaagaag

SEQ ID NO: 81025 - RNA, 82 nt, Homo sapiens
ggccgggcgggaacaagcccggaacaggcccacccaagacagcacagaagaaaagcaccgaagaacgaagccagaagagacg

SEQ ID NO: 81026 - RNA, 74 nt, Homo sapiens
agccaagagggcgcccagagacaacgagagaacacagagccgcgcacccagccggggcagggcaagccacccgc

SEQ ID NO: 81027 - RNA, 78 nt, Homo sapiens
accagaagaaaccagccagagagccaagaagaacagacagacaggcccaggccccgggaccaaggacacgcagacccg

SEQ ID NO: 81028 - RNA, 74 nt, Homo sapiens
gacagaaagaggccccccggaggggcggaccggcgcccagaagccccgggaggcgccgcccgcggccgcccccg

SEQ ID NO: 81029 - RNA, 70 nt, Homo sapiens
aagcaggagcacgcaggaggcacaaggcccgggccggccacgacgcacggcgggcaagcgcacgccaccg

SEQ ID NO: 81030 - RNA, 77 nt, Homo sapiens
acagccacaggggggagacgggaccagcaagccgagaaagggaggcggaacaggagaagaggaaaacggccacagga

SEQ ID NO: 81031 - RNA, 68 nt, Homo sapiens
caagaccagagaaggaggagggaccacgcgcgaggccaggcagagcagcccaccagggaggggagggg

SEQ ID NO: 81032 - RNA, 56 nt, Homo sapiens
caacgaacagaagcacaaccagagccggccccggggcaaggggagaaaccacagaa

SEQ ID NO: 81033 - RNA, 78 nt, Homo sapiens
caaccccagccccagccaccacggaccccgcgcccccaggggaccccacaccacaaaccgaggaaagaagggacagca

SEQ ID NO: 81034 - RNA, 50 nt, Homo sapiens
cccccgaacccagccgcaccgggggggcaggccacagcagcagcccggga

SEQ ID NO: 81035 - RNA, 78 nt, Homo sapiens
acacagccagaacagggacgccagccgcagaggaagacccgagcgccccgcagggaggagaagcagcgacaggagcgg

SEQ ID NO: 81036 - RNA, 78 nt, Homo sapiens
ggccagaagaccagcggaaaagcgaagccgagcccaaacaaaggggaccacgggcgcagggccggcggagaggcccga

SEQ ID NO: 81037 - RNA, 77 nt, Homo sapiens
acaggacagcacaggcacagaaggccaaaaaggcaaccacagagagagagagggagggggaacagacgaaggcccaa

SEQ ID NO: 81038 - RNA, 87 nt, Homo sapiens
gcgccgcgacacaccgcacccacacgggcgagaagcccacgaggcaacacgcaaggccgccaccaggggaaggaaggaaaagaaaac

SEQ ID NO: 81039 - RNA, 79 nt, Homo sapiens
aagccaaccagccagcaggccgggcggggaagggaacgaggcgagacagagaagcacgccccggcacacagcagcaaag

SEQ ID NO: 81040 - RNA, 64 nt, Homo sapiens
gacgagcccccaccaaccaccacagggccagacgggcccagccagcaccaagagaggccacgcc

SEQ ID NO: 81041 - RNA, 79 nt, Homo sapiens
gcgagaacagaggacggaccgcgaaggacggggagggacgggacaccacaagccaccacacagcaggaggccaggcacg

SEQ ID NO: 81042 - RNA, 70 nt, Homo sapiens
aagaagagccgccccacacgcagaaaagggagagcgaaggaagagccaggaaagcaaaagggcacccgcc

SEQ ID NO: 81043 - RNA, 84 nt, Homo sapiens
cccggcggcgcggggagccagcgagcgcgcccggcaggccgccgcgagcagccaggcggcgggccagccaaaagaagcaaggga

SEQ ID NO: 81044 - RNA, 74 nt, Homo sapiens
ggcaagggaaaggacaaagccagacgcaccaagaaacgacacaaggagcagagcaagaacgggacgagacaaaa

SEQ ID NO: 81045 - RNA, 59 nt, Homo sapiens
caaaggcaggggaggaagccacccgagaacaggacagagccacgaccaggggacacccc

SEQ ID NO: 81046 - RNA, 84 nt, Homo sapiens
ggaggggagggggcgagcggaagccaggcggagcccagcccgaaggagacggcgaagaacagaggaacaacgccaacgacaaga

SEQ ID NO: 81047 - RNA, 56 nt, Homo sapiens
aaaaagacgggaaacggcaaaggcgcgaagaggccagaaagcaccaacaaccggca

SEQ ID NO: 81048 - RNA, 55 nt, Homo sapiens
ggcggaggacgagcccgggagcgacccgcgcaaacaaacagggcagagaaacagc

SEQ ID NO: 81049 - RNA, 72 nt, Homo sapiens
cggggccagcggggaggcgaagacgagacagagcgccacaggagccgcagaagcaaaggcaccgccaaaccg

SEQ ID NO: 81050 - RNA, 75 nt, Homo sapiens
agaagcaaagagcaggccagcccgcagcaagggcaagccaggaccaaaggcaccgggaaaaccagacaaggaaaa

SEQ ID NO: 81051 - RNA, 76 nt, Homo sapiens
ccgggccagcccaggaccccaggggaacaagaggccacgcagagccacgccggaaacgagggaaagagcacggacc

SEQ ID NO: 81052 - RNA, 69 nt, Homo sapiens
cgagcagcggacgccggccgccgcaggagccaaggacagaacacacacggagagcagacagcacagcaa

SEQ ID NO: 81053 - RNA, 73 nt, Homo sapiens
gacaggaggacccaaaacgcagccaggaaaggacacggaacagcccagcgaaggaaagaaagaagaagagcga

SEQ ID NO: 81054 - RNA, 78 nt, Homo sapiens
cacacgaggagcgcggccagcccgccgcagaaaccgccccacgcaaaccagcaaaagcagaaagcacggaccaaacca

SEQ ID NO: 81055 - RNA, 76 nt, Homo sapiens
gcggcgcgggacgcgcgcgggcacccacggagccccggggcggagaagacagaggagccagaccaagagacagcac

SEQ ID NO: 81056 - RNA, 69 nt, Homo sapiens
agcggcggcgggccgggcagcccggccgacaaccacgggcagcagcggagaccgagcagcagggaagga

SEQ ID NO: 81057 - RNA, 84 nt, Homo sapiens
agcccgcacccgcagcaaaaacggccacacgacacacagaggagaggagacgccggagcgggacgaccagagaccgagagcggc

SEQ ID NO: 81058 - RNA, 79 nt, Homo sapiens
cagacaccgacgggccgcgaggggaagaggaagcaaagccaaggacaccagaggaccagaacccacgagaaacagacga

SEQ ID NO: 81059 - RNA, 95 nt, Homo sapiens
ggcggcggcagcgggccagacccaggaccgcgacacggcagaccagaaacgggggcagagccggccaggggcaccggaaggagccacaaggggcg

SEQ ID NO: 81060 - RNA, 93 nt, Homo sapiens
caacggccaaccggcaagaccagacgggaacgggagacaagcgcagcgagagagaaccccagagggcgcggaagccccagcaaacaagaccac

SEQ ID NO: 81061 - RNA, 56 nt, Homo sapiens
caccccaaaacgggagaggccaggcccgccaaagaaccgcagaaggaagacagaag

SEQ ID NO: 81062 - RNA, 75 nt, Homo sapiens
ccccgaagagggggacacgacccggagcacccgaccccgaaccggaaacaggcacagaacagaaggaaaggacga

SEQ ID NO: 81063 - RNA, 72 nt, Homo sapiens
gcgagaagccacaagcaccccgccggcagaggccagccaagccaaaagcccggagaccaagagaagccacaa

SEQ ID NO: 81064 - RNA, 76 nt, Homo sapiens
aaaacccggacaacagaaagagaccaagagaagaaggggcgccgccaaaccacaggacaacgaaacccagcacacg

SEQ ID NO: 81065 - RNA, 56 nt, Homo sapiens
gaggggggggagaaaggaaagcaccgcaccaacgaccgaagcaccaggcacaccca

SEQ ID NO: 81066 - RNA, 53 nt, Homo sapiens
cgcgggggcaacgagaggcccagaggagaagcacaaccacggacggcccagaa

SEQ ID NO: 81067 - RNA, 80 nt, Homo sapiens
cggagaccccgaaaacggaagcgcagggagaaggaagaggggaaaaggaaaaaccaagcccggacccgagagccccaccc

SEQ ID NO: 81068 - RNA, 72 nt, Homo sapiens
agccagaacacgccaaggcaaggagagagaacgaaacccaaccaagacccagcacacgggaaagggccgaac

SEQ ID NO: 81069 - RNA, 102 nt, Homo sapiens
agcagaggccgagaaacagagagaaaagagacggagcaagagaacgcaagagacggcagagaaagcaagagacgcaaccgaacgcagagcggagaacggcgg

SEQ ID NO: 81070 - RNA, 80 nt, Homo sapiens
cagccacgccccgacagggggcaagagaaccaccgaggccaaggaaaaggaacagagagagcagaaccgaaacggggaaa

SEQ ID NO: 81071 - RNA, 55 nt, Homo sapiens
accgggcgcagccagcagaaaaaccccccaccgacccaccacgccaggccgccgc

SEQ ID NO: 81072 - RNA, 65 nt, Homo sapiens
gccagaagagccaagcaagcacggccaagccaggacacccaaaagcaaaagaccagaaaagaaag

SEQ ID NO: 81073 - RNA, 69 nt, Homo sapiens
aaacggggcccgaccggaaaagggccaagagcaggaaccccaaggcgccaccggaagaaacgggagggg

SEQ ID NO: 81074 - RNA, 71 nt, Homo sapiens
accccgccggagacgagaggaaaccccccaggcaagaggcgcaggaccgggaagaccaacaaacgcaccgc

SEQ ID NO: 81075 - RNA, 76 nt, Homo sapiens
aggaacagacacggggaagcgcaaaaacaagacggggcgccccacagaggggcgacgccggggagcaaaagcagcc

SEQ ID NO: 81076 - RNA, 74 nt, Homo sapiens
gccaaccgcccgcaggacgagaggggcgcggcacaggcagggcccaagaaggaccccagccaacagagcggggg

SEQ ID NO: 81077 - RNA, 60 nt, Homo sapiens
gacccaccgcaggagcacaacaagaggccagcccagaaaaccacccaggcaacacacaca

SEQ ID NO: 81078 - RNA, 100 nt, Homo sapiens
gcagggaaaccagcgagccaacccacacgaccaaggagcacgagagcaaacgagacggaagaaaaaaccgacggcccgaaccacagccaacaagcagcca

SEQ ID NO: 81079 - RNA, 75 nt, Homo sapiens
cccagggaccccccgggaggggcgccccagccggcaaccagaaggcagaacacggcaagcacgacagacccacca

SEQ ID NO: 81080 - RNA, 73 nt, Homo sapiens
gggccaagaggggagagcgagaagcagccgcgcgcgccccacacggcgcgaaagagcacaacagcggccccac

SEQ ID NO: 81081 - RNA, 72 nt, Homo sapiens
gaagagacgaaaaagacggagacagggaaagagaaggcacagggcagagcaacagagacacaggagaggaaa

SEQ ID NO: 81082 - RNA, 76 nt, Homo sapiens
cccaggagagcgggcaagggcccaggacaccaacacggacacggggcgggggcccacggggcagggaagagcacaa

SEQ ID NO: 81083 - RNA, 76 nt, Homo sapiens
gggaaccaaacagcagagcagacaggaaggcaagaacaaaggcaccaaaggagccaaggagacagcgaacccacaa

SEQ ID NO: 81084 - RNA, 77 nt, Homo sapiens
agaggaaaacacaaaaaacaggaaaaacagaagaggcagggcaaaacgagggacaccaacacgcggaagccccaacc

SEQ ID NO: 81085 - RNA, 73 nt, Homo sapiens
agagagggacaggagacgaggaggagaaccagcaagccccgcgacaagagaagcaccagaagacgcagggcgc

SEQ ID NO: 81086 - RNA, 75 nt, Homo sapiens
aggcgcacaacccaccacaaagagagagaaagcccgccacagcgccggaccagaaaaacaagggggggggaaccg

SEQ ID NO: 81087 - RNA, 79 nt, Homo sapiens
aaaacaagccaggaaggaaaggacggaagcaccaaaaacgcgcaggagacccaggccgagaacaccacagcgcggaaag

SEQ ID NO: 81088 - RNA, 82 nt, Homo sapiens
ccgaaggcaggacaccgaggggaaaggagcgacagcgccacgacagcccgaagacgagcagcgcgaacaggccacgaaagaa

SEQ ID NO: 81089 - RNA, 72 nt, Homo sapiens
gagggcaagcagacacagaacgcaggggagcgaaccagcgacgagaggggcgaagcacaaggaaggagggca

SEQ ID NO: 81090 - RNA, 84 nt, Homo sapiens
cgggcggaggcggcggagcgcgagagccgagcggaccagggcgccggccgagcccgggaaaacgacagcagcagcagggccgga

SEQ ID NO: 81091 - RNA, 84 nt, Homo sapiens
ggcggggccgccggggccgccaggagcccgaccgggagaggacaagaccacgagccaggcagggagggaagcggagagacagga

SEQ ID NO: 81092 - RNA, 76 nt, Homo sapiens
cggccagaacccggccccaccgccccaccaccccaccagacggcgccccaagaccagaccaaagggacacagaaga

SEQ ID NO: 81093 - RNA, 74 nt, Homo sapiens
gagaaaaacagacgaacaccagaaggaaggaaacccggcaggcccccccgggcccaccaccaaagagacaagca

SEQ ID NO: 81094 - RNA, 80 nt, Homo sapiens
acgcccgggccaccaagcaagggccaccagagccccacccagaaaggcagaggggagagccagagcaccccaacccggag

SEQ ID NO: 81095 - RNA, 81 nt, Homo sapiens
acaacggcggcacccacgcagacaccagccgcgccaggaaaccccccaggcaagaggcgcaggaccgggaagaccaacaaa

SEQ ID NO: 81096 - RNA, 75 nt, Homo sapiens
gcacacccaccagggagggccccgaggcgccaacgcacccacgccgagaggagaaggccggaacaacgaagggga

SEQ ID NO: 81097 - RNA, 72 nt, Homo sapiens
aaccaacaagaaacagacacaccgcacagaaacgaggaaaacgaaaggacccaaaacacaaggggacaccga

SEQ ID NO: 81098 - RNA, 73 nt, Homo sapiens
agacagcccagacgcaaggcagaaggaagacagacaaggcggcacaccacacaccgaggagaaggacaccagc

SEQ ID NO: 81099 - RNA, 79 nt, Homo sapiens
agaaaccggaggacccgccgcaaggaacgcgaagggaagaaaaaacaagaaagccaggccaagcacagagacaagagaa

SEQ ID NO: 81100 - RNA, 85 nt, Homo sapiens
ccacaaagcacgacggcacccgggggccacacgcaggccccgcgccaggaaagggagcgccaaaaagaaaagaccccaacacaca

SEQ ID NO: 81101 - RNA, 78 nt, Homo sapiens
cccaccaacaggaacagggcagacgagcggaggacacccaacccggggacaggagccagcggcccaggggcgggggag

SEQ ID NO: 81102 - RNA, 67 nt, Homo sapiens
gggaagcaccaaaagagagcgaagacagggagaaaacaggggaacagaacaccgcaaccgccaccca

SEQ ID NO: 81103 - RNA, 70 nt, Homo sapiens
gaaaaaccggcccggccacccgggagagccgcggcgcaagggaaagaaaagaggcccggaagagagccac

SEQ ID NO: 81104 - RNA, 79 nt, Homo sapiens
cgggagcagaggaagccgaggaccaccacagaaggaagaagaacgcggaaccccagagaggacagaagccaacgcaacc

SEQ ID NO: 81105 - RNA, 86 nt, Homo sapiens
aaccgaggcacggacaacacaccggaggcagggggacacagccacccaggaacgcaggagcgaagaggaggaagcccccaggagcc

SEQ ID NO: 81106 - RNA, 72 nt, Homo sapiens
cggcggagcgcccacgagcgggcaagcgcgcgcaggccgcggaggcccgagagcggccgcacaccggaggag

SEQ ID NO: 81107 - RNA, 82 nt, Homo sapiens
agaggccacggagaccacaccggagacgcagacagcaccccgagggagagggcccagagaccgccaggcggacgaacccccc

SEQ ID NO: 81108 - RNA, 84 nt, Homo sapiens
gcggcccagcgggcgagacggaggaggccgacgaggaacagcagccgcaccaagggcaaaaagggaaaggaagagaagcaaaag

SEQ ID NO: 81109 - RNA, 60 nt, Homo sapiens
cgcgacagaggagggaggaaaacaaccgagggcagagccgccaacgcggaggcagggcgc

SEQ ID NO: 81110 - RNA, 60 nt, Homo sapiens
aaaaaggagccgcgcccccggagacagacgcagggcgcccccgggggccaacgaaaagag

SEQ ID NO: 81111 - RNA, 63 nt, Homo sapiens
gaggcccggaggcgccgagcggaggagaccagcagaagggcagagagggccgaggcagacaag

SEQ ID NO: 81112 - RNA, 67 nt, Homo sapiens
accgggccagccaacaggcaaaaggcgacacgggcggaccacaaacccggcgcccccaaacaaacag

SEQ ID NO: 81113 - RNA, 76 nt, Homo sapiens
gccgagggggaaaaggaagaaccagagaaagggagcaggcggaagccgcagaaggaccggccagaagcaagccgga

SEQ ID NO: 81114 - RNA, 37 nt, Homo sapiens
ccaacgacgcacagaacgcaagagaccccaccccgcg

SEQ ID NO: 81115 - RNA, 36 nt, Homo sapiens
gcagcggagcagggcggaaagaaaccgagcgccacg

SEQ ID NO: 81116 - RNA, 38 nt, Homo sapiens
aacaacacaccagaccaggagacccaaagagaagagaa

SEQ ID NO: 81117 - RNA, 40 nt, Homo sapiens
acacgcacggcaaaccagcacaaccggaggaagagaaggc

SEQ ID NO: 81118 - RNA, 74 nt, Homo sapiens
gggaagacggacagcgaagccacccagcgccgaggaaaggaaggagacgccccgacggaaaacagaccacagag

SEQ ID NO: 81119 - RNA, 87 nt, Homo sapiens
gcgcgggcggagacaggccaacacgcgggcagcgaacaagcgggagcaaggagggcgaagagcgaggagagccgcacaccaggggag

SEQ ID NO: 81120 - RNA, 41 nt, Homo sapiens
ggaaccagcacaagacaagccccgggaccaaggacacgcag

SEQ ID NO: 81121 - RNA, 75 nt, Homo sapiens
ccaagagaggcaggcagcgacagccacacaacggacagaaaacgaaggaaggaggacccgaggagagagaagacg

SEQ ID NO: 81122 - RNA, 55 nt, Homo sapiens
cgcggaacaggacgccccgagacaaaccggcgaccacacacggggacgacgggga

SEQ ID NO: 81123 - RNA, 70 nt, Homo sapiens
ccggaacaggagagagagagaggccagaaggacagaggagggccagaccaggacggcaaacaccccagca

SEQ ID NO: 81124 - RNA, 83 nt, Homo sapiens
ccgcgccagcgacaaacaaagcaaggcaccggcaccggaccaacacgaaggagaaccgcaggccccgcggagaacaaccgcga

SEQ ID NO: 81125 - RNA, 91 nt, Homo sapiens
agacggggagcgcagcagagggagcgccgaaggacaagaacagcgccgcaccagcagccgacaaccccggaacgcgggcaaaaggccccag

SEQ ID NO: 81126 - RNA, 81 nt, Homo sapiens
gaacgaggcggggagagcgcagcggcggagccccaccgcaggacccccgcgccagcaccaggagacaaagccacaaaaaca

SEQ ID NO: 81127 - RNA, 73 nt, Homo sapiens
agaagagagacgagagagaagaggagagagaagagaagaagaagcgcacaaggagcacaacagggagcggaag

SEQ ID NO: 81128 - RNA, 62 nt, Homo sapiens
agagacccgacgacggaccgcacacggagaaggaagcagagacggggcacggagccaggagg

SEQ ID NO: 81129 - RNA, 70 nt, Homo sapiens
gaacaagaccgacaggaggccaaccacgagaaggcaaacgaaagccaaacacagaagcagagcccgggag

SEQ ID NO: 81130 - RNA, 79 nt, Homo sapiens
acgccacggagggcaagagccggagggccagaggacagacaggccagacacgcagcggccgaggcaggggaagagagcg

SEQ ID NO: 81131 - RNA, 75 nt, Homo sapiens
cagcacccggccgagacggcggcagcagcggcacagagacgcggacagggggccagagcaaggaaagcggaagaa

SEQ ID NO: 81132 - RNA, 92 nt, Homo sapiens
cggccgcgcgcgaacccggccgcagggacccgcaggacccacccaggagggccgacccgaccgcgcccacagacacagaaagcaggcagacc

SEQ ID NO: 81133 - RNA, 98 nt, Homo sapiens
cggaggagacgcacgcagcgacgccccgcacgacgacagaggcccagagcccccccgaggcggggaaaaaggagaagccagaacaaagagaagaaacc

SEQ ID NO: 81134 - RNA, 82 nt, Homo sapiens
ccgaaccaccaacaccgcagcagcaaccgggcccggccaggcggcgccggaggaacgacgacgagccagggagaaggagcag

SEQ ID NO: 81135 - RNA, 59 nt, Homo sapiens
cacacacaagcaacaaaaaccaacgccaaggaagcagaaagcgggaagagggcagcaga

SEQ ID NO: 81136 - RNA, 79 nt, Homo sapiens
aaggagacacggccccccaaggaaaacaggaacagcaagccaaagagcggcgggccacccaagaagcaggaggaccagc

SEQ ID NO: 81137 - RNA, 57 nt, Homo sapiens
ggaacccggggccagaggggccacccaagggggcagccagagccggacagaggacaa

SEQ ID NO: 81138 - RNA, 75 nt, Homo sapiens
ggaccaaggccgagagccggaacaaacgagggcccgggaggaccgacgcagccaggaaagagaagggagggcgac

SEQ ID NO: 81139 - RNA, 72 nt, Homo sapiens
aaaccaaacggagaacaaaaagcagagcggaccaggaaacagacgggggaaggcaaacagaacgaagaaaaa

SEQ ID NO: 81140 - RNA, 83 nt, Homo sapiens
aggggcccagcaaccgcagacgaaccgaggaccggaacagggaccggccacgcccggagcagcgcgcaggccacccagagaca

SEQ ID NO: 81141 - RNA, 74 nt, Homo sapiens
gcccacgaaagaaagccacgaggaaggcaaacagcgaaggaaagcaaagcagacacggacccggaccaacgcgg

SEQ ID NO: 81142 - RNA, 74 nt, Homo sapiens
cagaggggcgaagaaggccagcgaagacggaggaccacaccggaagccagcaaagaaaacgccagcggagacaa

SEQ ID NO: 81143 - RNA, 112 nt, Homo sapiens
gaggccggggaggaagagagcaggggggcgccaggcacccgagaaaggggacggggaaagaggcccccggggacaagggcagggccggaagcaaggaccgaggggccacagg

SEQ ID NO: 81144 - RNA, 68 nt, Homo sapiens
aaagagaggagagaggaaggcggaccagaggaaagaacggaaaaaaggaccaaaagaccagagcaaac

SEQ ID NO: 81145 - RNA, 59 nt, Homo sapiens
ccgcggagacaaagaggcgcgagcacccccgaaggccaccgcacacaccaacaggcaga

SEQ ID NO: 81146 - RNA, 39 nt, Homo sapiens
ccagaggaagccaaaaggccggccgcgccagagcccagc

SEQ ID NO: 81147 - RNA, 61 nt, Homo sapiens
acggaagccagagaaccggcgagcaccaagagccggagagacaagggcaccaggcccaggc

SEQ ID NO: 81148 - RNA, 65 nt, Homo sapiens
ggccacgcgggcagaccgacagaagcccgggaccgggagcccgggaccgggagccggggggccac

SEQ ID NO: 81149 - RNA, 39 nt, Homo sapiens
gaaagggagcgcaccccagggaaacagaacgacagcccg

SEQ ID NO: 81150 - RNA, 80 nt, Homo sapiens
gcgggacaagagagccgaggcgcccccaccacccacaagaagccgaggccgccagcgccaagaaaaaaacaaggccaaag

SEQ ID NO: 81151 - RNA, 50 nt, Homo sapiens
cgcagggcgcccccgaaagagcacgaggagcagcacggacgagagaccgc

SEQ ID NO: 81152 - RNA, 81 nt, Homo sapiens
acgaagcccacgggaagagagaaaagggcagaacgaaaaagaagaaccgcaaaagccagaggagggagacggggggcggcc

SEQ ID NO: 81153 - RNA, 81 nt, Homo sapiens
cgcggcaggacggcggacggcgcggccacggagaagggcgcggcgccacaggagccgcagaagcaaaggcaccgccaaacc

SEQ ID NO: 81154 - RNA, 82 nt, Homo sapiens
ggcgaccgccaccgggagggggaagagccgggagcacaccgaggagcgacaggggaacgccaggacgggacacaagcggacc

SEQ ID NO: 81155 - RNA, 71 nt, Homo sapiens
cacacaacaaaacacaggagggggaagcaaaagcagaccggaaaacccaccggcaagaccacacccgaggg

SEQ ID NO: 81156 - RNA, 83 nt, Homo sapiens
gcaccgcaaagcggggacccagacccggagcccagggaagcagccgaccagccgcggagccgggggcagggaccagacaccac

SEQ ID NO: 81157 - RNA, 77 nt, Homo sapiens
cacggaccagagacacgccaagcagccagcccaggagaggaagaccccggggaggccgggcggaggacaccgaggcg

SEQ ID NO: 81158 - RNA, 50 nt, Homo sapiens
accaggagcccgagagagaagggacggagacgagcagagggggcacggag

SEQ ID NO: 81159 - RNA, 75 nt, Homo sapiens
cagcaagcgacgaggaccggcgacggcccccacacgcggcacagcacgcccagcccagcagcccgggagcgagcc

SEQ ID NO: 81160 - RNA, 92 nt, Homo sapiens
accagcagacgcagccgagacaccagcccgaaacaccaccaagggcaaggagagccaagcggaccaagaaggcaagagaggaagcagaacgg

SEQ ID NO: 81161 - RNA, 76 nt, Homo sapiens
gaacgcacaaagaggggccggaggaaaggaggcaagaaggcgaacagccaaagaagagcagaagcaaggcgaagca

SEQ ID NO: 81162 - RNA, 73 nt, Homo sapiens
ggagcgcccagagacgcagcaacaaacccacgccaaaaagggaaaaaagagagccacgacgaaagcaaacacc

SEQ ID NO: 81163 - RNA, 72 nt, Homo sapiens
gaggaaaacagagacaaagacaacgaaagagacagcacaaaaagccgaaccgcccggaaccgggaggcgaca

SEQ ID NO: 81164 - RNA, 84 nt, Homo sapiens
aaggacgcgccgacagaagagcgcgcccacacaccccgcccaaggacggccggcagcggccgggcccccgccgcagccacccac

SEQ ID NO: 81165 - RNA, 76 nt, Homo sapiens
cagaacggaggggaacacaaaaagggcggcaggagcgcggcaggggcgcgggggcagcaggaggagccccgaggac

SEQ ID NO: 81166 - RNA, 80 nt, Homo sapiens
ccgcaaagccccagaggacaaccaccccaggacaggagcagagcccgacacgggagcgcgaggccaggccaacgccggga

SEQ ID NO: 81167 - RNA, 55 nt, Homo sapiens
gaaaaggaagaaagggacaaagagaggagcaggccaaaacagaagaggcaaagcc

SEQ ID NO: 81168 - RNA, 57 nt, Homo sapiens
aggcccaacaacccccaaggacgccccggaaggagccacaagaccaagcgccacaag

SEQ ID NO: 81169 - RNA, 82 nt, Homo sapiens
cggggacagagagcaaaggagccccgaagaagagaaaggaaaaagaggcgacgagaaagaaaaagagcagcgcaaaggccga

SEQ ID NO: 81170 - RNA, 76 nt, Homo sapiens
gaccaagaggggcgacgcagagccgagcgaagcgccgcagccaagccggaacaggagcggcgagcccaaacgcaag

SEQ ID NO: 81171 - RNA, 78 nt, Homo sapiens
ccccgggacagcacgccccggaccccaagacaaaaccacaaggcaagaagccagcaacagccagcggagagccagaaa

SEQ ID NO: 81172 - RNA, 86 nt, Homo sapiens
ccgggacggcgcccccacgcgcgggggccacggcgcggacgccaggcccagcagcggggccccccagcccggagcagccagccaac

SEQ ID NO: 81173 - RNA, 81 nt, Homo sapiens
gagccgggcaggaggacaccaccagccggggacgggcgcaccagggacggcgcggacggacagaaggaacccccaccccgc

SEQ ID NO: 81174 - RNA, 73 nt, Homo sapiens
caaaacgaaccaggacggcaagaacaggacggacggcacacaaagggcgaagacgaacccagaagaacagagg

SEQ ID NO: 81175 - RNA, 68 nt, Homo sapiens
ccaagaagacagaccccgaggagacggacccggacacgaagacgaaaccagagggagggcccgcagga

SEQ ID NO: 81176 - RNA, 74 nt, Homo sapiens
gcgagacccagaggccgcggccgcggaacggcagagcgaaacaaacaagagggcgaaccagcacagcaacggac

SEQ ID NO: 81177 - RNA, 79 nt, Homo sapiens
gggaagacccaaaggcagcaaaaacaagagccccaaagcagccaaaaggccgcacgcccaaagcggaaacgcggaagag

SEQ ID NO: 81178 - RNA, 79 nt, Homo sapiens
cgacaacccagaagacccgcgaacaaggggcaggcgccgccgaggggcagcagcacaacaagggcgagcaacggcccaa

SEQ ID NO: 81179 - RNA, 70 nt, Homo sapiens
caaagaggagagagaaaaggagacgaagagcaccagacaaacccacaagcgaaagaacacgagaagaaga

SEQ ID NO: 81180 - RNA, 52 nt, Homo sapiens
aaaggaacccagcaacaagaggcccgaggccagaggggggggcaccggaacc

SEQ ID NO: 81181 - RNA, 80 nt, Homo sapiens
ccccagcgcccgcaccgacagggcgagcaggcgccgggaccgcacacacaccccacgaccccaggggaacaagaggagga

SEQ ID NO: 81182 - RNA, 71 nt, Homo sapiens
ccagaagcaggaaaaggaacagaagagcggagagaaaagaacaggggggcaggaaccagagaaggagaaac

SEQ ID NO: 81183 - RNA, 77 nt, Homo sapiens
gcggaaagggaaagaagaacacagcaggcaaacaggacgagagaggagcgcgggccgagagcggagagcgggacgca

SEQ ID NO: 81184 - RNA, 75 nt, Homo sapiens
agcgccgaagacccagccaaagaaaaaacaggacaagggacagccagagacacaaaagacggaggccggcccagg

SEQ ID NO: 81185 - RNA, 78 nt, Homo sapiens
ggagccaggccgaggggcggacgcggccgagcgaaagcacacgaagaggcagcccagaagaagaaagcaagcaggagg

SEQ ID NO: 81186 - RNA, 64 nt, Homo sapiens
aagaagacagcggacaagacgagccaacaagaaccgaggggacccaagggagagagggaacggc

SEQ ID NO: 81187 - RNA, 79 nt, Homo sapiens
ccaccacaagggaacagacacccacccgacggggccggcccgccgcccagggaaaagcgcagcaacaggaaaaaagcag

SEQ ID NO: 81188 - RNA, 83 nt, Homo sapiens
gaagaacccaaaggggagggaccgcagccacggaagagaaggaaagggccgagaaagaagagaggaagaagaggaggaggagg

SEQ ID NO: 81189 - RNA, 54 nt, Homo sapiens
gcccagcccccgagggcgggaacagagaggggagagccgaccccgcgaggcacc

SEQ ID NO: 81190 - RNA, 89 nt, Homo sapiens
gaggaggccgcagcccagcgggcccgggcggacagacaagcagacggggccgccacacgcccaaccagggcaccgcaagcgggaagaaa

SEQ ID NO: 81191 - RNA, 83 nt, Homo sapiens
cgaccaaccaacaaccacgggaagccgcggccccaagcaccagcccacaggaccaccgagccagacgaacaggcccaggagaa

SEQ ID NO: 81192 - RNA, 82 nt, Homo sapiens
aaagaccaggagccacaaaggagaaagaccacacagggaaacgaccagggagagaccaacaggaaccacagcggccgcgggg

SEQ ID NO: 81193 - RNA, 70 nt, Homo sapiens
agcacccgcccacgcggagaggggggcagaaggggaacagaggagcagcggcagaaaaagggccagacga

SEQ ID NO: 81194 - RNA, 78 nt, Homo sapiens
cacgggaaggagagcagccagcaggaacgcaagcacaggaccagaaacgaaaggcagcagaagaggaaagccagaaag

SEQ ID NO: 81195 - RNA, 72 nt, Homo sapiens
ccccgcagcgacgacggacagcaaggaaccccggagacagggaaacgaaaaccaccgggcaccacgagccca

SEQ ID NO: 81196 - RNA, 80 nt, Homo sapiens
aggccggcccgcgcggacgcggcgccacggcccgccaccggaccggaagcgggcccagggaacccccaaagaaggaaagg

SEQ ID NO: 81197 - RNA, 73 nt, Homo sapiens
gagccaagaacaagggccgcgagggaaaaggagcgacagaaaagcagaaaggcagaacaccaccacacggaac

SEQ ID NO: 81198 - RNA, 87 nt, Homo sapiens
cggccagaagaaaacgaggggcggaacacccgccaaagcagagaaaagaacaagacgccaaggagacgccgcagagacccccgggag

SEQ ID NO: 81199 - RNA, 73 nt, Homo sapiens
accagcaccagcaaaccaaaccagggaacggagcagcaagaagggacgccagaggggaagccgcacgagggag

SEQ ID NO: 81200 - RNA, 79 nt, Homo sapiens
cgaaggacccggccgaggcgggcgcaagagaaggcaccaagagagccacacaaccacaaccccaaaagagccacgcgcg

SEQ ID NO: 81201 - RNA, 82 nt, Homo sapiens
ccagacacgacaaacacggagaaggagggaacaaaaagaccccacggccgggcgacagaaggggggcaagacgggcagcgga

SEQ ID NO: 81202 - RNA, 86 nt, Homo sapiens
agcggacacggagacgggcccgacccccgacgccgaccggacagcggcacagaggagggagaccggagagaacagaaaaaaagcgg

SEQ ID NO: 81203 - RNA, 86 nt, Homo sapiens
ggccagccaagagaggagggacccggaggacaaggaaagggaaaaacagacaaggcacagagccccacgggacccgggcccaagga

SEQ ID NO: 81204 - RNA, 63 nt, Homo sapiens
ggagacagagccaaaaagccagggaaaaaagccagaaaaaacgaaaaagagaagcgaaaggga

SEQ ID NO: 81205 - RNA, 83 nt, Homo sapiens
gcgagggaggaagaccaaccaagagacaagcaccgcgaacaggcacaacagcaacgccagaaagagacggccccgaaacaaag

SEQ ID NO: 81206 - RNA, 77 nt, Homo sapiens
cacaacaagggagcacagaaccaggcccacgaaacagcaaacaacacccaacagcccaaagcaaaggagcaacagcc

SEQ ID NO: 81207 - RNA, 50 nt, Homo sapiens
aagacgggccccaacacccagagacgaaagcagacccggccaacgagcag

SEQ ID NO: 81208 - RNA, 80 nt, Homo sapiens
caaaggaggcaccagacgccggcaacaaagaacacacggaagaaagagccgcagacgcacagcaaccaccggacccgaag

SEQ ID NO: 81209 - RNA, 61 nt, Homo sapiens
ggaccccagccagaacgcagggaaacagccacagaggggcaaagaaaaaggagagaaaaag

SEQ ID NO: 81210 - RNA, 77 nt, Homo sapiens
cccccaaggaaaagacgaaaagaaacaagacagacaacaaaagcgcacagccagaagaaaccgggaggaccgagaac

SEQ ID NO: 81211 - RNA, 84 nt, Homo sapiens
agggccccccagggggcccccaacccgacaggagagcacagagccgggagaacaaaggggaaaaagggcccaagcaggagagag

SEQ ID NO: 81212 - RNA, 72 nt, Homo sapiens
cccggaaaaccagaccagaaacggaggagcccgccgaagcaggcaaagggaaaccgaagggggggcccagca

SEQ ID NO: 81213 - RNA, 78 nt, Homo sapiens
gggcgcgcccggccgcgacgcccgggacccagagcgggcaggcgaccggcccgaggaccgccgcacgaccaaacgcag

SEQ ID NO: 81214 - RNA, 70 nt, Homo sapiens
acggaaaaagagcacaagccagccaagacaggaaaaccaagcagaaggaggaggcagccagcagagcgac

SEQ ID NO: 81215 - RNA, 82 nt, Homo sapiens
caaggagcaggcgaaagaggggcgccccagaacaaaccagaagcagaagggaggaaaaaagaaaacgagaccaagaaaaagc

SEQ ID NO: 81216 - RNA, 81 nt, Homo sapiens
agaagaggaagaagaagaagaacagaaaaggaaaaggcacaaccagggaccccgcggcccccaaaccacacagggcccgag

SEQ ID NO: 81217 - RNA, 86 nt, Homo sapiens
agagagcacggaccaagcgggccacagcacccccgagaaaggacagaaaacgggccccagacacaagccccaccaagaggacaccc

SEQ ID NO: 81218 - RNA, 69 nt, Homo sapiens
gaaaagaaccgagcagcggagcagggcggaaaggaaagaaccggaaccgccccaccacccccgagcccc

SEQ ID NO: 81219 - RNA, 78 nt, Homo sapiens
acccgccgccaggccaccggacgaccccgcgcgcagggcacacaggcccgagcacaaacacaagaaacgcacgcccgc

SEQ ID NO: 81220 - RNA, 86 nt, Homo sapiens
gggaagggcgagacggagcagagccgcgggcgccggagccgaggcgagcgccgcgcgcaccacggccaagccgacgccagcgggcg

SEQ ID NO: 81221 - RNA, 75 nt, Homo sapiens
gggaagggccaggcggagggagcaaggcacggagccagcagcagcaagcagcgggcaagacccgcgccggccccg

SEQ ID NO: 81222 - RNA, 91 nt, Homo sapiens
gcggccgcagcgccacaaaccagggaccaggaggaagaagagagccgagggaagacagaggagcgggggaggacggggcgaggccgccaga

SEQ ID NO: 81223 - RNA, 73 nt, Homo sapiens
ccccagaaaccgcccccgaaccgggcgcccaagcaggaaaagcagacgcaaagacaaggggacaggagagcgg

SEQ ID NO: 81224 - RNA, 72 nt, Homo sapiens
gcagcccacccgcagcgggaacagccacaaacaacccccaccacgccaagagaaggagagagaaaggacaag

SEQ ID NO: 81225 - RNA, 60 nt, Homo sapiens
caacaacacaggcacacgagacgaacgcaacagagaggcaacagaccagacaggaaggcc

SEQ ID NO: 81226 - RNA, 74 nt, Homo sapiens
gccacgagagacgagcaacccccgggaagccaagccgcaggcaaaccgacaccagcgacacaagcgcgagggaa

SEQ ID NO: 81227 - RNA, 80 nt, Homo sapiens
gccggagcccccggcccaagggcgaccccagccgggcccgcgaaggacaagcagcagaccccagggcccgacagcacgga

SEQ ID NO: 81228 - RNA, 71 nt, Homo sapiens
cacaagaaaaaagcgagccggaaggggaagaggcaagcagaagaggaacagaagaagcagagcagagacgg

SEQ ID NO: 81229 - RNA, 71 nt, Homo sapiens
aaaacgcgagacagacgaggcccagacccaaagggagccgagcagcaccgggaaacgagaagcaggagagc

SEQ ID NO: 81230 - RNA, 73 nt, Homo sapiens
gaaggcccggacacagcaaaccgggccacaggagaaaagccaccggcgggagggcagcaaaagacgggccccc

SEQ ID NO: 81231 - RNA, 72 nt, Homo sapiens
aaccaccagagaccaggcccgagggggagaagcaaagcgaaagaacaaaaacagaaaaagagcagacccagc

SEQ ID NO: 81232 - RNA, 77 nt, Homo sapiens
gagagccaacggcacgggagcagacaaccgaacagaagggggcccaaaggcgcaacacgaaaagaagaaagagcaag

SEQ ID NO: 81233 - RNA, 69 nt, Homo sapiens
aggaaacgcagaagaggccgccaacacacgcaaagcagagaaaggaggagcaacccaccagcagaccag

SEQ ID NO: 81234 - RNA, 76 nt, Homo sapiens
acaaggcaagaaaaaggaaccgaagaacaaagagacacaagcagcgaggaccaggaacaacagagacaagaacaag

SEQ ID NO: 81235 - RNA, 47 nt, Homo sapiens
cggcgccggaggcaaagggagaggcgcaagaacccaagggcagaagg

SEQ ID NO: 81236 - RNA, 81 nt, Homo sapiens
ccgaccgcgaggcgagagggggcaccggagggacaacaaaacaagacgcccggacaagagcgggagcgacacagcaaagag

SEQ ID NO: 81237 - RNA, 62 nt, Homo sapiens
gccacagaacaaggagggcccaggaagacacgagaagcccgaggaggcgaagccaacgccga

SEQ ID NO: 81238 - RNA, 73 nt, Homo sapiens
acaaggcaacacccgaagaaacaagcacagagaaagagcgcgcacgaaagcacacgaaaaggaaggaaaaacg

SEQ ID NO: 81239 - RNA, 77 nt, Homo sapiens
gaaggccagagcacgagcacgggaagagacaaagcaggaggacacaagaagggaggaaaggcggacccaggaaccac

SEQ ID NO: 81240 - RNA, 71 nt, Homo sapiens
agaaaaagacaagcaaggcggagggcaggggcgaggcggaagacagagccagggcaaaagcagccagaaca

SEQ ID NO: 81241 - RNA, 36 nt, Homo sapiens
ccagccaccacaagcccaaaggggaacgccaggagc

SEQ ID NO: 81242 - RNA, 84 nt, Homo sapiens
aggcgccgcacggaggcgcccggggacggggccgcagggagccacgaggcggccccagcgcgggcgacaggccgacacccccag

SEQ ID NO: 81243 - RNA, 88 nt, Homo sapiens
ggaggaccgcagaaagcccgcaggagcaggggggcaagacgaagaaaagccagacgggacgaaagccacagaggaggacaaagccaag

SEQ ID NO: 81244 - RNA, 81 nt, Homo sapiens
gcggaccacaaaccgcgccagaaaagcaagcaacgagaagaaacggaacaaacaaaaccaaggaaacagcccaaccagaag

SEQ ID NO: 81245 - RNA, 73 nt, Homo sapiens
gaaaagccaggaggccacagcaaaaacgaagaccaaagcgcagcccaaacggagccaaggcgagcgcaacagc

SEQ ID NO: 81246 - RNA, 105 nt, Homo sapiens
aaacccaccccccgagccagcgcagagaaggagcccaaacagagcggggcgagcccggggcaagacggaccagcaggcgaggccaggccacccagcgaagagaga

SEQ ID NO: 81247 - RNA, 53 nt, Homo sapiens
accagagccagaagaagcaggaaagcgaccaccacacagccaagcccccggcc

SEQ ID NO: 81248 - RNA, 71 nt, Homo sapiens
aacaccaggcggagccaggcaaccgagaggccccggaccccagccaaaagggcggagaaggaacagggaga

SEQ ID NO: 81249 - RNA, 60 nt, Homo sapiens
gagagcggccgagggaagaaaccagcgcaaggaaaggcagcaacaggggaagcggaggga

SEQ ID NO: 81250 - RNA, 73 nt, Homo sapiens
gggcgcggagggccgagggagggccgagccagccgcggccggaggagcccccaggccaccaacaagccaccca

SEQ ID NO: 81251 - RNA, 70 nt, Homo sapiens
gcaccaagacaacggcaaaaacaccaacaccagaggggagagacagagcgaaaagccagcgccaccagag

SEQ ID NO: 81252 - RNA, 79 nt, Homo sapiens
gacccacgaccagcaggaagaacaaacgagaaggcagagaggggaagaccaagagcacagcggcggaggcaggacccag

SEQ ID NO: 81253 - RNA, 77 nt, Homo sapiens
agagagagcaagagaggaagaagaacgacccgcccggggcagcaggggcaggaccgcccccgcaggaagaggagccc

SEQ ID NO: 81254 - RNA, 74 nt, Homo sapiens
agcccaaagacaagaaaggagagcagacccaggaaacaagagaggcggccagcccgcaacccccggcgaccacg

SEQ ID NO: 81255 - RNA, 69 nt, Homo sapiens
gaggaaagacaggggagaaagaggaagaccgggaggcacagaacaaggcagcagcacaacacagaccgg

SEQ ID NO: 81256 - RNA, 38 nt, Homo sapiens
acaacggccacacgccaggaaaagagcgacagcaggac

SEQ ID NO: 81257 - RNA, 83 nt, Homo sapiens
agcagggaagcggcgcccagcccacccaggcccccgcagcacgggcccgcaggagccaggaccccgagagacggggcgccagg

SEQ ID NO: 81258 - RNA, 66 nt, Homo sapiens
cccaccaagcgcggcccgccacgaaaggagagggagagaaccagggccgaaacagcgcggaaccaa

SEQ ID NO: 81259 - RNA, 79 nt, Homo sapiens
cagcccccagcccgccgccgccccgccgcggcgcacccgccccgcgccgcaggcgcggggaggcccagcccgccgcagg

SEQ ID NO: 81260 - RNA, 74 nt, Homo sapiens
gggaccccaggcggcaggccgaggggcgaaaaagcggccagcaagagcacaacccagaacaaaaaggcaaagca

SEQ ID NO: 81261 - RNA, 77 nt, Homo sapiens
gacaaagaggaggagaacaagaaacagaccggacaccagcaggaagaagacggcacgggacccccagcacaggcagc

SEQ ID NO: 81262 - RNA, 71 nt, Homo sapiens
agcacgccaggccggaggaagccacccgacgaggaagcaaaaaagggcccgccgaaacccacaaagaaacc

SEQ ID NO: 81263 - RNA, 61 nt, Homo sapiens
aggaacgggcgccacaccggacacaggccagacgcagagagaccgccccagagaccgacag

SEQ ID NO: 81264 - RNA, 72 nt, Homo sapiens
aaacagcagaaacgcaccaggccaaagaaagagaagcgggagcagcggaagacaccaaggccagggagggcc

SEQ ID NO: 81265 - RNA, 83 nt, Homo sapiens
cgcgcccgagccagccccacgccgcggcgcgcccgggccccgcgacccaggggcccccggagggccacaagccagagcgcccc

SEQ ID NO: 81266 - RNA, 85 nt, Homo sapiens
ggaggagcagcagcgcggcagagcaggggggggagcgggccggagagaagagaggggcgcgaggagaaggaaacaggcccggagg

SEQ ID NO: 81267 - RNA, 61 nt, Homo sapiens
gaggacgagaggagacgaagagagaggagacgagacgagaggaagagacccggcgcgagag

SEQ ID NO: 81268 - RNA, 74 nt, Homo sapiens
ggcccgaggcccgggaaggagcaaacgcgggaagcagccagagcaccaccaaccgcgccggccaccacacccaa

SEQ ID NO: 81269 - RNA, 76 nt, Homo sapiens
aaccagaaagcagggccgcaccccaggaccgaagaggcaaagagcgcgaaacgaaagaaacccagaaacaaccaag

SEQ ID NO: 81270 - RNA, 82 nt, Homo sapiens
ggcgaacggcaggcgccggcgggccggccgccagcaagagaaggggggcggcgcaggacgagagcccccgcaggacccgggg

SEQ ID NO: 81271 - RNA, 81 nt, Homo sapiens
ggaccggccgagaggaagacgagccgggaggaacggcccggaaacaggaggacggccccggggcggcggccgcgggcggag

SEQ ID NO: 81272 - RNA, 56 nt, Homo sapiens
aaggggaacgccacggacggggggccgcaaggccaggcgcgcagaggcacccaacg

SEQ ID NO: 81273 - RNA, 85 nt, Homo sapiens
gagacagcaggggaggcccagcccaccagcggccaccgagagaacgccccgggacaggggccacggagagacgcggagccagcag

SEQ ID NO: 81274 - RNA, 43 nt, Homo sapiens
gcaccggaaggccacgccaaggaaaagagcgaccaaggacaac

SEQ ID NO: 81275 - RNA, 69 nt, Homo sapiens
ccaggcaccacaacccagcagaccgagaggcggaacagaacgacgagagccgcccgcgcccaggcggag

SEQ ID NO: 81276 - RNA, 53 nt, Homo sapiens
cggcagcaaagagggaacagggaaagggagcagcaccggccacacccacagca

SEQ ID NO: 81277 - RNA, 49 nt, Homo sapiens
cggagcccgggagcccgaggagaggaagaggagaacgaaaacccaccag

SEQ ID NO: 81278 - RNA, 71 nt, Homo sapiens
cccccaaggcacgccgaaaaagcacccggacaagcaacaaggcggcaggagagaaggacggggagcgccca

SEQ ID NO: 81279 - RNA, 51 nt, Homo sapiens
caggacgcagaagaagaccagacaccaaacaagagcgccgcgcccaggcgg

SEQ ID NO: 81280 - RNA, 70 nt, Homo sapiens
ggaaacgacacaaccaggcaaagcacagaaaaggacaaccggggaagcagaacacgacgaggaaggcccc

SEQ ID NO: 81281 - RNA, 65 nt, Homo sapiens
acagggaaacacaagcagaaacagacaggaccacgcaaagcaagccggggcagagcgacggaggg

SEQ ID NO: 81282 - RNA, 65 nt, Homo sapiens
caagaccccgccgcacaacgcagaagagagaagaagcaaaccgggaccggaagcaccaaggagaa

SEQ ID NO: 81283 - RNA, 85 nt, Homo sapiens
ccaagcaaaaacccagaaaccaaaaccgaaaaacaaccaccagcgagcaaaaaggcaaagaccaagaccaccaagaagcgcccca

SEQ ID NO: 81284 - RNA, 86 nt, Homo sapiens
cccgagccagggcagcaaaagacaaacgaagcacaaaccagggaccgcagaaaagcgcggaagcagaggaggccgagacgccggcc

SEQ ID NO: 81285 - RNA, 72 nt, Homo sapiens
agacagaaggccgagcagcagccaacggaacagaggcggagaagaacccaaccaaaaccaggcggcaacccc

SEQ ID NO: 81286 - RNA, 64 nt, Homo sapiens
cgacaagaagacgaagaaggagggccgggcacgcccccgagggaaacaagcgcccaggccgggg

SEQ ID NO: 81287 - RNA, 79 nt, Homo sapiens
cccgagagcggacacaggcgaacagcgcggagaacacaaggaagaaaagaaagcaagacaggcaaggaagagaggaaga

SEQ ID NO: 81288 - RNA, 77 nt, Homo sapiens
ccgcgggccgcaggccgcgagcagcggacgccggccgccgcaggagacaaaaaccggcccagacggaaggaacaaca

SEQ ID NO: 81289 - RNA, 89 nt, Homo sapiens
acagcaagcccacgagcggccccccgagacggaggagagggccgggccgggggcaagacggagagaacggcccaggaagcccacggccg

SEQ ID NO: 81290 - RNA, 82 nt, Homo sapiens
cgacacccgcccacgagagcggagggaacgaagcccaaaaggcagagacggaccgagacaggagagcaggggcccagccacc

SEQ ID NO: 81291 - RNA, 69 nt, Homo sapiens
agaaaagaagagacagcgagaacaaaggagagaggaccacccagaggagcaacacaacaggcacaaaga

SEQ ID NO: 81292 - RNA, 76 nt, Homo sapiens
aaaggaaaaacccacaaacagcacaacgggcagccaaagaccacgggggccaaacaccaggagaagggcgagccaa

SEQ ID NO: 81293 - RNA, 62 nt, Homo sapiens
gacgcccccagccaccagcgccaacgaacccgggaacgcgagcaagcagcgccaccagacgg

SEQ ID NO: 81294 - RNA, 51 nt, Homo sapiens
ccagccccgcaaacgggacacagacgcggccggagcccccccagacacacg

SEQ ID NO: 81295 - RNA, 70 nt, Homo sapiens
accccagaccgcagagaaaggcagaagaaagaagaaaaaggcagggaaacggcaagaaagcaaaaagcaa

SEQ ID NO: 81296 - RNA, 119 nt, Homo sapiens
cggcggcgaagcgggagagccgacgagcgcgcacaacgcaggaccggcgccgaaggcccgccagccaccgcccccggccgccgggggacagcgggcccacgcgggagccacaggccacc

SEQ ID NO: 81297 - RNA, 70 nt, Homo sapiens
caccaccaaaccggcggagcacacaggagcgcggggaagacaccgagaccagaaacaagcgaaagagaga

SEQ ID NO: 81298 - RNA, 70 nt, Homo sapiens
acccgaaggccgcggggccccgaccccgagaaaggaggacccgggaagacagagacgggcaacggaaagc

SEQ ID NO: 81299 - RNA, 78 nt, Homo sapiens
gcgaagcgccgaaagcaagaccaaaagagaggcaccgcggaacacaagagagcccaaacgagaaggaagccgcggagg

SEQ ID NO: 81300 - RNA, 70 nt, Homo sapiens
aaagcacgccccagccacgaccacgccacccccgaaggaaccgcgaccacagcaaagggcacaagccccc

SEQ ID NO: 81301 - RNA, 75 nt, Homo sapiens
cgaggcggagcgccgagcggaggcagcacggcaggagacgaggagaggacagcaggacacccggaccccaccgcg

SEQ ID NO: 81302 - RNA, 84 nt, Homo sapiens
acgaccacagcagagacaggacaaggccccggcacccaaaggggacagcagcccagggacggcgaccagcaccgggggggcaga

SEQ ID NO: 81303 - RNA, 80 nt, Homo sapiens
ccgagacccggcaccacccccggccgcccccagggcggagaacggaaaagcaccaggaagcagagaggaccgcagaaggg

SEQ ID NO: 81304 - RNA, 67 nt, Homo sapiens
ggggggaagcggagaacggaccgaagccacccgacggggacccggagcgggcaccccacgcaacagg

SEQ ID NO: 81305 - RNA, 83 nt, Homo sapiens
cgagcgcccccgcaggcccacggccggcgagacggaccaagacaaaacacgaagcgaccagaagcgggacggcagggcaggcg

SEQ ID NO: 81306 - RNA, 59 nt, Homo sapiens
ggacggggcggggggaacgcggaaaacccagcggacaaagaggccacacaagacacgac

SEQ ID NO: 81307 - RNA, 87 nt, Homo sapiens
gggacgcagagcgcggacccggcgccgaggcggccacccgagacgcggcgcgcacgcccggccgcgaggcagcgagaagaaaaagaa

SEQ ID NO: 81308 - RNA, 85 nt, Homo sapiens
gcaggaccgcggacggaaccccaggaccacggcgcccagagagacgaaggaggcaccaagggggccggcggcccccgcaagagcg

SEQ ID NO: 81309 - RNA, 52 nt, Homo sapiens
gggggcgggcaggccggccacagacaagaagccagccagcaggcaacaggcc

SEQ ID NO: 81310 - RNA, 74 nt, Homo sapiens
agaccgggcgaagggagaggacagcagggaggcgggacgcgggaaagcaaggaaacagggcagaagccagaccc

SEQ ID NO: 81311 - RNA, 86 nt, Homo sapiens
caagcccgccgcgcccgcggcccgcggccgccaggccgcggaacaccaccggaacggcgcgcgcagaccgggcagaggagcagcgc

SEQ ID NO: 81312 - RNA, 73 nt, Homo sapiens
cggccggcagggggcacccgcggccggcccggggccccgggaccggcgcccccccggccgagcgcaccagccg

SEQ ID NO: 81313 - RNA, 67 nt, Homo sapiens
aacagaccgccaggcaaacaaaagaaggcccgggaaggggaggacgcccgaccccacccagcccgca

SEQ ID NO: 81314 - RNA, 71 nt, Homo sapiens
aacaagggcgacgcccgggcgcgcagaacaggcgcgcggcgacacccacccgggacagagaggcgcaggca

SEQ ID NO: 81315 - RNA, 66 nt, Homo sapiens
caaaagagagggacgggaccggaaaaaaggcagcgacagcccgcccggaacgggacaaggcacaag

SEQ ID NO: 81316 - RNA, 56 nt, Homo sapiens
accagggaaaacacacccgagacccagacagagaggccagcgaagacccacagccg

SEQ ID NO: 81317 - RNA, 77 nt, Homo sapiens
acaggacccccaggaccaccagccaccggcacagagcagaggacaccacaggaaggaggcgcagagagaaggccagg

SEQ ID NO: 81318 - RNA, 70 nt, Homo sapiens
aagcccgccgagcaacagaccaacacccagagacgaaccagacccaagcccaggaagaggaaaaaccccg

SEQ ID NO: 81319 - RNA, 65 nt, Homo sapiens
accagaccaacccggaaacaaaaccagacaccagaaagagccccaagcccgcagccccagaagaa

SEQ ID NO: 81320 - RNA, 70 nt, Homo sapiens
gcacaccggaggaaacagaacacggccaaccaggcaccacccccccaagcgagcagaacaaagcagaaac

SEQ ID NO: 81321 - RNA, 79 nt, Homo sapiens
gcggagggggagacagacccgccagccagaaggaaccaaaccaaggagcgcaaccgcggccagacccaggcaccggcgg

SEQ ID NO: 81322 - RNA, 88 nt, Homo sapiens
ccaggagaagccgcccaaagaacggccgggaaagacggaaaaagcggaacacgaaagagaacggcgcggaagagccaaagacaggaga

SEQ ID NO: 81323 - RNA, 77 nt, Homo sapiens
cgaagccaagaggaaccccaggccacaccgccggccaggaggagagcgcaccaccaaaaaggcaaacacaccagccc

SEQ ID NO: 81324 - RNA, 74 nt, Homo sapiens
gagcgggcccccacaaacacgacgccacgacaagcgaaggagaaacgcagacaccggaaaggaagaccgcccag

SEQ ID NO: 81325 - RNA, 75 nt, Homo sapiens
ccagggacagagccacccaagaaagaccacagcggaccacaaggaggaacggaagaccggcccgaggggcacaag

SEQ ID NO: 81326 - RNA, 59 nt, Homo sapiens
ccgcagggcggagagaccaggcagacagcaagcgcgggcggcgacccagacgccccaca

SEQ ID NO: 81327 - RNA, 77 nt, Homo sapiens
ggcgacacccgggagccgccggcaccgccggaaccggcgcaggaaacaggagccagaaaaaaaaaaagaaaggacaa

SEQ ID NO: 81328 - RNA, 76 nt, Homo sapiens
acggggggggccagggagcccggaagacccacagccaacaaagacggccaagagcagagcaccagaaaacggccga

SEQ ID NO: 81329 - RNA, 64 nt, Homo sapiens
cggccaggcgagaaaggcagcacagggaacaccagaggcgggaccacgggcagcgcccagggag

SEQ ID NO: 81330 - RNA, 82 nt, Homo sapiens
acaagaagggcaaagccgaaagacgggagacgaggggaagagccaccggcaggggcagacacgccagcggacgccaggaggg

SEQ ID NO: 81331 - RNA, 77 nt, Homo sapiens
cagacagagaccgcagaggacccaacaccgagggaaagaaggcagcggaaaaccccacccccagccccgaggcagcc

SEQ ID NO: 81332 - RNA, 80 nt, Homo sapiens
agcgccgcccacgcccagcgccgcccccccggccagcaacagcgaggaggaaggccaggaacgcagaagaccgcagggga

SEQ ID NO: 81333 - RNA, 37 nt, Homo sapiens
cacaacccgacccgacgaaaaacagcacaggaaacac

SEQ ID NO: 81334 - RNA, 80 nt, Homo sapiens
cgacgcgcgggacgccacccccaacagggccgccccaggacaggggacgggcgcccggccccaccaccaaacgcaaagac

SEQ ID NO: 81335 - RNA, 59 nt, Homo sapiens
gaggcagaaacacgccgcgcgccacaccaggcccggcgagagagacagccggccaccag

SEQ ID NO: 81336 - RNA, 73 nt, Homo sapiens
cgaggacaaaaccgaaggaggcggagcggaggcagacacacacggggggagagggagggggggacacggccgc

SEQ ID NO: 81337 - RNA, 129 nt, Homo sapiens
cggcgccgcccgccccgcccgcagagccggcgccgcgcacgccgcagacgccgccaccgccagggcccgaggaaccaggacgacgcagagaaggaaaagaggaaaaggccaacaccaccgggagccagg

SEQ ID NO: 81338 - RNA, 76 nt, Homo sapiens
gagagcgacgggacccccccgcagaagaacgcaaggagggacaggacggaaggagcggaggaagacacaagagcga

SEQ ID NO: 81339 - RNA, 77 nt, Homo sapiens
gcccggcaagagcaccagaagcggccgaggcggcaaagaaacggaaaaggaagggaaaacaagaggaaaaaaccagc

SEQ ID NO: 81340 - RNA, 70 nt, Homo sapiens
gacaacacacccggcaggacaacaggcacaaagagagaaggaacacccacagggcagacagagaaagaac

SEQ ID NO: 81341 - RNA, 62 nt, Homo sapiens
gccggggagggagccagaagcaacgagagaaagcgcgggggagcaaaaacagacaagccaga

SEQ ID NO: 81342 - RNA, 79 nt, Homo sapiens
gccgcgcgcccgcgcccccgcgcgacgccaggacccgaagaggcagaagccaccaagcgggcccagcacggcacccgga

SEQ ID NO: 81343 - RNA, 31 nt, Homo sapiens
caaaaccaccagggcagcgagagcaggcccg

SEQ ID NO: 81344 - RNA, 40 nt, Homo sapiens
gcaacaaggcacggcaacaagcagagcagcaaggcgaacc

SEQ ID NO: 81345 - RNA, 34 nt, Homo sapiens
aagggggggcaaccgccagggagaggcggccgcc

SEQ ID NO: 81346 - RNA, 87 nt, Homo sapiens
cagaccagaggcacccggccggccggacaagcacaagccagcagaggcccggaggggcggggggacccaaccgcggcggagcccagg

SEQ ID NO: 81347 - RNA, 77 nt, Homo sapiens
ccgggaccagccgcgcggcggggggcggagcagaaaccagagacagcaccacacagacgggaagaacagcccggagc

SEQ ID NO: 81348 - RNA, 70 nt, Homo sapiens
ggaaaagccccgaggcagcacaacaagaaaaagaagcgaggacacagaccgaacacaaagggaccccagc

SEQ ID NO: 81349 - RNA, 103 nt, Homo sapiens
gacggcccagcgacgcaccagcaagacggcaggcgagagccgacccaggccgccggccccacagggccggggaccagcacaaggaagccagagcacgccggag

SEQ ID NO: 81350 - RNA, 77 nt, Homo sapiens
cagacagacagccaggcgcccagaggggccccggagccagcaacacagaagggaacaagcggacagaaaaagagaac

SEQ ID NO: 81351 - RNA, 84 nt, Homo sapiens
gcaacccaggacggaacccccagaaacaggcccggacccccccaccacccccaacgaaagggaagaacgggcaggagaaacgac

SEQ ID NO: 81352 - RNA, 81 nt, Homo sapiens
gacgcgagcgaggccggacgccggaccgccacgccaccggggagcacgcacccgcaggcagcggggcggcacccccaacac

SEQ ID NO: 81353 - RNA, 76 nt, Homo sapiens
gaaccaaaggcagaaaagaaagagccgaagcgcccaacagccaaacggaacgcgacgcggccaggccggaagcaca

SEQ ID NO: 81354 - RNA, 66 nt, Homo sapiens
gacacacccaggaaaagaccaggacggacaagcacagccggaagacaggggcaaggccgaggggaa

SEQ ID NO: 81355 - RNA, 79 nt, Homo sapiens
cccgcgaccgcgcggaccagggcgacaaagggacccggaaagggaagaaggaaagagcagaaaacccaagagcggagaa

SEQ ID NO: 81356 - RNA, 72 nt, Homo sapiens
gcaggcccccagccgcagccacaacaccggcaggaaccaccaggacagaaaggaccgagagaagagggaagg

SEQ ID NO: 81357 - RNA, 48 nt, Homo sapiens
ggaaggacacgccagggaggagacacaacacagacagccagcaggggc

SEQ ID NO: 81358 - RNA, 76 nt, Homo sapiens
ccaaagagaaagagcagagggagaaccagaagagaaaacagcggcacacaccagaagggccaaagaaaggggggcc

SEQ ID NO: 81359 - RNA, 56 nt, Homo sapiens
cccccgggagccagaccggcaccgaagaccgaccgaaaagacgcggccccaaagga

SEQ ID NO: 81360 - RNA, 80 nt, Homo sapiens
gcacgggaacaaacacgaggccgggagaagcacggaaagcaggggaggcaacggcagggaggggaccaggacccagcacc

SEQ ID NO: 81361 - RNA, 85 nt, Homo sapiens
ccgaggacacgggagcgggcagcggaagcgaggacaaccagggaagcagaaggcaaggaccccggcaaggagaaacaacagcagc

SEQ ID NO: 81362 - RNA, 78 nt, Homo sapiens
gaaacaggagcgaagcccagcgggccggacggggcggggggaacggagccaggccgggcaaacacaagaggcgaccca

SEQ ID NO: 81363 - RNA, 70 nt, Homo sapiens
gaaacagaagcacgcgaccgaaagaagaaagcaccacggaggacgcgggaccccacaccagccagggaac

SEQ ID NO: 81364 - RNA, 75 nt, Homo sapiens
gaagaacagagacagcagccaaacccccagggaggagcgggagcacccgagcggaagacccggacaaccggggag

SEQ ID NO: 81365 - RNA, 58 nt, Homo sapiens
gacaggaaggaaagagggcaaccgaagaccaacaaggacgaaggacagagagggacgg

SEQ ID NO: 81366 - RNA, 76 nt, Homo sapiens
aaggacgaaaaggggcggaagaaaaacaaacacacgcaaaggagaaaggaaccgacaggacagcccaggccaagac

SEQ ID NO: 81367 - RNA, 96 nt, Homo sapiens
cgcagcccccgcgcgggcagccaccccgcccccgccccccccgccgcaccagcaacggggcggcacacaaggagcgaagggcagggagaacgccag

SEQ ID NO: 81368 - RNA, 74 nt, Homo sapiens
gcccagggcccaaaaaaagggcaggaaccacgaaggacagaagacaccacagagcagcagggacgcaccaaaac

SEQ ID NO: 81369 - RNA, 73 nt, Homo sapiens
gaagaaacgcacacgaagaacaagaaaaagcacaagagcaccaacgagggagggcgacccaaaacacggcaaa

SEQ ID NO: 81370 - RNA, 75 nt, Homo sapiens
aagcaacgcgcagaacgcggacccaggaaccagagcgcaacaaacaggaagggaaacggagacgcggggagccac

SEQ ID NO: 81371 - RNA, 79 nt, Homo sapiens
ggggaaggggagccgcacaagagggggaaacggggaaaaggcaagcagaggaaccagaggaaagccccagaagcaaaga

SEQ ID NO: 81372 - RNA, 135 nt, Homo sapiens
gcagggacacccacggagcgcagaggccacgcgaccagacccaggacgagacgggcaagaaccggggaacccacacccgcccccagggccaccgcaggacgccgacaccacccccagcagacgccggagagaaag

SEQ ID NO: 81373 - RNA, 96 nt, Homo sapiens
cgaaagcaaacacaccccccccaaggagagagcggcacaaaaccccagccaggcacagacaaccgcagaaagaccagcccaagaaaacccagggca

SEQ ID NO: 81374 - RNA, 72 nt, Homo sapiens
gcaggaaacaagaaacaccaacacaaaaaaaaccaacagccccccaggaacaaagggcagaagcagagaaca

SEQ ID NO: 81375 - RNA, 54 nt, Homo sapiens
acagaggggaaagagcaggcaacagcacagcgggaggcacggcagaaacggaaa

SEQ ID NO: 81376 - RNA, 37 nt, Homo sapiens
ccacaccggacacaggccagacggcaccaggacaagc

SEQ ID NO: 81377 - RNA, 66 nt, Homo sapiens
gaaaccaggaaacggacggcaaggaaaccgcagcacgcgcgacgcagcagaaagggaaggaagcac

SEQ ID NO: 81378 - RNA, 70 nt, Homo sapiens
gaagaaccgcagccgagcggggccggccacagaaaagaagacggaacgaagagccacaacagccacaacc

SEQ ID NO: 81379 - RNA, 73 nt, Homo sapiens
cgaacaaggcaaaaggggccagcaacagaagaaagcaagcaccggggaaagcggcccgaaacaagcagaaggg

SEQ ID NO: 81380 - RNA, 73 nt, Homo sapiens
gaggggcacaaccgacaggaaaaaaagcggaagagcgccagcacggcaacagcagaagcgggggaccccgaga

SEQ ID NO: 81381 - RNA, 74 nt, Homo sapiens
agaaaagcggcaaccagaccgcagaacccaaaggcggcacagaacagaggagagaccccggagccagcgccgca

SEQ ID NO: 81382 - RNA, 71 nt, Homo sapiens
aacgcccgggaaggagggggcgaaaaagagcacagcaagcgggagcaggcagaccaaaggaacagaagcca

SEQ ID NO: 81383 - RNA, 67 nt, Homo sapiens
gcggcggccgccagcggcgcggcgcggcaaaaggccaaaacggaagaacccccgcaacagccggaag

SEQ ID NO: 81384 - RNA, 71 nt, Homo sapiens
ccgcgccccgaccagacaagcagaccggaagaccgacggaagaccacaccccgagggagcccaggacacca

SEQ ID NO: 81385 - RNA, 68 nt, Homo sapiens
gcagggcacgccgaccgagagacccaggcacccagggaaacgagaggggagaaggcccgggggagagc

SEQ ID NO: 81386 - RNA, 71 nt, Homo sapiens
gacagagagagccaaacccccagggaaacacaaagaagacaccagaagggccagcaccacgacaacacggc

SEQ ID NO: 81387 - RNA, 80 nt, Homo sapiens
cgggcaaccaaagacgggcgccacagacacaaaaggcaccgacagacacaacagaggagaggggaagacaaaaggaggga

SEQ ID NO: 81388 - RNA, 79 nt, Homo sapiens
aagcagaagaagcgaggagaagaagaggaaaaccaagaacgggacccaaagaaagaaccgcgcaggaacaaaaacgcaa

SEQ ID NO: 81389 - RNA, 77 nt, Homo sapiens
agccccagcccccgggcgaggcacaccccggagccaggagggcccacagacaagccgcccccccacccgacggagcg

SEQ ID NO: 81390 - RNA, 68 nt, Homo sapiens
caagaggcggcgggagaccccaaccgcagagcgcccgggcaaaacgaggcaagggaggcaaaagacag

SEQ ID NO: 81391 - RNA, 86 nt, Homo sapiens
gcgacggcccaggcccccgaccccacgcagaccacagcggccaggcggccggccccacacggccaaccaccccgccagcaaaaaga

SEQ ID NO: 81392 - RNA, 77 nt, Homo sapiens
ccacacggcggccgcagggcgccggagccccccagggacaacaagaaacacgcccaccgagcggcagcgagcgaaga

SEQ ID NO: 81393 - RNA, 80 nt, Homo sapiens
gcgggggagacgaagaacccacgcgaccgggggggcggcacgggcagacccaccagccagcaagcaaagcaggcggccac

SEQ ID NO: 81394 - RNA, 62 nt, Homo sapiens
accaaggcaaggaagaacaggacacaacgagaggcccgccgaaacccacaaagaaaccaaga

SEQ ID NO: 81395 - RNA, 78 nt, Homo sapiens
cgggacggccccaggagaagagccagagcgggaggacgacgagagaggaggaagaggaggcagggccacgccccagcc

SEQ ID NO: 81396 - RNA, 75 nt, Homo sapiens
ccgacacccgacccagcacgacaccgggcaaccaaagacgggcgccacagacacaaaaggggacccaacaggcgg

SEQ ID NO: 81397 - RNA, 53 nt, Homo sapiens
ggaaggcgcgagaagcgagcgcgacaaacccaggccggagcccacccagcaac

SEQ ID NO: 81398 - RNA, 51 nt, Homo sapiens
gcgcgaggggcgccgaagcgaggggacagggccaaagcggcaggagaagga

SEQ ID NO: 81399 - RNA, 85 nt, Homo sapiens
ccacgcccccgcaccaagcggaagagagagcaggcggcagagcaaagcgagcaaggggaaaaacgaacccgccacaacaaaagag

SEQ ID NO: 81400 - RNA, 80 nt, Homo sapiens
ccaagcgacccacccggccaccgagagcgggacacaggcacgcgccacacaccggcaacccccagccacaacgcgaaccg

SEQ ID NO: 81401 - RNA, 73 nt, Homo sapiens
cgggaaacgcccaggacaaacccagaccacacaagggcaggggggaaaggacccggcgggggcaaggaagcac

SEQ ID NO: 81402 - RNA, 84 nt, Homo sapiens
cacggagaaaaacggccaagaggcagaccaggaaaggaacaacaagaaccagccaccaggaccaccagggcgggccgaacagaa

SEQ ID NO: 81403 - RNA, 84 nt, Homo sapiens
aggacaacggcaggacggaaggcagaaaaaagcccagcgagcaccaggaccacaggcacaaggcaacccgagacccaaggcaaa

SEQ ID NO: 81404 - RNA, 81 nt, Homo sapiens
gcgacgcggcaagaggcgcagagcgaggagcgggaggcgcgagcggcgacggacagaacaccagaaacaacagcgaagaag

SEQ ID NO: 81405 - RNA, 73 nt, Homo sapiens
gaagagcaaaggcgagagccacaaccggaaacacgggccaggacagccacaacggacggagcaaaaggcaagg

SEQ ID NO: 81406 - RNA, 62 nt, Homo sapiens
accagccgcggagccgggggcagggcacaaaaacaaaggacgaagaaaaagagaaaagagaa

SEQ ID NO: 81407 - RNA, 67 nt, Homo sapiens
accgggcgaggcggagaggcagaacaaaggagaaaagcagagacagaagcaacaagcccagagaaac

SEQ ID NO: 81408 - RNA, 81 nt, Homo sapiens
ccgcggccgccacgcgcagacggagccgagagcaggcacggaggacgccccagccacccggaccagggagaagagcagccc

SEQ ID NO: 81409 - RNA, 75 nt, Homo sapiens
aggagaagcgcccgccgcccggaagaagaggacggagagccgcgggcggcccggcagcaaggcgagaagaaagag

SEQ ID NO: 81410 - RNA, 77 nt, Homo sapiens
acgggagcagaggaagccgaggaccaccacagaaggaagaagcgacaagcccacgagacgaacccccagccagcaca

SEQ ID NO: 81411 - RNA, 84 nt, Homo sapiens
accaccccccgaagcacccagaacccgaggcagcacacagccacccccggaagaaccaggaaaaccaacacagcgggaggagcg

SEQ ID NO: 81412 - RNA, 80 nt, Homo sapiens
gcacagcaaccaacaggcacgacaagcggacaccccgagagggaagaggcgcggggccgagaggccgccgggacggcggg

SEQ ID NO: 81413 - RNA, 78 nt, Homo sapiens
gagaaacccaagagcagcggcaggacgccccgggccgccaggagcagacgaagcccgcggagcaagccgcgccaggcc

SEQ ID NO: 81414 - RNA, 53 nt, Homo sapiens
ccaccaaagacaacagccaccggaggacaccacccgacaccaccgaggaagcc

SEQ ID NO: 81415 - RNA, 60 nt, Homo sapiens
cggccgcgagcgcggccgcaggagcacggggcaccgggcccagaggagcagcccggagcg

SEQ ID NO: 81416 - RNA, 86 nt, Homo sapiens
ggagcagccgaaggcgaccaagacgcggcccaagggcccggcggcgcgagcaggaagaagacccgaggaccgggaacgaaggggcc

SEQ ID NO: 81417 - RNA, 89 nt, Homo sapiens
gccccagcgaagagagcggcaaagggcagccccgagaaccacagggacacccgcccccacccgggagagcgaccaagaaccaggcagcc

SEQ ID NO: 81418 - RNA, 75 nt, Homo sapiens
ccccgagagcgggaacagggcccgccgcacaaccagaagaaccccacccaccaccgcaaaagacagcgcggcaga

SEQ ID NO: 81419 - RNA, 87 nt, Homo sapiens
gcagggcgagggaacagagagaaacccggcaagaaagccgaccgcagaacacgccccggagcagccaggccagggcggcagcaccag

SEQ ID NO: 81420 - RNA, 58 nt, Homo sapiens
caaaccaacccagcacaaacccgaaaaacgaacgacagaacaagagaccaggcgacac

SEQ ID NO: 81421 - RNA, 79 nt, Homo sapiens
gcgacgagagcaagccaaagaccaaggggggggcacccccacaacgcaagaggagccaggagcacggggggaacaagac

SEQ ID NO: 81422 - RNA, 42 nt, Homo sapiens
gaagccaggaggccgggaaccccccagcagagaccagagaag

SEQ ID NO: 81423 - RNA, 51 nt, Homo sapiens
ccgcggagacgagaccaagcaacaccgggcgcgcacagaagggacaacgga

SEQ ID NO: 81424 - RNA, 81 nt, Homo sapiens
ccggcacccccgcacaggcgcccgcccgcacgggcgcgccaagggcacagagggagaggccacggcgagccccgaggacgg

SEQ ID NO: 81425 - RNA, 71 nt, Homo sapiens
aggaagcccagacacaagggcgcggcgggcccgcggggaggggcagcaggaaaaagcccagaggaacaggc

SEQ ID NO: 81426 - RNA, 73 nt, Homo sapiens
cgagccgggccgcccacagggggaagaggcgccgcccgggggacggcaggaggccaaaggaagaccaggaaag

SEQ ID NO: 81427 - RNA, 78 nt, Homo sapiens
gaaaaggcacagaacagcagggggagccaaggaagcagacacgagcacaagccacccgcgcggcgcccggagggcaca

SEQ ID NO: 81428 - RNA, 39 nt, Homo sapiens
ggaggaggcaacgccgcggaggcaccacagcgaacacaa

SEQ ID NO: 81429 - RNA, 78 nt, Homo sapiens
caaaaaagaacaggagagaaacaaccaggaccggacagagagggaccaagaaaggcccagggaccaaagcccggacaa

SEQ ID NO: 81430 - RNA, 55 nt, Homo sapiens
aaaaacaagacggggcgccccacagaggggcgacggggacgagagacagaagagg

SEQ ID NO: 81431 - RNA, 81 nt, Homo sapiens
acgggcacggcgggagcagaccagccacccccggcgggaccccagacaacgagggaagcgggagaggccacccgcccacga

SEQ ID NO: 81432 - RNA, 81 nt, Homo sapiens
acgagcagaagaccgcccgggggcaggaagacccaacaggcgccaaaaaaacacgcggacgggggagaagacgccccgccg

SEQ ID NO: 81433 - RNA, 80 nt, Homo sapiens
ggaagcggcggcagcggcggggcggggcgagcagaggacccggcgggcggcccgcgggcaggaagcagcaaaagaccaaa

SEQ ID NO: 81434 - RNA, 83 nt, Homo sapiens
gacgagcgacaagaagacgaagaaggcgagcacacagagaggggaagggcagcagcagcagagaaccaaacccaaagcgaaca

SEQ ID NO: 81435 - RNA, 66 nt, Homo sapiens
ggaccggacacccgggagaagccaacacgggcacagaccaccaaaccacagccaggaggcacagac

SEQ ID NO: 81436 - RNA, 74 nt, Homo sapiens
gccagcccggcgcagaaagaggagcgaggggacagagaaaaggacagcagcaggacgaacaggagggcagacgc

SEQ ID NO: 81437 - RNA, 79 nt, Homo sapiens
cgggcccggaaagcgccgcccagcagccgcagggcacacaggccccgagaaccaagagaacccccaccaaccaggcccg

SEQ ID NO: 81438 - RNA, 84 nt, Homo sapiens
gcgcgaaacgcacgagaaggcgacaggaccgcaggacccaccgaccgggccccgggggccaaccggggagcccccacacccccc

SEQ ID NO: 81439 - RNA, 70 nt, Homo sapiens
agaagcaccaggagggaggcagcagcccgggcgccacgggggcaagcggccgaaaacaggacagaacgga

SEQ ID NO: 81440 - RNA, 72 nt, Homo sapiens
gacccaacaccagaagacacacaggggaggaaggaacagccaaagaccacagcgagcccccaccaaggaccc

SEQ ID NO: 81441 - RNA, 74 nt, Homo sapiens
cagccaaagcacccaccacagaaaaacagaaacgagagaacccaccgcaagagaccaaaggccaagagcaccgc

SEQ ID NO: 81442 - RNA, 70 nt, Homo sapiens
ggaggagcacagaacgccaggaccaaaacagggagaaacacagccagaagaaacccgaagagagcccacg

SEQ ID NO: 81443 - RNA, 79 nt, Homo sapiens
caacaaggaggccagggcggccaggcgccgaccccgacagaacgggccccgcacccgcggccccggggcagcggaggcc

SEQ ID NO: 81444 - RNA, 52 nt, Homo sapiens
gaacggcaggaacgggcgaacagggcaggccaacacacgggacgcggggcac

SEQ ID NO: 81445 - RNA, 65 nt, Homo sapiens
ccgcacgcgcacggacggcacagcccgccgaacccgaaaggagcgccacagagccgggacagcag

SEQ ID NO: 81446 - RNA, 77 nt, Homo sapiens
aagcagggcggaggggagcagagacccccggaggagggagcgccccggggccaaccaccaccccggaaaggaggaga

SEQ ID NO: 81447 - RNA, 65 nt, Homo sapiens
acgaggccccgcagcgacgacggacagcaaggaaccccggcaggggaaggcgggcaagcgcaagg

SEQ ID NO: 81448 - RNA, 35 nt, Homo sapiens
gccgcggggcacaaagcacaaacgcagagcgcaag

SEQ ID NO: 81449 - RNA, 75 nt, Homo sapiens
gggagaagaacgcgcaggccgccaccggcaacaaccagacccgacccgaacccacccaagagaccgaccagccgc

SEQ ID NO: 81450 - RNA, 90 nt, Homo sapiens
ggggaccagcccaacggagacgacaggggcaaagaaaaaggagagaaaaagaggcaaaacaacaagaagaaaagagaaaaaagagagcga

SEQ ID NO: 81451 - RNA, 80 nt, Homo sapiens
caccacacaagacggaaaaagcgacggagcccccccccggcccgccgacacagccaccaagaaggcacaagcagaacggg

SEQ ID NO: 81452 - RNA, 71 nt, Homo sapiens
ccaaagaggccagagcacacgagaagacaaggggagaggacgcagacccagaagaagacacccaagcagca

SEQ ID NO: 81453 - RNA, 81 nt, Homo sapiens
acgggagggaggaccggccagcccccccaaaaaggaaagacaccggcgggaaccggagaggacacagcagaagagaacacg

SEQ ID NO: 81454 - RNA, 78 nt, Homo sapiens
cggccagggcccaccgcgcaccggagagcagccgcgcccccaccagcacaacagacgggacaagggagaaacggaaca

SEQ ID NO: 81455 - RNA, 79 nt, Homo sapiens
caaaacaaggagggagagaaagcagacacgcaccacaaaagaccaccagggggagaggcaccagcaacagaccaaccgc

SEQ ID NO: 81456 - RNA, 72 nt, Homo sapiens
aaaggaggagaacagcccaggcacgcgcacccacccacggcaggacaagagaaagaaaaccgcaacagggcg

SEQ ID NO: 81457 - RNA, 81 nt, Homo sapiens
ggcccgccagcgccagcggcacggcccgccgcccaagggagaccagcacgagccgggcgggacgccggaaggggcacaaga

SEQ ID NO: 81458 - RNA, 107 nt, Homo sapiens
ccacgcgccccccgcacccggcccgccccaccaaggagacaacggccacacacggggggcacccacagaaggagaacaagcagagcaccggacacgaggagaaacag

SEQ ID NO: 81459 - RNA, 81 nt, Homo sapiens
cccagcgggcaaggcagaccggaccacaaaaaggacaccagcaagcgcaagaggagcggcagacaaggcccaaagacagca

SEQ ID NO: 81460 - RNA, 85 nt, Homo sapiens
ggagcagcagagagaacaccggacagcacggcgaggacgggaagagcaacaccaccaagccacccccacggacgggagcaggcca

SEQ ID NO: 81461 - RNA, 56 nt, Homo sapiens
acacgacaccggcgaggaacggcaggaacccagaaccgcgggcagcaagaaccacc

SEQ ID NO: 81462 - RNA, 69 nt, Homo sapiens
acccgggagaaaggcggagaagagggacaggagccagcggcccaggggcgggggaggaaacagagacac

SEQ ID NO: 81463 - RNA, 54 nt, Homo sapiens
ggggcaagcaaagaaccaaaaagcaccacacccaaaggaggaggcaagggcgac

SEQ ID NO: 81464 - RNA, 83 nt, Homo sapiens
gcaaaaagccgagccacgaacaacagaaaccaccgacggaaggagagaacaccagggcgccagggcccggacaaagaaagcga

SEQ ID NO: 81465 - RNA, 75 nt, Homo sapiens
ggaagccacacaggccagaacgaggccaaagaacaagcgcgacaggacagaagcagcccaaaaaaacaaggacag

SEQ ID NO: 81466 - RNA, 67 nt, Homo sapiens
cggacaaagcacaggaggcccaggaggagagaaagaacccacgcaggacgacagaagaggccggaca

SEQ ID NO: 81467 - RNA, 78 nt, Homo sapiens
aagaaggaccagaaaaccgacaacccccagaaagccaagccggaaaacgacagaagcacgacaacaacgggcagcaag

SEQ ID NO: 81468 - RNA, 93 nt, Homo sapiens
gaccggaccgggggagccgggccccacaaggagcgcagcaggcacgaggagggagccaggagcgcgggagcgaaggccagccacacgcgcacc

SEQ ID NO: 81469 - RNA, 82 nt, Homo sapiens
cggcccgcaggccgcgcgaggaggccaccgaagccggggacgcgaggagccggcgggcccgggcgcccgccggggacgcagc

SEQ ID NO: 81470 - RNA, 80 nt, Homo sapiens
aagacacagaaggggaccccaacgaagagggagaacggcaacccaccagacaccagccgggggaccggagagaaaaaaga

SEQ ID NO: 81471 - RNA, 89 nt, Homo sapiens
cagggccggccgcagagcccaccggaaggagaaggaagaggagcggaggcccagaagaaacaaggccaagccaggcggaggcacccaaa

SEQ ID NO: 81472 - RNA, 75 nt, Homo sapiens
cacagaaacaagaaagccaggaacgacagggggaaggaagggccccacaccaaagaaacccaaaaagaacgaccc

SEQ ID NO: 81473 - RNA, 79 nt, Homo sapiens
gcgcggagggccgagggagggccgagccagccgcggccggaggagcccccaggccggggagccccccagacccgaaagg

SEQ ID NO: 81474 - RNA, 71 nt, Homo sapiens
cggacacagaagaggacagggaccgagcagagaaccaacggagaacagcccaccgagaaacacaaagcagg

SEQ ID NO: 81475 - RNA, 98 nt, Homo sapiens
acaaccagcccacgcaccaagaaacagccccacggcagggcaggaagcccaagacgaggacagcaggacagaagcagagagcagagcacagccaggac

SEQ ID NO: 81476 - RNA, 88 nt, Homo sapiens
gggcaccagggcggcggcaggaagaggagcgggagcaggagcgcggagcggagcgcccgacccgccgcacgagacagcggaaagaaga

SEQ ID NO: 81477 - RNA, 82 nt, Homo sapiens
cccgccggacgggacgggaccccacgccggccgccaggcagcaaagaagccaaacagaaaaacccaacccaaaagaagagaa

SEQ ID NO: 81478 - RNA, 81 nt, Homo sapiens
aggccaccggcaggcgcacaggcccggccaggcacaagggcaccacaaagcgccgggaccagggcagggaccccggaaccg

SEQ ID NO: 81479 - RNA, 78 nt, Homo sapiens
aaaaaagaggggggagagccaggggacaaaggacccccaaccagacacgaagaccagagggagcccggagaggacaca

SEQ ID NO: 81480 - RNA, 64 nt, Homo sapiens
ggaacaggcggggcaggggcacccgcgcgagaaaaggaaacgaaaagcaccccaaagaacgaca

SEQ ID NO: 81481 - RNA, 66 nt, Homo sapiens
accaaaccagaggacagacccacagaaccacaaggcagaagccccagaggagcccgaaacccccag

SEQ ID NO: 81482 - RNA, 38 nt, Homo sapiens
ggggagcaggcccgacccaggaaacgcagcagaggcag

SEQ ID NO: 81483 - RNA, 60 nt, Homo sapiens
ccaagaccggaagaccgggcagcaagaagagaggaggcaaagacgccaaccccaggaaga

SEQ ID NO: 81484 - RNA, 75 nt, Homo sapiens
gagagaagcagcggacagcagagaggaacagaaaaacgaaacgccacacagagaaaaacgaaccacacaaacaca

SEQ ID NO: 81485 - RNA, 80 nt, Homo sapiens
gagagaggcccccgaggagagaccagcccgggagggaagaaggagcggaccaaagccgcagaggagccaccgcgcccagg

SEQ ID NO: 81486 - RNA, 77 nt, Homo sapiens
gagccaggccccccagagcaaacagggcgcggagaaaacccagcgcacagccgaaaagacgaggcgaggaggcgaga

SEQ ID NO: 81487 - RNA, 66 nt, Homo sapiens
agggcgaccaagaagaccgaccgaggaggcaaagaccgaccacaaagagagacgcggccggccccc

SEQ ID NO: 81488 - RNA, 73 nt, Homo sapiens
acacccgggggcgggagaaagcacagaaggaccacaacagacagcggccagcagagaagaaccagaaacagaa

SEQ ID NO: 81489 - RNA, 53 nt, Homo sapiens
cggaagcggagagcaacagcgcgccggcaccacccgcaacgggagagaaaccg

SEQ ID NO: 81490 - RNA, 78 nt, Homo sapiens
gaaccacaagcccacgggacacgcggcaggaacggggggcggcgaacaagcggaaaaagaagcggagagaaacgcaaa

SEQ ID NO: 81491 - RNA, 79 nt, Homo sapiens
ccgaaccagggccaccgcgcaaggccggcgccagcgccagcgaggaaccgaacccagccaaaaggccccgcgccaccac

SEQ ID NO: 81492 - RNA, 55 nt, Homo sapiens
ggaggggaggcaaagggaggaggaggaccggagaacccagacccaagaaccagaa

SEQ ID NO: 81493 - RNA, 50 nt, Homo sapiens
agaaacacagcgaccgagagccaaaagaggcagaagcccgagccagaaga

SEQ ID NO: 81494 - RNA, 82 nt, Homo sapiens
ccaaaaagcgccggcccccgcccccgcgagacgaaaccccgcccggcggccggcacccaggacacgaggaggggacggcccg

SEQ ID NO: 81495 - RNA, 84 nt, Homo sapiens
caaagggaaggcgcaggagcggagggcgaagaccgcgaagccccccaggaagaaaacaccggagcccaagacaccaaaacagac

SEQ ID NO: 81496 - RNA, 70 nt, Homo sapiens
gagggaggagaaggcaaggcagggaaggaccgaaggagaagaaggagaaggggaggagaaggcaagccgg

SEQ ID NO: 81497 - RNA, 73 nt, Homo sapiens
ccccaagccacagggccgccgacagcagagacaggggacccccaaaagacaagggcaaaacggaccagacaca

SEQ ID NO: 81498 - RNA, 79 nt, Homo sapiens
accgaccgagcgggaggccacagcagccagccggcccgaggacaccgacaccagcaggccggcccggccacccccgggc

SEQ ID NO: 81499 - RNA, 71 nt, Homo sapiens
acaacgcacccaccaccaaagaagcgagcggcgagagacgacagacgacaaggcgaacaagaacgggagcc

SEQ ID NO: 81500 - RNA, 79 nt, Homo sapiens
acaccaccaccgggcggccccggccccgccgccacccccgccccgcccgccccgccccggaggcagcacggcaggagac

SEQ ID NO: 81501 - RNA, 74 nt, Homo sapiens
gaaaaacggagagccacaaaaaaggaagcgaaaccccagacaaacccagacccagaagggaacgggaaacccag

SEQ ID NO: 81502 - RNA, 85 nt, Homo sapiens
cgcgccgccccgcgagcacagagcccgccgccgaccgccgcccgccacacccgccgccagcgaccacagggccgagaagcgcgcg

SEQ ID NO: 81503 - RNA, 50 nt, Homo sapiens
agaagacggaaaaagccgaaggacaccgcccccccaaggagggaaggcaa

SEQ ID NO: 81504 - RNA, 79 nt, Homo sapiens
gcacccagcagccgaagcaaaccaacacagaaaagcagcagaaagcagagagcccagaagaaaccaaagccacaccacc

SEQ ID NO: 81505 - RNA, 82 nt, Homo sapiens
ccggaggcccggccacccgagaagggagacgacgcgcgggccgcgagcggggcgacccgaggaaaacaggaacagagcgagg

SEQ ID NO: 81506 - RNA, 87 nt, Homo sapiens
aggggcaaggacccaacccaggagaaaaagcagaccaagccaaaaaagccagaaagaagggaacccaaaaaaacgcaaagcccacca

SEQ ID NO: 81507 - RNA, 81 nt, Homo sapiens
acccaccgacacacaggcaagcgcgaggaacacaagcggggggcaggaagacaaagaaagccaggccacgggaaaaacaag

SEQ ID NO: 81508 - RNA, 67 nt, Homo sapiens
agaggcgccgggacagggagcgaagagcagcaagaccaaggaacaacagaccggggacagcaacaaa

SEQ ID NO: 81509 - RNA, 57 nt, Homo sapiens
gcgaagagaaaacccaaaaaccggagcgagcacaaaggacaggaagagcacccaagc

SEQ ID NO: 81510 - RNA, 81 nt, Homo sapiens
ggggagagacgagccccgagcccggcggacgccgcgcccaggaacggagcacagccaaccccagaaacggccagggaaggc

SEQ ID NO: 81511 - RNA, 63 nt, Homo sapiens
ccgacgccaggcagcgcccccaaacggagcccggggacccgcagaggggacacacgggacagg

SEQ ID NO: 81512 - RNA, 59 nt, Homo sapiens
aagggaaacaccgcaacccagaggcccagcacccaggcaagaggagggcggaaagggag

SEQ ID NO: 81513 - RNA, 80 nt, Homo sapiens
cccacacacagaccaaagcaccccagaagaagaagaggacaggcccaggaaagggaagaacaaaggaagagagcaggaag

SEQ ID NO: 81514 - RNA, 79 nt, Homo sapiens
acccagaacacgggagaaaaaggaaaacgcggaaaaccgacacaacagaggaaaggcaagggcagaaaagaggggaaaa

SEQ ID NO: 81515 - RNA, 33 nt, Homo sapiens
cccaggcgcggacgaggagccaagaaccgaagc

SEQ ID NO: 81516 - RNA, 72 nt, Homo sapiens
ggaccaacggaaccacaagaggaccgacagcacgaggaggagagaagaaaagcggcccgagacaacaagggc

SEQ ID NO: 81517 - RNA, 55 nt, Homo sapiens
ggaaagacccaggacccagaacacaacacgagagcaaccagcaggccacggagaa

SEQ ID NO: 81518 - RNA, 35 nt, Homo sapiens
caagaaacaggaggacaagggaggagcccaagaag

SEQ ID NO: 81519 - RNA, 72 nt, Homo sapiens
aaacaacagcagaccaggaaggaaggggacgcgccacagacgggggaacccagaaagagaaccgacgggaac

SEQ ID NO: 81520 - RNA, 71 nt, Homo sapiens
accggaaaaagaaaaggcgcagcaggagccgcaaagggcaagacaaaacggcaggaaaaaccagaacaaac

SEQ ID NO: 81521 - RNA, 67 nt, Homo sapiens
caacagccggaacgccccaaaaaaggcaaaggcaggacaaagcggaggcgccagcacacggggcgca

SEQ ID NO: 81522 - RNA, 73 nt, Homo sapiens
gccgcagcgacccgcagcaccaaaacgcagcgcacagggccaccccgcccaggcagaaccaacccgccccccc

SEQ ID NO: 81523 - RNA, 76 nt, Homo sapiens
gaaaaacacgggcgccaggaacgcggaacagaaccaaaggcaggacagccagcagggaaaagcagacaagagaaca

SEQ ID NO: 81524 - RNA, 75 nt, Homo sapiens
cggccaaccaaggcgggacagggcgggaggggacgaaggaagcaagcaccagaacagaagaggaacgacagcgcc

SEQ ID NO: 81525 - RNA, 58 nt, Homo sapiens
caacacggaaacccggggcgaaaaacaaagagcccagcgagcaaaacggaaaaaaaag

SEQ ID NO: 81526 - RNA, 72 nt, Homo sapiens
gcgcggccagagagacgggaagaggacccgacaggaagcacagccaccgccaaccggccacaccaagaggga

SEQ ID NO: 81527 - RNA, 79 nt, Homo sapiens
gacgacgaggaagaggaggcgagaaacacggcccgcggcaaagcgcgcccaccgccgacaacaggacgccacgggcaga

SEQ ID NO: 81528 - RNA, 89 nt, Homo sapiens
ccccaggagagccccccaggaagccagccagagccaccgcgcaaagcccagaagaaagcgggcgggcgggaggcaaacggcgagaagcg

SEQ ID NO: 81529 - RNA, 73 nt, Homo sapiens
ccgggagagccgcggcgcaaggaccgccgaggcaagagccacaccaaggcggcagagaaggccccgcaggccg

SEQ ID NO: 81530 - RNA, 82 nt, Homo sapiens
gccgaggagcccgcgcggcgcggagagagacaagagccgccagagcgcggccgccaagacagaaggacagagaagaacccag

SEQ ID NO: 81531 - RNA, 67 nt, Homo sapiens
gagcagcggaccaaggcgcggggaggggagaagaagcaaagacccagggccggaggccacggaggaa

SEQ ID NO: 81532 - RNA, 88 nt, Homo sapiens
gagacacgcaagagaagcgaccgcgcacgccgggcagcacacccgggccccccacccccgccgcaagccgaggaggccagcagagaaa

SEQ ID NO: 81533 - RNA, 109 nt, Homo sapiens
cagaagccgcggcggcgcccggcggccccggcgccggcaaggggacccaggcgcccgcacgcgaggcgcgcaagggaccacagaacaaagcggcacacgccgaagacac

SEQ ID NO: 81534 - RNA, 77 nt, Homo sapiens
gagagaaagaagacggggggagaccagggcgagcccgaccaaggagacagaaggaccagacggaagagcaagagcca

SEQ ID NO: 81535 - RNA, 79 nt, Homo sapiens
cggagcgggagcgagcggcgcggcccgggagcgacccagacggcggcaacggaagcaggcggcaagcaacgcaagagac

SEQ ID NO: 81536 - RNA, 75 nt, Homo sapiens
caccgccccgagacgagaaaccccacaagacgaagcagacgggcagaaaaccaggcgaagcaggcccaagagcca

SEQ ID NO: 81537 - RNA, 51 nt, Homo sapiens
gacaggcaaagagaccccgggcgacacaagggcaaacgaagaaaacgaccc

SEQ ID NO: 81538 - RNA, 50 nt, Homo sapiens
ggaccgcgcagaccgagaagcagggcgagcgcgagcagccgggaacgagg

SEQ ID NO: 81539 - RNA, 100 nt, Homo sapiens
agcgccgaagcacccggaagggaaggccagaagcacaaagcgcccgaggcaccagacccggaggagcagcaccccggcaggcagaccagccggcccccac

SEQ ID NO: 81540 - RNA, 75 nt, Homo sapiens
caaaaccaagccaaacacaagcagaaggagcgaagaagaggcaacacaccgaaaaaagggaagcggagaggagca

SEQ ID NO: 81541 - RNA, 70 nt, Homo sapiens
gaaacgaccggccggcgaccggaagcaccggcggaggagcgggagcacccgagcggaagacccggacaac

SEQ ID NO: 81542 - RNA, 79 nt, Homo sapiens
cggaggggagacaacaggaggaggaaacagacgcgaggggccaaggggaggccaggcaggggaggggaccgcccgggca

SEQ ID NO: 81543 - RNA, 86 nt, Homo sapiens
ccggggacagccagccccgcggaccagaccaggccgcggcccggcacccgccggcgccccccggcacaacccgcgggcaccagccc

SEQ ID NO: 81544 - RNA, 82 nt, Homo sapiens
acaggcaaaggagcacgccgaggaccggagcagcggcacaaggcccagggcggcgaggacacaggacaccggaggagcacgc

SEQ ID NO: 81545 - RNA, 61 nt, Homo sapiens
ccgcccgaccccaagaccagagccgggaccccagccaggcggcaaagacgcaacaacagcg

SEQ ID NO: 81546 - RNA, 78 nt, Homo sapiens
agagaccgcaggaagaagcgaagagagaacacaaggaacgaaaggaagggaagaagcagaaccaagacaaaagaagac

SEQ ID NO: 81547 - RNA, 84 nt, Homo sapiens
gacgcccgggaagagggggagcggccagcgagagccagggcccaaagaaccggaaaacaccacacacggaggccaccgcgggac

SEQ ID NO: 81548 - RNA, 53 nt, Homo sapiens
caccgacggggaacgacgggacaaccccaaacacagacggacagaaccccacc

SEQ ID NO: 81549 - RNA, 77 nt, Homo sapiens
ggccagccaggagacggcggaggggcggacgccacgccaaagagaggggcgaaaacgcggaagcggagacacaggcg

SEQ ID NO: 81550 - RNA, 73 nt, Homo sapiens
gccccggcgcgaagaggcggaccggacggccgagaagcaaagccagggagggaaccgaagccacgggcggggg

SEQ ID NO: 81551 - RNA, 75 nt, Homo sapiens
ccaccagcaggaggaagagaaacagagggaggaccaagccacagggggcccaagcccacgaaaacacagacagaa

SEQ ID NO: 81552 - RNA, 59 nt, Homo sapiens
gacaccggaagcgggaaaggagcacaggaacaaacgagggaaagccccaggaacagagg

SEQ ID NO: 81553 - RNA, 76 nt, Homo sapiens
agcgcgccagcgcccgccagaccccggagaagccccgccccccagcagggagcgagcacaaacgacacacgcaaac

SEQ ID NO: 81554 - RNA, 77 nt, Homo sapiens
gagcaacaggagggcgaccacaagcaaacagagcccaagagacacaggcagaagaagaccgcaaggaagaagaggga

SEQ ID NO: 81555 - RNA, 74 nt, Homo sapiens
gccacggcgcgggccggagaacagggcggaggagcaagggaacaagagacaaggcagagcagccgacccagggg

SEQ ID NO: 81556 - RNA, 34 nt, Homo sapiens
gaagagaaacccacggggcaggcagggccaaaga

SEQ ID NO: 81557 - RNA, 72 nt, Homo sapiens
ggccccgaggacgagcggacggaacagaccacagggaccaccgggggcaccgccgaccgaaaccgcaaacac

SEQ ID NO: 81558 - RNA, 57 nt, Homo sapiens
gggcagacggacaagagcgcggaacaggacgccccgaaaaaggggaagaaggccaac

SEQ ID NO: 81559 - RNA, 74 nt, Homo sapiens
cgggcgagccacagaggagcagagcccggaccacacagagaagaaggaagagacgggccccccacaagaaaacg

SEQ ID NO: 81560 - RNA, 58 nt, Homo sapiens
caaaacgcagccaccgccgcaccaaccacaaaggcccaagagaaacaggcacgccgca

SEQ ID NO: 81561 - RNA, 75 nt, Homo sapiens
caagccggcggccaagacggagccgaggcgacagaccggcagcgaagcaccaggcccgcgggacaacagcaggca

SEQ ID NO: 81562 - RNA, 81 nt, Homo sapiens
ggaaggaagaaggcgcacaccccagcgcgcaaagcgcgaggggcgaggacaaagcaagagacccacagacagaaacccgcg

SEQ ID NO: 81563 - RNA, 85 nt, Homo sapiens
ccagagggccagcggaaccagaagcagcccagggccccgagaaggagccgcccaagccagagagagcgccgccgcggcccccggg

SEQ ID NO: 81564 - RNA, 77 nt, Homo sapiens
aaaacgaaccaggacggcaaagggcggacggcagacaggcagcaaccggccccgcccaccagccccagcccaggggg

SEQ ID NO: 81565 - RNA, 59 nt, Homo sapiens
ccccagagcgacagcccgggacaccaagaaagaacggacggcagaaacagaacaggaag

SEQ ID NO: 81566 - RNA, 71 nt, Homo sapiens
ggcggcaggggcaaccagacgggccaagagccacccgcccaccacagacccaccagaagcgagacgccagc

SEQ ID NO: 81567 - RNA, 68 nt, Homo sapiens
gacaaagcgaaagcacaccaaggggccaaggagaccgcacgccggacggagcccaccaccaggagaaa

SEQ ID NO: 81568 - RNA, 65 nt, Homo sapiens
accgaccgcggggccaaacgaccacccaaaaacaggaaaccacacaacaagaacgcgccagaaga

SEQ ID NO: 81569 - RNA, 84 nt, Homo sapiens
gagagggaggcgggaggagcggcagccgcgaggaggcgcgggagggcgagaacgaccccgagacggcccaaggggaaagcccgc

SEQ ID NO: 81570 - RNA, 61 nt, Homo sapiens
cggacaggcagaggcgaggaaaaaaccacgacaaaaccacccaacgcagaaaacagacaca

SEQ ID NO: 81571 - RNA, 90 nt, Homo sapiens
cggggggcgacgccgagggcgggggagagcgcgccgcgccccggaccgggccgcgcacgccgcccagacgacgacacgcggaggcgccgg

SEQ ID NO: 81572 - RNA, 69 nt, Homo sapiens
ccacagccacaggaaaaggccagaaccaagcagagggacacagcaaagaagcagggggaaagaagcaac

SEQ ID NO: 81573 - RNA, 79 nt, Homo sapiens
cggaggggggccgccgccgaccaacccaggacgagaaaaaacagagcggaacaagcggcccaagagaaagcagccaaga

SEQ ID NO: 81574 - RNA, 107 nt, Homo sapiens
cgcaaccagccaagaagacacaagcgcaagcacacccaccgaaacaagacagggaaacacaaagaagacaccagaagggccagcaccacgacaacacggcgacagac

SEQ ID NO: 81575 - RNA, 78 nt, Homo sapiens
ggcgcaccgaggcacgggggcagcaacagaggcccaccaggggccggaacccggccaaggaaaaacaggacgcagcag

SEQ ID NO: 81576 - RNA, 79 nt, Homo sapiens
cgggagcgcaagggcggacagcgcgggaacccgcagacggagaaacgaggcagggggacacaacggacccccccaaaaa

SEQ ID NO: 81577 - RNA, 59 nt, Homo sapiens
ccaggccaaccacgaaagcacaagaccgaaacagaagcgaaaagagggcaacaagggaa

SEQ ID NO: 81578 - RNA, 85 nt, Homo sapiens
ggaagcccacagaagcacagcgccaggcggaaagagccaccgaacagacagaggagcgagcaggcccccgggagcagggacacgg

SEQ ID NO: 81579 - RNA, 78 nt, Homo sapiens
caccgacacaggagaacaagcagcaccaggagacaaagccacaaaaacaccagaaaaaccaagcagaaaaggagcggc

SEQ ID NO: 81580 - RNA, 59 nt, Homo sapiens
ggccagaaggcgggcaggagccagaagcgggagcccgagaaggaagacacaacagaagg

SEQ ID NO: 81581 - RNA, 68 nt, Homo sapiens
ggggccgaggagcgggaagaggcgggggacaagagaaaaaaagggcgggcgaacaaaaagagcagagg

SEQ ID NO: 81582 - RNA, 59 nt, Homo sapiens
gcccgcgccagcacacgacaccgagccgccgccgaccgagcaaagccacaacacgagaa

SEQ ID NO: 81583 - RNA, 72 nt, Homo sapiens
ggaggagagaccaaccgaagcggcggcaggggccgcggcccggagcgccagggggcagaacagggaagccga

SEQ ID NO: 81584 - RNA, 68 nt, Homo sapiens
gcgcaccgacccgacgcgccggcccacgcgcggccaagacagcaaagcaagccaagagggcccagcca

SEQ ID NO: 81585 - RNA, 77 nt, Homo sapiens
ggcagaaacagaacaggaagaaacaaacagacaggacaccaaaaaggacaagaaaaccccaggacacagagcgggga

SEQ ID NO: 81586 - RNA, 77 nt, Homo sapiens
agcaccggccgcgagaaagacagaggacagagaccagaagccaacccagggccggagcgagggagagcaggaacaca

SEQ ID NO: 81587 - RNA, 72 nt, Homo sapiens
gggggcacgaagggggacacaggcgagaaacgggcccagaaaggaagcgcccaagcaggaggaaaaaggaga

SEQ ID NO: 81588 - RNA, 38 nt, Homo sapiens
caaaaggagcaagaaggcccaaaaagacagcgagagag

SEQ ID NO: 81589 - RNA, 50 nt, Homo sapiens
agccaacccagaagagccaaggcgagaacgcggacaagcaaacaaagagg

SEQ ID NO: 81590 - RNA, 73 nt, Homo sapiens
gagaagcccaaacagacgcagccaccaccaaagccggagcggaagaaaaagcagcgccggaagaaccggggac

SEQ ID NO: 81591 - RNA, 74 nt, Homo sapiens
ggaggccccagcggaccgaacagaccccgcgccggcagccccccgggcccgccaccccgcgggcaacgccggca

SEQ ID NO: 81592 - RNA, 58 nt, Homo sapiens
ggcgaggaggcgcccggagcggccgccccagccgggaccagcgacgacgcagaagaga

SEQ ID NO: 81593 - RNA, 92 nt, Homo sapiens
gccaagaggcggccaaggggacgagcaaaggaagcgcgaacagcagcgcagggcggaaaacaccccaaaagccaaaagggaaaggaaaagac

SEQ ID NO: 81594 - RNA, 42 nt, Homo sapiens
cccacgccgggacccagcgcagggcgaagaaaccaaaagcga

SEQ ID NO: 81595 - RNA, 61 nt, Homo sapiens
aggagcagagggaggcgcagacgggagccgggagccggcaggaaggagggaagacggccgg

SEQ ID NO: 81596 - RNA, 60 nt, Homo sapiens
gcgcggaaggcagcgcccagcagcgcaggacaaagaggccaggagacacgccaccgccgg

SEQ ID NO: 81597 - RNA, 84 nt, Homo sapiens
cggacagacgaagaggagggcagaggcacccaaagggagccccggggaggacaccagacacgaaggaccacaggccccggaggg

SEQ ID NO: 81598 - RNA, 58 nt, Homo sapiens
gcggcgcgggagacgcggagggcgaggcggcgcggccgagggcacgagcaaaaaaaag

SEQ ID NO: 81599 - RNA, 60 nt, Homo sapiens
accagaccgggagccggccccgggaccaaaagagcgcccgacacagcagggcgaggacca

SEQ ID NO: 81600 - RNA, 85 nt, Homo sapiens
cccccccgcgggaccggcccggcgcccggcgagggcgcgcggcgggccgccccgcccgaaagaagcacagagggaaggagaagga

SEQ ID NO: 81601 - RNA, 64 nt, Homo sapiens
gcccggcgcacagcgccaggaaaggcccgagccaaaagacccagagaaaggagcacgaaggaac

SEQ ID NO: 81602 - RNA, 94 nt, Homo sapiens
cagcgccgggcgagaaccgaaacgccgccggagaagagcggaaggcagaggcgccaaggagaagggaaccgagagcaacaacgcccacgcacca

SEQ ID NO: 81603 - RNA, 79 nt, Homo sapiens
gcggaaaaggaggcagagaaagcaagcaaaggacaagacaccagacaccacacacaagggacaaaaaggaccagaagaa

SEQ ID NO: 81604 - RNA, 71 nt, Homo sapiens
gaaggaggcaggaaggaccgagaccaggaggaagacggcgaaggcccagaggagaagcgcggcgaggagac

SEQ ID NO: 81605 - RNA, 84 nt, Homo sapiens
ggagccagcccacggccggcggccaggggcaccaagacacgcgcgagcaaggaaccccgggccccgccacccacgcgaccagcc

SEQ ID NO: 81606 - RNA, 69 nt, Homo sapiens
cgggagaccgcggggaaacccaccccccgagaccaggaaccagcagagaaacggcgcgccgcgcgccgg

SEQ ID NO: 81607 - RNA, 75 nt, Homo sapiens
gccgggccgcccaagggcgcgccccccaccagacggagccccgaggagcaggaaaccacggggggcagccaggac

SEQ ID NO: 81608 - RNA, 38 nt, Homo sapiens
gccgcagccaagcgccgccgggacccacaggacgacac

SEQ ID NO: 81609 - RNA, 65 nt, Homo sapiens
caccacccaagaccacgcccgcaaggccaaacagaaccggagaaagaaagagcagaggagcggcc

SEQ ID NO: 81610 - RNA, 77 nt, Homo sapiens
agagcagcgcacgcagaagcgaagggcgggcagcggagccgaggaccaggcgcgcccgcgcccggggcggccaaggg

SEQ ID NO: 81611 - RNA, 87 nt, Homo sapiens
gcagccaaaagagaaggaagggaacaagaggggcagcaagggccaagcgaaacaagccagggagccgggcacacggcaaagaggacc

SEQ ID NO: 81612 - RNA, 78 nt, Homo sapiens
gggagacgcgggagcgagcgcagcaaagcgcccagccgccgcccgcgcccgcggccggggcccgagaaaagcacagca

SEQ ID NO: 81613 - RNA, 51 nt, Homo sapiens
cacggggaaacacagcagaacacagacaggagggcgaaaggaaccagagca

SEQ ID NO: 81614 - RNA, 69 nt, Homo sapiens
cgccggcaccgccggaaccggcgcagagaccgcagcccacaccccgacggaagagcaaggaaagcagaa

SEQ ID NO: 81615 - RNA, 56 nt, Homo sapiens
ccccaggaggggacaaaaccccgaaaaaggcagggacgagagggcgaggaagcgac

SEQ ID NO: 81616 - RNA, 80 nt, Homo sapiens
cccagccgcccagcgccgccgcgcccggccaaggagcagacaagggcccacaccaaagccaccagagcaagacagggacg

SEQ ID NO: 81617 - RNA, 69 nt, Homo sapiens
gcccgcgccgagccgacaccaccacacaccgccggggaccgccacagaaagcccgccccagacagggcc

SEQ ID NO: 81618 - RNA, 71 nt, Homo sapiens
gggacgacaaagaagaagagcagaagcaacaccagcccaacggaccagagacccacagacaggaacggccg

SEQ ID NO: 81619 - RNA, 111 nt, Homo sapiens
gcccgcgcgccgcgcacccgcgccagcaccacgcccgcgccgcgccgccgccaccagcccaagagaaagggggcacccgaggaggaagagggcagggcccacggaaagaag

SEQ ID NO: 81620 - RNA, 72 nt, Homo sapiens
aaggcaacaagaaccgaaggcaaagggcaaagacccagcccccggagaagccaaggaagaccaagccagaaa

SEQ ID NO: 81621 - RNA, 69 nt, Homo sapiens
gagaagacaaccaagaggagagagcccacaggacgggcagggaagaaacagagccaaccagaagacaga

SEQ ID NO: 81622 - RNA, 87 nt, Homo sapiens
acgggcggcccgcgcggaggccgcgagaccgcagaaggagcggagcggcagcagaaggagggagaaaaacgacaaacagagcgaaaa

SEQ ID NO: 81623 - RNA, 75 nt, Homo sapiens
agggggcacccagaggccggggaccgccaaccccccaagaagcagagcaaggcagcaagccgcggggccccaacc

SEQ ID NO: 81624 - RNA, 84 nt, Homo sapiens
ccccagccagccgcaacccagccagccaccgccaccgcgaccacacggggcccaggaaccacccagggaagacgaggggcgagg

SEQ ID NO: 81625 - RNA, 78 nt, Homo sapiens
gcagcgccggaggcgaacgaagagcgaggaaaaacccagacagacagaacaggagagaaagccgaaagcggagagaca

SEQ ID NO: 81626 - RNA, 85 nt, Homo sapiens
agccagaaccgcagcagccaggacggacaccaaacacaaggggaagccggggccgcccagaaagccaacaggcagaccagagaca

SEQ ID NO: 81627 - RNA, 70 nt, Homo sapiens
ccgagccgcgccgaccagcggagcgacgcagaaagacagaaccagcacagcaaaaaaggcagcgcaccga

SEQ ID NO: 81628 - RNA, 70 nt, Homo sapiens
gccccaggaaccggaagagaacagaagcccaggaaagaagaaaggccccagggaacaagacaacacacac

SEQ ID NO: 81629 - RNA, 37 nt, Homo sapiens
ccagacaggaggagacgggggcagacacagggagggc

SEQ ID NO: 81630 - RNA, 78 nt, Homo sapiens
cgggcaccaacaagcagaaccaaagagaacccgacagaagaaaagggggacccacagaacaccagcagcaaacacagg

SEQ ID NO: 81631 - RNA, 81 nt, Homo sapiens
cgcagccgggcccggccccagccgacggccgcccaggagcgaggggagggacaggagccgagaacagggaggccccaagaa

SEQ ID NO: 81632 - RNA, 81 nt, Homo sapiens
gaacccaaacccccagagccaggcacaaggagaacacgccgaagagaacaagacgggaagaccaggaacagagacaacaaa

SEQ ID NO: 81633 - RNA, 54 nt, Homo sapiens
gacgcacgaccgcgcgaccgggccggaccagagaaaggacaggcaggagggaag

SEQ ID NO: 81634 - RNA, 60 nt, Homo sapiens
cgagcccgacagcccagccagacagaagcgaaggggacagggggagaaccgccagggaaa

SEQ ID NO: 81635 - RNA, 74 nt, Homo sapiens
agggccaagacaggaaaccaacaagacgagaacacgcgcggacagaagcggccgggccaaggacgacaaagacc

SEQ ID NO: 81636 - RNA, 69 nt, Homo sapiens
gcgccgaaggaccgacgcccgggccaaagccgacagaaaaggaagagacccagcgaacaagaggaagac

SEQ ID NO: 81637 - RNA, 48 nt, Homo sapiens
aaaaggcccaggcaaaaacgaggaaccccagagaggacagaagccaac

SEQ ID NO: 81638 - RNA, 57 nt, Homo sapiens
gaaagagcagccagcaagggaaggcaccacccaaaagacaccaggcgagggaaggag

SEQ ID NO: 81639 - RNA, 81 nt, Homo sapiens
ggcggacggcggggccgggccggagacgcgcccgcgcgcaggggaagcgggcaggggccagagaacaagcccagacagcaa

SEQ ID NO: 81640 - RNA, 40 nt, Homo sapiens
gacccaaggacgcgaaaaggcgagaggcccgggggccaag

SEQ ID NO: 81641 - RNA, 49 nt, Homo sapiens
gagggaagaacagccccaacaaacggcgagcagaacacggccccagggc

SEQ ID NO: 81642 - RNA, 54 nt, Homo sapiens
ccggcacgggcggcgggcccggggacgcgcgggagcaagggagaacagagcaac

SEQ ID NO: 81643 - RNA, 77 nt, Homo sapiens
aaccgcgcgggacccaaacggaaggaacggaggcggaaaaagagaccgaccaaaaggcaaggaagaaaaggaagccc

SEQ ID NO: 81644 - RNA, 74 nt, Homo sapiens
agggcacagccagggcccaccagcggagccgcaacaaaggcacacgcagaacacacaacacaagaaacagaagg

SEQ ID NO: 81645 - RNA, 77 nt, Homo sapiens
caccgaagcagcggccccggggagcccgagggaaagacaaggagccgggccgagaaaccgaaccagagaccagagaa

SEQ ID NO: 81646 - RNA, 85 nt, Homo sapiens
cggcgcggaggcgcaggcagcaacgaggcagcggcaggccagggcagccgcgggggaagaaagccacccgagacccagagccagc

SEQ ID NO: 81647 - RNA, 73 nt, Homo sapiens
cgcagcgcagcgaggaagaaccgccggggacgaaacaaaaagaccggaagcgagacccacgcgcccagacgga

SEQ ID NO: 81648 - RNA, 39 nt, Homo sapiens
ggccacaagagaaagagcacgggaggaaggcaggaagaa

SEQ ID NO: 81649 - RNA, 79 nt, Homo sapiens
caggacaggagagaaagacggaggaagaagccagagccacgaggagggagcccaaagaggcgaagagagaacaggaccc

SEQ ID NO: 81650 - RNA, 63 nt, Homo sapiens
gccggaggagccaggacgcagcccggcggacgccggcacagaacagaaacagcaccaggacac

SEQ ID NO: 81651 - RNA, 80 nt, Homo sapiens
cgggcgccacgagcagacagacagggcgcgccaccagagcaggacccgagccccaaagacagaaaagccccgagacggaa

SEQ ID NO: 81652 - RNA, 81 nt, Homo sapiens
gcgcgagacccacgaggcgcggcccggaggcccagaaacgggccgcgccaccaaggaacacaaaggccgagagaaacaagc

SEQ ID NO: 81653 - RNA, 56 nt, Homo sapiens
ggccggaccgagcgcccgacccggcgagggaccccgacggagagacaaagaagacg

SEQ ID NO: 81654 - RNA, 39 nt, Homo sapiens
aggacacacccagccgcgggggacgggggaggacaggag

SEQ ID NO: 81655 - RNA, 54 nt, Homo sapiens
acggccagaaacgagcaagagacaaagggcggcaaccacacaggaaccaacaac

SEQ ID NO: 81656 - RNA, 85 nt, Homo sapiens
gccaggggggacagccagccagcagcaggaggagagggcggcggcggcgggggcccgggagccgccgcaccgcccaaagggaccc

SEQ ID NO: 81657 - RNA, 75 nt, Homo sapiens
gcgcgaacaaacagcagagcgccgcggggagggaaagaaacagacaccagggcaaggacaaagggaggaaaaagg

SEQ ID NO: 81658 - RNA, 67 nt, Homo sapiens
cgcggcgaggagcgagcgcgcgaggggcggccgagagaggagcgcaagccgagggaggaaggaggaa

SEQ ID NO: 81659 - RNA, 78 nt, Homo sapiens
aggcgacagccacaacaccgccagagaaccacacggccgcacaaggggcacccgagcacgaaaggaccgcaccaaggg

SEQ ID NO: 81660 - RNA, 51 nt, Homo sapiens
gggccaaagaagggagagaggacaaaacgccgaaacaggcaacaggcaaac

SEQ ID NO: 81661 - RNA, 85 nt, Homo sapiens
gcgacagcaggcacagggacgagggggcggaagaaaaagcgagcccacccccacaccaacccccggaagagagccaacaccagag

SEQ ID NO: 81662 - RNA, 78 nt, Homo sapiens
ggagaagaggaggagcggccgggggaggcaggggcgcggcaggggaggggcgaccccggggcccggccagcacgaccg

SEQ ID NO: 81663 - RNA, 83 nt, Homo sapiens
gccaagccgccccccaccgcccgggcccgaggaggcagccaagccgggccgcccgcggcgggacggcaaaacagaacagaaag

SEQ ID NO: 81664 - RNA, 113 nt, Homo sapiens
cggggcggaccaccgcccccgcgccccgcaccgcggcaaagagaggacgcagcgagaaagggggggcacgagaagccgccgagagacccgccccgcagcaagagcacaccgag

SEQ ID NO: 81665 - RNA, 99 nt, Homo sapiens
gacggagcaaaaaggagggcaaaggagaggagccacgccgggaacccaggcagcgaggagcaagacaacaaaagggaaaaacggaacagagagaaacaa

SEQ ID NO: 81666 - RNA, 80 nt, Homo sapiens
gaaaagagaaccaaggcggcagggagaaaggagcaagcccagagggaacccaccagaaaacgacacacaaacgcagccaa

SEQ ID NO: 81667 - RNA, 80 nt, Homo sapiens
accggggccacagcaaccacgggaagccaggcagaagccgcaaaaaagaagagcagcagacgcagaaaaggccaagaaga

SEQ ID NO: 81668 - RNA, 49 nt, Homo sapiens
acggacgccagccccacaacagaaggccgcggacccccccccccccacc

SEQ ID NO: 81669 - RNA, 87 nt, Homo sapiens
cgacagcgcgagagagcgcggccccaggagcaaggcgaggacggaaggcccacgccccgaagacaaaggaagcgccagcgccgggcc

SEQ ID NO: 81670 - RNA, 72 nt, Homo sapiens
aacgcccaagcccgagacccagaccgcgggaggggaagaccgaaacaaggaccccccgggagaagaaaagcg

SEQ ID NO: 81671 - RNA, 75 nt, Homo sapiens
gcggagccaccgcgccccgggggagcagaaacgaaaccgaagcgacagagaggagaacggaggaggaagaacacc

SEQ ID NO: 81672 - RNA, 78 nt, Homo sapiens
gcggacagcaggcccgaacacagagccgacagccaaagcggacagccggggggaccacagcacggcccacgacaccag

SEQ ID NO: 81673 - RNA, 43 nt, Homo sapiens
aagaaccccacaaccaccaccggaggacaagcgccggcacgcg

SEQ ID NO: 81674 - RNA, 73 nt, Homo sapiens
aaaggaagcgcacaggaagccggaaacgggaacggcgccaccgagcacagaagagcgcaggcacaaccggcac

SEQ ID NO: 81675 - RNA, 64 nt, Homo sapiens
gacagcagcgagcccaccggagccaagacggggcccacgccggaaggacccaccgcacaggcga

SEQ ID NO: 81676 - RNA, 71 nt, Homo sapiens
cccgcacaagaaaagcaacgagcaacagagcgccagaggaccagaggaaacgggaagcggggacaccaagc

SEQ ID NO: 81677 - RNA, 75 nt, Homo sapiens
gagagagaaacagaacaacacagaggggccgaaaaacaagagggacaagccaggacaaggcccaaggcacagcgg

SEQ ID NO: 81678 - RNA, 83 nt, Homo sapiens
agcacagccccgaggggcgaagccaccaagagaaagaagcaggagagaccaaggcagggaggggcccaaaccaccgcaagcag

SEQ ID NO: 81679 - RNA, 80 nt, Homo sapiens
caaacgcccaggcgcagggcgcagcggcagcaaggccgaaagaagagaaggcgagaggaaagcaaagaaaggaagagaaa

SEQ ID NO: 81680 - RNA, 79 nt, Homo sapiens
aaggaccaagaaccagaaaaccggcgcagagccaaaaggaaccgaggaaaagcaggggaaacgacgcagcggagagacg

SEQ ID NO: 81681 - RNA, 75 nt, Homo sapiens
agcgcagaccgaggaaaaggagagaggcacagccgccagggcgcggcccaagaaggaccagacagaacaagggcc

SEQ ID NO: 81682 - RNA, 76 nt, Homo sapiens
cgaccacgcgaccccggccgcggggccaggaagcggaggagccccggaggcagagcggcgccagggcccacacaca

SEQ ID NO: 81683 - RNA, 66 nt, Homo sapiens
ccgaacaagaccaaaggggccagagccgccaccagaagccaagcaccaaagaggagcaccggccca

SEQ ID NO: 81684 - RNA, 58 nt, Homo sapiens
cggagacggaaccggcaccagaaacaggagcgccggaccagcgcgagcgccacggcac

SEQ ID NO: 81685 - RNA, 82 nt, Homo sapiens
gcaagaggaggagacgcgcgagagccggggaggacgcgagcggaagagaagcaaaaagacaaggaggaaagcgacaccacga

SEQ ID NO: 81686 - RNA, 70 nt, Homo sapiens
agcgaacgaagacccccaccaggcaccgggcaaccccccacaaacggccgcagcagggacgcaccaaaac

SEQ ID NO: 81687 - RNA, 60 nt, Homo sapiens
agaaacggaacaccaagccggccagaccacggcgcaagaccgcgggccacaagaagacag

SEQ ID NO: 81688 - RNA, 63 nt, Homo sapiens
ccggagggggccggggagcccgaccggaccgcggaggaccccccagggggcccgagcccaccc

SEQ ID NO: 81689 - RNA, 113 nt, Homo sapiens
caacacgggaccaacgcaccagagccgagaaacgcgaaaaggaagcggaagggaccgaccagggcaaccaaaaagccacaggcaccaggaagaggaggagagaacagagcggc

SEQ ID NO: 81690 - RNA, 74 nt, Homo sapiens
ccacgccaggcccaggacgccagagacagaacaacggaccaagagggggcaccaggaggaacgggcgcacagaa

SEQ ID NO: 81691 - RNA, 113 nt, Homo sapiens
gaaagcaccgaaaaaacgaagaacgaaacggagaaggaacgagccagcagcggacaggccggcccagggagaacgcaaaaccaccacccccacaaaaaacgcagggagaaaag

SEQ ID NO: 81692 - RNA, 80 nt, Homo sapiens
agagaagcggcggaggacgagcccgggagcgacccgcgcaaacaaacagagcccagaaccgccccagacaaggcccggcc

SEQ ID NO: 81693 - RNA, 67 nt, Homo sapiens
ggcagaacgggccgaccagggagaagggcccacggaggagaagcaaggcccccgggaggcaggcaca

SEQ ID NO: 81694 - RNA, 78 nt, Homo sapiens
gacgggcggcggggggccacgccgccggccgacgcggagggggagaagcacaggcaacgccccaaaggcagaagaaac

SEQ ID NO: 81695 - RNA, 75 nt, Homo sapiens
cgccagcaaacgggccaagagcgccccaaacccaagaaggaagcccagagcccaaagaaaaacaggaaacaagac

SEQ ID NO: 81696 - RNA, 52 nt, Homo sapiens
agcgggaacgcaggacccaaagcagaaacagaagcggagagacagggacaag

SEQ ID NO: 81697 - RNA, 71 nt, Homo sapiens
cggaaacacaagagaccagagggaccgaaagacaacaacgcagagaagaacgccggccaacggaagcggag

SEQ ID NO: 81698 - RNA, 32 nt, Homo sapiens
agggaaagcacgaaagagagcggggacgggaa

SEQ ID NO: 81699 - RNA, 66 nt, Homo sapiens
gacaccgcacgcgcacggacggcacagcccgccgaacccgaaaggagaacgaaaacaaacggaaga

SEQ ID NO: 81700 - RNA, 69 nt, Homo sapiens
gcggaaacccccgaaggaagaacaagggaaagccagaggcacaaggccaggacacgcagcacagcagag

SEQ ID NO: 81701 - RNA, 69 nt, Homo sapiens
cacgcagaccaggccacaggaagaagagcaccggcgacaaaggacagccaccccgacacccgacaaagg

SEQ ID NO: 81702 - RNA, 62 nt, Homo sapiens
acggcaggcgagagccgacccaggccgccggccccacaggggccaaccgccccccagcagca

SEQ ID NO: 81703 - RNA, 82 nt, Homo sapiens
ggagcacccggcgcccagacaacccaaagcagacaacagcgaacgcggacacaccgcaacccagacgccccggacagaaaaa

SEQ ID NO: 81704 - RNA, 75 nt, Homo sapiens
ccacacaacccgcaggcgcgggcaggcccaccagaaaaccaaccaggcgcggacagggcagaccgccagcagcac

SEQ ID NO: 81705 - RNA, 86 nt, Homo sapiens
cagcacgcgcacacaaacacacccagcacaaccaggagccgccggccaacacgaggacacgcgcaaggcgccaccggaagaaacgg

SEQ ID NO: 81706 - RNA, 83 nt, Homo sapiens
gacaagcccccgcaaaccaaccccggaaacacccccaacagagacaagaggagcagcagcggcaccgcccccacccggagggc

SEQ ID NO: 81707 - RNA, 71 nt, Homo sapiens
gacgggacgcgcggcgggcagcaaaccaccggaccagggcggcccgaaccgggccgggcggcaaccgggcg

SEQ ID NO: 81708 - RNA, 75 nt, Homo sapiens
aggaaaacgcggaaaaccgacacaacaggaagagaaaaggagggcaacccggggaaagagacaagccgaagagac

SEQ ID NO: 81709 - RNA, 89 nt, Homo sapiens
cccgggacagcgaggagcgagggaccccagcgccgcccaagagagagaagagaggcgcgagggcagggaagaggcggacaagcgcaaac

SEQ ID NO: 81710 - RNA, 70 nt, Homo sapiens
ccagccggcaaaaacacccccgaccgacaagacggaaaccgggagggggaaaagcgagaaaaagacccaa

SEQ ID NO: 81711 - RNA, 107 nt, Homo sapiens
gcgaaacagcgacgaggagcaccaacgagcagagggaagaacgagaaccaagcgagccccccagcacccaggcggaagcagggcgccacgacagcaaccgccccggg

SEQ ID NO: 81712 - RNA, 75 nt, Homo sapiens
cgagaccgggcggccacagccgcagggagaacccgaggcgggaacagaaagacaacggacaaggcaggaagaaaa

SEQ ID NO: 81713 - RNA, 85 nt, Homo sapiens
cacacagggagaacaagcaggaagaccagcccccaccagccgcaggggggaggggaacagcagcggagaacacggcagagacaaa

SEQ ID NO: 81714 - RNA, 84 nt, Homo sapiens
ccgaccagaggaaggcgaacccgccacgcagcaggagcaggggacgaaggccccagcccaagcggaagggaagaaccagcggag

SEQ ID NO: 81715 - RNA, 60 nt, Homo sapiens
caaaaacaaaacgaaccaggacggcaaaggcgacccgcggcgagagcccccccagagcgc

SEQ ID NO: 81716 - RNA, 71 nt, Homo sapiens
gagcgacaggaagccgccaggagcaccaggcaaaagcaagaaccaaaaacaggaacaggaaagacacaagg

SEQ ID NO: 81717 - RNA, 79 nt, Homo sapiens
caacaggcagaaaaagaaccagaggggaggagggcaagaaaacaagcaccaaacgaaaagaaaaaggaagagagaccca

SEQ ID NO: 81718 - RNA, 33 nt, Homo sapiens
ggagacagaacagcggcccgagggcaggacagc

SEQ ID NO: 81719 - RNA, 75 nt, Homo sapiens
agaagcaagggcgcgaggacacagggagcccaggaccaccccagacgaaggcccaccaccacgagcgcggccacc

SEQ ID NO: 81720 - RNA, 76 nt, Homo sapiens
ccagagcgaggacgccggcagcgagaggggagagaagccggacagagagcacagcaaaaaaaaaacaacccagcaa

SEQ ID NO: 81721 - RNA, 69 nt, Homo sapiens
gcccgacaagccacaggagccccaagccagaccgaacacggagcaaggaaaagagcccggaaagaagca

SEQ ID NO: 81722 - RNA, 74 nt, Homo sapiens
cgaagaaagagagggaagaagcagggcagaggaccaggacgcgcgcggagccagcgcccggcaaggagcgagcg

SEQ ID NO: 81723 - RNA, 78 nt, Homo sapiens
gccgcacgggaccccggaacccgcgcgcgcccacgacgccgaggggagcgagcacccagagccagggaggagagaaga

SEQ ID NO: 81724 - RNA, 77 nt, Homo sapiens
cggagaaggaccggcaaccagacagccacgagcgggcagccacccgcaagagacgccaggaagccggacgcgcaggg

SEQ ID NO: 81725 - RNA, 74 nt, Homo sapiens
aaagcagaccgaaacagaagaggcagggcgaacaagaggcgccagcgggcgcgccggaagaacagcgccacgcc

SEQ ID NO: 81726 - RNA, 78 nt, Homo sapiens
agccccccacacagccacacagacaccgccacaggagagagcaagccggaacaagaggagaccaagaaaacgaagaaa

SEQ ID NO: 81727 - RNA, 73 nt, Homo sapiens
acggggccaagagacgacaaaggagaggaaaacagccacccgcccgaagaacgaccagcggcagacgacaacg

SEQ ID NO: 81728 - RNA, 71 nt, Homo sapiens
ggcgagggaagcggaaccaaccgggaaagcccggggcaggagaggaccgaggaggggcgccgaggaaaaga

SEQ ID NO: 81729 - RNA, 67 nt, Homo sapiens
ggccaagaaggcagccaaaagaagaacccggacccgaccgaagcaagaacgcaaaaggcacaagcac

SEQ ID NO: 81730 - RNA, 64 nt, Homo sapiens
accaagaaccagcaacaaggggaggagccagacggaacaagcgcccacgagagaagcccgagaa

SEQ ID NO: 81731 - RNA, 79 nt, Homo sapiens
aggaacaaaccgaggagccgggggaagcggccggggaggacagcgaacggaggagcgacggccagcgcgcacaggcagc

SEQ ID NO: 81732 - RNA, 79 nt, Homo sapiens
cacacacggccaagcagcaggcggcgcgaggagaggagggcgacggccggggacgccggagagcccacaaggagaagcc

SEQ ID NO: 81733 - RNA, 74 nt, Homo sapiens
aaacagaagacgcagcccaggggcaagagccaagacggcagcaccaacgcccacagaaaggggcaccagcagca

SEQ ID NO: 81734 - RNA, 77 nt, Homo sapiens
aaagaaggcagcacgcgagagcacagcaccggaccagaaaaagcggggaaaacaaaaaaaagaaggagggaagaggg

SEQ ID NO: 81735 - RNA, 68 nt, Homo sapiens
gcgcacgagaggagagaaagaacggaaaggcgaagagaagagggaaagggaaaagaaaaccacacagc

SEQ ID NO: 81736 - RNA, 65 nt, Homo sapiens
aagcggcggaaagaaaaaggcggccagcgagggcgcgacgcgggcccccagccagcccggaccag

SEQ ID NO: 81737 - RNA, 48 nt, Homo sapiens
caaaagagcggaggagcggcgaggaggacccaagaagaccagccgaag

SEQ ID NO: 81738 - RNA, 104 nt, Homo sapiens
gacgcaaccgggacagaaaggaaacgagagaagaaacaaacggagagaggagaccaaagaggaaggggaccaacacagagggagaaagcagaaaacgccagaaa

SEQ ID NO: 81739 - RNA, 71 nt, Homo sapiens
gaaacaggcaaaacaaccagaaggggagaaggcaggcaccacaaaaaggacagacggaaggacagaacgga

SEQ ID NO: 81740 - RNA, 72 nt, Homo sapiens
gacgcggagacaagagggcccaggacagaaggcgggcaaggagcgccccccgagcaccccccacagcccacg

SEQ ID NO: 81741 - RNA, 61 nt, Homo sapiens
gcgagaggagaagacgccgcaacaggccacaggcagaaggaaccgcggagagacgacggac

SEQ ID NO: 81742 - RNA, 77 nt, Homo sapiens
ggagacccaggcgggacagagggagccaggcagaggggcaaaagcagggcaacggcccggccaaaggaagaggcggc

SEQ ID NO: 81743 - RNA, 83 nt, Homo sapiens
caggcaacaagacaagcggcggggccccgggcgcagcccagagggcacccgcaaacagcgggaccccaccagcaaagccaaag

SEQ ID NO: 81744 - RNA, 67 nt, Homo sapiens
gaccaaaagagaagcaccaaggaccagccgaccgagggcaccgcgcccgcagacacaccccaaacag

SEQ ID NO: 81745 - RNA, 63 nt, Homo sapiens
cgcgcgggcggaggcagaggacaagcagaagcaagcaaacgcacgaggaggcaaggaccgcgc

SEQ ID NO: 81746 - RNA, 77 nt, Homo sapiens
aaagaagccaaacgcggccaaagagaaaaggcaacaccgcacaggccagccggcaaaaacgcgggaaaacggcacaa

SEQ ID NO: 81747 - RNA, 81 nt, Homo sapiens
gccgcggcgcagcggcggacccgggcagaagaggcgggagagcccgccgacagcgcgagggagaagcccgagcacaacccg

SEQ ID NO: 81748 - RNA, 82 nt, Homo sapiens
acagggagacaacacgaccacaagccacaggcacccagggaagagcgggccaacagaaagagggggcagacccggaagccga

SEQ ID NO: 81749 - RNA, 69 nt, Homo sapiens
ggaccaagaaccagcaggaccggacgccacacaggggggggcagcaaagcggcgcccccagagcccccc

SEQ ID NO: 81750 - RNA, 68 nt, Homo sapiens
aaccaagaggaaggaaagagacagaagcacggaagaagaagcaggaaagggaagcgcgcacagagcac

SEQ ID NO: 81751 - RNA, 65 nt, Homo sapiens
gaccgggccaaaggacaaggaaccaagccaggccaagaccaaacgcgacagcgggcgcgagagcg

SEQ ID NO: 81752 - RNA, 70 nt, Homo sapiens
aaggaacagcagacaagacgagcccaccacggacagcaaacagggcacgagcaaaaaaaagccccgagca

SEQ ID NO: 81753 - RNA, 79 nt, Homo sapiens
acaaggaaacacgacacaaaaagcaagcgggccaccacagaaaagaaacggcgaggaaagagaggagccccggaaagaa

SEQ ID NO: 81754 - RNA, 73 nt, Homo sapiens
aacagccaggggcccacggagggcgcccaggaaagccaagcaggcgggacaccaggagcggccgggcggcagg

SEQ ID NO: 81755 - RNA, 71 nt, Homo sapiens
cccggccggaggcaccagcgcgggacaacacaagggaaccaaggagggcgccgcgggcgcgccgccggcgc

SEQ ID NO: 81756 - RNA, 90 nt, Homo sapiens
agcggagaaaaacccaaagcaaccaaggagacaccaaagaagccgggaccgcgcggagcgacgcacgagacgaggacggggaaggaggag

SEQ ID NO: 81757 - RNA, 80 nt, Homo sapiens
acaggaccgcagacagagccgaaaccaggcggaaggcgcgagaagcgagcgcgacaaacccagcccaccgaagaagagac

SEQ ID NO: 81758 - RNA, 120 nt, Homo sapiens
ggcggacccggccaccagcgagagcaccaccaggcccccagccgcaggcccggcgacagaggggaagcggagcgacggacaccaggggcacagagagcgaagaagagccaggccaaagac

SEQ ID NO: 81759 - RNA, 64 nt, Homo sapiens
gacgggaggagaagggcgggccacacgcacgagacaggccaagcgcacaacacgggaggcgccg

SEQ ID NO: 81760 - RNA, 77 nt, Homo sapiens
aagaaaacaggccgcacaaaaccacccaggcgaacagccacacccaagcgccaccagaccagaggaacagggagggg

SEQ ID NO: 81761 - RNA, 54 nt, Homo sapiens
gccgcggccccccgcgcgcccgggaacgagaccagacaagggaggcgaggacgg

SEQ ID NO: 81762 - RNA, 71 nt, Homo sapiens
cccaacggcgccggagaagcaagggagaacagagcaaccaccaaagagagaggggaaagccacgcggaaag

SEQ ID NO: 81763 - RNA, 65 nt, Homo sapiens
acgaggccacgacagcccgaagagggcacgcggaccacccacccaaagagcaccgacacccacac

SEQ ID NO: 81764 - RNA, 69 nt, Homo sapiens
gggaacgagaaaacaggaccaagaagaagaaccagcaaaagcagcgccaacgcaaacacagcaggggga

SEQ ID NO: 81765 - RNA, 69 nt, Homo sapiens
gaaacgggccgcgggccgggccggaaaggaagggccaggacaccaggagaaagacagcaaagaaaagga

SEQ ID NO: 81766 - RNA, 81 nt, Homo sapiens
ccccggagacccgggccggcccccaccagagaccggcagaaggaacgagggagcacggagggaaaagaagccgccgacccc

SEQ ID NO: 81767 - RNA, 70 nt, Homo sapiens
gaaaagaagaagaagaccacaaaaaagagacccacagccagcaacaccaacgcggcagaacggaggcagg

SEQ ID NO: 81768 - RNA, 55 nt, Homo sapiens
gcaccagcagccaccaggagcccgagagagaagggaaaagacacgaagggaggcg

SEQ ID NO: 81769 - RNA, 63 nt, Homo sapiens
aaagagaggggcagacggcgccaacgcccaccgaacggccagagaaggggccccggcgcggag

SEQ ID NO: 81770 - RNA, 73 nt, Homo sapiens
acgcgcaggccgggcccggaccgcccccgagcccggaggggggagaaaaggagcagaaagcccagggccccgg

SEQ ID NO: 81771 - RNA, 69 nt, Homo sapiens
gcggaccgaagaaaacgagacagagcgccgcaagggcaggcggagcggaggcagacacacacgggggga

SEQ ID NO: 81772 - RNA, 76 nt, Homo sapiens
caccgccaaccgcgaggcgcaaagggggaacccggaagcgacaagccacggagcacgcccagagcccaccgaaacc

SEQ ID NO: 81773 - RNA, 70 nt, Homo sapiens
aaggcagagacgaggacaaagaagccacgaagcaaaaagacccccaaggcaggagaccaaaacgagggcc

SEQ ID NO: 81774 - RNA, 73 nt, Homo sapiens
gcaggacgaccagaccaagaagcccccgggaggagcagaacgagggcgaaggggccggacgggccaccagaga

SEQ ID NO: 81775 - RNA, 57 nt, Homo sapiens
cggacggaaaaccaggccgggacacaaacccccaggaacagccaccgggaggagaac

SEQ ID NO: 81776 - RNA, 80 nt, Homo sapiens
cagcagcgcgcgcgggagcccggggaacagcgaagggagaacgggagcccaagaaggggcccccgcagggaccagaagca

SEQ ID NO: 81777 - RNA, 86 nt, Homo sapiens
ccccagaagccaagcggaaggcggaggaggacccggaggccgcggaagcgggggggagagaaggaagagagaaagaaaggaaggaa

SEQ ID NO: 81778 - RNA, 78 nt, Homo sapiens
ccaccgcgccccagcccgagccagggcgaggacccaaagacaggaccacgcaccagcagagaaggaaagcaaaccgaa

SEQ ID NO: 81779 - RNA, 75 nt, Homo sapiens
caggacacagcaggcaaccgcggaaaaaacaccagcagcccagcaaccaaaaagaagaccgcacccaaacaaggg

SEQ ID NO: 81780 - RNA, 66 nt, Homo sapiens
ccaccgaaggcaaagacccagccagacaggcaaaagacgcacccggcggccacggacccaagacag

SEQ ID NO: 81781 - RNA, 81 nt, Homo sapiens
ccagccggccgggaggcaccacggccgagcccgaggaccggggcgccggcagcgagcacccgcacagagagaagccaggaa

SEQ ID NO: 81782 - RNA, 75 nt, Homo sapiens
cgcagaggacccaaagcagagagacgaccaggaaagccggcgcggaacggcgggagaagaagagcgcgagaggac

SEQ ID NO: 81783 - RNA, 66 nt, Homo sapiens
cgcaaggagagggcgggagcagcagcagaaacaggagaagaggaaaacggccacaggacaaagaca

SEQ ID NO: 81784 - RNA, 64 nt, Homo sapiens
caccggggccaccccaaaaggccgagagacccgcgaacgagcacaagggcaccacgcaaacagg

SEQ ID NO: 81785 - RNA, 76 nt, Homo sapiens
ggaaccaagaccgaggcgaagcaagcacacaacaaacagaacgcaaagagagagcaggagacggagggcagaggca

SEQ ID NO: 81786 - RNA, 74 nt, Homo sapiens
gcggagggccgagggagggccgagccagccgcggccggaggagcccccaggccaaagcccaggagcccaacacc

SEQ ID NO: 81787 - RNA, 62 nt, Homo sapiens
agggcgaccgaacgaagaaacaaacaggagggaagaacaagagacagagaaaacaaaaccac

SEQ ID NO: 81788 - RNA, 57 nt, Homo sapiens
gccacagacccacaccggaggcccacagagggggacacaagaacaaccagaggaaac

SEQ ID NO: 81789 - RNA, 72 nt, Homo sapiens
cgggaaaggccgcgggggcaacggagaaaacccggaaccgcgacggcggcagacggcaccaaacggcaagga

SEQ ID NO: 81790 - RNA, 56 nt, Homo sapiens
agacagccaggggaacgcccgacgcaagcggcaccagaagaaagaagagaccaagc

SEQ ID NO: 81791 - RNA, 75 nt, Homo sapiens
gaggagggaggaaaacaaccgagggcagagcagcgaaagaggacaaacacaccgaaaggcgaggacgcaaagcag

SEQ ID NO: 81792 - RNA, 82 nt, Homo sapiens
gcaaggcggcggacggcgcgcgcccgaggcgaggaggagcgcggcgaggacagcagcggacggccggaccaagaggcgccgc

SEQ ID NO: 81793 - RNA, 83 nt, Homo sapiens
gcccgcgacgccccaacaagaaggccacagcacgaaggcggcacagggagaacacagggccccaccgcgccccacagaaaacg

SEQ ID NO: 81794 - RNA, 54 nt, Homo sapiens
gaaaacacagcgcaggaaaagacccaccccaaggcccggcagccgaccgccggc

SEQ ID NO: 81795 - RNA, 69 nt, Homo sapiens
ccgaggcggcgagagaggcaggcggagccgaccgggccagagagcgcgcacaccgaaccagagccccca

SEQ ID NO: 81796 - RNA, 75 nt, Homo sapiens
cagcgagaagccgaaccaccacacacaaaagcaccagggagcgagcacaaacgacacacgcaaaccacaaagccc

SEQ ID NO: 81797 - RNA, 69 nt, Homo sapiens
aagagaggaacggggggagagaacccaaccagggggaaacacagaacgcagggggacaaacgccaggac

SEQ ID NO: 81798 - RNA, 80 nt, Homo sapiens
acagcacgcagacccgccggagacaacggcgggagcccggagcccggaaaacacgccggaggaggaagacaaacaggggg

SEQ ID NO: 81799 - RNA, 82 nt, Homo sapiens
aggagagcacgacggaccaagacgagcccagcgcaaccccaagcgcccaaaggcgcagccgcgcccggccggcacccaggcc

SEQ ID NO: 81800 - RNA, 74 nt, Homo sapiens
gcccaagagcccagccgagccggccgagagcggacggccaaggaggaggagcgcagcacccagggaaggcagag

SEQ ID NO: 81801 - RNA, 68 nt, Homo sapiens
acacccccacgcggaacacaggcaaaagggaaagcacccaggcgaaccgaccaggaagaaggaagcga

SEQ ID NO: 81802 - RNA, 81 nt, Homo sapiens
accacccaggaaacagcgcaaggggcaacacccccacaaagagcaagccagccggacgcaccacgggggggaagcaaaccc

SEQ ID NO: 81803 - RNA, 77 nt, Homo sapiens
caacaagaaagagaagagcagcaagagcaccacaaccacacagccaaaaaggggacgaacccaacagaggaggaaga

SEQ ID NO: 81804 - RNA, 76 nt, Homo sapiens
cagcagggacgcgggcacgggaccggcgaggacgggacccccgacaggccagcgccaccaccgccgaccagcagcc

SEQ ID NO: 81805 - RNA, 74 nt, Homo sapiens
cccgcgccgccgaccccccggcgccgcgccggcggcgccgagcgggcaccccgccgggcgagaccaagcaggag

SEQ ID NO: 81806 - RNA, 39 nt, Homo sapiens
aacgaccgaaacaccaggacaggaaccaccaagaagaag

SEQ ID NO: 81807 - RNA, 67 nt, Homo sapiens
gaagcaaggaaaacaagcccgagagagacgcagcgcaaggccgggggaggccacaaaacaaagcgac

SEQ ID NO: 81808 - RNA, 83 nt, Homo sapiens
aggacaccccgaagccgagaaaggaccgaaaagacgcggccccaaaggaaacacccgaagaacacagcgccagcccaacggag

SEQ ID NO: 81809 - RNA, 74 nt, Homo sapiens
aggaaacacggaagcacagccacggcggcccccacacacggccacaacaaccggcgcaggcgacgcaagcagaa

SEQ ID NO: 81810 - RNA, 78 nt, Homo sapiens
cggccgacaagaggcggacggggagcgaacgggacagcccacacccggcgcggagggagccacaacgaccgagcggac

SEQ ID NO: 81811 - RNA, 59 nt, Homo sapiens
ggggaaggggcccacccccgccaggaacgagaccggacaagacaccaggaggacgagaa

SEQ ID NO: 81812 - RNA, 50 nt, Homo sapiens
gcgaccgggcagcagggcacccacaagagacaagcccagggacgacgcag

SEQ ID NO: 81813 - RNA, 81 nt, Homo sapiens
gcaggaaaagcagaccggcgaaggagacaaccaaagccaaggccgaaagaagccagcggagaaggcggagagaaggaggca

SEQ ID NO: 81814 - RNA, 87 nt, Homo sapiens
aaggaaagaggaaagagagagagcagaaaagaagaaacgggcaacaaaacccaagcgacaggaagaggcacaacaaagaaaagaacc

SEQ ID NO: 81815 - RNA, 83 nt, Homo sapiens
gaggacgaggaggaacccacacccccaaggcacggggccacaccacgaaggaggaggagccagaaacagaagaggccagaaag

SEQ ID NO: 81816 - RNA, 90 nt, Homo sapiens
gagccaagaacccgccagcaggcaaccagacccagaagacacaaggccaggcacacagaaggccaaaacccgcaaacacgagagaaaaga

SEQ ID NO: 81817 - RNA, 68 nt, Homo sapiens
agaagagcgggaagacggaaccgagccaggacccgaaaagccagcaagcgagaccaacaccaacacga

SEQ ID NO: 81818 - RNA, 78 nt, Homo sapiens
agccggccgcccacccacaccagcggacggcgagggccccccgccgggggggcacgagaagccgccgagagacccgcc

SEQ ID NO: 81819 - RNA, 91 nt, Homo sapiens
cgcgaccggcgaggcccaccaagccagggccgagaaaaggggccagcgagccggacgccgggaaggaagaacagccagacccacccccacc

SEQ ID NO: 81820 - RNA, 77 nt, Homo sapiens
aggagccgccgcgccccgcgcgcgggaagcagcaccaagcacggccaacgccggcacaggacagacaccccaaacaa

SEQ ID NO: 81821 - RNA, 108 nt, Homo sapiens
cgccaccagcgaccccagccggaagccgcggacagccgggccgaacgcggaaaaggaccacccgcacccaggggacgcacggcccaaccccgagcaaggacgcccacc

SEQ ID NO: 81822 - RNA, 66 nt, Homo sapiens
agaagaagccaaaagcaccgaacaccacaccccaaaagcgcgccgccgcaacaggggcaagagagg

SEQ ID NO: 81823 - RNA, 73 nt, Homo sapiens
agccgcacacccggcaggcaccaaagcaggccggcacaagaggcaaaaaaccaagaaagggcacaaagagcaa

SEQ ID NO: 81824 - RNA, 84 nt, Homo sapiens
cgcccgcagaaaaagaggcccccccccccgcgacgagaagccagccaaaggcaggacaaaaaacgaaggccgaagaaaaaacca

SEQ ID NO: 81825 - RNA, 74 nt, Homo sapiens
gaagccagaagagccgaggcagcagagcggggacgggaaagagggcagaagcagcaagaaaaggccaagagaga

SEQ ID NO: 81826 - RNA, 88 nt, Homo sapiens
ggcccgccccgcggaagccgccgggccaggccaaggagggacagggcgccggggaagcgggagaacaaccgcaacgaacaaacaggag

SEQ ID NO: 81827 - RNA, 79 nt, Homo sapiens
caccagggaagaggaagcagaaaacagcagaacaagaagagaagggcaaaaacagggaacgccgcagaaagaagaaggg

SEQ ID NO: 81828 - RNA, 67 nt, Homo sapiens
ccgaccagggcaacaccaaaaacaaaacgaaccaggacggcaagagcccgcgggcgcccaggggggc

SEQ ID NO: 81829 - RNA, 108 nt, Homo sapiens
cggggccgggcggcaccgcgggcgcaagcgcaaccgcgggggcggggacggcgccgagagccggcacagccacaccgagaagaccggcccaagaaccccaccgcccga

SEQ ID NO: 81830 - RNA, 59 nt, Homo sapiens
ggcgacgccagaggaggaaaggaagacaagcggagaagcggaggagaccaaggaggcca

SEQ ID NO: 81831 - RNA, 83 nt, Homo sapiens
aagacgcgagaagccacacggacgaaggagacgcaggagggagagcagccagaggaagaagaggaccaccgcacaaaaagccc

SEQ ID NO: 81832 - RNA, 41 nt, Homo sapiens
aaccagaagaaaaccgaaccgaggaaagaccacagcaagac

SEQ ID NO: 81833 - RNA, 75 nt, Homo sapiens
ccccaaagccacggcggcgaggaccggggacaagccaccgggccaagcacaacaccagagggcagcaggagcgca

SEQ ID NO: 81834 - RNA, 56 nt, Homo sapiens
cagaagcacaaggacagagcacccaccacaggagccacacccgggaaacacaccca

SEQ ID NO: 81835 - RNA, 70 nt, Homo sapiens
ccaccaccccccgagcagacccaggcagggggccaccggagaccgcgacagccccaaagcgggaagccgg

SEQ ID NO: 81836 - RNA, 30 nt, Homo sapiens
acaaaaaaggaagcgaaaaccgagaggaaa

SEQ ID NO: 81837 - RNA, 76 nt, Homo sapiens
cacggagccgggagcaccgacaccccgcagcggccccgccccgacgggcacaacccaagccaacagcaggcagggg

SEQ ID NO: 81838 - RNA, 85 nt, Homo sapiens
cggccgagcgaggaggagcggacaagaagacaaccggcgaacggcgcagggagaacacagacagaggccagcaaggacagcagca

SEQ ID NO: 81839 - RNA, 81 nt, Homo sapiens
cgcccaagcgacagcgcagaggggcaggagccgggagccaccgcgaaggggcgggccccggccagggcccaggcagccggg

SEQ ID NO: 81840 - RNA, 74 nt, Homo sapiens
aaaagaagggcgcccggaaaggcgccgaagagagaggaccgcgcagacgcgcaggacggagcggggccaggcgg

SEQ ID NO: 81841 - RNA, 71 nt, Homo sapiens
gagaggccgggcccagcgccacggcgaggaaggcggcccagaggagagggaaggcgcgcgcagaaccaaca

SEQ ID NO: 81842 - RNA, 73 nt, Homo sapiens
cagcgcaagccgcggcgccccgaccccagacagacccccgaagcaggggacgaaggccacaggcacgcgggca

SEQ ID NO: 81843 - RNA, 71 nt, Homo sapiens
gccagcagacccgaggaagcgcgacccaggaccacaccagggcaggagggaacccggcgcaaccgcaccca

SEQ ID NO: 81844 - RNA, 68 nt, Homo sapiens
gaccaggggcacaaaaacgcagccaaagcgaaaagcagggaccgcaaaagaaggaaaaggcaaagaaa

SEQ ID NO: 81845 - RNA, 61 nt, Homo sapiens
aaacaaagccgcgagaggaccccccacaaaggggaaagaaaaaaacagaaaccagggaaca

SEQ ID NO: 81846 - RNA, 63 nt, Homo sapiens
caggggaaacccgcgagcaccgaggccagagagaaccccacccaagagacaaagaccaacgag

SEQ ID NO: 81847 - RNA, 78 nt, Homo sapiens
gcaggggcagcaaccccccgcgcccccgcccccggggacccccagaagaaggcggaaacagaaacccaacccaagcca

SEQ ID NO: 81848 - RNA, 87 nt, Homo sapiens
gccaggaggggcccagcccggccaggaggcggcggaaaaagccggcaggcgcccgagcacgccaaccccaaccccacggacagcgcc

SEQ ID NO: 81849 - RNA, 79 nt, Homo sapiens
acagcaccggggacaaaaccaagaaaaaaccgagccagccagcaggaaaacagcagacccgagccccaaagacagaaaa

SEQ ID NO: 81850 - RNA, 114 nt, Homo sapiens
ccgccgccgccgcccagagacgcgagcccgccgccgccgccaccacccacccggacacagggcgaaccgaccaagaacaacacccagagggccaggagaaggcgaagagagcag

SEQ ID NO: 81851 - RNA, 62 nt, Homo sapiens
cgacggcgacaccaacggaggccggagggggcaggcaagccgcgcgcagggagccggcagga

SEQ ID NO: 81852 - RNA, 93 nt, Homo sapiens
ccaccaggccgcaggcacccgagaacaacaaccccccaggcaaaaaagccacggagaccagaccgccgccaaccgagcagagaccccaacaga

SEQ ID NO: 81853 - RNA, 77 nt, Homo sapiens
ggaggccaccgaaggcacggacagggacagaccagggacacaacgggaaaccggaccggggacgagcagccaaaggc

SEQ ID NO: 81854 - RNA, 59 nt, Homo sapiens
cggcggcgcccagcgggaccaagagccacggcaaagccccccgcccccagggaacggcc

SEQ ID NO: 81855 - RNA, 86 nt, Homo sapiens
ccaaccagcgaagagcgacaagccgcggcagccgcggaccaccgccgccaggacccgggaaaaggagaagagaaggaagccaagga

SEQ ID NO: 81856 - RNA, 74 nt, Homo sapiens
gggcccgcaggaaggacggaccaggggcaggggcacaaaaccaggggaaagaggaagaaaccagcaccgggacc

SEQ ID NO: 81857 - RNA, 84 nt, Homo sapiens
cgcacccacaagccaggcaagaggaggaacgacgagaagagaggaagagagagacgcaacggagaggaagaacaaagaggcgcc

SEQ ID NO: 81858 - RNA, 70 nt, Homo sapiens
gccaaggacgaaagaagacagagaagcaaagaagcagaggaggcaaaaggggagaaaagagcgaaagaac

SEQ ID NO: 81859 - RNA, 74 nt, Homo sapiens
cggaagaggcggggagcggccccagcgcagaacggagacggaagggaccagccagagagaagcaacaaccaggg

SEQ ID NO: 81860 - RNA, 81 nt, Homo sapiens
aacagaccaccaacccacaacgcccccagcacagcgccccaccccagcccccaacccccagaaaagacgcagagcccagag

SEQ ID NO: 81861 - RNA, 73 nt, Homo sapiens
gcccgggaagagagcgaggagacaagagcaagcaagaaaaaggggcagaacagcgacccacaagcaaggagaa

SEQ ID NO: 81862 - RNA, 72 nt, Homo sapiens
ggcgagagccgcgggccgggcaaagagaggagccaagcccaacgggacgggaaaacggccacagccaacgac

SEQ ID NO: 81863 - RNA, 74 nt, Homo sapiens
cagccggaaaaggagcaccccaggcgagcagcaggcacaccgcagcaaggggcagaacaagaagggcaaccagg

SEQ ID NO: 81864 - RNA, 62 nt, Homo sapiens
aacgaaccaggacggcaaggaccaagaaaggcccagggaccaaagcccggacaaggcccgag

SEQ ID NO: 81865 - RNA, 70 nt, Homo sapiens
cggagggggaccacacagccagaacagcggacgccacacccaagagaagcccgaggaagaggcaaagcag

SEQ ID NO: 81866 - RNA, 81 nt, Homo sapiens
cagcccgaaacccgacaggaaggaaggaaccaagcacccaggaaaaccgccagaacagcccaagcccaagagagccccaaa

SEQ ID NO: 81867 - RNA, 74 nt, Homo sapiens
aaacaaggacccgaaagcacacaaacgaaggacaaaacaggcaagcacgggcacaggcggaagaccccaccccc

SEQ ID NO: 81868 - RNA, 52 nt, Homo sapiens
cgaaggaccaccaaccaaacaaaggcagaaccagaaggagcccgagccacgc

SEQ ID NO: 81869 - RNA, 80 nt, Homo sapiens
aaagagccagaggggagacacgccaaagccccaagggcacagaccaagacgccagaccaaaagagcacaaaaccaacggg

SEQ ID NO: 81870 - RNA, 87 nt, Homo sapiens
caccggcaaagaggggcagaacccggccccaaggacaagcaaaagaggcggcaaggcagcccaggcaaagaagaaaggcgagggcca

SEQ ID NO: 81871 - RNA, 75 nt, Homo sapiens
agggccaaagaagggagagaggaagccggaagacgggaaaggaaacgagaacgggcagcgcagacgcaaagaaac

SEQ ID NO: 81872 - RNA, 80 nt, Homo sapiens
ggcgcccaaccaaccccgacaaaagagcccagcggaagcaccagagcaaaggaggagggaacacggaccaccagaggcca

SEQ ID NO: 81873 - RNA, 77 nt, Homo sapiens
agcgaaaaggcacagagagcccgcacgcgcgggccaggggcagaacaccagggcgcacaaaagagcacaaaagcacc

SEQ ID NO: 81874 - RNA, 81 nt, Homo sapiens
ggagagggaccggaacggcggcgacaaggggcccgaacagagggggggccgacgacgagccccgcgaggagcgcagcggag

SEQ ID NO: 81875 - RNA, 54 nt, Homo sapiens
caaagcacaagcagaagacggccacacagggacaggggccacggagagacgcgg

SEQ ID NO: 81876 - RNA, 79 nt, Homo sapiens
cagccggagacaggcgagaggaagacgacgaggaagagcccgccgaaggcggaacaccaaagaggacacaggccggagc

SEQ ID NO: 81877 - RNA, 39 nt, Homo sapiens
gcagcaagcaccgagaaggaaaaagaggccacagaaggc

SEQ ID NO: 81878 - RNA, 84 nt, Homo sapiens
cggagccaggggaggcggacgggacgggagggcgacagcgggcgggcccggaagaggccgcccagggaggccaagccaagagcc

SEQ ID NO: 81879 - RNA, 59 nt, Homo sapiens
cccacgaacgcccaccccccgaacccagccgcaccggccccccaggccacccaggacca

SEQ ID NO: 81880 - RNA, 73 nt, Homo sapiens
agacgcggcggcgcggcgccggcggagggaagaagacggcgaagcaccaacgccaagggggacccgaagcccg

SEQ ID NO: 81881 - RNA, 78 nt, Homo sapiens
gaaggagggccggcagcgcccgcggagacggaagaggacgagaacccccgcgaaccagaggaacccagcgagcgagag

SEQ ID NO: 81882 - RNA, 67 nt, Homo sapiens
gaagaagcaggagcgacaaacgggaaaaagaaagaagcgaagccaggagggagaagggaagccagag

SEQ ID NO: 81883 - RNA, 83 nt, Homo sapiens
accgcccgggaacaagaaacccagagggcagccaaagcgcaaagcacagaaaaggaagagcaccgagacaaccaagcaagggc

SEQ ID NO: 81884 - RNA, 36 nt, Homo sapiens
gaccgcagcgagggaccagcagagacggggcaccgg

SEQ ID NO: 81885 - RNA, 66 nt, Homo sapiens
caggaagcggagcaggaaaaggaagcggaagagaagaccggcaacaagaaaaaaagccagaaacgc

SEQ ID NO: 81886 - RNA, 80 nt, Homo sapiens
caggacgccaagaggagacagcagggcagccccgggcaaaagccgagaaaccggggagagagagccaagccaaccacaaa

SEQ ID NO: 81887 - RNA, 55 nt, Homo sapiens
aggggccccaagagcacagaccagcagccgccaaaggaaccaagaacagagacca

SEQ ID NO: 81888 - RNA, 78 nt, Homo sapiens
agccagaaaaaaggagaaaagcaaacaaacgggggacaacccaagagaagaagcgcgagagaaagccaacccagcgaa

SEQ ID NO: 81889 - RNA, 81 nt, Homo sapiens
gcgcgggaggggcacaaagagaagacggcccagcagagcacccaaccagcgggaacacagcgccgcccccggccaaaggaa

SEQ ID NO: 81890 - RNA, 62 nt, Homo sapiens
acgcaccgcaggcagacaaaagggccaaagaagggagagagcgggcgagcaagaacaagccg

SEQ ID NO: 81891 - RNA, 80 nt, Homo sapiens
ggagcccagaggcaagaaggggagaccggagaagcggagggaacgaagcgcccaccccgagcccacccccacccgaagag

SEQ ID NO: 81892 - RNA, 66 nt, Homo sapiens
gaagggcccaacaacacgcagcgaacgccacacaggaacgagaaaggagaagcggggcgagacaac

SEQ ID NO: 81893 - RNA, 61 nt, Homo sapiens
ccaagagccgaaaaggcagagggaaccaaaaaaaacagacaagaaggaacacaagggacaa

SEQ ID NO: 81894 - RNA, 71 nt, Homo sapiens
cgaaaaagcgggaacgcaggacccaaagcgcggcccggcagcaaggcgagaagaaagaggccagacaggag

SEQ ID NO: 81895 - RNA, 73 nt, Homo sapiens
acacgaccacaagccacaggcacccagggaagagcgggccaacaggcgcgcacagacggccacagaagcccag

SEQ ID NO: 81896 - RNA, 85 nt, Homo sapiens
ccaggccgggagcgcacaaggaccgcaagcgcaggaccgagcccaccgcacgggcagcagaacgagggcgggcccgcccgcaccg

SEQ ID NO: 81897 - RNA, 38 nt, Homo sapiens
gaaacaaaggggacacgggccgcacaacaaaaaagaac

SEQ ID NO: 81898 - RNA, 84 nt, Homo sapiens
ggcgacccaagacacccagagagggacagcacacgggggcaccgccaggagaacaagaccaggcggaagccagaggacccgggc

SEQ ID NO: 81899 - RNA, 36 nt, Homo sapiens
gaccgaaaagacggggaacggcaacgacagaagcac

SEQ ID NO: 81900 - RNA, 70 nt, Homo sapiens
agagcagacgaagaccaacgaaagaaaacacacacacacaaagaggacggggacgggccccaggacgagg

SEQ ID NO: 81901 - RNA, 89 nt, Homo sapiens
cagcaaccagaagcacgacaggaggcacgacccaccggagaacgcagcgagcaagaacaagccaggaggcggagaaaacggcacaggca

SEQ ID NO: 81902 - RNA, 65 nt, Homo sapiens
cagcacaagacgccgccccagcggacacaaaccaggggacagcccagaccaaaccccagacaaaa

SEQ ID NO: 81903 - RNA, 73 nt, Homo sapiens
aaagacgaaggggccccagagccaaggaggaaggggccggaacacagacagcaggcaaagcccccgacagggg

SEQ ID NO: 81904 - RNA, 107 nt, Homo sapiens
cgccaacgcggcccaccagggcgcacgggacccgcccaagagccccaaaaacaccagagacaagaggggagcagcaggaacgcccccgccagaggcagggaggaaag

SEQ ID NO: 81905 - RNA, 71 nt, Homo sapiens
gcggaaccgcacgcagagaaacaacccccagccacaacgcgaaccgggcggacgaaggaggcggcaacagg

SEQ ID NO: 81906 - RNA, 78 nt, Homo sapiens
ggcgggagccggcagccgacggcaaagggcgggggcaaagcggagaccggagaggagccaagcccaacgggacgggaa

SEQ ID NO: 81907 - RNA, 60 nt, Homo sapiens
aagacagcagcgaacaagaaggggacacaggcaaaacggacaaagaccgcaaaaagaccc

SEQ ID NO: 81908 - RNA, 78 nt, Homo sapiens
ggacgagcccgggcgccagggcaagggaacacagccgcacccgggcggccagcgggggcaggcccccagccagcccgg

SEQ ID NO: 81909 - RNA, 74 nt, Homo sapiens
ggggcggaaggggccagcggagacagcaagcaggcccgaccacgaagaagaggacaggggacgcgcggaaaacg

SEQ ID NO: 81910 - RNA, 71 nt, Homo sapiens
aaagagaagagaagaaacccagcgaaggagagaaggcagaaacaaaaaagggagagaaaaagcccggcggg

SEQ ID NO: 81911 - RNA, 79 nt, Homo sapiens
cgggccaacgcacccgcagccaggagcgcgcgcacgaccggcgcccggacacccgaggggggggcgagcaccaaagcca

SEQ ID NO: 81912 - RNA, 68 nt, Homo sapiens
ccgccagcagcacgggaggccgcccgggacaagagaaaaaaagggcgggcgaacaaaaagagcagagg

SEQ ID NO: 81913 - RNA, 64 nt, Homo sapiens
aggaacgcaacaaaacgacacaaaaggagcagagacggagcaacagcgagcaacaggcaacgaa

SEQ ID NO: 81914 - RNA, 74 nt, Homo sapiens
gcggagacagagcaagaaaagcccgggagcagaagggaggcccaagacccacaacaaaaggacgaaaggggcaa

SEQ ID NO: 81915 - RNA, 71 nt, Homo sapiens
acgcaacacagaccgccaagagccgcgcgcgaccaccggcaacacccgcccagcccaccgccggccagccc

SEQ ID NO: 81916 - RNA, 79 nt, Homo sapiens
gacccccccccggaggcggcgggcggaggcggcgggaggagagaccagcagcaaacccacgcggcgcaccgcacaccag

SEQ ID NO: 81917 - RNA, 71 nt, Homo sapiens
cgcccgaggcgaggaggagcgcggcgggaaagaagaaagcaccccgcaaaagaagggaaagaaccagcacc

SEQ ID NO: 81918 - RNA, 63 nt, Homo sapiens
agccccaggggccaggacccacaggcaagagacagcacgcacgccgagccaggaccaccagag

SEQ ID NO: 81919 - RNA, 56 nt, Homo sapiens
ggaagagcccagcacaaggaaggggccgcaaggccaggcgcgcagaggcacccaac

SEQ ID NO: 81920 - RNA, 70 nt, Homo sapiens
caagaggcgcaaagaaggaacgggcgcaccacgccaccccgccacgagagcaggaaacggaacgcccggg

SEQ ID NO: 81921 - RNA, 70 nt, Homo sapiens
ggcgcggggcagaggacacacggccagaacacacagcaggacgaaagagacaaaagccacagagaacaca

SEQ ID NO: 81922 - RNA, 89 nt, Homo sapiens
aagacccgccacaagcaacgcgggaagagaagggcaggcacgaggggaaaccaggaacagccagcaagaggagacaaccagcaacaaca

SEQ ID NO: 81923 - RNA, 90 nt, Homo sapiens
ccccgacccccgaacccccagcccaaacccggaaacccagcggcccagccggggcggagaacggaaaagcaccaggaagcagagaggacc

SEQ ID NO: 81924 - RNA, 77 nt, Homo sapiens
cgagaagcccgacacacaggaagacacgccaagggggaggaggaacagagacagacccgggggcccccaaggagagg

SEQ ID NO: 81925 - RNA, 72 nt, Homo sapiens
caccaccccccccgccccaaagcgcgggaaaagggcccaaccggagagcaaaaaacccacgaagaagcgaca

SEQ ID NO: 81926 - RNA, 77 nt, Homo sapiens
agcggagacgcgagcgcccagcacggagcggaggaagcacaagggcggacccgacccgagaggaggcgccagcgaga

SEQ ID NO: 81927 - RNA, 53 nt, Homo sapiens
gcgagcagaagaggggcccagagggcaggagaggacaaaccggcgaccacaca

SEQ ID NO: 81928 - RNA, 78 nt, Homo sapiens
cccgaaggaacaaacagaaaaggagagagagagagcgagaaaccaaagaaggagaagagaagaacaagccaaacacag

SEQ ID NO: 81929 - RNA, 65 nt, Homo sapiens
cgcgaccgcccccgcccccgccggacccagcaagccgagccacacgccagacaccaggggaaggg

SEQ ID NO: 81930 - RNA, 77 nt, Homo sapiens
aacacagagggaagagaaagcaaacgagcagggcaagcccagaaccgggacaacccagcaaacaggccagacccgac

SEQ ID NO: 81931 - RNA, 71 nt, Homo sapiens
ccggggggacgaccacaagaccggggaaaccccccaggcaagaggcgcaggaccgggaagaccaacaaacg

SEQ ID NO: 81932 - RNA, 71 nt, Homo sapiens
gggacgagcggagaggagcgagcggccgccgcgggcccgggcaggccccccgggccgggcacgggcgccag

SEQ ID NO: 81933 - RNA, 76 nt, Homo sapiens
gggcgagagcccccaccccagacaggggaacagggcacagcccacccagcggcaccggcccggcggccccgccacc

SEQ ID NO: 81934 - RNA, 77 nt, Homo sapiens
gggcggaacacccgccaaagcagagaaaagccgcccgcacagggggcacgaagaaagcaggacgagcaaggacagga

SEQ ID NO: 81935 - RNA, 97 nt, Homo sapiens
caagaccgcaaggccgcccgggaacgcgacgcgagagaaggacccacggcgcgcgaaggacccaaagacaggaccacgcaccagcagagaaggaaag

SEQ ID NO: 81936 - RNA, 83 nt, Homo sapiens
cggcccccccaggacaacccagaggcaacaaaggcgagagccacgcgcccaggcgcaggcaggggccacacgcgcacgcaacc

SEQ ID NO: 81937 - RNA, 68 nt, Homo sapiens
acaggcaaaggaagaagccagcgagcggggcgcgcggccccggagaaaaacggagggaacgcccggag

SEQ ID NO: 81938 - RNA, 59 nt, Homo sapiens
ccagagaaggcccgaggagagaacaggcgcgcgcagaaccaacaaaagcgaaggaaaag

SEQ ID NO: 81939 - RNA, 78 nt, Homo sapiens
cggcggcggcaggcgagcccggaccgcaggagcacagcaagcgggagcaggcagaccaaaggaacagaagccagggcc

SEQ ID NO: 81940 - RNA, 80 nt, Homo sapiens
ccggcccccgcggggcaggggcgcgcgagccgccgggcgcccagacgggcccaggagcacaagacagggggaaaacggga

SEQ ID NO: 81941 - RNA, 65 nt, Homo sapiens
gggacgccagcaccagcaggagcagccaaccagcagcagccacaggagagccgaaaaccagcccc

SEQ ID NO: 81942 - RNA, 75 nt, Homo sapiens
ggaggagaacccggagcagccaggcacgaaaggagcaagaaagcaaaccggcacaaagggccaccacaaacaagc

SEQ ID NO: 81943 - RNA, 74 nt, Homo sapiens
cgcgcaaaggagaaccccacaccagaacccaggggaggcaagcaggggggcaaaggaaagaaggcagaaaggga

SEQ ID NO: 81944 - RNA, 69 nt, Homo sapiens
aaaagacagcaacagacggccaacacaacaaaaccaagaagacaggagacaaaccagcaggcagaaaac

SEQ ID NO: 81945 - RNA, 75 nt, Homo sapiens
gggaaaaagcgggagaacgggaagcaggaacagaccacgccgacccaagaaaaccccggcaaccccccagagagc

SEQ ID NO: 81946 - RNA, 80 nt, Homo sapiens
aagagccgaccacaaggggaggacaaccgcccgggaccagaggagcaagacaacaaaagggaaaaacggaacagagagaa

SEQ ID NO: 81947 - RNA, 85 nt, Homo sapiens
cgccgccaccgcgaacaggagcccgacagaaggaaaagaggcggaccacacggggagcaccgagagagaaagagaacggccccgg

SEQ ID NO: 81948 - RNA, 105 nt, Homo sapiens
gccggacagccacaaagacccccagacacacacacccaacccaaaccaagcaccagcccgaagaagccgggcagaccaggcagcagcggaaaggagcagggaagg

SEQ ID NO: 81949 - RNA, 75 nt, Homo sapiens
cgggacccgccgaggccgcggcgccaaaccgagggcggagaacggaaaagcaccaggaagcagagaggaccgcag

SEQ ID NO: 81950 - RNA, 72 nt, Homo sapiens
cgcggcgcggggacggcggcaaccgaggggaccccaggccggggcccccaagaagggaacaggcacgcccca

SEQ ID NO: 81951 - RNA, 76 nt, Homo sapiens
acagccaccgcggggccgcccagacggaaggcacgagggccgacacgccccccaacgcagacacccccggaggacc

SEQ ID NO: 81952 - RNA, 68 nt, Homo sapiens
cccccgcagcgcacgcgggcgggggggacgaccaccagccaggccggggacaaacaggcaaccgacgg

SEQ ID NO: 81953 - RNA, 83 nt, Homo sapiens
gcggcgccggcggcgggacgaagagggacgggcccgcggcgagcgagcccgagcaccagaaaggagcaggcaggaagacagaa

SEQ ID NO: 81954 - RNA, 56 nt, Homo sapiens
ggcgcagagagaagacagcaccggcaggacaggagagacaacggaggcaagaaaga

SEQ ID NO: 81955 - RNA, 69 nt, Homo sapiens
cggaaaccgccaaaaccccccacacaccccgccgggaaaggcacaaggaagaagcggaaggggcagggg

SEQ ID NO: 81956 - RNA, 79 nt, Homo sapiens
ccacacccaggcagcaagggcaccgcgagcaaggccccaaccacggagccaggggaaccgcccaccaccaccaccagga

SEQ ID NO: 81957 - RNA, 61 nt, Homo sapiens
aggcggggcggaggcggggcgcgggcgggaccgggcggagaacggaaaagcaccaggaagc

SEQ ID NO: 81958 - RNA, 75 nt, Homo sapiens
ccaaccggaccagccacaaagccggaggcagcagaacagaagagcggacggacaagagaaagaaagagaagagag

SEQ ID NO: 81959 - RNA, 60 nt, Homo sapiens
ccacccgcggcgaacagaaggaaagggagaagaggacagaaaaagaccagacgcggaaaa

SEQ ID NO: 81960 - RNA, 89 nt, Homo sapiens
cccggacggcgggagcgcgagggaggcacgagaagcccggcgacggaggaacgcaggcgcgccaggaaccagcaccagacagaagacgc

SEQ ID NO: 81961 - RNA, 50 nt, Homo sapiens
aggggcagaaaaagcacacaccacgcaacggccaggacacacagcaacga

SEQ ID NO: 81962 - RNA, 63 nt, Homo sapiens
cccccgggaccgaggccaacccggcacgagaagagaagcccagagcaaaacaccccaaaccag

SEQ ID NO: 81963 - RNA, 54 nt, Homo sapiens
gggcggggacacgggccgcgcgaaaaaggcaaagcagaagacgcaagggcacgc

SEQ ID NO: 81964 - RNA, 73 nt, Homo sapiens
ggccggaagggggcggccacgacgcaagaagaagcgcggaccccgggagccagcagaaaacaacaagaagagg

SEQ ID NO: 81965 - RNA, 64 nt, Homo sapiens
gggaaacgcggagccaggccgagagccagagacgcgcacgaaacgacgaagaggcccgaggaca

SEQ ID NO: 81966 - RNA, 78 nt, Homo sapiens
gggcagacggacaagagcgcggaacaggacgccccgaacccggaagcgccgaacaaaaccggaggcccgggccacacg

SEQ ID NO: 81967 - RNA, 63 nt, Homo sapiens
gagaagcgaaaagaaacccaagaaggccgggcccgggaggagcaggggcagaggggagaaccc

SEQ ID NO: 81968 - RNA, 86 nt, Homo sapiens
gaagaacccacgcgcgacgaaaaaggcagcagcgccccgagccccggcggcaacaccccccaacgagggagccgggaggccccacc

SEQ ID NO: 81969 - RNA, 52 nt, Homo sapiens
gcagagaaagagcaccccgcccccgacccagagacggccggcaacaagcgag

SEQ ID NO: 81970 - RNA, 68 nt, Homo sapiens
gagaaaggaaggaaaaccgacgagcccacaagacccggccccggccccacacaacggcaccccaccag

SEQ ID NO: 81971 - RNA, 52 nt, Homo sapiens
acaaaaacagaacagggacaccaggccaaaggcgagcagacccacaacaggc

SEQ ID NO: 81972 - RNA, 69 nt, Homo sapiens
caacagaacagcaaaagcgaagagacaggggaaacgaacaagaaagaagagcaacaggccacaaaggac

SEQ ID NO: 81973 - RNA, 85 nt, Homo sapiens
acaagcgagcccaacacgccccgaggacgggacggccccccagagaaggcaggcacacgggcagaccgggcgagccccccagccc

SEQ ID NO: 81974 - RNA, 75 nt, Homo sapiens
gcgggaagagacaagcgaccgccacagacacgagagggcgaagggcgccaacgcggaaaaacaagggcaacaccc

SEQ ID NO: 81975 - RNA, 80 nt, Homo sapiens
ggcggggggccgaaccggggagccgacagagaacagaaacgggaccacagaggagcacagcaaaaaggaagccgaaaagg

SEQ ID NO: 81976 - RNA, 72 nt, Homo sapiens
agggacccccgggaagaagacacagaaaacagacccacagcggggccgggccccgaccacccagagaaagga

SEQ ID NO: 81977 - RNA, 76 nt, Homo sapiens
aaaacgcacggaaagacccagaaagccaagacaaagaggacagggcacacgggccgccccaaggaaggagagaaca

SEQ ID NO: 81978 - RNA, 80 nt, Homo sapiens
ggcgggagagccccgcagaagacgccgacgaggggacaccagcagcgccgccggaccaccgggcagcagaacggagcaca

SEQ ID NO: 81979 - RNA, 82 nt, Homo sapiens
ccccggcgcggaccccgcggcgccgccgcccgcagccccgagaccgcaggagaccggacgcgggacacaagaaaaaacccgg

SEQ ID NO: 81980 - RNA, 72 nt, Homo sapiens
ggggaagagacccaaacgccaacagaaacgcaccaccaagaacgggcgcaggaggaggcaagacgggcagac

SEQ ID NO: 81981 - RNA, 117 nt, Homo sapiens
gccgaccgagcgcaacaaagcgagcggcgcgcgccaggaacgaagaagcccgagcaagcggagacagacccagcacggaccccccccccagccgggcgaggccccgaaacgcagcgg

SEQ ID NO: 81982 - RNA, 39 nt, Homo sapiens
gcacacgggcgcaggggggaggaaaacccaccaccacga

SEQ ID NO: 81983 - RNA, 71 nt, Homo sapiens
gaaaggaagaagggaagccggaagaagacaaagcgccgcgaaacacaacgacgaaagaaagcagggaacgg

SEQ ID NO: 81984 - RNA, 78 nt, Homo sapiens
gggagccggcgcgcgggcggggaggcgaggccggacgcacccggggggcccagacagcacagagggccaagccagaac

SEQ ID NO: 81985 - RNA, 83 nt, Homo sapiens
gcccgggccggggagcaagcgccagggcggcacccaccccccgagcccgcccgccggccccagcccccaccagcagccccggg

SEQ ID NO: 81986 - RNA, 75 nt, Homo sapiens
gccgggagcgcgggccccggacagaacgaccgcccggccagcccaccccccgacgaaggccacggggagacacgc

SEQ ID NO: 81987 - RNA, 67 nt, Homo sapiens
gaaggcaacaagaagaaggagagagcaaacggagcgagcacagacagccccgcggcgcagccccgac

SEQ ID NO: 81988 - RNA, 86 nt, Homo sapiens
ggggccgcggggggccgggggcgcgccacgggccagagggcggccacccggagccagcggagggacagggcggcacggccccacca

SEQ ID NO: 81989 - RNA, 68 nt, Homo sapiens
agcagggaaacgcagacagccaggcccccacgcgaagcaccgagccaggaagggagagaccagcagcc

SEQ ID NO: 81990 - RNA, 80 nt, Homo sapiens
ggagccggagaacggccaggcggccccgagcggaacggagaaagcgaggggggagaggcaccagcaacagaccaaccgca

SEQ ID NO: 81991 - RNA, 80 nt, Homo sapiens
gggaacacaagaggaaacagagaaaaagcggggaaaacaaaaaaaagaaggagggaagagggggccaggaccaggcccca

SEQ ID NO: 81992 - RNA, 81 nt, Homo sapiens
ccggagcccgccgcggcccccggcacaggcagcggaggagcccgaccgacccgaaaccaagggagggaaccgggaacggcg

SEQ ID NO: 81993 - RNA, 79 nt, Homo sapiens
cgcaccccggacccgaagccgggaagaaggagacccaacaccccggccagacgggccaccaggccggcgccccacgccc

SEQ ID NO: 81994 - RNA, 74 nt, Homo sapiens
cgccaaaggaaccagaggaacagaacgagaggcccagaccggaggagaacaggcagagaacaggaccgaaaagg

SEQ ID NO: 81995 - RNA, 69 nt, Homo sapiens
gaaggcggaaggcccacaccccacccagggacgcaacacagcaaccaaccccaggcaaaagaccggaca

SEQ ID NO: 81996 - RNA, 79 nt, Homo sapiens
cccggacacgggcaggcagcagcagcagaggaaaaaagagaccgagagaaagcagcagaaaggggggagagaaaaagga

SEQ ID NO: 81997 - RNA, 68 nt, Homo sapiens
acgcgccgaaacaccaaaagcgggggaagaagagaggacgcggagaaggcacaggagcaaggggagag

SEQ ID NO: 81998 - RNA, 87 nt, Homo sapiens
gaggagcgggcaccaccggaaccgccgggggccgggcaagaagccccacaagcgcagagcagggagcgaggacaccaccaggggccg

SEQ ID NO: 81999 - RNA, 72 nt, Homo sapiens
aacaaaagaggccagcccccagagggaggccaccggaggcgaggcaagcagacccacacgccggcaaaaccg

SEQ ID NO: 82000 - RNA, 72 nt, Homo sapiens
aacccagcgcaccccaggcaacccaaacgaggacaccccgcgccagaaaagaagagagccagcaggaacaag

SEQ ID NO: 82001 - RNA, 71 nt, Homo sapiens
aaaggggacgaagacacgaagcagggagcgggaaacgcacaacagagaacagaaaagacccgcagacaacg

SEQ ID NO: 82002 - RNA, 84 nt, Homo sapiens
gagccccagagagacaagccccaaggagcccggccccacaccggcacacagccccacggcaggccacagcacagggagccgcac

SEQ ID NO: 82003 - RNA, 68 nt, Homo sapiens
gagcagaaggggccccgggagcggagacagaggacagaggagcagcaagagggacgagaacgacggga

SEQ ID NO: 82004 - RNA, 52 nt, Homo sapiens
ccaagagacagacaccgccccgagacgagaacccaggagaaacgagagggac

SEQ ID NO: 82005 - RNA, 84 nt, Homo sapiens
aagagaaacccggagggcgccggggccaaaacagaagaggcaaagcccagccacagcagcagcccagcagcaaacaaccaaaga

SEQ ID NO: 82006 - RNA, 76 nt, Homo sapiens
ggaagaggccaccgaccccaccgccacggcccaccgccgacggcacacgaaaggcacaagcgcccgacaccgagga

SEQ ID NO: 82007 - RNA, 93 nt, Homo sapiens
cgcgaaaaggccaagaggaacagaaaccgaagagaaaggccaacgagaacaagcacaggggagaagcagaccgcaccaggcgggaccccgaaa

SEQ ID NO: 82008 - RNA, 82 nt, Homo sapiens
ccacgcgcggaaggcagcgcccagcagcgcagaacaggccgcccgccgaagaaacacaagagcaagagaaacaacagaaagg

SEQ ID NO: 82009 - RNA, 72 nt, Homo sapiens
caacaaggcccccacgacaaggcagccaaagaaggagagccagccaggcggggcacaggggccagaccccac

SEQ ID NO: 82010 - RNA, 84 nt, Homo sapiens
accccgagggaggaagcaaacaccagagaggcggaagggagcccgccgaaggccccgcgaaacacaccaagcgaaaccagccag

SEQ ID NO: 82011 - RNA, 81 nt, Homo sapiens
cgccccgccaaccgcaaccagacgccagcgggacgaggaccgagaccgcggccgggaccgagggagaaggccggaacaacg

SEQ ID NO: 82012 - RNA, 101 nt, Homo sapiens
cgacaaggagcaggggcccgaaaaacggagacggagagggaaagacagggccaagacaacagcagcgagagagaaaagaaggaaggcaggacgggcaaggg

SEQ ID NO: 82013 - RNA, 79 nt, Homo sapiens
aaaaaaagggacagaaccaaagaaagaccacagcaagaccacgcccccagccgggggaccaggccgaacgacccggaca

SEQ ID NO: 82014 - RNA, 74 nt, Homo sapiens
gcgcgaagggccaaggaaaacacaaccccaaaggcaaccaagcaacaccaggcaggaggagagcgacacgcggg

SEQ ID NO: 82015 - RNA, 79 nt, Homo sapiens
ggaccgggcccccagggagccagcggaggaccccggcaggggaaggccaagaagaggagcacgaccccacccaggacac

SEQ ID NO: 82016 - RNA, 66 nt, Homo sapiens
ccgcccccaggagaaggagcgagcgcaacagccggcgagagagagcgacccgagcgggcagggaag

SEQ ID NO: 82017 - RNA, 79 nt, Homo sapiens
ggcagcccgaaaggagagacacggaacacaaggaagcaaaagcccagaaagcaaacaggaggaagaaaaaaacagggca

SEQ ID NO: 82018 - RNA, 75 nt, Homo sapiens
gacacacaggagagcggcgcagaaaaacaaaaggagccgggcgcccccaagcccacagcgaagaagggccacccc

SEQ ID NO: 82019 - RNA, 80 nt, Homo sapiens
cgggagccccacgggagaagcccaggaagacggccagggaaccaaacagcagagcagcagcagccagaaagacccagaga

SEQ ID NO: 82020 - RNA, 81 nt, Homo sapiens
ggccccacccggccgcccgcccagcgccgcccccggagggcccacgcagcgccggacaagcaagcccggacgggacacaga

SEQ ID NO: 82021 - RNA, 56 nt, Homo sapiens
gggggcgacaagggaccaacacgagcgacacaagacacccaagaagcccagcagac

SEQ ID NO: 82022 - RNA, 33 nt, Homo sapiens
acggcagcgacaccagacccggcgggcccccga

SEQ ID NO: 82023 - RNA, 66 nt, Homo sapiens
agaaacgggccgcgggccgggccggaaaggaagggccaggacaccaggaaacagaacgacagcccg

SEQ ID NO: 82024 - RNA, 74 nt, Homo sapiens
aagaaggcccggacacagcaaaccgggccacagggcaaacgaagaaaacgacccagccagaggacaaaggaccg

SEQ ID NO: 82025 - RNA, 73 nt, Homo sapiens
ggccgcacccgccccccgcgcccgccaccggccgccgcccggggcaacaggaaaacaacccagagaacccaaa

SEQ ID NO: 82026 - RNA, 66 nt, Homo sapiens
gggacgacacacacacggaggacccacaaagcaggaagggacaacaaacgagggaaagagggagcc

SEQ ID NO: 82027 - RNA, 115 nt, Homo sapiens
cccacccgacccggcaccacacgcagaacgggcggacgggcgcccagccagggagacaaggggcccagcccaaagaagcacagcagcagcagaggccgggggccgggaaaccgca

SEQ ID NO: 82028 - RNA, 78 nt, Homo sapiens
cgcccggaagccccggaccacacagaagccgagccgggaacccacagggaggggacaccgggcaggagggggccgcgc

SEQ ID NO: 82029 - RNA, 81 nt, Homo sapiens
gccggccagccggggggcacgcccgcccgggccgaaaggggagcaagaagaaagagcagggaggagggagcgacaggaaga

SEQ ID NO: 82030 - RNA, 76 nt, Homo sapiens
cgggcgagcccaggggcagccaccgccaggaccccagaaagaaaagaaggaggccagcgggacacacaaagaaaga

SEQ ID NO: 82031 - RNA, 88 nt, Homo sapiens
gaagcaggaaaggccggacaccaggggaccaaaagaacccagccaacccgcagagggaggggaggggcgagcggaggagagcggggcc

SEQ ID NO: 82032 - RNA, 76 nt, Homo sapiens
gcgccgccgcccgcggaagggagcccaagcgcagaggggggacacaccaccgggaacaagccgccgggccagggaa

SEQ ID NO: 82033 - RNA, 84 nt, Homo sapiens
ccacgacacccacggacgccacaggggcaagaggaggagagaagagaggaagcgagcagcacgggcaagcgggcagcgaagaga

SEQ ID NO: 82034 - RNA, 54 nt, Homo sapiens
ccgccagccccgggggccacgagcgggagcgagcggaaaggaggaaaagaacgg

SEQ ID NO: 82035 - RNA, 53 nt, Homo sapiens
accaagaaccagagggcgaacaggcgcagacgagggcgaaagaaccccaccgg

SEQ ID NO: 82036 - RNA, 75 nt, Homo sapiens
ggagagaaggaaagcaacgaggaagaacacagacaggacaaaccggcgaccacacacggggacgacggggaagcc

SEQ ID NO: 82037 - RNA, 94 nt, Homo sapiens
aaccagcagagcagacagacgccgccaaagacggcggcagagacaagacagggcacacaacgggcaggcccaccgcgcgcggaacccacagaaa

SEQ ID NO: 82038 - RNA, 82 nt, Homo sapiens
gccagcacgcacggacacccgagcacagagacgaagaggaccaggagcaaacagaagagggcacgccacgcacagcggcagc

SEQ ID NO: 82039 - RNA, 71 nt, Homo sapiens
cccgcgggcagaggggacaaccaacgcagggccgggccagccccacaaaggcagcaagcaaagacggagga

SEQ ID NO: 82040 - RNA, 80 nt, Homo sapiens
gcgccaagcccggccaaaaacccaggccggcaccggacccggaaaaccgcccacccagcggacaccaggacaccgagggc

SEQ ID NO: 82041 - RNA, 73 nt, Homo sapiens
aacaaacaggcaaggagcgccacggaaggagagcgcagacgagcagaggcgcagggcccagcggaaggccaca

SEQ ID NO: 82042 - RNA, 75 nt, Homo sapiens
ggacccggccccccaagcgaaaacaccgcaccgcgcgaccccagggaacaaggagagggaaaagcccagccaacc

SEQ ID NO: 82043 - RNA, 81 nt, Homo sapiens
ccgggaccaggcccgggggcggcggccacgccaaggacggcgcacggggcaacagccacacccggagcacccaccaaacac

SEQ ID NO: 82044 - RNA, 72 nt, Homo sapiens
ggccgggggccgccgggacccggccaccagcaagccgggacgggagaaagaacagacaagccgcaagaaccg

SEQ ID NO: 82045 - RNA, 38 nt, Homo sapiens
agaaacgccccaaagcagaacgaggagcccgccgcgcc

SEQ ID NO: 82046 - RNA, 105 nt, Homo sapiens
ggcaagaggagcagaacgggagagggagcacaggggcaacacagaagcagagcagaaaaaccgggggaaaaaaaaagaacaaacgccgccgaccagaacaagaga

SEQ ID NO: 82047 - RNA, 74 nt, Homo sapiens
aaaagaaaccaacaccgcaggcgaaaagccaggagcaaaagacgagcgcgacgccaccagcaacgaacccggca

SEQ ID NO: 82048 - RNA, 59 nt, Homo sapiens
gcggacaagcacgagggcgcgccgagacgcccgagggggccaaacgaaagcagaaggcc

SEQ ID NO: 82049 - RNA, 73 nt, Homo sapiens
ccgagcaaagaagcaaccagccagacccccagcaccccgggcagcggagaggccggcccggagcaggagcagc

SEQ ID NO: 82050 - RNA, 72 nt, Homo sapiens
gaacagcgcgacacaggagagaggaagagaagaggaagcaaaacggggggaagagcccagagcaacccagaa

SEQ ID NO: 82051 - RNA, 75 nt, Homo sapiens
gccgagcaggaggcgccacagaagggccaaaggcaaagcgggacaagccaaaacagcggacaaagcaccagaaaa

SEQ ID NO: 82052 - RNA, 77 nt, Homo sapiens
gcgcccccgcgcgggccacagcaaccaccccccagcagcccccccaccccccggggaacgaagagccggccgcgacc

SEQ ID NO: 82053 - RNA, 79 nt, Homo sapiens
cgaaagcggagagagcgggcgggcggccgggagacccacagacggcacaggagagggccaaaacgaaggagaagcccag

SEQ ID NO: 82054 - RNA, 58 nt, Homo sapiens
gggacaacaaaagagccacccaaggcaacagcaagagaaaagcccacagaagaggggc

SEQ ID NO: 82055 - RNA, 80 nt, Homo sapiens
cgggaccccagccccgccaagcgcggccgccgcccccgcccaggccacggaaccgcccagccccaagccccgccacggcg

SEQ ID NO: 82056 - RNA, 74 nt, Homo sapiens
cggcccagcccagcggcacggggcaagagcaggccagaaccagcacccggcgagaaggaacccagcccacgacg

SEQ ID NO: 82057 - RNA, 80 nt, Homo sapiens
ggcgccgggagccgcggcgagcgccccagccaggccgcgccggcaccccgagcggggacgagagccccggcacaaacgga

SEQ ID NO: 82058 - RNA, 86 nt, Homo sapiens
acccaagaacgccaagcgccaaaggcaaaaaggggaccaagaaaggcccagggaccaaagcccggacaaggcccgagcaccaggac

SEQ ID NO: 82059 - RNA, 80 nt, Homo sapiens
gagggaaccaaccgggaccccaagccaaagaacccacacaaggacaagggaacaagcacaaggaagagcccacagaaaag

SEQ ID NO: 82060 - RNA, 40 nt, Homo sapiens
ccccgagagcgggacgcagcgaagcaccaaggaaaggcca

SEQ ID NO: 82061 - RNA, 76 nt, Homo sapiens
gcagcccaggagaccagcaaagaaccaggaacaccacccgcaggagagagagaacccggcgagaggaagagagaga

SEQ ID NO: 82062 - RNA, 69 nt, Homo sapiens
accccaagcagccacaccgggccgcccgccccgcgcaagaacaagggggcgcaacagcccaggcagcac

SEQ ID NO: 82063 - RNA, 56 nt, Homo sapiens
ccaggcagacccgaccccagcggcccggccaacgcaacagggagcccacgcaagag

SEQ ID NO: 82064 - RNA, 86 nt, Homo sapiens
ccaaacgcagcgaacacaggcaggaggcgcaccgggggccccggcccccggccccccggcgccccccccggcccagcggcggggga

SEQ ID NO: 82065 - RNA, 71 nt, Homo sapiens
ggagaagggaaagacaccaggagaaaagcggcccagaacgaaacaaacaggcacacagggaagcgggacgg

SEQ ID NO: 82066 - RNA, 108 nt, Homo sapiens
gcccgccaggaagaggagagaaaagggccagggagagccggggacgacacacacacggagcaacaggaaggccgaagcccacgccaagcggacccaccaaagaagaaa

SEQ ID NO: 82067 - RNA, 71 nt, Homo sapiens
agaagaggccaaaaaggaaaaaaggaacccggacccccagaagaagaggggaacagaggacaccccgaaca

SEQ ID NO: 82068 - RNA, 66 nt, Homo sapiens
aagagggaacacaacaaggaagggacaacacgaccacccaaaacaggcacggggacaggaagagac

SEQ ID NO: 82069 - RNA, 79 nt, Homo sapiens
cgggacccgccaacgggggggcggaaagggccccaaccgggcacaccagagagacaaaggccagagagggaggcacgcc

SEQ ID NO: 82070 - RNA, 66 nt, Homo sapiens
cggaacacggaggcgggaaaggaccagcccacaaagaagcccccaggaacgacccaagccccacag

SEQ ID NO: 82071 - RNA, 75 nt, Homo sapiens
gagaccgagggaaaacacaaggaaggcagaaaaggaggacgggacaccgagggagccagagacaaccaggcgcgg

SEQ ID NO: 82072 - RNA, 72 nt, Homo sapiens
cagccgaccgcgcaccgccgccagccgccagcccagggacggagaggacccccagcaaggaccagaagggaa

SEQ ID NO: 82073 - RNA, 76 nt, Homo sapiens
agaagaagacaagagagaagccagagcagagagggcgaccgggaaggggaaagcccgaccaggggcgagagaagag

SEQ ID NO: 82074 - RNA, 88 nt, Homo sapiens
gggaacggggaggcggccgcggccccaaggagcggccgcgggcgacggccaaccgggcaaaggcgaaccgggagcgggcaaaggcgag

SEQ ID NO: 82075 - RNA, 82 nt, Homo sapiens
gaaaagcaaacaccaccagccgggccccagcaggagcacggagcaagcggcagagcggagagcagacaagaagccccgcccc

SEQ ID NO: 82076 - RNA, 70 nt, Homo sapiens
ggagacccaacaccacggacacaggagaacagccccccaagccgccgcccaccaacagacaaaccacccc

SEQ ID NO: 82077 - RNA, 55 nt, Homo sapiens
cgcgcagcgccaggagcaccgcggacgccccagggcacaccgcgcaccagcgaga

SEQ ID NO: 82078 - RNA, 76 nt, Homo sapiens
aacaaacacagaacaacccaccagaggagcggagcacgaacagcaacccgccaggaccacgcagacccaccgggag

SEQ ID NO: 82079 - RNA, 41 nt, Homo sapiens
gggcaaggcgcacaccgagacggacaacaggaagccaagcc

SEQ ID NO: 82080 - RNA, 71 nt, Homo sapiens
cagcgaacgcagggcaaggaccgcccacaaggcccagacgcgacaggccggaccagggagaaggcggcacg

SEQ ID NO: 82081 - RNA, 82 nt, Homo sapiens
ccaccagcccaaacggcggggaggacggcccgcgaacgcagcccaagcccccaggccacacaacgaggaggcacggggacca

SEQ ID NO: 82082 - RNA, 93 nt, Homo sapiens
acgcgaccgaggggacgccgcccgccgcccgccgcaggccacccgggaacggaggagggagccagcgggccggcaccggcacgaggagcgcac

SEQ ID NO: 82083 - RNA, 78 nt, Homo sapiens
ccggccaaaggacccgcgcaaaggcggagacgggcagcccaaagcccgaaggaggaaacaggacagaccggagacgca

SEQ ID NO: 82084 - RNA, 81 nt, Homo sapiens
gagccccgaccgggagaggagagcccccaggggagccggcggaagacagagcgggagccaccagcgccaaagggaagccag

SEQ ID NO: 82085 - RNA, 38 nt, Homo sapiens
agcaggagcccaccagcaggggcaggacaaagcgccca

SEQ ID NO: 82086 - RNA, 84 nt, Homo sapiens
ccgcagccggggaagggagcgcccaccagaggagcgaaagagagagacagccaaaggccgagacacagggcagaacggacaggc

SEQ ID NO: 82087 - RNA, 75 nt, Homo sapiens
aaagggccagacagaagccggacaggacaaaaggacacaacccacacaagaggagaagagaacaggccggcccac

SEQ ID NO: 82088 - RNA, 69 nt, Homo sapiens
gcgaaagagccagcaaaagggcacgagggagaggccgagaagaaacagggaacggagcccgcaagaaga

SEQ ID NO: 82089 - RNA, 81 nt, Homo sapiens
ggccaaccggcggcagcggagacaggagcaacacacgggccagggaagaggcgcggggggacaggccaccagagcaggacc

SEQ ID NO: 82090 - RNA, 76 nt, Homo sapiens
acagccaccagcaccagaagaacacagacacgacagccaggagacgggccccaagagcgaccgcagcacgggggca

SEQ ID NO: 82091 - RNA, 75 nt, Homo sapiens
cgcccgggagagcaagagagaacccaccgcaagagaccaaaggccaagagcaccgcagccaccagcccggaaccc

SEQ ID NO: 82092 - RNA, 66 nt, Homo sapiens
agagaggcaccgcggaacacaagagcgaggcgcgcaacagcggacgcggagacaccccgacccccc

SEQ ID NO: 82093 - RNA, 56 nt, Homo sapiens
caacagcacacacccaggggcaaaggggacccagaaagaagcacaaaacaaacgac

SEQ ID NO: 82094 - RNA, 85 nt, Homo sapiens
gccaggggaccaaagcagggcacagcgaaggaaagccagaggacacgaaggggaggaaaaccccccgcagaccaacggacccacc

SEQ ID NO: 82095 - RNA, 75 nt, Homo sapiens
caagcagcacaaagaccaacaggacgcccggcaagaggggagagcccggaacaggacagggggaggagaagccac

SEQ ID NO: 82096 - RNA, 75 nt, Homo sapiens
cggcgcgccgggcccgccggcccccccaggaccgacagaaccgagaagcaggccgggccaagaacgggaccgaac

SEQ ID NO: 82097 - RNA, 81 nt, Homo sapiens
acgagcaccagccagagccagaaaaagcggggaaggggggcaaaaaaaagaagcaagcgaagcaccgagcacccacccgag

SEQ ID NO: 82098 - RNA, 69 nt, Homo sapiens
ccggcccaagggggggagccccaagggaaaggaccaaccagccaaaagcaagcgagaaggggcgccacg

SEQ ID NO: 82099 - RNA, 82 nt, Homo sapiens
agccaaagccaacaagaccaagcccgcggacgccaggggccagacccacgagcgaagcagcaggggacgagaggcaccagaa

SEQ ID NO: 82100 - RNA, 77 nt, Homo sapiens
cacgccggccgacacgccagcggaaccagaccagggcaagacgccaagagaaaaggcgagagcacaaagcaccaaga

SEQ ID NO: 82101 - RNA, 57 nt, Homo sapiens
cgcagaaggccggagacaccagcagcagacaacagggagaccccacgggacaccagc

SEQ ID NO: 82102 - RNA, 72 nt, Homo sapiens
agacacagccacgcacgaccgggcgggcacaaaccgaagaggacaaggagagaagcagacagaaggacaggg

SEQ ID NO: 82103 - RNA, 73 nt, Homo sapiens
acagcaagagaaaaagacaccgcagcgaaaggaagcaaagacccacagaagcccagcacaggaaagagcgaag

SEQ ID NO: 82104 - RNA, 56 nt, Homo sapiens
cagcagccaccagccgacggaacaaggaaagacgaggccggaagccacaggagaaa

SEQ ID NO: 82105 - RNA, 74 nt, Homo sapiens
aagacccaaaacacgcggaaaacgcgagacagacgaggcccagacccaaagggggcagagaacacacagaagag

SEQ ID NO: 82106 - RNA, 70 nt, Homo sapiens
accaagcggggcacgcgagcagacgagaaaaaggagcccaagccccaccaccagcacacccccccacgcc

SEQ ID NO: 82107 - RNA, 72 nt, Homo sapiens
acggacgagcccggagacaggagcccagagcggagaccaaacgcgagaaaaagaaagcgcgaaaacacgaac

SEQ ID NO: 82108 - RNA, 73 nt, Homo sapiens
ccaggaggggccaaagaccgcaagaagacaacaggagacggcaagcaagcgagggaaacacaaagaagacacc

SEQ ID NO: 82109 - RNA, 78 nt, Homo sapiens
gaggagcagcccaaaaacacaaggaccagacaaagggagcaccagccagaccgggaagaaacgaaggggggaggccca

SEQ ID NO: 82110 - RNA, 35 nt, Homo sapiens
ggacaacgaccaggccaggagcgaaaaggcaagag

SEQ ID NO: 82111 - RNA, 74 nt, Homo sapiens
cacgaaagcgggagagggaccggaacggcggcgacaaggggcccgaacagaggggcgaacaagaggcgccagcg

SEQ ID NO: 82112 - RNA, 58 nt, Homo sapiens
caagacccacccgccacggcaccagaacccaagcggaggccgcggggcccagcgagca

SEQ ID NO: 82113 - RNA, 80 nt, Homo sapiens
cgcaacaaccagcagcacagagcccgacggccaggaggcgaagagacgaggaagcccaggagcccgaacacaaaaagacc

SEQ ID NO: 82114 - RNA, 56 nt, Homo sapiens
gcgcaaaagcgaaggcaccgccaccggaaaccaggaaaaggacaccaacccagaca

SEQ ID NO: 82115 - RNA, 87 nt, Homo sapiens
aagaagggccgggggcgagccggagcgaccccggcagcagaacgcgggaccgaaggacgaacagagaaacccccagaacagaaacaa

SEQ ID NO: 82116 - RNA, 52 nt, Homo sapiens
gaccagaagccagagcgaggacgccggcagaacggccgagcgaccaggagag

SEQ ID NO: 82117 - RNA, 74 nt, Homo sapiens
aggccggcgcgaagagaacccagccgccgaaaagaggcaggaaaggaggaaacagcaacgaacaggaaaaaacg

SEQ ID NO: 82118 - RNA, 78 nt, Homo sapiens
caccccggaacccgcggggcggaccggagaagccccgagcaccccacagggcaccacagaacagccgaagcaggccac

SEQ ID NO: 82119 - RNA, 86 nt, Homo sapiens
gaaaaacaacgccgcagcaacaaaggagagagcgggaagcagaaggcagcaggaacggaacagcgaaggagagaacaagaagaaaa

SEQ ID NO: 82120 - RNA, 78 nt, Homo sapiens
caggccgggcccccaggccggcaggccacggagaaaaggggaagggaccgcagggcccggcaaagggccccggacaaa

SEQ ID NO: 82121 - RNA, 75 nt, Homo sapiens
caccacacggaacgcccgacccgggggccgcggaaaaaaagcgcagaaaaggcacagaaacgggaggggcaggac

SEQ ID NO: 82122 - RNA, 74 nt, Homo sapiens
gcagcgaaggcgaggcaccgccagcaagggacaccgagaagaaagggcaaaaaagcgaggacccacgccgaacc

SEQ ID NO: 82123 - RNA, 73 nt, Homo sapiens
ccccggccgggccggccagcgccggaaaccaacaaggccaaagagcgcaggcgagaaaggagagacagggccc

SEQ ID NO: 82124 - RNA, 72 nt, Homo sapiens
ccaagcccggaagacgcgaccgggcaccggcggggaaagacaaggccccagcagcaggcaaagggaaggcac

SEQ ID NO: 82125 - RNA, 72 nt, Homo sapiens
acaaaaaacaagagaaccaagcgcaaggcaaggggcgcaccgggaaaggaacaggagcgccacgggacaacc

SEQ ID NO: 82126 - RNA, 72 nt, Homo sapiens
ccaaagagaccagcgccaccgacccggggaggaaggagcccccgccgacaaggcaaacacaccaggagagga

SEQ ID NO: 82127 - RNA, 82 nt, Homo sapiens
aaaaccacgagagcccgcccaacaaacagaggacagggaacgcaagcacaggaccagaaacgaaaggcagcagaagaggaaa

SEQ ID NO: 82128 - RNA, 120 nt, Homo sapiens
caccagaagaccaccggaacgccacaagcgggcacaggggaaaagccaccagggaacgggcacaggaacgcacagccacccaacccagcaaccaccacgcaaggcaacacccagcagcag

SEQ ID NO: 82129 - RNA, 79 nt, Homo sapiens
ccgcaagagcggagcgcggcgcccggccccccgcggcgcggccacggccaggcagaaaccgggagaagccggccaggca

SEQ ID NO: 82130 - RNA, 49 nt, Homo sapiens
gaccaagaaccagccccaaaagcacgcacgaaaccggcaagccagcgga

SEQ ID NO: 82131 - RNA, 36 nt, Homo sapiens
gaagaaggccagaaaaagaggagagcaaacacacac

SEQ ID NO: 82132 - RNA, 82 nt, Homo sapiens
gggacacagggcccgccaccacacccaggacaggaaaagccagagagcggcagagaagaagggaggcccaaagagcaaacaa

SEQ ID NO: 82133 - RNA, 70 nt, Homo sapiens
gcaacagaggcgaggcgaggcccgaagccggcagcgccaacgaacccgggaacgcgagcaagcagcgcca

SEQ ID NO: 82134 - RNA, 80 nt, Homo sapiens
ggcgccacggggaagaaggccagacggaaaggagaaggaacagccgcaagaacaacaggcacagcggaaaaagagcgaga

SEQ ID NO: 82135 - RNA, 48 nt, Homo sapiens
acgcgaccgaccacgcagggagagaacagcacacagaggcgcaagggg

SEQ ID NO: 82136 - RNA, 78 nt, Homo sapiens
ggcccccaaccgcgccagcggagcgaacccgagagcgggagcgggcgggccagggaaccagacaaaccgggaggaccg

SEQ ID NO: 82137 - RNA, 84 nt, Homo sapiens
gaggccaggcggccgcccgggagcgagcggaggagcaggcgccggagggccaaaaccacaccaaaaccaagggacagaaacagc

SEQ ID NO: 82138 - RNA, 72 nt, Homo sapiens
aagacaaagaagaaaaaagggacgaaacagcacagcgggcagcagaagagaggagaaggcagagccccccca

SEQ ID NO: 82139 - RNA, 67 nt, Homo sapiens
acaacacaaagcgcgagacccgaagaacgggaacaacaccccagagagggaggaagaaaacccgcac

SEQ ID NO: 82140 - RNA, 49 nt, Homo sapiens
ggggacggcaagagcaacaagcagagcaaaggaggcagcagcagcgagc

SEQ ID NO: 82141 - RNA, 80 nt, Homo sapiens
agaccgaaggcgccggccaaaagagccgggcagaggagcagaaaaggggcaggcggacccgcgacaagacaccaccccac

SEQ ID NO: 82142 - RNA, 76 nt, Homo sapiens
agccaacaaggcacgagcagcagcccagagcaaacagaagcagacgagcgggggaacaccggacgggagcgggccg

SEQ ID NO: 82143 - RNA, 72 nt, Homo sapiens
ccgggagccacgggccaggaccacacaagagccaaacaagagcgccaaagccacagcgcggcacgaagaccc

SEQ ID NO: 82144 - RNA, 68 nt, Homo sapiens
agcgaacaacccgagccagaaaacaccagggaaagcaaaaccagcaaacgagaagaaagaaggaaaga

SEQ ID NO: 82145 - RNA, 81 nt, Homo sapiens
caagcgccaaggggagagagggaacagaaaggagaacaccacagagaaacggagaggagaagcaaagggcgaggcacccag

SEQ ID NO: 82146 - RNA, 74 nt, Homo sapiens
cgccgccacaaggcgcgccgcgacgagcgcacggccgccccgaccgggcggccgcccccgggacgggggccggc

SEQ ID NO: 82147 - RNA, 76 nt, Homo sapiens
cggcgcccccggcccggagcaacgagcgcagcgccgaggagaacagaagcggagaacacaaagccacaagccaaac

SEQ ID NO: 82148 - RNA, 75 nt, Homo sapiens
ccagcccccgagagcggacacaggcggcccccagcccaggacaacgagccagcccgcaccacacgcggggagacg

SEQ ID NO: 82149 - RNA, 67 nt, Homo sapiens
gaccagcgggaggccagaggaagggaagggagggggcagcacccacacaggaaaccaaaaaagaacc

SEQ ID NO: 82150 - RNA, 86 nt, Homo sapiens
ggacaagacccgggaaggaggcgacagggcgcaggggcacagcgacgccgggcccccggaccccgcggcggcgggcgggagggcgc

SEQ ID NO: 82151 - RNA, 64 nt, Homo sapiens
acgacacaaacggaggagaaaagacggccggcaacaagcgaggggggaggccaggcgcccagaa

SEQ ID NO: 82152 - RNA, 67 nt, Homo sapiens
caagccgacggcggcagcaacagaagacaggcggaaggaggagagagaggaaacgcccgccaacgcc

SEQ ID NO: 82153 - RNA, 56 nt, Homo sapiens
cgaaacaggagaaggagaggaaagaaggcaagcgcaagccacccaggccgggaggg

SEQ ID NO: 82154 - RNA, 75 nt, Homo sapiens
gaagaacccaagccagagcccagcaccgaggagcaacacccccagggagcccagaccgacaggacgcaagggggc

SEQ ID NO: 82155 - RNA, 67 nt, Homo sapiens
ggagaagggcggaccgcgcacgggaagcacgccgagaaagcgcggaaagacacgacaggccccaacc

SEQ ID NO: 82156 - RNA, 81 nt, Homo sapiens
cccaggaccaccagaacgggcgggaccgggcccccaacccgggcacccaggcgaggagaaacacaggagaagcagaagacc

SEQ ID NO: 82157 - RNA, 81 nt, Homo sapiens
cacggaagccagccaacgagccggacggggacagcgcagggccaggccgcagacgacgcagccagagcagcaagaggccaa

SEQ ID NO: 82158 - RNA, 86 nt, Homo sapiens
gggagcggacgaggaaggcacgccgccgggggcgcgacgcggagcagccggggcagcaggaggggggaagcaggaggcacggaggg

SEQ ID NO: 82159 - RNA, 74 nt, Homo sapiens
acgggaggggaacgggccgaacgcaggacaaacaagaccaccagcccacaccaccagaccaaaccagcgccacc

SEQ ID NO: 82160 - RNA, 82 nt, Homo sapiens
cccaaggaaagcacaaaagggaaagagacggagaaaagaagaacacgcccaaaacgaagaagccggccccaaacaggaacac

SEQ ID NO: 82161 - RNA, 71 nt, Homo sapiens
cggagcaggagcaaaggagcaagaaaccagacccggaaacgcaggagaaagagcggagccaccggaagaga

SEQ ID NO: 82162 - RNA, 82 nt, Homo sapiens
gcaagaagggccgggggcgagccggagcgaccccggcagaggcagaggaggggacacggggacgcccggcggcccgcagagg

SEQ ID NO: 82163 - RNA, 79 nt, Homo sapiens
aacccccaaaagagcccagaaagagacggccggaaacaaagaaacgagcaaaccagggaccggaaagcaaggaacaacg

SEQ ID NO: 82164 - RNA, 78 nt, Homo sapiens
gggggcagcggagcccaggcggcagcgccagaaagagaggcacaacgggcggacagccggaaacagaacagaggccag

SEQ ID NO: 82165 - RNA, 72 nt, Homo sapiens
acacagacaacccaccaagacagaggggaccacaaacaggcccaccggagcagcagcccgacccgaccagca

SEQ ID NO: 82166 - RNA, 58 nt, Homo sapiens
ggcagaacgccacgcacaagaacaggagaccacggggggaaggaagcgagacccggcg

SEQ ID NO: 82167 - RNA, 79 nt, Homo sapiens
cgaccagccaccccggacgagagcaaggagaggcaggaccccagccacccccagggccaggcaagaaagagcgcgacga

SEQ ID NO: 82168 - RNA, 71 nt, Homo sapiens
caccaagacccgcaacgagaaaacaccaccccagagaaggcgcagcgagaggcccgaagcaaaaaagaagg

SEQ ID NO: 82169 - RNA, 62 nt, Homo sapiens
gaaaagcccaggcaagagcaacacgccacagagccacagcgcgcgaaccccgggacgacgac

SEQ ID NO: 82170 - RNA, 79 nt, Homo sapiens
gaaccccaggacgcgcccccgggagcgggcgcccagaggcagcagagcagcaccagggcgggaggcgagaaaccggaag

SEQ ID NO: 82171 - RNA, 63 nt, Homo sapiens
gccggccacagaggccggaaaagccccaaacgcgccaacggaaaccaccccacccaacccccg

SEQ ID NO: 82172 - RNA, 61 nt, Homo sapiens
aaacaccaggaaagacaggagaccaaaaagcccaggaccacaagccagaaaacacgcggaa

SEQ ID NO: 82173 - RNA, 77 nt, Homo sapiens
cggggacccgacggacacaacggcagaccgcagaacacccagccagggcaaaagcagaccggaaaacccaccggcaa

SEQ ID NO: 82174 - RNA, 77 nt, Homo sapiens
gcggagccgaagccggagggccacccgacgcagagggcaggccccagccagcagcagcagcaccgcgcaggagagga

SEQ ID NO: 82175 - RNA, 75 nt, Homo sapiens
gccgcagccggccgcagcgagagcgaggaggagggaagaaaacgccagagaagcagagcagcccggagcgagggg

SEQ ID NO: 82176 - RNA, 72 nt, Homo sapiens
gcgcaggaaaaaggcaaacccaccggaagcggaagaaagaagagccaagaagggaagaaaacaagaaaaaga

SEQ ID NO: 82177 - RNA, 67 nt, Homo sapiens
agggggggccggggcgacccgggaagcggggccccgcccgccgcgccacagcagaaggaccacggga

SEQ ID NO: 82178 - RNA, 66 nt, Homo sapiens
agccacacaaacgccggaccggcacaaagggaagggggacaaaacagccaccggcaaggccaaggg

SEQ ID NO: 82179 - RNA, 70 nt, Homo sapiens
acaaaaacccgccaacaacaacaaaaagaaagcgcgacacaggcgagagccaagcgaaagacagaggccc

SEQ ID NO: 82180 - RNA, 74 nt, Homo sapiens
caaagacgacaagacccagagcagcaaaaaccgaacccagacgcccaagaaggcgaaagcaacaagccgaagag

SEQ ID NO: 82181 - RNA, 70 nt, Homo sapiens
cagaagggcacggacgaggagccgcgaacgccaccaccccgcagccccggggcacccgaggaggaagagg

SEQ ID NO: 82182 - RNA, 58 nt, Homo sapiens
gcagaaacacaggaccccccccaacgagggaagagggccagacgaaacggagcgcccg

SEQ ID NO: 82183 - RNA, 77 nt, Homo sapiens
ggaagacccaaggaaccaggcgaagacgcgagggccacaagacaagaccggacaaccagcacaccagaggcccccac

SEQ ID NO: 82184 - RNA, 72 nt, Homo sapiens
gggacaacaagccacaaccgcccaccaccgaaggggaggcaagcaggggggcaaaggaaagaaggcagaaag

SEQ ID NO: 82185 - RNA, 86 nt, Homo sapiens
cggaagcaaagaaaaagaacccaaacaagacgcaagaggccgcccaaaacccagaacacggggcccaaacgcagagaaccacgccg

SEQ ID NO: 82186 - RNA, 73 nt, Homo sapiens
ggcccggacaaacaggcacgaggacccgccaggcaaggaaacccccaaagagaaagaagaagaaaacgagacc

SEQ ID NO: 82187 - RNA, 71 nt, Homo sapiens
gagacgggcaccgagagggacacggggcaccgcgccgcagcggcagaaccgcgcaccagccgaacacgcag

SEQ ID NO: 82188 - RNA, 79 nt, Homo sapiens
aagagaacagggcagaggaaaagcaagaagacgaggagcaggcgcaaaaaagaaccgaaagacgacgcaccgaaacgaa

SEQ ID NO: 82189 - RNA, 79 nt, Homo sapiens
cccgaggagcccgaccacccacagcaacacagaagcaaggaaaggcggagccggccagcgaaggaaggggagcagagag

SEQ ID NO: 82190 - RNA, 76 nt, Homo sapiens
aacagaagccgagacgcccgaaccagggcagaagcagaaaaggcgacggcggagacagaagagaggagagcccaca

SEQ ID NO: 82191 - RNA, 37 nt, Homo sapiens
gccggagcaggcgaccagggcggaggcaaggcggacc

SEQ ID NO: 82192 - RNA, 70 nt, Homo sapiens
caccggcgggaggaacaaaaggaaaggcccgagccaaaagacccagagaaaggagcacgaaggaacaaag

SEQ ID NO: 82193 - RNA, 76 nt, Homo sapiens
agcgacgacagaacagaaagaagaggggacagacaggccggacacaaccacaaacgagccacgccaaagggcccgg

SEQ ID NO: 82194 - RNA, 72 nt, Homo sapiens
ggagcccgcgcccgccgcgggagagaggacccccccccccccccaaggcgccacaggagccgcagaagcaaa

SEQ ID NO: 82195 - RNA, 87 nt, Homo sapiens
cgagcccagcacggacccaggaaaccaggagaaccgccagcggaggagaccagaagcagcggaggaggggaggaagcagaaacaaac

SEQ ID NO: 82196 - RNA, 63 nt, Homo sapiens
ccgaagccgcagggaggggaaacgaagcgcacgaaacaccaagcgaagaagaaagaagaacag

SEQ ID NO: 82197 - RNA, 84 nt, Homo sapiens
aggcgcgaggggagccgagaagaccgagggaagggcgaagacaggacggcccaggcagacacggaggaggaggaagaggaggag

SEQ ID NO: 82198 - RNA, 40 nt, Homo sapiens
gcaccccccgccggaaagaaacgaaggaggcccaaccaca

SEQ ID NO: 82199 - RNA, 52 nt, Homo sapiens
cggggcgcacaccaccggacaaccgacaaaaccacgccacccgacccacgcg

SEQ ID NO: 82200 - RNA, 89 nt, Homo sapiens
gcgagagggcagaggagcggcggagagcggccgcgggcgacgggccgagcggagcccaaacacgcgccgcaccagagcggcgggaccag

SEQ ID NO: 82201 - RNA, 78 nt, Homo sapiens
acggccaccggcgggaggaacaaaagacggagacagccgccagaagaaacacgcaaggcagagaccgaagaagaagga

SEQ ID NO: 82202 - RNA, 39 nt, Homo sapiens
gcagaaacagagaaggaacagacggagcaccgcgcccag

SEQ ID NO: 82203 - RNA, 77 nt, Homo sapiens
gacaacaagccacaaccgcccaccaccgaagaaccagcaggcgaagacgcaggagagcacagacggacccgcacgac

SEQ ID NO: 82204 - RNA, 63 nt, Homo sapiens
ccggcggcacgcccagcaccaccccgggaggccgagcaaaacaagacacggggcccgcaaggc

SEQ ID NO: 82205 - RNA, 58 nt, Homo sapiens
acagcagaaacagcgcccacaggggagaaaacaagaggagggaaggaacacaaacgag

SEQ ID NO: 82206 - RNA, 76 nt, Homo sapiens
agaagcccgaaaagaaggggcagacccgggcgacgccccagggacaggaggaaacaccaaggaagaagagacgacc

SEQ ID NO: 82207 - RNA, 84 nt, Homo sapiens
gaaggcagcgccgacggcagccggcaccgacggcggaccgacccgagccggagacccgggagccccagaaaaaggggcccacgg

SEQ ID NO: 82208 - RNA, 82 nt, Homo sapiens
cagaagaggcagcagcggaaggcagcgggagccgaaaacggaaggccaccccgaagaggccaagcaacggaagacacacgaa

SEQ ID NO: 82209 - RNA, 75 nt, Homo sapiens
aggagagaacaaacccggcccccaaggacgacccagccgaaagggaaacacagccacggcgcacccccaccacca

SEQ ID NO: 82210 - RNA, 95 nt, Homo sapiens
caggaagagcaaagcgccaggccaaccagagacaccagcaggacaggaaaaaaagagcaccgaccacgacaccccgggcgaggaagaccgagacc

SEQ ID NO: 82211 - RNA, 59 nt, Homo sapiens
cgcgcacccccggccggaggcaccagcggcgggacgaccccacaacccgagcgcccaag

SEQ ID NO: 82212 - RNA, 76 nt, Homo sapiens
agccgaagccggagggccacccgacgcagagggcaggccccagccaggaagaaagagggccacggacagaggcgca

SEQ ID NO: 82213 - RNA, 72 nt, Homo sapiens
ggagcccggagcaggaagccaagacggcagccagcagcgcagcgcccgcagccacgcaacacaagccaaccc

SEQ ID NO: 82214 - RNA, 77 nt, Homo sapiens
acaggcccaggcagaccgcagcaaacagccagagcggagccacacaccgagggagagaagaacaaggggagccaaga

SEQ ID NO: 82215 - RNA, 72 nt, Homo sapiens
acaacacacagaaggcagggagggaggggaaagacccacaccaagaggggcgcccgagagccgaagcacagg

SEQ ID NO: 82216 - RNA, 98 nt, Homo sapiens
caaccaaacacagaggaaaagggggaggccagccagcggcaagaaaggaacgagggaaaggaacccgacacaggggagggacgcaccacccacaggga

SEQ ID NO: 82217 - RNA, 72 nt, Homo sapiens
aagacaaacccaggaaagccacagaacgagacgacgggaccgaaggaccccgccagagacaaccgagcgcca

SEQ ID NO: 82218 - RNA, 66 nt, Homo sapiens
aaaaggccagcaacaggagagagacaagcagacagcaagccaccggggacacgcgacgccggcccg

SEQ ID NO: 82219 - RNA, 60 nt, Homo sapiens
gggggcacccagcacacccaagacgcggcaacagacaaagaacgcaaacccaagcggcaa

SEQ ID NO: 82220 - RNA, 75 nt, Homo sapiens
caaccggacagaggacgacgaagagacaaaggcaccggaaagccaggaaaaacacacaacaccagcaggaaaaaa

SEQ ID NO: 82221 - RNA, 86 nt, Homo sapiens
cacacaagcagacccaggcgccccgcccccagggcccgcccgcgcgaaggccagcggagccgcaccaccgggagacaaccggagac

SEQ ID NO: 82222 - RNA, 76 nt, Homo sapiens
cccccgccggaccccacagcaacaaggacagcggggacaggagacacccgggcccccagcgaacccgaaaacaccg

SEQ ID NO: 82223 - RNA, 66 nt, Homo sapiens
aaagacacggccccaagcagagagacaagggcagagccaagcgccgcccgggcccaagcacccgcc

SEQ ID NO: 82224 - RNA, 61 nt, Homo sapiens
ccacgaaagccggccacgccgggccggagccggcgcagacccaggggagcccaccagccag

SEQ ID NO: 82225 - RNA, 56 nt, Homo sapiens
ggccacaaccaagagaaacaaccagcggaaccagcaaagaagaaaccaagaggaaa

SEQ ID NO: 82226 - RNA, 88 nt, Homo sapiens
aggacggaggacaggaagggaacgggaaagcgcaacaggacccaaacagcgcagagagccaaacccccacagccgaagcgaacacaga

SEQ ID NO: 82227 - RNA, 68 nt, Homo sapiens
gagcgggcgcgcgcggaacgaaagcgccgcggcaaagcgcccgcacaccaaggcccccaggcacacga

SEQ ID NO: 82228 - RNA, 77 nt, Homo sapiens
ggcccacccggagaaccccacggagaaccagagcgcacagccaagcaaacgcaccccgggccccaaggagccaaggc

SEQ ID NO: 82229 - RNA, 77 nt, Homo sapiens
gccccccaggaccacagccccgaccgagagaaccagcgccaggaggcccacgcaccgcaacacaccacagcaccgcg

SEQ ID NO: 82230 - RNA, 67 nt, Homo sapiens
ggagggagaacacagaaaccggccccaggcccggccaacgcaacagggagcccacgcaagaggggcc

SEQ ID NO: 82231 - RNA, 71 nt, Homo sapiens
accggaaagacaaggaaggacaaacccgaggcgagaaccaagacaacaggcgaagaagggaaacgaggaag

SEQ ID NO: 82232 - RNA, 79 nt, Homo sapiens
gggaccagcagcgcgccgccgcccagagaacggcaacagggagaaaaagaacaaaaacaaccaggaggagagaagcgga

SEQ ID NO: 82233 - RNA, 76 nt, Homo sapiens
cgccggacagagaagcccccaaggagcgcagacagggaggccgcacagaggaggagcaccaaaccgagggagggca

SEQ ID NO: 82234 - RNA, 57 nt, Homo sapiens
gggcagggagagaaggagccaggaagcgccgccccggccgaggaagccgcaaaacac

SEQ ID NO: 82235 - RNA, 75 nt, Homo sapiens
ggaaagacagaaccagccaacaaaagcagggagaccacgagcaaggcaaaacccgaggggccgggcccggaagca

SEQ ID NO: 82236 - RNA, 92 nt, Homo sapiens
cccccccgccccccaggaggggcgagagggagccgcagcgagcagagggccacccggggaccacaacagcgcccgacaaccagaagcggcca

SEQ ID NO: 82237 - RNA, 76 nt, Homo sapiens
agagaaacaaggaacccgaaaagcgaacaacccgagccagaaaacaccagagcagcaaaaaggagggagcagggac

SEQ ID NO: 82238 - RNA, 84 nt, Homo sapiens
ggaacgcggaggcccccaccccggcccgaagaggacacggaccagaacagcaagggcgcaagggccaagacagcggacgggcgg

SEQ ID NO: 82239 - RNA, 75 nt, Homo sapiens
agaagacgaaagaagggaccacgaacgaaggcgaggaaaaaaaaccgccccgggcggggaacggaggagaggaaa

SEQ ID NO: 82240 - RNA, 79 nt, Homo sapiens
ggggcagaagaaagaggcaacaccacagaaacaagaaagccaggaacgacagaaaagggacacagacgccaggcagccg

SEQ ID NO: 82241 - RNA, 55 nt, Homo sapiens
aacgaacccaacaggagcaagcgacggaaaaccggcagcaggagaggccacgcca

SEQ ID NO: 82242 - RNA, 72 nt, Homo sapiens
cggaagaaccccccgggagccagaccggcaccgaagacccaaggccaagacaggggacagccggccgaacgg

SEQ ID NO: 82243 - RNA, 67 nt, Homo sapiens
cccgggaagcacgagcacgccaccggcgccagcgggcgaggcaagcggcagccacacccggagaagg

SEQ ID NO: 82244 - RNA, 108 nt, Homo sapiens
agccagaagaccgggaaaaacgcagaagcaaaggagaagaaacaaaaggaagagggggacagccacagaacacaaggacggacaggaaaaaaagggcggaggcaggga

SEQ ID NO: 82245 - RNA, 91 nt, Homo sapiens
gcggcgcagcgacccggcgaagggagccgaccgggcccgggcggaggaaaaccccacgaaccggggagaccacgacgcgccccgggcgcca

SEQ ID NO: 82246 - RNA, 82 nt, Homo sapiens
ggaagagggaaaaaccggagccacggggaaaagagacaccaacaccagaccacaaacggggaacccaagccagaccgcccga

SEQ ID NO: 82247 - RNA, 81 nt, Homo sapiens
acagaaaccgaagagaaaggccaacgagaacaagcacaggcgccaggggagaggaggcagaaggagaccgcgggacagaac

SEQ ID NO: 82248 - RNA, 71 nt, Homo sapiens
gcccacaggacaggagagaaagacggcccgagcgagagaagagaaggaggacagggagccgaagcaaaaaa

SEQ ID NO: 82249 - RNA, 74 nt, Homo sapiens
ccacccgcaagcccacccgggcagacagcccaggcacaggaccagggcccgaggagggcggaaccacacgagga

SEQ ID NO: 82250 - RNA, 74 nt, Homo sapiens
agggggccagcaggacgcccagggagccgccccggccacaagaaacggacaaaagggacacacaggaagacgaa

SEQ ID NO: 82251 - RNA, 76 nt, Homo sapiens
ccaaagcggaccagagacaggaccgggacggaggaccccacagacagcaggaggcagggcgcaacaagcacacaga

SEQ ID NO: 82252 - RNA, 64 nt, Homo sapiens
ggagacccggggacccccgacgccaggcagcgcccccaaacggacggacagcgacagaagaaca

SEQ ID NO: 82253 - RNA, 76 nt, Homo sapiens
cccccgaaccgagaagaacgaagcacacggccgggacaagcaagagagaacgagggccaaagccaacgaagaaaag

SEQ ID NO: 82254 - RNA, 85 nt, Homo sapiens
ccccccaccgcccgggcccgaggaggcagccaagccgggccgcccgcggccccgggcgcgccaggcacagccaagagcggaccgg

SEQ ID NO: 82255 - RNA, 47 nt, Homo sapiens
gcgaaacgcacgagaaggggcaggcccggacccaggggcgcaaaccc

SEQ ID NO: 82256 - RNA, 75 nt, Homo sapiens
gcggccgggcccccagccccaaggcccaccgccacccgccccgccagacaagagcgcccaagcggacagccccac

SEQ ID NO: 82257 - RNA, 83 nt, Homo sapiens
cccacggcgacggcagcggaggagggcaaggacaccccgccaggcaaaaggccggccacaggcagcggcaaagagaacccgga

SEQ ID NO: 82258 - RNA, 75 nt, Homo sapiens
ggagaagaggcaaagaaacaccaaggaagaccaaagcaagggaggagaagccagccccgcggcgggcgggaagga

SEQ ID NO: 82259 - RNA, 72 nt, Homo sapiens
ccgggccaaaccagggaaaaagcaaaaccgaacacgaccagcccaggcacccaaagaagagaggcgggaaca

SEQ ID NO: 82260 - RNA, 72 nt, Homo sapiens
agaagaaaccagaggcaaaaaggaaacacccgcgagcaaaggaaacgacaacgacccaggggggagaggacc

SEQ ID NO: 82261 - RNA, 83 nt, Homo sapiens
gcagccccgcgcgccgggaccccgcgcgcgaccgccgaacgcccgcagcagaggagaagccccacccgccccaggagccagcc

SEQ ID NO: 82262 - RNA, 76 nt, Homo sapiens
cccgagagccagcccgacggaaccaacgccacgacccagaagggacgaacagcggggacgccccagcagaccgccc

SEQ ID NO: 82263 - RNA, 85 nt, Homo sapiens
agcaccagaagccacgggacggaggagcagcggcagcggcaggcgaggggaccccggaccgcaccagcagaaagaggcagccagg

SEQ ID NO: 82264 - RNA, 87 nt, Homo sapiens
cagaaacagagcggcggaaggcgggcgccagaggacaaggagaccaaagagaacaaccccgaagaagacgaagccacaaaagagcaa

SEQ ID NO: 82265 - RNA, 87 nt, Homo sapiens
aaccagcgaagagcgacaagccgcggcagccgcggaccaccgccgccaggacgcaccacgacggggaagagaggcccggccaggcac

SEQ ID NO: 82266 - RNA, 69 nt, Homo sapiens
cgcgggagagaggacccccccccccccccaaggggccagggccggagaccacagcaacccgcagagacc

SEQ ID NO: 82267 - RNA, 49 nt, Homo sapiens
cgggggagagccacggaagccgacagacaaccaggccgagggaggaccg

SEQ ID NO: 82268 - RNA, 76 nt, Homo sapiens
gccggacccagcgagcgggcggcacgcacgcagggaaagacaaggagccgggccgagaaaccgaaccagagaccag

SEQ ID NO: 82269 - RNA, 83 nt, Homo sapiens
agcgaccggaagacgaggcggcgggggacaagcggcgccccagagcggacgagggaacggagggaaagcgacaaacaaccaac

SEQ ID NO: 82270 - RNA, 67 nt, Homo sapiens
gaccacccccggccacgccccgggccggcccacaaaggcccacgggggagggcagcccagagacacg

SEQ ID NO: 82271 - RNA, 60 nt, Homo sapiens
aagccaccgacccaaaacaaccaagggcagcccaccccgagggaaacaggaggaagaaaa

SEQ ID NO: 82272 - RNA, 86 nt, Homo sapiens
agagcccgccgccgaccgccgcccgccacacccgccgccaggccaccagcccccgggccaagagcagcacggagacagagccacac

SEQ ID NO: 82273 - RNA, 84 nt, Homo sapiens
aaagcggagagagcgggcgggcggccgggagacccacagaagcagaaccaccccgacaaagccaggacgcggcagagaaagaga

SEQ ID NO: 82274 - RNA, 71 nt, Homo sapiens
gcccaagacagaggaaaacaggcaccaacagcggcgccgacaccggaacagcgcccggaacagaaagaaag

SEQ ID NO: 82275 - RNA, 65 nt, Homo sapiens
gcaagagaggggcaagcgacaaggaaaagaagcgcggaggaccacacccacaagagcccaaagga

SEQ ID NO: 82276 - RNA, 57 nt, Homo sapiens
aaccccacaaggagccaggaggacgaagagccgcggagagcgggaggagagccggac

SEQ ID NO: 82277 - RNA, 60 nt, Homo sapiens
cgacggcggcggaggcgggaccgggcgagccgaggaagggccagaccacaggaaagcggg

SEQ ID NO: 82278 - RNA, 82 nt, Homo sapiens
cacagaggacggagcgccgccgccgggaccccgcccagcaggcgccacgcgggaaaacagcaacagaaggaaaaggagccac

SEQ ID NO: 82279 - RNA, 81 nt, Homo sapiens
ccccgcccacgaggagcacagccgggccgcgcgaaggaaaccagcaggggagcagcaggacacgggccaccaagagaaggg

SEQ ID NO: 82280 - RNA, 74 nt, Homo sapiens
ccgcccagccggcgagggacgccgcaggaagccaggagggaagcccagaagacgcacaagagagaccgaccaaa

SEQ ID NO: 82281 - RNA, 74 nt, Homo sapiens
ggcgacaaggccaagaccgccagcaaaggaagacgaggacaaccccaaacacagacggacagaaccccacccac

SEQ ID NO: 82282 - RNA, 73 nt, Homo sapiens
accacaaaaacgaaggcggcggggcacccacagaaggagaacaagcagagcaccggacacgaggagaaacagc

SEQ ID NO: 82283 - RNA, 64 nt, Homo sapiens
acccaacggggaaccccagcggcggcaggaaaaggaagagcaaaaacaaaaacccagcagacaa

SEQ ID NO: 82284 - RNA, 89 nt, Homo sapiens
ccccaccgccggcgcgggaaacgggcgaagcgacgagccgcgaggagggggcacccgaggaggaagagggcagggcccacggaaagaag

SEQ ID NO: 82285 - RNA, 82 nt, Homo sapiens
ccgaggaagagcagacggcagaaaaagcggggaaaacaaaaaaaagaaggagggaagagggggccaggaccaggccccaccc

SEQ ID NO: 82286 - RNA, 74 nt, Homo sapiens
cgccgagcaaacagaggcgccaccacagagccacacgaggcaccgaccgcacgagcaacccggaagagcccgca

SEQ ID NO: 82287 - RNA, 77 nt, Homo sapiens
caaggcacagaggaaaaaagagggaggacaaaggaccaaagagagcccgggaaagaggaaaacgcacaagagccgca

SEQ ID NO: 82288 - RNA, 78 nt, Homo sapiens
cgacacgaacaaccaggaggagacaagcgacagagaagaagagaaccgcacgcacaggaacccggaacagcaccacga

SEQ ID NO: 82289 - RNA, 80 nt, Homo sapiens
gccccggcccggcgcgcccgccccggcagcgacaagaggaaagagagccccagcacagcacaacagcaagcagccccaac

SEQ ID NO: 82290 - RNA, 87 nt, Homo sapiens
cgaaaggccgcgaaacggcagggacgcgaaaaaacaggggcagaagaacaaggaagcggagaggcaagagagcggccaccccaaacc

SEQ ID NO: 82291 - RNA, 69 nt, Homo sapiens
aagcaaaaaacacgagcccacagaccagggaaccagagcccagaccagcagagcaccggccacgaaaca

SEQ ID NO: 82292 - RNA, 73 nt, Homo sapiens
ggagcagacccggagacacacggccgagcagggaggcagacaggccaaccagcgagcggagagcggcccggcg

SEQ ID NO: 82293 - RNA, 55 nt, Homo sapiens
acaggcgccaaggggagaaggaagggaccaccaacgcccgcgagcagcgccacgg

SEQ ID NO: 82294 - RNA, 73 nt, Homo sapiens
ggagccgccgccggagcgagaacacggaggggccgaacaagccgagacggggccggccgagcaagaccccgcg

SEQ ID NO: 82295 - RNA, 66 nt, Homo sapiens
accgggaaggagcacccaggaccaccagaacgaaacccgagaggagcaggagcaaccgacaggcgg

SEQ ID NO: 82296 - RNA, 39 nt, Homo sapiens
aggaggccagcgggccgaggagaaaaggcaaccccacgg

SEQ ID NO: 82297 - RNA, 53 nt, Homo sapiens
cgcagggcgcccccgggagcaagaggcagacagaccgagacgggcaaccaaca

SEQ ID NO: 82298 - RNA, 39 nt, Homo sapiens
cgcgcacacggcgagcaaaggaagcccagaggccaacgc

SEQ ID NO: 82299 - RNA, 81 nt, Homo sapiens
gcccgcaaggcgccaggccggaaccagccgcagcccgacgccaggcagcacaaccagacagggaaagcaggcaagcgggag

SEQ ID NO: 82300 - RNA, 85 nt, Homo sapiens
ccgcggcgcggagccccggcggccaccccggggccgggcagaagggcccagggcgaggaaccaaagccccggcgcgcaacagaag

SEQ ID NO: 82301 - RNA, 43 nt, Homo sapiens
ggagacacaccgcggaaaacgagaaagcaagcagccggccaca

SEQ ID NO: 82302 - RNA, 64 nt, Homo sapiens
ggcccggcggggaggagaaacccagagaggagcgagaggaagcggaagaaaaccaacaaaggac

SEQ ID NO: 82303 - RNA, 54 nt, Homo sapiens
ccgcagaaggccggagacaccagcagcggaagccgcagaaggaccggccagaag

SEQ ID NO: 82304 - RNA, 77 nt, Homo sapiens
cccagaagcaccggcaccggagaagcccaaaggcacaaagggaggaccccacaagcaccaacagggacgcagcaacg

SEQ ID NO: 82305 - RNA, 78 nt, Homo sapiens
gcggcccaccaacaggaacagggcagacgagcggaggacacccaacccggagccggggccggacgagaaagccgaagg

SEQ ID NO: 82306 - RNA, 85 nt, Homo sapiens
gcgaggagccggcgcggcgcagcccacggcgcaggcccacggagcgcagccgccgaggcacaggccaggaaaggaagacacacaa

SEQ ID NO: 82307 - RNA, 75 nt, Homo sapiens
ggaagggggaaagacaaacaagcggacagaacaagggcgacacagagcggacagaaaagaaaccccacgagggaa

SEQ ID NO: 82308 - RNA, 75 nt, Homo sapiens
agaagacaaggcgcacacacaagaaaggcaacaaaaccacgcaggacgagagaaacaggaaaccagagccaagcg

SEQ ID NO: 82309 - RNA, 61 nt, Homo sapiens
gggacggcacagggaggccagccggagaagcgagcagcgaacagcgggacccacccagcaa

SEQ ID NO: 82310 - RNA, 77 nt, Homo sapiens
ggccgcaggacgacgagcgagacgggagagaggggcaccaaggcccgagccgggaggaggcggaggcaaggggacca

SEQ ID NO: 82311 - RNA, 76 nt, Homo sapiens
gaggcgccccacgagcgggcgcgcggagccgagcgcccaagcgcgaggggagaaacccggcgaagggaaaaaaacc

SEQ ID NO: 82312 - RNA, 51 nt, Homo sapiens
gccaccagcaccaccgcagaccgagaaacggcacaacaacaggcaaaaaga

SEQ ID NO: 82313 - RNA, 80 nt, Homo sapiens
caaagggacgcggccggggaaaccgcacgagcggccgagcgggcaccccgccgggcgagaccaagcaggagacgccacca

SEQ ID NO: 82314 - RNA, 75 nt, Homo sapiens
ggagacgaggccaccaggaaagccgcagccccggcacaaggcacaaagcaggaggcaggaggccaggaagaggcc

SEQ ID NO: 82315 - RNA, 52 nt, Homo sapiens
gccgcgggagagaggacccccccccccccccaaggagagggcggggacacag

SEQ ID NO: 82316 - RNA, 67 nt, Homo sapiens
gaggcaaaaagaagacccgcaaccaaggcagaagacgacagcgaacacccgaaggagccagcaacag

SEQ ID NO: 82317 - RNA, 41 nt, Homo sapiens
cccaaagaggacggacgcacagcggcccagcggaccccgca

SEQ ID NO: 82318 - RNA, 76 nt, Homo sapiens
acgaaaggaagcgcgaggccacacaggggccaaagcagagaaccagcagcagcccaagaaagagcgaaaagagacc

SEQ ID NO: 82319 - RNA, 73 nt, Homo sapiens
acggcacaagaagaaggagagaaccgccagcagagaggaccaggaaaacagaaggccagagcgccaggggcag

SEQ ID NO: 82320 - RNA, 94 nt, Homo sapiens
gcgccccgccccccccccgccagccgaccagggccgcccacaacagcccaaaggcaggcccggcaccgaggccgaaacccaaggggcgcaggaa

SEQ ID NO: 82321 - RNA, 60 nt, Homo sapiens
aacccgcccacacggccagcaccaagaacaagcacacaaaggagagcgaggacaaaacac

SEQ ID NO: 82322 - RNA, 64 nt, Homo sapiens
ccgggacccaccacccaggccccgacgccccgagccccgacaagggaccgggcgggccccgcag

SEQ ID NO: 82323 - RNA, 87 nt, Homo sapiens
caggaacaaggccaagcgaaggcgaaaggaagccaaaaagggagagaagcaaaacaagcaggcaacagcagaaaaacagcaaaagaa

SEQ ID NO: 82324 - RNA, 64 nt, Homo sapiens
agacaagcaacaaggcaacaagcagaagaggaggacaaccacggccgagcggaggaaacagcgg

SEQ ID NO: 82325 - RNA, 65 nt, Homo sapiens
acgacagaacgaaaagaaaggaccccagaccgaagcagggcggccaggacagggacccgccaacc

SEQ ID NO: 82326 - RNA, 66 nt, Homo sapiens
aaaagggcagggacagcgcaggcagcagaaccgcacggccaagcccacacagaggaaaccgggaga

SEQ ID NO: 82327 - RNA, 85 nt, Homo sapiens
ggaggagcgggcgagaagcgccgccgaacgacaggacgggggcggccggcccccagagacaacggcaacacgacaagaagccggc

SEQ ID NO: 82328 - RNA, 61 nt, Homo sapiens
cggcaaagcgcagcagaacaggccacccgccgacagcaggcggggaagaggcggaaaacaa

SEQ ID NO: 82329 - RNA, 81 nt, Homo sapiens
cagccgcgaggaggcgcgggagggcgagaacgaccccgagacggccaggaagacggcggccagcaaaacgggcgaagagca

SEQ ID NO: 82330 - RNA, 74 nt, Homo sapiens
ggcggggcgcccggcgccaggggagccgccacagcgcagcagaagaaagccccacaaccccaacaagggaaaac

SEQ ID NO: 82331 - RNA, 80 nt, Homo sapiens
cagagcgcggaggccgaaccccgaaggaaaccaggagacgacaaggcgggcagggggagcggcgcggcagagcgggcagg

SEQ ID NO: 82332 - RNA, 72 nt, Homo sapiens
gccggggccagccccgggcagccccgcccggacaggcccgcaccagaacacacgagaagccacaggacacag

SEQ ID NO: 82333 - RNA, 86 nt, Homo sapiens
cgccggccaaacccccagccccggcgcccaccgcagcaaggacgccgcagcagagagcccgaccaagcccaaagggacaccagcac

SEQ ID NO: 82334 - RNA, 56 nt, Homo sapiens
agccgcgggcagaggcgggccgccgagcggacccggaccggggacagcgaacccac

SEQ ID NO: 82335 - RNA, 64 nt, Homo sapiens
cagaggggaggcgcgaaaggccaaacgaccaagaaagcgggacgcggaaaacgggacccgcagg

SEQ ID NO: 82336 - RNA, 58 nt, Homo sapiens
cccccagacaaacaagcacaggaaaaaaaagcccaacaccaaagacacacaaggcaac

SEQ ID NO: 82337 - RNA, 56 nt, Homo sapiens
aacaccaggcgccaggaacaagcagaaagcacgaacaacgagaacaagacacgagc

SEQ ID NO: 82338 - RNA, 88 nt, Homo sapiens
acgaggccgagcgcgcggcgccgcaacaaagcagacaccagccaaggccaccgagccacaagaccacagcaccgacccccgacccgga

SEQ ID NO: 82339 - RNA, 77 nt, Homo sapiens
gagacacacagggaagaccaccgacagaacggcagcagaacaaagccagccgaaacaccagcaagacaggccagagg

SEQ ID NO: 82340 - RNA, 75 nt, Homo sapiens
cggagcggaaagcccacgggagaaccaagcacacgaccagacggcacagaccaaccgcaagaaacaggagaccac

SEQ ID NO: 82341 - RNA, 61 nt, Homo sapiens
agcaaggacaaggccagaaccagggaaaccagaaggcacgacggccgaacagacacagaaa

SEQ ID NO: 82342 - RNA, 66 nt, Homo sapiens
gaagaaagccaacaagaggaagcaggaaaaacaaagaagacccaggcagaaaacaccaagacagaa

SEQ ID NO: 82343 - RNA, 81 nt, Homo sapiens
gacccggacgcaagccgggagacgcacagcaagagcccggacaccggaagcgggaaaggggccgacccccacaccggcaaa

SEQ ID NO: 82344 - RNA, 71 nt, Homo sapiens
accgggaagaaacgaaggggggaggcccaggccaaaagaaacaccggaaagaaaacagaccacaaagaaag

SEQ ID NO: 82345 - RNA, 76 nt, Homo sapiens
cgaggagagaagaaggcaagcgacggcccgaacgagcggaggccaacaaaggggaacaggaggggcagaacagaga

SEQ ID NO: 82346 - RNA, 70 nt, Homo sapiens
gaagaaccgaaacggagaagaagcgagggggaggcagcaaaggaaggacaaaaccgaaagagcaagggcc

SEQ ID NO: 82347 - RNA, 92 nt, Homo sapiens
gacgccacccacggaccagcagcgccgagggaaacccggagaccaaaccgcccccgcaagaaaagggagacgacagaccggggcaagccccg

SEQ ID NO: 82348 - RNA, 98 nt, Homo sapiens
ggcaggggacaccagcgagggccacacaggagcccggacggcacaggggggaagacccagacacacaccggagaaagccccccagcgagcgggcccac

SEQ ID NO: 82349 - RNA, 84 nt, Homo sapiens
gggacgcgcgcgggcacccacggagccccggggcgaccgccgaccaggcacgcccaaccccgcgaaggaaggggacccaagccg

SEQ ID NO: 82350 - RNA, 50 nt, Homo sapiens
cgcagggcgcccccgggaacaacggagagaagcaaaagccccaccacaac

SEQ ID NO: 82351 - RNA, 96 nt, Homo sapiens
gaaaaccccagacaaaagaccgggggaggaaagaagggggcgagaggacgccagaaagcccaacggaggcccaggggaaaaggacaaaggaaaaga

SEQ ID NO: 82352 - RNA, 85 nt, Homo sapiens
gcaggacgacagcagcagcagcgcgccccagggaaagaacagaccagaccccggagcccaaggggccccgccaccgcgaggaccc

SEQ ID NO: 82353 - RNA, 74 nt, Homo sapiens
agcaccagcgcccccgcccaggagaccagcggccaacgcccggaggccgggcagggcccacggaaggggccccc

SEQ ID NO: 82354 - RNA, 70 nt, Homo sapiens
ccagaccacagccgaaacaaccaacgacaacaaggcagaagcccgccgcagcaagagagagcaaggagca

SEQ ID NO: 82355 - RNA, 70 nt, Homo sapiens
agggagcgggccaccgagaaggagggaaaagacgcgaggacaccgggggaaaccggcccggcggccaccg

SEQ ID NO: 82356 - RNA, 73 nt, Homo sapiens
aggcggacaggcggaacaaaggacgagcacagcccgggggagccgggagacaacacagcaacgccacagcaag

SEQ ID NO: 82357 - RNA, 68 nt, Homo sapiens
gaccccgccagcccaagaagcgaggacagcgaagaccgaggcaggacggcccaaaccaaaccagacgc

SEQ ID NO: 82358 - RNA, 80 nt, Homo sapiens
ccaaggggggccagaggggagcacagagcgagaccaggaaagaagggggcagaagagggcggacgacagcagacgacccg

SEQ ID NO: 82359 - RNA, 70 nt, Homo sapiens
gaccgagagcggaccgagagcgcgaaacgcacgagaaggggccacacgcggacccggagggaccagacgg

SEQ ID NO: 82360 - RNA, 78 nt, Homo sapiens
gaagacggccagggagagaggaacccaagacaccaccaggcagagaccgggcacaaccagccagcaacccgcccgggc

SEQ ID NO: 82361 - RNA, 78 nt, Homo sapiens
agagaacagcagcagagccgggcgggcccccgaacaaggaaaagaggccgagcaggccgcaagggcgggggaaacaag

SEQ ID NO: 82362 - RNA, 39 nt, Homo sapiens
cgacaaggggcccgaacagaggggcgagcaaaaaccgga

SEQ ID NO: 82363 - RNA, 40 nt, Homo sapiens
aggaccccaaagccagaccaagggacaagaacaaccgcaa

SEQ ID NO: 82364 - RNA, 73 nt, Homo sapiens
aagaagcgggcaacccagcgcaggagggcacggagagcaggacccaggcccaaaaggaaaagccagacacacc

SEQ ID NO: 82365 - RNA, 62 nt, Homo sapiens
caccggaaaaaaagggcggcccgaaggcaagggagagcccgaccagagaaaaggcggaagac

SEQ ID NO: 82366 - RNA, 72 nt, Homo sapiens
gggaacgagcccgaaaacagaggaagaaacgaacagccagcaggaagagaccccggagcccaccgagaccag

SEQ ID NO: 82367 - RNA, 62 nt, Homo sapiens
caacaagccagccgcaacgggcgcagcaacggcgccgcgaccccggagaaaaggccccaaac

SEQ ID NO: 82368 - RNA, 84 nt, Homo sapiens
ccgggcgcagacagagcaccagcaccagcagagagcgagccaaggcagcaaggagacgacagccggagagcgggcccggagccc

SEQ ID NO: 82369 - RNA, 78 nt, Homo sapiens
acaaaacgaaagaagccccagaagccacccggagcggcggacaccagaagagaaaagggcaagccagacgcacagggc

SEQ ID NO: 82370 - RNA, 72 nt, Homo sapiens
ccggagggggagaaacacccacacagcaacaaggaaaaaaagggcagagaaggggacggggaggaaggagcc

SEQ ID NO: 82371 - RNA, 80 nt, Homo sapiens
ggaccaaggagccacagaggaccgacgcgcgcaggcagaggagaaggcagcggacaaagaggaggcacaggaggaagacc

SEQ ID NO: 82372 - RNA, 72 nt, Homo sapiens
aggagcacagaagagcgaggagcagaaacggggggggagggggacccggaagaggagaaacagaagacgaag

SEQ ID NO: 82373 - RNA, 88 nt, Homo sapiens
gggagcggggggcgccgcgccaagggaggcccagaagaaacaaggccaagccaggcggaggcacccaaaccagggagaaaaagaggag

SEQ ID NO: 82374 - RNA, 63 nt, Homo sapiens
cagcccccaaggcaacagggagggacacacccaagcacggaccaaaggaaagaccaaaaagac

SEQ ID NO: 82375 - RNA, 72 nt, Homo sapiens
gagaaaaaacgaagcacccacagcaacaagaaaaccagaaggcaccgacaggaaaggaaaaggagaaccagg

SEQ ID NO: 82376 - RNA, 71 nt, Homo sapiens
gcccaagggcggggacacgggccgcgcgaaaaaggaccagcccaacggggacccagcaggaccaagccagc

SEQ ID NO: 82377 - RNA, 86 nt, Homo sapiens
ggcaaggagcacgggcagcgcaggaaacagacaaacgagggagcaggagacacccccgacaccgacacgagaggcacaagcggaga

SEQ ID NO: 82378 - RNA, 54 nt, Homo sapiens
gagggggccagcccagacggggacccggcgggggcaaggaagcacggaggcccg

SEQ ID NO: 82379 - RNA, 76 nt, Homo sapiens
caacaaagagagggagacgggaccgagaggaagaaaagaccacagcgccaaagagaagagaaggagccaagacacg

SEQ ID NO: 82380 - RNA, 77 nt, Homo sapiens
accgacaacgaccccacacaaggaggacaagcagcaaggggagacgagcagcaggaaaggaacacccgaaacccgac

SEQ ID NO: 82381 - RNA, 81 nt, Homo sapiens
cgacgcgagagaaggacccacggcgcgcgaagaggacaccccaaggcaccggcgggcgacgagaacaaccccgagagcggg

SEQ ID NO: 82382 - RNA, 72 nt, Homo sapiens
ggcgaaaaccaacgcccccccagcacacagaggagagcgacgagaagcgaaggagaggaaaagaggacaagg

SEQ ID NO: 82383 - RNA, 68 nt, Homo sapiens
caggccccagccgcagaacaccggcagagagagagacacaccagacgagaaagcgacggagcggacgc

SEQ ID NO: 82384 - RNA, 76 nt, Homo sapiens
ccgaccagccacccagacagggcagaagcaggcacggcagacccacaacagcacggagacgcaaagagaggaaagc

SEQ ID NO: 82385 - RNA, 95 nt, Homo sapiens
caggccagaccccgggagcccagccaccacagacagccacggacggagccagggaaggggacgcgcgccccgagcacgcacgcgggacaggagcc

SEQ ID NO: 82386 - RNA, 83 nt, Homo sapiens
gcccagcgagaccgaggaaggaccgaaaagacgcggccccaaaggaaacacccgaagaacacagcgccagcccaacggagacc

SEQ ID NO: 82387 - RNA, 56 nt, Homo sapiens
gcccccaggcggaacgcccgccccgcagagagggccacccccaaccaggaccaaag

SEQ ID NO: 82388 - RNA, 75 nt, Homo sapiens
aagaagcgcagccgcaccggccaaggagagcacaagccggacccccacccggcccgagaagaggacccgaaacag

SEQ ID NO: 82389 - RNA, 65 nt, Homo sapiens
gaaccaacgccacgacccagaaggggaacaggaaaaacgagaggagagagaacgcccggaaagag

SEQ ID NO: 82390 - RNA, 68 nt, Homo sapiens
acagaaccggagacaacccaagaaggggcaaaaacacgagagcagggagaagaaccgaagccgggcag

SEQ ID NO: 82391 - RNA, 81 nt, Homo sapiens
gccccggacggccgcgccccggccgcgccggggccgcgcggccccgcggagccaggcaccggcccgaccagccacgacacc

SEQ ID NO: 82392 - RNA, 71 nt, Homo sapiens
agcacaacaggaaccaggacacgcccaccaagaaagaaccggaaaggggaccgggccaggaaagcagaaaa

SEQ ID NO: 82393 - RNA, 55 nt, Homo sapiens
acgacgagacgacaccacaaagacaagcagaccggaagaccgacggaagaccaca

SEQ ID NO: 82394 - RNA, 71 nt, Homo sapiens
caaaggccccggggacagccacgaccagaacgcagagacgaggaagggagggcaacagagagaaaagcgaa

SEQ ID NO: 82395 - RNA, 74 nt, Homo sapiens
cacacagcaccgggcgaaaaggaggaaaagaagccagaccgagggaaaaaaccccaaacagaaaccgacagaca

SEQ ID NO: 82396 - RNA, 72 nt, Homo sapiens
caagccccacaccggccgggggacaaccgcgagaccgaggcacgggcaggcacagcagaccagaagcagcga

SEQ ID NO: 82397 - RNA, 74 nt, Homo sapiens
gcaggcccggccgacggccacacggcggccgcagggcgccggagccccccaggccggggcagcagaagaggaca

SEQ ID NO: 82398 - RNA, 77 nt, Homo sapiens
gagcaggggcccggggcggaaagcgcggaccgcgccgccccgccgcggcggggacgcaggaccgggcgaggccaccc

SEQ ID NO: 82399 - RNA, 70 nt, Homo sapiens
gaaacaggcggcggcggggggagcgggaagcgagacgacgggaccgaaggaccccgccagagacaaccga

SEQ ID NO: 82400 - RNA, 65 nt, Homo sapiens
gagccggccggcggcaaaggcaacgaggcacgggaagcaaagagcacacagaaaacaggcgcacc

SEQ ID NO: 82401 - RNA, 77 nt, Homo sapiens
gacaggcccagaacacgagcgaacaaagcaccggcaggaggagcaaagcccacagggaagacagaaggaagcaaaga

SEQ ID NO: 82402 - RNA, 70 nt, Homo sapiens
caagaagacagaccccgaggagacggcccacaccgaagccgcccagcgcagcaggagaaccgcgcaacca

SEQ ID NO: 82403 - RNA, 67 nt, Homo sapiens
gacggacaaaggcaccgagaaaaccaaaaggggcgcggcagcgaaaaggggccacagaggcgggcca

SEQ ID NO: 82404 - RNA, 49 nt, Homo sapiens
cgcccgcccccggcgcgcccaggccaggaaagaaaaccagagacagaga

SEQ ID NO: 82405 - RNA, 73 nt, Homo sapiens
gacaggcgaccccccacaggaggcgccaggcggcgagccagacgggcccaagccccggaaagccacgccccag

SEQ ID NO: 82406 - RNA, 75 nt, Homo sapiens
gagagaggaccccggacacgaaagccgggaaagggggaggggggcgaaaccgagcgcggggcagagaaacacccc

SEQ ID NO: 82407 - RNA, 64 nt, Homo sapiens
gacagagggccgagaaggacaggacagcccaacaagagcagagacgagaaaaggacacacgcaa

SEQ ID NO: 82408 - RNA, 77 nt, Homo sapiens
caagccaccccagagaagaaaaaggcaaaaacccggagagcaaacaacacgacgaccacacccagcacaaggcggcc

SEQ ID NO: 82409 - RNA, 81 nt, Homo sapiens
gagaaaaaaaccgccagaggagcccacaagcccggagggcacgagccacacgccacgcccgcagggccccagcaagaagag

SEQ ID NO: 82410 - RNA, 56 nt, Homo sapiens
cgcgccgccgggcgggcccgcagagcccacacacagcccccagagcacgacaggag

SEQ ID NO: 82411 - RNA, 76 nt, Homo sapiens
gcacccacgcccggcccggcccggccccgacacggggaggggaaacacagagaacggaacagaagcgagcccgacg

SEQ ID NO: 82412 - RNA, 66 nt, Homo sapiens
gcacgacccacgcggaacgaccggccagagaacaaacccccaaagccagaagccccgaaggggaaa

SEQ ID NO: 82413 - RNA, 70 nt, Homo sapiens
cacggaccgagagagaacgggaggcaacagaaggggagaagcacacagaacccaaagagcacccaacgag

SEQ ID NO: 82414 - RNA, 86 nt, Homo sapiens
cgggacccccccggaccgagccgacgccgcggggcagcgggccggcgccggcgcggaaagccaggccagaagaaggaaggccgggg

SEQ ID NO: 82415 - RNA, 83 nt, Homo sapiens
ggccgcccgccccgcgcgcggccggcggcccaggcgcacaccgcgagcgagccaaggcagcaaggagacgacagccggagagc

SEQ ID NO: 82416 - RNA, 37 nt, Homo sapiens
caccggggaccggacagaaaccaacccaggcaagaag

SEQ ID NO: 82417 - RNA, 38 nt, Homo sapiens
ccagagggagcccgcggcacggaccaccggcccaggcg

SEQ ID NO: 82418 - RNA, 47 nt, Homo sapiens
cgaacgaaccgaggcaaccagagaagaagaggccccaggaccggcga

SEQ ID NO: 82419 - RNA, 67 nt, Homo sapiens
cgacggcgagcccgggccgcgcccgaggaacagagacagacccgggggcccccaaggagagggaaga

SEQ ID NO: 82420 - RNA, 55 nt, Homo sapiens
acacaggagaagcaagaggcgcaaagaaggggacaagagacggagggggaagggc

SEQ ID NO: 82421 - RNA, 67 nt, Homo sapiens
caagaagcgaacacccacaaccggaagagccgaaacagacagagcgggagccaccagcgccaaaggg

SEQ ID NO: 82422 - RNA, 66 nt, Homo sapiens
agagcaagaccagccgaacccaaccacgccccagcagcaggaagaccggaaaaggagaaagaaaca

SEQ ID NO: 82423 - RNA, 71 nt, Homo sapiens
caagccggaggagaagcaagaaggcccggacacagcaaaccgggccacagagagagaaacacaaggaggcc

SEQ ID NO: 82424 - RNA, 75 nt, Homo sapiens
ccccagagccacagcgcacagacaagcaggccaaagaggaaacgcgaccaaacaggggcacacagcgcgacaagc

SEQ ID NO: 82425 - RNA, 81 nt, Homo sapiens
caggaacggacgccagaccgaacgggcgcccacagagaagccaagagagagacccacccccgcccccccaagccgaccccg

SEQ ID NO: 82426 - RNA, 78 nt, Homo sapiens
ggccaggacgcaggcaaagagagccaccaagaagccacggaggaaagacaagccccaaaagcagccgggaaaggagcc

SEQ ID NO: 82427 - RNA, 60 nt, Homo sapiens
gccgccgccgcgaggcgcgcgagcagcgccccacaaggaaagacgccaaggaagacccag

SEQ ID NO: 82428 - RNA, 116 nt, Homo sapiens
ccaaccagcgaagagcgacaagccgcggcagccgcggaccaccgccgccaggaaaccgggagaagccggccaggcaggcacaccccaccacaacgccacacgaccagccaggaccg

SEQ ID NO: 82429 - RNA, 78 nt, Homo sapiens
gcacaagagaaagaaggaagcggcgccgaaaaaaaggcccaggcagcgcagagccaacagacgagcagaagccgcaag

SEQ ID NO: 82430 - RNA, 58 nt, Homo sapiens
cgagcggacccggaccgggggcagggccgcgcgaagcggcccccgaggccggaaagga

SEQ ID NO: 82431 - RNA, 79 nt, Homo sapiens
gcagaagccgggccggggcagcggcacaacccgggagagagacacgcaccaggaccgagagaaggagccagcacgcaaa

SEQ ID NO: 82432 - RNA, 60 nt, Homo sapiens
aggacccgcaacagcgcagagggcagccaaggccgaaacaacgaacaaggacggaccaac

SEQ ID NO: 82433 - RNA, 73 nt, Homo sapiens
gacggaagcccaggcgaagacgacagaccaaggagcagcgcacaccggaggggggcaccacccagcaaggcca

SEQ ID NO: 82434 - RNA, 89 nt, Homo sapiens
gcgcaggaggagccgaggcgagccaacagcaccaacagaaacccaccaaggagacggcggccaaagggagggccgggaggaaaaggaag

SEQ ID NO: 82435 - RNA, 70 nt, Homo sapiens
cgcgagggcggacagcggggcccgcggaaaacagcacagacaggcacacccaccagcccggaacggagaa

SEQ ID NO: 82436 - RNA, 74 nt, Homo sapiens
aaaagcggaaaagaccgaaagaggaaagggaacacggacacgaacaagaaggcagcacaggcccccacagaaag

SEQ ID NO: 82437 - RNA, 49 nt, Homo sapiens
cgggaagagacagccaaggacagaaagcgggacacaagcaggagcacag

SEQ ID NO: 82438 - RNA, 76 nt, Homo sapiens
ccccgagagcggacacagcccaaccggcccggagcccaaggccccaggcagcccacaccagaagaccagagcagcc

SEQ ID NO: 82439 - RNA, 77 nt, Homo sapiens
gaagacccagaacagaagagccacagaagaagagagaagaggagagcggaaccaacggagggaaccgagacaaaacc

SEQ ID NO: 82440 - RNA, 59 nt, Homo sapiens
cccgcccagcccccgggagcgggacacaggagcgccaaaaaagagggggcgaagggaaa

SEQ ID NO: 82441 - RNA, 88 nt, Homo sapiens
acaggcccgagggcccgagagcaccgcgccagacagggggcccgaaggcaccgcagaacggggcgggacgacaggagccaagaccagc

SEQ ID NO: 82442 - RNA, 74 nt, Homo sapiens
agaggcaggccaaagagagagaaagggcgcaaaaagaaagaaaacaaaagccagccaaaaacagaccgaaaaac

SEQ ID NO: 82443 - RNA, 56 nt, Homo sapiens
agggggaagccgagaagaaagcaccgggaggaaagagagccacacgaagaacacgg

SEQ ID NO: 82444 - RNA, 110 nt, Homo sapiens
ccgccgccgccgccgccacgcgcggagccggaggaggaggggagaggccggaggacaccaacagagccacgcgcccaggcgcaggcaggggccacacgcgcacgcaaccc

SEQ ID NO: 82445 - RNA, 69 nt, Homo sapiens
cgcacagagacgcaaacaaagacccggacccgaaagaaggggagaaaacgcaggccacaaagacaggac

SEQ ID NO: 82446 - RNA, 74 nt, Homo sapiens
gaaacccccccaccacccgagaagaggccaaagacagaagggagggcaagcagaaagcagaggaaaacgaacaa

SEQ ID NO: 82447 - RNA, 86 nt, Homo sapiens
gacgagaagacccaaccacacggcacggcgcgacggccaccccgcacgcacaccaccccggcaggcagcgaacaagaccgccccac

SEQ ID NO: 82448 - RNA, 41 nt, Homo sapiens
cccccagcagagcgccgagcggacaagcagaccggaagacc

SEQ ID NO: 82449 - RNA, 62 nt, Homo sapiens
gcccgggagggcggccgcagccggacggaccccaggggcagagacgccacagggaccagcca

SEQ ID NO: 82450 - RNA, 82 nt, Homo sapiens
cacaaccaacaggaagggccgcccacgaggggccccacggagggacaagcggaagcacaccaggggacaccaccagggccag

SEQ ID NO: 82451 - RNA, 90 nt, Homo sapiens
aacagggagagccacagagggggaaagccaaggaaaaacggagagccacaaaaaaggaagcgaaagcagacgggaaaggaacccacggaa

SEQ ID NO: 82452 - RNA, 74 nt, Homo sapiens
caaaaagccccagaccagagacagaagcagaggacgccaggggggcggccggccgcagagcaccgcgcggagga

SEQ ID NO: 82453 - RNA, 59 nt, Homo sapiens
agaaggcaaggaagaggagaagaggccacgcaagcccccccgggagagcaggaagacag

SEQ ID NO: 82454 - RNA, 57 nt, Homo sapiens
ggaaaccaaaaaaaggaggaggcacaacaagccagccgacaaagccagacccaccca

SEQ ID NO: 82455 - RNA, 71 nt, Homo sapiens
aaacagccaggagagaaagaaacgcccagcccaacccgaccgggaaccccggacaaaacgcgcaaaaggag

SEQ ID NO: 82456 - RNA, 66 nt, Homo sapiens
ggcgcccggcgccggccgagaaggcagaggcgagccgaaagcagaaaacgaacgaaaccaccacag

SEQ ID NO: 82457 - RNA, 57 nt, Homo sapiens
gagaacgggcgcgccagagacgggagcgggccgagaaaaaccacagagacacacgca

SEQ ID NO: 82458 - RNA, 80 nt, Homo sapiens
acccagacccccccccgagaccggaagagaaagagcagggcagcagccagcaagcagacacgcagaaagcaaacaaaggc

SEQ ID NO: 82459 - RNA, 67 nt, Homo sapiens
gaagaccaagaaggaccgagccaaacaggagaacagagcggccggaccaacacagggagaggcgcgc

SEQ ID NO: 82460 - RNA, 76 nt, Homo sapiens
ggccgcggaaggccagaacacaggcacccacagaaggagaacaagcagagcaccggacacgaggagaaacagcaga

SEQ ID NO: 82461 - RNA, 58 nt, Homo sapiens
ggaaacagagaaagaaggcggccaggccaaccgaaggaagcgaaagggggcagacaga

SEQ ID NO: 82462 - RNA, 97 nt, Homo sapiens
ccggccgagggggcccaggggcagcgagcaagacagcaagcagcccgggcgcgccaggcacagccaagagcggaccggcagcggccagcgcagcggc

SEQ ID NO: 82463 - RNA, 79 nt, Homo sapiens
aaaaacgaaccacgagcggaagcacaacgggaagaaaggagcgacccagacccgagcccgaccacggcggcgcgcgggc

SEQ ID NO: 82464 - RNA, 70 nt, Homo sapiens
cgcccgccgcgggagagaggacccccccccccccccaaggaagcgggacgaccaggacacaccacgagga

SEQ ID NO: 82465 - RNA, 82 nt, Homo sapiens
cggagcggcggggcgcccggagccggccccgcccacccgcaaacagacccagcccgcggaaggcgagagacgggggcaccag

SEQ ID NO: 82466 - RNA, 80 nt, Homo sapiens
cagacacggggaagcgcaaaaacaagacggggcgccccacagaggggcgacggcagcagacgacaggacggcagagcccc

SEQ ID NO: 82467 - RNA, 88 nt, Homo sapiens
caaccagacgccagcgggacgaggaccgagaccgcggccgggaccgaggaccaagcggagcagccagcggcagagcgcccgaggaccc

SEQ ID NO: 82468 - RNA, 66 nt, Homo sapiens
cgccacgagagcaaccgacacagaagcacggagcccaaggccggcgccacccccagacgccgcagg

SEQ ID NO: 82469 - RNA, 72 nt, Homo sapiens
caaagcacaggaaccaccgaaagcggcgcaacgagggagcgggagccaaaaagcccgaccaccggaacaaaa

SEQ ID NO: 82470 - RNA, 67 nt, Homo sapiens
gaaaacagacagaacagaacccaaaagccgacaaccccagaaacaggacgccgccagccaccggcgc

SEQ ID NO: 82471 - RNA, 64 nt, Homo sapiens
gccggggcgagcaagccaggagcccagcgaaggccaacaccaagagacccggggccgaccaaag

SEQ ID NO: 82472 - RNA, 80 nt, Homo sapiens
accacaagcgaagaggagaccaagaaaagacgaagcggacaagacaaggaaaggaaccagggaagacacagacccagcac

SEQ ID NO: 82473 - RNA, 78 nt, Homo sapiens
cggacggacacccagcggcgacacgcgacgcgccaaaacccgcccggaaaggggacaccgacaccacccaacccagcc

SEQ ID NO: 82474 - RNA, 35 nt, Homo sapiens
caccgggacgggccgagccgagccgcgagaagggg

SEQ ID NO: 82475 - RNA, 73 nt, Homo sapiens
cggaagcacagaaggcaacagacggggaccccgaacaaaggcaagccaccgaaaaagacaaaagaaccaaaga

SEQ ID NO: 82476 - RNA, 90 nt, Homo sapiens
cgccagcaccaggccagcaccaccgggcgcccgcgccggcagaggaggcgagcacccgccagggagaggaacccccgcgcacccagcgca

SEQ ID NO: 82477 - RNA, 78 nt, Homo sapiens
cacacacagggaaaaaggagcagcccgggcaccacagaaaaggggcagagagaagagcacacagaaggccaggagcga

SEQ ID NO: 82478 - RNA, 80 nt, Homo sapiens
aaaccccacggcaagcgacgcggcccggccccaagggacaaggagcccggcacacccaacccgaggccccggccgccagg

SEQ ID NO: 82479 - RNA, 78 nt, Homo sapiens
aacaagccaaacggacaggagaacggcgccacaagaaagagcaggacaagagaaagggacaagggagaagaagccaca

SEQ ID NO: 82480 - RNA, 78 nt, Homo sapiens
gggagaacacagaaaccggccccagccgacacagcccccgaggagcagccacaccagccccaggcgcccccccacgcc

SEQ ID NO: 82481 - RNA, 57 nt, Homo sapiens
gcagcaacggaacaaggccccaccgaaagccgggcccagggacgggagcagcggaag

SEQ ID NO: 82482 - RNA, 55 nt, Homo sapiens
gccagcagcaacccggaccacagggagacggccgggagcccagaaacaaacacag

SEQ ID NO: 82483 - RNA, 115 nt, Homo sapiens
ccccgccgagccgccaccgcaggcgaggacggcggaccccgcggcgggaggagccgccccgaggagagcacacagaaccgacccagaccagcaagccgaaacgcagcgcgagacg

SEQ ID NO: 82484 - RNA, 57 nt, Homo sapiens
gaaaaggagagagaggcgcccaagcgccagagggaccagaggcagaagagggcccgg

SEQ ID NO: 82485 - RNA, 83 nt, Homo sapiens
ccaggaggaagacggagcggcgcccagcccaaaggcccagaggggagcagagggccgcgccgggcaccagcagacggaacaac

SEQ ID NO: 82486 - RNA, 75 nt, Homo sapiens
acaaagggagacaagcaccagaggacacaagaaaggcccaggcaccccgaagccgcaccggaagaggacaccacc

SEQ ID NO: 82487 - RNA, 76 nt, Homo sapiens
cgagaagaagaaaccaaggccgggacagaccccgcggccccaaggcggcggaggagcggacaacccagagagaaac

SEQ ID NO: 82488 - RNA, 35 nt, Homo sapiens
agaggccaccccaaccaggggccagacccacgaga

SEQ ID NO: 82489 - RNA, 54 nt, Homo sapiens
acaaaggacagacagagagaggcaccaccggagaccgggcccacccgccagggg

SEQ ID NO: 82490 - RNA, 87 nt, Homo sapiens
cccaaccagacccaggacgggcagagcccggacagagaaggcaagaggccaggaaggcgaccggcagcccgggcaggggagacagga

SEQ ID NO: 82491 - RNA, 93 nt, Homo sapiens
acggaagaaccaaacccaagaaacaggccggggagcacagcaacgcaacggagccgcgaaaagacagacaagcaaaaagaaggacaagaaggg

SEQ ID NO: 82492 - RNA, 58 nt, Homo sapiens
acggggccaagggacaaggcaccgcccaggacccaaagacaggaccacgcaccagcag

SEQ ID NO: 82493 - RNA, 80 nt, Homo sapiens
cagccagagcgagcggcgcgggcccagaccgccgggcaagcaccagagagggaaacacggggaacggccaggccgcgcag

SEQ ID NO: 82494 - RNA, 71 nt, Homo sapiens
aaaagagacagaagcacacccgggaaagcaggcgacaaggccagaacaacagggcagacacaaggaacagc

SEQ ID NO: 82495 - RNA, 81 nt, Homo sapiens
cgggcgaacagcaaaaggcacaaaacaacccaaggggaaagaaccacgaagccgcggcaaggccgccagagaagcccccag

SEQ ID NO: 82496 - RNA, 81 nt, Homo sapiens
gcaagcggagccccccaagagccggaaaggccaagaccaaagaaaaaagagaaggaaagcggacaaaacgcggaaagaggc

SEQ ID NO: 82497 - RNA, 62 nt, Homo sapiens
cggccgacgcaggggaacagggccagagccggaaaacagcaaggaaagagcggaggacccgg

SEQ ID NO: 82498 - RNA, 59 nt, Homo sapiens
aagaagcagccaggaggcgaaacgggccagcagaagggaagcaccaaaaaaagaccaga

SEQ ID NO: 82499 - RNA, 75 nt, Homo sapiens
ggagccaggcaaggacacaaagaacccgccgacacccaaacaggcgcgaccgcccagggagacggaacccacaca

SEQ ID NO: 82500 - RNA, 74 nt, Homo sapiens
aaaaagaaacaaaagagaagaggagcgagcaaaggcaagagaagcacagcagacagacagagcggcaggcggga

SEQ ID NO: 82501 - RNA, 60 nt, Homo sapiens
gggcccacacgacgccggagggcccccccaaggagggaccccaagaaagcaagcaagagg

SEQ ID NO: 82502 - RNA, 76 nt, Homo sapiens
cggagcaaaacgaaccgcgaagcagaaacaccgacacggggcggggaagcggccagggagccaaggaccggagaac

SEQ ID NO: 82503 - RNA, 73 nt, Homo sapiens
cggcgcgcgcccccaggggcggccgcggcgccgggcgccgagggcgacgccaggagcacaccgaaaagaaagg

SEQ ID NO: 82504 - RNA, 70 nt, Homo sapiens
aaagacagacaacggcagccgcaaggacacccagcaggaagaaccgagcgccagaacacgggcgacccac

SEQ ID NO: 82505 - RNA, 61 nt, Homo sapiens
ggaggggccgcggaggggcacgagcgccacaaccccagcaagaggcacggagcccaggcgc

SEQ ID NO: 82506 - RNA, 74 nt, Homo sapiens
gcggccgaccaccggggacagaggccgcgaagaggaaacaaaagcgcaggagagaccaggccggagaccaggag

SEQ ID NO: 82507 - RNA, 40 nt, Homo sapiens
gcgggggagcggcgcgggggacacagaaggcccccggacc

SEQ ID NO: 82508 - RNA, 75 nt, Homo sapiens
ccagggaggccgcacggcccacgcgagcccagcaggcgcagcagcaagagggaaaaaggcaacgggaccgcggca

SEQ ID NO: 82509 - RNA, 41 nt, Homo sapiens
gcccagagacaacgagagaacacaacggcagcgggccgcac

SEQ ID NO: 82510 - RNA, 62 nt, Homo sapiens
accaaaggccggaggcaccacaacacgaaacgggagaaaaaagacgacgggccagaaaagca

SEQ ID NO: 82511 - RNA, 65 nt, Homo sapiens
ggcacagggaggccagccggagaagcgagcagcggggggcggacgaagcaggacacaccgaacac

SEQ ID NO: 82512 - RNA, 58 nt, Homo sapiens
gggggaagaggcgggggcggcccggggccggagaagggcaggcaccaaccagaaggcc

SEQ ID NO: 82513 - RNA, 75 nt, Homo sapiens
aagcccaagagaggcaggcagcgacagccacacaacggacaggcaccaaccagcggacacacggaaaagggacgg

SEQ ID NO: 82514 - RNA, 79 nt, Homo sapiens
agcagcgcccccggacagcacggggaccggagaagagagcaggcagccaggccaccgagcggcagcacagccgcggccg

SEQ ID NO: 82515 - RNA, 55 nt, Homo sapiens
accaagaggagcggagaaccaggaaccgcgcagggaccaaaaaaccaaggacgac

SEQ ID NO: 82516 - RNA, 32 nt, Homo sapiens
acacagggcaccagaccgccaacaaaggaacg

SEQ ID NO: 82517 - RNA, 73 nt, Homo sapiens
agagcggaccgagagcgcgaaacgcacgagaaggcaagagaagaaagcaccaacaacaaagaaaacgggaaga

SEQ ID NO: 82518 - RNA, 61 nt, Homo sapiens
gaacaaaacagaccggagaaggaaaacggacgagaacaagcggaaaacaggggcgagggga

SEQ ID NO: 82519 - RNA, 67 nt, Homo sapiens
cccgcggggcaagaagaggccagccggacccccaaaaccggaaagacagaaagcagaagccaacaac

SEQ ID NO: 82520 - RNA, 76 nt, Homo sapiens
acaaacaacacaaaccccaagccccgccaggcccaaccacaccaggcaaggagcacaaagacaggggcggaaagca

SEQ ID NO: 82521 - RNA, 75 nt, Homo sapiens
cgcaaaacgggacaagcccgcacgcgcagagacaagcccgcgcgcgagacagagcaagggcggagaggaggggag

SEQ ID NO: 82522 - RNA, 67 nt, Homo sapiens
gcggcgagcggacagaggcaaaaggaaaaaaccaaacaagcaggaaaaggacaaaccggcgaccaca

SEQ ID NO: 82523 - RNA, 66 nt, Homo sapiens
ggacagaagagccagcaggaacacaccagcaccagacagcgaaaaagaggacccaaaaaagagaga

SEQ ID NO: 82524 - RNA, 81 nt, Homo sapiens
acggagggaaagaccaggcagacggaacagcgacgaacaaccgagaaagacaaagacaggccaagaccgggaccaaggaca

SEQ ID NO: 82525 - RNA, 80 nt, Homo sapiens
cgaggggagcgcggcccccgccccccccccaccgcgccccgggaccagccgcgcggcgggcccacccgggcaggagaggc

SEQ ID NO: 82526 - RNA, 116 nt, Homo sapiens
accaagacaacagcccagaggaggccccagcaccgcggccggcgcagcaacaaggccgaagggcaagagggcacagaagacggcgccccacacacggcccacacggaccccgcggg

SEQ ID NO: 82527 - RNA, 62 nt, Homo sapiens
gagggggaagggcccaaagccagaagacgggaacggagccccccgcacaggacaaccaccag

SEQ ID NO: 82528 - RNA, 78 nt, Homo sapiens
ggcgccagcgccggcaacggaagaggggcggcaagacgccgacggcggcagcccaccccacaccgggccaaaaaaagg

SEQ ID NO: 82529 - RNA, 79 nt, Homo sapiens
ggcggaaggacccgagacggaaaaaaacaggcgacggaacgaggaggggacaacagagccgacacagccaagaagcaga

SEQ ID NO: 82530 - RNA, 65 nt, Homo sapiens
gcaggagaaagggagcgcaccccagggagcgccacccgaaaccagcccagaacccgagaaacaga

SEQ ID NO: 82531 - RNA, 80 nt, Homo sapiens
cgacaaagggacaaaagaccagaaagagccagacaaaacgcggacaaaggaaagaaaacaagccacccagacaagaggaa

SEQ ID NO: 82532 - RNA, 78 nt, Homo sapiens
gaggagcagagcgcagggagaaggaaagaacaggccgggcagcggacgcgagaacggggggcggcagagcccgagaga

SEQ ID NO: 82533 - RNA, 78 nt, Homo sapiens
gccagggggaccgcgcggaggggggccaacgaccgcaagcccaccaagcgggaagcgaagccgaaaccgcaggccaca

SEQ ID NO: 82534 - RNA, 73 nt, Homo sapiens
cacggggcaacgacgcagacggcagggggaaaagaccagccaagcacggaacggaaacagaggcggaggcggc

SEQ ID NO: 82535 - RNA, 69 nt, Homo sapiens
cggcgcgggcgggagcgcagccccagaacacaacaccagaggggacaacgaagagaggaaagaagcgga

SEQ ID NO: 82536 - RNA, 82 nt, Homo sapiens
agaacaaagaaaacgcgaggacagagccacggggaagcgcccgggaggcgcaggaagaagaaagaaagcaaagcgaaaacgg

SEQ ID NO: 82537 - RNA, 84 nt, Homo sapiens
gaggcagcgcgggacccagcccaggcggcgcggacggggcggcaaaccagccggcgggcgccacaacggacgacgaaaacacag

SEQ ID NO: 82538 - RNA, 72 nt, Homo sapiens
agaagcgaagacacccagaggaacccaggagaccaaccaccgacaaaaggggcagcgaaaccaccccagagc

SEQ ID NO: 82539 - RNA, 71 nt, Homo sapiens
acaaaagcggaagagcagagagaaggcagggcaaaccagaaagacgaacgcaacccaggagccccgggcgg

SEQ ID NO: 82540 - RNA, 86 nt, Homo sapiens
aaaaaccagacggaagcgacgacggcaggaagaaaacgagccaggaacaaagagcaagagacagggaccagaaaagaaacggccac

SEQ ID NO: 82541 - RNA, 79 nt, Homo sapiens
agagccggccggccaagggggacgggagcggggccggcggccaccggaaccgcaacccacgacgagacaagccccagga

SEQ ID NO: 82542 - RNA, 78 nt, Homo sapiens
cagcaaccaacaaccagaaaaacaacaccacagacaagcaggagccggggaaacgcaggaggcacccagacacccccc

SEQ ID NO: 82543 - RNA, 71 nt, Homo sapiens
ggggccggcgcgcgaccaggggccgccgggaagaggaccaagggcgggcagcaagcagggaggagaccgag

SEQ ID NO: 82544 - RNA, 68 nt, Homo sapiens
agagcgagggaggagagagggagagccaaagaagaaaccagcaaaaccagaagggagaaggccgagag

SEQ ID NO: 82545 - RNA, 68 nt, Homo sapiens
acccaacgccgaagaaggggaaagaacccagaaaaggagcaccgaaacacagcaaccccccggaccac

SEQ ID NO: 82546 - RNA, 65 nt, Homo sapiens
gacgagagcaagcaggggaaaagagcccgggcagccaggccagcagaggaacagaaggaagacac

SEQ ID NO: 82547 - RNA, 74 nt, Homo sapiens
gcgggcaccaaaaccaggcaccaggcacaagaccccgccgcacaacgcaggacaggcgacacaacagggaagac

SEQ ID NO: 82548 - RNA, 62 nt, Homo sapiens
caacgcgaggggagcaccaggaccgggccggaacgagacgcacgccaagcccaaccaagccg

SEQ ID NO: 82549 - RNA, 43 nt, Homo sapiens
cggcggggagccgcgcgcggcagggcgaacgacccccaacccc

SEQ ID NO: 82550 - RNA, 78 nt, Homo sapiens
gcccaaaacccggggaggcagaaaagaaaaagagaaacggaagcaaaggcagaagagaagaagcgcagacaggcgagc

SEQ ID NO: 82551 - RNA, 82 nt, Homo sapiens
ggcaacgcagggggccgagcaaggcaggcgggccacacagcacgcccgccaggcacaagcagaccgccacaccagagaccac

SEQ ID NO: 82552 - RNA, 74 nt, Homo sapiens
ggaccaccgcccccgcgccccgcaccgcggcaaagagaggacgcagcgagaaaggaaaagaaaagccaagagga

SEQ ID NO: 82553 - RNA, 68 nt, Homo sapiens
gcgccgaagcaacaacacagcagaagcggagcaggagcaaaggagcaagaaaccagacccggaaacgc

SEQ ID NO: 82554 - RNA, 78 nt, Homo sapiens
ggcgggaggcccggccagccgacgcaggcccaccggcggccagccccacaccggaggaccaccagagacaggacagga

SEQ ID NO: 82555 - RNA, 76 nt, Homo sapiens
ccgcagcagcagagaccacgaagaggccaagcaagacgccccccaggcccgcccccccaagaggaaaacacaggag

SEQ ID NO: 82556 - RNA, 56 nt, Homo sapiens
cgaaggcgcgcaccggaagcaccagcgaggaaggcaggggcaaggcagaaagcggc

SEQ ID NO: 82557 - RNA, 72 nt, Homo sapiens
gggccaccaccgacagcgcgcccggccaggaaccaggagccgcaaagaaggagccaagggcccacgcaggaa

SEQ ID NO: 82558 - RNA, 70 nt, Homo sapiens
agaccggaagcgaaagaaaaacaggagaagaaggccgacacggagggggccaggaccgcaagcaggccgg

SEQ ID NO: 82559 - RNA, 76 nt, Homo sapiens
gcaggcccccgcccccgagcagccgagagggccaggagagggagccaaaaccggcacacccggggagccgggcgcg

SEQ ID NO: 82560 - RNA, 88 nt, Homo sapiens
cggagacccagcgcacgggagcagccagagggaaaggccaacaaagcagaccgcgagcgaacccaccgaagcacagccggcgccacca

SEQ ID NO: 82561 - RNA, 84 nt, Homo sapiens
gaggaagcagcagaagagaagaagaagcaggagaacgaaacggagccagagaaggcagaaggaaccgaacacagggagggccaa

SEQ ID NO: 82562 - RNA, 73 nt, Homo sapiens
gcccagcccccgagggcgggacacagggcccggcaggaaccggaacaacccacagggcagagcggagaagccg

SEQ ID NO: 82563 - RNA, 94 nt, Homo sapiens
gaagagcaaggccacgccggccgcgcgcgccagcaagaagaccgcgcccgagcccagaccccaagaagaagcggaagaggagccgcggaaccaa

SEQ ID NO: 82564 - RNA, 62 nt, Homo sapiens
aaaaaaagcccagcaaagagccacagaggcagacgccagcagacacacagccgggcacagcg

SEQ ID NO: 82565 - RNA, 78 nt, Homo sapiens
gagcgaggcggagggagaagggaagaacaggaagagcagagggggaagcccaaagaacaaaagaggggacggcaaagc

SEQ ID NO: 82566 - RNA, 73 nt, Homo sapiens
ggagaaagaaaagaccacaagaaaaccaaagcgaggaacaagaaacaggcggccagcaagacagcgacccaag

SEQ ID NO: 82567 - RNA, 59 nt, Homo sapiens
ggcccaccggcccaggcgaacaaacgcagggcagaaaagaacagacccagaagaagcga

SEQ ID NO: 82568 - RNA, 71 nt, Homo sapiens
gcaccaagaaagccaaaggaccccagacaggagaccgcagaggcgcccgaagccccgggccggagacagac

SEQ ID NO: 82569 - RNA, 87 nt, Homo sapiens
cagcaaaacgaacccaaccgaggacgccccccacaccaccgaccaggaccgggaagccgcaaccgcaacaaacgaggccgaaggaag

SEQ ID NO: 82570 - RNA, 53 nt, Homo sapiens
cgccgaacaaacccagcagcagaaacgagagcgcaaaaccaccccggaaacac

SEQ ID NO: 82571 - RNA, 81 nt, Homo sapiens
gaggagaacgcaggcccccgagggcagcccgagacccaccagagggcgccacaaacggccagccggcccggccggacgaaa

SEQ ID NO: 82572 - RNA, 73 nt, Homo sapiens
cccccccaccaacgaccagacacggaccggcaccgccgcgacgcagaggggcggcgccagggcggcccacggg

SEQ ID NO: 82573 - RNA, 77 nt, Homo sapiens
gacgcagggcgcccccgaccaagcccacgaagaccggagaagaggacggcgccacccgccacccacgagcccggccg

SEQ ID NO: 82574 - RNA, 84 nt, Homo sapiens
ggagcggcagccagccaggcgcaggaagggggcagcgcgggcgcgcggccggccggagccagcagcagagccccacgcccccga

SEQ ID NO: 82575 - RNA, 50 nt, Homo sapiens
ggggcgcaaacaggagacagaggagacagaaagacacaaccagagaacgg

SEQ ID NO: 82576 - RNA, 70 nt, Homo sapiens
gcgggccagcccacggaaggccaggaacccgaagacacaccaggagccagcagcgaccacccgagaacgg

SEQ ID NO: 82577 - RNA, 70 nt, Homo sapiens
aagggggaggccccgcaaccaggccaagaagcgagagaagaaaaacagaaaaagccaagacagaaacaag

SEQ ID NO: 82578 - RNA, 82 nt, Homo sapiens
caagacgcgcgcaggcggcgcgagcgcgggagcggcaccggagccacagaagacgaaacgccaagagagaaacgaggcacaa

SEQ ID NO: 82579 - RNA, 71 nt, Homo sapiens
accgccggacgcagcgaaggccaaggccgagcggccccgagccgggacacccggcggcggccccggagaaa

SEQ ID NO: 82580 - RNA, 56 nt, Homo sapiens
gaaagaccaaccgcggaacccaaaagaaacaaagccgcaggggagaaaaaccaaga

SEQ ID NO: 82581 - RNA, 69 nt, Homo sapiens
cacccgaggagcagaacaccagagagcagcagccagccaagcgagcgcaacagcaagcgcaccggagac

SEQ ID NO: 82582 - RNA, 84 nt, Homo sapiens
ggggccgggccggagacgcgcccgcgcgcaggggaagcgggcagaaaacacggaacggagaaggggaaaaacagcaacgcagag

SEQ ID NO: 82583 - RNA, 49 nt, Homo sapiens
gagaaaaaggaaaacgcggaaaaccgacacaacagggaccccaccacgc

SEQ ID NO: 82584 - RNA, 83 nt, Homo sapiens
gacgcggacagcgggcggagccgacgagcggcgggccaggcgaaccagccgaaaaaggagaaaccaaaaggaaaagcgaacca

SEQ ID NO: 82585 - RNA, 62 nt, Homo sapiens
cagcgggaggaccgggaaggcaggaagcacagaaggaagccaaaggcagagaagcgacccgg

SEQ ID NO: 82586 - RNA, 72 nt, Homo sapiens
gccccggccgccccccagaccgggacagaaggcaagggccgcggacacgcgggcccgccgagcgcgagcccc

SEQ ID NO: 82587 - RNA, 76 nt, Homo sapiens
ggcgcggggagagaggggcgggcgagcagaggggaagcggcggagcaggaggagggcggacaaagacccggggcca

SEQ ID NO: 82588 - RNA, 71 nt, Homo sapiens
cgaagcgaagacagagaacgaagcgaccaaagcgcacggcagcgagaggcagcgcacgggaaagcgccgac

SEQ ID NO: 82589 - RNA, 69 nt, Homo sapiens
accaagagggaaggagacagggaagcaaagcgcaacagaaacagagagaagccgccgacaaaacacgga

SEQ ID NO: 82590 - RNA, 76 nt, Homo sapiens
gagcacgcgacagcgaggaagcgcaccacagcacaaaagggacaaagaggccaggagacacgccaccgccggcggc

SEQ ID NO: 82591 - RNA, 40 nt, Homo sapiens
cggagcccacgaggcccccagcaccaaccagcccagggcc

SEQ ID NO: 82592 - RNA, 61 nt, Homo sapiens
caagcgggcagcgaagagagagcaaggaggaacaacgggaccggcaggcccaaagggaccg

SEQ ID NO: 82593 - RNA, 55 nt, Homo sapiens
ggcacaacgccacgaggcacaccccagcaaggcagccggcacccgcacaacccag

SEQ ID NO: 82594 - RNA, 68 nt, Homo sapiens
aaagccccacccgccgcagcaagcagagccagcagcgcagcgcccgcagccacgcaacacaagccaac

SEQ ID NO: 82595 - RNA, 76 nt, Homo sapiens
ggagcaggagaaagcaaaggcgccgaagcgcacgaccccgacacccccaaggcacgccgggcgcccgcgaagagca

SEQ ID NO: 82596 - RNA, 74 nt, Homo sapiens
gcgccccccacagagaaaggggcccgccagcggacagccgccgccaacgacagcccacgagcgacaggagacaa

SEQ ID NO: 82597 - RNA, 59 nt, Homo sapiens
caacgcccagcgccacgcagggacggagcaaaacccggccagacggacccgagacccca

SEQ ID NO: 82598 - RNA, 72 nt, Homo sapiens
accaaaagccccaccacccgaacgggcaacaccacacaggacgacgcagcacagagaggaaacgaggaaacg

SEQ ID NO: 82599 - RNA, 74 nt, Homo sapiens
gcaagcaagaaggaaggccaccaccgggcagaaacggggagggagcaacaacaaggagcaagcacagcgcgagc

SEQ ID NO: 82600 - RNA, 84 nt, Homo sapiens
accggcccgcagcaagaggcggacgagaaggacagggaagggcacacacgaaacgggcaaccggggccagggccagcaccagag

SEQ ID NO: 82601 - RNA, 71 nt, Homo sapiens
aaaacaaaagaacccaagggacaaaggaaccggaccacccaaggggaagcggaggcagggagcaagcgaag

SEQ ID NO: 82602 - RNA, 77 nt, Homo sapiens
ccccgccgcgcccaggagcggaacaacgcggcgagcggggagcggagaaaaaaaggcaggaaagagaaagaagcgag

SEQ ID NO: 82603 - RNA, 75 nt, Homo sapiens
ccccggcgggcccgaggcggcgagagaggcaggcggagccgaccgggccagggaaaacgagccaggcagacacac

SEQ ID NO: 82604 - RNA, 74 nt, Homo sapiens
gaagccagaaaacacagcaagcgggcaaagagacaccagcagaaaacgaagagacaaaggccaccgagaaacag

SEQ ID NO: 82605 - RNA, 77 nt, Homo sapiens
gccagcacacggggaaggaagcgaaaccacagacagacgagccccagaagaggcggagaagccgaagggccagaacc

SEQ ID NO: 82606 - RNA, 88 nt, Homo sapiens
aaggacagaaagaagacgggagacaccggaaccgaaagaaaacggaccaaagacgaccaccaaagccagcccccagaacacgccgaca

SEQ ID NO: 82607 - RNA, 111 nt, Homo sapiens
ggcgccgaaggcgaggagacggagcacggcccccgaggacggaggcacagcgcagcgacgagagggcgccacggccaccacgcggcagacagggcccgcccggagcaaaga

SEQ ID NO: 82608 - RNA, 46 nt, Homo sapiens
gcgcacgcgacaacgagcaggaaaggacagagcgggagccaccagc

SEQ ID NO: 82609 - RNA, 81 nt, Homo sapiens
ccgagcagcccccacgccgcagcagacacagccccagcaaagggagaaagggcgaccaaagacaggaagagcaaacagagg

SEQ ID NO: 82610 - RNA, 56 nt, Homo sapiens
cgacgacgaagcccacacaggcgcgccgggaaggacgcaccggagcaaaacagacg

SEQ ID NO: 82611 - RNA, 74 nt, Homo sapiens
acaacgggcaggcgaacgagggaccaagcacgccagaaagggccaaggaaaggacgcagacccgaaagcaaacg

SEQ ID NO: 82612 - RNA, 79 nt, Homo sapiens
ccgcagacaagaacggagaggcaacagaacggcagcccagacaccagcagccaccggaaaagcaacagcaaagaaagca

SEQ ID NO: 82613 - RNA, 50 nt, Homo sapiens
cggggacgcggacgcacgaacggcggccaaagcgccagacaagggccgag

SEQ ID NO: 82614 - RNA, 74 nt, Homo sapiens
gcaacccagagggcaacgccgcggcccgacaggagccagacggagaaaagaaaggaaagaaaggaagaaggaac

SEQ ID NO: 82615 - RNA, 92 nt, Homo sapiens
ggaagaaacgaaggggggaggcccaggccaaaagacaaggaagccccacagccaacagaaagcacaagcaaccccacccaacggacaacccc

SEQ ID NO: 82616 - RNA, 86 nt, Homo sapiens
ccacacacccaggcgcggagggaagacgcccgggccaccaagcaaggccaacggaccacaccaaaagccaccaaaggaacacgcca

SEQ ID NO: 82617 - RNA, 77 nt, Homo sapiens
ggagaagaaaggggccgggggacggaggagccccggcggagaccacgcaaggccacagacaacaaagcacacggaga

SEQ ID NO: 82618 - RNA, 75 nt, Homo sapiens
ccagagccccggggccaagagaaaggaaccaggggccaaagcacggaggcaacgggggagacagagagaaagaag

SEQ ID NO: 82619 - RNA, 71 nt, Homo sapiens
cgggcgaaaaggaggaaaagaagccagaccgaggggagagaccccagaagaccggaggggcaccccaaaca

SEQ ID NO: 82620 - RNA, 73 nt, Homo sapiens
agaggaacccgaaaaccccggggagaagcgcagcgccaacccgaaaagaagcagaacaaaaaagcgcccaacc

SEQ ID NO: 82621 - RNA, 77 nt, Homo sapiens
acgcgaccccggggccacccaaggcgcacccgccggaggaagcagacgcccgaaaaccgcacaggaacagcggaaca

SEQ ID NO: 82622 - RNA, 77 nt, Homo sapiens
gcagcgccgagagacgccccaccaggcacaggaaggagggccccggagcagccacaccaccgaggccccacccagca

SEQ ID NO: 82623 - RNA, 71 nt, Homo sapiens
gagaggaacaggcggcgggcgagccggaggaaggagaacacgccagagcaagacccacgaagggcacacaa

SEQ ID NO: 82624 - RNA, 77 nt, Homo sapiens
cggaccccccgaacagaaacaggaggaacaaaacgggggaaagacacccgcaccagcgccaaccggagcgacaccac

SEQ ID NO: 82625 - RNA, 83 nt, Homo sapiens
cgacgggcagcccgggcccggcgaggcagaccacgccgccgcaacgggcgagccccaaaagcacgcacgaaaccggcaagcca

SEQ ID NO: 82626 - RNA, 84 nt, Homo sapiens
aggcggcggcggcggcggccgaggaggaggagggggaagcggcggcggcaaaggaggagaccgccagaggacaggagacacgcg

SEQ ID NO: 82627 - RNA, 73 nt, Homo sapiens
acgacccagcgaggacgccaaggagagaaggaaagcaacgaggaagaacacagacaggaggcacaaagagaga

SEQ ID NO: 82628 - RNA, 77 nt, Homo sapiens
gaaaaagggcaacaggggacaagagaaagcagaggaagggcagcagaacaacgcagccaccagccagaaccagaaga

SEQ ID NO: 82629 - RNA, 78 nt, Homo sapiens
cggcccacgaggcgcacgaggagggcacacccacccagagcggcggggaaggccacccagccacccggacagacaccc

SEQ ID NO: 82630 - RNA, 38 nt, Homo sapiens
ggcaaagccagaggccccccaaaccaagcaagggaaca

SEQ ID NO: 82631 - RNA, 78 nt, Homo sapiens
cccgccggccaggccgacgggcaccccgagcggccaccaaggcaggaaggagagacaaacagcagcaggcagagagaa

SEQ ID NO: 82632 - RNA, 65 nt, Homo sapiens
cggcgaaggcagccacagcgcccagagagaaacaacaggaacccccaaaaccaaaagccacggaa

SEQ ID NO: 82633 - RNA, 73 nt, Homo sapiens
gaccgcgagaaaaggccagggcccacgcaagagacacagcaccagagaaaaaaaacggaccaccgcggaagac

SEQ ID NO: 82634 - RNA, 78 nt, Homo sapiens
cccaagagcgggaacagaggcagagcgcggcccagacggaaggcagggcccgacacagccacgcagccaaacccaggc

SEQ ID NO: 82635 - RNA, 67 nt, Homo sapiens
ggggagacagccccccgcggcggcagccacagaaccggcggggcgcggaggaccgacggaaaagaac

SEQ ID NO: 82636 - RNA, 76 nt, Homo sapiens
acgaagagccccagcaggaggaaacaggaacacgaaagaggaaaaacgcacaagaaaccgaagccaaggaggagag

SEQ ID NO: 82637 - RNA, 103 nt, Homo sapiens
gacgcggcagcaacagcgagacccggggcgaggacccccgagccagacccccgggaacagagggcagcagaaaaacaagaggacacaaccaggaaaaaaagaa

SEQ ID NO: 82638 - RNA, 70 nt, Homo sapiens
cggcaaacaggcggggaccggcgaggagcgaagaacaaacacccgagcgcgagcggacagcagcagcaca

SEQ ID NO: 82639 - RNA, 39 nt, Homo sapiens
ccgacaccaacgagcccacacccagaacacaccaccccc

SEQ ID NO: 82640 - RNA, 71 nt, Homo sapiens
ccgcgcgcggaagcgccggaaaccagcgaagacacacccaccagcaaagaaagaggaggaaacaagcccaa

SEQ ID NO: 82641 - RNA, 84 nt, Homo sapiens
caacaagccagaaagagccgggaagcgaaaggggcaccagcgggcacaccaagaagcgccccgcaagacccaccgaggccgcgc

SEQ ID NO: 82642 - RNA, 72 nt, Homo sapiens
cccacaaacagggcagagggcaggcacgagcaaggaggagccccgaaaagcaaagaaaaaggaaggacgaac

SEQ ID NO: 82643 - RNA, 79 nt, Homo sapiens
ccccagaaagcaagaaacccaggacagcagcggacaacaagcaggaccgccagccccaggggcggaagaaggaagggac

SEQ ID NO: 82644 - RNA, 75 nt, Homo sapiens
gaccacgaccagcaggagacccggacaccaggcacgcaaccccgggcagaagaaaggcagaccccgagaagaagc

SEQ ID NO: 82645 - RNA, 74 nt, Homo sapiens
acacgaggggacacaagccggaaaggccccgagagcaaccgggcccgagggcaggacagcaggcaccggcgaag

SEQ ID NO: 82646 - RNA, 72 nt, Homo sapiens
gccagccacacgaggagacggaaccggagaaaagaaaaagagggacgcggacagagacgggacgccagcaaa

SEQ ID NO: 82647 - RNA, 73 nt, Homo sapiens
cacgaccgggagaccggacagagagggaaagccggcccacgagaccccaagaccgagcaggaggacagaagag

SEQ ID NO: 82648 - RNA, 72 nt, Homo sapiens
accccgccccccccaggcccaggacaccgccccgagggagcagcaccccgcgccggcaaaccgacagaacaa

SEQ ID NO: 82649 - RNA, 73 nt, Homo sapiens
ccgcagccgagcgccccgcaccgccaacgcggaccacacaaggaccaacacaaaagaggagaacagcaagcga

SEQ ID NO: 82650 - RNA, 68 nt, Homo sapiens
gcacgacacagcagagaagaaagcgggccacaaccacaagaaaacaacgaagagaacaagagacgaca

SEQ ID NO: 82651 - RNA, 75 nt, Homo sapiens
cgaagacccagaaaaaagagccacaagcagaccaacggaaaacaaaccacagggaagagaggcggaaaccggacg

SEQ ID NO: 82652 - RNA, 78 nt, Homo sapiens
ggcaccaaaaccaggcaccaggcacaagaccccgccgcacaacgcaggaaaggccgaggggcaaagaaaaggaaagca

SEQ ID NO: 82653 - RNA, 59 nt, Homo sapiens
ccccagaggagaagacccgacggaccccagcgccgggcagcgacggcagcagaagcagc

SEQ ID NO: 82654 - RNA, 76 nt, Homo sapiens
ggacgccgggaacccggcacccggacaaccggcaagaggaagccaggaagaaaggggacacaaccaggagccgcaa

SEQ ID NO: 82655 - RNA, 74 nt, Homo sapiens
caccacgacggaggacggaggagagggcggcaggaaaggaagacaggacggccacccggaagagagacagcaag

SEQ ID NO: 82656 - RNA, 79 nt, Homo sapiens
agacgagaagccgaaaagcgcagcgagcggagccgccggaggagacgaggcccgcggcgcgcgccagcacggaagaacc

SEQ ID NO: 82657 - RNA, 62 nt, Homo sapiens
ggcagagaagaacacgaaggagaagaacaaaccgccggagcggggaccggagcccagcagag

SEQ ID NO: 82658 - RNA, 66 nt, Homo sapiens
cgacaggaggagacaggcgagagaggaggacacgaccggaacaagcgggaaacggagccaccaaca

SEQ ID NO: 82659 - RNA, 113 nt, Homo sapiens
agagcagcagcaaaccggcggaggacggaaccaggggagagcgacccaaacaaagaaaccgaaccccaccaaacagacgcgcacaccacgcacgagacccagaaaggagacgg

SEQ ID NO: 82660 - RNA, 86 nt, Homo sapiens
gccggccgcccccccgcgaaagggacgcggcacagaacgaagaagaaagcagaagcaagagaaaaaagaaacaccgagacggcccc

SEQ ID NO: 82661 - RNA, 85 nt, Homo sapiens
gcacaggcgcgaggcgccaccgggcaagcagcccggccagggacagcgcacagcagggaaccacgaacgcgagacaaccacaaga

SEQ ID NO: 82662 - RNA, 63 nt, Homo sapiens
ccacaaccgcacgggacagcgggcacgcgccagacagcacaaggcaacaccgaagcaccaaaa

SEQ ID NO: 82663 - RNA, 75 nt, Homo sapiens
agccgaccgagcccaggagcgccacgcgcggaaggcagcgcccagcagcgcaggagcacagcaagcgggagcagg

SEQ ID NO: 82664 - RNA, 83 nt, Homo sapiens
aaacacgggcgacggggcccagcagacagccgaggggagcgcggggcccggcagaaaggaagcccggggcggcgacggagcac

SEQ ID NO: 82665 - RNA, 72 nt, Homo sapiens
ggccggacggcgcaagaacagcgagcccaaagacaggcaggccaggagggagcggacagacgcagcggggca

SEQ ID NO: 82666 - RNA, 72 nt, Homo sapiens
gggcccagccaggggcaaagcacaggggccaggcaggcggcgagggaaacagagagcaggcaaggcgcccag

SEQ ID NO: 82667 - RNA, 76 nt, Homo sapiens
ccagcgcacggaccgccggccgggcggccccgccacccacaggaaccaacagaggcaaaacccgacgcaaacgacc

SEQ ID NO: 82668 - RNA, 72 nt, Homo sapiens
gaacaaaccccggaaacacaaaaaccaggagagacgcgaccagcggaggagcggacaacccagagagaaacg

SEQ ID NO: 82669 - RNA, 71 nt, Homo sapiens
ggcacccgccaccagagaaggaaggagacacagggaaagcccaccaccgcccggggggacaacaggaaccg

SEQ ID NO: 82670 - RNA, 79 nt, Homo sapiens
ggcggccaccaggagacagcgcgaccagcccgcgccccgcccacacagaacgaggagccccccgcagaacaggaagggc

SEQ ID NO: 82671 - RNA, 72 nt, Homo sapiens
gccaagagccgcagccaagcccggaagacgcgaccgggcaccggcgggagcccgggggagggagccaccccc

SEQ ID NO: 82672 - RNA, 72 nt, Homo sapiens
gcggcacacaaaagacaaccccagggaaggggcagcacagccaaagagcacagggacagaaaaacagcgcag

SEQ ID NO: 82673 - RNA, 80 nt, Homo sapiens
ggcaaaaaagcaaacacgaggccacggggaaacacagcagaacacaggacggaagagccacagagagccaaccgcaccag

SEQ ID NO: 82674 - RNA, 74 nt, Homo sapiens
gaagcgcaaaaacaagacggggcgccccacagaggggcgacggcaggaagagcggagagcagccccaaaaccag

SEQ ID NO: 82675 - RNA, 82 nt, Homo sapiens
ccagagaagccgcaggacagcagccccgagcacgggccgaggcccaccgcgacacaccgccagaaccccccaggcgccagca

SEQ ID NO: 82676 - RNA, 76 nt, Homo sapiens
aagagaaaacgcagaagaaagaggcacaaagaagaacgggagcgccgcaagcaaagcccaggaaagagaccgaaag

SEQ ID NO: 82677 - RNA, 77 nt, Homo sapiens
gagacaaaggcaccaggccaccacagaaacaaaagcaacaaagaggaagagaagccagccgaggcgcgcccgcagcg

SEQ ID NO: 82678 - RNA, 77 nt, Homo sapiens
gaaggcccacaccccacccaggaggacaagaagggcagagaagccagaacggagaaacaacgaagaccaacacgaag

SEQ ID NO: 82679 - RNA, 80 nt, Homo sapiens
ccgcccgagcgggacgccgggaccccgccgcgcaaaaaccgaggaaggagagggaccggaccaggaacggccaccaaagc

SEQ ID NO: 82680 - RNA, 107 nt, Homo sapiens
gcgggagaagccaggaggcgccggcccgccgaaccagagacacccgcgggcccgaggcccgcggcggaagccggcaggacacgaaagcccaacgggagacagcaagg

SEQ ID NO: 82681 - RNA, 69 nt, Homo sapiens
ggcacaacacaggcaagacaccagcgcaggggaagcgacaccgggaaaaaaggggccagggacacggag

SEQ ID NO: 82682 - RNA, 71 nt, Homo sapiens
agagcggaccggggcagaccaaacggcaagggccaggaggcggggagcgcgaacaaacagaccgggagccg

SEQ ID NO: 82683 - RNA, 86 nt, Homo sapiens
gagaaggaaacgggacaaacggcgggcccgggaagcgggccggcagcgcccggacgaggaggcgagagccacagaaggaggagggg

SEQ ID NO: 82684 - RNA, 75 nt, Homo sapiens
aaaagcgccaacagcagaaaacacggaagggcagccccacccacgcacgggacagcgagaggcgggacgcgaggc

SEQ ID NO: 82685 - RNA, 93 nt, Homo sapiens
aggcccaaaggccgccaggccgcagacgcgaaggaacggcaaagggaggacagggagcaggggagaagagaaaaaagagacaagccggagagg

SEQ ID NO: 82686 - RNA, 59 nt, Homo sapiens
ccgcaagcccacagagagccaggccaagaaggcaaccaagcaacaccaggcaggaggag

SEQ ID NO: 82687 - RNA, 78 nt, Homo sapiens
cgagagcgcggagcgggcggagcggcgagagcccccacgggcgggacaagggcgcaccggggcgcagcgagggaggac

SEQ ID NO: 82688 - RNA, 76 nt, Homo sapiens
ccggcgccccaaccccggcagccccaggccgacggccagaaggagaaaaaagagcccccaagaggcggccgcagcg

SEQ ID NO: 82689 - RNA, 81 nt, Homo sapiens
gaccccagcagaggagaaagaacagcgacccacagagagagggagaagaagaagaagcagagagccaggaaaagaaagaga

SEQ ID NO: 82690 - RNA, 39 nt, Homo sapiens
gaaagaaggcggaccagcgggcaaaagcagaccggaaaa

SEQ ID NO: 82691 - RNA, 80 nt, Homo sapiens
cgccccgagcccgccgccacacccgaggaggaggagcagcgcggaggaggaagccccccggccagaacaccggacgcacc

SEQ ID NO: 82692 - RNA, 58 nt, Homo sapiens
gggcccgccagccccagcggcgccgagaaaggacaagaaaggaccagcagaagagcaa

SEQ ID NO: 82693 - RNA, 67 nt, Homo sapiens
gaaggaccaagaaccaggagggccaaaaccaggcgagaaccaggagaagcggggggaagagaaaaaa

SEQ ID NO: 82694 - RNA, 76 nt, Homo sapiens
aggacaccaaacaccgccgccgaacagagagaagggcgggagaaaccaaggaaagagaaaagcgggaggcgaggga

SEQ ID NO: 82695 - RNA, 75 nt, Homo sapiens
cgagagaccgcgacacgggggccagaaggaaagcaaggccagggacgcggacgcagaagacgaccaaaagccgcc

SEQ ID NO: 82696 - RNA, 73 nt, Homo sapiens
gacgagcgacaggagcacacccggagaagcaggagcccaccggcagagggaaggggaacaggaccggccacag

SEQ ID NO: 82697 - RNA, 78 nt, Homo sapiens
ggcccagggcggggcccgaggccggagacaccgggggacccaaacagccggaaccacgcccacggccggagacaggga

SEQ ID NO: 82698 - RNA, 74 nt, Homo sapiens
cccgccgcggagcccgcagcccgccggcgcgccccacgggccaggaggacagcagcgcccaaggacaagccaag

SEQ ID NO: 82699 - RNA, 72 nt, Homo sapiens
cgcggagcgggcagccgccgccaccccgcggccgcacccccgccccaggcccagaaggggaagacccccagc

SEQ ID NO: 82700 - RNA, 78 nt, Homo sapiens
gaaaaaccgaacagcagaggagacacagggacggccaacagggaagagacagcgagcagagaccaggagaagagaaga

SEQ ID NO: 82701 - RNA, 81 nt, Homo sapiens
cgaaaggcagccgcggacgccgcgccagcgacaaacaagcgcagccaccccagccaaccccgccccccgcccaaggagggc

SEQ ID NO: 82702 - RNA, 73 nt, Homo sapiens
gcaaaccggagccagaaacaaccgcaaccacccaacaaggagaaaagaaagccagaaggaaggaagcaacgaa

SEQ ID NO: 82703 - RNA, 80 nt, Homo sapiens
acgccccggaacacgcccccgacgccagaaggagcccgggcgcgcgggacagacaaaacagaggagaccagaccagaagc

SEQ ID NO: 82704 - RNA, 77 nt, Homo sapiens
agagaaacgaaaaaagcggaaaaccagagcaggcccggaagagcccgacaaggagcggcagaccgagacagagaggc

SEQ ID NO: 82705 - RNA, 77 nt, Homo sapiens
gaaaaggacagaccagacggaggaggagccggacgggccaggcacgccccggaaaccacgcggaaccggaaacacac

SEQ ID NO: 82706 - RNA, 75 nt, Homo sapiens
acagcaaagaggacagaaaacaggaagaacggcgacagggacggccaggaggcagaccagggccagagcaccaga

SEQ ID NO: 82707 - RNA, 76 nt, Homo sapiens
ccagggcccccaaacgcacagaaagagcgaacacccagaaacggagcaaccagacgaggcacagaggcacagggac

SEQ ID NO: 82708 - RNA, 74 nt, Homo sapiens
gaaaccagaccacaaacgagacgagccagaacagagaaacaggacaagacaccggaggaagacacagaagagaa

SEQ ID NO: 82709 - RNA, 87 nt, Homo sapiens
agaagggcgagcgggcaggacacggaggaccggagcggccgccgagccccaccaaagccaccaagccaagaccagcagccaaaggaa

SEQ ID NO: 82710 - RNA, 73 nt, Homo sapiens
cggccgccccaccggcggaacccagcaagaccgcaggcgggacaagaaaagaaaaagcaacagaaaaacaacc

SEQ ID NO: 82711 - RNA, 121 nt, Homo sapiens
agaaaggggcgcagagcgggccacgccgggggcggagcggagcacacggaggccggagaagccgcagggccgaggcagccaggcgcccagccggaaggcaggcgaagccccacccacaagg

SEQ ID NO: 82712 - RNA, 79 nt, Homo sapiens
gcgaagaagaagagacaggccacgggaggaaaggagggagagcacagcgcggcagaacggaagcccggccaggcagagc

SEQ ID NO: 82713 - RNA, 84 nt, Homo sapiens
caggacccaggccagaccggagcagcggggacagaggggaaagaaccagacgacaggaaggcacagaacgaagccgcagaagcc

SEQ ID NO: 82714 - RNA, 76 nt, Homo sapiens
ccccaaggaagccacggcagacacacaacccgacccgacgaaacacacagcaggacgaaagagacaaaagccacag

SEQ ID NO: 82715 - RNA, 80 nt, Homo sapiens
cggcagacagggagcggcacagacaacgggcgaagaggggccaggcccgaaaaggagccaagagagcgcacgccaccaag

SEQ ID NO: 82716 - RNA, 50 nt, Homo sapiens
aagacagggacgacgcggaaccacggcacaaggagcagggcacccacagc

SEQ ID NO: 82717 - RNA, 72 nt, Homo sapiens
agccaccgaagccggcaaacgcgaagaggaggagaagccaagacaccgcgaaagggggagagacaaccagag

SEQ ID NO: 82718 - RNA, 72 nt, Homo sapiens
cgagaggcagagcgcaggagcagcagcgcggaagccaaacaggaaaagaaaaagaacaagcagagcgcaagc

SEQ ID NO: 82719 - RNA, 83 nt, Homo sapiens
ggaaacagcaagcgaagccgaaaaagcgcccgagacgggcccgccgaaagaccccaagacgccgagacagaaacagaacggcg

SEQ ID NO: 82720 - RNA, 36 nt, Homo sapiens
gggacgcagaagaggagagagcgcacaccaggaagc

SEQ ID NO: 82721 - RNA, 55 nt, Homo sapiens
gacaagcacgccgcccagacaaccgacaaaaggcaacccagaaacagaaggcaag

SEQ ID NO: 82722 - RNA, 83 nt, Homo sapiens
gccaaggaaaacaggcacaaaccagcagggaggccagagaaaaagaaaagacaccgcacgaaagcagaccgaaaagggcggaa

SEQ ID NO: 82723 - RNA, 74 nt, Homo sapiens
cggcacccgggaccggagggcacccccgcgcaccccaggcaacgccagcaaaaagaaagaaacgggacaaagaa

SEQ ID NO: 82724 - RNA, 73 nt, Homo sapiens
ggaccgaaagaaagcgaaaacacaaacaccgcacgggagcaacaaaggcaacacagagaaagggccaacacaa

SEQ ID NO: 82725 - RNA, 87 nt, Homo sapiens
caagagggcagccgccgaaggaacgcgacggcggcgcccgcagacacgaagaaaggagccaggaagagaaaggaagagggacagaca

SEQ ID NO: 82726 - RNA, 83 nt, Homo sapiens
gcggccgggcgcgacgcgcacggaaagagcaggcggcggcggcggaacgccaggcagaaccgcgcacacagaagcggaagcga

SEQ ID NO: 82727 - RNA, 76 nt, Homo sapiens
ccaccgcccggccggcgcccgcaaccgcgacgaagaaaaaaagagcgacgaggcaagcggagaaccgaacaacggc

SEQ ID NO: 82728 - RNA, 78 nt, Homo sapiens
accaagaaccagaccccgccccccgaggcgcagcccgaacccagcagccacacgccaacaacgagacagccgcggacg

SEQ ID NO: 82729 - RNA, 73 nt, Homo sapiens
aggacaccagggcgagccaggagcggcagcccggaacaggccgccgggcaccagacaccgccaccccgggccc

SEQ ID NO: 82730 - RNA, 56 nt, Homo sapiens
caggacaggagagaaagacgaggagccccgccacaccagcaggcgccaaacaccgg

SEQ ID NO: 82731 - RNA, 99 nt, Homo sapiens
caccgcgcagaggcccccgccgagaggagccccgagacgagcaaaaggaccaaccccgaacgcaggagcagcgaagaccgaaagacgcagccaaagaag

SEQ ID NO: 82732 - RNA, 72 nt, Homo sapiens
aagaacaccaaggacgaacaaccaccaaggagggaaacaaacgacggaaaaggccaggaaaagcggacaccg

SEQ ID NO: 82733 - RNA, 76 nt, Homo sapiens
aagcagagaacaccagggcagcacaagcacgaaaggaaggggaggcaagcaggggggcaaaggaaagaaggcagaa

SEQ ID NO: 82734 - RNA, 79 nt, Homo sapiens
aaaaagagaaaccggggaaccacggacaacccagaggacaacgaaggcggcccccacagagagcacacaaacaaagcga

SEQ ID NO: 82735 - RNA, 49 nt, Homo sapiens
ccacggacggacagcagcccacccggacggaggaccccgaaccccaagc

SEQ ID NO: 82736 - RNA, 76 nt, Homo sapiens
cggcacaccccgacgccagggccggggcccggggcccacgcggcgggcaccaggaaaggaaaagaccgcgagcgga

SEQ ID NO: 82737 - RNA, 40 nt, Homo sapiens
gaaggagaaggaagaggagcggaggcagccaccagcagga

SEQ ID NO: 82738 - RNA, 80 nt, Homo sapiens
ggaaccacaagcaccagcacgccggcaagggaggggcgaccccggggcccggccagcacgaccgaggaggggcggacagc

SEQ ID NO: 82739 - RNA, 74 nt, Homo sapiens
ccggcaagaagaaggcagacgggccgcgcggaggggacaaagaggcaccagggaacgccccccacgaaccaggg

SEQ ID NO: 82740 - RNA, 88 nt, Homo sapiens
ggaccagcaaggcggcagagcaaggggcacgcagaaggaccggccacgggcccgacccaggcaagcgagcaggcgagcaggagcccac

SEQ ID NO: 82741 - RNA, 65 nt, Homo sapiens
caccgaaacagagacagaacggaaacacacaaacagacagagcaacgaggccgggccggaaaaga

SEQ ID NO: 82742 - RNA, 63 nt, Homo sapiens
acggcaggccaagaagcaccgagccggacaaggcaaaaccagcaagcggacccagacaaaagg

SEQ ID NO: 82743 - RNA, 70 nt, Homo sapiens
cagcaggcgaccaccggggaccagccaaaggcgaacaaacccaaagcccggggaacgagcggggaaggaa

SEQ ID NO: 82744 - RNA, 79 nt, Homo sapiens
aggcacgccacgggagcccggcaagccgccaccgggagaagcggccgggccaaggcaagcgacgcggcaggacgagcgg

SEQ ID NO: 82745 - RNA, 82 nt, Homo sapiens
gggccagcccgggaccacggaccaaaggccgggcgcagaacccccagaccacaggcggcacccaccccccgagcccgcccgc

SEQ ID NO: 82746 - RNA, 83 nt, Homo sapiens
cggagaccagaaggcggaaccacagcggcgacgcgggagcacgcgccaccagcggagcacagaggggcgcacccaacgcgcac

SEQ ID NO: 82747 - RNA, 75 nt, Homo sapiens
caaagagcgcagggaaaggggcggaggcagcaaagacaggccgggggccagcaaggcagaaaagcagcagaccga

SEQ ID NO: 82748 - RNA, 36 nt, Homo sapiens
accaccacgccgaggacacacaaaccagccacgcga

SEQ ID NO: 82749 - RNA, 70 nt, Homo sapiens
ggagacagccaaggaagaacgagggaagcaaacagaaaagggaggggagccgaaggacgaggcaagcccg

SEQ ID NO: 82750 - RNA, 49 nt, Homo sapiens
cagggggcagggcggcagagggaaaaacccgcagaaaacagggcacgag

SEQ ID NO: 82751 - RNA, 66 nt, Homo sapiens
aacggggcaaggacccgacgaccaacaggcaacgcgcaaggagaagcagcgccgcgggcccgagca

SEQ ID NO: 82752 - RNA, 94 nt, Homo sapiens
cgagggcccggcgcggaaagcagagcaccggccagaacaagccaaggagccaagacgagagggacacacggacaaacaacagacagaagacgac

SEQ ID NO: 82753 - RNA, 78 nt, Homo sapiens
gcggagaggcagcgccagcaacccagccgccggccgcgggccccgagcgcgcgggggacaagcaaaaacggccagaca

SEQ ID NO: 82754 - RNA, 61 nt, Homo sapiens
ggagcggaaggcgaggaggacggccggggaagcaggcgccagggggggcggcgaagcgagg

SEQ ID NO: 82755 - RNA, 60 nt, Homo sapiens
gcagaccaggcgaacccagcgggcaggccaaagagggcgaaaaaaaggagccaaggagga

SEQ ID NO: 82756 - RNA, 93 nt, Homo sapiens
aaacaaaagagagcgcacgaccaagaaaagaagagccccaggccaagggcgggagcaccccggcgaaagcagaaggacaacgggagagacgag

SEQ ID NO: 82757 - RNA, 90 nt, Homo sapiens
cccgccgccccggccccgcgccggacgccgcgacggccccgagcacggccgcccggccacggaacgcaagcacaggaccagaaacgaaag

SEQ ID NO: 82758 - RNA, 110 nt, Homo sapiens
gcggaccaccggcggggaggagaccaggcgacaccgcgacaccccaacaaacaccagcgcgggcgggaagaccgaggacccggagaagccacagagcaggggaaagccgc

SEQ ID NO: 82759 - RNA, 62 nt, Homo sapiens
gaccgcagaaggccggagacaccagcaggggaccgcaaagcggagcggcaagcccgaacaag

SEQ ID NO: 82760 - RNA, 72 nt, Homo sapiens
ggcccgcgcccgcccccgggagcccgcacggaccagagaggccgcacgcaccagagagagccccgcagcccc

SEQ ID NO: 82761 - RNA, 79 nt, Homo sapiens
ggccaccaccggccgcccagccaggacgcgcccggagaaggcccaggaggcaagagcgagaagagcgcaagacagaaag

SEQ ID NO: 82762 - RNA, 68 nt, Homo sapiens
cgacaacacacacacagcgacagcacaagaagaggaaaacgaaagaacagggcaagagaagccaaaca

SEQ ID NO: 82763 - RNA, 74 nt, Homo sapiens
gcaagccggaggagaagcaagaaggcccggacacagcaaaccgggccacagccaaaagaccgacaaagaggaga

SEQ ID NO: 82764 - RNA, 78 nt, Homo sapiens
cggagccgccgcccccgcgccccgcagcgccccgcagagcagcgagaacaacgcaaacgcccacacagcaagcacggg

SEQ ID NO: 82765 - RNA, 74 nt, Homo sapiens
cccaaaggcgggaaaggcggagccaccggccggcgaaggaggaaacaaaggacagcacacgcacgaagcaaaaa

SEQ ID NO: 82766 - RNA, 77 nt, Homo sapiens
ggaagacgcagacgccggccagggccaccggccaccaaacgcaccacggggagcaacagcgagcaacaggcaacgaa

SEQ ID NO: 82767 - RNA, 49 nt, Homo sapiens
cgcgaacaggcgcaaagaggggaacccagggccgaaaagaaaacaggag

SEQ ID NO: 82768 - RNA, 78 nt, Homo sapiens
cgagccagccgcggccggaggagcccccaggccgacccaaagacaggaccacgcaccagcagagaaggaaagcaaacc

SEQ ID NO: 82769 - RNA, 78 nt, Homo sapiens
gcggaagagcgaggccagccagaacgccggggaccaggcccgggcgccgcaaaaggagacaaaaggacagcgacagac

SEQ ID NO: 82770 - RNA, 75 nt, Homo sapiens
aagccccccgggacgagaagaggaagaaaaaacaccagcagcccagcaaccaaaaagaagaccgcacccaaacaa

SEQ ID NO: 82771 - RNA, 42 nt, Homo sapiens
caaaggaagacgaaccggagaagaggagaaagacagcaaaga

SEQ ID NO: 82772 - RNA, 81 nt, Homo sapiens
agaagcggagagcgaggagaggagcgccccaccaagagccgcgcgcccagccgcgaccacacaaagaggggagcgaccaaa

SEQ ID NO: 82773 - RNA, 72 nt, Homo sapiens
caaggaccggaaacagacacaccgggccgggagccacgcccggccgaacaggaccacgaccagcggggcaca

SEQ ID NO: 82774 - RNA, 64 nt, Homo sapiens
gaagcggaggcacgggcggcccgcaggaccggaccgggggagggcggagaacggaaaagcacca

SEQ ID NO: 82775 - RNA, 49 nt, Homo sapiens
gggagccggcggaaaccaaacaccaaagaaaggaaaacaaaacgaccag

SEQ ID NO: 82776 - RNA, 61 nt, Homo sapiens
gcgcgcgcgcgaggacggaggccgcaggaaagcgcaaagccgacgaggagagaccccgcag

SEQ ID NO: 82777 - RNA, 68 nt, Homo sapiens
cccaccgccagccacccacgccagcagaggaaaagcagaggacaggagagccaccaggcaaaaccgcc

SEQ ID NO: 82778 - RNA, 57 nt, Homo sapiens
cagagacgggcaccaaggcgggacaacaaaccgcccagacaagggaggcgaggacgg

SEQ ID NO: 82779 - RNA, 87 nt, Homo sapiens
gggccagagaccgcacgccagaagggcgccggaccccaaccggcagccccgagaaccacagggacacccgcccccacccgggagagc

SEQ ID NO: 82780 - RNA, 96 nt, Homo sapiens
ccacccgagaagggagacgacgcgcgggccgcgagcggggcgacccgagggggaaaccacaccacccgccacagacagggaggaggacagccgaaa

SEQ ID NO: 82781 - RNA, 79 nt, Homo sapiens
gcgcggagaaggagaggggaccgcccggacacaagaaaaagagcgaaaaagacacgccggggcccccacagagagcaca

SEQ ID NO: 82782 - RNA, 72 nt, Homo sapiens
aagaccacggagcggggagagccgccgcaaacccagaccgcagggaacaggcggagcgacggaagcagccca

SEQ ID NO: 82783 - RNA, 61 nt, Homo sapiens
ccggccccggcccacaggggggggcaaacccgagagaacggggagacagcacggagaaaac

SEQ ID NO: 82784 - RNA, 69 nt, Homo sapiens
agccagggcggacgggaaagcagagcacagccccggcgggcagggacggcgccgcgaacaccaagaaca

SEQ ID NO: 82785 - RNA, 58 nt, Homo sapiens
gggaaagccgcaaaggaacaagggacaaaccaaagaccaaccaagaggccagagagca

SEQ ID NO: 82786 - RNA, 83 nt, Homo sapiens
acacccagagcgccccggacgaccaggcaccgcgcgggcagcagaagacagcggagaacccacgaacagcacccagggagaag

SEQ ID NO: 82787 - RNA, 72 nt, Homo sapiens
agaaagcacagggacgagacagaacaacgagagagagcaaaaacaccagacaagagcggccagcaaacaggg

SEQ ID NO: 82788 - RNA, 35 nt, Homo sapiens
caagggacaacagaagccggcagggcgcgcaggaa

SEQ ID NO: 82789 - RNA, 74 nt, Homo sapiens
cccgagccgggggcggccaagcgaggggaaaccgcgccagagacacaggaccccagcccggcacaaacaggaag

SEQ ID NO: 82790 - RNA, 73 nt, Homo sapiens
aacggggacggaaccaaggacacgcccaagcaagggagccaccaccagaagaggaagcggggggacgggggag

SEQ ID NO: 82791 - RNA, 86 nt, Homo sapiens
aaagcagaagaaaagggacgcaagaaacccaggacgagaacagcaacagggcgaagcggccaggcccgggcggacgcagagccaga

SEQ ID NO: 82792 - RNA, 78 nt, Homo sapiens
cccggagaaaaggccaagaaggcaggcaccagacccgcgaccgacagcccccagcccccccagccgcagggagcccgg

SEQ ID NO: 82793 - RNA, 57 nt, Homo sapiens
cacaggaggcaaccacacagagaaaaagggacgagaccagaggaaggggcgacaggg

SEQ ID NO: 82794 - RNA, 38 nt, Homo sapiens
aagccagaccccccaggacgccacacacagaacgacac

SEQ ID NO: 82795 - RNA, 75 nt, Homo sapiens
cacggggccaccaggacaagcgggcagaacagcgcggcagccgaaacacacaagaggagggaagcaccaaacaaa

SEQ ID NO: 82796 - RNA, 71 nt, Homo sapiens
gggaaaaggaaaaccgaagaggagccacgaagggggcccagcacaggagggagcaggaaaaaggcggagag

SEQ ID NO: 82797 - RNA, 53 nt, Homo sapiens
ggagaaggggcccggcagccgcccgaagcgcacccgcaaccaccacggcaaac

SEQ ID NO: 82798 - RNA, 79 nt, Homo sapiens
gcacccaaacaggaaaaacaccacacgcaaaaccagggagaggagcggaagacccggggggcgggcagcaacacgaagg

SEQ ID NO: 82799 - RNA, 75 nt, Homo sapiens
gcggccccgcagggcacaacacggagcacaagccccccagaagacaacaagggagaaagcggcgcagcacacacc

SEQ ID NO: 82800 - RNA, 53 nt, Homo sapiens
aaccgcacacaccaaaaacccaccgggacaagaaaagacaccacaaggcaggc

SEQ ID NO: 82801 - RNA, 73 nt, Homo sapiens
gaggggacgagaacaaaggagagccagaacaggggcaaccgcgcaacggcgccggaggacagccgaggaggcc

SEQ ID NO: 82802 - RNA, 71 nt, Homo sapiens
gaacagagccccccccccaccgcgggggcgcagagcgggcaaggaaaaaggaccaggcacagagcgcaaag

SEQ ID NO: 82803 - RNA, 73 nt, Homo sapiens
gccccccaccccaccgccaccgaggcccccccgccccccagggggacaggagccaggccaagagaaagaaaca

SEQ ID NO: 82804 - RNA, 57 nt, Homo sapiens
gcaaaaacaagacggggcgccccacagaggggcgacgggaagggacgcaaaaaggaa

SEQ ID NO: 82805 - RNA, 81 nt, Homo sapiens
cggcagccagcggcggcgaccagaccagagccacgcacacagaaacagcgagacggaggggacacccaaggcgacacaccg

SEQ ID NO: 82806 - RNA, 106 nt, Homo sapiens
agggcgccccccacacaaggacaggaccgcaagcccgcagggacgaggccccaagcaagccccagccaagacccaccaggcaggggaagaagacaccacaaacaac

SEQ ID NO: 82807 - RNA, 47 nt, Homo sapiens
cacaaggaaaaacgaaagccgcggagagaaggcagaaacaaaaaagg

SEQ ID NO: 82808 - RNA, 52 nt, Homo sapiens
gacacaaaagaaagcgacaaggaacaagggcggaacgaaaggagcgacgaga

SEQ ID NO: 82809 - RNA, 74 nt, Homo sapiens
gaaggacacgcaaaccaccaagaagcgccagccccagccaagcaaaggagaaggagaagcggcgaggaaggaag

SEQ ID NO: 82810 - RNA, 72 nt, Homo sapiens
gggagcccgcacgcccaggccagcgggggcggagccaggagaagagcagaggaaacaagaaacccacagcgc

SEQ ID NO: 82811 - RNA, 70 nt, Homo sapiens
aacagaaagacgaggaacccagaagaccaggaagacgcaaacacaaggaaggaaccaaccgaggcagaaa

SEQ ID NO: 82812 - RNA, 82 nt, Homo sapiens
cgggggaagggcgcccggaggcccgcaagcccccccggagaaaaaggaagcgacacacaggacaggccccccagccaccagc

SEQ ID NO: 82813 - RNA, 59 nt, Homo sapiens
cggagacgcgcaccagaaagcacaccacaaaagaccccacagcgagagagagcaaacga

SEQ ID NO: 82814 - RNA, 83 nt, Homo sapiens
aaggcacgaagcccacgagacacaccgccggcccggggcggcgccgaggggaggaggcggaacacccaggccacagaggagga

SEQ ID NO: 82815 - RNA, 65 nt, Homo sapiens
agagaaaccagccagagggaccagaccaaagaacagaggcggcggcggccaggagggcagcgaag

SEQ ID NO: 82816 - RNA, 70 nt, Homo sapiens
cgaacccacgcggcagggacaacggaggagaaaggagccagaggagagagaaacacccaaaaccccccag

SEQ ID NO: 82817 - RNA, 82 nt, Homo sapiens
aaaggagcaaggagaagagccggggaggagaggagaaaccaagcagacccaggagaaaaaggagaagcggcaagcaaggaag

SEQ ID NO: 82818 - RNA, 79 nt, Homo sapiens
cgagcagacagaacacgccgggggggagggagacgcggagcggggccaggaaggcccggacggagcaggcggaccacag

SEQ ID NO: 82819 - RNA, 75 nt, Homo sapiens
gagggcgaaggcgagaaggggagccagaggacaaaacccagccggcacaaaccaggaaaggaagccggagcgggg

SEQ ID NO: 82820 - RNA, 92 nt, Homo sapiens
ccgcggggcgagcccggaaaaccagaccagaaacggaggagcccgccgaagcaggcaagaaagagagaggacagacaaagaagagcgcaaaa

SEQ ID NO: 82821 - RNA, 79 nt, Homo sapiens
cccaccgcaagcaacggagaccagagccacggacggagacacacccccaaagaaaggggccaggggcaagccgcaggcc

SEQ ID NO: 82822 - RNA, 56 nt, Homo sapiens
cagcgccacggcgggccgcgggaggacaccacccacaggaaccaagaacagagacc

SEQ ID NO: 82823 - RNA, 98 nt, Homo sapiens
ggacggaggaccagagagaggaaagaggaggaagccaagcaccgcagagaaaaggggcagagcaaacaaagcaaaaaacaaaaagaagcgcaacccgc

SEQ ID NO: 82824 - RNA, 69 nt, Homo sapiens
gcacagccggaaagcaccgcggagccagggcccgacccgaaaagcgcagccaaccagacgcgcgaagaa

SEQ ID NO: 82825 - RNA, 71 nt, Homo sapiens
agggcgcggcggggggcacaaaagcaacgaagggggaacagaaaaggcaagaaggaacggaaggcacaaca

SEQ ID NO: 82826 - RNA, 78 nt, Homo sapiens
aggaggggggcaggaggcgacggcggccacgagcagcgaagcaagccagaggacaacagagcaaccagccgggcacca

SEQ ID NO: 82827 - RNA, 79 nt, Homo sapiens
cagagaaaaccagaggaagcgggccaagagggcggcgacggcggcgcgaggaccgaccgggcccgcggacgaagaaggc

SEQ ID NO: 82828 - RNA, 92 nt, Homo sapiens
cgcccgccgcccgccaccccggcacccaagccgcccccgccgccccggcccggcgcgcaggccgcagcccggcgcccaggcgcacgaccggc

SEQ ID NO: 82829 - RNA, 60 nt, Homo sapiens
cccgcgcgcgcccggccccggccccacccgagcggccccaaggccaggaaaggcgaacac

SEQ ID NO: 82830 - RNA, 64 nt, Homo sapiens
ggccagcgggaagaagcacagcggggacgagagccccggcacaaacggaccaccagaaagcacc

SEQ ID NO: 82831 - RNA, 71 nt, Homo sapiens
aggcacagccaggccgcagaggggaaccccgacagcagagacgacgcggcaagcagcggaagaggacgacg

SEQ ID NO: 82832 - RNA, 79 nt, Homo sapiens
cagcaccaacccggcccaccaaaccccagaccacaagcggcagcccgagccaacagagaagaagaggcaccacgaaaag

SEQ ID NO: 82833 - RNA, 82 nt, Homo sapiens
ccggagaacccccccagggggaacgacacaacaagccggaagggaagcaggcggcaaaggaggagggagccggcaggagcga

SEQ ID NO: 82834 - RNA, 73 nt, Homo sapiens
cgccagacgaccccacccgcgccgcgacccgccacaaggagaagagaaggagcgcgggcgcgccacgcccgcc

SEQ ID NO: 82835 - RNA, 84 nt, Homo sapiens
cgcaccccccacgaccaggcgaggcacaggcaccagccagacccccaaaccacgaccgcgcaggacgcaccagaaacaccacag

SEQ ID NO: 82836 - RNA, 72 nt, Homo sapiens
gggacggcaaaggcgcaacggccccaacgagaacccgaaggaagagagaagacaaggggcccgggcgacacg

SEQ ID NO: 82837 - RNA, 84 nt, Homo sapiens
gggcgcccgccgcgccgccacgcaaaccaagaaggaggggaccgaagcgccaggccggcgaaggaccggaggccgcgaacccaa

SEQ ID NO: 82838 - RNA, 75 nt, Homo sapiens
gacaaggggcgcagagcccgggccggagcgcgaagacgcagggaaagcggcacacgaaaggggcacggcaggacg

SEQ ID NO: 82839 - RNA, 71 nt, Homo sapiens
ccagggaggcaggggcagaaacagagaaggaacagaggcagcagcagagcgaacaggacgaaaggagaaga

SEQ ID NO: 82840 - RNA, 84 nt, Homo sapiens
ccagcacccgcagcccggaaccacgcaccagacaacacagggagccgggaaaccgaagaaggcagagaaggcaaacaggaggcg

SEQ ID NO: 82841 - RNA, 71 nt, Homo sapiens
aagcacaacgcacacagcaaacgccggacaggagccacaagagcagacaaagccagggaagagcaggcggc

SEQ ID NO: 82842 - RNA, 73 nt, Homo sapiens
gagggcagaccgggaccagccccgggcacccccaggggaccaacccagacacgccaaaggaaggcagcaccgc

SEQ ID NO: 82843 - RNA, 37 nt, Homo sapiens
aggaaagaaaccccagaaagcacggagccgccgcacc

SEQ ID NO: 82844 - RNA, 71 nt, Homo sapiens
ccgcccgggccagcggccgcgcacccccggccggaggcaccagcagacgagcacaacacacaaaggcgaga

SEQ ID NO: 82845 - RNA, 58 nt, Homo sapiens
ggaaaagacaagagaccggaaggacgaccagagcacgcggagaagggaggaaaacagc

SEQ ID NO: 82846 - RNA, 65 nt, Homo sapiens
cccagcagaggagcacgcagcgaacaagaagagagccaccccaacaggcgagcaccacgccgaaa

SEQ ID NO: 82847 - RNA, 63 nt, Homo sapiens
cacggagaggagcagcccccggagacagcggcacagagggccgccagccacagcgggaacggg

SEQ ID NO: 82848 - RNA, 81 nt, Homo sapiens
cggggggcccgaagcaggccgaaaggccgcgggaacgcgcgccgccgacaaggcgcacaacagacagccccagcgccccag

SEQ ID NO: 82849 - RNA, 81 nt, Homo sapiens
ccggcccccagcgccgcggcaccacaggggaggagcggaacgcacgccacaaggaccggaggaaagggagaccccagaggc

SEQ ID NO: 82850 - RNA, 71 nt, Homo sapiens
aagagaccccagaggacaacagcagcagcagagaccagcaggacaggggaagggcaggcgcccagccaaag

SEQ ID NO: 82851 - RNA, 77 nt, Homo sapiens
cggccgagccacggagcaaggggccagacaacaggcacaaagagagaaggaacacccacagggcagacagagaaaga

SEQ ID NO: 82852 - RNA, 81 nt, Homo sapiens
gagcggcgccaccagccgcaggacaagagcacgaggagccacgggacgaagacggaaacaggggacggcacaagggaaaac

SEQ ID NO: 82853 - RNA, 74 nt, Homo sapiens
caacagcgaccaacacccaccccaccaagcaagcgccgaaaaggaagaaaagcagaccccgaaaggacgacaca

SEQ ID NO: 82854 - RNA, 73 nt, Homo sapiens
cgaacaaagcagccccaaccacacccagagaggccgagcaggaccaacaacagacggccagccccaccacaaa

SEQ ID NO: 82855 - RNA, 69 nt, Homo sapiens
agcaggaacgcgcccacgcgaaagaaaggaacagaccacgggccagccgggcccgggaggagcaggggc

SEQ ID NO: 82856 - RNA, 73 nt, Homo sapiens
caccccagaggaaccagacacacacagcgacgcaggagaacaagcaaaaccaaagacagccaaggagagaacc

SEQ ID NO: 82857 - RNA, 115 nt, Homo sapiens
cacccaaggcggagaccgcacgagggcacccacaccacgacaccgaaaacccaccgagcccgccaaagagcacagccgacacagccccgggacccccaagagcacaggcagaagg

SEQ ID NO: 82858 - RNA, 64 nt, Homo sapiens
caacagccaccaccaccaccagagcacacgccggaacggggccaagggcgcaggcggaagagaa

SEQ ID NO: 82859 - RNA, 77 nt, Homo sapiens
acacaggcgcgaaacggaaaaagaggaccacccgcacccaggggacgcacggcccaaccccgagcaaggacgcccac

SEQ ID NO: 82860 - RNA, 76 nt, Homo sapiens
agccagaaccaaaaaggagagcgggaggagacacacaacagccgaaggaggacgagcaagacgccacacgccaagg

SEQ ID NO: 82861 - RNA, 101 nt, Homo sapiens
accaggccaccacagaaacaaaagcaacaaagaggagagacaagagagacaccccaaccgacaaagagcaccagacagccgggaacgacccccacgaaaac

SEQ ID NO: 82862 - RNA, 82 nt, Homo sapiens
aaaaacccgcaacagcccccgcccaaggcccgggcgggcaccggcacggcggaggagcagcgggagaacaaaccagcaggaa

SEQ ID NO: 82863 - RNA, 101 nt, Homo sapiens
ccggagccgggccgcagcgcgaggccgggccgggggagaccgcgaaccagaaagagacaagaagggaccggcgcgggggacccaccacccccgaccacagc

SEQ ID NO: 82864 - RNA, 83 nt, Homo sapiens
cccccaaagaggcagagacccacacgcggggaggaggaggaggaagggagcggcagcaggaaggagaccccccgccacgaagg

SEQ ID NO: 82865 - RNA, 56 nt, Homo sapiens
aaccccaggagcccagagcaagaccagcagggcccgagggcaggacagcaggcacc

SEQ ID NO: 82866 - RNA, 80 nt, Homo sapiens
gcgaggaggcgcgggagggcgagaacgaccccgagacgaccaggggagccggacaggaaagggaggggacagcaaggcgg

SEQ ID NO: 82867 - RNA, 81 nt, Homo sapiens
agcggcagcaggacaccccgggcagcaaaaccccagaagaggcgaaccgcaggaaaccagagcaagaaacgagcgacaacg

SEQ ID NO: 82868 - RNA, 76 nt, Homo sapiens
ccagaaccccacacagacagaacacgagccagagaggcaccaacacaagagaccaccccacacaaccacaccacgc

SEQ ID NO: 82869 - RNA, 83 nt, Homo sapiens
aagcaagggacggcacccgagggcgcggcgaagagccaggacaaaaccaggcagaaccaacacgaacccaagcacaaacaaga

SEQ ID NO: 82870 - RNA, 79 nt, Homo sapiens
agcgccagggcccgaagagggaagacacgcggaaacaggacagccagccgccagacaggcccccggacaggagggcggg

SEQ ID NO: 82871 - RNA, 78 nt, Homo sapiens
cggggccagcgggagggggcagcgcgggccccgaagcagaggccagggccgagagcgcccaggcagggcgggcgagca

SEQ ID NO: 82872 - RNA, 105 nt, Homo sapiens
gggggcacccgcggccggcccggggccccgggaccggcgcccccccggaggagacacacagccccagacgggaggaaaaaaggaaggaccgcgacgaacacaacc

SEQ ID NO: 82873 - RNA, 69 nt, Homo sapiens
cccgcgacgccaaccacgacgaagcggaaggcagaagggcaaagcaagcaagccggacaaagcacaccc

SEQ ID NO: 82874 - RNA, 95 nt, Homo sapiens
gagcggggcccgaggacgcgcacacacagcgaggagaggagggaagcgccccagaaacgaaggaggcccaaccacaaaaggagccgacggaaccc

SEQ ID NO: 82875 - RNA, 80 nt, Homo sapiens
ccccggagagcgggacacagcgagcaacgggggcagcagcggagcaagcagagagaagagacaggagcggccgcaccgaa

SEQ ID NO: 82876 - RNA, 70 nt, Homo sapiens
gggaccgaaaagaagaaccgaagaccggagccacagacacaaccaagaggcaggaggggcggcaaaggga

SEQ ID NO: 82877 - RNA, 77 nt, Homo sapiens
cagagccccaacagcgagggcagcggggaagaccaaggcagaaggagaaggaagcgcacaaacacacccgagcagga

SEQ ID NO: 82878 - RNA, 75 nt, Homo sapiens
gccggcacacggacagccccccaccacgcagacgacggagaacggagaggccacagaacaccgccggccacaccg

SEQ ID NO: 82879 - RNA, 50 nt, Homo sapiens
cgagagggcacaacaaagacagaccaggagaagagggaaagacaagcagg

SEQ ID NO: 82880 - RNA, 87 nt, Homo sapiens
gcagaggaggagcgcagcccggcccggaaagccaggccagaagaaggaaggccggggaggggacaggaaagacacaccaccccaccg

SEQ ID NO: 82881 - RNA, 66 nt, Homo sapiens
aagaaaaacaggagaagaaggccgacacggagggggccagggagagagaacggggagaagcaacac

SEQ ID NO: 82882 - RNA, 64 nt, Homo sapiens
aagggacggacaaaggaacaggaccagccaaacgaagggaaggacaggaccaggggaggagaga

SEQ ID NO: 82883 - RNA, 78 nt, Homo sapiens
caccagggagccccacaccaaggggaggcccacccagaaacaaggacaccgcgagcgaggacaggacacaacgccacg

SEQ ID NO: 82884 - RNA, 75 nt, Homo sapiens
agaggcaagagaagacaggagcaaaacgcacaggaagcaaaggagggccagggacggcagaccgggacccggcgg

SEQ ID NO: 82885 - RNA, 85 nt, Homo sapiens
gaagcggcggcagcggcggggcggggcgagcagaggacccggcgggcggcccgcgggcagcgccgaaaagcgaaaagaaacaagc

SEQ ID NO: 82886 - RNA, 82 nt, Homo sapiens
gcccggcgccagcaccgcgcccaggccgaaccgggcagcaaggacgcgagcgacgacaagcgggccacgcggacgaggagga

SEQ ID NO: 82887 - RNA, 80 nt, Homo sapiens
cgccagcccacgcaaggaggggcggaggagcccccacacaccagaaaaggggagcggacgggcccaggagcaggagccac

SEQ ID NO: 82888 - RNA, 78 nt, Homo sapiens
aaagaagggagcaagaggcaaggcagcggaggaggagaaagagaggacccccggaccggcccgagggccgcggccgca

SEQ ID NO: 82889 - RNA, 72 nt, Homo sapiens
acggcagggaggcacaaaggggaacacaggaagagagcagccaaccaggggcaccagcgagaaacaaacaga

SEQ ID NO: 82890 - RNA, 81 nt, Homo sapiens
cgagcaggggagggaacggcggcgcgccccagaccaccggcagggaacagccgagcagaccgaggaggcccaccagcagac

SEQ ID NO: 82891 - RNA, 65 nt, Homo sapiens
cggggacagacccaaggacagggggagaggcaaggaaacgacaagagaagaacacccaggaaaag

SEQ ID NO: 82892 - RNA, 66 nt, Homo sapiens
cagccagcaaaggccaaggaggagacacagccgccagaagcgaaccagaagaaaagaggggagaaa

SEQ ID NO: 82893 - RNA, 72 nt, Homo sapiens
accagggaggacccgggaagcaccacaaaagcagaggggagccagggcaagaacgcgcgcgaggagagggaa

SEQ ID NO: 82894 - RNA, 84 nt, Homo sapiens
gcagggggaccggccgcggcacaccggagagcgacgggacccccccgcagaaggccgccaagggggcgggccgccccgggccgg

SEQ ID NO: 82895 - RNA, 72 nt, Homo sapiens
acaaccggagccacgccccacgaccgccaggccgggcccgggaggagcaggggcagaggggagaacccagcc

SEQ ID NO: 82896 - RNA, 70 nt, Homo sapiens
cgccacgcgcggaaggcagcgcccagcagcgcagggcggaagacagccagaggagggggagagcggagca

SEQ ID NO: 82897 - RNA, 70 nt, Homo sapiens
cccaggccgagacgaaaggcagccagaggaagcggccggacgcacagccgaagcaaggagagcccaagca

SEQ ID NO: 82898 - RNA, 68 nt, Homo sapiens
acaacaaaaggaaaagcaagggaccaccggaaagccaggcagcgggccacacccaaaaccggacaggc

SEQ ID NO: 82899 - RNA, 76 nt, Homo sapiens
aggaacggccgggcgagcggcacagccacgccaagacaaagaccacgccacccagagggccgagagccggaagcag

SEQ ID NO: 82900 - RNA, 35 nt, Homo sapiens
gcaacccagcgccgaagaagcccggggcggcgacg

SEQ ID NO: 82901 - RNA, 54 nt, Homo sapiens
gaaaccggaaccagacagaagggggagaccccacagaacccccagcaagcgcca

SEQ ID NO: 82902 - RNA, 31 nt, Homo sapiens
aacacaccaaaggagaagaacaaccccgagg

SEQ ID NO: 82903 - RNA, 73 nt, Homo sapiens
accggacgcagccgccaccgagacgagaccgggaacgggcgggcgagacagagaggccacggaaacccaccca

SEQ ID NO: 82904 - RNA, 67 nt, Homo sapiens
aagcacgcacaaacaacaaggggaaaaagcaacccagccccaaaagacagcgaacccacccaacacg

SEQ ID NO: 82905 - RNA, 79 nt, Homo sapiens
gaagaagcagcacaaggcgagccagaaacgggagagaccaaagacggccccaggaagcagaggaacgacgggagaggga

SEQ ID NO: 82906 - RNA, 79 nt, Homo sapiens
gaagacaaccagaagagaaaaaccaagggagagagagagagaaccagccagagagccaaggcacggcaaccaaacaagc

SEQ ID NO: 82907 - RNA, 67 nt, Homo sapiens
ccagcaccacggacggacagcagcccacccggacggggcgccacaccaacaaggcggccaggcaaaa

SEQ ID NO: 82908 - RNA, 94 nt, Homo sapiens
caggaagaggagagaaaagggccagggagagccggggacgacacacacacggaggccagcgcgcaggcccggaggagcgggaggccagaaacaa

SEQ ID NO: 82909 - RNA, 82 nt, Homo sapiens
gaggcgcgcggggcccgccaggcgcgcggagccacacaaagggcggagaacggaaaagcaccaggaagcagagaggaccgca

SEQ ID NO: 82910 - RNA, 46 nt, Homo sapiens
cacagaggagggcggaagaaagcgacacacaggcgcgcggagaaac

SEQ ID NO: 82911 - RNA, 73 nt, Homo sapiens
cgcaagaccggagccagcgaggccacacccgaaagcaagcccagaaggcaaggggaggaagcacaagacccgg

SEQ ID NO: 82912 - RNA, 67 nt, Homo sapiens
agaggggagaccaaagagaacagcgcgggagccaggaaacgcagaccccccacgagaagcaggcaga

SEQ ID NO: 82913 - RNA, 67 nt, Homo sapiens
ggccagccagcaccccaacagaaccagcaagcccaagccacagaccaaaaagagaaagggaggcaaa

SEQ ID NO: 82914 - RNA, 74 nt, Homo sapiens
cgacgccacccaagacacaaacggcgacacagaacggccggggggcgagcgaccgaaagacagaaacagagaaa

SEQ ID NO: 82915 - RNA, 77 nt, Homo sapiens
agaagccgccaagcaaaagagccaaagcagcagccccgacagccacggaacagacacgggcgcagccccgagcccac

SEQ ID NO: 82916 - RNA, 66 nt, Homo sapiens
aagggggcagcgaaagaggagacacggcagaacgaggaagaacagggagccgcaggaaaacggcag

SEQ ID NO: 82917 - RNA, 79 nt, Homo sapiens
gaaggcccgggaaagcacaaagcaagagacagcgaggacagaaggaagaacgagagaccaaacgagcccaaaacaagag

SEQ ID NO: 82918 - RNA, 77 nt, Homo sapiens
gcccgagccggcgccaagggcgggacgaccccacaacccgagcgcccaagccccccgcgcagagggagaaggcaccc

SEQ ID NO: 82919 - RNA, 65 nt, Homo sapiens
ccagccaagagcaggcagggagaaggaaggcaggcagcaggcagggaaagggagcagcaccggcc

SEQ ID NO: 82920 - RNA, 85 nt, Homo sapiens
agcggggagccccgagaacgccccagcggggagacacagaagccagaggagaccgaagaagacggagaccaaacaggacagaagc

SEQ ID NO: 82921 - RNA, 39 nt, Homo sapiens
ggacagggggagggcagaggggccgccgcgcccaggcgg

SEQ ID NO: 82922 - RNA, 84 nt, Homo sapiens
ggccccggcggcgggagcgcccccgaccggacaaagaaacgagcgccggcgggggagcgggaggagccagagcacaccgcacca

SEQ ID NO: 82923 - RNA, 66 nt, Homo sapiens
gcgacaacgagggaccgaacgcgcaccccagagggagaaggcaaccaaaggcaggacacaaaaaca

SEQ ID NO: 82924 - RNA, 52 nt, Homo sapiens
aacccaacaggaaaaagcacaaacgaggacaggcaagagcccaaacaggagc

SEQ ID NO: 82925 - RNA, 63 nt, Homo sapiens
ggaaacaagaaacaccaacacaaaaaaaaccaacagccccccagggaagccaccgcaaaaggg

SEQ ID NO: 82926 - RNA, 61 nt, Homo sapiens
caaaaccaagacaacccaacaaacaaccggagggaggggcggagaacggaaaagcaccagg

SEQ ID NO: 82927 - RNA, 82 nt, Homo sapiens
ggaggaacggaccagagagaccccggagggagaagcgcaggcagaccgggcacgacacagggagcagagcgaaaaggaggcg

SEQ ID NO: 82928 - RNA, 84 nt, Homo sapiens
cgaccaaggagggaggggagacaggcagcacaagcaggaaaggcaggagagcgaaagagagcggaaaaacgaccaaagaagcca

SEQ ID NO: 82929 - RNA, 70 nt, Homo sapiens
ccagcaaacaaaggcaggaagagaaaaggcgagcagcgcgcaaagagagaaggcgggaccaagaagaaag

SEQ ID NO: 82930 - RNA, 53 nt, Homo sapiens
ggaagaacaccacccgcaagggcaagaacacacaggaagggaaggggcggaga

SEQ ID NO: 82931 - RNA, 79 nt, Homo sapiens
cgggcccgaccgcaggagggagaccacagcaagacgccaggacccacggaagccagaaagacggcgaacgccccggccc

SEQ ID NO: 82932 - RNA, 71 nt, Homo sapiens
ggacagagcagacagaacagacaaggggacacgaaacagccaggaggagcgcgaagggggaaagaaaagga

SEQ ID NO: 82933 - RNA, 79 nt, Homo sapiens
agcagcggcaggccagggaaacaggcacgcccgccgcagggaaccaccacagggcgggggagacggagcgaagcagacg

SEQ ID NO: 82934 - RNA, 82 nt, Homo sapiens
ccggcggcgcggaggagcgaggcagcgacaggacgggaacggaaacgggaccagggcaggaggagaacagaagacggagaga

SEQ ID NO: 82935 - RNA, 35 nt, Homo sapiens
gcaaaaacgacacaaagaaacaagggacgaacaaa

SEQ ID NO: 82936 - RNA, 50 nt, Homo sapiens
cagagcacaggccggagagcaccaccagaggccgcaacagccgggccacg

SEQ ID NO: 82937 - RNA, 80 nt, Homo sapiens
cgcccaccccccccgcggggcggcagcccgaagccggaccagcagagcggaagcgagggcaccaaccaggagaggagaca

SEQ ID NO: 82938 - RNA, 85 nt, Homo sapiens
aggcagcggcagagagggaagggcaggcaggcgcgagaaggacgcgcagccaccccaggagaagccccacccgccccaggagcca

SEQ ID NO: 82939 - RNA, 78 nt, Homo sapiens
gaaaaccacggacaagaaagcgccaaaaacaacaccaaaaagccgcaggggcaacaaaagacagccagaagacaacga

SEQ ID NO: 82940 - RNA, 79 nt, Homo sapiens
gaggagagaggaacccgaagaagaaaggacgacagccagagagagagcccagccaagccagaaccaggggcaacagaca

SEQ ID NO: 82941 - RNA, 76 nt, Homo sapiens
agcccgggacaccaagaaagaacggcagcgcaagaccccgcacggaagcagcaagcacaggcagcgcagagccaga

SEQ ID NO: 82942 - RNA, 85 nt, Homo sapiens
ggccagaggcaacggggccacaggcccacccggacgaagccacccccaccccaccaaccaaaacagggcagaagaagcgcccaag

SEQ ID NO: 82943 - RNA, 60 nt, Homo sapiens
ccacgggggcagcgcaggacaacggcaggacggaaggcagaggaccacccgcacccaggg

SEQ ID NO: 82944 - RNA, 58 nt, Homo sapiens
ggcggcaggaccgggggccgaggcgccggggaccccagaaggaagcgacccggaaccg

SEQ ID NO: 82945 - RNA, 66 nt, Homo sapiens
aacggcagcagaacaccggagagcaaggggacccgcacacgcaacccgccccagggcaagggcccg

SEQ ID NO: 82946 - RNA, 55 nt, Homo sapiens
cccggacacgagcaggccacaagggggagaaaaggccaagggcaggagacacgag

SEQ ID NO: 82947 - RNA, 48 nt, Homo sapiens
ggagccagcgcgcagaccagcgggaaaagggggccaggaagcaaaaag

SEQ ID NO: 82948 - RNA, 39 nt, Homo sapiens
agagcgcgaaacgcacgagaagacggaccaacggaaaaa

SEQ ID NO: 82949 - RNA, 76 nt, Homo sapiens
gcccccgccccccgcgccggcgcagacccgccccgccacgagaacacacccccaggcggagaaaaaagagaagcca

SEQ ID NO: 82950 - RNA, 68 nt, Homo sapiens
gaagcacgaaagccccacccgccgcagcaagcagaggaacagagacgcaggcaagagcgcggaggaga

SEQ ID NO: 82951 - RNA, 81 nt, Homo sapiens
accgaaaaggcgaggagaagacggcaaaaaacgcgagacacacaaaagggaagaagaagaaacaggcagaagcagaaaaac

SEQ ID NO: 82952 - RNA, 70 nt, Homo sapiens
cccgcacacagccaaagggcccgacaggaggccaccggggcacgccacgcagccccaggccgcgcaggga

SEQ ID NO: 82953 - RNA, 69 nt, Homo sapiens
caaagcaacagccaaaaaacagcgggacaaccagacaacagaaggaacaacagaacgcacgaagcaagc

SEQ ID NO: 82954 - RNA, 59 nt, Homo sapiens
gaaaggaggaacacacgaacaaggggaaagcacagacggggccagccagaccaaggaca

SEQ ID NO: 82955 - RNA, 74 nt, Homo sapiens
ggacggacccagcacgaggaggcgcgaggagagcgggggaacaggaaagaaaaaggacggcgcccccaacgaac

SEQ ID NO: 82956 - RNA, 120 nt, Homo sapiens
cagcaccccgaacccgaggcaggggaagcgggacgccagccagccagaccgcggcgccagccgaggacgcgccaaacccagaagacaggcagaagccaggggacaccgccagcccaaaca

SEQ ID NO: 82957 - RNA, 78 nt, Homo sapiens
cgccccagggccagcccgggaccacggaccaaaggccgggcgcagaacccccagaccacagcgcgagaaaggaccaac

SEQ ID NO: 82958 - RNA, 77 nt, Homo sapiens
cagcgccgcagcacgcggaccagagaaccgcagccagaagcaaagcagacagacgcgaaaagacagcccaagcaaca

SEQ ID NO: 82959 - RNA, 82 nt, Homo sapiens
acaccgaggcagccaccggcccgcgccgcgacaagacgggccgagcccgaggggggaggaggacagcaccaccacccagaaa

SEQ ID NO: 82960 - RNA, 88 nt, Homo sapiens
ggcgggaggaaaggaggggacagagcaggcccaggggaagacagggagcagccacccccggggggcccccgaagcccgggagccagcg

SEQ ID NO: 82961 - RNA, 60 nt, Homo sapiens
acgccgccaaccgcagggacgcgccaaggccacggccgagacgggccaggccacgcgcgc

SEQ ID NO: 82962 - RNA, 80 nt, Homo sapiens
agcgagagccggccgaacgggggagcgggcaggcagaagaaggggaacccgcgcccaccagaggaaaaagggaggcagac

SEQ ID NO: 82963 - RNA, 81 nt, Homo sapiens
gcgccgcgcgcgcacgaacgccgcagcccccagccgcgcgcgcgcacccccggacagagagaagagggggaaaaaggaagg

SEQ ID NO: 82964 - RNA, 74 nt, Homo sapiens
ggcgaacgaggacaggcgacacacaggcgcacccggggccaaagcagccagagcaagacccacgaagggcacac

SEQ ID NO: 82965 - RNA, 63 nt, Homo sapiens
gcacggagaccagcgggcccaccagcccccaaagaccagggaaggaagaagcgcgaaaacgcg

SEQ ID NO: 82966 - RNA, 79 nt, Homo sapiens
gacagggcggacaccaggaagaggagccgagcacgggccgagaccaccgaggagagccgggaaagaaacccaaaggaag

SEQ ID NO: 82967 - RNA, 80 nt, Homo sapiens
cgcggaggccgcgacggacgcaagaggcgacggcgaccaagcccacaagcagaccggaagaccgacggaagaccacaccc

SEQ ID NO: 82968 - RNA, 66 nt, Homo sapiens
caaaagcgggggaagaagagaggacgaggacgggacagaagggcccgaaacagacagaagaaaaac

SEQ ID NO: 82969 - RNA, 86 nt, Homo sapiens
cagcaggacacgcccggaagcccgaccacagagacgcgccaggccccgcgagcggccaccgcccaccaacagcgggaagaagccgc

SEQ ID NO: 82970 - RNA, 67 nt, Homo sapiens
caaagaacagaggggagagaggggaaagaagccacccaacggaggcaaaagagacacagcagacccc

SEQ ID NO: 82971 - RNA, 34 nt, Homo sapiens
ccgagcaaggagggagggcaggaaccacagagaa

SEQ ID NO: 82972 - RNA, 72 nt, Homo sapiens
gcaccaccaggccacccaggggcgccaggaaacagaccaagagaggcgcgcaccacgcagccaccacagagg

SEQ ID NO: 82973 - RNA, 77 nt, Homo sapiens
aagccaacacggaggacagagcccggggaccgagggaacagccaggagagcaagcaaaagggaggcacgacggggga

SEQ ID NO: 82974 - RNA, 80 nt, Homo sapiens
cgaggaccgagaccgcggccgggaccgaggagacgacaacccccccggcggaagcccccgaacggcaaaacaccggccgc

SEQ ID NO: 82975 - RNA, 78 nt, Homo sapiens
gaaggcccggacacagcaaaccgggccacaggaaaacggacgagaacaagcggaaaacaggggcgaggggacaaggag

SEQ ID NO: 82976 - RNA, 81 nt, Homo sapiens
gcaaggagaaggacgccagggcggaggaccccaacgccacgagagaagaaagaaaaagaaaccgccagcccagagacacga

SEQ ID NO: 82977 - RNA, 76 nt, Homo sapiens
ggcgccggcacaagcagagcggacaaggacaccgcgaaaggcagcaccacagcaccacaggacaacacgcccacac

SEQ ID NO: 82978 - RNA, 75 nt, Homo sapiens
aaggccagcccaagacaaggcaacaacaccccacagagaggaacgaagggcaccacgacaaaccaagacgacaaa

SEQ ID NO: 82979 - RNA, 85 nt, Homo sapiens
ggcgaacgcggagagcacgccagaaggcccgggcacgcgaacggaggaaccacgcacagaggagcggcgacacgggccggcgggg

SEQ ID NO: 82980 - RNA, 77 nt, Homo sapiens
accaaaaaccccccccaaaaaagggaggaaagggggacggcggggggagacccagggcggagaaaaaagaggaagag

SEQ ID NO: 82981 - RNA, 80 nt, Homo sapiens
gacaaccaagacgccgcccaccagcagacccaccagagacaagccagggcccggggaacagcccacgcaaggcagggcag

SEQ ID NO: 82982 - RNA, 83 nt, Homo sapiens
cagcccgcggaaacccggggccacagggcccccacgaagccgcagacacgacccacaccacccagaaccagccccccaaacgg

SEQ ID NO: 82983 - RNA, 72 nt, Homo sapiens
aagagagcacggaaggaaaagggacaagcaagagcaacaacaggccccgagccccggccccaaagacccaaa

SEQ ID NO: 82984 - RNA, 83 nt, Homo sapiens
cgcggccggaccgagcgcccgacccggcgaggccagccaaggacggcaacggggagaggcgacacccggagaagccgaaacca

SEQ ID NO: 82985 - RNA, 47 nt, Homo sapiens
ggcgcagaaagaggagcgagggggggaaggaacagcgggaccaggga

SEQ ID NO: 82986 - RNA, 77 nt, Homo sapiens
gacacgaagccaggcgcccgccggcacacacaaaagaaaaccagagcgccaagagccacccaggaaggccgcaggag

SEQ ID NO: 82987 - RNA, 101 nt, Homo sapiens
agaccacagaccagcagggaccgggcacagacaacccccaccgcaaccagaaacaaaaccagaccgagagcaacaagacggaaaagcagcccagggagcag

SEQ ID NO: 82988 - RNA, 90 nt, Homo sapiens
cgaggcggcccagcggcggcagggcccgacccaggcaagcgagcaggcgagcaggagcccacagccgagcagcggcccagagcagcggag

SEQ ID NO: 82989 - RNA, 70 nt, Homo sapiens
aagccacaaaaacagggaacaaaaccaacaccaagaggaacccaacggaacacgggcgccccagcaagac

SEQ ID NO: 82990 - RNA, 75 nt, Homo sapiens
agcgggaacagccgaggaggagacgcaggagaggggccgcacaacaagacgagagaggacccccgccccaccggg

SEQ ID NO: 82991 - RNA, 78 nt, Homo sapiens
cacgacgagagggacagcacgaggcgcagcagccccagccaggcaggaaacacccccaggagaggcagccagaggccg

SEQ ID NO: 82992 - RNA, 73 nt, Homo sapiens
ggcacaaaaagcacaaaccaacaaaaccagcaacaccccaacagggggaaggagcaggagagagcacacaacc

SEQ ID NO: 82993 - RNA, 77 nt, Homo sapiens
cgacccgaagacccacgcggaggaggacgaggacacggccgcggccggacccgacggggaaccaaggccggaggcgg

SEQ ID NO: 82994 - RNA, 82 nt, Homo sapiens
gccacagcaccccagcacccaggaggagggcgccagcgaacccgccgagccagccagacacacgcggccagcaacccaccgc

SEQ ID NO: 82995 - RNA, 83 nt, Homo sapiens
cgggccccgggccgcggcgggaggagacggagcccggaggaagaaggagggcgaccgcaccagacagcgcgggagccaggaaa

SEQ ID NO: 82996 - RNA, 77 nt, Homo sapiens
acggcacgccccgcaagaaacgggggaagcagagcgcacaaagggaaagggaccccggaggaaaagcggaagcggca

SEQ ID NO: 82997 - RNA, 88 nt, Homo sapiens
ccgccccggcgagccgcgacggcgccgcccacggcgagaaccacaaggaccgccaccgccgcagcccgggcggccccgccaggcccgc

SEQ ID NO: 82998 - RNA, 76 nt, Homo sapiens
cgcgcacagaaccgacgccaagcaggggccacaacaacaaacggacaggcaccagccccacgggaacagaacgcca

SEQ ID NO: 82999 - RNA, 79 nt, Homo sapiens
agcgcagccccggcgcccaccgcccaccgagccggggggagccccccagacccgaaaggagacaagaggacagccgcac

SEQ ID NO: 83000 - RNA, 81 nt, Homo sapiens
gcagaagagccaaggaaaaacagcaagaacccaaaagggagcccaaaagaaacagggcgcaggaaaagacgagccaggaaa

SEQ ID NO: 83001 - RNA, 76 nt, Homo sapiens
agaaggcaggaaaaacgaaccacccccgccccgggcacaaacgcacgggaagacacacaggacacagagaagggac

SEQ ID NO: 83002 - RNA, 41 nt, Homo sapiens
cgcagggcgcccccgaagggggcggaggacggaaccaggga

SEQ ID NO: 83003 - RNA, 50 nt, Homo sapiens
gggcaccagccagcaaaccagaggggagaagcagaccgcaccaggcggga

SEQ ID NO: 83004 - RNA, 70 nt, Homo sapiens
aaagcacccaggcacgccagacaccgccaccaccgagaagacaaaacaagcagggcagaaaagaacagac

SEQ ID NO: 83005 - RNA, 68 nt, Homo sapiens
cacgaagcacaacgccaggagggcaagccagccaagcaaaggaccgaggaaggaaaacggagccaaga

SEQ ID NO: 83006 - RNA, 75 nt, Homo sapiens
cacaggaaaggagagcaaccgccgagagagaggaaggccaacaccaacaggagcagcgcggacgaagaagacagc

SEQ ID NO: 83007 - RNA, 76 nt, Homo sapiens
ccagccgaccccccaaggagaggccccggaacccccgaagcaacagcccccacgccacgggcgcccccggaggcca

SEQ ID NO: 83008 - RNA, 59 nt, Homo sapiens
cccccagcacaccgaggaggcaggaccgcacgaggacggccagcagaagcaggcgagcc

SEQ ID NO: 83009 - RNA, 70 nt, Homo sapiens
gggaagagaaagcggcacgaagacagccccaacagacgagaagcaaggaaggcaacaacgacaaaaccgg

SEQ ID NO: 83010 - RNA, 103 nt, Homo sapiens
ccaccagcagccagcggcgaggaaaagaaggaagagaagaccggaaggggagcaagggccgccgagaaggagggcaaaaagccgcagacacaagcaagaacag

SEQ ID NO: 83011 - RNA, 77 nt, Homo sapiens
cacccagggccggaaaagccaacgccggcgaaggacccccccgcggcggcgaggcccgagccagagaggaggacccg

SEQ ID NO: 83012 - RNA, 57 nt, Homo sapiens
ggcgcggagaggaagccagccaccagccaggccaaaagcagggacgcggacaaaggg

SEQ ID NO: 83013 - RNA, 87 nt, Homo sapiens
gggcgcccaggaacaacaagaaacgacaggaggggcagacaccccacaggcaccagcagcaacgaacaggaggaaaagagaaccagg

SEQ ID NO: 83014 - RNA, 55 nt, Homo sapiens
cagcccgacaaccagaaccgagaaaccaagacccgaaaccagcccccaccaccag

SEQ ID NO: 83015 - RNA, 57 nt, Homo sapiens
cggagcccgcagaccgcagaaggccggagacaccagcaggccggcccggcagaaaac

SEQ ID NO: 83016 - RNA, 75 nt, Homo sapiens
gagaggcacacccggcagaccacacgagcggaggacagcgaacggaggagcgacggccagcgcgcacaggcagcc

SEQ ID NO: 83017 - RNA, 82 nt, Homo sapiens
cgggcacccgacccccgccggagccagcagaggccaaggcagcagcgaagaagaaagggagcgacagcaaaacaaggacgca

SEQ ID NO: 83018 - RNA, 50 nt, Homo sapiens
ccagccgaccaccccagcccgggagccgaaggcccagggcgacacgagaa

SEQ ID NO: 83019 - RNA, 77 nt, Homo sapiens
aacacgcggagcggaagacggcaacccagagacaacggcaacacgacaagaagccggcccaccgcagcacaggcgcg

SEQ ID NO: 83020 - RNA, 56 nt, Homo sapiens
agaagcagcgccagagaaccagaagaaccgaaaccgcagaggggggccccgccgga

SEQ ID NO: 83021 - RNA, 67 nt, Homo sapiens
agaagcgaccgcgcacgccggggacaggagccaggccaagagaaagaaacacagaagcgagcaccac

SEQ ID NO: 83022 - RNA, 70 nt, Homo sapiens
ccccccagccacggaaccaagccagggaaacggggggaaacaaaaaaaaacgaaaaaggcaagcggaaaa

SEQ ID NO: 83023 - RNA, 53 nt, Homo sapiens
agggcggaggagccccaagaacagaggacgaggaggggcagcaagccgccagg

SEQ ID NO: 83024 - RNA, 61 nt, Homo sapiens
gaccacggcgcgccccggccggaggccccgcgagaccggcgcggcggcagacagccgccga

SEQ ID NO: 83025 - RNA, 79 nt, Homo sapiens
ggacccggacaaccagaggcagccagcagggggagagaggagcgggaaggccccgcacccggagaccgggggaagacaa

SEQ ID NO: 83026 - RNA, 58 nt, Homo sapiens
acggcgaagcgcgcgccgcgcccggaccccagacggcccgccacgggccccgcagccg

SEQ ID NO: 83027 - RNA, 57 nt, Homo sapiens
gacccgggccacaccggaacaagcggagggccgcaggaaaccacgagcggggagaaa

SEQ ID NO: 83028 - RNA, 68 nt, Homo sapiens
cacacagagcaggaggccaggccggaggcaacccaaaagaccgcccagacaccccagagacagcgaca

SEQ ID NO: 83029 - RNA, 70 nt, Homo sapiens
gccgccccggcggggccgggcggccgcggcgagaccggacccaggcgggcgcggacggcaggggcgccgg

SEQ ID NO: 83030 - RNA, 75 nt, Homo sapiens
gccaggacaggaaggggaagccccacacagagcgcaggggcaggacagaagagagcgggacacccaggaggaggg

SEQ ID NO: 83031 - RNA, 69 nt, Homo sapiens
aagagagcgcccaggaaggagccaaagcacaagaagaagacgagggcaaaccgacacaaagcgagaggg

SEQ ID NO: 83032 - RNA, 69 nt, Homo sapiens
caggacggaagggggcggccacgaccaagaagaagccgcagaccccggccgcccaacagcacaagaagc

SEQ ID NO: 83033 - RNA, 35 nt, Homo sapiens
ccacccagaaacccccccagcccaagcgaggaaag

SEQ ID NO: 83034 - RNA, 68 nt, Homo sapiens
caggaggagcagcccggaagagagggccacaggccaggcaaccaaacccggcccaaggaccccgccag

SEQ ID NO: 83035 - RNA, 106 nt, Homo sapiens
accccaccagaaccaggcccaagccgaaccgggagaagaccccggcgcgggaacggcccaacaaaagggagaggagaccggagacggcgaggagaccaaaagagaa

SEQ ID NO: 83036 - RNA, 80 nt, Homo sapiens
gacaggcgagagaggaggacacgaccgaggcaccagaaacgcagccggggccacagcccagccgccagccacacgccaca

SEQ ID NO: 83037 - RNA, 74 nt, Homo sapiens
ccgaaccagcaggggagcggaaggggacaaaccgcgacccagcagcaggggcagaaacgggacgggagcgccac

SEQ ID NO: 83038 - RNA, 76 nt, Homo sapiens
acagaacggcagcggagaaaacaaccagcagccaaaggcagggaagaaaaagaagacaccagagaaacacgagagc

SEQ ID NO: 83039 - RNA, 57 nt, Homo sapiens
ccagcaccaggggaagcgggacaacgggggggaggcaggaaaaagacacaagacagc

SEQ ID NO: 83040 - RNA, 52 nt, Homo sapiens
cggaccccgcggcgggaggagccgccccgagcaaccccaagcgcccacccaa

SEQ ID NO: 83041 - RNA, 34 nt, Homo sapiens
aggaaaacaaccgagggcagacacagaagacggc

SEQ ID NO: 83042 - RNA, 78 nt, Homo sapiens
aacagaagaagaggggccccaaaggcagcgcggcagggggcagacaccccacaggcaccagcagcaacgaacaggagg

SEQ ID NO: 83043 - RNA, 60 nt, Homo sapiens
aaaacgcccagagccgagccacaagcccacgagaggaccgaaacagcaacaaccgcaacg

SEQ ID NO: 83044 - RNA, 72 nt, Homo sapiens
acaacccggccgggaggaagccgcaggaccggaccaggagccaacaggaggggccgagaccccgccacacac

SEQ ID NO: 83045 - RNA, 58 nt, Homo sapiens
gacggggaagggcgagcgaccaccggcaggccaacagagcacaggcaaggcaccgagg

SEQ ID NO: 83046 - RNA, 78 nt, Homo sapiens
cgcgggcaacggcgggacagcaaaaagacccaccaaggaagcagcggccacgccagggcggccggagcagcagaacaa

SEQ ID NO: 83047 - RNA, 124 nt, Homo sapiens
aaggacaccaaggacccaagccgacaccacaacaaagaagaccacacacgggaaacacaaaacaaaacaaccgcaacgcccgacaccggcgggccggggcacagaggagcgacgagggcgggcc

SEQ ID NO: 83048 - RNA, 71 nt, Homo sapiens
aacagcagaggacgacagcaggagagcagccaaaacgagaagaacgacagaacacggcaaaaccacgaccc

SEQ ID NO: 83049 - RNA, 86 nt, Homo sapiens
ggaagcgcgggaagggaaaacaggagacaagaggccaaaaggaacgagccaggggaacccagaaaaaagaagaggagagagacaga

SEQ ID NO: 83050 - RNA, 75 nt, Homo sapiens
acaggggccggccaccgggaagaagagcaccggcgacaaaggacagccaccccgacacccgacaaaggggcacag

SEQ ID NO: 83051 - RNA, 50 nt, Homo sapiens
aggaaaagagaaggagcccggcccggaaaggagccggggagagacgcggg

SEQ ID NO: 83052 - RNA, 73 nt, Homo sapiens
cagaagcaggcccccagccgcagccacaacaccggcaggaaccaccaggacagaaagcacaccgacccccaac

SEQ ID NO: 83053 - RNA, 60 nt, Homo sapiens
caagcgcgggaacggcgcggaaggaaacggggccgggggaccaggacggcccaaccacag

SEQ ID NO: 83054 - RNA, 80 nt, Homo sapiens
aaagagaagacagccaggaaggcccgaccacgaagcacacggcgcaccgccgaaggcccggccacagcgaggccgggcaa

SEQ ID NO: 83055 - RNA, 76 nt, Homo sapiens
gggaaagagcgaggaggagggagagagccacagaccggagacgaggacgcgcacaggaaaggacgcggaacaagca

SEQ ID NO: 83056 - RNA, 76 nt, Homo sapiens
acgggggaaagagaagcacggcccgacacccaagccccagcccgacaccgcgccacccgggggggcaccccaaccc

SEQ ID NO: 83057 - RNA, 86 nt, Homo sapiens
cggcccccacaccacacagagagcgaaaacagaagaggaggaaaagcaaagagcaaaagcaagaagaagagaggcagaaggcaacg

SEQ ID NO: 83058 - RNA, 51 nt, Homo sapiens
ccagagagcgggaacaggagagagcgaagcaccgcgcagaccgaaaggcac

SEQ ID NO: 83059 - RNA, 66 nt, Homo sapiens
ccagcggacgcgcgcccggaccagcggcaaccacagacagcaagcagaagaggaacagaagaagca

SEQ ID NO: 83060 - RNA, 74 nt, Homo sapiens
cacacgaggccacccagcccaccaaacacgccggaaaccccgcccacagcacgaggcaccccagccccgagcca

SEQ ID NO: 83061 - RNA, 77 nt, Homo sapiens
acagccagccaaacacaccaacaaaaagaccgggacagggggaaggaagggccccacaccaaagaaacccaaaaaga

SEQ ID NO: 83062 - RNA, 52 nt, Homo sapiens
acccacagagagccaggaggagggaggacgaacccgcccgagccgggagaac

SEQ ID NO: 83063 - RNA, 80 nt, Homo sapiens
acacacgcaaggccgggaaacaaagggaggaacggagccccgccagacgccccaaacaaacacgagcaccaaggggcacc

SEQ ID NO: 83064 - RNA, 83 nt, Homo sapiens
aaggcgacccaagacacccagagagggacagggcgaaccgaccaagaacaacacccagagggccaggagaaggcgaagagagc

SEQ ID NO: 83065 - RNA, 76 nt, Homo sapiens
aggggcccgcgggggaaaaagcagcgaacccgagaccaacgggaggagcggggggaagacaccaggcgcaggagcg

SEQ ID NO: 83066 - RNA, 76 nt, Homo sapiens
agcccgaggagcgccccggagaccccccacaccagcagaggcagaaggggacggaccccggcacccaaacgcgaca

SEQ ID NO: 83067 - RNA, 75 nt, Homo sapiens
aaggcccccagaacacagcgggcgagcagcacgggaacaggcagaagagcgggaggacagaaagaaagacagccc

SEQ ID NO: 83068 - RNA, 78 nt, Homo sapiens
agacacacaagaggacagggagaaagggccccaagaaggcggagaagaacccaaccaaaaccaggcggcaaccccggg

SEQ ID NO: 83069 - RNA, 73 nt, Homo sapiens
acagagcacacccaaaggccaacacaagacaagccagcagccgccagacaagagacaagagagggcggcagaa

SEQ ID NO: 83070 - RNA, 81 nt, Homo sapiens
gaagggcaacaaagaaagaacacaaacgacacagaagccccagggccacaaaagaagacagggaagccgaagaagccagcc

SEQ ID NO: 83071 - RNA, 47 nt, Homo sapiens
aggcacacaggcagagacaagcccccccaaggacagcagaccacagc

SEQ ID NO: 83072 - RNA, 76 nt, Homo sapiens
acaagggaacagacacccacccgacggggccggcccgccgcccagccgggcacgagccaagagaaggaaagaaaca

SEQ ID NO: 83073 - RNA, 79 nt, Homo sapiens
aggccaacaaccccagcgaggaaaggggagcgggggaggaggaaggaaggaagagagaagggcacagaccaagacaacg

SEQ ID NO: 83074 - RNA, 73 nt, Homo sapiens
ggaagcggcagagagggaaacagacaacacaccaaaggagagacacgggaggcagaggcgcaaaaggaaaggg

SEQ ID NO: 83075 - RNA, 88 nt, Homo sapiens
gaaaagcgaggcaaggcaggcgggaaaacaacggagcacgcaaagcaagccggcaacgggacaagcaggacgggagagcacagccacg

SEQ ID NO: 83076 - RNA, 77 nt, Homo sapiens
cccacgcgaccccggggccacccaagggccggaggcccaaggcaggccagacgccgcgaccaccgcgaagccgacaa

SEQ ID NO: 83077 - RNA, 72 nt, Homo sapiens
ggcggaggccacgaacacgccggagccgccagggaaagggagcagcaccggccacacccacagcacgaccgg

SEQ ID NO: 83078 - RNA, 62 nt, Homo sapiens
gagcacgcgggccggaggaaaacccacaaggagagagcaagaagaccacgccgaccagagaa

SEQ ID NO: 83079 - RNA, 35 nt, Homo sapiens
gaaagaagccaccagagagaggcaggggaggcaga

SEQ ID NO: 83080 - RNA, 77 nt, Homo sapiens
ggcgaaggaggcagaggcacagcgcagaggagcagccgcgcaagggggaagggccggcggggcaaagaaggcggcgc

SEQ ID NO: 83081 - RNA, 73 nt, Homo sapiens
gaacccgagcagcccagacaggaagacagcagagaccaaaccagggaggacagagcccaggaccaagagcaca

SEQ ID NO: 83082 - RNA, 75 nt, Homo sapiens
aacgcagcgaaagcggaacggacacccggcacaccacaaaggccgcccccaccagcggggcggccaccgaccccc

SEQ ID NO: 83083 - RNA, 75 nt, Homo sapiens
aagccaaacgcagaaaccagacaaaccgagccagacaacaggacggcgggagccgaaacaacacaaaggacaccg

SEQ ID NO: 83084 - RNA, 87 nt, Homo sapiens
cgggagacccaggaggagcccgcaggaacccgcggccgaggcgaccaccggagcggccaggcggaaggagcagaccgggcacgagac

SEQ ID NO: 83085 - RNA, 66 nt, Homo sapiens
aaaggaaagaagaaacagaacacggccacgggagacagacccgccccgaagccgccccccaggaag

SEQ ID NO: 83086 - RNA, 70 nt, Homo sapiens
cgcagccggggacgcagacgaaggcagccgagggacaacgcacggaccaaccacggggaaggggcgacac

SEQ ID NO: 83087 - RNA, 78 nt, Homo sapiens
agccaaagagacagagggccaacagccaacacacaccgaaacaagagcaaacggcgaaaccggcacagaagcacggga

SEQ ID NO: 83088 - RNA, 79 nt, Homo sapiens
gcagccaagccggggcagcagcccaccccaaagcaggaggagcaaccgaaagaacgacaagcagaaaagaagcacccag

SEQ ID NO: 83089 - RNA, 76 nt, Homo sapiens
gagccagcgccggccgcgcgccgcgcccgcgccacaggcgaaggcaagagaggggagggagaaaaacccgaccccc

SEQ ID NO: 83090 - RNA, 73 nt, Homo sapiens
aaaagacaagaagccccgaagacaagcggcagaggccgccgcaaccgacccgggaagcaggcgcaaaaacagg

SEQ ID NO: 83091 - RNA, 59 nt, Homo sapiens
ccgccgcccggacaacacggaccgggggccagaccgggaggcagaacaggcaggaacac

SEQ ID NO: 83092 - RNA, 72 nt, Homo sapiens
ggaacaggcagcaggaagcacggcgggcgaaacagagacacaaaaggccccagaggcaacagggaagaagca

SEQ ID NO: 83093 - RNA, 70 nt, Homo sapiens
aacgacccccaccggcccaacggcgggaaaggggacacgccgggggcccagcacggcaccagggggccgc

SEQ ID NO: 83094 - RNA, 74 nt, Homo sapiens
cagccccaccccgcaccaacagcagaggacgcgagaaaccgcagccagcaggagcgccagaaaagaacgccaag

SEQ ID NO: 83095 - RNA, 58 nt, Homo sapiens
ccccccaacaggcggcccaggaagaaagagggccacggacagaggcgcagcagaggaa

SEQ ID NO: 83096 - RNA, 80 nt, Homo sapiens
cgagggcagagacccccgccagccaggggaagcccccccaagaaggggcccgcagcaccacaaccgcgcgccacggacgg

SEQ ID NO: 83097 - RNA, 76 nt, Homo sapiens
gagcgaaaagcgagaacccagggcagagacaagagaagcgggacaaagacaagaccagaccacacagccgaacacc

SEQ ID NO: 83098 - RNA, 37 nt, Homo sapiens
cccccgagggcgggaacaggaaaagggggaaggccca

SEQ ID NO: 83099 - RNA, 67 nt, Homo sapiens
cgagccacagccacaaggcggagcgaaaggacagcgaagagaaaacgacgacccgggaagcaagggg

SEQ ID NO: 83100 - RNA, 84 nt, Homo sapiens
ggacggccgcgaagaggcgggccgggaggacaccaggaggggaagagcgaaagaagcgcagcagaaagagacaaacacccaacc

SEQ ID NO: 83101 - RNA, 47 nt, Homo sapiens
aaaagcccaggaagaagacgaggagcgccgaaaagcgaaaagaaaca

SEQ ID NO: 83102 - RNA, 105 nt, Homo sapiens
ccaccggcaggcgcacaggcccggccaggcacaagggcaccacaaagaggaccacacaccccgaccacagcgcaacaacccacgcacgaacaaccgcagggcgaa

SEQ ID NO: 83103 - RNA, 73 nt, Homo sapiens
gaagaagggcaaaaaccggggcagagaagaccgggaggacagcgagcggagacaaagaagaaaagcagaaaga

SEQ ID NO: 83104 - RNA, 90 nt, Homo sapiens
acggagcggagaaaaggaaccggccccggaagcagcgacaggagcggagcgccacgggcgccaccagccagaggggcggaccagcgcagg

SEQ ID NO: 83105 - RNA, 54 nt, Homo sapiens
gcgcccggccaggacaccccggaaaagcccagcacggcagacacaccgaccaga

SEQ ID NO: 83106 - RNA, 82 nt, Homo sapiens
ggggcaccagaagcagcaaccagggaaccagaacagagcgccaaagaaaaacgagggaaacgcggccgaaacacagaaggaa

SEQ ID NO: 83107 - RNA, 72 nt, Homo sapiens
agaagcacgaaagccccacccgccgcagcaagcagagggaccccagggcaggagggcgcccccagcgcccag

SEQ ID NO: 83108 - RNA, 62 nt, Homo sapiens
cccacgaacccgaagcccccaaagagagaaccggagagcacccaacagccagaccggaccga

SEQ ID NO: 83109 - RNA, 115 nt, Homo sapiens
gcggcgccccggcgggaccgggcggcacgcacgcgggcagggaacaggcggagcggaagggcaaggccagagaaggcgggagaaagacacgaaccacagaacgcaacaggacagc

SEQ ID NO: 83110 - RNA, 98 nt, Homo sapiens
aacagacgcagccacaagcgaggagcagacgagggccaggccggggcgaccaacgggggggccgcccgcccaaggcaggaagaggggccgcaaagaag

SEQ ID NO: 83111 - RNA, 64 nt, Homo sapiens
ggcgcgggccagcggccgcgaggccgcagccccgggacacaagggcaccggaccggcagggcac

SEQ ID NO: 83112 - RNA, 84 nt, Homo sapiens
gacgcagcacgcagcacggggaacgagaaggccaagagaggccaacagaggaacaaggcccgcagaacccaagagcaaaagcag

SEQ ID NO: 83113 - RNA, 72 nt, Homo sapiens
agaaggagaaaagggagcagcaggagccccgcggggcgcgcgcagaaccaacaaaagcgaaggaaaagggag

SEQ ID NO: 83114 - RNA, 86 nt, Homo sapiens
gagccgcaggagggccgcgcggccggagcccggaagcagcagccaccgaggacggggacccgccagcagcccgggggcgacgacga

SEQ ID NO: 83115 - RNA, 73 nt, Homo sapiens
gaaaaaagaggaacaggcaggaggaggccaaagaagaaagagcggccgaacgaaggcaccccgagcaaagccc

SEQ ID NO: 83116 - RNA, 71 nt, Homo sapiens
ccccaaaggcgcaccggcccaagaagcgcagggcggcgccaagaaggacagggcggccgagggcagcaaag

SEQ ID NO: 83117 - RNA, 79 nt, Homo sapiens
gcggcggccagggaccagagcccaggaggagacacaggacgggcacccccagagacgcccagggcccccccggcggccc

SEQ ID NO: 83118 - RNA, 58 nt, Homo sapiens
aagaacgacccgcccggggcagcaggcgccaggggagaggaggcagaaggagaccgcg

SEQ ID NO: 83119 - RNA, 72 nt, Homo sapiens
ggaacggcccgagacacagacagggaggccggaagagcgggagcgggagccaggcagaaggccaaccaaccc

SEQ ID NO: 83120 - RNA, 68 nt, Homo sapiens
gacaaaagggccaaagaagggagagaggggggcaaaccgagggacacccagcgagcacaagcacaagg

SEQ ID NO: 83121 - RNA, 58 nt, Homo sapiens
cccacgacagaccacgacaagagcacaaccccgcgccggaggaagagcggaaaaggcg

SEQ ID NO: 83122 - RNA, 59 nt, Homo sapiens
gagccaacccaaaaccaagggccaagaagccaagaagcaaggacgaaagagcaagcacg

SEQ ID NO: 83123 - RNA, 96 nt, Homo sapiens
cacaaccacagcaagagcaccggcgaccgcaccacaagggacgagaccaaacggaagaggaggcagcacggcaggagacgaggagaggacagcagg

SEQ ID NO: 83124 - RNA, 77 nt, Homo sapiens
gaagcggaggagcccaggagacccggggacagcacgcccaggccccgaaaaagacggaacacgcccaccacaaaaaa

SEQ ID NO: 83125 - RNA, 68 nt, Homo sapiens
gcccggccacagaaaccagaccagaaagaaaacccaggaaacacaagaccgccagcacaacagaaagg

SEQ ID NO: 83126 - RNA, 80 nt, Homo sapiens
aacagggaggacagaggaaaagccccagcgcgcgcccggacagacaagggccaagcggagaacaaccccaccagacagcc

SEQ ID NO: 83127 - RNA, 67 nt, Homo sapiens
aggacgaggacacagcgggacagcagaaacgcccggaaacaccggagggcacgggcaaacaacagac

SEQ ID NO: 83128 - RNA, 73 nt, Homo sapiens
gggggacccaaaaagggcagaaaggcaaggaggggcaggagcacacccccacaggaccccccacagaaggccc

SEQ ID NO: 83129 - RNA, 73 nt, Homo sapiens
agagagccccagcaggaaggccaccgagggaacccgaccggacccagccccagaaggaagcacacacacccgc

SEQ ID NO: 83130 - RNA, 79 nt, Homo sapiens
gcgccgaagcagccgggagccggagcgggcgcggacgccgaggcaccgaggcaccagaggagaagaggagggagaacga

SEQ ID NO: 83131 - RNA, 55 nt, Homo sapiens
aaaacaagacagccagagaccggaccaaaccagagacaaaaggcacagccagaac

SEQ ID NO: 83132 - RNA, 76 nt, Homo sapiens
caagacaggacacagagccccaggacacagagacacaaaaacagaacagggacaccagagccgccggggaggggcc

SEQ ID NO: 83133 - RNA, 62 nt, Homo sapiens
ggccagagagccagaacggagaggccagcggaccccagggaagcacacccgggccgggacca

SEQ ID NO: 83134 - RNA, 79 nt, Homo sapiens
gcccaaagccaggcagaggccccggaggagcggagaaccggagcggccaacggcaggaggcacggaaaaaccgcgagcc

SEQ ID NO: 83135 - RNA, 70 nt, Homo sapiens
acacagcggcggaccccacaccaagaagggacacagcaggacaggaacggccagcccgggggcccacaga

SEQ ID NO: 83136 - RNA, 85 nt, Homo sapiens
agagcgcggaacaggacgccccgaggacgaacagcggggacgccccagcagaccgcccaggagaggaaagcaggaggaaagacca

SEQ ID NO: 83137 - RNA, 105 nt, Homo sapiens
aaagcagagaagccacccgggcccacgaggcagcgcccagccgcgagcacggggccgggggcaccaggcggcggcagcccccagcccccacccggcgcccggggc

SEQ ID NO: 83138 - RNA, 37 nt, Homo sapiens
ccgagagcgggaaacagcaccccgcggagcagcgcgg

SEQ ID NO: 83139 - RNA, 66 nt, Homo sapiens
gcggcccggagcgcggcccgaggcccgcccagagcgcaggaggaccggccccgcaccggccgggcg

SEQ ID NO: 83140 - RNA, 83 nt, Homo sapiens
ggagcggcgcaagaggaagagccaccaaaggacaggagaaaagaaagcaaccagccgagacaagcagccaaaccaaagaagca

SEQ ID NO: 83141 - RNA, 80 nt, Homo sapiens
cgggcccaagggcagacagacgagaacagggggcagaaacacgagcacagcaagggcgcacgccccgacaagggaccggg

SEQ ID NO: 83142 - RNA, 43 nt, Homo sapiens
gaccgaaaaccagaaccacacaggaggcacaaagacagaaagg

SEQ ID NO: 83143 - RNA, 74 nt, Homo sapiens
gggaaacaccacgaagcagccaaggcaggaaaacagggcgacaccccaacgcggagacagccgaggagccacgg

SEQ ID NO: 83144 - RNA, 75 nt, Homo sapiens
gcagacagcgaggaggagagaaaaggggcggaggacacggggaaccaacagaagaaggagaaaggagcaaccagg

SEQ ID NO: 83145 - RNA, 40 nt, Homo sapiens
cccaggaacccgccaccagaaggcgacccagcaacgcggc

SEQ ID NO: 83146 - RNA, 58 nt, Homo sapiens
aggcccacgccgggcgagacaaggcgcccgcgaagagcccgcggccccaggccccccc

SEQ ID NO: 83147 - RNA, 72 nt, Homo sapiens
aagccggggagggagggacaagagagaagcgcgcaggcaacaccccccacggcggagggagaagacccggga

SEQ ID NO: 83148 - RNA, 69 nt, Homo sapiens
acgcaccaggccaaagaaagagaaacccaaccaagaagcagcaacacaggcgaacccgcaccccaccga

SEQ ID NO: 83149 - RNA, 71 nt, Homo sapiens
cagcccgaggccccagccagcgaacaaaaacacggagagcaacaaagagggaagcggagaagaaagaagac

SEQ ID NO: 83150 - RNA, 73 nt, Homo sapiens
gcggccgacagagccccggcccccccgcagacccccggccgcaaggggggccgaagccgaccgcggaccaccg

SEQ ID NO: 83151 - RNA, 83 nt, Homo sapiens
agcagagccgcccggccacggggaccccggagccgcgccaggcccagacacgcagaggagacccgaaccggcaacagcaccgg

SEQ ID NO: 83152 - RNA, 73 nt, Homo sapiens
agcaaggaggccccagcggaccgaacagagcggcagcaacagccggcagggaaaacgcggcgcaaaaaggacc

SEQ ID NO: 83153 - RNA, 78 nt, Homo sapiens
gaaagcacgccacgccacggccccgcacggggcgcacagaggaggcagagccagagcccaagcccccgcagggagccc

SEQ ID NO: 83154 - RNA, 77 nt, Homo sapiens
ccacggcgcaacaaaaaggacaaagaacagggaaaagcaaaggggcaagcaaagcacagaaaaaacggaaagccgca

SEQ ID NO: 83155 - RNA, 88 nt, Homo sapiens
caggcagcccgagcagaggaagagcaggggcacagagagaggagagagaccagaggacgggaaaagccagccggcacggccacaaccg

SEQ ID NO: 83156 - RNA, 91 nt, Homo sapiens
acaggaagcccagaagcgcagaacacaagacccacgcacaaaaacacaccgccaaacaggacagccagacaagaccccaacgaagggccag

SEQ ID NO: 83157 - RNA, 60 nt, Homo sapiens
gagacacaaggacagcagcgacggggcccgcaccccagggacaagaaaaaccaagcgaag

SEQ ID NO: 83158 - RNA, 73 nt, Homo sapiens
aggccccccagccacgggaacgggcgaggaaaccagaggaacccgggaaaaagcagccgagcgaaccccgggg

SEQ ID NO: 83159 - RNA, 55 nt, Homo sapiens
cagcagggccgaccaagcaccgcagacccaaccccagagggccagcacagggacg

SEQ ID NO: 83160 - RNA, 44 nt, Homo sapiens
gcagcaggcagcgcccaacggaccacacccagcacaaggcggcc

SEQ ID NO: 83161 - RNA, 74 nt, Homo sapiens
gagaccccgcgggcccgagacaacgggaagaacccaaaggcggcggcaaaacggacgacaaggacaaagggaaa

SEQ ID NO: 83162 - RNA, 73 nt, Homo sapiens
aacccccaaaaaaaaaaagcaagagagagacacgaacaagaccaacccggaaggccccagccaggacagccca

SEQ ID NO: 83163 - RNA, 84 nt, Homo sapiens
cagcccccagcccggagaagccaaaggcaaagaaagacaacaggaagcgaacaaggaccggaaacccggacaacagaaaaagga

SEQ ID NO: 83164 - RNA, 69 nt, Homo sapiens
aacggaggaccgaagcaagagcagaggccgagcccacgcaggagacgggaggagcgacaacggagcaca

SEQ ID NO: 83165 - RNA, 66 nt, Homo sapiens
ccgggcccgggcggaggaaaaccccacgggacaagagaaaaaaagggcgggcgaacaaaaagagca

SEQ ID NO: 83166 - RNA, 83 nt, Homo sapiens
cccagccgccggggccccggcggcagagcccacgcaggagacgggaggagcgacaacggagcacacccaccccgcgcaagggc

SEQ ID NO: 83167 - RNA, 53 nt, Homo sapiens
gcccccagagcggaacacaggaccaccagacggcgccccaagaccaaaagcca

SEQ ID NO: 83168 - RNA, 76 nt, Homo sapiens
gcaagccaacccagcaccacaagcaggggagcaccccccagacggcgccagccgacccccgccgccacaccagggc

SEQ ID NO: 83169 - RNA, 82 nt, Homo sapiens
ccccgaagaccgcacgaggaaggaaagacgggcacgcggccgcggccgcagcccggcgccgcggcaggagggagccgccaga

SEQ ID NO: 83170 - RNA, 57 nt, Homo sapiens
gcgccacacccacacacaagcggacgcacagaacagccccggggaggagacaagggg

SEQ ID NO: 83171 - RNA, 85 nt, Homo sapiens
ggaggagaacccaccaagccccgcaggagccaccagacggagcagagcagacaaaccaccaccaagcaaaggagccgcgacggcg

SEQ ID NO: 83172 - RNA, 71 nt, Homo sapiens
ccaccaccacagacccagacaggggaagcagcaagagaaccccaggaccacaggagggaggcgccccagac

SEQ ID NO: 83173 - RNA, 36 nt, Homo sapiens
acagacgaaggcaaaagagaaagaacaacggcgcga

SEQ ID NO: 83174 - RNA, 66 nt, Homo sapiens
caaacaccaccaccaaggcgggaaaacggcacaaggcgacgagggagggcagaccgccaggccagc

SEQ ID NO: 83175 - RNA, 61 nt, Homo sapiens
agcggaccaacagccaccacccgaaacaagaaagaaacacaaagacaaggaaagaagagca

SEQ ID NO: 83176 - RNA, 63 nt, Homo sapiens
ggggcagaaacagagaaggaacagcccagagaggaccaggaaaaaccccagaccaccaacacg

SEQ ID NO: 83177 - RNA, 82 nt, Homo sapiens
ggcccgaacgcggacggcacgcagacgccagaacgccaacggcaagaaagggaaggccgcaaacagacacgcggaaaagccg

SEQ ID NO: 83178 - RNA, 98 nt, Homo sapiens
cgcgcggcggcggagagcaagggccaggggagcccagcggcgcgccggcagcaggaaaggagcagcagaacgaaggaagaagggaaagacaggagcgg

SEQ ID NO: 83179 - RNA, 81 nt, Homo sapiens
gggaccacgccggagccgaggacacccgcgcacagaggagaaagacagcaaagaaaaggagaagaaaggaaaaaaacaacc

SEQ ID NO: 83180 - RNA, 71 nt, Homo sapiens
ccgcaccaaccacccacacaacacagaagaagggacaggcccagggagggcacgacagcagagaggaaggc

SEQ ID NO: 83181 - RNA, 84 nt, Homo sapiens
cgagggggaagcggcccagggaggcagacaacagggagaccccacgggacaccagcccaccggccgaggcggggccgaagaaga

SEQ ID NO: 83182 - RNA, 78 nt, Homo sapiens
agagagcaaggcaaaggagaacccgcaagccagaaagaaacagaaagaagggagaagggcgcccaggaggcaggaagg

SEQ ID NO: 83183 - RNA, 75 nt, Homo sapiens
ccaagaagaccacagagggacccggacaaccagaggcagccagcagggggagcaacagaagccaggcaaggaacg

SEQ ID NO: 83184 - RNA, 79 nt, Homo sapiens
gagggcgacggggcgcccgagcccaacggcccggacgggcaggggcgagccacaaccgggagccccggcaagcagcagc

SEQ ID NO: 83185 - RNA, 57 nt, Homo sapiens
gggaagaaaagcaggggcggcaggacacaaacccagagaaggagggccccaaccaag

SEQ ID NO: 83186 - RNA, 73 nt, Homo sapiens
ccagcagccgcgacccacgccacccagcaacaaaaagaccacagacaggccccggggagccggaaggagacca

SEQ ID NO: 83187 - RNA, 69 nt, Homo sapiens
aggaaaacggccgaaacccagagcccaacaaggcgaagaacaaaaacgagacaggcagggaggaaagac

SEQ ID NO: 83188 - RNA, 62 nt, Homo sapiens
gaccgcgagcagacccgacaacacacccggcagggaggcccacaagcggcacccaccaagac

SEQ ID NO: 83189 - RNA, 57 nt, Homo sapiens
cagcaggaaaaacccagaagccaaaggaaacagcagcagagagaagaaggccacaaa

SEQ ID NO: 83190 - RNA, 74 nt, Homo sapiens
ggaacagaccgcccgcagccgccggcccggccccgcccccaaaggacgcacacagcgcacggcgccggcgccca

SEQ ID NO: 83191 - RNA, 78 nt, Homo sapiens
gccacgcagccacccgggagaagcgcagcgcaccaagagggaaccacgccgggaggccggagagaaaaagagaagaac

SEQ ID NO: 83192 - RNA, 55 nt, Homo sapiens
gcgcacgaggcggcacaaggcgggagagagaagaaaaaacaacccagaacggaaa

SEQ ID NO: 83193 - RNA, 82 nt, Homo sapiens
gacgggagaagaccaagccgcacgcaaacagaaggacaggggacaagcagggcagaagaagagaaccaaaccaggaaccaga

SEQ ID NO: 83194 - RNA, 68 nt, Homo sapiens
ggagagccagccgggagggagacgcagcagaccaaaaaaccgccacccgccagggggccggggggaca

SEQ ID NO: 83195 - RNA, 85 nt, Homo sapiens
cagccgcggagcagagccgccggggagggagccagaagcaacgagggaaacacaagaccggaggccacggacccgcgaagagcga

SEQ ID NO: 83196 - RNA, 39 nt, Homo sapiens
gccccagcggagccgaaacgaacgaacagaggcaggcca

SEQ ID NO: 83197 - RNA, 81 nt, Homo sapiens
cgaggccagcccgccggcagcacgcaaccgcgaaggagggagcaaccgccgaaaagaaggggaagcagcgcgcagagacaa

SEQ ID NO: 83198 - RNA, 64 nt, Homo sapiens
cgagaggggccagccaaggacagggagagcagcccgacggccaggaggcgaagagacgaggaag

SEQ ID NO: 83199 - RNA, 81 nt, Homo sapiens
agagcggaggcaaccagccaaaacaacggaaaacagcgacaggagaaagacagcaaagaaaaggagaagaaaggaaaaaaa

SEQ ID NO: 83200 - RNA, 80 nt, Homo sapiens
ccagggcgcgagccacgggcacccaagcccaagggacccgagaaggaggcaaacagccggccagcaaaaggaaagggccg

SEQ ID NO: 83201 - RNA, 90 nt, Homo sapiens
ccgcgcgcccggccaagaggcaaaggggaggacgcagcaaaccaccagaagccagaagacagggccagaaacggcgagccacgagggaca

SEQ ID NO: 83202 - RNA, 60 nt, Homo sapiens
gaagcaaggccgcggggggagaccccaccaccgccaaaggagccgaacccaaaaagagca

SEQ ID NO: 83203 - RNA, 87 nt, Homo sapiens
ggagcccggagaaggggacgcggagggcgacgccgagggccagcgggacggagcagggaacgaagcgcgcggcaggcgcgcgccgcc

SEQ ID NO: 83204 - RNA, 73 nt, Homo sapiens
acgcacggaaagacccagaaagccaagacaaagaaaaaacccaggaccaaaacagagaaaggagaccaagcga

SEQ ID NO: 83205 - RNA, 129 nt, Homo sapiens
cgacccgaggccgcgcagccgggcgcgcggggccccccaccgcaggagccccacgagaaacccagaaaaacaaccaccagcgagcaaaaaggcaaagaccaagaccaccaagaagcgccccagcggcaa

SEQ ID NO: 83206 - RNA, 73 nt, Homo sapiens
ggaggaggagccggacgggccagagcgcaaacgagaacagcacgcacccaagacgccgagacaaggaagcaag

SEQ ID NO: 83207 - RNA, 70 nt, Homo sapiens
ccccggcgccccggcccccgccccagcccgccggcggcggcgggcgggcaacacaacaaggcgcggacac

SEQ ID NO: 83208 - RNA, 73 nt, Homo sapiens
gccccacgaacgccccgccaccgccggcgcgggaggcccgcgccccaggccccgaaggcacacccagaagcca

SEQ ID NO: 83209 - RNA, 83 nt, Homo sapiens
gcagaggaccaggcaccaccggccccggaaggccaagacaaggggcgcagagcggggggacaggcgcaagaccggagaagcag

SEQ ID NO: 83210 - RNA, 39 nt, Homo sapiens
gaagaggccagacaggacaaggagcacccgaagaagaca

SEQ ID NO: 83211 - RNA, 72 nt, Homo sapiens
cacagagcaggaggccaggccggagaggccgaaaggcgccagccaagaacacaccaagccagcaagaacaac

SEQ ID NO: 83212 - RNA, 63 nt, Homo sapiens
agcgcccgggccccagcagggccagagaccacggaagccccggccgcacagcgaccacagggg

SEQ ID NO: 83213 - RNA, 73 nt, Homo sapiens
cggccacagcaccccgagaccgcagccccgccccacgccggcagccccacgaggccgcaggagggaagcgcac

SEQ ID NO: 83214 - RNA, 64 nt, Homo sapiens
caggccaggcagaacaaacggaccagcgaccgggcacccagcgacccaacagagacccgcaagg

SEQ ID NO: 83215 - RNA, 76 nt, Homo sapiens
cggagaaaaacggagggagaaaaagcaagaggaaagcagaggcaagacagagaacagaaaaggagaaaaggagaaa

SEQ ID NO: 83216 - RNA, 77 nt, Homo sapiens
gccgacccacaggccgacaagaaccccgcagccacccacagaccaggccccgccccagcccgggggcagggcagggg

SEQ ID NO: 83217 - RNA, 66 nt, Homo sapiens
ggaacccacgaccaaagcggaaggccccggacacaagagggcaagaaaggcgcgacgggccgaaaa

SEQ ID NO: 83218 - RNA, 54 nt, Homo sapiens
gagaagccgaaggaagccaagaaaacggccgagcacggagagaaaggaggaaag

SEQ ID NO: 83219 - RNA, 80 nt, Homo sapiens
caggacccgacgccagaccagaaaggccagacaagaggaagaccagccgcaaaccaaggaaggaaaacacccggcaggga

SEQ ID NO: 83220 - RNA, 59 nt, Homo sapiens
aggaccaagaaccaggcgcagacggggaagcggagccaacagccagggcccggagcggg

SEQ ID NO: 83221 - RNA, 67 nt, Homo sapiens
cacgggcagcggccacgaggaagggaacaaaaaccaggaagcgggcaccaacagacaaccagggcaa

SEQ ID NO: 83222 - RNA, 73 nt, Homo sapiens
cgacgacaccgcgcacggcgccacggggaagaaggccagacggaaaggagagagacgaggaaagaaggaagca

SEQ ID NO: 83223 - RNA, 69 nt, Homo sapiens
aagccacaaaccaggagacccaagaaccaggggagaagaagcccccggggcagccgggcaagcagcccc

SEQ ID NO: 83224 - RNA, 72 nt, Homo sapiens
aagaaaggaagaacagaaaccaagccaacaaaagaagcgccgcaggcgacaccacgcagggcacaccccaag

SEQ ID NO: 83225 - RNA, 78 nt, Homo sapiens
gagaagaaggggaggggacagacggggccacccccacacgcccccagccaaacagacacgggcgcagccccgagccca

SEQ ID NO: 83226 - RNA, 60 nt, Homo sapiens
cacggggaaacacagcagaacacagcgaacaccagcagaaagaggcacagacgcaaagcg

SEQ ID NO: 83227 - RNA, 71 nt, Homo sapiens
cgcgagaacaggcccgaaaggcaaaaagacgacggaaagaaaacgcaaccgggaggcgcaggaaacccacg

SEQ ID NO: 83228 - RNA, 62 nt, Homo sapiens
gaccacagagggacccggacaaccagaggcagccagcagggggagccggaagaaaagacacg

SEQ ID NO: 83229 - RNA, 91 nt, Homo sapiens
cgcgggccggccccgcggggagcgcccccggcgcgagccccaggaaaggaagaccgcaggaaagcaggaaggcaagaaagccaaggacgaa

SEQ ID NO: 83230 - RNA, 73 nt, Homo sapiens
cgagagccgcgggcccagcgaagcacagcaagccagggccaggcgggcgggaaaaaccaagagcacagcgagc

SEQ ID NO: 83231 - RNA, 72 nt, Homo sapiens
acagacacagccagccagccacacggcagaaaaagagaaggagaccgcaaggagaagaccacaaaccgcgaa

SEQ ID NO: 83232 - RNA, 39 nt, Homo sapiens
ccccagacgcgcgccggacaacgggggccgagacaacaa

SEQ ID NO: 83233 - RNA, 73 nt, Homo sapiens
ggaagccggaccagggccccggcccggggccccccgagcccccgagcggggcaaagagccccggcgcaggaac

SEQ ID NO: 83234 - RNA, 61 nt, Homo sapiens
cgaagagagcaccgaccagacggcgagaaccagccaaaacacacgaacagggaacaagaaa

SEQ ID NO: 83235 - RNA, 116 nt, Homo sapiens
agggagcgagagcggagaagcgggaggagaccacccaaacgcggcacgggaggcaagcacagcccacaaagagcagagggcacggacgacggggacaaagcagggccacgcacagg

SEQ ID NO: 83236 - RNA, 76 nt, Homo sapiens
gcagcgcggggcagcgcgagccgggaaggaaggccgacaaaaggcagagacgggcaagaggcagcaagggcaccaa

SEQ ID NO: 83237 - RNA, 79 nt, Homo sapiens
agacgccaccacagccgcgcagagggaggacgccacacccaggccacagaggaggaaagagaggggaaagaagcagcca

SEQ ID NO: 83238 - RNA, 85 nt, Homo sapiens
cgacgcagagcaagacagaacgaacccaccagcgaagccagaagggagggagccacgcggacaccagagacagcagagaaggagc

SEQ ID NO: 83239 - RNA, 59 nt, Homo sapiens
gcggcgcgcccgggccggggagcaagcgccagagaggggagcaccccggggagacaccc

SEQ ID NO: 83240 - RNA, 57 nt, Homo sapiens
cacagcaagccgccgggacagccacgacggacacacagcaacgaagcaggggaggag

SEQ ID NO: 83241 - RNA, 70 nt, Homo sapiens
cgggcgggagcgcccaagggggcggagagcggggggggccggaggacaaggaggcgcaaggacagacgag

SEQ ID NO: 83242 - RNA, 132 nt, Homo sapiens
ggagccacggcccgcaggccgcgcgaggaggccaccgaagccggggacgcgaggagccggcgggcccgggcggggcggagggcgccccgagccccagacagagccgcgacagcgcgcgagcgggcgccgccc

SEQ ID NO: 83243 - RNA, 93 nt, Homo sapiens
agacagacgcacgcacaaggcgcggccaacagagagcgccgcccgacagcgcacagcacaccggggagcacccaccccaagacacggggccga

SEQ ID NO: 83244 - RNA, 66 nt, Homo sapiens
gggcacggacgaggagccgcgaacgccaccaccccgcagccccgcgggcgccacggaaaggagggc

SEQ ID NO: 83245 - RNA, 90 nt, Homo sapiens
cggggggccaagggaccacacgaggacaaggaagaggggagccaaagaccaagcaccagagaagaggaggaagaaggcgagaagcacagg

SEQ ID NO: 83246 - RNA, 89 nt, Homo sapiens
ccgggccaagacgagcgacaggagcacacccggagaagcaggagcccaccggcagcgaggagagcacaggccaggacacgcccagagaa

SEQ ID NO: 83247 - RNA, 54 nt, Homo sapiens
ggcggcgggcgagccaacagaagaccaggacccaaaaagccccgaaggacgcga

SEQ ID NO: 83248 - RNA, 56 nt, Homo sapiens
aggacggaggagagccgggccgcccaagccgggccaaaacgaaggagacgacaaga

SEQ ID NO: 83249 - RNA, 74 nt, Homo sapiens
gacagcccaaacgccccacgaccaggcgagaacgcggacaagcaaacaaagaggaaaaagagggcaacagcgaa

SEQ ID NO: 83250 - RNA, 87 nt, Homo sapiens
cggacccagcacggagggaccgcagagagaggcgcagaaggaccgggagcacagccgccgagcaagaaaccccggacagaaggcacg

SEQ ID NO: 83251 - RNA, 55 nt, Homo sapiens
gagacggccacagacaacggagccagagaaaaccgcggaccccgagacggccggg

SEQ ID NO: 83252 - RNA, 81 nt, Homo sapiens
cggcgggccgcccagccgagaccaccgcagcccaccccagaaagcaaggagaggccaccaaggagaagcgcaggcgaaaga

SEQ ID NO: 83253 - RNA, 68 nt, Homo sapiens
aaggagaacaccaaaccagccaaaggggcaggcccagccccaggcccagggaacgaacacgaagggag

SEQ ID NO: 83254 - RNA, 70 nt, Homo sapiens
cgccccgggcggcacggggaaaagaaacaaacaacaagaagaaggacaaggaacgaaggcaaggaggcgg

SEQ ID NO: 83255 - RNA, 52 nt, Homo sapiens
agcccggacagacccccgccccgaggcaggaaaaggaagagcaaaaacaaaa

SEQ ID NO: 83256 - RNA, 69 nt, Homo sapiens
acccagccaaagccagacagagagggcagacgcagcgcacaggcggacgaacggccaccgggaccgagg

SEQ ID NO: 83257 - RNA, 51 nt, Homo sapiens
gggccaccaccggaccgggccgagccgcacagaagagcgcgacagagggag

SEQ ID NO: 83258 - RNA, 63 nt, Homo sapiens
cggcccaggagcgacgccagaaacagccaccagaacccccagcaaccagagaggagaaaagag

SEQ ID NO: 83259 - RNA, 64 nt, Homo sapiens
agagacaacaagacaggcaggacaaagaaggagagaaaggagcaacaaggaggagaaaaaagag

SEQ ID NO: 83260 - RNA, 74 nt, Homo sapiens
cccaggagccgcccacagaggcgaaccaggagcggcagcccacaagcaggaagaccagccccaggagggaaaca

SEQ ID NO: 83261 - RNA, 114 nt, Homo sapiens
aaacaggccgaaacggaaaagaaacagaagaaacccacaagcaaccaacgcagccgcaaaccgggaaggcaaagaagaagcgcccacagaaggaagcgcgggaaagagggccgg

SEQ ID NO: 83262 - RNA, 74 nt, Homo sapiens
ggaaaagagagcgcccgaaagaagcgaaaacggacagcgcaagagaagccaggcaacagaaaaccagcaggaca

SEQ ID NO: 83263 - RNA, 73 nt, Homo sapiens
cccagcccagagaggcccacaaccaagccacaaaagacacgccacaaccggcaacgaaggacggggaacagcg

SEQ ID NO: 83264 - RNA, 63 nt, Homo sapiens
aaccaacaaacacagaggaaagaggccaccacacccgagcaaaggaccgcaacaagggaaaac

SEQ ID NO: 83265 - RNA, 71 nt, Homo sapiens
ggaccggcgcggcagaccagaagagggcggagcgaaggggaggcccgaaagccaaaaaacccgggggaaaa

SEQ ID NO: 83266 - RNA, 63 nt, Homo sapiens
ccgcagcggcaaggagagacgcgcgaggggcgccgaagcgaggggaggaagagcaacgaaaag

SEQ ID NO: 83267 - RNA, 76 nt, Homo sapiens
accggccaccaaacgcaccacggaggagccacgaacaacccccagacaaacagagagagaaccgaaaaacgagggc

SEQ ID NO: 83268 - RNA, 69 nt, Homo sapiens
caaggaccggagcccccggaaaacacgcccggccggggagcaaggggaggacaaaccggcgaccacaca

SEQ ID NO: 83269 - RNA, 67 nt, Homo sapiens
cagcagggacacgagacggcagacccagcgccgggaaaggaaggcaaagccagccccgcaccacaaa

SEQ ID NO: 83270 - RNA, 75 nt, Homo sapiens
cgggagagagggggaacaaccacaagcaaccacacaaaagcgcaccacgggccgcccggcagcccgcagacggac

SEQ ID NO: 83271 - RNA, 77 nt, Homo sapiens
ggccaccacagaaacaaaagcaacaaagaggaagggacccgacacaggacaagagacgggaaccagggcccacaccc

SEQ ID NO: 83272 - RNA, 86 nt, Homo sapiens
acaccagcaccagcaagcggcaggcgcggagaccacgggaacacagacccagcccaggaggccaacgggagcgaaggaggcagccc

SEQ ID NO: 83273 - RNA, 51 nt, Homo sapiens
cccaccgcgcgcacacccccggcaagcaacccaaagaaccaccagaaccga

SEQ ID NO: 83274 - RNA, 74 nt, Homo sapiens
gccggggcgaaagccacggagcacccggcaaacagagggggacgacagcgcaggggggcgacagcccgcgacac

SEQ ID NO: 83275 - RNA, 81 nt, Homo sapiens
ccgcaaagagaacggaaaaagcgaagcacgaggggacagggagcccagcccgagagccaaagcaggaggagcagaagcagc

SEQ ID NO: 83276 - RNA, 80 nt, Homo sapiens
aagaggcgagacaggcgacaacgaacagcccaccagaaaggaagagaggaagaaaggcgcccggggggacaccgaagcga

SEQ ID NO: 83277 - RNA, 81 nt, Homo sapiens
cgcaaacacccccagacaaaggagcagcgacggacccagagccagggcggccccggccccaacccacgaggcagcccgggc

SEQ ID NO: 83278 - RNA, 70 nt, Homo sapiens
cgcaggccagaccccgggagcccagccaccacagacagggggcacccgaggaggaagagggcagggccca

SEQ ID NO: 83279 - RNA, 74 nt, Homo sapiens
gaaacgaggaaaccgggaaagccaccgaaaagggccggacggggaagacacacagaaaacagaggaggaaccgg

SEQ ID NO: 83280 - RNA, 39 nt, Homo sapiens
gggggagcgcaccacccgacccagacccgccagcgccgc

SEQ ID NO: 83281 - RNA, 75 nt, Homo sapiens
cagaacagcaagagaagacgacaacgaaaaaacaccagcagcccagcaaccaaaaagaagaccgcacccaaacaa

SEQ ID NO: 83282 - RNA, 86 nt, Homo sapiens
caagcgggccacgcacccgcaccaaggccaagagagcacagggagagcgagggagcaggacggaagaggggcagccccgggaaaac

SEQ ID NO: 83283 - RNA, 84 nt, Homo sapiens
acaccgggcggcgacgacagcggcgcgggcggcggcacggccacgccggccggggaggcggggccaggggagcgcagagagaga

SEQ ID NO: 83284 - RNA, 59 nt, Homo sapiens
ccagagaggacggcaccagccaggagcaagcaccgagaagaacaccaaacaagaagcca

SEQ ID NO: 83285 - RNA, 74 nt, Homo sapiens
ggaaagccagagaacgggaaagaaagaacgcagggaaggagaaggaagacggcgagcccaaagggagaagaaag

SEQ ID NO: 83286 - RNA, 71 nt, Homo sapiens
gagggagggccagcaaaacacccaggaaaaagagcgagacaggggacaagcagaaaacagaacaacaggcc

SEQ ID NO: 83287 - RNA, 45 nt, Homo sapiens
ccacaggcgagccccgaaccagggacccggggcaaggggcacaag

SEQ ID NO: 83288 - RNA, 71 nt, Homo sapiens
caaggaaaaagagaaacccaagagggaaccacccccaacaaccagggcaagacagaaaacagccacgcaaa

SEQ ID NO: 83289 - RNA, 75 nt, Homo sapiens
aggccccgaacaggagaaagaaggcggaacaccacaaggcaccgcaaggacaccgacaagccagaaacaccagga

SEQ ID NO: 83290 - RNA, 80 nt, Homo sapiens
gaccacccagccagcggaagaagcccagcagagcaaaggcccgagaagcgggcccaccaccaagccagccgccccagccc

SEQ ID NO: 83291 - RNA, 78 nt, Homo sapiens
cacaagaaggcaaggggacgccccagcccaaagcagcgggccaccacagagcccgcagggacacagcagaacaagcaa

SEQ ID NO: 83292 - RNA, 70 nt, Homo sapiens
cacagagggggaaagccaaggaaaaacggagagccacaaaaaaggaagcgaaaaccgaagaccgaccacg

SEQ ID NO: 83293 - RNA, 78 nt, Homo sapiens
gaccaagaggggggagacggggaggacaggccagcgcggccaagacccgccgcaagagcaccaagcggaaaacgagac

SEQ ID NO: 83294 - RNA, 76 nt, Homo sapiens
cccggagagcaaggaagaaagcagcccagaaacggcgaggaaagagaggagccccggaaagaaaaggacagacccg

SEQ ID NO: 83295 - RNA, 77 nt, Homo sapiens
gcggccgcccgggagggcaagacccaggggggacaagacaggggccggcagagacaccaagggagaaagcccagaca

SEQ ID NO: 83296 - RNA, 69 nt, Homo sapiens
agaaccaggggagaagaagcccaccagccggacacccgaagcagaagcgcggccaaaagaggggaaggc

SEQ ID NO: 83297 - RNA, 90 nt, Homo sapiens
cggagggagacgcgcgccgaggagaacccagcggccccaagccggagcaagagcgcaggccaccccgcgcgagcaggcgcgcccagggag

SEQ ID NO: 83298 - RNA, 74 nt, Homo sapiens
aagggaggcgcgcggcagcaggggcgacgaggcgggacgcaggaagggcggagaacggaaaagcaccaggaagc

SEQ ID NO: 83299 - RNA, 28 nt, Homo sapiens
aggaccaagaaccagagagaagcacggg

SEQ ID NO: 83300 - RNA, 64 nt, Homo sapiens
gacccaaagcacaggaaccaccgaaagcggcgcaacgaggcgagcagaacaaggagaaagacca

SEQ ID NO: 83301 - RNA, 80 nt, Homo sapiens
aaggacagccccgcgcgggacccggggcgccacgggggccagaagcagacccacgagcacgcgagagaacaacagagacc

SEQ ID NO: 83302 - RNA, 77 nt, Homo sapiens
cgagagcggccaaacacagagacagaggcccggaagggagaacacgcggaccaggaacaccggcgaaccgggcaaag

SEQ ID NO: 83303 - RNA, 74 nt, Homo sapiens
gccacccccgagaggggaacgagagacccccggagacccccacgacacgccagacaacgagacggccaggccga

SEQ ID NO: 83304 - RNA, 75 nt, Homo sapiens
cgccgggcgccaagcacccgaagggccaaaggcaaagcgggacaagccaaaacagcggacaaagcaccagaaaac

SEQ ID NO: 83305 - RNA, 70 nt, Homo sapiens
cccgacccagagcaggaaacagccggaaggaacgacaagagggagagaagcccaggcaacgagaggcaag

SEQ ID NO: 83306 - RNA, 81 nt, Homo sapiens
ggaggacccccgcccgaaccgagggaacagacagaaggacagagaagaacccagaaaaaagcaaggccgaaaaacgagaga

SEQ ID NO: 83307 - RNA, 69 nt, Homo sapiens
gcggcacccccaggaagcgcggcgaggagggaccacgccccagcggccacaccgggggcagccgcgacc

SEQ ID NO: 83308 - RNA, 77 nt, Homo sapiens
cagggcagaccccacaagaaagagacaagagcacccaaaggcagcagcccaaggagcagccaggccccagacgcgca

SEQ ID NO: 83309 - RNA, 69 nt, Homo sapiens
ccacgaccacagcaaggccccgagccccggccccaaagacccaaaacagagacaccccccagcccccgc

SEQ ID NO: 83310 - RNA, 50 nt, Homo sapiens
cagaagcaacaccaacgaacgaacagacgaacagaaggcggagccaggcc

SEQ ID NO: 83311 - RNA, 71 nt, Homo sapiens
gcacgcgcgcgccccacccggccaagcacacacaccaccggcgggaccgaggaggaagaaaagagcggaag

SEQ ID NO: 83312 - RNA, 38 nt, Homo sapiens
cccgcggaggagcgcccgggcggaagcaggggcgaccg

SEQ ID NO: 83313 - RNA, 79 nt, Homo sapiens
cacagggagcgggccgcagcaccggggcacccaaggaaggccaggaacgggaccagaaccccgagggccggcgcagccc

SEQ ID NO: 83314 - RNA, 60 nt, Homo sapiens
agacaagcaaaaagacgggaaacggcaaaggacacggacgacaccgagcccaaccgacca

SEQ ID NO: 83315 - RNA, 55 nt, Homo sapiens
ggccagcaagacccgagcccagaagaccgcaggaaagcaggaaggcaagaaagcc

SEQ ID NO: 83316 - RNA, 80 nt, Homo sapiens
cgggcgggacggcagccggcacccaacggaccgcaccaacacccgcccgggagaaggaccccgcgcccacccaacaaggc

SEQ ID NO: 83317 - RNA, 78 nt, Homo sapiens
acaggcccgaaaggcaaaaaggacccgaagacaaaaccacccacgaaagcgaaaagacccaaaacaaggcagccacaa

SEQ ID NO: 83318 - RNA, 77 nt, Homo sapiens
acgccaacccgaagagacacgaaaacggacaaaacaaaagcaccggccagaacaagccaaggagccaagacgagagg

SEQ ID NO: 83319 - RNA, 70 nt, Homo sapiens
ggggggaggccacaggcgcaagcagggaaccccaccaccgacggaccaagcgcacaaacagacaccaggc

SEQ ID NO: 83320 - RNA, 64 nt, Homo sapiens
aaccaagcacccaaaaggccacccaaacaacgggaagaacagcagaagggagcagccgcgccgg

SEQ ID NO: 83321 - RNA, 75 nt, Homo sapiens
cgcccccggcgggcggcggaggccgcgagaaccgacgagaaccagcaggcgaagacgcaggagagcacagacgga

SEQ ID NO: 83322 - RNA, 97 nt, Homo sapiens
gaccacacaccgcagcagggcgagcgcgcgcggggcagccgccgcgacggcggccccagcccgacccggaccccaaaagcaccccagacgcgaacca

SEQ ID NO: 83323 - RNA, 66 nt, Homo sapiens
aagccccggccgggccggccagcgccggaaaccaacaacccaaggaaaggcccaggcacagcagac

SEQ ID NO: 83324 - RNA, 82 nt, Homo sapiens
aaggggcggaggacggcaaggagggaagacaacaaaaacaacgcaggacagcaaaggacaggaaaggccaggaggacaaggg

SEQ ID NO: 83325 - RNA, 76 nt, Homo sapiens
cagaacagacaaggggacacgccgaagcgaggggaagacgaaagggaagagaaaaaaacaagagcgcaagagagcg

SEQ ID NO: 83326 - RNA, 117 nt, Homo sapiens
ccgaggggccaaccagcgaagagcgacaagccgcggcagccgcggaccaccgccgccaggagagaccgaaaggcccaaccgacagccccacccagagcagccacacgggaaagagga

SEQ ID NO: 83327 - RNA, 70 nt, Homo sapiens
ggcgcgcgcccccgccaaaagcacaaccaccacacaagagaaaaggcaacggggaccccggagcccagaa

SEQ ID NO: 83328 - RNA, 55 nt, Homo sapiens
ggacacaacggcagaccgcagaacacccagccaggagagggccgaggcagacaag

SEQ ID NO: 83329 - RNA, 44 nt, Homo sapiens
cagcacccaccgggaagcacagacagaggcacaaaaggagaaag

SEQ ID NO: 83330 - RNA, 80 nt, Homo sapiens
ggaaaccgcccgcccccaggacaccaggggggaaaaaccacacaggcaaagaacgcgcaaaacaggacgaaaacaaaggg

SEQ ID NO: 83331 - RNA, 63 nt, Homo sapiens
agaaggaccaagaaccagaccaccacaacccgcaacgccacagcgagaacagaccacccaaag

SEQ ID NO: 83332 - RNA, 77 nt, Homo sapiens
cggagggggaccacaagacccacgacagggcccaggacagaaggcgggcaaggagcgccccccgagcaccccccaca

SEQ ID NO: 83333 - RNA, 71 nt, Homo sapiens
cacaggccccggcccagagggagaagcagaccgcaccaggcgggaccccgaaaaagcccaaacagacaggc

SEQ ID NO: 83334 - RNA, 78 nt, Homo sapiens
cccagcacccggcagcagaagcagcccggcggaggacagcccggagcaggcagcccaaaaggacagaacgaccgcccg

SEQ ID NO: 83335 - RNA, 92 nt, Homo sapiens
ggaaggacgaggcgaggcgagaaacgagccacgaggcggccccagcgcgggcgacaggccgacacccccagagagccgggccaagcaggcgc

SEQ ID NO: 83336 - RNA, 82 nt, Homo sapiens
gcagcgcagaaggaaccggcaaagcgcaggaacgggaacgcaggagcgaccaggaggaaagaagaaggacaaagagaggaaa

SEQ ID NO: 83337 - RNA, 85 nt, Homo sapiens
aaaccgggaaaggagaggacccggagccgcggaagaccgaaccccgagacaaacgaaggaagaggcgacaggaaggagaggacag

SEQ ID NO: 83338 - RNA, 68 nt, Homo sapiens
cgaacaccaagcgccgcacaaggggggaaccgaagagcaaggaaaagaaaagggggaaggaaacccgc

SEQ ID NO: 83339 - RNA, 82 nt, Homo sapiens
ccagcagcgggcaacaccacagaagagcagagagacgcagcagcaccaaggggggccagcggaaacaggacacagagggggg

SEQ ID NO: 83340 - RNA, 75 nt, Homo sapiens
aggggcgaaaacgcggaagcggagacacaggcggcgcgggacgcagcgaagcggaaagaacgccggacaacagcg

SEQ ID NO: 83341 - RNA, 61 nt, Homo sapiens
gacacccagaagcggcgccgccggcaggaagaaaaaagcgggcacgggcagcacaaagccg

SEQ ID NO: 83342 - RNA, 84 nt, Homo sapiens
cccaaccgcgccagcggagcgaacccgagagcgggagcgggcgggccaggcccacaaacccagagaagagaggaaacggagaag

SEQ ID NO: 83343 - RNA, 92 nt, Homo sapiens
aacgggacaaacggcgggcccgggaagcgggccggcagcgcccggacgaggaggcgcagcccagcccgaaagcagaacgacgccggcgagcg

SEQ ID NO: 83344 - RNA, 85 nt, Homo sapiens
cgcagcgcccgccgagacgcgcaccaggggaaaggaaaccaaaccaggaaagaaggacaaggagcgaggagaaagagggacacca

SEQ ID NO: 83345 - RNA, 72 nt, Homo sapiens
gcgaacgagggaccaagcacgccagaaagccggagaccgggacgagcagggccaccccagccccggagaccc

SEQ ID NO: 83346 - RNA, 63 nt, Homo sapiens
ggccgcagccccgcgcggcgccccgcgcagacagggccaagaacaaggaccagggcaccagag

SEQ ID NO: 83347 - RNA, 75 nt, Homo sapiens
aagacggccacggaggagaccacaaacagccacaaggccgggcagagcgaaacgggagggaagacccccaagcag

SEQ ID NO: 83348 - RNA, 85 nt, Homo sapiens
cgccgccgccgccgccagaacaaccgggcgccgacgagacggaaaagaaacgaagccgggcacggacaggacagagaaagcaggc

SEQ ID NO: 83349 - RNA, 60 nt, Homo sapiens
gaggaagaaaggacagggagagaagccaagaaagacagcgaagaacagagggaggaggaa

SEQ ID NO: 83350 - RNA, 77 nt, Homo sapiens
ccaccaacacaaggaaacaaacaacaaaaacaaaagccagaaaaccccaaagcaaacggagcggagcgcaagaagaa

SEQ ID NO: 83351 - RNA, 81 nt, Homo sapiens
agcggcgagccggagcaccacgcagccagaaagcgaggggcaccaccacgaggcgaggggccaaccaaggaggcgaggggc

SEQ ID NO: 83352 - RNA, 77 nt, Homo sapiens
cagaacgcccggccaagacagcagcaccaaggaccagcaacaaagggcaccgaaggcaacaagaagagaagaaggac

SEQ ID NO: 83353 - RNA, 77 nt, Homo sapiens
cgcgccagcgccaggcacagcgggaagcggcggggcaggccagcgaccggccggagcccagcaggagcccaaaagcg

SEQ ID NO: 83354 - RNA, 55 nt, Homo sapiens
cgaaacaggccggggcacagcacagcgccggcgcaagaccaagggaacggaagcc

SEQ ID NO: 83355 - RNA, 76 nt, Homo sapiens
acccggagacccggccaaacagagacagaagggagcacagcgagaagaggacgaacacaccaaccagggcgcccaa

SEQ ID NO: 83356 - RNA, 61 nt, Homo sapiens
cacgagcgaggccgcaggggagcccggcagccgcccggcaccaagaagagcccggagagcg

SEQ ID NO: 83357 - RNA, 95 nt, Homo sapiens
caaaacgggggcccaaccacacggggcagccccaaggccaagggacaggagacagggaaacgaaaaccaccgggcaccacgagcccacgagagag

SEQ ID NO: 83358 - RNA, 80 nt, Homo sapiens
agcccggaccagccggggagcaagggacgaggagcacaaccagacagggccaccgcaggggagagcaccgcccaccacgc

SEQ ID NO: 83359 - RNA, 76 nt, Homo sapiens
aggaggcaagaaaggggaaccccggagaaaaggccaagaaggcaggaggcaaaacccaacgaggacgggggaaaga

SEQ ID NO: 83360 - RNA, 73 nt, Homo sapiens
cggcgcgcgcgcgcgcgcggggccccgcagggcgcggggcgcgggggcccaggccggaggaaccaccgagcaa

SEQ ID NO: 83361 - RNA, 75 nt, Homo sapiens
aggccgggcccggaccgcccccgagcccggaggggggagaaaagggcagcggagcagaaaaggaaacgaggcgca

SEQ ID NO: 83362 - RNA, 63 nt, Homo sapiens
cagaaacgcgggagagagagcaccgcagagcaaccccaagcgcccacccaagccgcgaaagaa

SEQ ID NO: 83363 - RNA, 80 nt, Homo sapiens
cgaaggagagggggggccagaccagggcgcgccgcggaggaaggaagcagaggcggggccacgaggagggcacgcggagg

SEQ ID NO: 83364 - RNA, 82 nt, Homo sapiens
cgcaccacgacggcgccacaccgagcgcgaggcgcggagagcaacgccgggacagcgcaaggaggaagacgcacgccggacc

SEQ ID NO: 83365 - RNA, 82 nt, Homo sapiens
cgaaacagacagaaaacaaaaacagaaagcgcaaaaaccaggccgggaacccaacaagggagcaaacagagaaagaacccaa

SEQ ID NO: 83366 - RNA, 56 nt, Homo sapiens
agcgcccgaaggcgaccgaggcccgagccccaagggaacaggcacgccccacccgc

SEQ ID NO: 83367 - RNA, 75 nt, Homo sapiens
gccagaagaacagcaagcgcacaggccgggcacagggagccccaaaaacagccaaggaggagagaaagaacccac

SEQ ID NO: 83368 - RNA, 61 nt, Homo sapiens
ggcccagcgccgaggacgaggcagacccacgaccaccgcccacgaagcccgacgaggcccg

SEQ ID NO: 83369 - RNA, 66 nt, Homo sapiens
gacaaggagaagggaaagaaggcacaccacgaaaggcaacaggcgccaggcggagggacgcaacag

SEQ ID NO: 83370 - RNA, 56 nt, Homo sapiens
ggaacccagaccaggggcagcgacagaagcaggaacagaagaggaccggcagaaaa

SEQ ID NO: 83371 - RNA, 77 nt, Homo sapiens
cgacaccacacccagacccaaaggcaacaacagcagcagcagccgcccaaaacacaaaccaaagaagaaacccgaag

SEQ ID NO: 83372 - RNA, 82 nt, Homo sapiens
ggagacaacccgccaaggccagaaccacgccaggagcccaacaggccgcggcagcagaaaaacaagacgcagcccaaaccgc

SEQ ID NO: 83373 - RNA, 72 nt, Homo sapiens
acagaagaagcgagggagccggcagcagagcaaaacagagcggaacgaacaaggggaccaaagagcaggcaa

SEQ ID NO: 83374 - RNA, 80 nt, Homo sapiens
aagccaggcccaccagcagaaagccggagcaggaagcgcacacgccaaaggagagcgcggagaaccaaacccaggaacgc

SEQ ID NO: 83375 - RNA, 67 nt, Homo sapiens
ccccggcacgacaccgccccaacccacgagaggacagcccaggagcccaaaggcgccccaaccaccg

SEQ ID NO: 83376 - RNA, 78 nt, Homo sapiens
cagagcaaagaagaaaccggccagaaacagccagagaaggcaagcccaaggggaacaaccagacaacccaggacgagg

SEQ ID NO: 83377 - RNA, 33 nt, Homo sapiens
aggacgccaggaagcacggggaaaacgaccccc

SEQ ID NO: 83378 - RNA, 62 nt, Homo sapiens
aaccaagacagcccaaacgccccacgaccagcaaagcagacagcgacaagagaagagcgaca

SEQ ID NO: 83379 - RNA, 38 nt, Homo sapiens
gggcaaagagcgcggggcagagagcacacgaagaccca

SEQ ID NO: 83380 - RNA, 59 nt, Homo sapiens
ggaaaacaaaggagcacaggagccggagcaaggaagacagaacgaggccaggaagcgag

SEQ ID NO: 83381 - RNA, 72 nt, Homo sapiens
cgacacgagaccacagccaccccccacccgccaaaaaaagaacccaagaggaagccagcaaggcagaaaaca

SEQ ID NO: 83382 - RNA, 89 nt, Homo sapiens
gcccgggaagcgcgcaccgccaagcaggcacagaacacaccagaggcggaccaagaccccaggaagccccggggcaggcccagaagcac

SEQ ID NO: 83383 - RNA, 69 nt, Homo sapiens
ccgagcgggaaaacgcaggcagacaggccgaaagggaacgaaagggagagaagcaagaaagggggcgca

SEQ ID NO: 83384 - RNA, 63 nt, Homo sapiens
agcagcccccaacagaaaaaagcgcgggaccagcaagcgaagccaaagagccaacaagaaagc

SEQ ID NO: 83385 - RNA, 83 nt, Homo sapiens
cgagcccccaccaaccaccacagacgacgacacgcggaggcgccggaagcccccacccaacaagaccccaccggcacacacga

SEQ ID NO: 83386 - RNA, 36 nt, Homo sapiens
acggaagaaggacagaagaagccggaggaggagaag

SEQ ID NO: 83387 - RNA, 62 nt, Homo sapiens
ggacgcaaggagcgccagcagggcggagggggagagccaacagacacgccacgcgaagcgca

SEQ ID NO: 83388 - RNA, 70 nt, Homo sapiens
cccccccccccaaggaagcgaaccacacccagaaagccagaaagaaagagcaacaaacgcacccagagac

SEQ ID NO: 83389 - RNA, 86 nt, Homo sapiens
cacacaggcacaggccgggagggaccgcccagaccggaggcgcagccaaacccccccccacagcaacaaagcggccccccccacag

SEQ ID NO: 83390 - RNA, 78 nt, Homo sapiens
ggcaggcgggaggcaacggagcaccagccggaacccccgaacgcaaagccaccgacggacaagaggagacgacgccaa

SEQ ID NO: 83391 - RNA, 90 nt, Homo sapiens
gaagaggaggcaaagaagaagagacgggagagaaacagaggacaccgcacaaagggaccacagaagcccagaaggacaaaaccaagccag

SEQ ID NO: 83392 - RNA, 75 nt, Homo sapiens
cccacccaaggacagacagacgcagaaaaacagagacggagcgcaagaggacggcagcgcggcgaagggaccgcc

SEQ ID NO: 83393 - RNA, 69 nt, Homo sapiens
cgcagggcgcccccgaaggagacccccacagccaccccgcagcaacgaacgagcagcgcaggcaagaga

SEQ ID NO: 83394 - RNA, 81 nt, Homo sapiens
ggggcagagcaggggccggaagcaccaggacaggaaggaagcagccaccccgccaggccccccgcccgccgcccccggagg

SEQ ID NO: 83395 - RNA, 73 nt, Homo sapiens
cggcccaaccgcccgcgaccccccgcgccgcgccgccgccgcagcgccaaaaaccagagaggacaaccaaaag

SEQ ID NO: 83396 - RNA, 80 nt, Homo sapiens
cgccacggggagcaaaaccaacgccggccggagcagcagcccgaggaacagagacgccaagcccgggcccggaggcacga

SEQ ID NO: 83397 - RNA, 81 nt, Homo sapiens
ggccagcacagacagggaaacagaccacacccggaggagcaccgaaggggaagaacggaccacccaccgccggagccccca

SEQ ID NO: 83398 - RNA, 92 nt, Homo sapiens
acccaccagcgacgcccaagcgggaaggaccgaacccccacccacccccaaaggcccagaagaaagagaagagcgacaggcaagcggaacag

SEQ ID NO: 83399 - RNA, 72 nt, Homo sapiens
ccacagggcagaaccaacccgcccggaacgcccagcacgacagagacccggaaagcgagcagcaaagaccca

SEQ ID NO: 83400 - RNA, 70 nt, Homo sapiens
gacagacgcagggcgcccccggaccacaagcaccggggcacagccagcgcccagccggccggggggacaa

SEQ ID NO: 83401 - RNA, 58 nt, Homo sapiens
gagggaggagacaaagacaggaccaggaaacggagaagaaggaaccccgagagaaacg

SEQ ID NO: 83402 - RNA, 72 nt, Homo sapiens
caaccaccagcccacacaacccaggagaggacacaggcaggaagcagaaaccaaggcccggagcacacaagg

SEQ ID NO: 83403 - RNA, 81 nt, Homo sapiens
gaagaaagacggcggaccgcgggggagaacgacgggcccagggaacacgggagccccggaccaccggacaggggagcgcga

SEQ ID NO: 83404 - RNA, 64 nt, Homo sapiens
gcacaaaaacaaggcgcggcggcggagcggcgcgaccacagggccgagaagcgcgcggcgcagc

SEQ ID NO: 83405 - RNA, 51 nt, Homo sapiens
ggggagagggagaaggagggacgcccggagccagcggaggcacccgacgaa

SEQ ID NO: 83406 - RNA, 82 nt, Homo sapiens
ccagccaccacgcggcgcacaacgcaggaacaccgcacgcgcggaggaggacaccgagccaggggggcaagacccaggagaa

SEQ ID NO: 83407 - RNA, 71 nt, Homo sapiens
gccgccccaacaccagggaagagacacacccaggccccgagagccagcccggaaaaccccgcaggcggaag

SEQ ID NO: 83408 - RNA, 58 nt, Homo sapiens
cgggaggacagccagagacaagcagggggcacccgaggaggaagagggcagggcccac

SEQ ID NO: 83409 - RNA, 83 nt, Homo sapiens
agaacacccccccaggaggcgagaccacgccggggacacaggccgccaaaggagggaaaagggagagcgaagaccacacaggg

SEQ ID NO: 83410 - RNA, 77 nt, Homo sapiens
gaaccaccagaagccagcccccaggcggaacgcccgccccgcagagagaccagggcaaagcaccccagagcaaaaaa

SEQ ID NO: 83411 - RNA, 65 nt, Homo sapiens
gcaaggcagaagaggccacgagaagaggcgaacggaagcaacacccgggaaaagcagcgaggaag

SEQ ID NO: 83412 - RNA, 87 nt, Homo sapiens
cagacaggacaccaaacaccgccgccgagcggaccgccgcaccgaagccagcagcccgacagccgaggagagagggccgagccagca

SEQ ID NO: 83413 - RNA, 81 nt, Homo sapiens
ccccccaacccaacccgcacccgcccgggggcacaggccccgcccagaaaaagaaaacaacggagcacgcaaagcaagccg

SEQ ID NO: 83414 - RNA, 65 nt, Homo sapiens
gcagacgcggcaaaggccaacacccacaaagcaggcccaaggcccccagggcaagggcagccacg

SEQ ID NO: 83415 - RNA, 88 nt, Homo sapiens
cgccaagcgacgagcgcacgccacccggcagccggcgacgcacacaccacgcaggcacagccagagaacaacacacacacacaggaaa

SEQ ID NO: 83416 - RNA, 75 nt, Homo sapiens
gggggaagcagcagccaggaagcagcagcggagaaacagccgcacagcgaccacaggggaaacggcgcggacagg

SEQ ID NO: 83417 - RNA, 58 nt, Homo sapiens
gagaagccaagaaagacaggaacgaaagcggcacggagaagaaggaaaagaacggccc

SEQ ID NO: 83418 - RNA, 73 nt, Homo sapiens
agcgcgggaacggcgcggaaggccaaaagcacagcaagggcaaagcccggaagagggaaggggaaacgcggag

SEQ ID NO: 83419 - RNA, 76 nt, Homo sapiens
ggagcagcgccaagaccgccggacccggggcgccgcggcccggcacgcaccgcgaagcgagcaaaggcgaggagca

SEQ ID NO: 83420 - RNA, 78 nt, Homo sapiens
gggagccggaggggaccggcggcagcacaacaacagcaacggaggcgggaccggaacaggcacaccccacacaagcac

SEQ ID NO: 83421 - RNA, 76 nt, Homo sapiens
aagaagcagcacaaggcgagccagacgagaccgaggagggaggaagagaccaggcccggaggaccaccgcgcgacg

SEQ ID NO: 83422 - RNA, 62 nt, Homo sapiens
gaagaagagaacccacagagagaagacgaagagcagcaaggcgccgcaagaggagaagcgca

SEQ ID NO: 83423 - RNA, 73 nt, Homo sapiens
ccgggcccggcgccgccgcccgcagaccagaggacaacacaaggaccgaggcccaagcgccagggggagcgac

SEQ ID NO: 83424 - RNA, 68 nt, Homo sapiens
ccccacgccaccacagagcaacccgcgcgcaggcccggggaaggagcacaccggcccgagcgcgggag

SEQ ID NO: 83425 - RNA, 55 nt, Homo sapiens
cagggcgcccccgggcgggagaccggaaggcaaagcagaggagccaggccccggg

SEQ ID NO: 83426 - RNA, 34 nt, Homo sapiens
ccgcaggaggagaaagacgaagacaccgaaaacg

SEQ ID NO: 83427 - RNA, 66 nt, Homo sapiens
agaaaccccgagaccaacagagcccgagagaggagccacgagccaggcggcgaacccgggacaagg

SEQ ID NO: 83428 - RNA, 94 nt, Homo sapiens
gcaacagagcgccggcgggagcagaaccaaaaagcgccaagcagccagcgaaaacagcacaggcaccaccggcgcccacgcgaacaccaccaga

SEQ ID NO: 83429 - RNA, 81 nt, Homo sapiens
accacagcaggggggcgggaggagaaggaggaaggaccaggacacaaggaaaacagaccgaaaagagccagaacccccagc

SEQ ID NO: 83430 - RNA, 72 nt, Homo sapiens
agggcagggcaagcagagcgaccagccgccaaagcgcgcagaagaaagccgcggaaccgcgacaccaagagg

SEQ ID NO: 83431 - RNA, 72 nt, Homo sapiens
agacggagccaagagcagcagacaaaaacaagcaaacaacggaaaggagggggaagcaacggccaaaagccg

SEQ ID NO: 83432 - RNA, 77 nt, Homo sapiens
cgagaccgcaccgcacggcggagcccgcacgcggcgggcaggcacacagagaaaaaaagggaacaaaacacagcaag

SEQ ID NO: 83433 - RNA, 68 nt, Homo sapiens
aggaccgcgccagggggcaggggcaaaagaccacagaaacagcaacacagaaaagcaaacgccagcag

SEQ ID NO: 83434 - RNA, 70 nt, Homo sapiens
cccggcggcccacgcagcccgggcaagggccgggcccaaaagcacccgaagccaggccgcgcgggggcag

SEQ ID NO: 83435 - RNA, 77 nt, Homo sapiens
gagcgggggcccgagaagccgacggaggggcgcggaacagaaacagcaacaaagagcgagcgaacagacaaaaaccc

SEQ ID NO: 83436 - RNA, 79 nt, Homo sapiens
ccggcaagaggaagcccgcgccgggaggaggagaaaaaccaaggaagacccacacgaggagacaggggaaagcgaaagg

SEQ ID NO: 83437 - RNA, 64 nt, Homo sapiens
cagaaccgacgaaaaggagcagagcaaaagccacaaaaagcccgccccagacacaaaccgaccc

SEQ ID NO: 83438 - RNA, 78 nt, Homo sapiens
ccgcccccgcgggcgccgggccaggacggggcgaccagacgaggggagacggacgggggagagaggccaaacggacaa

SEQ ID NO: 83439 - RNA, 73 nt, Homo sapiens
ccgaaagaaaagaaccaaacggcgagaagacaccggcagaccaagcaaggaaccagcgagcaaacgcaaacac

SEQ ID NO: 83440 - RNA, 85 nt, Homo sapiens
gaacccgcccagccgggccccaagcccagcgggaccgagccagggaggcgaggcccgcaccggaaggccaaggacacccacaggc

SEQ ID NO: 83441 - RNA, 77 nt, Homo sapiens
ggcacagaacaacagaagaggagagaggaacccgaagaagaaaggacgacagccagagagagggaacaggcacgccc

SEQ ID NO: 83442 - RNA, 71 nt, Homo sapiens
agccaggcacaagaaagcgaaaaaagggcaagcagaaaccgggaagggggcgccggcggacgcacccggac

SEQ ID NO: 83443 - RNA, 67 nt, Homo sapiens
ccccgagagcggacacagggaccacggacgcgccgagccaaacagaaaaagcccagaagaaagggca

SEQ ID NO: 83444 - RNA, 56 nt, Homo sapiens
gaaccaacccaaagggggggggggaggccaggagaagcacagggaacaccagaggc

SEQ ID NO: 83445 - RNA, 64 nt, Homo sapiens
accggccaaggcacaaaaggagcaccacgaagaaacgcccagaggagccagaaacagccaaaca

SEQ ID NO: 83446 - RNA, 72 nt, Homo sapiens
ggaaggaaagcagaagaacaacgaggcagcggggccaagcggagggaagaacgaaaccagaacagaaaggga

SEQ ID NO: 83447 - RNA, 79 nt, Homo sapiens
ggcaccgcgcgaagcggccaaagccgcccagacggccaccggcgggaggaacaaaaggcacacacaagcaaaacacccc

SEQ ID NO: 83448 - RNA, 77 nt, Homo sapiens
gagggacggggaaggccggggcgcccggcgccggccgagaaggcagaggcggacagaaagcgggacacaagcaggag

SEQ ID NO: 83449 - RNA, 70 nt, Homo sapiens
acaaggcgggaagaagaggccagaaaggaggcccacagccgaccgagcggggcaggacacggaagaacaa

SEQ ID NO: 83450 - RNA, 70 nt, Homo sapiens
cagacgcccaacagaggaaggccaaacgcagaagagcagcacaggaagaacaacacacgcaggagaaacc

SEQ ID NO: 83451 - RNA, 78 nt, Homo sapiens
caggaaacgaaggaagcaaaaccacgcgcaaaagcagccgaagacgagagaggaagaagagaagaagcccaaagaaca

SEQ ID NO: 83452 - RNA, 71 nt, Homo sapiens
aagcaaacccagccggaggcacccaggggccgcaaggccaggcgcgcagaggcacccaacggcacagaccc

SEQ ID NO: 83453 - RNA, 79 nt, Homo sapiens
cccgcaagaagaacagagacagcagccaaacccccagacaggccggacacaaccacaaacgagccacgccaaagggccc

SEQ ID NO: 83454 - RNA, 82 nt, Homo sapiens
acaggcggacgcggccagcagggcccgggcccggccaccaccgcccagccgccagacagagcgggagccaccagcgccaaag

SEQ ID NO: 83455 - RNA, 70 nt, Homo sapiens
cgacagaagccaaagggcagcggaacaccgcaaagaccgcacagggagcacaaagccccaagaacagcca

SEQ ID NO: 83456 - RNA, 75 nt, Homo sapiens
cgaaaacgccggaaggaggcaccaaagaagaaaacaggccgcacaaaaccacccagggccagaaagcccgaaaca

SEQ ID NO: 83457 - RNA, 111 nt, Homo sapiens
aaccggacagagccccacacacgggcgggacccaggcgagagcgcccagagcaacagggcggcggaggggacccccagagagcggcagcgagaaagaagcggacagcaaga

SEQ ID NO: 83458 - RNA, 76 nt, Homo sapiens
cggaaggcacaaggacaaacccacccacaaagggggggaagagcccccccaacaaaggacgaaaagggcggcaagg

SEQ ID NO: 83459 - RNA, 82 nt, Homo sapiens
cagcggaagaccaaagaggagagaaggacgacaagcccaccgagaggaaaacgcgagagagacgcaaccagcacaaagaaaa

SEQ ID NO: 83460 - RNA, 85 nt, Homo sapiens
gcgggccagccaccgggccgcgccgcccaagagagagaagagaggcgcgagggcagggaagaggcggacaagcgcaaacccaagg

SEQ ID NO: 83461 - RNA, 63 nt, Homo sapiens
ggggacacaaaccagaccaaacgaaccagcgcagaaaggccagacagggaccgaacgacacaa

SEQ ID NO: 83462 - RNA, 34 nt, Homo sapiens
agccccccgagaagacccagagaggggccacaag

SEQ ID NO: 83463 - RNA, 70 nt, Homo sapiens
agccgaggccgcccccgaacacccaaccagggccgggaaacgagagcacaccagaggagcaagagggggg

SEQ ID NO: 83464 - RNA, 79 nt, Homo sapiens
cgaagaccggagcagggcagcagagcgcgagggaacggaggccgaaaaggaaaaggagccagggcggaccccgcgggac

SEQ ID NO: 83465 - RNA, 68 nt, Homo sapiens
ggccggagagggccggaccgagcggccggcaccgaacaagaggagaaaggagccggaacaaacccggg

SEQ ID NO: 83466 - RNA, 79 nt, Homo sapiens
gaagcaaccagaagcgcgaccccacgaggagacgggacagggcccgcgcaacgaaggacacccgcacgggcgcagcgca

SEQ ID NO: 83467 - RNA, 75 nt, Homo sapiens
ggaaaacacacagacgaaggcaaaagaggcaaaccagacgcacaggaacccaacaggaggaggcccaaggagccg

SEQ ID NO: 83468 - RNA, 38 nt, Homo sapiens
cgaggacggaggcgcgcaggacaagaagagcaccccgg

SEQ ID NO: 83469 - RNA, 72 nt, Homo sapiens
agagacacaaccggagcccagagccacgcaaacggggacgagagccccggcacaaacggaccaccagaaagc

SEQ ID NO: 83470 - RNA, 78 nt, Homo sapiens
gccgcccgccccgcgcgcggccggcggcccaggcgcacaccgcgagccaggacaaaaccaggcagaaccaacacgaac

SEQ ID NO: 83471 - RNA, 82 nt, Homo sapiens
ggaaaacaacaccagaagaaagccaacccgcaggagagaaaggccagcacgggggaacaaagggaccggaaaggagagagaa

SEQ ID NO: 83472 - RNA, 70 nt, Homo sapiens
ccgaggcggcgagagaggcaggcggagccgaccgggccaggagggaaggccaggacaggggaacaggcac

SEQ ID NO: 83473 - RNA, 85 nt, Homo sapiens
gccaaaaaagcccgaggaaaagggccagcggagcgaccagagcgcagcgaagagacccagcaccccaggaagaaaagaggccgag

SEQ ID NO: 83474 - RNA, 78 nt, Homo sapiens
ggcgggagagcgaggcacggcaaggggccggagggccggcccagaacgcaggaacaagaacccagccgggccaacaga

SEQ ID NO: 83475 - RNA, 79 nt, Homo sapiens
ccaaacagcccaaaggaacacagaagagaggagacagacgcggaggacaacccaaaaggagacaggagaagaaccaagc

SEQ ID NO: 83476 - RNA, 97 nt, Homo sapiens
ccacaagcagcagagaagaccaggaaagacaggaggccacccccaaagaaaagggcggagaacggaaaagcaccaggaagcagagaggaccgcagaa

SEQ ID NO: 83477 - RNA, 79 nt, Homo sapiens
cacgaggcaacgccccaggcgccccaggcccggcagacacaccaggccccagccgcagcccaggaccgcggggggccag

SEQ ID NO: 83478 - RNA, 63 nt, Homo sapiens
cgcccaaagccaagggaacaccggcaaggagccccagcgagccagagggacagcacagcccgc

SEQ ID NO: 83479 - RNA, 73 nt, Homo sapiens
cgccacagagcgcgaaggggcacaggagggcagaccaaaagcacaaaaagaacggcccgaagaccccaagcca

SEQ ID NO: 83480 - RNA, 75 nt, Homo sapiens
gcagacaagcgggcggcagagcaggcagaggcacccccagggacaagcaaggcgaccggcccgaggaccgccgca

SEQ ID NO: 83481 - RNA, 79 nt, Homo sapiens
ccgaaaagggaggaggaggcgagcacagggggcggggcacagaacggcagggggacccccggaacacaggcccaggagc

SEQ ID NO: 83482 - RNA, 75 nt, Homo sapiens
caacgagacgcacaagaaaagcgcaagaagaggaggaagccagcgagggagcagaaaaccacagaggaggggacg

SEQ ID NO: 83483 - RNA, 84 nt, Homo sapiens
aggacacgggggccacaaagccccccggagacgcaaccaagaggcgaggggacggcggggagcgcaggacagacgcccccgcga

SEQ ID NO: 83484 - RNA, 79 nt, Homo sapiens
gccccgaaaacgaggaagaaggaccaaaacagcagacgccgacccaggagaaggagcgggcagccccagccgcgcccga

SEQ ID NO: 83485 - RNA, 68 nt, Homo sapiens
agagaggagcgaacgagacagaacaggaaaaaggacacaacagcaggcagcccgcccagcggcacgcc

SEQ ID NO: 83486 - RNA, 70 nt, Homo sapiens
accgccccccccaacgcgggcagcaccccgcagacaccggcgacaccccggcaggcagagaaagcaagag

SEQ ID NO: 83487 - RNA, 64 nt, Homo sapiens
ggcagcagccccgaagagaaacacacggacaacaaacggcccgaaaagaaagcgaacacacaaa

SEQ ID NO: 83488 - RNA, 76 nt, Homo sapiens
gagcagagcccgcgaacaagacaaggagcgagagaccaacgggcaagcaaccgaggagaaaagagcgggccaccgc

SEQ ID NO: 83489 - RNA, 74 nt, Homo sapiens
aaaagacccaagcaggacacggccggaccaggaaagacccgaggcaggaaccccacggccgaaagaagaagaaa

SEQ ID NO: 83490 - RNA, 54 nt, Homo sapiens
ccccccccgaccaagggaaagcaccccgggggagccaccgaggccacccgagca

SEQ ID NO: 83491 - RNA, 87 nt, Homo sapiens
gggaaaaggacgccgcggccccaggcgcgcggagagcagaccagcagggacacagcaggacaagaacgacagaaagagcaggcagca

SEQ ID NO: 83492 - RNA, 66 nt, Homo sapiens
caggcccgagggggccggaccgggagggcagcaagcccgacccccagaaggcggcgccaagccccc

SEQ ID NO: 83493 - RNA, 84 nt, Homo sapiens
ccccagcagcgcagcgcaaagcagccgccaaagccgcccagggagagaagggagggcccaaccccagccggaagccagacaaga

SEQ ID NO: 83494 - RNA, 71 nt, Homo sapiens
cacccaccacagccacaagacaagcgaggcagaagcacggagccacacaaagcggaagagaaagacccaga

SEQ ID NO: 83495 - RNA, 66 nt, Homo sapiens
ggcccacaccacagcaagccaacaccaggagacggggccagggagaaaggaaggccaggagcaaac

SEQ ID NO: 83496 - RNA, 70 nt, Homo sapiens
agaaaacacccaaacggaaggacacagagccaacccagaagagccaaggaccaagcccaccaagggacgc

SEQ ID NO: 83497 - RNA, 76 nt, Homo sapiens
ggccaccgcagccgacccgggccaggagcgccaaaaaagagggggcgaagggaaaagccccgcaggaggccgaagc

SEQ ID NO: 83498 - RNA, 72 nt, Homo sapiens
caaccagccggcccgaagaccgcagggcccggcagcgacggagcggaggcccaaagaccaaaaaagacaaag

SEQ ID NO: 83499 - RNA, 72 nt, Homo sapiens
ggccgacaaaagcgcagcaagacggccgcgcggcccgcagggccgcacaccagaggacgggaacccagccag

SEQ ID NO: 83500 - RNA, 71 nt, Homo sapiens
caagggggacagccaacaaagagaagagaaaccaagcccgggggacaggccgcgcggcacaaaccagggga

SEQ ID NO: 83501 - RNA, 86 nt, Homo sapiens
gcgcgcgaggccgggccggccgcccagacgcgcccgcgggcccggccacggcggagccaagccggcacagccacaccgagaagacc

SEQ ID NO: 83502 - RNA, 69 nt, Homo sapiens
gcgcccaaaacaagcgaagaaagacccggaagcaagaagacaaacgaggggagaaagaaggggaaggac

SEQ ID NO: 83503 - RNA, 73 nt, Homo sapiens
aggagaagacaccaaaaagcaaacggaccagaccgaccaccaaaagccaagcacagagacgcaagcagggagc

SEQ ID NO: 83504 - RNA, 69 nt, Homo sapiens
gagcgcgaggaaaaggcggcgggagaaccggaacagaagacagggaaggacccaagagcggagaacccg

SEQ ID NO: 83505 - RNA, 69 nt, Homo sapiens
caaaaacaaaacgaaccaggacggcaaaacaaagggcaaaggacacaccgcacaaacggccgcgcacca

SEQ ID NO: 83506 - RNA, 61 nt, Homo sapiens
ccagaacggaggaggagccgcagccaaaagggacagagcgggagccaccagcgccaaaggg

SEQ ID NO: 83507 - RNA, 79 nt, Homo sapiens
gaaaaaaagagcgacgaggcaaggagcagaaggcaagaaagggagaagccagaaaagcagaaagagacagcgggaaaac

SEQ ID NO: 83508 - RNA, 75 nt, Homo sapiens
agcgccagcggcacggccggacccgcagagaggacggggacgggccccaggacgaggaagacaaggccagccacg

SEQ ID NO: 83509 - RNA, 74 nt, Homo sapiens
ccaccacacagaagaaaccccacagacaccacgaacacaaaggacaggaccgcaccacgcggcccggaccaccg

SEQ ID NO: 83510 - RNA, 66 nt, Homo sapiens
cgaagccgggccaaaggacgaagaacccacagagaggggaaccacgacccaacaaaaaacggaagg

SEQ ID NO: 83511 - RNA, 80 nt, Homo sapiens
aggaagaggaggaaggagggcgagcgaggaggaggcggagcggggcccgacgaaccagcaggcgaagacgcaggagagca

SEQ ID NO: 83512 - RNA, 90 nt, Homo sapiens
caacggggaccaacacgcagcagccgcgccgccgccgcgggagccgcgcccgaaccccggcccgaacccaggccgaaccaagaacaaccc

SEQ ID NO: 83513 - RNA, 76 nt, Homo sapiens
ggagcagaggaaaaaacgaccaagccagagaacagcccccacgcagcccagaagggacaagcacaacagaaccaca

SEQ ID NO: 83514 - RNA, 44 nt, Homo sapiens
cgggccgcacccgccgagccgcacaggcagaacaggagggaaaa

SEQ ID NO: 83515 - RNA, 82 nt, Homo sapiens
ccccaaccgacgaggagggagacggcggacacacggaggcgcggggagcacccacgggaacagcccagaaacgagggaaaaa

SEQ ID NO: 83516 - RNA, 75 nt, Homo sapiens
gccggcggcagcagcccagagcgcaaagaaggcaccccagcaacaccccgccacgccgcccaacccccgagcgcg

SEQ ID NO: 83517 - RNA, 78 nt, Homo sapiens
gaaggccacgcggaaacaaggcgaccccagaaaggccgccaaggcgagaagacaaacacaaggagggccggccagggg

SEQ ID NO: 83518 - RNA, 80 nt, Homo sapiens
gggaaggggagccaccagcccccgggccaggggcaccgccacaaaaagacaccccgaagaggaccgagaccaaagccaca

SEQ ID NO: 83519 - RNA, 79 nt, Homo sapiens
ccccaaaggcggaacagagcgcgcaaaaaccagcgggcacccggaaaagcaagggaccaggcccagagccgacgggcaa

SEQ ID NO: 83520 - RNA, 80 nt, Homo sapiens
cagaagaccaagaccgcagaccgaccccgagagaggacgggaaagggagcagcaccggccacacccacagcacgaccgga

SEQ ID NO: 83521 - RNA, 64 nt, Homo sapiens
gcaggacaagcagcacaagcaccaagccaccgccagaaagcaccgggaggaaagagagccacac

SEQ ID NO: 83522 - RNA, 90 nt, Homo sapiens
aagcccagacaagccggggaggaagggcggcggaccggacagggcagaccgccagcagcacagcaagccacagagagggccggcagggcg

SEQ ID NO: 83523 - RNA, 73 nt, Homo sapiens
gcggacgaagaggcgaccgccagacggagcacacggacagacccacccaggaggcagaaacacgccgcgcgcc

SEQ ID NO: 83524 - RNA, 73 nt, Homo sapiens
aaagcaacacgcgcacaacagagcgcacggagagcaaggaaggagggcagcccaagggcagaggagggacaag

SEQ ID NO: 83525 - RNA, 68 nt, Homo sapiens
gaagaaagccaacaagaggaagcaggaaaaacaaagaagacccagggaggagggacacacgacaggcc

SEQ ID NO: 83526 - RNA, 55 nt, Homo sapiens
cgaaggagagcgaacgcacgcaaagagcccaaaagcaaagcagggcagcaaagaa

SEQ ID NO: 83527 - RNA, 39 nt, Homo sapiens
caggccggagaaaagagaagggacacgcaggggagaacc

SEQ ID NO: 83528 - RNA, 83 nt, Homo sapiens
accgagcacaacgaaggagccgggaacgagagagaaaggagagggcggcgaagaggacccgcaggcgcaaggagcaacagcga

SEQ ID NO: 83529 - RNA, 80 nt, Homo sapiens
gcaacaaggagaaaacgcaggacccggggaaagccaccagagccgcgacagccaaggaggcaagcaaggggccccggccc

SEQ ID NO: 83530 - RNA, 77 nt, Homo sapiens
aaagcgcggccccaggaaccggaagagaacagaagcccaggaaagaagaaaggccccagggacagacgcaaagagac

SEQ ID NO: 83531 - RNA, 52 nt, Homo sapiens
ccgaccgacgacaacacacgggacgcggccaagggccagaagccaagccgag

SEQ ID NO: 83532 - RNA, 58 nt, Homo sapiens
cggggcggccaagacacgcacgagccccccaggccacccaggaccagcggcacacccc

SEQ ID NO: 83533 - RNA, 94 nt, Homo sapiens
caccgcggggccgaaaacaacgacaacgagcacagacaccgagaaacacaggcggaagcgcgccggagaaacgaacagagaccacagcgcagcg

SEQ ID NO: 83534 - RNA, 59 nt, Homo sapiens
cccacgcaacacagggagggcagggcgggcagcagcggcgcacaaaagcaggaaaggca

SEQ ID NO: 83535 - RNA, 68 nt, Homo sapiens
accgaacgccaaacccaagggggagagggagaagacaacgaagagaggaaagaagcggaaaggaggga

SEQ ID NO: 83536 - RNA, 68 nt, Homo sapiens
gggcccagaggcccagggaggcaggggcagaaacagagaaggaacagaagccaggggagggccggggc

SEQ ID NO: 83537 - RNA, 64 nt, Homo sapiens
acacgaaccccggacgggagagcgccggcggagaaaaaggcgagcagacagagcaccagccggg

SEQ ID NO: 83538 - RNA, 74 nt, Homo sapiens
gagaaacacccggagaaagagaggaacgcacaaaacaacgagggaagaggacaaaccgacacccaggagaaaaa

SEQ ID NO: 83539 - RNA, 76 nt, Homo sapiens
cgcaaaaggccccaggagcaaggcacaacgagccagcaagccagacaacaggccaaagccagggagggccagcccc

SEQ ID NO: 83540 - RNA, 58 nt, Homo sapiens
gcggccggccggggggaagcgagcgcgggggagccgggccgcacaccgcccaaccgaa

SEQ ID NO: 83541 - RNA, 40 nt, Homo sapiens
gggcacacggcacagaccagggcggcgacggcggcgcgag

SEQ ID NO: 83542 - RNA, 81 nt, Homo sapiens
gagggcaacaagagccaggcaacgagggacaaccagggcaccccacagccagcacaagcgaaagaggagcagcgcaaacca

SEQ ID NO: 83543 - RNA, 65 nt, Homo sapiens
agccggaagcaagccgccgggagaaggaagaacggcgaggagacaccaggggagaagcgacgggc

SEQ ID NO: 83544 - RNA, 53 nt, Homo sapiens
gaagaggagcaccccacacagaccaaaaagaccagggggaaagggaagaagac

SEQ ID NO: 83545 - RNA, 71 nt, Homo sapiens
accgacggacaagacacgggacagagcgacagaggaagaaacgcacagacgcgaaagagggaagaaagaaa

SEQ ID NO: 83546 - RNA, 71 nt, Homo sapiens
aaaccggaggcaggaaacgcagcaaagccacgggggagaaggagaaaagccacagagccagggaaggggga

SEQ ID NO: 83547 - RNA, 81 nt, Homo sapiens
ggacgccccgcccgcaccgccggccggcggccggagaaacgaggagccagaaacgaaggaggcccaaccacaaaaggagcc

SEQ ID NO: 83548 - RNA, 61 nt, Homo sapiens
cgccgcgccgcccggcagcccggcaggcacgggagcgcggggaccgagacaaaacgcagaa

SEQ ID NO: 83549 - RNA, 85 nt, Homo sapiens
gggagccggaggaggagcccgcccccagagaggggagccggcgaggacaaaaccgaaggagggacccagaagaaccacgcgcagg

SEQ ID NO: 83550 - RNA, 69 nt, Homo sapiens
aacggggggagagaacccaaccagggggaaacacagaacgcaggagggaaaagaggacgaggcgcgaaa

SEQ ID NO: 83551 - RNA, 80 nt, Homo sapiens
aggacgacggcgagggagcacaagaaaagcccaggaaaaagaaggaaccacgcaacggagcgccgccccaggcggaggca

SEQ ID NO: 83552 - RNA, 130 nt, Homo sapiens
gccggggccgaggagcgggcacagggcaaggcggcggacggcgcgcgcccgaggcgaggaggagcgcggcggagaaagagcaacgcacgaggaagaacgaacggaccacggacgcaaacaccgccaaaga

SEQ ID NO: 83553 - RNA, 59 nt, Homo sapiens
caggaaggcccccccagccccgcgggagaagcaggccaacagcaaaaaaccaagagggg

SEQ ID NO: 83554 - RNA, 52 nt, Homo sapiens
aaggaccaagaaccaggcagaaccacagggagagaaaaaacaaggacacagc

SEQ ID NO: 83555 - RNA, 33 nt, Homo sapiens
cagaaagcggacgacacggacagaggaaaaccc

SEQ ID NO: 83556 - RNA, 80 nt, Homo sapiens
caccccaccgaggccggcgcgcggcgggcgaggagcggcggcggggcggccgcgggggaccaaaagaacccagccaaccc

SEQ ID NO: 83557 - RNA, 84 nt, Homo sapiens
gggcccgaggaggcagccaagccgagccgccacccggcgccaaaaagcaaaggaccaccgacaaaccgggaccaagaagcagaa

SEQ ID NO: 83558 - RNA, 73 nt, Homo sapiens
aggaggagccgaggcgagccaacagcacaaagcaacgaggcgagcgaagaaagccggacgcccagagaagcgc

SEQ ID NO: 83559 - RNA, 78 nt, Homo sapiens
aacgcgagccggagaggagccgcaggagaaggaaccagcggggagaaggcccagcgaaagaccgagcgagagcagcca

SEQ ID NO: 83560 - RNA, 74 nt, Homo sapiens
aggacccccaggaacgcgcccccaccaaggcaccaggaggcgcccacccagaccaccgcccacgaagcccgacg

SEQ ID NO: 83561 - RNA, 78 nt, Homo sapiens
gaaaagccccagggccaccaaaggggcagaccaacaccacccagcaaaaaccccgacgaacgcgccagggagcgccag

SEQ ID NO: 83562 - RNA, 81 nt, Homo sapiens
acagcagccgaagcaccagaccaacacagcagacacagagaaaaacggcagcagccaagcacgcaaccaagagggaaggag

SEQ ID NO: 83563 - RNA, 59 nt, Homo sapiens
ggcccgacgggaggccaaggcaaggaagagaggaacggaaaaccaggggccagaacgga

SEQ ID NO: 83564 - RNA, 76 nt, Homo sapiens
ggcccacacccgggggcacagccagggagagccggggagacaggagagccgcccagaacccccggaagggaccagc

SEQ ID NO: 83565 - RNA, 80 nt, Homo sapiens
ggagacaaccgaaggagccagacccgaggaacagcagaaggaagcagcgccacaaggaacagaaaggaagcaggaagaag

SEQ ID NO: 83566 - RNA, 76 nt, Homo sapiens
ggagcccgcggccggccagccgaagaggggcggcacccccggggacgaagggaacccgccgggcggcccggcaccc

SEQ ID NO: 83567 - RNA, 72 nt, Homo sapiens
agggagggagggaagaaaggagagcgccaaaacggaaggagaacaaccaaccaagagcgaacggaagcccaa

SEQ ID NO: 83568 - RNA, 60 nt, Homo sapiens
cgaaagcgagcaggaacccggaagagggcagagacgacggcacacaacagaacccagagg

SEQ ID NO: 83569 - RNA, 75 nt, Homo sapiens
gggggcacacagaaaccagcaaggaaggagagccagccgaaggccaagacccggcacaggagggagcaggaaaaa

SEQ ID NO: 83570 - RNA, 76 nt, Homo sapiens
gccagccagggcccgcaggcagagcgccacgaggacaacggaaccagacaagaagggaaaaggaccccacaaaacc

SEQ ID NO: 83571 - RNA, 59 nt, Homo sapiens
cccacggaagcccccgggcaaaggcacacaagagccccacgacggcaggcgcacggaac

SEQ ID NO: 83572 - RNA, 81 nt, Homo sapiens
aaagaggaagaacgcgccagagcaaaagggacacagaagaagacggcacgggacccccagcacaggcagcaggccgggaga

SEQ ID NO: 83573 - RNA, 76 nt, Homo sapiens
gcccccacacagccaaccgcgcccccacaggccaggaggacaaccccaaagaggccgcgacagccaccaaagcagc

SEQ ID NO: 83574 - RNA, 72 nt, Homo sapiens
gcaaaccgagccccgcgccgcagagcagcaagcggcaagagccacagagaaacaaccaaggcagggaagaaa

SEQ ID NO: 83575 - RNA, 38 nt, Homo sapiens
agcgcgagagccgagcggaccagagacccacggcaggg

SEQ ID NO: 83576 - RNA, 79 nt, Homo sapiens
gcccagggccgacacccaccccccaccaaagagggcacccacaggaaaggacccggaagccaaggagagcaggcgaacc

SEQ ID NO: 83577 - RNA, 51 nt, Homo sapiens
gacgggaagcagaggccacccaggcggggccgggcgggccgggaagggcaa

SEQ ID NO: 83578 - RNA, 77 nt, Homo sapiens
gacgggggccgggacacaccacacagagggaggcccacagccagccagaacaaccacaacccacaaccaaccaacca

SEQ ID NO: 83579 - RNA, 53 nt, Homo sapiens
gcagcgacaggacgggaacggcggccggcgcaacaagaggaaccaaggaaaag

SEQ ID NO: 83580 - RNA, 77 nt, Homo sapiens
acacaaagcgcgccaaacaggaccacgcaaggaacaacaggcagcccaagagaacgaaagcaaaaagcgccgaccag

SEQ ID NO: 83581 - RNA, 69 nt, Homo sapiens
gagcacgcagccaaccccagcaagcaacggggcggcacacaaggagcgaagggcagggagaacgccagg

SEQ ID NO: 83582 - RNA, 88 nt, Homo sapiens
ggcgcgggccggccccgcggggagcgcccccggcgcgagccccaggaaagggccaggccgagggcccgcccggccccaggagaagaac

SEQ ID NO: 83583 - RNA, 72 nt, Homo sapiens
acggagaaaaacccaggagacggaaggaaggacagacccagagaagagacagccccacacaagaaagcgcga

SEQ ID NO: 83584 - RNA, 75 nt, Homo sapiens
gcaccaacgccaaccaaagagcacagccaccagccagcaagcccaagccaggagccggcggcacgacagcaaaag

SEQ ID NO: 83585 - RNA, 72 nt, Homo sapiens
gcacgccaagcacggggggcaggccaccggcagcccagcagagcacccgaaggcccgaaccagcggcacgcc

SEQ ID NO: 83586 - RNA, 60 nt, Homo sapiens
aagggccgaggcccgcaaaaaaagcgccagcggagagagaaggcaaagcacaaaaccacg

SEQ ID NO: 83587 - RNA, 86 nt, Homo sapiens
gggaaggagcagaacggaggggaacacaaaaaggggggacaaccgaggaggcgcggcacccccgcccgccacagagaacaggagcc

SEQ ID NO: 83588 - RNA, 76 nt, Homo sapiens
gcagagaaggggacccaaacacaagggcgaacgacgggcccagggaaggagcgcgacgacgccaaaagagagcgac

SEQ ID NO: 83589 - RNA, 73 nt, Homo sapiens
gcaagaccagacagcacacacgcaggaggcaaacaaggacaaaagcaggggcacggaagaggacaagaaacaa

SEQ ID NO: 83590 - RNA, 76 nt, Homo sapiens
ggaaaacaaggaaaaggccgcgggaaaaaaggaagcccacaaccaaagagaggccggagaaccagcaacgagacag

SEQ ID NO: 83591 - RNA, 82 nt, Homo sapiens
acggagccccagcgcccacgcaccccaccggcgcgcgcggcggcccgcgcacagaccccagacccgcagagaccgcgcgcaa

SEQ ID NO: 83592 - RNA, 68 nt, Homo sapiens
cagaaagggcagcgaagcagccggcacccaagcacagaggaacgcaaggaagaaaagggaacgccacc

SEQ ID NO: 83593 - RNA, 82 nt, Homo sapiens
aggcagagaaaaaagaggggggagagccaggggcacaggaaaagggagaagaggaaaagacaaaagacccagaggaaaaccc

SEQ ID NO: 83594 - RNA, 78 nt, Homo sapiens
gcgcggggggggaacgcggggaaggcgaggcacgaccccacccccgaggcccgaccgggaaaaggggcgaggccggcc

SEQ ID NO: 83595 - RNA, 38 nt, Homo sapiens
accggcgggaggaacaaaaggcccaacgagacaaaaac

SEQ ID NO: 83596 - RNA, 46 nt, Homo sapiens
gccccgaacaagcagggcggcggggaccgaaaggaagcggagagag

SEQ ID NO: 83597 - RNA, 73 nt, Homo sapiens
agagcggaccgagagcgcgaaacgcacgagaagggacacaaagcgcgggaaagaaccccgcacccggaacacc

SEQ ID NO: 83598 - RNA, 108 nt, Homo sapiens
aaaccagcggaaagccaagagcgcacgggggaaacaagcgaaaaacaggcaagggggagcaggacaacggccaaaagcggaacgagcagggccgcggaggcagcgagc

SEQ ID NO: 83599 - RNA, 81 nt, Homo sapiens
cggccggccgcaaggcggcaagaaagaaaagaagggcgcccggaaaggcgccgaagagagagagcccagccacagagcgag

SEQ ID NO: 83600 - RNA, 77 nt, Homo sapiens
aggcgccagcgaacacagaggaaggggagggcagagagggagccgagcggaagagagaggagcgagaggaagcggaa

SEQ ID NO: 83601 - RNA, 110 nt, Homo sapiens
caagcggcccacagcaggacggaagcgagggcacgggcggcagcccgagaccgcagcagggcgcgacaagagacggacaaaaagacgagagggaaggccaggccccaggc

SEQ ID NO: 83602 - RNA, 78 nt, Homo sapiens
ggcgggaggccaccgccaggagcccacgaaagggccagcagcccccagaagaagccagaaagccaggaaaggcccagg

SEQ ID NO: 83603 - RNA, 80 nt, Homo sapiens
gaccgcccgggagacggagcgaaggccggagggaggcggacaacaggagccccccagcacagggacgagagacccgaaag

SEQ ID NO: 83604 - RNA, 74 nt, Homo sapiens
gaggcgggaaacgcccaggacaaacccagaccacacaagggcaggggggaaagggacaaaccgaagaaaaaaag

SEQ ID NO: 83605 - RNA, 77 nt, Homo sapiens
ggggaaccggccccacccgggaggggggagcggcgggaggccaccgccaggagaccggaaaccgagagaaacgaaga

SEQ ID NO: 83606 - RNA, 77 nt, Homo sapiens
ggcgggggcacggccgcccagcccacgccgccccgcgcgcagcgcccccagcacaagggggcaccaggcggagaagg

SEQ ID NO: 83607 - RNA, 63 nt, Homo sapiens
gaagaaccagaccacggacaggacgacccagccaacggcaagcagcaagcagccaccagcccc

SEQ ID NO: 83608 - RNA, 74 nt, Homo sapiens
gcggaggcggcagagaccgggcgagcgacccaggaaggagagaggagccagagaccaagagcccagagaacaga

SEQ ID NO: 83609 - RNA, 75 nt, Homo sapiens
aggggcccggcggcggggagaggcgacccgcggcgagagcccccccagagcgccagggcccgagaaggcggcggc

SEQ ID NO: 83610 - RNA, 66 nt, Homo sapiens
gaagacggccaggcgccagccaggaaaaaccaccacaggcacgacgcccgagacaaacccggggca

SEQ ID NO: 83611 - RNA, 50 nt, Homo sapiens
ccccacggacgggaacagaaaggaagggaccccgacggagagacaaagaa

SEQ ID NO: 83612 - RNA, 76 nt, Homo sapiens
gcgccgaggaccggcaacagggcggcggggaaaaggaaaagagcacgggccaggacccagaggacacgcgggccca

SEQ ID NO: 83613 - RNA, 78 nt, Homo sapiens
aaggaaaacccagacgacacaacccgggcgcgggaccaagaaaggcccagggaccaaagcccggacaaggcccgagca

SEQ ID NO: 83614 - RNA, 73 nt, Homo sapiens
aagggaagccacggaagaaaggcaagaacggaagcacgggcggaggaaagcacaagcagagcccccgcagagg

SEQ ID NO: 83615 - RNA, 74 nt, Homo sapiens
gacagaccaaccaagccaggacagggagaaaaaggcagccccggagacgaaaagacaaagcaccaccaacagac

SEQ ID NO: 83616 - RNA, 41 nt, Homo sapiens
gcgacaagccaaaaaggaggaacaccagcaaggaaagagag

SEQ ID NO: 83617 - RNA, 60 nt, Homo sapiens
agagcaacggacagacagcccaccgggcaggaaaccagaaacggcgaggaaagagaggag

SEQ ID NO: 83618 - RNA, 47 nt, Homo sapiens
gggcgaagaggacaccacgccgggacccgaaccacgcaacgcccgcc

SEQ ID NO: 83619 - RNA, 83 nt, Homo sapiens
acagaggcgagggccgccgccgccgacagaacgcccgggggcggagaaggccaggcagcagcgcaggaggagcccggcaggca

SEQ ID NO: 83620 - RNA, 76 nt, Homo sapiens
ccccgccacccccacggccacccaccaggaccccgcagagccgccccagcggccccggaggcggcagcaggaggca

SEQ ID NO: 83621 - RNA, 66 nt, Homo sapiens
aaggaccaagaaccagagcccaaaagcaaagcagggcagcaaagaacacaaaggcacgggagagga

SEQ ID NO: 83622 - RNA, 66 nt, Homo sapiens
agggacccaaggacgcagaccacgcgaaccagaaagagccagaaagacaaagaccaaaagacagac

SEQ ID NO: 83623 - RNA, 67 nt, Homo sapiens
cgacaagaccaagacacccaagagcggcggcggaagaagaggcaagaccgcggaaaggacgaaccca

SEQ ID NO: 83624 - RNA, 76 nt, Homo sapiens
gaacccaccacccagcagcagggcacaagcagagaccgggaggcagcaacccagaggccaccgccaagcaaaacaa

SEQ ID NO: 83625 - RNA, 75 nt, Homo sapiens
gaacacacgacgggacaaaagacccaagcaggacacggccggaccagggaggaacccggaagaaaaaaaaaacaa

SEQ ID NO: 83626 - RNA, 66 nt, Homo sapiens
aaggcccggacacagcaaaccgggccacagaggagaacgaaaacccaccaggaaggagcacaggaa

SEQ ID NO: 83627 - RNA, 75 nt, Homo sapiens
aaggcggcccagcagcgagacacagaagggcccggaggggccgccccacgccggcgagccaggacagcccaacca

SEQ ID NO: 83628 - RNA, 58 nt, Homo sapiens
ggagcaaaaccaacgccggccggagcagcagcccgaggcgccgggcgaaggggaagcg

SEQ ID NO: 83629 - RNA, 75 nt, Homo sapiens
gagggcacccacccacgaagggaggaaaagggcagggacagcgcaggcagcagcagagagcgcagaagacaggac

SEQ ID NO: 83630 - RNA, 75 nt, Homo sapiens
cgagcggaccaggagggcacccccgggacggggggccaggaggagccccagcacagcagagaaaaaaccacaggc

SEQ ID NO: 83631 - RNA, 52 nt, Homo sapiens
acaaggacaagaacgcaaagcaggagcggcccccaggacaaagacaaggaag

SEQ ID NO: 83632 - RNA, 80 nt, Homo sapiens
ggacgaccgcgccgcccagcacgccagggggcgacgcaaacccggacacaagcagccaagagaggaaaagacagggcaac

SEQ ID NO: 83633 - RNA, 57 nt, Homo sapiens
gcagcggaaaagaccagcacagggaccagagcacgaagagagggggaccagggagaa

SEQ ID NO: 83634 - RNA, 58 nt, Homo sapiens
cccgcccggaggaaaagggaggggaagaaaccgccaggaagagaggaggccacagagg

SEQ ID NO: 83635 - RNA, 73 nt, Homo sapiens
cgccccgccgcccaccccggcaggccaagaagcgagagaagaaaaacagaaaaagccaagacagaaacaagaa

SEQ ID NO: 83636 - RNA, 81 nt, Homo sapiens
ccagccccaccagaccccggccgccgaccgcggccccgccggccgccggccgcgcggggggcccgggaggagcggggacac

SEQ ID NO: 83637 - RNA, 73 nt, Homo sapiens
cgaccaaccagcaaacaccacaaaggagaaacaggccccagcaaagcgcacggacccacaaaaaggagagccc

SEQ ID NO: 83638 - RNA, 66 nt, Homo sapiens
ccaagcccacacacaacgcgacagggaaacaaaacccaagccacacgaaaacgacggcacccgggg

SEQ ID NO: 83639 - RNA, 77 nt, Homo sapiens
caaggggcccgcaacccccagcagcacggggaaggaccggacccggcccgggagcaaagggcccaaaaaagggaacc

SEQ ID NO: 83640 - RNA, 39 nt, Homo sapiens
caagaagaagcgcggaccccgcgacggagccaccggccc

SEQ ID NO: 83641 - RNA, 81 nt, Homo sapiens
caaaagcaggcaacggccagacacagggaaagcggaggcgagggaaaaggcccccccaggcggagccacggaccccaggcc

SEQ ID NO: 83642 - RNA, 74 nt, Homo sapiens
ccggggccaccccgcgggcagacgaggccacagcccaggcacaggaaaggagaccaaaggaaagacgacagagg

SEQ ID NO: 83643 - RNA, 63 nt, Homo sapiens
gcggagggagccccagacacgacaggggccacacagagaacaaaccaggagagaaacaaaccg

SEQ ID NO: 83644 - RNA, 78 nt, Homo sapiens
ccaggacccccaacaccagcaccgcagaggcaaggggccaccaggaggccagggggcgccaggagggacaaaacaaga

SEQ ID NO: 83645 - RNA, 71 nt, Homo sapiens
cccccccgccccgagcaaaaaacacagggacgagccaccagagggccaaaagggcggggaacggaccacca

SEQ ID NO: 83646 - RNA, 34 nt, Homo sapiens
cgcaagacggacccgaccaggcagagaggcggac

SEQ ID NO: 83647 - RNA, 79 nt, Homo sapiens
cgaagagcccagaccagcagcaaggccacgcagaccacacacagagagggccccaaggcggcagccccgaccgacgggg

SEQ ID NO: 83648 - RNA, 64 nt, Homo sapiens
cagcacacaacgcggagcgacaacgaagagaggaaagaagcggaaaggagggagcacacaacaa

SEQ ID NO: 83649 - RNA, 74 nt, Homo sapiens
aagaaacaaaaacgggaaagccggcaagagggagaaggacaccaggcagaggcaaggcgaggggcccgcgagca

SEQ ID NO: 83650 - RNA, 82 nt, Homo sapiens
gccgggcgacaagcggggacgcgcccagacgcagcgcagcccggccaagcccgccgcgcccggcagacggcagaaaacagac

SEQ ID NO: 83651 - RNA, 83 nt, Homo sapiens
cgggcccaccccaccgccagcggaacccggggacacgacgccccaaaccgccaggagaaaaaagcgcgccccagaccaccggc

SEQ ID NO: 83652 - RNA, 67 nt, Homo sapiens
cgaccaaacgacgggggccggagcccacagcgacagggcccgagggccagcggccccccggagaaag

SEQ ID NO: 83653 - RNA, 85 nt, Homo sapiens
cgcagcgcgaggccccccaggcacggcaaaggcggaacccggggacccagaacccagacaccaccacagccccgccccgaccagc

SEQ ID NO: 83654 - RNA, 60 nt, Homo sapiens
acagcccagggaaggcaccaaaagggggggcaggaaagaggcgcggccagcgaagaagac

SEQ ID NO: 83655 - RNA, 70 nt, Homo sapiens
ccaggggaaaggaacacccccagcggccagggggagccacggaccagggggacggcgacagcgccgaaca

SEQ ID NO: 83656 - RNA, 76 nt, Homo sapiens
gggggaccgggagggaaagaaaacaacccgccgcagccgcagacggacagcggcaaaggaagaagagaccaaagaa

SEQ ID NO: 83657 - RNA, 51 nt, Homo sapiens
cgccccccggacccgcaggagaaggcaaaagccgggccccggggccaaccg

SEQ ID NO: 83658 - RNA, 84 nt, Homo sapiens
ccggcccccccaggacaacccagaggcaacaaaggcgaggagggaaggaaacgcaagagccgccgccaaggccgcaacaggaaa

SEQ ID NO: 83659 - RNA, 54 nt, Homo sapiens
gagccggcgaggagcaccccccgccggaaagccagacgcagagcggccgacaac

SEQ ID NO: 83660 - RNA, 62 nt, Homo sapiens
cagccaccgaacgcgcacacgaccagcaggccggaaaggaaaaacaccagaacggaaacaga

SEQ ID NO: 83661 - RNA, 78 nt, Homo sapiens
gccaagccaacagcccagcacagacaacagcagcgccgagaaaccggcagccgacaccacaacaaggcagcaaacaga

SEQ ID NO: 83662 - RNA, 85 nt, Homo sapiens
cccgcccgcccgcccgcgcccggggcgcgcccaccgcgccgcaccagcgagaacgcacaccagcaccagcccaccaaaccagcac

SEQ ID NO: 83663 - RNA, 72 nt, Homo sapiens
gcggccccgggccgggcccggccccggagaagggccaggaccccaggcgagaaggggagacaggagacgggg

SEQ ID NO: 83664 - RNA, 82 nt, Homo sapiens
agcccccagagcgggaccacaggagaagaagccgaccagaccagaccagaaccaggaagcgcaacccaaccacgcagaccaa

SEQ ID NO: 83665 - RNA, 80 nt, Homo sapiens
acccagccgggcaacaggaacccacaaacaaagcaccagaaagcagccaaaaggcagagcccaccaaggccggaagcgac

SEQ ID NO: 83666 - RNA, 72 nt, Homo sapiens
cacccccggcgggcccgaggcggcgagagaggcaggcggagccgaccgggccaggagcagcccaggggcccg

SEQ ID NO: 83667 - RNA, 66 nt, Homo sapiens
aacccgccccgggccaagcaaccccacccagccgggcaccagacgcccgagagaaccaagcgcgca

SEQ ID NO: 83668 - RNA, 73 nt, Homo sapiens
cggagaaagacaggcagccaaggaaaaggaacagagagagcagaaccgaaacggggaaagaccgaagaaagaa

SEQ ID NO: 83669 - RNA, 116 nt, Homo sapiens
cgccgccccgcgagcacagagcccgccgccgaccgccgcccgccacacccgccgccaggcaaaagcagaccggaaaacccaccggcaagaccacacccgaggggagcccaggacac

SEQ ID NO: 83670 - RNA, 69 nt, Homo sapiens
cgagggcacggccgaggaccgccgaccaggcaggagcacggagaagagaacgacgaacagaaaaagccc

SEQ ID NO: 83671 - RNA, 61 nt, Homo sapiens
cagggaaaggagcggggagccccgcgccacagacaagagagggcggcagaaggaacaccga

SEQ ID NO: 83672 - RNA, 76 nt, Homo sapiens
agccaaaagagaaagcacagaaaccaaagccagccagggcccacccagacaggagcccagcagggggaggccgaca

SEQ ID NO: 83673 - RNA, 41 nt, Homo sapiens
ggccaccccccaggacccaaagaaggacccgaagcagggga

SEQ ID NO: 83674 - RNA, 46 nt, Homo sapiens
gggcgggccccccgaagagaaagggaaggcggggccggggcgcagg

SEQ ID NO: 83675 - RNA, 66 nt, Homo sapiens
cacaaaaccgcgcggaaaccaccggggaaagacaaggagccgggccgagaaaccgaaccagagacc

SEQ ID NO: 83676 - RNA, 83 nt, Homo sapiens
cacgcggcgaaggaagaggagggcaagaagggcaagaaggaaaagaaggaggccagcgggacacacaaagaaagacgaaggac

SEQ ID NO: 83677 - RNA, 59 nt, Homo sapiens
gcagccagaccaagaacaaccgcggacacggagaggaaggagacaaaaccaaaggagga

SEQ ID NO: 83678 - RNA, 71 nt, Homo sapiens
ccccggcggagaaagcaccagaaccaaaaaaacaccgccccccggaagaggagcggaccgcgaagagagac

SEQ ID NO: 83679 - RNA, 76 nt, Homo sapiens
aagccgacagacaaccaggcgaaggcaagagaggggagggagaaaaacccgaccccccagggcagagacaagaaag

SEQ ID NO: 83680 - RNA, 90 nt, Homo sapiens
ggggccccaagaagccgagacacgcgggaggcggcgacgggcccggggacgggacacagggacgggccaagagcccggaagaaggaaggc

SEQ ID NO: 83681 - RNA, 60 nt, Homo sapiens
gaacacacaccgaagcaacccaaagcacgaacaagcaagcaacgccaaggggggcacgaa

SEQ ID NO: 83682 - RNA, 77 nt, Homo sapiens
gaaccagaccagaagcaaagacagcccaaccaacccaccagccagacaacacaagaaaacggagacgcagaaaaacc

SEQ ID NO: 83683 - RNA, 83 nt, Homo sapiens
cgggcaagcaaaacggagaccgagaagcgagcacaaaaagaaagaagagaaccagaacaacaagaaccagccaccaggaccac

SEQ ID NO: 83684 - RNA, 82 nt, Homo sapiens
caggacagcaccagcgggccggaggagccagagcgcagaaaggagaaccagaggacaaaaagcccagggaacaacaagcgca

SEQ ID NO: 83685 - RNA, 70 nt, Homo sapiens
aaaaacaggacaaaggaagccaagcaggaggcaagaaaaagcagcacgaaggcgaggaaccagcagacaa

SEQ ID NO: 83686 - RNA, 41 nt, Homo sapiens
gccaggcgaccgacggccggaaccaaaaagaagccccagag

SEQ ID NO: 83687 - RNA, 86 nt, Homo sapiens
cagcacaccacgcacagcgccggacagcccccagggcacaacgccaggaccgaagcccggcaaccggcggaacgaagacggagcga

SEQ ID NO: 83688 - RNA, 82 nt, Homo sapiens
cccccgggggcccgggaggagagaaaagaaaccaggcggggaacaagccagcagcccaaggagaagccccacagagcaagcg

SEQ ID NO: 83689 - RNA, 75 nt, Homo sapiens
gccacggaaagagggagaagaaaacaaagccgcaagccaaaagagcgagaggcgagcaaaagggaagagaacaag

SEQ ID NO: 83690 - RNA, 79 nt, Homo sapiens
gggagcccgagcgacccggggacgaggaagaggaggggcacccaggcaaaaccccacacgggacccccgacgggagcag

SEQ ID NO: 83691 - RNA, 67 nt, Homo sapiens
acccaaggaaccaggcgaaggaaacagagcggaaacagacacccaccacaagaaggacccgaccaca

SEQ ID NO: 83692 - RNA, 76 nt, Homo sapiens
gcacccccacggaccggcacggccgcagggaccccagcccagcccaggggcgggggcaggacacggacaaaacccg

SEQ ID NO: 83693 - RNA, 79 nt, Homo sapiens
ccggcccgccacccccgcacagcaaaaggaggaaccggagccacacaccgcagaaagagcaggccggaaaccaggccag

SEQ ID NO: 83694 - RNA, 39 nt, Homo sapiens
ggcgggaaagagaggcccgacggaccaagagaggagaca

SEQ ID NO: 83695 - RNA, 79 nt, Homo sapiens
cagcacccggcaagaagaacacagggggaagccaagcagaacaaacacagacgcggccaaccacccaaagaggagcaac

SEQ ID NO: 83696 - RNA, 72 nt, Homo sapiens
acagacagcagggccgaccaagcaccgcagacccaaccccaggagagcgaccagggggaaccgaaggagcca

SEQ ID NO: 83697 - RNA, 72 nt, Homo sapiens
acacgcccccacgaacaccgagaagcgagagaaagagccccgcaccacaaagaaagacagccaagcagagag

SEQ ID NO: 83698 - RNA, 76 nt, Homo sapiens
cacccaacagcaacacaggaaaggcaaacgaacaccggaggacagccagggcaaagacacagcggaacgacaacaa

SEQ ID NO: 83699 - RNA, 39 nt, Homo sapiens
cgagaccaccgcacaccacaggcggagccccccccaagg

SEQ ID NO: 83700 - RNA, 73 nt, Homo sapiens
caagcggggagcgcccgcgacagaggagggaggaaaacaaccgagggcagagaaagagcggaggacccggacc

SEQ ID NO: 83701 - RNA, 86 nt, Homo sapiens
cccagagagcgggaacaggcaggcacccgggagagcagcagagagcacagaacacgcacgacgacagcaggaacaacgcggcccag

SEQ ID NO: 83702 - RNA, 75 nt, Homo sapiens
acgcgggggggggccgaccggagcgggccaggccgggaggaagagagaaggccacgcccgaccccaagcaacaac

SEQ ID NO: 83703 - RNA, 52 nt, Homo sapiens
cgccaaccacccgggcaacacagggacaacggcaagcggagaagagcaaggc

SEQ ID NO: 83704 - RNA, 71 nt, Homo sapiens
agaccaaggaagaggcgaacaaggacagggcagaccgccagcagcacagcaagccacagagagggccggca

SEQ ID NO: 83705 - RNA, 81 nt, Homo sapiens
caggcgggcccccgcggcccgggcgagcccggagaagaggaagcgcgagcccagcagaccgcgcaggcccgggagcacgga

SEQ ID NO: 83706 - RNA, 74 nt, Homo sapiens
gggcccggcgggccggggccggagcccagggccggggaaccccgcgcccgcggaacacgggcaacgggggaaga

SEQ ID NO: 83707 - RNA, 71 nt, Homo sapiens
cacacgcggaccgagcgcagagagaagcagagggaccgaaacaacacgaagcgaaaccggggccgaggcag

SEQ ID NO: 83708 - RNA, 46 nt, Homo sapiens
accagaaaccggaagcgagcggagggaaaccccgcagacagacaca

SEQ ID NO: 83709 - RNA, 98 nt, Homo sapiens
gccccccagcggagacccgccgcaaacagcccgccagacacggcaggccaagaagcaccgagcgaccgcgacgagaagagcaaaacggagcccaaaaa

SEQ ID NO: 83710 - RNA, 71 nt, Homo sapiens
gccacccgcaccggacccaagcccgcgaacaccgcggagcccacaccacgcaagcggccgcgagaaccggg

SEQ ID NO: 83711 - RNA, 68 nt, Homo sapiens
cgacacgagaagaagagacacagggagccaacccagccccagagagcacgaaccagaccaagaggcag

SEQ ID NO: 83712 - RNA, 75 nt, Homo sapiens
accccgggaagaagcgcccacaccgggccaggaccaaccaccgcgcaaagaagggcccagaagagacaacaaccc

SEQ ID NO: 83713 - RNA, 82 nt, Homo sapiens
aaaaccagacaaacaaaacaaagagccgcagaagaaagcagcgaagcacacacagaccaaaaagggcagccgcagaagccaa

SEQ ID NO: 83714 - RNA, 73 nt, Homo sapiens
gcggagcacccaaggcaaaggcggcaggcacagaggcaaggcagaagacagccacacaggcacccacccaggc

SEQ ID NO: 83715 - RNA, 103 nt, Homo sapiens
cggaggacgaaggccgaacagggcgccgcccccccagggacggaagcccacaggaggacggggccgacaagagccccggaacggccgacggacccgccgcacc

SEQ ID NO: 83716 - RNA, 82 nt, Homo sapiens
accgaccacgggacgcagagcgcggccagagggcccgcccagccccaaccaggaacgagaaggccagacacacaccacggag

SEQ ID NO: 83717 - RNA, 83 nt, Homo sapiens
gggagagccagggcaagaaggcggggacgcaggcccagaggagcccaaaggccagagaaggacaagaagccaagccgaaagga

SEQ ID NO: 83718 - RNA, 76 nt, Homo sapiens
ggcacacgcagcagaagcccggagcaaaagggaaagcaaggggaagggcccaagaagacaccccaccagaaaccga

SEQ ID NO: 83719 - RNA, 73 nt, Homo sapiens
aacccccagcccagaaggacacacaccaaaccggagggagaggcgcacacaggaaagacaaccaggcgaagaa

SEQ ID NO: 83720 - RNA, 75 nt, Homo sapiens
cagggaagggcgcagcagaaagcaaaccagcaggcaccaaggaaagcagaagacaaaaaagcacgaaacacaaag

SEQ ID NO: 83721 - RNA, 74 nt, Homo sapiens
gaaacgaggaaaccgggaaagccaccgaaaaggaaacccggcaaagaagaaagacagcgggaaggacgagcaga

SEQ ID NO: 83722 - RNA, 75 nt, Homo sapiens
gggaacggcgcccggagggacgcaaaagcccagggagcggcggcagcagccagccggcccggccggacgaaagaa

SEQ ID NO: 83723 - RNA, 68 nt, Homo sapiens
agaagaagaggaggaggaggaagaagaggaggaagaagggggaaagggaaaagaggaagagagaaaca

SEQ ID NO: 83724 - RNA, 39 nt, Homo sapiens
cagggccgccacacccaggcgaagccgacgagcccgaac

SEQ ID NO: 83725 - RNA, 61 nt, Homo sapiens
cacaccccaaaagcagaaggccggagccccgggaccgcaccggcaccgcagcgccaccccc

SEQ ID NO: 83726 - RNA, 79 nt, Homo sapiens
gggagaggcgagcagaagcaggaagggcaaggaccggcaaagccgaagagcacagggaacaccagaggcgggaccacgg

SEQ ID NO: 83727 - RNA, 75 nt, Homo sapiens
ccacgccgcaacccgcggcagagagaaaagaaaggaagcgacggcgcacaggaacccccacgagccagaggaggc

SEQ ID NO: 83728 - RNA, 78 nt, Homo sapiens
gcgaccacaaggaacgaggggccccaagagcacagaccagcagccgccaaaggagacaaggagaaggccaggacacgg

SEQ ID NO: 83729 - RNA, 75 nt, Homo sapiens
gaaagcaaaccagggccccaaagacaagccaggagcccggaagacagccgcagggcagacaccacacacagaccg

SEQ ID NO: 83730 - RNA, 77 nt, Homo sapiens
acgaccagggcccggcggggacgagcaggaagcgcggcgagcgagagaacacagggcacgggaggccgcgcagggag

SEQ ID NO: 83731 - RNA, 92 nt, Homo sapiens
ggggagcgcagacggcgcccagcaacacagaagccgacaaggcgcaagcgaaaacagaccgcgagcccagagaggaggcgcggaggaggagg

SEQ ID NO: 83732 - RNA, 72 nt, Homo sapiens
cgccacccagaaaccaggagaggaaaggccgccgacccccggcaaagcaccagaggaagaggaggaacgagg

SEQ ID NO: 83733 - RNA, 73 nt, Homo sapiens
gccagcgggcccagccccaccgcgaccgcagccccaggccccagaggagccacaacgaccgagcggacaggag

SEQ ID NO: 83734 - RNA, 60 nt, Homo sapiens
cacaagccggaggacagccccagggcagaggcccgaccccaagacagcgggcgcgaccaa

SEQ ID NO: 83735 - RNA, 74 nt, Homo sapiens
cccaaaaccaaggccaccaaggacagagcagacacaccacccaacagaaaagcaccgagcagaaggcccgaaca

SEQ ID NO: 83736 - RNA, 58 nt, Homo sapiens
agcgcccgagacgggcccgccgaaaggcagaaaaaaccagcaggccaggaacacaacc

SEQ ID NO: 83737 - RNA, 66 nt, Homo sapiens
acccagcaccgaacagaccccgccccagcagaagagaaccaaaggcaagaaccggagcaggagaaa

SEQ ID NO: 83738 - RNA, 79 nt, Homo sapiens
aagcaccgcagacccaaccccagcagaagaggagccccgccgaggcagagggccggcccccccagaggaagggaggccg

SEQ ID NO: 83739 - RNA, 84 nt, Homo sapiens
cccggccaggacacggcgggccgccgaacccggccgaagagcggcggcggcagcggcggcaaaagggaaagcaaggggaagggc

SEQ ID NO: 83740 - RNA, 53 nt, Homo sapiens
gagcgacgcagaagacggggacgcaccacgagaaacggaagaagacgccccaa

SEQ ID NO: 83741 - RNA, 73 nt, Homo sapiens
gagccccgcccgcgccaccccaccccccggccggagaaggaacagggccacacggacccggggcgagcccccg

SEQ ID NO: 83742 - RNA, 72 nt, Homo sapiens
aggccaggggaacgggggagaaaggccggagacaagccaggaggcaagaaaccgggggacggggagagcacc

SEQ ID NO: 83743 - RNA, 79 nt, Homo sapiens
aagcacccggacgcaacgggaagaacaacggcggaaacccgagagcccacgcggaggcaacacccaaacgagcaagggg

SEQ ID NO: 83744 - RNA, 57 nt, Homo sapiens
ggaggggcgcggcgggagaaagagaggagggggaccagggggcgcccagccagggag

SEQ ID NO: 83745 - RNA, 72 nt, Homo sapiens
aaaacacacggaaaagacgcagccaagccaaaggcccggaacacgcagaacaacagaccaacaacagaacca

SEQ ID NO: 83746 - RNA, 77 nt, Homo sapiens
agggaggcccaagacccacaacaaaaggcgaagccaacccaccgccaccaccccaccagagacacccaggagacccc

SEQ ID NO: 83747 - RNA, 72 nt, Homo sapiens
gcaagggacccggccagcgacgcaccgagaaaggaaggaaaaccgacgaggaaaaagaagccagggaaagca

SEQ ID NO: 83748 - RNA, 84 nt, Homo sapiens
gacaaaggccaacccaccagacaggggaccgaggaagccacgcccccagagcagcagcgaaaacggccaacagcagggaagaac

SEQ ID NO: 83749 - RNA, 66 nt, Homo sapiens
gggcacggggaaccacaggagaagggaaaggaggacaaaaggaaaaaaaaaaagggaagacagaga

SEQ ID NO: 83750 - RNA, 89 nt, Homo sapiens
agccgcgaggaggcgcgggagggcgagaacgaccccgagacggggggcaacaacgccggccacacggggggggagggaaagagacgacc

SEQ ID NO: 83751 - RNA, 72 nt, Homo sapiens
ccagacgaaaagccggacccaggagaagaggggagagggaccacacagaaacgaaaagaagggcacagaaac

SEQ ID NO: 83752 - RNA, 54 nt, Homo sapiens
aacaaagacccggacccgaaagaaggcgcggagcgggaaagacacggagcaggc

SEQ ID NO: 83753 - RNA, 78 nt, Homo sapiens
cacgagcgaggccgcaggggagcccggcagccgcccggggcgggccacaagcgcaaaacaggcaaaaggaagcaaaac

SEQ ID NO: 83754 - RNA, 82 nt, Homo sapiens
gacgaccgcgcccagaagcgaagggagagcgccagagaaggccgagagcggcccaggaggaacaaccagcccacccggagag

SEQ ID NO: 83755 - RNA, 76 nt, Homo sapiens
agacaggaacgggacacacaaaccccaaccagggacaagggggcccccaaagggaagccaaacacaaaggaagaag

SEQ ID NO: 83756 - RNA, 75 nt, Homo sapiens
agcgcccaaagcccgccaccgagggggaccagagacacccgacccgaccacagcggaggagagagacgacagccc

SEQ ID NO: 83757 - RNA, 78 nt, Homo sapiens
acaggccacccaaggagaagaagaaaccgcagcaccagaacgagaaagcaaccggcagaccccccaaggggggaaaca

SEQ ID NO: 83758 - RNA, 66 nt, Homo sapiens
agagagcccagagaaagcacaaaaccaggcgccgagcggaagaaccccagccacaaagaggaaaaa

SEQ ID NO: 83759 - RNA, 60 nt, Homo sapiens
gacagaggcagacacagaaggccgacacccgcaccggaaagcaccggggaagaaaacagc

SEQ ID NO: 83760 - RNA, 78 nt, Homo sapiens
gcgacaccagcaggccggggcaggacacaacaagcagaaacacagcgagacgaaggccccgcagccgaccaaccgcag

SEQ ID NO: 83761 - RNA, 61 nt, Homo sapiens
ccagaggaagcccacacacgccagcagaccaccccgggagggaagaaggggggcaaaggag

SEQ ID NO: 83762 - RNA, 70 nt, Homo sapiens
caggaacacccaagacaaaaaggcaaaacccacgacaagaaggcaccgggacggaaagagagccgcagcg

SEQ ID NO: 83763 - RNA, 85 nt, Homo sapiens
agccaccggggagccaccgcccagcccaaaccaggagagcgagggagcgagcgggcagcgcgacaagggaggcgaggacggacaa

SEQ ID NO: 83764 - RNA, 71 nt, Homo sapiens
caaggagaagcaaacacgagaaccgaaaaaagggagggagggaacaaccaaagaacaaagaaggggacagg

SEQ ID NO: 83765 - RNA, 35 nt, Homo sapiens
gaaaccgcaaggcaagacgacagggaaagaagaac

SEQ ID NO: 83766 - RNA, 77 nt, Homo sapiens
gagcgacggcagcccccagcagacaacagggagaccccacgggacaccagcccaccggccgaggcggggccgaagaa

SEQ ID NO: 83767 - RNA, 75 nt, Homo sapiens
ccgacggccaagaaacccccaagagggcacaacaccagagcccaaaagaaacagggcgcaggaaaagacgagcca

SEQ ID NO: 83768 - RNA, 79 nt, Homo sapiens
ggcgccgacagaagagaggccgcgagcacccggcgaggccaaggccccaggacagacccccccggccacccccgccggc

SEQ ID NO: 83769 - RNA, 89 nt, Homo sapiens
acaccgagcagagagagagcccaagaacccaaaaggcaaaccgacaccagcgacacaagcgcgagggaaccacagaggacaggcgaggg

SEQ ID NO: 83770 - RNA, 61 nt, Homo sapiens
cagggcagaagaaagaagagagggaccggggaccgacgaaggggagcagaccggaagaccc

SEQ ID NO: 83771 - RNA, 78 nt, Homo sapiens
cacagaacaacagaagaggagagaggaacccgaagaagaaaggacgacagccagagagccgccaccacaaggccgcgg

SEQ ID NO: 83772 - RNA, 78 nt, Homo sapiens
ccggcccggcggcgcgccccgcggcgcccgcgccaggcaagccggaacggggcccaggagcaaggaaaagggccgcgg

SEQ ID NO: 83773 - RNA, 80 nt, Homo sapiens
gagccccccccaccagaggacgggaggagcagcaacaggcaagaacaacccaagaaggacagcgcgacagaaggacagca

SEQ ID NO: 83774 - RNA, 80 nt, Homo sapiens
caaacacagaggaagaccaccaggcagaggcaacagaggagcaacaaggagggagagaacagcacacagaggcgcaaggg

SEQ ID NO: 83775 - RNA, 109 nt, Homo sapiens
cccacaccaagcccgacgggcccccgggccgccccccccacgggcagccggggcagagaagacgggggagaaggcgggaagaggaaaagaggaagggggagaccccaaa

SEQ ID NO: 83776 - RNA, 62 nt, Homo sapiens
gcccggcaaggcgcccccaaaagcaccaaacagagaaagccaaggaagggaggaaggacagc

SEQ ID NO: 83777 - RNA, 81 nt, Homo sapiens
ccagagcaagcagcaggcgggacaagaacccaagaaacaggaaaaaacccaaaacaccaaaaggaccagcgagaagacaaa

SEQ ID NO: 83778 - RNA, 73 nt, Homo sapiens
acagacgaacacaaagcagaccaccacaggcaggacaccggggcgagcccggaggaaagacaaaccgacgaca

SEQ ID NO: 83779 - RNA, 77 nt, Homo sapiens
gcgcccagcagcaggcacaagacacgggagaggaagagcaagcggacaggggggagaaacagcccagcccccagcca

SEQ ID NO: 83780 - RNA, 74 nt, Homo sapiens
aagacgcgggcagaaaagcaagacagggcaaggaaacgcgaagcgaaaaccagccagacagaaggaccccggcc

SEQ ID NO: 83781 - RNA, 82 nt, Homo sapiens
gcgcccggggcacgggggacgcgggcgcgcagggaagacgggggcgcaggcgcgcagcgagaaccagccaaaacacacgaac

SEQ ID NO: 83782 - RNA, 60 nt, Homo sapiens
aacccagacccagcccgggcccggagcaggacagacccccaggggcgccgaccggaccac

SEQ ID NO: 83783 - RNA, 78 nt, Homo sapiens
aaggcacaccggacaagccaaagagaagcaggagaaggaacgggaaaagaccaaaaaaccaggccagagcaggagcaa

SEQ ID NO: 83784 - RNA, 77 nt, Homo sapiens
agcgacgacaagccccacaccccccagcacacgaaacgcaacgcgcccaagaggacagcgccagaaagcaaaacccg

SEQ ID NO: 83785 - RNA, 81 nt, Homo sapiens
ccgcggaggagggcaggagcgcgagaaggaaccgacggccacgccgccgaccggcaaggcaaaacccaaggcggggcgccc

SEQ ID NO: 83786 - RNA, 81 nt, Homo sapiens
aaaaagagcggagagagaagcaagaccccaccaacaacgaacgcggcaggcgcacaaggaaggaaggggcaaggggaaccc

SEQ ID NO: 83787 - RNA, 78 nt, Homo sapiens
cacaagggcggaccgcaggcaaaacagaccgcagcgaagcacagcagaaggggccacaagacagcacaaaaagaccgc

SEQ ID NO: 83788 - RNA, 69 nt, Homo sapiens
cggggggacaaaaggaacgcccagcccaccagaagaccgccaagaggccggacccaagaacccgcacga

SEQ ID NO: 83789 - RNA, 74 nt, Homo sapiens
ggcggacggcgggaccacaagacaacgcggagcggcgaagagcaaccagaccgaggaacgaagcaccggagaag

SEQ ID NO: 83790 - RNA, 70 nt, Homo sapiens
ggggggaagaggccaccaacacggacggcaggagcgcgaaccaccgcggcagaacggcggggccgaggac

SEQ ID NO: 83791 - RNA, 70 nt, Homo sapiens
ccgggcgggggcgcgccccgcgcgcagggaccgcccgaccaggagacgcggacagggggccagagcaagg

SEQ ID NO: 83792 - RNA, 39 nt, Homo sapiens
cccggacagagaggcgagacacacaggccccacgggccc

SEQ ID NO: 83793 - RNA, 77 nt, Homo sapiens
cggggacaccaacaggacccggcccaaaggacgccaggcaaaagaaggcacgaaggagcgaaggaagagacgggcca

SEQ ID NO: 83794 - RNA, 79 nt, Homo sapiens
gacaacagaggcagaaaaggggacacggcgggcagacaagggccgaacaccaacagaggaagaaaggagagccgcagaa

SEQ ID NO: 83795 - RNA, 73 nt, Homo sapiens
agccccggcacggcgccaaggaaacgaaagagcccagacacccaagagggccaagccagaaaacagaaacgaa

SEQ ID NO: 83796 - RNA, 107 nt, Homo sapiens
aaacccagggccgggacacggcaaaggggggcacggagcaacaggaaaggacgcgaaccccaaggggaacagaaaaggggaagacccggagacagaccagaccagac

SEQ ID NO: 83797 - RNA, 58 nt, Homo sapiens
gggaaaaagaagaaaagagcagcacccaaggaagaccgcaggaaagcaggaaggcaag

SEQ ID NO: 83798 - RNA, 69 nt, Homo sapiens
ccaggcacccgagaaaggggacgcagcgacacaagacaggcaagggcccgaacggcaggggaagaccaa

SEQ ID NO: 83799 - RNA, 79 nt, Homo sapiens
ggcgcgcccgcgcggcgcggggaccgcggcccggccaccccagagaagaggacgagagacaagacaaccaaaagggaaa

SEQ ID NO: 83800 - RNA, 70 nt, Homo sapiens
gcccgccagccaggccaccccgggaacggagacaaccaagggaaagaaaggcaaagcgagcaagagggag

SEQ ID NO: 83801 - RNA, 80 nt, Homo sapiens
agcaccacggaggacggagagccggagaggaggaaggagaagcccgggagcgcgcgggccggcggagcaaggagacggag

SEQ ID NO: 83802 - RNA, 74 nt, Homo sapiens
gcacggaaacaaagacggggagcaggaagaggaaacaggaagcccacgcacgcggaacacaccacagcacccca

SEQ ID NO: 83803 - RNA, 65 nt, Homo sapiens
gcggcggaggggcaggaggcgcggacacgcaaaccacacaagcacgacagccgaaggagaggagg

SEQ ID NO: 83804 - RNA, 84 nt, Homo sapiens
cccaggacaccccgaagccgagaaagcaccgagcgagagcgggcagcccagcagcagaaagaaaacagagaggacaaagagccc

SEQ ID NO: 83805 - RNA, 73 nt, Homo sapiens
cgcgcggggccgccgccagcggcggcccgcggcgcccgcacccgggcccgcaggccaggggccagaaggaaag

SEQ ID NO: 83806 - RNA, 79 nt, Homo sapiens
cgaacaacacacaaagcacaggaaagggcacgcggggggccaagcacgacacccaacagagcacacaacgacccggcga

SEQ ID NO: 83807 - RNA, 79 nt, Homo sapiens
agaggaggcccacaggcccgcccggacaccgaggcgcgcggccgcaagaaaaggacagacgcaacacaggaaacaagag

SEQ ID NO: 83808 - RNA, 48 nt, Homo sapiens
gagagagcaggggcccgcagggcccacccccgcaggacacaaaaggac

SEQ ID NO: 83809 - RNA, 60 nt, Homo sapiens
gacaccacaagaagggcgccagggccagagagggacaaggaaagcaaacaaacccagaca

SEQ ID NO: 83810 - RNA, 103 nt, Homo sapiens
agaaagaaagccgaaccacaggagaacagcaccaacgaggaggcagaagaagcgcgcaaagcacacagaaggaaccggcaaacacccccagcacacaagagac

SEQ ID NO: 83811 - RNA, 80 nt, Homo sapiens
gacgacggggcgagaccccgcccggaccgcagggacaacaagccgaaaacaaaaacacaggagagacacaagcggcaaaa

SEQ ID NO: 83812 - RNA, 68 nt, Homo sapiens
aacgcgcaagaaccagaccagcccaggcccacaggggcccccccacgaaaaagacacaagcacacccc

SEQ ID NO: 83813 - RNA, 80 nt, Homo sapiens
ggaaaaagggacggaaacggacagagaaacaccaggcagcagggggaaaagagggcagcagccaaaccacaagaagcaac

SEQ ID NO: 83814 - RNA, 71 nt, Homo sapiens
aacaaggcggcccacaaagaaccccggaaaaggagacagaagcgcaagaacccgacaagaaggaacaagaa

SEQ ID NO: 83815 - RNA, 78 nt, Homo sapiens
aaaaggggcggaggacacggggaaccaacagaagaagggaacccacccaccacccagggcacaacaccacagccggac

SEQ ID NO: 83816 - RNA, 82 nt, Homo sapiens
aacccaagaaaacaaaggcaccggggacgccaccggagaagggaggaaaaccaacaagccgcgaccgaaaacacagaaggag

SEQ ID NO: 83817 - RNA, 81 nt, Homo sapiens
gaggaccaacaccgcagacgaagggcgaggaaccaaagccccggcgcgcaacagaagaggagcggagcaggccaacgagag

SEQ ID NO: 83818 - RNA, 55 nt, Homo sapiens
ggacccacggagaagggaacgcggaaagaaaaacaccagcaaccgacggcagcaa

SEQ ID NO: 83819 - RNA, 52 nt, Homo sapiens
cccgagagcgggagcagaggaccgacgagccgcagggcggagagacaccaca

SEQ ID NO: 83820 - RNA, 77 nt, Homo sapiens
gagcggcgaaggcgggcagacgagcccgccgccgaccccgccaacagccagaagaagacaggcccagaacaggacag

SEQ ID NO: 83821 - RNA, 80 nt, Homo sapiens
ggcccacgcacacccaggaagaaaccccaccacgcggcaggggccgccgaggaaaaagcaacaagaagaaaaccaaacaa

SEQ ID NO: 83822 - RNA, 75 nt, Homo sapiens
aggaggaagccagccaggcccacgagaaggagagaggcgccgggggagacccaaccagaccagcggcaacgcacc

SEQ ID NO: 83823 - RNA, 87 nt, Homo sapiens
caaaagaccaagagcggaaggacaaagggcccacagaaggaaacgacgaagaaccagacaacaggcacaaagagagaaggaacaccc

SEQ ID NO: 83824 - RNA, 85 nt, Homo sapiens
gcgggagcgcggaacagcaggcccgagcccaccgcgccgggccccggacgccgcgcggaaaagagagggagagaccagaggcgcc

SEQ ID NO: 83825 - RNA, 81 nt, Homo sapiens
gccgccgcccagagacgcgagcccgccgccgccgccaccacccacccggacacagacaagcagaccggaagaccgacggaa

SEQ ID NO: 83826 - RNA, 73 nt, Homo sapiens
ggaaaaaagacacgagcagaggcccggaccccccgaccacagaccaggacacaggcaccagagcaacccaggc

SEQ ID NO: 83827 - RNA, 67 nt, Homo sapiens
cccagcccgcccccagaaaccagggccaaaggacgggagcacgaaagggggaggagacacgacagag

SEQ ID NO: 83828 - RNA, 74 nt, Homo sapiens
aaacccgacaggaaggaaggaaccaagcacccagggggggccgaagaagccagggggaggaaagcagacagacc

SEQ ID NO: 83829 - RNA, 62 nt, Homo sapiens
ccgagagcggagaagcccacaggacacagaacagagaagaagcagacgagacagaaaaagaa

SEQ ID NO: 83830 - RNA, 76 nt, Homo sapiens
cgcacgcagcagcacacacgagcgcgaccccaaggagcgcagggggagggcgccagagacgagaggcaagcagagg

SEQ ID NO: 83831 - RNA, 73 nt, Homo sapiens
cccagaagggagaccagcagaacccaccagacaggaagggaaggggcggagacgggcggaacgcaggaggcca

SEQ ID NO: 83832 - RNA, 65 nt, Homo sapiens
cgggagggaacaaaggaccggcacccccgcccccggagaaacaagaagaaacaggggcggcacac

SEQ ID NO: 83833 - RNA, 70 nt, Homo sapiens
gagaagacgacgcaccgcaggcagacaaaagggccaaagaagggagagaggaggaccagccaaaagagcc

SEQ ID NO: 83834 - RNA, 35 nt, Homo sapiens
accacgggcagaccacggagagacagggcgccggg

SEQ ID NO: 83835 - RNA, 38 nt, Homo sapiens
cccagcgccccgggcaaagcaggccacccacaaaccga

SEQ ID NO: 83836 - RNA, 67 nt, Homo sapiens
gccccaaacagacagacccggcacggggccaaaaaaggccggaaaggaaaaacaccagaacggaaac

SEQ ID NO: 83837 - RNA, 73 nt, Homo sapiens
ccaaaggccagggaagcaacccgaggcagagacagaggaagaggcagagccggggaaggcgcaaccccgacag

SEQ ID NO: 83838 - RNA, 67 nt, Homo sapiens
gaccaagagacggacgcaagccaaggccaggcaccggagcccgcaagggccgacccaagcgagcacc

SEQ ID NO: 83839 - RNA, 69 nt, Homo sapiens
cgaaggagaaaggggccacagaggccacgaggacaggacaacaacaccccacacaaagcggcaagagca

SEQ ID NO: 83840 - RNA, 74 nt, Homo sapiens
caaaaacccccggacagccgccgagagagacaaagagaggagagaggcgaccacgagggaaaaaggccaagagc

SEQ ID NO: 83841 - RNA, 64 nt, Homo sapiens
accagccagagcgccacggaccggaaagcggcacccgaccgacagcgcagcgacccgcgccagc

SEQ ID NO: 83842 - RNA, 78 nt, Homo sapiens
ccgcccccgggcaagcaacccgcccagccccaagagcgggacacaggcgggggcgggcgggggcagagcccagcccca

SEQ ID NO: 83843 - RNA, 82 nt, Homo sapiens
ggcgagcgcccggaggggagagagcggaggacagccgagaggagaccagagacaaggccccgagggaggagcccgaaggcgc

SEQ ID NO: 83844 - RNA, 84 nt, Homo sapiens
acagagggagccaggcagagccgcgccacaccgccccgacaccggcccccaaccccaccacccgcaccgacccacccacccacc

SEQ ID NO: 83845 - RNA, 73 nt, Homo sapiens
ggggaaaaagcacagacagccacagcggacggcccggggcgccggcacgggggcccccagagccagggcccgg

SEQ ID NO: 83846 - RNA, 82 nt, Homo sapiens
ggacacgggcggcgcggaagggagcgccagcaggccgggcgcagcggccacgaccgggcacgggacccaggacgagcgacca

SEQ ID NO: 83847 - RNA, 58 nt, Homo sapiens
agaggggagaccaaagagagcggcgagccagaggccaacgcagaggaacggaacagag

SEQ ID NO: 83848 - RNA, 68 nt, Homo sapiens
caagaaacagagcaaaaaccggaaagggagaagcagaccgcaccaggcgggaccccgaaaaagcccaa

SEQ ID NO: 83849 - RNA, 77 nt, Homo sapiens
gcagagccggaagcggcaggccacaaagccacagaagcgaaaccacaacacccaaaagcaaggaagaccacggacga

SEQ ID NO: 83850 - RNA, 57 nt, Homo sapiens
aaaaccagcgggacgcacgagcaacccaggcccaggccaagaggcaaaggagaacca

SEQ ID NO: 83851 - RNA, 98 nt, Homo sapiens
cgcggcgcgcgcccagcgccgccccgcgcgcgcccgccacggcgccgagccgcggccgagaaacagaagcgcccagaggaccgcccgagcagaccccg

SEQ ID NO: 83852 - RNA, 81 nt, Homo sapiens
aaaagcaagcgcgaaggggaggaagaaaagccagagccgggccacggggggcgggccaggggcccggacagcagagcgggg

SEQ ID NO: 83853 - RNA, 39 nt, Homo sapiens
cgccacccgcccagcaaagaacagccaccaaacccacgg

SEQ ID NO: 83854 - RNA, 76 nt, Homo sapiens
acgggggacaacaggacgaagagaacgcccgggaccgagcacccgccccgggcaccaacgaagggcgcaggaggag

SEQ ID NO: 83855 - RNA, 79 nt, Homo sapiens
gccaagggagccgcgcaaaggccccggcaagaaggagggagccaggagcgcgggagcgaaggccagccacacgcgcacc

SEQ ID NO: 83856 - RNA, 104 nt, Homo sapiens
gcagcgcagggagccagccgaaaaccagaccgcgcaacgagcgccaaacaagcagaccagcccacaccggccaagcgaccagagccacagaacaaaaccaccaa

SEQ ID NO: 83857 - RNA, 74 nt, Homo sapiens
ggccgcgcccgggagcggcgccaggccggagcgcgacacggagacaggggcagggagcagggagcgcaggcaag

SEQ ID NO: 83858 - RNA, 78 nt, Homo sapiens
aggggcaaaaccccgagaagcagcgggccccagccccaccggagccgaaggggagaaagaaggacgagaagggcggcg

SEQ ID NO: 83859 - RNA, 79 nt, Homo sapiens
ggaacacagaggaggaagccagaacgaggacaccacaggccacaaaaaacaggcaccgggccgagacgccgggccaacc

SEQ ID NO: 83860 - RNA, 61 nt, Homo sapiens
gccgacccgcggagacagacaagacaagaccggcggggaagcgagaaggagaaagcagcaa

SEQ ID NO: 83861 - RNA, 68 nt, Homo sapiens
cggaagcacaaccacggaagccccagcccgagcgaagagaggaaggacaggacaagccaaggcgccag

SEQ ID NO: 83862 - RNA, 93 nt, Homo sapiens
ggggggcaggggccaccccaaagaccgaaggagggaaaaagcggggaaaacaaaaaaaagaaggagggaagagggggccaggaccaggcccca

SEQ ID NO: 83863 - RNA, 78 nt, Homo sapiens
gagccacccccgaggaggccaggccccccacggagcaggaggccaggagcacagaaacacccaccaggagccaagcag

SEQ ID NO: 83864 - RNA, 74 nt, Homo sapiens
cgcacagaaaaggaggcgcagaccgccgaacgggggaaacagggcaagacagaggaagaaaaggaagagcaagg

SEQ ID NO: 83865 - RNA, 83 nt, Homo sapiens
aggaggaagagggggcacccagcacacccaagacgcggcaacagggccccacgaaggacggccagcgcggcagggaggagaga

SEQ ID NO: 83866 - RNA, 68 nt, Homo sapiens
cccgacccagcggcagcggagccagaaagcagcaaaccgacaccagcgacacaagcgcgagggaacca

SEQ ID NO: 83867 - RNA, 71 nt, Homo sapiens
gcagaagacagcgccaccgcccacacggccacagcggggaagccgcagaaagcaacaaagcgagagcacaa

SEQ ID NO: 83868 - RNA, 40 nt, Homo sapiens
gccaccggggagcgaacacaggggggcggccggccgcaga

SEQ ID NO: 83869 - RNA, 59 nt, Homo sapiens
ggaaaaggaaaccgcccgcccccagggaaccgagcaagggggcgagaggggaacgccac

SEQ ID NO: 83870 - RNA, 82 nt, Homo sapiens
gcgagcgcgccgcccggagccgcgcacacgcgcaggaagacaggaacaagaaaaagaaggagaccgaagcaagaagcacaga

SEQ ID NO: 83871 - RNA, 70 nt, Homo sapiens
cacaggaggagaaggcacggggagaaggccagcggcccgggagggaacaaagaggaacaggccaaaccag

SEQ ID NO: 83872 - RNA, 79 nt, Homo sapiens
accaaaaagcagcggacagcacaaggaaccacccgcggcagaggggaaggaacaaagcagagaaaccaaaaggccagac

SEQ ID NO: 83873 - RNA, 89 nt, Homo sapiens
cgcgcagcccagcgcagccagggaggggcgaccccggggcccggccagcacgaccgaggaggggcggacagcggaggagaacggagaag

SEQ ID NO: 83874 - RNA, 87 nt, Homo sapiens
ggaagcggcggcgacgccggcggcgccggggcggcgaggcgcgaggagcagcgcacaagagaaggagaggcacaaacaaaacagacc

SEQ ID NO: 83875 - RNA, 66 nt, Homo sapiens
cacccaacgcaagcaacaagaccacagggaaagaaggcaggcgaccgaaagagcgaaaaccaggac

SEQ ID NO: 83876 - RNA, 76 nt, Homo sapiens
ggaaggaggagggcccacggaaagaacaagcaccggagagagagcaccagcggcaagcgcccacccagcacaagga

SEQ ID NO: 83877 - RNA, 77 nt, Homo sapiens
ccggagcgaggggcggaccgcgggcgcccacgaccagacaggaagagaaggaagaagagggcacagccaggaaccac

SEQ ID NO: 83878 - RNA, 77 nt, Homo sapiens
gaagcaagaagacaaggagcagagacaggccaagggaacacggcgacggcggcccagacaccccgagcagagcaaac

SEQ ID NO: 83879 - RNA, 84 nt, Homo sapiens
gaggcacccaaccgcgggacaagacccaggaacgggaacgcgggaacgcagggagaggaggaacgggagaccaaggaaagagga

SEQ ID NO: 83880 - RNA, 84 nt, Homo sapiens
ccacgacgcgcacaaagcaggagcaccgaggccaaggagaaagacagcaaagaaaaggagaagaaaggaaaaaaacaaccccgg

SEQ ID NO: 83881 - RNA, 58 nt, Homo sapiens
gggacccggacaaccagaggcagccagcagggggagagaagcagagagagagaccaga

SEQ ID NO: 83882 - RNA, 73 nt, Homo sapiens
gcccggcgcgcgcggcccggccggcccggcgccccagacggcaccaggacaagcgagggagacacgggcggaa

SEQ ID NO: 83883 - RNA, 79 nt, Homo sapiens
ggaccaagaaccagaccaaaagccccaacagcggcaagaccagcacacagaggccagagcacccagcgcagcagcgggc

SEQ ID NO: 83884 - RNA, 82 nt, Homo sapiens
cggcacagcggagggagcgcccgggggggggggaccgaggaccggaagaagcagaggagccagacaggaggaagacgagaca

SEQ ID NO: 83885 - RNA, 73 nt, Homo sapiens
ggaaccgacagcagaagaagggcgagccgagaaccaaaggagggggagcgaggccaggggacgaggagagcga

SEQ ID NO: 83886 - RNA, 77 nt, Homo sapiens
cgaccgagccccgagaaccagcgcgacgagggcgccgccgcggccgccccaggggaaggcgcgagccccgcgcgggc

SEQ ID NO: 83887 - RNA, 80 nt, Homo sapiens
cgcacaagagccaagaacaagggccgcgagggaagcagcggaggaggaaaggcaggccaacaaccgcacgccgcggacac

SEQ ID NO: 83888 - RNA, 78 nt, Homo sapiens
ccccccccaaaccgagccaaaagcggcaaggcaacaggaggagaaaggacacgcaaacagacaagcagaaggagacca

SEQ ID NO: 83889 - RNA, 74 nt, Homo sapiens
cgagaccggagcgccagggccacggcccaccacccggaacacaaggcccgaggagaggagcaccaacgggggaa

SEQ ID NO: 83890 - RNA, 92 nt, Homo sapiens
ggggaacaacaagaccagcgcaaaagcagaggacaagagggacggcagagcaagcggacagacaccagcccgccgccccggagccccgccac

SEQ ID NO: 83891 - RNA, 78 nt, Homo sapiens
ggaaaaaccaggagacacaaacagaaaaggaagaaagggacaaagagaggagcagcaacaaaggccaggggcagcacc

SEQ ID NO: 83892 - RNA, 78 nt, Homo sapiens
ggagacaggcagggaagagagaccagaaaggacaggacggcggagaaggaacagaacagacaccaccgaaacgcgcca

SEQ ID NO: 83893 - RNA, 82 nt, Homo sapiens
ggccgagcaggcgagcgaacgacggcgggagcggaaaggacgaagaaaggagggcaggggaaggggaggaaggcaaacgagg

SEQ ID NO: 83894 - RNA, 80 nt, Homo sapiens
gcagaaccccacagcaagaggacggagaggagccaagcccaacgggacgggaaaacggccacagccaacgacgcagcaga

SEQ ID NO: 83895 - RNA, 99 nt, Homo sapiens
gcgggagacccgggaggggcggagggcaagagcgccgaccgggcggcgaggaaggcgccccggcgagggaaaaggccaaccaagcggagagcaaaagag

SEQ ID NO: 83896 - RNA, 74 nt, Homo sapiens
cggcagcacacaacaaaacacaggagggggaaaaaggcgaaggcgcgaaagggccagagagcaaggagggaaca

SEQ ID NO: 83897 - RNA, 53 nt, Homo sapiens
aagaagcaaagggcaaccagggaaacaggagagcacaggagggagcaggaaaa

SEQ ID NO: 83898 - RNA, 87 nt, Homo sapiens
accgcgcgaagcggccaaagccgcccagacggccaccggcgggaggaacaaaagaaccaccaaccccagccgccaaccagagacgac

SEQ ID NO: 83899 - RNA, 66 nt, Homo sapiens
gaaggaccaagaaccaggaagagagaaccccaccgagacccgacaaggacagacgggccggcccca

SEQ ID NO: 83900 - RNA, 63 nt, Homo sapiens
aaagagacccacagccagcaacaccgacaagggagagacagagcgacagagagaaaacacgag

SEQ ID NO: 83901 - RNA, 68 nt, Homo sapiens
gacaaaagggccaaagaagggagagaggcaggccggagcgcgagaggcgcccgcacggccccccaccc

SEQ ID NO: 83902 - RNA, 37 nt, Homo sapiens
gcccaccggacacgacagcacccaagaaaacccaggc

SEQ ID NO: 83903 - RNA, 75 nt, Homo sapiens
caccaaaaacaaaacgaaccaggacggcaagcaaaagacgcgggcaacgaaaagaagacgagaggcaccagcggc

SEQ ID NO: 83904 - RNA, 36 nt, Homo sapiens
cccggaggaggaagaacgccgcccaacaaggcgcac

SEQ ID NO: 83905 - RNA, 87 nt, Homo sapiens
cagcccccaggaacagggcaaaggagagcacaaccacgcagggaagcccaggggcaggaaagcaacccaccacaagacaaagaccac

SEQ ID NO: 83906 - RNA, 79 nt, Homo sapiens
cacggacccgacagaccgccgagcagacaagcccgggccaggaacaccgcagacaagaccagccagacaaacaaggcca

SEQ ID NO: 83907 - RNA, 55 nt, Homo sapiens
aacacccgggaaaggaagcgcacaggaagccggaaacggaaagccgcagcgggga

SEQ ID NO: 83908 - RNA, 53 nt, Homo sapiens
cacacagggggacggcagaaaggagcacagaccaacagaaaacagacgacggg

SEQ ID NO: 83909 - RNA, 78 nt, Homo sapiens
cgcccagcagccggcgcaggccagagagggcccgggaagagagcgaggagacaaggggaaccagaccgggggcggagg

SEQ ID NO: 83910 - RNA, 35 nt, Homo sapiens
aagaaccgacccacaccaagccgaaaagacgaggc

SEQ ID NO: 83911 - RNA, 69 nt, Homo sapiens
cagccggagaaggagcccacaacaaccacaggccccccacccggcgccccgggccagcgggacaccagc

SEQ ID NO: 83912 - RNA, 40 nt, Homo sapiens
aagaacgggcaaggaaacaggacagaaccaggcggaagag

SEQ ID NO: 83913 - RNA, 72 nt, Homo sapiens
agagggaaagcacaagcggagcccaacgaaaccgaacaggaggggagacaggaaagcacacagacaaaccac

SEQ ID NO: 83914 - RNA, 65 nt, Homo sapiens
agaagcccggccggaacccggagaaagagagcgaaccaggggagcggagacaccacgggcagcgc

SEQ ID NO: 83915 - RNA, 92 nt, Homo sapiens
gagacggcgggagcccagagagaacccgggagaaaggcggagaagagaggccagcccaccagggcaagggcccgccgccacgagccgaggcc

SEQ ID NO: 83916 - RNA, 76 nt, Homo sapiens
gcagcgccggggccgccgaccaacacccgaggcggacgcagagacagggggaaagcaggggagaaaagaaaagaaa

SEQ ID NO: 83917 - RNA, 82 nt, Homo sapiens
cgcgcgcaccccagcggagccaagccccacgcggccggacagggccgccgcgccgggaggcagcacggcaggagacgaggag

SEQ ID NO: 83918 - RNA, 81 nt, Homo sapiens
gcgagggcggcccggggcacccgcacgggaagcaggcccgccacaggagggacagacagcaaagaagcaaaggaaagcgaa

SEQ ID NO: 83919 - RNA, 78 nt, Homo sapiens
gagaacacaggaaaacaacaccagggcaagaaggccggaaaggaaaaacaccagaacggaaacagaaggacacaccag

SEQ ID NO: 83920 - RNA, 86 nt, Homo sapiens
gacccgagcccagcagccgcccacccagccagcacacacgaaagacaggaaacagagcggaaacagacacccaccacaagaaggac

SEQ ID NO: 83921 - RNA, 71 nt, Homo sapiens
acaccaggacgcgcagcggcaggggagcgggccaaaaagagagaaaaaccagaaagaaaacagacgggaga

SEQ ID NO: 83922 - RNA, 86 nt, Homo sapiens
cagaccagacaagagagcgacaacagggccgaagaggaagacgccgcgcaaagagggcgaagacaggacggcccaggcagacacgg

SEQ ID NO: 83923 - RNA, 71 nt, Homo sapiens
aagggccaacccaacagcacagaggacagggacaagcgcacagcggagaaagcagcgcggccaggaggcgg

SEQ ID NO: 83924 - RNA, 83 nt, Homo sapiens
ggaggcagagcggcgccagggaacccgagcgcagaggggaagcagaggacccaggcgaacagcaaggaggggacaaaacaggc

SEQ ID NO: 83925 - RNA, 71 nt, Homo sapiens
aggagcaggcgccagcaaagagaagggaaccgaaccaagggaccaggaggagaagcaaccagagaggaagc

SEQ ID NO: 83926 - RNA, 75 nt, Homo sapiens
gcgcgccccgccgccgccgagccgagccccaagagagagaggccgcagaagggcagaagaacaggccgggcacaa

SEQ ID NO: 83927 - RNA, 83 nt, Homo sapiens
ggcggggagaccccgcaccaggacagcgggaggaacaacagaagccagcagcacaggcggaagaaggccccaccagaacccaa

SEQ ID NO: 83928 - RNA, 73 nt, Homo sapiens
gcaggaaggccaccgagggaacccgaccggacccagccccagaaggcaggggaaaggaagggagcagcgaagc

SEQ ID NO: 83929 - RNA, 82 nt, Homo sapiens
accccacacccgcaggaccgcaggcgggcgccgcgcgagccacccagcgagcacgagaagaggccggccccacggccaccac

SEQ ID NO: 83930 - RNA, 67 nt, Homo sapiens
caggaggaagcgaggccagacagcaagagcacccgacccacaggccagagaggccacaaacgaacag

SEQ ID NO: 83931 - RNA, 64 nt, Homo sapiens
gcggagcaggacgcggaacacccagaggccagcacaacagaacgggaggaaccgccgccccgag

SEQ ID NO: 83932 - RNA, 75 nt, Homo sapiens
gaagcacaggccagggcagaggaccaacagggcagagagcaaggggagaagcagacccgcgccgaccgcggcccc

SEQ ID NO: 83933 - RNA, 78 nt, Homo sapiens
cggaccagaagccagagcgaggacgccggcagacgaggagcgccaggaaagaggcagagacgaagcagaagcgaggca

SEQ ID NO: 83934 - RNA, 69 nt, Homo sapiens
gcaaacggagccaggcacaagaaaacaagcccgagaagcaagaccgccccaaaaagcaagaaaagaccg

SEQ ID NO: 83935 - RNA, 79 nt, Homo sapiens
cccccgggcgggagagacccacggccacggccagaggaccccaagaagagccaggagccaacacacgcccggggagacc

SEQ ID NO: 83936 - RNA, 72 nt, Homo sapiens
ggcggacaggaggagcagaggacacgaaaagaagcaagaagcaggcgaggagcaggccccagcgccaaggga

SEQ ID NO: 83937 - RNA, 98 nt, Homo sapiens
acggggacacaccacgggccacggccacccaagcccagggcggaacgggccccgaacccgggcaccccccccccggcccgaccgcccgcggccggacc

SEQ ID NO: 83938 - RNA, 74 nt, Homo sapiens
gaagccacgccagacggagaaaggcaacagagaagcggcgcggagggaaaacaccgggaaaggcccaaaccggc

SEQ ID NO: 83939 - RNA, 92 nt, Homo sapiens
gcgggcgaagggagcggagcacgggcaaggcggagaggacggagcggcgagcccccgcggcgacagggaccagaagcagcagccccagaagc

SEQ ID NO: 83940 - RNA, 81 nt, Homo sapiens
gcaaacgccggacagccacaaagacccccagacacacacacccaacccaaaccaagaaaaccgagaaaacgggacaaagag

SEQ ID NO: 83941 - RNA, 71 nt, Homo sapiens
cagagagaagaaaacaggagccccagcgccaccgccgaccgaagccgcaaaagccccgaggcaaagcccaa

SEQ ID NO: 83942 - RNA, 77 nt, Homo sapiens
ccccggcgcgccgcggcccggagcgcggcccgaggcccgcccagaggcaaaagcagaccggaaaacccaccggcaag

SEQ ID NO: 83943 - RNA, 73 nt, Homo sapiens
aacgcaccggcaggacgcgagggacagaaggggaacagagccacccgccgggggaacgagaacaccagggaga

SEQ ID NO: 83944 - RNA, 77 nt, Homo sapiens
acaaagggaagagccggccaaaaaacaacaaggaagccagcccacaaagcccgagcagccacaaacacgcagaacaa

SEQ ID NO: 83945 - RNA, 84 nt, Homo sapiens
cacacaccagacagcggccaaggagcgcaacgaggagggaggaggcacaccgagcccgagaccgggaccccaaacccagcggac

SEQ ID NO: 83946 - RNA, 69 nt, Homo sapiens
aacacaagagaaacaggccaccaagccaaaacgacgaaaaggcccaggccggcggaaaacccaccgcca

SEQ ID NO: 83947 - RNA, 84 nt, Homo sapiens
cgagagagcagcaagcgaggggcagagaggggagggagaagagaagccggccgagaaacggcacaggcgcgaacaccaaggggc

SEQ ID NO: 83948 - RNA, 76 nt, Homo sapiens
agcagcggggggcaaaccagccccaaagcggacccaaggggccgaagagcaaggagaccagggaccgacggggcgg

SEQ ID NO: 83949 - RNA, 87 nt, Homo sapiens
ggacacacccaggaagcagccagaccaagaacaaccgcggacacggagaggaagggagccaaggcgagcgcaacagcagggacaaaa

SEQ ID NO: 83950 - RNA, 74 nt, Homo sapiens
gggaggaaagccacagcgggaggaccgggaaggcaggaagcacagaagggacaagcccaaacaggaagacagga

SEQ ID NO: 83951 - RNA, 56 nt, Homo sapiens
cccgggggcccagcgggcgccgcgcacgcgggggccaaagggcgagggcacaaaaa

SEQ ID NO: 83952 - RNA, 82 nt, Homo sapiens
cgcccgcaccccggggcccaggaagggcggcccaggggcgacggagcggccaagagcgggacagcagaggacaagacggagc

SEQ ID NO: 83953 - RNA, 72 nt, Homo sapiens
cagcagaagaagagaggagggagaacacagaaaccggccccaggcaggaagaggagaggcggacgcagggcc

SEQ ID NO: 83954 - RNA, 72 nt, Homo sapiens
gcacgcgcagggagaccagcaaccagacaccaagacaagcagagaggcagaacgaaaaacaggcggcgagag

SEQ ID NO: 83955 - RNA, 77 nt, Homo sapiens
gagcgcgcagcccgcgccccccgcccccccaccgacacagcccagccggagggagaaaacgcaggacacaaggaaga

SEQ ID NO: 83956 - RNA, 67 nt, Homo sapiens
aggaccaagaaccagccaaagcgaggccaggaacgacacaaggggaagcgaaaccggagaaggacac

SEQ ID NO: 83957 - RNA, 78 nt, Homo sapiens
cgagaccagccggcaacaggcagaggcaccagcgcggggcagcgccaggacacgccgaggacaagcccccccacggcc

SEQ ID NO: 83958 - RNA, 77 nt, Homo sapiens
cgagacccagaccagcaggaaggaaagcaggcaggagggagagcgccgaagaaccaccccccgccccgggcggggga

SEQ ID NO: 83959 - RNA, 70 nt, Homo sapiens
cacccagcagagacagcaaccggccacgaggaggggcaggaagggagcaggaaagcccaaaccagcagaa

SEQ ID NO: 83960 - RNA, 77 nt, Homo sapiens
ggacccaaacagggccagaagcggagagagcggagcagaagagcgcccccgccgaacacgccgcagaccagcaaaga

SEQ ID NO: 83961 - RNA, 89 nt, Homo sapiens
aggccgcaaaccaaggcaccgaaggcggcccacacagcggaggcgacagacacagcaccggccccggcagcgggacgcaggacggcagc

SEQ ID NO: 83962 - RNA, 72 nt, Homo sapiens
aagagaaaaagagcaccaccagggaccggcaaagaccagaacaccccagaagcagccaaggagaccgggaga

SEQ ID NO: 83963 - RNA, 78 nt, Homo sapiens
ggagaaacgcccgccccgggaggcgcggaggcagaagcaccagaccgccaagggcggccacaaaagaagacccaaagc

SEQ ID NO: 83964 - RNA, 74 nt, Homo sapiens
acacagcaaagcaaccaccaggcagagacagccaacaaaaacaggcgagcgcaggacaagcgagcacaaaagac

SEQ ID NO: 83965 - RNA, 73 nt, Homo sapiens
agcgacagcccgggacaccaagaaagaacaaaagagcacgccacgcgggaaaacagagccagaaaccgaaccc

SEQ ID NO: 83966 - RNA, 83 nt, Homo sapiens
ccagggcccgcgggccaggagagcgccggcgggcgccgaccccgacagaacgggccccgcacccgcggccccggggcagcgga

SEQ ID NO: 83967 - RNA, 58 nt, Homo sapiens
gcggcccgggcggcgacggagcgacgaacggcagcgcggagggggccgcacggaggac

SEQ ID NO: 83968 - RNA, 71 nt, Homo sapiens
acggagacggagagggaaagacagggccaagagcaaacgagacggaagaaaaaaccgacggcccgaaccac

SEQ ID NO: 83969 - RNA, 88 nt, Homo sapiens
ccggcagggcggagaggagcggccggagcagcgagggcccggcgaggagaaccaacggcccgaaagagaaaaacacggccagaggaag

SEQ ID NO: 83970 - RNA, 80 nt, Homo sapiens
acgcagggcgcccccggccccggggcccggccccggagaggcccaggagcagcggagcggagcgcagaaaccaggaaggg

SEQ ID NO: 83971 - RNA, 63 nt, Homo sapiens
gaaagaggagacgcagccgcccgggcgcaagaaagaagagcggccgaacaaagggaggagcca

SEQ ID NO: 83972 - RNA, 66 nt, Homo sapiens
gccgccacagggaaccagcaaaggccgaagcccagccggcagaggggcaagacgccaagagaaaag

SEQ ID NO: 83973 - RNA, 71 nt, Homo sapiens
cagcgaaaaacccgaccccccaagcagacgaacccagaggaagacagagggaaacaggagcgcacgacaac

SEQ ID NO: 83974 - RNA, 119 nt, Homo sapiens
gcccaccgaaggacgggccacgggcccgcgacgcgcagccacgcaggagaccagagaagacagcaagaaagcaccagccaagcagaagggagccagcggacgagggcgccaggccaggg

SEQ ID NO: 83975 - RNA, 74 nt, Homo sapiens
caagaacgggcaacaaaggaggcaaggagcacagaggggcgcaacaggaaggagaacaccagaagcggaggagg

SEQ ID NO: 83976 - RNA, 39 nt, Homo sapiens
ggaccacaagacccacgacaggggaagggggccagacaa

SEQ ID NO: 83977 - RNA, 73 nt, Homo sapiens
gaagaacccacaagagccccagaaaagagcagcgagccaagcaagacaagagcagccgagcggacaccgaaaa

SEQ ID NO: 83978 - RNA, 91 nt, Homo sapiens
ccagggaggcaggggcagaaacagagaaggaacagggaccgagggggcaaccgggcgcccccaggccccaggccggcaagacgacccccga

SEQ ID NO: 83979 - RNA, 84 nt, Homo sapiens
ggaggggaagcggaacagccagaaggacccgaaaccagcccacgccaggcaagggaagagcaagaagagacgcgcaacgagggg

SEQ ID NO: 83980 - RNA, 52 nt, Homo sapiens
cacacccaagagaagcccgcggagagaaagggacccacggaacagagccggg

SEQ ID NO: 83981 - RNA, 80 nt, Homo sapiens
cagaccagagacagaagcagaggacgccagaacaaggcagaccaaccaccccaccgggccacgacagccaccaaaccggg

SEQ ID NO: 83982 - RNA, 50 nt, Homo sapiens
ggaggagaaagacccgcacaaacaaggggcggaggaaagcgaagggggcc

SEQ ID NO: 83983 - RNA, 73 nt, Homo sapiens
ggcgagaagaagcaggaaaaagcgacggaccgcgcaagccccagacgagggcggaaagagagcgcagaaaggg

SEQ ID NO: 83984 - RNA, 60 nt, Homo sapiens
gcgcgggcgcgacacgcgaggacaacaggcagagaagaaggcggcacgagcagccaagga

SEQ ID NO: 83985 - RNA, 61 nt, Homo sapiens
caagaaaaaggcaggaacaaccacaaggcaaaagcagaccggaaaacccaccggcaagacc

SEQ ID NO: 83986 - RNA, 75 nt, Homo sapiens
acggccggcgacccacccgagggggcaggggccgaggacgaacacggggagaggagccaggaagagacaagcaac

SEQ ID NO: 83987 - RNA, 68 nt, Homo sapiens
gaaagagggaagccacaaggaaagcgaggggcacgagggagaggccgagaagaaacagggaacggagc

SEQ ID NO: 83988 - RNA, 81 nt, Homo sapiens
ccgaccccagccagcacagccaggccagcgcggcgccagcaacaacaccagcaaaagagccaacacccaggccaggccgcc

SEQ ID NO: 83989 - RNA, 89 nt, Homo sapiens
cccccgagcccggcccgagccggccgaaccagacaggcgaccccgcacacacacccaccagccacggcagcccagcggggacccagccg

SEQ ID NO: 83990 - RNA, 78 nt, Homo sapiens
aaaacggcacacccaccaagcacccaacagaagaagaggaacgaccagcacaagaagacagccgaccccagacaccga

SEQ ID NO: 83991 - RNA, 67 nt, Homo sapiens
agagcgagggaggagagagggagagccaaagaagaaagggggaacacagaaacaaagcacacggcga

SEQ ID NO: 83992 - RNA, 56 nt, Homo sapiens
caagacacagccgagaaggcccgaacaagacaggaacgccggcccggacgggagcg

SEQ ID NO: 83993 - RNA, 70 nt, Homo sapiens
aggagaacaccgaagacaagcccaaagaaagggggacggaagcggcagcgggcagccggcccagcacagg

SEQ ID NO: 83994 - RNA, 77 nt, Homo sapiens
gggaacagaccgaacacccagcaccaggacccccgccaccccccaccccgaaagcgccagcgggcgagaaggagagc

SEQ ID NO: 83995 - RNA, 77 nt, Homo sapiens
ccggcaccgccaccccacaggcccccaccaggccgcggcagccaaaagcgagacaagacgaaaggacgccacaagga

SEQ ID NO: 83996 - RNA, 78 nt, Homo sapiens
gcccccaaagcgggaacagccagacagccgcaacacaagggcgagggccagagcaagagagcaccagccgcggacagc

SEQ ID NO: 83997 - RNA, 71 nt, Homo sapiens
ccggagcgcggcccgaggcccgcccagagagccacaaccccaggaaggcaccggaaaaaccaaacaaagaa

SEQ ID NO: 83998 - RNA, 76 nt, Homo sapiens
ggcagggcgaggaacgccgccaacacgaaggagcccagcaaagaaggccaagaagacgacacaaaaggagcaccga

SEQ ID NO: 83999 - RNA, 77 nt, Homo sapiens
agccggccagccacgcagcaccaggccagcccgaagacacaccagaagacaccaccggacacaaaccccaaccccgg

SEQ ID NO: 84000 - RNA, 78 nt, Homo sapiens
cacaaaaacaacaaggccaccaaacgagagcagccaacggaaacaagggggagcggaaagaaccaagacggaggaaag

SEQ ID NO: 84001 - RNA, 77 nt, Homo sapiens
aaaagaggcgggacgcgaacacagagggaagagaaagcaaacgagcagggcaaggaacaagacaccaagggaaggaa

SEQ ID NO: 84002 - RNA, 75 nt, Homo sapiens
cagccccggccccggcccgccggagaaacaggcccccggccggaaaaacccgggccggaaccacaaggaaaagcc

SEQ ID NO: 84003 - RNA, 79 nt, Homo sapiens
agcgggccggaaggaaaaggggacggagcacaaacggaggaaacgacaaaacggcacccggccaaaaacggagaaacca

SEQ ID NO: 84004 - RNA, 73 nt, Homo sapiens
acaaaccgcacgacacaggaaaggacaaaaccagaagcaggggacacaaacggcaaagcacagagccaagaaa

SEQ ID NO: 84005 - RNA, 34 nt, Homo sapiens
gcaagaaagggaaggggccagccggcgccccgcc

SEQ ID NO: 84006 - RNA, 70 nt, Homo sapiens
gagagagcgagcgagggggggcgcgccggaaaccggagcgcgcagcagcggccccggaggcggcagcagg

SEQ ID NO: 84007 - RNA, 77 nt, Homo sapiens
cgggccccgagcgcccgaacagggaaacacaaagaagacaccagaagggccagcaccacgacaacacggcgacagac

SEQ ID NO: 84008 - RNA, 84 nt, Homo sapiens
cgggaccccagcggcggaccccccgggaaccagccacggggagccaggaacgaaacccaagagccagaggcggcaggaggagcg

SEQ ID NO: 84009 - RNA, 80 nt, Homo sapiens
ccgcagcagcaccggcggcccacacccaccgccaccgcgcagaacgacacccgcagacagccagggcggcgggccgagaa

SEQ ID NO: 84010 - RNA, 82 nt, Homo sapiens
cgggacaacaaaagagccacccaagagagaacaagagagcgacgggagcagcccaggcccaggcccacgccacgaccccagc

SEQ ID NO: 84011 - RNA, 59 nt, Homo sapiens
cgcggcgccggggcggggcccaggagacggaggacccaaggccagccagccccaggcac

SEQ ID NO: 84012 - RNA, 57 nt, Homo sapiens
gacagccccgaggcggaagaggaacaaggagcaggcggagaacggaaaagcaccagg

SEQ ID NO: 84013 - RNA, 69 nt, Homo sapiens
gaaggaccaagaaccagcccaaaaggaaccagcccgagacaagagaggaagccagccgccacaaagaac

SEQ ID NO: 84014 - RNA, 73 nt, Homo sapiens
gcagacgccccccccggccagccccgggcgcgggacagggggacagcagcaccagaaccaaaaagccacaaca

SEQ ID NO: 84015 - RNA, 60 nt, Homo sapiens
ggaccgagagaccgcgacacgggggccagaaggaaagcaaggaagaaggagaaagacaaa

SEQ ID NO: 84016 - RNA, 107 nt, Homo sapiens
aaggccaaccaggagagcggacccagacgggcgcagccagggcccggaaagaagagccagagaccaagagcccagagaacagagcgccccaccgaagagccccagac

SEQ ID NO: 84017 - RNA, 77 nt, Homo sapiens
gaaccggccagccagggccgggccgcgaccggccccggagcacagaagcccggggcggcgacggagcacgacccaag

SEQ ID NO: 84018 - RNA, 70 nt, Homo sapiens
accgggacagagccaaaagaagaccgggaaccaaccaaccgaagacaagaccaggaagaggaaggacaac

SEQ ID NO: 84019 - RNA, 54 nt, Homo sapiens
acgcggaaaaccgacacaacagagggcggaagccaccaaaaccagggaaacagg

SEQ ID NO: 84020 - RNA, 83 nt, Homo sapiens
ggcgcagcgccgaggcgggcgaggcgccgcggaccagaggcgccgaggccgcgacagccaccaaagcagcgcggacaagaaaa

SEQ ID NO: 84021 - RNA, 48 nt, Homo sapiens
cgaaggcgacagagacagggaaccaaaaggaagaccaacggcgaggcc

SEQ ID NO: 84022 - RNA, 68 nt, Homo sapiens
cggccgcccccacggccccggcggccaaacaccgggacgccccagagggacagagcaggaacaagaac

SEQ ID NO: 84023 - RNA, 56 nt, Homo sapiens
ggcggaggaccccaacggcacgcagaagccagcggacgcccgcaacggggaccggc

SEQ ID NO: 84024 - RNA, 66 nt, Homo sapiens
ccggagcaagcggagccccccaagagccggaaagggggcggggcagaacccaaagcggcgcaaaga

SEQ ID NO: 84025 - RNA, 75 nt, Homo sapiens
agcaacggcgaggcagaccggagccagaagcacagaccccaaacggcgcccggcgcaggccaaagggcccccgaa

SEQ ID NO: 84026 - RNA, 77 nt, Homo sapiens
ggcggccacggcaccggcggggggcacgaggaaagaacaggagagagcagccgggcggcccagccaaacaggccccg

SEQ ID NO: 84027 - RNA, 71 nt, Homo sapiens
aaagcccaaagccagcgacaagaaaacgaaacacgcgaaaccaaggaaagccaaggacacgcaggacgaag

SEQ ID NO: 84028 - RNA, 77 nt, Homo sapiens
cacccccagaggcccaacgggacgaaccacagggcggccagagcacacaccaggcacgccaacagcaggcaggggcg

SEQ ID NO: 84029 - RNA, 77 nt, Homo sapiens
gagcagccaggcggcgggccaggaacgggaacagaacaaacgggaaacaggaaccaagccagaaaggagagggaacc

SEQ ID NO: 84030 - RNA, 84 nt, Homo sapiens
gcggcggccgacggggcggcgggagcaggaaagaacagaggcccggaaacacaagaggaagaggaaggggcgagaagagcaaaa

SEQ ID NO: 84031 - RNA, 77 nt, Homo sapiens
caggggaagacacgaggggcagaaagagaccgcagagacagccaacacggcacccacagggaaagggagcagcaccg

SEQ ID NO: 84032 - RNA, 88 nt, Homo sapiens
aaggacaaaagccaagaggaggacagcgcacacagcaagcacgagaaacaacgaacgagcaaggaagggccaaggcagaccccacacc

SEQ ID NO: 84033 - RNA, 87 nt, Homo sapiens
ggcaggcgcggaggcccgaagacgccgaggaggcagagcaccgcggcgccgagcgcagacccgagaggaacgccacacagaccagac

SEQ ID NO: 84034 - RNA, 74 nt, Homo sapiens
cgagagcgacagcaaggggggccacgaggaacaaagacagcccaccaggaagagcgaaaaagcgcaaaagacaa

SEQ ID NO: 84035 - RNA, 67 nt, Homo sapiens
ggaaaccagcccccgagcaggagcggccccccaccgccacccaagcgcaggaggacggacggcgcag

SEQ ID NO: 84036 - RNA, 73 nt, Homo sapiens
cgagccgccacgccgaggacgggcgccggcccaggcggaggcaggggccacagccaacccgaccccggacaag

SEQ ID NO: 84037 - RNA, 74 nt, Homo sapiens
cgggcccaaacacgacggacaacgaacaaggcccgccaagggaggcgcccacagagggcacagcgaagaaccgg

SEQ ID NO: 84038 - RNA, 86 nt, Homo sapiens
cagcggcgggacaccgccggaacggcacgcggccgcggagccgggggcgggggccgggcgcgcacagaccgccagggccccccacg

SEQ ID NO: 84039 - RNA, 68 nt, Homo sapiens
aaacgaagaacaagaagacacccccaccggacggaaaagaaccaacaggaggaagccacaaacgaggg

SEQ ID NO: 84040 - RNA, 72 nt, Homo sapiens
ggcgcgggcaggagccggcgaggagcaccccccgccggaaagggggagagagacgcgggaaccgccagcaaa

SEQ ID NO: 84041 - RNA, 72 nt, Homo sapiens
agcggccgcgcacccccggccggaggcaccagcagggacggaaacagacgacgacacggacaggacggcgga

SEQ ID NO: 84042 - RNA, 50 nt, Homo sapiens
cgagcagccaggccaggagagaaaacccacaccaaaagcagaagcgcgcc

SEQ ID NO: 84043 - RNA, 83 nt, Homo sapiens
cgcgcgcgcccgccccgcccaccggcgcaggaaaccgaggaaggcagggaccggaaagaacaaaggcccaccggaagagcggc

SEQ ID NO: 84044 - RNA, 53 nt, Homo sapiens
gcgaaacgcacgagaaggaaacaaagccagaccgccgaggggggacgaaccca

SEQ ID NO: 84045 - RNA, 67 nt, Homo sapiens
gggcggggggaacagacagccccaggcggcccagggcagcagcacacaaacaaccacaaacaacagc

SEQ ID NO: 84046 - RNA, 75 nt, Homo sapiens
aggaacaagggggggaaacccaccgggaaaaggcacgaagggagaggagccaagcccaacgggacgggaaaacgg

SEQ ID NO: 84047 - RNA, 84 nt, Homo sapiens
ccgaacgcggaggcagcgccaaccggagggaaggaggcaccacagcgaacacaacccccggggccggccagaacacagggcccc

SEQ ID NO: 84048 - RNA, 71 nt, Homo sapiens
ggaaggcaggcaaagccggcgacccgcacagccgcaccccaacccccaggcacacagagaaaaaaagggaa

SEQ ID NO: 84049 - RNA, 54 nt, Homo sapiens
ccgagcgcagccacccccccaccgggaagagccgcggcccgcggcccaccggac

SEQ ID NO: 84050 - RNA, 70 nt, Homo sapiens
cccggaacccaagaaccggggagcgacagaagacaaacagcaaggggcaaaggggaagccaaaacagaaa

SEQ ID NO: 84051 - RNA, 75 nt, Homo sapiens
cgggcgcccgccagcagcgggccgcgccgcgcccagccggcaccaaggaggccccggccgaaggaccaggcacca

SEQ ID NO: 84052 - RNA, 87 nt, Homo sapiens
agacgcggccagcagcaccgagccgacgcccgagcagggaagcccacagaagcacagcgccaggccccgggggggggaccagccagc

SEQ ID NO: 84053 - RNA, 61 nt, Homo sapiens
gcgccggcagccgccgccaccgcaaggacagagcgaagaaccccccaagaagacgaaaccc

SEQ ID NO: 84054 - RNA, 83 nt, Homo sapiens
cggccccggaacagcaggcgcgcacgcgggccaccggggaccgcaaggccgcggggcccaacaaggcaagacacagcggggag

SEQ ID NO: 84055 - RNA, 83 nt, Homo sapiens
aacaacaagagacgggacacacacagggcagcggacgacgagaacaaaagaggcggcaaggcagcccaggcaaagaagaaagg

SEQ ID NO: 84056 - RNA, 69 nt, Homo sapiens
ccgcaccagaaggggacgccagacgccaccgcagcaccccagggaggccgcaagggccgcgcacccggg

SEQ ID NO: 84057 - RNA, 58 nt, Homo sapiens
gcaccgcaaaccaacgcgggccgggcaacacgcagccgagcgaaagccgacaagagac

SEQ ID NO: 84058 - RNA, 81 nt, Homo sapiens
cccccgcgacccggaccaccgggcgcggcgccccagccggacccaaagacaggaccacgcaccagcagagaaggaaagcaa

SEQ ID NO: 84059 - RNA, 74 nt, Homo sapiens
aaagaagagacaaaagagagagcggaaacgagggaaaggccggcgcggaagaggccggcggcgggacggcccca

SEQ ID NO: 84060 - RNA, 41 nt, Homo sapiens
caagcaacgccaggacaaagcacggcgaggccccaaggaac

SEQ ID NO: 84061 - RNA, 54 nt, Homo sapiens
ccagcgacgcaccgagaaaggaaggaaaaccgacgaagagcgccgccgcggccc

SEQ ID NO: 84062 - RNA, 48 nt, Homo sapiens
aggagagaagagccagcacccaacgagaaccaaggagcgaccaggacc

SEQ ID NO: 84063 - RNA, 77 nt, Homo sapiens
cgaggaggcggcggccgacggggcggcgggagcagcaccgggcagagaacaccagcccgcgcccccgcagaccggaa

SEQ ID NO: 84064 - RNA, 72 nt, Homo sapiens
agacaccaggccgggcggccccggagggcccgcaccccaggccaagaagcgggcgcggaccaccccacggac

SEQ ID NO: 84065 - RNA, 80 nt, Homo sapiens
gggcaacgcgcagaacaccaaccgccacccgcggggagacacggcaaagggccaccagccaccccaagcgcccaacgggg

SEQ ID NO: 84066 - RNA, 79 nt, Homo sapiens
acacacagcaaggggcgggacaccagaggaccagaacccacgagaaacagacgagccaaccagaccccaggagccaaag

SEQ ID NO: 84067 - RNA, 54 nt, Homo sapiens
accgccaccccacaggcccccaccaggccgcggcagaaagcagagagcgaagac

SEQ ID NO: 84068 - RNA, 74 nt, Homo sapiens
aaagcacgccacaagaaaccgaaggaccagaggaacacggaaagaaacacccggaaaagcaaagacacgccaaa

SEQ ID NO: 84069 - RNA, 67 nt, Homo sapiens
cgccccccaggcccacaaccagcccagcagcagcaagcagagaccaaaccgccagacacccgaagga

SEQ ID NO: 84070 - RNA, 83 nt, Homo sapiens
cagacccggagccggagcaggaggccccagagaggacggggacgggccccaggacgaggaagacaaggccagccacggaagga

SEQ ID NO: 84071 - RNA, 72 nt, Homo sapiens
acggagacaaaacagccaagcgggcagaccgccaggccagcgaaacagccccaacagccaccggcgccacgg

SEQ ID NO: 84072 - RNA, 83 nt, Homo sapiens
gaacagaagccaaagccaaagaaaagagaagagaagccagagaagcccagcccgaaagcgggccagagaggcgccacaaccag

SEQ ID NO: 84073 - RNA, 58 nt, Homo sapiens
gacccgccggggccgcaggggcgaggcgaagagccaccagcggcgacgcaggccaaaa

SEQ ID NO: 84074 - RNA, 45 nt, Homo sapiens
ccaaaggacgaagaacccacagagaaccagggggaaggccccggg

SEQ ID NO: 84075 - RNA, 54 nt, Homo sapiens
caggacaacgaacgaaacggggacaagaaaaccagaaacgggggcccgacaaga

SEQ ID NO: 84076 - RNA, 99 nt, Homo sapiens
cgaaaggcgccagaccccagccaccgcccaggaagccaggcgggcaccaggcccgacaccagagcgcaaaagacaacccacgaaaaccacacccaggga

SEQ ID NO: 84077 - RNA, 82 nt, Homo sapiens
cgcaaacagaccaaaccacgaggaggagaccggaaaagagagacaagagagacaccccaaccgacaaagagcaccagacagc

SEQ ID NO: 84078 - RNA, 55 nt, Homo sapiens
gagagcgcgaaacgcacgagaaggacccgggggccagcccacagaccagccaaca

SEQ ID NO: 84079 - RNA, 76 nt, Homo sapiens
gagcgcccgcgccggcgcggccaaggcggggccccagacacgacgcccccggccggcccgggccgcgccagagcgc

SEQ ID NO: 84080 - RNA, 85 nt, Homo sapiens
cggccgcgaccaagccgacccaccacacaagacggaaaaagcgacggagcccccccccgggcacgcagcacgggggcaggggccg

SEQ ID NO: 84081 - RNA, 75 nt, Homo sapiens
gccgccgccagaggagagcaccggccacggaaaagcaaagggggcacccgaggaggaagagggcagggcccacgg

SEQ ID NO: 84082 - RNA, 65 nt, Homo sapiens
gaggagaaaggaaacagaggagagaacacgacaacggcaagcggagaagagcaaggccgaaccga

SEQ ID NO: 84083 - RNA, 51 nt, Homo sapiens
gcaggaggaccaaggaaaccaaagcacaggaaaagagccagcgcgaccgag

SEQ ID NO: 84084 - RNA, 53 nt, Homo sapiens
cccagcagccagaaccgcagccagaaacgaacgggaggagggaagaaaagcgc

SEQ ID NO: 84085 - RNA, 74 nt, Homo sapiens
agcgaagcagccgaagcacaaaagagagacgcccaggcagccaacgaaggggagaaaagccgggccaggcgccg

SEQ ID NO: 84086 - RNA, 78 nt, Homo sapiens
cacgcgaggcccggcccacaacaggacagacacacaccccaggcaacccgccaagagacaaagcccaaggggggcaga

SEQ ID NO: 84087 - RNA, 65 nt, Homo sapiens
cgcaagccgccaaacaggcggaggagcccagagaagacgaccccgacgcaggccaggagccgcgg

SEQ ID NO: 84088 - RNA, 77 nt, Homo sapiens
gccgcggacgccgcgccagcgacaaacaagggcggccgccggcaggccacccggcaccacggcaggggccgaccccc

SEQ ID NO: 84089 - RNA, 31 nt, Homo sapiens
cagggcgcccccgggcaggaagaggccaagg

SEQ ID NO: 84090 - RNA, 78 nt, Homo sapiens
cggaggacgagaggaggaaacagcgcggagaccccagacccccagcgcggcacagaagcgaaaagaaaacaaagaaac

SEQ ID NO: 84091 - RNA, 75 nt, Homo sapiens
caaccccacccccccagcggccgcagggccgacaagcggaccaagccagacccaagcggcccagcaggagaacca

SEQ ID NO: 84092 - RNA, 85 nt, Homo sapiens
gagaaaggagccggggaccccccaaagacaagacaaagcagagcccacagacaaggccaaaggcaaagcgcacagaggggcccag

SEQ ID NO: 84093 - RNA, 57 nt, Homo sapiens
gagaacacaggaaccggagggggcacgaaaaaacagaagaaccgagaaccgacaccg

SEQ ID NO: 84094 - RNA, 72 nt, Homo sapiens
ccaacgagacaagagggcacaccagaaccgagaagcagcccgggaggagaaaccaacagaccccaccagaaa

SEQ ID NO: 84095 - RNA, 58 nt, Homo sapiens
gaaacaggcagagaggaaacccagaaaccacaggcagaccgaccaaacagggagcagc

SEQ ID NO: 84096 - RNA, 68 nt, Homo sapiens
gggaagacgaaaagcagaaacagggacaaaccacacaaccagaccaaaccaaccgagccaccccagca

SEQ ID NO: 84097 - RNA, 73 nt, Homo sapiens
gccaaagcagcgaagaagaggcccaacccccaccccgcccaaggaggcccagcggaaaccaccccacccaacc

SEQ ID NO: 84098 - RNA, 68 nt, Homo sapiens
caggaaaaagcaggggaggaggggaccggccgggcaccagccagcaaaccagagacaggagggcgaaa

SEQ ID NO: 84099 - RNA, 83 nt, Homo sapiens
cccgccagcagccgccggagccagccaacgagcgggccaagcggagaacaaccccaccagacagccggcccaaacggcaacag

SEQ ID NO: 84100 - RNA, 80 nt, Homo sapiens
gcgcggaggaccggggcagccagggcgggaagaaggggaagcaggagcaccgcacagccccggaacgacacccgcccgaa

SEQ ID NO: 84101 - RNA, 50 nt, Homo sapiens
aaggaccaagaaccaggcacaggaaagagaaaagcaaagaggggacagca

SEQ ID NO: 84102 - RNA, 73 nt, Homo sapiens
agcgccggcgcggcgcggcgcggccaaggcgacaacggcaagcggagaagagcaaggccgaaccgagaggaag

SEQ ID NO: 84103 - RNA, 69 nt, Homo sapiens
ggaacccaaaggcaccgggggcacagagcggagaccaaacgcgagaaaaagaaagcgcgaaaacacgaa

SEQ ID NO: 84104 - RNA, 52 nt, Homo sapiens
ggcaggacagccagcaggggagaagagaagaccagagaaagaacaaccccgc

SEQ ID NO: 84105 - RNA, 82 nt, Homo sapiens
gagcccaaaacccgccacggcgggcgagcgccccaggggcaaggacagaagcacaagcgcgacgagggcccgagaagcagga

SEQ ID NO: 84106 - RNA, 67 nt, Homo sapiens
cgggagaaagaacagacaagccgcaagaaccggggaagggagaggccggaacgggcggacccagagc

SEQ ID NO: 84107 - RNA, 72 nt, Homo sapiens
gcgaaggaccccaacggggaggccaacggaagaagccaaagccacccccaaaggcagaggaagaacgagcag

SEQ ID NO: 84108 - RNA, 50 nt, Homo sapiens
gagccagcccgaaagcagaaggcggcagggagcacgcaccaggagcccac

SEQ ID NO: 84109 - RNA, 77 nt, Homo sapiens
ccgccacaccacccggaacccagggaacgcgcagcggcccagagacggaaagacaaagacagaaaaacaccgcccaa

SEQ ID NO: 84110 - RNA, 62 nt, Homo sapiens
cgaggagacggaaccggagaaaacgccacgcagagccccgccaggaagacacgccggggaac

SEQ ID NO: 84111 - RNA, 67 nt, Homo sapiens
agacaaaccagacgggagcccgggagaaagacaggcaacggaaaaccaaaggcagggacaaacaaac

SEQ ID NO: 84112 - RNA, 76 nt, Homo sapiens
gggggcagccgcagaggcgcgggccgccccccgggcgaggcagagacgccaggggcaaagcgcgggaagcggggcc

SEQ ID NO: 84113 - RNA, 79 nt, Homo sapiens
caggccagagggggccgccgcggcagcaagaacagagagagaggggacagacgagagaacgagaaaaacgagcacaacg

SEQ ID NO: 84114 - RNA, 71 nt, Homo sapiens
cggaaccacagacaaaaacccaaagcaggcacacggcacggacagggcgggacgcagaaccagggcgcgac

SEQ ID NO: 84115 - RNA, 64 nt, Homo sapiens
ccgggccggggggggcgacccaccgcacggcccagcccagcagaagccccaggggacagggaga

SEQ ID NO: 84116 - RNA, 85 nt, Homo sapiens
accagggccaccaaccccacccagacgaagccgaagaaaagaccaccgcaccgggaaagcgggacgggaccacacgacccgggac

SEQ ID NO: 84117 - RNA, 78 nt, Homo sapiens
agcaaggcccggaaaaccgcggccccgaggcaaacaaagcagacccagccaaagcgaggccaggaacgacacaagggg

SEQ ID NO: 84118 - RNA, 78 nt, Homo sapiens
acaccgccgcgagaggacgaggcagcaagaaacgcaccccaccaccgggcaacggggagccggccagggcagcgcgga

SEQ ID NO: 84119 - RNA, 58 nt, Homo sapiens
cgagaggcgccgaccccgcaggaaagcggggcagcaaggcaaggaaaaaacgaagagc

SEQ ID NO: 84120 - RNA, 79 nt, Homo sapiens
cagcgcccggagggcggcccgagccgggggcgccagggaggagcaacaacgcacccgcccgcacaagccagcggggcca

SEQ ID NO: 84121 - RNA, 78 nt, Homo sapiens
gcgccgcacagagcaacgcgccccagcacagggagagagcccaccaaggaaccacgaaaccaccgcgcagaaaaaaag

SEQ ID NO: 84122 - RNA, 80 nt, Homo sapiens
cgcccgccggcgccgacaccaggaccagcaaagaagcgcgcaccgccgggcgaccagacgaggggagacggacgggggag

SEQ ID NO: 84123 - RNA, 76 nt, Homo sapiens
ccgcggcaaacaggcggggaccggcgaggagcgaagaacaaacacccgagcgcgaggcacgacgcgaaagagacga

SEQ ID NO: 84124 - RNA, 60 nt, Homo sapiens
aggacgggccacccaggagccgaggccagagcagaaaccagcccaggaacccagcgcccc

SEQ ID NO: 84125 - RNA, 64 nt, Homo sapiens
gagagagaccgcggacgaggacccgcgccaaccagcccacccaggacgcgcggcagagaagcgg

SEQ ID NO: 84126 - RNA, 63 nt, Homo sapiens
agcgggacaggacgcagaccacgaaggaaccgaaagaaccccgaacaggcccaagggccggca

SEQ ID NO: 84127 - RNA, 97 nt, Homo sapiens
gcccggagggggagcagacgaaccggaacccgcggggaccaagaaaggcccagggaccaaagcccggacaaggcccgagcaccaggaccgcagaagg

SEQ ID NO: 84128 - RNA, 65 nt, Homo sapiens
ggcggccgggggggggcgaggggaaaggcaaagccgcgaggagaaggccagaaagcccggaagca

SEQ ID NO: 84129 - RNA, 68 nt, Homo sapiens
ccggaccgggcccggaggagcgaacaaggcgacaacacaggcaggggaaggaaaacacggcagggaaa

SEQ ID NO: 84130 - RNA, 72 nt, Homo sapiens
acgcacgagggagaagcaggcccagagcgagcacagcaggaggaggagcgagcacagggacaaaccaaacga

SEQ ID NO: 84131 - RNA, 79 nt, Homo sapiens
ccaacggaccccgaggacaggaaaaacaggccgagaaaccgcgccccccgaacaaaggggaaggcagggaccaagacac

SEQ ID NO: 84132 - RNA, 80 nt, Homo sapiens
cgcggcgccgcccgccccccgcccgccgcgggcgccagcgaggggaagaacgccagccaggcccccgggccaaccaagcc

SEQ ID NO: 84133 - RNA, 82 nt, Homo sapiens
cgagcgggagcgggcccgcgcgccgagggcgaggcggacgcgcggcgcgcagggcaaacagcacagaagaaggcaaagaaag

SEQ ID NO: 84134 - RNA, 73 nt, Homo sapiens
ccccacggcacaacacacccgcaaggaaggaaaacacccggcagggaaggaaggaacgcaaccgaagacgcag

SEQ ID NO: 84135 - RNA, 84 nt, Homo sapiens
ggcgccggccccggggagaaacgggacgaacagcggggacgccccagcagaccgcccaggagaggaaagcaggaggaaagacca

SEQ ID NO: 84136 - RNA, 75 nt, Homo sapiens
aaccacgcaggcacgacaccaccgggagagcaccgacagaggaccagacaccccacaagaccaacccaccggagc

SEQ ID NO: 84137 - RNA, 70 nt, Homo sapiens
gggcagccagaaaggggagagcgcgaagcaaaggagcaagcggccgagccgaggcacccacaagccggga

SEQ ID NO: 84138 - RNA, 64 nt, Homo sapiens
agggagcgcaccccaggaaaccaaccagaacacacaagaaccgggagaacgaacaaaccaagcc

SEQ ID NO: 84139 - RNA, 79 nt, Homo sapiens
acccaccccaagcgcccggccgagggaccgcagcccccccacggccaggcccgaaaaggcacacacacccgcaggagag

SEQ ID NO: 84140 - RNA, 87 nt, Homo sapiens
ggacccaggaggaggagagggcaacaaaacccacaggcccaaagaagccgcccccaagacaagggagagcgccacggccgccaggcc

SEQ ID NO: 84141 - RNA, 80 nt, Homo sapiens
cgaagaggccaccccagacgcaccacaccgggacaggggagaggaacagcgagaagagcaagagaacaagcagaggaaag

SEQ ID NO: 84142 - RNA, 75 nt, Homo sapiens
gcacacaaaagcagcagcgcaacaagagggagcagaggaggggcaccaggcccccagggaggccgaacacacagc

SEQ ID NO: 84143 - RNA, 87 nt, Homo sapiens
aacgcgcgccagcgcgggacccgccagaccggaccaggcggccggcgcggggcgcaggcggcgcggccagggccgcagggcagccgg

SEQ ID NO: 84144 - RNA, 75 nt, Homo sapiens
aaaccgacgcagacgaagggggaccaggagggggcggagcccccggaaaaaacagccacaagccaacaagacacc

SEQ ID NO: 84145 - RNA, 76 nt, Homo sapiens
ggccaaggagccgaaaagaggaaggggcaggccacacgggcaggacaggccacccggccagaccaccagcgaagac

SEQ ID NO: 84146 - RNA, 54 nt, Homo sapiens
ccccagccaaaggcaaaggcccccacagagagcacacaaacaaagcgaaaccac

SEQ ID NO: 84147 - RNA, 78 nt, Homo sapiens
gcacaccagggcaaacgggagacagcgccaccacgaccgaaaagggaagcgcgcaggagcggagagggaggggaacgg

SEQ ID NO: 84148 - RNA, 72 nt, Homo sapiens
caagacccaacagggccaccacggaacaagcacaaggaaaacgcaaaaccagaagcgcgccgacacggcccg

SEQ ID NO: 84149 - RNA, 70 nt, Homo sapiens
agacagcccagaacccggaacggaccagcagacccaaagccgagaaaacgcccacccgaccgaaaacccc

SEQ ID NO: 84150 - RNA, 89 nt, Homo sapiens
gcaggcacgggagccgaaggcagaggcaaggcggcagcaaaacgggcgcccgggcagaagcaagagaaacgcagagagaacggaacgac

SEQ ID NO: 84151 - RNA, 67 nt, Homo sapiens
agcccggagcccgggcaagagcgggaccagaccccacgcagggacggccccgggcgcacgaccagag

SEQ ID NO: 84152 - RNA, 75 nt, Homo sapiens
aggcggcgcccagggcgccaccgccgccgcagaggaaacacccaaggaaccaaagcaggccagcagaaaaccccg

SEQ ID NO: 84153 - RNA, 79 nt, Homo sapiens
gccgccgccgcagagccggagcgggggccgccggcgccggcccggcacccaccagccccccgagagccgcagggccaaa

SEQ ID NO: 84154 - RNA, 73 nt, Homo sapiens
agaaagagagagaacaacgacggaacaagacaggacaacgcacaacagggcaggagaaggcccaacaggaggc

SEQ ID NO: 84155 - RNA, 85 nt, Homo sapiens
gcaggagaaaggagcagccagaaagcggcacgaacagagccgggagcaagaagaacacccagagagagagccaaaggccagaccg

SEQ ID NO: 84156 - RNA, 73 nt, Homo sapiens
gccggcagaaagagggagcaacacccgggaaaggaagcgcacaggaagccggaaacgggagccaccaggggga

SEQ ID NO: 84157 - RNA, 72 nt, Homo sapiens
gcagggccgggccagccccacaaagcccgggcaagagcaaagagaggcaccgggaagcccaacgcaaccaga

SEQ ID NO: 84158 - RNA, 71 nt, Homo sapiens
cccccgccggaggaaccgaagaccagccgcagacagaaggcgcgggagaaaagccacccccacagaccgca

SEQ ID NO: 84159 - RNA, 72 nt, Homo sapiens
cagagcaagagcagcaccggacgggcccaccgcccaagaccggcccggcacggcggggacaggaagggaccg

SEQ ID NO: 84160 - RNA, 75 nt, Homo sapiens
aaggccgaaggagacagcacagacagacggcacccacggacacggcagggaagccgaaaggaaaggcacagcaca

SEQ ID NO: 84161 - RNA, 71 nt, Homo sapiens
ggaccgaggcggaaggacaggccgggaccccgacggagagacaaagaagacggagggggggccagccaccg

SEQ ID NO: 84162 - RNA, 78 nt, Homo sapiens
accacgccgccacacgggggcacgccacacggggacggcgaaggcaagcagaagaagcgagaggggacgaaaccgcca

SEQ ID NO: 84163 - RNA, 77 nt, Homo sapiens
cacagcccggcccccacggagcccccgcagggcgagagcgccccaggggcggaggagggcgcaacggacaccacaac

SEQ ID NO: 84164 - RNA, 86 nt, Homo sapiens
cagcgcagcacgggacgcgaccggaaggcagccggggccaaagcgaccaaccccccaccgcacgcagggggccccccgcccggggc

SEQ ID NO: 84165 - RNA, 82 nt, Homo sapiens
aagccagacccagccgcgccgaaagagcaagggccagagaaggaggagaaggagacaggcggcaagcagggcgaagggagga

SEQ ID NO: 84166 - RNA, 75 nt, Homo sapiens
gaaagcacacagacacaaacaccgccaaaaaagagaaaaaaagaggcgaccagcccgggggaaaagaagagaacg

SEQ ID NO: 84167 - RNA, 62 nt, Homo sapiens
gcgagagacagccgcccagcagaacagaaaagccccaccaggcggggaagagccaagaccca

SEQ ID NO: 84168 - RNA, 79 nt, Homo sapiens
cacaggggccccgaagaaccccacaagccacaggaggaggcagcaggggcgcaccgagaaccaccagcacgacgggcac

SEQ ID NO: 84169 - RNA, 76 nt, Homo sapiens
cggacgcgggcccaccgcgcgggcccaaggaccaagccgacacgcaccgccaagccccgaaaacgaagacccgcga

SEQ ID NO: 84170 - RNA, 73 nt, Homo sapiens
gaaaaaggagcagcccgggcaccacagaaaaggaagagagaccaaacaccaagcgcccaggggcggggcacaa

SEQ ID NO: 84171 - RNA, 80 nt, Homo sapiens
acggaggaacaggagcaccacgagagcacccagagagcccaccgaagacacaccccacaggaccccagagcgacagcccg

SEQ ID NO: 84172 - RNA, 79 nt, Homo sapiens
gagcgagcgagggggggcgcgccggaaaccggagcgcgcagcaggggccaccgaacacgcagaacgaagaaggagggcc

SEQ ID NO: 84173 - RNA, 67 nt, Homo sapiens
ccagacaagggaagaggaagagggagaccccaacggcaagaggaccagggaacgggacacacagacg

SEQ ID NO: 84174 - RNA, 77 nt, Homo sapiens
ggggccagccaggccgcgcgggcccgaggccggaggaacccggacccggcgagcgacagaggcacaaaaggagaaag

SEQ ID NO: 84175 - RNA, 54 nt, Homo sapiens
ggaggacagacaaacagaacgagagccacagggaccaaggaagggacagggccc

SEQ ID NO: 84176 - RNA, 78 nt, Homo sapiens
cgcgaccacgagacgccacaggcaccgccccggagccacagcaaagccacccaaggcaggcacagcaccagaccaggg

SEQ ID NO: 84177 - RNA, 64 nt, Homo sapiens
ccccggcccacaggggggggcaaacccgagagaacggacaaaacagaggagaccagaccagaag

SEQ ID NO: 84178 - RNA, 82 nt, Homo sapiens
caggaacagacacggggaagcgcaaaaacaagacggggcgccccacagaggggcgacgaggaacccagccagggaacgaagc

SEQ ID NO: 84179 - RNA, 57 nt, Homo sapiens
agggaggcagcagcccgggcgccacgggggcgggaggggcgaggagggcgggggccc

SEQ ID NO: 84180 - RNA, 72 nt, Homo sapiens
ggagccagaacaggagaaccagagagagggggggcccagcggacgcccgggacgggaggagccaaggcccga

SEQ ID NO: 84181 - RNA, 103 nt, Homo sapiens
ggaagggaagccacccacaagacaacacgagagcccggagccgagcccgggaaggcggacaccagaagcggagagagaggccggacgccgcccgaagcaccaa

SEQ ID NO: 84182 - RNA, 41 nt, Homo sapiens
gcacacaccgaccgacaaagaagaagaagcagagagccagg

SEQ ID NO: 84183 - RNA, 85 nt, Homo sapiens
cgcgacgcagccaggcggaggcggcggaagccggcggagcgagacgagaacccggccgcgcaagggaggcgacccgcggcgagag

SEQ ID NO: 84184 - RNA, 74 nt, Homo sapiens
caaagcagccagggagacccaaaccgaaggcagcacggcacacgccaaaaggggggcggcgcaggacgagagcc

SEQ ID NO: 84185 - RNA, 79 nt, Homo sapiens
acagccagaacggaaaccacggacaaacaccccaagaacacagaagaccggccgcccccacgagccgccaccaagcagg

SEQ ID NO: 84186 - RNA, 79 nt, Homo sapiens
cggagcagcggcggcgaaagacaagacgcaaacagcagacggaagaccccacggcaaaaccacacccgaggcgagccca

SEQ ID NO: 84187 - RNA, 75 nt, Homo sapiens
ccaggcaccgcaaggcgagaacgggaagcgcacaaggaaacccacaccacccaggaaggagcgagccgagggacc

SEQ ID NO: 84188 - RNA, 76 nt, Homo sapiens
gaaacaaaagcaacaaagaggccaaaagaagaacccggacccgaccgaagcaagaacgcaaaaggcacaagcaccc

SEQ ID NO: 84189 - RNA, 72 nt, Homo sapiens
acgagcaggggcccaaaagacggggacgcgaagaagcccccaccaccacgagaccgacccaggacgacacca

SEQ ID NO: 84190 - RNA, 34 nt, Homo sapiens
ggcccccagaacacacaggaagacaaagaaagcc

SEQ ID NO: 84191 - RNA, 81 nt, Homo sapiens
ggaccgccaagggcccaggcaccacaccaccccacaccgccaccggcgggccacagagccagaccagagagaggcaccagg

SEQ ID NO: 84192 - RNA, 59 nt, Homo sapiens
ccggggcgaggagccacgccgcgacaagggcagaaagaaagcgagggagcaggaagcca

SEQ ID NO: 84193 - RNA, 44 nt, Homo sapiens
cacagccagcaacaccgaacaaaccgagcgaagacacaacaaaa

SEQ ID NO: 84194 - RNA, 62 nt, Homo sapiens
gaaggagcgacccgcaccggccgcgcgagaggggaccaggccacagcggcgggcaggcagag

SEQ ID NO: 84195 - RNA, 58 nt, Homo sapiens
aaaaacaagagccccaaagcagccaaaaggacacggaacaagagggaggcaggcccac

SEQ ID NO: 84196 - RNA, 48 nt, Homo sapiens
agcgcagaaaaagccggacacgaccaagaaagcaacggggcggcacac

SEQ ID NO: 84197 - RNA, 72 nt, Homo sapiens
cacgagggcagggcggaagggacaaaggaagcagccaggacggagagaacaagagaagggaaaacaggacac

SEQ ID NO: 84198 - RNA, 76 nt, Homo sapiens
cggcccgcccccaaagcgaccgacccggacgagaaacgcaaggccgcaggagggaagcgcacggaaaccgccccgg

SEQ ID NO: 84199 - RNA, 85 nt, Homo sapiens
agcgggcccgcggaggcccgcgaggaacgacgccgaggaagacaggccggacacaaccacaaacgagccacgccaaagggcccgg

SEQ ID NO: 84200 - RNA, 80 nt, Homo sapiens
cccaaagaggagggcgcacagcgcccgaggacaggacccacgaggaagcggccgcggcgaaccccagagccagcgggcag

SEQ ID NO: 84201 - RNA, 79 nt, Homo sapiens
cacgacgccgggaccgggaccgccgccgccgccgccaccaggagaccggaaacgagagaaacgaagacgaagaaacagc

SEQ ID NO: 84202 - RNA, 74 nt, Homo sapiens
ccaacccaagggccccagcccgggcccccaacgagaggcggacaacagagcaccccagacgcccgccgcagagg

SEQ ID NO: 84203 - RNA, 74 nt, Homo sapiens
gggagaacaaagcaggaaacaaaaacaagccaggaaggaaaggacggaagcaccaaaaggacggaaaaggcgca

SEQ ID NO: 84204 - RNA, 81 nt, Homo sapiens
gcaggagcggcgggcaccccgagacccggggcagacgcccacccagaacagccaggccgccgcggcagcgagaaagaccag

SEQ ID NO: 84205 - RNA, 72 nt, Homo sapiens
agccaagggaaaccgccgggggcggcgacggcggcgcgaggaccgaccgggcccgcggacgaagaaggcacc

SEQ ID NO: 84206 - RNA, 77 nt, Homo sapiens
gaccaagaaaggcacgcaccaccccaccgggacccaaaaggcgggcgaaaacgccaaaaaccagacgggagcgcaga

SEQ ID NO: 84207 - RNA, 73 nt, Homo sapiens
agacacggggaagcgcaaaaacaagacggggcgccccacagaggggcgacgagagaggaccagaaccagaccg

SEQ ID NO: 84208 - RNA, 75 nt, Homo sapiens
aggcgaagaccagacacagggaaaggaggcgcaccgaggaaggaggaacagaagaaacagggcgagcccccaagg

SEQ ID NO: 84209 - RNA, 36 nt, Homo sapiens
gccgcggggggagccgggcaggaccccccgacccag

SEQ ID NO: 84210 - RNA, 75 nt, Homo sapiens
gcgaagccaggacacacacgggcgcggcccaccccgcaaaggaccaagagagcccccgaggaccgcccccagcgc

SEQ ID NO: 84211 - RNA, 72 nt, Homo sapiens
gggacgggcaaaggaaaggggggagccaaaagggcacaccgccccccgcgagcccccagcgcagggggaacc

SEQ ID NO: 84212 - RNA, 64 nt, Homo sapiens
gcgacaagagaggagccgagaaccgggcaaagacgacgcggagagggcgcagagagccagcagc

SEQ ID NO: 84213 - RNA, 80 nt, Homo sapiens
cgggccgccgagcggacccggaccgggggcgggggagcgggaggagccagagcacaccgcaccacggccacaggcgcccg

SEQ ID NO: 84214 - RNA, 79 nt, Homo sapiens
ccgagcgcagccgcgcagggagaagaggcacccagagccagccccaggccgcgagccggacaacacaccacaagaaccg

SEQ ID NO: 84215 - RNA, 70 nt, Homo sapiens
acagacccagggccaaaacgccgcaacggccggcggggccaaagccgggacaggaggcagccggggccga

SEQ ID NO: 84216 - RNA, 58 nt, Homo sapiens
aagaaaggcgcgcgcggaggcagaggaaagggcgcaggcagaggagcagccgccaccc

SEQ ID NO: 84217 - RNA, 72 nt, Homo sapiens
acagcaggcacagggacgagggggcggaaggacaagcaagccagacccccgccaaaagaaggggaccccagc

SEQ ID NO: 84218 - RNA, 61 nt, Homo sapiens
aaggaagcgaggcaaaggaaaaaaagacaccaccaggagcgaaggaggggcagagggaaaa

SEQ ID NO: 84219 - RNA, 67 nt, Homo sapiens
ggacccacggaacagagccggggggacgaccacaagaccggggcaaaagcagaccggaaaacccacc

SEQ ID NO: 84220 - RNA, 71 nt, Homo sapiens
ggagaaacaagaaaagaccaaggaaggaaacagagcacaacacgaaaggagaagaggacgggaggagaaaa

SEQ ID NO: 84221 - RNA, 71 nt, Homo sapiens
cccgggcaggcgaaagaggcggcggcgcgccgcggccggccacgcggccaaagagaagaggaagcccggag

SEQ ID NO: 84222 - RNA, 67 nt, Homo sapiens
caacgacccaggggggagaggaccagggccggggggacccacgaggaagcggccgcggcgaacccca

SEQ ID NO: 84223 - RNA, 38 nt, Homo sapiens
agggccccgaagcagggagaccccaaggcaaaaccacc

SEQ ID NO: 84224 - RNA, 66 nt, Homo sapiens
aaggaccaagaaccaggacggggggcccgggcgaaaccggaccgggcccggaggagcgaacaaggc

SEQ ID NO: 84225 - RNA, 55 nt, Homo sapiens
ccccgggcccagcgcgccgggggacaaggcggcaaagacgcaacaacagcgagca

SEQ ID NO: 84226 - RNA, 52 nt, Homo sapiens
cgccggccgagaaggcagaggcggacacacagcaacgaagcaggggaggagg

SEQ ID NO: 84227 - RNA, 99 nt, Homo sapiens
agcggaggagacgggccgcacccgccccccgcgcccgccaccggccgccgcccggacagcccaaggcggaaaagcgaaggaagccacaagcacagccca

SEQ ID NO: 84228 - RNA, 77 nt, Homo sapiens
ccacccgcccacaacacaagaagggccacaggagaaggagcgccggcaggaggaagaccaccccgggcaacgcaccg

SEQ ID NO: 84229 - RNA, 58 nt, Homo sapiens
agagcaaggaggccccagcggaccgaacaggggcggcagaccgcaaggacaacacacc

SEQ ID NO: 84230 - RNA, 60 nt, Homo sapiens
caggagagacccggaaggccaaaggcgcgcaaggaggaaggaacaccccaaacccaggca

SEQ ID NO: 84231 - RNA, 32 nt, Homo sapiens
aaccaagcagacccagccacggggaaaaggaa

SEQ ID NO: 84232 - RNA, 80 nt, Homo sapiens
caaccaaacagaaacaagaaagccagacaaaggaaagaggcagaaggccagaagggcgaagaagaaggaaaaaaggccac

SEQ ID NO: 84233 - RNA, 69 nt, Homo sapiens
gccggcgcgcgggcgagcgcaggcccgcccggagggaggaaaaagcggccaacagggggacgggaaaga

SEQ ID NO: 84234 - RNA, 69 nt, Homo sapiens
ccggcgcaggcggcgcggagagggggcgcgagcggggaaacccacaaaccccagagcaagccaacgcaa

SEQ ID NO: 84235 - RNA, 68 nt, Homo sapiens
ccgaaaggccaggacacagaaggacaccagggcgcgaaaccaagagaccggccacggggcagagggga

SEQ ID NO: 84236 - RNA, 74 nt, Homo sapiens
ccgaggaggaagacgaacgaaacacaggcagagccgaagagacccgaaaacggcacacaaggcggggaagacga

SEQ ID NO: 84237 - RNA, 60 nt, Homo sapiens
ggagagacgcgcgaggggcgccgaagcgagggcgagagaggaacgaggggcacagaaacc

SEQ ID NO: 84238 - RNA, 64 nt, Homo sapiens
ccgccccacggggcgggcgggcgcacacaccacccgccaccgcagagacaagagccgacaggcc

SEQ ID NO: 84239 - RNA, 73 nt, Homo sapiens
ccaaggcgaagacaaacccacgaaacagaccaagaagacgaccccgacgcaggccaggagccgcggacagaag

SEQ ID NO: 84240 - RNA, 79 nt, Homo sapiens
gagaacgcgggcagcgccgacaccccagccggcgacacaggagcagcagccggcccggcgccagcaggaaaacagaagg

SEQ ID NO: 84241 - RNA, 74 nt, Homo sapiens
ccgcccccaacacagaggagaccaaagaaccaaagaaacaccagagacccacaggcaccgcccccaccacccaa

SEQ ID NO: 84242 - RNA, 78 nt, Homo sapiens
cacagagaagcaaagaccaaacccaggagccagcgaccaggacgggaagacaaccagccagaggccggaggagagagg

SEQ ID NO: 84243 - RNA, 73 nt, Homo sapiens
ccaccccacgacccaccccaaagaacacagaccaccaaggagaggaaacagagcaaagcagcgacaacaaaga

SEQ ID NO: 84244 - RNA, 55 nt, Homo sapiens
gggcccagggagggccccggccgcggccaagaggcccccggccgcgggcccggca

SEQ ID NO: 84245 - RNA, 86 nt, Homo sapiens
gaggaggagcccgcccccagagaggggagccggcgaggacaaaaccgaaggaggacacgagaggcgagggacgacagagcaagcgg

SEQ ID NO: 84246 - RNA, 75 nt, Homo sapiens
cacagagggggaaagccaaggaaaaacggagagccacaaaaaaggaagcgaaagagagcggagggcagaaagagg

SEQ ID NO: 84247 - RNA, 57 nt, Homo sapiens
ggcggccaggccaaccgaaggaagacgcgacagcaacacgcgagggccagacccggc

SEQ ID NO: 84248 - RNA, 35 nt, Homo sapiens
ggaaaccgcccgcccccagagaccggcaaacccga

SEQ ID NO: 84249 - RNA, 59 nt, Homo sapiens
cacggaccaaaggccgggcgcagaacccccagaccacagaggggcagcagcaggacagg

SEQ ID NO: 84250 - RNA, 36 nt, Homo sapiens
agacgacagcagggcaaaccggacgaagccaaggca

SEQ ID NO: 84251 - RNA, 85 nt, Homo sapiens
ccccgcccacgagccaccgagcaccaccagcgcgggaggaaaagaaccaggagggaggcacagaaccgaaacagcagagcccggg

SEQ ID NO: 84252 - RNA, 108 nt, Homo sapiens
cggggccagggagcgggacgggaggcgaacggcgccacgcagggccagggagggaggccgccagggaaaaacacgggaagagagccgaagaaacggacaagaagcggc

SEQ ID NO: 84253 - RNA, 77 nt, Homo sapiens
gaaggacgcgaagagggaaggagcggagaagcacggagcgggggaggcacagaagggagcgaggccgaagacccaga

SEQ ID NO: 84254 - RNA, 80 nt, Homo sapiens
cggacacgagcaggccacaaggggggggggagaggccgagcaccaagagccacaccaaaaaggaagaagaaaggaccagc

SEQ ID NO: 84255 - RNA, 51 nt, Homo sapiens
ccgcaaaaggccccaggagcaaggcacaacgagccagcgcagacccccgag

SEQ ID NO: 84256 - RNA, 82 nt, Homo sapiens
aagcccagccagagccccagggcaagcgaggccaggagcccgggaagcaggccaaaggaagggcgacgcccaaaacgcccag

SEQ ID NO: 84257 - RNA, 73 nt, Homo sapiens
gcaagacccacggaccggggcaggaaaggaaccaggagagagcagccagaggggacgaacagcggggacgccc

SEQ ID NO: 84258 - RNA, 63 nt, Homo sapiens
ggggaggcaaagggaggaggaggaccggaggccccaagacgcagagaagccaccagggggaaa

SEQ ID NO: 84259 - RNA, 65 nt, Homo sapiens
aaaacacaaacgaccaacagggcccaagagaaacaggcacgccgcaccacccaccagcggaccgg

SEQ ID NO: 84260 - RNA, 51 nt, Homo sapiens
aggagcacaaaaggggcgcccggccaggccccccggggcgcccggggccgc

SEQ ID NO: 84261 - RNA, 79 nt, Homo sapiens
gaaaacaaggaaggacagcagaagcgccacgcagagccccgccaggaagacacgccggggaacgaagcagaagacggag

SEQ ID NO: 84262 - RNA, 54 nt, Homo sapiens
acgcgcgggaccccgggcacggcgcgcgggaggggaccagcggggacaagggga

SEQ ID NO: 84263 - RNA, 70 nt, Homo sapiens
cccggaaaaccccccccgaagaagacaagagcagacgagggagaagcgggcaaaacagacaaaggaaaca

SEQ ID NO: 84264 - RNA, 95 nt, Homo sapiens
agaggccaaagaagggagacagaaggaaaaaggggagaaggaaccagacagcccaacggaccagcaccaccacagccagccagaacagaaggccc

SEQ ID NO: 84265 - RNA, 86 nt, Homo sapiens
aaccaaagcgccaaagaaagcaaggcagcggaaagcacagccaggccacagcccagcagcgggcagccccagcaagcagaaccagc

SEQ ID NO: 84266 - RNA, 77 nt, Homo sapiens
gggcaggcgcccgcccccaggcgcgcccagccccgcagccagggcgaacccccgcaggcgacaccgaaagaaccgag

SEQ ID NO: 84267 - RNA, 70 nt, Homo sapiens
gaagaggaaacgaaaagaaacagcgccgcacccaaccagacacccagaaggagacccaaagcaaagcccg

SEQ ID NO: 84268 - RNA, 86 nt, Homo sapiens
ggcggagcagaacggagcaggccacccaggcccaggaccgagcccgacgcccacagacaggcgaacgccggcggccggacgacggc

SEQ ID NO: 84269 - RNA, 57 nt, Homo sapiens
aaggagacacgcccggcacccagcacaagaagacaagacgagagcgagaggcaacgg

SEQ ID NO: 84270 - RNA, 70 nt, Homo sapiens
ccgcccccacacgccagcgcacaccggggccaccccaaaggggcaccagccgaagccaggcaagcaagaa

SEQ ID NO: 84271 - RNA, 78 nt, Homo sapiens
gaacacggaacagaacaacccagaacggaagccccccggaaaaggaggaccagcaagacggcaggggcacaccaggca

SEQ ID NO: 84272 - RNA, 77 nt, Homo sapiens
agcaagacgcccagagaagaaagccacacacgaggaggggcacggaagcaaaagccacgcccagaacccaggcggag

SEQ ID NO: 84273 - RNA, 68 nt, Homo sapiens
gcgcaccgcagggccagcaaagaaagggccagccaaagaagaaaaccagagcacagagcggacagaca

SEQ ID NO: 84274 - RNA, 72 nt, Homo sapiens
gccaaaaaaccaggaagcgcccaacaaaccacaggccagaccgaaacaccaaggaggcacacagcggccagc

SEQ ID NO: 84275 - RNA, 63 nt, Homo sapiens
aacccaggccccgccgaggcggccagaagaacggaccgaagccaaagaacaagagcgcaggga

SEQ ID NO: 84276 - RNA, 72 nt, Homo sapiens
cacccccacagggcagaagacacccacaacgacccaagccccgccccagaccaccggagacccagccggccc

SEQ ID NO: 84277 - RNA, 74 nt, Homo sapiens
acagggaccgagcaagcaggccacaacagaaggacccagaaggaaaccgacccagcgggccgggcggccagaag

SEQ ID NO: 84278 - RNA, 78 nt, Homo sapiens
gcaggagcaaggaccaggagcaggacggggacaggcaacagacgaaaccagagagcaccacaccagagcaagacgcgg

SEQ ID NO: 84279 - RNA, 80 nt, Homo sapiens
ggaaaggcggagccaccggccggcgaaggagaagacccgggaaggcgacagcgacgggcgacgacggccgggcccaggag

SEQ ID NO: 84280 - RNA, 78 nt, Homo sapiens
caggggacagagagcccggacaggaagggcaggcccgaagcaaccaccccccagcagcccccccaccccccggggaac

SEQ ID NO: 84281 - RNA, 71 nt, Homo sapiens
aaccggaggaggaccgcggagggaacaccggcccgagggcaggacagcaggcaccggcgaagcacagagag

SEQ ID NO: 84282 - RNA, 78 nt, Homo sapiens
agaggcacgcaccccacaaaaaaaggaccccaagaccagaagccagaggggagcagaagaggagaaggaggagagccc

SEQ ID NO: 84283 - RNA, 54 nt, Homo sapiens
ggcgagcccccgccaccgagccaccaggggccgcaaggccaggcgcgcagaggc

SEQ ID NO: 84284 - RNA, 72 nt, Homo sapiens
gaggcggcgcgaggacgggcccgagcgcgaggccgaaaggcgccagccaagaacacaccaagccagcaagaa

SEQ ID NO: 84285 - RNA, 51 nt, Homo sapiens
cgagacgggcggagaggagaagaggcgaggccggcaacaggcacagggaac

SEQ ID NO: 84286 - RNA, 74 nt, Homo sapiens
caacccggcagcagaagacaagaagaggaggacccgcggagaccgaaaacggaaacaagaagcaaggaaaacgc

SEQ ID NO: 84287 - RNA, 74 nt, Homo sapiens
cccaccgcgaagacaccggggagccccccagacccgaaaggagacaagaggacagccgcacggaacacaaaaac

SEQ ID NO: 84288 - RNA, 78 nt, Homo sapiens
aaaggaagacgagccaccgagcaagcgagccagagcccacagaagcaggaagacagaagacaggagccagagggacgg

SEQ ID NO: 84289 - RNA, 78 nt, Homo sapiens
caaagggaaccaaaagaggaccaccaagcccaaagaaccccacacgggacagggaaaaggggacccaaccacagcccc

SEQ ID NO: 84290 - RNA, 41 nt, Homo sapiens
ccagggacagccgaggagcccggaaaagaaaagaggcccca

SEQ ID NO: 84291 - RNA, 68 nt, Homo sapiens
acgcagaagaggcgagaaggaggccgggaaccgagagaaagaaaaccgacgcgacaaaaggccgaagc

SEQ ID NO: 84292 - RNA, 74 nt, Homo sapiens
gcgccgccgcgccccaccgggcaaaccgcggacgggcacaagccgccccaccacggcgggaaagcaagcaaagc

SEQ ID NO: 84293 - RNA, 51 nt, Homo sapiens
ggggagccgaagaggcacagccagccaaagcagacccccaagcgagcggag

SEQ ID NO: 84294 - RNA, 71 nt, Homo sapiens
aaacccaccaggaaggagcacaggaagaagcaggcagaggagaagcaaaacacagaggaaaagggaaagag

SEQ ID NO: 84295 - RNA, 73 nt, Homo sapiens
aaccaacacgacccaacgcccagaggagcaaagacaggacggcgagaacagaagacagagccggagacagccg

SEQ ID NO: 84296 - RNA, 81 nt, Homo sapiens
ggcccaaccgccaacgcgccccaccccacagcagaacaaaaccagccaagcagaggagaaaaagacagcaccccagagcca

SEQ ID NO: 84297 - RNA, 58 nt, Homo sapiens
ccgaggagacgggcagaaccgggcagaccacagggcgcccgccgggagagaggacggc

SEQ ID NO: 84298 - RNA, 79 nt, Homo sapiens
aaaagccaacgaggacgaccgcaaccgggaaagaccacagcaagaccacgcccccagccgggggaccaggccgaacgac

SEQ ID NO: 84299 - RNA, 78 nt, Homo sapiens
gccccgcaacacaggaaaacagagaaagaaggaaggagggccgagcccgccgacacagccaccaagaaggcacaagca

SEQ ID NO: 84300 - RNA, 96 nt, Homo sapiens
cgcgaaaggaggcaacaagaacaaggaaagaaagcacagggccgcgaaggccgcccagaccgcgaagaacacgcgcaacaccggcccaggcagccg

SEQ ID NO: 84301 - RNA, 49 nt, Homo sapiens
agccaagggcgaccagaaacagcagcgggagccggaaccaacaccacga

SEQ ID NO: 84302 - RNA, 36 nt, Homo sapiens
caaaagaagaacggcaagggaccccgacggagagac

SEQ ID NO: 84303 - RNA, 52 nt, Homo sapiens
ccaagagaaaggagccccccaagggacaaaagggcacgcccggacaacaccc

SEQ ID NO: 84304 - RNA, 80 nt, Homo sapiens
acgccgggccaagaccccgagggcgccggccgagcccgggaaaacgacagcagcagcagggccggaagacgccaccgcaa

SEQ ID NO: 84305 - RNA, 66 nt, Homo sapiens
cccaacgcacagacgagcggcggccaaaagaaacccccaaaaccggaagaaagagaaggaacagag

SEQ ID NO: 84306 - RNA, 56 nt, Homo sapiens
ggcacgaccacgcggggggcaaaggaggcaaggcaaaggcgcagaaccgccaggag

SEQ ID NO: 84307 - RNA, 70 nt, Homo sapiens
ggaggccgaaaagacagagaggggaaaccccgaaaggggggcagggagagaaggaaaacagagcaagccc

SEQ ID NO: 84308 - RNA, 76 nt, Homo sapiens
cagccaaagaaacaagccgggaaagggacaagaagggcaaagccgaagcccaccaagccgagaacaccaggaaaca

SEQ ID NO: 84309 - RNA, 81 nt, Homo sapiens
gaggaaacaacaagaaaaagggcagcgacaagccccgaccggggcaaccccagagcgcgcacagcggaagaggccggcaca

SEQ ID NO: 84310 - RNA, 81 nt, Homo sapiens
acaccacacccaccaaccccggccccaaaacgccacgcagggagacacagggcagagccaggaacacagaaggcgcgccac

SEQ ID NO: 84311 - RNA, 76 nt, Homo sapiens
cggccgggggaagggacccgcacgccgggcggggaaacccggaccggggacaccagcagcgccgccggaccaccgg

SEQ ID NO: 84312 - RNA, 87 nt, Homo sapiens
agagggaaagcgaaaacacacggaagagcgcggccagcaccccaacgggccaaagacagacaaggacagcagccccggaaggaggga

SEQ ID NO: 84313 - RNA, 53 nt, Homo sapiens
cccaacggaccagagacccacagacaacaggcacgcacaccaagaacaacggg

SEQ ID NO: 84314 - RNA, 56 nt, Homo sapiens
ggaaagagggcacgggcgccgggcccccggcccagggcgcggcccccaggccccag

SEQ ID NO: 84315 - RNA, 39 nt, Homo sapiens
agacgggaccgaaagacaccgaggccaaaagaaaggaag

SEQ ID NO: 84316 - RNA, 57 nt, Homo sapiens
gggccgcgaggggaagaggaagcaaagccaagccgggcccagcaaccggcgcagaca

SEQ ID NO: 84317 - RNA, 86 nt, Homo sapiens
cgcgggcgcgagggcagaaccggagaaacgcccaggccaaagaagagaacggggcacacagacacggacagacacaaacgaacaac

SEQ ID NO: 84318 - RNA, 80 nt, Homo sapiens
ccagggggacgacaaagagaggccacaaggacaccagcaacgaagaggcgccacggacaagaacaacagccggaacaagg

SEQ ID NO: 84319 - RNA, 68 nt, Homo sapiens
caacagaacgcaaagacggccggagaccgggacgagcagggccaccccagccccggagaccccaccca

SEQ ID NO: 84320 - RNA, 84 nt, Homo sapiens
gagaaccccagcaaccaccggagacggagaggagccaacaaggagaggcagcagaaaaggccaaagcagcagccggggaggcca

SEQ ID NO: 84321 - RNA, 81 nt, Homo sapiens
agacgagcagcccagggagcgggagacagcaggaaaagcccaggcggggcaggcccagcacgagcccagaaaccagcagcc

SEQ ID NO: 84322 - RNA, 38 nt, Homo sapiens
gcccagaagaagggcaccagcgaaggaagagcccagac

SEQ ID NO: 84323 - RNA, 83 nt, Homo sapiens
ccgggccaggccccggggcacagacaccagcgcggcccaaggaggggcaggagaagccaagagggggagggcagagagagcaa

SEQ ID NO: 84324 - RNA, 81 nt, Homo sapiens
cgaagcgaggagccagcgccgccgacaggggccgggcgcccgagccggggcgacagcaagaaggagccagcacagaggcaa

SEQ ID NO: 84325 - RNA, 94 nt, Homo sapiens
ccggaaccgccgggccgaacagcagacgccgcggagaacacacaaccaaaccccacaaggaggacacaggcaccaacgcgagaacggggcacgg

SEQ ID NO: 84326 - RNA, 81 nt, Homo sapiens
gcaagaagaacagagacagcagccaaacccccagaggaaggcgggggagaaggagaggaacaggaagaggccgaccacggg

SEQ ID NO: 84327 - RNA, 55 nt, Homo sapiens
gccgcggggggagaccccaccaccgggaaaaggggaggcaaggcaagagcgaaca

SEQ ID NO: 84328 - RNA, 73 nt, Homo sapiens
gggacggccagccaagaaccgcacgacacgaacaaccaggagacccccagcaccccgggcagcggagaggccg

SEQ ID NO: 84329 - RNA, 57 nt, Homo sapiens
cgcaccacaagcacgaagagagccgaagaccaacagagcaggggaagaaacccgaag

SEQ ID NO: 84330 - RNA, 62 nt, Homo sapiens
gcccaacccccccccaggcgaagcccaaggagccgcccgcagccgcaggcaccaagaagacc

SEQ ID NO: 84331 - RNA, 75 nt, Homo sapiens
cccacacggaggggacgaagacaaaaaccaggccaggcgaaccagccgaaaaaggagaaaccaaaaggaaaagcg

SEQ ID NO: 84332 - RNA, 60 nt, Homo sapiens
aagaagccgcggaccccacgacagccagcagcccccccaagggggacacagcaggcacca

SEQ ID NO: 84333 - RNA, 69 nt, Homo sapiens
gaacacaaacgggaaaacagagccacaaccaacaggcgcacggaggggcagagaaaaaccgagaaagca

SEQ ID NO: 84334 - RNA, 90 nt, Homo sapiens
gaagagcagcccggcggcagcaacagcgacacgagggaggcggcggcgcagcaggaacgcaacacccagagagagaagaagaaggaggcc

SEQ ID NO: 84335 - RNA, 55 nt, Homo sapiens
ccccgagagcggaacagaagaagcggagaaaagaagaagacacgcagaagaagga

SEQ ID NO: 84336 - RNA, 70 nt, Homo sapiens
cacccgagaggcacacccagaagggaagacaacacgggggagggacaaaagcggaaagcgagaaccacgc

SEQ ID NO: 84337 - RNA, 84 nt, Homo sapiens
ggccgcagggccgacaagcggaccaagccagacccaaggaccgccacagcagccgggcccgccgggagcacaggcccacgacga

SEQ ID NO: 84338 - RNA, 73 nt, Homo sapiens
gaaggaaaaccgacgagcccaggaggggcaggagaggaagggaaacaaggaagagccaggagagcccaaggaa

SEQ ID NO: 84339 - RNA, 39 nt, Homo sapiens
gcccgggcgcggaagaagccaaggaacaccaggcacaca

SEQ ID NO: 84340 - RNA, 88 nt, Homo sapiens
gcgcacacccagggcggcggagggcggccggggcggccggggcggccggccgagcgcggcccgggcgcaggggggaaaggggcggcgc

SEQ ID NO: 84341 - RNA, 74 nt, Homo sapiens
cggaggccggcacgcccgcccgaggcgacggccgcggcgcacaggacagcccaaggcggaaaagcgaaggaagc

SEQ ID NO: 84342 - RNA, 76 nt, Homo sapiens
gggagcaggcaccagcaaccccccggcggaacacccgcccagacgacaagcgggagaaggaacaagaaaaggcaca

SEQ ID NO: 84343 - RNA, 55 nt, Homo sapiens
caaggaggagaaaggaaaaagacagagcgcgaagcgggccccgaacaggaaaggg

SEQ ID NO: 84344 - RNA, 84 nt, Homo sapiens
ccagggacgcagaggcgggccgaggacgcggccgcaggggaagcggagcagcacacggagcggcgggggcacacagcccggccg

SEQ ID NO: 84345 - RNA, 87 nt, Homo sapiens
agcgcagaaggaccaccaagggcagcccgaggagcgagcggccgcccccaagcgacggcgggcagaggacaaggacgaaggcaaggc

SEQ ID NO: 84346 - RNA, 75 nt, Homo sapiens
aggacccacggcggagcaaggaacaggcccaagggagcgaccaggagagacgacaaaccggcgaccacacacggg

SEQ ID NO: 84347 - RNA, 69 nt, Homo sapiens
cgggaagcacacaagggccgaagcagggcacaaaaccaaggccaagcaagggggggaaagaacagggcc

SEQ ID NO: 84348 - RNA, 71 nt, Homo sapiens
gaaggccaggaacccgaagacacaccaggcagagcaaaaaggagccgggcaaaaacaggacggaaccgaaa

SEQ ID NO: 84349 - RNA, 62 nt, Homo sapiens
gaacaggccggagcggcccagaccccgcccgcgggagcgggcagcaccggcgcagggaagaa

SEQ ID NO: 84350 - RNA, 39 nt, Homo sapiens
aggccccccaaagcaccgcgcagacagaaggacagagaa

SEQ ID NO: 84351 - RNA, 54 nt, Homo sapiens
ccgcaacagccagagacagaggccaggacgaccacacgcccgagcaacgggggg

SEQ ID NO: 84352 - RNA, 85 nt, Homo sapiens
gagcgccaggaaagaaggaaccccgaccgcagcccccgggcacgaccccggacacgggcaggcagaaaccgggagaagccggcca

SEQ ID NO: 84353 - RNA, 57 nt, Homo sapiens
aggcgcaccgacgcaccagacggagacgcgcacagaagggcacagcagggacagaac

SEQ ID NO: 84354 - RNA, 79 nt, Homo sapiens
caccagagagggaaggcaccagaaggcagcccgaccacagcgccccaggaggcggcacggagccaccggggccagggcg

SEQ ID NO: 84355 - RNA, 59 nt, Homo sapiens
gcaaaaggcggaccgcccccgccaacgaagaccgagaccagacagacaagagaagagag

SEQ ID NO: 84356 - RNA, 52 nt, Homo sapiens
aaaaacagggaaagggccagcacaggagagagaaaaggaacagccgaagcca

SEQ ID NO: 84357 - RNA, 78 nt, Homo sapiens
cacaagcagaagccacgcaaaggaggaggcagcaacagagaaaacaggcccaaaggcaagcagagaaggaacgaagcc

SEQ ID NO: 84358 - RNA, 75 nt, Homo sapiens
gcgcggagccacacaaaggcgcacacacaaaggggagccaggaagaagacaaaacagagaggaagcagcaccaga

SEQ ID NO: 84359 - RNA, 65 nt, Homo sapiens
caaaaacagggacagccgacgagcacgcgcgcaccggaaaccaaccagagccaccgcccaggcgg

SEQ ID NO: 84360 - RNA, 91 nt, Homo sapiens
ggagggaaagagagggagccccgaccccaggccccccacagaaaaggaaagagccacggcgggaagaagcaaacgaagggcaagaacaaaa

SEQ ID NO: 84361 - RNA, 88 nt, Homo sapiens
cgcagaggaaagcgggcggcaggcgagggagcccgcgcggcgagagcccacaggcccccacagccacccaggcgaccggcaaccccag

SEQ ID NO: 84362 - RNA, 82 nt, Homo sapiens
caaccagaaccggagcaggaggcgcacaacacccagaggagaagaagagacggccacaaaccaccccagcaaagccggaaag

SEQ ID NO: 84363 - RNA, 76 nt, Homo sapiens
gcacgccgggggcccaggaggcggcggccccaagcacggccccggggcccggggacaccggagggggagaagccac

SEQ ID NO: 84364 - RNA, 82 nt, Homo sapiens
gaaggcgagcaggggcgggagagccccgcagaagacgccgacgaggcccccacagagagcacacaaacaaagcgaaaccacg

SEQ ID NO: 84365 - RNA, 67 nt, Homo sapiens
cgcgagcccaaaccaagcgcgacaagaaaggacacaaccagagggaagcacgcccgggcacagcgga

SEQ ID NO: 84366 - RNA, 94 nt, Homo sapiens
aaaagagaaaaagagcgaaaaagaccagcgcgagacagagagacacggaaaaggacacggacagagcccagaaaaagcaggggcaagcaaaagc

SEQ ID NO: 84367 - RNA, 95 nt, Homo sapiens
agaagggggaaaacccccaaaggagcaaccgacgccgccaagccggagccacgacccccgagacgggccgcggggcgggggacgaacgccagggc

SEQ ID NO: 84368 - RNA, 77 nt, Homo sapiens
caagggcagcccaaggacacaaggaaagacacagagccaggacaaaaccaggcagaaccaacacgaacccaagcaca

SEQ ID NO: 84369 - RNA, 52 nt, Homo sapiens
ggaccccgaccccgaggcgagacggaaagccccggcacaaagcagaccgccc

SEQ ID NO: 84370 - RNA, 68 nt, Homo sapiens
aaagggcaagacaagagcggaacgaaaacggaaaacccagaaggcccccacgagacagcccaggcaaa

SEQ ID NO: 84371 - RNA, 65 nt, Homo sapiens
ggaggaaggcgggcgacaccccccgcagcaccccccgggagggggggacggaagcacagagagaa

SEQ ID NO: 84372 - RNA, 85 nt, Homo sapiens
ccgacccaccgagggacggcccgggccccaggagagaagaccagaggaagagggaccagaaccagccgagaagaaggggaggcag

SEQ ID NO: 84373 - RNA, 75 nt, Homo sapiens
gcggcagcgaacgggggcgaacggggcgagccggaggagcacccaaccccgcgagcccaaaaggcagagcgagga

SEQ ID NO: 84374 - RNA, 71 nt, Homo sapiens
cgcccccgcagcagcgccaggaagagaaagaacgcgaccagggcgcgccaggggcacgagaaggcaaaaag

SEQ ID NO: 84375 - RNA, 76 nt, Homo sapiens
ggcagaggcacgcagcgccgggcccaggggcaagccgggagaggaagacacagagaaaccaaagccacaaagacag

SEQ ID NO: 84376 - RNA, 82 nt, Homo sapiens
ccgggacgcgacgggacgcgcgggaccggcgcgggggcgcggggaccagcagcggagagagaaccccacccaagagacaaag

SEQ ID NO: 84377 - RNA, 75 nt, Homo sapiens
gcgggcgggggcgggggccggagagaagcggaaagggggaaacaagcagcaggaagccccagaaagcagaagaag

SEQ ID NO: 84378 - RNA, 83 nt, Homo sapiens
gaggaggcacagggcgcggaccgcacgagcgcgaacaccccaccagaccacccagcaagcccacaaaaaaggcacaagcaggg

SEQ ID NO: 84379 - RNA, 57 nt, Homo sapiens
gccccccagcaaacgagaaaaacccagcgaccgacgaccggcggaggcagggcggac

SEQ ID NO: 84380 - RNA, 67 nt, Homo sapiens
gagagagggagagccaaagaagagcgggacaaagaaggacaagaacacacggagaagaggaaaggaa

SEQ ID NO: 84381 - RNA, 82 nt, Homo sapiens
ccgagcgcgagggaggagggcgccggcgcccggggaggcgcacggggaagcccccaaaacacaagaggacggagaagcgacg

SEQ ID NO: 84382 - RNA, 99 nt, Homo sapiens
accgccgcaccaggccaccgccacgggccgagacacgcagcggcggccagggaccaggagaaaccgaaacgaacccagccagaaacacaaaacgaagag

SEQ ID NO: 84383 - RNA, 70 nt, Homo sapiens
agggccgagaaggacaggacagagacaccaggcgccgagaaggccagcagagaaacaggcaggagaggcc

SEQ ID NO: 84384 - RNA, 84 nt, Homo sapiens
cacccgggacacagcgccaccccgagcagcggggaagcggcgggcgcaaagacaccgccagaagaccagaggaccccggaggaa

SEQ ID NO: 84385 - RNA, 78 nt, Homo sapiens
gaccacccccacccccgcgccacccgggcgacaccagagagggccgccacggccccccaggcgggggaggagagaaca

SEQ ID NO: 84386 - RNA, 76 nt, Homo sapiens
cagaagcaccgcagcccgcagcccaggcacgcagcacgggggcaggggccgacccagaacgccagcgccgcaagga

SEQ ID NO: 84387 - RNA, 88 nt, Homo sapiens
gacgaacgagcagacaacaaagaaaacgggaagagcacccggagaggaacacccacaacaaggaacggcgccaagcgggagagaaaca

SEQ ID NO: 84388 - RNA, 69 nt, Homo sapiens
aaaaagcccgacgaggaggcacgggcgaaggccagaaccgagaggaaacgaaggagcccagccagcaca

SEQ ID NO: 84389 - RNA, 50 nt, Homo sapiens
gggcagagcggggcggccaagacacgcacgagggcaagggaccccaagag

SEQ ID NO: 84390 - RNA, 77 nt, Homo sapiens
ggaaacaggcgaccgagggaagaccacaaccacgaccacaaaccggcggagccacaggaagaagagagggcgaagga

SEQ ID NO: 84391 - RNA, 75 nt, Homo sapiens
aagaacccacacaaggacaaggcaaagaaagggagacaggcagaaccagacccggagcagacgaggaggagggac

SEQ ID NO: 84392 - RNA, 42 nt, Homo sapiens
gacagaggacaggaggaaaaccagccaccagccaaggacaga

SEQ ID NO: 84393 - RNA, 71 nt, Homo sapiens
aggaccagcaaacagaaaagggaaaaggggaccgggaaacaaccagaaaccaacaaaagaggcccacagag

SEQ ID NO: 84394 - RNA, 61 nt, Homo sapiens
aacgaacaccggaccgccagccccaacggacccaggcaaaaggagggcaccccgccaggac

SEQ ID NO: 84395 - RNA, 62 nt, Homo sapiens
gccgagccgacggacgcacaggccgcgccccaggcggcaaacgcaaagagcaagaaccaaac

SEQ ID NO: 84396 - RNA, 74 nt, Homo sapiens
gaggggagaaagacagcgggcccccagagcccacacagaacacacaaagaacgaggacaccaccccggggaggg

SEQ ID NO: 84397 - RNA, 64 nt, Homo sapiens
acacacagaaccccgagaggggaaagaggaagagcaccaacacagcacccggcggcaaaccaaa

SEQ ID NO: 84398 - RNA, 66 nt, Homo sapiens
gccacaacaccggcaggaaccaccaggacagagagcgggggcaggaaggaaagcagaaccaagcgc

SEQ ID NO: 84399 - RNA, 76 nt, Homo sapiens
gcggcaaggcaagagcggcggcgccaagggccgcgggccaagagcaaaagccgaccgcagagaccaagagagcaga

SEQ ID NO: 84400 - RNA, 78 nt, Homo sapiens
gagagagcagcccggcagacgcagaaccagcccagggaagcaaggcgagagacgaagcagaaccaaagcacacagagg

SEQ ID NO: 84401 - RNA, 75 nt, Homo sapiens
caaagccccggggggcaaaacacccccaagagaacacgccaaacaaaaggaaggggaaccacagcaggaacgaga

SEQ ID NO: 84402 - RNA, 77 nt, Homo sapiens
caccccacaccgacaccacggaggaggcggccggagggacacggacgacaccgagcccaaccgaccaaccacaacac

SEQ ID NO: 84403 - RNA, 62 nt, Homo sapiens
gaaggcgccaggcgggaaaccggcccagcggcgccacagcagaagggggaacaaacaaaagc

SEQ ID NO: 84404 - RNA, 41 nt, Homo sapiens
aggaagggccgaggaagcggggacccaggggacaaagcaaa

SEQ ID NO: 84405 - RNA, 74 nt, Homo sapiens
gcgccgcgccgcgccgcaccccgagcgaccgccaaggccgacaaaaccggccgggaagcaagaaaccgaccgcc

SEQ ID NO: 84406 - RNA, 76 nt, Homo sapiens
gggagaaaaacaaaagggaaagacagcgaggacgaggagagagaagaccaaccaccaaagaacaagcgcgacagga

SEQ ID NO: 84407 - RNA, 41 nt, Homo sapiens
caacagccgccggcggaaggccaccccagagaagaggacga

SEQ ID NO: 84408 - RNA, 74 nt, Homo sapiens
gaagcaaaaaagaaacgcaggcccgaccgaagggagcacagcaagcgggagcaggcagaccaaaggaacagaag

SEQ ID NO: 84409 - RNA, 96 nt, Homo sapiens
ggaccacaggcccagacgagcggaggaggcacagggcgcggaccgcacgagcgcgggggcacccgaggaggaagagggcagggcccacggaaagaa

SEQ ID NO: 84410 - RNA, 78 nt, Homo sapiens
aaagcgcgaagaggggaagcaaagcaagggcgaaagacggaaaggcccagaggacgaccgccgaagccacgacaacca

SEQ ID NO: 84411 - RNA, 79 nt, Homo sapiens
gcccacccgcggcgcggggaaaggcgcgagacccagaggccgcggccgcggaagaccgaggagcagggagcaaccacaa

SEQ ID NO: 84412 - RNA, 78 nt, Homo sapiens
accgcggcgaggacggggcgccggcgccgccgcccccgggccgcggccgcaggcggacaaggacaccgcgaaaggcag

SEQ ID NO: 84413 - RNA, 74 nt, Homo sapiens
ggcaagacacagcggggagggaggagggaccaacagcccgcgcggcagacaaggcccccaaaacacaagaggac

SEQ ID NO: 84414 - RNA, 82 nt, Homo sapiens
caaggaccccgccagcccaagaagcgaggacagaccagccgacagcgaccaaggccagagcgaaaggccacggccagccgcc

SEQ ID NO: 84415 - RNA, 70 nt, Homo sapiens
cccgacgaggccccagcgcacggaccgccggccgggcggccccgccacccacagacggcagccgggacca

SEQ ID NO: 84416 - RNA, 101 nt, Homo sapiens
cgggccagcccaggaccccaggggaacaagaggccacgcagagccacgccgggggagggaagcagccaagcgggcagaagaggaagccccagacacgaggg

SEQ ID NO: 84417 - RNA, 125 nt, Homo sapiens
gggcccaacaagggccacaaaggaccaagaacggagcaagcccaggcacagccgacgccgcggggccaagacaaggggcgcagagcggggggacaggcgcaagaccggagaagcaggagcggaac

SEQ ID NO: 84418 - RNA, 56 nt, Homo sapiens
acggaaaaacaccacaggcagcagcagagaaccgggaggcccagggagaaaaggag

SEQ ID NO: 84419 - RNA, 76 nt, Homo sapiens
aaaaaaagcaagaagaaaggaagaaaagagagaaggagagaaccaacacccacacgagaccccagagcggcccccg

SEQ ID NO: 84420 - RNA, 75 nt, Homo sapiens
acccagagcgcacggcgacgccccaggggaaaacccccgggaccaggcaaaggccgaagaggaccaaaacaaagc

SEQ ID NO: 84421 - RNA, 59 nt, Homo sapiens
cagcccgcagccccgccagccacccccagagcgcaagaccgggggacggggcccaccgg

SEQ ID NO: 84422 - RNA, 72 nt, Homo sapiens
ccaggcgacacaaagcagcccccaacgaagaggcacaaagggcccccgcgaagccccagagccgccaggcag

SEQ ID NO: 84423 - RNA, 86 nt, Homo sapiens
gccagcccggcgggaaggaaaaccgcgcagagagggcggaaaacaccccaaaagccaaaagggaaaggaaaagaccaacaacagcg

SEQ ID NO: 84424 - RNA, 65 nt, Homo sapiens
gcgcgggagccacgcagaggacgccggaacacccggaagccgagaaaggcagaacaagggagaag

SEQ ID NO: 84425 - RNA, 75 nt, Homo sapiens
ggcacggagccagacacaaaacgcacgaggaaaacagaaaagcagaaaaaagaagagaaaagaaacccgagccgc

SEQ ID NO: 84426 - RNA, 53 nt, Homo sapiens
ccgcaggcagccaagaccaggaaagcccaggaaagagacacgcaaagaagaaa

SEQ ID NO: 84427 - RNA, 67 nt, Homo sapiens
gaagcccaagaccaccgggcagccgcggccacacacccaaaccaagggagccgccggaaaccgccca

SEQ ID NO: 84428 - RNA, 80 nt, Homo sapiens
ggcacgaaccagaaaccacaacagacagggggaggggggcagaaaaaagggccggagacaggcggaacgccacaccccca

SEQ ID NO: 84429 - RNA, 75 nt, Homo sapiens
gcaccgcggcggcgccgggggggaaaccagaaggaggaacagaggaggggagcaacacgaagaaacgaagccgga

SEQ ID NO: 84430 - RNA, 77 nt, Homo sapiens
cgcccgcgccccgccgcggggcgcgcggcgccggcggcgcgcgacccccgcgcagggcacacggcacggacagggcg

SEQ ID NO: 84431 - RNA, 83 nt, Homo sapiens
cggggcggagggaacggagcgggcgggaggaggccggggaccacacaggagcggagccacgcgggccaagaaggagaagcgcg

SEQ ID NO: 84432 - RNA, 76 nt, Homo sapiens
aaacgcgcccgcccccaggggccacacaccacagcaaccaaggccacgacggcaagcaacgagcgaagccgggggc

SEQ ID NO: 84433 - RNA, 80 nt, Homo sapiens
gacgacgaccggggacggggagcgacggggcggacccagagcgaccaggcgcgccaagccccgccacccagggccacccg

SEQ ID NO: 84434 - RNA, 80 nt, Homo sapiens
ccagggggccccgggcacagccacacgccgggcaggagccacggccgacgcccgccgcggccggggaacaggccacagcc

SEQ ID NO: 84435 - RNA, 58 nt, Homo sapiens
gcaccccaccccaggagccaggccccgcgcggcacagaggcaggacagaacaaaggag

SEQ ID NO: 84436 - RNA, 73 nt, Homo sapiens
accaagaccgagagagagacgaccaccacagccaacaccccgggcaaggggagcagacaacaaaacgagcaag

SEQ ID NO: 84437 - RNA, 51 nt, Homo sapiens
agccacacgcccagcagccaccaacacccaaagagagggccgaggcagaca

SEQ ID NO: 84438 - RNA, 72 nt, Homo sapiens
ggggacgggaagacggagagagagggcagggcggacgaccggaaagacaacagacaaacgaaggaaacgcga

SEQ ID NO: 84439 - RNA, 41 nt, Homo sapiens
gggaagaaagaagcagcgccaggcaagaagagaaccgacag

SEQ ID NO: 84440 - RNA, 64 nt, Homo sapiens
gcggagaaccaggaaccgcgcaggggacggagggcaaacaaggggaaggaggagggaggcagga

SEQ ID NO: 84441 - RNA, 57 nt, Homo sapiens
gggcgcgcagaacaggcgcgcggcgacacccacccgggacagcagaggcacacaaac

SEQ ID NO: 84442 - RNA, 75 nt, Homo sapiens
cgacaaggcaacagcagcggccagggccagaggcacacagagaaaaaaagggaacaaaacacagcaagcagacaa

SEQ ID NO: 84443 - RNA, 52 nt, Homo sapiens
cgcagggcgcccccgggcagcgcaagaccccgcacggaagcagcaagcacag

SEQ ID NO: 84444 - RNA, 57 nt, Homo sapiens
ccaggcacccggagggggaaggggaacggcgagggaacccaggaaggagggcgacaa

SEQ ID NO: 84445 - RNA, 60 nt, Homo sapiens
gcccacgccagccgggccaggaggacacgcaggggagaaccggaggaagcagagcaaggc

SEQ ID NO: 84446 - RNA, 69 nt, Homo sapiens
ccgcagcggaggaagggccacgccggcgaggaggcggcggcggcggacggcggggcgcaccacacaaca

SEQ ID NO: 84447 - RNA, 104 nt, Homo sapiens
accgaaccaacccaagaggaaaagcaggccaggaaagaaacggcaacgaaagggcggaaacagggagggccacagcccccgcccgggagacaaagccccaggcc

SEQ ID NO: 84448 - RNA, 83 nt, Homo sapiens
accggaagaaaaccagggggcggagggacaccgcccggcgcaacggagaccggcgggccacgaacgcaggcgcgacggccggg

SEQ ID NO: 84449 - RNA, 79 nt, Homo sapiens
ccggccggacaagcccaggagccgaccagagagcagggcccgccccaccgggggccaccccagggaggagaagagggac

SEQ ID NO: 84450 - RNA, 78 nt, Homo sapiens
cgggggccaccagccagaaggagaaagacagcaaagaaaaggagaagaaaggaaaaaaacaaccccgggcaccccgcc

SEQ ID NO: 84451 - RNA, 82 nt, Homo sapiens
gccgcagggcgccggagccccccagggagcggagcgcccggccggcagcgggaaggcgcaaaaggccacgccggagggaacg

SEQ ID NO: 84452 - RNA, 82 nt, Homo sapiens
gggccccgggcagcagagcggaggcgcgccacgaaaccgaccgcggcaagagcaggcgacgccggaccgcgaagagacgaga

SEQ ID NO: 84453 - RNA, 62 nt, Homo sapiens
gagcggcagcagcaccagcccaagagaagggggagcgacagaccagccacaggagaacacag

SEQ ID NO: 84454 - RNA, 81 nt, Homo sapiens
agaaggaacaagccagagaaggcccgaggagagaacagggaccaaaagagcgcccgacacagcagggcgaggaccaccaga

SEQ ID NO: 84455 - RNA, 79 nt, Homo sapiens
gcggcacaccccccaagaccggcggcccaacccaccgggaaagaaagccaaaaacccgaagcccagaaaaacgcagaga

SEQ ID NO: 84456 - RNA, 44 nt, Homo sapiens
gcggccaccagggaacgagagccgccaccaaaaccccaacaggg

SEQ ID NO: 84457 - RNA, 41 nt, Homo sapiens
ccaggggaacagcgagcagacaaagagaagccgcggagaag

SEQ ID NO: 84458 - RNA, 77 nt, Homo sapiens
aggccgaccgagacgggcggagaggagaagacacgcagcggccgaggcaggggaagagagcggccccggacacgcga

SEQ ID NO: 84459 - RNA, 59 nt, Homo sapiens
cccgaaaaggagaaccaagaagagggcacaacaaaaccaagaggaccgggagaagccgc

SEQ ID NO: 84460 - RNA, 67 nt, Homo sapiens
gcggggcccggcaccaggaccaccgcggcagcacgcggcgggcacacaaaggaacagaaaacaacac

SEQ ID NO: 84461 - RNA, 47 nt, Homo sapiens
gggcggcagagagcggggcggcggcagagaccgaaggagcagacgag

SEQ ID NO: 84462 - RNA, 85 nt, Homo sapiens
cggccggagcgggaggcgggccagcgacaaaaagagcccgagcgggaagaagccgcagcaagccgcagcggcgcgcaccgggcgg

SEQ ID NO: 84463 - RNA, 81 nt, Homo sapiens
gacgggggggcgagacgaccccggagacaccgaagaccacaccagagggacaggagccagcggcccaggggcgggggagga

SEQ ID NO: 84464 - RNA, 83 nt, Homo sapiens
ccggaacacggcagaacacagggacccggcaaagagagaggcacacgccgccgaaggccaggagcagaggccaacgccccaag

SEQ ID NO: 84465 - RNA, 81 nt, Homo sapiens
ccaggaaaagccagagcgccaggagcagcaaaacacacaaagagggcagcacggggagaacccacaaaggacaagaagcga

SEQ ID NO: 84466 - RNA, 68 nt, Homo sapiens
agagaagacgacgcaccgcaggcagacaaaagggccaaagaagggagagagggccacagagccgaaca

SEQ ID NO: 84467 - RNA, 81 nt, Homo sapiens
ccgcggcaccgggggacaggaaaagagcagaaccggaaagagcgaggccccgagaccccggagagcagcaggacagcgaga

SEQ ID NO: 84468 - RNA, 84 nt, Homo sapiens
cacgcggacgccgccagcgcagacaaccagacccaccggcggccccgggagaggagcaagcaagggagcgacaggagacaaggg

SEQ ID NO: 84469 - RNA, 71 nt, Homo sapiens
gagcacccgacccacaggccagagaggacaacaggcccaacccaagccagggggcccaggaacagcaggca

SEQ ID NO: 84470 - RNA, 68 nt, Homo sapiens
ggccaggccggaggaacggagcaccgcgcaaaaaaacggacagcgaacccacccaacacggcaaaaca

SEQ ID NO: 84471 - RNA, 35 nt, Homo sapiens
ccggggggggacaaggccagcccgcgagcagcgcc

SEQ ID NO: 84472 - RNA, 70 nt, Homo sapiens
gagacaagagggccgggacagcgcgggaaggggaacaggacacaaggagcggaaaagacccaaaaagaaa

SEQ ID NO: 84473 - RNA, 80 nt, Homo sapiens
ccgagacagccacgcagagccgccccgggccaccaccaccacagacagagggaagagcggaacaccaacaaaccagcaga

SEQ ID NO: 84474 - RNA, 78 nt, Homo sapiens
agcagcaggagcgccgcccacgcggagcaacaagcacccacaaaagcgaaaagccagacaggaacaccagacagaaga

SEQ ID NO: 84475 - RNA, 76 nt, Homo sapiens
caagggcaccaccccgagagaggacgaagaacaagaaaaggagaacaaccccgccacgcccaagcacccggaagcc

SEQ ID NO: 84476 - RNA, 76 nt, Homo sapiens
gaaggaaaaccccagcgaaacaccaagaggacccagagcaggacggacaccgaaccggcggcgaggcccagaccca

SEQ ID NO: 84477 - RNA, 35 nt, Homo sapiens
cagcggcggccagggaccaagagcgaccaaacccc

SEQ ID NO: 84478 - RNA, 68 nt, Homo sapiens
aggagcacaacaaagaacggacacggcacgccacacccgggaaaacaccacacacggaggccaccgcg

SEQ ID NO: 84479 - RNA, 53 nt, Homo sapiens
cagaaaagcacaccaagagccagcaagcaaagagccagggccgccggccaggc

SEQ ID NO: 84480 - RNA, 54 nt, Homo sapiens
cgagccagaagcagagccggaacaagaggacgaaaacacccgaggcccaacccc

SEQ ID NO: 84481 - RNA, 83 nt, Homo sapiens
gagggcgaaaaaaaagaaggaacccaaagaaccaccccaaacaggaggagaggccacagcccgggaagacagccacaccgaga

SEQ ID NO: 84482 - RNA, 83 nt, Homo sapiens
aaaaacaaacacacgcaaaggagaaaggaaccgacagggggagaggcaccagcaacagaccaaccgcagcaagcacagagaca

SEQ ID NO: 84483 - RNA, 78 nt, Homo sapiens
gccaccagcaggacgccgccgcggccgggcgaaagaggcaaccgagaggcaaagaaacagagcggaccagcaaggagc

SEQ ID NO: 84484 - RNA, 34 nt, Homo sapiens
aagggaagcggcaaacggcggacccagaacgccg

SEQ ID NO: 84485 - RNA, 76 nt, Homo sapiens
agaggggaagagcagcgcaaaccgaaagccacacaccagacccgggcccaaagccgaaggcaagggaaggaagacc

SEQ ID NO: 84486 - RNA, 69 nt, Homo sapiens
ccgggccgaccaccccaagaaaagaggaggaggagagggaaccagagcgccgggaagcggaagcaaaga

SEQ ID NO: 84487 - RNA, 75 nt, Homo sapiens
accgggacggaccgagaccggaccgagagcggaccgagagcgcgaaacgcacgagaaggagcgagaccgggcgcc

SEQ ID NO: 84488 - RNA, 84 nt, Homo sapiens
agaaaacccgcccccagcgggaggaaggacccggggaggccggccacgccccgcacgcgacgggcaggccggagagcagcgggc

SEQ ID NO: 84489 - RNA, 74 nt, Homo sapiens
aaccacagagagagagagggagggagacacagcaccagagaaaaaaaacggaccaccgcggaagaccaaaaaac

SEQ ID NO: 84490 - RNA, 67 nt, Homo sapiens
ggggcgagagagagaccagggcgcccaagcgcaaggaaaaggcaccagaccaggagggagaaacccc

SEQ ID NO: 84491 - RNA, 67 nt, Homo sapiens
cacaggaggcagaaggaaccgaagaagacaggaaaacgcaggaagggccaccaccaacccggaagca

SEQ ID NO: 84492 - RNA, 81 nt, Homo sapiens
ggagacgggcccagcggacgggcgggcggcgggcaagcacacaagaaggagacagggaaacgaaaaccaccgggcaccacg

SEQ ID NO: 84493 - RNA, 85 nt, Homo sapiens
cgcgcgcgcggccccccccccggcgcccccaggggcagaacccccgagcggccccccagaccagcccgaccacggagaccgacgg

SEQ ID NO: 84494 - RNA, 66 nt, Homo sapiens
gaagggccaggcacgccaccacaggacaaagcggcaaacgccacagcgggggaggggccaaaggga

SEQ ID NO: 84495 - RNA, 79 nt, Homo sapiens
caaaccgaaaggacacacgaggccgcaacggcagcgaaaggagcagaggcgcggcacagaggccaagaggcgcgaagaa

SEQ ID NO: 84496 - RNA, 67 nt, Homo sapiens
ggcagggaaaagagcccccgagacggccggcaacaagcgaggggggaggccaggcgcccagaacggc

SEQ ID NO: 84497 - RNA, 78 nt, Homo sapiens
agcaggcacagcacgggcagagccagacacgccccaagggccaccccacccgaggccggggaccgaagccaagagaaa

SEQ ID NO: 84498 - RNA, 77 nt, Homo sapiens
ggcccacggccggcaaaggcagcacccacccacggcccaacagcacgacccgaggaaagaccacagcaagaccacgc

SEQ ID NO: 84499 - RNA, 66 nt, Homo sapiens
aaaagcggggcacaaaaagacacaacagaaagaggaaaaaagcgcgcggaggcaggccagcagcaa

SEQ ID NO: 84500 - RNA, 81 nt, Homo sapiens
gaacccccccacgccagccaggagaagaagcgagcccagagcaccagccaggacccccaagagcaccaacgcacacacgga

SEQ ID NO: 84501 - RNA, 81 nt, Homo sapiens
cccgcggcgaagggaagaggcccagccggcccgcgggggagccccgggagccgcacgggcggaaaacaccccaaaagccaa

SEQ ID NO: 84502 - RNA, 75 nt, Homo sapiens
ccccagaacgcccggccaggcacaccgccccacagcccgcccaacaccaaaaaccagaaaagccagacagacccc

SEQ ID NO: 84503 - RNA, 72 nt, Homo sapiens
cggagaagcgagcagcggagcgaggaagcaagaaagccgaaagaaaaccccagcgacaccgccaagagccga

SEQ ID NO: 84504 - RNA, 55 nt, Homo sapiens
cagacggacagacccacaacaccaggcgccagcaaaccagccagcacgggggccc

SEQ ID NO: 84505 - RNA, 78 nt, Homo sapiens
aggagcacgcgaaaaaccagaccaaacgaaacgcccgcacagaggagaggagacgccggagcgggacgaccagagacc

SEQ ID NO: 84506 - RNA, 78 nt, Homo sapiens
aaggagggcggcgcgccgagcgggagaagcccaccacgcaacgggacggcgcggcggaaggcgcgccagacgagccac

SEQ ID NO: 84507 - RNA, 60 nt, Homo sapiens
aagacagaacgggaaacggcgccacccagaagcagccggccagaacacacagaaaagggc

SEQ ID NO: 84508 - RNA, 82 nt, Homo sapiens
gcccccgccgccccccagagacacaccggagcaccgagacggagccagaacgagcccagcggagcagagacagcaggaaaag

SEQ ID NO: 84509 - RNA, 59 nt, Homo sapiens
cccccccaccagaggacgggaggagcagcaacagcacgcagcagagagcaaaagaagac

SEQ ID NO: 84510 - RNA, 59 nt, Homo sapiens
gaacaacagaaggagaaaagaacagacacaccaacagcagcagcggagcgaggccggcc

SEQ ID NO: 84511 - RNA, 73 nt, Homo sapiens
ccgggcgcggcggcgggacaccgagcccggggaggggccccgcgaggggaagggggccagacaaccagggaag

SEQ ID NO: 84512 - RNA, 56 nt, Homo sapiens
cccagggaggagccagaacacagaccgccagagaccagagaaagggcagaaacaca

SEQ ID NO: 84513 - RNA, 36 nt, Homo sapiens
gggccaggaaacaaagcccacccggacaagacgacg

SEQ ID NO: 84514 - RNA, 72 nt, Homo sapiens
ccaaagaagggagagaggagagagggagccacacgggagaacggaccccggagagccgaggcccgggcgcca

SEQ ID NO: 84515 - RNA, 80 nt, Homo sapiens
agacaaaagacgggaagacgcaacgcagaagaaaagccagccgcggaggccgagaagcaggaaacaacggcagaccacac

SEQ ID NO: 84516 - RNA, 68 nt, Homo sapiens
ggggacggcgcggccaggccggagaaggcgacggccgaaccacaaagcaaaccagacagaaccggaac

SEQ ID NO: 84517 - RNA, 83 nt, Homo sapiens
caccggcggccccaccagcagacgcagccgagacaccagcccgaaacaccaccaagacccaacagaggaagccgcaagaaacg

SEQ ID NO: 84518 - RNA, 70 nt, Homo sapiens
ggacgcgcacgagggacggggaaagaaggagagaacggggacaaggcaagacagacacccagccccgaca

SEQ ID NO: 84519 - RNA, 75 nt, Homo sapiens
ccagaaagcagcagcagaaaacgaaggaagaggaggcgagaacgcggacaagcaaacaaagaggaaaaagagggc

SEQ ID NO: 84520 - RNA, 75 nt, Homo sapiens
aaacaaggcgagcggaacagcaagcacccaaaaggggccgggcagccacaacaggacacggccaagcccggacac

SEQ ID NO: 84521 - RNA, 57 nt, Homo sapiens
agacccaggacaccccgaagccgagaaagaagaaggagccccccgagagcaaaccag

SEQ ID NO: 84522 - RNA, 82 nt, Homo sapiens
cggaggacagcagcacagaagcaaggacaagaggggccagaaggaagaacgaagcgcgcagaaaacacagaaggcaaaagcg

SEQ ID NO: 84523 - RNA, 72 nt, Homo sapiens
gaagagccacgaaaacaggaggcaacccaaccggcagaaggcagaggcaacagacaggaacaagcgggaaac

SEQ ID NO: 84524 - RNA, 67 nt, Homo sapiens
ccgcccccaccccggcccaggggagcgacagcccaacgcagccacggaaaagcccggaaacaagaga

SEQ ID NO: 84525 - RNA, 75 nt, Homo sapiens
ccgggaccggccaagggcccacacaccaagaccaagggggccgccacaagccaacgaggggaaggaccaaaaaac

SEQ ID NO: 84526 - RNA, 66 nt, Homo sapiens
aagcagggccccgaaggcgggcgcggacggcaggggcgccggggaacccgcgggaagaagcaacaa

SEQ ID NO: 84527 - RNA, 82 nt, Homo sapiens
ccgggagcgcggccgccgcggcacggggaacgcagggcagcgagacccggagaaggcaggacacccacaaaggaaaacaaaa

SEQ ID NO: 84528 - RNA, 77 nt, Homo sapiens
ccacaaccgggccggccccagagcccaccgggaggagaaggaggaggaacgggagagcccagagacaagcaaagagg

SEQ ID NO: 84529 - RNA, 77 nt, Homo sapiens
gaggaaaaccgaaacacaggccagggccaaagcgggacgacccgggacagcccacggggcagaccagcgaccaccgg

SEQ ID NO: 84530 - RNA, 57 nt, Homo sapiens
gccgggaacggcgccggaggaccagacccaggagggggagccagaaaaacacagcgg

SEQ ID NO: 84531 - RNA, 68 nt, Homo sapiens
agagccaccagggcaaagagaagcaacgggacggaggcacaccaaaaacagaacgccaccagggcaag

SEQ ID NO: 84532 - RNA, 78 nt, Homo sapiens
gggcgacagcgcaaggagacgaagccccccgggaagacacaaacgcaccaccagaaagccaagcggaaaaggaaaccc

SEQ ID NO: 84533 - RNA, 58 nt, Homo sapiens
cgaccaccggaacggacagcccccccaggcagagaagaccagggaaacaagcaaaggc

SEQ ID NO: 84534 - RNA, 78 nt, Homo sapiens
ggggaggccccagaggcacgagacccaggaggaggccacaccccccgggcacaccacagcaacccccagccacaacgc

SEQ ID NO: 84535 - RNA, 78 nt, Homo sapiens
agaccaaggcgcaaccggacgcgagcgaggccggacgccggaccgccacgccaccgagcggagaagggaggcagccgg

SEQ ID NO: 84536 - RNA, 77 nt, Homo sapiens
accggggggcccccacccaagcacgcaccaagacgacaagagcagggggggggaagaacgaggaacgcgcacaccac

SEQ ID NO: 84537 - RNA, 67 nt, Homo sapiens
gcagaaggccggagacaccagcagacaacggcaagcggagaagagcaaggccgaaccgagaggaagg

SEQ ID NO: 84538 - RNA, 81 nt, Homo sapiens
caaagacggcaaaagcacaaggaccgcggacagagacaacaccgagagagaagggacaaaagacggcaccccaccgacgac

SEQ ID NO: 84539 - RNA, 68 nt, Homo sapiens
agggcgaaccggcaaccaccaccaggagccagcacgaggggcgcccaagccggcccccgcaaaggcca

SEQ ID NO: 84540 - RNA, 77 nt, Homo sapiens
acggcccccagaacccagagacgggcagccccaccaaagccaccaagccaagaccagcagccaaaggaagaaggaca

SEQ ID NO: 84541 - RNA, 53 nt, Homo sapiens
cgcgcgaccgcgccccggggacccagaggaaggagccagaagagaaaaccacc

SEQ ID NO: 84542 - RNA, 69 nt, Homo sapiens
ccccaggagacacacagccgcccccggaaaggccggacagaccacccgacagccggcacaggcaggacc

SEQ ID NO: 84543 - RNA, 63 nt, Homo sapiens
cgccccaaggcggcgcgaagccacaagaaaggaagcaccacgccagcgacccgggagggggcc

SEQ ID NO: 84544 - RNA, 76 nt, Homo sapiens
gcgcagcaaaacagacaagacgaagacagccacagaacaaccaggaccagcaggcaccacacccagaccaccaaaa

SEQ ID NO: 84545 - RNA, 75 nt, Homo sapiens
cccggcggcaagggaccgaacaggaagagagaccgaggcgcagggccgccacaggcgcccgcaaaggccccgcca

SEQ ID NO: 84546 - RNA, 69 nt, Homo sapiens
cagaggcccaagaacacgcaaacggccaagggagagccaaccaggaggacccagaagggacaagccccc

SEQ ID NO: 84547 - RNA, 54 nt, Homo sapiens
aaggaccaagaaccaggacaccgagaacagcagcaggaagcgcccagccaccag

SEQ ID NO: 84548 - RNA, 64 nt, Homo sapiens
ggcggccggagcccccgcgcgggccgccacggggcacaggcgaccgaagccaccgacaaggaaa

SEQ ID NO: 84549 - RNA, 76 nt, Homo sapiens
aagcaggaaacagaaaacaacaaaaaacaagcaacacggaaccacaggcacagaggacagaggccacgaagccaga

SEQ ID NO: 84550 - RNA, 93 nt, Homo sapiens
aaggcgaaaaacacagaaaggacgcggaaaaagggaccaagaaaggcccagggaccaaagcccggacaaggcccgagcaccaggaccgcagaa

SEQ ID NO: 84551 - RNA, 75 nt, Homo sapiens
aggaagaaaccgaagaacggcgccgggaacccaacaagggagcaaacagagaaagaacccaaacacacagaaaaa

SEQ ID NO: 84552 - RNA, 78 nt, Homo sapiens
acacagcccgggccccccggaaagggcagagcggaccgcgaagagagacacgcaggaaagccccagccacccacaaac

SEQ ID NO: 84553 - RNA, 80 nt, Homo sapiens
ggagaggagcggcgcaggcgcagacgcgcgggcgggaagaggcggcgggcaaacggggcaccaagggcgcaggaaagcac

SEQ ID NO: 84554 - RNA, 80 nt, Homo sapiens
ccgcagaggacagcaggcccaagcgcacacccagaaacaaccccggaccaggggacaccccccgagcagagggaaggaag

SEQ ID NO: 84555 - RNA, 46 nt, Homo sapiens
agcagcgcaccccacgcagaccccgcgagcaagaaggggagaccgc

SEQ ID NO: 84556 - RNA, 75 nt, Homo sapiens
ccagcacccgggccgcgggagcggacgcagcgagcgccgaacggagccgcggggccaggggagggcagcggagag

SEQ ID NO: 84557 - RNA, 64 nt, Homo sapiens
agaggcccaggagacgacaaagccccgccaagggccagaccagacccaggggccaccgagcgga

SEQ ID NO: 84558 - RNA, 86 nt, Homo sapiens
gcgggaagaaggcgggcacgccgggcagcgagaagaggcacagacaagcagaccggaagaccgacggaagaccacaccccgaggga

SEQ ID NO: 84559 - RNA, 84 nt, Homo sapiens
gcccagccccaaacagccagagccggaaccaaaaagaagccccagagccggggccaggagccccaagcgccccagcagcaaaca

SEQ ID NO: 84560 - RNA, 89 nt, Homo sapiens
ggaaaagacagaggccagcagacccgaggaagcgcgacccaggaccacaccaggggaggcccagaacaggcgcgggaagccaggagcga

SEQ ID NO: 84561 - RNA, 54 nt, Homo sapiens
aaggcaaaaacaaagcaaaaccagaccacaacaagaagggccacggcccaggcg

SEQ ID NO: 84562 - RNA, 62 nt, Homo sapiens
cggggcgacaccgaagccgaaggggcagcaggagcgccggccgcccgcaggacaccgagggc

SEQ ID NO: 84563 - RNA, 41 nt, Homo sapiens
aaagagcaagccacacagcagcgcagggaagccccgggaga

SEQ ID NO: 84564 - RNA, 78 nt, Homo sapiens
agagaaaagacacaggagaacgggaggcgcagaaagaggagaagccccacccgccccaggagccagccggcaacacgg

SEQ ID NO: 84565 - RNA, 130 nt, Homo sapiens
ggagccgcacaccgggccgcccgcgcgacggggaaccgcgaccgagacggcaggcggcggaagcgggagaaacaaaggcagcgcgccccgggggagcaggcccggcggaacgcagcagccgcgaaggacc

SEQ ID NO: 84566 - RNA, 81 nt, Homo sapiens
cggcgggccccggccgaagcgcaccgccagcgccgagagcacgacggcccccgcgcagaggccaaacacacaggaacgcca

SEQ ID NO: 84567 - RNA, 83 nt, Homo sapiens
ggggcgcgggggccgcgcgaagacaggaccagggcacggagaacaaccgccagggaacagcaaaaaacgagagcagcaaagag

SEQ ID NO: 84568 - RNA, 74 nt, Homo sapiens
gcaagaaaaccgaaaaaaagccaaaaagaaacgaccaaagggaccaggggaacaaggaagagcgagaaggaaga

SEQ ID NO: 84569 - RNA, 77 nt, Homo sapiens
cacaaaaaaggaagcgaaagcggcaggaccacaccccaagccaagcgggcaccaaccacccgccacacaaagacaac

SEQ ID NO: 84570 - RNA, 79 nt, Homo sapiens
cagccgagcaccgagccagcccaggaaaaggagagcgaaccaacagagccggacggagcagcggcaaagcaacacgcga

SEQ ID NO: 84571 - RNA, 55 nt, Homo sapiens
ggccgagaagaagcaaagggcaaccagggaaacaggagagagcgcgaaaaggcga

SEQ ID NO: 84572 - RNA, 75 nt, Homo sapiens
agggacaaagagcaaacagacagggccgcaggagaacggaagaggacaagagacgacacgcaagcaggcaaccga

SEQ ID NO: 84573 - RNA, 85 nt, Homo sapiens
agagaaagcagggaaaggagagcaccacacaaggggaccaaaagaacccagccaacccgcagagggaggggaggggcgagcggag

SEQ ID NO: 84574 - RNA, 85 nt, Homo sapiens
ccaagccaacacacccaggggaacgagcaacacaccgcacgcaacagaagaaggagaagacaccacacccccaccggaaagcccc

SEQ ID NO: 84575 - RNA, 65 nt, Homo sapiens
cccgaacaggggagagaggaacaggacaaaggaggaaaacgacccagacagccaaaacaaaacac

SEQ ID NO: 84576 - RNA, 82 nt, Homo sapiens
cacaagccagacccggcacgccccagcacacgagaccaagaggggggagaccggaggacccccaaacaacccggagaggcaa

SEQ ID NO: 84577 - RNA, 80 nt, Homo sapiens
gaggacaccgcaggggcgagcgccgcaggagcccgcccaggggacggacacaagcaggaggagcgggggaccggggacaa

SEQ ID NO: 84578 - RNA, 96 nt, Homo sapiens
gacgacggcaggaagaaaacgagccaggaacaaagagcaaggacagcagaccacagcccggcaggcccaaaaacccaaagggacagaagcaccccg

SEQ ID NO: 84579 - RNA, 84 nt, Homo sapiens
gacgaccgaacgccacgaacgggaagcgggcagcacaaaacaaggccggacgaaacacaggaagaaacgccaggaacacaagaa

SEQ ID NO: 84580 - RNA, 74 nt, Homo sapiens
agacgcaaggagccaccagcacggaccaggaggcgagcaacaggcagccgccgcaaagggacgacgaagggaca

SEQ ID NO: 84581 - RNA, 86 nt, Homo sapiens
gcagaggggacccggaagcggcaccagaaggagcagacgccccgccagaccgaagccaccccaccccaccagacgacaccagagag

SEQ ID NO: 84582 - RNA, 72 nt, Homo sapiens
cagcagcccgcccagaagccacggaagaccgcaggaaagcaggaaggcaagaaagccaaggacgaaacccac

SEQ ID NO: 84583 - RNA, 67 nt, Homo sapiens
aggcaagaaaccagaaagagaacgggacaacaaaagagccacccaaggcacgggaggggagagagaa

SEQ ID NO: 84584 - RNA, 74 nt, Homo sapiens
gggacagagagcccgagacacgacagcaccgaggagcaacacccccagggagcccagaccgacaggacgcaagg

SEQ ID NO: 84585 - RNA, 38 nt, Homo sapiens
ggggaggaggggcaggcccggcgaagggagggcaagca

SEQ ID NO: 84586 - RNA, 74 nt, Homo sapiens
gaaaacgaggccccgagccagccccgacagcgggaacccgaaccagacccagggggcagaaggcaggcaaggac

SEQ ID NO: 84587 - RNA, 103 nt, Homo sapiens
gcgccgaagaggggaggccccacccacaccccaaaaacccagaagaagaacagaaagccaaggcccgagaggcaggagaacaagcgcgagaaggaacaaacca

SEQ ID NO: 84588 - RNA, 54 nt, Homo sapiens
ccacaggagaggcggaagacgagaagcagacacggagcgggggaggccccacac

SEQ ID NO: 84589 - RNA, 66 nt, Homo sapiens
aaaccccaagaggccgcagaaggagggaaacaacgaacgagcaaggaagggccaaggcagacccca

SEQ ID NO: 84590 - RNA, 74 nt, Homo sapiens
ggagcaacaggacagagcagaaggaagggagagggccgaggcagacaagggaaaggccgcgcaggggaccaccc

SEQ ID NO: 84591 - RNA, 103 nt, Homo sapiens
ccgcggcaggcacacgggaacagcccacccggccacaaacccacacaacagagaacggaccagaaaagccagacagacccccagagacccagccagcgagaga

SEQ ID NO: 84592 - RNA, 56 nt, Homo sapiens
cagacagccaccacccggcaccggcacggaccaccccaacaccgggggagaaccgg

SEQ ID NO: 84593 - RNA, 70 nt, Homo sapiens
ggcggcagggaaacccacgcgggcacagggagaaggaacgacacggggaccgcagaccagggccccacga

SEQ ID NO: 84594 - RNA, 95 nt, Homo sapiens
cggccgagaccagccagggagcgcgaaccgcccgcggaaccacagcccagcacggcgccgggccgcaagacagcccgggacaacaccgaggggga

SEQ ID NO: 84595 - RNA, 83 nt, Homo sapiens
gccgcagacccccggaggaggggagcgccacgaggggcggcggagaccaagaacaccacgcgcgcgggggggcacgcgggcgg

SEQ ID NO: 84596 - RNA, 75 nt, Homo sapiens
agagaggcccccggaaggccagagcacccccccggagggggccgagacaaaacgaggccggaagagcgggagcgg

SEQ ID NO: 84597 - RNA, 91 nt, Homo sapiens
gcagcggaggagccagggcaggcggccggggaccgcccgaacgaggaggccgagaggaaaggggggggaagaaaacagacagaaacagagc

SEQ ID NO: 84598 - RNA, 80 nt, Homo sapiens
aaagggaaggacaggcagagcaaacaaggcaagcggcccacagcaagcgcgagccagagaacaaacacaaagcgaaccga

SEQ ID NO: 84599 - RNA, 54 nt, Homo sapiens
cagcccaaacaaaagaacagcgaacccagacagacaagcagagcgcgaacgcca

SEQ ID NO: 84600 - RNA, 83 nt, Homo sapiens
ccaacccgcgccgccgccaccagcccaaaacgagagaaaacggcgcccaaggagggacggggaaggcgaggaaggcgccccag

SEQ ID NO: 84601 - RNA, 91 nt, Homo sapiens
cggcccccggagggggcagcccgggagaaccgcggcggccggagcgccaccaggcaggcaaccagcgggaccagaggagaccggagccacc

SEQ ID NO: 84602 - RNA, 75 nt, Homo sapiens
agcgagcacaagcaaggccaaaggcggagcggggacaagcaaggggccaaggagccaaggaggaaacccacaaca

SEQ ID NO: 84603 - RNA, 77 nt, Homo sapiens
gaaaccgggaagggggcgccggcggacgcacccggacgcaaagcgcacggaaggagagaagcggcgggcaacgccag

SEQ ID NO: 84604 - RNA, 80 nt, Homo sapiens
gcgaagagacaggcagcggacagaagcggcgacccacaaacaagccaagccaaggccaccgagccacaagaccacagcac

SEQ ID NO: 84605 - RNA, 89 nt, Homo sapiens
ggaaaaggcggacgggaaggcgggagacgagaagccgaaaagcgcagcgagcggagccgccggagacaaggcagccgcaaggaaacaca

SEQ ID NO: 84606 - RNA, 87 nt, Homo sapiens
ccccagcaggagcaggagcaggagcgggagcgggaccccagcaggagcaggagcgggagcggaagacgaccccgacgcaggccagga

SEQ ID NO: 84607 - RNA, 60 nt, Homo sapiens
cgggccgcccccggaggggaaccgccggcacccgaccgccacaaccgacggcagcacacc

SEQ ID NO: 84608 - RNA, 47 nt, Homo sapiens
aaagccaaagaggacacgaacagacccaggacagcccgcggggaacg

SEQ ID NO: 84609 - RNA, 80 nt, Homo sapiens
ccgccagaagccgaggaaagcggaagcggccggcaggggaaggacgagaggcagcgagaagaaaaagaagagagagacac

SEQ ID NO: 84610 - RNA, 73 nt, Homo sapiens
cccaagccaacccaccaacacggaaaaccgacccaaaaagaaaacaccgaagggcggcgggccagagaagcag

SEQ ID NO: 84611 - RNA, 77 nt, Homo sapiens
cgcaaaacaaggaaaggcacaagagaaaccaaggcagacagagcaggaagaaacaccgagagaggcagcccgcagac

SEQ ID NO: 84612 - RNA, 60 nt, Homo sapiens
cgaaggggcaggaggagaaggcaaagagccagcccgaacaccgaccgaggacaacaggag

SEQ ID NO: 84613 - RNA, 70 nt, Homo sapiens
ccccacaagggaagaaccacagaagggcggaaaaggcaaaacagcgcaaccaagagagaggaagagagag

SEQ ID NO: 84614 - RNA, 89 nt, Homo sapiens
gacccgcccaggcccccggagaggccggcgggccgcaggggcccccaccagggcagaccgaaggagcgggaacagagaggaagcagagg

SEQ ID NO: 84615 - RNA, 69 nt, Homo sapiens
caaccgcgcggcaggccaggggaccgacgacgcagccagagcagcaagaggccaaggggacgacggcca

SEQ ID NO: 84616 - RNA, 72 nt, Homo sapiens
agaacacaaggaacagccagacacacgaacacaccgaaagacaagaaagcacccggcagggagaccagaggc

SEQ ID NO: 84617 - RNA, 78 nt, Homo sapiens
gaaaacccacgaaagagagcagagcagacccaaggccccgaaaagcacgcagggacggcccgggaccagccagggcac

SEQ ID NO: 84618 - RNA, 71 nt, Homo sapiens
gaagacaggaggggcacaccgccgccgccgaggggcgggaacgaaacggaaggagggccccggagcagcca

SEQ ID NO: 84619 - RNA, 77 nt, Homo sapiens
gcgccggcccccaggcccgcgggaagggcaaaccaggagaaaggaaggcagagggggcgagggaggaaagggggcaa

SEQ ID NO: 84620 - RNA, 65 nt, Homo sapiens
caacacaaagccccccacgccaccacagagcaacccgggagcagaagaggggaagaaagagaccc

SEQ ID NO: 84621 - RNA, 80 nt, Homo sapiens
ccggcccgggccgccagggcaggcacagccagggcgaaagaagaccccgccaccggcccccacgcaccaccaaagccgca

SEQ ID NO: 84622 - RNA, 71 nt, Homo sapiens
acccacaagacaacacgagagcccggagccgagcccgggaaggcgggacagaggcgggcaagaaagacccg

SEQ ID NO: 84623 - RNA, 78 nt, Homo sapiens
ccaagaggcgacgagcagacgaccgcgcagggcggcggcccgcagacaggcccgagccgccaggggggagaacacccc

SEQ ID NO: 84624 - RNA, 76 nt, Homo sapiens
cgccggacgccaggaggggggggaccccggccaccgggccaaaccgagcgccgccccggcaggccagccgacacac

SEQ ID NO: 84625 - RNA, 55 nt, Homo sapiens
agcacgaagaagccacagccgcacggacccccaggaggagagaaagaacccacgc

SEQ ID NO: 84626 - RNA, 73 nt, Homo sapiens
caccaccgcacgcgcgcccgccgcccgaggagccccgcgcgaccaacgcgcgagcgggaagacaacggacgga

SEQ ID NO: 84627 - RNA, 60 nt, Homo sapiens
cggcgccgcgcgccacccccgaagggacaagaaccaaggggacagcaagaacaaagaggc

SEQ ID NO: 84628 - RNA, 41 nt, Homo sapiens
agacgccagcggccggccggcagcgaaggagggggcagaag

SEQ ID NO: 84629 - RNA, 69 nt, Homo sapiens
caccaacgcgaccagaccagacccgacgaagagaggcgcgcaggggggccagcgcaccaagcagaggaa

SEQ ID NO: 84630 - RNA, 85 nt, Homo sapiens
agagccccagcggggaggcgcaacacgaggcgccgcagcacccgcgagcccagagacccagagcagcagcgaagagaaggcccag

SEQ ID NO: 84631 - RNA, 55 nt, Homo sapiens
gacggggacgcaccacgagggccacggccacccagcggagaaggggcaaacacag

SEQ ID NO: 84632 - RNA, 75 nt, Homo sapiens
ccacagcgaagaccagaggaggggcgaagaggaagcccaccgccaccgaaaggagccaagaaccggaacaagaag

SEQ ID NO: 84633 - RNA, 40 nt, Homo sapiens
gccggccgacgagggagaaaggcggagaacggaaaagcac

SEQ ID NO: 84634 - RNA, 57 nt, Homo sapiens
cccagaccagagacagaagcagaggacgccaggcagaaaagggacccaacacagaag

SEQ ID NO: 84635 - RNA, 47 nt, Homo sapiens
cccacaccccggaccgagggacgcgggaccgccgggagagccgccca

SEQ ID NO: 84636 - RNA, 88 nt, Homo sapiens
ccccacagcaacagaggcgcagcccaaggaggaggaggccagcagggccggggcagagagccgaaagaccagacgccaacaagaacca

SEQ ID NO: 84637 - RNA, 68 nt, Homo sapiens
cgagaccagagaaagccaaagccaagaagaaggagcggaaaacagaaagagaaaacagaacagacagg

SEQ ID NO: 84638 - RNA, 85 nt, Homo sapiens
gccgcgccgcgggccggagaagcggccgcggccagggaacggggcacgcggccaacgggacccccgacaggccagcgccaccacc

SEQ ID NO: 84639 - RNA, 67 nt, Homo sapiens
gagcgagcaagaacaaggaacgaaaagaaaccaccaccaaagaaaagaagccacagcaaacgccaga

SEQ ID NO: 84640 - RNA, 83 nt, Homo sapiens
gcagacaccaggcccagaggcagcccaaggaggccaagacaaagggccccacacaccagacagcccagaagaaaaggaagcaa

SEQ ID NO: 84641 - RNA, 66 nt, Homo sapiens
caagaccagcacggcgggacagcgcagaagccgcacagcggcaagcagaccgagaaacccggagaa

SEQ ID NO: 84642 - RNA, 77 nt, Homo sapiens
gaggccggcagaaccccaaagaggccccccgacggaaacaggaccccaacaaaacacagaggagccaccggcccagg

SEQ ID NO: 84643 - RNA, 79 nt, Homo sapiens
cccgaagccaaaccaggaggggcaggaccgagggagcagcgcggagggagagccagggggagaaggacggacccccagg

SEQ ID NO: 84644 - RNA, 88 nt, Homo sapiens
gggcgggaaggcgcaggcggcccaggcgccgacacgccacgcaccccccgccggccgcgcccgcgaccagcaagagaaccacccaaaa

SEQ ID NO: 84645 - RNA, 100 nt, Homo sapiens
gcggccgccgagccggggcaaagcgaaggcggaaaaggccacagcaaggcccccccaccccccggaaagccccagggaccaccccccaagggggccgccc

SEQ ID NO: 84646 - RNA, 82 nt, Homo sapiens
aaaccggagcaacagaagagcagagggaccaccccagaacccggcccaggggacacccagcaggccagggaagaggcagccc

SEQ ID NO: 84647 - RNA, 49 nt, Homo sapiens
agccccgcggcggggaggcacgagagaaggcccaggaggagcgaagagg

SEQ ID NO: 84648 - RNA, 71 nt, Homo sapiens
ccgccgccgccgccaccacgccaccacggcgccgccacagcgaccccagagacccaccacgcccggcagcg

SEQ ID NO: 84649 - RNA, 74 nt, Homo sapiens
gaaggaccagaaaaccgacaacccccagaaagccaagccgggccaagccgacgccagcgggcgccacccaacag

SEQ ID NO: 84650 - RNA, 79 nt, Homo sapiens
gcccaccaccacgagcgggagcgaagagggaaccagcgcgcggcagccgcgacggaggcagcacggcaggagacgagga

SEQ ID NO: 84651 - RNA, 79 nt, Homo sapiens
aggcgaggccagcaagcgggagccaggcgggccacaccgcaacccagcacgccaagacaagcaaacccaggaacacccg

SEQ ID NO: 84652 - RNA, 74 nt, Homo sapiens
agaacggccgcccgccgcagcggagaagagacgaagaagagaaccccccaagaaggagaagaccagggggcacg

SEQ ID NO: 84653 - RNA, 73 nt, Homo sapiens
caggcgacacaggggcgcgcgcaaagaaggaggaaacacggaacgacgaccggagagaaccagcagagaaaag

SEQ ID NO: 84654 - RNA, 83 nt, Homo sapiens
acggcgaagcgcgcgccgcgcccggaccccagggcccgacggccacacaggggcgcggggcgccgggggcggggggccaccga

SEQ ID NO: 84655 - RNA, 113 nt, Homo sapiens
cacaggagccccgcccccgagacggccgcggcaaggcaagagcggcggcgccaagccgcgcagacaaggcaggaaccgacgcccagggcacgcccccccaagagcaaaagcaa

SEQ ID NO: 84656 - RNA, 79 nt, Homo sapiens
aggacgaggaagaggggcgaggcagaccgccccgggccgcggccgccgagaaccagggaaagaacggagaagcggccca

SEQ ID NO: 84657 - RNA, 74 nt, Homo sapiens
aaaaagagaaacgaagaccaaaaacaggaaacagcagaggagaacgcaggagaaagggcagggccacccgaacc

SEQ ID NO: 84658 - RNA, 80 nt, Homo sapiens
acccagacgaccaaaagggcaccccaacaagaggccaccggcgccagagcaagcccgccccgagccaaaggaagaaaagc

SEQ ID NO: 84659 - RNA, 79 nt, Homo sapiens
gacccaacacccggaaaaacccaggagacaaagacgcggcccagaccgacagaccccaggggcagccaccacagagaca

SEQ ID NO: 84660 - RNA, 70 nt, Homo sapiens
gcagaaagaggagcgagggcaagccacacccagaaccagcagcccgcagaagaaaggcaaacccaaggcc

SEQ ID NO: 84661 - RNA, 71 nt, Homo sapiens
gccaaccagcggggggaagacaccaagacaagcaggggaccaaaacaaccccggaagagaggacaaacaac

SEQ ID NO: 84662 - RNA, 79 nt, Homo sapiens
aagggcgccccccacacaaggacaggaccgcaagcccgcagggacgaggccccaagaagggccaaaggcaaagcgggac

SEQ ID NO: 84663 - RNA, 51 nt, Homo sapiens
cgcccgcccccgccccgcacaagcaaaaaagcgaaagcaccagcaggaaag

SEQ ID NO: 84664 - RNA, 67 nt, Homo sapiens
agaccaacggaagaaagaaaaaccgaaccaaacgaacacaagagacagggaacaccagaccggagca

SEQ ID NO: 84665 - RNA, 84 nt, Homo sapiens
gaggcacaggggcccccaccacccggaggagcagcccgccccgccgggggagacgacccccgccagagagccgccgcccgggag

SEQ ID NO: 84666 - RNA, 49 nt, Homo sapiens
ccgacagccgcagaacaaagcaaggcaaaccagggggccacacagagcg

SEQ ID NO: 84667 - RNA, 47 nt, Homo sapiens
cgaaaccgaccgcggcaagagcaggccacccccgcccggcagcaaca

SEQ ID NO: 84668 - RNA, 77 nt, Homo sapiens
cagaacaagaaccaaagaaaacaaaaggggacaggggcgacagcaagaaggagccagcacagaggcaaaagaaccaa

SEQ ID NO: 84669 - RNA, 54 nt, Homo sapiens
gccacggaggcggagagagaccccaacaggaaccccccggcggcagagagcaga

SEQ ID NO: 84670 - RNA, 80 nt, Homo sapiens
gcagcacccgcgccccggccggcccgcgcccgcggcgccagcaccaggaaaagcccggaaaagcagccaagcggaagaca

SEQ ID NO: 84671 - RNA, 76 nt, Homo sapiens
caagagcacaggggaagaagcacagccacgagccaacacagacaacaggcacaaagagagaaggaacacccacagg

SEQ ID NO: 84672 - RNA, 74 nt, Homo sapiens
aaaaagacgaagaagaagcccaagaaaagggcggaaggcagaaagcaggaggagggacagacgagagacaacag

SEQ ID NO: 84673 - RNA, 74 nt, Homo sapiens
acaggaaaggccccacccccacaccggaagggaccacagaccagcacgccggcgccacgaaccgagcgacagga

SEQ ID NO: 84674 - RNA, 71 nt, Homo sapiens
aagggagaagggaaagaagcagagcaggaacacagggacgccacgaaccgacccgccgcaagagcacaagg

SEQ ID NO: 84675 - RNA, 80 nt, Homo sapiens
agcagaagcccggagggccacaacgaagaagacagagagacaacgcaaagcagacgcgcacaaaaagaaaaacgaagaaa

SEQ ID NO: 84676 - RNA, 76 nt, Homo sapiens
gccaccacacgaccacagcagagacaggacaagggagcagaaacgggagaaaggaaagaagaaggcaacaagcaag

SEQ ID NO: 84677 - RNA, 82 nt, Homo sapiens
aaggaacgacgcggaccagaagccagagcgaggacgccggcaggcaccacacgaaccgaggcacaccaaaggcggaaggagg

SEQ ID NO: 84678 - RNA, 38 nt, Homo sapiens
ccaaggagccgcgcggaggaagaggaccccaaagcaac

SEQ ID NO: 84679 - RNA, 68 nt, Homo sapiens
gacaacaccgagagagaaggagaccgccagaagacaacacggagaggcaccccgacccacacagggag

SEQ ID NO: 84680 - RNA, 75 nt, Homo sapiens
caagaggccagagagcaacaccccccagggccacacagcgacaaaagaaaacgcgggagagggcagaagcgaagg

SEQ ID NO: 84681 - RNA, 82 nt, Homo sapiens
cccccgggaacgcagcgcgcaggaccacggggaaagccaagaagaagacggcccagcagagcacccaaccagcgggaacaca

SEQ ID NO: 84682 - RNA, 36 nt, Homo sapiens
caaaggcgcagaggaaaggacgaacgccagcccgaa

SEQ ID NO: 84683 - RNA, 41 nt, Homo sapiens
gcaacacgcagccgagcggccgcggggagccaccccagccc

SEQ ID NO: 84684 - RNA, 103 nt, Homo sapiens
gggaccggacagggcggagcagcgcagaggaaaggcggcagccaggcggggggcagcccgccgccagcgggcagagggcacgggcggcgcccaggacggacga

SEQ ID NO: 84685 - RNA, 81 nt, Homo sapiens
cgagccgcggcccgggcgggcgccggcgcgggggaggccacccgaagaaaggcgcagcggaaccacggccaacccgcccgc

SEQ ID NO: 84686 - RNA, 79 nt, Homo sapiens
gcaaagccaagaggccagacgagaccaaagccaacggagagcacagccccgcggcgcccgagccccaccagcggccccg

SEQ ID NO: 84687 - RNA, 76 nt, Homo sapiens
acgggggaacggacgggaggaggaaaacacagcagcagcagcaaacagaacaggaggcccggacccccagcacaag

SEQ ID NO: 84688 - RNA, 59 nt, Homo sapiens
cagcgagaccgcgccggcgaccagaaagaccccagcaggccccaaggagcggcaagagg

SEQ ID NO: 84689 - RNA, 85 nt, Homo sapiens
ccagaagcaggcccccaccaaggaaaaaacgagaagaccccaaaaccaggagcagggacggggggaaaagcgcacccgggcccgg

SEQ ID NO: 84690 - RNA, 56 nt, Homo sapiens
gaaagaaagcagaggccgagacagggcgcacgacggcccaggggaagcagggcgga

SEQ ID NO: 84691 - RNA, 80 nt, Homo sapiens
ggagggaacccgcccccagggagggaacaaagcccacagcaccgcggccccaaggggaaggcccagcccccccgccgcag

SEQ ID NO: 84692 - RNA, 99 nt, Homo sapiens
ggagacgaagaaggaacccccacggcgaagccagcggacgggcagggcccaggagggagaaaacgcaggacacaaggaagaagaaggaccagaggaaaa

SEQ ID NO: 84693 - RNA, 83 nt, Homo sapiens
ggccgagcggacggaagaacagccggacagaccgaaacagacagcgcccacaggcagccgaagaaccccccacaacaccaaga

SEQ ID NO: 84694 - RNA, 68 nt, Homo sapiens
aaccacggaaccaaggcaagaagcgaaagaagagaagccaggcagggaaaagaaacgacgccacaaag

SEQ ID NO: 84695 - RNA, 76 nt, Homo sapiens
ggggaggcaggcagaccagacccacccacgcaggccggaggcaggcaggacagcccaggacgcccggagcacgcgg

SEQ ID NO: 84696 - RNA, 68 nt, Homo sapiens
cacagcgcagagggaaccagcggacgcggaggcccaaccgaagaaaacaagaaaaccagacgagagac

SEQ ID NO: 84697 - RNA, 78 nt, Homo sapiens
gagggggacggccggcggcacccgcacccggggacaagcgcgggaacggcgcggaaggagggcagccccgggaaggcc

SEQ ID NO: 84698 - RNA, 78 nt, Homo sapiens
cgacgagcgcaccgggcaccgaaaggagaaagcgaaagaagcaaggagaaaagcagcaacagacacaagccagacgag

SEQ ID NO: 84699 - RNA, 73 nt, Homo sapiens
gaaaagcacgcccaggccaaagaaaccacaagccgccgggaaccaaaggaagaaggcggcgcacggagaggcc

SEQ ID NO: 84700 - RNA, 69 nt, Homo sapiens
acgccgcccagacaaccgacggaccaccaaggaaccagaaggccaacccaccgacaagagaccaagaca

SEQ ID NO: 84701 - RNA, 37 nt, Homo sapiens
gcccccacaccacacagagagcgaaaagagcgcagca

SEQ ID NO: 84702 - RNA, 46 nt, Homo sapiens
ggcagcacggccagcacccccacaagcaccaaccgaaacaaggacc

SEQ ID NO: 84703 - RNA, 73 nt, Homo sapiens
cggggccccggggacaaacagcaacacccccccgaccggggccagcacaggagggagcaggaaaaaggcggag

SEQ ID NO: 84704 - RNA, 78 nt, Homo sapiens
accagccgggcgccgggagccgcggcgagcgccccagccaggccgcgccggcaccccgagggcagcaaaacggcacag

SEQ ID NO: 84705 - RNA, 37 nt, Homo sapiens
gaagcaagaggcgcaaagaagcccagcccagaccccc

SEQ ID NO: 84706 - RNA, 74 nt, Homo sapiens
cgccggaagagacacccaagcaggagagaagcacaaagagcccaaaaggcagagcgaggagagaagaaggaggg

SEQ ID NO: 84707 - RNA, 63 nt, Homo sapiens
gcggagagaaaccgaagggccccgaacaacagacgaaaaaccgccagaaaggccaagaaggaa

SEQ ID NO: 84708 - RNA, 75 nt, Homo sapiens
ggaacaccaaacggaggagccagacccggggaggcgcacacacaccaaagaggcggggcaccaggcccagacggc

SEQ ID NO: 84709 - RNA, 62 nt, Homo sapiens
aagcaagacccaggacaccccgaagccgagaaagggccaaccgccccccagcagcaggcacg

SEQ ID NO: 84710 - RNA, 59 nt, Homo sapiens
acaaggaccagaagaaacgcaccggaaaggccaccaggccagcgcgcgcggcgcaggca

SEQ ID NO: 84711 - RNA, 85 nt, Homo sapiens
gggcgggacccgagcggagagccgcggagccggaagagccccgagccccaaaccccaggcccaaacacaggcgcgagacgaccca

SEQ ID NO: 84712 - RNA, 73 nt, Homo sapiens
gaccccccggcgccgcgccggcggcgggccccagggcagccaaccccgcggcaggcacggccaccggaacagc

SEQ ID NO: 84713 - RNA, 58 nt, Homo sapiens
cgaaacgcacgagaagccaaggccaccgagccacaagaccacagcaccgacccccgac

SEQ ID NO: 84714 - RNA, 81 nt, Homo sapiens
gacaagacgcggcgccgacgggccccgaggccgcgggcgggggacagaccagagcaggaccaaaggcgcacagagccgaac

SEQ ID NO: 84715 - RNA, 54 nt, Homo sapiens
acagccagccagccacacggcagaaaaagagccaccaaaagaaggcggaagaaa

SEQ ID NO: 84716 - RNA, 58 nt, Homo sapiens
gcaacgcgcaccaacccagccgggacagggccagaagcgagcaccaaagcaaagacca

SEQ ID NO: 84717 - RNA, 61 nt, Homo sapiens
acgacacaacgaaccaggcaccgaccagggccagccaagcagcagggccagaacggaagac

SEQ ID NO: 84718 - RNA, 83 nt, Homo sapiens
gggccgggacggacaccgacggccgaacgcgacccgaggaggcggaagagcggcgccggcggaggcggggcggacggccacgc

SEQ ID NO: 84719 - RNA, 77 nt, Homo sapiens
gcacacccaggcccacagcagagcagccaggaaacccgagcaagacacaacaggaggcaacaaaccaagagaaaagg

SEQ ID NO: 84720 - RNA, 75 nt, Homo sapiens
aagagacaacaagacaggagaagagaaaagggaaggcacggaggaagcccgagaccacgaggcagagaagaagga

SEQ ID NO: 84721 - RNA, 73 nt, Homo sapiens
aaggaccaagaaccaggagagaagagacagggagaccggggaaacgccgcaacacaacgaccaccaagaaggg

SEQ ID NO: 84722 - RNA, 56 nt, Homo sapiens
gggcgccccggacgagagcccggcgggggcgcagagccaggcagcgagcgggagca

SEQ ID NO: 84723 - RNA, 82 nt, Homo sapiens
gcgcggacaagaagcgaggggggagggggaagcgggaaacccacaggaggcaaccacacagagccaacaaggcaaaccgaag

SEQ ID NO: 84724 - RNA, 74 nt, Homo sapiens
cgccggcgcgcccgcgcggcgcggggaccgcggcccgcgcaagccccggggcagagacacaggacacccacccg

SEQ ID NO: 84725 - RNA, 85 nt, Homo sapiens
cgcacaggcgcccgcccgcacgggcgcgccaagggcacagagggagagagacaagaggagcagcagcggcaccgcccccacccgg

SEQ ID NO: 84726 - RNA, 75 nt, Homo sapiens
cccgcgcagaccgcaccgagcacagaagcaccaagccgccgcacccccaaccccgaggagcccccgcgcccaggc

SEQ ID NO: 84727 - RNA, 86 nt, Homo sapiens
caccggacaaagacccggaccgcagcaagacagcggaggagagcaggaggcagaagcaaagaagaccgcagaagaagcaagcccag

SEQ ID NO: 84728 - RNA, 100 nt, Homo sapiens
ccgccgcccgggaccggcgagaaggccacaaccaagagaaacaaccgggcccgggcagagggaaagcagaggacggaacaacccgggggaccgcgggggc

SEQ ID NO: 84729 - RNA, 69 nt, Homo sapiens
accaagaaccaggagagaacagaaagaccaagcagaagagaggacaaagcaccgggcaggcgcggggag

SEQ ID NO: 84730 - RNA, 70 nt, Homo sapiens
aaaagaacaagacggacacagaaacgccaagaaagccggacagggccagcaaacaagaaccgccaaggaa

SEQ ID NO: 84731 - RNA, 56 nt, Homo sapiens
gacgcacacaacccccgaaagcgaagaagacggcacgggacccccagcacaggcag

SEQ ID NO: 84732 - RNA, 76 nt, Homo sapiens
aggaggagggggcccgggaagaagaacacgggcagccgggaacccggggcagagaaagaagccaacacaaaccaca

SEQ ID NO: 84733 - RNA, 79 nt, Homo sapiens
cgcacacgagcggaggcgaagggagcccacccagaggcagggggcgacccgaacccaaaggaggaaacagcggcaagcc

SEQ ID NO: 84734 - RNA, 75 nt, Homo sapiens
gaaacccacaacacagacccagaagagacgaaaaagacgccaagggaagaagcagaagcaagcccagggcaagga

SEQ ID NO: 84735 - RNA, 52 nt, Homo sapiens
gaaagggaaccggagaagagagagaaagaccaaggcgaaagacaccagcacc

SEQ ID NO: 84736 - RNA, 74 nt, Homo sapiens
agaaggaccaagaaccagacagaggcacaaaaggagaaagcagaagaaacaggagaaagcaaaaaagagaacag

SEQ ID NO: 84737 - RNA, 83 nt, Homo sapiens
gcggagcggggcccgacggagacccacccgccaaggccccccgggagggccaggcgccgccgcagggaaggccacccggaccc

SEQ ID NO: 84738 - RNA, 75 nt, Homo sapiens
ccaacgccagccaacccaggaccaagaaacggcgaggaaagagaggagccccggaaagaaaaggacagacccggc

SEQ ID NO: 84739 - RNA, 79 nt, Homo sapiens
ccaccgaggaagagcgggagaaaggcccgcagaaaaaccggcaggcacaacaaaaagggccgcagacccaaaacggccc

SEQ ID NO: 84740 - RNA, 68 nt, Homo sapiens
cggcacgagcaaaaggaagcaacccagaagagcgaaggacccagcgaggagggcgggaacggacaggg

SEQ ID NO: 84741 - RNA, 74 nt, Homo sapiens
agaaccagaggaacgaaaagacccagaggaacgaggcgcgacacaccagcggagcgggggaacccccccgggca

SEQ ID NO: 84742 - RNA, 65 nt, Homo sapiens
aaaagggcgcggcaagggggcagggggaggagcagaaacacagcaggacagggcaggcagaaggc

SEQ ID NO: 84743 - RNA, 72 nt, Homo sapiens
gggcaccaaacaaaaggaaaccacaccaaccaagaagagccaggaggaaaagccgccacagaaaggaaggag

SEQ ID NO: 84744 - RNA, 73 nt, Homo sapiens
cccagaaaaagcaccccgaggaggaagacgaacgaaacacgaaagggcagaaaagcaccaaggaccggaagag

SEQ ID NO: 84745 - RNA, 61 nt, Homo sapiens
gaaggcagaggcggaggagggagacaggggcaaaaaacggcagggaagaggcgagacagaa

SEQ ID NO: 84746 - RNA, 62 nt, Homo sapiens
aggcccaacacgcagacggcagccaaaagcaggccggcaccggaggcagaacccaaggggca

SEQ ID NO: 84747 - RNA, 72 nt, Homo sapiens
gcacagccacgcacacagggcacgagccaagaaaacagaaagccaaaagccaaacagaaaaaaagaggagca

SEQ ID NO: 84748 - RNA, 65 nt, Homo sapiens
agaaaccaggagacacacgagaccggacaccccagaggacacggccacagggcagacacagggag

SEQ ID NO: 84749 - RNA, 74 nt, Homo sapiens
cacaacagagggcaagaacgaaccaaccccacaacaccgccggagacagccaagggccgggcccaagaagcacg

SEQ ID NO: 84750 - RNA, 57 nt, Homo sapiens
agagaaccaccgcagagggacacagcagggcaggagaggggagagcggagcgaagcg

SEQ ID NO: 84751 - RNA, 70 nt, Homo sapiens
gcacagcgccgcccagcgaggacccgcagcacaccaccgggaagaaaccacggggacaccgggggacaga

SEQ ID NO: 84752 - RNA, 70 nt, Homo sapiens
ggacacccagaaagaagcgagaaccacggaacgaccgcgcgggaagggacgccagggcaccggacacagg

SEQ ID NO: 84753 - RNA, 79 nt, Homo sapiens
cgcccccacccggaggcccgccggccccggggcggagaacggaaaagcaccaggaagcagagaggaccgcagaagggaa

SEQ ID NO: 84754 - RNA, 91 nt, Homo sapiens
aagaaaacgaagcaaccagcccacgcagacaggcaaaagaagaagaccacacgagcgagaccccacggccagcgaggcagcgccagagcac

SEQ ID NO: 84755 - RNA, 76 nt, Homo sapiens
gagccagagcacaagaaagacaccccgagagcggccgagggaagaaaccagcgcaagggcagggaagaccagaaaa

SEQ ID NO: 84756 - RNA, 81 nt, Homo sapiens
cccaccagcaacacgagcacaagacccaaaaaggcgacgcaaccaagcaccgaaacagcaggggagacaccgcgccaaggg

SEQ ID NO: 84757 - RNA, 57 nt, Homo sapiens
cggacagcggggcccgcggaaaacagggggcagacccaaaggaaacgcacgaaagaa

SEQ ID NO: 84758 - RNA, 56 nt, Homo sapiens
cccagcaagagaagacccaagacccaccgcaagaacagcgaaagagcggaggagga

SEQ ID NO: 84759 - RNA, 76 nt, Homo sapiens
cgcggagggaagacggacagcgaagccacccagcgccgaggcagaaggaacgagggagcacggagggaaaagaagc

SEQ ID NO: 84760 - RNA, 84 nt, Homo sapiens
gaacaaaccgaagaacagcgggaaagaaggcaaaacacgggacccaggaggaggagaaggaggcccggacccaccagaaggcca

SEQ ID NO: 84761 - RNA, 71 nt, Homo sapiens
gggcgccagggcggaaccaagcagggaaacgaaaaagcccacgcgccgaccacgagaccgagaagacaaaa

SEQ ID NO: 84762 - RNA, 75 nt, Homo sapiens
gcacacacaagaaaggcaacaaaaccacgcagcacaggaagaaacgccaggaacacaagaaaagacagcagacga

SEQ ID NO: 84763 - RNA, 95 nt, Homo sapiens
gcgggcgacaagagaggagccgagaaccgggcaaagacgacgcggagagggagcacagcaagcgggagcaggcagaccaaaggaacagaagccag

SEQ ID NO: 84764 - RNA, 81 nt, Homo sapiens
gggggaccacagcagcacccccagcagcacacagcagccgagggaacggcagaagagaagagcacggcaagaccacaagca

SEQ ID NO: 84765 - RNA, 62 nt, Homo sapiens
caagaacaccaggagaccaagacggaagccccaggggacacggcagagacagagcgacagag

SEQ ID NO: 84766 - RNA, 82 nt, Homo sapiens
ccccggccgcaggagggagaccacagcaagacaccgggaccccggaagccaaaaagccaaaacgaagacagacagcagcccg

SEQ ID NO: 84767 - RNA, 75 nt, Homo sapiens
agaaggaccaagaaccagacgccccccaggcccgcccccccaagaggaaaacacaggagaggaaggaaggcgcgg

SEQ ID NO: 84768 - RNA, 81 nt, Homo sapiens
cgggaccgcggcgagaagccccagcgcacacgcggccccagccagcagggcccaagcaggacgaagcagggaaacaaaggg

SEQ ID NO: 84769 - RNA, 60 nt, Homo sapiens
cgcacacagccaggccgcccggaaagggcgcgggagacccccacccagaagaccagcggg

SEQ ID NO: 84770 - RNA, 89 nt, Homo sapiens
ccgggacggaccgagaccggaccgagagcggaccgagagcgcgaaacgcacgagaagcaaaccagccagcacgggggcccagccagcca

SEQ ID NO: 84771 - RNA, 84 nt, Homo sapiens
gggacgcaccgcaccgagggcgagcccagggggcacggcaaggcagggaacccacaccacagccacggcccagcgcgccccagc

SEQ ID NO: 84772 - RNA, 63 nt, Homo sapiens
ggaagaccgaccgccgccgcgcaccgcgagcagcaagcagagacagagaacgcagaacagaag

SEQ ID NO: 84773 - RNA, 76 nt, Homo sapiens
cagacacccacagaaggaggaacagcacgaaaccccgcaacccgcagacacaggggcccaggccagaggcaaggaa

SEQ ID NO: 84774 - RNA, 71 nt, Homo sapiens
acgcaaccggaggccaaagaaaagcggagcaggaaagaggcgaacacaaagaaaggaacgaacaaagcgca

SEQ ID NO: 84775 - RNA, 75 nt, Homo sapiens
cggccccacccgggaggggggagcggcgggaggccaccgccagagccggaggagccaccaacagaagcaggagcc

SEQ ID NO: 84776 - RNA, 81 nt, Homo sapiens
cgcgcgaaccaggcagagcacaccgggaggcaaggccgcaggcccagaaccagagccggaaggccgcagaccggggcgcgc

SEQ ID NO: 84777 - RNA, 54 nt, Homo sapiens
gccacgagccggaggagcgaccggacgggggggcggaggggccgaagacaaacc

SEQ ID NO: 84778 - RNA, 58 nt, Homo sapiens
gggaaccagccaaaaaacaaccgccagggaacagcaaaaaacgagagcagcaaagagc

SEQ ID NO: 84779 - RNA, 83 nt, Homo sapiens
aaaaaggccagaaagaggagcagagacgccggacagacccccagggcagccagagagacacagcccacgaggacggacagacg

SEQ ID NO: 84780 - RNA, 74 nt, Homo sapiens
gcggaacacaggccggcacggaagcagacaaaggaccaaggggcaacaaacgaacaggacaagaagaacaggca

SEQ ID NO: 84781 - RNA, 60 nt, Homo sapiens
aggacaagcaaccggcgacaaagaagagcagcccagagagagccggagggcaggaagccg

SEQ ID NO: 84782 - RNA, 78 nt, Homo sapiens
ggaagcagaggaacgaagcgcccccgcagaacgccccccggcagggacaggcgagaacaggcgaaagccgggcagcag

SEQ ID NO: 84783 - RNA, 80 nt, Homo sapiens
accggccgcccaggaccaaaggacacccacaccccacggccgaggcgaggaggcaaggaaccgagcgcggcaagaccaga

SEQ ID NO: 84784 - RNA, 64 nt, Homo sapiens
gaaagagcgaacacccagaaacggaacaaagggcaaaggacacaccgcacaaacggccgcgcac

SEQ ID NO: 84785 - RNA, 57 nt, Homo sapiens
gaaccggcaccgcacaccggaccaggaaacggaggcggccaccagaaggacccggga

SEQ ID NO: 84786 - RNA, 73 nt, Homo sapiens
gaggacgcagcgagaaagcgcgggccaggcacgacaccgcaacgacacagcagcgaagcgccggagaacgcac

SEQ ID NO: 84787 - RNA, 74 nt, Homo sapiens
ccgcagcccaggcgcgggggcgacgacagaaaccagagacacacagaccacagacagcccgaggaacagaggga

SEQ ID NO: 84788 - RNA, 61 nt, Homo sapiens
ggacagagcccgggcgcgcagggaagaaaacgccagagaagcagagcagcccggagcgagg

SEQ ID NO: 84789 - RNA, 56 nt, Homo sapiens
ggacggaacaacaggcaccgccagagacgccgaaaaccgagggcaccggagggaag

SEQ ID NO: 84790 - RNA, 75 nt, Homo sapiens
cgacccaagcacaccagaaagggcaacgccaaagaaaggaaaaccaaagagaagaaacaaagacgaacaaaacac

SEQ ID NO: 84791 - RNA, 84 nt, Homo sapiens
cccccgagacgggaacagggaagaaggagaaagggccaaccccgaagaagcaaacagaaacgaaggagacagagaagaacgaca

SEQ ID NO: 84792 - RNA, 82 nt, Homo sapiens
cccagccccgagcagcgggaacagaacagaggaagagccagacaaggaagaggaagcggccagaccagcccgagaaagaccg

SEQ ID NO: 84793 - RNA, 64 nt, Homo sapiens
agagcggcccgaaaggacgaccacaccgcaggaaggacacccacgacacacaggccgcagcacc

SEQ ID NO: 84794 - RNA, 77 nt, Homo sapiens
gaagagcccgaacaaacaaacacccagaaacaagaggccaggcgaaccagccgaaaaaggagaaaccaaaaggaaaa

SEQ ID NO: 84795 - RNA, 65 nt, Homo sapiens
acaaagccccacacaaacccccagaagagagggcgccccgagaaggcacgccaccggcgcgggca

SEQ ID NO: 84796 - RNA, 70 nt, Homo sapiens
cgaagaaagacagcccggaaacaacaggaacaccaccaaaggcgggcgcggacggcaggggcgccgggga

SEQ ID NO: 84797 - RNA, 41 nt, Homo sapiens
aagaacacccaagaacgaacaacagagcggccgcgcccagg

SEQ ID NO: 84798 - RNA, 88 nt, Homo sapiens
caaaaggcccggaccccccggacgacggggcgggaccggcgccaccgcaggcccgaaaccggcagagcgacgggagaggcaaagcccg

SEQ ID NO: 84799 - RNA, 79 nt, Homo sapiens
agaggggcgcgccaccacggacccccccggcaggccgaaagcccgagaccccccacagcaccagaacacacggagaagg

SEQ ID NO: 84800 - RNA, 79 nt, Homo sapiens
gcgccggagacagaggacgagccacgggccgaagaaggaaggacagaagcccccagcaacgcggaaccccaaaccaggg

SEQ ID NO: 84801 - RNA, 82 nt, Homo sapiens
cagacgcagaccccaccgcagagcgcagcagcccgccccgcccggcagcgagcggcgccccaacccgggacagagggcagga

SEQ ID NO: 84802 - RNA, 67 nt, Homo sapiens
gagacggagcgaaggccggaggacaagacaacggcaagcggagaagagcaaggccgaaccgagagga

SEQ ID NO: 84803 - RNA, 79 nt, Homo sapiens
ggagcgacccagcgcgaaggccgggggaaagacagccggggccagacaacacagggacacaacaaacacaaccgccaca

SEQ ID NO: 84804 - RNA, 79 nt, Homo sapiens
gaaaggcaccggagacagaggcggaaccaaaagcagggaaaccggagccagggcagaaacccccaccaggcgggcgcca

SEQ ID NO: 84805 - RNA, 78 nt, Homo sapiens
cggcggcggcgggaggccccggcgggggcgcgggcggcgggcagcccgcgggcgcccaggacccaaagacaggaccac

SEQ ID NO: 84806 - RNA, 90 nt, Homo sapiens
gagccgcgaaccgagcgggcggcgggcgcgcgcaccagggggagaaacccgggaccaggcaaccagaacccggaggagggaggcaggaag

SEQ ID NO: 84807 - RNA, 74 nt, Homo sapiens
gagacagaccgcagacaggaacacgcgccagggcaccacggggcgccaccgaccggccgcgaaaagccacacca

SEQ ID NO: 84808 - RNA, 80 nt, Homo sapiens
ccgagggagacacaggcgggaggacgggaaagacccaaaggccacgaccagcggcccgcaccccggccagcagcaccggc

SEQ ID NO: 84809 - RNA, 47 nt, Homo sapiens
caggcggagaggaccgagaaaagagaggacagcagaccacagcccgg

SEQ ID NO: 84810 - RNA, 81 nt, Homo sapiens
ggaaagcgccaaaccagggcaccgaaggggaagagcaagagcagcagggagaaccaagaaggagcgagggaggagcagcga

SEQ ID NO: 84811 - RNA, 65 nt, Homo sapiens
agcggggcagagaagagcaacaacggcacccccgaaagcccaaggccaggccggccagcgggcaa

SEQ ID NO: 84812 - RNA, 69 nt, Homo sapiens
ggagcaccggcccaagacaaacgagagaaaaggcacgggaaggagaaaccaagagccccaaagaggagc

SEQ ID NO: 84813 - RNA, 77 nt, Homo sapiens
cggaacaccccagccccgacgcaaaacagaccaggaggagaagaagggaggcagagaagggccggcgcacaaaccag

SEQ ID NO: 84814 - RNA, 77 nt, Homo sapiens
cacaacagggaggcaggagcaacacacaagggcggacagaacggaaacggcacgaagggcaccagaaaaaaccgaga

SEQ ID NO: 84815 - RNA, 81 nt, Homo sapiens
aaaccgcagcacgcgcgacgcagcagaaagcagacagacgaggcggcacagacggacagccagccgcccaccccccgaccc

SEQ ID NO: 84816 - RNA, 70 nt, Homo sapiens
aagcaagccgggaacagaccccaggagaaacaaagaaaccaaagcagcaaggacagggaaaagggcagag

SEQ ID NO: 84817 - RNA, 77 nt, Homo sapiens
cccacacacgccccgcgcacaacaggcgaagagaccgacccaaacccacccaagggcaggacgggaagcaggcggcg

SEQ ID NO: 84818 - RNA, 76 nt, Homo sapiens
acccagccaacacgacgcaaaccagagcgcgaagcagcaaagaaggacccaagagcaggagagaagggcagaaacg

SEQ ID NO: 84819 - RNA, 63 nt, Homo sapiens
ggggggaggaagggcagagaaggggagaagcagaccgcaccaggcgggaccccgaaaaagccc

SEQ ID NO: 84820 - RNA, 55 nt, Homo sapiens
ccagcacaggcccacaggggcccaggagccacggggaaggagaagagagacagac

SEQ ID NO: 84821 - RNA, 65 nt, Homo sapiens
cgggcgaagcgacgagccgcgaggaggaccgcagggcgacgcaccaaagcgaaacagaagcgaac

SEQ ID NO: 84822 - RNA, 60 nt, Homo sapiens
agccagacaacaccagaacagggggagaaccaggacaggccaagcagaaaaacccgaaaa

SEQ ID NO: 84823 - RNA, 68 nt, Homo sapiens
caagcgcacaggaccgggagaccggaaaccgagagaaacgaagacgaagaaacagccgcacacagaag

SEQ ID NO: 84824 - RNA, 66 nt, Homo sapiens
gcacgacggcagacacggcgcagccggcaaaaaacacagaacccggcaacggaaaaacacgccaag

SEQ ID NO: 84825 - RNA, 67 nt, Homo sapiens
agagcaaccaaacaacaagggcacacgaaggccgcaaagacggagaagagcagaaaccgcaagaacc

SEQ ID NO: 84826 - RNA, 77 nt, Homo sapiens
cccaccaaacacgccggaaaccccgcccacagcacgaggagcagaaggagaaggccagaacaaagggaccgacgcca

SEQ ID NO: 84827 - RNA, 84 nt, Homo sapiens
gaggcgggggagggcacaccaacggccggaccggcggccccagcaacacggcgcgaggcaaggccagcgccaaagcggacgccg

SEQ ID NO: 84828 - RNA, 73 nt, Homo sapiens
aggagaacggaaaaagaagcacaaaagccagcccgaggagcaaggggcaggggaaaagaaacaaacaacaaga

SEQ ID NO: 84829 - RNA, 80 nt, Homo sapiens
cccggccacaccacaagcgcacgcacgccgcgacgagaacccccgcgaaccagaggaacccagcgagcgagagcggacca

SEQ ID NO: 84830 - RNA, 71 nt, Homo sapiens
acaaaagcaacaaagagggcaacagcagcgcaggagaaggagaaagaaaaagaaaccagccaaacagcgag

SEQ ID NO: 84831 - RNA, 63 nt, Homo sapiens
cagaaggaagaggcggacggaggagcaggcgagaagagaagggccgccgggcagaagcacgag

SEQ ID NO: 84832 - RNA, 68 nt, Homo sapiens
accgaccaccaaaagaaccccgacagcagagacgacgcggcaagcagcggaagaggacgacgcgacac

SEQ ID NO: 84833 - RNA, 55 nt, Homo sapiens
caggcggaacgcccgccccgcagagagggggccaaagggcgagggcacaaaaaac

SEQ ID NO: 84834 - RNA, 73 nt, Homo sapiens
ggaagcacggcgggcgaaacagggccagcgagacagaccgaaacccaaagaaaaggagcgcgcccaacgagag

SEQ ID NO: 84835 - RNA, 76 nt, Homo sapiens
caggacgagggcgaggcgcgggccgggcgcgcgaggggggggcggaggggccgaagacaaacccacgaaggcggcc

SEQ ID NO: 84836 - RNA, 77 nt, Homo sapiens
gggaaggggccgaagaagggagaagcggccagcaccaagacacgagggcggcgcagcaaacgagaacacaaaagaag

SEQ ID NO: 84837 - RNA, 65 nt, Homo sapiens
cagcacaacccccaaccacaaacaacacgaccaaggagggaacagggcccacacacagcccccag

SEQ ID NO: 84838 - RNA, 73 nt, Homo sapiens
agcgacggcgccggcgcgcccggccgcccgcgggagagccagaccccagcgccccccgcccacggacggacca

SEQ ID NO: 84839 - RNA, 83 nt, Homo sapiens
caaacagcccgcccgaccccgcccgacccggccgccccgagcggagccggagggaaacccagacgacaaggaaggccaaggga

SEQ ID NO: 84840 - RNA, 77 nt, Homo sapiens
agagaaagcaaagagaaaggaagcaggcccgggaaggggaaacgaaggaggcccaaccacaaaaggagccgacggaa

SEQ ID NO: 84841 - RNA, 53 nt, Homo sapiens
caaccccaaacaaaaaagccccaggcaccaaaagcccaaagagagcaacacac

SEQ ID NO: 84842 - RNA, 83 nt, Homo sapiens
cgccaagggacggaccacgcccgcaccagacaacagaaaccagggaggaccgccagacaaggggaagaggccgggaacgaacc

SEQ ID NO: 84843 - RNA, 53 nt, Homo sapiens
ggaacgcaggacccaaagcgaaggcccgaaaaaaacccccggcggccagagga

SEQ ID NO: 84844 - RNA, 68 nt, Homo sapiens
cacggccaccacccacggcaggcagcaccccaacaacaccgcgagacgaggagcaaagaagaacgagg

SEQ ID NO: 84845 - RNA, 121 nt, Homo sapiens
ggagccagcgcgccagaggggggccgcgagcgcacgagcggcccgccagcgaacccccgagacccagccacaggacgggcagcggaacgggccccgggggcggaccgggcaaggaagaccc

SEQ ID NO: 84846 - RNA, 75 nt, Homo sapiens
acaggccagaggcacggaaaaggggaacgggaaaggcgcagagaagcacaggcgcagaaacagccaggacccagc

SEQ ID NO: 84847 - RNA, 85 nt, Homo sapiens
gccgaccaaagaccggagagcaccgcaaacacagacaaaaggagagacgccagaagcaacagcaagagaagagcgacgcggcagc

SEQ ID NO: 84848 - RNA, 82 nt, Homo sapiens
caggacgcaacgaaaccggcacggccgcccgggcacacagggaccaagaagccccggggacacgcgagaaaagacgccgaag

SEQ ID NO: 84849 - RNA, 71 nt, Homo sapiens
ggagcacaccgggcggagaccaaggagacgcaggggcgcacccgggaggaacccacccggcagcccacaac

SEQ ID NO: 84850 - RNA, 81 nt, Homo sapiens
caaggaccagcgacaaggagcgcagcagcagaaagcaggacagccccaaagccccccagccgaggagaacggcaaaaagcg

SEQ ID NO: 84851 - RNA, 77 nt, Homo sapiens
cgaaaacggaaacacaagagaccagagggcagggagggaacaagcagccacccacagcaaggagaaaagaccaaaag

SEQ ID NO: 84852 - RNA, 60 nt, Homo sapiens
caggcccgcgcgggaaccaggaacgccagcgccggagaccaccgaaccgggccgaaacag

SEQ ID NO: 84853 - RNA, 76 nt, Homo sapiens
aacaggcacgcgccaccaccccagcgagacgacgggaccgaaggaccccgccagagacaaccgagcgccaggagag

SEQ ID NO: 84854 - RNA, 52 nt, Homo sapiens
cccggacagggcaggaaacaggcaggcaccagacccccaaacagcagcagaa

SEQ ID NO: 84855 - RNA, 71 nt, Homo sapiens
gggacacgccaaccgccaaggacaaccccagccaaggaaacggaggcgggggcagcccgcccgcaggaacg

SEQ ID NO: 84856 - RNA, 70 nt, Homo sapiens
acaccaaaagggcagaccgcagaaagacacaaggagaagacagaggagccagaccaagagacagcacagg

SEQ ID NO: 84857 - RNA, 83 nt, Homo sapiens
ccaagcccgaggcccagaggaggaggccacagaggagccaggggccgggagccaaggagccagcgaggccccaaccggcaccc

SEQ ID NO: 84858 - RNA, 58 nt, Homo sapiens
ccggaagagcgccccaggagaaacaacacagggaacaccagaggcgggaccacgggca

SEQ ID NO: 84859 - RNA, 77 nt, Homo sapiens
cccccccggccgcgagaagaagaagcagagagccaggaaaagaaagagaacccagccgccgacaggcagcgcccaca

SEQ ID NO: 84860 - RNA, 78 nt, Homo sapiens
agaagagccaaggaaaaacagcaagaacccaaaaggacaacaaaggaggcgaaaagagaagaaagcgaaccgacggaa

SEQ ID NO: 84861 - RNA, 73 nt, Homo sapiens
gacgggacacgggccaagggagcgaaaagaacccccaaaaggagacgagagaaaccgaacagaaacacagaga

SEQ ID NO: 84862 - RNA, 128 nt, Homo sapiens
gcgggcccgccccgcccccgccacccgagcgcggagcagcgaccagagagcgcggccggaggacagaaaaacaaccaccagcgagcaaaaaggcaaagaccaagaccaccaagaagcgccccagcggc

SEQ ID NO: 84863 - RNA, 69 nt, Homo sapiens
aggagcgagagcaaacaggggcagccaccagggaccaaccaccccggacccaccacagagcaaaaaaag

SEQ ID NO: 84864 - RNA, 66 nt, Homo sapiens
accacggcaccgagacacggaggcaaggagaagaaaagcacaaaaggcagacgggaaaaaccgcac

SEQ ID NO: 84865 - RNA, 73 nt, Homo sapiens
gaacggcgcccggagggacgcaaaagcccagggagcggcggcagcaggggaaaagcagcacgaagaaaagagg

SEQ ID NO: 84866 - RNA, 109 nt, Homo sapiens
gcggggaagacggccacacacggggacacgcgggggcggcacccggcaaaggaagggaacccagaaccgcgggcagcaagaaccaccaaacaaggacaggagggaaggc

SEQ ID NO: 84867 - RNA, 67 nt, Homo sapiens
gcagccgggaacgaaggcgggaagcccggcccccaccggacacaagagggcaagaaaggcgcgacgg

SEQ ID NO: 84868 - RNA, 60 nt, Homo sapiens
gaacacagcagcaagccacccagacacgggagcagggcgcacagacaaacaggaccgcga

SEQ ID NO: 84869 - RNA, 74 nt, Homo sapiens
ggacccgcccagcagaagaagagaggagggagaacacagaaaccggccccagcacagaagagcaacaagcggaa

SEQ ID NO: 84870 - RNA, 70 nt, Homo sapiens
acggaaaggcgcaggcagagcgccaacggccgacaagcccgacgaagaccggcggccacagcagcaagca

SEQ ID NO: 84871 - RNA, 68 nt, Homo sapiens
accagaggaaaaggaaacgggaaagcagaaaagcaaaacccaggacgagaaaaaacagagcggaacaa

SEQ ID NO: 84872 - RNA, 73 nt, Homo sapiens
ggcgagcgcccccgccagggccgaccagggaacgaagaaggacagaacggacaaggcagagcaaggaaaagac

SEQ ID NO: 84873 - RNA, 50 nt, Homo sapiens
caacaggacacaaggcagcgcgcagacggcacagggccccaggaggggga

SEQ ID NO: 84874 - RNA, 87 nt, Homo sapiens
ccgaaagggccacaaacccaaggaccaggccaaccggagcgcacccacgccacaagccggacggcggcagcgcggccgggggcgaga

SEQ ID NO: 84875 - RNA, 77 nt, Homo sapiens
cgagcgggcggcaccgaacaccgggggcgggcagccgaggccgggaaccagcgagggaacagcacaccgagcaagaa

SEQ ID NO: 84876 - RNA, 71 nt, Homo sapiens
ccggaagcagagaaagggccgaccaagcagaacccgagaagagccgagaaacacccgacaaagccgggagg

SEQ ID NO: 84877 - RNA, 73 nt, Homo sapiens
agagcaccgaggccccacccgacagcgcccaagaggagccaaaagaggcagaagcccgagccagaagaaacaa

SEQ ID NO: 84878 - RNA, 80 nt, Homo sapiens
acaaacagcaagcacgacaagcagcacaccaagagcacacagggcagaggacaacagcaaccaagaagacgagcaccccc

SEQ ID NO: 84879 - RNA, 66 nt, Homo sapiens
gcccagcagccaccaacacccaaaggaagaaagggcaggcgagagagggggaacaggaccaacgga

SEQ ID NO: 84880 - RNA, 73 nt, Homo sapiens
aaccggcagaaagaccagcgcagggccgagaaggaagacccagaaacaaaggagacgaagccgaggagcgaaa

SEQ ID NO: 84881 - RNA, 58 nt, Homo sapiens
agacagaagcacaccgggagaacgccggggagcagacacaaagagccaggagcaggcc

SEQ ID NO: 84882 - RNA, 62 nt, Homo sapiens
gacacgagggcgagcccccacggcggcggggacacccgacgcggaggcaaggcgcgaccgac

SEQ ID NO: 84883 - RNA, 70 nt, Homo sapiens
ccaggcaaaggaaccacccaggaaacagcgcaagacagccaagcaccgaacaggacaacacaaacaaaaa

SEQ ID NO: 84884 - RNA, 60 nt, Homo sapiens
caacaaccagcgggcacggacccccacccgacccccaagaagggaccacaggacaaaacc

SEQ ID NO: 84885 - RNA, 77 nt, Homo sapiens
gcggcgcaggggggcagccgagagcccaagaggacccagaaggaaaccgacccagcgggccgggcggccagaagcca

SEQ ID NO: 84886 - RNA, 46 nt, Homo sapiens
agacacgagcacaaacggggaagaacacggaaaccggacagggaca

SEQ ID NO: 84887 - RNA, 76 nt, Homo sapiens
acacgaccgggcccccacgggccccaggagaacacacaaccagccggaaaccccccggaaggggaggaggcgggac

SEQ ID NO: 84888 - RNA, 74 nt, Homo sapiens
ccacccaccggacagagagccagaaacgaagaggaacccaaccggccaggacagcaacaaaccaccggaacaca

SEQ ID NO: 84889 - RNA, 67 nt, Homo sapiens
caggagccccagcgccaccgccgaccgaagccgcaaaaagaagaacggcacacaccccccagaaccc

SEQ ID NO: 84890 - RNA, 77 nt, Homo sapiens
ggagaccagcgggggggaaaaggcaagccgaaggacgagcgggacgagaagcaccccacagccgcacgagacagaca

SEQ ID NO: 84891 - RNA, 39 nt, Homo sapiens
ggagagaccgaggagccaggaaggggaccccaaacacgg

SEQ ID NO: 84892 - RNA, 79 nt, Homo sapiens
cagggagagaccgagagccacgagccagagaccccagaccgcgcccggcccgcgacccaggccggcgcacaacaccaag

SEQ ID NO: 84893 - RNA, 67 nt, Homo sapiens
caagaacaagcacaaagccacagcgaccaagggaaagaaaagaggcccggaagagagccaccacgac

SEQ ID NO: 84894 - RNA, 76 nt, Homo sapiens
aaaccagaaacaccaagagacaaaaagcgaaggacaagggcaaaaggagagggaccgacacaagaagcagccagaa

SEQ ID NO: 84895 - RNA, 79 nt, Homo sapiens
ggcgcaggagggcacggagacccggcagaggacgaagagcaggaaagcaaccagaaccacgaacaagaaaagaccgaca

SEQ ID NO: 84896 - RNA, 73 nt, Homo sapiens
gaaaaacgcagacaagaacaaccagagggagagagggaaagggccccaagagccgggcggaaaacgaaagcga

SEQ ID NO: 84897 - RNA, 74 nt, Homo sapiens
gggaacagagaaacaacaggccgagcaaggagagaacgcgagggaaggaggagagacgacaccacaaaccagga

SEQ ID NO: 84898 - RNA, 56 nt, Homo sapiens
caaacgaagggagccggcaacacaagggggacagacaacagagcaacgcaacaggg

SEQ ID NO: 84899 - RNA, 58 nt, Homo sapiens
agccacccgcacacgcacccaggggcagccgcaaggagaccaggaaaaaaggggaaac

SEQ ID NO: 84900 - RNA, 60 nt, Homo sapiens
gccagaccgcgaccgcacgccagcccaagccgacaggacaggcgggcaaaccggccgggg

SEQ ID NO: 84901 - RNA, 76 nt, Homo sapiens
gagagagggaagcgcccggccggagcacacgcccacagacacaccccccaaggcacccccacggaggaggggacac

SEQ ID NO: 84902 - RNA, 76 nt, Homo sapiens
ggccgcaagcagcaggaggcggccgccgcaggaagccgagcagaagcaggaaaacagagacaaccacgcagagacg

SEQ ID NO: 84903 - RNA, 78 nt, Homo sapiens
gacaaaagcagggggacgaggcccagaccccgcccccagcccaggagcgaccaggccagcagcgccagccaggaacga

SEQ ID NO: 84904 - RNA, 67 nt, Homo sapiens
agccccacagcagccagaaggaaagaacacagaccaccaggcaaaacaagaaaaagcaccaagaaaa

SEQ ID NO: 84905 - RNA, 82 nt, Homo sapiens
aaacagccaccaacgacgacccagaaagagcaaccggagcagcagaccacacaaagcgaagcagggagagccacacgagggg

SEQ ID NO: 84906 - RNA, 57 nt, Homo sapiens
gccggagacgcgggagccggagccccaccgcagacagacgaagaaagcaagaccgag

SEQ ID NO: 84907 - RNA, 75 nt, Homo sapiens
acaagacaccagaaagacagggcaccaggcgcaccggacccacaaggacaaaaacggcaaaagacaaaaaagcag

SEQ ID NO: 84908 - RNA, 63 nt, Homo sapiens
gccaggaaaccgaacacgcccgggaagccggccacaggagaacgccggaacgagggaaaccgc

SEQ ID NO: 84909 - RNA, 66 nt, Homo sapiens
gccaaggcggaaaagcccaagaaacaaacagcggcccaaccgggggaggaaacaaaacccacgaag

SEQ ID NO: 84910 - RNA, 50 nt, Homo sapiens
ggaaggagaccacagggagccgaaaacagggccaagcgcacccccaccac

SEQ ID NO: 84911 - RNA, 109 nt, Homo sapiens
agggacggaaccaccagaagccagcccccaggcggaacgcccgccccgcagagaggaaaagaaggccgcaaacaagagagaccggggaccgggcggaaccgcgaggcga

SEQ ID NO: 84912 - RNA, 83 nt, Homo sapiens
ggagcggagaagcacggagcgggggaggcacagaaggggaggcaaggaacaggcagcagaacacgcacgcagacaaacaggag

SEQ ID NO: 84913 - RNA, 80 nt, Homo sapiens
cgggaggagacagagagcccggacaacaggacgagaacccccgcgaaccagaggaacccagcgagcgagagcggaccaga

SEQ ID NO: 84914 - RNA, 70 nt, Homo sapiens
cccaggaaccggcccggcgcgcggagccagcgcccggcaaggagcgagcgggagacaccggccggaaagg

SEQ ID NO: 84915 - RNA, 82 nt, Homo sapiens
agggcaaaggagagcacaaccacgcagggaagcccaggggcagaaaagggagaggacaaaacgcaccacccgacacaaaaac

SEQ ID NO: 84916 - RNA, 75 nt, Homo sapiens
agagcggcgacgggagcgcgagagccggaacggaaggaggacaccacagacggagccaagaccgaagaaaacacg

SEQ ID NO: 84917 - RNA, 43 nt, Homo sapiens
acaccccaccaggagacgcaggcacgcaaagaacgcccacaag

SEQ ID NO: 84918 - RNA, 75 nt, Homo sapiens
ccgcgcggcgcggggacaaagggcccgaagacaccccgccaaaaggacagaggaccacggagacagcagagagcc

SEQ ID NO: 84919 - RNA, 76 nt, Homo sapiens
acccagcgaggaggcagccaagaagagggaaagaagacaggaaacaagggaaggacgacaaaagaggaccaaagga

SEQ ID NO: 84920 - RNA, 78 nt, Homo sapiens
gcaacacgggcccgggcggccccgcacaggagagagagcggagacaaggccacagcaggccacggcgggggcagccag

SEQ ID NO: 84921 - RNA, 85 nt, Homo sapiens
gagacaggggcccaagaaaaagcaccggacgcccaggcgcaagcacaaaggaaggccagccagccgaaagcccagcacaacccag

SEQ ID NO: 84922 - RNA, 80 nt, Homo sapiens
ggagagcacggggaccgagacccggcaccacccccggccgcccccaggcacgaagagccaggacaaacccaccgacgggg

SEQ ID NO: 84923 - RNA, 82 nt, Homo sapiens
gcggcgagaaagagagcaaacaaggagcagacggccgcagcaaaggggaagaagagcccgaagaagaaccgaagagacagca

SEQ ID NO: 84924 - RNA, 80 nt, Homo sapiens
caagacgcgggaacccaccaaagaaggcaaagcgaaggcggagcaggagaaagcggcacagaccccagaggaaaaacccc

SEQ ID NO: 84925 - RNA, 35 nt, Homo sapiens
acaacggcccgggcggaggcgaccacggcacagaa

SEQ ID NO: 84926 - RNA, 89 nt, Homo sapiens
aggacgggaccgggaccgcccggacccggccgggagaagcagcagagaaaggaaaccccccaggcaagaggcgcaggaccgggaagacc

SEQ ID NO: 84927 - RNA, 82 nt, Homo sapiens
aaccagagggaaacggcacaccaggcggcaggggcaaccagacgggccaaggcggcgcggcccagggcacgagcgcagcgag

SEQ ID NO: 84928 - RNA, 36 nt, Homo sapiens
ccgagagcgggaacagaccagaccagaacgccggca

SEQ ID NO: 84929 - RNA, 85 nt, Homo sapiens
ggaaacaaaggggaagaccagagcagaagacagacaaaaaccaagaaacaaggaagagggaggaacagcagcggaaacaagcacg

SEQ ID NO: 84930 - RNA, 64 nt, Homo sapiens
agcgggggcgcgcaacgacgccaaccagcccgcacaggcgcaggcgccgcaacgggccaagccg

SEQ ID NO: 84931 - RNA, 73 nt, Homo sapiens
gagccggaacaacagaaagaggcagagacccgcaccgccagaacacaaagcaggcaggaccaaccgcaaagag

SEQ ID NO: 84932 - RNA, 82 nt, Homo sapiens
aggaaagcaccagacgccaccacgggcacccgcgccgggcaccgaggaccagccaagacagcaaaagacggaagagagagca

SEQ ID NO: 84933 - RNA, 69 nt, Homo sapiens
gaacccccgggccaaaacccagaagaagcacaaaacagagaccaacagacgcagccacaccaaaagaca

SEQ ID NO: 84934 - RNA, 70 nt, Homo sapiens
gaacccaaccaaccaaccaacgaggggaggagcacgaaaccgccaaagcgccaagaacagcggcagcgaa

SEQ ID NO: 84935 - RNA, 73 nt, Homo sapiens
ccgagccgacgcgggccgcgcggaacagggagagcgagcccgacccagagcccgggcggggccggagaagagg

SEQ ID NO: 84936 - RNA, 66 nt, Homo sapiens
cagcaaagggccaaggaagcccagagaagggcggaagagaacaggaaacacagggaacccaaaaag

SEQ ID NO: 84937 - RNA, 71 nt, Homo sapiens
agagcaagagcagcaccggacgggcccaccgcccaagaccggcccggccccacaacccagagggcaggcgc

SEQ ID NO: 84938 - RNA, 78 nt, Homo sapiens
aggacgggaggaccaagagagggggaggagcgggcagggagagcaccaagaggcagcaaacacgaagcggggacggac

SEQ ID NO: 84939 - RNA, 55 nt, Homo sapiens
ccagccccgagagcaaacagagagccaacggaccacaacagagaaccaaggacgg

SEQ ID NO: 84940 - RNA, 68 nt, Homo sapiens
aaccgcaggcgaagcccgaaaaggaaacggaacagggccaccccagccagaaaaccagcgacacgaac

SEQ ID NO: 84941 - RNA, 72 nt, Homo sapiens
agcacacaccacaagggaaaagccaaccccgacccaaagcccagcaccaggagacaaagccacaaaaacacc

SEQ ID NO: 84942 - RNA, 75 nt, Homo sapiens
aaacgacagacgaacacgaaccccggacgggagagcgccggcggagaaaaagaacaaagaagccacagacaaaga

SEQ ID NO: 84943 - RNA, 67 nt, Homo sapiens
ggaagcgagacaacgagaagagaccaaaacaaaaaggagccagcagcgcggccggagagggggaagc

SEQ ID NO: 84944 - RNA, 76 nt, Homo sapiens
gcagaaaaagaggcccccccccccgcgacgcgccccccccaacccaacggcaccaaggaagagagaagggaaacca

SEQ ID NO: 84945 - RNA, 91 nt, Homo sapiens
aagcggcaagagaggcaccccgaagaggcgaggagcaacccaggaccaagaaaggcccagggaccaaagcccggacaaggcccgagcacca

SEQ ID NO: 84946 - RNA, 76 nt, Homo sapiens
gcccggggccggagaagagcacccagcgaccagaggaaccaaccagaggcggggccaaagcacagaacaaacccag

SEQ ID NO: 84947 - RNA, 30 nt, Homo sapiens
ccacccaccgagcaggcagcccaacacacc

SEQ ID NO: 84948 - RNA, 64 nt, Homo sapiens
gcagagacagaacccgagcaggaaaaagaagagcacaagaccagcagacgaccacagcaacccc

SEQ ID NO: 84949 - RNA, 70 nt, Homo sapiens
gaaacaagacccgccagaacccccggcagagcaaacacgcaaggaagaccgcccaaaacccccacgggaa

SEQ ID NO: 84950 - RNA, 73 nt, Homo sapiens
cccacgggaacgaagaagcccacgcagaaacccaccagacgagcaccgaacagcagaaagaacaagcacgccg

SEQ ID NO: 84951 - RNA, 106 nt, Homo sapiens
gcagagcaggcggagcccaagccccagcccccgggcgaggcacaccccggagccaggagggggaaccagaagaggccaaccagcacgaacgccagcagcacggcac

SEQ ID NO: 84952 - RNA, 84 nt, Homo sapiens
ggcgcaggaggagaccggcggcagggcaagcggcgacggaccccaaggaggaacgaaccaaagaaaagcaaacgaaaaggaaaa

SEQ ID NO: 84953 - RNA, 62 nt, Homo sapiens
agccaaccggcccgaagaacacaggggacaggaggccagggcacgggaaggcagcacgaggc

SEQ ID NO: 84954 - RNA, 35 nt, Homo sapiens
gggcggcacgggcgcacagcacccagccaaaccca

SEQ ID NO: 84955 - RNA, 68 nt, Homo sapiens
ccagcagggaaagccccgcagcaacagccaagaagaggaaaccagaacacggcaagagcagccaccac

SEQ ID NO: 84956 - RNA, 52 nt, Homo sapiens
acacgaggggaaacccgacaagagaaggacaccaaccacaacaaccgcaaac

SEQ ID NO: 84957 - RNA, 83 nt, Homo sapiens
ggggccagcacgcacggacacccgagcacagagacgaagaggaccaggagcaaacagaaacggaaaccaaaaggaggaaagag

SEQ ID NO: 84958 - RNA, 70 nt, Homo sapiens
aagcggagcagggcgcagaaggcaaaacaagggcgagagggggaagaggagccggagggcaaagcaaggg

SEQ ID NO: 84959 - RNA, 84 nt, Homo sapiens
gggccgagccaacaggaccagcagggcgggcaggcccacacagggaacccacccaccacccagggcacaacaccacagccggac

SEQ ID NO: 84960 - RNA, 60 nt, Homo sapiens
gcaaggaggccccagcggaccgaacaggaccacgagaggagaagagcagaggagggagaa

SEQ ID NO: 84961 - RNA, 88 nt, Homo sapiens
ggcgcgcgggggcgacgcgcgggaacaacgcgagcggcgcgcgggacgaagacacgaagggacccgaggccacacccgcagccccccc

SEQ ID NO: 84962 - RNA, 71 nt, Homo sapiens
aaccgaaggcgacagagacaggagagagagagaggccagggagagagaagaggagacaaaccagaaccccc

SEQ ID NO: 84963 - RNA, 81 nt, Homo sapiens
gcgagcgagggggggcgcgccggaaaccggagcgcgcagcaggaaggacaccccaagaagggccaaacggggggcacacac

SEQ ID NO: 84964 - RNA, 75 nt, Homo sapiens
cagagccgccaggcagaaggccccccgaacagcaggcgccaccagcccggagcccccggcagggccaaggccccc

SEQ ID NO: 84965 - RNA, 83 nt, Homo sapiens
cgggccaagcggggaaggagccgggaggcacgccgagcgaaccgggaagcggggaggacgaaaaagagacagggcgccggggc

SEQ ID NO: 84966 - RNA, 75 nt, Homo sapiens
caggaggcccggcacaccaccaggggaggaggaaaacacacagacgaaggcaaaagaggaagagaccgagaccag

SEQ ID NO: 84967 - RNA, 60 nt, Homo sapiens
acccacaaacagagagaaggaaccacccacgcaggcaggagcagccaacacgaacgggca

SEQ ID NO: 84968 - RNA, 68 nt, Homo sapiens
accccaaagcggcacagggacaaagggcgcagcccaagcggccaacccgaccaaggaccacccgccgg

SEQ ID NO: 84969 - RNA, 40 nt, Homo sapiens
gacaaaccaacccaaacacaggacgacgagaacggcagga

SEQ ID NO: 84970 - RNA, 61 nt, Homo sapiens
cacacaggccccagagacccgccgaggcagaccaaggcgcaaaccgccagcggggacccgc

SEQ ID NO: 84971 - RNA, 80 nt, Homo sapiens
cggggccggggagcccaggcgacagcaaggaggcggcaaaaaaaaagcgcacacacgacgacccaggcaaagcgccacca

SEQ ID NO: 84972 - RNA, 56 nt, Homo sapiens
ggcgcggcgggcgggcggcggcggcgcgggccaccaagaagaacaaccgcagaaac

SEQ ID NO: 84973 - RNA, 49 nt, Homo sapiens
agagacacacagggcaccagaccggaggagggagacaggggcaaaaaac

SEQ ID NO: 84974 - RNA, 72 nt, Homo sapiens
gacggaaccacaacaagaaggacagcaaaggagcagggcgaagaaagcccaaaacacaagagcagaagagaa

SEQ ID NO: 84975 - RNA, 76 nt, Homo sapiens
cgagaccagcacaagacccgaaagaggacagagacgggggagaagcgccaccaacggagccacgcgaacccggagg

SEQ ID NO: 84976 - RNA, 86 nt, Homo sapiens
agcagaggggccacgcgggcccgaggcgcaccaagggcgaaggagccggcccaagccccggccaggccccgcagaacggcagggac

SEQ ID NO: 84977 - RNA, 83 nt, Homo sapiens
gaagcgccgccgcgccgccaggacgacgggcccaccgccgccggaggcgcagggcaaaaaacaggcagccagacgaaacacag

SEQ ID NO: 84978 - RNA, 63 nt, Homo sapiens
gcagaccgggagcagacgcgggcccgagcaccccgcggggcaagaaacgaagcaccgggccag

SEQ ID NO: 84979 - RNA, 75 nt, Homo sapiens
agcaggcccccagccgcagccacaacaccggcaggaaccaccaggacagaaacccgaggaaaggaggccaacaga

SEQ ID NO: 84980 - RNA, 78 nt, Homo sapiens
gacggcaccccacccaggcagaaggggcgccaccaccccagccggagaccccagaccggcagacagagagggccgaga

SEQ ID NO: 84981 - RNA, 42 nt, Homo sapiens
agcagccaccgaaaaagcaccaacagggacgcagcaacgggc

SEQ ID NO: 84982 - RNA, 60 nt, Homo sapiens
gcgggccgggggaaaaaaaaaggcacaaacccagcacagagaagacggcgacaagcaaaa

SEQ ID NO: 84983 - RNA, 75 nt, Homo sapiens
cgcggcccgcccccagaaagaaaccgaaagagcaccgaaaacgggaaccccccgaagacaccggaacacgcaacc

SEQ ID NO: 84984 - RNA, 82 nt, Homo sapiens
acgcccacgcccgcggccagcgcccaccagcccgcggagcccccaagggcccgccccaggagagccgcccgagaacaagccc

SEQ ID NO: 84985 - RNA, 65 nt, Homo sapiens
agcagggagaagccagaagacggccagcaaaccagccagcacgggggcccagccagccagcagcg

SEQ ID NO: 84986 - RNA, 81 nt, Homo sapiens
agcagaggagcggggcaagaagcgcgcggagggaacaacggaagaccaggagacaggcaaccggccaggaacagaggaagg

SEQ ID NO: 84987 - RNA, 85 nt, Homo sapiens
gaagaggaacagccaggggcccacggaggcgaggagggccccaaccgcagcacagcagccgcccccgcagccaccggcggacccc

SEQ ID NO: 84988 - RNA, 35 nt, Homo sapiens
ggcgaggagcaacccagaccgacaggagcggaccc

SEQ ID NO: 84989 - RNA, 81 nt, Homo sapiens
cggaccccagcgggggaagaaggacaagaggccagggcaggggcacacagggaccaagaagccccggggacacgcgagaaa

SEQ ID NO: 84990 - RNA, 80 nt, Homo sapiens
gacggccagggcccgcaagcgaaccgagcacagcaccaagccaggccaacggaccacaccaaaagccaccaaaggaacac

SEQ ID NO: 84991 - RNA, 74 nt, Homo sapiens
ggcaagaggaccggccacgaaaaaccagaggaaaaaccacaggaggagacacgagggcacccgacccaggaagc

SEQ ID NO: 84992 - RNA, 74 nt, Homo sapiens
cccgaggagacgggcgcaggaacccgccaggacgagggcgcacagaacgggaagaaagccaaacagacaggaga

SEQ ID NO: 84993 - RNA, 80 nt, Homo sapiens
acaagaggcgcacagcccggacacccaaggggacaggacgggacgggagcgaaggccaccccagagaagaggacgagaga

SEQ ID NO: 84994 - RNA, 80 nt, Homo sapiens
ggcagaggcggccccagcggccggcagcccaagacaccccgcggcacgccgccgccggaggagccccaagccaacaaggc

SEQ ID NO: 84995 - RNA, 72 nt, Homo sapiens
gccggggcgcccggcgccggccgagaaggcagaggcgacagcgaggacagacagcgcaggacagccagacca

SEQ ID NO: 84996 - RNA, 74 nt, Homo sapiens
ggcggggcggcccaccaacaggaacagggcagacgagcggaggacacccaacccggagcgagccgcgaccagcc

SEQ ID NO: 84997 - RNA, 72 nt, Homo sapiens
cacccaaaagaaaacccaaaaaggagcagccggccgaggcaggaaaggggaaagcaagcagagcccgcagga

SEQ ID NO: 84998 - RNA, 83 nt, Homo sapiens
gggaagggaggcggcggccccaaaagcaaaagcagaccggaaaacccaccggcaagaccacacccgaggggagcccaggacac

SEQ ID NO: 84999 - RNA, 77 nt, Homo sapiens
caaccagggggaaacacagaacgcagggcggggccgggcgggccgggaagggcaaggcagaagcccgaaaaaaaagc

SEQ ID NO: 85000 - RNA, 58 nt, Homo sapiens
cgagccccaccagccccaagagaagagggacaccccaaaacagagacggccggcaaca

SEQ ID NO: 85001 - RNA, 68 nt, Homo sapiens
aggcaacggcagaacacaaagcacgcagaggagacaggaaaaggccaaaggggaaaggacaagggaca

SEQ ID NO: 85002 - RNA, 85 nt, Homo sapiens
acaggggagccgccgccacgaggcgggcagcccaccgggcaaccggagaagaggccggaccggaagaccagagaagagcaccgga

SEQ ID NO: 85003 - RNA, 61 nt, Homo sapiens
ggcggacggcaccagagacagcgaggaggagagaagagaggaagcgagcagcacgggcaag

SEQ ID NO: 85004 - RNA, 81 nt, Homo sapiens
agaaaaggagccgcggggaggaggcgaagccacacagagggcaaggccaggcagcgaacaaagcacaaaagagaccggcca

SEQ ID NO: 85005 - RNA, 72 nt, Homo sapiens
cagagaccaccaggagaccaggacagacagagacaagagcagagaaacagaaaacagccaaaaggacaggga

SEQ ID NO: 85006 - RNA, 82 nt, Homo sapiens
cagggccgccaccaacagagaagacagagcaccaacgagcccaccgggacaccgacccaagcccagcagaagccaacagacg

SEQ ID NO: 85007 - RNA, 79 nt, Homo sapiens
agcgcagcaggagccaccaaggagcagcagccacgaacccggaccccagaaaagaggaaggagcaacccacgcagcacg

SEQ ID NO: 85008 - RNA, 78 nt, Homo sapiens
agcaccaggggaagaagaagaaacagaacaagaacgcaccgggcggagaagccgcaagacacacaccacgccaagaac

SEQ ID NO: 85009 - RNA, 75 nt, Homo sapiens
cagcacgcgccaccaccaaccaggaacacccagagaccaagaagagaagagaagcaaagcaggcgaaggcagaag

SEQ ID NO: 85010 - RNA, 81 nt, Homo sapiens
aagcgccccccgccgagcgcccgggagccccgccgcgccgagcaaagcccagcacaccagggggggaacaaccaacagcac

SEQ ID NO: 85011 - RNA, 77 nt, Homo sapiens
gaggaagcgcgggcggacgacagaggagccgaaccacccagaccagcccaggagaggaaccgagaacacgacacccg

SEQ ID NO: 85012 - RNA, 78 nt, Homo sapiens
gagaaaccaggcagggcaaacaggcaacggcgaaagaggagagcaaaaacagcagccaagcccagcaaagagcaaacc

SEQ ID NO: 85013 - RNA, 63 nt, Homo sapiens
caaccaagcagaagaggaaccaggggcacacgccgacgccgggcccaagccccagcagcccgg

SEQ ID NO: 85014 - RNA, 78 nt, Homo sapiens
gcccagaccagagagcaggaccggggacaagcgcgcagacgcagggacacagaaggagagaaggcaaggcaagaggga

SEQ ID NO: 85015 - RNA, 58 nt, Homo sapiens
gggacccaccacaaaggcccacaacggaacacacaggcacccccaggaggacacagcg

SEQ ID NO: 85016 - RNA, 91 nt, Homo sapiens
ccgggcagagcgaagaagcaaacggagaccggggccaaagcgaccaaccccccaccgcacgcagggggccccccgcccggggcaagaccac

SEQ ID NO: 85017 - RNA, 74 nt, Homo sapiens
cccagaagaggagagagagcaagagaggaagaagaacgacccgcccggggcagcaggggcagaaaaaggaagca

SEQ ID NO: 85018 - RNA, 54 nt, Homo sapiens
agcgacaacaggaggccggaagacccaaagcgagacggaaccaaagccgacccc

SEQ ID NO: 85019 - RNA, 43 nt, Homo sapiens
gcgaggaaaaggcggcgggagaaccagcgagagggaagcacga

SEQ ID NO: 85020 - RNA, 76 nt, Homo sapiens
accgcacaaacccacggacacccgccccgacccgggcgaagagggaggacgcgagagccgccagcaccggcagagc

SEQ ID NO: 85021 - RNA, 50 nt, Homo sapiens
gaacagagagacgaaggaagaggggaggagagagcagaacggagaacagg

SEQ ID NO: 85022 - RNA, 70 nt, Homo sapiens
acccggccccaagccggaagaaccgcagccgagcggggccggccacagggcggagaacggaaaagcacca

SEQ ID NO: 85023 - RNA, 38 nt, Homo sapiens
ccagagggcgggaacaggaccaggacacagaccggaaa

SEQ ID NO: 85024 - RNA, 69 nt, Homo sapiens
gcgaggagggacagcaacaggaaacaacgaacgagcaaggaagggccaaggcagaccccacaccggaga

SEQ ID NO: 85025 - RNA, 79 nt, Homo sapiens
gaccgcgcggaccagggcgacaaagggacccggcacgagccaggggcgcccccaccggcaccgggcgaccgccaacagg

SEQ ID NO: 85026 - RNA, 82 nt, Homo sapiens
ggagaagcaggaccccgggcccggggcaggaggaacacggggagagccgccggaacgggcggacccagagccagcggaccac

SEQ ID NO: 85027 - RNA, 75 nt, Homo sapiens
cccaaggcgacaagaccggaccggccgcagccaagccggaacaggagcggcgagcccaaacgcaagggggaagaa

SEQ ID NO: 85028 - RNA, 71 nt, Homo sapiens
gaccggacgcaaacaacagccaaccgcgcaagaggagaagagaagcacccgaaagagcgaaagcccagaca

SEQ ID NO: 85029 - RNA, 62 nt, Homo sapiens
ggagcccgagagagaagggagaacagaggacgagacgaagaaaagcaaagaccaaaggcaac

SEQ ID NO: 85030 - RNA, 67 nt, Homo sapiens
aacggagagccacaaaaaaggaagcgaaaacagaggcacaaaaggagaaagcagaagaaacaggaga

SEQ ID NO: 85031 - RNA, 65 nt, Homo sapiens
gcggcccacacggagcgcagccccgcagggggacgagggggcgcacacgcagaaagaacagcgaa

SEQ ID NO: 85032 - RNA, 84 nt, Homo sapiens
cgagaaggcacggcaccagacagaagacacggcccagaccacacaaagaggggagcgaccaaacagaacaacaccagcgacaaa

SEQ ID NO: 85033 - RNA, 80 nt, Homo sapiens
ggcaacagcgagggcaaagagcggggcccagggaaaagaaacccaccagagaaggcgcggccacccaggacccgggggag

SEQ ID NO: 85034 - RNA, 52 nt, Homo sapiens
accaaaccccaacgcaaaaccaacgacccaaacagcccaccaaggaacagcc

SEQ ID NO: 85035 - RNA, 73 nt, Homo sapiens
agcaacccacccgaccaaggcccgcccagaacaagcagagggacaaaccaaaggcacacaccgggcaggaccc

SEQ ID NO: 85036 - RNA, 56 nt, Homo sapiens
ccgccccaccgccgaccaagaagaacaagagagggggagagccgaccacggagccg

SEQ ID NO: 85037 - RNA, 70 nt, Homo sapiens
gcgaccgagaccggccaggcacacaagcaaaggccgggggcacaggggaggggcgaccccggggcccggc

SEQ ID NO: 85038 - RNA, 72 nt, Homo sapiens
ggacaggacgcaacgaaaccggcacggccgcccggacaagccgccgccgggggcaccccgcggcaggccggc

SEQ ID NO: 85039 - RNA, 58 nt, Homo sapiens
gcacacagacaacagagcaacccaccggacggggcaggcagggagccacgggagggag

SEQ ID NO: 85040 - RNA, 40 nt, Homo sapiens
acagggcccgcggacacggaagagcaacacacccaagaaa

SEQ ID NO: 85041 - RNA, 82 nt, Homo sapiens
aaagcagggacccgcgcccgggggcaccaagaacagggaaaagccgggccacagaagcaccaccacaagccacaccaacaaa

SEQ ID NO: 85042 - RNA, 83 nt, Homo sapiens
cagcggaggaagggccacgccggcgaggaggcggcggcggcggacggcgggcccgcaggagcaaaacaaaaccagcgacacac

SEQ ID NO: 85043 - RNA, 62 nt, Homo sapiens
aaaggcgcaacaacacaaaaaaagcagcaaggaagagcacaacacagaagaaacggcaagca

SEQ ID NO: 85044 - RNA, 77 nt, Homo sapiens
acccaaaacagacaaacggaagagcggcgacagcaggccagggcagagagagaagaggaaagacccaaaaaagcgag

SEQ ID NO: 85045 - RNA, 75 nt, Homo sapiens
acaccacgaagagagggaaaaaccgacacacaagaaaccaggagaaccagcagaagacacccgggaaccgcccac

SEQ ID NO: 85046 - RNA, 64 nt, Homo sapiens
ccggacaaccagaggcagccagcagggggagaccgccccagcacaccccaccccaccagccgcc

SEQ ID NO: 85047 - RNA, 75 nt, Homo sapiens
cgcgcccagaagaagggaaggcgcgaggaggaaaggaggacgaggaacaagcgggaaacggagccaccaacaagc

SEQ ID NO: 85048 - RNA, 66 nt, Homo sapiens
cgggaagcggaggaaaagacagaaaaggggaggcaccagaagcagcgggaaaggggaggacgagcg

SEQ ID NO: 85049 - RNA, 83 nt, Homo sapiens
gggaacaggcacccgccaccacgcccagagccacccccaagggcgagacaggcagcagccagggagcgaggcagacagagcaa

SEQ ID NO: 85050 - RNA, 42 nt, Homo sapiens
aaacgaagggcaagaacaaaaaacagcccacaccggcaggcc

SEQ ID NO: 85051 - RNA, 74 nt, Homo sapiens
gggagacccaccaggcccgcagggggccaggagaagcgggcgcccgcggcgggggagaggggcggaagcaaaca

SEQ ID NO: 85052 - RNA, 78 nt, Homo sapiens
caccacagcaacaagggcgggccccacgcgaggcgcaagagcaacgaaccaaagcaaaggaggccgggggaagacgga

SEQ ID NO: 85053 - RNA, 76 nt, Homo sapiens
gcacaaagggcaagaggaagaaaggcgagggaggcgcaggaggcccgaagccagcagagagcggaggcgcaaaccg

SEQ ID NO: 85054 - RNA, 35 nt, Homo sapiens
cccccaagcagcaggcaccgcgcgccgcgcccccc

SEQ ID NO: 85055 - RNA, 74 nt, Homo sapiens
gggcgaaaacaaacgacaaaaacaccccgcccacggcccgggagcgggggcccacgagaagagcaggcgacggg

SEQ ID NO: 85056 - RNA, 85 nt, Homo sapiens
cgagcccagcgcaaccccaagcgcccaaaggagaacggcagcagccaccaccaacagccacaagggcaccggcacacccaacggc

SEQ ID NO: 85057 - RNA, 73 nt, Homo sapiens
aacagccaccaaaacagaaggcggcaccaggacgccgaaaagcgaccggacgcaggcacagggacacgcgaga

SEQ ID NO: 85058 - RNA, 41 nt, Homo sapiens
cacggcagaaacagccaagggcggggccagcacaggaaggg

SEQ ID NO: 85059 - RNA, 81 nt, Homo sapiens
caggcacccccccccggcagggacggcgggcgacgcgaggagagagcgacgaagccaacgccaggggcaacagaaagccac

SEQ ID NO: 85060 - RNA, 73 nt, Homo sapiens
cccccagaccacaccggggcccgccgggcacggaaaaaccgcgagcccgggggccagcacaggaggaaagcac

SEQ ID NO: 85061 - RNA, 82 nt, Homo sapiens
gccccgcgcgggccaggagggaagggccagaacgagaaaggacagcccgaagaaggagacaggagaagagcggaagaagcac

SEQ ID NO: 85062 - RNA, 83 nt, Homo sapiens
cgcaccacacgggaacgacccgcgcggccccgagggccccaagggggcagcacgaaaacaccaacgacgcaacgaggaaaggg

SEQ ID NO: 85063 - RNA, 83 nt, Homo sapiens
gggcgcgagagcagcaaggccagcggcagcagaagcagcggccaagaacccaggcacgcaagaaaggggcccgggagaagagg

SEQ ID NO: 85064 - RNA, 40 nt, Homo sapiens
ccggcaacggagacccaaggggcaacgaggaacaggccaa

SEQ ID NO: 85065 - RNA, 76 nt, Homo sapiens
gggccagcacaacagaaagaacagccaggccgcagacagcacccaccgcccagcaggcgaccgaggagcacgggag

SEQ ID NO: 85066 - RNA, 80 nt, Homo sapiens
gcagacagccgaggggagcgcggggcccggcagaaaggacccaaagacaggaccacgcaccagcagagaaggaaagcaaa

SEQ ID NO: 85067 - RNA, 88 nt, Homo sapiens
aaaaggaccccggcgcggagaggaagccagccaccagccaggccaggcgggcaccacggcaggggcgagcaccccaggaagggagagg

SEQ ID NO: 85068 - RNA, 53 nt, Homo sapiens
cagcacggaccaggaggcgagcaacaggaaccagcccacgaaggaccaagcca

SEQ ID NO: 85069 - RNA, 79 nt, Homo sapiens
caggaacaagcggacaaaaaagccgagggaggaaaggagcagaggcgggagccaagaagaaaaacaccagaagcagcaa

SEQ ID NO: 85070 - RNA, 76 nt, Homo sapiens
cgggcacggcacgcccacccagaagagcaggaaaggagggcaccaaccacaaagggacgcagaagccccgggaggc

SEQ ID NO: 85071 - RNA, 77 nt, Homo sapiens
ccgagggagcagacacaccccagaaggcacaggggcaggaggcaccagccgcgccgaaaagcgaaaagaaacaagcc

SEQ ID NO: 85072 - RNA, 74 nt, Homo sapiens
ccccccggccggcccaaagcagcagccagccccgaagacaaggcacgaggcgcggcgaccaccacagcagagcc

SEQ ID NO: 85073 - RNA, 65 nt, Homo sapiens
gaaacgcccccgagaagaaggaggcgcagcagggaggggaaccaggggccgaaggcgacacacga

SEQ ID NO: 85074 - RNA, 78 nt, Homo sapiens
gggaaacggagaagagccaaccgcaccgcgcagaacagccacggaaaggaagaaggaaccgggaaggagagaaaaaaa

SEQ ID NO: 85075 - RNA, 73 nt, Homo sapiens
cgccgaggaggcgagcagccgggagacaccgccaccgccagggaagggagcccaaaacaggagcgcagcaagc

SEQ ID NO: 85076 - RNA, 96 nt, Homo sapiens
acgggagacccgcacacgacagccacagccagccaggcacgaccaggacagagcgggagccaccagcgccaaagggaagccaggagcccgggggca

SEQ ID NO: 85077 - RNA, 65 nt, Homo sapiens
gaggacaaaggcccgaagcgcacagagagggcaaaaaacacagacaccggcgaacaacaagaacc

SEQ ID NO: 85078 - RNA, 83 nt, Homo sapiens
cagcacccgggagccgcaaggcgagagcgcaaagcaaaagccaaggagaagcaagacccggacccgccgcccgagcggcagca

SEQ ID NO: 85079 - RNA, 73 nt, Homo sapiens
ggacgagcaggaagcgcggcgagcgaggcaaacaccgcaccagggaaagcgacggcgcggcgaaccaacagaa

SEQ ID NO: 85080 - RNA, 62 nt, Homo sapiens
cgcgccgagcccgccgcgcgggcccgcccgacgcggaagaagacgaccccgacgcaggccag

SEQ ID NO: 85081 - RNA, 58 nt, Homo sapiens
ccaaaagccgacaaccccagaaacaggaggaagacaggaaaagaaccgccaggagcac

SEQ ID NO: 85082 - RNA, 71 nt, Homo sapiens
aaaggggaaaccagcgcgcgccaaagggcgacggcacacagagagaccgaacacaaggagacgccacacac

SEQ ID NO: 85083 - RNA, 79 nt, Homo sapiens
gccaagcggcaccggggaccaggggaggaacccccggcaagaagcggcggggaccgaggaagcgacggccaagaagaac

SEQ ID NO: 85084 - RNA, 78 nt, Homo sapiens
cagcacaagcccgcccccacaaaccgagcaagagagagcaagaggaagcagggggaaagagaagccaccgacaggagc

SEQ ID NO: 85085 - RNA, 57 nt, Homo sapiens
ggcgaacacgccgacagggacgaagaaaaggggaaacacagggacaaacaaaacaga

SEQ ID NO: 85086 - RNA, 63 nt, Homo sapiens
agaaaccaaggccacgcacaacgcccacacgaccgccacgaggggagccaccgcaccgacaag

SEQ ID NO: 85087 - RNA, 89 nt, Homo sapiens
cgccaagcgcacacaaaagaggagaaaaccgggcgcagccgcggccgggcaaagggcagcacccggaagaggacgaccaaggaccccag

SEQ ID NO: 85088 - RNA, 73 nt, Homo sapiens
cggggaaaaaaccagagaccacagaaggacgggagaacaccccacagggaagagggagggagcgggaccgaga

SEQ ID NO: 85089 - RNA, 66 nt, Homo sapiens
aaagcggggcccaaaacagcccgagacgaagggaaaccgaagaagaacccgagccaaagggaggaa

SEQ ID NO: 85090 - RNA, 74 nt, Homo sapiens
cgaaagcgaaggcaaacacggcgccagagaaacgcgggaaggcggagaacggaaaagcaccaggaagcagagag

SEQ ID NO: 85091 - RNA, 76 nt, Homo sapiens
gaaccaaacaagccgacagagggaaaccaacagccaggaagcaacagaaacagaaagcccggccagcgccgaaaac

SEQ ID NO: 85092 - RNA, 86 nt, Homo sapiens
ccacccgcacccaagcccgaacgccccagaagccccgggagcaccgagaagcggagaagacaaacgagggagcaggagacaccccc

SEQ ID NO: 85093 - RNA, 58 nt, Homo sapiens
agccaagagcgggcccgggccaaccgagggggccagagacggaaaggccacccccgcc

SEQ ID NO: 85094 - RNA, 77 nt, Homo sapiens
agaaacagccaaaacagcacaacagcgcagacgcacacaggcccgaacaagcgacaaaaacgagaaaagcagaaaag

SEQ ID NO: 85095 - RNA, 78 nt, Homo sapiens
cagcggcgcagcccacgccagacgaccccacccgcgccgcgacccggaagcccggggcggcgacggagcacgacccaa

SEQ ID NO: 85096 - RNA, 39 nt, Homo sapiens
gcaagaggcagggaagcagagcgcccgcgccaggcggag

SEQ ID NO: 85097 - RNA, 76 nt, Homo sapiens
aagccgagggcgaggaggacccaccaacaggggaagagaagccaggagaaaagaaaacaacgaagacgggacaggc

SEQ ID NO: 85098 - RNA, 72 nt, Homo sapiens
gcgagaagacaccggcaggccggggggggcacagagccccggaagacagcccccagcgaccagacccagggc

SEQ ID NO: 85099 - RNA, 88 nt, Homo sapiens
gagccgcaggagagacacgcgggccgaccccagagcggcgcggacaggaaaaagaacgcacgggaaacccaagaaggagcaccggccc

SEQ ID NO: 85100 - RNA, 75 nt, Homo sapiens
cccacgcggccagcgaaaacgcccaggccaaaacagaagaggcaaagcccagccacagcagcagcccagcagcaa

SEQ ID NO: 85101 - RNA, 73 nt, Homo sapiens
ccgagcacccggaccacggggggaagaaagaaggagaaggcggaggagggagaggacccaaacgggaaagaca

SEQ ID NO: 85102 - RNA, 70 nt, Homo sapiens
gccccggccggggccgcagccgagacacgagaaccacaaaagacacgggagccagggaggaccagcggac

SEQ ID NO: 85103 - RNA, 85 nt, Homo sapiens
gcaacggccaaccggcaagaccagacgggaacgggagacaagcgcagcgaggaccagccaccagccgaagcaaagaccccagaag

SEQ ID NO: 85104 - RNA, 55 nt, Homo sapiens
cgcggggaccgcggcccggcaagccacagccaggaaacaccagccccccggcacg

SEQ ID NO: 85105 - RNA, 76 nt, Homo sapiens
acacccagagggccaaggccaaaagaaaggcagacgaagggaaagcccagaacaggcggagaacggaaaagcacca

SEQ ID NO: 85106 - RNA, 76 nt, Homo sapiens
agagagcgagcgagggggggcgcgccggaaaccggagcgcgcagcaggacgaggaaagccccaggaagaagaagaa

SEQ ID NO: 85107 - RNA, 89 nt, Homo sapiens
cgcggcagggagcgcgggggcccgcgcagcagcgaccacgaccccaagaagaagcggaagaggagccgcggaaccaagacacaaggaac

SEQ ID NO: 85108 - RNA, 75 nt, Homo sapiens
acgcccggaggaggcgagcagcacagagacggcgaaagcgagcaggaacccggaagaggggaggagacgccggaa

SEQ ID NO: 85109 - RNA, 79 nt, Homo sapiens
cgaagccggacagacggaaggacacgaaagacgacggcagagacgcaaaaacaaagaaaacccaaaacaagagcaggca

SEQ ID NO: 85110 - RNA, 71 nt, Homo sapiens
cacacaccacaggaagccagacccacgaggaagcggccgcggcgaaccccagagccagcgggcagacgaac

SEQ ID NO: 85111 - RNA, 71 nt, Homo sapiens
acagcagcgaagagcaaaaacgaagcaccaacgggagacacaggaaaccagagccaaggaacgaacagggc

SEQ ID NO: 85112 - RNA, 76 nt, Homo sapiens
cggggcaccacagagagcggaaggccgcgggaaaggcaaaaccccaagaggggacgaaggaggagggcgccgggag

SEQ ID NO: 85113 - RNA, 87 nt, Homo sapiens
aagagagagagaagcaaaaggagaacgaaagcggaccagaaacaccacgacagacacaagaagaagaaaaagaaaaaagaagaggac

SEQ ID NO: 85114 - RNA, 77 nt, Homo sapiens
gcgcccggccgccacgggcggaggccgggacagcggagcgcggaggcgcggcccccaggacagcggggaaagagaga

SEQ ID NO: 85115 - RNA, 67 nt, Homo sapiens
gacgggaaacagggccccaacaaagcaccggggccagcagcgccgcccaccgagcgggggccggaac

SEQ ID NO: 85116 - RNA, 89 nt, Homo sapiens
gaggcccggagcagagccgaagccgccggagaagaggagccccagcgccccgggcaaagcagaccagaaaggccacagagaaagacgcc

SEQ ID NO: 85117 - RNA, 77 nt, Homo sapiens
gcaggaaaagcaccagagagaccagagggcggaaggaacagaaaggcagccgccgcaaagggacgacgaagggacag

SEQ ID NO: 85118 - RNA, 39 nt, Homo sapiens
gaacaccagaaggcagcagccaggggcgggaaagaggcc

SEQ ID NO: 85119 - RNA, 80 nt, Homo sapiens
cgagggcccagcccaaggacccgacagagcaagcgacgcccagaggcagcaccgcgcgcgaaggcgcaggagcgcgaggg

SEQ ID NO: 85120 - RNA, 88 nt, Homo sapiens
ccggaacagagcagaaggacccccaggcaccagcgaggcagccgaccgagcagggaggaagcacaccgaggggggacccgaggcccac

SEQ ID NO: 85121 - RNA, 81 nt, Homo sapiens
gacaaccccaagcccgggccacccgcgcgggggcgaggcggagcagccgagagcggcccaggaggaacaaccagcccaccc

SEQ ID NO: 85122 - RNA, 69 nt, Homo sapiens
cccaccacgcagagcccggaaaaggaaacaacggaagacaaaggcaaagaccgaaacaaggaccccccg

SEQ ID NO: 85123 - RNA, 80 nt, Homo sapiens
cgaccaagacgcaagcggcagccgacagagcgggagccaccagcgccaaagggaagccaggagcccgggggcacggggag

SEQ ID NO: 85124 - RNA, 68 nt, Homo sapiens
aagaggaagccaaagcacagagccaaaagggacaggaagaaagaaccgggccccccgggcgaggacca

SEQ ID NO: 85125 - RNA, 82 nt, Homo sapiens
ggggccaccggaggcgggacacccagcaccccacgcccggccgacaagcacgcaaaccaacacgccccgcagaaggccaaca

SEQ ID NO: 85126 - RNA, 94 nt, Homo sapiens
ccaagaagggaaccgcagggaaacagcagcagccaaggacgagccacccggaaacagagcaaagcagcgacaacaaagacagaggaagaaaaac

SEQ ID NO: 85127 - RNA, 69 nt, Homo sapiens
ggagacccggggacccccgacgccaggcagcgcccccaaacgggaaggggcgagagaaaaagaagaaca

SEQ ID NO: 85128 - RNA, 84 nt, Homo sapiens
gccgcagccccccgccccggcgccgggcacggggcagaggaccggagcgccccgccggcaaacacggagaagcgacacgaagca

SEQ ID NO: 85129 - RNA, 79 nt, Homo sapiens
gagagaccaagcgcacagaaaaacacaagaagacagcccgcacggcaaagacccggcgggggcaaggaagcacggaggc

SEQ ID NO: 85130 - RNA, 71 nt, Homo sapiens
acaagagcccgagcgccacggaacgagcggacccccgagggccaccaacaagcccaggggggacacccaca

SEQ ID NO: 85131 - RNA, 77 nt, Homo sapiens
agagagggcagggcggacgaccggaaaggaacggacgggagacacaggaagagcgggccaaccggggacgagccaga

SEQ ID NO: 85132 - RNA, 62 nt, Homo sapiens
agaagaaccggaagccggagaccccccccaagacccacgaggaccccggaggaaaagcggaa

SEQ ID NO: 85133 - RNA, 52 nt, Homo sapiens
gggcggcgccggccccaagaacagcgaaaaagagagcagcgaggaaggagcc

SEQ ID NO: 85134 - RNA, 73 nt, Homo sapiens
ggaggaggagccggacgggccagagccgaaggcaggaaaagggaagggcacagggaggaagacgccagaacag

SEQ ID NO: 85135 - RNA, 72 nt, Homo sapiens
cagcacaacgcaagaaacggagaacccagggcacagaagagacgaaagggcgagggacgaagaaagaaagaa

SEQ ID NO: 85136 - RNA, 51 nt, Homo sapiens
cgaaaacgaagagaccagaagaaccaggacaagaacgcgccacaaagacga

SEQ ID NO: 85137 - RNA, 71 nt, Homo sapiens
aaaccgacaaggagcgacaaacaaggaaacccaccagagaaggcgcggccacccaggacccgggggaggca

SEQ ID NO: 85138 - RNA, 79 nt, Homo sapiens
aaggccacaagggaacgggcggccccggagagagagccgcgcacgcacagacaagggaaggcagaccgacagcaacagc

SEQ ID NO: 85139 - RNA, 75 nt, Homo sapiens
gccgcgaggggaacgaaggcagaggggcgggcaaaggagaggcacaggaagcagaggcaagaaacgaaggcagcc

SEQ ID NO: 85140 - RNA, 102 nt, Homo sapiens
aacacccaaacagggaacacagccagcaggcccccgggaaccggcacaacggaggggggaaggcagaagaaacacaaccaggaaccagcaaggacgaacccc

SEQ ID NO: 85141 - RNA, 78 nt, Homo sapiens
cgccggaggcccggccacccgagaagggagacgacgcgcgggccgcgagcggggcgacccgaggggcacaggggaaga

SEQ ID NO: 85142 - RNA, 71 nt, Homo sapiens
acccacggggcggagaaggaagcaaaggacccgggaaggcgcccgagccggaaaagcgaggacgcccggga

SEQ ID NO: 85143 - RNA, 70 nt, Homo sapiens
cgggcaagcagcccgacgccagcagagacgaggaacagcacccgcgagaaccagccaaccgagaggcgag

SEQ ID NO: 85144 - RNA, 73 nt, Homo sapiens
gccacagcaagcccaggcaggagagaagccgcccacagagagacgggagacaggaccgagccgccgccagggc

SEQ ID NO: 85145 - RNA, 68 nt, Homo sapiens
aaggcaccccgggaagaagacccgagaggccggaaggccgcacagggccggcacgcagcacgccgaac

SEQ ID NO: 85146 - RNA, 59 nt, Homo sapiens
gaaaacgcggaaaaccgacacaacagaggcgaggggacggcggggagcgcaggacagac

SEQ ID NO: 85147 - RNA, 76 nt, Homo sapiens
cgcgggcacgcccaccggcccgcgccgcccaggccccgcagagccaggacaaaaccaggcagaaccaacacgaacc

SEQ ID NO: 85148 - RNA, 63 nt, Homo sapiens
cgccacaagcagcaggccaagggagaagagccaaggagaccaaacccagcagcaccgcagcag

SEQ ID NO: 85149 - RNA, 76 nt, Homo sapiens
aaaaaaccaccaggcaccgagaaacacaagcagcgcggccacgaaacagcgaaacccaagcacgccgcaggggacc

SEQ ID NO: 85150 - RNA, 75 nt, Homo sapiens
gaaccagcacaacgcaagaaacggagaacccaggaaagaaacgcggcaagaaagcgacccgagggccaggaacag

SEQ ID NO: 85151 - RNA, 58 nt, Homo sapiens
gagggaaggggcaagccaccccgcccccaagagcaagccggccgagccaagaacagag

SEQ ID NO: 85152 - RNA, 53 nt, Homo sapiens
caccccgcgcccaccggcggaggagaaggccgaggacgcgaagccgccgccgc

SEQ ID NO: 85153 - RNA, 69 nt, Homo sapiens
aacggaagaaacaaaaaaaagaagaagcggcaagaacagacgacaccagccagaacccggacccgaccg

SEQ ID NO: 85154 - RNA, 57 nt, Homo sapiens
cacccggcggcagcggacagggcagaccgccagcagcacagcaagccacagagaggg

SEQ ID NO: 85155 - RNA, 34 nt, Homo sapiens
gcccacccgccccagaaggccacgcggcaggcaa

SEQ ID NO: 85156 - RNA, 73 nt, Homo sapiens
cagaaagcaaaccagcaggcaccaaggaaagcagaagacaagagaaagacagggcggagaccaggcgaaggac

SEQ ID NO: 85157 - RNA, 36 nt, Homo sapiens
cccgcaccggagcaaagagccggcagcgcccgaggg

SEQ ID NO: 85158 - RNA, 72 nt, Homo sapiens
gcaacagaggcaggagagagaagcccgagggcacggagaggccagggccgggaggccaagacaacgacaaga

SEQ ID NO: 85159 - RNA, 81 nt, Homo sapiens
agcgggccccccagggcgccccccgccagggccagaagcccccaggaggagaacgagcaacggaagccagaagaagcaccc

SEQ ID NO: 85160 - RNA, 85 nt, Homo sapiens
ggcgccgggcgggagaagagcggagcagggcggagagggcgaccggccagcacccgcccgaggacagagaggcgagcgcccggag

SEQ ID NO: 85161 - RNA, 75 nt, Homo sapiens
aggccaagggaacacgggaaaagaaccgcccagccagagacagccacaaagggaagcaagagaaaaagaacaacg

SEQ ID NO: 85162 - RNA, 70 nt, Homo sapiens
gcgcacgcagggcgcggaggggccggcccccggagcgacagaaacaaggggaagcggcaggagcaaaacg

SEQ ID NO: 85163 - RNA, 77 nt, Homo sapiens
acagaagaagcccagagagcaccccagcgaggcccacagaaaagccacaacccagggcaaagcccagcccaacccag

SEQ ID NO: 85164 - RNA, 42 nt, Homo sapiens
gcaagacaagaggcagccagcggacggccagagacgcgcacg

SEQ ID NO: 85165 - RNA, 75 nt, Homo sapiens
ggagaagagcgaaccgccagacccccagcgcagaaaccgggagaagccggccaggcaggcacaccccaccacaac

SEQ ID NO: 85166 - RNA, 59 nt, Homo sapiens
ccgagagcgcgaaacgcacgagaagaccccgcgaggcaagacaagaccaggcacacgac

SEQ ID NO: 85167 - RNA, 77 nt, Homo sapiens
acgaagaggaggaagcccaggaagaccgaggagcagggagcaaccacaaggaaaggaaaccaccgaaccgagccaga

SEQ ID NO: 85168 - RNA, 78 nt, Homo sapiens
cagcccggcacagccccagcggagcgacgcagaagacggggacgcaccacgaggaaaaaagaacccggaaagcggaaa

SEQ ID NO: 85169 - RNA, 57 nt, Homo sapiens
gcaaaccagcaaggcccaaaaaaggccaggaggaccagaaaacagcagaaagaccag

SEQ ID NO: 85170 - RNA, 57 nt, Homo sapiens
cggaccgcgggacaagaaaacagcgagcgcgcacaacacgcaacccaggcacaagga

SEQ ID NO: 85171 - RNA, 74 nt, Homo sapiens
ggggaccgcgccccgcccccgcagccgacgcgcccagcggggacaagcccagcacaaacggcagaacgaagccc

SEQ ID NO: 85172 - RNA, 96 nt, Homo sapiens
acgcaccagacgcaaacgcgaaaaggagggcgaagaaaaaagagggcccaaggaggcgaagggaggaggcagcgaaaacacaccaacgcaggacga

SEQ ID NO: 85173 - RNA, 73 nt, Homo sapiens
agcgggaaagaagagcgggaagggacaaaacagaggcaacaaggacggggggaaacaaagagccgaaaagccg

SEQ ID NO: 85174 - RNA, 69 nt, Homo sapiens
aggccccgccagaggcaaacaaacccgaagagagcccacgggacaaaaaaaccagacaaggaaaggaag

SEQ ID NO: 85175 - RNA, 88 nt, Homo sapiens
ccagccgccgcaggcgccgcacggaggcgcccggggacggggccgcagggaggacagggccaaagcggcaggagaaggaagggaccgg

SEQ ID NO: 85176 - RNA, 64 nt, Homo sapiens
ggagggcaagaagggcaagaagagggcgcaaacgcgggcacagccagccccccaacgacccacg

SEQ ID NO: 85177 - RNA, 79 nt, Homo sapiens
ggagaagggccggaaaccgaaacggggaaaaaaaccgcagggcggagagaccagaagcagaaagggccgccaaaacagg

SEQ ID NO: 85178 - RNA, 78 nt, Homo sapiens
accaaggagacgcccaaggaaccccgccggccaccggcggggcagcagccgagggggaaagaaagccgcaaggacagg

SEQ ID NO: 85179 - RNA, 85 nt, Homo sapiens
gccccaccacacaaggccaccagggcgcacggccggaccgaggcgcgacggcagaaggggagcccccagaaccaggccgagcccg

SEQ ID NO: 85180 - RNA, 76 nt, Homo sapiens
acaaggaaacccagaaaaaagagaggagcaccagaccgcaacaggagcagacggagaaagagaccacgagcccgaa

SEQ ID NO: 85181 - RNA, 77 nt, Homo sapiens
cgccacaaacgccgcaccaggcgagcagcgcccccgaagaaaaagcagcacgaaggcgaggaaccagcagacaaaaa

SEQ ID NO: 85182 - RNA, 71 nt, Homo sapiens
ggggcggaagcacggggaaggagcggggaccgagggggcagccgacaacggcaagcggagaagagcaaggc

SEQ ID NO: 85183 - RNA, 78 nt, Homo sapiens
aacaaacaggaaagaagccaggaaaccagggaacagaaggaaagaggcagaaggccagaagggcgaagaagaaggaaa

SEQ ID NO: 85184 - RNA, 68 nt, Homo sapiens
gcacgcgcacggaacagcagcaaccccagagaaaaagggaggcaaggaagcggagacgacaaagcgga

SEQ ID NO: 85185 - RNA, 78 nt, Homo sapiens
cccacccggaaaccaacacacacagccggaggcaacgcacagaaccagaagaaggccagccaggaaagcgggagcgcg

SEQ ID NO: 85186 - RNA, 76 nt, Homo sapiens
cccagggagccccccaacaagacacgcacccccagagcgcaagaccgggggacggggcccaccggcccacgccacc

SEQ ID NO: 85187 - RNA, 75 nt, Homo sapiens
gccagcgcgacgcacaggagcacagaaacaagagcagaagccagcccaacaagacgcgaagaaaagggacggcca

SEQ ID NO: 85188 - RNA, 77 nt, Homo sapiens
ccacgaggagcggaccgcgcacacggcacaggcaccagcccgggcagcgagcgcaaaaagccacccgcccaccacag

SEQ ID NO: 85189 - RNA, 57 nt, Homo sapiens
cgcgcagaccggggagggaaagaaagggaacaaacagagcaccaagaaagcacgcag

SEQ ID NO: 85190 - RNA, 82 nt, Homo sapiens
cacgacagagagaaggcaagagccgacccacgacagcaacggcgcaaagcaacagaagccaggcaaggaacgcggagaaaca

SEQ ID NO: 85191 - RNA, 67 nt, Homo sapiens
acacaggccaggggagacgcaccccaacagcaccccagcagacccccgagaggacccggaggagacg

SEQ ID NO: 85192 - RNA, 82 nt, Homo sapiens
cccaaggaggacccaggagacgagagagcgaacgccagggacccggcaggccgcccccggcaagaggcggagaagaacccaa

SEQ ID NO: 85193 - RNA, 79 nt, Homo sapiens
cgggccgcacccgccccccgcgcccgccaccggccgccgcccgggcggagaacggaaaagcaccaggaagcagagagga

SEQ ID NO: 85194 - RNA, 78 nt, Homo sapiens
gagaaaaccgggcgcagccaggaaggaacagagccacagagaaaaagacgccacaacagaagagccagagaaaacaca

SEQ ID NO: 85195 - RNA, 84 nt, Homo sapiens
aaagccgccggccagggcaagcgcccgaaggcagagcaaaagacgaccaggagacacaacaggccaaagccaagagaagaaaag

SEQ ID NO: 85196 - RNA, 83 nt, Homo sapiens
ggagcggggcgacgaggcgagcgggggccgggcaggcagccgcgcccaaaggggaccaaggcgaacccgagcagaggaccgag

SEQ ID NO: 85197 - RNA, 81 nt, Homo sapiens
aagacccagaacaccaagcaaagaagaggagcacaacagggaaccaagaccaggacaaagaagacccggagagacaagccg

SEQ ID NO: 85198 - RNA, 79 nt, Homo sapiens
gggaggaggaagaccagaggaagcgacagagagaggcaggcgccaaacggacgaagcaaaaacacggagacgccaaaaa

SEQ ID NO: 85199 - RNA, 58 nt, Homo sapiens
acccgcagagcgaggaccggaaggcagccacgcggggccaggaggaccaagcacagcc

SEQ ID NO: 85200 - RNA, 85 nt, Homo sapiens
gggaccaacagggagccagacgccgacaccccaggccacgagccccaggccacggcagcaggcccagcccccagcgaagcagagc

SEQ ID NO: 85201 - RNA, 65 nt, Homo sapiens
cgagaaggccacgagggacaacccggcggaccaagccgcgggagcacgagccagggagccgccgg

SEQ ID NO: 85202 - RNA, 80 nt, Homo sapiens
agaagcgccgagcaaacaaccagagggaagaaaagcaaacgaaaccgggaaacaggcaggacccgaggggggaggaagcc

SEQ ID NO: 85203 - RNA, 69 nt, Homo sapiens
ccaccaagagaaacagggcacaaggcccggaggcggagccgcacgagccccgaaagacccgagacccca

SEQ ID NO: 85204 - RNA, 74 nt, Homo sapiens
gaagagacccgacagagacaggccaagcccccacaagaggggccagaagacgggggcaccggcggaggcaacag

SEQ ID NO: 85205 - RNA, 66 nt, Homo sapiens
caggagaacaaaagggaccaagaaaagagagaggagccggaggccaaggcaaaggaaccagaaaca

SEQ ID NO: 85206 - RNA, 82 nt, Homo sapiens
aagccaaggagaccaaaacgaggagagagccggcggaaggcgggagggacaggagaacaggcacgaccccaccggcaccacc

SEQ ID NO: 85207 - RNA, 59 nt, Homo sapiens
cagagcgacagcccgggacaccaagaaagaacgccacacgccaacgaggacgacaagcg

SEQ ID NO: 85208 - RNA, 74 nt, Homo sapiens
caggaagcaaacccaagcaaagaccagcgccggaacaccaccgccaggccaggaaaaggcgggggcgcaacaca

SEQ ID NO: 85209 - RNA, 91 nt, Homo sapiens
aaagaacgagagaaagcaacgcacgaccgagcgagcaagaacaaggcgccccggcaaggccaccgcagaagccacaggagaccggaggcca

SEQ ID NO: 85210 - RNA, 95 nt, Homo sapiens
cggaagaagcgaaccaaagaagagacaaaagagagagcggaaacgagggaaagggacacccaggacaacggcagggaggcacaagcggggaaggc

SEQ ID NO: 85211 - RNA, 79 nt, Homo sapiens
gacaacacagccgcccggagcccgaggccaggaaaagaaggaacgggacccaagagcgcgggacaccgagaaggagggc

SEQ ID NO: 85212 - RNA, 47 nt, Homo sapiens
cgcaggaaagccgcagcccgaaaaagagacacgcagccggaccaaca

SEQ ID NO: 85213 - RNA, 47 nt, Homo sapiens
cccggaccagcgaccagaaggaacacacaagagaccaggcgcgaaac

SEQ ID NO: 85214 - RNA, 74 nt, Homo sapiens
ccgaccacgcgaaaaaacacagacaagagcgaccagcagacaccagacaacgaagagaggaaagaagcggaaag

SEQ ID NO: 85215 - RNA, 78 nt, Homo sapiens
gagagacgagagcacgacacggccgcacgggcccacgccagggcccagaccaagccccaccaacagaagagccccaca

SEQ ID NO: 85216 - RNA, 75 nt, Homo sapiens
aaacagacgggggaaaaaaaggagcgcccgagcgaccaaagaccgggaaaaacaagggaggcgaggacggacaaa

SEQ ID NO: 85217 - RNA, 85 nt, Homo sapiens
gaggcgaagcgggaagcagcagcagaaggggaacggacgggcccacagcccggagccccacaggagcgggggccccccccgggca

SEQ ID NO: 85218 - RNA, 75 nt, Homo sapiens
cgccccagaaaagcgaggaagcaggcggagaagagacaaggaacgcggagcaagaaagaaaaaagacccagggga

SEQ ID NO: 85219 - RNA, 52 nt, Homo sapiens
ggagagcgaagcaagggaccgaagaagccaaaggcaagcaaaaagcgggagg

SEQ ID NO: 85220 - RNA, 83 nt, Homo sapiens
ggggcgcggaggcggagaggcacggaggagccgcggggcgccgccacggccgcccggaggaccgccagaagcagcgcgacgga

SEQ ID NO: 85221 - RNA, 72 nt, Homo sapiens
agcgaccaggagcgccgaagggggacagcgccgcgcgcggaagcggcggggacgaggaaccaccagaaaccg

SEQ ID NO: 85222 - RNA, 81 nt, Homo sapiens
acacggcagcgcaggcagaccgcaggcgcaaggccaggcgacccgacgggccaccgaacacgccaaaaagaccagggggaa

SEQ ID NO: 85223 - RNA, 37 nt, Homo sapiens
gaggaggcacccccagggaccaagcaggcaggggcag

SEQ ID NO: 85224 - RNA, 78 nt, Homo sapiens
caagagaagcgagaggaacagcgacggaagaaggagaaagcagagacgaaggcccaccaccacgagcgcggccaccaa

SEQ ID NO: 85225 - RNA, 77 nt, Homo sapiens
gcagcgggccggacgaggaagagaacgagaacgcaggaagagagcaaagccaaaaaccacacaccaccccggcgaac

SEQ ID NO: 85226 - RNA, 74 nt, Homo sapiens
gggggacccaggcagacacccggcccagacccccccccagcagccggagaaggcgacaacaaccagacgaaccc

SEQ ID NO: 85227 - RNA, 84 nt, Homo sapiens
ggcgccacaccaggaaggaagcccaggcaaaagaagcggaagcagaagaggcgccaaggaggcagagaccccaggccaagaaga

SEQ ID NO: 85228 - RNA, 84 nt, Homo sapiens
ggagggagagaaccagcaccgggacgcacagagaccggaagaccaagcaggagaaccgaccggcacagccagagaacaacacac

SEQ ID NO: 85229 - RNA, 55 nt, Homo sapiens
gccgccacgccaccgcaacgggaggcgaagggaggaggcagcgaaaacacaccaa

SEQ ID NO: 85230 - RNA, 74 nt, Homo sapiens
cacgcgcggaggccggcccgccgggcgccgcagaccccaccaggcagcgagaagaaaaagaagagagagacacg

SEQ ID NO: 85231 - RNA, 87 nt, Homo sapiens
gggacaccagaagcacgaagaccaggacacaaccggaaccgcaggggggagcgggccggagagaagagaggggcgcgaggagaagga

SEQ ID NO: 85232 - RNA, 82 nt, Homo sapiens
gagacggcggggcccacagggacaacccgagaaaagagcaaaccgccgcagcagcccacagccagagccaggcagagaacgc

SEQ ID NO: 85233 - RNA, 77 nt, Homo sapiens
cagagggacaggaaacgccaggacaaagaaaacagaaaaccagaaggcaccgacaggaaaggaaaaggagaaccagg

SEQ ID NO: 85234 - RNA, 82 nt, Homo sapiens
aacgagaaccaaggcggacgcggcgagaaggcggcagagaggccccgagacccagaacgcaaaaccaaggcccggcagccac

SEQ ID NO: 85235 - RNA, 79 nt, Homo sapiens
gaaaacggaaacagagcacccaagagaagagcgagccgcagccgacaaagacaacagcagcgagagagaaaagaaggaa

SEQ ID NO: 85236 - RNA, 40 nt, Homo sapiens
cacgagaggcagagggagcccccccccggacagcacccca

SEQ ID NO: 85237 - RNA, 92 nt, Homo sapiens
ggcacagggcaaggcggcggacggcgcgcgcccgaggcgaggaggagcgcggcggcaccccgccaggaagaggcggcggcggaggagccccg

SEQ ID NO: 85238 - RNA, 42 nt, Homo sapiens
gcgccaggcacgcgaggcccccagggcggagaacggaaaagc

SEQ ID NO: 85239 - RNA, 81 nt, Homo sapiens
gaagaacgggcagcccggcagcccgagccgaccaaagacaccgaaggaggaggagggaaaccagaggagaggacagaggca

SEQ ID NO: 85240 - RNA, 70 nt, Homo sapiens
gaggagagccgaaggacaaaggggaacgaaacgcacacccggccccagcagccacagcggaggccccaag

SEQ ID NO: 85241 - RNA, 52 nt, Homo sapiens
cacccggggccaaagcaggaggccaccaaacccggacaaggcaaagaagaag

SEQ ID NO: 85242 - RNA, 67 nt, Homo sapiens
ggcaaggcggcggcgccgggggaccccaaagccccaccccacaagcagcgaaagagagcaggaggag

SEQ ID NO: 85243 - RNA, 76 nt, Homo sapiens
aaacgcaaaagccgccccaagacacagaggaaaaagacaaaccagccccgccgaagaagcagcagagaagagaggg

SEQ ID NO: 85244 - RNA, 72 nt, Homo sapiens
gacccggccgaggcgggcgcaagagaaggcaccaagaggcaacgcccccacacagaaacccaaaccaaggga

SEQ ID NO: 85245 - RNA, 84 nt, Homo sapiens
gaacagaccgccgcagagggagaaagaacaaggccaaggaagcgcggcaaagaaaccccaaagccagcaagaccacagcagcac

SEQ ID NO: 85246 - RNA, 52 nt, Homo sapiens
ggcgaaaccaccaccaccgcccgcccacgccaagccagcacaaaggggacca

SEQ ID NO: 85247 - RNA, 78 nt, Homo sapiens
gcccacaggcagcagcacggcacagcacgccgaccagccggcgccaaaggccccaggggcgccacagccgaggcagcc

SEQ ID NO: 85248 - RNA, 106 nt, Homo sapiens
agaaacaaagcgccagaagaacaggacgcccggcgaggacaaccagaagaaaaagacacggagggaagaggccagaggacccgcgcccaggcccgccagaaggaca

SEQ ID NO: 85249 - RNA, 71 nt, Homo sapiens
gaccacaggagaagcgggaaaaacaaagccagagcacaaaagccagggggcggagcagaaaccagagacag

SEQ ID NO: 85250 - RNA, 75 nt, Homo sapiens
gagagcgaaggagaacgggaggcgggaacacaagaggaaaagaaggaggccagcgggacacacaaagaaagacga

SEQ ID NO: 85251 - RNA, 89 nt, Homo sapiens
cggagcagcgcgcgggggcgagcggcagcccaccgggggacggcacggcaggcggacgcccggggccccccggaccacgaggagcaccg

SEQ ID NO: 85252 - RNA, 73 nt, Homo sapiens
ggagacgcgacaggcagggaaacaaggaaaaccagaaggacagcaacagcgccgcaccaccgaaaaagcggag

SEQ ID NO: 85253 - RNA, 75 nt, Homo sapiens
ccacccacgagcccggcaaaagcgcacaaacgcccaaggagaacgcagacagaaaccaagccgccccgaacaacg

SEQ ID NO: 85254 - RNA, 79 nt, Homo sapiens
caggggcggccacgaccaccaggcgccaggaacaagcacacagagacggggacggcaacaacaacaagaaacgggccag

SEQ ID NO: 85255 - RNA, 79 nt, Homo sapiens
gcaagcacaagggagcaaaggggccagggggccgaggccgggaagaggggagaggccgcccgcagaagccaacaccaag

SEQ ID NO: 85256 - RNA, 78 nt, Homo sapiens
ggagcgggccaggcgcggagacggagggacacacagagcggcgggaagcgccaccagaagacacaccacccgcggccc

SEQ ID NO: 85257 - RNA, 78 nt, Homo sapiens
caaaggagcagccagagggccgggcccagcaccgaccggaccaaggaagggacagggcccgcaccagaagaagaagcg

SEQ ID NO: 85258 - RNA, 114 nt, Homo sapiens
ggaacaacgcgagcaccggaccacgcagaaggcaccccgacagccccagccgacaaggaacgcaaccagaagaagaaaaaagaggaacaaaggagcagaaagcgaacggacaga

SEQ ID NO: 85259 - RNA, 107 nt, Homo sapiens
ccagcaacaccacgccaaacagaagccagaacgcggacccccgcagggccacccaggcccgcagaagacgcaggaacacccgacagcagccccccccagcagccacc

SEQ ID NO: 85260 - RNA, 71 nt, Homo sapiens
ccacccgggcccgccgcccccacacggaccacggagagcgaacaaagcaaggaagccccagaaaaagagag

SEQ ID NO: 85261 - RNA, 74 nt, Homo sapiens
caacgccgagcgggcgccaccgggccaggccggcagggcccacgagcgcagacaaagccggcgaaaaccagccg

SEQ ID NO: 85262 - RNA, 77 nt, Homo sapiens
gacgaggaggcggacccccggcgcagaaacgggagagaccaaagacggccccaggaagcagaggaacgacgggagag

SEQ ID NO: 85263 - RNA, 57 nt, Homo sapiens
cccccgagcccagcaccgcgggaagggaaccacggagaccagaccgcgccacaggac

SEQ ID NO: 85264 - RNA, 82 nt, Homo sapiens
acacaagaagaccgagcaaagagaccccggaacaaagaagcggcacggaaggaaacggcccagcagacaagcaggaaggcgg

SEQ ID NO: 85265 - RNA, 77 nt, Homo sapiens
cggacaccacacacacacagcgaagcggaacgcagagccagaagagacgaaggacccagagacacaaagaaaacaga

SEQ ID NO: 85266 - RNA, 34 nt, Homo sapiens
agcggcaagccacagacgcaaaagacgaccagga

SEQ ID NO: 85267 - RNA, 73 nt, Homo sapiens
aaggagaaggcaaagaggcagaaaaccacacaaagggcaaaggaaggaaaaaggccccaaacaagagagcagc

SEQ ID NO: 85268 - RNA, 72 nt, Homo sapiens
aagcagcgaaagcacccaaggaaccacggcaaagaaaaggaggggcaaggacagcggggacaggagacaccc

SEQ ID NO: 85269 - RNA, 81 nt, Homo sapiens
ggccgggccagagagcaaggaaggcaacgagacggggagagcggccgacaccggacagcacccaagaaaacccaggccgcg

SEQ ID NO: 85270 - RNA, 67 nt, Homo sapiens
caggaaggccaccgagggaacccgaccggacccagccccagaaggagccagaagacgagacgggaga

SEQ ID NO: 85271 - RNA, 79 nt, Homo sapiens
cgagagaccagaggaagacaggcgccaccgcggagaaaagggagccccaagagcacagccaaaccaccagagcgaaggg

SEQ ID NO: 85272 - RNA, 80 nt, Homo sapiens
acagagaggcgagcgcccggaggggagagagcggaggacagccgagaggagggcgaaggcccggcagcagcgaggaagac

SEQ ID NO: 85273 - RNA, 70 nt, Homo sapiens
cacaggaggcgcggaggacgccccaccgccgacgcccccagccaccaggaacagaccagcaccaagaaag

SEQ ID NO: 85274 - RNA, 41 nt, Homo sapiens
acgagcaacccagcgccgaagcggaggacacggccggcggc

SEQ ID NO: 85275 - RNA, 59 nt, Homo sapiens
gcagcgcagacgcggacgggagggaaaaccagggaaagcaggcaggagggagagcgccg

SEQ ID NO: 85276 - RNA, 81 nt, Homo sapiens
cgaggaagaagggcaggaccgggcggaggccgccaagacgagcaaggcagacacaagcagaaaacaccgaccggagccagg

SEQ ID NO: 85277 - RNA, 83 nt, Homo sapiens
cggcagaccccagacccaaacaacggcagaagcaggaacagagacgccaagcccgggcccggaggcacgagacaccagaagaa

SEQ ID NO: 85278 - RNA, 60 nt, Homo sapiens
gggacggagagagcacgagcccacaggaggacccgcagacacaacggaggcccgaccgag

SEQ ID NO: 85279 - RNA, 64 nt, Homo sapiens
ggagggcggcgggcggaggaacagcggcagccacaggagccaggaaaaggcggacgcaaccgcc

SEQ ID NO: 85280 - RNA, 79 nt, Homo sapiens
gccagcgccggaaaccaacaagcgccagggcagaaccgcggcagcgagaggggaagccggaaagaggcaagccgggcaa

SEQ ID NO: 85281 - RNA, 77 nt, Homo sapiens
gccccggcgcgaagaggcggaccggacggccgaggcaccgggaaaggaccggggcgggaggggcccggaggagccgc

SEQ ID NO: 85282 - RNA, 74 nt, Homo sapiens
agccccggggaccagaggagaccgccacacaagagaagacccaccgaggaggaggacagaacccaccagacaac

SEQ ID NO: 85283 - RNA, 80 nt, Homo sapiens
ccccggcccccgaagcccaccggccccaacgcacagccagggagccaagcgccgcccggccacaaccagaaggaggcaag

SEQ ID NO: 85284 - RNA, 48 nt, Homo sapiens
ggcccacgggaaaaggggcgggccacaagcgcaaaacaggcaaaagga

SEQ ID NO: 85285 - RNA, 76 nt, Homo sapiens
gagggggacggccggcggcacccgcacccggggacaagcgcgggaacggcgcggaaggcggaaaccacagaagcac

SEQ ID NO: 85286 - RNA, 74 nt, Homo sapiens
gccggaagcaccaggacagaggaaaggcaagggcagaaaagaggggaaaaggccagccgcacgcaggcaaacga

SEQ ID NO: 85287 - RNA, 80 nt, Homo sapiens
gggggacaagagcccccgccgcgggcccccccgcgcgaccccaggaccagcacgcacggccagacggaggcagagcggga

SEQ ID NO: 85288 - RNA, 66 nt, Homo sapiens
gagaaagacggccagcaaggggaaccacaggaacggaagacagcccaacaaggcgggacgacaaca

SEQ ID NO: 85289 - RNA, 43 nt, Homo sapiens
gagcggaagacggcaacccaggcacagggaaggacccagaaca

SEQ ID NO: 85290 - RNA, 78 nt, Homo sapiens
aggaacccccggaaagaacacggggcgagcggccggaagaagaagaacacaggccaccggagcagcaacaagaaggga

SEQ ID NO: 85291 - RNA, 74 nt, Homo sapiens
gcgcccgcaccgcgcccgcaaaagagggccgaggcagacaagggaaaggccgcgcaggggaccaccccagacgg

SEQ ID NO: 85292 - RNA, 57 nt, Homo sapiens
acggaagagaaggaagaacaaaaaaggagcgcaacgggaaaaaaccaaagggaaagc

SEQ ID NO: 85293 - RNA, 85 nt, Homo sapiens
cgggccgggagagggacgggcggcgcggcccgcgcgcagccggccgggaaagggagcagcaccggccacacccacagcacgaccg

SEQ ID NO: 85294 - RNA, 85 nt, Homo sapiens
gagcaagagacgcacggaggcggcccgcccggaaggcaagcgcagcaacaacagagagcacggggcggagaacggaaaagcacca

SEQ ID NO: 85295 - RNA, 75 nt, Homo sapiens
agacgacacgccgcacgacgcgccaacaacgggcacacaagaaaagagcaccggccagcagaaccagccggggcc

SEQ ID NO: 85296 - RNA, 72 nt, Homo sapiens
gggccgccccaggacaggggacgggcgcccagccagccgccgcgccaagaaacgcgcggccgggccgaccaa

SEQ ID NO: 85297 - RNA, 58 nt, Homo sapiens
gccacaggcaccagaccgacacagagaccggaggaagaaacacacccgcagaaacggc

SEQ ID NO: 85298 - RNA, 48 nt, Homo sapiens
gcaagcaggaccaaaggccagaagccagacgacccgaggagaaacaag

SEQ ID NO: 85299 - RNA, 78 nt, Homo sapiens
gccgggcccgcccgcgcgcgccggcggccgcgcgcggcggccggaggcagcggccccgcgaagcggagaacacccacc

SEQ ID NO: 85300 - RNA, 84 nt, Homo sapiens
gcgcccaagaggcccagagacagcgaaacacgaagggagaggagcggaagacccggggggcgggcagcaacacgaaggagaaac

SEQ ID NO: 85301 - RNA, 38 nt, Homo sapiens
gaggaaccagcccgagcgcccgcacggcaaagcaaaga

SEQ ID NO: 85302 - RNA, 82 nt, Homo sapiens
gggagagggaacgcagcgaaagcggaacgaaacccaccagagaaggcgcggccacccaggacccgggggaggcagcgaagaa

SEQ ID NO: 85303 - RNA, 90 nt, Homo sapiens
gggacggcggcggcgcagccggaacccgccagggccagggccaggccagcgcccggcggcccagggcggcacccaccccccgagcccgcc

SEQ ID NO: 85304 - RNA, 76 nt, Homo sapiens
ggcgaggcgcagaaaccccggacaaggcacgccagacgaaaaccagaaggcaccgacaggaaaggaaaaggagaac

SEQ ID NO: 85305 - RNA, 74 nt, Homo sapiens
cgcccgggcggagacagaagaggcgccaggacgaaggcccacgggcaagcgggcgcccgcacacacccgccacc

SEQ ID NO: 85306 - RNA, 57 nt, Homo sapiens
gcgccccccccaaccacaaaacaggcggagggcggcgagcgagcaggagcacgaagg

SEQ ID NO: 85307 - RNA, 63 nt, Homo sapiens
ggccacgacccaccccgaagagcaacggaaccagcgccgaggacagagaggcgcaggcaagac

SEQ ID NO: 85308 - RNA, 72 nt, Homo sapiens
cggaacacccacccgcccgcagcccgccggcccggccggccgggaggaggacacaccaagcgagccacggac

SEQ ID NO: 85309 - RNA, 55 nt, Homo sapiens
ggacaccaacaggacccgaacacggaacaggggcgagagaacggccagggcggag

SEQ ID NO: 85310 - RNA, 76 nt, Homo sapiens
cgccgggcgcgggcccacgcggcgcagggcccaaggccggccaagaaagagcggccagcccaaacggcggagggac

SEQ ID NO: 85311 - RNA, 79 nt, Homo sapiens
gaaacgcgaggacggggcccaggaacggaaaagggcagccgcacgggaaacggaaacggccagaagcaggacaaagcag

SEQ ID NO: 85312 - RNA, 73 nt, Homo sapiens
acacacccaacccaaaccaaggaacaagagcaaagaccaagagccaggggggggggcaaagcggagagaaagg

SEQ ID NO: 85313 - RNA, 54 nt, Homo sapiens
aacagaaggggaaaagcaccaaggggagaacagaggacagagaagacgaaccgc

SEQ ID NO: 85314 - RNA, 59 nt, Homo sapiens
agcccccagagcggaacacagcgagcaccacgcccgaggccaacacgacaccggaacgc

SEQ ID NO: 85315 - RNA, 73 nt, Homo sapiens
ggggacgcacagcaaacccacccagcacaccccgcgaaaggaggaggcacagagggcagccgaccgaagaagc

SEQ ID NO: 85316 - RNA, 77 nt, Homo sapiens
gaccagacaggcggcgccaccgaacagacccggaaggacggcgaggaaacaacgaagcaagcccaagggcgcagggg

SEQ ID NO: 85317 - RNA, 39 nt, Homo sapiens
accaaaggccggaggcaccacaacacgcgggaaaacggc

SEQ ID NO: 85318 - RNA, 71 nt, Homo sapiens
ccaaggaaccgcggcagaaaagggggccgggaccgcacacacggaggcagagacgacgccaggccagaaag

SEQ ID NO: 85319 - RNA, 59 nt, Homo sapiens
acccaggcaaacgaccaaagacaagaaggcaaaagggaaagcaaggggaagggcccaag

SEQ ID NO: 85320 - RNA, 79 nt, Homo sapiens
aacgaaggcacagcgggccgagaaagcaaacagaaaggccaaaacccccaagacgagaggaccgccgaagagcaccaga

SEQ ID NO: 85321 - RNA, 106 nt, Homo sapiens
ggaaccacaccgaacgggagccgcgcacacaccgggagaggcagagaaggagaccagaaggagcccaccggacccccccgcccggccccgacgaggaagggaaaac

SEQ ID NO: 85322 - RNA, 70 nt, Homo sapiens
cgccgaggcgagccggagaaaggccaagagcaccagccgacgaggcaacggaagaggcaaagggaggagg

SEQ ID NO: 85323 - RNA, 81 nt, Homo sapiens
caggaccacccaccagccaccagaacacacagcaggacgaaagagacaaaagccacagagaacacagaagcagaaaacgca

SEQ ID NO: 85324 - RNA, 82 nt, Homo sapiens
gccgagcaacaaccgccgagcgcgagagccgcggcagcccaagcgaacaccgaagggagagcaagccggcccggcggagaag

SEQ ID NO: 85325 - RNA, 82 nt, Homo sapiens
ggccagagaaggggaggaaccgaacgagcggacagagcgggagccaccagcgccaaagggaagccaggagcccgggggcacg

SEQ ID NO: 85326 - RNA, 80 nt, Homo sapiens
agcgggagagacaagaagggccgcacagaaggaagaaaagccaggcaaggggaagccaaagcgaggaagaaacaagagcc

SEQ ID NO: 85327 - RNA, 75 nt, Homo sapiens
agcccaacccccaggccaggaacccgccaccggacggggaaaaccagaagccggagccaggggcaacacacacac

SEQ ID NO: 85328 - RNA, 79 nt, Homo sapiens
ccgcagaaggccggagacaccagcaggaaagaccacagcaagaccacgcccccagccgggggaccaggccgaacgaccc

SEQ ID NO: 85329 - RNA, 76 nt, Homo sapiens
gaagcaagccggacccacgacggcaggaaaggaggccaggacggagagggagaagagagaacccaccgaacagcaa

SEQ ID NO: 85330 - RNA, 59 nt, Homo sapiens
gaacccgccggcacgacggcacaaggggacaaagaacagagaagcagaccaaaggagcc

SEQ ID NO: 85331 - RNA, 72 nt, Homo sapiens
ggcagcgcgccgcgcaacaccgggaggcaaggagcaccggcggcaggacagagccccgacccgggaggcgaa

SEQ ID NO: 85332 - RNA, 63 nt, Homo sapiens
gagaagcggagacaccaaagaaccccaggacaggagccagacacaggaggacggcacccagcc

SEQ ID NO: 85333 - RNA, 80 nt, Homo sapiens
gggcccgaagaagggcccggcccaagcccgggcggaggagcaccacgccgacgccagcagcgcaccgccgggggccccca

SEQ ID NO: 85334 - RNA, 79 nt, Homo sapiens
accacacggcccaaaaccgcaggacacaggaacgccacaagaaacaacagcaaggcgagggccacgaaacagaggagaa

SEQ ID NO: 85335 - RNA, 75 nt, Homo sapiens
gaccaagaaccagagcggggacgggaaagagggcagaagcagcaagaaaaggccaagagagaaggagaacggagg

SEQ ID NO: 85336 - RNA, 74 nt, Homo sapiens
gaacgggccagagagggcaaacacaaacagaggaggccagaagcaaggaaagagcagggcagaaacagccgaac

SEQ ID NO: 85337 - RNA, 70 nt, Homo sapiens
ggaccaagcagcccccacgcccgcccggaggacccggcaaaaggaagaaacagaagagaagaagacgccg

SEQ ID NO: 85338 - RNA, 74 nt, Homo sapiens
ggggagcacaccacacggacacccggcaggacccgaagacaaaaccacccacgaaagcgaaaagacccaaaaca

SEQ ID NO: 85339 - RNA, 88 nt, Homo sapiens
ccggagcaagcggagccccccaagagccggaaaggccccgagccccggccccaaagacccaaaacagagacaccccccagcccccgcg

SEQ ID NO: 85340 - RNA, 76 nt, Homo sapiens
ggggccaacgagccaacgccaggcgccgcccacaggagaggaagacgaggaagcagaagaacaccaagcccaccaa

SEQ ID NO: 85341 - RNA, 65 nt, Homo sapiens
ggccaggcccgcccagaccacccgcccaggaccccacaacaaggaagaaaagaacaagagagagg

SEQ ID NO: 85342 - RNA, 66 nt, Homo sapiens
agagccggcagcaaagagggaacagggcaggaaaggagggcgaaacacaagcaccacccccggaag

SEQ ID NO: 85343 - RNA, 67 nt, Homo sapiens
gggaaccaccaccaccagcgacccgagagaaaccacaaaggaccgaaagagggcaaccccgcaggag

SEQ ID NO: 85344 - RNA, 72 nt, Homo sapiens
aacgccaagcaggaggaagagccaaagaacaccagaaacagacaacggagacaccgccagaagcaccaggac

SEQ ID NO: 85345 - RNA, 40 nt, Homo sapiens
ggaaggcgcgaggcaacaagaccgggcaccgagccgggag

SEQ ID NO: 85346 - RNA, 67 nt, Homo sapiens
acgggagaaaaaggaaaacgcggaaaaccgacacaacaggcgacagcagcagacgcggcacgcggcc

SEQ ID NO: 85347 - RNA, 73 nt, Homo sapiens
ggacagccaccgagacaagacaacaaagaggcgagaagacgacaccgaaaagcaagagaaaaccaggcggcga

SEQ ID NO: 85348 - RNA, 104 nt, Homo sapiens
gccaacagaaagaagcaccgaaggaagaaaagcacagcaaccaaagccgacggccgccggcacgcgaagaaaaggggaaggaacaaaccaaagagcagaccccc

SEQ ID NO: 85349 - RNA, 75 nt, Homo sapiens
ccgccccggcccgcggggcgcgggccgccagcccggcaccgcccccccccgcgagccggagcgcggcggagcagg

SEQ ID NO: 85350 - RNA, 37 nt, Homo sapiens
cagagacgaaccaggcaaaggaaaaagcccagaggaa

SEQ ID NO: 85351 - RNA, 57 nt, Homo sapiens
aacaagacacggagcaaggaggaaaacacacgagcacaggcaaccagcgccacgcac

SEQ ID NO: 85352 - RNA, 49 nt, Homo sapiens
aacggcacacgcgagcgaacaccgaaaacccccagcacagaaaggggac

SEQ ID NO: 85353 - RNA, 58 nt, Homo sapiens
cggcggcgcccgcaccgcgcccgcaaaaacagagcgggagagccccccacgacccaga

SEQ ID NO: 85354 - RNA, 94 nt, Homo sapiens
aaacccaagaaagaaaaccggaaacaacccaaccgcagagcaggaggaggcagcggaagaggagcgaagcagaggcgagaccgaggagaccagg

SEQ ID NO: 85355 - RNA, 85 nt, Homo sapiens
agagaaggagcagagaacgaccaagaggagaagaagccacacacagaagacccaaagagaacacaggagaggcaagaggggaaag

SEQ ID NO: 85356 - RNA, 58 nt, Homo sapiens
ggcagaaggcaccaaaggcagcaagaggaagaagaacaaaacaagaagaaagacagga

SEQ ID NO: 85357 - RNA, 80 nt, Homo sapiens
ggcgaagcggccgagcaggcgagcgaacgacggaacaagcagaaagcacgaacaacgagaacaagacacgagcaaacccc

SEQ ID NO: 85358 - RNA, 92 nt, Homo sapiens
ccccagaagagggaaagccagacccgcccaacagaaaaagagaggagggagaacacagaaacccgccccgggaaagaccacagcaagaccac

SEQ ID NO: 85359 - RNA, 65 nt, Homo sapiens
ggcaagaacaggccacgcaaacaagcagcgaaacgagcagaaagaagaaacggagagaggcacca

SEQ ID NO: 85360 - RNA, 50 nt, Homo sapiens
cagacagcaaggaacccaaacacgcccacggacacaagcacgacggagaa

SEQ ID NO: 85361 - RNA, 65 nt, Homo sapiens
cgaggaagcacacaccagcaagcaagagggaagaaagccaagacagagaagaagccagaagaaga

SEQ ID NO: 85362 - RNA, 79 nt, Homo sapiens
cggaagcgaaagaaaaacaggagaagaaggccgacacggagggggccagccagccgagagcgacagaccccaacaaggg

SEQ ID NO: 85363 - RNA, 75 nt, Homo sapiens
agaaaagggaaaaccaccaacagaacaagagaccaccggggcggccccccacccccaccgaagacgaagcagaaa

SEQ ID NO: 85364 - RNA, 70 nt, Homo sapiens
ccgcagcgaaacacagagcagacaacaagacagagccagaggaccagaaacaaaaacaaccaccccacac

SEQ ID NO: 85365 - RNA, 74 nt, Homo sapiens
acagggacagggcggaggcacgcacaggaccacaggaggcacacagagaaaaaaagggaacaaaacacagcaag

SEQ ID NO: 85366 - RNA, 74 nt, Homo sapiens
gggggccacaaagccccccggagacgcaaccaagcgcacggggcaacagccacacccggagcacccaccaaaca

SEQ ID NO: 85367 - RNA, 68 nt, Homo sapiens
cgcccccgccaggaaggagccaggggaccaaccggagaaagcccaaaagaaaacccgacccaaccagc

SEQ ID NO: 85368 - RNA, 80 nt, Homo sapiens
ggaggcagcggaggaggggagaagaacggggcagccgaagaggaagcagacccggacaaaagggcccccaacgccaaaaa

SEQ ID NO: 85369 - RNA, 70 nt, Homo sapiens
gaccgccacaccaccgcacagaaggggacgaagggaacccgccgggcggcccggcacccagccccccggc

SEQ ID NO: 85370 - RNA, 75 nt, Homo sapiens
ccagcgaggagagcgaggcagccaccaccgagcccgagccggaaggacacgacacagaaccaagaccggcagcgg

SEQ ID NO: 85371 - RNA, 64 nt, Homo sapiens
ccgaggacggccggaaaaacgaacagacgcacaccacgcggcccaaccgggggaggaaacaaaa

SEQ ID NO: 85372 - RNA, 78 nt, Homo sapiens
agaaagaaggcgagcggccaaggggcggaagacacaggccccgagggcgggggacaggcccccacgccccaggaggag

SEQ ID NO: 85373 - RNA, 42 nt, Homo sapiens
gcagcggcgcgggaggccggcggagcacggacagagggaagg

SEQ ID NO: 85374 - RNA, 76 nt, Homo sapiens
gcagcccagaaccggagagggagcaccacagaaggagacaccaaagggagaagaggaagggggagagcggacaaag

SEQ ID NO: 85375 - RNA, 77 nt, Homo sapiens
ggaagaggccacgaggcgcacaccgccagcccaagaaaaagaagcagcgacggagaggagcccgcccagccaaggag

SEQ ID NO: 85376 - RNA, 77 nt, Homo sapiens
aggacagcgcacacagcaagcacgagaagagaccgacccaaacccacccaagggcaggacgggaagcaggcggcggc

SEQ ID NO: 85377 - RNA, 78 nt, Homo sapiens
gagacggagcaagagaacgcaagagacgcaaggcacggcggacagcagcccccggagcagacggcccacccggaggaa

SEQ ID NO: 85378 - RNA, 78 nt, Homo sapiens
aggaaaggaggaggccaaacgcgccagacgagaaccggcaaagggaggggagaggagaaagcacgaggccagaaggca

SEQ ID NO: 85379 - RNA, 79 nt, Homo sapiens
ggccagaccggagcagcggggacagcgccacgcagagccccgccaggaagacacgccggggaacgaagcagaagacgga

SEQ ID NO: 85380 - RNA, 78 nt, Homo sapiens
gcagaggaaagggggcgacaaggggagcgggcccacagccacgggcccagcagaccaccgacggagccagccaaagaa

SEQ ID NO: 85381 - RNA, 95 nt, Homo sapiens
acacgaacagcaagagccaacacagcacaagggcagcaccagaaagcccccaaaacacaagaggacggagaagcgacgaaagaagccgggacaag

SEQ ID NO: 85382 - RNA, 80 nt, Homo sapiens
ggccgaaagcggagagagcgggcgggcggccgggagacccacagaagcaagaaaggacagcaaagcgaagaagcaaagaa

SEQ ID NO: 85383 - RNA, 75 nt, Homo sapiens
gacaaccccgcaacggcaggggcaggccaggaccgacagcccccacaaggccacggcacgagagagggccggccc

SEQ ID NO: 85384 - RNA, 69 nt, Homo sapiens
gaacaacaagcagaggaccaaagccgcggaacacccacagcgccacacgagaaccaccaccccgcaaca

SEQ ID NO: 85385 - RNA, 80 nt, Homo sapiens
gcgcagaccgcggagaagggagacacaaggacagcagcgacggggcccgcaccccagaaggccccgagcgagggcgcccg

SEQ ID NO: 85386 - RNA, 76 nt, Homo sapiens
gacaccaaggacccaagccgacaccacaacaaagaagaccacacacgggaaacacaaaacgaccgcaagggaagca

SEQ ID NO: 85387 - RNA, 71 nt, Homo sapiens
ccagcgccccccacgaccggggcggccaggcagccaccgccggccgaaagcccaagcgcaaaaaaaaggcc

SEQ ID NO: 85388 - RNA, 84 nt, Homo sapiens
acggagaagaagcgcggcccacacacccagccgggacgcaggagggaagaagacacccgcaaagaaacagagaaacaaaacaga

SEQ ID NO: 85389 - RNA, 82 nt, Homo sapiens
gcaaggagggcggcgggacgcaccgaggccagaccgccgagcagggaaaggcaaaggcaggcagagaagaagggaaaaagaa

SEQ ID NO: 85390 - RNA, 77 nt, Homo sapiens
ccaggcggcacccacccagaaccgccgccccgcccacaggacagccgggcagcagcccagccaaagccggaaaagga

SEQ ID NO: 85391 - RNA, 67 nt, Homo sapiens
ccgcaacaaacagcgcagcggcccaaggcgcaccccacggacagcgagaggggcagggcccgggcgc

SEQ ID NO: 85392 - RNA, 67 nt, Homo sapiens
cccccgacaccacaagcggaaagggagaacgggagaggagcggaaacgcccgaggggacccaccaga

SEQ ID NO: 85393 - RNA, 73 nt, Homo sapiens
acaggcagagacgccgggacggcagagaacccacaaagaggcggacaaaccggcgaccacacacggggacgac

SEQ ID NO: 85394 - RNA, 58 nt, Homo sapiens
cccaacaaacaccagcgcggcagaccccacagagacagaaagaaggacgaaccgacca

SEQ ID NO: 85395 - RNA, 84 nt, Homo sapiens
ccagggaggcaggggcagaaacagagaaggaacaggacccaccgccagcggaggacacccaggccacaagagagaggaggccac

SEQ ID NO: 85396 - RNA, 72 nt, Homo sapiens
gccgcggggccccgaccccggcacaggcagaagcaagaagagacagaagggaggcacagaagaggaacaggc

SEQ ID NO: 85397 - RNA, 58 nt, Homo sapiens
aacagcccgagccgagcaaggccagcaccccgaaagaggaagagccacagggagcacc

SEQ ID NO: 85398 - RNA, 81 nt, Homo sapiens
gacagagcggcgggacagcccaagggccagcaccgcgcccaggcagagccagaccgacagaacaagcgagggaggcggcgg

SEQ ID NO: 85399 - RNA, 51 nt, Homo sapiens
aggccaaggaaaccaaaagggagacacagaaacaaagggagagcgcgaggg

SEQ ID NO: 85400 - RNA, 39 nt, Homo sapiens
gcgaacccagcaccccccgacacgacgccacagcaacaa

SEQ ID NO: 85401 - RNA, 77 nt, Homo sapiens
ggaggagggggcggccacggccaacgccgcgcccgcggagggaaaagacaagggaggcgaggacggacaaaaggaaa

SEQ ID NO: 85402 - RNA, 73 nt, Homo sapiens
gcgagcagagaaaccagggccgcaaggccaggcgcgcagaggcacccaacggcacagaccccacacacaacgg

SEQ ID NO: 85403 - RNA, 63 nt, Homo sapiens
ggccgcacaacgcggagcggaagagagggaccacaggcaggaaaacaagcgagggccccacga

SEQ ID NO: 85404 - RNA, 73 nt, Homo sapiens
cagaacccgggagaggagaccagaacgaacccccccccccgacaggagacccaacaccccagccagacggcac

SEQ ID NO: 85405 - RNA, 70 nt, Homo sapiens
acgaaggaggccggagaagaaagaggccacggaccgcagcgcagcacggaggcgccaaggcgcccgggca

SEQ ID NO: 85406 - RNA, 79 nt, Homo sapiens
ggcgccgggccaggacggggaagaagcccagcggaggcgaacggcccccgccaacacgaggaccccacggagaggcccg

SEQ ID NO: 85407 - RNA, 86 nt, Homo sapiens
agcgcccccgggccggcaggcgacccgaacgaaggcggcccggcgggccaccccacccccgggcggggcgaagaagagcagagcag

SEQ ID NO: 85408 - RNA, 85 nt, Homo sapiens
cggcccgcgggggagccccgggagccgcacggacccagcagccagcgaagccccaaggaagccgggacgcccacagacccagcag

SEQ ID NO: 85409 - RNA, 81 nt, Homo sapiens
gcaaaagagcccagaaccaggaaaaaccagaagagaaaaaacaaaggggagaggcaccccgcgggacgaccggacagagag

SEQ ID NO: 85410 - RNA, 79 nt, Homo sapiens
aaacaaaaaggaaaggagacaagcagagacgaaccaggcaaagggagaagacaacacagacaagccgacagcacaggcc

SEQ ID NO: 85411 - RNA, 73 nt, Homo sapiens
cacccccaacgagaaccgaacacacaaaagagcaaaagaaggcagcggcagcagagagcacagaaaggagacc

SEQ ID NO: 85412 - RNA, 74 nt, Homo sapiens
cccagaggagaaagaaggcgcagagcaagccaaggcaacaccaacagcagaagaggaccagcacaagcaacggc

SEQ ID NO: 85413 - RNA, 59 nt, Homo sapiens
cgggcacaagacgcggccgcgggcccacagcaggcgagaccgacgcgcaggcggccccg

SEQ ID NO: 85414 - RNA, 81 nt, Homo sapiens
ggccaccagccgcgcccacccgggagccggcccagaaggccgagcccggccacacagcaccgacacccgcggccgaaacca

SEQ ID NO: 85415 - RNA, 81 nt, Homo sapiens
ccccagacaagaggacaccgcggaggaaggcagacccgcagaccaacgaaaaccacggcgccacgaagagggaaaaggaca

SEQ ID NO: 85416 - RNA, 76 nt, Homo sapiens
accaggggcagcagggcagggcacccagcagcccagcagggaagccgaacccacgacagagaagaagaaacagaca

SEQ ID NO: 85417 - RNA, 64 nt, Homo sapiens
ggaagagggcagagggggacggaagcggcagcgggcagccggcccagcacagggagcagaaccc

SEQ ID NO: 85418 - RNA, 73 nt, Homo sapiens
aaaggaaaaggagagagccagagcaagagcggaccgccgccagaagaccgaagacagagaagaaaaaaaaaga

SEQ ID NO: 85419 - RNA, 63 nt, Homo sapiens
aggcacagcgcggaacggagcagacaagggagagcagagaagcagaggagaaggcaaacagaa

SEQ ID NO: 85420 - RNA, 81 nt, Homo sapiens
gaagacacaccccacaggaccccagagcgacagcccgggacaccaagaaagaacgggcgcggagaaacaagaaccccccag

SEQ ID NO: 85421 - RNA, 65 nt, Homo sapiens
caggaccgaaaaacagagcaaggagggcacaggaaaaaagagcggaaaaaaaaggaggccccccg

SEQ ID NO: 85422 - RNA, 76 nt, Homo sapiens
gacggcaacagagggagaagcaaagcaacgccaagggcggagaacggaaaagcaccaggaagcagagaggaccgca

SEQ ID NO: 85423 - RNA, 79 nt, Homo sapiens
caccaacgcagcagggaagaaaaggcagagaagcaccccccgcccggaggggagaggcccggcgggagaagcgaaggaa

SEQ ID NO: 85424 - RNA, 83 nt, Homo sapiens
ccgcagccggcaggccggggaccacgagggaggacggggggacacccggagacaaccccaaccccggagacccgcagggcccg

SEQ ID NO: 85425 - RNA, 57 nt, Homo sapiens
ggccaaagaagggagagagaaacggccacaaggcaaaccacacaccaagacaagaga

SEQ ID NO: 85426 - RNA, 80 nt, Homo sapiens
cagggggcgcgcccgaagcaggaagaccggagggagcgcagcacagcggggggaggaggggggagcaacagcgagcaaca

SEQ ID NO: 85427 - RNA, 75 nt, Homo sapiens
ccccggcggcacggcgccgaccagcaccaggggaagcgggacaacggggagccaaagggaccgggacaggggaag

SEQ ID NO: 85428 - RNA, 82 nt, Homo sapiens
aaagcccacagccaaagccgggcggacgcgaacgccaaaagacgaacacaaagggaaagaggagaggcacccgaaagccagg

SEQ ID NO: 85429 - RNA, 58 nt, Homo sapiens
aggcggagcccgcagaccgcagaaggccggagacaccagcagcggagaaccgaacaac

SEQ ID NO: 85430 - RNA, 79 nt, Homo sapiens
agaagacccgccagaacaaaacaagaaaaacagccagacagacgcacacaggaagacagacccagagcaggacggacac

SEQ ID NO: 85431 - RNA, 81 nt, Homo sapiens
gcggaggcagaggggaggcgcgaaaggcggggccccgggccgcaccccccaccgcaacccgccgggaagcagccgccaaaa

SEQ ID NO: 85432 - RNA, 74 nt, Homo sapiens
gcccaggagcggcggcgaagaaggaggcaggcacgggagccgaaggggggcccacgcggaggacgcagaacacg

SEQ ID NO: 85433 - RNA, 111 nt, Homo sapiens
cggcgcgcggagaaggagaggggaccgcccggacacaagaaaaagagcgaaaaagacacgccgggaaagcaccgggaggaaagagagccacacgaagaacacggccaaagg

SEQ ID NO: 85434 - RNA, 70 nt, Homo sapiens
acgccacggggacgggggacgaaggaagagaggaaaggcgggaggcggcgcgagaaaggaaaaggcagag

SEQ ID NO: 85435 - RNA, 80 nt, Homo sapiens
caaagaagaggccgcaaagcgacaagagacagcaggccagcaacagaagaaagcaagcaccggggaaagcggcccgaaac

SEQ ID NO: 85436 - RNA, 87 nt, Homo sapiens
cgacgcggaccagaagccagagcgaggacgccggcagagagagcaagccgccaggcgcgggagccggggaacagaacgccgaccacc

SEQ ID NO: 85437 - RNA, 87 nt, Homo sapiens
cgccgccgcaccgggaccggagaggaagcggaggcgaagggggacaggcgcaaggaagaagagacgccgcgcggcagacaaggcccg

SEQ ID NO: 85438 - RNA, 77 nt, Homo sapiens
aaggacaccccgccaggcaaaagagccaggacaaaaccaggcagaaccaacacgaacccaagcacaaacaagaaaac

SEQ ID NO: 85439 - RNA, 83 nt, Homo sapiens
cccggaccgcgcagccaccgcggcccccgcgggacggggaaacgcaaggcacaggcagcaggagccagcacaagcaccaaacc

SEQ ID NO: 85440 - RNA, 36 nt, Homo sapiens
aggaccgggaaacaaaaaggcgaggcacaggcacgc

SEQ ID NO: 85441 - RNA, 80 nt, Homo sapiens
cgagggccgggagcccgcaccgggccggcagaggaccacccgcacccaggggacgcacggcccaaccccgagcaaggacg

SEQ ID NO: 85442 - RNA, 73 nt, Homo sapiens
agcgacaaacaaagaaagacggacgcacaacgcagacacaacgccagggacgacagacgccaggcggaagggg

SEQ ID NO: 85443 - RNA, 100 nt, Homo sapiens
aggccaaccagccaccaaccaccgacacaccagagcaccacccacagcaacccccagccacaacgcgaaccgggcggacgaaggaggcggcaacaggacg

SEQ ID NO: 85444 - RNA, 68 nt, Homo sapiens
gaaggaccaagaaccaggaaacccgggacgacagcagaggcgacaaaccagaccagagaaaaaagagc

SEQ ID NO: 85445 - RNA, 69 nt, Homo sapiens
aggcagaccagagagaggaaacaaggaaagggaacgcagagaagcggcagaaggcacccacagggaacg

SEQ ID NO: 85446 - RNA, 96 nt, Homo sapiens
ccccacagccccaccgacccacccaggaccggggcccacgccgccaagccgccccgaccaaagaggcgagccagcccccacccagaggagaacgaa

SEQ ID NO: 85447 - RNA, 73 nt, Homo sapiens
ccacaacagcaagagcgggagaaaagacccccaagagcacagccggaagagcacagaaccccaaagccaagcc

SEQ ID NO: 85448 - RNA, 70 nt, Homo sapiens
cacagccgacccaagacgggcgaacagaggcgagagcacagacaaaacaacaaccagaaaaaacaaggga

SEQ ID NO: 85449 - RNA, 71 nt, Homo sapiens
gggggccacagagccgcagaaagggcagagaggcggaccccgcgggcgcgcggcccgaacccagcgagagg

SEQ ID NO: 85450 - RNA, 79 nt, Homo sapiens
aacagacgcgcccagagcgcagcacgggcgcaggccgagggggagacacgcccagggagaccacgccccagcaacccac

SEQ ID NO: 85451 - RNA, 69 nt, Homo sapiens
gggaccaacggggaaccccggggcggccccgagggacgcagggccgcgggaaagggcggacaggagccg

SEQ ID NO: 85452 - RNA, 80 nt, Homo sapiens
cggccaggccccaacaacgacaagcaagcagggcacggaaaaccgcagcaggaagcggggcagcccacagcaagcacgcc

SEQ ID NO: 85453 - RNA, 72 nt, Homo sapiens
gcaaccggaagcaaaagaaacaggagggaaccaggagccgacaacaacccgacgcaaggcagccacaccacc

SEQ ID NO: 85454 - RNA, 73 nt, Homo sapiens
aaccgggcacagagccgcgggggcggggagcgcggaccccggccgggacgcgcagggacccaccccgaaaccg

SEQ ID NO: 85455 - RNA, 81 nt, Homo sapiens
acaggggcacaaagaaaccagcacagacacgcaaagcaaagaggacaggagcacagaggaagcgaaaagaaagaagaagga

SEQ ID NO: 85456 - RNA, 88 nt, Homo sapiens
aaacacgcacaggcgcgggaagcgaccaaaaagagccaagcgagaagagagaaccacaaagggcagagcaaagacccagaacaccaag

SEQ ID NO: 85457 - RNA, 84 nt, Homo sapiens
gcaagccaaccaagccaggcacacagagacaaggacccccaagggccaccacggagccagggcccgcgacaccgcccaaagccc

SEQ ID NO: 85458 - RNA, 80 nt, Homo sapiens
ggccgcggcaccggggggggacaaccgcaacagcccccgagcgaacgacagggccagcacaccagcccaagaagccggca

SEQ ID NO: 85459 - RNA, 80 nt, Homo sapiens
aagagccaggaccaccggaagccagaaaggggaaaaagaaaagggcgaagacccgaagcagcgcaggaacagaagagaag

SEQ ID NO: 85460 - RNA, 76 nt, Homo sapiens
acgcccgcgcccaacagaaagggcgaccgcaagcacccgccggcgacaaaggcccggacacacagaacgaacacgc

SEQ ID NO: 85461 - RNA, 75 nt, Homo sapiens
cgccgcgcccccggcccgcgggcggcccacggcgagacaacggcaagcggagaagagcaaggccgaaccgagagg

SEQ ID NO: 85462 - RNA, 85 nt, Homo sapiens
gcgcggagagcaacgccgggacagcgcaagcccggcagggcccggcccgccccccacccccggccccagggccgcggaggagagc

SEQ ID NO: 85463 - RNA, 79 nt, Homo sapiens
gcaaccggaaccccagccaagagaccccagcccagcccccggagggagcaacaacaaggagcaagcacagcgcgagcca

SEQ ID NO: 85464 - RNA, 78 nt, Homo sapiens
cggcgacggcggcggggcggcggacgaccggagagccggaagaaagagggccacggacagaggcgcagcagaggaacc

SEQ ID NO: 85465 - RNA, 72 nt, Homo sapiens
ccacaaccccagaacgaacaaagacaacagccggaacgccccaaaaaaggaacaccaccccagagcaagccc

SEQ ID NO: 85466 - RNA, 84 nt, Homo sapiens
cggcggcggccccaaggaagaggacaggaggggacaaccgcggaaaggacagaaggcaagcagcaaggaacaaggaaagagcga

SEQ ID NO: 85467 - RNA, 79 nt, Homo sapiens
agagaggacaccgaggcagaaagaaacgccccaaagcagaacgggagggagacgggccgcgcaccgcccgaccagccca

SEQ ID NO: 85468 - RNA, 79 nt, Homo sapiens
ccaggagaagaagaagcagcaaaaagagcgggaagccacccgggaggaggagggggggcaacagaaagccacaaccgga

SEQ ID NO: 85469 - RNA, 70 nt, Homo sapiens
aaccgcagccgagcggggccggccacagacgcagcggggaaaggacacagcgccacccgcaacccgcccc

SEQ ID NO: 85470 - RNA, 80 nt, Homo sapiens
ggaacgcgggcgccgaaggagggccggcagcgcccgcggagacggaagaggagccccccgagaaagaagcgccggccaac

SEQ ID NO: 85471 - RNA, 78 nt, Homo sapiens
caggaggcgagcaacagggcagaggggcaggagagggagccccggagagggagacaacaccgggaaccccgcccggaa

SEQ ID NO: 85472 - RNA, 51 nt, Homo sapiens
ccccacgccacacagggaaggcacacagcaggacaagggagagacagagcg

SEQ ID NO: 85473 - RNA, 81 nt, Homo sapiens
gacgccaccacgccgcggaggcaaccgagaggggcgagccggggccggagcaggaggaggaccggacaggagcgcagaagc

SEQ ID NO: 85474 - RNA, 73 nt, Homo sapiens
ccacgcgcccgagacaaccacaccccccccacacccaaaggccccaggagagccaggaggggcaggcgcggcc

SEQ ID NO: 85475 - RNA, 66 nt, Homo sapiens
gccaaagaaggggagaggcaaacgacgacgaaaaggaagggagagacacccgacaagcggcacgga

SEQ ID NO: 85476 - RNA, 73 nt, Homo sapiens
caaggaagcgacagccaggaccaggcacccgggaagcaccgagcgagagcgggcagcccagcagcagaaagaa

SEQ ID NO: 85477 - RNA, 76 nt, Homo sapiens
cccagcgccaacagaggcggaggcaggacggagcccaagagcagaaccccggggaggagggaggagaccgcccaac

SEQ ID NO: 85478 - RNA, 59 nt, Homo sapiens
cgagccgaaaagcgagcgcgaggaaaaggcggcgggagcagcggaggaacccgggggac

SEQ ID NO: 85479 - RNA, 66 nt, Homo sapiens
gaaggaccaagaaccagaggaagagaaacaccaaggaaccacacaagaaaagaaagcaaaaggacc

SEQ ID NO: 85480 - RNA, 71 nt, Homo sapiens
gggggggggcccgccaacgaaccacaggcgagaccgagacaaggcccagcacaccggaaagcgcaaggccc

SEQ ID NO: 85481 - RNA, 50 nt, Homo sapiens
accccccggcgccgcgccggcggcggggccccagacacgacgcccccggc

SEQ ID NO: 85482 - RNA, 58 nt, Homo sapiens
agacccaccaaaaagggaagcgggcagcagacgacaggacggcagagccccaagaaag

SEQ ID NO: 85483 - RNA, 74 nt, Homo sapiens
gggagcgccgcggcggcaggcaagagagagaagaagccggcagcccggcccaggccgagaaaaaagagacagac

SEQ ID NO: 85484 - RNA, 40 nt, Homo sapiens
agccggggagccccggggcgcggggaggccaagaggccag

SEQ ID NO: 85485 - RNA, 78 nt, Homo sapiens
ggcggaccggaggggaccgacgccggcagaacacgcgcgggaccccgggcacggcgcgcgggaggaaaccacacacag

SEQ ID NO: 85486 - RNA, 82 nt, Homo sapiens
cccaccgcagagcgcagcagcccgccccgcccggcagcgagcggcgccccaacccgggacgcaaggaccaaaaaacaaaggg

SEQ ID NO: 85487 - RNA, 71 nt, Homo sapiens
accgccccaccgacgccgaaggggacgcgccacagacgggggaacccagaaagagaaccgacgggaacaca

SEQ ID NO: 85488 - RNA, 78 nt, Homo sapiens
ccacccaaagcaccaccgcgccggagcgcaccagaaggaggcccgaccaacccagagaagagcagcaccaaagaaaca

SEQ ID NO: 85489 - RNA, 71 nt, Homo sapiens
aaccagaaaaccacagacaaggaaccagagaacaaacgcgaccagaaccgaagaaaacaaaagaaggacag

SEQ ID NO: 85490 - RNA, 77 nt, Homo sapiens
cccaagaagaggccggggggaaaaaaggccacacagaaagacgcccaaaaggaaaagagagcccgagggaaaagaca

SEQ ID NO: 85491 - RNA, 82 nt, Homo sapiens
gaacagacacggggaagcgcaaaaacaagacggggcgccccacagaggggcgacgaagagcaagggaccaggaggaaccaca

SEQ ID NO: 85492 - RNA, 84 nt, Homo sapiens
gcggcggcagggggcggaacaaggagccggagcggggcaaagcaccaggagacaaagccacaaaaacaccagaaaaaccaagca

SEQ ID NO: 85493 - RNA, 54 nt, Homo sapiens
gcggaaaaggcgccgcgaacgggaaagacaaggagccgggccgagaaaccgaac

SEQ ID NO: 85494 - RNA, 82 nt, Homo sapiens
cgaaggcccgccacgcccggggaaagaacgccggacaacagcggcgaagaaggcaaaccgaaggcccacagagaagaagaac

SEQ ID NO: 85495 - RNA, 98 nt, Homo sapiens
acagagcaccagaggaacagcagggcaagaccagccacaggaaagcagagccccaagggcgggaggagcggagaaccaagaacaggaggaagagaggc

SEQ ID NO: 85496 - RNA, 84 nt, Homo sapiens
gaacccacaacgaagggaagccacggaagaaagagccaggacaaaaccaggcagaaccaacacgaacccaagcacaaacaagaa

SEQ ID NO: 85497 - RNA, 71 nt, Homo sapiens
gaacagacgcaggaagaccgacccgcgagacacgcggacggacggagggcaccacgaccagagcagaagac

SEQ ID NO: 85498 - RNA, 81 nt, Homo sapiens
cgaaagcgggagagggaccggaacggcggcgacaaggggcccgaacagagggcagaccgaaaagggcggaaaaggaccaag

SEQ ID NO: 85499 - RNA, 77 nt, Homo sapiens
gaacggcgcagcggacaaggaaggaacacaacaaagcaagcacagaagaggggagagaccacaacacaggaccgcca

SEQ ID NO: 85500 - RNA, 80 nt, Homo sapiens
cgggacgcagaaagggcagacacaggcacaccaaggggaagggaaaaggccgaggcacagcgggaagaccgcaaagacga

SEQ ID NO: 85501 - RNA, 74 nt, Homo sapiens
aaagccgaagaaaggcccgggaggggcggcggcgggagacagacccgacggagcagcagcgccgggaaggaaag

SEQ ID NO: 85502 - RNA, 80 nt, Homo sapiens
cccagcacacagaagccgagacgaaccagaggaccggcaacaacccgaggacgaaccaccccgcgccagcagcacagcac

SEQ ID NO: 85503 - RNA, 53 nt, Homo sapiens
ccaggagaccgacgccaggcacgacacaggccggacggggcgcaacccccagc

SEQ ID NO: 85504 - RNA, 117 nt, Homo sapiens
gaaccgcccgcaagagcgagccgccgccccgggcgcagacagagcaccagcaccagcagagggggagaggcaccagcaacagaccaaccgcagcaagcacagagacaggaagcccgc

SEQ ID NO: 85505 - RNA, 70 nt, Homo sapiens
ggcagcgccgaagggcgagcggacagaccaaggcggacagcgggaggaaagggaaggccaggccacgaga

SEQ ID NO: 85506 - RNA, 71 nt, Homo sapiens
cccgggagacggagcgaaggccggagggcaaagcaagcaagccggacaaagcacacccgcagcgccaagag

SEQ ID NO: 85507 - RNA, 58 nt, Homo sapiens
ccagccccgaaacacgggcggagaccagaggcccacggccaacagcccagaccacaga

SEQ ID NO: 85508 - RNA, 82 nt, Homo sapiens
gaaaagagcccggaaagaagagacagagaggagcaaacaagcgccggcaggaagcggagaaagcaagcagccaccagggaga

SEQ ID NO: 85509 - RNA, 67 nt, Homo sapiens
cccagaaaacgcaggggagacccgcgccgcaacccggccagcggcaagcagagaccggcgcgaagac

SEQ ID NO: 85510 - RNA, 72 nt, Homo sapiens
cagcacagccgggaaggggagccaccagccccccgagaacgggccggaacgcagcaaagacgcccaggacag

SEQ ID NO: 85511 - RNA, 63 nt, Homo sapiens
aagccgagcggaccggaccaaccacacgggcagcgggggcagagacggggaacagggccaccc

SEQ ID NO: 85512 - RNA, 71 nt, Homo sapiens
acagagagagaagccaggagccaccaacaccaaaaagagcccagaaaaccagagagcagaaagaaaggccc

SEQ ID NO: 85513 - RNA, 83 nt, Homo sapiens
cagcaaacaacccgcaaacgaaaaagaacgacagagcaaccaggaaagaagaggagggaagggcgccggaaaaccgcacagcc

SEQ ID NO: 85514 - RNA, 60 nt, Homo sapiens
ggcccccgcagaccaccccgaaaagcaaaggcccacccaggcacagggagaaacaggaag

SEQ ID NO: 85515 - RNA, 91 nt, Homo sapiens
cccaaggcgggcggggcggagccaggagccccacggagcgcgcggagcgaacccaccccagggcgcaagggagcagcccccgagcagccaa

SEQ ID NO: 85516 - RNA, 78 nt, Homo sapiens
accaaagacacaagaacccaccacgggcaaagaaagacccaagaagagcaaagagggcagcccggaagggacaaacag

SEQ ID NO: 85517 - RNA, 73 nt, Homo sapiens
agacggacagcccacgggaacaagaggggacagaaagaacaccccaccagaccacccagcaagcccacaaaaa

SEQ ID NO: 85518 - RNA, 68 nt, Homo sapiens
agacgagccagaaacgagaggaaagaacccaagggaacagggaggcaaggagccgagaagaccgacgg

SEQ ID NO: 85519 - RNA, 74 nt, Homo sapiens
accgcccggcagcaggccagacgcagacaggcaagaacggaagcacgggcggaggaaagcacaagcagagcccc

SEQ ID NO: 85520 - RNA, 69 nt, Homo sapiens
acgccaggcagcgcccccaaacggccagaggcacggacgaccccggagagagcgggcgagcagaaaccc

SEQ ID NO: 85521 - RNA, 76 nt, Homo sapiens
caaggacaggcagcccagcgggggaagacgacagagacccaggcaaagcgccaccagcaggaaaagcgagaacagg

SEQ ID NO: 85522 - RNA, 78 nt, Homo sapiens
ggagaggggaggaaacgcgccggaaaggaagaccaggacgcacaggaagcagagaccaccgagaacaccaagcagcac

SEQ ID NO: 85523 - RNA, 58 nt, Homo sapiens
agccgcggagcagggggagggagccaaagaaaacagaaaccacaagacccaacggaaa

SEQ ID NO: 85524 - RNA, 74 nt, Homo sapiens
cgcggccagcgacggcggcgccgggaagccagagagaagagaacagaaaaaggcccaagcgacagcgggaagac

SEQ ID NO: 85525 - RNA, 50 nt, Homo sapiens
ggaagcaacaagagcgcaacaagagcccgcagaaagccgcaacaccgaga

SEQ ID NO: 85526 - RNA, 63 nt, Homo sapiens
gagcccgcacccagccacaccggaaccgcgggagccgaagagagccgcaacaggccagcccga

SEQ ID NO: 85527 - RNA, 81 nt, Homo sapiens
gccgaccagcgacacgcggccgcggagaccaccgcggcgcggcagcgcgcccgagaccccaccaacaacgaacgcggcagg

SEQ ID NO: 85528 - RNA, 74 nt, Homo sapiens
gcccgccgccccggggacaagaaacagagcaaaaaccggaaagagggaagcggacacacaggacgagaaacccg

SEQ ID NO: 85529 - RNA, 82 nt, Homo sapiens
ccacacccacagcgcccaccaaggggacggagagcaggcccacaccggcgagcgcccccccgcccgaggcgggaagagcccc

SEQ ID NO: 85530 - RNA, 52 nt, Homo sapiens
cgcagggcgcccccggagagagacccaaaccggcgagagcacagaaaaacag

SEQ ID NO: 85531 - RNA, 78 nt, Homo sapiens
accgcgccgccgccaccacgcccacgcaacacacggcgaagccgacgagcccgaacagacgcaccagcgggaggaaga

SEQ ID NO: 85532 - RNA, 74 nt, Homo sapiens
cagcgcgccccgaccgggggccgccagcaaagccagagaaggacggccacaaggcgaacaaccagccccaacca

SEQ ID NO: 85533 - RNA, 56 nt, Homo sapiens
cagaaaggaaaggggacacagggagcaacagcgagcaacaggcaacgaaaacagac

SEQ ID NO: 85534 - RNA, 86 nt, Homo sapiens
gagggggaagcggcggcggcaaagggcaacgcccgcgcggcggcggccgcagggggcggagagggcaagagaagcggaacaccggg

SEQ ID NO: 85535 - RNA, 57 nt, Homo sapiens
agccgggaaacagaagaggagacagacagaaggcgggcacaaaccgaagaggacaag

SEQ ID NO: 85536 - RNA, 104 nt, Homo sapiens
caagggcaagccagcacggcagggcagcaacacgagagaacggaggccggcaggccgacaccccaccgccccaagcgccagagaggcccgcggcccgggcgccc

SEQ ID NO: 85537 - RNA, 50 nt, Homo sapiens
gggcccccaaaaagcggcaaaagcaagagaacagagcggccacccgaggc

SEQ ID NO: 85538 - RNA, 71 nt, Homo sapiens
ccgaaacagaagccaacaggagcagcgcaggcaggaagaaccacaagcggacgcagcccacgggggaggaa

SEQ ID NO: 85539 - RNA, 79 nt, Homo sapiens
cgcccaggagacaaaagcacaggaggacccagcagccagcgaagccccaaggaagccgggacgcccacagacccagcag

SEQ ID NO: 85540 - RNA, 84 nt, Homo sapiens
gcgggccgggaagaagcgccgcgcacggaccggcagaggcggagagacgagacgcaggaggacacacggggcccagagacagac

SEQ ID NO: 85541 - RNA, 72 nt, Homo sapiens
gacgggggcgggcgggggcggacccagaacaaccacgggccacagacaagccggcacggagggccgcagaga

SEQ ID NO: 85542 - RNA, 77 nt, Homo sapiens
cagagaagaccacacaaccgaaggggacggcagaggaagggacgacaaagccagcgcgcaccggagacacacagaac

SEQ ID NO: 85543 - RNA, 79 nt, Homo sapiens
agggccggcgcaccaccaggccacccaggggcgccaggccccgagccccggccccaaagacccaaaacagagacacccc

SEQ ID NO: 85544 - RNA, 73 nt, Homo sapiens
agaagaccacaaaaaagagacccacagccagcaacaccgcagcgaaaccaccccagagcaagcacacgggacc

SEQ ID NO: 85545 - RNA, 55 nt, Homo sapiens
gagaagcggggcaccacgaaggaccgaagagggcggagaacggaaaagcaccagg

SEQ ID NO: 85546 - RNA, 73 nt, Homo sapiens
ccgacgggacaggccgcggaaccgcccccagagaaggggcaaaaacacgagagcagggagaagaaccgaagcc

SEQ ID NO: 85547 - RNA, 59 nt, Homo sapiens
cgacagcagagacagagaggagccaacccccagggcgacaggacaacggacagcaaaaa

SEQ ID NO: 85548 - RNA, 74 nt, Homo sapiens
acacgcagccgcggcacgccgcgcggagccagcgccacggccgcaccagggggacacccacggccaaccaaaaa

SEQ ID NO: 85549 - RNA, 80 nt, Homo sapiens
gacgacaaagaggcggcagggaccagcagacgggaagggcggagaacggaaaagcaccaggaagcagagaggaccgcaga

SEQ ID NO: 85550 - RNA, 68 nt, Homo sapiens
caacaacagaccggggaccgcccagcagcccaggccgagacgaaaggcagcacagcaggaacgagcaa

SEQ ID NO: 85551 - RNA, 83 nt, Homo sapiens
caaagaaacaagccgggaaagggacaagaagggcaaagccgaaacccaggagcacccccgcaggcgccagccccaacagccag

SEQ ID NO: 85552 - RNA, 80 nt, Homo sapiens
gaagaccgagagcaccacaaggccaagggcaaggagacagggcgcccacaaccgacacggccgcacacccccagaccccg

SEQ ID NO: 85553 - RNA, 78 nt, Homo sapiens
gcggccccgagcggaacggagaaagcgagggaagaagcaaagcaggggacgaaggagaaccaacacaaacgacacgcc

SEQ ID NO: 85554 - RNA, 80 nt, Homo sapiens
ggacgccgaggaccaccaccgcgaccgccccgcccggcgcgggcccagcaagccaagaggggacaagcaagagcgcaaag

SEQ ID NO: 85555 - RNA, 65 nt, Homo sapiens
cgggcagaagcgaagcgggacagaacagccaccaaaacagaaggaagaaggagaaccacaggaga

SEQ ID NO: 85556 - RNA, 91 nt, Homo sapiens
gcggaggcgacggggcggcccggagccggcgcgaaccggcccccgcagcgggacccggcaccacgccacgggaaggcaggcaagagcgggg

SEQ ID NO: 85557 - RNA, 77 nt, Homo sapiens
aaggccagcgcagaaacgcaggaggacaggcccaggaaggagacgcacgagcagcccagcacggacggcaggcccag

SEQ ID NO: 85558 - RNA, 61 nt, Homo sapiens
aggcccgagcgcccggccgccagcaccacgacgacgagagaccgaaggagcagacgaggca

SEQ ID NO: 85559 - RNA, 75 nt, Homo sapiens
ccccacagaggggcgacgaaaaagcggggaaggggggcaaaaaaaagaagcaagcgaagcaccgagcacccaccc

SEQ ID NO: 85560 - RNA, 82 nt, Homo sapiens
caaaagacgcagagccccagggcggacagcagcccggggcaaccggagccccccaggagggaggcccaacagcaggccgagg

SEQ ID NO: 85561 - RNA, 80 nt, Homo sapiens
accgaggcccaaagagcccaggagaagcggagcggcagagaaaaaggccaccgaaggaagcacccgcgagaaagaagggc

SEQ ID NO: 85562 - RNA, 56 nt, Homo sapiens
ccgcaagagccacagacaagcccggccacccccagacgccgaggaaggagacagag

SEQ ID NO: 85563 - RNA, 80 nt, Homo sapiens
ggagccaccccgggcgcagaggccacacccacagagaacccagacaacaggacgccgccaaggaggcagcacggcaggag

SEQ ID NO: 85564 - RNA, 79 nt, Homo sapiens
accgcgagggagcgacgcgccaccaccggcagggcaggagccggagagccccaggcaccgggaagacagacccgggccc

SEQ ID NO: 85565 - RNA, 67 nt, Homo sapiens
gaaaccaaaggacgagagcaaccagccagaagagggaaagaaccccgggagcgaagaagcggaacga

SEQ ID NO: 85566 - RNA, 78 nt, Homo sapiens
cgggaggacgccgagcccagacgcagagagaccgccccagagaccgacagccaagaccacggagagacaggaggaccg

SEQ ID NO: 85567 - RNA, 59 nt, Homo sapiens
gcagggcccccgccaggaaagccagcaggggaaagcgcgagcgagcacccggagcagca

SEQ ID NO: 85568 - RNA, 80 nt, Homo sapiens
aggccgaagggcacagcagccagggggcagacgcccgcagcagcgccaaagagcagggaagaaccacggcagagagcaag

SEQ ID NO: 85569 - RNA, 77 nt, Homo sapiens
gggcgcacccaccgagaaaggcgcgccccagcagacacggacgcacaaaacagaaacaaggacccggaaaggaagaa

SEQ ID NO: 85570 - RNA, 76 nt, Homo sapiens
ccaagacaaacagacaagacaccagaaagacagccccgacaagggaccgggcgggccccgcaggaaacccccaccg

SEQ ID NO: 85571 - RNA, 66 nt, Homo sapiens
gccggaccggaaccaggaacggacacagggaggaccaagaacccggaggaggggagcgaacccgcc

SEQ ID NO: 85572 - RNA, 74 nt, Homo sapiens
acgacggcaggaaggaggagacgaagaaaggagggccagaagcaccgcagcggacagcgaacggacggagaacc

SEQ ID NO: 85573 - RNA, 77 nt, Homo sapiens
agagaggacggggacccgcgacccagccccccacccaacgcggacagcccaaggcggaaaagcgaaggaagccacaa

SEQ ID NO: 85574 - RNA, 76 nt, Homo sapiens
ggccaaagccgcccagacggccaccggcgggaggaacaaaagaccgggcaacaccacagacagacgcggcccacca

SEQ ID NO: 85575 - RNA, 75 nt, Homo sapiens
aagccgaggagcacgaccggagaggcaaaaggcagcccaaggaccaagggagaagagacccaggaggcagggcag

SEQ ID NO: 85576 - RNA, 62 nt, Homo sapiens
agccagaccagggacaaagagcaaacagacagggccgcagggcacacaagcaacagaagaaa

SEQ ID NO: 85577 - RNA, 83 nt, Homo sapiens
ggcgaacgcggagagcacgccagaaggcccgggcacggcacgaggcgaaccggccaccaagcacgggagcacgcggagggcga

SEQ ID NO: 85578 - RNA, 67 nt, Homo sapiens
ggcaaacccgccacgcgccgacgccccaaccaggccccccgcccagacgaacggggaagaagcagcc

SEQ ID NO: 85579 - RNA, 76 nt, Homo sapiens
cggggacacgcgcgggcgggagcggcccacgacgggacacgccccggaggcacgagacacgagacaggagagaaag

SEQ ID NO: 85580 - RNA, 75 nt, Homo sapiens
aagcaggacgcgccgcgccccaagacagaagaaagggagcccccaagaacagcgagcacaggaaggaaaccggac

SEQ ID NO: 85581 - RNA, 82 nt, Homo sapiens
cagcgccaagaccgccggacccggggcgccgcggcccggcacgcaccggacagcagggaagaacggaaaccagagaaagaaa

SEQ ID NO: 85582 - RNA, 41 nt, Homo sapiens
ccaacccaccaacaagaccaggggcgcgcggagcggcagac

SEQ ID NO: 85583 - RNA, 67 nt, Homo sapiens
accgcgacagcgaggacacgccgggcgaaccaaaacgccacggaggaggcaagcaaagggcgagagg

SEQ ID NO: 85584 - RNA, 65 nt, Homo sapiens
gggcggcagggccccgagccggcccgggcgagccagggaaaacaagacaaagcaagcagaaagcg

SEQ ID NO: 85585 - RNA, 68 nt, Homo sapiens
agacgcccggggaggagcaggacgcagaaccaccaaaagccaagaaacgggcccgccgagaggggccc

SEQ ID NO: 85586 - RNA, 79 nt, Homo sapiens
caaaaacccacaccgcaacccagcgagagaaagacacgagaggcgagggacgacagagcaagcggcagagggcaagcgg

SEQ ID NO: 85587 - RNA, 78 nt, Homo sapiens
cccccacagaaagggagcgaagcccagacagcgcgcacagaaagacacagacccagcaccacgaaaaaagaacagcag

SEQ ID NO: 85588 - RNA, 34 nt, Homo sapiens
acccccaagcaggaaggcagagcccgcccagaac

SEQ ID NO: 85589 - RNA, 77 nt, Homo sapiens
accggggcggcccaccccccacgcaccgcacaacaagaggccggcggggcgacaggcagagggcccaccccggagag

SEQ ID NO: 85590 - RNA, 72 nt, Homo sapiens
gggagaaagagaaaagagaaggcagggggagaaggggcaagaagaaacgcacagaaccaggaacaacaagaa

SEQ ID NO: 85591 - RNA, 55 nt, Homo sapiens
cggagcgcggcccgaggcccgcccagaggaagcccggggcggcgacggagcacga

SEQ ID NO: 85592 - RNA, 84 nt, Homo sapiens
cagaagacgaggacacagcaaaacccgagcgggaagaagccgcagcaagccgcagcggcgcgcaccgggcggcccaggaccgag

SEQ ID NO: 85593 - RNA, 78 nt, Homo sapiens
acggaacacggcacccccaggggaagacgagccaccgaggcacagacgagcggagccgggggcaggagggcagaggcg

SEQ ID NO: 85594 - RNA, 85 nt, Homo sapiens
cccaggccgcgccgagcccgccgcgcgggcccgcccgacgcggaagagaggacgaggagcccccacaagccgacggggaaggacc

SEQ ID NO: 85595 - RNA, 75 nt, Homo sapiens
ggcaacggaccaggcacccagcgggccccccaggaaaaaagcagccgcaccaccgcacgcaggggaaccagagac

SEQ ID NO: 85596 - RNA, 77 nt, Homo sapiens
caccagccaggacgcacacggcgaacggaacccaccggggaccgccaccggcacaaccaaggccggcccccgcgccc

SEQ ID NO: 85597 - RNA, 72 nt, Homo sapiens
aacagaagaggagcacggaggagccgaccgcagcgagggaccagcaccggcagccggggcaggagacaccga

SEQ ID NO: 85598 - RNA, 73 nt, Homo sapiens
cgggagaaccaggacccgcaaggaacgaaagcgggaagacggaagaaacagcaaggacagcagccagaaagca

SEQ ID NO: 85599 - RNA, 85 nt, Homo sapiens
agaaccggacacccacggaacaaggcaagccaaccaggagcagcggagcaacaggaggcaaacaggcccccgggggaaccacacc

SEQ ID NO: 85600 - RNA, 74 nt, Homo sapiens
gggccaaggcaaagaaccggccaagccgaccaccccccaaggccaccgcgcggcgccacccaggggaacgaggc

SEQ ID NO: 85601 - RNA, 76 nt, Homo sapiens
ggagaaaggcccaccggccgggagggcccagggcggggcccgagaccaacccacagaggaccagagagaggacggg

SEQ ID NO: 85602 - RNA, 62 nt, Homo sapiens
cggacggacgccgccgccggcgagcgcaaaccgaagagacccaccagggaagacgagacagc

SEQ ID NO: 85603 - RNA, 76 nt, Homo sapiens
aagcagggaaagagagcgccagggcagcaggcacgcagaagccagcggacgcccgcaacggggaccggccagagac

SEQ ID NO: 85604 - RNA, 60 nt, Homo sapiens
gagacccggaggaggcgaagcgagaggacagagcacacccacagagaaaccgcagaagga

SEQ ID NO: 85605 - RNA, 73 nt, Homo sapiens
ggccgcacccggggcaccaacagggacacagaccgggaccccgggaaaggcacaggacaagacggagccggag

SEQ ID NO: 85606 - RNA, 68 nt, Homo sapiens
gcaaccacgggcggcgaaaggggcggcccgaaaccgagagagcccggaacgaaaccggcgcaaagaga

SEQ ID NO: 85607 - RNA, 68 nt, Homo sapiens
ggacagaggaccggggcacccaacagcggagcaacggcccccccagagaaagaaagcccaagaggaga

SEQ ID NO: 85608 - RNA, 92 nt, Homo sapiens
ccgggaggggccggccccgcgccgcgcgcgggcccccccccgcgccggcgagagacgaggagcgccaggaaagaggcagagacgaagcagaa

SEQ ID NO: 85609 - RNA, 78 nt, Homo sapiens
gcaaagacggcaaaagcacaaggaccgcggacagagacaacaccgagagagaaccccacggggaaccacggggagaca

SEQ ID NO: 85610 - RNA, 66 nt, Homo sapiens
cggccccggcgcagcccggaaagccggcaagacgagaaagcaggaggccacgcgcagccccggaag

SEQ ID NO: 85611 - RNA, 73 nt, Homo sapiens
caccacggagggaaagaccaggcagcgggggagccggaaggacgcacaaccacacacggacacccacagaaag

SEQ ID NO: 85612 - RNA, 85 nt, Homo sapiens
gggccaagacgagcgacaggagcacacccggagaagcaggagcccaccggcagaagacgaccccgacgcaggccaggagccgcgg

SEQ ID NO: 85613 - RNA, 72 nt, Homo sapiens
gacgccgccccaggacgcagggcccaggaggccaaggcagagcccccacacccaggcccagcccagccgcac

SEQ ID NO: 85614 - RNA, 75 nt, Homo sapiens
ccggcgaggcagaaagaagccggacaccagaccaacacaacgggaagaagaagaaggcgaagaagcacaacacca

SEQ ID NO: 85615 - RNA, 109 nt, Homo sapiens
ccacgcagccccggcaaagcccagggaccgacgaggacacaggcgcaagacaaggcccgcgggccaagacaaacaccacacaagaccccaggcggggcgaggagccggc

SEQ ID NO: 85616 - RNA, 71 nt, Homo sapiens
gagaccaccaccccggcgccaccaccgacgagcgaagagcaaggggagccgcgcagcaccacccccagacg

SEQ ID NO: 85617 - RNA, 68 nt, Homo sapiens
accacggagcaagggaaagagcccggaggcaagggacggcgggaggagggccgaggcacgcaaggcag

SEQ ID NO: 85618 - RNA, 42 nt, Homo sapiens
acagagggggacagcgaaacgacggacccacggggaacaaca

SEQ ID NO: 85619 - RNA, 59 nt, Homo sapiens
ccaaacagacgaaggccccagaggcaaggcccagagaggcggacccacggggagacacc

SEQ ID NO: 85620 - RNA, 75 nt, Homo sapiens
agggagcccggcgcccgcggccagccgcaagacccgccacaagcaacgcgggaagagaagggaagggaagagaag

SEQ ID NO: 85621 - RNA, 84 nt, Homo sapiens
cggaccaacgagccaccagcgcaagacggaggacagaggccggcggcccggcagggggggccacgcgaacccagcacgacaggc

SEQ ID NO: 85622 - RNA, 72 nt, Homo sapiens
gagaaggaccaagaaccaggccaagggaggaaaaagcggcacagaggaagaggcccaccccaggagaacaaa

SEQ ID NO: 85623 - RNA, 59 nt, Homo sapiens
ccgcaggcagacaaaagggccaaagaagggagagaggaagcacaaacaccagcccgaac

SEQ ID NO: 85624 - RNA, 77 nt, Homo sapiens
gccaccgaaaaggaagcggagcagccagcagaggcgcgccggagggaggaacacccaggagggaccagccaccccag

SEQ ID NO: 85625 - RNA, 42 nt, Homo sapiens
ccggagagggcaacgggggagcgagaccaggcaccggagaga

SEQ ID NO: 85626 - RNA, 84 nt, Homo sapiens
caacccacggagcggaggggcggacccaggccgagcggcacacccccgacccacgcacccgcagaaggggcagaccaacaccac

SEQ ID NO: 85627 - RNA, 64 nt, Homo sapiens
cgaggcgggaagaagggggcccagagagaaacggaaagagacagaagaagcaaacaagaagaaa

SEQ ID NO: 85628 - RNA, 67 nt, Homo sapiens
gacgaacaaaagcggcagcccaacccagaggaacgacccaggaaaagcgccaccacaaggaacaaca

SEQ ID NO: 85629 - RNA, 70 nt, Homo sapiens
ggcggcaccaacaagaaccgcaaaccaggcaaacaacccccaacgaccaggcaagagaccgcagcccaca

SEQ ID NO: 85630 - RNA, 84 nt, Homo sapiens
aaaggacagaaccgggagaaacaccacacacgaagagagggcacagaccaggaggaacggcgcgaagacccggggacagaggcc

SEQ ID NO: 85631 - RNA, 70 nt, Homo sapiens
ccaggaaggcaacacaacaccgacgcagcagaaagaaggaagagcaacgcaaggaaaaagaaaagacaaa

SEQ ID NO: 85632 - RNA, 78 nt, Homo sapiens
cgaaggggaaagggaagcaagagccagacccaaaccccgacaagggaccgggcgggccccgcaggaaacccccaccgg

SEQ ID NO: 85633 - RNA, 80 nt, Homo sapiens
agaaagagagaccggggggaggccgggaaaccaggaagccccccacaggacaccgggcccacgggcaggaggagacgaag

SEQ ID NO: 85634 - RNA, 87 nt, Homo sapiens
cccaagaaagccaccgggcgcaccgcgggcggacccagcacgccgggccgggggcgcagcagacacagaaccacacagcagcacccc

SEQ ID NO: 85635 - RNA, 76 nt, Homo sapiens
cagaagggaggcccaagacccacaacaaaagagcaaacaggaccaaggcaagaggcaaacaagaagaaagcaccag

SEQ ID NO: 85636 - RNA, 70 nt, Homo sapiens
agacccgagccacgggcagaagaccagagagcagaggacagcaggaagaggaccaagggagcagagagcg

SEQ ID NO: 85637 - RNA, 79 nt, Homo sapiens
gagcggaggacagaagagaagaccgccccaagaggaaaccagaaggaggcgaaggggagcaagggagaaaagcaaaggg

SEQ ID NO: 85638 - RNA, 34 nt, Homo sapiens
ccggccccacgggccgagacgcgccgcggcccac

SEQ ID NO: 85639 - RNA, 72 nt, Homo sapiens
ccaacgcgacggaaaggcacgaaagccagcgagacgacgggaccgaaggaccccgccagagacaaccgagcg

SEQ ID NO: 85640 - RNA, 79 nt, Homo sapiens
gcgagaagccgggcacggcggccgagcgcggcagagcggcgagggggcgcggcccggcccgaaccagaacgcacgacag

SEQ ID NO: 85641 - RNA, 85 nt, Homo sapiens
cgcggggaggccacgaacggagacaccgccaaggggccaagggagagcggggccccccccaaggcaccccccggcggaacgaaga

SEQ ID NO: 85642 - RNA, 72 nt, Homo sapiens
cacagggaccacgccagaccggccaaacgcacagaaaaccagacgagagacagaagacgaaagggcaagaaa

SEQ ID NO: 85643 - RNA, 85 nt, Homo sapiens
gcccaggcggacaccagcaagagaggacccgcggggcacccgcaggggcagacagcacaaccagcgaggggggcgggccgagcac

SEQ ID NO: 85644 - RNA, 57 nt, Homo sapiens
aagaacggcccgccaccggagacaacgagaggagggaacccgaccagcccagggccc

SEQ ID NO: 85645 - RNA, 77 nt, Homo sapiens
caaaaagccgacccaaaaccgcccccccacggccacaagggacgccagaggggaagccgcacgagggagagacggac

SEQ ID NO: 85646 - RNA, 79 nt, Homo sapiens
gcagccgcgagcacaggcccagagagcccagcggaccaggcccgcgcagaaacgaaggaggcccaaccacaaaaggagc

SEQ ID NO: 85647 - RNA, 70 nt, Homo sapiens
gagagccgcccgggccagcggccgcgcacccccggccggaggcaccagcgaagcccggggcggcgacgga

SEQ ID NO: 85648 - RNA, 63 nt, Homo sapiens
gaccgaacgcgccagcgcggggcaacaggacaagaggacccaccgggggcagggcgcaccacg

SEQ ID NO: 85649 - RNA, 78 nt, Homo sapiens
gccggcgcaggcggcgcggagagggggcgcgagcgggggacaacaaacgagcacggagaaccgccagccgacgcgcca

SEQ ID NO: 85650 - RNA, 81 nt, Homo sapiens
ccccacgggccccaggagaacacacaaccaaggagaggaagacaccccccccaccgaaagaacccgaacgggagcaaggaa

SEQ ID NO: 85651 - RNA, 81 nt, Homo sapiens
ggacacaccggaacaaagaaaaccaaaacgcaacagaaacaacaggaaggagggccccggagcagccacaccaccgaggcc

SEQ ID NO: 85652 - RNA, 81 nt, Homo sapiens
cggaggcggcggagggcaccccgggcgggcggcggcgcggaaacaacacgaggaggacggcacaaaaagcaccagcgggga

SEQ ID NO: 85653 - RNA, 39 nt, Homo sapiens
cgaccacaccgggcaggggcggcgaaggcagggcacgac

SEQ ID NO: 85654 - RNA, 40 nt, Homo sapiens
ccaagacccacaacaaaagccggagcgggcagggcacaca

SEQ ID NO: 85655 - RNA, 62 nt, Homo sapiens
accaacagagcccgcagagcaccaggcccaccggaaaggaaacaggaacacgaaagaggaaa

SEQ ID NO: 85656 - RNA, 82 nt, Homo sapiens
caggcgaagccccggagaaccacccggaggagacggggcagacaacggagcccgggaggaccacccgcacccaggggacgca

SEQ ID NO: 85657 - RNA, 78 nt, Homo sapiens
gcccgccgccccgcgggggagggcggagcggcgcggccccagcccccgggggggcccgagggagcagcagccccgaga

SEQ ID NO: 85658 - RNA, 71 nt, Homo sapiens
aggcaggaaacagcccgggcaccccgaggacaaccgaggggaagaaaaggccaaagagggagaaagcccgc

SEQ ID NO: 85659 - RNA, 69 nt, Homo sapiens
ggcccaaccgaagaaaacaaggaaaacggcacacgcaggaggagacagagacaacgggaaaacgccaaa

SEQ ID NO: 85660 - RNA, 73 nt, Homo sapiens
gaaagggcgccccccacacaaggacaggaccgcaagcccgcagggacgaggccccaaggacccggcgggggca

SEQ ID NO: 85661 - RNA, 83 nt, Homo sapiens
gaagaccaggaaagacaggaggccacccccaaagaaaagggaggagggacacacgacaggcccgagagggaacccacaccaaa

SEQ ID NO: 85662 - RNA, 70 nt, Homo sapiens
ccgagagcgggaacaggagcacagggagaaacccagcacaacaggacacacaacgcggcacaccccccga

SEQ ID NO: 85663 - RNA, 74 nt, Homo sapiens
ggcccagccacagcagacggacaccaggccaaacgaccaagaaagcgggacgcggaaaacgggacccgcagggg

SEQ ID NO: 85664 - RNA, 75 nt, Homo sapiens
cagaccccagaggcagaaaggaaaggggacacagggaaaccacgccgggacgggggagaaggaaaggcagaccga

SEQ ID NO: 85665 - RNA, 77 nt, Homo sapiens
caaacgcagacaaagaacaaggccacgggcgacccccccccaccaagccggcccccaaccgccaagaaggccccacc

SEQ ID NO: 85666 - RNA, 82 nt, Homo sapiens
cgcggcgcgggcggggcggaggcgaggagaaggaggagcgggccgggaggccgccgccagaagaagggagaccgggagagaa

SEQ ID NO: 85667 - RNA, 56 nt, Homo sapiens
gaggccccagcggaccgaacaggagagccgccgggacacagacccccccgagaggc

SEQ ID NO: 85668 - RNA, 78 nt, Homo sapiens
cgccgcacccggacggaccgccacgcgcccgggagacgcccgcgccgccggccgccaggcacagagaaggcaaacggg

SEQ ID NO: 85669 - RNA, 83 nt, Homo sapiens
gcggccggagcccggaagcagcagccaccgaggacggggaccggcgcgcggagccaggacagcggagcagcgcggaccccgcg

SEQ ID NO: 85670 - RNA, 78 nt, Homo sapiens
acaccggaccgccagcgggagggacaggagaacaggcacgaccccaccggcaccaccacggggacagcgaccgcagcg

SEQ ID NO: 85671 - RNA, 75 nt, Homo sapiens
acagaaacacacagaagggggcacaaccccgcgcccggcgaaggcgcaggccgcccacaccccgggagacccgcc

SEQ ID NO: 85672 - RNA, 44 nt, Homo sapiens
gacccacccgccagaagccccccgcagaggcacccccgcccccg

SEQ ID NO: 85673 - RNA, 65 nt, Homo sapiens
caccccaccacagcgacaaagacccggacccaagccaaaggcagaacaagaagggcaaccagggg

SEQ ID NO: 85674 - RNA, 66 nt, Homo sapiens
gaaaagacgggaacagaggaaaccagcccgcacagggggcacgccgcgaaagaccgaggccccacg

SEQ ID NO: 85675 - RNA, 68 nt, Homo sapiens
gaaagccagacagagaacacagacaggagaacaggagaaggcgagcggccagacaaaggaaacaaccg

SEQ ID NO: 85676 - RNA, 62 nt, Homo sapiens
agacaggaaagggccacgggagccgccgccggagcgagaacacggcaagcaagcagcagacg

SEQ ID NO: 85677 - RNA, 72 nt, Homo sapiens
caggaaggccgggaagccagacgcacgcaagcaaggccccccgaaggaagaggagccacacagagaacacag

SEQ ID NO: 85678 - RNA, 68 nt, Homo sapiens
aggggcacggggcggagcccaggccacaagggccgcaagccccggaggaaacagcacgggccaggggg

SEQ ID NO: 85679 - RNA, 59 nt, Homo sapiens
ggacacaccgcacgagagccaggcgccaccaggggccagaaccgcccacggcccccaca

SEQ ID NO: 85680 - RNA, 51 nt, Homo sapiens
acggcaacgggacagcacgaggacagagggcagccaggacaccaaaacgac

SEQ ID NO: 85681 - RNA, 58 nt, Homo sapiens
cggcgaacacgccgacagggacgaagaaaaggggagcaaccacgggccacgagccgcc

SEQ ID NO: 85682 - RNA, 71 nt, Homo sapiens
cagccaggggaagaagggacggcgcaaaccagcaacaagaagcaaggaagccggaggcaaggagcagacga

SEQ ID NO: 85683 - RNA, 50 nt, Homo sapiens
ccgcagaagacagggcggcgggccggacgacaagacagacagggggccgg

SEQ ID NO: 85684 - RNA, 73 nt, Homo sapiens
ggcgccacaacgaccagacagcaacccaacaaccaggaacaccggacacagacaagcaagccagaagagagaa

SEQ ID NO: 85685 - RNA, 82 nt, Homo sapiens
gacccggagcccagggaagcagccgaccagccgcggagccgggggcaggaagccaaaggcagagaagcgacccggcgaccga

SEQ ID NO: 85686 - RNA, 76 nt, Homo sapiens
gaggagcgcggccgcagccgcgccgcgaggcgcggcccgaggccggaagagcgggagcgggagccaggcagaaggc

SEQ ID NO: 85687 - RNA, 88 nt, Homo sapiens
gcaaagcggggacccagacccggagcccagggaagcagccgaccagccgcggagccgggggcagacagaagcgaaggggacaggggga

SEQ ID NO: 85688 - RNA, 74 nt, Homo sapiens
ggcgacggccgcggccgcccgaagaaccccgagacgagaagcccgcaagaagacaacaagagggcacgcaccga

SEQ ID NO: 85689 - RNA, 72 nt, Homo sapiens
ggggagccaaggcgggaggcgagacacagagaaaagcggcagaagaaagcaagacagaagaggagcacggcg

SEQ ID NO: 85690 - RNA, 81 nt, Homo sapiens
cggagggccgggcccacaccaggcacgagggccgcagggaaccggagagagcgggcccgagaccgcacccggacgagggga

SEQ ID NO: 85691 - RNA, 73 nt, Homo sapiens
ggaaccaaggaagagaagaaggaacggaaacaaagagccgggaaacaggagaaccgacagaaaccccaagcgg

SEQ ID NO: 85692 - RNA, 78 nt, Homo sapiens
cagccaggaaaaaaacaacagaggggaccaagggagagaccagaccgccgacccagcggacgccaagaagaaaggccc

SEQ ID NO: 85693 - RNA, 81 nt, Homo sapiens
gcaggagcggcggccaggccagacccgaaggccaggagacccgaccccaagacaagcagaccggaagaccgacggaagacc

SEQ ID NO: 85694 - RNA, 62 nt, Homo sapiens
cacgagagcccacaccgggaaaggaccaaagggccaaccacgacaacagaagcgagcagacc

SEQ ID NO: 85695 - RNA, 73 nt, Homo sapiens
caaacgcaaggaacggccagaggaacggcgaagagaaagaacaagacccgaagagaagccaggcagaggagag

SEQ ID NO: 85696 - RNA, 73 nt, Homo sapiens
gcccaccggaggaggggggagggagggcaagcggcccaggccaaggggggcgcagggccacgcgggggagacg

SEQ ID NO: 85697 - RNA, 79 nt, Homo sapiens
caggaacaggggccccggaaccgcagaccaacgccggaccaaaaacgacagaagacgaggcgccaagaaaccaagacac

SEQ ID NO: 85698 - RNA, 65 nt, Homo sapiens
cacaccccagcggcacacacaggcaccagagcaaagagaaagggcagacggagagaaaagaaaaa

SEQ ID NO: 85699 - RNA, 80 nt, Homo sapiens
cgcggagaaggaggaacagaggaggcaccgcacccaaggacccggagaacccggagagcaaggcgccaccggaagaaacg

SEQ ID NO: 85700 - RNA, 76 nt, Homo sapiens
cgcacgcgcgccagagggccacgccaggccggccaagaagaaagaggccacagaggcaccccccagcaggcagagc

SEQ ID NO: 85701 - RNA, 84 nt, Homo sapiens
gacgacaccgaagaacggccgcggacgaacggggaagaagcagccgcccaaacaccaggcagggccccagaccgaggcagcacc

SEQ ID NO: 85702 - RNA, 37 nt, Homo sapiens
acgagagagcgcacggcaggggcggcgaagccaacca

SEQ ID NO: 85703 - RNA, 84 nt, Homo sapiens
agcgcacgcccggacggaaggcgcggcacacacaccccagcaggggcgcggagaacccggaagaagaggaagaggaaggcaaag

SEQ ID NO: 85704 - RNA, 74 nt, Homo sapiens
cccccgcgccggagccccgggccaggacccaaagacaggaccacgcaccagcagagaaggaaagcaaaccgaag

SEQ ID NO: 85705 - RNA, 68 nt, Homo sapiens
acaggacaccgaagccaaccgaccccagaagaaaggcggacaggaggaccacccgacgacccagggga

SEQ ID NO: 85706 - RNA, 76 nt, Homo sapiens
caggaccaggacccccgcacagcgaccgacgcgaacaccagggcagcaggagccacgacccgacacgcgcagccac

SEQ ID NO: 85707 - RNA, 120 nt, Homo sapiens
ggacggcagggcccccggagggaacccgcccccagggagggaacaaagcccacagcaccggaaggagggagccccaggaacaggagcccaccgaagaacgcccgacagaacagagacccc

SEQ ID NO: 85708 - RNA, 76 nt, Homo sapiens
gaacccgccccgcccgaaaggaccccaacgcccgccgccggccaaaacagaagaggcaaagcccagccacagcagc

SEQ ID NO: 85709 - RNA, 72 nt, Homo sapiens
cgcacccagccacaccggaaccgcgggagccgaagacagagcaccacccagaaaagagcaaccccggccacc

SEQ ID NO: 85710 - RNA, 72 nt, Homo sapiens
agggggaaacacagaacgcaggcagcagggaagagcacgcaagcaaacacccacccacagagcgcaccaccc

SEQ ID NO: 85711 - RNA, 105 nt, Homo sapiens
cgaaccagcagggaaccaaagaaaggcaacgaaagccaaccaggagccaagaaagggagggggaaacagccaaggccgaggagagaagaaaaaggcagcagaaca

SEQ ID NO: 85712 - RNA, 73 nt, Homo sapiens
caccccagcagaaagacaaagcaccaggacacggacgacaccgagcccaaccgaccaaccacaacaccccaaa

SEQ ID NO: 85713 - RNA, 70 nt, Homo sapiens
gacagaccagaccgggcgggggcccggccagcagggagacacaggccaggggcaagacgccaagagaaaa

SEQ ID NO: 85714 - RNA, 75 nt, Homo sapiens
aagagccacgcgaggacagaaaacgcaagacaacaggagaggaaagcggaaagccaagagggaacaggcacgccc

SEQ ID NO: 85715 - RNA, 79 nt, Homo sapiens
gagggaggcggggccccgcagaccccaacaggaagcacaaaagcaacaggccaggccaggaagaagcaaaggaagacag

SEQ ID NO: 85716 - RNA, 78 nt, Homo sapiens
cgcgcagcgccccagccacacgccggcgggcagaagccgcccgccccggggcccccgcgaagccccagagccgccagg

SEQ ID NO: 85717 - RNA, 71 nt, Homo sapiens
gcggggcccgggacgaggcggacgggggagggaccaaaggacaaccggaccaagggaccccgggcgccagg

SEQ ID NO: 85718 - RNA, 80 nt, Homo sapiens
agcaagccaagaggaggaggaggcggaggccaagcggaaaggagaacgcgccgccggccggggcgcagggacacgggggg

SEQ ID NO: 85719 - RNA, 77 nt, Homo sapiens
accaccaacccacaacgcccccagcacagcgccccaccccagcccccaacccccagggacaagagaaaaaaagggcg

SEQ ID NO: 85720 - RNA, 84 nt, Homo sapiens
cgcgaccccgagggaagagaacgggacgcggaacgggacccggggacggcacccagaggaccaggcggcgagcccaaaaggcag

SEQ ID NO: 85721 - RNA, 72 nt, Homo sapiens
ccaagagccaccaacaggaagagaaccagggggaaggccccgggcagccgagcgccagggaaacaacccacg

SEQ ID NO: 85722 - RNA, 88 nt, Homo sapiens
gcggcccagacgcccgggcgaccgccgcgaaggccaaccccgggaaggggacaggaaagggggaggaaaaggggcagacagacagaca

SEQ ID NO: 85723 - RNA, 74 nt, Homo sapiens
ccaaggggccgaccaggcggagaagaccaaaagaggcgggggaccagaacagaaacgcccgaaagaagaaaaac

SEQ ID NO: 85724 - RNA, 64 nt, Homo sapiens
cggagaaggagaggacggcacaaacaagcaacgagacgcagcggccaacgaccagcgcaccgcg

SEQ ID NO: 85725 - RNA, 70 nt, Homo sapiens
aggacaaaggggacgagggcggggagaagaacaccccacaacgcgcagcccgggggaaacagaacaacgc

SEQ ID NO: 85726 - RNA, 81 nt, Homo sapiens
ggccacagccgaggaccggcaaggaggaggacgaaagacagccgccaggaagcaacgcagcgcggaaaggcacaaccaagg

SEQ ID NO: 85727 - RNA, 82 nt, Homo sapiens
gaggcaaacggggggcgcggagggaccagcgagcgggacccccaccacggaaggccccccgcccaggcaccccgagcagcac

SEQ ID NO: 85728 - RNA, 86 nt, Homo sapiens
ccgaaccgagacaacgagaagaaggacacaaggcaagagaggaccaggaggcaacaaagaagaaaacccggaacgggaacagagcc

SEQ ID NO: 85729 - RNA, 83 nt, Homo sapiens
accgggcggcgcggcggccagaggaaccccgagccgagagcggcccaggaggaacaaccagcccacccggagagggcacgcgc

SEQ ID NO: 85730 - RNA, 83 nt, Homo sapiens
ggcgccacgccccagccggaagcgcagaagagacgcgaccacccaaccaaggaagaagagaaccgacaagggcaggggaaagg

SEQ ID NO: 85731 - RNA, 82 nt, Homo sapiens
ggagccggagcgcgagacagcgcaccggcggcgcggacgacagcgagacaccgcaccaccagggacgcacaccgagacgaac

SEQ ID NO: 85732 - RNA, 82 nt, Homo sapiens
aagaccgcgcgcagggccgcagcgggagcggacggcgagcgcgagcggcgcgagaaaaaggccgagcccacagagaggaaga

SEQ ID NO: 85733 - RNA, 83 nt, Homo sapiens
cggaaaaagccgccacacgccaaaggaaggcccgaacaagacaggaacgccggcccggacgggagcggcagggaggacaccaa

SEQ ID NO: 85734 - RNA, 38 nt, Homo sapiens
agacgcccagcgcgcgggccaagccaagcgcccccccc

SEQ ID NO: 85735 - RNA, 64 nt, Homo sapiens
aacgcaaggagaaacccaagagcagcggcagccacacaaagcgaaggagcaaagcaagaaaaaa

SEQ ID NO: 85736 - RNA, 57 nt, Homo sapiens
caaagggcaaccagggaaacaggagagcggcggacgaggaaaccagagccacagaaa

SEQ ID NO: 85737 - RNA, 78 nt, Homo sapiens
ccgaggcgccgcacggggccgaggcgaaagacaccagcacccgaggccagcaacaacaccgccagcaagcacaagcca

SEQ ID NO: 85738 - RNA, 53 nt, Homo sapiens
gcggaacacaacccaacgcagaggagcaggaaggaagaccgggaggaacagag

SEQ ID NO: 85739 - RNA, 78 nt, Homo sapiens
cggcgacgggacgacaaagaggcggcagggaccagcagacgggaagacccagggcaagcacccacggggagcccgggg

SEQ ID NO: 85740 - RNA, 75 nt, Homo sapiens
agaacacaagaaggcaagaggggaaaaccggacagacaagccccgagggacacggaaagcagcagacgaaccccg

SEQ ID NO: 85741 - RNA, 73 nt, Homo sapiens
cgaggcgcccagaaccaggcacagagcaggaagacacccacgaggacaaccccacagagcaagagacgaagaa

SEQ ID NO: 85742 - RNA, 69 nt, Homo sapiens
aaagcgcgggaggcgagcagaggccacgccgggcagagcgacggcgacccccccaccacgcgcgcccag

SEQ ID NO: 85743 - RNA, 72 nt, Homo sapiens
cacaaggacaaacccacccacaaaggggaacgaacaaagggaccgcgcgggagggcggccaggaacgaggac

SEQ ID NO: 85744 - RNA, 53 nt, Homo sapiens
cagccaggacggcaaggagggagccgccagaagggccaaaagaacacagccga

SEQ ID NO: 85745 - RNA, 72 nt, Homo sapiens
agagaaacgaaaggccaagacccagcgacagagcagcgacacaagggaacaagaccgaaaagaggacaggac

SEQ ID NO: 85746 - RNA, 78 nt, Homo sapiens
ccaggcccagcagccgccaccggcccggggccccagccggcccgggcacccggcagaggagagggccggcccggcccg

SEQ ID NO: 85747 - RNA, 42 nt, Homo sapiens
aaggaccagaccgcccaggaaacgggcaaggccagagaaggc

SEQ ID NO: 85748 - RNA, 77 nt, Homo sapiens
gaggagaagagccacgaggccggaaggaagcagccgagaggcgagaaagaagaaagaaaggaaagagaaaacagagg

SEQ ID NO: 85749 - RNA, 71 nt, Homo sapiens
cggaagaaacgcacacgaagaacaagaaaaagcacaagagcaccaacgagggaagaccgcaggaaagcagg

SEQ ID NO: 85750 - RNA, 74 nt, Homo sapiens
cgaagccaccaccaacagacagcggcccccagaagcacggaaaagcccccggccaaagaaagccaccccggccc

SEQ ID NO: 85751 - RNA, 71 nt, Homo sapiens
gagggagccccaccaagcgaagcgggacaaaaagccaaaggaagacaggaaccaaaacagggacgaagcgg

SEQ ID NO: 85752 - RNA, 75 nt, Homo sapiens
gcaaggaggggcccacaccgggccagccagagcccccaggggaccccaccgcagaagccaaaacacccgagcacc

SEQ ID NO: 85753 - RNA, 75 nt, Homo sapiens
aaaagcacacggagaagccaaacaaagagacgcagcggggaaaggacacagcgccacccgcaacccgccccgcaa

SEQ ID NO: 85754 - RNA, 82 nt, Homo sapiens
caccgggacggaccgagaccggaccgagagcggaccgagagcgcgaaacgcacgagaaggacccagaagaaccacgcgcagg

SEQ ID NO: 85755 - RNA, 76 nt, Homo sapiens
gagaggacaagaccacgagccaggaaaccccccaggcaagaggcgcaggaccgggaagaccaacaaacgcaccgcg

SEQ ID NO: 85756 - RNA, 83 nt, Homo sapiens
cgccacccgagacccagaagccagggggcagagcacaaagcgaagaagccacggcagagacaacgggaccccaaggcacaggc

SEQ ID NO: 85757 - RNA, 33 nt, Homo sapiens
caggcgacggacagggggccgcaaggccaggcg

SEQ ID NO: 85758 - RNA, 70 nt, Homo sapiens
acaacccgcagagaccacggcgcgccccggccggagggacagaagagcgcgaaaggaacaagaaaagaca

SEQ ID NO: 85759 - RNA, 70 nt, Homo sapiens
agggaacagaaacgcgaaccggcggaacacaggggccaaggccagggcagaaaaaaccaggaagacagcc

SEQ ID NO: 85760 - RNA, 74 nt, Homo sapiens
gcccccaaggggcccggacggagaggccgagagcaaaccgcccagccgccgagcaccacacacagcccagagcg

SEQ ID NO: 85761 - RNA, 51 nt, Homo sapiens
ggaaggcagcgcccagcagcgcagcaggggccagccggagggagcaagggc

SEQ ID NO: 85762 - RNA, 76 nt, Homo sapiens
cagaccgacgcgggacaccgaccacccgacccaagaaaacgagagaagcgagaggcacagggcagcaggacaaggc

SEQ ID NO: 85763 - RNA, 64 nt, Homo sapiens
caggagcagagcgacagcggcgagcagaacacggcgagcgggagcaaaaggagggaggacagag

SEQ ID NO: 85764 - RNA, 73 nt, Homo sapiens
cacgggagagaggccgggcgagcagcaggagcaccggcccaagaaacaggacaacggccaagagaaacaaagc

SEQ ID NO: 85765 - RNA, 81 nt, Homo sapiens
ccgcacgggcccggccccccgaggaggagcgcaagacgcaacaccgcagggcccagacacgcacgcccgcccgcccacgcc

SEQ ID NO: 85766 - RNA, 81 nt, Homo sapiens
cccagggcaggacaccgacaggaacagggaccacggggaccggccccccccccagaagagaacgacccaagagacccagga

SEQ ID NO: 85767 - RNA, 60 nt, Homo sapiens
acagaacaacaacgacagaggcagacaacacaaaaggagcccgcggccccaaaaagcggc

SEQ ID NO: 85768 - RNA, 86 nt, Homo sapiens
cgaaggggaaggcgccgaagaggacgaagcacacggacccgacaccggcgccagcgcaagaaacgagcagaagaggaacaaggggg

SEQ ID NO: 85769 - RNA, 67 nt, Homo sapiens
gaaggaacgaggcaaggagcaaagcagcggcgcagcccgggaagaaccggaagcccagccagggaca

SEQ ID NO: 85770 - RNA, 33 nt, Homo sapiens
ccacaagcccacgagagggcggaaagcaggaag

SEQ ID NO: 85771 - RNA, 89 nt, Homo sapiens
cagaaaccccccgaagaagaccccccacacggacgaacaccagggggacaagcggagaggcgagagagaaacacaggccccagaaggaa

SEQ ID NO: 85772 - RNA, 75 nt, Homo sapiens
ggaccggccaggaccagacaagacagcaaggaagagccagaacagcacaaggaaacaggagccagaaaaaaaaaa

SEQ ID NO: 85773 - RNA, 65 nt, Homo sapiens
ccacccccggcaagaaagaagacacacagaagaagggccagagaggggaagaggaaaccggaacc

SEQ ID NO: 85774 - RNA, 77 nt, Homo sapiens
ccaccaagaagcaagagcggagcagcagagaacccccggcccagacagcaagaggcacagaaaacgcagaaaggacc

SEQ ID NO: 85775 - RNA, 80 nt, Homo sapiens
gagccgagcgaagcgccaccccgcaaccagcaaagaccagcagggcaggagaaaaaaccagaggaggagaagagccgcag

SEQ ID NO: 85776 - RNA, 69 nt, Homo sapiens
acacgcccccagaacagcacaaaacgcccagaagaagagaacgagccaaaaggacaaaccagacgaaga

SEQ ID NO: 85777 - RNA, 70 nt, Homo sapiens
agaagagaccaagcgcacaggaggcccaaaaaagggaaccgcacagcgagacaccccacacagagggacc

SEQ ID NO: 85778 - RNA, 74 nt, Homo sapiens
cgacccacaggagcgcccgcggaggagcgcccggggaggcccccccccacaaggcccgcaagcaccagccccac

SEQ ID NO: 85779 - RNA, 85 nt, Homo sapiens
gccggagcgcgaaggccgggacccggccccggcccacaggggggggcaaacccgagagaacgggagccgcccggcaaagcgaaag

SEQ ID NO: 85780 - RNA, 90 nt, Homo sapiens
ccgccgcacccaggacggaggcgcagcccgaggaccaggccggcgcagccaggacaaacagagcaacgaacagcaggacggcgggggcag

SEQ ID NO: 85781 - RNA, 91 nt, Homo sapiens
cgccgggggaagccggacgcgccggcccgaagaaggcggggacccgacgaaggcaggcacagggaagaaaagcaaaaagcacggaaaagca

SEQ ID NO: 85782 - RNA, 75 nt, Homo sapiens
acaagggggcacccacaaagaccagaagcaacgcgacacagcaaaggcgaaaggacacgacaccaaaaaagaaga

SEQ ID NO: 85783 - RNA, 70 nt, Homo sapiens
gcgaccgcgccggacggggagaggggagcgccggggcggcccaggcgagcggcgagaaaaaggaagaaac

SEQ ID NO: 85784 - RNA, 83 nt, Homo sapiens
gcagacgggcgccggcagccccccaggggagacacggcagacgacccaaggccagccagccccaggcaccagcggacaggaca

SEQ ID NO: 85785 - RNA, 81 nt, Homo sapiens
ccagaaggggagcgaacgggaggaagagcaaggccagccacccaaccgaccacacagcccagggagaaaaaagaaaaccca

SEQ ID NO: 85786 - RNA, 81 nt, Homo sapiens
ccggccccacccgggaggggggagcggcgggaggccaccgccaggagcagcaggaccgcagcaacaaggaacaaaagaaga

SEQ ID NO: 85787 - RNA, 39 nt, Homo sapiens
gaacgaccgaagaaggacaggaccaggaccgaggagggc

SEQ ID NO: 85788 - RNA, 80 nt, Homo sapiens
ccagaaccgaccgcgcacaggaaacgcccgcagaagaaggaagaggaacaagcaaaaagacagaaacacgagagagggaa

SEQ ID NO: 85789 - RNA, 85 nt, Homo sapiens
gaagccacacgggggaaagagggagggggagggcacacacgggaagaaacaaagagccgaccagccagaagacaacgaaggaccg

SEQ ID NO: 85790 - RNA, 82 nt, Homo sapiens
agcccccaccccgaccgggacacccagccgagcaagcgccacagaagcccgcccggaggaaaaggcgcaaacacaaccagga

SEQ ID NO: 85791 - RNA, 84 nt, Homo sapiens
cggaaacagcaaacaaggcacggaagagccggcgggaagcacacaccggacggcccccaggggacccccccagccaccccccgg

SEQ ID NO: 85792 - RNA, 79 nt, Homo sapiens
cccaaaccgagccaaaagcggcaaggcaacaggaggggggaggggaacagcagcggagaacacggcagagacaaaacgg

SEQ ID NO: 85793 - RNA, 82 nt, Homo sapiens
ccccccacggagaggagaagagacaccgaggcccggcacgagccgccagcccgccagagcgcccgaggagaagccccaggac

SEQ ID NO: 85794 - RNA, 88 nt, Homo sapiens
gacgcaggagaagcgccaaggacccgggacagggaccagcgggaaggcagacagcgagggcgacgagcaccgcacgcaccggcagaac

SEQ ID NO: 85795 - RNA, 84 nt, Homo sapiens
ccgcgaagaggcgggccggcacgaacgagcacccaccagggccagcacgggacgggccggagaacagacggacccaccgcagga

SEQ ID NO: 85796 - RNA, 52 nt, Homo sapiens
aggaagcaacagcaaggacagagcagggaaccgggaaggaagaaaccaaacg

SEQ ID NO: 85797 - RNA, 61 nt, Homo sapiens
aaagaccaaggggggggcacccccacaacgaacaaacggacccaggacaaaacgacaccag

SEQ ID NO: 85798 - RNA, 82 nt, Homo sapiens
accaaagacgagaaagaaacagcagcacacgacagacaacaacaggcaggaccccaggaaggccagcgcccagagaacgcac

SEQ ID NO: 85799 - RNA, 68 nt, Homo sapiens
ccgaaacagaagaaccagccccaaaggaccagccaaggaagcaacacagcagcgagagaagcagaaaa

SEQ ID NO: 85800 - RNA, 73 nt, Homo sapiens
cgcgggcaacccggccccaagccggaagaaccgcagccgagcggggccggccacagggaaaccccggccggcg

SEQ ID NO: 85801 - RNA, 75 nt, Homo sapiens
gggccggaacgaaagcaggacggaggagcgaccaccggcggagaaggggcagcagaccccgacgacagaaagggc

SEQ ID NO: 85802 - RNA, 68 nt, Homo sapiens
ggagaggaggccaggacaccggaagccgggaaaggacagaccacacgcggacaccaaggcgccaggcg

SEQ ID NO: 85803 - RNA, 79 nt, Homo sapiens
gcagacgacaccccacacgacaaggaggggcaaacagccgcagcacaagccagcagcagcagaggaccgcccgagaccg

SEQ ID NO: 85804 - RNA, 70 nt, Homo sapiens
gaaggggaccgggcggcggagcggcggaagaaggggcagccaccacagcaccccagggcaacaacagcaa

SEQ ID NO: 85805 - RNA, 54 nt, Homo sapiens
gcgcgcaagcacccccaagaaggaggggacaccagcagcgccgccggaccaccg

SEQ ID NO: 85806 - RNA, 119 nt, Homo sapiens
cgaggcggggccgccggggccgccaggagcccgaccgggagaggacaagaccacgagccaggccaggcgaaccagccgaaaaaggagaaaccaaaaggaaaagcgaaccagacagagga

SEQ ID NO: 85807 - RNA, 61 nt, Homo sapiens
gcgggccgcgaaaagcccaaaagaggagcaaaccaggaccgaccaccccgccagagccgag

SEQ ID NO: 85808 - RNA, 53 nt, Homo sapiens
caagagggcgagcaggacgaagcgcccgccaccaaggagcgcccggaggaggg

SEQ ID NO: 85809 - RNA, 77 nt, Homo sapiens
cgaaacccccccccccacccaccaaaccggagggggaaaaaacccaaggcgcaaaggacagcccagagcaagcacac

SEQ ID NO: 85810 - RNA, 83 nt, Homo sapiens
agccccaagaggggaccaaaacaaaaggcccccaagacacaagaagcagacgacgcccgaagcaaaagccacagaaaagacaa

SEQ ID NO: 85811 - RNA, 78 nt, Homo sapiens
gccgcgccgccgccgcgcgcggggcacccacgcccaggcggaggcaaggcggacgggccacgcaaccccacccccagg

SEQ ID NO: 85812 - RNA, 87 nt, Homo sapiens
ggcggacgaggagaagcgccgcccggcgggagaagcgcagagccgcagccagaggagaaggcagagcccccccaggcagaagcccga

SEQ ID NO: 85813 - RNA, 76 nt, Homo sapiens
aaccccacgaggccagggccgcgagcgccgagccgcgcaggaaagaagcgaccgcggcggcggacaagggagagac

SEQ ID NO: 85814 - RNA, 82 nt, Homo sapiens
gcggacgcagccgcgagcccggaggcggcgggaggaggcggcggccggcaggcacggggacacaaggccacgcggcggggaa

SEQ ID NO: 85815 - RNA, 76 nt, Homo sapiens
acgggagccccgaccgggagaggagagcccccaggggagccggcggaaccgaaaagacgaggcgaggaggcgagac

SEQ ID NO: 85816 - RNA, 80 nt, Homo sapiens
cgacaaggaggaccccgagcgagaagcaaaagcagaccggaaaacccaccggcaagaccacacccgaggggagcccagga

SEQ ID NO: 85817 - RNA, 74 nt, Homo sapiens
ggacccggccagcgacgcaccgagaaaggaaggaaaaccgacgaaaacgggagcaggagaagaagccaggggca

SEQ ID NO: 85818 - RNA, 49 nt, Homo sapiens
ggagagaggaccacccagaggagcaacagaccaagagggccggaagaga

SEQ ID NO: 85819 - RNA, 70 nt, Homo sapiens
ccaggggcgagccacagcgaaagggcccgaagacaccccgccaaaaggacagaggaccacggagacagca

SEQ ID NO: 85820 - RNA, 81 nt, Homo sapiens
acagcaagagcaggacaccggaagcgggaaagggaaacagcaaccaaaggcaaagggggaaacaggacaagaaacaggaaa

SEQ ID NO: 85821 - RNA, 97 nt, Homo sapiens
gggccccgcagcggaaccggacccagcccgagccgccccacacccacagggcggaaaacaccccaaaagccaaaagggaaaggaaaagaccaacaac

SEQ ID NO: 85822 - RNA, 73 nt, Homo sapiens
cacgaggcaacgccccagcgcaaaccagcaaaagcagaaagcacggaccaaaccagcgaaaaggggagaaaac

SEQ ID NO: 85823 - RNA, 51 nt, Homo sapiens
ggaacagacgagaagaaagaggaggaaccggaccagaagcaaggcaacggg

SEQ ID NO: 85824 - RNA, 77 nt, Homo sapiens
ccaagcgggggcagggaacaagcgggacaagcccgggaacaacacaccagagacgacggaggcgccgcacgacgcgg

SEQ ID NO: 85825 - RNA, 79 nt, Homo sapiens
cagcgggggaaccggcgcgccggcgcgcggcgcggacaggcccaaacggcagccagcacgagcccccccaccaccacag

SEQ ID NO: 85826 - RNA, 63 nt, Homo sapiens
acaggcggccaaacagcaccgaaaaacgggcagaaggaggcgagaaagggcccggggaaggcg

SEQ ID NO: 85827 - RNA, 79 nt, Homo sapiens
agggcgcacaaccagccccgcgagaggaagcgccaccagccaaggcagggccggggggggcacagagccccggaagaca

SEQ ID NO: 85828 - RNA, 83 nt, Homo sapiens
gagagggccgggagcgcgcagccagcccgggaccgggagcccgggaccgggagccggggggccaccccgaccggaggagcggc

SEQ ID NO: 85829 - RNA, 63 nt, Homo sapiens
cggccaccggcgggaggaacaaaagacagggaaaggacccggccaaggcgcaacagaacagac

SEQ ID NO: 85830 - RNA, 77 nt, Homo sapiens
gcagaggccggcgaccagaagcggaaacgaacaaagagaggagagagacgacgacgagacgaggagacagacgagac

SEQ ID NO: 85831 - RNA, 64 nt, Homo sapiens
gaagagaggccagccgggaggacacacaagcggcaccaagaaggcggagaggaaagagagggac

SEQ ID NO: 85832 - RNA, 57 nt, Homo sapiens
gagaaaaggccagggcccacgcaagggggccaagccggcagaaagccaacaagcacc

SEQ ID NO: 85833 - RNA, 81 nt, Homo sapiens
gcgggcaaagccccccgggcgggaccgccaccgagcacccgggccgaagcagacaaccagaacacgacaccaaagccggca

SEQ ID NO: 85834 - RNA, 55 nt, Homo sapiens
aggccgccaggccgcagacgcgaaggaacggcaaaggaaaggccacagcaagggc

SEQ ID NO: 85835 - RNA, 82 nt, Homo sapiens
ggacaaaagccaagaggaggacagcgcacacagcaagcacgagaggagagcggaagaaaggagaggaagacaaagagaaccc

SEQ ID NO: 85836 - RNA, 73 nt, Homo sapiens
cacgacccggagaaccccacgaaaacaacaggcacaaagagagaaggaacacccacagggcagacagagaaag

SEQ ID NO: 85837 - RNA, 73 nt, Homo sapiens
gcggaaccacgggagccccgaccgggagaggagagcccccaggggagccggcggaagcagggaaaaaccagga

SEQ ID NO: 85838 - RNA, 78 nt, Homo sapiens
agaaggccgggcgccgagccggaccggagagcacaagccggccacgggaacgcaaccccaccccccaccccaccacca

SEQ ID NO: 85839 - RNA, 75 nt, Homo sapiens
aagcagggaaaaaagcagcaaacacgggacaaaaaccagaccagggccacaggagaaggagcgccggcaggagga

SEQ ID NO: 85840 - RNA, 73 nt, Homo sapiens
ggaaacagacgaacgccaggccggcgccaaacccagaggccgggaacgggaaacgcgcgccgagaagccaccc

SEQ ID NO: 85841 - RNA, 76 nt, Homo sapiens
ccccaccgccccaggacagcaccagcgggccggaggagccagagcgcagaaaggggaacaaagcgacgagggcgag

SEQ ID NO: 85842 - RNA, 77 nt, Homo sapiens
aaagaaacaaccagaccccaaagaagccacagaacaggggaggcagccaggcaaaccaggacaggggaaggcagcag

SEQ ID NO: 85843 - RNA, 54 nt, Homo sapiens
gcagggacacgagacggcagacccagcgccgggcggagacagcagccaacgcac

SEQ ID NO: 85844 - RNA, 81 nt, Homo sapiens
ggcagcccacggggcccgcgaagagggcccccgaggaccgaaccccggagaagaggaggacggcaaggaaggcaccccaag

SEQ ID NO: 85845 - RNA, 53 nt, Homo sapiens
agcccgcaccacaaaccggaaaagaagaagccaaacaaggcagagaaggcaga

SEQ ID NO: 85846 - RNA, 80 nt, Homo sapiens
ccaggggcaggagaacaaggagaccaggaggcagaaagacggggaaagaccacgaccgcaggaacccccgaagcaacagc

SEQ ID NO: 85847 - RNA, 54 nt, Homo sapiens
gcagagggcagcaagaggcgcgcagagggcgcagagccgaagaccggaaaccca

SEQ ID NO: 85848 - RNA, 72 nt, Homo sapiens
gggaagcacggcccaacgccggacagaccgcaagccgccacccgagaccgcgcgccccaccggccgcagaag

SEQ ID NO: 85849 - RNA, 69 nt, Homo sapiens
accgaaacacaggggcgggcagccgcccaggaccagcaaaccccacacggacaccaacagacaacagcg

SEQ ID NO: 85850 - RNA, 57 nt, Homo sapiens
aaacaaagaagccagaggccaagaagaggaaaccagaacacggcaagagcagccacc

SEQ ID NO: 85851 - RNA, 70 nt, Homo sapiens
aagcagccaccagcacaagcggaaaaggaaaccagaaaaacggagccgaaccgggaccccgaaacggcgg

SEQ ID NO: 85852 - RNA, 78 nt, Homo sapiens
cagcccgccgcgcgcccgacgccccgcgggaccccccgccggaccccacagcaacaagaccccagacccgcagagacc

SEQ ID NO: 85853 - RNA, 43 nt, Homo sapiens
caaagcggaccagagacagaccaggaccgaagccagaacaccc

SEQ ID NO: 85854 - RNA, 71 nt, Homo sapiens
ccaccagaaccgccacaacgccagacaccaccccaaagagggccaccagcccgcagcacccggcccgcggg

SEQ ID NO: 85855 - RNA, 87 nt, Homo sapiens
aaccagaacagagacagcaccaaaaccaggagaaaccaagcgacgggccgggaacgccccacccaagcaccccaagcccaaagagga

SEQ ID NO: 85856 - RNA, 69 nt, Homo sapiens
gagccggaccgcgagagcacaaacgggccacggaacggggagggaggcggcaccacacggacaagggca

SEQ ID NO: 85857 - RNA, 81 nt, Homo sapiens
cgccaagaccagagaaggaggagggaccacgcgcgagagcgccacagcagccaaacggggacgcccagagagccgaagaag

SEQ ID NO: 85858 - RNA, 77 nt, Homo sapiens
gcaaagggagagcaggcggggcaagcagagcagcgcgaccggccccccgcggaaccgagagggcagcagcggacccg

SEQ ID NO: 85859 - RNA, 52 nt, Homo sapiens
agcacgaggggcgaggaaaaaccacaagggggaaaacgacccggaaagagcc

SEQ ID NO: 85860 - RNA, 84 nt, Homo sapiens
ccgccggccacgagccgaacggcgcgccgcccaaggagagcaaccccaaacgcacggccaagaagcgagagaagaaaaacagaa

SEQ ID NO: 85861 - RNA, 70 nt, Homo sapiens
aacaagggcagggcaagcagagcgaccagccgccaaaggcaagaacgccccggcaaggacggaggcaggc

SEQ ID NO: 85862 - RNA, 78 nt, Homo sapiens
ccccaaagaagccacagaacaggggaggcagccagagagcgaccaaacccccacaacaaggacaaagggacccaagga

SEQ ID NO: 85863 - RNA, 78 nt, Homo sapiens
gaagagacgacacaaggagacgaggggaagaggcaaaacgggcgggggcaaagaaccacaagaacaaaaggcaagaaa

SEQ ID NO: 85864 - RNA, 91 nt, Homo sapiens
ggcagagagggggacgaccccgaacccaggacagcaccaggcccaggacagcacgagccagccagccggaccacggaggcaggaggacagg

SEQ ID NO: 85865 - RNA, 54 nt, Homo sapiens
acgcggaggcggcgcccgcagagcagaagaacgagcaaccgagaacagacacca

SEQ ID NO: 85866 - RNA, 82 nt, Homo sapiens
ggagggcggcgcgccgagcggcaaaagcagaccggaaaacccaccggcaagaccacacccgaggggagcccaggacaccacg

SEQ ID NO: 85867 - RNA, 70 nt, Homo sapiens
cacaaggacagagcacccaccacaggagaaagcgcgcgcccggcccaggagaggacacccgaccgccagc

SEQ ID NO: 85868 - RNA, 78 nt, Homo sapiens
cggagaccccaccgccggcgcgggaaacgggcgaagcgacgagccgcgaggagaaaacagcacaggaaacacagaaga

SEQ ID NO: 85869 - RNA, 76 nt, Homo sapiens
gggaaacgcggaagcgggaggagagaagaccgagcggaggagcgcagcagagcgcccagaaagaaaacaggcaggc

SEQ ID NO: 85870 - RNA, 80 nt, Homo sapiens
cagagcaagcaaaggacagccagaacaagcggaagaacaacaaacgaagaagaacggaccgaagccaaagaacaagagcg

SEQ ID NO: 85871 - RNA, 76 nt, Homo sapiens
ccaccgcgaacaggagcccgacagaagaaagccaacaggcagaccagagacagcgccacgcacccggggagcagac

SEQ ID NO: 85872 - RNA, 77 nt, Homo sapiens
agccgagaagaaaccgcagcagggaacagaaagaggaaaggcagcaacaggggaagcggagggaggcaaagaagcca

SEQ ID NO: 85873 - RNA, 70 nt, Homo sapiens
ccgcgagagaggcaagccggggggggaagcgcccgggaccaacgccacaaggcaaacaaagaacaagcgg

SEQ ID NO: 85874 - RNA, 79 nt, Homo sapiens
cagaggaaccacgaccgcgacccgaggaagaagagaaaacaaaaaacgacaaaaaaacagaagaaaagagaaaggaaaa

SEQ ID NO: 85875 - RNA, 79 nt, Homo sapiens
agaaggagcggagcggcagcagaaggagaccggccagagaacaaacccccaaagccagaagccccgaaggggaaagagg

SEQ ID NO: 85876 - RNA, 51 nt, Homo sapiens
cagacgcagggcgcccccggcccagagcagggaacagagaagggcagagcc

SEQ ID NO: 85877 - RNA, 83 nt, Homo sapiens
gagcaggcgcaaaaaagcgagcgacggaggcgccgggccaggggcacagcaccgccccagaagacgagaacgagcgaaagggc

SEQ ID NO: 85878 - RNA, 68 nt, Homo sapiens
ccagcaccaaggccagcgggaggagaaggcgaagcaaaagcaacaacggagaccagagaacacacagg

SEQ ID NO: 85879 - RNA, 71 nt, Homo sapiens
cggaacccaagaaccggggagcgacagaagacaaacagcaaggggcaaaggaggcgggggaagagaagcga

SEQ ID NO: 85880 - RNA, 77 nt, Homo sapiens
gaccggaccgagagcggaccgagagcgcgaaacgcacgagaagaggccgccagacagcgcagacaagaaggagagca

SEQ ID NO: 85881 - RNA, 80 nt, Homo sapiens
ccacccgggaggggggagcggcgggaggccaccgccagagccgagagcgccggaggaccacacccggccacagccgcagg

SEQ ID NO: 85882 - RNA, 66 nt, Homo sapiens
ggaacacagggacccaaggagaccggaaaaacgcacgccccaaccagagagcgagcagaaaaaaca

SEQ ID NO: 85883 - RNA, 69 nt, Homo sapiens
ggcaacaaggcggacaagagaagccgccagacgcggccggagcccccccagacacacgagggggacacc

SEQ ID NO: 85884 - RNA, 79 nt, Homo sapiens
cgaagcacccacagcaacaaggagagcacagaaggggacaacacccggcaagcccagggcgagcaaccacgggaaccga

SEQ ID NO: 85885 - RNA, 74 nt, Homo sapiens
ccgggaccaccagcccacggggagaggcaggaggcagaccacgccaaggaggagaccaggggccgacccgcccg

SEQ ID NO: 85886 - RNA, 84 nt, Homo sapiens
gcgcggggcgggacagacggccggcgggagacgccgagcgaaagcacacgaagaggcagcccagaagaagaaagcaagcaggag

SEQ ID NO: 85887 - RNA, 75 nt, Homo sapiens
gccgcggcgcggcggcggcgccgccgggcgggcggaagcgagagccgccacgagaaagcaacaacagccaaaagc

SEQ ID NO: 85888 - RNA, 72 nt, Homo sapiens
agacagaaccacgccgcgcgcgcaaccccaagagcggagacacggggaaacgcagaccaacacacgaaaaac

SEQ ID NO: 85889 - RNA, 76 nt, Homo sapiens
caggggcccacggggagaccccccacaccaacacccccaagacaagcaggggaaagacaaacaccgccgggacaaa

SEQ ID NO: 85890 - RNA, 72 nt, Homo sapiens
acaggcggcagcggggcggcgcgcggcgcggcggcggcccgccccgcggcccaggggaagcaggagcacagc

SEQ ID NO: 85891 - RNA, 79 nt, Homo sapiens
cagcgagccccacacaggacgaacgccagcccgaagaaggaaagcccggggagggccaacaacaccgacgagcaggcac

SEQ ID NO: 85892 - RNA, 77 nt, Homo sapiens
cagccaacacgccagaagcgggagggcggaaggcgggaccaaaccagcccagccgcgcgacccccgcgaagaccccc

SEQ ID NO: 85893 - RNA, 57 nt, Homo sapiens
ccggagcaggaggagaaaggaaacagaggagagaacacgggaaaccacgccgggacg

SEQ ID NO: 85894 - RNA, 53 nt, Homo sapiens
gcccagaaagcagaacaggccaccgggccaacgaaagcacaacacgccagagc

SEQ ID NO: 85895 - RNA, 76 nt, Homo sapiens
gcggcaaacaggcggggaccggcgaggagcgaagaacaaacacccgagcgcgagacacaggcagaccagagagagg

SEQ ID NO: 85896 - RNA, 70 nt, Homo sapiens
gccagcggccgcgcacccccggccggaggcaccagcaccagacaaagggagcaccagccagaccgggaag

SEQ ID NO: 85897 - RNA, 58 nt, Homo sapiens
cgggagaaaccagagacaaaacaccgcgagaccccgcgaggcaagacaagaccaggca

SEQ ID NO: 85898 - RNA, 70 nt, Homo sapiens
gcgcacagcagcgcacggcgggcaacacaacaaggcgcggacacccagacaagcgcgccaccggccccga

SEQ ID NO: 85899 - RNA, 72 nt, Homo sapiens
agaaagaaaaagaacacaagcagaaaagggaaggagaaaccaagagccccaaagaggagcacgggcaaaagc

SEQ ID NO: 85900 - RNA, 56 nt, Homo sapiens
acgcagggcgcccccgggcaacagggaggaagcgacaacccaaaacagggagggcc

SEQ ID NO: 85901 - RNA, 76 nt, Homo sapiens
aacaaaccccaaccaccggccccggaccaggcccaaggacaaagccccagagcaggcgccagcccgcccagacgcc

SEQ ID NO: 85902 - RNA, 74 nt, Homo sapiens
cccagagagagcacacaaaaaaagggggacgaaggccaccaagggccggaaggaaaaaacaggagacaccaaaa

SEQ ID NO: 85903 - RNA, 59 nt, Homo sapiens
gccaggagaacaaggcacacagagacagacaaagcagccggagccgccaccggacacca

SEQ ID NO: 85904 - RNA, 65 nt, Homo sapiens
gacccaaggcgcaagaaaaggagccggaaacggacaaacagacacggaagagacccaaagaaaag

SEQ ID NO: 85905 - RNA, 63 nt, Homo sapiens
ccagacgaccgcggaacaaacagaagacagcagggaaaacgggaacacaagccaggacagccc

SEQ ID NO: 85906 - RNA, 82 nt, Homo sapiens
cacacaccaaaggcaaggaaaggcacggaaaagcgggagagacccagagcaaaacgagcaccaagggcaaacacaagcccag

SEQ ID NO: 85907 - RNA, 77 nt, Homo sapiens
aggcacaccgcagcaagggggggacgcggaagagacagcagaacaagagccaggaccggacaggaagggagcccggg

SEQ ID NO: 85908 - RNA, 82 nt, Homo sapiens
aaacgaggcgccgcgggcgcggacggcgggaaccggcccggagcgagaacgcgcgaagcccggggcggcgacggagcacgac

SEQ ID NO: 85909 - RNA, 38 nt, Homo sapiens
gcgccaagaagcgcaacccggccccaccagaggcgagc

SEQ ID NO: 85910 - RNA, 86 nt, Homo sapiens
caaaacaccaaccccccagggcggcagaacagaacgccaaaagacgaacacaaagggaaagaggagaggcacccgaaagccaggcc

SEQ ID NO: 85911 - RNA, 73 nt, Homo sapiens
gccggacccgccaagccagaggcccgggccagcgacgggcgagcaccgcagaagcccagacggccgagaccac

SEQ ID NO: 85912 - RNA, 70 nt, Homo sapiens
caggaaccaccaccacagacccagacaggccggggggggcacagagccccggaagacagcccccagcgac

SEQ ID NO: 85913 - RNA, 75 nt, Homo sapiens
gagccggcgccgcggccgccgcaaggaaacacaacgagaagcgacagggccacgagcccaggggccgaacccggc

SEQ ID NO: 85914 - RNA, 92 nt, Homo sapiens
aaaggaaagggaaaaaaccgagaacccgaccccgcggagacagcgagacccgccaggagcaaaggccccgagccccggccccaaagacccaa

SEQ ID NO: 85915 - RNA, 75 nt, Homo sapiens
cgccagggaaaagagcaaacgagaacagaccacccagcaacaaagccaaagacaagaagaaaggggaaagcaaga

SEQ ID NO: 85916 - RNA, 77 nt, Homo sapiens
cagcggaagggaggcgcgcggcagcaggggcgacgaggcgggacgcaggaaggcaccacaacaacccggggcacgaa

SEQ ID NO: 85917 - RNA, 77 nt, Homo sapiens
ggagaccgagagagaaccaaacgagaccaagagcgcgcgggcaaaggacgggaagaacacgagagcggagagaggag

SEQ ID NO: 85918 - RNA, 84 nt, Homo sapiens
cgccagaggggggccgcgagcgcacgagcggcccgccagcgaacccccgagacccagccacgagagaagaaagaaaaagaaacc

SEQ ID NO: 85919 - RNA, 71 nt, Homo sapiens
gcagaccaaacggagccaagaacaagagacacacaggacaggcgagacaagaggaacacccaaaagacggc

SEQ ID NO: 85920 - RNA, 69 nt, Homo sapiens
aacgaggcaacagcaggcacacaaggggaaaccagaacacgaagaggccagaacagagagaccccaagc

SEQ ID NO: 85921 - RNA, 75 nt, Homo sapiens
caaacgagacgagaaacagaaacacacccacaaaagcgaaaagccagacaggaacaccagacagaagaacgccgg

SEQ ID NO: 85922 - RNA, 38 nt, Homo sapiens
cggacaaaggaacaggaccaggcccccagccggagacc

SEQ ID NO: 85923 - RNA, 76 nt, Homo sapiens
cccacaggggggggcaaacccgagagaacgggagcaggccacagaacaggacacggacgaagacacgcacggccca

SEQ ID NO: 85924 - RNA, 84 nt, Homo sapiens
gacgcggaggaggaagaaaagagagccagccgagcacccccaagcagaggagaagacagaggagccagaccaagagacagcaca

SEQ ID NO: 85925 - RNA, 38 nt, Homo sapiens
cgcacacagcaagcacgagggcacacagggaccaagaa

SEQ ID NO: 85926 - RNA, 68 nt, Homo sapiens
gcgaaccgggggaaaaggacaccgaaccggaacaggacccagaagaaccacgcgcaggccagagcagc

SEQ ID NO: 85927 - RNA, 69 nt, Homo sapiens
ccaagcggccacacccagccccccagagcgaccacagaaggcacagagaacaggcccaagaaaaaaaaa

SEQ ID NO: 85928 - RNA, 49 nt, Homo sapiens
acgcagggcgcccccgacgccaaggacagggcaacacgaagacggagac

SEQ ID NO: 85929 - RNA, 81 nt, Homo sapiens
gaccaggacaagcgccccaaaccagaggagcagaaaagcccaaaacgagaagaaaccaaaaaggaagacgagagaaaacca

SEQ ID NO: 85930 - RNA, 58 nt, Homo sapiens
caacagaaagagcaacagcagggcaacaggccgagggacagagaaaaacacgacagag

SEQ ID NO: 85931 - RNA, 70 nt, Homo sapiens
aaaccaaaccagcaccgggcaccacaggcaagagccagggaaaacaagacaaagcaagcagaaagcgggg

SEQ ID NO: 85932 - RNA, 79 nt, Homo sapiens
gggacccggccccggcccacaggggggggcaaacccgagagaacgggagaaagagcaacgcacgaggaagaacgaacgg

SEQ ID NO: 85933 - RNA, 75 nt, Homo sapiens
gccggcgcacgacagcccccaagcccagacgcgaacaggccgcgagcaagccgagcgagacgaagagaccagaag

SEQ ID NO: 85934 - RNA, 57 nt, Homo sapiens
ccggggcggcgcaggaggagccgaggcgagccaacagcaccaaaccagaaagcaaaa

SEQ ID NO: 85935 - RNA, 74 nt, Homo sapiens
gacaccaggaaacccacgcaagaggaacaagacagagaccccgaggaagacaacgaggggacgagccaaaaccg

SEQ ID NO: 85936 - RNA, 64 nt, Homo sapiens
aggggcggaaacgcggggacgccacaaggagggccacaggagaccccaagaggcacagaagaag

SEQ ID NO: 85937 - RNA, 69 nt, Homo sapiens
aggaagcgccgaagccgaacccgcgcgacaaaaggaccagacaaacaaaagggggcgccacaggagccg

SEQ ID NO: 85938 - RNA, 60 nt, Homo sapiens
cccgccagacgagggacaggccaggacggcaggcagacgaaagcgaaaagaaacagaaag

SEQ ID NO: 85939 - RNA, 59 nt, Homo sapiens
gggcggcgagagaggggggggccggggccgagggggacccgggcacaggcagaggccag

SEQ ID NO: 85940 - RNA, 43 nt, Homo sapiens
ggggccaagcaagggcaggagcgagaacccgagcagcgccaga

SEQ ID NO: 85941 - RNA, 38 nt, Homo sapiens
cgcagcagaagagggggcacagagcaggcacccaaaca

SEQ ID NO: 85942 - RNA, 71 nt, Homo sapiens
aaccgagagccagaacgaacaagccaacagacccaggggcgccagcaaagggaagaaaccccaacaggacc

SEQ ID NO: 85943 - RNA, 82 nt, Homo sapiens
agggaaaagaaaagggaacaggaccaaggagaaggaagaacaaaacagaggacaaggaggcagaggcacaggccagacgaac

SEQ ID NO: 85944 - RNA, 74 nt, Homo sapiens
aaggacaagaggccagggcaggccccaacaacgaccggggacgcccaagccagaacagaccgccacacccagcc

SEQ ID NO: 85945 - RNA, 71 nt, Homo sapiens
gacggaaccaggggagagcgacccaaacaaagaaaccgaagcgaaagacggcaccccgggggcacgggaag

SEQ ID NO: 85946 - RNA, 70 nt, Homo sapiens
gaagacgaacgaaacacgaaagggcaggggaacggcgagggaacccaggaaggagggcgacaaacaccag

SEQ ID NO: 85947 - RNA, 77 nt, Homo sapiens
gaccgagaccggaccgagagcggaccgagagcgcgaaacgcacgagaaggggcacgacacagccaccaggggagaca

SEQ ID NO: 85948 - RNA, 81 nt, Homo sapiens
gcccggccacgaccccgcgggaggaaccaaccggccaacaacaccgggccgagcagccacccgagggaccaggcaggcgca

SEQ ID NO: 85949 - RNA, 85 nt, Homo sapiens
agaccccaccgccggcgcgggaaacgggcgaagcgacgagccgcgaggaggcaaaccgacaccagcgacacaagcgcgagggaac

SEQ ID NO: 85950 - RNA, 79 nt, Homo sapiens
aaaaaacccaacccagaccaacagcgcacggaccaccaaccaagcaggcacagcaagcaacccggccgaggggggcacc

SEQ ID NO: 85951 - RNA, 76 nt, Homo sapiens
ggggggcacgcccgcccgggccgggacagagcgaagaaccccccaagaagacgaaacccccgggccacaagaaggg

SEQ ID NO: 85952 - RNA, 77 nt, Homo sapiens
acaaaaagagacagacagcgcacccaggacgcgccagggggacacagacgagggcagaaagggcccagccggcagag

SEQ ID NO: 85953 - RNA, 81 nt, Homo sapiens
cgcccagccacccccaggacgcccgcaacccgacacggccggaaccgggaaccgaaaacaaagcagcccgaagaaaacaga

SEQ ID NO: 85954 - RNA, 78 nt, Homo sapiens
aaaggagcgagcagacgacaagccgggagcgggcggccaaccagcccacgaggaacagacaaggggagagaagacacc

SEQ ID NO: 85955 - RNA, 53 nt, Homo sapiens
gaaaaggccaagaaggcagggggcccagagagggccgaaccggaggacaagcc

SEQ ID NO: 85956 - RNA, 76 nt, Homo sapiens
aacccaggcacaaggaagaccgaaaagaaacagaagcggagagacagggacaagggggagccggcaaaacaccaga

SEQ ID NO: 85957 - RNA, 79 nt, Homo sapiens
gacgcacagcgcggagaaacagccaaaggggacacccggaggcggcgcagcagcaccggacagggaacaaaggcagaga

SEQ ID NO: 85958 - RNA, 73 nt, Homo sapiens
agcaaagccgacagcagaagaagcaccaaggcccacggccccacggggcgacgagccacgggcgggcccaccg

SEQ ID NO: 85959 - RNA, 80 nt, Homo sapiens
gaggcaacaaccgggggccgcaccggaacgggcacaagccgacgcaccgccgccccggggcggccgcgcccagaagcagc

SEQ ID NO: 85960 - RNA, 74 nt, Homo sapiens
agcgggagagcaccaacgccaggacagccagaaagccggaccaccccagagcagcaaggggacccacagcccgg

SEQ ID NO: 85961 - RNA, 61 nt, Homo sapiens
gagccagggaggacgaagaaagacccagccagagagcaaaaaggaccccgccgaagaccaa

SEQ ID NO: 85962 - RNA, 52 nt, Homo sapiens
gcccccggcccgaccagggcggccaccgagaggacaagagcgcccaagcgga

SEQ ID NO: 85963 - RNA, 46 nt, Homo sapiens
gcaacacaccaacccgagccgcgagaaggggccagcaaagacggag

SEQ ID NO: 85964 - RNA, 101 nt, Homo sapiens
gcagaggaggggagcacgaagcacaacgccaggagggcaagccagccaagcaaaggcgcagggccacggcgagcggccaacagggacgaacggacagacaa

SEQ ID NO: 85965 - RNA, 86 nt, Homo sapiens
cgcggagcccagaccacccgggcgaagcgggcgagcggggggacgccggcggagacgcgggcgagggacgcaacagcgcgaagcag

SEQ ID NO: 85966 - RNA, 73 nt, Homo sapiens
aaaacaaaagcagcccaagcaccaggagaagacagcaaagccacagagagagcccgcgagagagaagggaaag

SEQ ID NO: 85967 - RNA, 76 nt, Homo sapiens
agaccggaccgagagcggaccgagagcgcgaaacgcacgagaaggcaagaagggcaggccgcagcgccccaccacc

SEQ ID NO: 85968 - RNA, 80 nt, Homo sapiens
caacggagaccgggggggcaagcaaccagacagcgggaagagaacggagaggccaccgcaggcacggccgaagcccgagc

SEQ ID NO: 85969 - RNA, 73 nt, Homo sapiens
cgacgccaccgaccgacagagcaggagacacaggcggagaagagagcggaaagagcaacaggacaagaaccca

SEQ ID NO: 85970 - RNA, 67 nt, Homo sapiens
accccgacagcagaagacagcagaggccccagcaggaggacccgccggaccagccacgaaaagccag

SEQ ID NO: 85971 - RNA, 78 nt, Homo sapiens
caccaacaagggcaccgccgggccacaaccccgcgcaccgccgcacgcgaacagagggaaggaggcaggggagcccag

SEQ ID NO: 85972 - RNA, 63 nt, Homo sapiens
gccagaacggccaggagacgcaacggaccgagccccgaacgcggggaaccaccacgcagacca

SEQ ID NO: 85973 - RNA, 77 nt, Homo sapiens
gccgcaagaggcagaccccagaacaccgaaaaggaaaccccaaagggaggaccacaaagaagcagaacacggagcaa

SEQ ID NO: 85974 - RNA, 76 nt, Homo sapiens
cggccaggagagaagcggcgcgaaagacgcgaaccggcgcagagagggggaggggggaagaggacgggcccgagaa

SEQ ID NO: 85975 - RNA, 87 nt, Homo sapiens
gcaaacccacccggcccaaccacccccagcagagaccagagaagccccccaccagccccaacagcaacaacaggaccacccccaaac

SEQ ID NO: 85976 - RNA, 37 nt, Homo sapiens
gaagcaggcaagagcgcaggcgacggagccgccggcc

SEQ ID NO: 85977 - RNA, 78 nt, Homo sapiens
cacaacccgacccgacgaaaagacagaaccagcacagcaaaaaaggcagcgcaccgaccccaacgaacacacaccaaa

SEQ ID NO: 85978 - RNA, 77 nt, Homo sapiens
ggacccagcaaaggagagcaggagaaaaacggcagcaggccgagaccgggaggaagcggagaaaagagccccgaacg

SEQ ID NO: 85979 - RNA, 83 nt, Homo sapiens
aggacgccccgacccaggcgcgcccgcgccggggcaggagggccggcggagcgccaggccgcaccgaaggcccgacaagcacc

SEQ ID NO: 85980 - RNA, 84 nt, Homo sapiens
cgcagaagcaaaggagaagaaacaaaaggaagaggggcgccaggccagggaggcgagagccagcaggaggcccagcgccccagg

SEQ ID NO: 85981 - RNA, 57 nt, Homo sapiens
aggggagaaagaaaaaggggccaagaaccgcaaggacccagcagccagcgaagcccc

SEQ ID NO: 85982 - RNA, 67 nt, Homo sapiens
gggcaggaggaggaagagggagaggacgaggaagagcgaggggacaaaggggacacaggcaaaacgg

SEQ ID NO: 85983 - RNA, 82 nt, Homo sapiens
cccggcccgagcgcaccggagggacggcacagggaggccagccggagaagcgagcagcgggaacacaagaaacgaagggaaa

SEQ ID NO: 85984 - RNA, 58 nt, Homo sapiens
cccacagccagcggaagggccggcagggggagcaggaaagagagaagcggcccgccgg

SEQ ID NO: 85985 - RNA, 73 nt, Homo sapiens
agcagaaggaaaccagccccagaaacggccagaacggagaaacaggggcggagaacggaaaagcaccaggaag

SEQ ID NO: 85986 - RNA, 56 nt, Homo sapiens
ccagcagccaccaggagcccgagagagaaggggcaaagcgaccagagcgaaaagga

SEQ ID NO: 85987 - RNA, 72 nt, Homo sapiens
gaagagaccaaaacaaaaaggagccagcagcgcggggggaacggcaggagaacagcaccccccccaccacca

SEQ ID NO: 85988 - RNA, 73 nt, Homo sapiens
agagcgaagcgcagaagcccgaagaaaacagcgggaagagacagccaaggcaaaagcagaccggaaaacccac

SEQ ID NO: 85989 - RNA, 79 nt, Homo sapiens
gcgcggacccggccgggagaagcagcagcgcaagaacggcgcacgaccccagagccgcccaacagggaaggagacccac

SEQ ID NO: 85990 - RNA, 81 nt, Homo sapiens
cagccgcagccgggcggcagggccccgagccggcccgggcgaggacgcggcccagagaccccccacgggaacggaagcaac

SEQ ID NO: 85991 - RNA, 78 nt, Homo sapiens
cgcgacccggagacagcccaaaacccggaagagcgccccaggagaaacaagaggcaggggaagcacaaaagcgcaccc

SEQ ID NO: 85992 - RNA, 80 nt, Homo sapiens
cggcccggggaagcaccaaacgcgccacaacgccgacgcaccacacgacggcgcagggcagcaaacccagccccgaacgc

SEQ ID NO: 85993 - RNA, 39 nt, Homo sapiens
gcaaccaggaaagaagaggaggaaccaaccagaggcggg

SEQ ID NO: 85994 - RNA, 72 nt, Homo sapiens
cgaggacagcaccaaacaacaccaaaggaagaaagggaacacgagcaacaaacaacagagaccacgccagga

SEQ ID NO: 85995 - RNA, 73 nt, Homo sapiens
aaggggagccaaaagcagcccgccacaacaaacagcccagccgggcaacccagagagccaagaccacaggcgg

SEQ ID NO: 85996 - RNA, 57 nt, Homo sapiens
ccccacgagcccgcaagggcagacagcaaaggaaacagaagccgcggcagccaggag

SEQ ID NO: 85997 - RNA, 67 nt, Homo sapiens
cgggagagggaggacaaggcgcggcggcaagcaggcaaacacccgcccaaggggacggggccagaag

SEQ ID NO: 85998 - RNA, 58 nt, Homo sapiens
gcaggaggacgacgcaggcccagggagggagggaacacaccagggacggccagaaacc

SEQ ID NO: 85999 - RNA, 68 nt, Homo sapiens
cccacacaggcgaggccaggcaaaggaaccacccaggaaacagcgcaagaccaccggaagccaagaag

SEQ ID NO: 86000 - RNA, 77 nt, Homo sapiens
cggccgaaggcgaacgccgcggccaaggagccgccaaagccagacgcgcagaaccggccgaaaagcacaaacagcaa

SEQ ID NO: 86001 - RNA, 78 nt, Homo sapiens
cgcgcacgggcaaggcgacaggcaccggcacagacagaagcgcggccccgccagcccgagacccaccggacagcccgc

SEQ ID NO: 86002 - RNA, 51 nt, Homo sapiens
cagacaggcgaagcagagacggacccaaggcagggcagcaggacaaacaaa

SEQ ID NO: 86003 - RNA, 33 nt, Homo sapiens
gagcgggccacaaagcacgagaacccaaaaaag

SEQ ID NO: 86004 - RNA, 65 nt, Homo sapiens
ggaacagcccaagaggaacaaagacggagagcccagagacacccagaacgcaaagcagagcaaac

SEQ ID NO: 86005 - RNA, 62 nt, Homo sapiens
cgccacaccaggcaacagaacaccccagaggagccaaaaggaggccggagagacagcccagg

SEQ ID NO: 86006 - RNA, 84 nt, Homo sapiens
gaaccgcagccagagaacaagaaggaggccagcgagcgccgacacccaacaagaccagcccccagcagagagcggccccacaac

SEQ ID NO: 86007 - RNA, 76 nt, Homo sapiens
gcccgccacgccccaaagaaccaaaagaaacccccaaaaccggaagaaagagaaggaacagaggacacgcacacca

SEQ ID NO: 86008 - RNA, 52 nt, Homo sapiens
cagggcgcacacgggaggagcaggcagagggccaggacaggacaggaccgga

SEQ ID NO: 86009 - RNA, 61 nt, Homo sapiens
cagcgacaccccagcgagaggagcacacaagagggcaccggcgcacccgggacgaacgcca

SEQ ID NO: 86010 - RNA, 80 nt, Homo sapiens
gggcgagaagcgccgccgaacgacaggacgggggcggccggcccccagaaacgagcaagcagaaccgcaaaggcagaaga

SEQ ID NO: 86011 - RNA, 70 nt, Homo sapiens
ccgcgagaggagcgagaccggggggcgggagacacccgaaccaacagcaggcaaagagacaggacgaccc

SEQ ID NO: 86012 - RNA, 78 nt, Homo sapiens
cacacacagagacaccgaaaccgggagagggccagaaccagacccaaaagagcaaacaaccgacggagaaggaaaaaa

SEQ ID NO: 86013 - RNA, 77 nt, Homo sapiens
cggccgacacagcgagccccagagccccaagggaaaacggcgagagcgagacaaaacagggcaaggcgcccagaagc

SEQ ID NO: 86014 - RNA, 59 nt, Homo sapiens
cggcccggaaacaggaggacccccccaggcccaaaccaaagcaccacccgccaaaaaac

SEQ ID NO: 86015 - RNA, 73 nt, Homo sapiens
agagagaacaaaccagagaacagccgcaaagaccaggacagggggaaaagacccacaggaccgcgaacaagga

SEQ ID NO: 86016 - RNA, 104 nt, Homo sapiens
gccccgagccccgggaccgcggagcggagccggccgacgcgggcgcgagggcagaaccgggccacagcccccgaagacacccaggaccccaagaacaccaaaac

SEQ ID NO: 86017 - RNA, 79 nt, Homo sapiens
ggaaccacagcaagacgccgggacacccggaagccagaaaggggcgagaaccagcgacggagcacgcgacggaaggaca

SEQ ID NO: 86018 - RNA, 70 nt, Homo sapiens
gcccacccacaagcgcacaggaccgggagcacaaaggaacggaaaccaagccaaagaggcaagaaagccc

SEQ ID NO: 86019 - RNA, 74 nt, Homo sapiens
cccccccggcggagaggaacagaggagcggaaacgcaggaggagagagacggacccacgccaaaagaagggacc

SEQ ID NO: 86020 - RNA, 61 nt, Homo sapiens
caggcacacaagggaggaggcaaagccaggaccgaaaagacgcggccccaaaggaaacacc

SEQ ID NO: 86021 - RNA, 109 nt, Homo sapiens
gcaacaaaggagcacgacggcaggaaggaggagacgaagaaaggagggaccaagaaaggcccagggaccaaagcccggacaaggcccgagcaccaggaccgcagaaggc

SEQ ID NO: 86022 - RNA, 93 nt, Homo sapiens
cggaggccccagggaagcgcagaaagcaggcgaacccgcggcgcaaaacgaccgcgaccgcacaagcagccgccagcggaaccaagcggcgcg

SEQ ID NO: 86023 - RNA, 78 nt, Homo sapiens
agaaaagcggaagaaagacgcacacggaaaaccagaaggcaccgacaggaaaggaaaaggagaaccaggcacccgggg

SEQ ID NO: 86024 - RNA, 79 nt, Homo sapiens
ccgcgagaggcgcccagcgaccagaaggaaacaggaacacgaaagaggaaaaacgcacaagaaaccgaagccaaggagg

SEQ ID NO: 86025 - RNA, 50 nt, Homo sapiens
cgggggccaaggaggaagggcccagacaggaaaagaaggaggccagcggg

SEQ ID NO: 86026 - RNA, 73 nt, Homo sapiens
cggccccagcccgccaggaccgaggacgacagcccaggaagcccagggcgaggacgccacggcgcgcggaaca

SEQ ID NO: 86027 - RNA, 80 nt, Homo sapiens
gaaaaagaaaagaaaggcaaagaaaagaaggaaaggaaaaaagggccagggcccgggacgagcggcccagcgacgagcga

SEQ ID NO: 86028 - RNA, 36 nt, Homo sapiens
aaaacccaagcggagccagagccccagcacaagaga

SEQ ID NO: 86029 - RNA, 75 nt, Homo sapiens
ccagccccgcccgcccccagcccggcacgcagaaaagaagagcgaaacgggaccacacggcgcacacagcgacag

SEQ ID NO: 86030 - RNA, 54 nt, Homo sapiens
acagagaggagaacgaagcccacaagaagggcggcgaaggcgcgccacggagcc

SEQ ID NO: 86031 - RNA, 74 nt, Homo sapiens
ggagcccgaccgggagaggacaagaccacgagccaggcagaggggcgggcaaaggagaggcacaggaagcagag

SEQ ID NO: 86032 - RNA, 76 nt, Homo sapiens
ccccgggcccccaggcaggcagccgaaaccacaagccgccgggaaccaaaggaagaaggcggcgcacggagaggcc

SEQ ID NO: 86033 - RNA, 79 nt, Homo sapiens
ggcgacccccaccgagacgaagcgggcggcgaaggcccacagacaagccgcccccccacccgacggagcggcgagcgac

SEQ ID NO: 86034 - RNA, 72 nt, Homo sapiens
accacacccagaagacgacggcacagcgcacaagaaacccaagcgcgaggccaaaacaaaggggagggagga

SEQ ID NO: 86035 - RNA, 94 nt, Homo sapiens
cggcgagcgggggcggagaccaggagaccccacggagcgggcgacgagcgacccgggagacacgacggccagccgagaggaagaggcaagcgag

SEQ ID NO: 86036 - RNA, 78 nt, Homo sapiens
gggcgacgggaggcgcgccggccgccgccgaccggcccagcccagcagagcgcaggcacgacgggcccccgagagaac

SEQ ID NO: 86037 - RNA, 92 nt, Homo sapiens
caagcaaccacacagaaagagcaaaagacggacggaaccacaaacaaggcgcagagcccaaggaaagacaggcagaaagaaacagacccgga

SEQ ID NO: 86038 - RNA, 82 nt, Homo sapiens
cgccgggcccggacccgcgcagcgagcccgagcggcagcgccggagccggggacaaccagcaagccagggcgcagggagcgg

SEQ ID NO: 86039 - RNA, 58 nt, Homo sapiens
gacccggaacgagaagccaacagcaacagaggaaaacaaaaagcagcaaaaaagggag

SEQ ID NO: 86040 - RNA, 65 nt, Homo sapiens
gcccccccaggacacaggagcaagacgaaggggaggaccaggcggcgagaagagaagagagaagg

SEQ ID NO: 86041 - RNA, 67 nt, Homo sapiens
gaggcggggcgcccggcgccaggggagccgccacagggggagccccccagacccgaaaggagacaag

SEQ ID NO: 86042 - RNA, 81 nt, Homo sapiens
gagggggaagaggagcgcgccccggggaaagaggacccccaggagaggaggacagcaggggggaccgcccgggaggcgacc

SEQ ID NO: 86043 - RNA, 81 nt, Homo sapiens
gggaagagcgagagaagcggcggaggacgagcccgggagcgacccgcgcaaacaaacagcacgacaccagcagccccgagg

SEQ ID NO: 86044 - RNA, 76 nt, Homo sapiens
cacagaggcaaaaaagaaaacgaaccagaggagaagcacgaggcccagcaaagcgagacggagggggaaccgggaa

SEQ ID NO: 86045 - RNA, 66 nt, Homo sapiens
ggaaccgaaaaagacccggaagacagccacccgaacagaccaaggagagccaagaaacagccaccg

SEQ ID NO: 86046 - RNA, 77 nt, Homo sapiens
cagaacagaaaaaaagaagaaaaacaaaaggacacacaaaggaagaagcacacgggaaaggcggggaaaaaaacaaa

SEQ ID NO: 86047 - RNA, 67 nt, Homo sapiens
cgcagaccgcagaaggccggagacaccagcaggggaggagccccagccccgcgacgaggaggaagcg

SEQ ID NO: 86048 - RNA, 76 nt, Homo sapiens
gagccagcagggacaaggaccagaagaaacgcaccggaaaggccaccaggcagggaaaacagggaagcaggcaaga

SEQ ID NO: 86049 - RNA, 79 nt, Homo sapiens
gggcgcggaggggccggcccccggagcgacagaaacaagggaccaggacggggagacagcccccagcggccacagaaac

SEQ ID NO: 86050 - RNA, 84 nt, Homo sapiens
ggcagaagaggcgggagagcccgccgacagcgcgaggcgaaagacaccagcacccgaggccagcaacaacaccgccagcaagca

SEQ ID NO: 86051 - RNA, 68 nt, Homo sapiens
gcacccgacccacaggccagagagcccggagggaccaccagagagcccaagggacccaaacccagacc

SEQ ID NO: 86052 - RNA, 57 nt, Homo sapiens
ccccgccccaccgccgaccaagaagaaacgccgagcgcgggaaggaggcccggagcc

SEQ ID NO: 86053 - RNA, 65 nt, Homo sapiens
aggagccgcacacaaggagacgcagcggcgcccaaaaagaaggaccggagaaaaggaaagggcaa

SEQ ID NO: 86054 - RNA, 58 nt, Homo sapiens
caagcggcaggacgcacgcagcagccgcgaccgcgcagcggggaaaagagacgcaaac

SEQ ID NO: 86055 - RNA, 58 nt, Homo sapiens
caggcaccggccggcccgcgggggaagcccaccggccacggcagaaggaaacaacgag

SEQ ID NO: 86056 - RNA, 41 nt, Homo sapiens
ggacaaccccccaagaagccgggcggaggcaaggcgcgacc

SEQ ID NO: 86057 - RNA, 40 nt, Homo sapiens
gccccaagcagcgggaacagcccagcaagcgcagaagaac

SEQ ID NO: 86058 - RNA, 85 nt, Homo sapiens
gcaccgacagcgccgccaccgagccgggcccaccccccaccaaggaagagcgacacgcgcgacggaggccgcagggccagaacaa

SEQ ID NO: 86059 - RNA, 36 nt, Homo sapiens
cggacggacggcgacgggccgagaagcagcaaaggc

SEQ ID NO: 86060 - RNA, 74 nt, Homo sapiens
aaagagaagaccaagaacaagggacgcgcggccgggcgcggcagaacaccaggggaagggccgggccaagaaga

SEQ ID NO: 86061 - RNA, 78 nt, Homo sapiens
cacggcgcagcggagccgcgccaggccggcgccaccaaaggaacaaggcacaaggagaggggaccaccaggaagaggg

SEQ ID NO: 86062 - RNA, 76 nt, Homo sapiens
gcagcccgggacaggagcccaagcaccccaccgcagcacgccgggaggcggaagcaaaagggacagcaaacaaacg

SEQ ID NO: 86063 - RNA, 75 nt, Homo sapiens
gcagcgcagaaggaaccggcaaagcgcaggaacgggaacgcaggagcgaccagcagacccggccaacgagcagca

SEQ ID NO: 86064 - RNA, 57 nt, Homo sapiens
gcgccggaagcacggcccgggagccggccaccaggcgcccagccacccccgacgcgc

SEQ ID NO: 86065 - RNA, 57 nt, Homo sapiens
ccaacaccggacaccgagaggaaccacaagcagagcaagagaggcagagaagagaga

SEQ ID NO: 86066 - RNA, 87 nt, Homo sapiens
gagggaccgcaggaacaccgccccaacacaccgggcgacggacgaccaggagggagcgggacgaaagcaacgcagaagcaacaggac

SEQ ID NO: 86067 - RNA, 73 nt, Homo sapiens
gcaggacagacacacacgaggcaccacagcgccgccaccagccccagaccagaaagcagcagcccccagcagg

SEQ ID NO: 86068 - RNA, 73 nt, Homo sapiens
aggagaaccagggagaggaggagaaacccacaaaccgccccaggaaagccgggacagggcgggggcgacgggg

SEQ ID NO: 86069 - RNA, 116 nt, Homo sapiens
cacggccagaggagggccaaccaaggcgagccggccccaaaacgagagagccccaggagcacaccgcggcgcagagaagaccaggaaaaaggaccgagccagcgccgcaacaaaaa

SEQ ID NO: 86070 - RNA, 80 nt, Homo sapiens
cacgaagaggagcgcaggagcagccgcagagaccgaagaccaaaaagcgccccgagaaacgaaagaggagcaccaaccgc

SEQ ID NO: 86071 - RNA, 75 nt, Homo sapiens
cggacacgaaagccgggaaagcgcggagccagcgcccggcaaggagcgagcgggagacaccggccggaaaggggg

SEQ ID NO: 86072 - RNA, 71 nt, Homo sapiens
aaaaggaacagcggcgccccgcgaagccacaggaccgaagcccgcgaggccacggaaccgcccagccccaa

SEQ ID NO: 86073 - RNA, 82 nt, Homo sapiens
cggagcagcagcgaggaagacaagccgcccggaagcggacaccccggcacagcccacccagaagccggcaccggcacaccac

SEQ ID NO: 86074 - RNA, 72 nt, Homo sapiens
gagcaccgggacggaaagggggcaggaaagcccagaagaacaggcggcgggcagagcgaggcagaaagagga

SEQ ID NO: 86075 - RNA, 42 nt, Homo sapiens
ggccggaggacaccaacagaaacgccgaagggaccaggcaga

SEQ ID NO: 86076 - RNA, 65 nt, Homo sapiens
acagggagaagggaaacccacacccagaccccaggcggacaacgcaccagggcagggcagaagaa

SEQ ID NO: 86077 - RNA, 85 nt, Homo sapiens
ggacggcaaacggagccaggcacaagaaaagacaaccccagagaaagagacccacggccagaagccaagaccagagaagaacccg

SEQ ID NO: 86078 - RNA, 59 nt, Homo sapiens
ggccgggggcgagccggagcgaccccggcaggaccagaaagggcgggaaccagcgagca

SEQ ID NO: 86079 - RNA, 74 nt, Homo sapiens
caacagggcaaaggccccgacagaggacgcgggagaaggagaagaagaaaaagaacaccaaacacaacaagaca

SEQ ID NO: 86080 - RNA, 80 nt, Homo sapiens
cccaccgccgcccccgcgccaaggggccaagggagagcggggccccccccaaggcaccccccggcggaacgaagacacga

SEQ ID NO: 86081 - RNA, 74 nt, Homo sapiens
gagacagagaaagcagagcagaagagaaggaagagccaggaggcgcgacccccgcgaagacccccacgcacgga

SEQ ID NO: 86082 - RNA, 86 nt, Homo sapiens
cgcgcggcgcagcgacccggcgaagggagccgaccgggcccgggcggaggaaaaccccacggaaaagaggaaagcacgcaaaaaga

SEQ ID NO: 86083 - RNA, 61 nt, Homo sapiens
caaagcacgccagacggagaccgggccagcgccacggcacggggggggaggaggccggcgg

SEQ ID NO: 86084 - RNA, 87 nt, Homo sapiens
gaggaaagggcacagaggggcccagaaaacaagccagcagcaacaggccaacgcccggccagcgccacgcgagcgcgcaagggcggc

SEQ ID NO: 86085 - RNA, 76 nt, Homo sapiens
aaaaccaaaaacaccgcgcaagggaacacaacgggccgggaacaacaggagagaaaggcccggacacgacgaacac

SEQ ID NO: 86086 - RNA, 65 nt, Homo sapiens
cggccacagaagcgcagacccagaaccagggacgagacgagccacggccaggcggcccaacccga

SEQ ID NO: 86087 - RNA, 81 nt, Homo sapiens
cccaaaagaaacgggcacacagagagaaaggacagagcgggagccaccagcgccaaagggaagccaggagcccgggggcac

SEQ ID NO: 86088 - RNA, 120 nt, Homo sapiens
caccgaggccagaacccaaggagggcaaaggacagagccaacgcgaagcggccggagggagcccccgagcgcccgcgacgcagcacggacccacaacgaggccagcagccagcgcccgca

SEQ ID NO: 86089 - RNA, 65 nt, Homo sapiens
ccaagcaaaagagacaaggaggccaaggaccgcacaaccaggggaagaacacggaaaccggacag

SEQ ID NO: 86090 - RNA, 69 nt, Homo sapiens
cagcgccggaccccccacccacgcgaacgagagggacacggagcagaaaaagcggggaaggggggcaaa

SEQ ID NO: 86091 - RNA, 82 nt, Homo sapiens
aggcgcccgccaccacacccagaggccggaaaaccccagagaggagcacgcccggagcccacgagcccacccccaccccagg

SEQ ID NO: 86092 - RNA, 83 nt, Homo sapiens
ggaggaacggcccggaaacaggaggacgcgcggggaggcccagcccgccgcagggccaccccgcggcccaccgccgccgcccc

SEQ ID NO: 86093 - RNA, 67 nt, Homo sapiens
aggcgcggccaacaagacaaggagggcgcacggccaacggcccgaccccggagacccacacgcccca

SEQ ID NO: 86094 - RNA, 54 nt, Homo sapiens
agacggccaccggcgggaggaacaaaaggccgacgcaggagaggaaccaagagg

SEQ ID NO: 86095 - RNA, 71 nt, Homo sapiens
gcacacaaacggaaccgcacaaagcagacaacaaaaagcagccaccagcaggccaaagcggcgacaagacc

SEQ ID NO: 86096 - RNA, 85 nt, Homo sapiens
ggcgggggcagcgaccgcgggcggcgacgagaggaggacgcccacagccacccaaagcaacgcccccgacccacccggggaggcc

SEQ ID NO: 86097 - RNA, 46 nt, Homo sapiens
gacagagcaccagcaccagcagaggcagcgccccaaccccagaacc

SEQ ID NO: 86098 - RNA, 33 nt, Homo sapiens
cacggaaaccgcccgggacgccgccagccaccg

SEQ ID NO: 86099 - RNA, 57 nt, Homo sapiens
aaaggccccacagggaagaagagaagagcccagcgagaaaggccaaaaagagagaaa

SEQ ID NO: 86100 - RNA, 78 nt, Homo sapiens
aaaaagcaagcaagagcgcgacacccaaggccgcacaagcagcaggagacccagaaacagagcagccacaagaaggac

SEQ ID NO: 86101 - RNA, 70 nt, Homo sapiens
acgcccacccccaccgcagaagcgggcaacaggggcacacacacgagaaagagccacgcaagcagagagg

SEQ ID NO: 86102 - RNA, 59 nt, Homo sapiens
gagaaagggccccaagaagaagacggcccagcagagcacccaaccagcgggaacacagc

SEQ ID NO: 86103 - RNA, 48 nt, Homo sapiens
ccacccgggcacagcaggcacggagaaggaagaggcccagcagaaggg

SEQ ID NO: 86104 - RNA, 74 nt, Homo sapiens
cccgggcaccggagaggccaacgagacgcggggcaacggaccacagcccaggcggccaacaccggcggagaccg

SEQ ID NO: 86105 - RNA, 91 nt, Homo sapiens
agcccaccggagacacaggaacaaacgagcacgcaaggcagacacaaggaacagccagccaggagaaaaacgaacccaacagaccacccca

SEQ ID NO: 86106 - RNA, 56 nt, Homo sapiens
cgaccagaacgcagcaacaaagagaccccaacaggcccgaccaacaaagaaaccca

SEQ ID NO: 86107 - RNA, 79 nt, Homo sapiens
accgacgaggagccacagcccccaggaaggccagagaaggaccaaagagagcggaagagcccggccccagagagagacg

SEQ ID NO: 86108 - RNA, 80 nt, Homo sapiens
ggacagcccagacgcccgcacaaggagcggagccacgcgggccaagaaggagaagcgcgggaggccacggaggccaagcg

SEQ ID NO: 86109 - RNA, 86 nt, Homo sapiens
acaggagaaggcggcagaaggaaacgccagcccacgagagccaagacagagacgcggccaaaaggccacagagcagcagagaagag

SEQ ID NO: 86110 - RNA, 73 nt, Homo sapiens
gcgacaaggggcccgaacagagggggacgccagaggggaagccgcacgagggagagacggaccaaaggcgcag

SEQ ID NO: 86111 - RNA, 83 nt, Homo sapiens
ccaggcgcgcccagccccgcagccagggcgaacccccgcagggaagaaaacgccagagaagcagagcagcccggagcgagggg

SEQ ID NO: 86112 - RNA, 84 nt, Homo sapiens
cggggaccggacacacccccccaggcaagagcgggagcggggcgccagcccccgggagagacgcaggcggggcggccgaccagg

SEQ ID NO: 86113 - RNA, 68 nt, Homo sapiens
ccggccagcgccaggcaaaacagcggaagagggaaaagggacaccggccacaaaaaacacagaaaagc

SEQ ID NO: 86114 - RNA, 66 nt, Homo sapiens
gcaaacagcgaacccgaaaaagcccaaacgaggcgaggccgggacagaaacaccacgcaagggggg

SEQ ID NO: 86115 - RNA, 75 nt, Homo sapiens
aaagacagagaaggagggggaacgccaggaagagaaaaagagccacagagaggaaacccaagaagaaacagacaa

SEQ ID NO: 86116 - RNA, 85 nt, Homo sapiens
gagccaacccaaccacgacggggccgacgagacccaggcccgggcgaaccgccgcgccaggccagcggggggggaaagcccaacc

SEQ ID NO: 86117 - RNA, 89 nt, Homo sapiens
cggacgggaaggcgggagacgagaagccgaaaagcgcagcgagcggagccgccggaggcacagagaggagagcaccgaccggacacccg

SEQ ID NO: 86118 - RNA, 53 nt, Homo sapiens
ccgagcacccgccccgggcaccaacgacagcagaggcacacaaacggaaccgc

SEQ ID NO: 86119 - RNA, 65 nt, Homo sapiens
gcccccggcaggggaaaaccaaggggcaaaccaggccggggggggcacagagccccggaagacag

SEQ ID NO: 86120 - RNA, 72 nt, Homo sapiens
cgcgcaggggccaaacggcgacaggcaagaagagccacaccaaagccccagagcgaaggcagcgggggcaca

SEQ ID NO: 86121 - RNA, 77 nt, Homo sapiens
agggcccaccccaagcccagaagccaggcgagccaaaccaagccaaggcaagcaagaagaaacaaaacggcgaaccc

SEQ ID NO: 86122 - RNA, 57 nt, Homo sapiens
ggagaacaaaccgcaaacgagcccccgacggccaaccaggcacggagagacagccac

SEQ ID NO: 86123 - RNA, 75 nt, Homo sapiens
cgggaagaagcgggcgcgggcagaacgaaggcacagcgacccaggaaaaaaaccaccagagaagaggggccccac

SEQ ID NO: 86124 - RNA, 70 nt, Homo sapiens
gggcaaaagaacaagacggacacagaaacagaacagacccggaaccccagaaaccaaaaaacagaaccac

SEQ ID NO: 86125 - RNA, 38 nt, Homo sapiens
gccggccccgacaggcggcagccagcaaccaggaggga

SEQ ID NO: 86126 - RNA, 61 nt, Homo sapiens
agccccgggcacccccaggggaccaacccaggccacagcagaagggggaacaaacaaaagc

SEQ ID NO: 86127 - RNA, 74 nt, Homo sapiens
acaccaggcgcacggaaacggagcagcaaggaaaaggaaaccgcccgcccccaggccaggcagcgcgaccaaac

SEQ ID NO: 86128 - RNA, 72 nt, Homo sapiens
cagcggccgcgacgcaggcgcacggagacccgccggcacgagcaggcgacccaaaagagcgaaggaaaacca

SEQ ID NO: 86129 - RNA, 74 nt, Homo sapiens
agggcgccaaagcgagagagggaagcgcccggccagccgggccccaggaccccacaaggcagacaaagcggcaa

SEQ ID NO: 86130 - RNA, 62 nt, Homo sapiens
ccgcgggcaccgaccgcgcccggaggaaggagcaccaccacaaggaaagaccacagcaagac

SEQ ID NO: 86131 - RNA, 64 nt, Homo sapiens
gaagagccgcggaccagaaaaccaccggcaccacccacaaaggggccccaggacgcggagaaag

SEQ ID NO: 86132 - RNA, 95 nt, Homo sapiens
ccagagaaaaacggcagagacagcgccagaaccacggcaaaccccagcagagaccagagaagccccccaccagccccaacagcaacaacaggacc

SEQ ID NO: 86133 - RNA, 86 nt, Homo sapiens
ccacgcaggcacgacaccaccgggagagcaccgacaaaccgagaccaagaacccgcggaaagcagaacggcgccgggggaacagag

SEQ ID NO: 86134 - RNA, 71 nt, Homo sapiens
acgaacaacgacgaagcacaacaaggggacgaagccacacgacagggacaagcgcacagcggagaaagcag

SEQ ID NO: 86135 - RNA, 85 nt, Homo sapiens
cgaacggcaagagaaccccgcggggaaggggggcagaggccggaccccagcacacagaagccgagacgaagaagagccgaaacgc

SEQ ID NO: 86136 - RNA, 73 nt, Homo sapiens
aaagaacaaaccgcacgacacaggaaaggacaaaaccagaagcagggaaaaggcccacccaagacccgaagaa

SEQ ID NO: 86137 - RNA, 60 nt, Homo sapiens
gacaccacaacaaagaagaccacacacgggaaacacaaaacggcagcgcaagaccccgca

SEQ ID NO: 86138 - RNA, 84 nt, Homo sapiens
agacggcaaccagggcaaccggggcaggacaggaagacagacagagaacggacagggcgagggggggggcgagacaccgccgcg

SEQ ID NO: 86139 - RNA, 71 nt, Homo sapiens
cagacagaaaagcgcagagccaaaaggagaagaaacggacagagaacgcagcggaggaaagcaggaagcag

SEQ ID NO: 86140 - RNA, 41 nt, Homo sapiens
gggaaaccgccccaggaggaaccaggcgccaggacgccagg

SEQ ID NO: 86141 - RNA, 86 nt, Homo sapiens
agacaacaagcagccaagcccagacaagccccagggaagccacagcaccccagcacccaggccaagacaacaaaaaagggagaacc

SEQ ID NO: 86142 - RNA, 76 nt, Homo sapiens
cgccgccggaggagacggcaacaggcagagcccgcccagaacgaggacgcacccgacaccagagccagggaacccg

SEQ ID NO: 86143 - RNA, 71 nt, Homo sapiens
cgggccacggggggcggccgcacaacgcaaacggcgaagaggcccggggccaggacgaacagcccggagag

SEQ ID NO: 86144 - RNA, 78 nt, Homo sapiens
agcaagaggcagacagaccgagacgggcaaccaacaagaaacagacacaccgcacagagggaaagggccccaagagcc

SEQ ID NO: 86145 - RNA, 54 nt, Homo sapiens
gacaaccgcaccaacaaagacagccacccggaggagaaggaggcaccagcccca

SEQ ID NO: 86146 - RNA, 72 nt, Homo sapiens
cagaccgagccgccaccagcccccacagccccccagggagacgaggccagccggcaagaggaggggcccccg

SEQ ID NO: 86147 - RNA, 69 nt, Homo sapiens
ccgagcagcccggggaccagcacgcaggggggaaccgaagagcaaggaaaagaaaagggggaaggaaac

SEQ ID NO: 86148 - RNA, 75 nt, Homo sapiens
accggaagcagagaaaaaagccaggcccaccagcagaaagggcccacacccaaacagagcgacgagacgcagcag

SEQ ID NO: 86149 - RNA, 70 nt, Homo sapiens
ggacacagaaaagcgaaagccagaagggaaccacccgccccgaccaggagaggacagacagccacacacc

SEQ ID NO: 86150 - RNA, 80 nt, Homo sapiens
agagacgcgagcccgccgccgccgccaccacccacccggacacagaagacgaccccgacgcaggccaggagccgcggaca

SEQ ID NO: 86151 - RNA, 80 nt, Homo sapiens
ggcccggccgaagcaagaacaaggaaacaaagagcgcccggaaagaggcagaggaaacgagcccccgcagaagaagagga

SEQ ID NO: 86152 - RNA, 98 nt, Homo sapiens
gggccgagagccgcccgggccagcggccgcgcacccccggccggaggcaccagcgcaaacgaacacgcgcagcgcagaggcccggcagccccaaggaa

SEQ ID NO: 86153 - RNA, 103 nt, Homo sapiens
caggagacgagaggacgggaccaggcgaagcggccgagcaggcgagcgaacgacgggcggagaacggaaaagcaccaggaagcagagaggaccgcagaaggga

SEQ ID NO: 86154 - RNA, 82 nt, Homo sapiens
caggccgggcagagacgccgcgcgcggccagggggcacgaagcggccgcacaagaacaaccaagcggagggcagaagaagac

SEQ ID NO: 86155 - RNA, 99 nt, Homo sapiens
aacccaagcagaaggcaaacaggaagcacaaagggaagaggggcagcccagcgcccaagccgccagaagcccgggagccagcggaccagaggaaagccc

SEQ ID NO: 86156 - RNA, 51 nt, Homo sapiens
cccacgcgggggccacgcacaaagaaaacaccagacagacccgaacccgcc

SEQ ID NO: 86157 - RNA, 47 nt, Homo sapiens
ccaggagaacaacaagagacagagaccaccaaaagagggaaccaaca

SEQ ID NO: 86158 - RNA, 77 nt, Homo sapiens
acgcccagaaaaacacccgcccagcgcccaccaagacaggcagaaggcccacgcaaaaagggagagaacagcacaca

SEQ ID NO: 86159 - RNA, 80 nt, Homo sapiens
ggagcagagggcccagaccgcaaccacaggcaccccaagggacacggcccagggagagcgaagagagaggacccgcccac

SEQ ID NO: 86160 - RNA, 83 nt, Homo sapiens
aagcaggagcacaggaagaaggagagacgaccacgcaacagaaaaagagcgcacccaagggaagagcgaaaacagaaaaagga

SEQ ID NO: 86161 - RNA, 66 nt, Homo sapiens
ggaagggagaagaaaaaagaaagccaagcgggagagaacccgcggcgggcaacggcgcccccaccc

SEQ ID NO: 86162 - RNA, 54 nt, Homo sapiens
cacgcccggaagaccagccaacaggggagaaaaacaggaaaagaaagacgcaca

SEQ ID NO: 86163 - RNA, 85 nt, Homo sapiens
gaacggcccggaaacaggaggacgacccaaggccagccagccccaggcaccagcggacaggacagggaggacgaaggcccccccc

SEQ ID NO: 86164 - RNA, 76 nt, Homo sapiens
ccccacccgccagccagggcacagagaaggaacagaaagagcacgaggagcagcacggacgagagaccgcacaccg

SEQ ID NO: 86165 - RNA, 73 nt, Homo sapiens
ggaaaccaagcacccaaaaggccacccaaacaacgagccgcccagcaaaacccaacgggaacccgccggaaaa

SEQ ID NO: 86166 - RNA, 71 nt, Homo sapiens
gagggagaacgcccgaaaggggaaccaccagaaggagcgccccagcacgcgacagggacgggggcgcagcc

SEQ ID NO: 86167 - RNA, 80 nt, Homo sapiens
ggcgagagcccacagcagaggacgcgccccaccgccggagagaccagcgcaaagacaacccaaaagaccacacacagccg

SEQ ID NO: 86168 - RNA, 74 nt, Homo sapiens
ggggcgggccgcgcgaagcccgagaggagccacaaggagacgccgccgcgcccccgcgacaaagacccggggcc

SEQ ID NO: 86169 - RNA, 76 nt, Homo sapiens
caccggagcaacgaagacgcaagaccgcccagaagccgaaaagcaaggcccccacaagcaacccgccacacgccac

SEQ ID NO: 86170 - RNA, 76 nt, Homo sapiens
gaggagacggagacacgaaggggaggggggagaccagagacgaccagcaacagggacggagagacaagggaaccaa

SEQ ID NO: 86171 - RNA, 73 nt, Homo sapiens
gcagcggccggacagcgccacggcgggccgcgggaggacaccacccacagaggcagagcaacagggacacaag

SEQ ID NO: 86172 - RNA, 78 nt, Homo sapiens
cgcagagggagcgccaggccggagggcgccccggaaaccaggggcgcgcgggggcacagcccaggcgcagcagcggac

SEQ ID NO: 86173 - RNA, 67 nt, Homo sapiens
ccccccagcgacgagggggacagggaagaagccaaaacagaaggggcaagagaacacggcgaaaccg

SEQ ID NO: 86174 - RNA, 73 nt, Homo sapiens
ccacccccaccacggccggaggaagaggagaaaggcccaaaggggcgaaaagccaaaaagaaaaaggagaagg

SEQ ID NO: 86175 - RNA, 70 nt, Homo sapiens
ggaggagaagcccagggagcgcaccccaggaaaccaagacaggggccaggccaggggcaggggaagcacc

SEQ ID NO: 86176 - RNA, 51 nt, Homo sapiens
gcacaaagaagaaaacggccggacacaagagggcaagaaaggcgcgacggg

SEQ ID NO: 86177 - RNA, 53 nt, Homo sapiens
ggcgcggccccagcccccgggggggcccgagggccagaacgcggagacggaca

SEQ ID NO: 86178 - RNA, 87 nt, Homo sapiens
cagaagaagcccagagagcaccccagcgaggcccacagaaaagccacaacccaggccggccccgggcccaccgcccccccagcccac

SEQ ID NO: 86179 - RNA, 73 nt, Homo sapiens
ccaccgggaaaaggcacgaagggaggcacaaagaaaccgaagagggcagaaaacaccccggaaagaaaagcgc

SEQ ID NO: 86180 - RNA, 65 nt, Homo sapiens
aaagcgcaacagaaacagagagagcgagggcgaacgaggagaaaagggaaccacagacaaagaaa

SEQ ID NO: 86181 - RNA, 81 nt, Homo sapiens
acgcgaaggaacggcaaagacgaaggccccaaaaccaaggaaaagaacagaagcacagcgagcacaacggcaccaagagaa

SEQ ID NO: 86182 - RNA, 72 nt, Homo sapiens
gcgcagacagcagacacgaccgcaggaacagggagcaacacaccccacacgagacccaagaaagacaagaag

SEQ ID NO: 86183 - RNA, 73 nt, Homo sapiens
cgagagcgggagccacacgcccagcagccaccaacacccaaagggcggagcccacgccccaggacacgcagag

SEQ ID NO: 86184 - RNA, 64 nt, Homo sapiens
agacaccaaaaagcaaacggaccagaccgaccaccaaaacggagcggaggcagacacacacggg

SEQ ID NO: 86185 - RNA, 82 nt, Homo sapiens
agcagaccgccagcgagcaacggcagagggacagagcccggccaggacaaaaaggggaggaacgcaagcggggagaacagaa

SEQ ID NO: 86186 - RNA, 85 nt, Homo sapiens
cccgcgccgccgaccccccggcgccgcgccggcggcggacccaaagacaggaccacgcaccagcagagaaggaaagcaaaccgaa

SEQ ID NO: 86187 - RNA, 44 nt, Homo sapiens
caacaacagaagaagaacaggacccagcaggacgaccagccaaa

SEQ ID NO: 86188 - RNA, 58 nt, Homo sapiens
gcggacgaacaggcgggaaggaagaggcaacaagaaccggcccgaagagcacgggaac

SEQ ID NO: 86189 - RNA, 82 nt, Homo sapiens
ggacagggcggagcagcgcagaggaaaggcggcagccaggaccagccagccgccgaccccgcagcagccagggcacccgcca

SEQ ID NO: 86190 - RNA, 56 nt, Homo sapiens
caaagggaccagaccagggagaaccaaggagaagcacggaccagcagcccaaaggc

SEQ ID NO: 86191 - RNA, 87 nt, Homo sapiens
gccgaagcagccgggagccggagcgggcgcggacgccgaggcaccgaggcaccagaggaggccggcgcggaagaggccggcggcggg

SEQ ID NO: 86192 - RNA, 55 nt, Homo sapiens
agggaggcgaggcccgcaccggaagcggcggagaaaccaccacaaacacgaggcc

SEQ ID NO: 86193 - RNA, 46 nt, Homo sapiens
aaaaaacaacaaccgcgaaaagaaacaggccggacacaaaaaggca

SEQ ID NO: 86194 - RNA, 82 nt, Homo sapiens
ggccggccagggggacgcgcgcaaggggccgcagggaggagagcacccccaaggggacgaaccgagacaccacaagcaggaa

SEQ ID NO: 86195 - RNA, 68 nt, Homo sapiens
caacccgaagccacagcccaacccccggcaccccagaagaacccagaccagagaacccaggacgcacc

SEQ ID NO: 86196 - RNA, 74 nt, Homo sapiens
aaggcccgaccgccggcgccacagccacagcccggagacaaggcacacgacccccacagaagacccaagaggcg

SEQ ID NO: 86197 - RNA, 83 nt, Homo sapiens
accgaaccaggaccaggccccaagcccgaggcccagaggaggaggaaacgcccccacgccaaacgggcaggaagacgacaagg

SEQ ID NO: 86198 - RNA, 67 nt, Homo sapiens
aggaaaccggccaacggacagggaacgaacaggacaacgcaaagcccgcaacaagcgacgaaaaaga

SEQ ID NO: 86199 - RNA, 74 nt, Homo sapiens
gaagaggaaggagcaaaacaacccagcagaggagaagacagcagccccagaaggaaccaaggcagccccaacca

SEQ ID NO: 86200 - RNA, 72 nt, Homo sapiens
cggcgaccaagcggcggaggcacgaaccaagaggacacaaagagagaggaaagaccgaaagagcagacagca

SEQ ID NO: 86201 - RNA, 76 nt, Homo sapiens
aagccggcccggggccgcggacgaggaccagcagaggccagcacgagaacccagggaccaggcagacgaccaagga

SEQ ID NO: 86202 - RNA, 111 nt, Homo sapiens
ccccccccccaccccgacgaccggaccgaggaggcagcgcggggcagcgcgagccgggaaggcgaccccgcacacacacccaccagccacggcagcccagcggggacccag

SEQ ID NO: 86203 - RNA, 86 nt, Homo sapiens
gggacaacacgcccgggagacgagaccgaaccggcaccgcacaccggaccaggaaacggaggcgggcccaccgcgaggagaacggc

SEQ ID NO: 86204 - RNA, 59 nt, Homo sapiens
caaggggggccggccagccggcaaaagaggggccgcaaggccaggcgcgcagaggcacc

SEQ ID NO: 86205 - RNA, 72 nt, Homo sapiens
ggagagcccgaacggggcaaaaaggcgagccagccggcacaggcgaagcagaaagcaaacggcggcgcccgc

SEQ ID NO: 86206 - RNA, 53 nt, Homo sapiens
ccaggcaccccacacagacacaagcaaaagagacccggcaccagaacaaacac

SEQ ID NO: 86207 - RNA, 67 nt, Homo sapiens
aagcaccaaagaaagaaaagaagaaggaagaacaccaagcaggaagaggccaacccaacagaagcgc

SEQ ID NO: 86208 - RNA, 70 nt, Homo sapiens
caccagcaggacaggaaaaaaagagggcaccaccaaaacaacaccaacggccaaggccgaaacaagccaa

SEQ ID NO: 86209 - RNA, 73 nt, Homo sapiens
aagggcagaacaaggagaagcggcagcggccaggggcacgagggagaggccgagaagaaacagggaacggagc

SEQ ID NO: 86210 - RNA, 80 nt, Homo sapiens
ccgggcccgaggaggcagccaagccaggccgccacgcggcgcaagaacggaagcacgggcggaggaaagcacaagcagag

SEQ ID NO: 86211 - RNA, 61 nt, Homo sapiens
ccgaacgcgccagcgcggggcaacaggccagaaaaacggaaccgggagaaaacaagcgaga

SEQ ID NO: 86212 - RNA, 125 nt, Homo sapiens
aagaagccaggcgaaagaacagaccgccgcagagggagaaagaacaaggccaaggaagcgcggcaagagcgagcggcgcccagaagaaccacagccgagaaggggaagagaaacagcggcgcccg

SEQ ID NO: 86213 - RNA, 81 nt, Homo sapiens
aagaaaggggaaccccggagaaaaggccaagaaggcagagaaggcaccggccaaagggggcgaccgggacaggacgacgac

SEQ ID NO: 86214 - RNA, 73 nt, Homo sapiens
gcccgccgccccggggacaagaaacagagcaaaaaccggaaagagaaaagaaagccagaaggaaggaagcaac

SEQ ID NO: 86215 - RNA, 70 nt, Homo sapiens
ccggggagacaaagaccagaggacaagacaaagggagcaagacaagccaaagaggaaaagcaaagcccag

SEQ ID NO: 86216 - RNA, 61 nt, Homo sapiens
cacacgcaggccccgcgccaggggaaaagaaaccgcaaccgcagccacaagcaaaaaccag

SEQ ID NO: 86217 - RNA, 71 nt, Homo sapiens
acaggagcgaacacagaaaacagaaggaagcagcagcagcagggcagaaagaaagcaggaccagggggagg

SEQ ID NO: 86218 - RNA, 56 nt, Homo sapiens
ggcggcagcagagcgagaacaccagaggccaaagaggaaacgcgaccaaacagggg

SEQ ID NO: 86219 - RNA, 77 nt, Homo sapiens
gaaaacccggccaaggacgagggggaccggaggagagaacaaccaagcggaaacccacccaagcccaaaggacgagc

SEQ ID NO: 86220 - RNA, 45 nt, Homo sapiens
aagcgaaggacaagggcaaaaggagaggaaaggggcaaggcgggg

SEQ ID NO: 86221 - RNA, 81 nt, Homo sapiens
gcgggcggacgcgccggcgggaagagagcggcggccgccacaacagcacagccggcgacggcgcggacaagcaagccagac

SEQ ID NO: 86222 - RNA, 66 nt, Homo sapiens
cgggcgagcggcgacggcggcggcggcgggcacaggaaccgcaccgggaggaggagcgacgcgggc

SEQ ID NO: 86223 - RNA, 81 nt, Homo sapiens
ggaccgggagaggcgcgggaggcgaggaggcggcggcggagacgggacaggaagagcacccaagcgcaagcaaaagaaggc

SEQ ID NO: 86224 - RNA, 68 nt, Homo sapiens
gccagcacccggccgagacggcggcagcagcggcacagggcccggaaacaaagaaagaccaccgaccc

SEQ ID NO: 86225 - RNA, 81 nt, Homo sapiens
cagagcagaaaccagggcgcagagagcccgccccccaaagcgaagccaaagcgaaggcaaaggccaagaaggcagggaaag

SEQ ID NO: 86226 - RNA, 65 nt, Homo sapiens
aggagacccacaagggcaaagagcgaaaacgccacaacagagggggccagggcggggaagacaaa

SEQ ID NO: 86227 - RNA, 54 nt, Homo sapiens
cgagggccacgccggaccccgccacgggagagacaaagcgaaagaaacccgcac

SEQ ID NO: 86228 - RNA, 80 nt, Homo sapiens
acggacgccgagcccggggcgcgacggcgcagaccacacgaaggggcagaagagcacaagacggaagagaggagcgacca

SEQ ID NO: 86229 - RNA, 74 nt, Homo sapiens
gggcggagggggagacggccgggagggcccgccagccgcgcccgaagacagcccaacaaggcgggacgacaaca

SEQ ID NO: 86230 - RNA, 57 nt, Homo sapiens
caagaaccggccaccggccccacacgaccggccaaagaaggaagaccaaggcgaagg

SEQ ID NO: 86231 - RNA, 77 nt, Homo sapiens
gaggcgagaggagcggaggagacacgaacgccaccacagccagggaaaacaagacaaagcaagcagaaagcggggag

SEQ ID NO: 86232 - RNA, 77 nt, Homo sapiens
ggaacccaggcagacacaccacagagaccggagcccggccagggcaccagcaccggacacaggacaaggagccaccg

SEQ ID NO: 86233 - RNA, 70 nt, Homo sapiens
agacaccccccccgcccagccccccgggccgggacaaaggaacaaacgacccaaagaacgcccccaacgc

SEQ ID NO: 86234 - RNA, 57 nt, Homo sapiens
cgagcccggaggggggagaaaagaggcggaaagaaagaggaggagaggagccccagg

SEQ ID NO: 86235 - RNA, 39 nt, Homo sapiens
ggcgagaaaaggccccagggggccggggccagggccacc

SEQ ID NO: 86236 - RNA, 73 nt, Homo sapiens
cacgcaaaccacacaagaaaacaacccagacagcgaggcagacccaaagaacgcaggcagcaccccgccaccc

SEQ ID NO: 86237 - RNA, 45 nt, Homo sapiens
gcacgagagagcggccccccgcaggaggcagcagcgccccgagcc

SEQ ID NO: 86238 - RNA, 64 nt, Homo sapiens
cagaggccagaagcaagccaggaaggaggcacaggagagaggcaacaaggccaggaacgggagc

SEQ ID NO: 86239 - RNA, 80 nt, Homo sapiens
gcacgggaagaccggaggggacgaagaacggaagccgaggccgccagcgccaagaaaaaaacaaggccaaagccagcccc

SEQ ID NO: 86240 - RNA, 59 nt, Homo sapiens
cagcgcccagggggggaaaccaccggcaacagagacccgagcggaagagaagccaagga

SEQ ID NO: 86241 - RNA, 71 nt, Homo sapiens
cgggagagggaacacagacaaaaaccgcaacccacgagaaaacagcagaaagccaggaaaaagaggaaccg

SEQ ID NO: 86242 - RNA, 80 nt, Homo sapiens
ccagacccgcgcggagcgacggagagagacggccagcccagccgcccaccgccggggaacgcggagaaggaaaaacacca

SEQ ID NO: 86243 - RNA, 85 nt, Homo sapiens
ccggggcggcgacagcagcagcgaaccagcgggcgcgcagacgcaaacagcagacggaagaccccacggcaaaaccacacccgag

SEQ ID NO: 86244 - RNA, 77 nt, Homo sapiens
ccacggcgccccgcaagaaaaagcggggaaaacaaaaaaaagaaggagggaagagggggccaggaccaggccccacc

SEQ ID NO: 86245 - RNA, 76 nt, Homo sapiens
gcggcggccgcagcgccacaaaccaggaacagagacgcaggcaagagcgcggaggagagagccaaaagaagggggc

SEQ ID NO: 86246 - RNA, 66 nt, Homo sapiens
accggcgaaacccgagaggagcgcaggagaggaaagacacgcccaccaagaaagaaccggaaaggg

SEQ ID NO: 86247 - RNA, 105 nt, Homo sapiens
ggaacgagacgcaaggggacacgccaaaccgagcacagaaagagaccgcccgcccaacggccagcgcagccacgggacggggcaaggccacacacacccgcggga

SEQ ID NO: 86248 - RNA, 69 nt, Homo sapiens
gcggcccacggccggaaacccgcagagccgccgcagggcgaaggcgaggacccccagcccccagagccg

SEQ ID NO: 86249 - RNA, 55 nt, Homo sapiens
cagcggccgcagcaagcgaggcaagaaagaaaacgagcagaggccaggaggggcc

SEQ ID NO: 86250 - RNA, 83 nt, Homo sapiens
cgagcggagggggcgaagagacgccagaagaacgaggaggagaaggaaaaggccagaggaaccaagaaccaacacagacagag

SEQ ID NO: 86251 - RNA, 50 nt, Homo sapiens
cgcggagagcagcacgaccccagcacaggggggcccgcgggaccagcccg

SEQ ID NO: 86252 - RNA, 74 nt, Homo sapiens
cgacgcgagagaaggacccacggcgcgcgaaggcccagcaacggccacccaaagaacaccacgcgaggcaaaaa

SEQ ID NO: 86253 - RNA, 84 nt, Homo sapiens
cgggaacagaaggacaggacagccaggggcgagcaccaaagccaaggaagcccagaagaaagagcaccccccggaagcagcagg

SEQ ID NO: 86254 - RNA, 104 nt, Homo sapiens
cgcagccaagcccggaagacgcgaccgggcaccggcgggggggccgacgacgagccccgcgaggagcgcagcggagaggccagaacgcccgccagcccagccgc

SEQ ID NO: 86255 - RNA, 77 nt, Homo sapiens
aagcggggcaggcgagggaggagcagcccagcaccccaacagagaaggccgaagaccgaaccagaaccacaaagagg

SEQ ID NO: 86256 - RNA, 82 nt, Homo sapiens
agcaccacggaccccaaggaagccacggcagacacacaacccgacccgacgacgggccgaacgaacgaagagagaagggaga

SEQ ID NO: 86257 - RNA, 72 nt, Homo sapiens
cgaccacacaccagaaccggaggaggaccgcggagggaacaccgaacaagcagaaagcacgaacaacgagaa

SEQ ID NO: 86258 - RNA, 80 nt, Homo sapiens
acccagccacgagacaagacacaaggagggggcagagcgagggcaaacagcccagcagacccgcggcacgggaggagagg

SEQ ID NO: 86259 - RNA, 71 nt, Homo sapiens
aaaggaacggcaccgcggacagagcagacagaacagacaaggggacacgggcccaaacgaaccgcggccca

SEQ ID NO: 86260 - RNA, 87 nt, Homo sapiens
agacgcagagccccagcggggaggcgcaacacgaggcgccgcagcacccgcgagcaaccggggagaccacgacgcgccccgggcgcc

SEQ ID NO: 86261 - RNA, 70 nt, Homo sapiens
agggagaaaaggagcagacacaggacaacggcaagcggagaagagcaaggccgaaccgagaggaagggca

SEQ ID NO: 86262 - RNA, 87 nt, Homo sapiens
aaggaccccgcccagcccccaggagggagccaacgcaccgaggaggaacccacagggggaggagcccagggcaccccggaagaggag

SEQ ID NO: 86263 - RNA, 65 nt, Homo sapiens
gaaaaaccacggggaagccacccgacagacgccccgagccggacccccggaaacgacggggagaa

SEQ ID NO: 86264 - RNA, 54 nt, Homo sapiens
cagaagacaaagagaggagccgaaggagaagcagacaacgggacggaccgggcc

SEQ ID NO: 86265 - RNA, 67 nt, Homo sapiens
gccgggaggaagaaaaaggaagaacagcccgcccgcaggaagaagagagggcgaaggaggccacaca

SEQ ID NO: 86266 - RNA, 96 nt, Homo sapiens
agagaggaagaagaacgacccgcccggggcagcagagagaagaagaaggaggccgcggccagaaacccaagaaaaagcgaaggaacgcagagcgaa

SEQ ID NO: 86267 - RNA, 63 nt, Homo sapiens
cgccgcgcgggcccgcccgacgcggaaggggggcgcagagaaagcaaagcgaggcggacccag

SEQ ID NO: 86268 - RNA, 68 nt, Homo sapiens
accaacgagcagaccagaacaaggccgggaaaaagcggggcaaggcagagccacaacggcagggacac

SEQ ID NO: 86269 - RNA, 56 nt, Homo sapiens
cgcccccgcggagcccacgcccacgccacgacggaacagggaacaagccgccaaag

SEQ ID NO: 86270 - RNA, 76 nt, Homo sapiens
aaagacaaagaagaaaaggaaaaaaaaaggcaaagcacggaagaaagcgacacggcgcgcagcggcgccaaagaac

SEQ ID NO: 86271 - RNA, 69 nt, Homo sapiens
gaccgacaccgcaagaccccgaagcccaggaacgaagaacccgagaagagagaaaaggcggagagcgac

SEQ ID NO: 86272 - RNA, 79 nt, Homo sapiens
ggacagcgcgggagggcgccgcggggcagccgccgcccccgggccacaaaagaagacccaaagcaccaacaaaaagcaa

SEQ ID NO: 86273 - RNA, 76 nt, Homo sapiens
cgcacacagcgcgcaacgcgggagagcccgggccacccccccaggcaagccggaaccaaaaagaagccccagagcc

SEQ ID NO: 86274 - RNA, 88 nt, Homo sapiens
gaacccgggcgaaacccagcaccggggaggggacccaaaacagggcacacaaacgcagccagaaggacaaccacaacagcaagccggc

SEQ ID NO: 86275 - RNA, 78 nt, Homo sapiens
cccagaggggaccgaagcagccgcagacgaaacagcagaaagaggcagagagaccaaacggccggaaaagccaacgcc

SEQ ID NO: 86276 - RNA, 70 nt, Homo sapiens
cgaccagaagaaaaaagaaaacacgggaaacgccggaaacgagcggcaaccggcacgcaccagagcagcc

SEQ ID NO: 86277 - RNA, 80 nt, Homo sapiens
ggcaagcccgccgcaaacagggcaacccgcagcacgcccagagggagccacacccgggaaccagaagaggccaaccagca

SEQ ID NO: 86278 - RNA, 70 nt, Homo sapiens
agaaaaagagaggagggagaacacagaaacccgccccggaaagagcggcaaaaggacagcaccaccagac

SEQ ID NO: 86279 - RNA, 72 nt, Homo sapiens
agccgcgggcgaccagcagaagccaccgccagcccgagacgaaaggaccgcccggagagggaccagaccggg

SEQ ID NO: 86280 - RNA, 75 nt, Homo sapiens
gggggcgaaggcaaggcacaaagcccgacagggcaacacccgacaaaggaggcggagggcgagaccagcagacaa

SEQ ID NO: 86281 - RNA, 72 nt, Homo sapiens
ggaccgccgcacaccagcgaggcccaccagccggggagccagcgcagagacaggaggacagagaaggaccag

SEQ ID NO: 86282 - RNA, 81 nt, Homo sapiens
cccgccgccgcagagcacccaacggcgccggagaaggacggcggccccggaccagggcgaaagaggccaagaggacccgag

SEQ ID NO: 86283 - RNA, 66 nt, Homo sapiens
gaagacgacgcaccgcaggcagacaaaagggccaaagaagggagagagaccggagggaagacaagg

SEQ ID NO: 86284 - RNA, 66 nt, Homo sapiens
gaaggccggccggcagccagggcagcaggcgggcagaaaggaaacaaaaagccaacggaaaaagaa

SEQ ID NO: 86285 - RNA, 72 nt, Homo sapiens
cgacagaagacaaacagcaaggggcaaagggaggagaggcgagaagaggagaagaagagggcacgggagcca

SEQ ID NO: 86286 - RNA, 83 nt, Homo sapiens
gaacaaggccacgaagcgcccacggacaacccccagccaaagcaaccaagggaagaagcagaagcaagcccagggcaaggacc

SEQ ID NO: 86287 - RNA, 86 nt, Homo sapiens
cgaggcgggcgaggcgccgcggaccagaggcgccggccgagggagcaacaagagcagaaaggaagaaccacccgcccaggagaaaa

SEQ ID NO: 86288 - RNA, 87 nt, Homo sapiens
ggcagacggcgacagggcggcggcgccaggcagggcgcagagaaccaggagcggcagaccgccgccaggaggaggcacgcagcccga

SEQ ID NO: 86289 - RNA, 83 nt, Homo sapiens
ggaagaaggagagcccacagcaccgcccggccgaggccccccgggcgccccgcagcgggaccgacacaagaagcagccagaac

SEQ ID NO: 86290 - RNA, 72 nt, Homo sapiens
agccaggccaggagaggaggcggggcaggcccaaccgacacacacgccacacccaaaagccagcagcaccaa

SEQ ID NO: 86291 - RNA, 68 nt, Homo sapiens
gagcgcaaaagcgaaggcaccgccaccggaaaccaggaaaaggggcgagaccaaaaggaggagaagag

SEQ ID NO: 86292 - RNA, 57 nt, Homo sapiens
ggcagcgacgggcaaaggcaagcgcaccggcaggcaccgccggaaagaacaccggcc

SEQ ID NO: 86293 - RNA, 74 nt, Homo sapiens
ggaacggcgggccaggaccgcaagggcaggcggggaagagccgggcgggggggcagagaagggccaggggaggg

SEQ ID NO: 86294 - RNA, 104 nt, Homo sapiens
cagcagagcaaaaacccaaaccccccaccagcgccaagagcgaccccgggggcagcacgccacacagacagaccaacagagcagagcagaccggaggccagaca

SEQ ID NO: 86295 - RNA, 75 nt, Homo sapiens
cagagcccggcggccgggcgcaacgccagacgccacacacagaccaccgcaggacgccgccagccaccggcgcga

SEQ ID NO: 86296 - RNA, 78 nt, Homo sapiens
acgcaaccaagagggaaggagacagggaagcaaagcgcaacagaaacagagagaaggagcgccggccaggcggaggca

SEQ ID NO: 86297 - RNA, 78 nt, Homo sapiens
acgcgcaacagacgcccaaagcggcacaacgcccagagccgagaggcaccggaccaagagcaccagcgcccggaggaa

SEQ ID NO: 86298 - RNA, 79 nt, Homo sapiens
caggaaaacaaaagaggagaaagaagcccaggacaggggacagcacagcacaaagagaaaacacaaaaggccagagaag

SEQ ID NO: 86299 - RNA, 50 nt, Homo sapiens
acggggggaggcaggaccggaccgcaacaggaggcgcagcccccaagacg

SEQ ID NO: 86300 - RNA, 74 nt, Homo sapiens
ggaagcaccgcacaccacacccgcgccgacagggcaaaacggacaacgagaacggcaacgggggccaacagaaa

SEQ ID NO: 86301 - RNA, 85 nt, Homo sapiens
gagcccgacaaaggaagagagcacagacagagccaggccaggagaaggggacgaagcggggaggggagagaggcaaagaggaccc

SEQ ID NO: 86302 - RNA, 81 nt, Homo sapiens
cgggcggcggcacagccacaccgcaccgcaggccgccccgaccgccgaacaagaaaacagcccccggacccgcagcaagcg

SEQ ID NO: 86303 - RNA, 90 nt, Homo sapiens
ccgaagaaggcgagcaggggcgggagagccccgcagaagacgccgacgaggcagcgagagacgaggaggaggggacagaggagcggacag

SEQ ID NO: 86304 - RNA, 38 nt, Homo sapiens
aacagcagagcgcacaacgaagccggaccccaaaaaca

SEQ ID NO: 86305 - RNA, 84 nt, Homo sapiens
aggacgccacccggaggacagggcacaacaaccgcgaacaagcgggagccggcaggaaagcagcagagcagagcgccagagccg

SEQ ID NO: 86306 - RNA, 41 nt, Homo sapiens
aggccgcccccggcaagggacgacacaagaccaccaccacc

SEQ ID NO: 86307 - RNA, 84 nt, Homo sapiens
ccaccccggggagccaaccaggcgccacggccggaacgcacagcggaaggccgccacccgggccaggagccgccgccgccaagc

SEQ ID NO: 86308 - RNA, 63 nt, Homo sapiens
aggagcggcggagagcggccgcgggcgacgggccgaggaagagggagaggggggaagcgaagc

SEQ ID NO: 86309 - RNA, 69 nt, Homo sapiens
acagcgaagcgccgggaagagagagcaccacagaaaacaggccgaaaaaaagaacgacagaaaaaagaa

SEQ ID NO: 86310 - RNA, 77 nt, Homo sapiens
gggagccgccgccggagcgagaacacggcagggaccaccacaaggacagaaaagcacaggaccaggaggccaccgcc

SEQ ID NO: 86311 - RNA, 67 nt, Homo sapiens
ggcgacgaggcacagcgcgcaagaagggagcccgcggaaacgccagagaaagcggcgcgagcggagg

SEQ ID NO: 86312 - RNA, 82 nt, Homo sapiens
gcgggggaagcagacgcggggccgaagggccccgcgcggggcccgaggcaagggcccgcccacggcccaaccgaaggccccg

SEQ ID NO: 86313 - RNA, 99 nt, Homo sapiens
aagaaaaaagagagagaaaaaggacaaaagccaagaggaggacagcgcacacagcaagcacgaggccgaagaacaggagaaggaagaacaaagaaagac

SEQ ID NO: 86314 - RNA, 83 nt, Homo sapiens
acggggaaacgacaagaaaaacaacgccaagagggaaggggacccgccgggaggacgcggacaccaggggggaaaaaccacac

SEQ ID NO: 86315 - RNA, 76 nt, Homo sapiens
ggaaaggccgcgggggcaacggagaaaacccggaaccgcgacggcggcagggagaaaaacgacaaacagagcgaaa

SEQ ID NO: 86316 - RNA, 81 nt, Homo sapiens
aaccaccgaaaacagaggaaggacagcaggaagcagaccacgccaaagcaggcacgggaagggaccaaagagaggaagcac

SEQ ID NO: 86317 - RNA, 82 nt, Homo sapiens
cagggagccggaaagaagagaagaccagcaaaaggagaccccccggggcgacagagcgaaagaaacgagccaggccaagacg

SEQ ID NO: 86318 - RNA, 67 nt, Homo sapiens
gaagaaaggaaccagagggagaggccaggaagcggccagagaaaggaggcaggcaaccaaacgggcg

SEQ ID NO: 86319 - RNA, 77 nt, Homo sapiens
gacaaaagccaagaggaggacagcgcacacagcaagcacgagggcacggaccgaagagggcggaaccccaggaggag

SEQ ID NO: 86320 - RNA, 70 nt, Homo sapiens
ggcacagaaaggcggaccaggcaggaaagacggcccacaaggaagaacgaggacggaaaggggcacagca

SEQ ID NO: 86321 - RNA, 87 nt, Homo sapiens
acagccaaaagcacaagcgggacgcacaccgagacgaacacagaacagcacgaccagaggggaagccaagcaaacgcagaaggacgc

SEQ ID NO: 86322 - RNA, 71 nt, Homo sapiens
ggcaaccagaggggccaacggacgacaggagaagacagaggagccagaccaagagacagcacaggcgagcg

SEQ ID NO: 86323 - RNA, 95 nt, Homo sapiens
gaagagagcaggaagaaggaagaaaaggaccgcaaaggccaagagaggccaacagaggaacaaggcccgcagaacccaagagcaaaagcagccca

SEQ ID NO: 86324 - RNA, 88 nt, Homo sapiens
gcagagacgggggaagcagcacgggacccagcccaggccgcacggacgggggggggaccgaaggagaagaaggagaaggggaggagaa

SEQ ID NO: 86325 - RNA, 77 nt, Homo sapiens
gagagacaacaagagggggagagggggggagggagcggaagggccaggcagacaaccagccaagaaccgccaaagcc

SEQ ID NO: 86326 - RNA, 72 nt, Homo sapiens
ccgacaccggaagccccgaggggggcccacgcggaggacgcagaacacggcgggcggcccgccaacgacgca

SEQ ID NO: 86327 - RNA, 62 nt, Homo sapiens
cgccaaggaacaggccgaacccccaggaacaccagcccgagggcccggaaaggggagcacag

SEQ ID NO: 86328 - RNA, 75 nt, Homo sapiens
gagacggcggcaggacacaccaccggcgggcagagcaccgccgacagggggccacggacggggccgagcacaacc

SEQ ID NO: 86329 - RNA, 84 nt, Homo sapiens
aagaggggaagaggacgggcaggcggaagcgccagaggagccaccaggagggggccgaggagacgagacggggagcgcagaggg

SEQ ID NO: 86330 - RNA, 69 nt, Homo sapiens
acgagaagaaccggaagccgacccggagccgagcaaccagcacaacacgaaaggagaagaggacgggag

SEQ ID NO: 86331 - RNA, 84 nt, Homo sapiens
ccacccacaccgggagcgcgagggccgcacaaggagcaggcccaggcggcggcgcagcagacgggcaccgcggccagcacccaa

SEQ ID NO: 86332 - RNA, 55 nt, Homo sapiens
agcaggaagcacggcgggcgaaacagagaagaagaagggagggaaccgagaaagg

SEQ ID NO: 86333 - RNA, 74 nt, Homo sapiens
ggaggagaaaagaggcggcccacccccccggccgcgaggaagagcaaccgccgcaagccgagcccgccaagaga

SEQ ID NO: 86334 - RNA, 79 nt, Homo sapiens
aagagaggcaccccgaagaggcgaggagcaacccaacaaagaaacagccggaaaagcacgagcacaagacgaaaacgac

SEQ ID NO: 86335 - RNA, 79 nt, Homo sapiens
ccccgcgcagcacgggaggagcggggagacgcgagacaagggcgggcccccggcagggacaaaggcgagacaccaccca

SEQ ID NO: 86336 - RNA, 87 nt, Homo sapiens
acggcgggaccacaagacaacgcggagcggcgaagagcaaccagcccggacgaggggcaggaccggggacacacgacgcgggacgag

SEQ ID NO: 86337 - RNA, 75 nt, Homo sapiens
gccccagagggcgggaacaggagaccagaccggaagggggggaggacgccaccacaccgccccagaggcacacac

SEQ ID NO: 86338 - RNA, 72 nt, Homo sapiens
ccaacgaccgagaaagagccccgaggacaagagaaggacccaacgagcgacagagagagagaaaaccagaag

SEQ ID NO: 86339 - RNA, 77 nt, Homo sapiens
gggaggccccggcacccacaccaccacgccagcccggacgggcacgacagagagacccgaccacccgcaagaccacg

SEQ ID NO: 86340 - RNA, 78 nt, Homo sapiens
gaaggaagaggcggacggcgggaccacaagacaacgcggagcggcgaagagcaaccagggaaacacaaagaagacacc

SEQ ID NO: 86341 - RNA, 77 nt, Homo sapiens
caagaaaggggaaccccggagaaaaggccaagaaggcagagccgcagagcacacaacagaccgaaggggacagcgga

SEQ ID NO: 86342 - RNA, 78 nt, Homo sapiens
accaccggggcggcccggcggaggacccccccaggccgagggcaggaagaggacaggacacccggagccggacaaccc

SEQ ID NO: 86343 - RNA, 78 nt, Homo sapiens
ggcagcaaccccgcaccccaacgagccaggagagcaagagaagaaagccgagccgggccagcccacacaccgcccccc

SEQ ID NO: 86344 - RNA, 71 nt, Homo sapiens
cacgagaggagggcacagaacagaccgggaaaagagagggccccaagcaaaaagaacagccccaaaacaaa

SEQ ID NO: 86345 - RNA, 77 nt, Homo sapiens
acccaaccccacaagacgaggggaggagagcaagagaaagcagaaggaaccaaggagaaggcccaggccaaggggga

SEQ ID NO: 86346 - RNA, 76 nt, Homo sapiens
ggcggaagaccagcagaggcaacgcaaaaagccagagacacacgcgccggcgcaacaagaagcgaagaggacccag

SEQ ID NO: 86347 - RNA, 59 nt, Homo sapiens
gcggggaaggccagcagcagcaggggccgcaaggccaggcgcgcagaggcacccaacgg

SEQ ID NO: 86348 - RNA, 67 nt, Homo sapiens
cgcagcaaagccagccaaagaaacgccggccgaagcagagcacgcagacgacccaggacacacccag

SEQ ID NO: 86349 - RNA, 76 nt, Homo sapiens
aagaagcaccccaggcaaagccagaggcacggacgaccccggagagagcgggcgagcagaaacccggaaggcagaa

SEQ ID NO: 86350 - RNA, 61 nt, Homo sapiens
cgcagaaggccggagacaccagcaggagaccaagacacaccaccccagggggggcccaacc

SEQ ID NO: 86351 - RNA, 73 nt, Homo sapiens
agcgccagaccgcgacaggcccgaaaaaaacccaggcggcccaggcaagccaccgcgcacacgagcagacaaa

SEQ ID NO: 86352 - RNA, 79 nt, Homo sapiens
gcagccgaagcccagcacagaaaaacgcccaaggaaacaggaggggaaaagccaggacgaaagccgggcccacaacagg

SEQ ID NO: 86353 - RNA, 53 nt, Homo sapiens
caagggcaccaccccgagagaggacgaagaacaagggaaaaaacgcggagccg

SEQ ID NO: 86354 - RNA, 75 nt, Homo sapiens
gaaacacagacacaccaaaagaggagccagaggaggcagaggaaacggagagcccaggcgaagggagagcgggga

SEQ ID NO: 86355 - RNA, 72 nt, Homo sapiens
gaaacccacgaaccaaaagggacggacaaaggaacaggaccaggagcagcgcaacgagacacagcggcccca

SEQ ID NO: 86356 - RNA, 75 nt, Homo sapiens
aaaaacaacaaccggacacagagcaaagaaggccaagaagacgacacaaaaggagcaccgagcggacaagagcga

SEQ ID NO: 86357 - RNA, 70 nt, Homo sapiens
aagaaaggccgcaaggcacaaagacagcagcgaaacaagcacccagcaaccgaaccagaaaaaagaggac

SEQ ID NO: 86358 - RNA, 86 nt, Homo sapiens
gcaggccgcgggagcggcagcacgcagagcgcgggggggggggcccacgccagggagcgggaggacgaggaggaggccgccacgag

SEQ ID NO: 86359 - RNA, 57 nt, Homo sapiens
gaaaagaggcggcccacccccccggccgcgagaaaaccagacgagagacagaagacg

SEQ ID NO: 86360 - RNA, 77 nt, Homo sapiens
gaagccgacagacaaccaggaccccggaggaaaagcggaagcggcagcggcgaacgccggaacggaccaacaggagg

SEQ ID NO: 86361 - RNA, 71 nt, Homo sapiens
gaaggaccaagaaccaggagaaagacagcaaagaaaaggagaagaaaggaaaaaaacaaccccgggcaccc

SEQ ID NO: 86362 - RNA, 67 nt, Homo sapiens
caaagagcagaagagcagcacacccagccccaagagcaacagggaaagcccgaaaaggaccagcgaa

SEQ ID NO: 86363 - RNA, 58 nt, Homo sapiens
caaaggcagggcggggccgagcaaaaaagggggcccccaaagggaagccaaacacaaa

SEQ ID NO: 86364 - RNA, 66 nt, Homo sapiens
gaaacaaaaaagaaaagaaggaaaagaagagccacgccggaagagaaggaaccaaagaagcagagc

SEQ ID NO: 86365 - RNA, 56 nt, Homo sapiens
gagccaccgcacgcggccagcgcgagggacccggccagcccagcaggcacacccgg

SEQ ID NO: 86366 - RNA, 76 nt, Homo sapiens
cggagcggaagacggcaacccagaaggagcgagggagggccgaggggaagaacagacacaagccgaaggcaagaaa

SEQ ID NO: 86367 - RNA, 78 nt, Homo sapiens
agcgggacagaacagccaccaaaacagaaggaccaagcacagagggcggaaaccgcggcgcacggggccccaggggcg

SEQ ID NO: 86368 - RNA, 103 nt, Homo sapiens
cgggaggaagaaaagacaagcggcaacgggccaacccaaagaagacagccaaagaagagcacagggccccccaacgggcgaccagggcccgacccgcgacggc

SEQ ID NO: 86369 - RNA, 77 nt, Homo sapiens
cccacagacagccccagccgggcccagcaagccacacccagaaccagcagcccgcagaagaaaggcaaacccaaggc

SEQ ID NO: 86370 - RNA, 58 nt, Homo sapiens
gagcaacaccgcgagccgcgcggcgcggggccccgcggcggagggaaccacccgcccc

SEQ ID NO: 86371 - RNA, 82 nt, Homo sapiens
agggacaagaagggcaaagccgaacacagggcccaggccggaggcagggcggaccggccgcacaaccaccaccccagcagcc

SEQ ID NO: 86372 - RNA, 79 nt, Homo sapiens
gacccggccagccagcaccaggcgaggacggccggagcagcagaacaagagcggagaccaagggagccccgcagcagca

SEQ ID NO: 86373 - RNA, 79 nt, Homo sapiens
cgaggccgggaaccagcgagggcagggcagcccccaccaccggaagggcgaagaggagagaccgggaggaaacgccgca

SEQ ID NO: 86374 - RNA, 78 nt, Homo sapiens
caagaccaaaagagaggcaccgcggaacacaagagccggacaccagaaggccagaaggaacgaccaaagagaacgaga

SEQ ID NO: 86375 - RNA, 56 nt, Homo sapiens
ccgcgggagagaggacccccccccccccccaaggcggggaggcccaaggggcggac

SEQ ID NO: 86376 - RNA, 89 nt, Homo sapiens
gcccgcgcgacggggaaccgcgaccgagacggcaggcggcggaagcgaaaaggggagcggacgggcccaggagcaggagccacgcagac

SEQ ID NO: 86377 - RNA, 40 nt, Homo sapiens
ggcaagcaccagagagggacccagcagccagcgaagcccc

SEQ ID NO: 86378 - RNA, 72 nt, Homo sapiens
caagagaaccaagagaccgcgggccacccccgccgcagaacacaggacagaaacggaagccagcaagcgcaa

SEQ ID NO: 86379 - RNA, 72 nt, Homo sapiens
gcggagcacccaccacggagggaaagaccaggcaggaccagagccacccaccaccgaaccagggcccagcgc

SEQ ID NO: 86380 - RNA, 78 nt, Homo sapiens
gggagccacgcggcgcccaggcgccgagaggccccgagccccggccccaaagacccaaaacagagacaccccccagcc

SEQ ID NO: 86381 - RNA, 72 nt, Homo sapiens
cacccgcccacaacacaagaagacaacagacaaacgaaggaaacgcgaggggggaagccaggcagagaaaag

SEQ ID NO: 86382 - RNA, 81 nt, Homo sapiens
gcagaggaaaaaacgaccaagccagagaacagcccccacgcagcccagaagggcgaagcagcaaaacacacagccccccgg

SEQ ID NO: 86383 - RNA, 80 nt, Homo sapiens
aaggggagcacggggccggaccagccccgaaacacgggaccccagcaacacgggaggaaaagcagaccacaagagagacc

SEQ ID NO: 86384 - RNA, 54 nt, Homo sapiens
gagccggcagcaaagagggaacagcgggacagcaagggaggcagcagacgggaa

SEQ ID NO: 86385 - RNA, 70 nt, Homo sapiens
cgcccacggggacaacccccgacggcccacgccagggagggggagaggagaaccaaacccgagaaaccag

SEQ ID NO: 86386 - RNA, 82 nt, Homo sapiens
caacgggccaggaagacgaagcacgcagagacaggaaagcaagaacacggaaacagaggaaaaaaagaaagcaaggaaacaa

SEQ ID NO: 86387 - RNA, 81 nt, Homo sapiens
caggaggagccggagagcagccaaggggaagaaagaaggcagcgggggcacagcgagggggcagaccccagcgccacgaac

SEQ ID NO: 86388 - RNA, 118 nt, Homo sapiens
gcggcggggccggggagcccaggcgacagcaaggaggcggcaaaaaaaaagcgcacacacgacgcaacggggcggcacacaaggagcgaagggcagggagaacgccaggcacagcacg

SEQ ID NO: 86389 - RNA, 90 nt, Homo sapiens
cgcccgccacacccgccgccagaggcgggaggcggcagaagcagccagaggagggcacaggcggcgcggagcgcgccgagggcagcgcaa

SEQ ID NO: 86390 - RNA, 56 nt, Homo sapiens
ccgcgccgcacgcgcagggggggccccagcccggccgaacgggcgcacgacacaaa

SEQ ID NO: 86391 - RNA, 77 nt, Homo sapiens
gagcgccggaacgccgaccgaaaccaccgagcccaagaccaagggagaccaaccgaaggacaagggaaggagcagag

SEQ ID NO: 86392 - RNA, 68 nt, Homo sapiens
acgggaaaggcgcagagaagcacaggggccacacgcggacccggagggaccagacgggcgccacaggc

SEQ ID NO: 86393 - RNA, 58 nt, Homo sapiens
agaagagggaaccccagcgccaaagacagcccacaccggcaggccaacaaccaagacg

SEQ ID NO: 86394 - RNA, 80 nt, Homo sapiens
gcccacggacagaaggggacggagaggccacgagaagcaaaggaggaaggaggcgaacggggcgcggagcacgaagacga

SEQ ID NO: 86395 - RNA, 72 nt, Homo sapiens
cacgccgccagcaaggaggagacggcggcggcacgagcaaaaaaaagccccgagcaacaaaccagggaacga

SEQ ID NO: 86396 - RNA, 66 nt, Homo sapiens
ggagcccagccgcgcagacagcagacacgaccgcaggaacaggccccccacccggcgccccgggcc

SEQ ID NO: 86397 - RNA, 54 nt, Homo sapiens
gcgaaacgcacgagaagggcagcgcaagaccccgcacggaagcagcaagcacag

SEQ ID NO: 86398 - RNA, 49 nt, Homo sapiens
ggcaagagccaacccaaaaccaacccaaggaaaggcccaggcacagcag

SEQ ID NO: 86399 - RNA, 65 nt, Homo sapiens
agaggcggggcgcgacgagcaagcagcgggccggacgaggaagagaacgaggcagagaaagcaag

SEQ ID NO: 86400 - RNA, 75 nt, Homo sapiens
cgggccgccgagcggacccggaccggggcccgccccgcgcagcagcacacagaagaaacaggacagacgaaaagg

SEQ ID NO: 86401 - RNA, 67 nt, Homo sapiens
ggaggagggagaaaagcggacgccggggaggccaaaaagccagaaaaccagcgacacgaacccccag

SEQ ID NO: 86402 - RNA, 76 nt, Homo sapiens
ggggacacgacgccccaaaccgccaggagaaaaaagcaacggggcggcacacaaggagcgaagggcagggagaacg

SEQ ID NO: 86403 - RNA, 80 nt, Homo sapiens
gggaaaggaggcagcgcaaggagggcggcgggacgcaccgaggccagaccgccgagagcccagaggcccggaaggcgcaa

SEQ ID NO: 86404 - RNA, 76 nt, Homo sapiens
aacaggaaacacggcagccaaaacgcccccggggaaggcgccagcgaagaagggagagaggcacggcccccgggac

SEQ ID NO: 86405 - RNA, 85 nt, Homo sapiens
acacagccgaagcgacccgggcaaggccaagacaaggggcgcagagcggggggacaggcgcaagaccggagaagcaggagcggaa

SEQ ID NO: 86406 - RNA, 75 nt, Homo sapiens
ccgagggagcgaaaaccgggccaggagcgcagaggacaacaaagggagccaaaggaaaaaagaccccagacccgc

SEQ ID NO: 86407 - RNA, 71 nt, Homo sapiens
gggcccccgccagcaggggggaccgccgaggaaaacgggaagcagcaaagccaacaccgaagaacagacga

SEQ ID NO: 86408 - RNA, 54 nt, Homo sapiens
gaggggggaaaccacaaagagaagaacggccgagcgaccaggagaggagccccc

SEQ ID NO: 86409 - RNA, 71 nt, Homo sapiens
gaacgccgcccgcacgccgccggcacaggggcacagggaccgccagggcccccacccggcaacggacagag

SEQ ID NO: 86410 - RNA, 80 nt, Homo sapiens
cggaggaggaggaggggaggcgcccccggagccgccccggaggagaagacacaaagggaggaaaacgaccaaacggggaa

SEQ ID NO: 86411 - RNA, 71 nt, Homo sapiens
gacaggccaggcagaacaaacggaccagcgaccgggcagcgacaccccaagagggccgccaccacgaggag

SEQ ID NO: 86412 - RNA, 68 nt, Homo sapiens
aaaacaaagccgcgagaggaccccccaacagcgacacgacgaacgacccgaggaggcagcccgaggag

SEQ ID NO: 86413 - RNA, 63 nt, Homo sapiens
gcagaaagagagaagagagacagaagagcaaaagccaacaggcagaccagagacagcgccacg

SEQ ID NO: 86414 - RNA, 55 nt, Homo sapiens
cgaagccacagcccaacccccggcacccgagcgacagacagcaccaagaagaagc

SEQ ID NO: 86415 - RNA, 54 nt, Homo sapiens
aaaggagcggaagcagccaggggacagaaggaagggagcgcgccaaaggaccaa

SEQ ID NO: 86416 - RNA, 81 nt, Homo sapiens
gggaggggggaggaccggccccaggcgcgccacagccgagccggccgaggaggcgccccgcccggggcccagagggaagcg

SEQ ID NO: 86417 - RNA, 36 nt, Homo sapiens
aaacgggcaagaacaggacccagcgaaaggcacaca

SEQ ID NO: 86418 - RNA, 75 nt, Homo sapiens
gaacaccccaacagaagcccagccgacggcccacaagggcaaggaagaccgggagcacagaagaaaagaacaagg

SEQ ID NO: 86419 - RNA, 68 nt, Homo sapiens
gggagaagggagaacaagaacgggcacgggaagacagaccgcgaggccacacccaagaccgagcccaa

SEQ ID NO: 86420 - RNA, 79 nt, Homo sapiens
agagggcaaacagaagagaggaccaaaacaaacaagaaggagcccgcccaggcgcgacacacgccaaacgcaggcaagg

SEQ ID NO: 86421 - RNA, 60 nt, Homo sapiens
ccaccccgacacaacaccaccagaagaggaagccagaaggaaaacgaggaacaacaccca

SEQ ID NO: 86422 - RNA, 74 nt, Homo sapiens
caggagcgccacgggagccaggccgcagaggcgcacaggggcaaacagaggcccacgcggaccggcagcgccac

SEQ ID NO: 86423 - RNA, 107 nt, Homo sapiens
gggacccacaccgaggaaagacaacccacccgcgggaacccgccgccaggcccgcccaagcaagaacacagacaaacccgagcgacccccagagcccaagcgagacc

SEQ ID NO: 86424 - RNA, 77 nt, Homo sapiens
cacagacacacgcccagaaaccagcagaaccgcgggacaagaacagggccacagggaaacggcgagggggccccaaa

SEQ ID NO: 86425 - RNA, 73 nt, Homo sapiens
gggaaggggccgaagaagggagaagcccggaaggcgggcagaacgcaagacacaagagccagcggacacgcag

SEQ ID NO: 86426 - RNA, 80 nt, Homo sapiens
cgccgccagcccacggccgccgcccccacacagccggccagaagcggcgagagacagagcggcacaaggccaagacggcc

SEQ ID NO: 86427 - RNA, 79 nt, Homo sapiens
ccgccgggacgcgggccggggcgcgcgggcggcgcgggccacaccagaggagccggaagcagcccgcacagcggacgca

SEQ ID NO: 86428 - RNA, 71 nt, Homo sapiens
cgaaggagagcgaagcaagggaccgaagaagccaaagggacccccacagagccggaagaagcgaagacccg

SEQ ID NO: 86429 - RNA, 68 nt, Homo sapiens
caccgagcccaagcggaaagcacgcgcacagaggaacccaaggaccgcaaagaaaacccagagaacac

SEQ ID NO: 86430 - RNA, 73 nt, Homo sapiens
aggagcacaacaggcagacagacaagccacaagcccgaagccagggacggcggaaaacaacgaccaccacaac

SEQ ID NO: 86431 - RNA, 71 nt, Homo sapiens
accagcagcaccacccccgcccgaccgcccagcccccccacagaccccgccccccgaggcgcagcccgaac

SEQ ID NO: 86432 - RNA, 80 nt, Homo sapiens
agcagcagaagagaagaagaagcaggagaacgaaacggagccagagaaggcagaagccagacgggaggacagaccgcacc

SEQ ID NO: 86433 - RNA, 84 nt, Homo sapiens
gagggccgacggcgacagagggacggcaaaacagaacagaaaggcggagaaaaaagagggggaaaagaccacgagaagacaggc

SEQ ID NO: 86434 - RNA, 72 nt, Homo sapiens
agccaccgcaaaaaagcggggacgggaaagagggcagaagcagcaagaaaaggccaagagagaaggagaacg

SEQ ID NO: 86435 - RNA, 70 nt, Homo sapiens
cacaaggaccaaacaccaaaacagcgagacgacgggaccgaaggaccccgccagagacaaccgagcgcca

SEQ ID NO: 86436 - RNA, 58 nt, Homo sapiens
caggcaagggacccgcccagcccccaagagcgagaaagcaggcacgggcgcggagggg

SEQ ID NO: 86437 - RNA, 78 nt, Homo sapiens
ggacgcgacgccagcacgacccaccgcacgcagaagcggggggccccaccaccggagaagcgacgcggagagagcaga

SEQ ID NO: 86438 - RNA, 42 nt, Homo sapiens
cggcccgcaaggaggaggcggacccggccggcggaggggagg

SEQ ID NO: 86439 - RNA, 87 nt, Homo sapiens
gcccggcgggccggaccaagaaggccgggacagcagaaaacagccagcagaaaaagccaaaaagcaagcggacaaaagaagaaacaa

SEQ ID NO: 86440 - RNA, 64 nt, Homo sapiens
agccaccaggagcccgagagagaaggaaaagaggcacagagagaagaaggacagcgcagaaaaa

SEQ ID NO: 86441 - RNA, 74 nt, Homo sapiens
agaccgaccaccaaaagccagcagaagaggaccagacgcccgggggggcggcggcccacagaccgccaccagcc

SEQ ID NO: 86442 - RNA, 65 nt, Homo sapiens
gcggaaacgcagaaagccgcccacaccaaccgcggagggccagcccaaagggagaagaaagaaca

SEQ ID NO: 86443 - RNA, 85 nt, Homo sapiens
gcgagccgaaaagcgagcgcgaggaaaaggcggcgggaggacgaagagcagcaaaaaccacaaagcaacgcaaacacaagaccca

SEQ ID NO: 86444 - RNA, 80 nt, Homo sapiens
aggaggagcaacacgggaccgagcaaacggagaccgggacagaccaaaagcgccgcacagcccaacccaccgaacagccc

SEQ ID NO: 86445 - RNA, 79 nt, Homo sapiens
agcgcagagagacgcaggccaaggaaaagccagacggaagccaaccggcgccgaagcccgaggaagacggaaggagcgg

SEQ ID NO: 86446 - RNA, 68 nt, Homo sapiens
cccggcccacccagcaaacccagcaggaagccacgggcgaaacagaaaagaaaggaagaggagcagca

SEQ ID NO: 86447 - RNA, 76 nt, Homo sapiens
acaaggccaggagaggaacagcaaagggcacaagcccccgaagacaagaggccggggagaccgacaaccccggcca

SEQ ID NO: 86448 - RNA, 52 nt, Homo sapiens
cgcaggcacgaggaagaaggaaccggggcagggaggccacgggcgacgaacc

SEQ ID NO: 86449 - RNA, 65 nt, Homo sapiens
gcagcccagggacccgagcaccgccggccccgggccagcccagacgacgacacgcggaggcgccg

SEQ ID NO: 86450 - RNA, 79 nt, Homo sapiens
agaaacagcccaccgagggagagacacagaccaagaacaagccagcaagaggagccacaaaaggggggaagaaccgcca

SEQ ID NO: 86451 - RNA, 78 nt, Homo sapiens
gcgccagcggcagaccagggcccacgaagacgaaaccacgccacagaaagcccgccccagacagggccccggcccgcc

SEQ ID NO: 86452 - RNA, 75 nt, Homo sapiens
gacgccgcagcccagccagccgccaagaacgcagcagcagccgccaagacgggcgacagaccggcagcgaagcac

SEQ ID NO: 86453 - RNA, 79 nt, Homo sapiens
agccagaaagcggcacgaacagagccgggagcaagaagaacacccagagagggaaaagaggacgaggcgcgaaaaggca

SEQ ID NO: 86454 - RNA, 77 nt, Homo sapiens
cagccgaccagccgcggagccgggggcagggcccgacgggccaggagggggccgaggggacccgcccacggggccca

SEQ ID NO: 86455 - RNA, 100 nt, Homo sapiens
ccagccggaccgcacggacagaagccccgcccgaccccggccagagccccccccaggcagagaccagaccgacagggcgaacagcccgggcaccgaggag

SEQ ID NO: 86456 - RNA, 86 nt, Homo sapiens
aggaggccgccagcagaggcggagcccgcagaccgcagaaggccggagacaccagcagacagaagcccgggggagcggaggaagag

SEQ ID NO: 86457 - RNA, 75 nt, Homo sapiens
gaagaaaaacgaaccacgagcggaagcacaacgggaagaaaggacacacagcaacgaagcaggggaggagggaag

SEQ ID NO: 86458 - RNA, 72 nt, Homo sapiens
aaggggaaaaaacacaggacacgcggcagagagagaggaagaagacacggaccgacggacgggaaacccagc

SEQ ID NO: 86459 - RNA, 75 nt, Homo sapiens
cacgccgcggccggggcccgaccgcggggacccagggaaaagaggacgaggcgcgaaaaggcaaaggcaagaaag

SEQ ID NO: 86460 - RNA, 68 nt, Homo sapiens
agagcagggaacagccaccgaaaccaaaccgaaacaaggaccccccgggagaagaaaagcgggacgag

SEQ ID NO: 86461 - RNA, 76 nt, Homo sapiens
cagcgaccgcgggcggcgacgagaggaggacgcccacagccacccaaaggaccccgcgggcacggcgggacgggac

SEQ ID NO: 86462 - RNA, 69 nt, Homo sapiens
gaccagaccggcgacaagccagcagacaacgacagaaaaccacccccagcgagcaacgggggcagcagc

SEQ ID NO: 86463 - RNA, 86 nt, Homo sapiens
aaacgcaaaaagaggcgaaaggaagcaagcagcagaagagccaaggaaaaacagcaagaacccaaaagggccgcgcgaaaggccaa

SEQ ID NO: 86464 - RNA, 77 nt, Homo sapiens
aggaggagcaggagcggaggaggagccgccgccgccaggcccaggaggcaagagcgagaagagcgcaagacagaaag

SEQ ID NO: 86465 - RNA, 73 nt, Homo sapiens
cccagcagaagaagagaggagggagaacacagaaaccggccccagggagcgggaaacgcacaacagagaacag

SEQ ID NO: 86466 - RNA, 78 nt, Homo sapiens
ggccacagcgaccagccgccagcaccaagaaagccaaagaaccacccccaagcccccagaagggcaaggaaagcagga

SEQ ID NO: 86467 - RNA, 72 nt, Homo sapiens
cagaccagcagaaagacggacagcggcaaaggaagaagagaccaaagaaccagcaaagggagacgccacaac

SEQ ID NO: 86468 - RNA, 75 nt, Homo sapiens
agcccccccgaagacgccgcgagcacaccgcagaaccaggggcagggggagccaaggaagcagacacgagcacaa

SEQ ID NO: 86469 - RNA, 77 nt, Homo sapiens
ccagaaacaacagacagcgggcagagaaagacagcaaagaaaaggagaagaaaggaaaaaaacaaccccgggcaccc

SEQ ID NO: 86470 - RNA, 78 nt, Homo sapiens
cccgccgcgccccacgccggcacacacacagagccccaggaggaccaaaaggagcgcgggccgagccgagggcgccgg

SEQ ID NO: 86471 - RNA, 82 nt, Homo sapiens
gagagagcgagcgagggggggcgcgccggaaaccggagcgcgcagcagggagcagcagccccgagaaggaagaggaggaagc

SEQ ID NO: 86472 - RNA, 81 nt, Homo sapiens
aagcacgggaagaagcagcggacccgccaccacacggcaccggggaggccaacagacccaacccagaaggcaccaaacgga

SEQ ID NO: 86473 - RNA, 77 nt, Homo sapiens
gcgccgcggcgaggagcgagcgcgcgaggggcggccgaggacagggacaagcgcacagcggagaaagcagcgcggcc

SEQ ID NO: 86474 - RNA, 61 nt, Homo sapiens
ccaccaaggagcagcccgggccaggaccgggggcccacgagaagagcaggcgacgggggag

SEQ ID NO: 86475 - RNA, 72 nt, Homo sapiens
accgaccgcaacagaacggacccggaaagagaagggagggcgacgagagccgaagcagaggccaagaccaac

SEQ ID NO: 86476 - RNA, 72 nt, Homo sapiens
gagcaccaccaggcccccagccgcaggcccggcggaaagcggggcagcaaggcaaggaaaaaacgaagagca

SEQ ID NO: 86477 - RNA, 85 nt, Homo sapiens
gagcagccagaaagcggcacgaacagagccgggagcaagaagaacacccagagacagccgccaggaagcaacgcagcgcggaaag

SEQ ID NO: 86478 - RNA, 79 nt, Homo sapiens
ggggaaaaaccgcgaagcaggggccgcgggaagccgaaacacacaagaggagggaagcaccaaacaaaccgaaaaaggg

SEQ ID NO: 86479 - RNA, 73 nt, Homo sapiens
agcgagccggagaagagggggcccggggggaggaggggcaggcccggcggaacagcgccgaagccaagaagcg

SEQ ID NO: 86480 - RNA, 65 nt, Homo sapiens
cccgcgccgccgaccccccggcgccgcgccggcggcgcccacagcaccggcccaagcagcccccc

SEQ ID NO: 86481 - RNA, 69 nt, Homo sapiens
gcccaacacacaaaccacgaaccaagaaaggagaaacacaagaccccgaaccagaagcggcaaacagca

SEQ ID NO: 86482 - RNA, 80 nt, Homo sapiens
gaaaacccgaggcaaagcgaggcgaagagagagggagccggcacagaaaacaacacgggagcggggacgacagacaggag

SEQ ID NO: 86483 - RNA, 82 nt, Homo sapiens
ccaccccagcacacgagcagcaagcggacacacggcacacgaccaaaggggaggagaaagccgggacagcaagacaggggca

SEQ ID NO: 86484 - RNA, 77 nt, Homo sapiens
ggaaggaagaacagaaacacgaccaaagccaggccaagcagcagaacagaagagacccggccacgaaagacagcaca

SEQ ID NO: 86485 - RNA, 105 nt, Homo sapiens
gcgaccgggggacgcggcgacaacccgaagggaggaggcagaagagccaaaagaggcagaagcccgagccagaagaaacaaagaagacagaagccacggcagaag

SEQ ID NO: 86486 - RNA, 66 nt, Homo sapiens
caaaagcccggaaacagcagccaggcagacaaccaacagggcaaaaccgccaacaagacccgcaaa

SEQ ID NO: 86487 - RNA, 83 nt, Homo sapiens
ggcaagcgcaccgcagagggacaaagcacacagcagaccacccccacacacggacggggcacaggacaggaggagacacggca

SEQ ID NO: 86488 - RNA, 86 nt, Homo sapiens
ggacggaaggggcacaccagccccagagacggccgccccgaaggacgccgccggcaaaaaggcaaaaagagcgcgaagagacggag

SEQ ID NO: 86489 - RNA, 75 nt, Homo sapiens
gcggcgggccagccggcggccccacagcaaccagcaccagagaaggagcacccgggacgcaaggaccaaaaaaca

SEQ ID NO: 86490 - RNA, 90 nt, Homo sapiens
cggccagggcgcagcgagcgcccgagcggcgcgcaccaggcggagccccagccggggcccagcgaacgccagggagagcccgaccagaga

SEQ ID NO: 86491 - RNA, 56 nt, Homo sapiens
acaaaaggaaacccaccaaggaccagaaagcagcgaagaaacaaacaggagaagaa

SEQ ID NO: 86492 - RNA, 82 nt, Homo sapiens
agaaaacgagccaggaacaaagagcaaggagaaagacagcaaagaaaaggagaagaaaggaaaaaaacaaccccgggcaccc

SEQ ID NO: 86493 - RNA, 82 nt, Homo sapiens
gacggaacggaggaccaagagcagggagagacccccacgaccagccaaaccaaagaaaaagaaagacaggcccggcaggagg

SEQ ID NO: 86494 - RNA, 73 nt, Homo sapiens
aaggaagagacccccaagccacccagcagagccccgagaggggcgcgcagaaacgggaagaaacacgacagga

SEQ ID NO: 86495 - RNA, 73 nt, Homo sapiens
caccgagagagaggacacgaaacagagaggggaaggagcccagcgaccaccaggaagaagaggcggaagaaac

SEQ ID NO: 86496 - RNA, 71 nt, Homo sapiens
gggagaaagaggaagggccggccggggcagcaaaagagcaagaaggggagaacaacgaggcgaggacaaac

SEQ ID NO: 86497 - RNA, 64 nt, Homo sapiens
cagacacgggacccgccgaggccgcggcgccaaaccgaggaaaagacgagggaagaagaccgac

SEQ ID NO: 86498 - RNA, 72 nt, Homo sapiens
cagagcaacccgcccccagaaggccaccggccaaaaggacacgagcaccaaaagaagaaacgggaggaccag

SEQ ID NO: 86499 - RNA, 69 nt, Homo sapiens
gagaccgcgccagcgccacggaaccagcggcccagaaacgggagacacccaaggagggacgggccagaa

SEQ ID NO: 86500 - RNA, 69 nt, Homo sapiens
aaaaccacccccaacaggaagaggaacccacgaaaaggagggagccaaagggagccgccggcccaggcg

SEQ ID NO: 86501 - RNA, 78 nt, Homo sapiens
gcgcagcgggccacccgggagcggggccacacacagagcaaagcaggacagaaggagcaagcgggaaggaaagaaagg

SEQ ID NO: 86502 - RNA, 79 nt, Homo sapiens
gaggaggacaaggagaaggaggccacggggggccggagcaagcaccgagacggagccagaacgagcccagcggagcaga

SEQ ID NO: 86503 - RNA, 61 nt, Homo sapiens
acaccaggaaagacaggagaccaaaaaggcacagcaggaccagaccccagcagcggccgac

SEQ ID NO: 86504 - RNA, 64 nt, Homo sapiens
accaagaaccagcccggaggaacaaccggaccaacagaacaacgagagcaaagggacgaaaaag

SEQ ID NO: 86505 - RNA, 72 nt, Homo sapiens
gaagaggagaccgacgagcagaagaggagaagaccagaggagaagggagggcggagagagagagacgagaga

SEQ ID NO: 86506 - RNA, 92 nt, Homo sapiens
aagccggaggaggacaacgacaccaccgcagcgacgagcagggcggaggcagcaccagagaaagacacagggcgggcgcggacgaggacgag

SEQ ID NO: 86507 - RNA, 77 nt, Homo sapiens
aagccggaaaaagccaagccagaccacggggggagcagcgcgagcagggacggaaagcagcgaccgagcccccagca

SEQ ID NO: 86508 - RNA, 63 nt, Homo sapiens
aagagccgggcagacaccaggacacagcaggggccagacaaccagacccgggaggcaagagac

SEQ ID NO: 86509 - RNA, 57 nt, Homo sapiens
ccgagccggagcggacgacggccgcccgcacagggggcacgaagaaagcaggacgag

SEQ ID NO: 86510 - RNA, 40 nt, Homo sapiens
aggcccccccgccccccaggggagaaagccagagccagac

SEQ ID NO: 86511 - RNA, 72 nt, Homo sapiens
caacaccagaagacacacaggccccggcgcaggaacacaggacggccgaacacgacgcacacagaaacaaaa

SEQ ID NO: 86512 - RNA, 74 nt, Homo sapiens
acaggaccgcccccccccccaagcgcaggccacgcaagcccacaggagaacgacaagggaacagcccgcagccc

SEQ ID NO: 86513 - RNA, 81 nt, Homo sapiens
agacaggccaacacgcgggcagcgaacaagcgggagcaaggagggcgaagagcgaggagcagaaaggaggacaccacagac

SEQ ID NO: 86514 - RNA, 79 nt, Homo sapiens
cccaaccagcagagagggagagccagaaccaacagagccaacacaagcaccaggagcgaggagcagcggaggaggagga

SEQ ID NO: 86515 - RNA, 85 nt, Homo sapiens
ggcggcggccagcgggcccacagcccaggccaacaagcccaaaggaaaagcgaccaagaaaagcggaaaaacaggggaaggacag

SEQ ID NO: 86516 - RNA, 77 nt, Homo sapiens
cacgggacgccccagaggaccccggccggaggcaaggagaccaaccggagaggcaagacacgggcgaggggccacca

SEQ ID NO: 86517 - RNA, 76 nt, Homo sapiens
ggcggaagcaacaaaacaaaccgcagaacaaaacagaagggggacgaagcgaagaagcccagaagcagccacaggg

SEQ ID NO: 86518 - RNA, 73 nt, Homo sapiens
cgaccccgggaagcacgagcacgccaccggcgccagcgggcgagaggcgggagccgagcacccgcggccagag

SEQ ID NO: 86519 - RNA, 51 nt, Homo sapiens
acagcggccgggaacgaccgaaacaccaggccccagggaaaggaccgaggc

SEQ ID NO: 86520 - RNA, 73 nt, Homo sapiens
gccccgaggacaagcaggaggggggagcgggaagcaccacggggccggaagaaccaggggagaaagcaagggc

SEQ ID NO: 86521 - RNA, 84 nt, Homo sapiens
gcgacccggcggcgggaagccaagccagggagacaagaagagccccaccaggcggccagggaccccacaggccacaggagccag

SEQ ID NO: 86522 - RNA, 108 nt, Homo sapiens
ggaggcgaggggccagaggaggcaggaaagaggccgggagcaggaacgcaagggcgcccaggaaagccaagcaggcgggacaccaggagcggccgggcggcagggagg

SEQ ID NO: 86523 - RNA, 71 nt, Homo sapiens
gaagagagaagacagggggccaggacggcaaggacgacagcgaaggcagggaaggcgggccacgaagcaag

SEQ ID NO: 86524 - RNA, 57 nt, Homo sapiens
ggggcagcagacccaccggaaagaaaaaggagcccaagccccaccaccagcacaccc

SEQ ID NO: 86525 - RNA, 75 nt, Homo sapiens
aaaaaacaaccgaggggccgacccaagcacaccagaaagggccggggaaggcgcacgacagggaaaaaccagagg

SEQ ID NO: 86526 - RNA, 81 nt, Homo sapiens
aacaacgaaaaggagaggaacggcaagaaagcaagcagaagccgaccaaagcaacaaggaaccccagaaccagaaccagag

SEQ ID NO: 86527 - RNA, 81 nt, Homo sapiens
ccgacaagaaggacaaagagacaagccgagagaaagcaagcaaagagcacacagggagcagccaggccaggggcagaacac

SEQ ID NO: 86528 - RNA, 85 nt, Homo sapiens
gaaaaacccaagaaagagcgcagcgggagaagggaccaagaaaggcccagggaccaaagcccggacaaggcccgagcaccaggac

SEQ ID NO: 86529 - RNA, 73 nt, Homo sapiens
gaaggaagccaggaaaggagcagaaaagcgaagacaaaaaagacaccacagagcaacaacgagaagcaaggca

SEQ ID NO: 86530 - RNA, 59 nt, Homo sapiens
ggacaggagcgcccgcccccagggcccaccagccgagcagacagaagacaggggcccgc

SEQ ID NO: 86531 - RNA, 64 nt, Homo sapiens
cgccacccccgaaggaaccgcgaccacagaggaacgccacaaagcaggcgaacaagaacacagg

SEQ ID NO: 86532 - RNA, 89 nt, Homo sapiens
ccggccccggcgcgagaggcccgggagccgccggccaggacgcccccgaggggagaccgcgccccggagagcagcaaggcgaaccggcg

SEQ ID NO: 86533 - RNA, 74 nt, Homo sapiens
acgcccccaagaagccacacgccaccagaaagcaacagcagaggaaaccaagcacccaaaaggccacccaaaca

SEQ ID NO: 86534 - RNA, 49 nt, Homo sapiens
aaaggaggaaggaagccaagggaaaaagaaagcacaccacgaggcacac

SEQ ID NO: 86535 - RNA, 79 nt, Homo sapiens
cagaggcaacaaggcggacaagagaagccgccagcccccaggggccggagacaacgccccaggagcggcaagaagcaaa

SEQ ID NO: 86536 - RNA, 73 nt, Homo sapiens
agcccccacaacggggaccaccgccccagcagacgcggaagaaaacaacaggggcaggaagcccagcccaaag

SEQ ID NO: 86537 - RNA, 80 nt, Homo sapiens
aagagaaacccggagggcgccgggaccgaggaagccgacaggaccgggggcacggaggggaagcacccagaacccccgga

SEQ ID NO: 86538 - RNA, 69 nt, Homo sapiens
gaggcgaagcgagaggacaggcagcacaagagacgagcgaggaagggagcaggggccgcccaccacggc

SEQ ID NO: 86539 - RNA, 98 nt, Homo sapiens
cagaaacgacaaccgaaaaacccccggaaccacaagaccacagagaaccagaacaaaaaagacaacaggcacaaagagagaaggaacacccacagggc

SEQ ID NO: 86540 - RNA, 72 nt, Homo sapiens
cgacaggagagaacacaacaggagccgcccagcaaaacccaacgggaacccgccggaaaacggagagcaggc

SEQ ID NO: 86541 - RNA, 82 nt, Homo sapiens
agagcgcagggccgagaccaggagaaccacgacgagaccacggcggccccccggaggagcgggacgcaaagcaaggagagcg

SEQ ID NO: 86542 - RNA, 56 nt, Homo sapiens
ggggaaaggcaccaggacaagcaaaggaccaagcccagaaggaccagaaaggggac

SEQ ID NO: 86543 - RNA, 79 nt, Homo sapiens
aagagacgacggaggcccggcacacagcccagccgacggcagagcagcccccacagcgggcggcagaacaagaagggca

SEQ ID NO: 86544 - RNA, 60 nt, Homo sapiens
gggcagagggagcgggagcccccgacagcccgggccgagaagaccggaacagaacagcag

SEQ ID NO: 86545 - RNA, 79 nt, Homo sapiens
ccgaagcaggaagcgccccacggaggagagggaccagggagacggaacccccggagccccaggacccgaagaccagacc

SEQ ID NO: 86546 - RNA, 70 nt, Homo sapiens
caggccggcggggggcggacaccagccaagcagcggaacgacagaggaccggccgcccgcccccggggcc

SEQ ID NO: 86547 - RNA, 82 nt, Homo sapiens
ggagaaagagcagccacgagaggggaacaggcccggcagagcgggccgacccgaaaagggaacaggcacgccccacccgcca

SEQ ID NO: 86548 - RNA, 79 nt, Homo sapiens
ccgggccacagccggaggccgagcgcgagcagcgacaagacccaggcggcggccggggcagcgccgcgagccagcaacg

SEQ ID NO: 86549 - RNA, 80 nt, Homo sapiens
gcagaagccaaacaagcagggggaagaccagcaagcacaaaggacaccacagacaaacccccgcgaccaaggacgaggag

SEQ ID NO: 86550 - RNA, 74 nt, Homo sapiens
gcggaccccccgccaccgcccgagcccagaagagagaagaagcaaaccgggaccggaagcaccaaggagaaaaa

SEQ ID NO: 86551 - RNA, 73 nt, Homo sapiens
ccaagagaacaacaaaaaaaaccccagaggaacagcagcccaaacaagcaccaaccgaaaaggagcgaacagg

SEQ ID NO: 86552 - RNA, 82 nt, Homo sapiens
ggggggccaagaaaccgcaggggagggcggagaacaacgcccgcacaaggagaaggagcagcgaacgcccggcgccacccca

SEQ ID NO: 86553 - RNA, 70 nt, Homo sapiens
gggcgcggagccggccccaggcagcgggcggcgccagcggagaacagcccgaccacgacaccgaaaacga

SEQ ID NO: 86554 - RNA, 63 nt, Homo sapiens
ccccccagggagcggagcgcccggccggcagcgggaaggaagagagaagggcacagaccaaga

SEQ ID NO: 86555 - RNA, 74 nt, Homo sapiens
caaggcggaggaacgagacgcgaaccaggcccgagagagaaagggaaagaaggagcggagcagaacaaggaccc

SEQ ID NO: 86556 - RNA, 84 nt, Homo sapiens
gggaccaggcccggagaagccgcggcggcagcacgacagcgccggcaacacgcggcacaagacaacaccccaccagaccaccca

SEQ ID NO: 86557 - RNA, 69 nt, Homo sapiens
aacgaccacgcaagagacaagcaggacagccaaaccagaagaagggcaccgaaggagaccccaagaaaa

SEQ ID NO: 86558 - RNA, 81 nt, Homo sapiens
ggggccagccgacgcagaaccaccaaggaaccagcggaaggccaaagacagacgggcccagcacacagggacaacgccagg

SEQ ID NO: 86559 - RNA, 52 nt, Homo sapiens
cgccagaggcaagcccagcggcagcgcggaagaagcacaacccagaggggga

SEQ ID NO: 86560 - RNA, 73 nt, Homo sapiens
gcgcccaaagaagagggggaagggagaacccaggagaaacgagagggacagcaaggaagacgccagagagcgg

SEQ ID NO: 86561 - RNA, 79 nt, Homo sapiens
ccggcgggcccgaggcggcgagagaggcaggcggagccgaccgggccagacagggaagacgaggaagaaacagcccagg

SEQ ID NO: 86562 - RNA, 57 nt, Homo sapiens
ggagagcccagagcgacccccggccaccgggcggaagaggaacccgcaagagcagaa

SEQ ID NO: 86563 - RNA, 49 nt, Homo sapiens
acacaacacacaggggcacgagacgggaaagaagcgaaaaacagaaaga

SEQ ID NO: 86564 - RNA, 69 nt, Homo sapiens
ccggggcaggaggcagaggcagcacgccccgcgccggcaagacccaccaggggccggagacccccgcgc

SEQ ID NO: 86565 - RNA, 79 nt, Homo sapiens
caccaacagcagcggcagccaagggcagaagcggaagcggagggggcaagacaacacagggcagcccaagacggcgagg

SEQ ID NO: 86566 - RNA, 74 nt, Homo sapiens
aacagccagcagcggcggaagaacagaagaaaaaacagcccggaaaggcgcgagggaacgagaaagggaacggg

SEQ ID NO: 86567 - RNA, 79 nt, Homo sapiens
gaagcgaggagaagaagaggaggcgacacccgaagccccgaccgccacagcagagagagaccaggaagcgggaccagcc

SEQ ID NO: 86568 - RNA, 72 nt, Homo sapiens
ccagaaacgcccaaaggagaaggacggagaagcgaaagccagaccggcaagagcggaagaaagcaccaaaga

SEQ ID NO: 86569 - RNA, 80 nt, Homo sapiens
ccacccagagcgcacggcgacgccccaggggaaaacccccgggaccaggccgagccccgacggggcaagaaagcccacgc

SEQ ID NO: 86570 - RNA, 74 nt, Homo sapiens
cgcccccggcccgaccagggcggccaccgagagggcggaagggcaagaaagaaggaaagcccaagagggagcgc

SEQ ID NO: 86571 - RNA, 74 nt, Homo sapiens
ccaaccgcaaccagacgccagcgggacgaggaccgagaccgcggccgggaccgaggggaagcgcaagaaagcac

SEQ ID NO: 86572 - RNA, 74 nt, Homo sapiens
gggcagaggcgggagcccgaggagagcggagaaaaggaggacacaaggaacgagggaaaccgccccacccggag

SEQ ID NO: 86573 - RNA, 83 nt, Homo sapiens
ggagacgccgggcagccgaacggagggcgacggagggagaagagaccgacccaaacccacccaagggcaggacgggaagcagg

SEQ ID NO: 86574 - RNA, 70 nt, Homo sapiens
cggaaccagagcgcgcgacaaccacacaaaacccggcgcgagagaggaccagagaaggacgaagcggcag

SEQ ID NO: 86575 - RNA, 71 nt, Homo sapiens
gcaagagagacgagaaagaacacgcggccaaacccggaggaggaggaaccgggaaagaggcacggaacaca

SEQ ID NO: 86576 - RNA, 57 nt, Homo sapiens
gggaccgcgcccgcccagcgccgcagcacgcggaccaggcacaaaggaaccaggggc

SEQ ID NO: 86577 - RNA, 76 nt, Homo sapiens
cccgcacgccgggcggggaaacccggaccgagggaacaggcacgccccacccgccagccgagcccccgacgcagca

SEQ ID NO: 86578 - RNA, 101 nt, Homo sapiens
ggggcgcaggaccggccgcaggccaccgacacgagacaaccgggagccgggaaagcggggcagcaaggcaaggaaaaaacgaagagcaggggaaaacaaaa

SEQ ID NO: 86579 - RNA, 84 nt, Homo sapiens
ggacacccgagcacagagacgaagaggaccaggagcaaacagaagaacgcaagcacaggaccagaaacgaaaggcagcagaaga

SEQ ID NO: 86580 - RNA, 56 nt, Homo sapiens
aaaggccgagccaggccacccggcacaaccaggcgcaccggcgcgcccacagcccc

SEQ ID NO: 86581 - RNA, 90 nt, Homo sapiens
ggccgcgcagagcgggaccacccgggcacagcaggcacggagggcgaccagacgaggggagacggacgggggagagaggccaaacggaca

SEQ ID NO: 86582 - RNA, 73 nt, Homo sapiens
aagaacgacgaaacggagcaaaacgggaacagcggagaagaaggaacaaagccaaggaccgaagagaaggggc

SEQ ID NO: 86583 - RNA, 73 nt, Homo sapiens
ggaagagggaagaaagaagcagcgccagagggcgaaccaaagaaggaaggcgacccaaaaccacgaagcacag

SEQ ID NO: 86584 - RNA, 82 nt, Homo sapiens
aaaaaggagccaacccaaccacgacggggccgacgagacccaggccggcaagaagccaacggagaaccaaggccaagaccag

SEQ ID NO: 86585 - RNA, 75 nt, Homo sapiens
gaaacgagccaaaaagacaagcgaaaaagggcagaccaaggacaaggaccaagaacaaaggagaagaaaccaaga

SEQ ID NO: 86586 - RNA, 77 nt, Homo sapiens
ccagccccaaaagcacgcacgaaaccggcaagccagcggaggggagcacaaagaggaggagaccccacagcccacag

SEQ ID NO: 86587 - RNA, 51 nt, Homo sapiens
ggaggaagaagcgaagcgcaggcgagacccgagcagaggccgagaggcggg

SEQ ID NO: 86588 - RNA, 75 nt, Homo sapiens
gcgccaggggcgcccgaagggccgccgcacgcagagggagcccaggcggcaggagagcaaggggcaacgaaggag

SEQ ID NO: 86589 - RNA, 79 nt, Homo sapiens
ccaaggccgagaggaaggaaacacaggggacaacaagcgggaaagaggaacaaagaccaggaacggagccgagaaccag

SEQ ID NO: 86590 - RNA, 75 nt, Homo sapiens
ggagacgcccgcccgcgccaagacagaccaagaaaccggaaccaaaagaagcaacagagaggaaaaagccgcaag

SEQ ID NO: 86591 - RNA, 71 nt, Homo sapiens
gaacaccaaacggaggagccagacccggggaggcgcacacacaccaaagggaagcggacagcaagacaggc

SEQ ID NO: 86592 - RNA, 100 nt, Homo sapiens
gcaaaccacccgcgcacagcaccaagccggggcagggccgcgcgagcaggcacgccgaggaggcaagcgccaggaccgcggggggcgagccgccgcgccc

SEQ ID NO: 86593 - RNA, 36 nt, Homo sapiens
acagagacagcccggacagacgaaccccagaaaccc

SEQ ID NO: 86594 - RNA, 69 nt, Homo sapiens
cccgcagcccggggcgaacacggacaccaacgagcgaagcaggaagcgacgaaaagaaaccagacaaga

SEQ ID NO: 86595 - RNA, 72 nt, Homo sapiens
agaaggcagccgagcaccgagccagcccaggaaaaggagagggaagagcagcacacacaggcaggagggagc

SEQ ID NO: 86596 - RNA, 81 nt, Homo sapiens
gaaaggagcggcccggaaggggagggcgaagaaaacaccagggaacggagccaagggggagccggccccaggggacccgga

SEQ ID NO: 86597 - RNA, 71 nt, Homo sapiens
cagaaagcaggcgaacccgcggcgcaaaacggacagaaagcgggacacaagcaggagcacagaccccgaaa

SEQ ID NO: 86598 - RNA, 57 nt, Homo sapiens
gaaaaagacgcgagaagccacacgggaagaccacaacaagcaagcagcagcacgcga

SEQ ID NO: 86599 - RNA, 73 nt, Homo sapiens
gggggaggcgcaccacacaacggcacgaagaggcaagaaggacaaggacgaagagaaaaaccaccgcacagcg

SEQ ID NO: 86600 - RNA, 75 nt, Homo sapiens
cacggaccaaaccaacaggccagccaacagcagacaacagcaacagcaccccaccagaaaaccagaaggcaccga

SEQ ID NO: 86601 - RNA, 83 nt, Homo sapiens
gccacgccgagaagccgccgacggaaaggcaaaaggacgcggcccagagaccccccacgggaacggaagcaacgagccagcag

SEQ ID NO: 86602 - RNA, 74 nt, Homo sapiens
gcccgccgcaccagcaagcgcggggggcaagacgccaagagaaaaggcgagagcacaaagcaccaagagccgag

SEQ ID NO: 86603 - RNA, 68 nt, Homo sapiens
aggccaccacaggaggagcagcaaaacaaaccggcgaggagaagaaaggaagcccccagcgaacggga

SEQ ID NO: 86604 - RNA, 39 nt, Homo sapiens
accgggacccaagccagcaacagaggccacaccggcccg

SEQ ID NO: 86605 - RNA, 67 nt, Homo sapiens
gaccggagagccacccaaaggccacgaggaagagcaacacacgcagaacagaccgaagaacggcaaa

SEQ ID NO: 86606 - RNA, 72 nt, Homo sapiens
caaaaccgggcccagaaacagccagagcggagcgaggcgggggaccagaggagaccgccagaggacaggaga

SEQ ID NO: 86607 - RNA, 85 nt, Homo sapiens
aaggagaaaagggggaaaagcccaggaggaagcaggagcagcccaagcgccccccacgagaaggggaacgcgggccgagagccgc

SEQ ID NO: 86608 - RNA, 72 nt, Homo sapiens
gcaggagcaccggcccaagaaacaggccgggaggcccagaaaagaacggccacgagcaggcccacagaggaa

SEQ ID NO: 86609 - RNA, 65 nt, Homo sapiens
aacagcccagcgcagccccaggagaccaacgcagaaggggaggacgcgagcggaagagaagcaaa

SEQ ID NO: 86610 - RNA, 53 nt, Homo sapiens
gcaggggcaccggggccgacgaacacacggggacaggaagcacgagcaggcca

SEQ ID NO: 86611 - RNA, 75 nt, Homo sapiens
aacgaccgaccaacaggcgaaggccgagaaaaggggccagcgagccggacgccgggaaggaagaacagccagacc

SEQ ID NO: 86612 - RNA, 78 nt, Homo sapiens
cacgacaaaagaaccagaaaaagagaaggaggcgcgaggagcgccccacaaaaccaagcgaggccaggccgccggacc

SEQ ID NO: 86613 - RNA, 83 nt, Homo sapiens
ccgagcccagcccccagaaaggaggacaacgggacccagaagagcaaacaacacccaacagcccaaagcaaaggagcaacagc

SEQ ID NO: 86614 - RNA, 82 nt, Homo sapiens
gaccagcagccaaagcccacagccggggaggcgagagaaacccagccgaagcaaaaaggacaagaaaagcgaaccccagcac

SEQ ID NO: 86615 - RNA, 85 nt, Homo sapiens
gggcgccccaggagacgcagaacgcagacccagcagcccagcgccgagcgcagggacagaggacgcggccccagagcccccgccc

SEQ ID NO: 86616 - RNA, 56 nt, Homo sapiens
caagacaaagaaaccagccgagcaaccaaaccaaagggaaccaagaccaggacaaa

SEQ ID NO: 86617 - RNA, 69 nt, Homo sapiens
agcagagaaagggaaagccagggaccagcgccgcgacgccagaggagaacgagaaagaaacccgggccc

SEQ ID NO: 86618 - RNA, 50 nt, Homo sapiens
cagaaaagaccaagaccaccaaggcaaaggcccccccaaggagggaaggc

SEQ ID NO: 86619 - RNA, 60 nt, Homo sapiens
gagaaaagaaaacacagcgcaggaaaagacccaccccaaggaagcgcccccacgagaccc

SEQ ID NO: 86620 - RNA, 61 nt, Homo sapiens
gggggcgcccccccgaggcgcgccacccccggcaccggaagagagcagaacaaacgacaag

SEQ ID NO: 86621 - RNA, 71 nt, Homo sapiens
ggagagaaaccgaagggccccgaacaacagacgaaaaaccgccagaagcaagcggccgaaaacaggacaga

SEQ ID NO: 86622 - RNA, 59 nt, Homo sapiens
gagaacacaccgagccagcagcagaaacagaaggccgggaaagcgggcgcgcgccgacc

SEQ ID NO: 86623 - RNA, 67 nt, Homo sapiens
gccgagagccaggggaaaggccagcgcagaaacgcagacacagccccgaagcgaaagagagccaacc

SEQ ID NO: 86624 - RNA, 87 nt, Homo sapiens
gggacacgggagcggcccgcacaccgagccgcccggagaggagcccggccccgacccagaacagaaggagcggcggacacacagacc

SEQ ID NO: 86625 - RNA, 85 nt, Homo sapiens
cgccccacccgagagccgcgagcgcccggccgaacccgcgaggaaaagcccagcggcccgccaggcccggaaaccagacgccgcc

SEQ ID NO: 86626 - RNA, 81 nt, Homo sapiens
ggggcgagagacggcggcggccgaaagcggagagagcgggcgggcggccgggagacccacaggcccacacgcagccacgca

SEQ ID NO: 86627 - RNA, 32 nt, Homo sapiens
gggaggcaccaagaaggccacaacagagaggc

SEQ ID NO: 86628 - RNA, 55 nt, Homo sapiens
ggcgcgcgggacgcggcgcccccggagaaggaacagggaggccaggcggcagcag

SEQ ID NO: 86629 - RNA, 78 nt, Homo sapiens
cggagaccaccgcggcgcggcagcgcgcccgagggacagaagagagccgcggccggagggaggggccgggggccaggc

SEQ ID NO: 86630 - RNA, 81 nt, Homo sapiens
ggcgcgacgacgcggcaccggccgacgccccgcccgcccagaagcagaaacggcgaggaaagagaggagccccggaaagaa

SEQ ID NO: 86631 - RNA, 71 nt, Homo sapiens
gaagccagagcgaggacgccggcagacagaggcgggcgagcggacgaaacagacggccacagagggggacc

SEQ ID NO: 86632 - RNA, 84 nt, Homo sapiens
gggggaagcagcacgggacccagcccaggccgcacggacggggggggagagacgggggccaccagcgcccccaggccgagagcg

SEQ ID NO: 86633 - RNA, 96 nt, Homo sapiens
agacaagggcagagggaacaggcagcaggaagcacggcgggcgaaacagggaaagagagggacgaaaccccagacacaagaaaaccagcaaacagg

SEQ ID NO: 86634 - RNA, 72 nt, Homo sapiens
gaagagccgccccacacgcagaaaagggagaggcaaggagagcgaaaggaaaacaaggcaccaggaccaaag

SEQ ID NO: 86635 - RNA, 80 nt, Homo sapiens
acagagcgagggaggagagagggagagccaaagaaggcccccacagagagcacacaaacaaagcgaaaccacggaagaaa

SEQ ID NO: 86636 - RNA, 83 nt, Homo sapiens
ccagcggcagcgacaccccgcagcaggacaaaaaggccagaggaaccaagaaccaacacagacagagaccaggaacacacaaa

SEQ ID NO: 86637 - RNA, 77 nt, Homo sapiens
acacgccggggggacaccaaagcccgggcaccgcaggacaacaccccccggaaagagggaggcgggcccccgaacac

SEQ ID NO: 86638 - RNA, 74 nt, Homo sapiens
gggagagaggagcacccggagcagccgggagaaggagaaaagcgagaagccgcagcaagcgggcggcaaagaga

SEQ ID NO: 86639 - RNA, 81 nt, Homo sapiens
aaggagcaaagcagcggcgcagcccgggagcagaaacgaggcccagcagagagagaacagcgaggcaccacccacacgccc

SEQ ID NO: 86640 - RNA, 72 nt, Homo sapiens
ggagaggggaaccagcagaaggggagacgggccagagaacaggacaaagagaaagccaacggaagccacagg

SEQ ID NO: 86641 - RNA, 79 nt, Homo sapiens
gggagggacagcgcccgagaccagcgccggacaccggaacggggcacgagcggggcaccacgaagagaggaccaacgaa

SEQ ID NO: 86642 - RNA, 80 nt, Homo sapiens
cagcagcaggccagagaggcgagcgcggaggaccgcccaaagacacaaggacacggcacaaacgaggaacgccaagcgga

SEQ ID NO: 86643 - RNA, 79 nt, Homo sapiens
gaggagagggcccacagcgggccccggccaggcgagggcggaggccggcagaaggggcgaggagcacagggggagacga

SEQ ID NO: 86644 - RNA, 71 nt, Homo sapiens
cagggagagggggggccaagagcggcagcgggcacagaaagacgcgaagcagcaggggaacgacgcggaaa

SEQ ID NO: 86645 - RNA, 80 nt, Homo sapiens
gaggggcacacgcccgcacgagcagcggagaaggaccacaccacggagccaggaggaagccaggacacggaaggagagac

SEQ ID NO: 86646 - RNA, 99 nt, Homo sapiens
ccagacccacgcggcgccagcccggcgggaaggaaaaccgcgcagagagccccacgcaggccccaccaggcgccgccgcgcacgcccaacccagagcgg

SEQ ID NO: 86647 - RNA, 44 nt, Homo sapiens
ccagaaacgggccgcgccaccaagagccaggccccggggcccca

SEQ ID NO: 86648 - RNA, 71 nt, Homo sapiens
gagagaggcgcccccagcacaaacgaccgccagaaccccacagccgagccaaaggccaacacaagcacaca

SEQ ID NO: 86649 - RNA, 71 nt, Homo sapiens
ccggaggcccccgccggcggagaacagcggggcgcggcaccgagggccaggccagagggcgagcaggccac

SEQ ID NO: 86650 - RNA, 59 nt, Homo sapiens
cggaaagccggcaagacgagaaagcagagacgccggggcccggcgccaccaccggggag

SEQ ID NO: 86651 - RNA, 73 nt, Homo sapiens
cccggaggggacagaacagcgcccgcccacaaccggaaacagaagacagccgaaccaagggcgacaaccagag

SEQ ID NO: 86652 - RNA, 74 nt, Homo sapiens
caggccgcaacagggggagaggggggaccccaaccagaaggcgggcagggcgggcagcggccgagccagcggac

SEQ ID NO: 86653 - RNA, 94 nt, Homo sapiens
gcaggagccaggaccaggaaggaagaccccccaagacaccgccaggcggcgcccacagcgagacgaaacgggcgccccgggcaaggggaaaggg

SEQ ID NO: 86654 - RNA, 70 nt, Homo sapiens
ccaggagcccgagagagaaggcccccggaaacgcgaaaagaaagaagaaagaagaagaaaggaaaccggg

SEQ ID NO: 86655 - RNA, 99 nt, Homo sapiens
aaaagggaaaccccagggcgagcacagggaagaaagcgaccccgcccccaaagcgaagaacaggacaccaggccgagcacgaaccgaccaacaggcgag

SEQ ID NO: 86656 - RNA, 80 nt, Homo sapiens
aaccagacagagcaacagcagaaaggaacgcccggaaaacacagcggcccccagccaacaccagcggacagaggggaccg

SEQ ID NO: 86657 - RNA, 71 nt, Homo sapiens
caaacaccaccaccaagcacgggggagccggaccccaagaccaaaccggcaggaccggggggaagagacaa

SEQ ID NO: 86658 - RNA, 68 nt, Homo sapiens
acccgaagcgggcgcgcgcacggcaggacggagggagaagaaccaacaacggaaaaccagcgggacaa

SEQ ID NO: 86659 - RNA, 59 nt, Homo sapiens
cggccgagacggcggcagcagcggcacagaaccagggccgaaaacccagaagaacggcc

SEQ ID NO: 86660 - RNA, 75 nt, Homo sapiens
cccacagagccgaggcagccgaggggcacaccagaacaacacagcagaccaagaagcaagagagaccacgacgga

SEQ ID NO: 86661 - RNA, 80 nt, Homo sapiens
cgaccagagagcggcggaaaggaaagcccgacagaagcaccgagacccaagaaaggcgagacaaggagggacaggccaga

SEQ ID NO: 86662 - RNA, 37 nt, Homo sapiens
ggaacaggccaaaagcaaacagcaaagcaagccaaga

SEQ ID NO: 86663 - RNA, 78 nt, Homo sapiens
caggagggcaggcgaggggcagagccggagagcagccccggcccccgagcaggacgcccacagcgcagcaacgcgcca

SEQ ID NO: 86664 - RNA, 65 nt, Homo sapiens
gcgacgcacgcgaagagcggagagccgccccagaacccccgaggacccgcagacacaacggaggc

SEQ ID NO: 86665 - RNA, 64 nt, Homo sapiens
gacgcgggcgagcggggcggacgccggggagacgcaggcgaggcagacagcaagcgcgggcggc

SEQ ID NO: 86666 - RNA, 73 nt, Homo sapiens
cccgaaggcgggaaagacccccgcacggcacaaaacgggccacgagaaccaggccaggaaacaggcagcaaaa

SEQ ID NO: 86667 - RNA, 60 nt, Homo sapiens
aaagcaccgaggcacaacaggaagaagacggcacgggacccccagcacaggcagcaggcc

SEQ ID NO: 86668 - RNA, 85 nt, Homo sapiens
gaaaacaaccaacagagcccgcagagcaccaggcccaccggaaagacacgcccgaagaagagacaaggaagaaggccgggagccc

SEQ ID NO: 86669 - RNA, 76 nt, Homo sapiens
gaaaaacagaagaggcagggcaaaacgagggggccagacccacgagaagcgccgaacaaggcaacggaaaaggaag

SEQ ID NO: 86670 - RNA, 69 nt, Homo sapiens
cccaaccggcggcgcagacccgggaggacgcccgaccccacccagcccgcaccgggcagccaggccccg

SEQ ID NO: 86671 - RNA, 80 nt, Homo sapiens
gagccggagacgagaccagaggccgaaccgggcgacaagaggccgggcgccccgcaggacacaagagaccacggaggaca

SEQ ID NO: 86672 - RNA, 89 nt, Homo sapiens
gacacacgcgaccggcgaggcccaccaagccaggaagcgcacgacaaaagaaaaagccgcagggaacaaccagaaaaggaagaagaaac

SEQ ID NO: 86673 - RNA, 72 nt, Homo sapiens
ccccccgagggcgggggaaaggaaagcaagccaggaggaaacgacaccaaaccggggggggcggaggacagg

SEQ ID NO: 86674 - RNA, 77 nt, Homo sapiens
aagaggagaccgcaaaacacacgaccggccacacgccagagggcccaaggaacccacagacagagagaagggggagg

SEQ ID NO: 86675 - RNA, 82 nt, Homo sapiens
ggccgggcccagcacccgccgccaggcgccgggggccgaacggcccggacacccgcagggccagcaggagaagaaagaaacc

SEQ ID NO: 86676 - RNA, 74 nt, Homo sapiens
agccgcacccccgccggacagacaggggcgggggaggaagaaacacccgaaaaacagacgccgaaaacaccggg

SEQ ID NO: 86677 - RNA, 70 nt, Homo sapiens
cgcgcgggagagggccaccgcccgccacccgcgcgccgccgccgaggagaaaggagaaagcccgaacgcg

SEQ ID NO: 86678 - RNA, 76 nt, Homo sapiens
ccccgcgcagcggcccggcggggcccggcaccaggaccaccgcggcagcacgcggcgcccgacacgacaaccacca

SEQ ID NO: 86679 - RNA, 77 nt, Homo sapiens
agccgaggaccaccacagaaggaagaaggcgcggccgaacccagcgagaaaccaggaaccaccccgggagccgagcc

SEQ ID NO: 86680 - RNA, 77 nt, Homo sapiens
cacgagggacaacccggcggaccaagccgcgggagaccccaagaagaagcggaagaggagccgcggaaccaagacac

SEQ ID NO: 86681 - RNA, 74 nt, Homo sapiens
agaaaaggcagaaagccaacagaggaacacgacaaaaaaaagaaaggcaagccaagaggaggagagaaagaaag

SEQ ID NO: 86682 - RNA, 72 nt, Homo sapiens
aaccgaacaggaccaaagcggacacccgagcaccgaaggccacagcgaaaagaaacagaaaaacgcggaaac

SEQ ID NO: 86683 - RNA, 82 nt, Homo sapiens
ccccggcggcgggaggcccggccgggcagaaacggcgaggaaagagaggagccccggaaagaaaaggacagacccggccaga

SEQ ID NO: 86684 - RNA, 74 nt, Homo sapiens
ccgaggcgggcgacaggaaagcaacccaccacaagacaaagaccaccaggacacgaaagcaagaccaagaaaag

SEQ ID NO: 86685 - RNA, 84 nt, Homo sapiens
gaagaggcagcagaagccagggcagcgaaagacagagacccaggacccagagagggaccagggccaaagaagagccggggggca

SEQ ID NO: 86686 - RNA, 74 nt, Homo sapiens
gcgagagaaacaaaggacggaaacgccgaggaacccggcgaggcggcaggagcaggggagagaagacagaagag

SEQ ID NO: 86687 - RNA, 73 nt, Homo sapiens
cgcccccagggcagaaggcaccaaaggcaggcagaaacccaacgggaacgaagggcgcagaaaaggggagagc

SEQ ID NO: 86688 - RNA, 85 nt, Homo sapiens
cgagagccagagaccacgggcagcggaaaaaagccaccgaaggcccagagggaggcacaacagcgaggacaccaccgagccccca

SEQ ID NO: 86689 - RNA, 75 nt, Homo sapiens
cgaggaccgcgaagaggaacaagacagaaccgcaaggccacaaaccagacggaagcagccacagagccgggccgg

SEQ ID NO: 86690 - RNA, 78 nt, Homo sapiens
accacggaagaagaaggaaggaaaccagagaagaagagagacgaaaaggcaacagaggccccgcaaaggaggaggacg

SEQ ID NO: 86691 - RNA, 76 nt, Homo sapiens
cgcccaacaccgaacaccgaaggggcaggaccagcgcccggcaggcgccacgcgccgcagaccgaccggcacgcaa

SEQ ID NO: 86692 - RNA, 81 nt, Homo sapiens
cggggcgcacgcggaggacgcgagggggacgcgccggccgcgcccaaagagagcaacacacacaggcgggagcgcagagca

SEQ ID NO: 86693 - RNA, 69 nt, Homo sapiens
ccgcgaagacccccagaaaaccaaagacaagcaggggaccaaaacaaccccggaagagaggacaaacaa

SEQ ID NO: 86694 - RNA, 55 nt, Homo sapiens
acgccgcccagacaaccgcgagagcgagacaaaacagggcaaggcgcccagaagc

SEQ ID NO: 86695 - RNA, 73 nt, Homo sapiens
ccgggcagcccacgagacgaacacgagcgagacagcacacagccagcaggggcagaagcagcagacggaacga

SEQ ID NO: 86696 - RNA, 77 nt, Homo sapiens
gaacagacacggggaagcgcaaaaacaagacggggcgccccacagaggggcgacggccaggcgggagagaaagcaac

SEQ ID NO: 86697 - RNA, 74 nt, Homo sapiens
gacggagaacagagcaaagacagcaaaaaaaaggaagcacaccagaggcgcgagccggcacgaaacaaaggagc

SEQ ID NO: 86698 - RNA, 72 nt, Homo sapiens
gaccacccccaaacggaaagggcaggaagaccaggaggggcgccacacagaggcgccaggagggaagccagc

SEQ ID NO: 86699 - RNA, 77 nt, Homo sapiens
ccgcaccgccgccacgccacacccgcaacccgggcccgcgcacaagaacgaggaccgaggaccggaagaagcagagg

SEQ ID NO: 86700 - RNA, 87 nt, Homo sapiens
agcagcagcagacagcagacagacagccaggcgcccagaggggccccggagccagacgcacccccagacgccgacccagaaagccag

SEQ ID NO: 86701 - RNA, 61 nt, Homo sapiens
cagacacagagcggaagagaaacggcgaggaaagagaggagccccggaaagaaaaggacag

SEQ ID NO: 86702 - RNA, 64 nt, Homo sapiens
cccacacgaagagacgccggagggaccacaagaggcccacgcggaccggcagcgccaccggacc

SEQ ID NO: 86703 - RNA, 68 nt, Homo sapiens
ggcggaggaaccgagcgggccgaccaccgacaggagaccgagaagcaaagcgccgggcaccagcaagc

SEQ ID NO: 86704 - RNA, 53 nt, Homo sapiens
ccgggacaccgagacgagaggcacagcaagaggcacacccagaagccacagga

SEQ ID NO: 86705 - RNA, 79 nt, Homo sapiens
caggcccgaggacagccagcccccccccaacagaacagggcaaagacaggcacagaggccaacacagaccaaggcgcag

SEQ ID NO: 86706 - RNA, 74 nt, Homo sapiens
aaggaaagacgccaaagaaagcagcaacgaccaagggacagacagcaggaaagcagcgaacacgccgagccaaa

SEQ ID NO: 86707 - RNA, 74 nt, Homo sapiens
caggcacccgggcccagccgggaacccccacgcggccagcgaaaacgcccaggaagcagcaaaagaccaaacca

SEQ ID NO: 86708 - RNA, 73 nt, Homo sapiens
caacacgcccagcaagccacaacccgggcaagggagcacacagccgcggcagggaaagaaaagcaaacgccag

SEQ ID NO: 86709 - RNA, 77 nt, Homo sapiens
caaggaagccaacggaccaaaaacaccacgcaaggaaggcaaaccgacaccagcgacacaagcgcgagggaaccaca

SEQ ID NO: 86710 - RNA, 77 nt, Homo sapiens
gaaaggaagaaggaacccacgaagcaaaaaaacacacccaagcaccgggaccacaacgaagaaaggagcacaaaaga

SEQ ID NO: 86711 - RNA, 73 nt, Homo sapiens
aaacacggggaacaaacggcaagagccagaagcccggcggaagggcacgaagaacacaaagcaaaaaggaaaa

SEQ ID NO: 86712 - RNA, 68 nt, Homo sapiens
ggaaagcacagggggaaaggagagccaaagcaagggacaagcagacgaaaagcaagaagagacaggag

SEQ ID NO: 86713 - RNA, 56 nt, Homo sapiens
cgggagacgcacagcaagagcccggacaccggaagcgggaaagggaggaagagcca

SEQ ID NO: 86714 - RNA, 84 nt, Homo sapiens
cgcccgccgcgccgccacgagcggccgccaccccagccgcagaggggaagagcgccgacgccaggacggagagcagccggcccc

SEQ ID NO: 86715 - RNA, 82 nt, Homo sapiens
caccggcgggaggaacaaaagaaccaacagggcaaaccacgacgaagaaagacgaaaaggggaaaaacgcaacgcgagagag

SEQ ID NO: 86716 - RNA, 81 nt, Homo sapiens
agagacccagcaacgggcagcgggcgcaggaccccgccccacgcccagaaagccaacaggcagaccagagacagcgccacg

SEQ ID NO: 86717 - RNA, 71 nt, Homo sapiens
ccccgccccgcggcgggccgcgcccggccgggcccaacggccagccccaggagcacccaaccaccaagggc

SEQ ID NO: 86718 - RNA, 68 nt, Homo sapiens
ggacgggccagcaagacacaggaaacccccgagaagcgcaccaagaacagaaggcacaaacaggcaag

SEQ ID NO: 86719 - RNA, 76 nt, Homo sapiens
caaagaagagacaaaagagagagcggaaacgagggaaaggacaagacgcagaggaagggggcggcgggaggcccag

SEQ ID NO: 86720 - RNA, 78 nt, Homo sapiens
gacgcggaggacgcaccccccgaggcgccgcccacacgcaagaaaaagagccaaaaaccgaacacccggaaggggaca

SEQ ID NO: 86721 - RNA, 60 nt, Homo sapiens
aggagggcgagacaccaaccaggacagaaacaacagccaccagcggccacgacaaagagg

SEQ ID NO: 86722 - RNA, 123 nt, Homo sapiens
agaagggcaccagggaagccagggcaagcgagcaaccacccggggacgagccagagacaggacacgaacaagccgaaggacccgagcaccgacacaccgaagcacccaacaggacggagagaa

SEQ ID NO: 86723 - RNA, 79 nt, Homo sapiens
ccccagaagagaccaacgccaccaaccaaccggaagaaagagggccacggacagaggcgcagcagaggaaccgcagaag

SEQ ID NO: 86724 - RNA, 59 nt, Homo sapiens
gcagcagaaggcagcacccggccgacacacggacaggcaggcgcagaccaagagcagac

SEQ ID NO: 86725 - RNA, 66 nt, Homo sapiens
caggaccagggagagagacgaccacaaaaaggggggaagcaggcgggcaacagcagggacgagaag

SEQ ID NO: 86726 - RNA, 61 nt, Homo sapiens
ccccggagcggagaagcagaacacaccagaggaggaggcccgcagcgacaggagggagcgc

SEQ ID NO: 86727 - RNA, 69 nt, Homo sapiens
acggggcgcgccggcccaggcgcacacggaaggcccgggcaacccagggggcaggacgaccagcgggag

SEQ ID NO: 86728 - RNA, 85 nt, Homo sapiens
cggcgcccgcagccccgacccggccccggacggagcgccggccgcaccaccgccccggccggcccaccgggcggacccagaacgc

SEQ ID NO: 86729 - RNA, 78 nt, Homo sapiens
cgcaggggcgccccccccggaccaccgcgcgccggggaccagccacaagcagaagaaaggggcaaggaaaacgagagg

SEQ ID NO: 86730 - RNA, 77 nt, Homo sapiens
gagcggagggagaccgagcggcggcggcaagcggcgcgagcggcgaggccaggccccaacagccgaacgaaaacccc

SEQ ID NO: 86731 - RNA, 72 nt, Homo sapiens
cagcgcgacgggcggacggaggagaggcgcgaacagggcccacccgccacgacacaggggaagaagaccacc

SEQ ID NO: 86732 - RNA, 86 nt, Homo sapiens
ccggcggcgccacgagagcgggcagcggaggaggagcacagaccagcgcgcgaccggagccccacagcggcacaggccccagccaa

SEQ ID NO: 86733 - RNA, 76 nt, Homo sapiens
agacgggccgcacccgccccccgcgcccgccaccggccgccgcccgaaaacgcacaaagacgcccaccgaaaaggc

SEQ ID NO: 86734 - RNA, 43 nt, Homo sapiens
caaacccacacggcaccaaagggcagcgcaagagaggccacaa

SEQ ID NO: 86735 - RNA, 84 nt, Homo sapiens
aggagacgccccacgaggcccaaaccgccaagaggcagaaacggggacacaagcgaaaggcaacggcgcacagaacaaaggacg

SEQ ID NO: 86736 - RNA, 81 nt, Homo sapiens
gggccgccccaggccgcagggccagagagagaggcgcaggacgccaggacacgcccaccaagaaagaaccggaaaggggac

SEQ ID NO: 86737 - RNA, 94 nt, Homo sapiens
caagaagaagacagaacgcccccaccaccgcaaacaacggcggaaaacccgaagcagaagcccgacacaggcacaagaccgagcaggcacagag

SEQ ID NO: 86738 - RNA, 82 nt, Homo sapiens
gacgccagcgccgaggcgcggccgcggcggccgcgccccagggcgcggggacgcacacccgagcaccggaagaggccccacc

SEQ ID NO: 86739 - RNA, 73 nt, Homo sapiens
gagcggaggacacccaacccggagcagagaaagggggaggcggacccggcaacacgaaccggaaagccaagga

SEQ ID NO: 86740 - RNA, 79 nt, Homo sapiens
aaggccccagggcccccaaacgcacagaaagagcgaacacccagaaacggagccaggacaaaaccaggcagaaccaaca

SEQ ID NO: 86741 - RNA, 76 nt, Homo sapiens
gaccacagcacagccgggaaggggagccaccagccccccgccccgacaggggccccaccagccaacacccccccca

SEQ ID NO: 86742 - RNA, 70 nt, Homo sapiens
ggcagcgaggagcgcagacaaagaaggagagcgcaaccaacccacgaccgcaacgcaagcagaaaggagg

SEQ ID NO: 86743 - RNA, 80 nt, Homo sapiens
cggagcccggccccggggaacagggagcgcccggcgcacagcgccaggggaggaccaaaaggagagcaagcccgacaaga

SEQ ID NO: 86744 - RNA, 71 nt, Homo sapiens
gaaggaccaagaaccagggaggaacacggccaaccacaaagaacaacacagaagcgaaggaacagaacagc

SEQ ID NO: 86745 - RNA, 74 nt, Homo sapiens
ggaacccgcagcacaccagggggcaggcccgaacgcaaggagggacaggacggaaggagcggaggaagacacaa

SEQ ID NO: 86746 - RNA, 104 nt, Homo sapiens
ccagcgagggggaggagacgcgcggggcgggccgccagcggggacaggcagccacaaacggcagaacgaagcccccggcaccaagaggaagcaagacaaggaac

SEQ ID NO: 86747 - RNA, 76 nt, Homo sapiens
ggggggagcggccagcaggagcgccggggccggggcgaacgcggccggagacggcgggcggcagaaaacggggaag

SEQ ID NO: 86748 - RNA, 55 nt, Homo sapiens
aggaaaaccagcccagacagcaaccacaacagcaagcagcaaaaagcggaaccac

SEQ ID NO: 86749 - RNA, 79 nt, Homo sapiens
aacaccagacacggaagccacgccgacacggcgcccccgacccggggccgggggggcggggaggccagaccaccacgcg

SEQ ID NO: 86750 - RNA, 73 nt, Homo sapiens
agcgcggaaagcacccgcgagcgcaacgggaagaggaggggcccgagagaagagaagagcggaggaacaggac

SEQ ID NO: 86751 - RNA, 66 nt, Homo sapiens
gaccggacaccccagaggacacggccacaggcaagaacggaagcacgggcggaggaaagcacaagc

SEQ ID NO: 86752 - RNA, 75 nt, Homo sapiens
gggccccgccaccggaaggaacaaaggcaaagcgaaggcggagcaggagaaagcggcacagaccccagaggaaaa

SEQ ID NO: 86753 - RNA, 67 nt, Homo sapiens
gaaccaaagaagagacaaaagagagagcggaaacgagggaaagggcgaagcgagaaacaaggcagga

SEQ ID NO: 86754 - RNA, 76 nt, Homo sapiens
gcaaaaccacccgggaaacaggaacccccaccaacaccgaagaggcagaaccaaaggcaagaaggaaaaaacacga

SEQ ID NO: 86755 - RNA, 71 nt, Homo sapiens
agaaaagcacaaagacacgagaagggaccgcgaccgaccagagaagacacacaacaaccccacggagcccc

SEQ ID NO: 86756 - RNA, 41 nt, Homo sapiens
agccagcgaggcaagaacagagaacaaggcagaccaaccac

SEQ ID NO: 86757 - RNA, 78 nt, Homo sapiens
gccagaagcaccacggaaaccagagaccggccagccacagagcagagaaagccggaccagcagggagccggggcaacg

SEQ ID NO: 86758 - RNA, 60 nt, Homo sapiens
aggaccaagaaccaggccaaaggcccgcagaaggcagagaaaaaacagacacccccgcaa

SEQ ID NO: 86759 - RNA, 84 nt, Homo sapiens
agaacgaaaaaaccgggaaacacgggagaaccccacggaccccggaggaaaagcggaagcggcagcggcgaacgccggaacgga

SEQ ID NO: 86760 - RNA, 90 nt, Homo sapiens
cgcccaggcccaggccacggccgccgcagggcacacagggaccaagaagccccggggacacgcgagaaaagacgccgaagggaagaccag

SEQ ID NO: 86761 - RNA, 64 nt, Homo sapiens
cccacagaggggcgacgaaggagagaaccaggagaccgaagcaaccaacaagcgaggaggaaag

SEQ ID NO: 86762 - RNA, 73 nt, Homo sapiens
acgcgcggaaggcagcgcccagcagcgcagagaggacaccgagaaaaagggccggccgcagacccaaaaaccc

SEQ ID NO: 86763 - RNA, 58 nt, Homo sapiens
gcggggggaccggcgggcgggaacgggaagggcacaggaagaaaggaccaaggaaaca

SEQ ID NO: 86764 - RNA, 70 nt, Homo sapiens
cgggcagcaccccgcagacaccggcgacaccccggcagacaggaacggccgaacacagagggagaagagg

SEQ ID NO: 86765 - RNA, 40 nt, Homo sapiens
acaggaaccggagcgggcacgccagcacgcaggcaggagg

SEQ ID NO: 86766 - RNA, 69 nt, Homo sapiens
aggaacgggggagcccacaggagccaggcggaaccaagaagaaccaaagagacggggccaggggagagc

SEQ ID NO: 86767 - RNA, 76 nt, Homo sapiens
gaagaagcaggagcgacaaacgggaaaaaagccaagcagagaccagaacagccaagcaggaccaacacagcggagc

SEQ ID NO: 86768 - RNA, 81 nt, Homo sapiens
ccagggaagagccggaggcagaggggggaccccggacggaccggcaggaaaaccaaggaaaaaagcagaggaggcacagag

SEQ ID NO: 86769 - RNA, 43 nt, Homo sapiens
gacaaaaacggcccggagaggagcgcggcgacagagcagagag

SEQ ID NO: 86770 - RNA, 80 nt, Homo sapiens
caagcgcagccaggcggagagaggcgccccgcagcccccaagcaggcggcacagcaaacacacaagagccagcaaaggga

SEQ ID NO: 86771 - RNA, 86 nt, Homo sapiens
cccgcgcgcgcccgggaggaaggaacgaggcaaggagcaaagcagcggcgcagcccggggacccaccaacaaccgaaaacagggga

SEQ ID NO: 86772 - RNA, 73 nt, Homo sapiens
acaaccccggccaggaacaagggagcccgccaggaacaagcgcgagaaggaacaaaccaggagaaaccgaaca

SEQ ID NO: 86773 - RNA, 80 nt, Homo sapiens
cagaaagaaagaggaggagagggcaacgggagcaaagcacagccgggccaaagagggaggcacagcgggacccccggaga

SEQ ID NO: 86774 - RNA, 81 nt, Homo sapiens
cgccaagccgcacgcaaccaccgcccggccacaccaggaaccaaaggcagacccagaagagcacaaaacagagaaaaggga

SEQ ID NO: 86775 - RNA, 74 nt, Homo sapiens
acgaagaccgggcgccagggccgccgccccgcccgggcaaagccccggaacaagacaacaggagaaagaaagaa

SEQ ID NO: 86776 - RNA, 49 nt, Homo sapiens
ggggagagccaccggccccagcaggagcacccacgggagaccggggggc

SEQ ID NO: 86777 - RNA, 71 nt, Homo sapiens
accccaccggccgacagccgcgacggcgagcccgggccgcgcccgaggaacaagcagaaagcacgaacaac

SEQ ID NO: 86778 - RNA, 81 nt, Homo sapiens
gccacgccgcccaggagacccccgcgcaccaccagaaccaggagaaggaagcagagcgaggaggcagcgacgggagccagc

SEQ ID NO: 86779 - RNA, 68 nt, Homo sapiens
gcgaaggagcaccgacacggaccgaaagacggcgcgagcccccccgcagcacaacggcagggggacgg

SEQ ID NO: 86780 - RNA, 61 nt, Homo sapiens
ccggagccagacagcagccaagaccccgaccgccacggacccgggcgccaccccggcgcga

SEQ ID NO: 86781 - RNA, 74 nt, Homo sapiens
aagaaacccacgaaccaaaagggacggacaaaggaacaggaccagaaaagaggaaccggaaaacaaaaagcaag

SEQ ID NO: 86782 - RNA, 83 nt, Homo sapiens
ggcagcgcccggaccggccgagaggaagacgagccgggaggaacggcccggaaacaggaggaccccgcagccgccccaggcgc

SEQ ID NO: 86783 - RNA, 83 nt, Homo sapiens
gagcggcggccgccacaacagcacagccggcgacggcgcgacagggaggccgcacagaggaggagcaccaaaccgagggaggg

SEQ ID NO: 86784 - RNA, 73 nt, Homo sapiens
agggcagacaccacagaggcaaagacaccaccacaacaacagggacacacaggaagacgaacacggaacgggc

SEQ ID NO: 86785 - RNA, 69 nt, Homo sapiens
gaaagccagccagcccacacgcacacgagccagagaagaggccgacgccccgagaaaagcgaacacagg

SEQ ID NO: 86786 - RNA, 57 nt, Homo sapiens
gacccccgcggcgcgcagcccagcagagacgcggacagggggccagagcaaggaaag

SEQ ID NO: 86787 - RNA, 77 nt, Homo sapiens
accacaaaaaagagacccacagccagcaacaccgggaaggaacaaagcagagaaaccaaaaggccagacgaacacga

SEQ ID NO: 86788 - RNA, 79 nt, Homo sapiens
acagaacagcacgaccagaggggaagccaagcaaacgcagaaggacgcccacgagcaaccaagaaaggagcacaacagg

SEQ ID NO: 86789 - RNA, 79 nt, Homo sapiens
ggacaccgacgcgccacgcggagcccgagggaccacagagcaccagccgcaggaaccccccaccagccccacggccagc

SEQ ID NO: 86790 - RNA, 76 nt, Homo sapiens
ggcagccagcggcggcgaccaggagacccgggagccccagaaaaaggggcccacggagggccgaacacgaaaagac

SEQ ID NO: 86791 - RNA, 61 nt, Homo sapiens
aaaacagcaagaacccaaaagggagaccgcacacaccgaggggagagggagcccggacagg

SEQ ID NO: 86792 - RNA, 71 nt, Homo sapiens
aagccggggacgacacagcacaacagccacaaggcgagccaagccgcgggcaacagggccagcgcggaggc

SEQ ID NO: 86793 - RNA, 60 nt, Homo sapiens
gcggaccgcgggggagaacaaagccacaccaaaccagaaaagaacaaaacgacccggaag

SEQ ID NO: 86794 - RNA, 89 nt, Homo sapiens
cgggaacggccagagcacgcagcgagcgagaagaggaggacaacagcacaaccggggggcccaaaggaccagccaaaacccacccaagc

SEQ ID NO: 86795 - RNA, 69 nt, Homo sapiens
gagaaagcaccaacagcagcggcagccaagaacaagaaccagaggacaacccagaagcccagaacagcg

SEQ ID NO: 86796 - RNA, 84 nt, Homo sapiens
agacccggcaggaccaggacccccgcacagcgaccgacgcgaacaccaggggaaaccggcccgaaacagggcccaccagccccc

SEQ ID NO: 86797 - RNA, 73 nt, Homo sapiens
gcacggagcgccgaaggacccgcaggaaagggaacacggggaaacgagcaagcagaaccgcaaaggcagaaga

SEQ ID NO: 86798 - RNA, 61 nt, Homo sapiens
cgacgggaagcccacagcccagaggacggaagacagaaccgaagccaggacagcacagccg

SEQ ID NO: 86799 - RNA, 73 nt, Homo sapiens
cagccgagcggccaaaaccacaggaaagaacaagggccagcaaacagcgaggcggcaggagcagaccgcgggg

SEQ ID NO: 86800 - RNA, 79 nt, Homo sapiens
gcccagaggaaagcgagcccaacccgcggccccggcgccaagccgccgcaccccggccaggcacagggaaggacccaga

SEQ ID NO: 86801 - RNA, 71 nt, Homo sapiens
gcgagcgacaacgggacgggaaacaacagccaggcgagcccgaagagcggcacgaaagagaaaggaaaccc

SEQ ID NO: 86802 - RNA, 59 nt, Homo sapiens
cggaaggacaccggacccaaaacaggggagccgccaccaaaagcagacggaaaacccac

SEQ ID NO: 86803 - RNA, 74 nt, Homo sapiens
ggagagggaggagcccagaccgggcgacccgccaaccaaaggcaagaaccggagcaggagaaaagccggaaaga

SEQ ID NO: 86804 - RNA, 66 nt, Homo sapiens
caacggagcaagcggaacacgacccccaggaaagaaggaacacagcccgccccagcggagcagccg

SEQ ID NO: 86805 - RNA, 38 nt, Homo sapiens
gggacggggcccgagggccccagacggcaccaaaggga

SEQ ID NO: 86806 - RNA, 74 nt, Homo sapiens
agaacaacacagccagccccccgagggagggacaagaaagacagaaccagcacagcaaaaaaggcagcgcaccg

SEQ ID NO: 86807 - RNA, 73 nt, Homo sapiens
cgcgggcgcccgcgcgcgccccgcgagcccagagggaacccaccagaaaacgacacacaaacgcagccaaccc

SEQ ID NO: 86808 - RNA, 73 nt, Homo sapiens
gacacaaacagcagggagaagagacaacaagacaggggaagcaacagagggcccggggacagcaccgacccgc

SEQ ID NO: 86809 - RNA, 85 nt, Homo sapiens
cagcagcggcgaaaaaggagaagggagaagcacacaccagaaaggagagaagagacgaggaggaggggagaccgcggcaggacac

SEQ ID NO: 86810 - RNA, 67 nt, Homo sapiens
agccggcagaaaagggaacgaagagacaaggacaagaacgcaaagggaaacccagacgacaaggaag

SEQ ID NO: 86811 - RNA, 72 nt, Homo sapiens
cgaaggagcagggagggcgaacgccagggacaagcaaggggccaaggagccaaggaggaaacccacaacaga

SEQ ID NO: 86812 - RNA, 80 nt, Homo sapiens
cggccggagcagcagcccgaggggaaccccgccagacagccagacaggaggaacaggaggaccgcagccagcagagacag

SEQ ID NO: 86813 - RNA, 80 nt, Homo sapiens
ggcggggggagcgggaagggagagagaaggcccaaaagccaggggccgacggacaagaggaagaccaggccccgaccacg

SEQ ID NO: 86814 - RNA, 76 nt, Homo sapiens
ggaggggggcaggggccacgcgccgccacacacgaaggaaacagcccgaacgcacagaagaaaccagcgcccagcg

SEQ ID NO: 86815 - RNA, 57 nt, Homo sapiens
gccgagagggagggccggcggaagagaaaaagcggaaaaccacgccacgagccccag

SEQ ID NO: 86816 - RNA, 70 nt, Homo sapiens
aagaacacagccgaaacagacgagccaagaagggacacagacaaaaagacaggcaagacaaacagagaac

SEQ ID NO: 86817 - RNA, 52 nt, Homo sapiens
accagaagagagaggcgagacagagggaaagaaccaccaccaacgagacaca

SEQ ID NO: 86818 - RNA, 76 nt, Homo sapiens
aagagaaaccacacagcgcaacaaagcgccaccccggcacaaaaaggccaaagaagaacaacagaggaggaaagaa

SEQ ID NO: 86819 - RNA, 58 nt, Homo sapiens
acgggcgcggcccagcgagagccgcgagcaccacgagagcacaagccggacccccacc

SEQ ID NO: 86820 - RNA, 86 nt, Homo sapiens
agagcgggggagccacggcaccgaacgcggccaagggccggccgacaccgagagcccgagggaaaagacaggcaacaggaaagcaa

SEQ ID NO: 86821 - RNA, 75 nt, Homo sapiens
gcccccgggggacggaggaggccgcgccgagaaccgaccgaggaagaccgcaggaaagcaggaaggcaagaaagc

SEQ ID NO: 86822 - RNA, 85 nt, Homo sapiens
agggggcagaacccagaggcgggaggggccgggaggcagaggggcaggggaagaggacaccagcccgggagaagaggcaacaccc

SEQ ID NO: 86823 - RNA, 75 nt, Homo sapiens
gcacacgaccagccccgcgaaccgaggcgaggggcccaagccacgacggacaagaggcacacaccaggaagagag

SEQ ID NO: 86824 - RNA, 75 nt, Homo sapiens
cggaacgcagacagcaacgaaccaaaaaccaaacaacaaccagagaccgagcccagcggacccaaaggacccccg

SEQ ID NO: 86825 - RNA, 73 nt, Homo sapiens
cgaaagaggcggcccaggagcggcggcgaagaaggaggcaggcacggcccccagggagaggaagccaggcacg

SEQ ID NO: 86826 - RNA, 73 nt, Homo sapiens
gccagacacgggggaaaaccggcggcccaagacagggcacaagggcacgggagccgccccacccggcagagca

SEQ ID NO: 86827 - RNA, 85 nt, Homo sapiens
cgagagcaccacaaggccaaggaccaaaaagagccaagcgagaagagagaaccacaaagggcagagcaaagacccagaacaccaa

SEQ ID NO: 86828 - RNA, 71 nt, Homo sapiens
ggcaagacgcgacacgcgcagaggacaaccaacaacacacacccaccacggaagacaaaaaggaccaagag

SEQ ID NO: 86829 - RNA, 84 nt, Homo sapiens
agcccgcacggccgagggcagagcgacggggagaccggaaaaaggagccgaggacgacgcaaagcaggaggaaaagacgaaagg

SEQ ID NO: 86830 - RNA, 78 nt, Homo sapiens
cccaccccaggccggggcgcacgcggccccacgcagccagccccgagaccgagcccagcggacccaaaggacccccgc

SEQ ID NO: 86831 - RNA, 75 nt, Homo sapiens
ccagagaagaagggccgcgaggaaaaggcggcccagggcagcagcacacaaacaaccacaaacaacagccacagg

SEQ ID NO: 86832 - RNA, 74 nt, Homo sapiens
gggcaagagcggaggagagggaaggagccagcagcaggggccgagagaaagagcccgcgaaacacaagcgccag

SEQ ID NO: 86833 - RNA, 79 nt, Homo sapiens
gcgggcagggagcaggaggcacagcgaacagagggcgaccaggagagaagaggaaaaggacaggagagggagagaaacc

SEQ ID NO: 86834 - RNA, 70 nt, Homo sapiens
cacgcggccagcgaaaacgcccagggcaaggccagagaaggcgggagaaagacacgaaccacagaacgca

SEQ ID NO: 86835 - RNA, 75 nt, Homo sapiens
ggcggggaacagccggaagggcggggggcgggccggaggggagacgggaggcagcgcccaccgcccgggagcggc

SEQ ID NO: 86836 - RNA, 77 nt, Homo sapiens
ccaccggagacagcacgcgggcgcgggaaagcccccgcccaaaccacgagggaaaaacgaaggaggcccaaccacaa

SEQ ID NO: 86837 - RNA, 101 nt, Homo sapiens
aaggacacgacgacggaaggagcagaacaaacggccaagaagggccaccccacagacgcccgcaaaacccacgaaaagagacagggcacaaggccccaagc

SEQ ID NO: 86838 - RNA, 63 nt, Homo sapiens
ggcaggcccagccaggacggagaaacaccaccaagggggaggagggaacgggccagggagcag

SEQ ID NO: 86839 - RNA, 67 nt, Homo sapiens
cggcggacgcaccagccaagaaggacagcagaagagcaacggaaagcccaagaaagcaaggaagcag

SEQ ID NO: 86840 - RNA, 35 nt, Homo sapiens
agcaaaccgggccacagaccaccgagcagcgagac

SEQ ID NO: 86841 - RNA, 64 nt, Homo sapiens
ccgggccgcgaccggccccggagcacagaaggaagcagccaccccgccaggccccccgcccgcc

SEQ ID NO: 86842 - RNA, 68 nt, Homo sapiens
ggggaggcgggaccagacgaggaacagcaaaaagggcgcgcgggggcacagcccaggcgcagcagcgg

SEQ ID NO: 86843 - RNA, 75 nt, Homo sapiens
ggcccggcacgggcacacggggcaccgagcacagggagcaggccgagcaaccgggacaggcccagaagagcggag

SEQ ID NO: 86844 - RNA, 77 nt, Homo sapiens
cgcaccgcagccggaggagcggccgaagggaggaaccgaaaggaaaccgaggacacagaaaagggcacagcaaagca

SEQ ID NO: 86845 - RNA, 96 nt, Homo sapiens
cagcgcgggcggagacaggccaacacgcgggcagcgaacaagcgggagcaaggagggcgaagagcgaggagacggcagcccagccacgcacagaca

SEQ ID NO: 86846 - RNA, 53 nt, Homo sapiens
gaggccggaccaaccgcgaaaagacagggaagaagccaaaacagaaggggcaa

SEQ ID NO: 86847 - RNA, 72 nt, Homo sapiens
ccacggaccagaaaacacaggacaagcagcaaagggggaacagacgaaaggcgaccggcccgaggaccgccg

SEQ ID NO: 86848 - RNA, 89 nt, Homo sapiens
agaagcgaacaccacaccaacagaccaagacgagcgagcccgcggcgggcacccgagcgcccagagccaaaccagccagcacgggggcc

SEQ ID NO: 86849 - RNA, 82 nt, Homo sapiens
gcccccgcccagaacagcaagcacaccgaaaacccccccaggggaaggggcaaaaaaacaaaaaaagaagaccgaccacaaa

SEQ ID NO: 86850 - RNA, 75 nt, Homo sapiens
aagacaagaaaagaaagaaagccacaccaaaagccaaggagaccaaaaaggaacaagaaagaacaaaaccacagc

SEQ ID NO: 86851 - RNA, 72 nt, Homo sapiens
cagaacaaaaggaccgcggcagacacagaccagcgcgagagaacaccaaggagccccaaaccaaagagagcc

SEQ ID NO: 86852 - RNA, 72 nt, Homo sapiens
gagccaagaacacggccacccaacagaagggggaagaaggagccgcagccagaaaaggccagccacaaagag

SEQ ID NO: 86853 - RNA, 76 nt, Homo sapiens
gcgggacccccgccgccccgggggccggacggccccaggggcgccacagccgaggcagcccggggggccccccgag

SEQ ID NO: 86854 - RNA, 43 nt, Homo sapiens
agcaagagcggagcagcagggccgagaagcaaggaagggaaac

SEQ ID NO: 86855 - RNA, 86 nt, Homo sapiens
cgccgacggcagccggcaccgacggcggaccgacccgagccggacgggaaaaacaccggcacgagccggcagccagcggacgcaac

SEQ ID NO: 86856 - RNA, 76 nt, Homo sapiens
caggcgccgggccacaccaggcagcacgggagaacccggacgggacccaagcggggccaaacggagagcacagagg

SEQ ID NO: 86857 - RNA, 75 nt, Homo sapiens
ggaacacgaagcggcagcggagaagggcagagggcaggccggccccgcaagcggcgcggcggaagagagagccac

SEQ ID NO: 86858 - RNA, 72 nt, Homo sapiens
aaacaccaggaagccggacaccgggaacggagaggaccgcaagcaggccggcccccagacaagaccaaggaa

SEQ ID NO: 86859 - RNA, 61 nt, Homo sapiens
gaggaccgaagcaacgcgaaacaccaaagggcggcacggccccaccacagaggggaggaga

SEQ ID NO: 86860 - RNA, 58 nt, Homo sapiens
caaggaagccacggcagacacacaacccgacccgacgaaaacaagcccacaagaggga

SEQ ID NO: 86861 - RNA, 67 nt, Homo sapiens
accagaaagaggcacagccccaaaagaaaggcaggccgccagaagcccaaaacaaaaacacagaggg

SEQ ID NO: 86862 - RNA, 70 nt, Homo sapiens
gagcaaaaggcagcgaaacaaacgcggaaccccagagaggacagaagccaacgcaaccagccagaggacc

SEQ ID NO: 86863 - RNA, 71 nt, Homo sapiens
ccaaggcgccgcgggcaggagacaaccaaaccgaaaacgaggggggagggggaagggacaaaaagacagca

SEQ ID NO: 86864 - RNA, 75 nt, Homo sapiens
ggcaacggagaaaacccggaaccgcgacggcggcagcaaaacaaacggagagaggagggagaaacaaaggccaaa

SEQ ID NO: 86865 - RNA, 75 nt, Homo sapiens
aggcaaaagcccaaccaccaccaggccggagaacgccccaaggagcaaggaacaagcagaaagcacgaacaacga

SEQ ID NO: 86866 - RNA, 101 nt, Homo sapiens
gcaagcgaccgcccagcccgagagcgggaacagggaggagaaaaggcaagaggaaaaacaaagcagccgaaacacacccagacgcacaccgccaagcaagc

SEQ ID NO: 86867 - RNA, 81 nt, Homo sapiens
gcaaggagagccggacgggcacgggcgaccggcccgcgagggacagcccagagcaagcacacggaggcccgggagccagac

SEQ ID NO: 86868 - RNA, 72 nt, Homo sapiens
accccacacgccaccgaaaaggaagaggacggaggagcacccggagccagaccgccacgccaaagacgccag

SEQ ID NO: 86869 - RNA, 67 nt, Homo sapiens
acggccagacaagaaaacggcaacccgaaaggacaggcacaacaggagggaagaagagagggcgaag

SEQ ID NO: 86870 - RNA, 76 nt, Homo sapiens
acgcacgcacagcgagcacggaggggaaggcacggacgcaacacggaacagacgcaggggggccccagcccggccg

SEQ ID NO: 86871 - RNA, 75 nt, Homo sapiens
aaggaccccgagggcacgaggaagaaacgggggacgaagcggaaaggccagcgcagaagacgagaagccaggagg

SEQ ID NO: 86872 - RNA, 84 nt, Homo sapiens
agaaggacagcgcaaagcgagaacaacagcagacaagaaaccagccaaggggcagcccacaaaaggagaaagacccgagcaaag

SEQ ID NO: 86873 - RNA, 84 nt, Homo sapiens
gcaaaggccccggcaagaagggcggaccccaaggagaacagggggggcaggcgagcggggggcagcccgcacaccagcacgaga

SEQ ID NO: 86874 - RNA, 80 nt, Homo sapiens
gagcaaccaggcacacgaccaagacgcaagcggcagccaggcaggagagcggcgacaaaaaggaccggagcacaccccaa

SEQ ID NO: 86875 - RNA, 70 nt, Homo sapiens
gaccaagaaccagggcgagaaacccggcccccagcagagaagcggaccgggcgacaggggccgaaacccc

SEQ ID NO: 86876 - RNA, 69 nt, Homo sapiens
cccggggcacaccaagccgcaaaccaccagaacccacccagaggcaccggagcccacagggggagacca

SEQ ID NO: 86877 - RNA, 64 nt, Homo sapiens
ggagaacgagcccccaccccggcaagaaaggggaacaggacaagcgaaccggagcccaaaacag

SEQ ID NO: 86878 - RNA, 74 nt, Homo sapiens
aggaaaccgagaggaaccggggcaggaaggagcacagcaagcgggagcaggcagaccaaaggaacagaagccag

SEQ ID NO: 86879 - RNA, 84 nt, Homo sapiens
gcgcggcgaaggggccccacggcgcaaggacgccgcgccagcagcccgccggcgcgagaggacggaccacagagacacgggacg

SEQ ID NO: 86880 - RNA, 83 nt, Homo sapiens
aagggggcgccaggagggcgacaaggcaaagaaccgaagacgacccaaaagggaccagagccgagagagcaccccaccccgcc

SEQ ID NO: 86881 - RNA, 81 nt, Homo sapiens
gccggccgcgcgacgggggacagaacggcaccgacgagacggaggagaacacgagacccgcacaaaaccccgccccccagg

SEQ ID NO: 86882 - RNA, 53 nt, Homo sapiens
ggaaaacgagaagaacggacgcggccccagggaggagcgggagcacccgagcg

SEQ ID NO: 86883 - RNA, 77 nt, Homo sapiens
agggaacgacagccagggccaggcgaggccagccagcaccccaacagaaccaggaacccaaaacccgaaagaggaag

SEQ ID NO: 86884 - RNA, 72 nt, Homo sapiens
cgacggaccccagcgccgggcagcgaacaagacaaaggcagaagcagggaaggcccacccagcagaacacac

SEQ ID NO: 86885 - RNA, 113 nt, Homo sapiens
ggagacccgggcaaaggcaccacgggaagggaagaaggcgcgggagagccggggcgccggagggcagacaacaggcagaacaaagccaaggggggaccaggagaaccaccaag

SEQ ID NO: 86886 - RNA, 71 nt, Homo sapiens
gccaaggcgggcggacacgagagccgcacggcgagccacgcgccggagcccgcggcggcccggcaggagcc

SEQ ID NO: 86887 - RNA, 78 nt, Homo sapiens
cagacccacggccgaccgcgcccgcagccgcgcagcgggcccgccccgccagcagagacccagcccagaccaggcaca

SEQ ID NO: 86888 - RNA, 91 nt, Homo sapiens
gacgagcgacaggagcacacccggagaagcaggagcccaccggcagacgcaaacagcagacggaagaccccacggcaaaaccacacccgag

SEQ ID NO: 86889 - RNA, 77 nt, Homo sapiens
aaaaaaaccacaaagcggccgaaacagaaaacaagagaccacagaagaaacaggacccagagacaggggacaaagaa

SEQ ID NO: 86890 - RNA, 63 nt, Homo sapiens
aaagacaagccgggaagagaaagcggaagaccgacaagcaggcagcgggacccgaccaagaaa

SEQ ID NO: 86891 - RNA, 56 nt, Homo sapiens
ggcggaaccaccagcacaccagccccgaggcagagcgggacaaagaaggacaagaa

SEQ ID NO: 86892 - RNA, 73 nt, Homo sapiens
cccacccggccaccccccagggagccgaagccaagggacggccaccccaggcggaagggccaccagcggcacc

SEQ ID NO: 86893 - RNA, 72 nt, Homo sapiens
gggaggcaggcgccaggccgagcagaagccccccagccgaggagaacggcaaaaagcgagggagacaacaag

SEQ ID NO: 86894 - RNA, 83 nt, Homo sapiens
caagcgaggccgggcagagggaccacggggagccccacgagccaaaagaagaacccggacccgaccgaagcaagaacgcaaaa

SEQ ID NO: 86895 - RNA, 77 nt, Homo sapiens
aacaccgagcgaagaaaagcaccacgccacccgaaaaacacggagagcaccacccagaggagaaggagaggagaagc

SEQ ID NO: 86896 - RNA, 75 nt, Homo sapiens
agggaggggagccaggcggccgcccagaccacagacacaaaaggaggacaaaaaagaccgaagaagcgaagaaac

SEQ ID NO: 86897 - RNA, 96 nt, Homo sapiens
cagcccgccgccagcgggaaaggaaagacaccaacccaaggccagccacgggcgggccaggagagcgggacagggccacggggcaccaacaccggc

SEQ ID NO: 86898 - RNA, 56 nt, Homo sapiens
gaaaaccgacacaacaggcgaagcgcgaaagaggcagaagaagggggagagccaaa

SEQ ID NO: 86899 - RNA, 73 nt, Homo sapiens
gcgcccgcagaaggccgagaagccacccacgccccggcccgcggcccaccaagccgagaacaccaggaaacag

SEQ ID NO: 86900 - RNA, 97 nt, Homo sapiens
gacgggccaagggacagccggcggacaccccaccaggagacgcaggccagcgggagcccccgaccccaggagggcaagaccaagccacagcgaccgg

SEQ ID NO: 86901 - RNA, 71 nt, Homo sapiens
ggggaaaacagcaagagccggaagaaaggaaagaggacacacggccaaacacccacggaccacgcaaaccg

SEQ ID NO: 86902 - RNA, 82 nt, Homo sapiens
gaaacaccagagggccaggccagaagagccgaccacaaggggaggacaaccgcccgggaccagggaaccaagaccaggacaa

SEQ ID NO: 86903 - RNA, 77 nt, Homo sapiens
ccagcgggggaaccggcgcgccggcgcgcggcgcggacaggcccaaacggggcgggcccaaagggcccgaagccccc

SEQ ID NO: 86904 - RNA, 42 nt, Homo sapiens
gaggacgcggacaaggcccagagcaaacgacgccacaaacag

SEQ ID NO: 86905 - RNA, 71 nt, Homo sapiens
gcaccaaccacagagggggccgcggggggaggagagccaaccagcaggcccggacagaccaagagaacaaa

SEQ ID NO: 86906 - RNA, 95 nt, Homo sapiens
ggcgccccgcagacggcgggggcacgacagcgcaaggaggccgcacccaaggccgcagacaaggagccaaccaaccccagggaggcaaacagaaa

SEQ ID NO: 86907 - RNA, 77 nt, Homo sapiens
gcccgcaggagaggaaaaggagcgagcagacgacaagccgggagcgggcggccaaccagcggcggagaaaccaccac

SEQ ID NO: 86908 - RNA, 70 nt, Homo sapiens
aggaaaacaggaagagaagccacaacacacaaaaagaaaaagggaaaaccaaggcagaccgaccaaacag

SEQ ID NO: 86909 - RNA, 38 nt, Homo sapiens
cccacagcgccgcacccgaggacaacggagccccacag

SEQ ID NO: 86910 - RNA, 61 nt, Homo sapiens
agcgggccccagaaaaacaaggaaagaggggaaaggaggcaagaaagaggcgggcgaccaa

SEQ ID NO: 86911 - RNA, 79 nt, Homo sapiens
aaacaaaaacaccaacacaggcccgaagaagagagccacaacacagcagcccccaggagagcaggaaaagccggagaag

SEQ ID NO: 86912 - RNA, 79 nt, Homo sapiens
gggccggagcagccgcgggcgcccgaggggccgagcgagagggaacggaaaaagcaacaaaacacaccaagaaaaggga

SEQ ID NO: 86913 - RNA, 59 nt, Homo sapiens
aaacccacaacacagacccagaagagacgaaaaagacgccaaaccaaacaggaagcacc

SEQ ID NO: 86914 - RNA, 69 nt, Homo sapiens
gcacaaccgacaggaaaaaaagcggaagagcgccagcacgaaccaagccgccacagggagaaaagagca

SEQ ID NO: 86915 - RNA, 77 nt, Homo sapiens
aacccgggaaaagaggaacaaggcggaggaacgagacgcgaaccagacagaggcacaaaaggagaaagcagaagaaa

SEQ ID NO: 86916 - RNA, 76 nt, Homo sapiens
agccagccacagcccagagaccagaaggcgccgcgcccggggagacagaaacgaggcgcccccagcagcaggagga

SEQ ID NO: 86917 - RNA, 77 nt, Homo sapiens
gcagcccagccaggaagagccgggaagcagcaccaacccggcccaccaaaccccgccagggcagcagagcacggagg

SEQ ID NO: 86918 - RNA, 77 nt, Homo sapiens
gggcccccacgccccaggcccaggaaagaccacagcaagaccacgcccccagccgggggaccaggccgaacgacccg

SEQ ID NO: 86919 - RNA, 70 nt, Homo sapiens
agggggcgacgggcccgaaagccgagacgagagagcgcgcgagcggccagcacaaggggggagcacagag

SEQ ID NO: 86920 - RNA, 59 nt, Homo sapiens
cgccagcaccacgacgacgagaaaacgacagaagcacgacaacaacgggcagcaagcca

SEQ ID NO: 86921 - RNA, 78 nt, Homo sapiens
gacccagcgcacgggagcagccagaaacgaaccggggagagaacaagacagccagagaggcggcaaacaggacaagag

SEQ ID NO: 86922 - RNA, 31 nt, Homo sapiens
agcgggagacacgagaaaggacagcagacca

SEQ ID NO: 86923 - RNA, 78 nt, Homo sapiens
cacaaacgggacacgccagagaggcagaaacgaagcgaaaggaaaccaaaaggaaaaaacagaagaaccaaagaaaaa

SEQ ID NO: 86924 - RNA, 76 nt, Homo sapiens
cgaagcccagacacccccacgaccccaaaaggaacccaggccacaaggaggccaaccacccagaggagcaccgcgc

SEQ ID NO: 86925 - RNA, 81 nt, Homo sapiens
cggcaccacccccagcaccaccccagccccgcgcccgacagagcaccacccagaaaagagcaaccccggccaccagcccaa

SEQ ID NO: 86926 - RNA, 73 nt, Homo sapiens
ccggaacggggccccgcaaggccggcgcggaggaggggagcagcgcgcaagcccgggcgcgccaggcacagcc

SEQ ID NO: 86927 - RNA, 67 nt, Homo sapiens
aaaggccagacccccccaacaagagacgcgacaggaggagcaggacaaaacgacaaaacacgagcaa

SEQ ID NO: 86928 - RNA, 74 nt, Homo sapiens
cccaagagagccaggagcgcacacacgacaggagaaaggagagggcggacggcagacaggcagcaaccggcccc

SEQ ID NO: 86929 - RNA, 71 nt, Homo sapiens
ggaaaggcggagacccaaagacggaggagggcgcggaggagaggagcgagcccagagagacgaggcgccag

SEQ ID NO: 86930 - RNA, 75 nt, Homo sapiens
gggagaaccgcccagacacgacggcagagccggcgcccgagggccccacccgccgggacggcggcgcggcggcag

SEQ ID NO: 86931 - RNA, 72 nt, Homo sapiens
acagggagaggaggcgaaaaacccagagcgacacaaggaagcgaagaaccaaggacgaagaagaccggaaag

SEQ ID NO: 86932 - RNA, 89 nt, Homo sapiens
caagacgagcgacaggagcacacccggagaagcaggagcccaccggcaggggcacaggacgaccgaggaaggcacccgcacgccaccca

SEQ ID NO: 86933 - RNA, 73 nt, Homo sapiens
caccacccccaccccaaagaggggcggagccggcagaagcaacagcccaagacagagcggcccaaacggaagg

SEQ ID NO: 86934 - RNA, 75 nt, Homo sapiens
ccaagccaggggccccaccaggagccagggaggacgaagaaaggagcaaaggagcagcaaaagggggacaagcca

SEQ ID NO: 86935 - RNA, 70 nt, Homo sapiens
aagcagcccgccacaacaaacacaaagggggagcgccaggagagaagagacccggccaaaacacagcaag

SEQ ID NO: 86936 - RNA, 85 nt, Homo sapiens
cagcgggagcggacggcgagcgcgagcggcgcgagaaaggccgggccaggcggaaagcaggagaagcccaacgcgaggacagaca

SEQ ID NO: 86937 - RNA, 72 nt, Homo sapiens
gcaagcagcagagaagacaggacagaacggacagaaaagagcagggggaaacagacgggaaagaagggacgg

SEQ ID NO: 86938 - RNA, 76 nt, Homo sapiens
ggcaagggcggggagaccaaagcagcgcaggaacggcgcgaagacccggggacagaggccccccccggacacgacg

SEQ ID NO: 86939 - RNA, 82 nt, Homo sapiens
cggcagacgggcgccaccgacgccgcccaccggcacagcggaccccgcccgagccaggcaggcgcgcggcagaagcaccagg

SEQ ID NO: 86940 - RNA, 79 nt, Homo sapiens
cggagaacacacagcggggggggcacaggcaacgcggaaaaaagccggggggacgcggacagcgcccaagggcgcgaac

SEQ ID NO: 86941 - RNA, 59 nt, Homo sapiens
cccaggacaccaccagccggaggaccaagggaggcaagcacgcaaggcgaagccaggcc

SEQ ID NO: 86942 - RNA, 83 nt, Homo sapiens
gagggagagacgccgaacgacgccccgcacaccggagcgcccagcgcgaggagcagacagccagagacagagagcacaaagcc

SEQ ID NO: 86943 - RNA, 92 nt, Homo sapiens
cacgggcccgggcgccgcggaccagcagcgcgggagagcggaccccccgccaccgcccgagcccaggaagagagaaggccacgcccgacccc

SEQ ID NO: 86944 - RNA, 82 nt, Homo sapiens
gaggcgcggagcgggcagccgccgccaccccgcggccgcacccccgccccaggcaagagcgaaggagaaaggcaacaaggcc

SEQ ID NO: 86945 - RNA, 69 nt, Homo sapiens
ggagaacagagcaaagacagcaaaaaaaaggaagcacaccagaggaaacgcagcagaggcagaacggaa

SEQ ID NO: 86946 - RNA, 74 nt, Homo sapiens
gagaacaaagggccgggagcgaggcagacgggagcgggccgagaaaaaccacagagacacacgcaagccgacgg

SEQ ID NO: 86947 - RNA, 76 nt, Homo sapiens
agggcgggccgaccaaccgccaaggggagcgcccccccaggacaagggaagaagccaaccagaaggaccgcccaac

SEQ ID NO: 86948 - RNA, 60 nt, Homo sapiens
gaccgagaggcacacacgggaggcgagagcaaggaaacccgagacaacaaacaagcaggg

SEQ ID NO: 86949 - RNA, 71 nt, Homo sapiens
ccgggccacccacaggccgcaaagagaggccaaaccaaaaggaaagcaagccggagaacgaccaaaggaca

SEQ ID NO: 86950 - RNA, 86 nt, Homo sapiens
ccagacgaggaagacccggaaacaggggccacggagccacggccacggccgcaagagaagaaggaagagacgggccccccacaaga

SEQ ID NO: 86951 - RNA, 87 nt, Homo sapiens
caaccacccgagcggcgcggacgaagaggcagaggaggggacacggggacgcccggcggcccgcagagggcggcaacacgaggccga

SEQ ID NO: 86952 - RNA, 72 nt, Homo sapiens
caacacagcagagaccgagggaacccacccccacccagaaaaccccgccgcccccccccccaaggcgagcac

SEQ ID NO: 86953 - RNA, 78 nt, Homo sapiens
cgcccggcccggccgcgcccgcggaaccagaccagacaaagagagaagcggggaagaaagcaaaagcagagccggagc

SEQ ID NO: 86954 - RNA, 61 nt, Homo sapiens
gaggggcagcaagggccaaggcgacccagcaacgcggccggccaggggcaagcgagcacgg

SEQ ID NO: 86955 - RNA, 52 nt, Homo sapiens
cggaaaggcacgaaagccaggcccgagggcccggaaaggggagcacagaggc

SEQ ID NO: 86956 - RNA, 74 nt, Homo sapiens
gggcagccgccgccaccccgcggccgcacccccgccccaggcaagaacggaagcacgggcggaggaaagcacaa

SEQ ID NO: 86957 - RNA, 52 nt, Homo sapiens
acaaaagggccaaagaagggagagaggggaccccacaccacaaaccgaggaa

SEQ ID NO: 86958 - RNA, 88 nt, Homo sapiens
cacagacagcccggagaggggaaaaccacgccccggaccaagcccgggagcaaggaaaagcccggaaaagcagccaagcggaagacag

SEQ ID NO: 86959 - RNA, 83 nt, Homo sapiens
gagcaaaccaggcgcgcacggagaaagaagagaaggcccccccccaggaggcagaggcggaagcacaaggaaaggcgcaagcc

SEQ ID NO: 86960 - RNA, 43 nt, Homo sapiens
agaaggcagaggaacacaacaggccaagaagcgagagaagaaa

SEQ ID NO: 86961 - RNA, 61 nt, Homo sapiens
gagggagcccgcaggccaaagaggaagacaacacggggacaaccaagcaacgaccaacaag

SEQ ID NO: 86962 - RNA, 80 nt, Homo sapiens
ggggggccgacacaagagcgcgagaccaacaggggccaaggcgacagcaaaacggagaaagaggagagggcaggggccgc

SEQ ID NO: 86963 - RNA, 80 nt, Homo sapiens
gcgagagagcgcggccccaggagcaaggcggacgacaaggacccagcaggggcgaaaaaccccacaagggacggacacca

SEQ ID NO: 86964 - RNA, 61 nt, Homo sapiens
agcgcccaccgagccaccaaggagcagcccgggccaggaccggaggacgggagaggcgcgg

SEQ ID NO: 86965 - RNA, 67 nt, Homo sapiens
accgaaggcgacagagacaggcgggaagaagaacaacagccgaggccaacacagagaacacccgcca

SEQ ID NO: 86966 - RNA, 42 nt, Homo sapiens
ccaggggagacagcccgaaggaagcccaggaggcgagccgcc

SEQ ID NO: 86967 - RNA, 78 nt, Homo sapiens
aaaccccgccagggccaccagaaacgagagccaaaaccaggccaaccgcacgcaacgccagaaaaaaccgagaagacc

SEQ ID NO: 86968 - RNA, 65 nt, Homo sapiens
ccacaccgggcgccccaggcgcaaaacccgagaaagggcaacccaccaaaaagcccgggcaccgc

SEQ ID NO: 86969 - RNA, 86 nt, Homo sapiens
acggaaagaaacaaaaacgggaaagccggcaagagggagaaggacaccaggcagaggcaagggaacgccgcagaaagaagaagggg

SEQ ID NO: 86970 - RNA, 71 nt, Homo sapiens
ccgagcgagagcaggaagacgggaggaggccaaacaaggacgcgccgagcagcccccagaagaaacccacg

SEQ ID NO: 86971 - RNA, 35 nt, Homo sapiens
aaggaccaagaaccagaacggaccacgggaaggcc

SEQ ID NO: 86972 - RNA, 81 nt, Homo sapiens
caagagagggaacagggccaaacggaaagcaggggggacccggaccgcgcgaagcggcccggagacgaggaacagggaagc

SEQ ID NO: 86973 - RNA, 85 nt, Homo sapiens
ccaggaaccgaaaaggcgaggagaagacggcaaaaaacgcggaagggaccacagaccagcacgccggcgccacgaaccgagcgac

SEQ ID NO: 86974 - RNA, 73 nt, Homo sapiens
ccgcggcggcagcagccccgcccaagccaagccacaggaggccccccggcgggccggccgccaagacaccccc

SEQ ID NO: 86975 - RNA, 85 nt, Homo sapiens
ccccagaacgcggggagggggcgaacgcaggggagaggagaagagagcggcggaaggggcacaacacaagagcggaagaccccag

SEQ ID NO: 86976 - RNA, 70 nt, Homo sapiens
gccaggaggaccgcgccagcagcgcagaagagaagcacgaaaacgcaggacagagaacgagaggaaccgc

SEQ ID NO: 86977 - RNA, 34 nt, Homo sapiens
gagcacgaaacgagcaggggaacacccagaggaa

SEQ ID NO: 86978 - RNA, 67 nt, Homo sapiens
cagagccaggggccgggagggcgccaggagagcacaaagcagaagaaacaaaacaacaaacaagaag

SEQ ID NO: 86979 - RNA, 64 nt, Homo sapiens
gcccggccgcggccagcggagcccgggcggggcaggagccggaggaacgccgggacccgggcac

SEQ ID NO: 86980 - RNA, 83 nt, Homo sapiens
gaccacaccaagcgggagacacaccacgccaaggacagccagcagcccccccaagggggacacagcaggcaccacaacagcac

SEQ ID NO: 86981 - RNA, 101 nt, Homo sapiens
agggccagggcgaaagggcaaggcaccaacgggcaaaaaagccagaaagccaaggaaggcaaggaagagaaaaggaaccccagccacggaagccggggagg

SEQ ID NO: 86982 - RNA, 75 nt, Homo sapiens
cgcgacggcgccgcccacggcgaggaggcaccaaacaaagcccaacgccagacaagaaaccaaagaaaagaaaac

SEQ ID NO: 86983 - RNA, 81 nt, Homo sapiens
gcaccacccagagggcccgcaggaaggacaccgaaggaggcaaccggaccccaaaaaccgagaagcagcggccaggagaaa

SEQ ID NO: 86984 - RNA, 81 nt, Homo sapiens
gcaagagagagaaagccagagagaggcgagggagccgaccacagcgaagcagaaggccccccggaggaggggaggccaggc

SEQ ID NO: 86985 - RNA, 74 nt, Homo sapiens
cagccgagacggcacgagaacgggacccggccagaggaaagaacccgagggagagaacagcacacagaggcgca

SEQ ID NO: 86986 - RNA, 82 nt, Homo sapiens
gagaacgaacaagaagaggaagaaagaggaaggagaaacaaaccagccgaaaagaagacgcaaggggaggcaagcccacagc

SEQ ID NO: 86987 - RNA, 82 nt, Homo sapiens
gggaccgaaaccagccccggacgagaagcgcagcaacggcgggggaccacgagagcggggagcgacacccaacaggaagaag

SEQ ID NO: 86988 - RNA, 76 nt, Homo sapiens
accggcacccggacaggaggagccagggcccggcccgaaaggagagccaccacgaaaacccggaagagcgagaggc

SEQ ID NO: 86989 - RNA, 85 nt, Homo sapiens
cgcaaccagacgccagcgggacgaggaccgagaccgcggccgggaccgaggagccaaaccccagccaccggaagaagaagagaac

SEQ ID NO: 86990 - RNA, 79 nt, Homo sapiens
acacaggaggcagaggcagcagcggaagaaagccaaggagccgcaggcacggcagaaggaaacccacgccaagcgcacg

SEQ ID NO: 86991 - RNA, 79 nt, Homo sapiens
gcccgcggcaccccgcggacagggcggacgcccaggaccacaccgcagcgaacgcaggccccagcgaaaaagggggaaa

SEQ ID NO: 86992 - RNA, 57 nt, Homo sapiens
gcaccaggcgagcagcgcccccgagagggccgaggcagacaagggaaaggccgcgca

SEQ ID NO: 86993 - RNA, 61 nt, Homo sapiens
gaagagccaggcccccaaagccgaaggccacgaaaacagagccccccaaaaaaacgaggca

SEQ ID NO: 86994 - RNA, 76 nt, Homo sapiens
gcgaaccagacggacccacaaagagggccaaaagggcggggaacggaccaccagccccaacgcacgcgccggagac

SEQ ID NO: 86995 - RNA, 76 nt, Homo sapiens
acccgagaccaaaagaaccgggagaccagacaaaaccccggagcagggcagaggagagccgcagaaggaagccaac

SEQ ID NO: 86996 - RNA, 80 nt, Homo sapiens
ggcagacagccaccaccaccccaagccccaacccacaccccacgcacgcacaccgaaccacccggggcagaagcgccggc

SEQ ID NO: 86997 - RNA, 76 nt, Homo sapiens
accgcgcacccacgaacgcccaccccccgaacccagccgcaccgggaacaaagagcagaggccagcagccaccgac

SEQ ID NO: 86998 - RNA, 85 nt, Homo sapiens
gaagcccccaacagccacgcccaccacgccggacgaggccgaccacagacagaggcaggaaaagcacaaaggaggcaacgccaga

SEQ ID NO: 86999 - RNA, 74 nt, Homo sapiens
cgggaggagcggggagaaaccaaaagcacgagaagagaagcccagagcaaaacaccccaaaccagaccaccgac

SEQ ID NO: 87000 - RNA, 71 nt, Homo sapiens
ggcagcaacaagaggagcgcccccccagcggcacgcagccccgcggcacaaccaggccgaagagaacccag

SEQ ID NO: 87001 - RNA, 76 nt, Homo sapiens
ccgcaagacagccccccgcccccccccccacgcaaccccagaccaacacacaacagcaaggaacgcacagaacagc

SEQ ID NO: 87002 - RNA, 74 nt, Homo sapiens
gcggcgcgcgcaggaccggcccgcacgacgcaccccgcaccaggcgcaggcggcagacgcagacaaacaaaaca

SEQ ID NO: 87003 - RNA, 87 nt, Homo sapiens
aggaccaccgagagggaacagagcgcagaaacggagggcagcagggaccggcggacgccccacagcccacggccagggcacggcaag

SEQ ID NO: 87004 - RNA, 78 nt, Homo sapiens
ggacagaaggcagccgggacagaaagagccgcagacgcacagcaaccaccggacccgaaggccaccacccagaggggc

SEQ ID NO: 87005 - RNA, 75 nt, Homo sapiens
gaacgaaaagcagcaacgagaagaagccaccaaggagcaggaaaacgcaaagcagacaaaggagagacagcacaa

SEQ ID NO: 87006 - RNA, 80 nt, Homo sapiens
cccaagaccgcgccgcgccaccgcccaccgcagaccgggcagaccccaggaggacaggacgccggccaggcgccgcaccc

SEQ ID NO: 87007 - RNA, 72 nt, Homo sapiens
gcagggcaaaccggaagaagcacaacacacagaacacgcagcccaggaggaggaacgcggggacgagcagga

SEQ ID NO: 87008 - RNA, 83 nt, Homo sapiens
gaggcgcgcaggagccaaggaagcggccaagaagcagaaggagacccagagggagcccagagggagaggggccgggcccgccg

SEQ ID NO: 87009 - RNA, 79 nt, Homo sapiens
ccaagaccaggccggcgacagcaccaagaacccacgcagcccagaagcgaggcgaagcagcggcgagaaacgagagcac

SEQ ID NO: 87010 - RNA, 77 nt, Homo sapiens
cacaaagaagacaacagacaggaggcaaaggccccccgaaaaacggagagaccaaagagccaccggcccaggcggag

SEQ ID NO: 87011 - RNA, 81 nt, Homo sapiens
cccgcgccgccgaccccccggcgccgcgccggcggcgccgagaagccaggccccggcagcaaggaccccaaggccgacagc

SEQ ID NO: 87012 - RNA, 55 nt, Homo sapiens
accagacgccggcaacaaagaacacacggaaggaaaagccaaggcggaggacaac

SEQ ID NO: 87013 - RNA, 54 nt, Homo sapiens
gacccccgcgcgacggcgacgcgggaggccagaagggaccagcgcaaacggaga

SEQ ID NO: 87014 - RNA, 83 nt, Homo sapiens
gaacggcgacccaagaagcagcccacgaaaggcagccgcggacgccgcgccagcgacaaacaaaacggcagcgcggagggggc

SEQ ID NO: 87015 - RNA, 70 nt, Homo sapiens
gaagcagcacgcagcacaaagacaaaaagaccaggagagaaacccgcgaaaaaggcagaggacggaaggg

SEQ ID NO: 87016 - RNA, 74 nt, Homo sapiens
gcagacagaaaaacaggagcgacaggcccagaacaggagaaaaaggcagccccggagacgaaaagacaaagcac

SEQ ID NO: 87017 - RNA, 71 nt, Homo sapiens
cgccccacaagcagagagggccagcagaagggaagcaccaaaaaaagaccagaagaaggaccgaagcggca

SEQ ID NO: 87018 - RNA, 82 nt, Homo sapiens
agcgaggcgcgagggccagaacgcggagggaggagagcccgaccaagcccaaagggacaccagcaccgagccgggaccccgg

SEQ ID NO: 87019 - RNA, 105 nt, Homo sapiens
ccgcaaggcgccaggccggaaccagccgcagcccgacgccaggcagcacaaccagacagaccccaggccagacaaacaagagcagcacaaagggaaggagcaggc

SEQ ID NO: 87020 - RNA, 42 nt, Homo sapiens
gacccggcagccaagaaaacggagaaacaaaggcagcgcgcc

SEQ ID NO: 87021 - RNA, 80 nt, Homo sapiens
agaacacgaaaagaggccgagggcggggaacacagaggaaggacggcgggggcagggaaagcccgagaagagggaacacg

SEQ ID NO: 87022 - RNA, 63 nt, Homo sapiens
gaggccgggaagccaacgaccacacgcaggcggggggaaaagcggcgcaggagaccagaccca

SEQ ID NO: 87023 - RNA, 54 nt, Homo sapiens
gcgcgggggaggggagcccgcgcccgccgcgggagagagacagcgaacgggcac

SEQ ID NO: 87024 - RNA, 85 nt, Homo sapiens
gaaggacagaggccgcggccccgcccccagggggcggccgcggagcgacgacggcagacagcccggcgccagcaggggcaccaac

SEQ ID NO: 87025 - RNA, 58 nt, Homo sapiens
gaaaaagcggcagcgagaccgcaggggaaagaccggcgggggcccagggccagcgcgg

SEQ ID NO: 87026 - RNA, 36 nt, Homo sapiens
accaggccgcccaccacgcggagggaggcgcccggc

SEQ ID NO: 87027 - RNA, 82 nt, Homo sapiens
aagccaaacgcggccaaagagaaaaggcaacaccgcacaggccagccggcaaaaacaacgccaaaagacgaacacaaaggga

SEQ ID NO: 87028 - RNA, 77 nt, Homo sapiens
caagaggcgcaaagaaggcccccagaccgcccaacgggggggacaacgggccagaaggggagcgcagcggcaccccc

SEQ ID NO: 87029 - RNA, 62 nt, Homo sapiens
agagggagagccaaagaagagcgagagaacgcaccgggggcagacaccaccaaggaccccag

SEQ ID NO: 87030 - RNA, 79 nt, Homo sapiens
ggccaaaaccgcgcgaaagagagaaggacaaaccagggaagaggcaaaacagaaaaaggggcagaagaagagcagaaaa

SEQ ID NO: 87031 - RNA, 71 nt, Homo sapiens
acagcgcaaagggcagagaaaaaagagcagcgaggcgaaagcaaccacagggccacgagcagggaggcaag

SEQ ID NO: 87032 - RNA, 63 nt, Homo sapiens
acaccccccgcagcaacggaggaacagccgaaacacggcaaagacgaagaaacggaaaaagaa

SEQ ID NO: 87033 - RNA, 77 nt, Homo sapiens
ggacggaccgagaccggaccgagagcggaccgagagcgcgaaacgcacgagaagggcggcagggcacaagaaacccg

SEQ ID NO: 87034 - RNA, 76 nt, Homo sapiens
agaagcgaagggcgaaccccaaaaaggaagagggacaaaaagaacgccaaacgcgaaagggagaaagaagaacgcc

SEQ ID NO: 87035 - RNA, 65 nt, Homo sapiens
ggagacaccggacaagcgggaaccgggaagcagcacgaccaggccgcgggggacccgagggggac

SEQ ID NO: 87036 - RNA, 68 nt, Homo sapiens
ggggaacaccagcggacagccccccaccacaacacgaagagaggccaccgggacccggagcgcagccg

SEQ ID NO: 87037 - RNA, 60 nt, Homo sapiens
ggcgaccccagaccgacagagagaagacaggccaaaacagaagaggcaaagcccagccac

SEQ ID NO: 87038 - RNA, 75 nt, Homo sapiens
ggcggcacgggcacgacgggacacccagcaacaccagagcaaaggggacggaccagaaaccaagaaacaacagaa

SEQ ID NO: 87039 - RNA, 59 nt, Homo sapiens
ggaccaagagaacaagggaaccagccaaaagggcaaaaagcagagaaaaaacaacggag

SEQ ID NO: 87040 - RNA, 75 nt, Homo sapiens
gccgcgcccggcggccagggaccccccccgcgccgcacagccccgcgcccgaggaaggggaggagcacagaacgc

SEQ ID NO: 87041 - RNA, 80 nt, Homo sapiens
ccgccaccacccaccagcccaccgacagcagcaaagaagaccggggggcgaccacagaacaggaaccagaaagacccccg

SEQ ID NO: 87042 - RNA, 67 nt, Homo sapiens
ggaaagaaccgcgagacgggcacaaggaagcggcaaaagcgcaagaaggggcgcaaacgcacgccaa

SEQ ID NO: 87043 - RNA, 83 nt, Homo sapiens
gggggcgccaggagggcgacaaggcaaagaaccgaagacgacccaaaaggccccgaacagcaggacccaacggcagcgggaaa

SEQ ID NO: 87044 - RNA, 80 nt, Homo sapiens
ggaaggaagaccggcgcggggcacaggaccggagcggagcccccaggggcacccggccgccgccagggcaaggaccgcgc

SEQ ID NO: 87045 - RNA, 40 nt, Homo sapiens
cacgaccgagaggcacacacggcaacaacgaacgcacaga

SEQ ID NO: 87046 - RNA, 81 nt, Homo sapiens
cgcgacggcaccacaccacccaagacccgcgaacgcccgacccacaggagaggggagcagaccggaagacccgaccggcaa

SEQ ID NO: 87047 - RNA, 81 nt, Homo sapiens
gggggacacgcgccggaaggggcccgaagcccccgcaggaaccacaacccaaccagggaggaacaggagcaccacgagaga

SEQ ID NO: 87048 - RNA, 80 nt, Homo sapiens
accccccggcagggaagaggggagacgaaggaggacaaaggacgcgcagaggagccagccagacgggcaccggcacacac

SEQ ID NO: 87049 - RNA, 37 nt, Homo sapiens
gacaccagaaggaagcagaacgcaaaacaaaaggggc

SEQ ID NO: 87050 - RNA, 77 nt, Homo sapiens
aacagccaccagaccaaccaagagcgaaggccgagagcccaggaccaagaaaggcccagggaccaaagcccggacaa

SEQ ID NO: 87051 - RNA, 69 nt, Homo sapiens
cgccgcaccccaggaggacccccagaggagaacggaagccagagaaaaggaagagagagcaagagaggc

SEQ ID NO: 87052 - RNA, 65 nt, Homo sapiens
ggaggagcaagaaagggagagggcggacggcagacaggcagcaaccggccccgcccaccagcccc

SEQ ID NO: 87053 - RNA, 83 nt, Homo sapiens
cagcgacaggccgcgcaagccaccacaacacagcagcccccaggagagcaggaaaagccggagaagccaacaggcggaaggcc

SEQ ID NO: 87054 - RNA, 40 nt, Homo sapiens
agacagccagacaggaggacagagcgggagccaccagcgc

SEQ ID NO: 87055 - RNA, 85 nt, Homo sapiens
ggcgcggcaccaaggcacaggacccaggaagcgcccccggcagaagcgaagagggaacaccccaccgacaaaaacgagagaaaac

SEQ ID NO: 87056 - RNA, 77 nt, Homo sapiens
aacagaaagagcaacagcagggcaacagggagcgaagaacagagccgcccaaagagacaccaaacccagggacccga

SEQ ID NO: 87057 - RNA, 79 nt, Homo sapiens
gccccaaacggaccaccacgagcacacgcagaagggggaaagagaccgggacagaacaggacccagagagggaccaggg

SEQ ID NO: 87058 - RNA, 76 nt, Homo sapiens
cagggcccgcaccccccgcaggggccgagaccaacccagcaacaacaacaagacacgacagcaagaagagagccca

SEQ ID NO: 87059 - RNA, 76 nt, Homo sapiens
gaaaagaagccccacccaacgcggagcgagagaggagccacccgaaggcgaacggaaccaagaaagaggaagaaga

SEQ ID NO: 87060 - RNA, 78 nt, Homo sapiens
gaagacgcgcccgcagcccgagggcgagcgcacccagcaagccaggaaggccaagaaaaggggcaaaggaccggaagc

SEQ ID NO: 87061 - RNA, 71 nt, Homo sapiens
cgggggaaccacgagaaccggggaaaaaagcagcggaggagaaaaaaaagaagaccgcagcaaggaagagg

SEQ ID NO: 87062 - RNA, 77 nt, Homo sapiens
gacgaaccggacggggaccaaccaaccgagcggagaaagagagcaggaaaaaagggaccagaagaacaaccagaccc

SEQ ID NO: 87063 - RNA, 72 nt, Homo sapiens
ggaccacaaggcaacgcggggggccggggaccggacccccggggggaccaacggggacccgccaccgcaggg

SEQ ID NO: 87064 - RNA, 50 nt, Homo sapiens
aaaagccgcgaaggaaacgacagaggcacagaggcaggacagaacaaagg

SEQ ID NO: 87065 - RNA, 88 nt, Homo sapiens
gaaggcaaaggaccagaccgagccagagggagcgaacgcaggaccgccgaccaggcacgcccaaccccgcgaaggaaggggacccaag

SEQ ID NO: 87066 - RNA, 73 nt, Homo sapiens
gcggaaggcagcgcccagcagcgcagcggcggagaaaccaccacaaacacgaggccagcaacgaccaacaaga

SEQ ID NO: 87067 - RNA, 84 nt, Homo sapiens
agcgcgagcggcgcgagaaagagacgaccccagcaaagcgaccggaagggggccaacccccaacaaggcccacggagccgggcc

SEQ ID NO: 87068 - RNA, 70 nt, Homo sapiens
gggagcggcccacgacgggacacgccccggaggaggcaagcggacgccaacaaggcgcagagaacggacc

SEQ ID NO: 87069 - RNA, 77 nt, Homo sapiens
cgggagcccgggagggcggccgcaggacccaaagacaggaccacgcaccagcagagaaggaaagcaaaccgaagcag

SEQ ID NO: 87070 - RNA, 76 nt, Homo sapiens
cagggagaacggcccaagccaagggccacgggggaccgcagggggccggaagcccccggccgcccaccgccaggag

SEQ ID NO: 87071 - RNA, 55 nt, Homo sapiens
agccgaacggccgaagaaagaagcagggggacccgaacccccgggccggaggacc

SEQ ID NO: 87072 - RNA, 64 nt, Homo sapiens
gagcgagcgggaagagaacaggacagagggcacaacggcaaagcggagagaaccagcagagaaa

SEQ ID NO: 87073 - RNA, 75 nt, Homo sapiens
agccacaaagagcggaggagggggagaacaccagcacggcacacggagcaaagaggagccgggcgcaagccacca

SEQ ID NO: 87074 - RNA, 89 nt, Homo sapiens
aaggaggccccagcggaccgaacagaggaacaaacagacaccaagaaagggaagaggagccgacagcagagggggaagcgaaaagacgc

SEQ ID NO: 87075 - RNA, 65 nt, Homo sapiens
cacaccgcaccggcccggcaaggacgccgccagccaccggcgcgaagccagaccagaccagcagg

SEQ ID NO: 87076 - RNA, 73 nt, Homo sapiens
agcggggggacaggaaagcagggagggcgggggcggcagagggcacgcccaggggacgggcagacaagcgcgc

SEQ ID NO: 87077 - RNA, 59 nt, Homo sapiens
gccaagcaaaggcgccgaagccggcgccagggaaaaagaacgaagacgaagaggacagg

SEQ ID NO: 87078 - RNA, 68 nt, Homo sapiens
aaacgcgccgacggcgaagaaaggggagcgaggaaaggggcggccgaggccaggcgcgcgcggaagag

SEQ ID NO: 87079 - RNA, 76 nt, Homo sapiens
ggacagcccacaaaggcaccgggagcaggaaaccagggacgaaaagcaaaccgagaacaccaagaaccgggaacag

SEQ ID NO: 87080 - RNA, 69 nt, Homo sapiens
gggcagacgaaaggaagacaggaaagcgagaaacgggacacaaagcagcagccggaaaaccagcagagg

SEQ ID NO: 87081 - RNA, 78 nt, Homo sapiens
gacccacgaggcgcggcccggaggcccagaaacgggccgcgccaccaagggggcgaaagcgaaaaccgaccgacaccc

SEQ ID NO: 87082 - RNA, 82 nt, Homo sapiens
aagcccacgcgcccgcagcaagacgggacggccaagacaaggggcgcagagcggggggacaggcgcaagaccggagaagcag

SEQ ID NO: 87083 - RNA, 57 nt, Homo sapiens
gcagccccccaaccgacgccacagggagaacagaggcgagagcggcagcagcaccag

SEQ ID NO: 87084 - RNA, 62 nt, Homo sapiens
aaggacgagaacgccgcgacagaaaggacagaaaggagaaccaacaggccacacgcaaacga

SEQ ID NO: 87085 - RNA, 72 nt, Homo sapiens
gcaagaaaagagacagacgaaaaagccagcaacaggcggcaggaccacaccccaagccaagcgggcaccaac

SEQ ID NO: 87086 - RNA, 62 nt, Homo sapiens
ggcagcgcccagcagcgcaggccccgagccccggccccaaagacccaaaacagagacacccc

SEQ ID NO: 87087 - RNA, 60 nt, Homo sapiens
aagaagacgccaacgagcggcgcggacggcgcgcggacaccaggccacagaacaccgccg

SEQ ID NO: 87088 - RNA, 80 nt, Homo sapiens
gaaaccaacaaaacagccggggaaaccagaagggagaggaagaaagaccaaacgagagacaaaagagaacaacagaacgc

SEQ ID NO: 87089 - RNA, 75 nt, Homo sapiens
cggcgcgaggcgcgggcacaggccgcagccaagccggaacaggagcggcgagcccaaacgcaagggggaagaaaa

SEQ ID NO: 87090 - RNA, 75 nt, Homo sapiens
agagggcggaaccgacacggcagacaggcacagccgaaggagcacagcacccccgacccacggccaccaaaaaga

SEQ ID NO: 87091 - RNA, 72 nt, Homo sapiens
agcaaaaccgccggccggaccagaccggggggaaaggcggacagagagcgagggagggaagccgcagaagcc

SEQ ID NO: 87092 - RNA, 73 nt, Homo sapiens
agcggagcgccgcaggcgggaggaggaggaggagagcgcaacggggcggcacacaaggagcgaagggcaggga

SEQ ID NO: 87093 - RNA, 83 nt, Homo sapiens
cacggaggagaccacaaacagccacaaggaaaccgagaggaagaaaggccagaacgaacggaagggccacaccagagacagag

SEQ ID NO: 87094 - RNA, 72 nt, Homo sapiens
gaaaacaccggaacaaaaggacggcaacaagggcagcagcaggaacaggaacagccaggagcacaaacaaaa

SEQ ID NO: 87095 - RNA, 52 nt, Homo sapiens
cacagagcacaacaagggagggcacaggcacgaacagacagagaaaccaaac

SEQ ID NO: 87096 - RNA, 75 nt, Homo sapiens
cacgcccacgcaagaagcagggagaggcgagcgcccccgagccggcagcagaccgcaagccgccacccgagaccg

SEQ ID NO: 87097 - RNA, 68 nt, Homo sapiens
aaggaccaagaaccaggggcggcgcgccgagacccaccccgacagacgagaagagacccagcaaggaa

SEQ ID NO: 87098 - RNA, 72 nt, Homo sapiens
ccgggggacaagacaacgggccggggagggccacagcagcggagcggaggcagacacacacggggggagagg

SEQ ID NO: 87099 - RNA, 49 nt, Homo sapiens
ccaaggcagcagccacgacacccaagccgcacaggcgaaggagaacaga

SEQ ID NO: 87100 - RNA, 77 nt, Homo sapiens
caggagaagaaagaaggcaggaacagccgagaagaaaccgcagcagggaacagaaagaggaacaaagaccaggaacg

SEQ ID NO: 87101 - RNA, 80 nt, Homo sapiens
cgggccgcggcgacggcaggacgcgggcagagagcggacccgcgacgcggaggcaaaaacacaagaagagagaagaagag

SEQ ID NO: 87102 - RNA, 38 nt, Homo sapiens
gacccagggccgggaccgacccagggcaacgagggaac

SEQ ID NO: 87103 - RNA, 82 nt, Homo sapiens
gggcaaaggagagcacaaccacgcagggaagcccaggggcagagcgaaaaggcgaagagacagcaggaacaacaagcaaacc

SEQ ID NO: 87104 - RNA, 82 nt, Homo sapiens
gagggcagggggcaaacaagccgaccggaaaaagcgcgccccggcccccggagccagcagggagccccagcccccaggggga

SEQ ID NO: 87105 - RNA, 72 nt, Homo sapiens
aaaacaacacacaacagacaaccgacccaagcagcggcacccacaagagcaccaggacaaccccaccaccac

SEQ ID NO: 87106 - RNA, 78 nt, Homo sapiens
cacaacgaaagcagacaaagacaaaagcacccagacaaaaaccggcaagagacaaaacacgacacagagaccgacaag

SEQ ID NO: 87107 - RNA, 111 nt, Homo sapiens
ggcacgggcgccggcgcgcacaagggcagagggccagagcccagaaaagagacagcagggaagaacggaaaccagagaaagaaacgcccccacacaaaagcgagacccccc

SEQ ID NO: 87108 - RNA, 71 nt, Homo sapiens
aaagggggccccccgacggagaaaaagccggccggaagcaaggcaccaccggcggcacagaaggaaaacaa

SEQ ID NO: 87109 - RNA, 75 nt, Homo sapiens
ccaacagacaaccaccaaaggggaaacagaaacaaggcagaacagaaagcgcaaggcagggaacacgagacaaca

SEQ ID NO: 87110 - RNA, 77 nt, Homo sapiens
aggaaagagagccacgaaccacggcacgacagcgggaaaaggggcacaggagccaagagggcgaagcgagaaacaag

SEQ ID NO: 87111 - RNA, 76 nt, Homo sapiens
ccccacaacagcagaggccacacagggcaagcagaccccacccagaccaaagggagcggagggagacagcgaacgc

SEQ ID NO: 87112 - RNA, 77 nt, Homo sapiens
cggcccggaggaccgccccgcagccgaagccagcagcagcagcaacaccagacaggaaggaagaaaaggaagcgcgg

SEQ ID NO: 87113 - RNA, 80 nt, Homo sapiens
cgccaggccgcggcccgaggcgcagcagcaggaggaggaccgcagcaagaagaggccccaggaccggcgaggcccccccc

SEQ ID NO: 87114 - RNA, 77 nt, Homo sapiens
cccccgcaacagggaagcccaaagacaacaggcccccccgccccccgcggagccccgcccagcaccaccccgcacgc

SEQ ID NO: 87115 - RNA, 82 nt, Homo sapiens
aacaggcagacgggaccgagccccaacaaccagacgggacccaacggcgccacacacacgccccacagaagaagggaaaaaa

SEQ ID NO: 87116 - RNA, 90 nt, Homo sapiens
ccaagagaggcggggcgcccccgccacgcagccggccaccgccgagacccagcacacgccgaccaggggagaagccccaaggcgaggagg

SEQ ID NO: 87117 - RNA, 70 nt, Homo sapiens
ggcggagggcaacaggggccagccacaggaggaaaggccagaccacagaaggggccgcaaggccaggcgc

SEQ ID NO: 87118 - RNA, 80 nt, Homo sapiens
gcggagaaggagaagggagaagaaacagcagccgcagccgagacacaagccccaaggggaagcacccggacccgagccgg

SEQ ID NO: 87119 - RNA, 85 nt, Homo sapiens
ggaaggacggcagagcgcaggacgccacagcaagaggaccccaccaccacccagaagacagagaaggagccagggcaggaagggc

SEQ ID NO: 87120 - RNA, 73 nt, Homo sapiens
aagcaacgcgacacagcaaaggcgaaaggagccaggaaaccaagcgaagaacgggggccaaagacggaagcca

SEQ ID NO: 87121 - RNA, 79 nt, Homo sapiens
agccaggccgaggggcggacgcggccgcgccgcgccaggacggcagccagacgagcagggccgcagcaggccgcagcgc

SEQ ID NO: 87122 - RNA, 80 nt, Homo sapiens
ggggcccccgggcaccccggaccgcgcagccaccgcggcccccgcggcaaagcggggaaaagaccgaagacagagaccga

SEQ ID NO: 87123 - RNA, 79 nt, Homo sapiens
ccaaccgagagagagaaaaagcaaccccaaacacgaaagcaagagaacaaagcacgaacaacgacgaagcacaacaagg

SEQ ID NO: 87124 - RNA, 65 nt, Homo sapiens
agcgcccagaggcgagcccggggaggaagagcaaaaccccggacaagaaagccagagaaacgaca

SEQ ID NO: 87125 - RNA, 77 nt, Homo sapiens
gacccggcacacaaagccagcagcaggcgccaaccgaagaacagggacacaaacggccagacgagaaccccaccagg

SEQ ID NO: 87126 - RNA, 70 nt, Homo sapiens
ccagcagccaccgcggccaggccccacagaggaggcaacggcccagcggaacagcaagaaccagaggccc

SEQ ID NO: 87127 - RNA, 71 nt, Homo sapiens
agccgaagcgcagaggggaaacggggcgagaagcgaccgggcaaggggggccacaccgaaccagcacggga

SEQ ID NO: 87128 - RNA, 75 nt, Homo sapiens
aggcagccaaaaagaacacggcaacgaaaagcgacagccaacggaaaaagaaggcagaacgacacacagaaaagg

SEQ ID NO: 87129 - RNA, 81 nt, Homo sapiens
gacgacgccacgacagcgcccgcccacaggcgcggggacgcagaagccacgcaccaaaggcacagggaaggacccagaaca

SEQ ID NO: 87130 - RNA, 89 nt, Homo sapiens
cgagcggcggcggcggcagcgggcgggccccgagagcagcagcggacaccacggccaggaggaagaacaccaagaagagggcgggggaa

SEQ ID NO: 87131 - RNA, 83 nt, Homo sapiens
ggacaccgcggaagccgggaaagaccgcgcgcgccaccgccgagaaccaccacccgccaggcgcgcggccacaccccggcggg

SEQ ID NO: 87132 - RNA, 72 nt, Homo sapiens
aggcccaagaaaacaacagaaaggggcaccagggggaaaaacacaaagggaaggcagccaaagcaccgacac

SEQ ID NO: 87133 - RNA, 74 nt, Homo sapiens
agaaaagaaagaagacaaggggaaaaggcaggaagaggaggacagcagaaagaacaagggaccccagagaaagc

SEQ ID NO: 87134 - RNA, 76 nt, Homo sapiens
ccagcacaagaaaaaccgccagcaacaggggcaagaaccgaagcaaaagagcaaaacaggaagcgaaaccacagca

SEQ ID NO: 87135 - RNA, 38 nt, Homo sapiens
cgcacccgccagagccacggacacggccgagacgcgca

SEQ ID NO: 87136 - RNA, 58 nt, Homo sapiens
gcggccccagggcaacacagccagaaccagcaggcgcagaagaccgcccccgagacgg

SEQ ID NO: 87137 - RNA, 55 nt, Homo sapiens
cgccagcgcgaagcgaaaagcgagaaagaccccggacaggacaggcagaaagccg

SEQ ID NO: 87138 - RNA, 80 nt, Homo sapiens
ggaagaacgggaacccccgcagcacgagcagggacagcccgggcacaccacgcaacgaaccggaacagcccaggaccccc

SEQ ID NO: 87139 - RNA, 66 nt, Homo sapiens
cccgagaggacgccacacgcgccaggaacgagccccgccgggagaggacaaagaagcggaggacgg

SEQ ID NO: 87140 - RNA, 65 nt, Homo sapiens
gaagacaacaaaagagcccaagaacgacagaacacggcaaaaccacgacccggcgcaagccacag

SEQ ID NO: 87141 - RNA, 87 nt, Homo sapiens
gcacagcgcgcaagaagggagcggccaccaggggagcgggaaaggacaaaaggaacccggagagcggccgaggcccggacgaacggc

SEQ ID NO: 87142 - RNA, 79 nt, Homo sapiens
cgcaccagcccgcccccagcgcagcgccgccgcccggccccccagccccggcaagggaggccaaaaaacaaaaaggggc

SEQ ID NO: 87143 - RNA, 54 nt, Homo sapiens
ggcagcggcgccgggcacaggagggaagagcaagggccgggagggcccgaaccc

SEQ ID NO: 87144 - RNA, 83 nt, Homo sapiens
gcaccacggcaagggcaaccgcggggcaagcgggccacgcacccgcaccaaggccaagaggcagcagcgccccgagccccggc

SEQ ID NO: 87145 - RNA, 76 nt, Homo sapiens
agcgacacaccaagcggaggggacgccacgcaacgccgaggcggggcaccaggcccagacggcgaacccgagcaag

SEQ ID NO: 87146 - RNA, 75 nt, Homo sapiens
gccaccaagcagccagcacaacccagccacagggaacagcaaaccaagccagagaaagcaaaagaaaacagcaca

SEQ ID NO: 87147 - RNA, 78 nt, Homo sapiens
ggccaaaccgaacacaccaagcacagaaagaccggacacccgcacacagggaagagaaggacagaggcaaggaggagc

SEQ ID NO: 87148 - RNA, 78 nt, Homo sapiens
caaaagccaagccacgagcggagggcaccgcaggccacggagcagaggaggaaaagagcggaccagcagacaacagga

SEQ ID NO: 87149 - RNA, 80 nt, Homo sapiens
ggcagagccgcaagggacaagcccaacagaaggaccaccacgagcgaggggagcgaccacccccagaagacagcggacgc

SEQ ID NO: 87150 - RNA, 81 nt, Homo sapiens
gccgcgcggcccccagaccccggcgcggggccaggccgagggcccgcccggccccaggagaagaaccagccgcagaggagg

SEQ ID NO: 87151 - RNA, 48 nt, Homo sapiens
cccgccgcaccccccggaacgcaagcggggacgagagccccggcacaa

SEQ ID NO: 87152 - RNA, 86 nt, Homo sapiens
gcaagaggagccaggaggagagcccacagggcaaagagagcagacccgaggagcccgcagggggagcgggccggagagaagagagg

SEQ ID NO: 87153 - RNA, 74 nt, Homo sapiens
caagcaagagggggcacaacaggagggacgcagcccaagaggaggcagggaagccggcagcccgcggaagccga

SEQ ID NO: 87154 - RNA, 81 nt, Homo sapiens
ccaccccaagaccgggcggaacaccccccaggcccacagccgggagaccgagagcccaggggacaaaacaggagagcaggg

SEQ ID NO: 87155 - RNA, 74 nt, Homo sapiens
acaggaccacccaggagacgcgagggccacaagacaagaccggacaaccagcacaccagaggcccccaccaccc

SEQ ID NO: 87156 - RNA, 63 nt, Homo sapiens
gaggggaggcgagaacacgaggagacagacgcgaagcaaagcgccacccagaagacgacagcc

SEQ ID NO: 87157 - RNA, 83 nt, Homo sapiens
ccacagccaaggcgggagccacggaggaggcagacgcagacaacaaacagaggaagccgaagaagcggacacaaagcagcaga

SEQ ID NO: 87158 - RNA, 63 nt, Homo sapiens
gcccaggcccgaaagagacgggcaccaaccacgggccccgcggaacgcagggcgcaccaccag

SEQ ID NO: 87159 - RNA, 71 nt, Homo sapiens
gacacgcacaagcacagagcacacagggaacaaaacgacaaaagaacagaagggagaagccacaaccaagg

SEQ ID NO: 87160 - RNA, 91 nt, Homo sapiens
gccgcacccggccggcccggccccagccccaggaccccgagcagagaccgaaggagcagacgaggcacgagcgccagcgcgagacagacgg

SEQ ID NO: 87161 - RNA, 78 nt, Homo sapiens
aaggaagccccacgcccaaggccgggggcgccacaacaagccacaaggagggcaaggcagcccagacgagcgggggag

SEQ ID NO: 87162 - RNA, 73 nt, Homo sapiens
acccagggaaaggagacaaggaccgaaacagaaacggaacaccaagggggcggggaagagacacagaagggag

SEQ ID NO: 87163 - RNA, 63 nt, Homo sapiens
gacgcgccggaggaaagaggaagacaccaggcgcggaggagggaggacacgggagccagagga

SEQ ID NO: 87164 - RNA, 61 nt, Homo sapiens
aagggaggaaaagggcagggacagcgcaggcagcaggacgccaggaaagcaggcagagcaa

SEQ ID NO: 87165 - RNA, 40 nt, Homo sapiens
cgaaaagcgaaaagaaacagagcccaaaaggagaaccgac

SEQ ID NO: 87166 - RNA, 85 nt, Homo sapiens
cagcgcccccgccccgccacccggacggcgccgaggcccgcgaggggcgccgcccagcaaccccaaggccaggggaggccacgaa

SEQ ID NO: 87167 - RNA, 85 nt, Homo sapiens
ggaccgagcgacagcgcacggcagcggcaccacggcgacgcacaaggagcggaggaccagaagaagcccccccaaccgcggaacc

SEQ ID NO: 87168 - RNA, 56 nt, Homo sapiens
agaaaagaaacagccagcacgccaagacacgcccgggcaaaggccaggcgaccgca

SEQ ID NO: 87169 - RNA, 74 nt, Homo sapiens
caccgagccacccgaaggcagacagagacaccaaagacagccaaggggacacagccagggcgcaggcagcgccc

SEQ ID NO: 87170 - RNA, 51 nt, Homo sapiens
accaagccaagaaggacggcccggacgaggggcaggaccggggacacacga

SEQ ID NO: 87171 - RNA, 81 nt, Homo sapiens
ccgaaccaaaccacggaaacaggcacggccacagaagcaacaaaggaccgcccccagagagagaagcgcggaacaaaggaa

SEQ ID NO: 87172 - RNA, 119 nt, Homo sapiens
ccggcaaggcacgaaaccgcgcccgcgaagcaagacaccacaaagagaacacagagccggaaggcacaagacaagcgcagagaccagaagccgcagcagcaggccgaaagcggggccac

SEQ ID NO: 87173 - RNA, 73 nt, Homo sapiens
aaccaccacccaccggacagagagccagaaacgaagggcaaagagaaccaggagaccccaccaccacagaaaa

SEQ ID NO: 87174 - RNA, 79 nt, Homo sapiens
cagccggggccgacgccggggcaggccaaacggagggaggagaagacagagcgaacagaagccgggagaaagcgaagaa

SEQ ID NO: 87175 - RNA, 103 nt, Homo sapiens
agcaaacggaaaaaggaaaggcgagccccaaaaggcacaggggaaggccaggagaagaaagaagaaaagggagggagcacccaacaaggggaagaagggaaaa

SEQ ID NO: 87176 - RNA, 78 nt, Homo sapiens
ccccccgcccccccccccacgcaaccccagaccaacacacagcaccaggggcaagacagcccccagcagcaacagcag

SEQ ID NO: 87177 - RNA, 74 nt, Homo sapiens
gaacccagccgggaggccaaggccaaggcgcagggagagaggccagcaagagaaaaccgacgcccggaaagggc

SEQ ID NO: 87178 - RNA, 69 nt, Homo sapiens
cagagcgggagagccggagagaaaccacggccaacaggaagaaagacaaaacagaggagaccagaccag

SEQ ID NO: 87179 - RNA, 77 nt, Homo sapiens
gccggcggaccgcgggacagccgaggaacacccagaaccacgaaagcagggggccggacaaccaaaaagaagaggag

SEQ ID NO: 87180 - RNA, 85 nt, Homo sapiens
aggccaagaccacgcgacgcagagcggaaggagcacgagccagggagccgccgggaccggcccgggagacgacaacccaaaccga

SEQ ID NO: 87181 - RNA, 70 nt, Homo sapiens
caggaaggcaccagcaaggacaggcgagacagcagccgcaagaaaaggcaacggagacagaaaccaggag

SEQ ID NO: 87182 - RNA, 98 nt, Homo sapiens
agggcccgagcgccccccagcacggcccggaacccgggcccagacacagaccccccagacgcaacaccgcagggcccagacacgcacgcccgcccgcc

SEQ ID NO: 87183 - RNA, 74 nt, Homo sapiens
aaaccacaaaagaggccccgagccccggccccaaagacccaaaacagagacaccccccagcccccgcgccccga

SEQ ID NO: 87184 - RNA, 80 nt, Homo sapiens
gccccagccgccggggcaccggaaaaccgccgccaggcgcgccccgacacgggccggaaccaaaaagaagccccagagcc

SEQ ID NO: 87185 - RNA, 74 nt, Homo sapiens
cccaacccggaccggggacgcacggaccaaaaacccgcaacagcccccgcccaaaagagcgagaccaaaagacc

SEQ ID NO: 87186 - RNA, 51 nt, Homo sapiens
gcccacgggaacaagaggggacagaaagaagaagggagaccgggagagaaa

SEQ ID NO: 87187 - RNA, 66 nt, Homo sapiens
gacacggcaagagagcccaaggccgcaacagaagaccgcaggaaagcaggaaggcaagaaagccaa

SEQ ID NO: 87188 - RNA, 49 nt, Homo sapiens
ccaaggacagggcagcaaggcgcacgcgccccaccagggagacccacag

SEQ ID NO: 87189 - RNA, 67 nt, Homo sapiens
gccagagggaaccaccggacggcggaaaggcccaggcgccccgcagggaaagcacaaggaagaagcg

SEQ ID NO: 87190 - RNA, 83 nt, Homo sapiens
gcagaggaccggaggccgggaagccaacgaccacacgcagagcacagaccagcgcgcgaccggagccccacagcggcacaggc

SEQ ID NO: 87191 - RNA, 71 nt, Homo sapiens
ggcacaaaaacaccacgccgagaacccagaaacgaaaagcaccagacagagacccccgcaagaggaagacc

SEQ ID NO: 87192 - RNA, 73 nt, Homo sapiens
cgccgccgcggcagccaacccacaccaaagggcacacagaggcggagcaagggaagccaggcaggacgacggg

SEQ ID NO: 87193 - RNA, 48 nt, Homo sapiens
gagacaaaagaagagacaccgacccaaaaaagagaggagagcgaaagg

SEQ ID NO: 87194 - RNA, 62 nt, Homo sapiens
cccgagggacggggacggagagaacacgagcccacagggggacagaggagccaaaggccaaa

SEQ ID NO: 87195 - RNA, 77 nt, Homo sapiens
gcccagccccgaggagcgggaacagcgaagccaacagagaaaaaggaccaacaaaaagaacaagaaaagacagccag

SEQ ID NO: 87196 - RNA, 58 nt, Homo sapiens
gagaagcagcggacagacgagagggaaggcaacgcagaagaaccaggcaacggagaag

SEQ ID NO: 87197 - RNA, 66 nt, Homo sapiens
gggccccaacacccagagacgaaaggaagaaggccccagacgaaggagcggacggaaaggcggaga

SEQ ID NO: 87198 - RNA, 88 nt, Homo sapiens
cgggaccaaccccagacagcggccggaagcggggcgaaaaggaccgcgccgggggaccgcggcgaaacgcaaggaccagaaccccgca

SEQ ID NO: 87199 - RNA, 79 nt, Homo sapiens
gccagcccagcccccgccgcgccgcacaaacacgcagaggcaagaagagaggcaggagggccgggacgggagaggggcc

SEQ ID NO: 87200 - RNA, 79 nt, Homo sapiens
caccacagaaagaccgaagacaaaaaccagaagacaagcagcgaccaagagaagagacgagcgggggacggcacgggcc

SEQ ID NO: 87201 - RNA, 79 nt, Homo sapiens
ggggacgcacgagcccggcgccggcaggccccgggccgcggcaggagcccacacagagcagagacagccaccggcagag

SEQ ID NO: 87202 - RNA, 83 nt, Homo sapiens
gaaggaagaaaggaaagcgagggcccagcccaaggacccgacagacaggacccagaccagccaaagagaagaagaaaggaagc

SEQ ID NO: 87203 - RNA, 79 nt, Homo sapiens
cccgcgggaccgacagccgggcagaggaaaagaaggaggccagcgggacacacaaagaaagacgaaggacacccaaagg

SEQ ID NO: 87204 - RNA, 62 nt, Homo sapiens
cgacaccgcacgcgcacggacggcacagcccgccgaacccgaaaggagagaggggcaccaga

SEQ ID NO: 87205 - RNA, 82 nt, Homo sapiens
gagccaggccacggggccacagccgcgggggccaccacacggcccaaaaccgcagaaagcaccgggaggaaagagagccaca

SEQ ID NO: 87206 - RNA, 59 nt, Homo sapiens
cgcggcggcgagaaggcggacccagacagcgaccccagagaagcgcggagccagcgccc

SEQ ID NO: 87207 - RNA, 78 nt, Homo sapiens
ccagcggaggaaggggagcggaggccagagaccgcacgaggcccgcgggggaaaagagacgcaaaccacgaggacaga

SEQ ID NO: 87208 - RNA, 50 nt, Homo sapiens
cagggcgccgggccggcccgggcccagggaaagacaaggagccgggccga

SEQ ID NO: 87209 - RNA, 104 nt, Homo sapiens
ccggaccgagaaaaaccacaagcaggaaacccggggggcaaaacacgccagaaacagaggcagcggagcaggagaagggggggcagagccaggcacgagggccc

SEQ ID NO: 87210 - RNA, 85 nt, Homo sapiens
ggaggaggcgcgccgacgcggaggaggaagaaaagagagccagccgagcacccccaagcagaggaaacacgccgcaccagggagg

SEQ ID NO: 87211 - RNA, 75 nt, Homo sapiens
gcaaacacggaacgcggcgaccgccagagggcggaacaacggacgaagggacaaacccaagcagcggaagcaccc

SEQ ID NO: 87212 - RNA, 81 nt, Homo sapiens
gcgggcgccacccccgagcaagaggcaaccccggcggcggcaacccccggggggacgaccaccagccaggccggggacaaa

SEQ ID NO: 87213 - RNA, 83 nt, Homo sapiens
cagggcagacgagcggaggacacccaacccggacagacgcgaagcaaagcgccacccagaagacgacagcccagcaacccccc

SEQ ID NO: 87214 - RNA, 79 nt, Homo sapiens
aagccgcccgcggaccgcggcccgacgaggaagcacgaaagcaccaacgagacccgccacacgagaaacacacgaacgc

SEQ ID NO: 87215 - RNA, 76 nt, Homo sapiens
ggaccgcgggacaagaaaacagcggcccaaccccccgaagagagaaaacagaagaaggaaaggcagaaggcaacag

SEQ ID NO: 87216 - RNA, 63 nt, Homo sapiens
agggcaggcagagagaagcaagccagacaccgaaaacgagaaacgaaagagacacgggggcac

SEQ ID NO: 87217 - RNA, 72 nt, Homo sapiens
aaacccacaaagccaaccaacaacgaagaaccccccaagaccgagaaccgaaagggccaccgcacccaggcg

SEQ ID NO: 87218 - RNA, 75 nt, Homo sapiens
caacgggggcacgaagggggacacaggcgagagacaggagagacaacggaggcaagaaagacggagaagcgagaa

SEQ ID NO: 87219 - RNA, 69 nt, Homo sapiens
gagaccccaggccccagaggagaaggagcaagggcgcggcaggaagagaaggagacacacaagggaaag

SEQ ID NO: 87220 - RNA, 80 nt, Homo sapiens
acaaaaaaccaaggcacacagagcagaagaaaaagccgaaacaggcagcgagacaagagcacccaaaggcagcagcccaa

SEQ ID NO: 87221 - RNA, 55 nt, Homo sapiens
gaaagagcgcagcgggagaaggacaaaaacgcggaggggaccagagaccaaaaaa

SEQ ID NO: 87222 - RNA, 53 nt, Homo sapiens
cgacggcccgaacgagcggaggccaacaaaaggccccaagagagaagagaccg

SEQ ID NO: 87223 - RNA, 87 nt, Homo sapiens
accgcgcagcgcgggccccgcagaggaaggaagccggcgggcgggcaccaagccaggagaagggagacgggcaagaccacgccccac

SEQ ID NO: 87224 - RNA, 81 nt, Homo sapiens
gaggaggcggcggcggagacggacgacgacaacagggagacggacccaggagcgcgacagccaaacacacacgagacccca

SEQ ID NO: 87225 - RNA, 77 nt, Homo sapiens
aagcccacaaggcaggcagaggggcagccgcccaagccagagaaccaccacagggcccgaaaaacacagagccagga

SEQ ID NO: 87226 - RNA, 82 nt, Homo sapiens
gaccacggaccaaaggccgggcgcagaacccccagaccacaggaagaagcccagcggaggcgaacggcccccgccaacacga

SEQ ID NO: 87227 - RNA, 84 nt, Homo sapiens
agcaaggaggccccagcggaccgaacagagcagcccgacggccaggaggcgaagagacgaggaagcccaggagcccgaacacaa

SEQ ID NO: 87228 - RNA, 67 nt, Homo sapiens
gacgcaccacgagagcagcacccagagggagcaggagaagaacagccgagcggaccaggggcagcga

SEQ ID NO: 87229 - RNA, 73 nt, Homo sapiens
accgcgacgacaccccggggaggcgaggagagaggcccggaaagaacaaaggcagggccgccacgcgagagag

SEQ ID NO: 87230 - RNA, 66 nt, Homo sapiens
cggggcacccccccccacacacgcaccgcacagcaccggagaaccaggcgacgcgacccggggcgc

SEQ ID NO: 87231 - RNA, 86 nt, Homo sapiens
gcagagccgaggcagaagacggggcccgggaccacaggccccggcccagaccccaaggaggcccgccgacgacgaccaggccaggc

SEQ ID NO: 87232 - RNA, 86 nt, Homo sapiens
cagcaggaggggcagcaacaaggagggaaaaaagagcaggggaaaaggaaaggaaaaccagggcgacaagaacagaggcacaggaa

SEQ ID NO: 87233 - RNA, 53 nt, Homo sapiens
gcacacaaaagaggagaaaaccgggcgcagccaaacaaagggcacccagaaag

SEQ ID NO: 87234 - RNA, 79 nt, Homo sapiens
ccgcagagccgggagaaccggaggaggaggccacacagaaggacggcccgacggaagcccagccgaaccagcacgggcc

SEQ ID NO: 87235 - RNA, 70 nt, Homo sapiens
cacagggccaacaagcagcgagaaagcgaccagagaccgaggaccgcggacgagcacaacagcagagaaa

SEQ ID NO: 87236 - RNA, 52 nt, Homo sapiens
cgcggaaggcagcgcccagcagcgcaggacaaacagcaagacaagacagcca

SEQ ID NO: 87237 - RNA, 75 nt, Homo sapiens
gagaagaaagaggccacggaccggggcgacagcaagaaggagccagcacagaggcaaaagaaccaacaaaggcca

SEQ ID NO: 87238 - RNA, 65 nt, Homo sapiens
gccgagcagacgaagcaggggccggcacagcagcaagaccggaacccagaagccccccccccgga

SEQ ID NO: 87239 - RNA, 56 nt, Homo sapiens
cagagggcaaccggggccggggggaagaacgcgccgaacaccaagccccaaagaag

SEQ ID NO: 87240 - RNA, 67 nt, Homo sapiens
gggcccacacccccggcacccccacagggcgagcccgcccggccgaagcgaggcacagccgccacac

SEQ ID NO: 87241 - RNA, 61 nt, Homo sapiens
gagcgccccccgagcggggggacgcgccaggcacagcagcaggaaacgaaagagcccagac

SEQ ID NO: 87242 - RNA, 70 nt, Homo sapiens
ggacacaggccagaggagcacacacaaagaggacccgacagggacggccaaaccaggcacgcccccacca

SEQ ID NO: 87243 - RNA, 77 nt, Homo sapiens
aacagccgcgcggcgagcggcccgcacaaggccggcaggcagcggccccgcgaagcggagaacacccaccaaggcag

SEQ ID NO: 87244 - RNA, 67 nt, Homo sapiens
cggaaaggcggaagcccgcgccgcgccgaccggacgccggccaaacgaccggggacaaagaaaaaaa

SEQ ID NO: 87245 - RNA, 81 nt, Homo sapiens
gagaagaggccgccgcgccaacgcgagcggcgacggcggggaggagacaacaggagccaccggacagggacgagagaccgg

SEQ ID NO: 87246 - RNA, 65 nt, Homo sapiens
ccccggaccccgcaaaaaggaggagggagacaggggcaaaaaacggcagggaagaggcgagacag

SEQ ID NO: 87247 - RNA, 80 nt, Homo sapiens
gcccccaaggacaagcggaagcgaggaaacccagcggcggcagaaccagccggcacaaagccgaaccagagagagcaacg

SEQ ID NO: 87248 - RNA, 73 nt, Homo sapiens
gccacggcagacacacaacccgacccgacgaggcccgccgagaggggcccccgggaggagagaagcagaacca

SEQ ID NO: 87249 - RNA, 82 nt, Homo sapiens
accgggccccgcgaccggggcccggggaaggcccgcgcccgccccaggccccacacaggaaggaggaggaccacaaaccccg

SEQ ID NO: 87250 - RNA, 76 nt, Homo sapiens
gcaggaaaaacaggggagacagcggcgaaaggaagcaagcagaagacacgaggaagcaggcaacaaagacggaaaa

SEQ ID NO: 87251 - RNA, 76 nt, Homo sapiens
cgacggcgggggcccgcaaggaacccggcccccagggccacggcagcgggcgcgagaaaaggaagcggcaaacaag

SEQ ID NO: 87252 - RNA, 72 nt, Homo sapiens
ggcccagcaaccgacaacgcggcccgaacgaaaggagaagagaacccgagcaagaaggacaagacggcggcc

SEQ ID NO: 87253 - RNA, 82 nt, Homo sapiens
cagggccccagcgccgacggcgacgcggggccgagcaacccggcccggacaagacggagagaccacaggaacagggaaacaa

SEQ ID NO: 87254 - RNA, 82 nt, Homo sapiens
agggcggccgcgccggcccaggagaaagacagcaaagaaaaggagaagaaaggaaaaaaacaaccccgggcaccccgccagc

SEQ ID NO: 87255 - RNA, 82 nt, Homo sapiens
ggagcaagaggcggacaccccggacgaaccacaggaagcgcggggcggcggcgaaaggacggccccgagccccggccccaaa

SEQ ID NO: 87256 - RNA, 83 nt, Homo sapiens
cggaggaggaggaggcggaggggcgcggaggcgaccgccaggcgcccaaacccggaccagaacagaaggagcggcggacacac

SEQ ID NO: 87257 - RNA, 84 nt, Homo sapiens
ccgagggagggccgagccagccgcggccggaggagcccccaggccaaacagaccccgacagaagaaggaaggcaccagaccaga

SEQ ID NO: 87258 - RNA, 69 nt, Homo sapiens
ggcaaccagccaaaacaacggaaaacagcgacaggggcaggacgaaaaccgagagaagagggcagggcg

SEQ ID NO: 87259 - RNA, 84 nt, Homo sapiens
cggcgcggcgcagcccacggcgcaggcccacggagcgcagccgccgaggacgagagcacagcccccaggagaggcaggcgcaaa

SEQ ID NO: 87260 - RNA, 76 nt, Homo sapiens
gccaacaagaccccccgcgagcccgaggacacacgccccggccaagccgcgccagggacaaagcgagaaaaagcaa

SEQ ID NO: 87261 - RNA, 71 nt, Homo sapiens
ggcggacaccccaccaggagacgcaggacgccgccagccaccggcgcgaagccagaccagaccagcagggg

SEQ ID NO: 87262 - RNA, 56 nt, Homo sapiens
aaggcaaagaacaagagaagacccagaggaagccaaaaggagcaaaggaaagaacc

SEQ ID NO: 87263 - RNA, 84 nt, Homo sapiens
ccccaaggccccagaaaggggagcgccgccgccgcagcgggaccgcgcgaccggcgcccgcccgcgagacagacgcagccgagg

SEQ ID NO: 87264 - RNA, 74 nt, Homo sapiens
gcgaagcgaaccgaaggcggaacggacagcaaaaacacagggcagaccccgcaaaacgagcgagcgaagaagca

SEQ ID NO: 87265 - RNA, 76 nt, Homo sapiens
gaagacggaagacgcgcccgcgccgagagagcagcacaaaccaacagaggagcaagggggaacacgacagaccgcc

SEQ ID NO: 87266 - RNA, 39 nt, Homo sapiens
gaggacacaccccccggcagcccgaccgcggggagaaca

SEQ ID NO: 87267 - RNA, 62 nt, Homo sapiens
ccccagcaaaaagcccgcaacaagaagcaggagccgccccagccaccgccccacggggcagg

SEQ ID NO: 87268 - RNA, 70 nt, Homo sapiens
ccagggaggccgcacggcccacgcgaggaaagaaaagaggcccggaagagagccaccacgacggcagcga

SEQ ID NO: 87269 - RNA, 80 nt, Homo sapiens
aagcgaaccggccgcgcgggggcggggcacccggcccgcagcggacaaaagaaccaaggcagccgacaaaacaggacacc

SEQ ID NO: 87270 - RNA, 41 nt, Homo sapiens
gacgagaccaccggccaacagggaccgcccaccggccccca

SEQ ID NO: 87271 - RNA, 83 nt, Homo sapiens
ccaacaggcgcagcaaacacacggagcgaacgccgcagcagaaagccaagaaccagcggaccagacccccaccccaggagcaa

SEQ ID NO: 87272 - RNA, 76 nt, Homo sapiens
ccggcccccgacagccaggcccgcgagaagcggaagccaaaccgaagggacagacccccaacaccaagagccccac

SEQ ID NO: 87273 - RNA, 77 nt, Homo sapiens
ccgggcccaacggaccgaaaacgcacaaccaagcggagagacaaaaggagcaccagaccgcaacaggagcagacgga

SEQ ID NO: 87274 - RNA, 73 nt, Homo sapiens
aaaaaaaaaccaaagccaaacacaaggagacccggagaggaaaacaaaagcgagaaggccgcggagaaccgaa

SEQ ID NO: 87275 - RNA, 77 nt, Homo sapiens
aaaagggaagaacgggagcaaaggaagaaaccgagagcaggaaaaccgaaagcgccaggccagcgaaggagagaagg

SEQ ID NO: 87276 - RNA, 68 nt, Homo sapiens
gcgaaaacaacaggccggagcacaaaggacagagagcaacgaaaggaaaaaccaccgggagcgccgaa

SEQ ID NO: 87277 - RNA, 85 nt, Homo sapiens
ccgccaagaggagcgagcggacccgcgagggccaggacgacggaagggaccaggccgcgcgaaggccccccgcaggccaggaagg

SEQ ID NO: 87278 - RNA, 101 nt, Homo sapiens
aagcacacaacagaccaaaagcaggccaccaagccagcaacaaggcgccaggaacggaggggcagccgcacccaagaaggacagaccccggcaagaagcac

SEQ ID NO: 87279 - RNA, 63 nt, Homo sapiens
cagcgagcagaaagaaccaccggagaaaacagcacaggaaacacagaagaagagaaaaagcac

SEQ ID NO: 87280 - RNA, 33 nt, Homo sapiens
aaaggcacagaaaaccagggggaaacccgccca

SEQ ID NO: 87281 - RNA, 79 nt, Homo sapiens
ccaggacgggcacggcacaaaaggagacagcccacaggcaaccaacacaaggacagagacggaaagggcaaagaagcgc

SEQ ID NO: 87282 - RNA, 62 nt, Homo sapiens
cacggcgacgccccagcccgcccaaagaaagaaggaggaaaccggacaagcagaagaacaga

SEQ ID NO: 87283 - RNA, 72 nt, Homo sapiens
ccaggagagacgaacggggcacggcaaggcccaaaaagaagcgggcacgcgggaaggcaaagaagaagcgcc

SEQ ID NO: 87284 - RNA, 83 nt, Homo sapiens
caaaacagacggaagcagaccaggcgggcagagaaaaccagcgagacagggcgccacacagcaagaggagccaggagcacggg

SEQ ID NO: 87285 - RNA, 43 nt, Homo sapiens
gagaccaacagagcagagaagcagagagcgcagaagacaggac

SEQ ID NO: 87286 - RNA, 78 nt, Homo sapiens
cggggggcccaagcaaggccggaagaagagcgcagaggacaggccaccggcccagcaggccggccaacggggacagga

SEQ ID NO: 87287 - RNA, 120 nt, Homo sapiens
aacaagcagccaagcccagacaagccccagggaagccacagcaccccagcacccagggaccaagaaaggcccagggaccaaagcccggacaaggcccgagcaccaggaccgcagaaggcc

SEQ ID NO: 87288 - RNA, 34 nt, Homo sapiens
gacggaacccaaagccccggggaagacccgcaag

SEQ ID NO: 87289 - RNA, 74 nt, Homo sapiens
gagaagagagacgagagagaagaggagagagaagagacaaagccaccaaaacacccagaacaaaacgcggaagg

SEQ ID NO: 87290 - RNA, 54 nt, Homo sapiens
cagacgcagggcgcccccgccagccaaccaagaaaaagaaccacacgagaaaca

SEQ ID NO: 87291 - RNA, 52 nt, Homo sapiens
cgagccgagaacggcgccaagacaaaccagagaggaaacgggacaaccaaac

SEQ ID NO: 87292 - RNA, 74 nt, Homo sapiens
agacgcagggcgcccccggaacagcaggaaggagaagagccaagaccgcccacaggcagggcggagccgccaaa

SEQ ID NO: 87293 - RNA, 66 nt, Homo sapiens
cgggaacgggagacaagcgcagcgagggacaagagaaaaaaagggcgggcgaacaaaaagagcaga

SEQ ID NO: 87294 - RNA, 78 nt, Homo sapiens
caggggcggcgagcgcggggccggcccgagccaggagaggcacagggccaggcacacaacgagaccacggcccaaaca

SEQ ID NO: 87295 - RNA, 75 nt, Homo sapiens
agaacaacaaaagaacagcagagaagggaacgaaagcgaaaccggaccaagaaaaaacaaaagcaaaaaagaagc

SEQ ID NO: 87296 - RNA, 79 nt, Homo sapiens
acaccaccccgcgccgcccccccacccgagcagagccgccgaggagaaaacacccaggacaggaggaacaggagcacag

SEQ ID NO: 87297 - RNA, 89 nt, Homo sapiens
ccggaccccgacccgccgccggcccggccgcgcccgggaaagggagcccacacagaaaagaacaggaggaaagagccagacggaaacga

SEQ ID NO: 87298 - RNA, 72 nt, Homo sapiens
gcgggaggaagaacagcaagggccaacggaagccagagaaaggaaaagggggccaggaagcaaaaagaccag

SEQ ID NO: 87299 - RNA, 66 nt, Homo sapiens
gaacaaagaccggagcagcaacgcaagacaccggcacgcaacagcgacgggcaggccggagagcag

SEQ ID NO: 87300 - RNA, 69 nt, Homo sapiens
aaaggaaaagccgacaaagacagcccacaccggcaggccaacaaccaagacgaacgaacgcccagacaa

SEQ ID NO: 87301 - RNA, 72 nt, Homo sapiens
cacacacgagaacgcgcgcagaggccagacaacggcaagcggagaagagcaaggccgaaccgagaggaaggg

SEQ ID NO: 87302 - RNA, 43 nt, Homo sapiens
cccagaagcaggagccacaccaccaggcacaggcggggaaccg

SEQ ID NO: 87303 - RNA, 81 nt, Homo sapiens
ggaaccccgaggccaccgcagccagagaaccaagcggccaggcgaaggggagcaagggagaaaagcaaagggaaggacgaa

SEQ ID NO: 87304 - RNA, 52 nt, Homo sapiens
cgacccgagcagcgcagaccccgaccgcacaggcgcaggcgcaaggggccag

SEQ ID NO: 87305 - RNA, 61 nt, Homo sapiens
agccagacacagagcaggaacgcagccggggacaccaaacaggaagcaaagcgaagccacg

SEQ ID NO: 87306 - RNA, 73 nt, Homo sapiens
agaagacgccaagagacaaagaaaaacggaaaggaaacacaacaccaagcccacaagcgcgccgggagacgcg

SEQ ID NO: 87307 - RNA, 65 nt, Homo sapiens
agggggaagaccgcgcccgcggagagcccaaacaccaccaccaaggccggggggggcacagagcc

SEQ ID NO: 87308 - RNA, 73 nt, Homo sapiens
accggagcagacgcccgggggcacacccagagcccccagcagccgggggcccccaacggcccagcacaccagc

SEQ ID NO: 87309 - RNA, 77 nt, Homo sapiens
cagcgcagcagccggaggaagcacagacggcggaggaggcgcagccggacaagccgccaccgcgaggcagaagcacg

SEQ ID NO: 87310 - RNA, 89 nt, Homo sapiens
gccgcgccgcgcagcccgcgagcacaggagcgagagaggaccccggacacgaaagccgggaaagcgagacaggagggccaagaagaagg

SEQ ID NO: 87311 - RNA, 69 nt, Homo sapiens
agagacgacgggcaacagacagaacagagcagcgaacacggaaggccgaagaaggaaagaggagggggg

SEQ ID NO: 87312 - RNA, 69 nt, Homo sapiens
gggaacgacgaacagggcaaaccgcaggcacaacacaagagggaaaccgcaggaggaccaacggaccca

SEQ ID NO: 87313 - RNA, 82 nt, Homo sapiens
aaaaagaaagaaaacacaggcggggacggcccggaaacccgggacgacagcagaggcgacaaaccagaccagagaaaaaaga

SEQ ID NO: 87314 - RNA, 71 nt, Homo sapiens
agaagaaaaggaacacacagaggaggcgagaagccaaggccaggggcaaacaggacggagccccacgcgag

SEQ ID NO: 87315 - RNA, 77 nt, Homo sapiens
cgaagaagccccggcggacaccccgggaaggcgggcaagcgggagacacgagaaaggacggaagagccacagagagc

SEQ ID NO: 87316 - RNA, 60 nt, Homo sapiens
gcgccggccccccggcggagaagaagcgcggccgcaccggccaaggggacaagaaaacca

SEQ ID NO: 87317 - RNA, 78 nt, Homo sapiens
cagcacaggcccaggggcaaaagcaggaaaggcagagaacagcaagaaagccgccagccaggcacgagccacgccaag

SEQ ID NO: 87318 - RNA, 78 nt, Homo sapiens
agagaaacagaacaagaaacagagacagaaaaaccccagcggccgaacagaggaagaaggaggccgaggggagaagag

SEQ ID NO: 87319 - RNA, 77 nt, Homo sapiens
acgcgcccaggagacgcaccgcggggaccggacacacccccccaggcgcggggaggcccagcccgccgcagggccac

SEQ ID NO: 87320 - RNA, 78 nt, Homo sapiens
acaaccgccccagaaagcgaaagcgaaagcgcacaagagaaggagaggcacaaacaaaacagaccgaagaagagaaga

SEQ ID NO: 87321 - RNA, 68 nt, Homo sapiens
gaacggaaaaaacaaagcgaaacagcggggccacccagaacaaaaagggccaggcacgagaacagggc

SEQ ID NO: 87322 - RNA, 77 nt, Homo sapiens
ggaagacgagcccggacaccaaaacccacagccccaggggacggccgcacacgggggagaccgccccccagaccccc

SEQ ID NO: 87323 - RNA, 83 nt, Homo sapiens
aggccggggccgcgcgagggcgcccagcggcaaacagaccgcgacgaaggcaaagacccccacccaccgccccccagcgccac

SEQ ID NO: 87324 - RNA, 76 nt, Homo sapiens
gaggcaaacggggggcgcggagggaccagcgagcgggaggcaagggacagagccacggggaagggagcaagccaga

SEQ ID NO: 87325 - RNA, 85 nt, Homo sapiens
ggagagagaagaagaggagagaggagcgaacccgcccaggcccaagaagcagcgaaggaaggggggccccagcccggccgaacgg

SEQ ID NO: 87326 - RNA, 83 nt, Homo sapiens
cacaggccgacaagaaccccgcagccacccacagggcccgaacccccggacagcccccaccacagcgcaggagaggaaccgag

SEQ ID NO: 87327 - RNA, 41 nt, Homo sapiens
agcgaccccggaggaggagcaggagaaagcgcagaacagac

SEQ ID NO: 87328 - RNA, 77 nt, Homo sapiens
gacccgaacggaccagcagaacccccaaagacaacaaggagcaccaaaagagaagagcagacagaagcagaccacac

SEQ ID NO: 87329 - RNA, 76 nt, Homo sapiens
aacacacgaacggccccagcagcccaggaaagaccacagcaagaccacgcccccagccgggggaccaggccgaacg

SEQ ID NO: 87330 - RNA, 116 nt, Homo sapiens
cccgcaggcgcagggcggccgcagcgggccgcggccgaggaggcagcgcgaccccgcacgaaacagagggaggaccaagccacagggggcccaagcccacgaaaacacagacagaa

SEQ ID NO: 87331 - RNA, 83 nt, Homo sapiens
agcaccaggggcagcagggggccagccaggacacacagacccagcggaaccgggggcaccaaagcggggggagggcgaaaaaa

SEQ ID NO: 87332 - RNA, 38 nt, Homo sapiens
gcaccacgccaaggaaagacgaaacggaggagcccagg

SEQ ID NO: 87333 - RNA, 70 nt, Homo sapiens
ggagaggccgagaggggccggacccgacacaaccagacaggcaacgaaggcaaaccgagacccaggcgaa

SEQ ID NO: 87334 - RNA, 81 nt, Homo sapiens
gcggaccgggcgccggggcacgaccacacgccggagcgcgcgaagaaaagaagagccccaggccaagggcgggagcacccc

SEQ ID NO: 87335 - RNA, 72 nt, Homo sapiens
gacacaaaaggccgaaaagaaaagaaacacggcaccgggggcggaaaagcagaaaggaaagggaagagcaag

SEQ ID NO: 87336 - RNA, 76 nt, Homo sapiens
ggccgggccagaggaagagaagaggcccaaaaaaacagaccaccagccgcgaggacaggacccccagaaacaccgc

SEQ ID NO: 87337 - RNA, 67 nt, Homo sapiens
agagcgggagccacacgcccagcagccaccaacacccaaaggagacgccaccgaaaaagccaaggcg

SEQ ID NO: 87338 - RNA, 74 nt, Homo sapiens
cagggcgccaaagcgagagagggaagcgcccggccggaggcaggggaaagccagagcaagacccacgaagggca

SEQ ID NO: 87339 - RNA, 79 nt, Homo sapiens
ggaacgcacaacagccaccgcagcgaacagacccagggaaccaacgcccgaagaaaagacaaaggagaaaggaggggag

SEQ ID NO: 87340 - RNA, 81 nt, Homo sapiens
ggcgccgcggcgaccaacaagcggcgccccggggcgcggcccgggcacagggccaacacgcccgggaggaagcgccacaag

SEQ ID NO: 87341 - RNA, 64 nt, Homo sapiens
acgggacacgggcccacagaaagcaggagcccggaaaggagaaggaaaagacggcaggaggaag

SEQ ID NO: 87342 - RNA, 79 nt, Homo sapiens
gagccagcagcagaaacagaagggaacaacagaaaaaacaagagaggaagcccagaggaacaagggaggcgaacaggga

SEQ ID NO: 87343 - RNA, 77 nt, Homo sapiens
ccccaaaaaccgccgaaaaagagaagacgcacccgaccgggccgaccacgggggcagaagaaaaagcaggacaacag

SEQ ID NO: 87344 - RNA, 91 nt, Homo sapiens
cacggccaagaggaaggccaagcgagggccaagacgaagacaccagaagccagaagaaggccaccaggaagagcgagccgagagcgagcaa

SEQ ID NO: 87345 - RNA, 78 nt, Homo sapiens
caacgccgcgacgcccccaccgccgcggcgccgggcccagcgcacgcgcagcagacaccagacagcaaccagccgcag

SEQ ID NO: 87346 - RNA, 79 nt, Homo sapiens
acgcgggcccagccgcggcccacggggaggcgcggcggaagcccgggaagcaggcgcaaaaacaggaaaacgacacgac

SEQ ID NO: 87347 - RNA, 73 nt, Homo sapiens
gggggagggcgagaggggaagaggcgccgggacaggggccagaagcccccaggaggagaacgagcaacggaag

SEQ ID NO: 87348 - RNA, 81 nt, Homo sapiens
ggaaagaggcccgacacaaccaagcggacccaaaggaaagcagaaaggaaaggcagacacaagacgagcacccccgagaaa

SEQ ID NO: 87349 - RNA, 72 nt, Homo sapiens
caacacagacccagaagagacgaaaaagacgccccgaaacagccccggagcaaccacagagcagggcggggc

SEQ ID NO: 87350 - RNA, 78 nt, Homo sapiens
cacaccagccacagccagcaggccgcccacgcggagccgccacggagcaggggcagagacgggagcgagcacaaccga

SEQ ID NO: 87351 - RNA, 71 nt, Homo sapiens
caggggcagaacaggcccgggccaaaacagcaacccaaacacagaagacgacagggaaagaagaaccggac

SEQ ID NO: 87352 - RNA, 80 nt, Homo sapiens
ccgcggcgggcagccagagcccagggaacgaagaacgccgacacaaagaaaacgaacaagaacaagccagaacagcccca

SEQ ID NO: 87353 - RNA, 71 nt, Homo sapiens
aggccaccggcaggcgcacaggcccggccaggcacaagggcaccacaaaggacaacaaccgacagcccccc

SEQ ID NO: 87354 - RNA, 82 nt, Homo sapiens
aagaggaagagaggaggcgcgagagcgggaagaggcggcagacagcgggcggagggaagcaggccagccccggacaggaaga

SEQ ID NO: 87355 - RNA, 68 nt, Homo sapiens
aaggaaacaccgaagcaaaaagaagcccggcagaagacaggacagggcgaaacaaccaaggccgacac

SEQ ID NO: 87356 - RNA, 75 nt, Homo sapiens
gaccaacggacccaaggaagaaccaggagggaaaaagaaaagaaggcccagccagcacccaggggcaggacacgg

SEQ ID NO: 87357 - RNA, 65 nt, Homo sapiens
gccagcgaagcggaggcggccgcgccgagggacagccgcagaaagaagaaggggacaagaacagc

SEQ ID NO: 87358 - RNA, 76 nt, Homo sapiens
cccggacggccaacaccaccggcacaggacggccagaggggacggaagggcccgcaacgaacgaacgaaccgagag

SEQ ID NO: 87359 - RNA, 67 nt, Homo sapiens
aaaggccaagaaggcagccaggacacggccaaggccggcgagaacgcccgcggcagcgaggggacca

SEQ ID NO: 87360 - RNA, 76 nt, Homo sapiens
cacagaacagccacgggcaacagagcaggaccagggcggaacgcacccagagggccccggaggccgccagcagagc

SEQ ID NO: 87361 - RNA, 74 nt, Homo sapiens
gcgcggaaggcagcgcccagcagcgcagagccgagcccacccgaccagggcccggcacccagcagaaggacaga

SEQ ID NO: 87362 - RNA, 74 nt, Homo sapiens
gcaggaggcacaaggccacacaacggaccacacaagcaggccgggaacggcccagcgggcagaggaaaaacgca

SEQ ID NO: 87363 - RNA, 70 nt, Homo sapiens
cgggcgcaggcggcacgaaacggagcccggagcagcggcggcgaaagacaagggcaaggccaagccggag

SEQ ID NO: 87364 - RNA, 80 nt, Homo sapiens
aaagaagaggagcacaacagggcgacaagcacaaacagagggggcagaaggccaagacccgagaacaggagaagcgcagg

SEQ ID NO: 87365 - RNA, 77 nt, Homo sapiens
caagaagccgagcacccacagccaggcaagcacccagcagcgaagagcaaaggacccaccacgagaaacaagaggca

SEQ ID NO: 87366 - RNA, 73 nt, Homo sapiens
aggcagaacaaaggaacagcaaaaaaagcgcaccacagcaaaagcagagggacccgagccccaaagacagaaa

SEQ ID NO: 87367 - RNA, 66 nt, Homo sapiens
gggcggacgcagggggccacccagcccccaccgccgccaagagacaacaggcacaaagagagaagg

SEQ ID NO: 87368 - RNA, 56 nt, Homo sapiens
gcgagccccaagaaccggccaccggccccacacgaccggggccagcgccgaaaaga

SEQ ID NO: 87369 - RNA, 70 nt, Homo sapiens
aaggaccagccacaccaaggcaaggcgacaacaaaggagaggacaagcgggccaacacaagggagagagc

SEQ ID NO: 87370 - RNA, 77 nt, Homo sapiens
ccaagcgagcacaggagcgcgaagcagaggggccaggccccccgcgcccgggaccagacgcagaggaacagagggaa

SEQ ID NO: 87371 - RNA, 71 nt, Homo sapiens
ccccgccgcccgaacacgggacggagcacaacgacccggcacaacagacgcccacagcggcacccacccga

SEQ ID NO: 87372 - RNA, 103 nt, Homo sapiens
accgcggggccaagggggacagccaacaaagagaagagaaaccaagcccggccgcgagagcgccgacagaaagggccaaagaagccagcagaccccagaacca

SEQ ID NO: 87373 - RNA, 60 nt, Homo sapiens
agaagaccaagcccaaggaacagagaagcaaaaccgaccaaaaaccaggcacaaaggaca

SEQ ID NO: 87374 - RNA, 79 nt, Homo sapiens
cacagcagggggcagcagggaggagagagcgaggccacccagaaggccagccccagcggcccccagccccggaagggga

SEQ ID NO: 87375 - RNA, 78 nt, Homo sapiens
aaacaacaccgaaggagagggcggagcggcccacagcccccgccgccaagacacgaccagacaaaggcggcagcaccc

SEQ ID NO: 87376 - RNA, 34 nt, Homo sapiens
acccagaggacaacgaaggcgaaccaggagcaaa

SEQ ID NO: 87377 - RNA, 40 nt, Homo sapiens
ggcaggaccagcgcagcgcggaagcccgcggggaggcccc

SEQ ID NO: 87378 - RNA, 82 nt, Homo sapiens
gccccggaccggcccccccgcgggcgccacgcagcggacacgaggagcccgggcggaccccagcccagcaccggacaaagaa

SEQ ID NO: 87379 - RNA, 71 nt, Homo sapiens
ccaagcgagcccccgcacccggcaaccgcagagccacgccgcagacggacaaccaccagagccagggggcc

SEQ ID NO: 87380 - RNA, 76 nt, Homo sapiens
cacagccgcagccaagagcaacaggaaagaacacagcagggacggggacaccagacgggaaaacacccgaagacgc

SEQ ID NO: 87381 - RNA, 65 nt, Homo sapiens
acacacagaaggaacaaagaaaacacccgacccaagccccacccagccaaacccaggcccgagaa

SEQ ID NO: 87382 - RNA, 75 nt, Homo sapiens
caagaagagaacccagggaagccgaagagccagccggaccgggaaaaaggcagcgcccaccaccaccagacagac

SEQ ID NO: 87383 - RNA, 72 nt, Homo sapiens
aggcaaaacaaccagaaggggagaaggcaggcaccacaaaaaggacaggccacggaaaacgagacaagacgc

SEQ ID NO: 87384 - RNA, 71 nt, Homo sapiens
gaacagacacagagccgaaacaggggcagggcaaccagccccaggacaggaacaccaagcggcccaaacaa

SEQ ID NO: 87385 - RNA, 74 nt, Homo sapiens
accgcgaagcccgaggcagcccaagccgggcccgcacggcaagaacggaagcacgggcggaggaaagcacaagc

SEQ ID NO: 87386 - RNA, 86 nt, Homo sapiens
gagagaacagaaaacagccggccaaaggccaaggggggccggccagccggcaaaagaggcggccagcaaagccagggccagacaac

SEQ ID NO: 87387 - RNA, 72 nt, Homo sapiens
cagaaagccgccagagcggggcacggagcggggcgaaacaagcacccagcaaccgaaccagaaaaaagagga

SEQ ID NO: 87388 - RNA, 85 nt, Homo sapiens
ggccaggccagacccgaaggccaggagacccgaccccaagagacaagcccagggaaggagagccggggcccgacagccccggggg

SEQ ID NO: 87389 - RNA, 70 nt, Homo sapiens
aaggagggcgaagcggggcggaccaccggacaccggcccccacacccgaaaggcgcaccgggggacccac

SEQ ID NO: 87390 - RNA, 55 nt, Homo sapiens
aaagagaccagagcagagcggaagccgagccacggagcacccaaagagaccaccc

SEQ ID NO: 87391 - RNA, 72 nt, Homo sapiens
gaaagagacacagaaaagaccacaaagcagaaaaagggagcagaagggagaacggaagaggacaagagacga

SEQ ID NO: 87392 - RNA, 82 nt, Homo sapiens
acgcgcaacacaacccgggcagggcggcaaccgagacacaaagggaaagcgaaaaacaaccaccagcgagcaaaaaggcaaa

SEQ ID NO: 87393 - RNA, 82 nt, Homo sapiens
ggagagcggccgacaagaggcggacggggagcgaacgggacagcccacacccggcgcggaggggggcacccgaggaggaaga

SEQ ID NO: 87394 - RNA, 70 nt, Homo sapiens
cgggaacccgaagaagaccaccgggagagagggaaaaaacaaccccgccgcgagaggcccggccagagac

SEQ ID NO: 87395 - RNA, 70 nt, Homo sapiens
aagaaccagacaaagacaaggaacaagaggaacaagaccaaggacaaagccgaaccagacccacagccac

SEQ ID NO: 87396 - RNA, 74 nt, Homo sapiens
ggcgcccggccaagggccacagcagcaggggaagagacggacacacagaaagggagaaccgaacgggaagaccc

SEQ ID NO: 87397 - RNA, 76 nt, Homo sapiens
gggcagacagcacaaccagcggaggaggagcagcgcggaggaggaagccccccggccagaacaccggacgcaccgc

SEQ ID NO: 87398 - RNA, 69 nt, Homo sapiens
gcacaaccgccacgagggccaaagccaagccggaggagccaccaacagaagcaggagccaggaaaccaa

SEQ ID NO: 87399 - RNA, 50 nt, Homo sapiens
cagcgcagagcgagagccacgcgcccgaaaaacacgaaccccggaaggaa

SEQ ID NO: 87400 - RNA, 74 nt, Homo sapiens
gccggaccagcaaggcgcgggcacggggacggccagccgggggcccggagcccggcccagggaagccggccgag

SEQ ID NO: 87401 - RNA, 74 nt, Homo sapiens
agggcaaggaaacggccacaagagacccggacagacaccagggagagaagaagccagacagagcaaacaaggac

SEQ ID NO: 87402 - RNA, 70 nt, Homo sapiens
agacgcacaggaacagaggccgcccccagcgaggggccggcggacgcccgggggcgcacgcacacaagac

SEQ ID NO: 87403 - RNA, 73 nt, Homo sapiens
ccaggaacggcccggggccgacccggcccgaggggaagcagccaggcgacacgggcggaccacaaacccggcg

SEQ ID NO: 87404 - RNA, 73 nt, Homo sapiens
ccaacccacagacgcccagaggacaaaaggggccgggcaccacaaggggccaacggaagcggcaaagccagag

SEQ ID NO: 87405 - RNA, 95 nt, Homo sapiens
gcggcggcgccgggcccggggggggacagcaggcgagggcgacccggacacgacacacacaagagcgggaaaggcaagcagcgacaggaaagaag

SEQ ID NO: 87406 - RNA, 73 nt, Homo sapiens
gagggccgcgggagggaggggcaagaaaagacggcacgcaccgagaggccagggagagaggagagagaggaac

SEQ ID NO: 87407 - RNA, 76 nt, Homo sapiens
cccacgagcgcccccaacacgacggccgggcgcccgggaggccgacggagaccgccccagggccaaccgggcaggc

SEQ ID NO: 87408 - RNA, 60 nt, Homo sapiens
agggaagcaccaggacccgacaaccaggaaggagacgccaggaagccggacgcgcaggga

SEQ ID NO: 87409 - RNA, 75 nt, Homo sapiens
cacgacagggaggagcggagaacgcaggaaccggcccacaggaaacagaacgacagcccgcaccgacgccggcgg

SEQ ID NO: 87410 - RNA, 72 nt, Homo sapiens
cgcagccaggacgaagccaggaaggccagaccgggcgcggaccaggacagggaccgccgcgaccaccggaga

SEQ ID NO: 87411 - RNA, 70 nt, Homo sapiens
caacggcccgggaccaccggcgacagcagaaagggacaccagcagcgccgccggaccaccgggcagcaga

SEQ ID NO: 87412 - RNA, 77 nt, Homo sapiens
ggcggccccaccagcagacgcagccgagacaccagcccgaaacaccaccaagcacacggcggcggcgaagccaagac

SEQ ID NO: 87413 - RNA, 84 nt, Homo sapiens
gacggcgccccacgaggcagaaacagggagcggaggcccgcggcaggcaggagaggaggagggcccgccccggcggccacaggc

SEQ ID NO: 87414 - RNA, 89 nt, Homo sapiens
gcagaggaccggaggccgggaagccaacgaccacacgcacgccaaggggccaagggagagcggggccccccccaaggcaccccccggcg

SEQ ID NO: 87415 - RNA, 84 nt, Homo sapiens
ggagaggaagccaggccaagaagcccgagagaaccgcgccagagacaagcgcgaagcgggaggccccggagcagccgcaaggag

SEQ ID NO: 87416 - RNA, 77 nt, Homo sapiens
ggacagcaggagaaaacagagacccacaggagaagccgggcagcagaggggagacaaagacgcagccgagcagcgga

SEQ ID NO: 87417 - RNA, 73 nt, Homo sapiens
aacaggccagaaaacagaaggccacgcggaaacaaggcgaccccagaaaggagaagacagaggagccagacca

SEQ ID NO: 87418 - RNA, 78 nt, Homo sapiens
gaagaaaaacaaacacacgcaaaggagaaaggaaccgacaggagacccaacagcgaagggaggagggaagacgaaaag

SEQ ID NO: 87419 - RNA, 57 nt, Homo sapiens
gacagccccagaagcaagagaggaaaacagaagcgggcaagaaggaaccagcaaagc

SEQ ID NO: 87420 - RNA, 76 nt, Homo sapiens
acgaagagaacgcccgggaccgagcacccgccccgggcaccaacgccgggaacggcagacgcagcagagagaccac

SEQ ID NO: 87421 - RNA, 56 nt, Homo sapiens
aggcacaagggcaccacaaaggaaagcgaacgcgaaaagaaaagccgagagcagcc

SEQ ID NO: 87422 - RNA, 67 nt, Homo sapiens
gcaagaagaagaagcccgaacaaggccccaacagggaccaaacaccccacgcccaggccagaagaga

SEQ ID NO: 87423 - RNA, 79 nt, Homo sapiens
ccacaaccaagagaaacaaccgaacagacgccccaccaggccagcggggcgcagagagaacccgggcccaggcgacgaa

SEQ ID NO: 87424 - RNA, 72 nt, Homo sapiens
ccacaagcaggaaaaggagaggcgggagacgagaaagcagaccccacgagcgaaagggaaaaaacgaaggag

SEQ ID NO: 87425 - RNA, 83 nt, Homo sapiens
ggccacgcgccacagcggcagggaggcagacagggcacacgggccacagaggaccagcaaggagaagaaaggagcagcacaga

SEQ ID NO: 87426 - RNA, 68 nt, Homo sapiens
ggcagggacgcgacccccggacgacacaaaaagaaaccgcacaccacgaggaggccaggcagcgacca

SEQ ID NO: 87427 - RNA, 73 nt, Homo sapiens
gccgccgccccgccagcgccagacggacgaggcggcggagaacaagcggcagggacaagagaaaaaaagggcg

SEQ ID NO: 87428 - RNA, 84 nt, Homo sapiens
agacccagggcggaaaggaagaggagacagagggccgagaaggacaggacaggccagaagcggacccagaagaggggagcagca

SEQ ID NO: 87429 - RNA, 54 nt, Homo sapiens
gcagcgaggagacacacgccacggccggggacccagacagaggggcggccccaa

SEQ ID NO: 87430 - RNA, 79 nt, Homo sapiens
aagaaacaccaccaacaaaccgagggaacaggcacgccccacccgccagccgagcccccgacgcagcacaaagccccca

SEQ ID NO: 87431 - RNA, 88 nt, Homo sapiens
ggcggaggaggaagaggcacgcgagggggcgcgaggggaacggaggccagagcgcgacacgcaccgcgcccacaccggccacaggagc

SEQ ID NO: 87432 - RNA, 66 nt, Homo sapiens
cgacaccgcacgcgcacggacggcacagcccgccgaacccgaaaggagacagcaaagcaagccaag

SEQ ID NO: 87433 - RNA, 68 nt, Homo sapiens
acgggacgggaaacgacgccgccggcaaaaaggcaaaaagagcgcgaagagacggagcagaaggggca

SEQ ID NO: 87434 - RNA, 86 nt, Homo sapiens
gacggcggaacccggggccgggacgcagcccggcggcagcaggaaaccccccaggcaagaggcgcaggaccgggaagaccaacaaa

SEQ ID NO: 87435 - RNA, 73 nt, Homo sapiens
agaaaacacagcgaaacgggacccacaaggaacagcccgcacacagaacaacagggcaccacagggaccaccg

SEQ ID NO: 87436 - RNA, 79 nt, Homo sapiens
gagcaaccacccggcagacaaggaggcgagaacgcaaaggagagcgacggaccgaagagggagaaaacgggcgaaggaa

SEQ ID NO: 87437 - RNA, 73 nt, Homo sapiens
gagcaaggaagaaagcagcccagggagaacacggggacaaagaaagcccgcgccgggagaagagacaacggca

SEQ ID NO: 87438 - RNA, 71 nt, Homo sapiens
caaccgccgggcgcgcagagggcaggacaacacggcccgcacccaggagcccaggaggcgagcaaggcacc

SEQ ID NO: 87439 - RNA, 65 nt, Homo sapiens
gcaagcggcacaaaggaggaaacagaaacaggagcccggaccccaacaagaccagcagaggggcc

SEQ ID NO: 87440 - RNA, 76 nt, Homo sapiens
gaccaccaaggagagagaaaggaaagggcggcaggaagacaggaaaagagaaacaggccccaacgaggagaaagag

SEQ ID NO: 87441 - RNA, 72 nt, Homo sapiens
gggcgccgcacaccacacccaaccgccacggaaggggggacacaaacggcagaggggagcaccaaggcggaa

SEQ ID NO: 87442 - RNA, 67 nt, Homo sapiens
cccagcaccggcgaagccgggccaaaggacgaagaacccacagagaacgaacaaaggcagaccagac

SEQ ID NO: 87443 - RNA, 74 nt, Homo sapiens
caggaaccaccgggacggaaacaccgaagcgccgcccaaaggagaaccgcaggaaaggagggcacggagcgggg

SEQ ID NO: 87444 - RNA, 53 nt, Homo sapiens
ggcgcagcggcagcaaggaaagacgcaggaggagcggcaggacaggagacagg

SEQ ID NO: 87445 - RNA, 80 nt, Homo sapiens
ccgacgaggacggaggacggagaggaccgcaccagcacgcccacccagagggggaccagagacacccgacccgaccacag

SEQ ID NO: 87446 - RNA, 82 nt, Homo sapiens
cagggaaaaagaaaacagccaaagccaaccccagggcggcgacggcggcgcgaggaccgaccgggcccgcggacgaagaagg

SEQ ID NO: 87447 - RNA, 54 nt, Homo sapiens
aaggaccaagaaccagagccgggaacagacaagggaagaagcaggaagggaaag

SEQ ID NO: 87448 - RNA, 79 nt, Homo sapiens
ggaggcgcccccggagccgccccggaggagaaggacccaaagacaggaccacgcaccagcagagaaggaaagcaaaccg

SEQ ID NO: 87449 - RNA, 87 nt, Homo sapiens
gggacagagcggagcagcgggcacggcgccagggcagcagggccgggccgcggcggccgcgccggccggccgacagaacagaaaggc

SEQ ID NO: 87450 - RNA, 78 nt, Homo sapiens
aagagagccccaggccagaagagagacccgacgacggaccgcacacggagaaggaagcagagacggggcaccagagcc

SEQ ID NO: 87451 - RNA, 48 nt, Homo sapiens
accggacgcgacgggcaggaacagagcaaagaggggcggggagaaaaa

SEQ ID NO: 87452 - RNA, 67 nt, Homo sapiens
ccagcgccgcgaaggacaaggggcacccgcgcgcacacgcaggccgcacagcccacagagagaaagg

SEQ ID NO: 87453 - RNA, 70 nt, Homo sapiens
gaaggaccaagaaccagagacccagcaagcccgaaacgaccgaaagagaagccccaggagcagagaacgg

SEQ ID NO: 87454 - RNA, 80 nt, Homo sapiens
ggagcagccgcagcccgcagaccggagacgcgacaggacgagagccgggaagaccagaggaccagaacgccacaacccac

SEQ ID NO: 87455 - RNA, 62 nt, Homo sapiens
gaaccgcagacagcggccaagaagacacaaaggacggaggcacggagaaaagcagaagccca

SEQ ID NO: 87456 - RNA, 80 nt, Homo sapiens
aggcgccagagcgagccagcccagggccagggagcaggagccagggccgagcacgggaagcggagccaggccgcgaaaac

SEQ ID NO: 87457 - RNA, 76 nt, Homo sapiens
aacgcggccggcgcccgcacccaccgagaaccagccaccgacccgcagaggccgggagcgcaagaggacagacggg

SEQ ID NO: 87458 - RNA, 85 nt, Homo sapiens
gaagaggcagaaggagcaggccgcgggaggggagcaccgaagagagccagcaggcgcgagaaaggaccaacgaccccgagcgcaa

SEQ ID NO: 87459 - RNA, 96 nt, Homo sapiens
agaagagggaggaagccggaggaccaacagcggacagcggaaagagagcacggcaacagcgccgcgcagggaaaaaacaacagccaaagaagccag

SEQ ID NO: 87460 - RNA, 68 nt, Homo sapiens
cccacagccaaaggaggcaccagaaaccagagagcaggcagcacagcaccagaagcagcacgagcccc

SEQ ID NO: 87461 - RNA, 71 nt, Homo sapiens
aaaacagaaacaaacacaccaggggcagcccgacaagaagccccgacacagacaagaagcagaaggccccc

SEQ ID NO: 87462 - RNA, 78 nt, Homo sapiens
gggacggagaggccgcaggagcacccaagcagccagggaagcgcagaagcagaaagaggaagagagcaagaagacaac

SEQ ID NO: 87463 - RNA, 69 nt, Homo sapiens
gggggcagacacgagagcacgaaacaaacccaacaccagccaccccaaagagcagacgacgggaaggag

SEQ ID NO: 87464 - RNA, 81 nt, Homo sapiens
agcccgcccaaagaaagaaggaggacgagaacccccgcgaaccagaggaacccagcgagcgagagcggaccagaggacgga

SEQ ID NO: 87465 - RNA, 77 nt, Homo sapiens
aaccccgaagacgaccaaaagacaaagaccagccggaaagaacccaggccaaaggaaggaaacagaacgacagcccg

SEQ ID NO: 87466 - RNA, 41 nt, Homo sapiens
ggcgcaacgcagcggccacaacgcacaaccggggaaaggcg

SEQ ID NO: 87467 - RNA, 85 nt, Homo sapiens
ggacaaccagaggcagccagcagggggaggcacagggcgggcagccccaggcccagagacggcgccgcgggggcccacacacacg

SEQ ID NO: 87468 - RNA, 53 nt, Homo sapiens
ggggcagaccaaacggcaagggcaacaggcaccgacagaggcgagagcggaag

SEQ ID NO: 87469 - RNA, 59 nt, Homo sapiens
caccaaaacaggaagcaaggagcagagagagagaggaggcgccagcaaaccccaaacac

SEQ ID NO: 87470 - RNA, 79 nt, Homo sapiens
gagccagacgccaaaggaaaccccgggggacacccccagacggaaggagaccaagccaccgcagagaaaaagaaggcgg

SEQ ID NO: 87471 - RNA, 54 nt, Homo sapiens
acagagacccgcccacgcaggagccaaaaaccgaacacccggaaggggacaagg

SEQ ID NO: 87472 - RNA, 66 nt, Homo sapiens
gaaggccacaccacgcagaacgcaacaccaaggcacaccaccccaggccgagacgcaccagagccg

SEQ ID NO: 87473 - RNA, 79 nt, Homo sapiens
agcccagcccccagaaaggaggacaacgggacccagaagaggaagccccagcaagacccggccagagcagggcaggaag

SEQ ID NO: 87474 - RNA, 74 nt, Homo sapiens
gggacagggggaccaacaccgcggccagacaacgccagggggagcggccaccaaggccaggcacggccgcggac

SEQ ID NO: 87475 - RNA, 59 nt, Homo sapiens
caagaggccggcggggcgacagaaagggggaccagaggaggagcgaaaagaccaacaac

SEQ ID NO: 87476 - RNA, 72 nt, Homo sapiens
gccagagcagggagacaaaagagaaagcaggccacgaaaacacaagacccacaggaccgcgaacaaggaggc

SEQ ID NO: 87477 - RNA, 63 nt, Homo sapiens
ccggcaagaacagacaaaaagaagcgggagaacgggcgcgccagaggaaaaaaacagggggaa

SEQ ID NO: 87478 - RNA, 76 nt, Homo sapiens
ggagaacaccagagcaaagccaccccccgaggaaaaagagcagaagacagagggaggagggccacggacaaacacg

SEQ ID NO: 87479 - RNA, 74 nt, Homo sapiens
gcaagcgccacccaccccagaaggaaccggagcaagagacgacggccccaacggggaggcaccgacagccaggc

SEQ ID NO: 87480 - RNA, 76 nt, Homo sapiens
gcgacggcggcaaacaagaaaacacccgagaacaccccagggagaaaggaaaaaaagccacagggcccggagagcc

SEQ ID NO: 87481 - RNA, 52 nt, Homo sapiens
ccgccgcccgccgccacgggggccgagcgagggcgcggacaggacggcgagc

SEQ ID NO: 87482 - RNA, 64 nt, Homo sapiens
aaaccgcggaaggcacagcgcggaacggagcagacaagggagggagagccgcccagagaaagca

SEQ ID NO: 87483 - RNA, 47 nt, Homo sapiens
cgccgaggagcgacgcaccgcaggagacgcagcacagccgggcaacg

SEQ ID NO: 87484 - RNA, 71 nt, Homo sapiens
accaagaaccagagcaccaagcagacaaacgagagcaccacaaaaagccaaagaggccaggggacaaagac

SEQ ID NO: 87485 - RNA, 81 nt, Homo sapiens
ggccaacacagagcagaagacagaggcggcagaagcacacaagaagacaccgcagcggcagccacgccacggacagaccag

SEQ ID NO: 87486 - RNA, 76 nt, Homo sapiens
aacccaacccaagagggcaaaagaacaagacggacacagaaaccggggagcgcaaggccaagaaagaagcaggaga

SEQ ID NO: 87487 - RNA, 72 nt, Homo sapiens
cgcagaagcaaccaaaaggaagacgggaacccggcgcaaggaaacaagggacgaacaaaacaccgaggaagg

SEQ ID NO: 87488 - RNA, 82 nt, Homo sapiens
aggcagcgcaaggagggcggcgggacgcaccgaggccagaccgccgagaccacagagaagcccacccggaaacaaacgccag

SEQ ID NO: 87489 - RNA, 74 nt, Homo sapiens
gccagaggacacaaaaggaaacaaacgacggaaaaggccaggaaaagcggacaccggaagacacgaacaaagca

SEQ ID NO: 87490 - RNA, 71 nt, Homo sapiens
gacacaggggggccccaacaggcccacagggcagccagggcaaagacgcacaaggcggaggcagggcggac

SEQ ID NO: 87491 - RNA, 71 nt, Homo sapiens
ccaagacccggccggcgccgcggccgcggaaccgaaaccaggggaggacacggacgagccaccccaaccac

SEQ ID NO: 87492 - RNA, 52 nt, Homo sapiens
acgagcgccacaaccccagagcggggcccggcgcacccaccaccgccgccca

SEQ ID NO: 87493 - RNA, 77 nt, Homo sapiens
ggaacagcccaggagccagagccccaagagacgacagaaaggcagagaaggaaaaaaggaccagagacggagcaaga

SEQ ID NO: 87494 - RNA, 61 nt, Homo sapiens
gagcgagagcaggaagacggccaaaacagggcagaagaagcgcccaagaagacaagaagag

SEQ ID NO: 87495 - RNA, 73 nt, Homo sapiens
cacgccagccccaggaaggcggagaccacaggaagacagcacagaggagaggaggcacccgggaagcggaaaa

SEQ ID NO: 87496 - RNA, 53 nt, Homo sapiens
cacccggcccgcacccgccggcacagcgcccacagggaggggaagagaacgaa

SEQ ID NO: 87497 - RNA, 37 nt, Homo sapiens
gggaaaagccagaaaaaagggacagacggaagaaagg

SEQ ID NO: 87498 - RNA, 78 nt, Homo sapiens
aagaacggaaaaaaaccaggggaggagaagagagcggacccacaccagggaagacaggggagagggggcaccagcggg

SEQ ID NO: 87499 - RNA, 76 nt, Homo sapiens
gggaaagccgggccccgagggcggaccgaggaggagaggcaacacgcgggcagccggcaggcgcggacagaaacag

SEQ ID NO: 87500 - RNA, 64 nt, Homo sapiens
gcacacacaaacagcagaccccaggggggggcgcccaaggcggcaggggggcaggaaccggcac

SEQ ID NO: 87501 - RNA, 78 nt, Homo sapiens
ccaggcccaccaccaccccaggcaccggccgccaggcacagagaaggcaaacgggagggcgaggacaccaagagcagc

SEQ ID NO: 87502 - RNA, 78 nt, Homo sapiens
gccgagagacgaagacgaggccccggccagggcagccccaggagcccagaaaggacaggcaaggagccaggccaagga

SEQ ID NO: 87503 - RNA, 57 nt, Homo sapiens
gggccagcggagacagcaaggcagcaggacaggaagcagggagccaagcggcaggaa

SEQ ID NO: 87504 - RNA, 73 nt, Homo sapiens
gccgcccagacaagaagcacagacgagaaacaaggcaagaaggcagccgagaagccaaggaggggcccgacac

SEQ ID NO: 87505 - RNA, 71 nt, Homo sapiens
gggacgcgcgcccgccacccgcccaccgcggacgagccgccgcacacggacagaaacccaacgccaaaggg

SEQ ID NO: 87506 - RNA, 76 nt, Homo sapiens
gagaacaaggggacagcaaccgacaagcaagacacagcggaaaagagacaggaggcacaggaaaaaaagacaagcg

SEQ ID NO: 87507 - RNA, 48 nt, Homo sapiens
gaaacaagaacaccaggaggaagacaaaagaggacaaaccggcgacca

SEQ ID NO: 87508 - RNA, 72 nt, Homo sapiens
caaaaccacacagggagcggcagacgggacggccaacggaggagagaaaccggaccaggcacagacaccacg

SEQ ID NO: 87509 - RNA, 74 nt, Homo sapiens
gacaaggacccacccacgaggaccgaagagagaagacagcagcgaacaagaaggggcagcccaccgggggccga

SEQ ID NO: 87510 - RNA, 71 nt, Homo sapiens
cccgaagaggcgaggagcaacccacccagcggcggcacacaccgccagaaggcccaggaaagcagcaggag

SEQ ID NO: 87511 - RNA, 74 nt, Homo sapiens
acaaaagccagaaaaccccaaagcaaacgacacgagaggcgagggacgacagagcaagcggcagagggcaagcg

SEQ ID NO: 87512 - RNA, 77 nt, Homo sapiens
gcacacggaggaagagcggcaccagagaaaggcgcacaaagaagcacagcacaggaagcggcaggggaagcaagagc

SEQ ID NO: 87513 - RNA, 69 nt, Homo sapiens
acccggagccagagcagaccaagaggccaccccaaccagacaaacgccaagaaaaaggacaaggacaaa

SEQ ID NO: 87514 - RNA, 70 nt, Homo sapiens
gaagagcgccagccccagggaagagcaaacagaacaacaccccggagcaaaagaacgccaaagagaggca

SEQ ID NO: 87515 - RNA, 62 nt, Homo sapiens
gcaggggccggaagcaccaggacagaccgagacaggggcccggcaccgcgcccgagcccacc

SEQ ID NO: 87516 - RNA, 92 nt, Homo sapiens
aagcagggacggaggcaaccggcgacagcaggcacaggacccgagcgaccagaaagccaacggcccacggccagaaggcccaaacgcaacgg

SEQ ID NO: 87517 - RNA, 49 nt, Homo sapiens
cagagagggggcccagggaggcgcgcaaaagagcaggggcagccgagga

SEQ ID NO: 87518 - RNA, 76 nt, Homo sapiens
aggaacacccgaaccaaggaagcaggccagaggacacaaaaggcacgagacagcggaaagaagaaaaacaacagca

SEQ ID NO: 87519 - RNA, 78 nt, Homo sapiens
ggcgccaccacgaacgcgaccaccaaagagcagagacaggcacgaacgagacacgccgggcgcgacccaccggccggc

SEQ ID NO: 87520 - RNA, 71 nt, Homo sapiens
agagaaacacgcaaaacaaggaaaggcacaaacaggacgcccgcccagacggaaacagggggaacacggcc

SEQ ID NO: 87521 - RNA, 73 nt, Homo sapiens
ccaccacgggcagccgcagagcgagcggcagcggcccggaaccgaaagagggcggacacgccgggaaggaaga

SEQ ID NO: 87522 - RNA, 78 nt, Homo sapiens
ggcaggaaaccgacgagaggacccagcccaagcggaacaggaaccaggagcgacgggaaacaacaggcagcaggaaag

SEQ ID NO: 87523 - RNA, 36 nt, Homo sapiens
ccccagacaggcggcgacagaaggcaacaacgaaca

SEQ ID NO: 87524 - RNA, 64 nt, Homo sapiens
ccaggaacgcagagacccccgccccgacggggcaaggccacaggccccaagaaccgacgagccc

SEQ ID NO: 87525 - RNA, 83 nt, Homo sapiens
cgaccaccacaccaagcagacacgcccacgccgcccagccaagggaaggagcggcggagcccagggaggagcgcacagcacag

SEQ ID NO: 87526 - RNA, 57 nt, Homo sapiens
ccgacgggccgcgaggggaagaggaagcaaagccaagcggaagaccaccaaaagcag

SEQ ID NO: 87527 - RNA, 101 nt, Homo sapiens
accagaaacaagcagaagagagcgcgagcagaaccgagaagcgccccagaaaggggggagcacagaggcaagagcacgggcggcagccccaggggaaccaa

SEQ ID NO: 87528 - RNA, 85 nt, Homo sapiens
aaaaggcggacgggaaggcgggagacgagaagccgaaaagcgcagcgagcggagccgccggaggcagccgccgcaaagggacgac

SEQ ID NO: 87529 - RNA, 82 nt, Homo sapiens
aggccgacacaccacgggggccgacgacgagccccgcgaggagcgcagcggagaggccagaacgcccgccagcccagccgcc

SEQ ID NO: 87530 - RNA, 63 nt, Homo sapiens
cccgccccggaggcggcgaggagcggcggaacaggcggaaaccgcgaggaaacaaaaacagca

SEQ ID NO: 87531 - RNA, 65 nt, Homo sapiens
caagccacaaagggaccgaccccagccaccagccccggcagggcggcagcaaaaccaaaccgcag

SEQ ID NO: 87532 - RNA, 65 nt, Homo sapiens
caccgggcacaagacgcggccgcgggcccacagcaggcgagagcggggcccggcgcacccaccac

SEQ ID NO: 87533 - RNA, 76 nt, Homo sapiens
cccaaggcacgaacgagcgaccgccccagcacaaaaggccaaaagccaaagaaaacaagaaaaagcaccaagaagc

SEQ ID NO: 87534 - RNA, 77 nt, Homo sapiens
cccgagacggaaacagcgcgggcaccggccgcacagggcaacgccggaggagcggacaggcagagggagggcgcggg

SEQ ID NO: 87535 - RNA, 64 nt, Homo sapiens
agcaagacaccggacaccgagggcccccaaaaggaagggaccacagaccagcacgccggcgcca

SEQ ID NO: 87536 - RNA, 61 nt, Homo sapiens
aacaaggcgaccgcagccccccgcccggaggccgggaaggacccccgcaggcagcggcagg

SEQ ID NO: 87537 - RNA, 75 nt, Homo sapiens
ggagcgagacgggaacagaccccgcaaagccgagcagaccgggaaccgcaccgggaaagaggaggagcagagaca

SEQ ID NO: 87538 - RNA, 70 nt, Homo sapiens
ccaaagcgaacgaagagcaccgggagcggcgaagaggcaccggaggaggaagggacgggaccagaagcga

SEQ ID NO: 87539 - RNA, 73 nt, Homo sapiens
gaacaggcggcgcgcgcggcgcgggacgcgcgcgggcacccacggagccccggggcgggcagcggggaagaag

SEQ ID NO: 87540 - RNA, 75 nt, Homo sapiens
acaggacacaaaggaaaaggaaaaaacaaggggaagacccaaggaaccaggcgaaggccggacgcggggcagccg

SEQ ID NO: 87541 - RNA, 84 nt, Homo sapiens
gaggacgcggcagcccgggagcggcgagggaaaagcgaggcaaggcaggcgggcagaaaaggcgcacagaagcacgaacacccg

SEQ ID NO: 87542 - RNA, 64 nt, Homo sapiens
gaaaggcagcgaagacagcagaccgggggccagcacacaacaacacaaaccaacgacaaacgca

SEQ ID NO: 87543 - RNA, 67 nt, Homo sapiens
aaaagacgccagaagagaaccacaagggccggagacaccagaaaccgggggcgcccccaagacaccc

SEQ ID NO: 87544 - RNA, 76 nt, Homo sapiens
gccgcgccgcgccgccgcccacaagcggcgccgcgccccggccgcacggacaacaggcacaaagagagaaggaaca

SEQ ID NO: 87545 - RNA, 74 nt, Homo sapiens
cacaaaccccagggaagaggaccaaagcgaacagagcacagcaagcgggagcaggcagaccaaaggaacagaag

SEQ ID NO: 87546 - RNA, 71 nt, Homo sapiens
gaagaaggaggcaggcacgggagccgaagacgcgggagcgaaggaaaggaggcagaaaaaaggacggggca

SEQ ID NO: 87547 - RNA, 72 nt, Homo sapiens
gaaaaaagaaggcacgaaggccagagagaacgggaacgcaaaaacggagaagagaaaagaggcacaaaacag

SEQ ID NO: 87548 - RNA, 54 nt, Homo sapiens
cccaggccgacaaccgcccagcccagccccccgccccagcgccgggggcaaagg

SEQ ID NO: 87549 - RNA, 72 nt, Homo sapiens
gaaaaggggccaggggagagcagaggcaaaccgaaagaccccagaggagggaggagggaaaccagaggagag

SEQ ID NO: 87550 - RNA, 73 nt, Homo sapiens
gggccgaaagcagaagaaaagggacgcaagaaacccaggacgagaacagcaacaggggaaccagaagaggcca

SEQ ID NO: 87551 - RNA, 51 nt, Homo sapiens
cacagcgccagaaggcccaaaaagcgcagcccggagcgcgaggagcagcgc

SEQ ID NO: 87552 - RNA, 70 nt, Homo sapiens
gacgagaccaaggaagagagagggaggaggggagaagagaagaccagagaaagaacaaccccgcgcacaa

SEQ ID NO: 87553 - RNA, 76 nt, Homo sapiens
gccccgaagggaggacggcggggggcccgcggccacgcccccgggcggacaggacaaaacgaagaaagaaacaacc

SEQ ID NO: 87554 - RNA, 74 nt, Homo sapiens
accaccgggggccaggacagagacaccacgggcagaccacggagggcaggaaccacagagaacagcccggacac

SEQ ID NO: 87555 - RNA, 54 nt, Homo sapiens
ggggagagaaaacccagcgccaaaggagacaaagaggccaggagacacgccacc

SEQ ID NO: 87556 - RNA, 65 nt, Homo sapiens
agccaaacacagaagcagagcccgggagacacacccggaacaggcagcccaacacaccggcaccc

SEQ ID NO: 87557 - RNA, 54 nt, Homo sapiens
gaagcaaacaagaaaaaggcaggaacaaccacaaggcaagcagcgccaaggaaa

SEQ ID NO: 87558 - RNA, 72 nt, Homo sapiens
cacccgcgcaaccacggcgaaagcggaagcggaaacccggacaaggcccggcagacgcgggagagcccacca

SEQ ID NO: 87559 - RNA, 83 nt, Homo sapiens
ccaggccagaagagccgaccacaaggggaggacaaccgcccgggaccaggcgcaaggaagaagagacgccgcgcggcagacaa

SEQ ID NO: 87560 - RNA, 84 nt, Homo sapiens
accaagccgggcgcccgcaaggagacggacaagcccaaccagggaccaggccaaaaccagacgccacgccccacgggccccacg

SEQ ID NO: 87561 - RNA, 86 nt, Homo sapiens
ccgggcgcggcgggcgcgcccgccagcgcccggagaacggacagagcgggagccaccagcgccaaagggaagccaggagcccgggg

SEQ ID NO: 87562 - RNA, 74 nt, Homo sapiens
aggccgccggcgagccgccaagaggcggcgcagccaccccgcgggaacgcccagcgcgagcagaagccagcgga

SEQ ID NO: 87563 - RNA, 74 nt, Homo sapiens
caagggacaagccacaaggggccagagcgggcgccagcgcagggcagacacaaacacacaggaaggggaacccc

SEQ ID NO: 87564 - RNA, 57 nt, Homo sapiens
ggacggaaagaaacacgagcacgccggacaggaggaacccgcgggggagcgggagga

SEQ ID NO: 87565 - RNA, 69 nt, Homo sapiens
gacaagaaaaccaagcacagcgagaagggaacagaccgacgagggaagacccagaggaacagccagaaa

SEQ ID NO: 87566 - RNA, 85 nt, Homo sapiens
gcacacaggagaagaaggggaagaaagcagccccagcgccgaggccaccccccaagggaagaacgaagcagcgcgcaggagcgag

SEQ ID NO: 87567 - RNA, 79 nt, Homo sapiens
agaaggccgggcgccagaaggagacaggggccaggccaggggcaggggaagcacccaaccaacgagcgggccacacagc

SEQ ID NO: 87568 - RNA, 59 nt, Homo sapiens
gacggcccgagaagagcgaccagaccaggacgacaaagagcgcaagcagaaccaggacc

SEQ ID NO: 87569 - RNA, 70 nt, Homo sapiens
cggacgagcaccgacgacaaaccccaccagccaggagcgcacccagcgcagagggaaaccgcaggaggac

SEQ ID NO: 87570 - RNA, 86 nt, Homo sapiens
caagccaagaagggcagccacaacacaagggacagagcagaagggcgaaagaccgggccgcagaagaggccccaacccgggccaga

SEQ ID NO: 87571 - RNA, 81 nt, Homo sapiens
cagcccgggagcggcgagggaaaagcgaggcaaggcaggcgggcagaaccagagaccacagaagaaggaagggccacccag

SEQ ID NO: 87572 - RNA, 113 nt, Homo sapiens
cagcgaacgaacaaaggaagagcaacaaagacagcacgcaaaagcaaacgagagacaacgacacgagggcaaccgcgcgcgcacgaggcgcggcgaagcacgaggccccacgc

SEQ ID NO: 87573 - RNA, 83 nt, Homo sapiens
agagccacgcggaggccgagggaacggaccgagcagcagcagagcaacaagggcccccacggagagagacgggaaggagcggc

SEQ ID NO: 87574 - RNA, 88 nt, Homo sapiens
gcgacccagacacaacccggccacgaggcccgcgcacgacccagccccagaggacaccagcgggcccacagggaacccagacggggag

SEQ ID NO: 87575 - RNA, 71 nt, Homo sapiens
gaagcccgaagcccacacaccccgaaaacaaaggaaggaagaaggaaaagcggaagcgcagacaagaaaag

SEQ ID NO: 87576 - RNA, 76 nt, Homo sapiens
cgggagcagggggggaagcggcagcgaggggccggagagggccggaccgagcggccggcgccgcaccccgccggga

SEQ ID NO: 87577 - RNA, 68 nt, Homo sapiens
ccgagagaccaaagaacagcaagcccggccagggcccgaacgccgagcagagcaagagggacagggag

SEQ ID NO: 87578 - RNA, 87 nt, Homo sapiens
aacagggccaggagaagcgcggcgagccgagcggccaggacgacgaggagcagggccgacgcgcaggcagaggggaggagacacgaa

SEQ ID NO: 87579 - RNA, 72 nt, Homo sapiens
cacagggaaaaaggagcagcccgggcaccacagaaaagcccgagaaaagcacagcacccgcaggccaacaca

SEQ ID NO: 87580 - RNA, 124 nt, Homo sapiens
caccaccccgacccacccaccccagaaaaccccaccccgcggccccacggcccgccaagagccagcccaggaccgacagcagaggagcgcaagaacggagaacaccgacggagaaaacaggagc

SEQ ID NO: 87581 - RNA, 82 nt, Homo sapiens
gaaaaaggaagcccaggaaaaaacccccgagaggccggacggagaacaggggcgggccgaggagaacgggacccgcaccacg

SEQ ID NO: 87582 - RNA, 74 nt, Homo sapiens
aagaggggacagaaagcgcaccacgacaaagaagagaaaacgcggcagagcaacaaacacagccagaagaagaa

SEQ ID NO: 87583 - RNA, 79 nt, Homo sapiens
cagcccggggaggacggcgcccgcggcgcggggacccgcgagcacacgccaaccaccggagaaaagaaaaagccaggaa

SEQ ID NO: 87584 - RNA, 73 nt, Homo sapiens
acgccagaagagaaccacaagagaaccggccagaaagcagcagacgcacagaaccagaacagggagcccccca

SEQ ID NO: 87585 - RNA, 81 nt, Homo sapiens
cagcacgcgaggaggaaaggcaccccaccagaaccaaaggcagacccagaagagcacaaaacagagaaaagggaagggccc

SEQ ID NO: 87586 - RNA, 54 nt, Homo sapiens
cgcccacgcggagccgccagaggaaaggcgcccgccaccccacacgcgaccaga

SEQ ID NO: 87587 - RNA, 75 nt, Homo sapiens
cgggaacccggcgcaagggccagggagccccaaaaagaagcaagagaaaccaccgcaggcaagccaaaggagaga

SEQ ID NO: 87588 - RNA, 81 nt, Homo sapiens
agcgacccgaccagggagaacccaccggaggcgcacccacacacggaccccaggagccaggaggcgaggaggcaaggaacc

SEQ ID NO: 87589 - RNA, 68 nt, Homo sapiens
ggaggcgccccaccggggagcccccagcgacagcagaggaagaagcacagaaagccagacagagaaca

SEQ ID NO: 87590 - RNA, 73 nt, Homo sapiens
gggcgcagcgggacgagcacccccggaggcacggaaaggaggaggagcccaggagagaccagggcagggggaa

SEQ ID NO: 87591 - RNA, 78 nt, Homo sapiens
gcacggaacagcgaggccagcaggagacggagccacggagcagaagcagaagaaggacaccccacaccgaaacagacc

SEQ ID NO: 87592 - RNA, 85 nt, Homo sapiens
aggaaccggcccggggccccgaaacgggccgcccccacagcaccccgggcggcggagcccggacgaggggcaggaccggggacac

SEQ ID NO: 87593 - RNA, 57 nt, Homo sapiens
cggccgaccgcgccgagcagagcgccggaaacaggccagaaagaacacgaggcccag

SEQ ID NO: 87594 - RNA, 112 nt, Homo sapiens
acgagaaacgaagcaggagagaagaggaggaagaagggaaggacggcaggccaaaggccaggcccacccacagccaaaacacccacccagggaccccagggcgcaaccaagc

SEQ ID NO: 87595 - RNA, 72 nt, Homo sapiens
agcgcgaggggacgagagccaggaagaaagaagcgaaggacgacagcagccagaagacgaacacaagcaggc

SEQ ID NO: 87596 - RNA, 78 nt, Homo sapiens
gggaggaaagcaccgaggcacaacaggcccgcggcaccccaagccaggagccgccgaccacaacagcccaacacacgc

SEQ ID NO: 87597 - RNA, 72 nt, Homo sapiens
ggagcacaacaggcagacagacaaagaaagcaaccagcgagagaaacgcgaggacggggcccaggaacggaa

SEQ ID NO: 87598 - RNA, 71 nt, Homo sapiens
cgccgccgcccccagaaagggaaccagcgcacggcagcgagccaccagagacaccccagagaagcaaagac

SEQ ID NO: 87599 - RNA, 76 nt, Homo sapiens
acccagaggccgcggccgcgaggcccacgcggaccggcagcgccaccggaccaccagacaaggacacggcccaagc

SEQ ID NO: 87600 - RNA, 82 nt, Homo sapiens
gaaaagccccgaaagaggagaccaaacaaaagcaaccaagcaagaaaaagaggacacagacagaaaggacgagaccgaagag

SEQ ID NO: 87601 - RNA, 78 nt, Homo sapiens
acaggccaccgggccaagcgcccgaggaacggcgcgccaacccaggcccagggaaccaagaccaggacaaagaagacc

SEQ ID NO: 87602 - RNA, 65 nt, Homo sapiens
accggccccagcccggacagcgagaacaggggaagagaaacgacaaacaccaagggagagaagag

SEQ ID NO: 87603 - RNA, 82 nt, Homo sapiens
ccaaaggcccggacccaaaacaggaaaagggccagagaggggaagaggaaaccggaacccaaagagaagaaacgcaaggaaa

SEQ ID NO: 87604 - RNA, 70 nt, Homo sapiens
caacagcagccacaccagagccaccacccacacagcagcggccaccaaaaccccaacaggggcaccgagc

SEQ ID NO: 87605 - RNA, 75 nt, Homo sapiens
ggagccacagcaaaaagccacgccacaaaaagccaaggacacgcaggacgaagaaggaggagagcccagaagaaa

SEQ ID NO: 87606 - RNA, 73 nt, Homo sapiens
cccaggaggaaagaccacccccccaccccggaccccgcaaaaagaacgagcaccgcccaaacagaagaggcga

SEQ ID NO: 87607 - RNA, 88 nt, Homo sapiens
aaaagggcagaagaggccaaggagaagaaagagacaggggagaaacacagagcccgaaaaaggagggaacaaaagcgaagacgaaggg

SEQ ID NO: 87608 - RNA, 58 nt, Homo sapiens
accccggaaagggaacaagagagagaaccaaaaaccgccccgaggcagaggccaaggc

SEQ ID NO: 87609 - RNA, 62 nt, Homo sapiens
cagaggacgcccgccccaggaaaggccgaggaaaagccaagaaagacccaaaagaccccaga

SEQ ID NO: 87610 - RNA, 78 nt, Homo sapiens
aagggagaaggcagagacgaagggaaggcgggcacagagccacccaacggacggggaggcagcaggacacaccggccg

SEQ ID NO: 87611 - RNA, 88 nt, Homo sapiens
ggacaggccaaacggaaagacgaaggggccccagagccaaggaggaaggggccggggacgggagaaagaacagacaagccgcaagaac

SEQ ID NO: 87612 - RNA, 77 nt, Homo sapiens
gcccgggacagagccggcagaaggcagaggagccggcccgcggcggagaagaaaggaaaacgaaaaacgggcaggga

SEQ ID NO: 87613 - RNA, 88 nt, Homo sapiens
ggaggacggcagcaaccgcagcagcagcccaggaggaccgcgccaacaggacgaggagaccgaccaggagaccccagcggagacgacc

SEQ ID NO: 87614 - RNA, 82 nt, Homo sapiens
cagccaaacgcgaagaagacagcaagcccacgagcggccccccgagacggaggagagggccggacggaaggacaccagcaca

SEQ ID NO: 87615 - RNA, 72 nt, Homo sapiens
ccagccaaagcagaccggagggggaacacccacacaaagaaaagccacgaccaagacaccagccaggacgag

SEQ ID NO: 87616 - RNA, 69 nt, Homo sapiens
aaagagaggaaagaccaccaccccgccagaagaggaaaaagcggccgcaaaacggagcgaacacaggcg

SEQ ID NO: 87617 - RNA, 77 nt, Homo sapiens
ccagggaaagggccagaagacgcgcacagaacaaacagaggcagaggggcgggcaaaggagaggcacaggaagcaga

SEQ ID NO: 87618 - RNA, 38 nt, Homo sapiens
ggaaagcagaagacaagcagagacggggcgccagggcc

SEQ ID NO: 87619 - RNA, 67 nt, Homo sapiens
gcggagggaggaagaagagccagcaaaccagccagcacgggggcccagccagccagcagcgaggggg

SEQ ID NO: 87620 - RNA, 77 nt, Homo sapiens
cacgaacagcacaccggaggaagccacacaccgggccaggagcgaccccccacacgaaggacgacgagcagaacagc

SEQ ID NO: 87621 - RNA, 77 nt, Homo sapiens
gggacggacaaggcaacacccgaagaaacaagcacagaccaaccagcaaagcggagccgggagccaccaaccgcagc

SEQ ID NO: 87622 - RNA, 74 nt, Homo sapiens
aggaaaggaaagaggcgggcagaacacggaggggcccacagcgggcaggagcagggcaaccagcccccaacaac

SEQ ID NO: 87623 - RNA, 77 nt, Homo sapiens
cgggcccgaggcggcgagagaggcaggcggagccgaccgggccaggaacacagggggcggacgggaaaagaaccgga

SEQ ID NO: 87624 - RNA, 66 nt, Homo sapiens
agacaaagaagagcagccgcagaaaaaaaggagacccaaagagacacccacaagaaaagaagaaaa

SEQ ID NO: 87625 - RNA, 78 nt, Homo sapiens
accacacaggagccgcaccaaaagaaccagcaagaaacaacaagacaacaagcccaaccgccgcggagaggccggaag

SEQ ID NO: 87626 - RNA, 58 nt, Homo sapiens
aggaccgcaagcccgcagggacgaggccccaaggccagccccgccaaggggcggcgag

SEQ ID NO: 87627 - RNA, 82 nt, Homo sapiens
gacggaccgccgaccgagagagcgaagccagccgcaggagaaacgaaacaagcgaggagcacaaaaagagagcgaagcaacg

SEQ ID NO: 87628 - RNA, 71 nt, Homo sapiens
gaaacacgaagcgggaacaggcaggcacagaaaggcggaccaggcaggaccaaaggaccagaccgcggcaa

SEQ ID NO: 87629 - RNA, 70 nt, Homo sapiens
cgcaagccaagaaaagggcccgaccaacagcagggcagaagagagaaaacgcggcacagagaagagcagg

SEQ ID NO: 87630 - RNA, 85 nt, Homo sapiens
aaaaacggcaaacgagggcccaacccaaaagaccgaagagaaacaacgaagaagcccaggacccaggaaggagacacaggaaaac

SEQ ID NO: 87631 - RNA, 81 nt, Homo sapiens
cggacgcggggggcgggaagagccggggccgggcgacaggagcagaaaaaaccagaggaggagaagagccgcagggcccag

SEQ ID NO: 87632 - RNA, 68 nt, Homo sapiens
gcgcagaagcccgaagaaaacagcgggaagagacagccaagacaacggcaagcggagaagagcaaggc

SEQ ID NO: 87633 - RNA, 59 nt, Homo sapiens
gaagcaagaaggcccggacacagcaaaccgggccacagaaagccacagccaccccagcc

SEQ ID NO: 87634 - RNA, 79 nt, Homo sapiens
cgcgggaccggaaggacgcagagaagccgggacggccagaagccgcagagcagcagaacagacagaaacacgaaaacca

SEQ ID NO: 87635 - RNA, 84 nt, Homo sapiens
cgagagaagagcaaaggagacgcaccaccggacaagaagagcaccccggggaaacaaagcccgagcagcccggaccacccagca

SEQ ID NO: 87636 - RNA, 74 nt, Homo sapiens
ggaccggcgacgaggccgcggcccagcgaagccaggacacagcgcgggggaacagagggagagagccgaacagg

SEQ ID NO: 87637 - RNA, 63 nt, Homo sapiens
ggaacacgagaaaggcaagcaaagaccagaggggaggccgcgagcccggggagccccggagga

SEQ ID NO: 87638 - RNA, 70 nt, Homo sapiens
gaacaaccagacccaacagaacgcccaccaaaaaagagagcacggcaacagcgccgcgcagggaaaaaac

SEQ ID NO: 87639 - RNA, 75 nt, Homo sapiens
aacaacaagagaaagacccaggaagcagaagaagcgaggagaagaagaggccgggcaaaagacaggagaagaagg

SEQ ID NO: 87640 - RNA, 68 nt, Homo sapiens
gcgagcgacaacgggacgggaaacgcagcgagaggaagaaaggacacaaagcagaagaaaagccacaa

SEQ ID NO: 87641 - RNA, 82 nt, Homo sapiens
cacggacaccaacgagcgaagcagcagaagaggaaccacccagaaagaaaccacaacaggaaacgaaagccaacaaaaacag

SEQ ID NO: 87642 - RNA, 84 nt, Homo sapiens
accagccgcccacaacaggaaacggaacgccaagcgaagaagaacgaaacggaagcacaaagcagcgcgagaaagcccaggaag

SEQ ID NO: 87643 - RNA, 68 nt, Homo sapiens
aaggaccaagaaccaggaggcgaggacaaaacagcgcagacagggagagcaaagaaggggacaccaca

SEQ ID NO: 87644 - RNA, 74 nt, Homo sapiens
gcgcggacggaggacgagcccagaaccacgccacaaaccaccccccgacccgaagaacgggcaccaagccagca

SEQ ID NO: 87645 - RNA, 77 nt, Homo sapiens
aaggagcaggacgaaagcgaaagagaagcggagaagggcagaaggagcggccagccgccggcccccacgccaacccg

SEQ ID NO: 87646 - RNA, 53 nt, Homo sapiens
ggacgggggaggaggcaacgccgcgacagcaggaacagagcaaagaggggcgg

SEQ ID NO: 87647 - RNA, 73 nt, Homo sapiens
gacccgccacaacaaacggaagaaggcggaaagagaaagaaacaagcaccccacgagcagaagaaaaagacca

SEQ ID NO: 87648 - RNA, 83 nt, Homo sapiens
cgaacagaagagaagcaaaggcccgaaaaaagacagagaaacagggacacagaaggaagaagccagcagcagccagagaacca

SEQ ID NO: 87649 - RNA, 34 nt, Homo sapiens
ggacaggcagggaaaaacagccgacggaggaagg

SEQ ID NO: 87650 - RNA, 76 nt, Homo sapiens
acgaaaaaaaaaggagagaagcgaagcagccaaagcaggggcaacccagaacccccagcagcaggcgcaaaaacga

SEQ ID NO: 87651 - RNA, 106 nt, Homo sapiens
cgcgcggggacaggaccgggggcccgcccagagcgcggcggggaaagaggcccccggggacaagggcagggccggaagcaaggaccgaggggccacagggaccacc

SEQ ID NO: 87652 - RNA, 74 nt, Homo sapiens
gcaccgaccagccacggccaaacagagcagcacccaagaccgaagaaggagaaccagcccaagcgcgcacaccc

SEQ ID NO: 87653 - RNA, 80 nt, Homo sapiens
ggaaacaaggacccgccacagcccgacgaaaggagccaaaccccgagcagccaaaccggcgcgggaaagcagccggagcg

SEQ ID NO: 87654 - RNA, 76 nt, Homo sapiens
ggcagccaccaaaacagacccgggcagcaccagaacacaaaaggcgccagggcagaaccgcggcagcgagagggga

SEQ ID NO: 87655 - RNA, 61 nt, Homo sapiens
caccacccaagggagcgaccccaacagcaggaaagccccggaggccggcaaccggcccaga

SEQ ID NO: 87656 - RNA, 81 nt, Homo sapiens
aggccagcacgcacgggcccacagcggaaagaagaaagccacagcaagacgcgagaaagggcaggggcaccagcgggccgg

SEQ ID NO: 87657 - RNA, 53 nt, Homo sapiens
gaggcaccaccgcacgccggcgaggccagcggacgccgccagccaccggcgcg

SEQ ID NO: 87658 - RNA, 75 nt, Homo sapiens
aaccagacggaaagcaaggcaaccgcaaacgaaaaggggacccgaagaggaacccgaaggcagcaaagaaaaggg

SEQ ID NO: 87659 - RNA, 74 nt, Homo sapiens
gaagcaggccaggaagaaagagaggaaagaagaaaaccaagaaagccccacggaacagggggggggaacaaaga

SEQ ID NO: 87660 - RNA, 80 nt, Homo sapiens
cacaaaacagcagacccaagagcagcggaaaagaccagcacaggaacacagaaacgccccgggccagccgccaaggccgc

SEQ ID NO: 87661 - RNA, 35 nt, Homo sapiens
aaggggccagagccggccgacgcagaaccccagac

SEQ ID NO: 87662 - RNA, 71 nt, Homo sapiens
agacaaaaacaagggaaaccacaaggaccaaacaccaaaacagaaaaaacaccagcagcccagcaaccaaa

SEQ ID NO: 87663 - RNA, 76 nt, Homo sapiens
ggccgcggcgcaggaggagccggagagcagccaaggggaagaaagggacaaggcccaggaggccaccagcacggcc

SEQ ID NO: 87664 - RNA, 69 nt, Homo sapiens
ggcacacaggccccaaaggccaaggacacacagcaacgaagcaggggaggagggaagaccggacagcga

SEQ ID NO: 87665 - RNA, 72 nt, Homo sapiens
gagaaaacagcgaaagagagaaaccgcaggagggccgcgaaaccaacgacaacagcccgacaccagcaccac

SEQ ID NO: 87666 - RNA, 58 nt, Homo sapiens
cagagggaaaccagacccacaggccagcgggaagcccgggagaccgaggggcagagag

SEQ ID NO: 87667 - RNA, 54 nt, Homo sapiens
caaagcccaagaacgaggaccaggagggaaagggagacacaaaacacaggcaag

SEQ ID NO: 87668 - RNA, 110 nt, Homo sapiens
acgggcagccagaagaaccggaagccggagaccccccccaagacccacgagagcaaaaaagcccgacgccacccccagggccagaccggaaccggacacggagccgaaga

SEQ ID NO: 87669 - RNA, 78 nt, Homo sapiens
caaaggcagaccaacaagaggacccaggagaaacgccccaaagaccgacagggcagggaaccagagaccacaaggcca

SEQ ID NO: 87670 - RNA, 70 nt, Homo sapiens
gagaagacgacgcaccgcaggcagacaaaagggccaaagaagggagagccaagaaagccggacagggcca

SEQ ID NO: 87671 - RNA, 75 nt, Homo sapiens
ccaggcccccacccaccccacaaccaaagccacacgcacagacgccgggaccggaaagcagcaagcccgagaaac

SEQ ID NO: 87672 - RNA, 73 nt, Homo sapiens
acacagcgaagagcagcaggaaaccgacgaacaacacaggaccaggagcaggaggagaagaaaccccaagacc

SEQ ID NO: 87673 - RNA, 80 nt, Homo sapiens
gcaacagaaagagcaacagcagggcaacaggaccccagggagccggggggaacgggggcacgccggcacgggaggcagaa

SEQ ID NO: 87674 - RNA, 74 nt, Homo sapiens
caccccaaaagcaccggccccgcacagcaaaccagggccggaacacagaagccggacggaaacaagaggcacca

SEQ ID NO: 87675 - RNA, 67 nt, Homo sapiens
acagcaacacagccgccagccgagggcaaagcccgaagagggcagaaaccaaaacggccaagaggcc

SEQ ID NO: 87676 - RNA, 73 nt, Homo sapiens
gcacagacccagacaaaaaccacccaaaggcaggaaaggccaagaccaaagaaccgcgcaccaggagcgagac

SEQ ID NO: 87677 - RNA, 81 nt, Homo sapiens
agggcgcagggccgggccgccgcgcaccgcagcgccggggcacgacacaaaaacagaaagacgccggggccagcaggcccc

SEQ ID NO: 87678 - RNA, 58 nt, Homo sapiens
ccccccgccccgcgcagcagggaggacaccaggagaacgaagcaaaagcgggccggga

SEQ ID NO: 87679 - RNA, 63 nt, Homo sapiens
agccggggccgggcgacaggagcagacccaacagaggaagccgcaagaaacgggacgacagga

SEQ ID NO: 87680 - RNA, 53 nt, Homo sapiens
gcgaaacgcacgagaagggaacaaacagcaaacaaacaaagccagaggcaggg

SEQ ID NO: 87681 - RNA, 81 nt, Homo sapiens
gggaccggacaggcgccgcgccgccgcacgggaccgccgagccacaccggacaagcagaccggaagaccgacggaagacca

SEQ ID NO: 87682 - RNA, 63 nt, Homo sapiens
ggacaaaagaaagcaagaccccgagggaagcaacgaaccaaacaaaggaccgggagaggaaac

SEQ ID NO: 87683 - RNA, 75 nt, Homo sapiens
gaagccgcccgaacaccaggcaaaagcagaccggaaaacccaccggcaagaccacacccgaggggagcccaggac

SEQ ID NO: 87684 - RNA, 76 nt, Homo sapiens
gcggggagaggcagacacagaaaacccacacgcgagaggagccacgggacgaagacggaaacaggggacggcacaa

SEQ ID NO: 87685 - RNA, 72 nt, Homo sapiens
gacggcgaagagcagacgaggcgcgaggaggaagagaacaggccacgcacggcagccaagaggagaagaggg

SEQ ID NO: 87686 - RNA, 115 nt, Homo sapiens
gcccgcgcgcgaccccggcccgcgcggcgccgggcgcggcccggcgacagagagaagaagaaggaggccgcggccagaaacccaagaaaaagcgaaggaacgcagagcgaagaca

SEQ ID NO: 87687 - RNA, 79 nt, Homo sapiens
gagagccaggagcgcacacacgacaggagaaaggaggcaagcacagcccacaaagagcagagggcacggacgacgggga

SEQ ID NO: 87688 - RNA, 42 nt, Homo sapiens
gcaccagaccgcagcagacgaaggagaagaagcaccagccga

SEQ ID NO: 87689 - RNA, 54 nt, Homo sapiens
cccagagaaaaaccaaaaccgcaacaacaccagaaaggaggagcaaggaagccc

SEQ ID NO: 87690 - RNA, 62 nt, Homo sapiens
cggacccggaccggggggacgaacagcggggacgccccagcagaccgcccaggagaggaaag

SEQ ID NO: 87691 - RNA, 75 nt, Homo sapiens
ggcccggaccgcccccgagcccggaggggggagaaaagacggagcagcaaccagccccaggcagagaaagcgacc

SEQ ID NO: 87692 - RNA, 82 nt, Homo sapiens
aacaaaaagcagcaaaccggaccaccccgaagaaagcacagaccccgcgaggcaagacaagaccaggcacacgaccaagaag

SEQ ID NO: 87693 - RNA, 77 nt, Homo sapiens
gccccagaacgggcgcagaagcaggaacagcaggagacaagcgcaagcagccagagcccgggcgcaaagaaccaggc

SEQ ID NO: 87694 - RNA, 80 nt, Homo sapiens
caaagaacagaagcaaggaagcgggcaaggacaggcggggaacaccccgcaacaagccccagagcaccccgccaggccaa

SEQ ID NO: 87695 - RNA, 79 nt, Homo sapiens
gaccgcaacacgggaggacggggaaaaagcggccaaagaaggaagcgcgcaccgagccgaacgcccacacgggagaccg

SEQ ID NO: 87696 - RNA, 77 nt, Homo sapiens
gcccccacgacccagaccaccccagagcaacagaaacaacgaacgagcaaggaagggccaaggcagaccccacaccg

SEQ ID NO: 87697 - RNA, 75 nt, Homo sapiens
gccgaggaagcggaagcgcagccacaaggccgcaggggagccgagagccacagggcaggagccaacccagcaaca

SEQ ID NO: 87698 - RNA, 72 nt, Homo sapiens
cgacaccgcacgcgcacggacggcacagcccgccgaacccgaaaggagaacccgaacggcaacagacgaaga

SEQ ID NO: 87699 - RNA, 85 nt, Homo sapiens
ccggggagaggagcgaaccgccgaaggaggagaagagaaacgcgccgcgaccagccgagaggcgggagggaacagagaccaagac

SEQ ID NO: 87700 - RNA, 76 nt, Homo sapiens
cgggacacgcaggaacggcccagcacaagaccgcgacagcccccgaaaacacaagaaaagcacgcacagacagagc

SEQ ID NO: 87701 - RNA, 79 nt, Homo sapiens
ccgggccgagggaacgggggaaccgacaacaacagcggccagaccgcaaaccaagaaacagagagcaagcacgcagaag

SEQ ID NO: 87702 - RNA, 78 nt, Homo sapiens
cgccgcccgagaaaggacccggccagaaacccaccgaacacaagacccaccaccccaggcaaagcgagcagagcgcca

SEQ ID NO: 87703 - RNA, 80 nt, Homo sapiens
gcaaacccgcaaggggggcaggccgcaggagggaagcgcacggaaaccgccccgggaggcacagagcaggagacgccacc

SEQ ID NO: 87704 - RNA, 55 nt, Homo sapiens
cgcagaagcggcgcgcaccagcgccgacgagacgaggaaaccggagaagacacac

SEQ ID NO: 87705 - RNA, 83 nt, Homo sapiens
aaccaggggcagaccaagacaagagagacaagagagacaccccaaccgacaaagagcaccagacagccgggaacgacccccac

SEQ ID NO: 87706 - RNA, 82 nt, Homo sapiens
cgccacggcacaaccacaccgaacgggaccgacccagaacggcagacaaccagaaccggccaagcagaaccgagcagccaga

SEQ ID NO: 87707 - RNA, 68 nt, Homo sapiens
gcacaaccaccagaagaacgacagagaggagggagaacaagcaacggcggagccccagcccccagcag

SEQ ID NO: 87708 - RNA, 70 nt, Homo sapiens
cgcaaacccaaagaccccgccggagacgagaggaccacagccgcgcaacgggcgaccccgagggaacaga

SEQ ID NO: 87709 - RNA, 77 nt, Homo sapiens
agacccacaaaccccgaaaaacgggaacaggacggcccaagacgggacgccaaacgcgaaagggagaaagaagaacg

SEQ ID NO: 87710 - RNA, 36 nt, Homo sapiens
agacacacgcccaagagcgggaagaccgcaggaaag

SEQ ID NO: 87711 - RNA, 91 nt, Homo sapiens
gggcgagcccgcggggacgccgccggccagcagagcgagcggaacggacagccaaaccaccggacgaagaggcgggcgaggcagagccgcc

SEQ ID NO: 87712 - RNA, 83 nt, Homo sapiens
aaagacagggaaacaggaaaaaaaaggaggcgacaagcaacaacaacaagcgggccgccgggcagaagcacgaggacgagggc

SEQ ID NO: 87713 - RNA, 69 nt, Homo sapiens
agcagacaccgcagccaccgcggagcaaagaagcccaagagccaaaggaacaccaccacccaaaacgca

SEQ ID NO: 87714 - RNA, 70 nt, Homo sapiens
agccaaaaccgcgacaggaagaagagagaagaagcaaaccgggaccggaagcaccaaggagaaaaaggac

SEQ ID NO: 87715 - RNA, 82 nt, Homo sapiens
gaggaggaggacagggaaaggagcggggagccccgcgccacaggcccaaccaggaaggagacgccaggaggccagggcagca

SEQ ID NO: 87716 - RNA, 60 nt, Homo sapiens
caaaaaaaaaaaaggaagcacaccaaggccagacacaacaggccggggccccaggagggg

SEQ ID NO: 87717 - RNA, 71 nt, Homo sapiens
ggggcccgggaggccgccggcccccgcgccggggggccccccgcgcacaacgacaaccgccacacacaaca

SEQ ID NO: 87718 - RNA, 81 nt, Homo sapiens
gaacagaggggacggaagcacacgacggggcagcggaaggcccggaggccggggacgcccagaagggagacaagccaaggg

SEQ ID NO: 87719 - RNA, 86 nt, Homo sapiens
aggacccgaggccaggagccaggggcccagaaggggcaaccaaaagccagaccaaaaggaaggacgcagcagacacgcccccagaa

SEQ ID NO: 87720 - RNA, 83 nt, Homo sapiens
agccccaccaggccccaggggccggcccccccggggcaacccagacggcaacaaaggcgaggagacaacaaccggacccagca

SEQ ID NO: 87721 - RNA, 52 nt, Homo sapiens
ggagccggcccccgaaagagggaagaagagagggcgaaggaggccacacaga

SEQ ID NO: 87722 - RNA, 74 nt, Homo sapiens
ggcggcaaacaagaaagcagaagaagaagagcggagaaccgaacaggcgcagggagcccccaccacagcagcac

SEQ ID NO: 87723 - RNA, 84 nt, Homo sapiens
cccagccccacacggcaagacacagagagacggcagccgcgacagacacaccacgggggggcgaccgaggaaaaaaagaaccaa

SEQ ID NO: 87724 - RNA, 83 nt, Homo sapiens
gcgaagaggaaaagaagcccaaggaagcacaaccccgagcacggaccagccacaagcagaagaaaggggcaaggaaaacgaga

SEQ ID NO: 87725 - RNA, 80 nt, Homo sapiens
acccaaaaccagggcggcaaaacgagcgggccagcacgagccagggagccgccgggaccggcccgggagacgacaaccca

SEQ ID NO: 87726 - RNA, 81 nt, Homo sapiens
aaagaccaccacgacccaggcccagaccgaccagcccaagaaacaccaccaacaaacgacgagggggaccaagaaggaaca

SEQ ID NO: 87727 - RNA, 76 nt, Homo sapiens
acaggggacagggcaaacgaggaaagacaccagcagcgcaaaacaccaggagcgccaaccggaacgaaagacaagg

SEQ ID NO: 87728 - RNA, 81 nt, Homo sapiens
cccgaagcccccacgccaaaaccgaagcgcgaaaccacagagaaaagcacgcgacaacacacacgcacaagcgaaaccaag

SEQ ID NO: 87729 - RNA, 58 nt, Homo sapiens
cagacacacaacccgacccgacgagcaagcaccgacgaagcagaggagacaagaggca

SEQ ID NO: 87730 - RNA, 81 nt, Homo sapiens
ccaaagccgcccagacggccaccggcgggaggaacaaaagcaccgccggccaggaggagagcgcaccaccaaaaaggcaaa

SEQ ID NO: 87731 - RNA, 74 nt, Homo sapiens
gaagacggcccaaaacacagcgcaccacacacagagggaaacggaaagaaggaagaaccgccaaaaagagggaa

SEQ ID NO: 87732 - RNA, 78 nt, Homo sapiens
caagcagccccggaagacaacgcagacgccagcaccaagccgaacccggagacggcagacacagccagcagaagaggg

SEQ ID NO: 87733 - RNA, 84 nt, Homo sapiens
cccgaagaaccagccgccacacgcaccccagcccgccggggcgcggacaagaaggagccaggcaggcacaagaccggcagggag

SEQ ID NO: 87734 - RNA, 60 nt, Homo sapiens
aagcaaaaaacgcaacaccagcacagagcgcggggaccacgagccaggacccagcgcccc

SEQ ID NO: 87735 - RNA, 44 nt, Homo sapiens
cggcagccgccgccaccgcaaaaacaagcaccaagccccagaac

SEQ ID NO: 87736 - RNA, 76 nt, Homo sapiens
ccgcccggggccagacccccgcaccggggggaagaagaagggaacaagcggagggacgcacgagaacgaggagcgg

SEQ ID NO: 87737 - RNA, 59 nt, Homo sapiens
ggggcacggcgcggcgcggcccaagaaggcagccgggcagcgacgacagcccgcggggg

SEQ ID NO: 87738 - RNA, 78 nt, Homo sapiens
agccgcccacaaacgcaagaggcgggaagaaagaaggcaaccaagcaacaccaggcaggaggagagcgacacgcggga

SEQ ID NO: 87739 - RNA, 70 nt, Homo sapiens
aggaccaagaaccagcaacgagggggaaccaagggcggacagcccaacgacaacaaagaagccaaccgac

SEQ ID NO: 87740 - RNA, 71 nt, Homo sapiens
aaggccccgaaaggaaaaggccaggcagaagcaggaagagccccgaccgcaggacgccgaacacaaaggcc

SEQ ID NO: 87741 - RNA, 78 nt, Homo sapiens
aggccccggccagcgccgccggaggagcgcccagggcccccgcgcccagcccaaggagccagaaacacacgccaacga

SEQ ID NO: 87742 - RNA, 77 nt, Homo sapiens
ccggagcccagggaagcagccgaccagccgcggagccgggggcaggagggaagcgagaaccaaagggcccgagaggc

SEQ ID NO: 87743 - RNA, 77 nt, Homo sapiens
cagagcaaagaccggacagcaaaaacacagaaggaaaacccagacgacacaacccgggcgcgagacgggacgccagg

SEQ ID NO: 87744 - RNA, 87 nt, Homo sapiens
cccgggcggccccgcggcccggcggagccccgcgcccgccgcgccaggcccgaagaccccggcacaggcgggcaggaagaccagcca

SEQ ID NO: 87745 - RNA, 81 nt, Homo sapiens
gcccgcccagaggcagaagaccagggaaccgggcagcagccgcagccgcccccgggacggccggcccccccggaagcgggc

SEQ ID NO: 87746 - RNA, 42 nt, Homo sapiens
cggccaccgccaccaaaagcggaccccaagaagcaggcagac

SEQ ID NO: 87747 - RNA, 58 nt, Homo sapiens
cccaccggcggccccggggccaagccccacaagggacagccccagaagcgccccggca

SEQ ID NO: 87748 - RNA, 38 nt, Homo sapiens
gaagcacaacgggaagaaagaacgcagagcaacggaag

SEQ ID NO: 87749 - RNA, 72 nt, Homo sapiens
ccagaggcacggaaaaggggaacgggaaaggcgcagagaagcacagcggcaaccggcacgcaccagagcagc

SEQ ID NO: 87750 - RNA, 57 nt, Homo sapiens
gaaacaggaagccgggagagaaacacagagccaagaaaggcaagcagggcgagagag

SEQ ID NO: 87751 - RNA, 90 nt, Homo sapiens
gggaagagccacgaacagggcggaggagagcggaggcgggcggacccgagccagcgaccgaagcagaaggcgccgagcgggccacagccg

SEQ ID NO: 87752 - RNA, 76 nt, Homo sapiens
aaaggcgcagccgggggagcggcaggagggcgggcggcgggcggaggagcaaagaagagcgccgcaaggcacagcc

SEQ ID NO: 87753 - RNA, 81 nt, Homo sapiens
ggggaaggcgccaggacggaagaccccggccaaagcgaaaggcagcccagcaagaggagggagcgaggaaccaccggacga

SEQ ID NO: 87754 - RNA, 74 nt, Homo sapiens
ggaaagaccgaccaggacacgagcgggaacgcaaacgaaggaagaccggaagcgccaagcccaccagacaccga

SEQ ID NO: 87755 - RNA, 80 nt, Homo sapiens
gcacgaccacaccgcgagaagacaaggaccacagggcgcaagacagggaggccgcacagaggaggagcaccaaaccgagg

SEQ ID NO: 87756 - RNA, 57 nt, Homo sapiens
cccagacaggcggacggcagcggcggcagggacgcgagagcccacgaagagcgacgg

SEQ ID NO: 87757 - RNA, 76 nt, Homo sapiens
ggaccagaacccgcgaaagagggaagcggcaaaccaaaagagcaacgagaggagcaaaaaaggaacaagacagaaa

SEQ ID NO: 87758 - RNA, 61 nt, Homo sapiens
gaaaaaggcgacgggcagaggaaggcggaaacggaacgccaagcgaagaagaacgaaacgg

SEQ ID NO: 87759 - RNA, 74 nt, Homo sapiens
gcgaagcgcaaggaaggggagacccggcgcgaccacgcccggcgccccaccccaggcgagcccccggcccaggc

SEQ ID NO: 87760 - RNA, 76 nt, Homo sapiens
ccaagcaaggcgcaggaggaggcaacaagagagggaagggcaggagaaaaaaaggcaaaagaagaggcggaaccag

SEQ ID NO: 87761 - RNA, 73 nt, Homo sapiens
gggcagccagaagaaggaccggaagcacacaacaggaaaacaaaagaggagaaagggaacaaccaagacaaac

SEQ ID NO: 87762 - RNA, 79 nt, Homo sapiens
gacgcccacagcagggagaaagagagcgaggaagcaaagccgagaagggagcgagaaaaggccaagccaaaaaaggagg

SEQ ID NO: 87763 - RNA, 64 nt, Homo sapiens
cgacccgaggccagcagggaaagccccgcagcaacaggcggccccggccgagacgccgccggcg

SEQ ID NO: 87764 - RNA, 81 nt, Homo sapiens
ccgcgcacacaccccgagggaggaagcaaacaccagagagccacaaacacagaccaccggggaccaccaaaagaccgaacc

SEQ ID NO: 87765 - RNA, 66 nt, Homo sapiens
aaccagccccggcaagaccgaaggcgccggccaaaagaggaaaaagaacgaccaggacacagagcg

SEQ ID NO: 87766 - RNA, 78 nt, Homo sapiens
cacccccggagcgcagccccgaagagaagaggaaaaccccaagacaccaagaaggggcgcaaggaaagaagaaaaaac

SEQ ID NO: 87767 - RNA, 81 nt, Homo sapiens
ccacagagccgaggcagccgaggggcacaccagaacaacacaagagcgagaacgggagagacacaggcacgagacaaccga

SEQ ID NO: 87768 - RNA, 79 nt, Homo sapiens
caggggccgggggccagacgcacgcccacagggaaggcaggagagcagagccggagccagggcaggccaggagagaagg

SEQ ID NO: 87769 - RNA, 76 nt, Homo sapiens
gcgcagagcgggaccacccgggcacagcaggcacggagcgcgccgcgcgccgggagaggcccggggcccgccggcg

SEQ ID NO: 87770 - RNA, 78 nt, Homo sapiens
cagcccagacacgcccggagccgcgccggcggccccccgcgggccccaccccgggccaggaccaggcccgggacaccg

SEQ ID NO: 87771 - RNA, 65 nt, Homo sapiens
gaaaggccccccaccccacagaaaaaagacaacaaagcacaggggcccaacagcagaaagcagca

SEQ ID NO: 87772 - RNA, 58 nt, Homo sapiens
gagcaggagagcaaagggaagagcgccagcccccaaaggaaagccgaccaagacggca

SEQ ID NO: 87773 - RNA, 77 nt, Homo sapiens
ggacaaaaccagaagcagggcagcagcaaaaacaaccagcacgggagccccccgggaagcaaggcaacaaagagcag

SEQ ID NO: 87774 - RNA, 74 nt, Homo sapiens
gcccagaagagcgagaaagcaacccagcaccagcggcaaggaagaccagacagaaagccagcggaggagccgag

SEQ ID NO: 87775 - RNA, 86 nt, Homo sapiens
gccgaggcgccgcggcggccgggaccgcggcgccccagggcccggccaggccccaccgccacaagcaggggaacaccgccaacccc

SEQ ID NO: 87776 - RNA, 40 nt, Homo sapiens
gacagagcaccagcaccagcagagccccgggcaaggggag

SEQ ID NO: 87777 - RNA, 73 nt, Homo sapiens
cgcgcacggggagacgcggcgcgcggcagggaggaagccgcccgcgcagcaggaagccacaaaggagacagga

SEQ ID NO: 87778 - RNA, 72 nt, Homo sapiens
ggcgaggagccagggacagccggccgacaggaccgggccgaccggcagcggcaagcggcagccacacccgga

SEQ ID NO: 87779 - RNA, 57 nt, Homo sapiens
accagacaacagcagcagggggggaggggaggggaggggaggccagggagcaagggg

SEQ ID NO: 87780 - RNA, 75 nt, Homo sapiens
ggaagacacaaacagcagggagaagagacaacaagacagcggcaaccggcacgcaccagagcagcccacaggacg

SEQ ID NO: 87781 - RNA, 67 nt, Homo sapiens
caacagcggcggagaaagaccaacgagcagcccagcgaccaaccgggggagaggaagaagcgcagaa

SEQ ID NO: 87782 - RNA, 69 nt, Homo sapiens
cgggcgagcagaggagcgaggcgccgcccgccgccacaaagggcgagaaaaagcggagaaaaaacaagc

SEQ ID NO: 87783 - RNA, 82 nt, Homo sapiens
ccccgcacggacaccggcggccccaccagcagacgcagccgagacaccagcccgaaacaccaccaagagaggaggacagcca

SEQ ID NO: 87784 - RNA, 61 nt, Homo sapiens
cagggagcggaccagccaaacaaacaggccccccaggccacccaggaccagcggcacaccc

SEQ ID NO: 87785 - RNA, 71 nt, Homo sapiens
ggcaggacaaccaggggaccagagaggacggcaccagccaggagggggcaccaaagcggggggagggcgaa

SEQ ID NO: 87786 - RNA, 88 nt, Homo sapiens
agaccagaggccgaaccgggcgacaagaggccgggcgccccgcaggacacaagagaaccaggagcggcagaccgccgccaggaggagg

SEQ ID NO: 87787 - RNA, 71 nt, Homo sapiens
cagaccccgaccccaggcagcccaaaaagagaacccccgagggacgggagaccaaagaaggcagaaaaaac

SEQ ID NO: 87788 - RNA, 62 nt, Homo sapiens
gggccagcgaagcggaggcggccgcgccgagggcaccgccgaccgaaaccgcaaacacacga

SEQ ID NO: 87789 - RNA, 80 nt, Homo sapiens
gggggcggcggaggcggcggcaccgagggagaaccaagcggcaacaaccgggggagacggagaggggagaggaggacggc

SEQ ID NO: 87790 - RNA, 58 nt, Homo sapiens
agagaggaacccgaagaagaaaggacgacagccagagagagcagcggagcccaccaaa

SEQ ID NO: 87791 - RNA, 59 nt, Homo sapiens
gaaaaacagaaaagagcaacggagcgaaagcgggccaaaagcagagaaccaaagaacac

SEQ ID NO: 87792 - RNA, 59 nt, Homo sapiens
caggggcagaaacagagaaggaacaggggacgagaacaagcaggcgcgaccgcaacgcc

SEQ ID NO: 87793 - RNA, 74 nt, Homo sapiens
gggagaggggaaacagcggagacggaacgggagaagaggcaaagaaacaccaagaagaaaacacgaagaaacgc

SEQ ID NO: 87794 - RNA, 70 nt, Homo sapiens
cccgccggaccccacccggccgcacccaaagagaacgcaggggcgccaccgccggaaagcacgacagcac

SEQ ID NO: 87795 - RNA, 83 nt, Homo sapiens
agaggacaggcggaggccccagggaagcgcagaaagcaggcgaacccgcggcgcaaaacgaggagcagcacagagaagaaaga

SEQ ID NO: 87796 - RNA, 35 nt, Homo sapiens
gaaccaagcacaggacggacacagacggaagggag

SEQ ID NO: 87797 - RNA, 83 nt, Homo sapiens
aacagcaaagggaggcagcaagcaaaccagccagcacgggggcccagccagccagcagcgaggggggacggaggcggcacggg

SEQ ID NO: 87798 - RNA, 85 nt, Homo sapiens
gcccagggcccgccacaaagccacggagggcaggccggcccggccgcgcggcgaccggcgggcgggcgccgccccccgggccccg

SEQ ID NO: 87799 - RNA, 39 nt, Homo sapiens
aggagacgaaccaagaaacagacgcggccggagcccccc

SEQ ID NO: 87800 - RNA, 75 nt, Homo sapiens
gggagcagaccggaggaggcgggggcgccggcagaggaccaggcaccaccggccccggaaggacccccagaggac

SEQ ID NO: 87801 - RNA, 71 nt, Homo sapiens
gcagagacgccggggcgacccccccagcaggcggcccgcagacggccccaagaccggagcgggaagccgcg

SEQ ID NO: 87802 - RNA, 81 nt, Homo sapiens
ggcggggagcgcagagcgggcgagcgcgggcggagaacggaaaagcaccaggaagcagagaggaccgcagaagggaaggag

SEQ ID NO: 87803 - RNA, 68 nt, Homo sapiens
aaaacaaccggcaggggacgaagaagggagaaggggagcaggccggcaagcacgcaaagcgagggagc

SEQ ID NO: 87804 - RNA, 52 nt, Homo sapiens
aaaccagcaccgggagaggagacagacccagcacggaccccccccccagccg

SEQ ID NO: 87805 - RNA, 69 nt, Homo sapiens
gcggcacaggagagaccagaaaaaggcacagcccagggcccccaccaccgcgcagaccggcagagcacg

SEQ ID NO: 87806 - RNA, 51 nt, Homo sapiens
gggcccacagaaaagcagcccaacgaaaaccgcacacgggcgcagccccga

SEQ ID NO: 87807 - RNA, 60 nt, Homo sapiens
gaagcagccagcagaggcgcagggccagcaggcagagacagcagggaccccggccaggcc

SEQ ID NO: 87808 - RNA, 67 nt, Homo sapiens
gcgggaagcaggacgcgccgcgccccaagccggccccgagcgaggcaccggacccgacacccccggc

SEQ ID NO: 87809 - RNA, 98 nt, Homo sapiens
caggaggaccgaagaaacgaagaagaaaaacaacgaacggaccagaagcaggcccgaagacaccccgccaaaaggacagaggaccacggagacagcag

SEQ ID NO: 87810 - RNA, 83 nt, Homo sapiens
ggggacggaggcaagacgcagcagacaggaacgacgcggcggggagggaaggaaagggacaagcaaggggccaaggagccaag

SEQ ID NO: 87811 - RNA, 65 nt, Homo sapiens
gaaagacgacccgccggcccaccaagaacccagagagaggaaaacccaagacaaggaagggcaaa

SEQ ID NO: 87812 - RNA, 82 nt, Homo sapiens
agacggcccgaccacccccggcacggccacgcccacagaggcagacccgcagccaaacccaagaaggcagaagccagccccg

SEQ ID NO: 87813 - RNA, 68 nt, Homo sapiens
gaagagaaggacacgcaaaccaccaaagggagcgcccccgccagcgcgcaagcgacaaaggaggcagc

SEQ ID NO: 87814 - RNA, 71 nt, Homo sapiens
aagccagaaagcaggggaagccgcaaccagccacaccaagagaccacaaaagggcgcaagcagccccagac

SEQ ID NO: 87815 - RNA, 64 nt, Homo sapiens
agaaccagaagagaggagcagagaggagaaaacgggccggaggaaaagggcggcaggggaccac

SEQ ID NO: 87816 - RNA, 41 nt, Homo sapiens
ggaccagcagcgcgccgccgcccagacacagaagcagcaac

SEQ ID NO: 87817 - RNA, 55 nt, Homo sapiens
gacggcgccggcagccgacggagcggaaccgccagaccacaagaaaagcagaaga

SEQ ID NO: 87818 - RNA, 71 nt, Homo sapiens
ggcaacacaccaacccccgcaaagcagcacagagaagacacagggcagaagccaggaccccaccaacggac

SEQ ID NO: 87819 - RNA, 93 nt, Homo sapiens
ccgccgcgcaccgacccgacgcgccggcccacgcgcggccaaggacccaaagacaggaccacgcaccagcagagaaggaaagcaaaccgaagc

SEQ ID NO: 87820 - RNA, 73 nt, Homo sapiens
ggccgccgcccgccggcggagggggcacacccgggcacacagggggcaccgcgacggccagggggccgccaga

SEQ ID NO: 87821 - RNA, 76 nt, Homo sapiens
acgcgcagcagcaacaagccgcagcgcagcagcgcaacaacaggcaccagaaggccagcggacaaccgacgaggcc

SEQ ID NO: 87822 - RNA, 64 nt, Homo sapiens
aaagccccacagcaagacccaggaagccgcgggcaaaccagaccgaagagagacggggcgccag

SEQ ID NO: 87823 - RNA, 73 nt, Homo sapiens
cagcaggcgaagcaagcacagccaacagcccacaaggaacgccagacccgggagggagaaacgagaggcaggg

SEQ ID NO: 87824 - RNA, 59 nt, Homo sapiens
aaagcaaacggaccagaccgaccaccaaaaaggacccaagaagaccagccgaagcccgg

SEQ ID NO: 87825 - RNA, 117 nt, Homo sapiens
ccggcgaaagcagcggaaaccccaacagaaccggacgcgaaggcccagcgcgcgagaacgacacggaaccagaggcagcagcccaaccccgaggacagcccaggccacgcacccacc

SEQ ID NO: 87826 - RNA, 53 nt, Homo sapiens
agaacacagaaacccgccccgggacacacagcaacgaagcaggggaggaggga

SEQ ID NO: 87827 - RNA, 84 nt, Homo sapiens
gagcagagccaaggagagagagagggaggaagacccagacaggggaccacacgaagaggggcacaaacggcagggaagaccagg

SEQ ID NO: 87828 - RNA, 81 nt, Homo sapiens
cagcaacacgcagcagggcggaagcgggggcaccagcaccccgcaccacagccagaaagaccagggacacagagagccacg

SEQ ID NO: 87829 - RNA, 72 nt, Homo sapiens
cagacagaacagaacccaaaagccgacaaccccagaaacaggggcaaaagaacagggaccaacaagagcaga

SEQ ID NO: 87830 - RNA, 84 nt, Homo sapiens
ggaagcgggccggcagcgcccggacgaggagagacaagagcggccgaggcgaaaaaagaagcaggcaaagaagcggaaggcccc

SEQ ID NO: 87831 - RNA, 77 nt, Homo sapiens
ggaggcccgccgccgcagagcacccaacggcgccggagaagggggaaggcaggaccggcccgcagccacccagaccc

SEQ ID NO: 87832 - RNA, 78 nt, Homo sapiens
cgggagcagccggcgccggcgcacggcccgagcgggggcagccgcagaggcgcgggcccacgagacgcgaacaaacgc

SEQ ID NO: 87833 - RNA, 81 nt, Homo sapiens
ggccgcgcggagcacgcggagccgcccaggcagccgaacagaaacagaggggcccagcaggaacacagagaagggcagaag

SEQ ID NO: 87834 - RNA, 80 nt, Homo sapiens
gaaaccagcgcacagcaaccaacaggcacgacaagcggacaccccgagagggaaggggaaagcagagggagaacaaagag

SEQ ID NO: 87835 - RNA, 81 nt, Homo sapiens
gcgcggcccagaggcacgaacaagaaagggacgaccggacagggagcaaccaacaagaggagacaagcgcaagcagccaga

SEQ ID NO: 87836 - RNA, 77 nt, Homo sapiens
gcgcccgcgcccccggagcgcaggaggacacacgaacagccaagaaaggccaggcgcgaggaaggagcgaggacagc

SEQ ID NO: 87837 - RNA, 48 nt, Homo sapiens
gccgagccgccaggcagcaggacggaaaggacgcgaaagaagacagac

SEQ ID NO: 87838 - RNA, 73 nt, Homo sapiens
cggccgccccgccggagcagcacacaagccacacgggcaagcaaaacggagaccgagaagcgagcacaaaaag

SEQ ID NO: 87839 - RNA, 67 nt, Homo sapiens
gggacccgcgggccccggcccagcaaccgacaacgcggcccgggaaggggaagcaggccaacccaga

SEQ ID NO: 87840 - RNA, 51 nt, Homo sapiens
gagccacggccacacgggagagaaggagcacggagggaggccgccaggccg

SEQ ID NO: 87841 - RNA, 56 nt, Homo sapiens
cagaaccgaagagacccaaccaccagaagccgaggaaaccgaaccaagcccagcgg

SEQ ID NO: 87842 - RNA, 78 nt, Homo sapiens
ccgggaggggaccggagccgccagcgcggccagcgcagcccgaggaccagcagcaggggcggggccccgaacgagaca

SEQ ID NO: 87843 - RNA, 78 nt, Homo sapiens
ggaggcagaagacggccagggagagaggaacccaagacaccaccaggccgaacccgccgccgcccccgacacagcgcc

SEQ ID NO: 87844 - RNA, 62 nt, Homo sapiens
gcgacgccaaccacgacgaagcggaaggcagaaggcgccgcgggcggacacgccagaggagg

SEQ ID NO: 87845 - RNA, 91 nt, Homo sapiens
aacaagacggggcgccccacagaggggcgacgacaggggcaaggccgaggggaacagcacacagagaggaggcggaagcacgccagcagga

SEQ ID NO: 87846 - RNA, 49 nt, Homo sapiens
acaaaggaaaagcggagcggagaccagagacaaggcggacaggagagcg

SEQ ID NO: 87847 - RNA, 91 nt, Homo sapiens
cggccgcccgagggaggcacgacaggcgggagccggaggcgaaagggaaacacagccgcccggggggagaaaagaggacaacacaccgccg

SEQ ID NO: 87848 - RNA, 67 nt, Homo sapiens
ccagaagaacaacagcaaaagcacacaagcaccgggacccaggacggcgacagggggaccgcggcgc

SEQ ID NO: 87849 - RNA, 74 nt, Homo sapiens
cgcacacagcaagcacgaggacccaaagacaggaccacgcaccagcagagaaggaaagcaaaccgaagcaggcg

SEQ ID NO: 87850 - RNA, 87 nt, Homo sapiens
gaagagacaggacgcgggaccggcagccgacaggcacgaggcgaaccggccaccaagcacgggagcacgcggagggcgaggagagcc

SEQ ID NO: 87851 - RNA, 75 nt, Homo sapiens
acggagaacagcaggccacggggccaagaagcagaccacaacagagagacgaagaggccaaagggaccgaacagc

SEQ ID NO: 87852 - RNA, 81 nt, Homo sapiens
gacaaccggccaccagcgcgagcagagaaggagaagaaaaacagaacgcagggcaaggcggggagaagagaacagcaggcg

SEQ ID NO: 87853 - RNA, 89 nt, Homo sapiens
ggaggaaccgaggccgagcagggacggggacaagcccgcggcgccgcgggaacgcaccacgcggcggccggcccaggccggggaagcgg

SEQ ID NO: 87854 - RNA, 82 nt, Homo sapiens
caagcgccccgagccacccaggccagcccccggaggaggagaaccggggggcaccgggcggccgaccgacgaggggacgagg

SEQ ID NO: 87855 - RNA, 56 nt, Homo sapiens
gcaccggagagcagccgcgagagacaacacagacgaccaggaaagcaaaggaagaa

SEQ ID NO: 87856 - RNA, 58 nt, Homo sapiens
ccagacagaagacacggcccaggaaaccccccaggcaagaggcgcaggaccgggaaga

SEQ ID NO: 87857 - RNA, 62 nt, Homo sapiens
ccccgcagcaaacagggcccaccagcggcagacagagcaagagagaggaggaaaaaaaggag

SEQ ID NO: 87858 - RNA, 80 nt, Homo sapiens
caacccacagcgcaggaagacggccgccgcggccaggcgaagaggacgcccaccggaggggcgccacccgcagcacggga

SEQ ID NO: 87859 - RNA, 71 nt, Homo sapiens
aaaccggcgaagagaaaccagcccggacagcgcaccccacgcggccggcgaggaagaaacagaagaaccga

SEQ ID NO: 87860 - RNA, 73 nt, Homo sapiens
gcggaagaagcaggaggcaagaaaggggaaccccggagaaaaggccaagaaggcaggggggggaaacggagga

SEQ ID NO: 87861 - RNA, 77 nt, Homo sapiens
agaggagggagaacacaggaacaggcgcggacagaccaggagagcaccaaacgcccaggagcgagcgaaaaggcaaa

SEQ ID NO: 87862 - RNA, 39 nt, Homo sapiens
cccgagagcgggagcagcccgggcgggaggacaaggaca

SEQ ID NO: 87863 - RNA, 77 nt, Homo sapiens
aacccggagcagggaagcagagccgcagaagagacgaagagaccgcagaagcgaaaaggagggaaagaaaggagggg

SEQ ID NO: 87864 - RNA, 59 nt, Homo sapiens
acagagaacaaagacgagacaggcacgggagccgaacaaggcccggcacgaagccgccc

SEQ ID NO: 87865 - RNA, 81 nt, Homo sapiens
ccgagcgacagcgcacggcagcggcaccacggcgacgcacaagggggaggaagaaaccccagaaaagaggcgcaccaaaag

SEQ ID NO: 87866 - RNA, 74 nt, Homo sapiens
agggagccgcgcgccggcgcgcgccgaggaaggaaaacgaaaaggaaaggaggccagacacaaaacgggaaccg

SEQ ID NO: 87867 - RNA, 80 nt, Homo sapiens
aagccaaggagaacccagcccgacggcaaagaagaaacaccccgccgccagggacaagccagccgcccacagccggccgg

SEQ ID NO: 87868 - RNA, 76 nt, Homo sapiens
ccagccacccgaccacacacaccaggaaaaaggacgagcaggggaaaagagacgcaaaccacgaggacagagaaga

SEQ ID NO: 87869 - RNA, 68 nt, Homo sapiens
agcgaggagcgggaggcgcgagcggcgacgaggcgggaggcggcagaagcagccagaggagggcacag

SEQ ID NO: 87870 - RNA, 72 nt, Homo sapiens
aggcgggagaaggcgcaacgcggcgccgagacagggaaacgggaggcggagccagacacgcagaccaagacc

SEQ ID NO: 87871 - RNA, 82 nt, Homo sapiens
cggcgcaaaggcggaggcggaaggggaaagccggagccggccaggggcagggcccagaggccggagcgagcccagaagagag

SEQ ID NO: 87872 - RNA, 71 nt, Homo sapiens
acaaagaccaacggacccaacccggaagccagggagaacaggcaagcacaaaagcgaaaacccgacaacca

SEQ ID NO: 87873 - RNA, 60 nt, Homo sapiens
aggaaaagacaacagccaagaagcgacccgagaagaaagggagcggccccaccaaacgac

SEQ ID NO: 87874 - RNA, 66 nt, Homo sapiens
cggcccgaaacgccgaaaaacccaaggcagcgagagcccagagaagggaagaaagcggaaaagaaa

SEQ ID NO: 87875 - RNA, 85 nt, Homo sapiens
cgccaccaccgacgagcgaagagcaagaaaaacaaccaccagcgagcaaaaaggcaaagaccaagaccaccaagaagcgccccag

SEQ ID NO: 87876 - RNA, 69 nt, Homo sapiens
ggcaaccgaaagcgggcccgggagacccaggcgggacagagggagccaggcagaggggaaccgacgcaa

SEQ ID NO: 87877 - RNA, 84 nt, Homo sapiens
cacccgcgcgcgcccgggaggaaggaacgaggcaaggagcaaagcagcggcgcagcccgggaacggaagaacaccagaaacgag

SEQ ID NO: 87878 - RNA, 75 nt, Homo sapiens
cgcgcaaggccaagacagcacaagaaaccagacgaacgaagacaaagcaaaaccacaggagaaacagaaacagaa

SEQ ID NO: 87879 - RNA, 80 nt, Homo sapiens
cccacagccgggggaaaacacggaggagggacgcacgaacgcggacccaaggacaggggcggggcagaaggaccccagga

SEQ ID NO: 87880 - RNA, 79 nt, Homo sapiens
agcgcgccgcccggagccgcgcacacggggacacggaaaacgacagaacgaagcagaagaacgcccaggcaggcaggga

SEQ ID NO: 87881 - RNA, 72 nt, Homo sapiens
ccaccccgggagcaggaccccgcccggcccgggcccagaggaaacaacggacacccccgggaacccaccaaa

SEQ ID NO: 87882 - RNA, 75 nt, Homo sapiens
ccccagcaagacgccaggccccggaagccagaaagcaagccccagccaagacccaccaggcaggggaagaagaca

SEQ ID NO: 87883 - RNA, 88 nt, Homo sapiens
ggccgaggggccaaccagcgaagagcgacaagccgcggcagccgcggaccaccgccgccagggcgaccaacgacgaagagcagagcag

SEQ ID NO: 87884 - RNA, 77 nt, Homo sapiens
gggagcgcgagggggcccgccccaggcgggaacaagacccgcagaggagaagacaaggccggaaggcgaggaggcac

SEQ ID NO: 87885 - RNA, 80 nt, Homo sapiens
gcgaccgccagcgccaacagggccgccagaagcgccgggccaaggcggggcagcaggcaccaacgcccgcgggcaaacac

SEQ ID NO: 87886 - RNA, 48 nt, Homo sapiens
cacaggggccgcaagccaggcccgggagcgagacgcaacagaaaagcc

SEQ ID NO: 87887 - RNA, 41 nt, Homo sapiens
gcaccgcagccggaggagcggccgagagggaaaagaagacc

SEQ ID NO: 87888 - RNA, 80 nt, Homo sapiens
ggagaggggagccgcacgccacagcgaaggcgcgagggacaagagcagaggggggggagaggccagaggaacaagggaag

SEQ ID NO: 87889 - RNA, 80 nt, Homo sapiens
caccaaaggggaaagccgaagaaaccagggggagaaagccggagagacccggagcgacaggacgagcagcaagcagggag

SEQ ID NO: 87890 - RNA, 71 nt, Homo sapiens
ggcaggccaaccccacacacaggagcaagcagggggcacccaagcaggagggccaccagcacagccaggag

SEQ ID NO: 87891 - RNA, 73 nt, Homo sapiens
ggagagaagaagaacagagagaacaaaagagcagcacacccacagaggcagaccgaaaacacccagcaagaag

SEQ ID NO: 87892 - RNA, 77 nt, Homo sapiens
ccggaccagaagcgccgaacgcgcgcagaaccggcgcaggaccgggcaggagcgaaggaacgaagcccgcagcgagg

SEQ ID NO: 87893 - RNA, 78 nt, Homo sapiens
cagaagcaagaaagaacgcacagccacgcacacaggagaagcaggccaacagcaaaaaaccaagagggggaacgaaaa

SEQ ID NO: 87894 - RNA, 76 nt, Homo sapiens
ggagacggaagacaacccagcacaggaagaaacgccaggaacacaagaaaagacagcagacgagaaggcagagaaa

SEQ ID NO: 87895 - RNA, 67 nt, Homo sapiens
cgcgggccacccccgccgcagaacacaggagaacgggaaagcgcacaagccaccgcggcccgggcgc

SEQ ID NO: 87896 - RNA, 76 nt, Homo sapiens
aagacaaggaggggaacccaaacccgcaacaagcacacgcaaaaagacacaagacacccaagaagcccagcagacc

SEQ ID NO: 87897 - RNA, 104 nt, Homo sapiens
caacaagcagcaggaggcacagcgcgccaagcgaacggagagccagccgggagagggcccccgccagacagcgccagacaagagcagagaggcaagacaagaag

SEQ ID NO: 87898 - RNA, 54 nt, Homo sapiens
caaagagcgccccacgagagaacggcacacgcgagcgggcagcgacacccagac

SEQ ID NO: 87899 - RNA, 68 nt, Homo sapiens
gaagggcaagaacaaaaagaggagagaaagaacccacgcaggacgacagaagaggccggacaagagaa

SEQ ID NO: 87900 - RNA, 75 nt, Homo sapiens
aggagacaaagcccaaaacagcagcagccaccagccgacggaacaaggccagcgggaagcccgggagaccgaggg

SEQ ID NO: 87901 - RNA, 84 nt, Homo sapiens
caagaggaagggcgcccgaagcgggagaaggacgcggacagcagcaagcagcagcccagggacggcccaacaacaaagaggaga

SEQ ID NO: 87902 - RNA, 113 nt, Homo sapiens
gaaggcgccgccggagaggggaggaaacgcgccggaaaggaagaccaggacgcacaggagacagacccagcacggaccccccccccagccgggcgaggccccgaaacgcagcg

SEQ ID NO: 87903 - RNA, 76 nt, Homo sapiens
aagggggcggcggggcggggggccgggccccagcacggccgcaccggggacaaagaagggcagagacacggagcaa

SEQ ID NO: 87904 - RNA, 81 nt, Homo sapiens
cgagcaaaggcacaaggaaccacgcccgcgggacacaagacgggcaaggagcggaaagaagcggagcgggccgcggagacg

SEQ ID NO: 87905 - RNA, 68 nt, Homo sapiens
acggcgcggcagaaaaaccagcccggcgcagggagagaacagaaggagcacagaaaagagagcgcgca

SEQ ID NO: 87906 - RNA, 72 nt, Homo sapiens
gcagcagacaagcagcagggacaagagagcaccaggacaaaagaagggcagcacaaaggaaagccccaaacc

SEQ ID NO: 87907 - RNA, 76 nt, Homo sapiens
ggaacccaaaagcgggcccccagagaagacacagggaaagagccaggccgaggacgacccccaaccgggaacagca

SEQ ID NO: 87908 - RNA, 75 nt, Homo sapiens
gggcagccagggaagagagacaaccagaagacagagcaagggaacagggaaaagacgcgaagaagagaaagaagg

SEQ ID NO: 87909 - RNA, 85 nt, Homo sapiens
agcagaggggccacgcgggcccgaggcgcaccaagggcgaaggagccggcccaagggaaagcaggcaggagggagagcgccgaag

SEQ ID NO: 87910 - RNA, 73 nt, Homo sapiens
aaccgggaaccagagcaaagaagaaaccggccagaaacagccagagaaggagccggccccacacacagcacgg

SEQ ID NO: 87911 - RNA, 83 nt, Homo sapiens
caccggggccgacgaacacacggggacagggaaagggagcagcaccggccacacccacagcacgaccggaacccagcgaccga

SEQ ID NO: 87912 - RNA, 75 nt, Homo sapiens
ggggcacccagaggccggggaccgccaaccccccaagaagcagaggaaggaccaacgaccgcgaaacagacggca

SEQ ID NO: 87913 - RNA, 79 nt, Homo sapiens
gcccgcccggcaggcagccacgggggcaggcgcacacagcccccccggcggggaacaccgaagaacccccaggcgacac

SEQ ID NO: 87914 - RNA, 73 nt, Homo sapiens
agagagacagccaccaggggggggccaggccacaggcccggcagaaaacccgcaaacacgccgccagaacccg

SEQ ID NO: 87915 - RNA, 74 nt, Homo sapiens
caaacaggaggggcaaaaggaaagaaggagaaggaagagaaacaaagagaaaacacgccgagaaaccagagaga

SEQ ID NO: 87916 - RNA, 81 nt, Homo sapiens
ccagaaccgcgcgccacccacaaccagagcggacgagaaccaccaccgaccaggcaccggagaccagagcaagggcaagac

SEQ ID NO: 87917 - RNA, 73 nt, Homo sapiens
cacagagccccaaacagacagacccggcacggggccaaaaaagagcgaagaagaaccagagaggcgaaaccgc

SEQ ID NO: 87918 - RNA, 72 nt, Homo sapiens
agcggccgcaacagccccaaggcgcccgaaacgacaagaccccgggagccaacccgcaggccgccacaaggc

SEQ ID NO: 87919 - RNA, 80 nt, Homo sapiens
ggcccgcgcacggggccaccgcaggagaagcacaccgcagcccgggcccgggaggagcggggacacgaggaccccccaaa

SEQ ID NO: 87920 - RNA, 72 nt, Homo sapiens
gcggaggacagaaggaacgaaggacccccccagccgggccaccgcagagagccgcgcccaccggggaaaccc

SEQ ID NO: 87921 - RNA, 72 nt, Homo sapiens
ggaggggccccacgcccaccaacaaacgccagaagaccacagagaagcaggcgaccaggcgcgcgggcaaga

SEQ ID NO: 87922 - RNA, 77 nt, Homo sapiens
acccagacggacacgggagggaaagagagcgaggagacggcgaccgacaacgaggacacaaaagcaaccgagaggga

SEQ ID NO: 87923 - RNA, 77 nt, Homo sapiens
gccagccgcgcagccagccgccgccgccccagccgcccgcggccgggagcggagccccggggaggcagcacggcagg

SEQ ID NO: 87924 - RNA, 71 nt, Homo sapiens
cggaacaggaacaagagcaggagcagggaggacacaaaggaggcgagcagaacaaggagaaagaccaagca

SEQ ID NO: 87925 - RNA, 82 nt, Homo sapiens
acacagccacacagacaccgccacaggagagagcaaggccaccaacggcggggggcgaggagcgagcaggagccgggcggcg

SEQ ID NO: 87926 - RNA, 73 nt, Homo sapiens
aggagagagagaaggccgaagaccagaaaaacaggacccgaaacacgcacaagggagcgccggaaacccgggc

SEQ ID NO: 87927 - RNA, 67 nt, Homo sapiens
cccacggcagacagccaccagcaccagaagaacacagacacgacagccagggccaaaagaacacagc

SEQ ID NO: 87928 - RNA, 72 nt, Homo sapiens
aggcgcccccacagagaagcagagcagcacaagccagaaccgaccgcgcacagaaaccgagaccaagaaccc

SEQ ID NO: 87929 - RNA, 56 nt, Homo sapiens
gggggcgccccggggaaggagccgccgggcagacgcccgaaccggcagaaaccgga

SEQ ID NO: 87930 - RNA, 64 nt, Homo sapiens
cacggacagcagagacagggaagccagccacggacaccaggccacgcccaccagccccaccgag

SEQ ID NO: 87931 - RNA, 60 nt, Homo sapiens
gacccaagcggacacagcacggccccacagaggagcggccgcagaagggcgcggcccgcc

SEQ ID NO: 87932 - RNA, 70 nt, Homo sapiens
cgcacgccgaccggcgccgggagaccgggggaaccagaagaggccaaccagcacgaacgccagcagcacg

SEQ ID NO: 87933 - RNA, 61 nt, Homo sapiens
gaggacgaacaaaacaggaaggacaccaaagcaaccaaaagcccaaaggaggcacagaaag

SEQ ID NO: 87934 - RNA, 73 nt, Homo sapiens
aaggaccaagaaccagagcaccgcaccaaaagccagaagagaggaggaaaaaaccaaccacaaccagagacgc

SEQ ID NO: 87935 - RNA, 85 nt, Homo sapiens
agggaggggccccggaccggaggcaaggacggagcagaagaagcgaagagaacacccaaacgcaggacccccgcggagaagccgg

SEQ ID NO: 87936 - RNA, 69 nt, Homo sapiens
cgaaaaacgaggcagccagcccgaagaaaagggaaaacgcgcgggccaagggccgccgaccaggcggag

SEQ ID NO: 87937 - RNA, 74 nt, Homo sapiens
acgggacaacggaggggagcggccccaaccaagccccgggaggagccgggacacagccagcgcccaacaggacc

SEQ ID NO: 87938 - RNA, 63 nt, Homo sapiens
ccagaagaccccgggaaaggcgacgcccacgcgcccgcaacaggagaaagacagcaaagaaaa

SEQ ID NO: 87939 - RNA, 78 nt, Homo sapiens
gcaaggccagggccaaggagagacagaagggccaagcccacgcagagcaaagggaggggcagagcaaacacgaagcgg

SEQ ID NO: 87940 - RNA, 88 nt, Homo sapiens
ggcggcaagggcgcgcccgggccgggcggcgcgcgcccacgcccagccgccacaaggccacagaccggaggagagcggcggcggcccc

SEQ ID NO: 87941 - RNA, 74 nt, Homo sapiens
agaggaaggaccccagagaagacaggaacgggaagggcacaggaagaaaggaccaaggaaacaggaacccgcaa

SEQ ID NO: 87942 - RNA, 85 nt, Homo sapiens
ccagggcccgcgggccaggagagcgccggcgggaacaaccaaagaggaggaaaggacgagcacgaggccgcagcgaggcaccccc

SEQ ID NO: 87943 - RNA, 68 nt, Homo sapiens
ccaccccgacacaacaccaccagagacaggaaacaaaaagaagaaaaaaacaaccagaccagaggaca

SEQ ID NO: 87944 - RNA, 84 nt, Homo sapiens
aggcggaagcaacccgacccggaggcggcggcggcggggggagccggagccgccgggagcacccgaaggaggcgccaagggaga

SEQ ID NO: 87945 - RNA, 69 nt, Homo sapiens
cgaggcaagggaacagaaggagcagggcggagaacggaaaagcaccaggaagcagagaggaccgcagaa

SEQ ID NO: 87946 - RNA, 71 nt, Homo sapiens
aaaggcagaagaaccggggagaccgaagagccacccaaggggacaggggacacaccggaagacgcaacaca

SEQ ID NO: 87947 - RNA, 54 nt, Homo sapiens
ggacagagggcggacggaggaacaggaacaggagcagaacggccgagcgaccag

SEQ ID NO: 87948 - RNA, 79 nt, Homo sapiens
gccaacgggaagaccagaacaaaagacagagggcaggcgagccaccacacagggccaccgacgggagagagcaccccaa

SEQ ID NO: 87949 - RNA, 77 nt, Homo sapiens
aggcaccgggcccagcacagccagcaccgcacgcccgcaagggaggaacagggagagaaggcagaaaaagacccgag

SEQ ID NO: 87950 - RNA, 76 nt, Homo sapiens
aggaagaggagaaaggaaacggaagaaaaaagaaaagaaacgacaaaaacacgagccagaagagagcgacacacga

SEQ ID NO: 87951 - RNA, 70 nt, Homo sapiens
aagagcgagaggcgccaagaggaacgaccgaaggcaaacagaaggaaggcgccgagcacagaaacgaaaa

SEQ ID NO: 87952 - RNA, 69 nt, Homo sapiens
gcccgagagagaagggcaacagcacgaaaaaacagagaaggcggaacccaaacaaagccagcagaccca

SEQ ID NO: 87953 - RNA, 102 nt, Homo sapiens
cgccgccccgcgagcacagagcccgccgccgaccgccgcccgccacacccgccgccagggcgcgcggagccaggacagcggagcagcgcggaccccgcgggc

SEQ ID NO: 87954 - RNA, 79 nt, Homo sapiens
gggcgggcgggcagcgggggaaggacacacaacgcccaggaggaacccacacagggcaagaaccgaagcaaaagagcaa

SEQ ID NO: 87955 - RNA, 70 nt, Homo sapiens
accagcaaggcacccacacccagaacaagcgggaaacggagccaccaacaagcgggagaaagacagcaag

SEQ ID NO: 87956 - RNA, 65 nt, Homo sapiens
ccagcgaccaaaacagaggcagaaggacgcaccccaacgcagcaacggggcggcacacaaggagc

SEQ ID NO: 87957 - RNA, 68 nt, Homo sapiens
agccccccacgcaccagagcacagacaggcaaagccaaaagaccggacggcggcagccagacccacca

SEQ ID NO: 87958 - RNA, 72 nt, Homo sapiens
cgccgggagaagccccgaagacgacagccacgaccgggggaacgcacgcaggacaaagcagccagaccaaag

SEQ ID NO: 87959 - RNA, 87 nt, Homo sapiens
gagagaccagaaaggacaggacggcgggaccagccgcagaagccaggagaaggagccgcacacagagcaggcgacccggcaacaaga

SEQ ID NO: 87960 - RNA, 35 nt, Homo sapiens
caagccaaagaacccagagagacgggcacggagcc

SEQ ID NO: 87961 - RNA, 82 nt, Homo sapiens
gaagaagaggagaagaaaagaccagacccacaagggcgcagaagccggcagagcccaagagacaacaagccgaaaagagagg

SEQ ID NO: 87962 - RNA, 77 nt, Homo sapiens
ggaagcgaccgcaacaagagaggaggcagggacaggcagcaaccagagcgaaagaggccagaagaaaaccggggacg

SEQ ID NO: 87963 - RNA, 64 nt, Homo sapiens
acgcacagacccaccagcaagaagagcgccagccccaagcaggaacgaacaggcccaaggcgcc

SEQ ID NO: 87964 - RNA, 49 nt, Homo sapiens
cccgagcccggaggggggagaaaagggggaaagccagaagcgaaaccac

SEQ ID NO: 87965 - RNA, 68 nt, Homo sapiens
aggcgcccacgacaaggaaagagaagagcccaccgaaggggggcaaaaaggccggagcgagggagagc

SEQ ID NO: 87966 - RNA, 72 nt, Homo sapiens
aaacaagaaaaacaaagccaaggaaaccccaacacagagccaagcgccaacagcaggcgcaaaaacgaaccc

SEQ ID NO: 87967 - RNA, 68 nt, Homo sapiens
cggcgggccgggcagcccggccgacaaccacgccgagagaaccgggaaagaagacacaagaaaaggag

SEQ ID NO: 87968 - RNA, 61 nt, Homo sapiens
aaacaccccacagaacaggaaacagcccgaacgcacagaagaaaccagcgcccagcgccgg

SEQ ID NO: 87969 - RNA, 74 nt, Homo sapiens
cgaggaagcgcaccacagcacaaaaggggacggacaagggagggccaagaacccggaggagggcaacaccggac

SEQ ID NO: 87970 - RNA, 84 nt, Homo sapiens
aacccagcaaaagcgggaagaacaaaggaaggggagcccgggacccccgggggcgcaggggacagccaccccaacggcggaccc

SEQ ID NO: 87971 - RNA, 65 nt, Homo sapiens
caagcggcgacacacgacggggcccgacccgaaaagcgcagccaaccagacgcgcgaagaacggg

SEQ ID NO: 87972 - RNA, 83 nt, Homo sapiens
aggcggccagaagaaaacgaggggcggaacacccgccaaagcagagaaaagaggcagcacggcaggagacgaggagaggacag

SEQ ID NO: 87973 - RNA, 72 nt, Homo sapiens
ccgaggccagaccgccgaggcgggcggccgagccgggaagccaaccagggcgagacacagcacgccgcaggc

SEQ ID NO: 87974 - RNA, 71 nt, Homo sapiens
aggacacacgcggcgcgggaagacggaccgcagggcccacgggggacagaagaccgggagcgggccaagaa

SEQ ID NO: 87975 - RNA, 63 nt, Homo sapiens
ccacagaggaagagaacaccagacaacgccagaagaacaaaaccggcacacagagaaaaaaag

SEQ ID NO: 87976 - RNA, 79 nt, Homo sapiens
aggagagaggagaaagaagaaacgcagaaccaacacgagaggcgagggacgacagagcaagcggcagagggcaagcggg

SEQ ID NO: 87977 - RNA, 74 nt, Homo sapiens
acgggccgagagccgcccgggccagcggccgcgcacccccggccggaggcaccagcaccccaagacgccgagac

SEQ ID NO: 87978 - RNA, 64 nt, Homo sapiens
cggggaagccaaccaccgcgcacgagagcgacacggacaaggcagggcggggggggagagcgca

SEQ ID NO: 87979 - RNA, 73 nt, Homo sapiens
acccgaggcccggcacgcagagcagagcaaacgaggacgggaaaagccagccggcacggccacaaccgaccgg

SEQ ID NO: 87980 - RNA, 110 nt, Homo sapiens
cagccgcggggagaagcccagggcagaggccggacggcggaagcgggcgagggccgggaagaccagccggacaaaacgaacacgaaggggcaacagaccggccggcccaa

SEQ ID NO: 87981 - RNA, 39 nt, Homo sapiens
gaagagacaacaagacagcgggaagagggcagcagaaga

SEQ ID NO: 87982 - RNA, 79 nt, Homo sapiens
acagaagagcgaaagcgaagcaggaagaggacgggaaggaacaaagcagagaaaccaaaaggccagacgaacacgagag

SEQ ID NO: 87983 - RNA, 75 nt, Homo sapiens
ggccaggaccaccagccagcggaaaagaaggaggccagcgggacacacaaagaaagacgaaggacacccaaaggg

SEQ ID NO: 87984 - RNA, 81 nt, Homo sapiens
cggccgccaagagaagggcacccgcacggccggcccggacccaggaccgaagaaacagacaagcaggagccccaacccgcg

SEQ ID NO: 87985 - RNA, 74 nt, Homo sapiens
ccagcccagaaagccggcgggaggggggcaaggagaagaccggagaacggaaaaagcccagaaaacgcacaaaa

SEQ ID NO: 87986 - RNA, 61 nt, Homo sapiens
ggaagacaggcagcaaacacacggagcacgaaggaagaggcccggaaaggaaggggggaaa

SEQ ID NO: 87987 - RNA, 88 nt, Homo sapiens
cggagcaggcggcggcggcgggcaggagcagccgcagcgacggcggcgacagcagcagagcaccaaacaggggggaaggaagacaaac

SEQ ID NO: 87988 - RNA, 71 nt, Homo sapiens
agggggccagggggagccacaggacccacaccgcaggagggcgaacgagacccgggaagaaggaaggccac

SEQ ID NO: 87989 - RNA, 81 nt, Homo sapiens
ggagcaccacggaccccaaggaagccacggcagacacacaacccgacccgacgaggcgacaagaacagagaagaaggcggg

SEQ ID NO: 87990 - RNA, 37 nt, Homo sapiens
agcaaggagcgggagggcgggacggacaaagaccaaa

SEQ ID NO: 87991 - RNA, 70 nt, Homo sapiens
caaggagaggaagaacagcccaaacagagaagacacggaagccaccgcagagagagacacagccgaaagc

SEQ ID NO: 87992 - RNA, 72 nt, Homo sapiens
cgaaggagacgaggcccagaagaacaaaggggacgggcagagaaacggacaggcaagggaggacagggccac

SEQ ID NO: 87993 - RNA, 41 nt, Homo sapiens
cccaccgcagaccggcaaagaaggggcagaccaacaccacc

SEQ ID NO: 87994 - RNA, 64 nt, Homo sapiens
cggccgaccagagaacagccagaacggaagaccaaccagaagacacacaaagcaggggaagaga

SEQ ID NO: 87995 - RNA, 65 nt, Homo sapiens
aagcccacagagcaggcgcgccaacacaagagaaacaccaaacaagcaccgccggccaggaggag

SEQ ID NO: 87996 - RNA, 43 nt, Homo sapiens
ggcagcccaagccgggcccgcacggcaccaggacacacgaccg

SEQ ID NO: 87997 - RNA, 63 nt, Homo sapiens
ccccgcgggggacgggcaccgggagaaacaccccagacaacccaagaaaaggcaacggacgac

SEQ ID NO: 87998 - RNA, 58 nt, Homo sapiens
aacccccaaaggcgggacagaagagcaaagacaggaccgagagagagccgccaacgga

SEQ ID NO: 87999 - RNA, 75 nt, Homo sapiens
ggagaaacggcgcagcagagcgagaccgccaacaggacaccgaagccaaccggaagaagagagggcgaaggaggc

SEQ ID NO: 88000 - RNA, 73 nt, Homo sapiens
ggcgggacggcacaccgccaccggagcgcgcgcggccagcgccaggggcacggaggccgaggcgggccgggcc

SEQ ID NO: 88001 - RNA, 71 nt, Homo sapiens
ggcaggacgaggacgaaggccgagcgaagcaggaggggaaggcgccgcccacgacggacagaaaaagacaa

SEQ ID NO: 88002 - RNA, 85 nt, Homo sapiens
cgcccgcggccggcgccggagcaggcggacccccagagcggaaccgaaggaaaagcacagaaaagagacccaccaagggcagaag

SEQ ID NO: 88003 - RNA, 64 nt, Homo sapiens
gcccagagccgagagagcagaaccgcgcagcagaagagcgagaagaagaaaagaagagagcgag

SEQ ID NO: 88004 - RNA, 53 nt, Homo sapiens
aagaaaggggaaccccggagaaaaggccaagaaggcagaaaaaaacagaggcg

SEQ ID NO: 88005 - RNA, 79 nt, Homo sapiens
ggggagaccaaaaggagaaaagacacaagagggaaggagacccagacagacaccgggcggaagcccagcgcgccccgga

SEQ ID NO: 88006 - RNA, 73 nt, Homo sapiens
ccaaccagaaaaacgaacacgagacggggccacggcaagagcccgcaagacagacggcacggccccaagaaag

SEQ ID NO: 88007 - RNA, 65 nt, Homo sapiens
gagcgaacagcaggaggagacccccccgaagaagcggcagaagagcccagaagaaaagaaaccaa

SEQ ID NO: 88008 - RNA, 80 nt, Homo sapiens
gccggaaggaaaaagacaaagcacccggcggccaaaggccaggacaccaacgggaccagaagaaacgcgcgccaccgggc

SEQ ID NO: 88009 - RNA, 71 nt, Homo sapiens
cgggggcgaggcggagcagagcggagaacagccgggagcacgccagcagcccccgcacgagccggggccag

SEQ ID NO: 88010 - RNA, 74 nt, Homo sapiens
aggcgacaggaaaggggccggcacgccgagccggaggagccaccaacagaagcaggagccaggaaaccaaaacc

SEQ ID NO: 88011 - RNA, 84 nt, Homo sapiens
gacgacgcaaaaccgaaagagggcaagagaagaacagaagaaacaaaaggccaccgaagaggcccgcggaggaaggaaacaaag

SEQ ID NO: 88012 - RNA, 76 nt, Homo sapiens
gccagccacgcgcacgaagcagagagccagggacccagagggaggccagcagcccgggcaaacagccacgaagcga

SEQ ID NO: 88013 - RNA, 75 nt, Homo sapiens
ggggagcaccaccacggcaaggagcagccacaccgaacaccaaaagacccacacgaccgcggacacagacaggca

SEQ ID NO: 88014 - RNA, 71 nt, Homo sapiens
gaagaccaggcccgagacggaagggcacacgcaaaggccggcccaacgggcccaagaaaaaaacagccgcc

SEQ ID NO: 88015 - RNA, 90 nt, Homo sapiens
caaaaacggcaaagggaacagcccgagcagaacaaaagagcacacagcaagaaggaggccacagcaaacgggaagaggaccccaccagga

SEQ ID NO: 88016 - RNA, 55 nt, Homo sapiens
ccccaacggcccccgcgccgggcgcagcggcgccaacggccgacaagcccgacga

SEQ ID NO: 88017 - RNA, 64 nt, Homo sapiens
gcgcgggacccagcccaggcggcgcggacggggcggcccgaagagccaaccacaggagggaaac

SEQ ID NO: 88018 - RNA, 60 nt, Homo sapiens
caggaaggaaacgaagagcgaaggcagccggaggaagaagagcggaccgcgcccaggcga

SEQ ID NO: 88019 - RNA, 84 nt, Homo sapiens
aggccaccgaggacacccggggagaagccaaggagcgcgcccaagcacagcccacgcaggagacgggaggagcgacaacggagc

SEQ ID NO: 88020 - RNA, 79 nt, Homo sapiens
aaggggcgggccgaggccgggggacccgccggagccccgcgccagcgacagcaagggccaggaaacagaggccagcagg

SEQ ID NO: 88021 - RNA, 84 nt, Homo sapiens
gaggagccaggaggagagcccacagggcaaagagagcagacccgaggagcccgcagcagcagcgcgacggcagaccgaagcccg

SEQ ID NO: 88022 - RNA, 75 nt, Homo sapiens
aaaaacaggagaagaaggccgacacggagggggccagggggaaaaaaacaggggaagagccagaaagcagggcca

SEQ ID NO: 88023 - RNA, 72 nt, Homo sapiens
acgggggagccacgcgcacagacagcagggggcagcggagcagaccaccgcccagcaaaaagcggcggaaag

SEQ ID NO: 88024 - RNA, 84 nt, Homo sapiens
cggaggcggaaggggaaagccggagccggccacacggggcaccgggcccagaggagcagcccggagcgggagccccgggcagcg

SEQ ID NO: 88025 - RNA, 51 nt, Homo sapiens
acgagccccagccaggacaaaggaaccggcgaacccgaacccaaaaaacag

SEQ ID NO: 88026 - RNA, 74 nt, Homo sapiens
aaagggaaccggagaagagagagaaagaccaaggcagccagacagcaagagcggcaagaccacaggaagggcga

SEQ ID NO: 88027 - RNA, 81 nt, Homo sapiens
cagcgcgcccaggaggagcaggacgaggagggaaaggggagagccgacaaaagcaccagcacgccacccaccgaccacgga

SEQ ID NO: 88028 - RNA, 49 nt, Homo sapiens
gccagaaggggagccggaaacaaaagagcagccagccagcaggcaacag

SEQ ID NO: 88029 - RNA, 58 nt, Homo sapiens
agcggcgcgcgcccagaaagcacgaccgagaaaggccaccagaaccacccacgcagca

SEQ ID NO: 88030 - RNA, 61 nt, Homo sapiens
gaagcggggagccacggacgcagggccgcagaggagggagggacgggaagagcacggcaga

SEQ ID NO: 88031 - RNA, 42 nt, Homo sapiens
gccaaagccgggcggacgcggcggaggcagggcgagaccgac

SEQ ID NO: 88032 - RNA, 32 nt, Homo sapiens
cgggaaaggagggcggggcacacccacaaagc

SEQ ID NO: 88033 - RNA, 80 nt, Homo sapiens
caacaccagagccccgaagagacccagcaagcgcgagccgaagagaccccagaaagagcaacagaaggagacagagcacg

SEQ ID NO: 88034 - RNA, 55 nt, Homo sapiens
aaggaccaagaaccagggaggcgaggacaacgggcagcccccacaccaaaggaac

SEQ ID NO: 88035 - RNA, 82 nt, Homo sapiens
ccacgcggcacacgggacgaaccccgccccagcggccgcgacggggaggaggcgcgggccgaggagaggagccgccgcgccc

SEQ ID NO: 88036 - RNA, 55 nt, Homo sapiens
agggccgggcggcccaagggaaaagcagcggccgcaaggaagaagacggcacggg

SEQ ID NO: 88037 - RNA, 58 nt, Homo sapiens
ggagaagaggagcacgcccaggccccagcacccagcccccacaacacccgccagccga

SEQ ID NO: 88038 - RNA, 79 nt, Homo sapiens
gagggccagagggaaggacaggcggacgaaagaaagaaggagcaccaacgcaaagaaaaagaccaagaagaccagggac

SEQ ID NO: 88039 - RNA, 97 nt, Homo sapiens
aaagggcgaaaaaagggaaaggacgggaagggcgacagcgcaaggagacgaaggaacaagcacacagagacggggacggcaacaacaacaagaaacg

SEQ ID NO: 88040 - RNA, 73 nt, Homo sapiens
gcgggaccaaagggcaaccaaaaaccccccccaaaaaagaggagccagccacacggaaagaagaaaagaaaag

SEQ ID NO: 88041 - RNA, 108 nt, Homo sapiens
ccagccgaccgagcccaggagcgccacgcgcggaaggcagcgcccagcagcgcagacaggaagaacaccaaaggggcaaagaggccagagggaaaagaacgaaagccc

SEQ ID NO: 88042 - RNA, 78 nt, Homo sapiens
aaacagaggcgaaggcacaaaggacagagcccaaccaacaacaagagagaacgggccaaggcgccccccggcaccgcc

SEQ ID NO: 88043 - RNA, 77 nt, Homo sapiens
aaaacaccagcagcgcgcaggacccagagaagaagggcgaacgaggaaggaagcgagccgagaccaggaagacaacc

SEQ ID NO: 88044 - RNA, 75 nt, Homo sapiens
gaaaaacccagagcccggaacaaacgggcccaagacaaacaaggggagcccaaggccgaaggcagcaagggcgga

SEQ ID NO: 88045 - RNA, 73 nt, Homo sapiens
gaaccacccaggacaggacaacagaccagaccacaaagagaccaaagacgccggcagcgcaggaggaccacga

SEQ ID NO: 88046 - RNA, 53 nt, Homo sapiens
gaggcccccgccgagcacgggagcggcagcccacaagcaggaagaccagcccc

SEQ ID NO: 88047 - RNA, 81 nt, Homo sapiens
ggagaggaagagcgaggaggaacgcgcaaggcaaagcaccgccccccagggcagggacgaggccggaaggggccagacgcg

SEQ ID NO: 88048 - RNA, 74 nt, Homo sapiens
gaagaccgaggcagaaacacagaaacaacgcgaaaacacagggaaccaagaccaggacaaagaagacccggaga

SEQ ID NO: 88049 - RNA, 74 nt, Homo sapiens
gcgccacacggccgcaccgcgcgagcacgggcggagcgaacgacaccgaagcggcaccagccggaaccaccggc

SEQ ID NO: 88050 - RNA, 42 nt, Homo sapiens
gccccgacggccacccggcgggcacaaaaaaacaggaaaacg

SEQ ID NO: 88051 - RNA, 81 nt, Homo sapiens
cagcagccaaaacccggggaggcaaagccagcgcaacccggggagagcccaagaggaagcccagacccacgccccgcgcag

SEQ ID NO: 88052 - RNA, 54 nt, Homo sapiens
gcaaaacaacagagacaaggaaagcccgcgcccacccgggcagaaaacgcagaa

SEQ ID NO: 88053 - RNA, 77 nt, Homo sapiens
cagcccaaagaccgcagggaagccggcagcaaaagggaccaagaaaccgacagaaagggaaacccagagaaggcgcc

SEQ ID NO: 88054 - RNA, 75 nt, Homo sapiens
aagagaacccagcgcggcaagggacacagagaccaacacggggccagcaaacaaagccaggagaaagcccgaacg

SEQ ID NO: 88055 - RNA, 40 nt, Homo sapiens
cgagagccagcaaagacagaggcccccgcacgcggggccg

SEQ ID NO: 88056 - RNA, 76 nt, Homo sapiens
ggagaccacccaaaccccccaagaagcacgggccggaccgaggaaagcgaccgcaccagacaccaccccacagccc

SEQ ID NO: 88057 - RNA, 71 nt, Homo sapiens
gcggggggccagcggaagaaccccccgggagccagaccggcaccgaagaccaggggaaagaaaaagagccc

SEQ ID NO: 88058 - RNA, 57 nt, Homo sapiens
ggggcaagcaaagaaccaaaaagcaccacacccaaaggaaacagaagacagccgaac

SEQ ID NO: 88059 - RNA, 78 nt, Homo sapiens
gagcagagccccccccaccagaggacgggaggagcagcaacaggagggcacggagcggggagccccgcgcacacagga

SEQ ID NO: 88060 - RNA, 72 nt, Homo sapiens
ggaccaaggaagaacccgaagcaccggagcaggccgggcccgccagggcacgcgcccgccacgggaagcccg

SEQ ID NO: 88061 - RNA, 80 nt, Homo sapiens
cagccaacccaggggaccacgcgaccaaggacggagagcggaagaccggcccagccaagaacccaaagcaaggcgagaca

SEQ ID NO: 88062 - RNA, 84 nt, Homo sapiens
ggagaggccaagcgggaccgccagaacaaggaaccgcccgcccaggccagggcagccacggcgaagccccaacccagcggagga

SEQ ID NO: 88063 - RNA, 73 nt, Homo sapiens
caagccgagccgccacccggcaccgccagagcggaacgaccccagagcgagcccgcagcagcccagaaacaaa

SEQ ID NO: 88064 - RNA, 79 nt, Homo sapiens
ccacccaaaaagcagacaacgcaccaaagacaaaggacacagcacccaaagcaccaccccaggagcaggagccggggca

SEQ ID NO: 88065 - RNA, 67 nt, Homo sapiens
agagcgcgaggaggaagacgaacgaacagccagaagaaaagggcagggcaaaaaaggggacgggaaa

SEQ ID NO: 88066 - RNA, 76 nt, Homo sapiens
ggacaccagccaagcagcggaacgacagagccgaaggacccgcccaaggagaggaagcagaagggagagcgaagac

SEQ ID NO: 88067 - RNA, 58 nt, Homo sapiens
ccgacgcggaccccagaccaagggaagaacagacacagcaccgacacgcgcaaaagca

SEQ ID NO: 88068 - RNA, 79 nt, Homo sapiens
cgcggcaccgcaggaaacaagcccacccagaaaaaggcccgggacccaggaaccagcgaaggcagccggaggaagaaga

SEQ ID NO: 88069 - RNA, 75 nt, Homo sapiens
gaaggaccaagaaccaggcagagacaagacgcagagacacaccggaaccacccacggggccgcaccaccccaggg

SEQ ID NO: 88070 - RNA, 109 nt, Homo sapiens
cagcgccacccccgcaccgagagaccacgccagccggcaagacggcacaccggaaagcagccgaagccacggagaagccgccgcagcggccggagacaaggaaaagaca

SEQ ID NO: 88071 - RNA, 62 nt, Homo sapiens
gaaaaaacccaaggcgcaaagcacgcaccccgcgccgccgccccccaccaaggaagcccaag

SEQ ID NO: 88072 - RNA, 74 nt, Homo sapiens
gccgccgcccgcccgccaaacgcagaaaggggacccaagggagagagggaacggcgaaagggcagcccggaagg

SEQ ID NO: 88073 - RNA, 78 nt, Homo sapiens
cacaagcggagcccaacgaaaccgaacagggccgccccccgggcgaggcagagacgccaggggcaaagcgcgggaagc

SEQ ID NO: 88074 - RNA, 60 nt, Homo sapiens
cccgccgaccacacacaacccaagaagaaccacaaggaccgggaaccccggacaaaacgc

SEQ ID NO: 88075 - RNA, 72 nt, Homo sapiens
ccgcggcagggaccgggggcgccagggaagcgggaggcaggcagccaggcgggagcgaccccggcaggaagg

SEQ ID NO: 88076 - RNA, 94 nt, Homo sapiens
ccgcgcccagggggaagaggccggcgacgggggaccgcggggaaacgaggcagagcgggcgacgcacgaggcacacaggaaggaggggagcagg

SEQ ID NO: 88077 - RNA, 72 nt, Homo sapiens
ccacccacaggccgcaaaggggcgggacagcggggagccggcccaccggcacaccaaacgccggaagacagc

SEQ ID NO: 88078 - RNA, 63 nt, Homo sapiens
cccggagcaagcagcgacgccagcggcggagaaccgacgaaagacaaccgcagaaccacacaa

SEQ ID NO: 88079 - RNA, 68 nt, Homo sapiens
gcagcagagcaggcagggcagaagaaaagcccgggagaggcaaaccaccccggggcgggaacccaggg

SEQ ID NO: 88080 - RNA, 46 nt, Homo sapiens
gccccggacgccgcgcggaaaagaacaaaaccagccaagcagagga

SEQ ID NO: 88081 - RNA, 80 nt, Homo sapiens
cgcccgcccccgccagcacgcgacaccaccggggcaagaagagaggcggaggcgaccccaggaacacgggcagaagacac

SEQ ID NO: 88082 - RNA, 69 nt, Homo sapiens
gaagagccgaaccgagaaaacagcgccagccccagcagccaggagccgaagcggcaccggaggggagcg

SEQ ID NO: 88083 - RNA, 98 nt, Homo sapiens
cgcggcacccggccgcgggcggccgccgcgccgcccaggcccggaccagaaacgaaggaggcccaaccacaaaaggagccgacggaacccagacggag

SEQ ID NO: 88084 - RNA, 74 nt, Homo sapiens
cgcaggggacaggggcggcgaccggcggcgccgaggagggccgagaacaacgagcgacccccagggaagggaag

SEQ ID NO: 88085 - RNA, 54 nt, Homo sapiens
gcgagcgaggcgcccagacaccccccccgcccagcccagagaggaccaggaaaa

SEQ ID NO: 88086 - RNA, 69 nt, Homo sapiens
gaggcgcggagccccagaaggacaggagggcgaaaggaaccagagcagacaagacgcacgcgccgcaac

SEQ ID NO: 88087 - RNA, 73 nt, Homo sapiens
caggaaaggaacagaaaaggcagagaggaacgacaccagacagaagcagagagaggaacacaacgagacagag

SEQ ID NO: 88088 - RNA, 86 nt, Homo sapiens
gaggaagacccggaaacaggggccacggagccacggccacggccgcaagagcaagacagccaaaagggagcaaacagagcgggcac

SEQ ID NO: 88089 - RNA, 87 nt, Homo sapiens
aagacagcggagaggagagcgggcggaggacgaggcgccacggccggaacgcacagcggaaggccgccacccgggccaggagccgcc

SEQ ID NO: 88090 - RNA, 87 nt, Homo sapiens
gccagccgggcaggccccgagaggaacccagccgacacgacgccgccggcaggcccgcgcaccagggccgagaacacggggcgggcc

SEQ ID NO: 88091 - RNA, 75 nt, Homo sapiens
gccgccaagccgccccgaccaaagagccggggggggcacagagccccggaagacagcccccagcgaccagaccca

SEQ ID NO: 88092 - RNA, 86 nt, Homo sapiens
gagccgacaccagcgaccaaggcgagggcgaggaagcagccaaaagccggcgcggaagaggccggcggcgggacggccccacggga

SEQ ID NO: 88093 - RNA, 73 nt, Homo sapiens
aagcagcagagaagaaaaacagaaccacacaaacgcgcaagggccacacggggagcgcgcaagaacggacagg

SEQ ID NO: 88094 - RNA, 62 nt, Homo sapiens
acaacccgacccgacgaggccaaaagaacacagccgaccccgaaacaccaagcgaaagaggc

SEQ ID NO: 88095 - RNA, 72 nt, Homo sapiens
gaaggccgggcgccaccccaaaccaggaaagacaggagaccagcagcagacacccaccacggagacaaggaa

SEQ ID NO: 88096 - RNA, 44 nt, Homo sapiens
gccgcaagaagggccgaccgcggagaaggcaaccaaaggcagga

SEQ ID NO: 88097 - RNA, 79 nt, Homo sapiens
accccaccgccggcgcgggaaacgggcgaagcgacgagccgcgaggagagcagcccacaagagcacgggaaggaaggga

SEQ ID NO: 88098 - RNA, 70 nt, Homo sapiens
gggccgcaccccagggaccaggaccgaggagagccccgccaggaagagacccagacgaagagcgcacaga

SEQ ID NO: 88099 - RNA, 78 nt, Homo sapiens
gccaaccacccgcccagcccgggcacgccccgccgacagagaaggagacgccgagagcagaaacccggacgacggaga

SEQ ID NO: 88100 - RNA, 78 nt, Homo sapiens
gaccgggacgccacagccagggccacgacgccccgggcgcaccagacgccgccgcggggagcgagccggcgggcggcg

SEQ ID NO: 88101 - RNA, 85 nt, Homo sapiens
gccgccgccgccgcgcgcgggagcccagggagcgccgcgcgaccaggaggcggcggcgccgccggcggcccagaaggggaagacc

SEQ ID NO: 88102 - RNA, 60 nt, Homo sapiens
ggggaagggccaggccgggcagccgccgacgagcagaggcggagaagaacccaaccaaaa

SEQ ID NO: 88103 - RNA, 77 nt, Homo sapiens
ccaaggagaacccagcccgacggggaacagaaagaacagccaaaagagaaagaccgggcgagccacagaggcgacca

SEQ ID NO: 88104 - RNA, 76 nt, Homo sapiens
caaagaccaggagagggcggccaagcccggaaagagcacaggagaaaaaggcagccccggagacgaaaagacaaag

SEQ ID NO: 88105 - RNA, 67 nt, Homo sapiens
acgcaaggaacaaaaggaaacccaccaagggcgaagagagaacacgcacggaaggaaggagaccacg

SEQ ID NO: 88106 - RNA, 76 nt, Homo sapiens
acgcagccacaagcgaggagcagacgagggccaggccggggcgaccaacgaaaacacggaacggagaaggggaaaa

SEQ ID NO: 88107 - RNA, 95 nt, Homo sapiens
caagacccacagaaacagagaagggacacagacgggcaccaagccaacagccagggagacggcgaccagagaacggagaaggaaaaacagaaaag

SEQ ID NO: 88108 - RNA, 61 nt, Homo sapiens
gggcaagcgcagcagcagccggcgcacgcgaggagacccggagaaaccgcagcaccagaac

SEQ ID NO: 88109 - RNA, 68 nt, Homo sapiens
ccaacagagaaaaaacacaaccaaagggcgaacgaccccggccccccaccacccaacccccccaacca

SEQ ID NO: 88110 - RNA, 82 nt, Homo sapiens
ggaccgggcagcaggacacggaaagcgggccggcgcaagacaggaagaaggagaaagggccaaccccgaagaagcaaacaga

SEQ ID NO: 88111 - RNA, 70 nt, Homo sapiens
accaaggcacaggaccccgagggggaaaagacagggcgcaggaagaggaagcacccgcgagaaagaaggg

SEQ ID NO: 88112 - RNA, 77 nt, Homo sapiens
ggcccacaggaaagaccacaggaaggaccgagaaggcagcgccccagcaaaagaggcaagaaggccagccaaaggaa

SEQ ID NO: 88113 - RNA, 80 nt, Homo sapiens
acgcaccggaaaggccaccaggccccccccccggaggcagccggccccgggcccaggccagcggaccaagccagaacccg

SEQ ID NO: 88114 - RNA, 74 nt, Homo sapiens
aagaaacccaggacgagaacagcaacagagccgggcagacccgaaaagcggacgacaagggaacagcgaagaac

SEQ ID NO: 88115 - RNA, 58 nt, Homo sapiens
caggagcacagaagagcgaggagagagagacagagagggacacgaggaccaagcaaga

SEQ ID NO: 88116 - RNA, 81 nt, Homo sapiens
ggaggacgagcaaaagagcaccgaaccggagaccgaggaggcgccacagagcccaaacccgcgcgacggcgcagaagacag

SEQ ID NO: 88117 - RNA, 75 nt, Homo sapiens
gcgggccacccaagaggagccccggggaacccgcagcacaccagggggcaggcccgccgcggcgagccgcacagg

SEQ ID NO: 88118 - RNA, 73 nt, Homo sapiens
aaagcgcacgggaccccacaagaacaccgggaaccgaacacagggagggccaagaacccccgaagagggaaag

SEQ ID NO: 88119 - RNA, 91 nt, Homo sapiens
gccggaccccgcggcgcccccggcccggagcaacgagcgcagcgccgaacagaaaggccccggagcagcgcgacccccaggaaacacgagg

SEQ ID NO: 88120 - RNA, 79 nt, Homo sapiens
caaggaccaccccgccgcacccagaagacgcgcgcaacccggaggagcagaaagagcccccacagaacgccagagagcg

SEQ ID NO: 88121 - RNA, 78 nt, Homo sapiens
gaagaaagaacgaaggcaacgcaagggaacggagacaagaaaacgcaggaaacggaacgccaagcgaagaagaacgaa

SEQ ID NO: 88122 - RNA, 77 nt, Homo sapiens
aagcccacaaaccggaaaaaaaaggagccggcacaggacccaaagaggcggaggggccagcaccggggcccggcgca

SEQ ID NO: 88123 - RNA, 40 nt, Homo sapiens
caccaccagagccagcgcgcgaaagaccacacagggaaac

SEQ ID NO: 88124 - RNA, 74 nt, Homo sapiens
gccccgagagcgggaacagccccaggcacgaaaggcaacaaaaaaaaacccgaaccggacacgcaaaccaggga

SEQ ID NO: 88125 - RNA, 84 nt, Homo sapiens
cgggccaggccgccgccgagccgagccgaacacccaacaagaaggcaacgacaaacagccaagcaagccccagggccccgaaac

SEQ ID NO: 88126 - RNA, 73 nt, Homo sapiens
aggcacacacaccgaccccaccagggagcaaaaaagcaggggaagaaaagagaccagaagcccaggaaaagcg

SEQ ID NO: 88127 - RNA, 51 nt, Homo sapiens
aaaagcgccaaagcgacaggagcgaagcaaggaagaggaaccccccaagga

SEQ ID NO: 88128 - RNA, 70 nt, Homo sapiens
cagcgccggaaaccaacaagaagacgggaagccaagcaggacaaccacaaaagcagcaaacagaagccag

SEQ ID NO: 88129 - RNA, 83 nt, Homo sapiens
accagggcccacgcgcgcgccaagcccagggccccgagggcgaagacaggacggcccaggcagacacggaggaggaggaagag

SEQ ID NO: 88130 - RNA, 81 nt, Homo sapiens
gcgcagaaccagaccgggagcacgcacgccacgaaggggagcagaccccgcccagggaacgccacaccgcccaccaagaag

SEQ ID NO: 88131 - RNA, 80 nt, Homo sapiens
ccaaggagaccccccgacaacagaaggccagccccgagagcgcagacaggggggccaagccagagccagaccgcagcacc

SEQ ID NO: 88132 - RNA, 56 nt, Homo sapiens
gggacgcgggcagcagcaggccggcacgaaccaaggcgacggggcggggacacggc

SEQ ID NO: 88133 - RNA, 82 nt, Homo sapiens
cgaagcggggcggcgcggcccagcgcagcccgcaaccgccaggcccacccaccagcgagcgccgcgaggcggcgcgaagccc

SEQ ID NO: 88134 - RNA, 60 nt, Homo sapiens
ggccacgccaggccggccaagcaaacggagaccgggacagaccaaaagcgccgcacagcc

SEQ ID NO: 88135 - RNA, 76 nt, Homo sapiens
cagcagcccacccaccaagcggggaaccacgcccgcaccacggggacccagcagagacaacgaagagaggaaagaa

SEQ ID NO: 88136 - RNA, 84 nt, Homo sapiens
ggggggcgggcgaccgcaggcagcaccggaggcccaggcccggcagcccaacccagcaggacaaggcgcggggaggcccagccc

SEQ ID NO: 88137 - RNA, 57 nt, Homo sapiens
aagcagcaaaccggaccaccccgaagaaagcacagaggccaagccaaaggcgcggac

SEQ ID NO: 88138 - RNA, 65 nt, Homo sapiens
gccgcccccggaaagcgaaggccaccagagccagggcggcgacggcggcgcgaggaccgaccggg

SEQ ID NO: 88139 - RNA, 67 nt, Homo sapiens
gaggaaaccagcccgcacagggggaaccgaaagcgaagaacgaaggcccgaccacggaagaggaagc

SEQ ID NO: 88140 - RNA, 74 nt, Homo sapiens
ccaagcaggagaaccgaccgcaaacgccaggggcagagcggccccaaaaaaggacagagaaggcggaacaaccc

SEQ ID NO: 88141 - RNA, 67 nt, Homo sapiens
ggaaggaaaggcgcaacaacacaaaaaaagcagcaaggccacaccgaaagggcaggaaaagaaaacc

SEQ ID NO: 88142 - RNA, 51 nt, Homo sapiens
ggccccacgaggcaggagcgcggggccaggaaacaacccagcgcagccaaa

SEQ ID NO: 88143 - RNA, 74 nt, Homo sapiens
gcagcagaaacgcggaggcgcggagcaacagcgagcaacaggcaacgaaaacagacaaaacaacggaaaagcag

SEQ ID NO: 88144 - RNA, 56 nt, Homo sapiens
cacaagaccaaaggaacgggcacaaccacggggcaggcaaggaagagaaaaggaac

SEQ ID NO: 88145 - RNA, 75 nt, Homo sapiens
cgcgcgcgcacaaggcggccgaagagggcgcgcgcagcgaaccaccaggggcaccaccacgaggcgaggggccaa

SEQ ID NO: 88146 - RNA, 74 nt, Homo sapiens
gcgggcaccgccccccgccaaggcgacccccaccgagacgaagcgggcggcgaaggagaagaaagaagaaagag

SEQ ID NO: 88147 - RNA, 38 nt, Homo sapiens
gggaggggaccgccgcgaagcggaaccacaaaaccaaa

SEQ ID NO: 88148 - RNA, 85 nt, Homo sapiens
gaaaaacacgacagccagacaggagagagaaggagagaagaggcagaggaggacgaggaagacaaagcggaaaaggggaagaggg

SEQ ID NO: 88149 - RNA, 74 nt, Homo sapiens
acaggacacagaacagaagcgaagaagggacgaaaggcacaagcgaggaccccagggggccgaaaagccaccgc

SEQ ID NO: 88150 - RNA, 73 nt, Homo sapiens
aacagccgggagagaagaggagagaggggagaacagccagcgaacagccggagggccgccaagggaaagaaga

SEQ ID NO: 88151 - RNA, 53 nt, Homo sapiens
gacgccgcacccccgcgacacagagggcaggggagcaaacacacccagaccgg

SEQ ID NO: 88152 - RNA, 83 nt, Homo sapiens
cgagcgcggcgcgccgagaaagaggacagcagcggacggccggaccaagaggcgccgccccccagcaaacgagaaaaacccag

SEQ ID NO: 88153 - RNA, 71 nt, Homo sapiens
cgacaaagcagagaaggccaaagaagcaaacgacaaaagaacagaagacagagagaagagagaccccaaaa

SEQ ID NO: 88154 - RNA, 66 nt, Homo sapiens
agcaaaagagaagaaacgcacagccccgaccagaccagacggggaaacggaccagccaccaacaca

SEQ ID NO: 88155 - RNA, 72 nt, Homo sapiens
agacccaacgaaaggggcgacaccagggccgcagagaggcccacgcggaccggcagcgccaccggaccacca

SEQ ID NO: 88156 - RNA, 56 nt, Homo sapiens
ccgccgccgagcgcgcggaggcggaggcgggcgcaacaggagacgaacccagacca

SEQ ID NO: 88157 - RNA, 74 nt, Homo sapiens
aggaaaaaaaagaaccgaaggcggacgggaacaacagagcccaaaggcgcaggggaaagcgcagaacgacagcc

SEQ ID NO: 88158 - RNA, 42 nt, Homo sapiens
gccgcaaaggccaaaggaaagggggagaggcaccagcaacag

SEQ ID NO: 88159 - RNA, 81 nt, Homo sapiens
cgggcgccagccaggaggaccggcaggaccgacgagcccgggagaaacaaaggaggagaggcccaagaccagcgaaccccc

SEQ ID NO: 88160 - RNA, 73 nt, Homo sapiens
ggacggccgaggaaggaacggcccccccccagcccgccccaaaagggaagggagcccaaaacaggagcgcagc

SEQ ID NO: 88161 - RNA, 78 nt, Homo sapiens
ggggcgacccacacagcagcacagaggaaggagaaaacccccgaaacagagaaaccagccagagggaccagaccaaag

SEQ ID NO: 88162 - RNA, 56 nt, Homo sapiens
aaaagaagccggagaggacacccaaaacaggaggccggccggcaacagagaaaggc

SEQ ID NO: 88163 - RNA, 64 nt, Homo sapiens
cagcacaagacgccgccccagcggacacaaaccaggcacgagaagagaagcccagagcaaaaca

SEQ ID NO: 88164 - RNA, 75 nt, Homo sapiens
aaagcagcaacaaaaaggacgcagcagaccgacaccagaaaggagacagagaaccacgcacagaaaggagaaaaa

SEQ ID NO: 88165 - RNA, 75 nt, Homo sapiens
ggccggaggaaccacaccggaagcaagaacggaagcacgggcggaggaaagcacaagcagagcccccgcagaggg

SEQ ID NO: 88166 - RNA, 86 nt, Homo sapiens
cgcacccccgcccgagacccgaccaacaggagcccaggcagcaacgagcagacaaggggaaggggggacgcagggcggagacccca

SEQ ID NO: 88167 - RNA, 54 nt, Homo sapiens
gcaaaaaaaaccgccccgccagcagaaggagacagaggcacaaaaggagaaagc

SEQ ID NO: 88168 - RNA, 69 nt, Homo sapiens
caaccgcgcagaaagagcgaacaccggcagcgagacaggagccacaggcagcccgccaaaaaggaaaag

SEQ ID NO: 88169 - RNA, 60 nt, Homo sapiens
accaaccaggagccaacaggcagaggagaaccaaggagagaaaccccaagcaggcacgcc

SEQ ID NO: 88170 - RNA, 66 nt, Homo sapiens
gaaaggaggaggcacagaagacgaaccagagggaccagcacaccccacggagaaaaggaacggccg

SEQ ID NO: 88171 - RNA, 74 nt, Homo sapiens
ggggaccgcacacccaagaaagggagcggcccaacggcacccagaaaacgcagaagcccagaggccgcagggac

SEQ ID NO: 88172 - RNA, 69 nt, Homo sapiens
aacgaggcgagaacgcgcagaccggggagggaaagaaagaaaaccaggagaaaaggaacgagaccccgg

SEQ ID NO: 88173 - RNA, 71 nt, Homo sapiens
gcggaccagaccccaggcgagccaaaccccagccaccggaagaagaagagaacaccgagacacaggggcga

SEQ ID NO: 88174 - RNA, 81 nt, Homo sapiens
ggcaagagcggcaggggcgcaggagaaagagaaacggggggagggaagcagccaagcgggcagaagaggaagccccagaca

SEQ ID NO: 88175 - RNA, 88 nt, Homo sapiens
gcgagcccgaaacgaggcgggagcagcacaggcagaggacccagccccaaccccgcagcagccaacccagagccaggagacaagagaa

SEQ ID NO: 88176 - RNA, 82 nt, Homo sapiens
aaaacgaaggccaagccggccgagggcaggggaagacggaagaaggagacgcgcccgccggagacaaacagagcaacgaaca

SEQ ID NO: 88177 - RNA, 68 nt, Homo sapiens
aggccgccaggccgcagacgcgaaggaacggcaaagcaagggagaacagagcaaccaccaaagagaga

SEQ ID NO: 88178 - RNA, 60 nt, Homo sapiens
cgagaagccacaccaaggaccccggcgcagccacgcaggacgacagagggggccaggacc

SEQ ID NO: 88179 - RNA, 83 nt, Homo sapiens
gacacggcggagcaggagacgccaccacagccgcgcagagggaggacgccagaagcccggggcggcgacggagcacgacccaa

SEQ ID NO: 88180 - RNA, 71 nt, Homo sapiens
gaaaagagacgcaaaccacgaggacagagaagagagaagccaccagcaaaagcgccacgccggggcagccg

SEQ ID NO: 88181 - RNA, 38 nt, Homo sapiens
cgacaggacgggaacggggagaagccaaaaggacaggc

SEQ ID NO: 88182 - RNA, 64 nt, Homo sapiens
gaggacgcggcgggcgagcgagaggccgaggagccccccaagagaacccagggggagccacgcc

SEQ ID NO: 88183 - RNA, 64 nt, Homo sapiens
aagacaagaggaagaagcgcggacccaggagaaagaaggccagaaaaaggaaaacccgagaagc

SEQ ID NO: 88184 - RNA, 67 nt, Homo sapiens
gcgggcccggggaggcaccgacgaggagaaccggcggggcgcggaggaccgacggaaaagaacagca

SEQ ID NO: 88185 - RNA, 77 nt, Homo sapiens
agccagaagaaggaccggaagcacacaacaggaaaacaaaagaggagaaaggaaacgaaaagcaccccaaagaacga

SEQ ID NO: 88186 - RNA, 39 nt, Homo sapiens
cggcggagcgcggggggaacagagacgccaagcccgggc

SEQ ID NO: 88187 - RNA, 79 nt, Homo sapiens
ccacaggagaggcacaggaccagaccaagacacacaaccaaacaggagaaaaaggcccaggaggcaagagcgagaagag

SEQ ID NO: 88188 - RNA, 53 nt, Homo sapiens
gaggacgaggagagagaagaccaaccagccaggccacacaagccccagccaaa

SEQ ID NO: 88189 - RNA, 78 nt, Homo sapiens
gccagcaagcaaaaacagcaccacaccaggagacaaagccacaaaaacaccagaaaaaccaagcagaaaaggagcggc

SEQ ID NO: 88190 - RNA, 52 nt, Homo sapiens
gggggcagccggggacagccgcgcccccccagagggccgcggcagaaaccgc

SEQ ID NO: 88191 - RNA, 69 nt, Homo sapiens
ccccgaaagcaggaagcccaacaggcgaagggacgccaacagcccagagagaaacagaaaaggaacaac

SEQ ID NO: 88192 - RNA, 64 nt, Homo sapiens
gccccccgcaacaacccacaaggcaccacaacggaggagaaagccaggaagcaccgccgcgagc

SEQ ID NO: 88193 - RNA, 90 nt, Homo sapiens
ccccccggggcgcggcgaccccggcggcgggaggcccggccgggcagcaagcccacagagcgaacccgaaagaaaaagagaaggcagaaa

SEQ ID NO: 88194 - RNA, 59 nt, Homo sapiens
gaagcgaggcgaaccgaggaccacgcgccaggaccagggaagacacgggagcgccgccg

SEQ ID NO: 88195 - RNA, 75 nt, Homo sapiens
aaaaccagaagcacaaggacagagcacccaccacaggagcgagacaacgccacaggagaacacagagacgcgcgc

SEQ ID NO: 88196 - RNA, 81 nt, Homo sapiens
cgaccgcagcccgcacgacccagagaagccagaagcccccagggcagggccacccccacccagagcccgcagaccccacaa

SEQ ID NO: 88197 - RNA, 38 nt, Homo sapiens
aaaggaacaggccccgggagggcaacacccagacagcc

SEQ ID NO: 88198 - RNA, 88 nt, Homo sapiens
aaagcgcccaggggaaccacaaagaagacaaagcacgcggaaggcaacagcccccaggggagcaaccagggagcaaaacacaccggac

SEQ ID NO: 88199 - RNA, 78 nt, Homo sapiens
gaccgaagccggaaacgaggcaccagggaagagccagcaagggcagcggagcagaaaaggaaacgaggcgcagaaaag

SEQ ID NO: 88200 - RNA, 78 nt, Homo sapiens
ggcggcggccgcgcgggcggcgggaccggggaagacgccggccgcagggggggccgaagaagccagggggaggaaagc

SEQ ID NO: 88201 - RNA, 55 nt, Homo sapiens
ccacaaaaaaggaagcgaaacaaggcaccagagggaccccagagaaaagcggaag

SEQ ID NO: 88202 - RNA, 71 nt, Homo sapiens
gaggaagaaaagaaaggagcccacgaaaagcgggcggaggagacggagagaggggaccgcagggcccaggc

SEQ ID NO: 88203 - RNA, 79 nt, Homo sapiens
gcgcccccccaacagggggaaggaaagaacaacccccaacccaaacccggggaggacgacaggaaagaagaaacgcccg

SEQ ID NO: 88204 - RNA, 82 nt, Homo sapiens
gacacaaaagcggacgaggaaacgaaggaggcccaaccacaaaaggagccgacggaacccagacggagaacaaaaggaagaa

SEQ ID NO: 88205 - RNA, 31 nt, Homo sapiens
caaacccacccacgcggagacggcccaccga

SEQ ID NO: 88206 - RNA, 69 nt, Homo sapiens
aacaaccgagagccgagagaggacgccaccagcacagagccagaccgagcagccacaggagacccaacc

SEQ ID NO: 88207 - RNA, 104 nt, Homo sapiens
aggaaggcgcggagaccacgacgggggggaggcggcagcgcaaccacgagacggccccaagccaggagaggcggaggcagagcaggaagacgggggcaacgcgg

SEQ ID NO: 88208 - RNA, 67 nt, Homo sapiens
gagagcccgcgaagggcagacacaaggaacagccagccaggagaaaaacgaacccaacagaccaccc

SEQ ID NO: 88209 - RNA, 87 nt, Homo sapiens
gaccaagcgaggcggacccgaagcggaccccgaggaagcccgccgggacccaccaagggcccccacgacgcaggcggacgagaccac

SEQ ID NO: 88210 - RNA, 75 nt, Homo sapiens
cgcgagggaaaagagcaacgacacgcgcaagaaggaccggaacaacgaacagcgaaaaggaggcccacaagcggc

SEQ ID NO: 88211 - RNA, 72 nt, Homo sapiens
ggggacgcaccaacgagaggccagcaaaggagggaaaggcaccaaagagaagaaaggcaaaggggagcgcgg

SEQ ID NO: 88212 - RNA, 67 nt, Homo sapiens
gcaacaggggcaaacgcccaggaagagaacaggccagggggggcccgggcaccggcgccggaagaaa

SEQ ID NO: 88213 - RNA, 78 nt, Homo sapiens
ccggccgcaggagggagaccacagcaagacaccgggaccccggaagccaaaaaggcagggccgccaagaccggagaca

SEQ ID NO: 88214 - RNA, 79 nt, Homo sapiens
ccccgcccgcaaccaccgccgcagagcgaacgcggcgcggaagggccacgaggagaaccaacagaggcaaaagcagaga

SEQ ID NO: 88215 - RNA, 74 nt, Homo sapiens
ccggagcggagggcccgggagggcaccccacgcaaccaaaggacacagaaaacaaaaacccacagcaaaggaca

SEQ ID NO: 88216 - RNA, 106 nt, Homo sapiens
cggagcggaggacaggagaccgaacaggaccaagaaaggcccagggaccaaagcccggacaaggcccgagcaccaggaccgcagaaggccccaggaggacaggcga

SEQ ID NO: 88217 - RNA, 39 nt, Homo sapiens
ccggcccaccaaaccccgacaagcagccagaaaaggaac

SEQ ID NO: 88218 - RNA, 76 nt, Homo sapiens
aaccagcgcccaggcaagcagcgcgcaggagcccaggagagcggggcccagaccccccgcggacgagcgacccacc

SEQ ID NO: 88219 - RNA, 45 nt, Homo sapiens
ggaagagccacagaggaaaggccagagaggcacacacaggagacg

SEQ ID NO: 88220 - RNA, 69 nt, Homo sapiens
aaagccggagggacggcgaaacgcgcccacccaggcgcaccgagagccagccgagcccgaagccacaca

SEQ ID NO: 88221 - RNA, 79 nt, Homo sapiens
cagcccagccggcacgccccccggcccagggaccccgcgcagaggcacccgggaacagaaaggagagggagcacagcca

SEQ ID NO: 88222 - RNA, 77 nt, Homo sapiens
cgggacaaggcagacgggagcgcaaggcgccccaaggccagacaaaacaacaaagaaccaggaggcagcaaggacga

SEQ ID NO: 88223 - RNA, 78 nt, Homo sapiens
ccaaaggccaggagagaaagagaaagagagggaaagggccccaagagccgggcggaaaacgaaagcgagcggaacggg

SEQ ID NO: 88224 - RNA, 54 nt, Homo sapiens
ccagccccgagcagcgggaacagggccgggcggagaaaggaaggccacaccagg

SEQ ID NO: 88225 - RNA, 61 nt, Homo sapiens
ggaggagcagcagaggggcgagcaggagcgaccgcgccaaacaggcccgagaagcagggga

SEQ ID NO: 88226 - RNA, 74 nt, Homo sapiens
aagacgcacgccaagacagcggagaagcggaggagaccaaggaggccaccaccacagaaggagcggcacggagc

SEQ ID NO: 88227 - RNA, 73 nt, Homo sapiens
cccacccaccagggaagcccgcacgcggaagcgccaggcagagaaggcagggggacagcaacacgggggccgg

SEQ ID NO: 88228 - RNA, 61 nt, Homo sapiens
cacggcgagggcgagagcggccccagggcaacacagagccagagcacagagcaccacgaac

SEQ ID NO: 88229 - RNA, 80 nt, Homo sapiens
caaggacacagaacaagagaaagaagaaagcagcaaaaggcagccggcaaaaaagaggacacggacaggccaggcccacg

SEQ ID NO: 88230 - RNA, 87 nt, Homo sapiens
gcaagaaacacgcgagcgagcggcaaagaggggccggaccacaaggcaagagcaggaacccccgaagcaacagcccccacgccacgg

SEQ ID NO: 88231 - RNA, 66 nt, Homo sapiens
cgccaccaccgcagcgcaaggggcagggaagccgggagggcccaggcaggaacacaagggcgggca

SEQ ID NO: 88232 - RNA, 84 nt, Homo sapiens
aagaggaaccacagggagccgcagggccccggaccagcgggcagcccgccaaaggaagaggagcccgggcggcggggaggcgag

SEQ ID NO: 88233 - RNA, 72 nt, Homo sapiens
aaaggaaggcacccaaggccgaaccaaggacccccagaagaccagcgggagcgacggaagccaggcaagaga

SEQ ID NO: 88234 - RNA, 56 nt, Homo sapiens
gaccacggagcagcgcaggagaaaaacaagagaccagacaaacaccaagaggaaga

SEQ ID NO: 88235 - RNA, 86 nt, Homo sapiens
ggcgcccggggaaagccgggccccgagggcggaccgagaaacggccagaggacccccaggccaccgggaaaggcaccaaacccccc

SEQ ID NO: 88236 - RNA, 81 nt, Homo sapiens
aggaacccaacagagccacgaagggggagagaagcgccagaaaaaggagcccaagccccaccaccagcacacccccccacg

SEQ ID NO: 88237 - RNA, 73 nt, Homo sapiens
gaggagaaagagcaaaaacacagccagcccacaagaaccccaggaccccagcgaacccggggccagacgacag

SEQ ID NO: 88238 - RNA, 77 nt, Homo sapiens
ggcccaaggggcccccgggcaccccggaccgcgcagccaccgcggcccccgcggagcaaacgcagaaacaacaacaa

SEQ ID NO: 88239 - RNA, 72 nt, Homo sapiens
ggaagcccccagcgaacgggacgcaaaaaaacaagaagggaggagaaggaggccaacaccacgacgagggca

SEQ ID NO: 88240 - RNA, 81 nt, Homo sapiens
acggaggacggagcacgccagaccggccggcgcaggagggcggcagccgagcaccgggacggacccgcagaagggggaccg

SEQ ID NO: 88241 - RNA, 60 nt, Homo sapiens
caccccggaagcgggaaagaaggacgagaagggcggcgcgaaaggacaaaggaaagcgaa

SEQ ID NO: 88242 - RNA, 76 nt, Homo sapiens
ccaggagacccggggacagcacgcccaggccccggaaagcaccccaaccaagcagcccagcccagacggacaaaga

SEQ ID NO: 88243 - RNA, 75 nt, Homo sapiens
gggacgccccagcccgaagagaaacgcaccacacccggaaccgcaggggggagaaaaggccaagggcaggagaca

SEQ ID NO: 88244 - RNA, 89 nt, Homo sapiens
cccacagggagaaaccccacccccaagaaccaacccccaaaggcgggacaggaccagaggagcgagagcagcaagaaccacacccagca

SEQ ID NO: 88245 - RNA, 49 nt, Homo sapiens
cgagacacggggcgagaaggcggcgcacaaggagaaggaccaagaacca

SEQ ID NO: 88246 - RNA, 53 nt, Homo sapiens
agagccaaaggagccccacaaaagagcagagaaagggggaggcggacccggca

SEQ ID NO: 88247 - RNA, 75 nt, Homo sapiens
caccgaggccagcggaagacggggcgaggcgcaccagcagcccgaaagaggagccccaggcgccccggccgagcg

SEQ ID NO: 88248 - RNA, 77 nt, Homo sapiens
caggcacacacagaacaaaagcagggcaccaccacgaggcgaggggccaaccaaggaggcgaggggccccccgacaa

SEQ ID NO: 88249 - RNA, 65 nt, Homo sapiens
cacaagaggcgccggcgggaaaacaacagccggcccaaagcccagccaaggacccgaaaaacgag

SEQ ID NO: 88250 - RNA, 56 nt, Homo sapiens
caaaaccaagaggaaaagaggcgggcacaaaccgaagaggacaaggagagaagcag

SEQ ID NO: 88251 - RNA, 80 nt, Homo sapiens
gaggcaagcccagacccaggcgaggagaccccccccacagaaagccgaccagaacagcgcccaggccaggaggaaggcca

SEQ ID NO: 88252 - RNA, 74 nt, Homo sapiens
gccccgggcggaaagaccgaacgccccgccaggcccagcgcggcagagaagagaggcaggaggggcggcaaagg

SEQ ID NO: 88253 - RNA, 76 nt, Homo sapiens
gaaagagcgccgggacagggggaggaaagcaccgaggcacaacaggaccaagagagaagaaccagcaacaacgcac

SEQ ID NO: 88254 - RNA, 56 nt, Homo sapiens
gcgccgcaccaggagcgaagagcgccgacaaggggcgcaggggacaagagccacag

SEQ ID NO: 88255 - RNA, 62 nt, Homo sapiens
ggcccacaggggggggcaaacccgagagaacgggcggcaaagacgcaacaacagcgagcaag

SEQ ID NO: 88256 - RNA, 70 nt, Homo sapiens
agcgcccagagaggcccgcacccaaccagccaaaggaggaaccggaaaaaggaagcaaccgaggggaaca

SEQ ID NO: 88257 - RNA, 81 nt, Homo sapiens
cccggccagcccgccgcaagaccacgaacacaggccgaggcccgagacgcggggaaccgggggaagaacaagaaggcccag

SEQ ID NO: 88258 - RNA, 64 nt, Homo sapiens
gagagggcagagaggcaacgaaccggccacgaagaagaggaggagcaccgcacagcacggagac

SEQ ID NO: 88259 - RNA, 79 nt, Homo sapiens
aagccagaaaggaaaaggagcacaaaaaggcagacgcaaagaagaagccgccaagaacagcaagccaccaaccaccacc

SEQ ID NO: 88260 - RNA, 79 nt, Homo sapiens
cccgcagaagacgccgacgagggcagagggccagacccccaacaaagccaaaggagaaacggacccagcaggggcagcc

SEQ ID NO: 88261 - RNA, 58 nt, Homo sapiens
ccgggggagccggcggcggaccccgccgaccaggccagcacccgcccgaggacagaga

SEQ ID NO: 88262 - RNA, 78 nt, Homo sapiens
gggcaaagcccgcaccacaccaaaaacaaaggggacggaccacagagggggggggaaagacggagcacaggcacggaa

SEQ ID NO: 88263 - RNA, 70 nt, Homo sapiens
acggacaggaaggccacacaacagagccaaaaagacccgacgcgaggaacacggccaaagccccagagga

SEQ ID NO: 88264 - RNA, 67 nt, Homo sapiens
acggcaagaagacagcacgagaacagcagaaacagcgcccacagcgcgaggagcgaaggaaaagaaa

SEQ ID NO: 88265 - RNA, 96 nt, Homo sapiens
ggcgcgcgcggcgcgggacgcgcgcgggcacccacggagccccggggcggggaacgcccgcggacggcagggcgcgacaagaagcgcccgcccgac

SEQ ID NO: 88266 - RNA, 80 nt, Homo sapiens
ggaggagaccacccaaacgcggcacgggaggccggcaagaagccaacggagaaccaaggccaagaccagaaccagcccgg

SEQ ID NO: 88267 - RNA, 76 nt, Homo sapiens
agagaaaaccccgcccgcagcgacacaccaagcggaggggacgccacgcaacgccggccaggccgaggacaacccg

SEQ ID NO: 88268 - RNA, 85 nt, Homo sapiens
ggacgccccagccaagaagaagggcggaaaccacaccccgaaaggaaggggagccggagggcaggaggccgaacgacgcaaacac

SEQ ID NO: 88269 - RNA, 76 nt, Homo sapiens
agagcaagcgcgcgaaaaccggcccagcgagaccggggcagaggggcacacccgaccaggccaaccgaccgcaagc

SEQ ID NO: 88270 - RNA, 71 nt, Homo sapiens
gcggaggcggagcggaggcgcggcgccgggagcgaggcgcccccccaaagagaggcgcgagaggcacagga

SEQ ID NO: 88271 - RNA, 72 nt, Homo sapiens
gacagagcaccagaggaacagcagggcaagaccagccacaggaaagcagagcagcaagaaacgggaacgggg

SEQ ID NO: 88272 - RNA, 88 nt, Homo sapiens
cacgggagaaagaaacaaaaagaagcaggggcccggaccgaagggccgagcgcgggacgcaagaggaggaaggcgggaaccaggaggc

SEQ ID NO: 88273 - RNA, 76 nt, Homo sapiens
gaaaagagcccggaaaaccagaacggagggacgcccggaacaaacccaggaccgcgcacaacagaagggcccagcc

SEQ ID NO: 88274 - RNA, 71 nt, Homo sapiens
caaccacagccaagagcagccaaacgacgccacgaacaaaagagaggaagggcggaaaaggcaaaacagcg

SEQ ID NO: 88275 - RNA, 67 nt, Homo sapiens
cccccccccaggcgggaggggggggggcgcacgcccccgaggacgcagccggaaccaaaaagaagcc

SEQ ID NO: 88276 - RNA, 61 nt, Homo sapiens
ccggcagaagggaagccaaaggaagagggaggaacagcagcggaaacaagcacggacggcg

SEQ ID NO: 88277 - RNA, 80 nt, Homo sapiens
ggcgacgaggcacagcgcgcaagaagggaggcgcacgcgggacagagcacccgaagcgcccagccagcacgccacccccg

SEQ ID NO: 88278 - RNA, 93 nt, Homo sapiens
gagcagcgcgcgcgcgagccacaaggagagcgaagcaaggcccggcgcaaggccagaaaaaggcacaaacccagcacagagaagacggcgaca

SEQ ID NO: 88279 - RNA, 72 nt, Homo sapiens
gagcagagacaaaaccaagccaaacacaagcagaaggagcgaagaagaggagggcaggagaaaggagaaaaa

SEQ ID NO: 88280 - RNA, 71 nt, Homo sapiens
agcaacaacgggggacaccacaaaggcggaaccacgcaaagaacaaacacaaaagccggaaacagaggccc

SEQ ID NO: 88281 - RNA, 56 nt, Homo sapiens
accgggcccccacgggccccaggagaacacacaaccagaccaccgcacccaggcgg

SEQ ID NO: 88282 - RNA, 90 nt, Homo sapiens
gaggaaaagccccagcgcgcgcccggacagacaaggccacgaggagggcacgcggaggagacgaagaggaggccggcagaagaaacacac

SEQ ID NO: 88283 - RNA, 84 nt, Homo sapiens
aacgcgcccaagggcggggacacgggccgcgcgaaaaaggcaccaccgggagagcgggaccggccgggggcgacgccagcaccc

SEQ ID NO: 88284 - RNA, 68 nt, Homo sapiens
agcggcgagaccagaccaggacaaagaggcgggagcaccagacagcgacagacgcaaacacgagcagg

SEQ ID NO: 88285 - RNA, 81 nt, Homo sapiens
gcgcggcccccacaccacacagagagcgaacgggcccagcacaggcagcgcaggcaaaccccccaccccgccccacccagg

SEQ ID NO: 88286 - RNA, 85 nt, Homo sapiens
cggcacgcagcgaagccgcgccccgcacagagagggagccggcacagaaaacaacacgggagcggggacgacagacaggagacca

SEQ ID NO: 88287 - RNA, 81 nt, Homo sapiens
caaacaccggcccaggaggagggcccggggggaggcgaaaggcaacaaggggaaagagagaacagaacaaaacgacgaaaa

SEQ ID NO: 88288 - RNA, 81 nt, Homo sapiens
aacccagccacagcgggagggcaaacacagaggccccagaccagaccagaccccggggaaaggcaacgccaaaagaacggc

SEQ ID NO: 88289 - RNA, 93 nt, Homo sapiens
cagcaagggccagaagaccgggaggaccagggaagcaggaaaagagagagaagacgaagaggagcagaaccagaagggacacacaggacggca

SEQ ID NO: 88290 - RNA, 73 nt, Homo sapiens
gggaagaccacggagcggggagagccgccgcaaacccagaccgcaaacccggaccggcggggggaaaaaagga

SEQ ID NO: 88291 - RNA, 62 nt, Homo sapiens
gggaaggcggaccgagaacgagggcagcgcaacaggagacgaacccagaccagcaaaacgga

SEQ ID NO: 88292 - RNA, 73 nt, Homo sapiens
ccccggcacgacaccgccccaacccacgagaggacagcccaggaaaaggggaagaaggagaccagaaaagcag

SEQ ID NO: 88293 - RNA, 77 nt, Homo sapiens
cggaacggcaccacaaggcacaggagggcagaccaaaagcacaaaaagaacggcccgaagaccccaagccagacaga

SEQ ID NO: 88294 - RNA, 68 nt, Homo sapiens
ggcggccccgcgcagcccccggccgcagcgcaggcagcccagcagaaaagaaacgaagccgggcacgg

SEQ ID NO: 88295 - RNA, 71 nt, Homo sapiens
gaaacgggccccaaggcgaccggacggggggagcagcgcgagcagggacggaaagcagcgaccgagccccc

SEQ ID NO: 88296 - RNA, 55 nt, Homo sapiens
caacagaggaagagaccgagcaaaaggagagccaggacaagcccaagacggacag

SEQ ID NO: 88297 - RNA, 84 nt, Homo sapiens
cgacaccaggcgaaccggccacgcacccccgaagccggcacgcacgggaccgaccccgggcggcgacaaagaggaagcagcagc

SEQ ID NO: 88298 - RNA, 72 nt, Homo sapiens
cagaacgagaaggaaaggaaagacaggcacgccggacaaaacaagccgggacagggccagaagcgagcacca

SEQ ID NO: 88299 - RNA, 64 nt, Homo sapiens
aaggggagaaggcaggcaccacaaaaaggacaggacccaggggagaaaccgcggccacaggaaa

SEQ ID NO: 88300 - RNA, 72 nt, Homo sapiens
cagacaaccggcaaaaacggccaccagagcagccccccggaacagcagcggacccagagaagacggcagccc

SEQ ID NO: 88301 - RNA, 80 nt, Homo sapiens
gcgccgccgccgccgcccggccgaccagggaccgcccgccgcggcgcccggaacagacaccccgaagaaccccaaagaaa

SEQ ID NO: 88302 - RNA, 76 nt, Homo sapiens
agagcgcggaaagaagaaagcccagagaagcaaaaaggaaaaggggcccaacacagaaaggcgggggaaccgaacc

SEQ ID NO: 88303 - RNA, 69 nt, Homo sapiens
gaggggaccccagagcagacgggaagaggagcgaaaaggcagggagaaaacaaagaaaggaaaagaacg

SEQ ID NO: 88304 - RNA, 78 nt, Homo sapiens
gagagcaaagggacgaaaaaggacaggagcgaagcagcaggggacgagaggcaccagaaacggcggacgaaaggacgg

SEQ ID NO: 88305 - RNA, 82 nt, Homo sapiens
ggagaagaagaggcagaacgcaggacacgcaagagcgcggaaacgacaaacagcccccgagagccccagcccgcagcccgag

SEQ ID NO: 88306 - RNA, 55 nt, Homo sapiens
ggacggcacgcgacaccacaggcacaacgggggcaaggcgacagagaccggggcc

SEQ ID NO: 88307 - RNA, 62 nt, Homo sapiens
aagcgccgagcgaacggaagcagaaacaaagcggagaaccaccacaacccgcaacgccacag

SEQ ID NO: 88308 - RNA, 74 nt, Homo sapiens
gccaacgcgcccagaacacgaggaacaggagacagcggagaaagagcccgggaagcacgaagccgagaccagcc

SEQ ID NO: 88309 - RNA, 76 nt, Homo sapiens
ggcaagggagcgggaccaccacacaagcgggacgccccaggaaggagaacacacggcagaggcagaaaagcagaga

SEQ ID NO: 88310 - RNA, 79 nt, Homo sapiens
ccgacccaggcgcgcccgcgccggggcaggagggccggcggagcgccaggccgcaccgaagccaccccgaccaacccgc

SEQ ID NO: 88311 - RNA, 80 nt, Homo sapiens
gcgcccccgcccgcgacgagcgggggcccgaaaacacggggaagagaaagccaaaaagaagccaacaagccgcggagaga

SEQ ID NO: 88312 - RNA, 92 nt, Homo sapiens
cgcgcagggccgcagcgggagcggacggcgagcgcgagcggcgcgagaaagccccggccccaacaggcccgcgcccagagccccgcaggggg

SEQ ID NO: 88313 - RNA, 68 nt, Homo sapiens
cacacacagaccccaaaagagcgcggaagaaaaggcaagacgagaaacaaaccaaggccaaccacggg

SEQ ID NO: 88314 - RNA, 91 nt, Homo sapiens
ggagccaaccagaggcccacaacaccaacagggcaccacaagccgaacagccagccagcaaaagaacagcagcaccagaagcagccagcag

SEQ ID NO: 88315 - RNA, 71 nt, Homo sapiens
cgacccagccggggggcacagccggaccacgggcaccgacaaaaacaagagagcgacagagcacaaaaggc

SEQ ID NO: 88316 - RNA, 75 nt, Homo sapiens
cccggcacggagcagcaaacgcagagacaaaagaaacgggccccgacgggggacaaacaccaggaccagggagag

SEQ ID NO: 88317 - RNA, 75 nt, Homo sapiens
gggagacaggaaacggcccccaccgccgccggggcgaccacgaccgaagagccagagacaagccccacgagacgc

SEQ ID NO: 88318 - RNA, 81 nt, Homo sapiens
agccgcgccccagagagcgcccgagagaacagggggccgcggccaggagacagacccagcacggaccccccccccagccgg

SEQ ID NO: 88319 - RNA, 76 nt, Homo sapiens
caacaccgaagaaagagccaaacgccaaggcggcaccgggccagaacaggcgaaaaaaggggggagaacaagcaaa

SEQ ID NO: 88320 - RNA, 68 nt, Homo sapiens
ccagcccagcgcgcggccccaccgcggaagggccgaggaggagacagaaacgagggacccgcagagac

SEQ ID NO: 88321 - RNA, 81 nt, Homo sapiens
cgcggccccccccccaacccgcccgcggccagcacccgcccgccgccggcgaccaggacccagagagaggcccgcacccag

SEQ ID NO: 88322 - RNA, 84 nt, Homo sapiens
cccgggcagcgaagccgcccccccgggcaaaagcagaccggaaaacccaccggcaagaccacacccgaggggagcccaggacac

SEQ ID NO: 88323 - RNA, 82 nt, Homo sapiens
cgcccagaccgccccggggacagccagccccgcggaccagaccaggccgcggcccgggaagcaaacaggaggaggcgcacca

SEQ ID NO: 88324 - RNA, 78 nt, Homo sapiens
ccgagagaaccgcggcagaagccgagcaacaccccggccaccgacccacaagaagagcacaacacagaagaaacggca

SEQ ID NO: 88325 - RNA, 76 nt, Homo sapiens
gcccccacacagaaacccacagaacacagcaaagggcaaacacggggaagcacccggcagaacaggaccccaaggg

SEQ ID NO: 88326 - RNA, 58 nt, Homo sapiens
agcaccagagaacaagcaccaaagcgaaggagggccgcaagagaggcgccacaaccag

SEQ ID NO: 88327 - RNA, 58 nt, Homo sapiens
ggagggaggaagaagagccaggcaggagaggaggagggcccgccccggcggccacagg

SEQ ID NO: 88328 - RNA, 69 nt, Homo sapiens
aagagaaacaaaaagcaaggcggaccagaaaccccagagcgcgaccgcagagggaaacccagacgacaa

SEQ ID NO: 88329 - RNA, 53 nt, Homo sapiens
gccagagcggagacagacgaggcgcaggaagggcaacaccaaaccagaagaag

SEQ ID NO: 88330 - RNA, 55 nt, Homo sapiens
cggaacgcccgccccgcagagagggaagcacagcacagcagaagcacacgacaga

SEQ ID NO: 88331 - RNA, 73 nt, Homo sapiens
gagcgcccccaccgcacccaggagcgccagcccagacccgccgaagaccccggcagcgagacaggaaacaggg

SEQ ID NO: 88332 - RNA, 79 nt, Homo sapiens
aacccggcccaaagacgagacaagaggcaagacagaaaccagcaaaaccagaagggagaaggccgagagggggagagca

SEQ ID NO: 88333 - RNA, 81 nt, Homo sapiens
cgaacgcgaccggggcagcgccggggaggagcggggcgcggcaggcgaggcgacgaggcgaagacaggggagcagccgagc

SEQ ID NO: 88334 - RNA, 89 nt, Homo sapiens
gcagcccaagagaccccaaggcacaccaaagacccagagccgcgcaacgcgaccagcagaaacccacggacggcccgccgggcaacgag

SEQ ID NO: 88335 - RNA, 79 nt, Homo sapiens
acaggaggggcaggaaacgaagcaagcgcagcagccaggccacacaaagcaacccaacccagccacaccacagcccaaa

SEQ ID NO: 88336 - RNA, 79 nt, Homo sapiens
ggacggaccgagaccggaccgagagcggaccgagagcgcgaaacgcacgagaagggaagcgggagaggccacccgccca

SEQ ID NO: 88337 - RNA, 52 nt, Homo sapiens
gccaccaggcacaggccgaccccagcaaaaaaggccccaagagagggaacag

SEQ ID NO: 88338 - RNA, 76 nt, Homo sapiens
acccgcaccaccgcacaccgagcaggccagcgggagcccccgaccccaggagggcaagaccaagccacagcgaccg

SEQ ID NO: 88339 - RNA, 74 nt, Homo sapiens
agcccgccccggcgccccaaccccggcagccccaggcgggccaaaggagaaacaagaaggagacaacaacggcc

SEQ ID NO: 88340 - RNA, 54 nt, Homo sapiens
agaaacacagacacgaccgacacaggaaggggaaaaccgccgccacccaagaca

SEQ ID NO: 88341 - RNA, 75 nt, Homo sapiens
agcggacagaaacaagccgccaaccccacgcgcagcgcggaggcagagcagaacccaggagccaggggggaaggg

SEQ ID NO: 88342 - RNA, 61 nt, Homo sapiens
gggaagcagagcgcacaaagggaaaggggcggagaagagaaacgagggcacacgcacaggg

SEQ ID NO: 88343 - RNA, 44 nt, Homo sapiens
gcggcaaaccaaaagagcaacgaagagaacgcgccgccagacca

SEQ ID NO: 88344 - RNA, 64 nt, Homo sapiens
acgcccaacaggcgaagaacacagacagcaaggaaagcgcagagaaacggggaagacggacggg

SEQ ID NO: 88345 - RNA, 68 nt, Homo sapiens
ggaggaccccaaggaagcaagggagcccggggcgacaggaaccgggaccagaaaagaggagccccggc

SEQ ID NO: 88346 - RNA, 76 nt, Homo sapiens
caaaaacaagacggggcgccccacagaggggcgacgacccccagcagacaagagcgggaccaaccaagccccagaa

SEQ ID NO: 88347 - RNA, 78 nt, Homo sapiens
acagcacagcacaccagcgcacccacacgaacaaagagccaagacagaaggaagaacagacaccgagagaccccaaag

SEQ ID NO: 88348 - RNA, 80 nt, Homo sapiens
ggacgcagccgggaacgagcgagcgccgcgcagcccaggacgcggccgcacccgacccgccccaggcaaggaacagagcc

SEQ ID NO: 88349 - RNA, 64 nt, Homo sapiens
gagaaggcagccgagcaccgagccagcccaggaaaaggagagggacccggagagcagacccagc

SEQ ID NO: 88350 - RNA, 57 nt, Homo sapiens
agccgccaccgggagaagcggccgggccaaggacgggccaacgcacggcccggcaga

SEQ ID NO: 88351 - RNA, 123 nt, Homo sapiens
ggcccgggaagagcgagagaagcggcggaggacgagcccgggagcgacccgcgcaaacaaacagggaagcggagaggacgaagacacccccgaccagagaccccggaagaacggccaaaagca

SEQ ID NO: 88352 - RNA, 72 nt, Homo sapiens
caaagggagcaaacccgcccccacaacgccccggagcccgccgcccgccaccaggccagcagcgaaggagcc

SEQ ID NO: 88353 - RNA, 73 nt, Homo sapiens
aaagacagaccggcacccggcaaccagaaacacaggccaaggaccaggagcacaggagaagagccccgcagcc

SEQ ID NO: 88354 - RNA, 81 nt, Homo sapiens
ccccacagagaggaaccgcagcagacggagaccagaggagggaaggagcagccagggagaccccacgcagggcagagcgcg

SEQ ID NO: 88355 - RNA, 83 nt, Homo sapiens
caagggcggccgaaagaccaggcagagagccagagacggccaggagagagggccgcagacacgagacgacccgggccagggga

SEQ ID NO: 88356 - RNA, 80 nt, Homo sapiens
gaccaaaggaacgggcacaaccacggggcagcacgagagacaaggaggggcgcgccgcccacccccaaagccacacgccg

SEQ ID NO: 88357 - RNA, 71 nt, Homo sapiens
ccggacccggaccagccgaaaagccccgcccgcccggaagaacaaaggcaagcagggaccgagccaagaaa

SEQ ID NO: 88358 - RNA, 78 nt, Homo sapiens
cagaggaaaacaaccccggggccacaaagcgagggaccaaacgccaagcaaaaaagaagacccaagacccagcaaaac

SEQ ID NO: 88359 - RNA, 82 nt, Homo sapiens
cagcacggcaggaggggggagcgagccgcacccacccgccaccccagaagacagaaggagaaccccaaaagggagacaaaag

SEQ ID NO: 88360 - RNA, 53 nt, Homo sapiens
ccaaagaagggagagaggggaagagacagcagcgggaagccacggccaacccc

SEQ ID NO: 88361 - RNA, 79 nt, Homo sapiens
cccaccagccccaagagcgggacacagacaggccaccagccaggcccgagcagccccgcccaacaggacccagaccccc

SEQ ID NO: 88362 - RNA, 73 nt, Homo sapiens
gcacgccacgccccaagacaagacgcgaccaggaggccggggccacgacagcgcacgagggcccgggcacaag

SEQ ID NO: 88363 - RNA, 77 nt, Homo sapiens
aagaccggggaccccaacccggaaaacagccaccagagccgcagagcccgggcaggcacccccaggccccggaccac

SEQ ID NO: 88364 - RNA, 78 nt, Homo sapiens
ccccgccccgcagaggccaggaggacgaggagagacagaagaagcggaggccggcaaagccaaggcagcgggcggagg

SEQ ID NO: 88365 - RNA, 71 nt, Homo sapiens
caagacccccagcacaacacaccgggccaggagaaggaaagagcaggaggccaagccacgggggccaacca

SEQ ID NO: 88366 - RNA, 72 nt, Homo sapiens
cgccaggccacaaaagaaagaaaccgcgaggcagggaaagaaggcagagcaagaaagcaccccccccgaaaa

SEQ ID NO: 88367 - RNA, 54 nt, Homo sapiens
ggggccgaagccgaggggagagggaacaaggacgacgggggacagaagaggaaa

SEQ ID NO: 88368 - RNA, 78 nt, Homo sapiens
cggaggagaagcgcaggagaaaggcaccggcacggaccaccccaacaccgggggagaaccgggcccaccagggacacg

SEQ ID NO: 88369 - RNA, 56 nt, Homo sapiens
gggccaaccggagcggggggggacgcgacaaagcccaagcgcaaaaaaaaggcccc

SEQ ID NO: 88370 - RNA, 78 nt, Homo sapiens
ggaaaaacaacagcacacagcaaaagagacagacggacaacagcccaacaacacccaagacgaagagaccgcagaagc

SEQ ID NO: 88371 - RNA, 68 nt, Homo sapiens
gcccccacaacccgaccggagacaaggcacagggagaagaagagccacagcaccaacaagaaccagga

SEQ ID NO: 88372 - RNA, 68 nt, Homo sapiens
gaaaaccgggacaggagccaagcaccccccaggccacacgcgccgagcagaaaacagaggcgacgaag

SEQ ID NO: 88373 - RNA, 75 nt, Homo sapiens
gggaagggacaccgaacaagacagcgccgcccggcggggcgcaagggggcaggaccagccgcccccaaaaaaagc

SEQ ID NO: 88374 - RNA, 74 nt, Homo sapiens
ccagcacagagagcccccggggcagaagccccaggcgacacgccccaaggagcacaccgcaggccgggcaccgc

SEQ ID NO: 88375 - RNA, 84 nt, Homo sapiens
aggaacaacacaggaggaggcacgaaccaccgggggagaggcaccaagaccacacgagccccaggcaccaccgcacccacgcca

SEQ ID NO: 88376 - RNA, 74 nt, Homo sapiens
gcaaagcagcacacaaagagggcacccagaccgcaggaagacagaagaaggacgccccaacccacagaaagaag

SEQ ID NO: 88377 - RNA, 37 nt, Homo sapiens
cccgaaagcgggacacagaaggagcggagaacggacc

SEQ ID NO: 88378 - RNA, 88 nt, Homo sapiens
gaagcacaggccagggcagaggaccaacagggcagagagcaaggggacggggcaggaggcgcagagcgcggggggaacccacccgaga

SEQ ID NO: 88379 - RNA, 69 nt, Homo sapiens
gcaaagacagcaaaaaaaaggaagcacaccagagcaaaagcgaaagccggacacaccaaacgcagccca

SEQ ID NO: 88380 - RNA, 75 nt, Homo sapiens
cagggaagcagccgaccagccgcggagccgggggcagaaacaacgaacgagcaaggaagggccaaggcagacccc

SEQ ID NO: 88381 - RNA, 103 nt, Homo sapiens
cggagaagaacaagccgacccaaagccgccgccgagggcccgacaagacacagccaccgggccgccaccccccaccgccagcaccccaccaagccaccaagga

SEQ ID NO: 88382 - RNA, 84 nt, Homo sapiens
agaggaggaggggaagcacgcaggaagcaggaagaggaggcacgaggccaggggcgcagcagaacacgcggaaaaacccaacag

SEQ ID NO: 88383 - RNA, 63 nt, Homo sapiens
acggggccaagggacaaggcaccgcccagggggcgacgaggcccgaggggcgggacaccaggg

SEQ ID NO: 88384 - RNA, 79 nt, Homo sapiens
cacagacgaaggcaaaagagacgcaaacagcagacggaagaccccacggcaaaaccacacccgaggcgagcccaggaca

SEQ ID NO: 88385 - RNA, 82 nt, Homo sapiens
gggaaagccaaaggagccagaaagcgaggacccggggggccaaaagagaaacaggcacgacaaccaaagcggacccaggaaa

SEQ ID NO: 88386 - RNA, 86 nt, Homo sapiens
gccggagcgcgaaggccgggacccggccccggcccacaggggggggcaaacccgagagaacggccgcagaacaagaacggcaggcg

SEQ ID NO: 88387 - RNA, 37 nt, Homo sapiens
gaagagcgccagcccccccagacaaaagaacgcacca

SEQ ID NO: 88388 - RNA, 80 nt, Homo sapiens
agaagccccaagcccggggccgacagcaagagcagccccggaacggaggaagggagccggagagaaaaagggcggagaga

SEQ ID NO: 88389 - RNA, 80 nt, Homo sapiens
gggcaacagcaccaccgcccagcaaaaagagaggaccacagggcccccagcccaacacccagcggacccagggaaaacag

SEQ ID NO: 88390 - RNA, 70 nt, Homo sapiens
cggaacccaagaaccggggagcgacagaagacaaacagcaaggggcaaaggccaggaaacgaacacacag

SEQ ID NO: 88391 - RNA, 74 nt, Homo sapiens
acgacagaggggagcagaagagaccccaagaaagaggacgcaccaccagagcaagggcaccggcacggaccacc

SEQ ID NO: 88392 - RNA, 72 nt, Homo sapiens
gcgggcagaacagcgcggcagagacagggcccacgggaggcggccgaacccgacccagggaccaccgccggc

SEQ ID NO: 88393 - RNA, 79 nt, Homo sapiens
cgcagccagggcaacgccaagcccgaacagagccacacgaccccgcggccaagggaccacggccccgacacacccgcgc

SEQ ID NO: 88394 - RNA, 78 nt, Homo sapiens
ccaaaaaaaaaaaaggaagcacaccaagcgccagcagcccgggggcgacgacgaggaccaggagccaggggcggggga

SEQ ID NO: 88395 - RNA, 86 nt, Homo sapiens
aagaaccaagagggggccgaacaccaaaggccaccccagcgcaggaccagcacacgcaagcccacgccgccacgacacacgggccg

SEQ ID NO: 88396 - RNA, 85 nt, Homo sapiens
cggagaaagcacaagaagaagcagaggaggcccacaggcccgcccggacaccgaggaccgcaggagccaacaagaaggaagaaac

SEQ ID NO: 88397 - RNA, 73 nt, Homo sapiens
gggccaccacgaaccaggaagaccccacagagcagcccgacggccaggaggcgaagagacgaggaagcccagg

SEQ ID NO: 88398 - RNA, 91 nt, Homo sapiens
gcagaagaaagagccacaaagggcccagagggacgggaagaagaaagggggggacccccaaaagacaagggcaaaacggaccagacacaaa

SEQ ID NO: 88399 - RNA, 92 nt, Homo sapiens
gccccacgccagccgcaacccagccagccacgccaccgcgacccacacggagagaggaccaaacgcccccggcgcgccgaaacggccaggga

SEQ ID NO: 88400 - RNA, 106 nt, Homo sapiens
caaggccggagagagggcgcagggcccacggacagcgacccagaacggcgacaggagccaggacaagggccaagccggaacccggcagcacaacacaccgacgggg

SEQ ID NO: 88401 - RNA, 88 nt, Homo sapiens
agcagggagaagagaaagagacgcagggaagaaggagaaagggccaaccccgaagaagcaaacagaaacgaaggagacagagaagaac

SEQ ID NO: 88402 - RNA, 81 nt, Homo sapiens
aaggcagagacccagagcggcggaaggacagcacgagcacccccgacgcacccgagaccccggacccagcggaggagagaa

SEQ ID NO: 88403 - RNA, 105 nt, Homo sapiens
accaggaaacgaaagcccggccgcagacccaagaggagcggggccacacgaagagccagcaccagggcgagggaacggcaggagacagacacggaaacacagccc

SEQ ID NO: 88404 - RNA, 59 nt, Homo sapiens
cgggccagggagggaaaacccagggccgcccacaaccggacccaaaacagccacccaaa

SEQ ID NO: 88405 - RNA, 100 nt, Homo sapiens
ggggcggccgcaccggcgccccacccgcccccgcgggcgccgggccaggacgggcccgggcccgccggccacaccacacgcccccgccgcccacaacgcc

SEQ ID NO: 88406 - RNA, 69 nt, Homo sapiens
aaagaacaagccgaaaggaagccacggggccccagaaacagggagaaaacaacagccaagggcaaagag

SEQ ID NO: 88407 - RNA, 57 nt, Homo sapiens
aaaaagaggaaccaagaaacaagaccagaagagagggcacacggacccgacaccggc

SEQ ID NO: 88408 - RNA, 60 nt, Homo sapiens
gccgaagggcgaggcgcgacgggagcggccagagcgcgggaaaggagacagggcgccagg

SEQ ID NO: 88409 - RNA, 71 nt, Homo sapiens
acaccccgggcccgcggcggcgggcacccggaggcgcccgagcgagagagaagaaacagcaaaacacaaag

SEQ ID NO: 88410 - RNA, 85 nt, Homo sapiens
aagaagggcaggaccgggcggaggccgccaagacgagaaagggcgcaaaaagaaagaaaacaaaagccagccaaaaacagaccga

SEQ ID NO: 88411 - RNA, 95 nt, Homo sapiens
acccaggggaacgcggaggcccccaccccggcccgaagaggacacggaccagaacagcaagggcgcaagccgcccccccaccgcggaagagcaag

SEQ ID NO: 88412 - RNA, 85 nt, Homo sapiens
ggcggcggcggagggcccgggcgcggcggcgggacaccgagcccggggaggggccccgcgaggagaccgcaagcagagcgacaag

SEQ ID NO: 88413 - RNA, 68 nt, Homo sapiens
cgcgcggccgggggcgcgggcggcggcgccggcaggaaggaaaaaacagggccaggaacgcgaagacc

SEQ ID NO: 88414 - RNA, 81 nt, Homo sapiens
ccacaacaacaagccacagggccggagaggggaaccagcagaagacaaacagcgggagccggaggagaacaccggacccga

SEQ ID NO: 88415 - RNA, 77 nt, Homo sapiens
cccgcggcgggaggagccgccccgagggagccgcccgagggaggggccaacggaacacaggacagaaggaaaaagcc

SEQ ID NO: 88416 - RNA, 74 nt, Homo sapiens
acgaggggacacaagccggaaaggccccgagagcaaccggcacgagaggaagccgaacccggaggaagaaaagg

SEQ ID NO: 88417 - RNA, 85 nt, Homo sapiens
gcccggcgggaagggagaagacacgcgcaagcagggccccgaaaacacaacaggcacaaagagagaaggaacacccacagggcag

SEQ ID NO: 88418 - RNA, 81 nt, Homo sapiens
cccggcccgggggccgccccggcgagccgcgacggcgccgcccacggcgagggcccagccagcggagagacgcgcgggggc

SEQ ID NO: 88419 - RNA, 77 nt, Homo sapiens
cggaacaaacgggggaggcacacggaccaacgggaaaacggaagcgccgcaagagaggagggccaagcaaacgaaga

SEQ ID NO: 88420 - RNA, 76 nt, Homo sapiens
cgaggagagcaaggccaaaaagaaagggcgagcccccgggcccagggcgcacggcaggacgagcccgggcagaacc

SEQ ID NO: 88421 - RNA, 39 nt, Homo sapiens
aaccggacaagacggggaaaggccacgggagggcaaccc

SEQ ID NO: 88422 - RNA, 56 nt, Homo sapiens
acaggcgggcacgcgcccaggggaccaacaggaaaggaacgaagcgaccggaccgg

SEQ ID NO: 88423 - RNA, 72 nt, Homo sapiens
cagccggagcgccgggacgcgccgcccgcccgcgcagccgcgcagaaagaaacggaagaaccgagagaaggc

SEQ ID NO: 88424 - RNA, 77 nt, Homo sapiens
acggggcgagcaccgcccccacccgggcccaccaaaaccagcccccgggcgcacagaggagcgccgagcccaggcgg

SEQ ID NO: 88425 - RNA, 64 nt, Homo sapiens
gaacagagcgagggaggagagagggagagccaaagaagcaacaggacaccagcaacagcgccag

SEQ ID NO: 88426 - RNA, 65 nt, Homo sapiens
gccggccaccccaagaagaagacggcaccaaacggcaaggaggaaaaaaccagaaaccagacggc

SEQ ID NO: 88427 - RNA, 102 nt, Homo sapiens
gaggacgcgcacacacagcgaggagaggagggaagcgccccagccaagaaggacaagaaggggagaagaaaagaaacggcaaaagaaaaaagaaaagagaaa

SEQ ID NO: 88428 - RNA, 75 nt, Homo sapiens
aacgccagccagcagcaaggaaggcagaggcggacaacagagcaccccagacgcccgccgcagaggaaagacacg

SEQ ID NO: 88429 - RNA, 67 nt, Homo sapiens
cagacgcagggcgcccccgggggcagcacagcccagaagcaggaccggaaaacgcagcagcaagggc

SEQ ID NO: 88430 - RNA, 73 nt, Homo sapiens
gcaaacaacaagcagccacccagggcggagaacggaaaagcaccaggaagcagagaggaccgcagaagggaag

SEQ ID NO: 88431 - RNA, 72 nt, Homo sapiens
gccggccgggagggcggccgcagcaggcgcaaaaaccagacaccccacaccaccacccagacgaccaaaagg

SEQ ID NO: 88432 - RNA, 72 nt, Homo sapiens
acagacaaaaagagcacccagaaaacagagacgacaagaaagggaacacaaaggacaccaccaggggaccca

SEQ ID NO: 88433 - RNA, 78 nt, Homo sapiens
ggaggggccccagcagcccccgaaggcccacaggacaggagagaaagacggagaccgcgggccgggccaccggcaggg

SEQ ID NO: 88434 - RNA, 85 nt, Homo sapiens
ggccgggcaacgaccggcggggggcgcggcgccgggacgcaccgcaccgagggcgagcccagggaaagggagcagcaccggccac

SEQ ID NO: 88435 - RNA, 79 nt, Homo sapiens
accagccaccaggcagcagaaagagaaccggccaggacgaaagagggccccacgcccaaaccaaacgaacaaagagaca

SEQ ID NO: 88436 - RNA, 73 nt, Homo sapiens
accgcgcggggcaggagccgccgcgccaccccaccagccaagggccaaccgccccccagcagcaggcacgggc

SEQ ID NO: 88437 - RNA, 70 nt, Homo sapiens
acccaaaaaccacagagggaaccgggaaaagccccacgagggaaaaccccgaggagcacgaaggaccaag

SEQ ID NO: 88438 - RNA, 75 nt, Homo sapiens
aagaacggcaagaaaagaggacagaccccaggaccaagacccgcaaccaggacacagcagaagcagaagaggaag

SEQ ID NO: 88439 - RNA, 78 nt, Homo sapiens
gcaaaagacagcgaggagcagcagcagcccagcaggcgcggcccgccaggcgacaccgaaagaaccgagggaaggaga

SEQ ID NO: 88440 - RNA, 74 nt, Homo sapiens
cggaggagaaagcagaaagaccaaggagccccaaggcaaaccaaaccagagagaaagggaaccaaagacgccca

SEQ ID NO: 88441 - RNA, 116 nt, Homo sapiens
ccggccccgaaccagagacccaagagcaccagaaagggaaaggaaccagggaaacagcaccaccgccgcccggagcacgcgcgaggagcagccggagcacggcgaaccccacgcaa

SEQ ID NO: 88442 - RNA, 113 nt, Homo sapiens
gcaaggcggcaagaaagaaaagaagggcgcccggaaaggcgccgaagagagaggaccacaagagccaggccacacggagcaaaggacaaccagaaacgagcgcggacagcgag

SEQ ID NO: 88443 - RNA, 73 nt, Homo sapiens
caggagaaagcagacagaaagaaggaggaagaggaacaacggaaccagagagccacagcgaaacaacacaaac

SEQ ID NO: 88444 - RNA, 80 nt, Homo sapiens
ggccagcaggggaggaaaagacacacccggaaggagggccccggagcagccacaccaccgaggccccacccagcacgagc

SEQ ID NO: 88445 - RNA, 67 nt, Homo sapiens
agccgcacgaggagagaaaagccaaggggaagaccgcaggaaagcaggaaggcaagaaagccaagga

SEQ ID NO: 88446 - RNA, 56 nt, Homo sapiens
agagggggggaggaggagacccggagagggcccacagcccaagaaggagacccaac

SEQ ID NO: 88447 - RNA, 81 nt, Homo sapiens
agcaggcagccacccaacaggcccccggggagcaacgagaagggcaggacgccggcaccggaagccagcgcaggcccacaa

SEQ ID NO: 88448 - RNA, 84 nt, Homo sapiens
cgcacgacaaccagcaaccagaaccacgagagaaagacccaccaagagacaacacgcggggccgggagacagagaaacacgaaa

SEQ ID NO: 88449 - RNA, 71 nt, Homo sapiens
gacgcccccgcccacggggacggcgccggcgcggaaggagagagagcagacaaaaccaagaagaaacaacc

SEQ ID NO: 88450 - RNA, 75 nt, Homo sapiens
cacgcggacaggaggaggcacgacacccaggcaggcaacacaggaccggaaggacccacaggccagaaacccaga

SEQ ID NO: 88451 - RNA, 61 nt, Homo sapiens
gagcgggcgggaagacaccaggaaggaagagcaaagccagcaggacaggcaaaaagacagc

SEQ ID NO: 88452 - RNA, 89 nt, Homo sapiens
accacgcgcccggcggcccggcccggccgacgccaaggcaccagcccgaagaagccgggcagaccaggcagcagcggaaaggagcaggg

SEQ ID NO: 88453 - RNA, 78 nt, Homo sapiens
agggggaagcggcccagggagggcagacgggagcgggccgagaaaaaccacagagacacacgcaagccgacgggggca

SEQ ID NO: 88454 - RNA, 59 nt, Homo sapiens
aaaagagccgggagccagaggagacagaaaggagccaaacccccagggggaaaggaaga

SEQ ID NO: 88455 - RNA, 57 nt, Homo sapiens
aagcccagggagcggcggcagcaggggagagagaaaagaacccccggaggaagggcc

SEQ ID NO: 88456 - RNA, 76 nt, Homo sapiens
gggagcggccagcaggagcgccggggccggggcgaacgcggccgggacggggacaccagacgggaaaacacccgaa

SEQ ID NO: 88457 - RNA, 80 nt, Homo sapiens
acaggacagcagggcccacacacgggcggacagaggagaacagccgcacgggcggcgcccggcgcgggacaagccgagac

SEQ ID NO: 88458 - RNA, 81 nt, Homo sapiens
cggagcaaggaaaagacccggaaagaagagacacagaggagccacacccccaggacgagagaggagcgcgggccgagagcg

SEQ ID NO: 88459 - RNA, 75 nt, Homo sapiens
gaacaccgaagcccccacaagggaagaaccacacgccccacacccacgcggggcaccgggacgaggcggaggcac

SEQ ID NO: 88460 - RNA, 68 nt, Homo sapiens
gcgcgacaggccaggcagaacaaacggaccagcgaccgggcagaggacgcccggaaaagagaaccgac

SEQ ID NO: 88461 - RNA, 54 nt, Homo sapiens
gaaggaggcgaacaggaagggaccccaagaacaacagagaaaggccaaaacgca

SEQ ID NO: 88462 - RNA, 75 nt, Homo sapiens
cacgaacgccgcagaacacgcggacacgcccggggcgaggcccgcggggccaggaggacagacaagcagacgggg

SEQ ID NO: 88463 - RNA, 73 nt, Homo sapiens
gagaaggcccaaagaacaaggagggggccaggaaccacaggcccggagaaggaccacacagcgcccaccgccg

SEQ ID NO: 88464 - RNA, 76 nt, Homo sapiens
caaagaagaaaaaagccaaacaaaagaacacaacaaagggggaagaaggaggccggggaggaagagagcagggggg

SEQ ID NO: 88465 - RNA, 79 nt, Homo sapiens
caccaggaggaggacgacagcacgaacggcggccaaagcgccagacaagggccgagccccggagagccccccgcaaggg

SEQ ID NO: 88466 - RNA, 84 nt, Homo sapiens
ccggccgggcagagagcgcagacaggacaccaaacaccgccgccggcccagaagcggggaaggcagagagaccaaggagagcag

SEQ ID NO: 88467 - RNA, 85 nt, Homo sapiens
ggccaagaggcagaccaggaaaggagagggccagaacgaccggcgacagagccggggaaaccaaggagaaggccgaacgcacgac

SEQ ID NO: 88468 - RNA, 70 nt, Homo sapiens
acacaaaaagaccaaagacaccccagcaagcagaaggccaaggaaaaggaacagagagagcagaaccgaa

SEQ ID NO: 88469 - RNA, 58 nt, Homo sapiens
aaagcgggaagaagacaccggagcaggcagagagcagagaaagggggaggcggacccg

SEQ ID NO: 88470 - RNA, 42 nt, Homo sapiens
gacaccaacaggacccggcaaacagagacagggagggcagcc

SEQ ID NO: 88471 - RNA, 53 nt, Homo sapiens
ggccggggagggcgcgccgaaagcggggccacgcgccccacgccgacagcggg

SEQ ID NO: 88472 - RNA, 72 nt, Homo sapiens
gcaacacaaggaagcaagggccaccgcccagccaaccacagggggcgaaacacaggacccgcaaaaccccca

SEQ ID NO: 88473 - RNA, 73 nt, Homo sapiens
gaggccccagcggaccgaacaggaaggcggaccccggcagcaagcaacagagcgccaagcccccgcaccaagg

SEQ ID NO: 88474 - RNA, 81 nt, Homo sapiens
aacaagcccaaggccaaaaagacaaagaacaccagccaggcaaccaaagagggaaagaccaccacaaggacacacaagaag

SEQ ID NO: 88475 - RNA, 70 nt, Homo sapiens
aaaccagcaacaccccaacagagagaaggaagggcggacgagcaccgcccagcgcagacagggccaagaa

SEQ ID NO: 88476 - RNA, 70 nt, Homo sapiens
caaggcaacaagaaccgaaggcaaagggcaaagcaaaaacagcaaaagaaaagaaaaaacaagaaggagc

SEQ ID NO: 88477 - RNA, 77 nt, Homo sapiens
caggggcggccgcggcgccgggcgccgagcgccccaacccagcggaaacagggacggaagggcagacaaaggaacag

SEQ ID NO: 88478 - RNA, 71 nt, Homo sapiens
agaccagccagaacccccagggccgaaagccaccgacccaaaacaaccaagcgaaggagcacgcaagcagg

SEQ ID NO: 88479 - RNA, 65 nt, Homo sapiens
gcagaaacgcaccaggccaaagaaagagaaccacacggccagcgaaaccagggaccccggaggaa

SEQ ID NO: 88480 - RNA, 82 nt, Homo sapiens
ggacacgaagggagcagaggacagaaccggaccggaggcaggaaaaaccagaagagaaaaaacaaaggggagaggcaccccg

SEQ ID NO: 88481 - RNA, 72 nt, Homo sapiens
cgcgggggacggaagagcggcccgagccgacgcggggcaagagcccccgaaaacacaagaaaagcacgcaca

SEQ ID NO: 88482 - RNA, 66 nt, Homo sapiens
gccgggccgggggagaccgcaaacggcgaggaaagagaggagccccggaaagaaaaggacagaccc

SEQ ID NO: 88483 - RNA, 57 nt, Homo sapiens
cgcaacagggccgcacgcaagacaacaggcacaaagagagaaggaacacccacaggg

SEQ ID NO: 88484 - RNA, 80 nt, Homo sapiens
aggacggggaggacgacgaggagaggaggagagaccgcccacaccaccacggcgaaggcgccaccggcgagaagacgcgg

SEQ ID NO: 88485 - RNA, 60 nt, Homo sapiens
gggacccaccgcgccccagcccgagccagggcgagacaagcagaccggaagaccgacgga

SEQ ID NO: 88486 - RNA, 76 nt, Homo sapiens
gaacgccgcggccaaggagccgccaaagccagacgggcggagaacggaaaagcaccaggaagcagagaggaccgca

SEQ ID NO: 88487 - RNA, 74 nt, Homo sapiens
gcaggaccacagaggcagacaagacagcacggagagaacagaagaagggaagcgacggagccgcgcgcccaggc

SEQ ID NO: 88488 - RNA, 45 nt, Homo sapiens
aaaacgaccaaacagacgggcaaaacaggggcgaccccaacagga

SEQ ID NO: 88489 - RNA, 73 nt, Homo sapiens
aagcacgcgcacagagacacgaggaaacaacaccaagaagaacaccagaaacaagacgaccaaccccgacggc

SEQ ID NO: 88490 - RNA, 74 nt, Homo sapiens
cgccgcccagaaaggcccggagaaaccgccaccccccgcagggaggagcagccaagggcgggcccgcagggacc

SEQ ID NO: 88491 - RNA, 78 nt, Homo sapiens
aggcccgaaaggcaaaaaggggaggagacaacaggagccaccggacagggacgagagaccggaaaggacaaaaaacgc

SEQ ID NO: 88492 - RNA, 81 nt, Homo sapiens
cagcccgccccgcgccccacagggcagcggcagccaggaagaaccccccacccaggcgaccccacacaaaacccagcgcca

SEQ ID NO: 88493 - RNA, 74 nt, Homo sapiens
gagaaccgacaagccaagacagggggggggagcacagcgaagaagaacaccagggagcacaaaagagcaacaga

SEQ ID NO: 88494 - RNA, 69 nt, Homo sapiens
cacaagaggcacgggacaggcacgaagacagccccaacagacgagaagcaaggaaggcaacaacgacaa

SEQ ID NO: 88495 - RNA, 82 nt, Homo sapiens
agagagcgacccggggggagcgcggggcgacgcggcgcagggacccgggacagcggagaggccaccacgcagagcaaccccg

SEQ ID NO: 88496 - RNA, 49 nt, Homo sapiens
caaccggagacgccggcaggcaagcggaagagcccgggaagcgcagagg

SEQ ID NO: 88497 - RNA, 76 nt, Homo sapiens
gaagcgcagaaacaaaccccaaaaggagaaacagcggaaagcacaaagcgcggaaaggcaacacggagagaaccgg

SEQ ID NO: 88498 - RNA, 52 nt, Homo sapiens
aaggaccgacccaaaagcagagagggcagcccagcagaagcaacgccaggga

SEQ ID NO: 88499 - RNA, 56 nt, Homo sapiens
agcagcaaccagcccaaaggccccgggaggagccgggacacagccagcgcccaaca

SEQ ID NO: 88500 - RNA, 70 nt, Homo sapiens
cccagacggggaagagacacgacaggcaggccccccgggcgcaacccccacccacagcagaccgaggggc

SEQ ID NO: 88501 - RNA, 43 nt, Homo sapiens
cccccgagggcgggaacagggcgaggaggcccaggccgaggac

SEQ ID NO: 88502 - RNA, 78 nt, Homo sapiens
gaaaggaacgggggccgaacacagagccggaggagccaccaacagaagcaggagccaggaaaccaaaacccacagaga

SEQ ID NO: 88503 - RNA, 78 nt, Homo sapiens
gccaccccgcacggagcagcagccacccgagggaggccaacagacccaacccagaaggcaccaaacggagggggaaca

SEQ ID NO: 88504 - RNA, 66 nt, Homo sapiens
acaccaaagggccggacccacggaccccggagagcgagagaacgcaccgggggcagacaccaccaa

SEQ ID NO: 88505 - RNA, 78 nt, Homo sapiens
gcccggccgcccaccaaccgcgcagcggcgcccgggccacaggaccaagaacgcccagcccgcgggcaccggcagaaa

SEQ ID NO: 88506 - RNA, 69 nt, Homo sapiens
agccaggagggcaaaacgccccagaggaaggaaccacgaagcgagaagcccggggcaagaacggggcgg

SEQ ID NO: 88507 - RNA, 81 nt, Homo sapiens
acgcgacggcaaccccaagcgacccggcccacggacaacacgcacccaggaccacagcacggcccacgacaccagaccagc

SEQ ID NO: 88508 - RNA, 75 nt, Homo sapiens
ccaccgagagggcggagggaccaaccagccggacaacacgcccacccccaccgcagaagaaggagacccccacag

SEQ ID NO: 88509 - RNA, 37 nt, Homo sapiens
accaaggcgagcccggggacaacgaggaaccccagag

SEQ ID NO: 88510 - RNA, 65 nt, Homo sapiens
aggggcagcacaaagaaggccaaggcacgagaacaagccacgcaggggcacgaagacaccagccc

SEQ ID NO: 88511 - RNA, 46 nt, Homo sapiens
cacggaagaagcgcaaaaaacgaagacaacaggaaggaagccaccg

SEQ ID NO: 88512 - RNA, 59 nt, Homo sapiens
caggaacgcccgcggaacggcgcaggcaccggcccgaccagccacgacacccacgaaag

SEQ ID NO: 88513 - RNA, 78 nt, Homo sapiens
agcggagaagcacggagcgggggaggcacagaaggggccccccaggccacccaggaccagcggcacacccccccgcgg

SEQ ID NO: 88514 - RNA, 76 nt, Homo sapiens
gggacccggagggagcccggcggccggaaccccgacaggccggaaagggcaaccgagacaaacaaggagagacggc

SEQ ID NO: 88515 - RNA, 48 nt, Homo sapiens
cgcagaaacagcaagcggaggagcaacagaccaggcgagggagccaaa

SEQ ID NO: 88516 - RNA, 57 nt, Homo sapiens
gccccccagcgaccaacaccaaggccccagcaggcccagacgccgacaaagcaaggc

SEQ ID NO: 88517 - RNA, 78 nt, Homo sapiens
ccaaaggcaacagcaggacacgcacgccagaacacaaagccaaggccgccgagaaacccccgaaccaggcagagcgca

SEQ ID NO: 88518 - RNA, 84 nt, Homo sapiens
caaaagcacaaacagcaagcacgacaagcagcacaccaagagcacacagcacgagagaaacagaggacgaccgggaggacaaga

SEQ ID NO: 88519 - RNA, 74 nt, Homo sapiens
ccccacagcaggggacagcacaggcacgagccaggggcgcccccaccggcaccgggcgaccgccaacaggaagg

SEQ ID NO: 88520 - RNA, 92 nt, Homo sapiens
ggaacccagccgcgccaccacgcacgcacacgccggcgcgcgaccgcgcaaaacggacagggaagaagccaaaacagaaggggcaagagaac

SEQ ID NO: 88521 - RNA, 78 nt, Homo sapiens
ggacacacggggagccaaagcaccacacaaagaaagaggcaggcaagcgagaaggaggacagggagagaagaccaacg

SEQ ID NO: 88522 - RNA, 41 nt, Homo sapiens
ggcgaaagccggggcccaacggaaagaccacagcaagacca

SEQ ID NO: 88523 - RNA, 103 nt, Homo sapiens
gaggcaacccaggagcacgaagggaagccaaggccaccaaaacaggcaaacgacaacaggcacaaagagagaaggaacacccacagggcagacagagaaagaa

SEQ ID NO: 88524 - RNA, 62 nt, Homo sapiens
ggaccgagagcgcgaaacgcacgagaagacagacagaaagcgcccaggacaggaccaggagg

SEQ ID NO: 88525 - RNA, 69 nt, Homo sapiens
gcagcaaaaaaggaaaggaccacgcagaacgcccaaccaggccaaggggcaacagcagacagagcacac

SEQ ID NO: 88526 - RNA, 50 nt, Homo sapiens
ggcgagaacagcccaggaagagaggaaagaggagagaacagaacagaaag

SEQ ID NO: 88527 - RNA, 71 nt, Homo sapiens
gagggaaccagcaacaagccgaaaacgaaggaaggaggacccgaggagagagaagacggaaaggaaacacg

SEQ ID NO: 88528 - RNA, 85 nt, Homo sapiens
gagcagggcgggaggagaccggaaggggaagaggcccacacagagaggaaaccgagaccagagcacaaggccacacagcaggaag

SEQ ID NO: 88529 - RNA, 74 nt, Homo sapiens
ccccagggcaccagcaacaccccaggccggggagggcgcgccgaaagcggaaaagaaggaggccagcgggacac

SEQ ID NO: 88530 - RNA, 79 nt, Homo sapiens
aggagcccaggaagagcaaagccgagcgcaggcagcaggacaggaagcagggagccaagcggcaggaaaggacccacgg

SEQ ID NO: 88531 - RNA, 53 nt, Homo sapiens
acgcgaagacggaacccgggacgacgggaaggaagggaacacggacgacgaga

SEQ ID NO: 88532 - RNA, 55 nt, Homo sapiens
caagaaggagaacaaaagcaaagccccagacggacggagagaaggcgaggaagcc

SEQ ID NO: 88533 - RNA, 88 nt, Homo sapiens
gcgcgcgcagggcggccgagcggggccagggccgccgggggagagccacaagcgggggcacgcgacacacccgacacccaaccccgaa

SEQ ID NO: 88534 - RNA, 72 nt, Homo sapiens
caaacgaaaccaaaacaaaacagagagggaaccggaggagagcggccaaagagcacagggacagaaaaacag

SEQ ID NO: 88535 - RNA, 72 nt, Homo sapiens
gccccgccggccaggccgacgggcaccccgagcaccgccaaggcgccacgcgaggggcgcgacacccccgcc

SEQ ID NO: 88536 - RNA, 62 nt, Homo sapiens
gaccagaccgcagccacaggcaaagaaggagaaagccgagcacacgaggaagagaagaacaa

SEQ ID NO: 88537 - RNA, 89 nt, Homo sapiens
gaagcccggaagaaggaggaggaggagcggcgcccaaagagagaacgagaagggcaaggagggcaggagcggagacgcagagaaggcca

SEQ ID NO: 88538 - RNA, 55 nt, Homo sapiens
cacacagccaaagcgcaaaggggcggaaagaaacaagaaagacgcaccgaggcag

SEQ ID NO: 88539 - RNA, 67 nt, Homo sapiens
gcccacgacaacaacccacaccagccacccaccggaggggagccaggggacggagacgcccaagaca

SEQ ID NO: 88540 - RNA, 104 nt, Homo sapiens
ccccaagaagaccacagagggacccggacaaccagaggcagccagcagggggaggagaaaaccggaagagaaaggccgggaagcaggaaagaaaaaaacaacag

SEQ ID NO: 88541 - RNA, 72 nt, Homo sapiens
gggggcgcgccccgaaggcagcgaggcgcggcaggcgagggcacaagacagcagagcaaaccagccccagag

SEQ ID NO: 88542 - RNA, 81 nt, Homo sapiens
agaggccacagcccggacccacgaccccccggccagacaagagaagaagaaggaggccgcggccagaaacccaagaaaaag

SEQ ID NO: 88543 - RNA, 64 nt, Homo sapiens
aacagaagcccagccgacggcccacaagggcaaggacggaaagacaccccacagccaggaacaa

SEQ ID NO: 88544 - RNA, 71 nt, Homo sapiens
gcccccaaaaagcggcaaaagcaagagaacagagcagccggcaggcccagcagaagacagcaggaagaaca

SEQ ID NO: 88545 - RNA, 72 nt, Homo sapiens
ccaggcccagcagccgccaccgagagacaaccagccacccagggaaaaaccccagccgggcaagaaacacca

SEQ ID NO: 88546 - RNA, 73 nt, Homo sapiens
gacggcggacggcgcggccacggagaagggcgcgacaacggcaagcggagaagagcaaggccgaaccgagagg

SEQ ID NO: 88547 - RNA, 79 nt, Homo sapiens
ccgccagaccacagcacagccgggaaggggagccaccagcccccggaaaaaaggccgacaacgagggagaagcacaaga

SEQ ID NO: 88548 - RNA, 88 nt, Homo sapiens
acacaaagcccccccgaaaacgggccaggagggaggccgaggcgacggcgaaaggagaaccgggaggaaaggagagaaaggagagccg

SEQ ID NO: 88549 - RNA, 58 nt, Homo sapiens
ccgcccggaacggggagcccaaaggccaacgcggagacaaaaaacaggagaaaaaaga

SEQ ID NO: 88550 - RNA, 60 nt, Homo sapiens
aggaggaaaggagacagaacaaccgcagccccccgaaccaagcccaaccaccccccgcca

SEQ ID NO: 88551 - RNA, 71 nt, Homo sapiens
agaagcagagagaggagcggcacaccgaacagggcgaccaacggcggacaggaggagcaagaaaaaaaacg

SEQ ID NO: 88552 - RNA, 81 nt, Homo sapiens
caacacccggccaagcgccaaaccagcacccccaccgcagcagcacagcccccacagccagaagacagcgccagacgacca

SEQ ID NO: 88553 - RNA, 80 nt, Homo sapiens
cgggaagcgacgaggagcgaggggggcaaaaccccagagccaaggcagaagaaagcagcaaacagcggcacgaggggccc

SEQ ID NO: 88554 - RNA, 53 nt, Homo sapiens
cagcagcggaagcggaggagagcggccagaacgccaccaggacccaaagccag

SEQ ID NO: 88555 - RNA, 38 nt, Homo sapiens
ccaacaccaagggcaagaccgcggaccccacacccgcc

SEQ ID NO: 88556 - RNA, 72 nt, Homo sapiens
gaaccagggagaagccgcccgaacaccagcccacagcgcggcaccgaccccggggggcgcggggggcccaga

SEQ ID NO: 88557 - RNA, 77 nt, Homo sapiens
cccagccgcagcgccagcagcggacaggcacagacaaccagggcccgacccaggcaagcgagcaggcgagcaggagc

SEQ ID NO: 88558 - RNA, 80 nt, Homo sapiens
aagcagcagaagagccaaggaaaaacagcaagaacccaaaaggccagggacaacacacgggagagcacaaaccgaacaca

SEQ ID NO: 88559 - RNA, 79 nt, Homo sapiens
aggagagaccggaaccaggagcagaaaaagagcgacgaaaagacaggaggggaaggggcccaccgaggagcgcagacac

SEQ ID NO: 88560 - RNA, 77 nt, Homo sapiens
gcgggcaacacccgccgcagagaaccagcaacacacaagaaacccagccaccaagggaaaagagaagcaaggaaagg

SEQ ID NO: 88561 - RNA, 75 nt, Homo sapiens
agagggccgggagcgcgcagccagggaggccaacagacccaacccagaaggcaccaaacggagggggaacaggcg

SEQ ID NO: 88562 - RNA, 57 nt, Homo sapiens
aggagaaacgcaagccagacacgcgagaaaagaagcgggcaagacacaaggacgccg

SEQ ID NO: 88563 - RNA, 61 nt, Homo sapiens
cagagcaaggaggccccagcggaccgaacaggaggggggaccccgcccagggcccagagga

SEQ ID NO: 88564 - RNA, 71 nt, Homo sapiens
aggcagccaggcaagaggcgcgcagccccgagacacaccgacccagggaagagccgacgcaaggccagggg

SEQ ID NO: 88565 - RNA, 77 nt, Homo sapiens
caggcaggaagcgggaagccaggccgcaaggcccaggaggcaagagcgagaagagcgcaagacagaaagcgaaagcc

SEQ ID NO: 88566 - RNA, 58 nt, Homo sapiens
aggcggcgccaccgaacagacccggaaggacggcgagggacagcccagagcaagcaca

SEQ ID NO: 88567 - RNA, 44 nt, Homo sapiens
ggaggacgaagcgcacggacgcagccgccaaccacaccaagcag

SEQ ID NO: 88568 - RNA, 73 nt, Homo sapiens
acgacaaccaagaggaaagggggccagcaacccagacgcccacaggacaagccccccaccgaagacaagcgag

SEQ ID NO: 88569 - RNA, 61 nt, Homo sapiens
ccagacccaaggcgcaagaaaaggagccggaaacggacaaacaggcccaaagaagccgccc

SEQ ID NO: 88570 - RNA, 41 nt, Homo sapiens
gccaagagccggcggcagacgacggaccggaaaaaaaagca

SEQ ID NO: 88571 - RNA, 86 nt, Homo sapiens
cggcgaggagagcccgcggcgcagggaaagcaggcaggagggagagcgccgaagaaccaccccccgccccgggcgggggaagcgaa

SEQ ID NO: 88572 - RNA, 59 nt, Homo sapiens
gcagacgggagcgcaaggcgccccaaggccagacaaaacgggagccagaaaaacacagc

SEQ ID NO: 88573 - RNA, 67 nt, Homo sapiens
cggagcggcaacgcccacaaagagggaccgcagggggaaggccacaccccaaaagaaccccccgacc

SEQ ID NO: 88574 - RNA, 69 nt, Homo sapiens
agggagggaaggcaagagccaacccaaaaccaagcggaccggaagcgagcaggagcagagcggaagacc

SEQ ID NO: 88575 - RNA, 78 nt, Homo sapiens
gacacgcgcaagcagggccccgaaaacggcggaaccaaagaaaaacagaaagaggaaaaccagagaaacaagaggagg

SEQ ID NO: 88576 - RNA, 54 nt, Homo sapiens
aaccaggggcagagggaccaccgacagacagaccaagaacgcaaccccacaacc

SEQ ID NO: 88577 - RNA, 65 nt, Homo sapiens
aggggagaagccgaccgaacgcgccagcgcggggcaacagagaaaaagggcgcacaacgcaggag

SEQ ID NO: 88578 - RNA, 54 nt, Homo sapiens
cgaacaaaacagcccccgaccgaggagaccgagaagcaaagcgccgggcaccag

SEQ ID NO: 88579 - RNA, 57 nt, Homo sapiens
ggggcccacgcacggaaaaggcccccaaaacacaagaggacggagaagcgacgaaag

SEQ ID NO: 88580 - RNA, 67 nt, Homo sapiens
agaacgggaaacaacagagcaaccccaggcaaagaccgcgcgaaacgcccagaaaccaagaagcagc

SEQ ID NO: 88581 - RNA, 53 nt, Homo sapiens
caaagacagcaaaaaaaaggaagcacaccagaggaaggagggccccggagcag

SEQ ID NO: 88582 - RNA, 81 nt, Homo sapiens
aggaccacggcgcacaagcaccaagcggcaacggccaaaccaaggaggagcggagcagaggcagcacaggaggacacacag

SEQ ID NO: 88583 - RNA, 76 nt, Homo sapiens
gaccggcaggcagagcaccgacccagagcagcaagccggccggagggacccgcaccagcgccaaccacccccacag

SEQ ID NO: 88584 - RNA, 74 nt, Homo sapiens
gggggggcaaacccgagagaacggacagcaggcaaggagacaaacagggaccacgcaggaagaacaaacccaag

SEQ ID NO: 88585 - RNA, 67 nt, Homo sapiens
cgaagacggaagacgcgcccgcgccgggaaaaggaggcccagagagaaacgaaaccggaccgaccac

SEQ ID NO: 88586 - RNA, 77 nt, Homo sapiens
aaggaaaccccaacacagagccaagcgccaacagcagccgcccaaaacacaaaccaaagaagaaacccgaaggacca

SEQ ID NO: 88587 - RNA, 56 nt, Homo sapiens
agaggaccccagccgcgcccgggagagcaaggcgcagcccagcccgaaagcagaac

SEQ ID NO: 88588 - RNA, 76 nt, Homo sapiens
gaacccgggaagccagcgcagccaaagcagcagaagacagcccaagggcccagcaaccaagcgccacccccaaccg

SEQ ID NO: 88589 - RNA, 70 nt, Homo sapiens
accggaccgcccaacccagagcggagcggggaggaggggcgaggggaggcgcaggaccccccccagacgc

SEQ ID NO: 88590 - RNA, 72 nt, Homo sapiens
cgcgaggaagcacgccaaggagagagcgaccaaacccccacaacaaggacaaagggacccaaggaccagcag

SEQ ID NO: 88591 - RNA, 75 nt, Homo sapiens
ggaagggagcccagaagacaagcaacggcccaggagagccggaggaacaccaggagacgaagaggccaaagggac

SEQ ID NO: 88592 - RNA, 77 nt, Homo sapiens
ggacagcaggcaacaggaacccacacacaccaccccgagacccaggcccggacgaggagggaggcagccagagaggg

SEQ ID NO: 88593 - RNA, 77 nt, Homo sapiens
gccggagagcggccacccacgccaggcaacaccccgaggagagcgcggggaaggcaggacccgggccgcgcgagccg

SEQ ID NO: 88594 - RNA, 73 nt, Homo sapiens
acgagagccaggaagaaagaagcgaaggacgacagcagccagaaagacgaggcgcacagccaggaggagaaga

SEQ ID NO: 88595 - RNA, 82 nt, Homo sapiens
ccccgacgaggacgaggaggaggacagagcagggcggagacaaaggcgaggaccggcccagccaggcccggggcagcggcga

SEQ ID NO: 88596 - RNA, 50 nt, Homo sapiens
aagggaccgcgaggacgagagagaagggaaaacagacggagggaagggag

SEQ ID NO: 88597 - RNA, 57 nt, Homo sapiens
caccggcaccagcagaccgaagcaaaaaagggggagccagccaccgagacgccgaca

SEQ ID NO: 88598 - RNA, 79 nt, Homo sapiens
caggaggccaaggcagcagagccagaacaccagcacaagccaagggggcagaagcacaagacaacggagcgcccgcgcc

SEQ ID NO: 88599 - RNA, 76 nt, Homo sapiens
gcgcagaccaaagccgacgagccccggagcaggcgacagcccaagacacagccccagcagcccccagacccacaga

SEQ ID NO: 88600 - RNA, 71 nt, Homo sapiens
gaccaggcccaacaggcccccacgcgcgcgagacccagacacacagggacaaacagcgcgagaccaggacc

SEQ ID NO: 88601 - RNA, 82 nt, Homo sapiens
gcgcccgcaccacaccccacgcagcaagagcaaccaccaccagccgggcccagaagcagcccgccccgcccagcccccggaa

SEQ ID NO: 88602 - RNA, 74 nt, Homo sapiens
gggagggcggagcgcgccgagcgcccacgccgccacccaggacaacaccacgacccggagacgggcagccgaac

SEQ ID NO: 88603 - RNA, 41 nt, Homo sapiens
gccgaggagagcaccgggaaagcccagggacggggcaccgg

SEQ ID NO: 88604 - RNA, 70 nt, Homo sapiens
ccaagaacacgacccccgagcgccacgcagagccccgccaggaagacacgccggggaacgaagcagaaga

SEQ ID NO: 88605 - RNA, 77 nt, Homo sapiens
cgaaggggaggcgccgcaagcgcgaggcccagcaggcgcagcagcaagagggaaaaaggcaacgggaccgcggcaaa

SEQ ID NO: 88606 - RNA, 66 nt, Homo sapiens
ggacaccggaggaggggaccccaaagacaaggaggagaaaggaaaaagagacggggcgacggggag

SEQ ID NO: 88607 - RNA, 70 nt, Homo sapiens
ggagaaggagacagccacggagcacaccaggaaaaggccgagaaggagggccagaaggaaggaaaaagga

SEQ ID NO: 88608 - RNA, 63 nt, Homo sapiens
acccaaggcaaggaaaaaagggaagacgagcagaccaaaaaaccaaggacgacgggaaaccgg

SEQ ID NO: 88609 - RNA, 85 nt, Homo sapiens
gaagagaagaagaagaggaagcaaaggaggcgaaggagcagggacacaggagacaacagagagaagacacagcacccccagcccc

SEQ ID NO: 88610 - RNA, 78 nt, Homo sapiens
cgccggcgaggaccgggggggagggggcccggcaggacgaggacgaaggccgagagcgaccgccggacgcagcaaaca

SEQ ID NO: 88611 - RNA, 78 nt, Homo sapiens
gagcccaaagcgccaggaagaccaaaccgggcacacacgaaacgggcaaccggggccagggccagcaccagagagcag

SEQ ID NO: 88612 - RNA, 80 nt, Homo sapiens
caagcggcaggcagagcgagcgccacccggccgccccgcaccggacccccccgccgcgggaggagaagacagaggagcca

SEQ ID NO: 88613 - RNA, 39 nt, Homo sapiens
ggacaagaccacgagccaggccagcaacaccgggggcaa

SEQ ID NO: 88614 - RNA, 56 nt, Homo sapiens
cgaccggacgagacccgggcacagccccaaggaaagaccacagcaagaccacgccc

SEQ ID NO: 88615 - RNA, 70 nt, Homo sapiens
cccaagaaacggcccggcacagcaggaggagccccagaggggaacagaaaaaacggcgagggggaagcaa

SEQ ID NO: 88616 - RNA, 75 nt, Homo sapiens
gccgcaccgggacgacaccggggaccggacaggaaaagcgacacaccaggcgccaagccacaccagccgcccgga

SEQ ID NO: 88617 - RNA, 78 nt, Homo sapiens
gacaggagaaagaagacagccacagaaagggagaagaagcacggaaaaaccaacaaagagaaaaaacaaacagaagcc

SEQ ID NO: 88618 - RNA, 83 nt, Homo sapiens
cccacccggccgcccgcccagcgccgcccccggagggcccacgcagcgccggacaagacccaaagacaggaccacgcaccagc

SEQ ID NO: 88619 - RNA, 77 nt, Homo sapiens
agaggccgggcgcagccggaccgcgaaacagacggaccaggcaagccaccagccacgagacacgccggccaccagcc

SEQ ID NO: 88620 - RNA, 61 nt, Homo sapiens
gcccagaagcccagaggccaaggaagcaccaaacgcaacaaccaggaaaccaacaggaaac

SEQ ID NO: 88621 - RNA, 77 nt, Homo sapiens
ccggccaccccgcacgcggaagcggccccaggagcaggcccgggcaccccgcaggagccccccgggcacagcagcgc

SEQ ID NO: 88622 - RNA, 70 nt, Homo sapiens
aaaccaccaggcgcaggaccccagcgcccacgacaaagcagccgcacaccacgagagggcgggagcaacc

SEQ ID NO: 88623 - RNA, 80 nt, Homo sapiens
ggggcgcagccgcgggcagaggcgggccgccgagcggacccggaccgggggcacgcaggaccagggacgaagagggcacg

SEQ ID NO: 88624 - RNA, 83 nt, Homo sapiens
gagaaagaacagcaaccacagcggacaaagagagaaaggagcaaagagggccccaaggcggcagccccgaccgacggggcaac

SEQ ID NO: 88625 - RNA, 56 nt, Homo sapiens
acaggaagcggggagggcgaggagggcaggaaggaagggaacacggacgacgagac

SEQ ID NO: 88626 - RNA, 76 nt, Homo sapiens
cggaaaggaaacaaaacgagcaaacacaggaacccaacgagccaaaggcaccggcacggaccaccccaacaccggg

SEQ ID NO: 88627 - RNA, 53 nt, Homo sapiens
gagcccaaggccgcaacagccagccagccagcgaaagacacgcccagcaaccc

SEQ ID NO: 88628 - RNA, 82 nt, Homo sapiens
ggcagcagaaaacagccaacagccgaggccagggaaacaggagcgccagaaaggacacagaacaccgcccgcagacaaagca

SEQ ID NO: 88629 - RNA, 86 nt, Homo sapiens
ggcccgcggacccgaccaagaggcagaagacgggggcaggaagacacaaggaggggcaccgaggaagaggacggaagaccggcccg

SEQ ID NO: 88630 - RNA, 47 nt, Homo sapiens
caggagggaaaccaagcaagacggcgccacagcaccggaggaaaccc

SEQ ID NO: 88631 - RNA, 82 nt, Homo sapiens
aagagcagggcagagacccaggagcagaagagcgaaaaccagagacagcaggaggagagaaagaacccacgcaggacgacag

SEQ ID NO: 88632 - RNA, 103 nt, Homo sapiens
ccagggagcccccgcgcgcccggccggcccggagcaccgagccgcggcacggaggagagcggggcccggcgcacccaccaccgccgcccacggcagcccaggg

SEQ ID NO: 88633 - RNA, 114 nt, Homo sapiens
cacccgcggggagaagagccgagacacggacagacaaacaggacgcaagaagggaccaagagaccgggaacccgggggccggcaaaccgcagcaccacccacgcgggaagacaa

SEQ ID NO: 88634 - RNA, 56 nt, Homo sapiens
accgcgcggaccacaaaccgcgccagaaaagccacaaacgaacagcgaaacggaga

SEQ ID NO: 88635 - RNA, 77 nt, Homo sapiens
cgcaaggcgcagaaaaaacaggaaagccagagaggagaggaccaagcaagccagccgacaagcaacgaaagcccagc

SEQ ID NO: 88636 - RNA, 115 nt, Homo sapiens
cgcgccccccgaccaagccagccgggcgagggcgcggagcgccccaccaggacggcagcagaacccaagccagcacaacgccgcaggggagcgcgagcggccccggcacacggag

SEQ ID NO: 88637 - RNA, 74 nt, Homo sapiens
gcaagaggagggccccacagaaccgggaaccccgaacaggcccaagggccggcagagagacaaccccaggcgca

SEQ ID NO: 88638 - RNA, 65 nt, Homo sapiens
ggacaggagaacgacaccgagcgaggagcaagagaacccagaacgaggagccaacaagagaccac

SEQ ID NO: 88639 - RNA, 85 nt, Homo sapiens
cgccgggcccccaacgccggagcgcggcgcccgccccgacccgcgcaggcggcggagggcccccccgcagcccggccgagcgcaa

SEQ ID NO: 88640 - RNA, 78 nt, Homo sapiens
gaaagcaaccgagaggaaacagacccagcacggggcaccacacgaaccgaggcacaccaaaggcggaaggaggaccgc

SEQ ID NO: 88641 - RNA, 79 nt, Homo sapiens
gccacaccgccggggccggagcgccgccgccgccgccgcggacaagagagaaaacaagccgacagaagaaagcagacag

SEQ ID NO: 88642 - RNA, 81 nt, Homo sapiens
ccacccgaaaccgaggcgcgggagccgcaccaccaacgcggccgacaacagccggcgccgccacgggcgaccaagagagaa

SEQ ID NO: 88643 - RNA, 78 nt, Homo sapiens
cccgcgggcccgaaggcagacgggaaagggggccaaggccgggccaccagaggggcacacagggaccaagaagccccg

SEQ ID NO: 88644 - RNA, 78 nt, Homo sapiens
aaacacagagggcacacggcacagaccagcggaaggccaaagacagacgggcccagcacacagggacaacgccagggg

SEQ ID NO: 88645 - RNA, 55 nt, Homo sapiens
aaccaaggcccaggaaaagagcacagaggaagaaaacgcgcgcccccaaaaaaga

SEQ ID NO: 88646 - RNA, 94 nt, Homo sapiens
caacaagaaacacaggcgagcagggacagccaagaaccaaaaaggaccacgaagaggcgagggcgccggcaccagggcgcaaccggaaagggaa

SEQ ID NO: 88647 - RNA, 56 nt, Homo sapiens
aaccagcggaagcccggcggaaggcaaacagggggcaccgacccgcacgcaagaac

SEQ ID NO: 88648 - RNA, 74 nt, Homo sapiens
aaggaccaagaaccagcaaaacaagcacgacagggaagacccagaaaagaaacacaaaacaagcgggaaagaag

SEQ ID NO: 88649 - RNA, 60 nt, Homo sapiens
agaaaaagcgaacagacagacgagggggaaacaaacaaagaaaggacacaggaacaaaga

SEQ ID NO: 88650 - RNA, 76 nt, Homo sapiens
cccgccgccccagccgaagcagccaccaggaggcgcaggcacaaggaacgaaagagaaccagagcaccccaggaag

SEQ ID NO: 88651 - RNA, 72 nt, Homo sapiens
acaaaagcgccagagccaagaacgggcaacaaacgcgcagccgaagcgagcgaacaaccaagaaacagaagg

SEQ ID NO: 88652 - RNA, 80 nt, Homo sapiens
ggaaacgggagacgaccccgagcgggaaccacaccaagggccggcgccggcaagcaggaagagaacggcaaaggcccaca

SEQ ID NO: 88653 - RNA, 79 nt, Homo sapiens
cgccggagccgcgggcaaagccagaggccccccaacccgccaaaagacccccagaaggaggcagagcccgcaccggacg

SEQ ID NO: 88654 - RNA, 80 nt, Homo sapiens
ggcgacgggcggccggcgcgaggcgagcacccaggccacagaggaggaaagagaggggaaagaagcagccaagccccaag

SEQ ID NO: 88655 - RNA, 79 nt, Homo sapiens
gagcccaaaagaagaggcacaggcccaggcagaccgcagcaaaacacgaagcagaggagccagacccaaagcccagaca

SEQ ID NO: 88656 - RNA, 33 nt, Homo sapiens
ccaacaagagcaacccagacagagcgccgggcc

SEQ ID NO: 88657 - RNA, 82 nt, Homo sapiens
cgaccaggagccggggcggcgcaggaggagccgaggcgagccaacagcacgagacgacagaagagcaggcgaggacgccggg

SEQ ID NO: 88658 - RNA, 66 nt, Homo sapiens
aacccgccgagcaccggaaccaccggacacagggggccgccccgggggcccagacaacgaccgaag

SEQ ID NO: 88659 - RNA, 71 nt, Homo sapiens
cacgggaaggaagggacaagacccacagcaaagccagcgacagaagccaggcagacccgcagaccaacgaa

SEQ ID NO: 88660 - RNA, 40 nt, Homo sapiens
agggaaccaccaaccccagggaccaccccgagagggagcc

SEQ ID NO: 88661 - RNA, 89 nt, Homo sapiens
ggcgcccccgccacgcagccggccaccgccgagacccagcacacgccgaccagccagagacgcgcacgaaacgacgaagaggcccgagg

SEQ ID NO: 88662 - RNA, 70 nt, Homo sapiens
cggaccaggcccaccccacaccaggcaggacagccaggggaggagaccgagcaacccagaccaagcaccg

SEQ ID NO: 88663 - RNA, 76 nt, Homo sapiens
gccacgggccgagacacgcagcggcggccagggaccacgggaagcacaggagagcaggcacgaccccagcggcaac

SEQ ID NO: 88664 - RNA, 37 nt, Homo sapiens
gcgaggcccaccaagccaggaggcacaaagacagaaa

SEQ ID NO: 88665 - RNA, 75 nt, Homo sapiens
ggaaccccacggccgaaagaagaagaaacggagaagaggaaggggacccccgcagccgaagcaagccacacaaac

SEQ ID NO: 88666 - RNA, 89 nt, Homo sapiens
gccgaacaagggaaggacaacagcaaggacagcaccaaggggaggacagagccaccaaagcagacagcacggaagaaggaggcagaggg

SEQ ID NO: 88667 - RNA, 63 nt, Homo sapiens
aaccaaggagcaccaaaaagaagaaccgcgccaaggaaaacgagcgccgaggcgggaaagaag

SEQ ID NO: 88668 - RNA, 70 nt, Homo sapiens
gggacgagaccccaacccgccgcgacaggcgaggagaccaacagggcaccaggagacaaagccacaaaaa

SEQ ID NO: 88669 - RNA, 75 nt, Homo sapiens
aaagaaggcccaaagagcagaacagagagacagccagcccagaccagagagaggagaaagcaggcacggagagaa

SEQ ID NO: 88670 - RNA, 53 nt, Homo sapiens
gcggaggcagcccaaccggcagaaggcgccggcggcagagcggggagacgaga

SEQ ID NO: 88671 - RNA, 79 nt, Homo sapiens
caacgaagaacaacagccggagcaggagaggacgggacgccaagagacagagaaggacaaaacggccgagcgaccagga

SEQ ID NO: 88672 - RNA, 80 nt, Homo sapiens
ccggaagcaaggcagaagaggccgaaggagggccccggagcagccacaccaccgaggccccacccagcacgagcacagcc

SEQ ID NO: 88673 - RNA, 93 nt, Homo sapiens
acacgacaagacaggagcaaaaacagaccacccaggcaaagaggaaagaggaacaccaagggagccggggcccgaacgaccagaccgcgacaa

SEQ ID NO: 88674 - RNA, 79 nt, Homo sapiens
gccggagcggagcgacgcgggcaagcggagcaggccgcagccgcgccacaccggagaaccccacagagcaggggccaag

SEQ ID NO: 88675 - RNA, 34 nt, Homo sapiens
caccaaacggcagagaaccaagccgccacaggga

SEQ ID NO: 88676 - RNA, 65 nt, Homo sapiens
agccgcccgaccggagaaagaaagccaagcacacacgaagacgcccgccacagcaagacacgcca

SEQ ID NO: 88677 - RNA, 88 nt, Homo sapiens
ccgacagcgccaggcccagacgccaacgcaggagcacccaggacgcccccgggccaaacggcagcaaaaacagacagaaagggaggaa

SEQ ID NO: 88678 - RNA, 73 nt, Homo sapiens
agccccagacccacacccccagaccgggaccagcgagagggccccagcaccggaccaagagcaccgcaggccg

SEQ ID NO: 88679 - RNA, 78 nt, Homo sapiens
aagcaaaggcgccgaagcgcacgaccccgacacccccaagacagcgcgggagccaggaaacgcagaccccccacgaga

SEQ ID NO: 88680 - RNA, 80 nt, Homo sapiens
ggagcagcccagacaaacaccccgaaacggccaaaccgacagcgacaccacgacaggcagcaaagaagcaagaagagaac

SEQ ID NO: 88681 - RNA, 89 nt, Homo sapiens
agagacacggggggaaaagcccaaggaaaaagcaaagaaagcaaaaaaaagggggccaagaaggaagcaccacccaacccaccagacac

SEQ ID NO: 88682 - RNA, 79 nt, Homo sapiens
ccggccgagggcggccggacccccccccggcgcccaagcggaaggaggagcgagcgacagaaaccaacccaagagcgcc

SEQ ID NO: 88683 - RNA, 81 nt, Homo sapiens
ggaaccggccccacccgggaggggggagcggcgggaggccaccgccagaagcacagagggaaggagaaggagacacagaag

SEQ ID NO: 88684 - RNA, 51 nt, Homo sapiens
cagggacacacgcaccaaaggaggaacaggagacagcggagaaagagcccg

SEQ ID NO: 88685 - RNA, 79 nt, Homo sapiens
aacagcacaaccacgagccaaacaaccagcccaaccacacgcaacaaccagcagcacagagggaggaagaggagccaaa

SEQ ID NO: 88686 - RNA, 57 nt, Homo sapiens
caggaaggacaccaaaggccccccaggccacccaggaccagcggcacacccccccgc

SEQ ID NO: 88687 - RNA, 77 nt, Homo sapiens
gcggcacaccccccaagaccggcggcccaacccaccgggggcaacgaggaacaggccaagaaacaacacagccaagg

SEQ ID NO: 88688 - RNA, 100 nt, Homo sapiens
cggcggacggcgacgggcggccggcgcgaggcgaggacacagggaacacacggcggagaacgacgccggcggcgcacgccccgagagacgagccccgcgc

SEQ ID NO: 88689 - RNA, 73 nt, Homo sapiens
agaccgaaaagaagagaacaaagaagaggcgggcggagggcacaccagaggggggagcgcaaccccagaagac

SEQ ID NO: 88690 - RNA, 54 nt, Homo sapiens
accagaagggaaaagggaaaacacccaaagagaagaccgggaggacagcgagcg

SEQ ID NO: 88691 - RNA, 67 nt, Homo sapiens
ggagaagcccagggagcgcaccccaggaaaccagcccagagcggagacgccaccaccccccagaggg

SEQ ID NO: 88692 - RNA, 80 nt, Homo sapiens
cgcagcgggagcggacggcgagcgcgagcggcgcgagaaaggcccggccaggccccaccgccacaagcaggggaacaccg

SEQ ID NO: 88693 - RNA, 75 nt, Homo sapiens
gagagagaagagccagagggacacgcgggcacggccggagggaaaaagagggacgcggacagagacgggacgcca

SEQ ID NO: 88694 - RNA, 71 nt, Homo sapiens
ccagcggggaacagcccggccaccaaggggcaggagcaacaagaaacgggagccgcgcaaaggaaaaaaca

SEQ ID NO: 88695 - RNA, 75 nt, Homo sapiens
cgaagccgggccaaaggacgaagaacccacagaggaccgagcacacaaacccagccgccccggcccaccgcaccc

SEQ ID NO: 88696 - RNA, 80 nt, Homo sapiens
caggagggacgcaaaacgcccaggaggccgacgggaccggacggacacgcaagcaccgcggcaccggagacgcagcgagc

SEQ ID NO: 88697 - RNA, 70 nt, Homo sapiens
gaagaagagaaagaaaaccagaccgcaacccaccaaggagcacaggacgaagaggaaggaaaaaacaggc

SEQ ID NO: 88698 - RNA, 77 nt, Homo sapiens
cacagaaccaagggaaaaaaaagccgaagagaacacaacaacaagaagaagaaagaaaaaggcgaagaggagaaaaa

SEQ ID NO: 88699 - RNA, 74 nt, Homo sapiens
cgagaaagccaggacaaaacagacgcgcccagagcgcagcacgggcgcaggaggagcacggcgaaccgcaaaca

SEQ ID NO: 88700 - RNA, 68 nt, Homo sapiens
gaagagcgagccagcgcccggagcaagcggagccccccaagagccggaaaggggaagcgacgaggaag

SEQ ID NO: 88701 - RNA, 44 nt, Homo sapiens
gagaacacacagcggggggggcacagaccccaagaagaagcgga

SEQ ID NO: 88702 - RNA, 70 nt, Homo sapiens
cgcaagccacccaagcagagccacgggccccccagccagaccgagaccaggccaaaacaagagcggcccc

SEQ ID NO: 88703 - RNA, 38 nt, Homo sapiens
caggaggacccaaacgaagaaggagacccaacaccccg

SEQ ID NO: 88704 - RNA, 76 nt, Homo sapiens
gaacgcaacaaagaaacgacaaacagaacagaaccgcaaaagccgagggaaccggccacccgacccgaggcccgcg

SEQ ID NO: 88705 - RNA, 35 nt, Homo sapiens
ggggagccccgcgccacagcaaagcaccacagggg

SEQ ID NO: 88706 - RNA, 79 nt, Homo sapiens
gccagggaggcggcggcgggaacgagggcgagcagaggacgacaggccgggaggggacccgaagaggaacccgaaggca

SEQ ID NO: 88707 - RNA, 79 nt, Homo sapiens
caccgagcacccgagaaccaaacccaccaggccagacgcccccggaacagcagggccggcaccgccgaggcagcccgcc

SEQ ID NO: 88708 - RNA, 72 nt, Homo sapiens
aacgccgcccgccaccaccggagccggaaacacaaagaagacaccagaagggccagcaccacgacaacacgg

SEQ ID NO: 88709 - RNA, 105 nt, Homo sapiens
ggggaggcgaggacgacggggcgagaccccgcccggaccgcagacgagccacaggagcccggcccacgcgggaacgagccggccgagcgccgcgggagaaggccc

SEQ ID NO: 88710 - RNA, 84 nt, Homo sapiens
caagggccgagagggaccggcacggcaaggccccaggaaccccgcacagccacaccaaagagggaaccgcgggaagcgacaccc

SEQ ID NO: 88711 - RNA, 41 nt, Homo sapiens
cccgagcagcgggacacaggagagcggggcccagacccccc

SEQ ID NO: 88712 - RNA, 79 nt, Homo sapiens
gaagggaggacggggcccacagcagacgaaccagagaacaggagaccgccagccggcacgggcaagggacaccaggaca

SEQ ID NO: 88713 - RNA, 94 nt, Homo sapiens
aggcgcggggcggcggcgcggggcggcgggagagcccggcggcggagcgaaagcggaacagcacgcgagaccgagcccagcaaagggcaggacg

SEQ ID NO: 88714 - RNA, 86 nt, Homo sapiens
gcagcacgagaagacggaaagcgacgggccaaaacagaagaggcaaagcccagccacagcagcagcccagcagcaaacaaccaaag

SEQ ID NO: 88715 - RNA, 79 nt, Homo sapiens
ccaccgcccgagaaggcgacccaccgcgagggagcgacgcgccaccaccggcaggcaaccgcggagggaccaaaccaca

SEQ ID NO: 88716 - RNA, 112 nt, Homo sapiens
cccgcgggggcccacagggcgggagggcaccgacggccggggagggcgggccgagacagcccccgccaccggggcccccgccccccccggcggcggggggcgcccccggggg

SEQ ID NO: 88717 - RNA, 77 nt, Homo sapiens
aggagcggagcggcagcagaaggaggaaagaagcccacccaaggaaggacccaacaagaaccagaaagaaagggaag

SEQ ID NO: 88718 - RNA, 85 nt, Homo sapiens
cacccccacgggagggagcgcgcaggagccagaaaaacgggcaaacccccccgagcacgcgcagcaaacccacccgcccggaagg

SEQ ID NO: 88719 - RNA, 79 nt, Homo sapiens
gcggaggacacgggggccacaaagccccccggagacgcaaccaagggaggagccaagagggcccgaggaaaaaggaacg

SEQ ID NO: 88720 - RNA, 79 nt, Homo sapiens
ccgcacacgagacgccaagagcgaggagccgcacgcaggccagcggggcgacaccagcgaccccgggccggagcacacc

SEQ ID NO: 88721 - RNA, 71 nt, Homo sapiens
ggcccggggggacggggggaggcaggaccggaccgcaacagggccggccgcgcacccagacccgagccgcc

SEQ ID NO: 88722 - RNA, 70 nt, Homo sapiens
cgaaaacccggacccgcaccgcagcggagacaccagggagccaacagaagggccaggccaaacaaggcac

SEQ ID NO: 88723 - RNA, 77 nt, Homo sapiens
cggaacaggcaccaagccggcggggcggacgcagcaggagggaagcgcgcagacgggcaggcgcgcggggggcgacc

SEQ ID NO: 88724 - RNA, 98 nt, Homo sapiens
ccggccagacacgaagaggagcaggaacagcacgacccagccgccccggccgcaggccaggaaggaagaccgggaggaacagagaaaagaaccagaag

SEQ ID NO: 88725 - RNA, 80 nt, Homo sapiens
ggagcagagaaaccccaagggacaacccgccacaacgacaaaggaccccaaagaccccggaaggcggaccaggcacaaga

SEQ ID NO: 88726 - RNA, 76 nt, Homo sapiens
cacaggggcgggcagccgcccaggaccagcaaaccccacacgaccgccagagcggaacgaccccagagcgagcccg

SEQ ID NO: 88727 - RNA, 80 nt, Homo sapiens
cggaggggcgcgggacacacccccaggaggcccggcagagcagggccagaccaaaggaaccagagcaggagaaaacgagg

SEQ ID NO: 88728 - RNA, 75 nt, Homo sapiens
acaaacacaccgaaccagagagaagaaagggggcccaggaaacgagaagaacgaaagagaaacccaaaaaaagga

SEQ ID NO: 88729 - RNA, 85 nt, Homo sapiens
gccgcccagaggccacccagccccagacagagggcgaagacaggacggcccaggcagacacggaggaggaggaagaggaggaggg

SEQ ID NO: 88730 - RNA, 71 nt, Homo sapiens
agagcgagcgagggggggcgcgccggaaaccggagcgcgcagcagaccccgagagaaacggcgagaaaacc

SEQ ID NO: 88731 - RNA, 38 nt, Homo sapiens
accgggacgggcagcccagcgacagccaccgcaacggg

SEQ ID NO: 88732 - RNA, 125 nt, Homo sapiens
ggaaaaaccgcaaccaaaacaacggcagcgaccacgggaaggcgccgcgcacgaaggccaggcagagcagcccaccagggaggggagggggggaggcgcaccccgcgcccacccaccaccagcag

SEQ ID NO: 88733 - RNA, 70 nt, Homo sapiens
ggacaggccacaacccaccacaggaggggggccgagcagcaccacgaaggcaggcccacgggagccgaga

SEQ ID NO: 88734 - RNA, 68 nt, Homo sapiens
ccgccgcgggcaggacgcgcgcgcagggcacacgggccacagaggaccagcaaggagaagaaaggagc

SEQ ID NO: 88735 - RNA, 69 nt, Homo sapiens
gaagaaagcggaaagagcgacaaacaaagaaagacggaccccaggcccacaaaagccgagcagcaacag

SEQ ID NO: 88736 - RNA, 82 nt, Homo sapiens
ccgcccgccacagagcagaggcggcggccgagcgacggccccggcccaggagaggcccgagcgcaggccgcacggggacgaa

SEQ ID NO: 88737 - RNA, 75 nt, Homo sapiens
gcggcagagccacgcgccgagaggcacgaagaacaaacaggggaaggacacgaagcagaggcccaagagcagcac

SEQ ID NO: 88738 - RNA, 55 nt, Homo sapiens
gaaaaagaccagacgcggaaaaagaagcgagagccggaacccgaagaggcagcag

SEQ ID NO: 88739 - RNA, 75 nt, Homo sapiens
aagccaccagagcggcccccagcaccacagcccgcagccccgccagccacccccaggggaggcaagcaggggggc

SEQ ID NO: 88740 - RNA, 67 nt, Homo sapiens
ccagccagcaagcccaagccaggggagaacacccagcagaggcgcaggaaaagcaccgaaagaacac

SEQ ID NO: 88741 - RNA, 66 nt, Homo sapiens
gagaagcggagaagggcagaagagcccagaagaggcaaacaaggagagagagcgcaaacacgccgc

SEQ ID NO: 88742 - RNA, 72 nt, Homo sapiens
caagcggaaagcacgaacgcacagaccaagccaaagaaacacccaacccagcgcacacgacagcaaagggaa

SEQ ID NO: 88743 - RNA, 79 nt, Homo sapiens
ggcgagcggggcggggcagggacccaggagcagaggcgagcagcaggaacagcagcgggagcagcccccagaaggaggg

SEQ ID NO: 88744 - RNA, 57 nt, Homo sapiens
aagacaccggacaccgagggcccccaaaaggccgccaacaagagaacaaaagagcag

SEQ ID NO: 88745 - RNA, 76 nt, Homo sapiens
acagacccggaagccagggccgaggggcgccagacaacaggcacaaagagagaaggaacacccacagggcagacag

SEQ ID NO: 88746 - RNA, 79 nt, Homo sapiens
gcagacgagcggaggacacccaacccggggcagacagcagggacagggaaccccacaacaccaacagcacacccacccc

SEQ ID NO: 88747 - RNA, 76 nt, Homo sapiens
gggggaaaaacccagccggccccaagagccccccccagcgccgaaggcccgacccagcagcccggcccggcaccgc

SEQ ID NO: 88748 - RNA, 70 nt, Homo sapiens
aagacggaaagaccaacggagacaaaacagccaagaggaaaaaagccgcaagagaggagaacagaaaaca

SEQ ID NO: 88749 - RNA, 79 nt, Homo sapiens
cacccaggcaaggaccgaaaggcaacaaagaaggagcgaagcaaaaccccggacaagaaagccagagaaacgacaccag

SEQ ID NO: 88750 - RNA, 75 nt, Homo sapiens
aagagggcgagcaggacgaagcgcccgccaccaagggaggaaaaaggaacaagagcaagaaaaaaacaaaacgca

SEQ ID NO: 88751 - RNA, 81 nt, Homo sapiens
aaacagagcgcaagacacaggacacaacccaagaaacaacggaacccagaagcccgagagacgagacagacaccaaagaac

SEQ ID NO: 88752 - RNA, 116 nt, Homo sapiens
ggggaaggcacagaacaccggggcgcgggaacagccgcgacggcccacaacccacggggaagggagaacgagggcacagccccaccagaagggccccaggagacaccgcccgaggg

SEQ ID NO: 88753 - RNA, 55 nt, Homo sapiens
caagaagacgccaggaaagaaggaccgccgcaagacgaagaagcagaagccaaca

SEQ ID NO: 88754 - RNA, 71 nt, Homo sapiens
aaaaccggaaacaaaagacaggaaggaaagggcggccggcccaaggaggcagggcgaccggccaccgcaac

SEQ ID NO: 88755 - RNA, 80 nt, Homo sapiens
ccagggaaccgaccggacaccaccaccagcacaacggaccacaagaggccggcaccccaacagccagggcagcagaccag

SEQ ID NO: 88756 - RNA, 83 nt, Homo sapiens
gacgacccccagcgagccagcggagcgcgagacaggggccaggccaggggcaggggaagcacccaaccaacgagcgggccaca

SEQ ID NO: 88757 - RNA, 82 nt, Homo sapiens
ggcccccccccagggccaggcgccgccagaacgggggagaggcaccagcaacagaccaaccgcagcaagcacagagacagga

SEQ ID NO: 88758 - RNA, 53 nt, Homo sapiens
caaccccacagaccacacacccgacaggacagggggagaggcaaggaaacgac

SEQ ID NO: 88759 - RNA, 76 nt, Homo sapiens
aacgggagacaaaggaggcaacagccaaccagaaaaccagaaacaccggcagggagcaaaccccccaacaagcacc

SEQ ID NO: 88760 - RNA, 68 nt, Homo sapiens
gacacgagcacaaacgaggaagaccagcacaggacgcccgaaaccggggcaacgcggaggaaggcagc

SEQ ID NO: 88761 - RNA, 80 nt, Homo sapiens
gagaagcacggcgcccggggaggggaccgcgcccgcccagcgccgcagcacgcggaccaggcggacccggacgacaccaa

SEQ ID NO: 88762 - RNA, 76 nt, Homo sapiens
cgccacagcggcaaacaggcagacaggcgggcaggggcacggccaggcagcccgacccgggaccagcgacccccgc

SEQ ID NO: 88763 - RNA, 72 nt, Homo sapiens
caacagacgaaaaagcagaggcaagaaccaggaaaaacggagccgagaccaaggccaaacacacaggaacgc

SEQ ID NO: 88764 - RNA, 76 nt, Homo sapiens
ccaagacaccaacaccaggaagagaggaagcgggggccgagaccacacaggacgcccagggaggacgcgcccacac

SEQ ID NO: 88765 - RNA, 57 nt, Homo sapiens
gggaggaccccagacaccggagacgggaaagccagcaggacaggcacacccgggcag

SEQ ID NO: 88766 - RNA, 86 nt, Homo sapiens
ggaggagacggcggaaaacggagagacggggagaaaggacagagcgcccagccaccaacaagcgacagaagcaaccggaaacacaa

SEQ ID NO: 88767 - RNA, 72 nt, Homo sapiens
cacgcccccaagacaacgaaggccccccccccggaggcagccggccccgggcccaggccagcggaccaagcc

SEQ ID NO: 88768 - RNA, 81 nt, Homo sapiens
agcggcggccccgcccgggcgcggaggcgaagcccaggagcggcccgcagagccgacccaggggcgggggggggcaccccc

SEQ ID NO: 88769 - RNA, 86 nt, Homo sapiens
gaacagcagcgccgcccgccgacagccaggcccgggagaagcaaaagcagaccggaaaacccaccggcaagaccacacccgagggg

SEQ ID NO: 88770 - RNA, 47 nt, Homo sapiens
gggacccaggccccacgagcggggccagagagaggacccaagaagac

SEQ ID NO: 88771 - RNA, 77 nt, Homo sapiens
gaaagaggcacacccagcccgagcaagagaacaaccgcaacgaacaaacaggagacagagagcaagagcaccccaac

SEQ ID NO: 88772 - RNA, 39 nt, Homo sapiens
ccaccaggaggccagggggcgccagagagagcagcacaa

SEQ ID NO: 88773 - RNA, 76 nt, Homo sapiens
cgcgaaggagacacaaacaacaccacccgaaccggcagaaagcaacagaagcagaagaaaggcggaccacaaggaa

SEQ ID NO: 88774 - RNA, 75 nt, Homo sapiens
gggccaggcagcccaggagaccagcaaagaaccaggaacaccacccgcagacaagaacccagcacaaaaccagcc

SEQ ID NO: 88775 - RNA, 102 nt, Homo sapiens
cacgaccaaggggcgagagcccccaccccagacaggggaacagggcacagcccacccaggcagacaggcagacgacacccccacagcaccgacgcccaagca

SEQ ID NO: 88776 - RNA, 71 nt, Homo sapiens
ccgacgccaggcagcgcccccaaacggacaaacaagaccaccagcccacaccaccagaccaaaccagcgcc

SEQ ID NO: 88777 - RNA, 75 nt, Homo sapiens
cgccagcaccgccaccagagcgcccgcgcgggaccccaggcgccggcgaaagcaacgaagggacgccagaacaag

SEQ ID NO: 88778 - RNA, 82 nt, Homo sapiens
acccccgggggaaaagagacaccgacaagacaccacggacgagagacaaacgccgaagccaggacaaaagaagggagaaccg

SEQ ID NO: 88779 - RNA, 76 nt, Homo sapiens
aggcgggcaaggaacaggcgagaaacagcacccgaggaggccgcgaggcacagaagaccgggagacgcaggaaaga

SEQ ID NO: 88780 - RNA, 75 nt, Homo sapiens
caggccgacggaggaggagggcgcaaacaaaaagagaaacgacagaaagggcgggagaacaacaggcacgacgcc

SEQ ID NO: 88781 - RNA, 89 nt, Homo sapiens
ggggacacgcagccggagcccgggaggggccgcgccgccaccgcgaacaggagcccgacagaaggcccacagcagcagaacaaaagcaa

SEQ ID NO: 88782 - RNA, 82 nt, Homo sapiens
gcccccgcgggcgccgggccaggacggggggacccgacgaccagggggagagacccgcgcccccccgagcccagggcacggc

SEQ ID NO: 88783 - RNA, 59 nt, Homo sapiens
cagaccggggagggaaagaaagcaggaaaaaacagaacaaggccggaccaaagacaccg

SEQ ID NO: 88784 - RNA, 105 nt, Homo sapiens
cacggccgcacggcccgccccggcgggcagagaccagcaccggagaaggacaccagaggaccagaacccacgagaaacagacgagccaaccagaccccaggagcc

SEQ ID NO: 88785 - RNA, 81 nt, Homo sapiens
cgcgagacgccgccgacgccgcgcgggccgcgcgcgcgcgcccggaaaccgagccaggacaaaaccaggcagaaccaacac

SEQ ID NO: 88786 - RNA, 78 nt, Homo sapiens
caaagggcagaaggaggccgccgccagcggaagacgcgccaccggagcggagccccgcggaccgccggccccgccccc

SEQ ID NO: 88787 - RNA, 78 nt, Homo sapiens
agagagcgcagacaggacaccaaacaccgccgccgaacgggccagcggggcgagcagagcgcgcgaagggcgcacaca

SEQ ID NO: 88788 - RNA, 70 nt, Homo sapiens
ggagagccagccaagaaaagggccaagccaggaagaagaaaagcaaccagacccgaggagcggggagaga

SEQ ID NO: 88789 - RNA, 80 nt, Homo sapiens
agggcacacggaagagccggcacgggcgacagcaggcacagggacgagggggcggaaggaagacacggggccgacgcgag

SEQ ID NO: 88790 - RNA, 64 nt, Homo sapiens
cccagacacagacgagcaggggaaggcacagagagcggcggacccgacgccgccagcccccagg

SEQ ID NO: 88791 - RNA, 75 nt, Homo sapiens
accggcaccaccgcacgagcacagacagccaacagcgagaacaaggacacgggccgacccggcgccaagaccaac

SEQ ID NO: 88792 - RNA, 70 nt, Homo sapiens
cgcggggccgaaaacaacgacaacgagcacagaacccaaggaaagaccggaaagaaggaagaaaagacac

SEQ ID NO: 88793 - RNA, 77 nt, Homo sapiens
cggaccaaaccgaaaacccgacgccgagaccgcacagccgcgagcgagcgcgaccgaggcgcaaacgaagaaggaaa

SEQ ID NO: 88794 - RNA, 75 nt, Homo sapiens
ggcagaccccacaagaaaggaggaagcagcaaagcagcgcgcagcgcagccaagaacaaaacagggagaaacccg

SEQ ID NO: 88795 - RNA, 77 nt, Homo sapiens
cgacagccccaaggcaacaagcccacccgaaaccacaaggccgacgagagggagaaccagacaccccaacacaggcc

SEQ ID NO: 88796 - RNA, 80 nt, Homo sapiens
accggagcaaccccgaggggaagggaagcccccagaacgggacgaaagaaccccagaacccagcccgcacacgcagccag

SEQ ID NO: 88797 - RNA, 74 nt, Homo sapiens
cgcggaggagggaaggcggccggggccgggacgccagccaggaggacccccggggaaaggcagcaccgagagcc

SEQ ID NO: 88798 - RNA, 82 nt, Homo sapiens
ccccgagcagcgggaacagggcgggaccccaaggccgggcaggcaagacgaaggacaaccccaggaaccccgggcgaaggag

SEQ ID NO: 88799 - RNA, 111 nt, Homo sapiens
agcggaccgcggagcgagaccacccgaacgacgcgggcgagcggggcggacgccggggagacgcaggcgagcacaccgacagagaacccaggccaacacacagacagaggc

SEQ ID NO: 88800 - RNA, 87 nt, Homo sapiens
ggagaagccgggacagccccacccgggggccgggacagccaagcacccgccgccggcagccgcggaaggaaaagggggccaggaagc

SEQ ID NO: 88801 - RNA, 40 nt, Homo sapiens
cccgagcagcgggacacaggcaagagcgaaggagaaaggc

SEQ ID NO: 88802 - RNA, 67 nt, Homo sapiens
gaggagcgaacgagacagaacaggaaaaagggggggaggggaacagcagcggagaacacggcagaga

SEQ ID NO: 88803 - RNA, 66 nt, Homo sapiens
accggaggacgcggagaaccggcacagcccccgggagccgcagcccaaagcaagaagagcgaggcc

SEQ ID NO: 88804 - RNA, 80 nt, Homo sapiens
cggcccgggacacacacccagaccaagcccacgaagaccggagaagaggacggcgccacccgccacccacgagcccggcc

SEQ ID NO: 88805 - RNA, 76 nt, Homo sapiens
gagggcgggggcagcggcagacaagcagaccggaagaccgacggaagaccacaccccgagggagcccaggacacca

SEQ ID NO: 88806 - RNA, 76 nt, Homo sapiens
aagaagggaaggcgcgaggaggaaaggaggacgagggacgcaacccaccacgaagcggagagcaggaaggggggcc

SEQ ID NO: 88807 - RNA, 81 nt, Homo sapiens
ccccccggcgccgcgccggcggcgacagcaagaaagcaccagccaagcagaagggagccagcggacgagggcgccaggcca

SEQ ID NO: 88808 - RNA, 41 nt, Homo sapiens
cagcacaccaggaagcaaggagccgaggaaacccagaccca

SEQ ID NO: 88809 - RNA, 79 nt, Homo sapiens
gcagccccccccaggaccccaggcaggcggagacacgaaaacaggaagggagaggaagaaagaccaaacgagagacaaa

SEQ ID NO: 88810 - RNA, 84 nt, Homo sapiens
caacaggccgcgccggcggcagagaggaacgggcgggggaggagcgcgagcccggcagacaagccgagaccaccaggagcagag

SEQ ID NO: 88811 - RNA, 82 nt, Homo sapiens
cgcagccggccgggccacgcaggacaccagaggaccagaacccacgagaaacagacgagccaaccagaccccaggagccaaa

SEQ ID NO: 88812 - RNA, 60 nt, Homo sapiens
accccagagagagccaacacacagagaaccaggccccgcggaagccgcgggcggcgccag

SEQ ID NO: 88813 - RNA, 80 nt, Homo sapiens
gacgaacggaacagaaccggcaggagacaagcgcaagcagccagagcccgggcgcaaagaaccaggcccggaccagagcc

SEQ ID NO: 88814 - RNA, 78 nt, Homo sapiens
gagcggacgggccaacccaaaaccagggcggcaaaacgagcgggccagccaccaggagagaacgccgcgccgcgcgac

SEQ ID NO: 88815 - RNA, 78 nt, Homo sapiens
ccggccaagccacgccgaccagggaggaccggacccccgcaaggcaaccgggaggggagccagaggcaggaagaagaa

SEQ ID NO: 88816 - RNA, 79 nt, Homo sapiens
cgaaaagcagcaacgagaagaagccaccaaggagcaggaaaacgacccccaggcaaaccgccccgcagcaccacccggc

SEQ ID NO: 88817 - RNA, 72 nt, Homo sapiens
cccaccaacagccgcgaccaggccaagaaaggagacaacaaggcgccacaggagccgcagaagcaaaggcac

SEQ ID NO: 88818 - RNA, 80 nt, Homo sapiens
gccaaagcgagagagggaagcgcccggccggaggcaggggaaagccaccagccaaggacagagggcaagagagacccagc

SEQ ID NO: 88819 - RNA, 76 nt, Homo sapiens
acacgaggccacccagcccaccaaacacgccggaaaccccgcccacagcacgagacaaagaacgcaaacccaagcg

SEQ ID NO: 88820 - RNA, 70 nt, Homo sapiens
acaaaaacaacagaaaacccgaccaggacaggacaacaacaccccacacaaagcggcaagagcaagaaca

SEQ ID NO: 88821 - RNA, 77 nt, Homo sapiens
aaggagcccggccccacaccggcacacagcggcggagaacggaaaagcaccaggaagcagagaggaccgcagaaggg

SEQ ID NO: 88822 - RNA, 76 nt, Homo sapiens
acaagcaaggcggagggcagggacgggccacgagccgggcccccgagaaaagagaacgcaagagggccgaacaacg

SEQ ID NO: 88823 - RNA, 74 nt, Homo sapiens
caccaggccgcccagaaccaaggagaaggaagccaacaccggagccagaaagccgaacccacggccagaggaac

SEQ ID NO: 88824 - RNA, 66 nt, Homo sapiens
cggggacccccgacgccaggcagcgcccccaaacgggccacaaccaaagcgggccacagacacagc

SEQ ID NO: 88825 - RNA, 35 nt, Homo sapiens
gcgagcaccaagagccggagagcgccggcccaggc

SEQ ID NO: 88826 - RNA, 68 nt, Homo sapiens
ggacagcgagaagcccaaccacaggagaaaggggaaagaagaacaggaccacaggaagcaagagaaga

SEQ ID NO: 88827 - RNA, 77 nt, Homo sapiens
ggcagcaggcacaacaccgcacacccagagcagacaaaacggacccaaaaaagccaagccaagaagccccgccccga

SEQ ID NO: 88828 - RNA, 78 nt, Homo sapiens
caggccgcagggccagagagagaggcgcaggacgccagagacggaacagagaagcaacccaacagacaggcaaaagaa

SEQ ID NO: 88829 - RNA, 75 nt, Homo sapiens
acagagggaccagaaggcccagacaaggagccaagaagccggacccaagccagaagcccgcaaagcccccagacc

SEQ ID NO: 88830 - RNA, 70 nt, Homo sapiens
gggaggggcgcacagcgccccaccccagaggcgcggagcgccccaggggagggaaaccagaggagaggac

SEQ ID NO: 88831 - RNA, 54 nt, Homo sapiens
gacccaccagcaagaagagcgccagccccaaagcccaagcgcaaaaaaaaggcc

SEQ ID NO: 88832 - RNA, 80 nt, Homo sapiens
gcggagaaggaggcggcgcccgggcgggccccaggccaagcaacgacagaagggcccgacccaggcaagcgagcaggcga

SEQ ID NO: 88833 - RNA, 81 nt, Homo sapiens
acggcaggaggacgcaagaaacgcaccggcagagcagagggaacagggcacggcaacacggaaccagggcacggcaccagc

SEQ ID NO: 88834 - RNA, 73 nt, Homo sapiens
ggagggggcaagaagaaaggccccggaagcaacccagaaacccaggaacccagcagaagccagccgccacgcc

SEQ ID NO: 88835 - RNA, 86 nt, Homo sapiens
ggggaggagccaaagcccggcgccaccaagccgcagggagaacacccaacgggagggcggagaacggaaaagcaccaggaagcaga

SEQ ID NO: 88836 - RNA, 77 nt, Homo sapiens
ggccgcggggcgcgccgggacaggagaagccgcgggagcggaagacaggcccggagcccgacggaccggagaagcag

SEQ ID NO: 88837 - RNA, 78 nt, Homo sapiens
ccagggagccaagcgccgcccggccaacccaggagaaacgagagggacagcaaggaagacgccagagagcggcacacc

SEQ ID NO: 88838 - RNA, 78 nt, Homo sapiens
gaccccgcagccgcagaggaggagcgcagcccggcccggggaaaaaagcagcggaggagaaaaaaaagaagaccgcag

SEQ ID NO: 88839 - RNA, 78 nt, Homo sapiens
gcgcccagcagcgcagccaaaagaaacccccaaaaccggaagaaagagaaggaacagaggacacgcacaccacagacc

SEQ ID NO: 88840 - RNA, 80 nt, Homo sapiens
ggagaccagaccacgcagccacgcgggcgagcggcggggagcggcgaagccgcgggcgagcagcccagaaagccgggaca

SEQ ID NO: 88841 - RNA, 81 nt, Homo sapiens
cggaggacggcaaggagggaagacaacaaaaacaacgcaggacagcaaagacccgggaagaggaagaccaacacagaaagc

SEQ ID NO: 88842 - RNA, 78 nt, Homo sapiens
gccagcgcgagaagggcgacacacgaggcgcaccagagaccggacccgccagccaccaggagagaacgccgcgccgcg

SEQ ID NO: 88843 - RNA, 72 nt, Homo sapiens
accccggacacgggcaggcagggggcagcacgccgaaggagagaccagacaacaggccagggaagggaaggc

SEQ ID NO: 88844 - RNA, 57 nt, Homo sapiens
gggcgcggcaacagaggccgacccaggcagacccgaccgcaaggacagcgccggcgc

SEQ ID NO: 88845 - RNA, 80 nt, Homo sapiens
aaacaagggaacggaggaaaaaacaagacaaacaaggggaacccaacacacacgaaggaaaagcaacggcgcaagaggcg

SEQ ID NO: 88846 - RNA, 79 nt, Homo sapiens
gaaacaagggggaaggagacaagggcacggacgagaggcacagaacagcaggaggccagagcccaggccgaggcgaaag

SEQ ID NO: 88847 - RNA, 77 nt, Homo sapiens
accagacgccagcgggacgaggaccgagaccgcggccgggaccgaggggccaaaaaggaaacgcgaaaaaagacccc

SEQ ID NO: 88848 - RNA, 59 nt, Homo sapiens
cacgccgggaacccaggcagcgcggccgcgagaaccgggcagagcagcccggcgcaccc

SEQ ID NO: 88849 - RNA, 66 nt, Homo sapiens
agcccggcacggcccagccccaagcggacaggacaaaacgaagaaagaaacaaccaaaccccgacg

SEQ ID NO: 88850 - RNA, 35 nt, Homo sapiens
ggaccaagaaccaggcacccgacaggaggaccacg

SEQ ID NO: 88851 - RNA, 49 nt, Homo sapiens
cggcccggccacccgggagagccgcggcgcaagggaagaaaagggaacc

SEQ ID NO: 88852 - RNA, 68 nt, Homo sapiens
gacgccggcgccccacccccggcggccccacggccccccgggaggagagccgagccccacagccgaaa

SEQ ID NO: 88853 - RNA, 77 nt, Homo sapiens
caggaacagacacggggaagcgcaaaaacaagacggggcgccccacagaggggcgacggcacaaccaaggccggccc

SEQ ID NO: 88854 - RNA, 65 nt, Homo sapiens
ggcccgacccgcgagaggacaggagagacaacggaggcaagaaagacggagaagcgagaagagac

SEQ ID NO: 88855 - RNA, 80 nt, Homo sapiens
gggcgccccccccgccgccccgggccggggccggcccccccgagccagagagaaagccccgggaccaaggacacgcagac

SEQ ID NO: 88856 - RNA, 90 nt, Homo sapiens
aggaaaacaacaggacaagaacaggggccacaggggccccgaagaaccccacaagccacaggaggaggcagcaggcacaaggcgagaagg

SEQ ID NO: 88857 - RNA, 70 nt, Homo sapiens
aggccgccgggaccccagagcacgggcggggaagcgcgccacagcaggcggggcagcccgaggccccggg

SEQ ID NO: 88858 - RNA, 80 nt, Homo sapiens
agagacgaacaacagcaagaaaacagcaccgaaacccgaccggaaagagccccaagcccgcagccccagaagaaaaacac

SEQ ID NO: 88859 - RNA, 76 nt, Homo sapiens
aacaaccaaagaaaacagaacagaaaaggccacccgcagcgggggaagccaccaggcggcagcacgggccccaggc

SEQ ID NO: 88860 - RNA, 53 nt, Homo sapiens
gaacggacaggcggaaagcagcaaagcggaaaagccagggcggaaaccggcaa

SEQ ID NO: 88861 - RNA, 39 nt, Homo sapiens
acaccaacaggaacagaaaggcagagcgaaggaaaacca

SEQ ID NO: 88862 - RNA, 66 nt, Homo sapiens
cagacaaaagaacggagcccgggcacaccagacacagagacaccagcccccagaacgaccaaaaag

SEQ ID NO: 88863 - RNA, 83 nt, Homo sapiens
agaccacgcagccacgcgggcgagcggcggggagcggcgaagccgcgggcgaggaccaagaacgcccagcccgcgggcaccgg

SEQ ID NO: 88864 - RNA, 44 nt, Homo sapiens
cagcaacagagaaaacagaccgaagccaggacagcacagccgag

SEQ ID NO: 88865 - RNA, 64 nt, Homo sapiens
ccacggcggagcaaacacccccagccgcaagacagacggacagcgacagaagaacagccacaca

SEQ ID NO: 88866 - RNA, 81 nt, Homo sapiens
aggaacggggggcagcaaggagcccgcagagccacggacggagccagggaaggggacgcgcgccccgagcacgcacgcggg

SEQ ID NO: 88867 - RNA, 84 nt, Homo sapiens
aaggagaagcagcaggggcccagacccggacacgcgggggagaggcccgagaggcaggcacagcccaagcagaggacacacgaa

SEQ ID NO: 88868 - RNA, 64 nt, Homo sapiens
cccggcagggaccggcgacgaggccgagacggccggcaacaagcgaggggggaggccaggcgcc

SEQ ID NO: 88869 - RNA, 80 nt, Homo sapiens
gaacagagaaggagccagaacagaggcacccagggaggagccaccggacccgacacggccaacccgcgcccacccccgga

SEQ ID NO: 88870 - RNA, 84 nt, Homo sapiens
gcgccgacccgagccgacgcagggcgccagcgcccagccgggaggagcagcagagcggaggggcagggggccaaagggcgaggg

SEQ ID NO: 88871 - RNA, 79 nt, Homo sapiens
ccaaggacaaaaagcagcccggaggggaaacccccccaccacagcagcagccaccgccaccaccaccgcagaggggccc

SEQ ID NO: 88872 - RNA, 62 nt, Homo sapiens
cccccagaacgcagaaagcgaccccagcgacccagaggacaaggagcccggcacacccaacc

SEQ ID NO: 88873 - RNA, 71 nt, Homo sapiens
ggggcaccagcgacaggaccaaggaacgggggccaggcaaaacccaaggcggggcgcccggcccagaggga

SEQ ID NO: 88874 - RNA, 83 nt, Homo sapiens
aagaggaggcggaaaaggacgcaaagcccggcgaggacgggagggcggccagggaagccaaggggaccggcgcggagcacaga

SEQ ID NO: 88875 - RNA, 78 nt, Homo sapiens
gaggcccaggccgggcccccagccggggcgcgagccgggagccaggcacaaagagagacccgaacagccaggcggcgg

SEQ ID NO: 88876 - RNA, 81 nt, Homo sapiens
gacccgcagcgccgcccacgcccagcgccgcccccccggccagcaacagcgaggcaagccaccgagaaagggaggaccaca

SEQ ID NO: 88877 - RNA, 77 nt, Homo sapiens
ccagaccgcgacacgagcagcgcagggaagcaagagcaaggaccaaaggcgaccaggagagaaaaccaaacacacag

SEQ ID NO: 88878 - RNA, 74 nt, Homo sapiens
gcaaaaaacagaaaaacgaccggacagcggagagagaaaccaagaagccggagaagaaagaagaaccgaaagac

SEQ ID NO: 88879 - RNA, 81 nt, Homo sapiens
aaagaagacaggaccaccgcggcgcgccagcagcacacagccgcgcaagacgcgagcaaaaagagaaaacaaagaagcaaa

SEQ ID NO: 88880 - RNA, 80 nt, Homo sapiens
cccggcggcggaccgaccgcaagaggccaaggagggggagcgaaagggccgcggcggccggacagaagcaacgagacaac

SEQ ID NO: 88881 - RNA, 66 nt, Homo sapiens
cgggaaacgggcgaagcgacgagccgcgaggagacaagggaggcgaggacggacaaaaggaaacgg

SEQ ID NO: 88882 - RNA, 74 nt, Homo sapiens
aacccccaccccgcccaaggaggcccagcgcccgccgcccgcagccaaccgccgggacgacggcggggacgccg

SEQ ID NO: 88883 - RNA, 55 nt, Homo sapiens
aaaaaccccaaaaggaggagcccccgggaggaaccgcacaccggaaaacagagga

SEQ ID NO: 88884 - RNA, 68 nt, Homo sapiens
gacggcgacagcgccgaacagcaccgaggcccgaaagcccgccgaccccccacaaccaggacggagaa

SEQ ID NO: 88885 - RNA, 75 nt, Homo sapiens
gggaagagacaagcgaccgccacagggcggagaacggaaaagcaccaggaagcagagaggaccgcagaagggaag

SEQ ID NO: 88886 - RNA, 71 nt, Homo sapiens
accagagaaagacaaccaaccccaccgaggaggacagagacgcaagcaggcgacacgagacccacgccacc

SEQ ID NO: 88887 - RNA, 80 nt, Homo sapiens
cccgagaaccgcaggagccagaggaaggaacgggagaggaagacaagaggaaacgagcacaggaccacaaacagcaacac

SEQ ID NO: 88888 - RNA, 79 nt, Homo sapiens
cgcgcgggcgcgcacgcgagaacaagaacgacaagcacacaccaccgcaggccaacccccaggaccagagaaaggagac

SEQ ID NO: 88889 - RNA, 68 nt, Homo sapiens
gggcaaggcaacgaagagagacccagaagggcagagccggaggagagggcacggaaacaaagacgggg

SEQ ID NO: 88890 - RNA, 82 nt, Homo sapiens
gaggagaagcgcgcgggcacgccgcggccacgcgccggcggagaacggaaaagcaccaggaagcagagaggaccgcagaagg

SEQ ID NO: 88891 - RNA, 76 nt, Homo sapiens
ggccacccgacagcaagcaccggagggagaagacagggcaccagaaagccagagccaagggagcaaaaaacagaag

SEQ ID NO: 88892 - RNA, 77 nt, Homo sapiens
cgggaaaacgaagacccaggagaacggaacagacaagcaaccgaggaacacaacagcggccaaaggggaccaggcag

SEQ ID NO: 88893 - RNA, 84 nt, Homo sapiens
gaaggcgaagagcaagccagaagcggacccagaagaggggagcagcaaggaggaagacagccggggccggaggggagccgaaag

SEQ ID NO: 88894 - RNA, 75 nt, Homo sapiens
cgagggcacgaggaagaaacgggggacgaagcggaaaggaagaagaagcacggcaggcgggggcggggcgggcag

SEQ ID NO: 88895 - RNA, 106 nt, Homo sapiens
cagcacagccccaccaggcccagggccggcccccccaggacaacccagaggcaacaaaggcgagggagaaaaaaccgaggagaaccggggcaggagcaaggaaagg

SEQ ID NO: 88896 - RNA, 66 nt, Homo sapiens
cccaaggaacaggccaagagagccgaacccaccgagccagggagaagccaggggagggccggggcc

SEQ ID NO: 88897 - RNA, 71 nt, Homo sapiens
gaaaggccaaggagcacgcaaagccgggaagacaaagacaaaagaacaaggccgaagcaccagaacagacc

SEQ ID NO: 88898 - RNA, 55 nt, Homo sapiens
cggaccacccccacgaacgaggggagacgagggcacacagaagaccgcgcgaaag

SEQ ID NO: 88899 - RNA, 77 nt, Homo sapiens
caccaggaaaccccagaggaggcgggcccggagcaggcaagagggaacaggcacgccccacccgccagccgagcccc

SEQ ID NO: 88900 - RNA, 78 nt, Homo sapiens
ggcccaaccacggacgaccacccccgcggcggcacaggcgccaccaggggccagaaccgcccacggcccccacagcgg

SEQ ID NO: 88901 - RNA, 104 nt, Homo sapiens
gagacaggcgagaggaagacgacgaggaagagcccgccgaaggaaaacaacggagcacgcaaagcaagccggcaacgggacaagcaggacgggagagcacagcc

SEQ ID NO: 88902 - RNA, 84 nt, Homo sapiens
acacaagggaaccgccgggcgccagcaacaggcacgggcaagccgggccgcgcgcgagacacgagacgacggagccgccgcgcc

SEQ ID NO: 88903 - RNA, 50 nt, Homo sapiens
ccgcggccgggcgccagcgcggcgcaggccaagggcagagacggaccaga

SEQ ID NO: 88904 - RNA, 72 nt, Homo sapiens
ggcgggagaacgcgcaggaacgcggggcccagccgaccgcaacaccaaagagcagccaaacaaccaaggaaa

SEQ ID NO: 88905 - RNA, 57 nt, Homo sapiens
agcaccgaaagaccagggccaggccccaggaggggagggccagcgagcgccgacacc

SEQ ID NO: 88906 - RNA, 61 nt, Homo sapiens
ggccgaagcagggcacaaaaccaaggccaagcaagggcacgcagcacgggggcaggggccg

SEQ ID NO: 88907 - RNA, 79 nt, Homo sapiens
caaaccccaggccaagcagccaccagcagcccccagagcgggaccacaggccaaagccgacagaaaaggaagagaccca

SEQ ID NO: 88908 - RNA, 68 nt, Homo sapiens
ggcagcgcgagcggaggcaagaacggaagcacgggcggaggaaagcacaagcagagcccccgcagagg

SEQ ID NO: 88909 - RNA, 51 nt, Homo sapiens
caagcagagaccagaaaccggaagcgaggaccaaaccgaaaccgccagagc

SEQ ID NO: 88910 - RNA, 61 nt, Homo sapiens
acggcagaacgaagccaggggaccaagaaaggcccagggaccaaagcccggacaaggcccg

SEQ ID NO: 88911 - RNA, 71 nt, Homo sapiens
acgccaccacaggacaaagcggcaaacgccacagcgggggaagggacgcaaaaaggaagccccacaaggac

SEQ ID NO: 88912 - RNA, 80 nt, Homo sapiens
caggcgaagaccaaaggaaggaggagcaccaccaaagagcaggagaagagaggcagcaaagggaccccacagcagcaggg

SEQ ID NO: 88913 - RNA, 60 nt, Homo sapiens
aggagggacgcgcaggcccgaacaacggcccaagagcacagagaagaccaagggccgcca

SEQ ID NO: 88914 - RNA, 80 nt, Homo sapiens
aaaccagcaccaacggccaaaagaccgccccggcggaacacagccccaaacgaagccggcgccgagggaggagcacccaa

SEQ ID NO: 88915 - RNA, 89 nt, Homo sapiens
gaaggcccggagaaccaagaacccaccacccagcagcagggcacaagggcgagcaacggcccaaccaacccccggaccgcaagaaaaag

SEQ ID NO: 88916 - RNA, 81 nt, Homo sapiens
accgggccccgcgaccggggcccggggaaggcccgcgcccgccccagaaaagacgaccaccagacccacaaccgcccgaga

SEQ ID NO: 88917 - RNA, 71 nt, Homo sapiens
gcaacccaaacagggaccaaccaaagacgccaaggagaaggcagaccgggagaccgagaagcaaagcgccg

SEQ ID NO: 88918 - RNA, 74 nt, Homo sapiens
cagaaacacagcgacacccagaggagaccaagcaggcgaaccaagaaaagccaggaagaaaaagcaagcagaac

SEQ ID NO: 88919 - RNA, 83 nt, Homo sapiens
gcagagcccaccggaaggagaaggaagaggagcggaaggagggccccggagcagccacaccaccgaggccccacccagcacga

SEQ ID NO: 88920 - RNA, 82 nt, Homo sapiens
gcgccgcgccagaccccgcacccgacaggaggacgcccgccaggggagcagacagaacacccgggcccagccggggaccgca

SEQ ID NO: 88921 - RNA, 84 nt, Homo sapiens
gcaccgggggcgggggcgccagcccaccaagaagggccgagcacagcaagcaacaccacgggagcgaggcgacagaagagacgc

SEQ ID NO: 88922 - RNA, 83 nt, Homo sapiens
ccaacgaaccaaaagcaaccgcgaagagcaggaaccaacgccaagaggcccagaagaaccaacaacagcggacccccaaccag

SEQ ID NO: 88923 - RNA, 59 nt, Homo sapiens
ccaagcccgggcgccaccgcgccaccccgcgagcgagccagcagcaccggaacaccaag

SEQ ID NO: 88924 - RNA, 82 nt, Homo sapiens
gaggaaagcggaaagccaagggccgaagaacaaaccgcgaccgggagacagaggagaaaaagcccagacagcgcagacaggg

SEQ ID NO: 88925 - RNA, 52 nt, Homo sapiens
gggggggacgagcggccaaggagaagaggcagccggcgggcacgggcccccc

SEQ ID NO: 88926 - RNA, 82 nt, Homo sapiens
cccgagaggaaacacccccagaagaggacaaagaggccaggagacacgccaccgccggcggcccccggccaggccacccccc

SEQ ID NO: 88927 - RNA, 77 nt, Homo sapiens
aacagaaacagaaagcggggagaacgacgacaaggaaagagggacaccacccggacacaacaagaggacccagcgcc

SEQ ID NO: 88928 - RNA, 72 nt, Homo sapiens
gcacacgacagcccaaccgccacagggaggagcagcagccagaaagacccagagaagcgagaagcagagaca

SEQ ID NO: 88929 - RNA, 68 nt, Homo sapiens
cggggccccgacccaaaaccagacgcacgaggggcacgagaggggagccccacccgccccgcccggac

SEQ ID NO: 88930 - RNA, 79 nt, Homo sapiens
aagggcaagagcaacgagaggaggcgcaccgcccgcagcgacgcgcaagaggggcgcggcgggcccgcacccagacacg

SEQ ID NO: 88931 - RNA, 80 nt, Homo sapiens
cacgaggccaacaccccgcaggaagcccacggaacacagcacaaggcaacaccgaagcaccaaaaaaaccggagaaagag

SEQ ID NO: 88932 - RNA, 78 nt, Homo sapiens
gaccaggaaagaagggggcagaagagggagaccaggcgagcccagggaaagacaaacgaagaagagcaaagaacaagc

SEQ ID NO: 88933 - RNA, 68 nt, Homo sapiens
agcaaaccgggccacagagccagaaaaagacccgcacgccacaaggagcaagaagccaagcagagaaa

SEQ ID NO: 88934 - RNA, 83 nt, Homo sapiens
cgcggagaccacgacgggggggaggcggcagcgcaaccacgagacggccccaagagagaaggacaaaccagggaagaggcaaa

SEQ ID NO: 88935 - RNA, 53 nt, Homo sapiens
ccgcggccagcgacagaccgcgccgcgccggcgagccggcggaagaggaccaa

SEQ ID NO: 88936 - RNA, 73 nt, Homo sapiens
ggagccagagcgcagaaaggcggccagcaagacagcgacccaagcagcagcggaaagaaccaaggaagcgaaa

SEQ ID NO: 88937 - RNA, 80 nt, Homo sapiens
aagagagagaagacagaaaggcgccgcagagacccccagccagaaggggggagaacgaggagagcagacagaagaaaaac

SEQ ID NO: 88938 - RNA, 79 nt, Homo sapiens
cacacacaccaccaacagccgcggacacacgagaagccacacccaccgcccgggcaggccacggcggagagggccgggc

SEQ ID NO: 88939 - RNA, 81 nt, Homo sapiens
cagaacaggggagaaaaaaagggccacagcacggaagaagaccgcgaagggccgcacggcgcagaagggccccggcacacg

SEQ ID NO: 88940 - RNA, 75 nt, Homo sapiens
accggagaccagcaagagccaggagccaagcacaagaccagaccacacgaaaaaggccacgaacggcgaaaccgc

SEQ ID NO: 88941 - RNA, 77 nt, Homo sapiens
aaccgccaaagcaaaccagaccgacacacgccaggaaacggaaacggccagaagcaggacaaagcagagaacaaccc

SEQ ID NO: 88942 - RNA, 79 nt, Homo sapiens
cagaggcaccgggcggcaacagagaccaagagaagggacaacaaacccggagcccaaaagggacacagaaacccaaaac

SEQ ID NO: 88943 - RNA, 74 nt, Homo sapiens
agagccaacgcaaccaggcgcaggacacacagagaggcggaagcagcgcagcacagcgagcaacacgacaaacg

SEQ ID NO: 88944 - RNA, 73 nt, Homo sapiens
gggcgcgcccccccgcgggcgccgcccagggaagccgcccacggcagagagagcagccggcagagacagacag

SEQ ID NO: 88945 - RNA, 52 nt, Homo sapiens
ggcgacgaggcgacggcggccaggaaacggggacagaagaacgaagaacaag

SEQ ID NO: 88946 - RNA, 61 nt, Homo sapiens
gggcaagcggcgccaccaccagcaccaggcccccagcacaagggggcaccaggcggagaag

SEQ ID NO: 88947 - RNA, 79 nt, Homo sapiens
acgacggccgcagaccgacggaaaaaccagaagagaaaaaacaaaggggagaggcaccccgcgggacgaccggacagag

SEQ ID NO: 88948 - RNA, 65 nt, Homo sapiens
agcacggcgggcgaaacagggaagcaacagaagagagcgaaaacaaaggagcacgaaccgaagcc

SEQ ID NO: 88949 - RNA, 77 nt, Homo sapiens
aaaagcaaccgcgaagagcagaccgaagaggccaacgaaacccagggagaaaaagaccgaaacagagaaagacccca

SEQ ID NO: 88950 - RNA, 78 nt, Homo sapiens
aaaaacgagaccacaagcgagggagcaaggaaaaagagaagcagacccagaaccagcggaggcagggcggaccggcca

SEQ ID NO: 88951 - RNA, 61 nt, Homo sapiens
cacaaaaaaccacaccccccaccgaggaagagcgggagaaaggacaccgccagcgcagcga

SEQ ID NO: 88952 - RNA, 79 nt, Homo sapiens
acagagcgcagaagcaggggagaaagcccgcggcggaagccggcaggacacgaaagcccaacgggagacagcaaggaaa

SEQ ID NO: 88953 - RNA, 69 nt, Homo sapiens
agcaggcccaggagaaagcacaggacagaagcgaaaggcggcagaggcaccgcagccagacacccaggg

SEQ ID NO: 88954 - RNA, 76 nt, Homo sapiens
cggcgggggcgcggcgcggccccggcccggcccccgcaggagcaggcaaaccgacaccagcgacacaagcgcgagg

SEQ ID NO: 88955 - RNA, 81 nt, Homo sapiens
gcgcgacggggaaccgcgaccgagacggcaggcggcggaagcggaccggggaccgcgaagcgaacgggcccccccgccgcc

SEQ ID NO: 88956 - RNA, 78 nt, Homo sapiens
aagagcaaggacaaacacaacagaaagaccaacagaaggacgggccaggcggggaaggaaaacagcaacacagagcga

SEQ ID NO: 88957 - RNA, 75 nt, Homo sapiens
cgccgcgcacaggaaagccaacgccccccaccacccggggcagaaaccaaacaggcagaaaacgaggccccaagc

SEQ ID NO: 88958 - RNA, 34 nt, Homo sapiens
cggagcgaaccaccgaaggcgcccggcaacagaa

SEQ ID NO: 88959 - RNA, 79 nt, Homo sapiens
gagaaccgaggaaaccacgacgggggagcccccacacgaggacgaggagcgccaggaaagaggcagagacgaagcagaa

SEQ ID NO: 88960 - RNA, 53 nt, Homo sapiens
caagcacgccgcccagacaaccagagacaacacagacgaccaggaaagcaaag

SEQ ID NO: 88961 - RNA, 54 nt, Homo sapiens
ggagaagccagaagacggccaggaaagcaggcggagacaggcaaccagcaggac

SEQ ID NO: 88962 - RNA, 65 nt, Homo sapiens
cccggggggacgcccccaccacaccgggaggacgagacaagggcaacgagacacccagcggcccg

SEQ ID NO: 88963 - RNA, 81 nt, Homo sapiens
ggcggcgaacgcggagagcacgccagaaggcccgggcacggcgcaggaggggacgcacgaagacagacacaagaagacagc

SEQ ID NO: 88964 - RNA, 85 nt, Homo sapiens
aaccacaccccccaccgaggaagagcgggagaaagggaagaacagggaaccgagaacagccaaggaccccaagcgaacaagagca

SEQ ID NO: 88965 - RNA, 69 nt, Homo sapiens
ggaccccaggaacaccaacagagaacagcaagggcccccgccccccccacggaaaacagcgaacagccc

SEQ ID NO: 88966 - RNA, 72 nt, Homo sapiens
cgcacagaaacagcacaagccaaacggaagccaggcacaccaagagcaggacccaggcccaaaaggaaaagc

SEQ ID NO: 88967 - RNA, 78 nt, Homo sapiens
gagagggcagagagcaagcagcgaccgccggcgggccggaacagacagaggagcgaacgaaagagcagaagagaaaag

SEQ ID NO: 88968 - RNA, 80 nt, Homo sapiens
caacgcgcgcacacggacgagaacggagagaacgcggaaggagacggagaagaaagcaaagaaggcaaaggagcaagcaa

SEQ ID NO: 88969 - RNA, 57 nt, Homo sapiens
gccacggggccaagaagaaaggccccacccaaccagccccccagaaacaagagccca

SEQ ID NO: 88970 - RNA, 67 nt, Homo sapiens
ggagcgagagaggaccccggacacgaaagccgggaaaggaccgagaaaaaacaccagagaaaaagag

SEQ ID NO: 88971 - RNA, 80 nt, Homo sapiens
ggcgcggcaaaggggacgcccaacgaagagaccaccgcccgagcagggagagaacagcacacagaggcgcaaggggaaga

SEQ ID NO: 88972 - RNA, 70 nt, Homo sapiens
ggaggaaaggaggacgagaagaggcacacaaaacagcgcgcaagaagcaccgacgggcggaacggccaag

SEQ ID NO: 88973 - RNA, 79 nt, Homo sapiens
ccacaaggaaggcaagccgccgccgcacgacagaagccgccagcgagccccacacagaccagcccaggcccacaggggc

SEQ ID NO: 88974 - RNA, 74 nt, Homo sapiens
aagacggaaccgggaaggcagcagcacgcagaagggaggagcagcccaacagaaggccgcaagcacacaagaca

SEQ ID NO: 88975 - RNA, 71 nt, Homo sapiens
acggaccaggaggcgagcaacagagacccacacgaaggccggcaccccgccaagggcaagaaccgcccacc

SEQ ID NO: 88976 - RNA, 72 nt, Homo sapiens
gagcgagacaggaaaaccaccgcgacgaaacggacgaaggacagagagggacgggcagacgccccgacacgc

SEQ ID NO: 88977 - RNA, 78 nt, Homo sapiens
gaggaggcgcaagacgcgaccaaagccgacggggcaaggcccaggaaaccagagaaaaaccgaggggagacccgccgg

SEQ ID NO: 88978 - RNA, 83 nt, Homo sapiens
ggcaccgcggagcaaaaaaagagcccgcaagaagaacagagacagcagccaaacccccaggcccgggaggagcggggacacga

SEQ ID NO: 88979 - RNA, 59 nt, Homo sapiens
aagcaaccaagggaccagaacgagacagcaaagaagaggccggaaacaggaagaaccag

SEQ ID NO: 88980 - RNA, 88 nt, Homo sapiens
ccggccccggcccacaggggggggcaaacccgagagaacggcgcagacgggacacggccggccaggagcggccgcaccacacccagag

SEQ ID NO: 88981 - RNA, 71 nt, Homo sapiens
gcgcgccggaaaccggagcgcgcagcagcagaaaagagacacacaaaggaagcaaagccggaaccaagacc

SEQ ID NO: 88982 - RNA, 77 nt, Homo sapiens
agaccccaccagcgagcccccggcagggcaccagggcgagaccccgagcccgcaacgggacgacgaccgccgggcag

SEQ ID NO: 88983 - RNA, 73 nt, Homo sapiens
agaagaacggcaggacaggaagcggggggcacaggagcggcgcaaggcccaccagaggagcagccgcgcccag

SEQ ID NO: 88984 - RNA, 127 nt, Homo sapiens
aacgcccgcagcggccaccgaggggcgcagcgagccagcccacgaccgcccgcgaccagagcgccaccacccagaaggcacgggcagcccccgcaaccggcagccacacgcaggacacgagaccaag

SEQ ID NO: 88985 - RNA, 75 nt, Homo sapiens
cagaagccagagcaaaagagaaagacaccgcgggcacagcggaggaccggcaggaaacgcaaccggacagaagag

SEQ ID NO: 88986 - RNA, 70 nt, Homo sapiens
acagcaagacgacaagcacgaaaggaggacccagaggggaaaggagggcacgaaacgacaccgacagacg

SEQ ID NO: 88987 - RNA, 70 nt, Homo sapiens
aaacacggacaaaagaaagcaagaccccgagggaaggacagcccaggccaagacagcagccacgaggaaa

SEQ ID NO: 88988 - RNA, 77 nt, Homo sapiens
aggccaggccacgggaacaaaccaaaagcaaccggcaaacacggaagccaaggacagagccggacgagcgggagagg

SEQ ID NO: 88989 - RNA, 76 nt, Homo sapiens
acaaaacggaaacgaggcacaaagaagcaaaacagagagaacccaccaaccaaagaggaacacagaacggagaccc

SEQ ID NO: 88990 - RNA, 81 nt, Homo sapiens
gcagaaggccggagacaccagcagggcgccggccgagcccgggaaaacgacagcagcagcagggccggaagacgccaccgc

SEQ ID NO: 88991 - RNA, 71 nt, Homo sapiens
ggcaccaaaggcgacacaagcccgggcggccaccagagaccacgggcaccaggagcagcgagccagcaaac

SEQ ID NO: 88992 - RNA, 101 nt, Homo sapiens
agaagggccgaccagaaaggaaccccaagcgacgcaggcagaagcgagacggcaagcacacgccaaagagggcagcaccccacccaccacaaaacgagcaa

SEQ ID NO: 88993 - RNA, 74 nt, Homo sapiens
agaagggggaaaaagggaccgcgggccaaaaggacaccagaggaccagaacccacgagaaacagacgagccaac

SEQ ID NO: 88994 - RNA, 55 nt, Homo sapiens
gacgcagggcgcccccgacagcgccgaaggggaaacccaacccaacaaccagaag

SEQ ID NO: 88995 - RNA, 71 nt, Homo sapiens
ccagggcggagggggaggaagcaggggaaagcccgggccaagcgggaggcgccgcacgggaccccaaccag

SEQ ID NO: 88996 - RNA, 74 nt, Homo sapiens
acccccacaacaaagcagcaacaagaaagcagaggaagcagaaaggaaggagggaaacaagggaaacccaagcg

SEQ ID NO: 88997 - RNA, 78 nt, Homo sapiens
cgcgcagcgaagcccagggaggccaccaggagaagacagcacggggagcccacaggccaccacccggcagaggagacc

SEQ ID NO: 88998 - RNA, 78 nt, Homo sapiens
gacagcaggccaggcggaaaccaacagccacaaaggagaaagagcacaccagggagggcggagaacggaaaagcacca

SEQ ID NO: 88999 - RNA, 77 nt, Homo sapiens
gaacagaaggagcgaagcgcgcagaccacgggaagggggagcggagggccaagccagacaaagcaacaaccagcaga

SEQ ID NO: 89000 - RNA, 70 nt, Homo sapiens
cgcagggcgcccccggccccaagaagaagcgaaaacagggggaaccgcaacaaaggcagccacaaagaac

SEQ ID NO: 89001 - RNA, 81 nt, Homo sapiens
ccccccggcccccgcgcgcacgccccgacgcaagacgcccggcccggccccggcacaaagcagaccgccccacgggcgcgc

SEQ ID NO: 89002 - RNA, 82 nt, Homo sapiens
agacccgcggcaaccccggcaacccagggccggcgcgcgccaccagacgggaagcggcggcgcggcaaggacccagacagcc

SEQ ID NO: 89003 - RNA, 71 nt, Homo sapiens
accacaagagaagaccgcccaagcgcccggaggcccacagcagggggcaggcagcccagaagaggggcaca

SEQ ID NO: 89004 - RNA, 93 nt, Homo sapiens
ggagcagagaagcgagcgagcgggccgcccaccacgccagaggccgaaagaagagaaggcgagaggaaagcaaagaaaggaagagaaagcccc

SEQ ID NO: 89005 - RNA, 68 nt, Homo sapiens
ggagcaaggagaagagccggggaggagaggagaaaccaagcagacccaggcccacaagccagagggcc

SEQ ID NO: 89006 - RNA, 76 nt, Homo sapiens
aagaagcaaccaaggcaaggaacccagacagcaaggaacccaaacacagaaagcgaagcagaagccgagaacagcg

SEQ ID NO: 89007 - RNA, 63 nt, Homo sapiens
aagagaggcggcagggggaagaaaggagaacacgaacccaggaggaggaggggggagccgaga

SEQ ID NO: 89008 - RNA, 92 nt, Homo sapiens
cgagcgcagaaaaggggagcaaagagaacacgaaacaaccagccaaagaaacccagcggcggcagaaccagccggcacaaagccgaaccaga

SEQ ID NO: 89009 - RNA, 58 nt, Homo sapiens
gccccagccacagcccccgcgcccgccagcccaacagaagcaccagcaccaagaccag

SEQ ID NO: 89010 - RNA, 82 nt, Homo sapiens
aaaagacaaacagaggaagaggaaggaaaagacaacagccaagaagcgacccgagaaggaacaaggaagggagcacacaaag

SEQ ID NO: 89011 - RNA, 72 nt, Homo sapiens
agaacaggggccagggaaaggagcagagagagagagcagaagacacacgaagagaagagcccggaaaaggag

SEQ ID NO: 89012 - RNA, 84 nt, Homo sapiens
ggcgggagccccggcgggccgcgccgggacggcccaccagccaccccaccgcgcagggagcggggacccccccaacaggccaga

SEQ ID NO: 89013 - RNA, 70 nt, Homo sapiens
agagggaacaggcagcaggaagcacggcgggcgaaacagacaccaaacccaaaggccagaccagaacaca

SEQ ID NO: 89014 - RNA, 54 nt, Homo sapiens
gcgcgggcacgcgcccaccagccggggcgggccccacccacagcacccacccca

SEQ ID NO: 89015 - RNA, 97 nt, Homo sapiens
gaaaaagcgcagcacaacggcccccggacggaagagagaaaaggggaagaacgggaggagcggcacaagaagaaaaaaacggaagaagaaacaccgc

SEQ ID NO: 89016 - RNA, 60 nt, Homo sapiens
ggagagccgcaggagaagcccaggagacgggggggccccagcccggccgaacgggcgcac

SEQ ID NO: 89017 - RNA, 76 nt, Homo sapiens
agacggaagcacgcaacaggaccgcacgcaccgaaccccagaaaaagggggcagacagggaaagaagacaaggacc

SEQ ID NO: 89018 - RNA, 76 nt, Homo sapiens
ccacggacagcaaacagggaaagggagcagcaccggccacacccacagcacgaccggaacccagcgaccgacgccg

SEQ ID NO: 89019 - RNA, 76 nt, Homo sapiens
ggggcggccccagcggaaggcgccagaggcccagaaggagggagcgggacaagggagaaggagcagacgagaagga

SEQ ID NO: 89020 - RNA, 66 nt, Homo sapiens
ggcaggcaccacaaaaaggacagaccagaacacacaagaaccgggagaacgaacaaaccaagccaa

SEQ ID NO: 89021 - RNA, 116 nt, Homo sapiens
cgcccccccaacaccgagccagggaagggccccgaaaggaaggagcacaagccaaggacgcaaggagaggggcggacggacgggggaaagcaaagaacaaaagaagggacaagggg

SEQ ID NO: 89022 - RNA, 69 nt, Homo sapiens
gaaggaccaagaaccaggggcgaccacacgccgaggcgccagacgcagaaaagaaaagaaccaaggaca

SEQ ID NO: 89023 - RNA, 70 nt, Homo sapiens
cagagcggagcgcagaccgaggaaaaggagagaggggacaagggaaaacaacagggaggaaaaaggcaaa

SEQ ID NO: 89024 - RNA, 52 nt, Homo sapiens
ccggaaccgggccgagacgcgggcaccacaaaagcaaacaaagggaagacgc

SEQ ID NO: 89025 - RNA, 59 nt, Homo sapiens
ccggcccacaggggggggcaaacccgagagaacgggacccacccaggaggcagaaacac

SEQ ID NO: 89026 - RNA, 75 nt, Homo sapiens
gaacacaaacaccgaagcacgggcccaacaggcaccccacaaacagggcagcagaccgaaaagggcggaaaagga

SEQ ID NO: 89027 - RNA, 37 nt, Homo sapiens
cccgagagcgggacgcaggccgccccacaagccgcac

SEQ ID NO: 89028 - RNA, 83 nt, Homo sapiens
ggagagccgcccagcagcacaacacagggaagcggggagccgagaggaacccggcaaagcgggccgcggaccccggcggcccg

SEQ ID NO: 89029 - RNA, 86 nt, Homo sapiens
gcggcggcggcggcggccagcagaagaggagagcggccggggggcagcagagccccgacaagggaccgggcgggccccgcaggaaa

SEQ ID NO: 89030 - RNA, 80 nt, Homo sapiens
gccacagcgacccacaaagaccgggcaggcagaacaaccgggagggcggagcaggggagcgaggcacaggagcccgcccg

SEQ ID NO: 89031 - RNA, 74 nt, Homo sapiens
ggaaagccaaggaaaaacggagagccacaaaaaaggaagcgaaaggaagcgggagaggccacccgcccacgagc

SEQ ID NO: 89032 - RNA, 78 nt, Homo sapiens
gccaagacagggaggggacggaaacgccaccagcaggaggaagagaacccagaccacccaggcaccccacaccagccc

SEQ ID NO: 89033 - RNA, 78 nt, Homo sapiens
aaaaaccaacgggaaaaggaaagcagaccgaagaaagcggaaacgagacacaaaagaaccgagaccaagccacccacc

SEQ ID NO: 89034 - RNA, 72 nt, Homo sapiens
caaccagaccccgagaaaaagaagaacagaccacgggagaaaaacaagaaacagcagccaaccaggcccgag

SEQ ID NO: 89035 - RNA, 67 nt, Homo sapiens
aagaccgggcggaggggaagcaagaagcacagcacaccggacgggaaacagccagaagcagcaacgc

SEQ ID NO: 89036 - RNA, 76 nt, Homo sapiens
agcggaacggacacaagcgcaacgaacgaagaggggggccgcccgcccaaggcaggaagaggggccgcaaagaaga

SEQ ID NO: 89037 - RNA, 66 nt, Homo sapiens
ggaagagcggcccaaagagcacgcacgggagcacacagaggcccggcgagcgaccgccgggggaac

SEQ ID NO: 89038 - RNA, 60 nt, Homo sapiens
cgaaaaccagggacaaaaccaaaaaaggaaccggaaacccaagcagccaaccccccccca

SEQ ID NO: 89039 - RNA, 80 nt, Homo sapiens
ggaggcgccgggggaggcggggagaccgccccggacgggaggaccgcggacgacggccgcagagacaaaaacaagcgaag

SEQ ID NO: 89040 - RNA, 84 nt, Homo sapiens
cgccgcagccccccaagcggccgcgagaagcagcgggggggcaggcgacgaaggcgaggaagaaacaaggcgggccgcgagacc

SEQ ID NO: 89041 - RNA, 75 nt, Homo sapiens
cgggagaggacaagaccacgagccaggccggggggggcacagagccccggaagacagcccccagcgaccagaccc

SEQ ID NO: 89042 - RNA, 77 nt, Homo sapiens
aaaccagagcgagaggagaggcagggggcaggcagaagcccccggggagagacagacagagggacacagagaggaag

SEQ ID NO: 89043 - RNA, 72 nt, Homo sapiens
gggaccccaagaagaccacagagggacccggacaaccagaggcagccagcagggggaggcagagacccgcac

SEQ ID NO: 89044 - RNA, 83 nt, Homo sapiens
ccggccgccacccccacagcccggggaggaaggccaacaccacaagaaagcagacagagacgcagcaccgacggaggccagcc

SEQ ID NO: 89045 - RNA, 75 nt, Homo sapiens
cgcgaaacgcacgagaagggcgggcagcagcggcgcacaaaagcaggaaaggcagccgacaggggaaagacccga

SEQ ID NO: 89046 - RNA, 54 nt, Homo sapiens
ccgacagccgcagaaccaacacaagcgagggagaagccaagagcacagacccaa

SEQ ID NO: 89047 - RNA, 74 nt, Homo sapiens
gggagggccacaggaggcggcgggccccgcccgccgaagggcgggaagaagaacaacagccgaggccaacacag

SEQ ID NO: 89048 - RNA, 76 nt, Homo sapiens
cggacaccgcaacacaagggagccggggcccccagcaagaacgggaacaaaaccgccaacgagaagcaccggagac

SEQ ID NO: 89049 - RNA, 36 nt, Homo sapiens
ggggccccgagcaagacgcagggcccgaagacaccc

SEQ ID NO: 89050 - RNA, 61 nt, Homo sapiens
cagcaggccccagcacgacaaacaggggaaggcccgccaaggacccaaacacgccaacacg

SEQ ID NO: 89051 - RNA, 78 nt, Homo sapiens
aacagcaggcgccaccagcccggagcgcagacccaggggagcccaccagccagcaacaggcccggaagacagccaagc

SEQ ID NO: 89052 - RNA, 75 nt, Homo sapiens
cgaaaaccaaacaccaagcccacagagggaaagaagaggccccagcacacggagccacaaccaagaaagaaacgg

SEQ ID NO: 89053 - RNA, 72 nt, Homo sapiens
agcacggacacaagaggaagcggaaaccagggccacagcacgcagccccaggcagagcacggggaccagggg

SEQ ID NO: 89054 - RNA, 78 nt, Homo sapiens
acaagaaacccaacaaccaagaagaggcaacacaaagacacacgaaccagcaaaaagaagccaaggggagcaaaagga

SEQ ID NO: 89055 - RNA, 81 nt, Homo sapiens
ggagaaaggcaagagggagccaacgcgcagaagcccagggaccgagggagcaacaacaaggagcaagcacagcgcgagcca

SEQ ID NO: 89056 - RNA, 78 nt, Homo sapiens
caagaagcgggcggcggccggcccggagcgagcaggaggacgaggagcagaacagaaggcgcacaaaggaaagagaag

SEQ ID NO: 89057 - RNA, 70 nt, Homo sapiens
gagagcccgccaccaaccccgacaggaggaggcagaggagaccaggccccccacacagaggaggagggga

SEQ ID NO: 89058 - RNA, 70 nt, Homo sapiens
ggccagcggccgcgcacccccggccggaggcaccagcaagaaaagcccacccacaagaccagacaaggag

SEQ ID NO: 89059 - RNA, 76 nt, Homo sapiens
aagccggcaagacgagaaagcaggacccacgaggaagcggccgcggcgaaccccagagccagcgggcagacgaaca

SEQ ID NO: 89060 - RNA, 77 nt, Homo sapiens
cgggagagagggggaacaaccacaagcaaccacacaaaagcgcaccacgggagacagacgggaggggacacggacgc

SEQ ID NO: 89061 - RNA, 61 nt, Homo sapiens
ggcggaacccggggccgggacgcagcccggcggcagcaggagaaagaagaaacaaagaggg

SEQ ID NO: 89062 - RNA, 99 nt, Homo sapiens
agcagcgggcaacaggaagaccaaaaacacccgaaaacacaggaaacaggcaggaacaaggcacccaccccagcaagaagagcccaaagaagagcgaca

SEQ ID NO: 89063 - RNA, 40 nt, Homo sapiens
cccgcccagccccgagagccgggcaggggcacacgccgaa

SEQ ID NO: 89064 - RNA, 77 nt, Homo sapiens
agcaggaggaaaaggagaagcacggaaaagcagcacaccccggccaaaagaaacggaggaagaccccagagaaacac

SEQ ID NO: 89065 - RNA, 87 nt, Homo sapiens
ggaacaccaaggcaagacggcacccagcacagcagggcggaggagcaaaggcccggccagacacacaggacgaccggacggaaccca

SEQ ID NO: 89066 - RNA, 83 nt, Homo sapiens
ccacccaccaaagggggcgcgaccgagagagccaccagccagaaaaaaccagaggaggagaagagccgcagggcccagcgggg

SEQ ID NO: 89067 - RNA, 74 nt, Homo sapiens
ggcgggaagccacgccagacggagaaaggcaacagagaagcggcgcggagggggagcccggacgacagcgcaaa

SEQ ID NO: 89068 - RNA, 68 nt, Homo sapiens
gagcccggcgcccccgcaagaggacggcgccggcagccgacaacggcaagcggagaagagcaaggccg

SEQ ID NO: 89069 - RNA, 54 nt, Homo sapiens
acccacagccagcaacaccgccccagggaaaggaccgaggcaggaaagaggcca

SEQ ID NO: 89070 - RNA, 84 nt, Homo sapiens
cagccgggcggccgcgcgagccggcggcccggagggggcggcgggccggcccggccacccccgggcccgcgccccaggcgagag

SEQ ID NO: 89071 - RNA, 71 nt, Homo sapiens
accggagaaaacagcaggaagaagagaaacaaaggccagacaaacaggccaggaaacgaggccgcgcaagg

SEQ ID NO: 89072 - RNA, 80 nt, Homo sapiens
gggccggaggcgggaccaccgcaggagccggcaggcccaggaggcagaaacgccaccaggacccagagcaccagagacaa

SEQ ID NO: 89073 - RNA, 74 nt, Homo sapiens
aggcccagggccggcccccccaggacaacccagaggcaacaaaggcgaggaggcaaggaaaccgacgaagcgcg

SEQ ID NO: 89074 - RNA, 78 nt, Homo sapiens
gacaggcacgaaacccaaaaagcaaaaaacgcccacaccagagaacagccacggaaaggaagaaggaaccgggaagga

SEQ ID NO: 89075 - RNA, 79 nt, Homo sapiens
gggccgggcggcagccgcggagagcgccacgggacagccaacaccagaccgagcccacgcgcgccacagggaggggagg

SEQ ID NO: 89076 - RNA, 71 nt, Homo sapiens
ggcgcagcgcccgccgcggcccgggcccccccgccggaaacaggaagcgggaccaacgaagacagcgcacc

SEQ ID NO: 89077 - RNA, 49 nt, Homo sapiens
gcaaacaaaaccacaggcacaaagaggagaccggaaaccgagagaaacg

SEQ ID NO: 89078 - RNA, 39 nt, Homo sapiens
gcccgggaccgaaaaaacggggcggagaggcggaaggag

SEQ ID NO: 89079 - RNA, 55 nt, Homo sapiens
gaccgccggagccccacagagagcagcgaccggacagaagacagaccgacagacg

SEQ ID NO: 89080 - RNA, 69 nt, Homo sapiens
ggcagccacaggaggcgcggaggacgccccaccgccgacgcccccagccaccagagcaaacagaacaaa

SEQ ID NO: 89081 - RNA, 76 nt, Homo sapiens
gccgcgcgaggccccggccaggaagaccgcaggaaagcaggaaggcaagaaagccaaggacgaaacccacacggag

SEQ ID NO: 89082 - RNA, 77 nt, Homo sapiens
cagaccgacccgaacaaggccaacaccagcaggagaggaaaaccagaaaaagccaacagcccagcgaaggagaccag

SEQ ID NO: 89083 - RNA, 76 nt, Homo sapiens
cgcgcgcgcgcgcgcagcaccaggagaggagggaacgcggagcgggaaacgcagaaaaaccgaagaagagaaacgg

SEQ ID NO: 89084 - RNA, 79 nt, Homo sapiens
cgaccgggacagcaccggcgcaccagaggcccaaagagggcagcgggcgcccagacccgggagggagacggaggccgca

SEQ ID NO: 89085 - RNA, 70 nt, Homo sapiens
gcggagcacgacgaagacacgcacacacagggcgccacagagccgggacagcagaaagagccaggcaagg

SEQ ID NO: 89086 - RNA, 75 nt, Homo sapiens
cacaccaccgggggaggggcgcgaccgcacggcccgggacacacacccagaccaacagagaaaagccagaggaga

SEQ ID NO: 89087 - RNA, 89 nt, Homo sapiens
ccggcggagaggccgaggggagaaggggaggcagcgcggcccagagccaggccccggggccccagcggcaccagcggagaccacgggag

SEQ ID NO: 89088 - RNA, 62 nt, Homo sapiens
caccaccgccccggccggcccaccggagcccaaggcagcagcaccaggaaggaacgggacag

SEQ ID NO: 89089 - RNA, 76 nt, Homo sapiens
aaggagcgagcccccagaagaggaagagagaaagaacgcacaccaagggaagagagccaaaaaaccccacagaaag

SEQ ID NO: 89090 - RNA, 60 nt, Homo sapiens
cgagaagcgggcccaggacaagacagaaggaaaccccccaggcaagaggcgcaggaccgg

SEQ ID NO: 89091 - RNA, 72 nt, Homo sapiens
cggagaagggaggaaaaccaacaagaccacccagcccccaaaccacgacagaggagaccgaccagccccgcg

SEQ ID NO: 89092 - RNA, 73 nt, Homo sapiens
ggaaagcccccaaacgaccgaggcggagggcggcggccccaccccgggcgggacaggaggaagccggcagacg

SEQ ID NO: 89093 - RNA, 73 nt, Homo sapiens
ggcaggcagaggagcgaaggcccaagaacaggaaggacggaccacagagacacgggacgcgcagcggcccaac

SEQ ID NO: 89094 - RNA, 105 nt, Homo sapiens
gcagaaggcagagacgaggacaaagaagccacgaagcaaaaagacccccaagggaaagacaaggagccgggccgagaaaccgaaccagagaccagagaagaaacg

SEQ ID NO: 89095 - RNA, 84 nt, Homo sapiens
agcgcaaggcgccccaaggccagacaaaacggcacacacgaaacgggcaaccggggccagggccagcaccagagagcagcaaga

SEQ ID NO: 89096 - RNA, 75 nt, Homo sapiens
gggccgaccggagcccaggcggccccagacgggggaaccccaagcggaccagaagcaccagaaacaggaagaaaa

SEQ ID NO: 89097 - RNA, 77 nt, Homo sapiens
ccgcgcgggcgcgcaccaaggcgcggccaacgacccacccagcaggagaacggacccggagggccggacagccccag

SEQ ID NO: 89098 - RNA, 52 nt, Homo sapiens
agccccaggagcagaacagaacgagcccaaaggggacacccagagcgcacca

SEQ ID NO: 89099 - RNA, 67 nt, Homo sapiens
acagaccccacgaccggacgcccacgaccccagcaggggaaggggaagaacaaaagcgcagagagcc

SEQ ID NO: 89100 - RNA, 80 nt, Homo sapiens
ccagcacaagaccgcgacaggcacccaaaagcaagcgcgggaagcgacacccagaccccacgggagaagcaggagagcaa

SEQ ID NO: 89101 - RNA, 65 nt, Homo sapiens
gccaacaacagccagcgaacagaggaccagcaacaaacgaagacgagggagaccggaagcagaag

SEQ ID NO: 89102 - RNA, 80 nt, Homo sapiens
cccgcgcgcgcgccggcccagccgcgcgacgggaggacgaagccggccgcaggcgcgcaggcaggcacaaggcccaggca

SEQ ID NO: 89103 - RNA, 80 nt, Homo sapiens
aacaagaaagaggagaaacgacgaacggagcggagcccagaaggggaacggcggaccacaaagagagaaccgcagcgaga

SEQ ID NO: 89104 - RNA, 79 nt, Homo sapiens
aggaaggcagaagaaagaagaggagaaggagcagccggccaaggacgagaaaagcgcgaaaccagaggaaacaagggag

SEQ ID NO: 89105 - RNA, 79 nt, Homo sapiens
gaagggacaagaagaacgcccgaaacacagcaggcggacgcccggcgggagggcagcggcagaagcaggacgacccgcc

SEQ ID NO: 89106 - RNA, 59 nt, Homo sapiens
aacgagaggggccagccaaggacagggaggaacacagcacccacccacacccacacccg

SEQ ID NO: 89107 - RNA, 71 nt, Homo sapiens
cacaaaggacacacagcgaaggcacaaccagggagaccggaaaccgagagaaacgaagacgaagaaacagc

SEQ ID NO: 89108 - RNA, 81 nt, Homo sapiens
ggagccaagacgcgcgcaggcggcgcgagcgcgggagcggcaccggagccacagaagagcgcagaggcaggcgggccgggg

SEQ ID NO: 89109 - RNA, 88 nt, Homo sapiens
cggacggcagcggcgcacagcccccgagccagcccgcaacgaggcaccccgcggacacggggcaacgccaaaaccccggacaagaaag

SEQ ID NO: 89110 - RNA, 77 nt, Homo sapiens
caacccacgcccagaaacagacaagagcacccaccacgcacaggaagcaggcaagacaagggaggcgaggacggaca

SEQ ID NO: 89111 - RNA, 55 nt, Homo sapiens
cagacgacgcaacaagaggccacgcgcagagcgaacaccaccgcgaagacgcagc

SEQ ID NO: 89112 - RNA, 71 nt, Homo sapiens
cgagcgagcggcaaagaggggccggaccacaaggcaagagcagcaaacccccggggcgcccaagagcgcag

SEQ ID NO: 89113 - RNA, 82 nt, Homo sapiens
aaggccgcccgggaacgcgacgcgagagaaggacccacggcgcgcgaagccagccaggacggaacccgcaccaccacacaac

SEQ ID NO: 89114 - RNA, 78 nt, Homo sapiens
aaccagaaaacaaagacaaaaggagacgagaagaagacaagaggggggacacagcgagccacgcgccaggaagcccgg

SEQ ID NO: 89115 - RNA, 97 nt, Homo sapiens
cagcagaaccccccagccaaaaacgccgaaacggaaagcccaagaggagacgaccgaaacaagcagcacaaaagcaaacaacccaacacaaaacgcg

SEQ ID NO: 89116 - RNA, 87 nt, Homo sapiens
gaggaagggcagaggcagaaggagccccagagccaagggggaccacagcagcacccccagcagcacacagacacggcacagccaaca

SEQ ID NO: 89117 - RNA, 65 nt, Homo sapiens
gaaccaccccgcgccagcagcacagcacggacgccgccagccaccggcgcgaagccagaccagac

SEQ ID NO: 89118 - RNA, 77 nt, Homo sapiens
cccgggaagaacacagcccgggaaagcacagaaagccaaaagaccggaccaaaccagagacaaaaggcacagccaga

SEQ ID NO: 89119 - RNA, 57 nt, Homo sapiens
gcaaaaggcagcgaaacagcccagcaggcgcagcagcaagagggaaaaaggcaacgg

SEQ ID NO: 89120 - RNA, 56 nt, Homo sapiens
ggaacccgaagaagaaaggacgacagccagagaggaaggagagcccggacccaccc

SEQ ID NO: 89121 - RNA, 104 nt, Homo sapiens
cggaaggaggacagcgggggccggggaaggagccacacacccggcacagcaggagaccggggaggggaaccggcagggagggcaggaagagggacggccccggc

SEQ ID NO: 89122 - RNA, 77 nt, Homo sapiens
acacgaggcgacggggagggacgagagcacagcccccaggagaggcaggcgcaaaggaggcaacagaggagcagcgc

SEQ ID NO: 89123 - RNA, 70 nt, Homo sapiens
gggccaccaaccccagcggggaaaacaaagacagaggcacaaaaggagaaagcagaagaaacaggagaaa

SEQ ID NO: 89124 - RNA, 78 nt, Homo sapiens
gagcgcggcacacggcgacggccggagaagcgcaccgggccagaagggggcgcagcggggaggccgcgggcgcacgag

SEQ ID NO: 89125 - RNA, 79 nt, Homo sapiens
ggacaggagagaaagacgacagggccagcacagcaaggggaacaggggaaagaaggcggaagcagcaggagacaaaggg

SEQ ID NO: 89126 - RNA, 74 nt, Homo sapiens
accccacaggccgaggagcagggaaaagcacagggccaggaagcagagggacagccaggccagaaacaggccca

SEQ ID NO: 89127 - RNA, 85 nt, Homo sapiens
ccgcgaccgcccggacccagccgggagaagcagcagaggaagacccggagagggccagcccacccaggacaccaccggacgggaa

SEQ ID NO: 89128 - RNA, 59 nt, Homo sapiens
ggacaggaggagccagggcccggcccgaaaggagagccgcagccggcacccgcacaacc

SEQ ID NO: 89129 - RNA, 75 nt, Homo sapiens
gccccgcgagccgacccgcacaggaaagacaagagaagcagcagacagcccaccgaggaagaccaaaggaccaac

SEQ ID NO: 89130 - RNA, 76 nt, Homo sapiens
acccaacggaagagacgcccccgaagagcaaaggcaagaacggaagcacgggcggaggaaagcacaagcagagccc

SEQ ID NO: 89131 - RNA, 35 nt, Homo sapiens
cacagggcaagccaaagacaagggaacaggaacaa

SEQ ID NO: 89132 - RNA, 76 nt, Homo sapiens
aacaaccgcggacacggagaggaaggggagcgaagcagggcacagaccccagggggaacaggcgaagaagaggggc

SEQ ID NO: 89133 - RNA, 75 nt, Homo sapiens
cagcggacaacagaaaggaaggcaacggaggccaggaagaaaagacgagcacaaccaggcgacggacaaggccac

SEQ ID NO: 89134 - RNA, 85 nt, Homo sapiens
ccggggcgggcagcgcggccgggcggggccgagggcccggacgagggaaccccgaggcaggcaggcaccccaggcccgcagcccc

SEQ ID NO: 89135 - RNA, 63 nt, Homo sapiens
ccaaccccaaggcaccagcaagggaaaccccagacaggcgcaaacgcaaggcgaccgaggagg

SEQ ID NO: 89136 - RNA, 72 nt, Homo sapiens
gaagaccacaagcaggccccgggagcaagcggggacggcgcggccagcaagcccgagaagcaagaccgcccc

SEQ ID NO: 89137 - RNA, 79 nt, Homo sapiens
aggaacggcccagcacaagaccgcgacagggggacgaccaccagccaggccggggacaaacaggcaaccgacggggagg

SEQ ID NO: 89138 - RNA, 86 nt, Homo sapiens
cgacaccccaacaaacaccagcgcggcccccgcagccaccgccacccaggaaggccaacaggggaccgcaaggccgagccgggagg

SEQ ID NO: 89139 - RNA, 83 nt, Homo sapiens
gggcaagacgggcagcgcaggggcgggaaagacccaggagaagccgcccaaagaacgccacacgcacagacgccgggaccgga

SEQ ID NO: 89140 - RNA, 82 nt, Homo sapiens
ccgggagaaggagacaggagaccagaccagaagaggggacagcgccagcccgaccaggcagccaagaacgagaagcggggca

SEQ ID NO: 89141 - RNA, 60 nt, Homo sapiens
gcgacggaaccaacggaggccaggcccgacaacaagccaaaacgcaccaaaggcagagga

SEQ ID NO: 89142 - RNA, 81 nt, Homo sapiens
gaagggaaggggcaccaagggacagcccggagacacaccaccagaccgggccagaacggaagcggacaaggacaccgcgaa

SEQ ID NO: 89143 - RNA, 64 nt, Homo sapiens
cagaagcagggccgagcaacacaggggcgccaaaacagagggagacgagaaaagggccgagcac

SEQ ID NO: 89144 - RNA, 79 nt, Homo sapiens
aacgggagcaccgacaaaaaacagcaaccgaagaccgaaaacgaagaccagggacacaaccaccaccgggaagacaaga

SEQ ID NO: 89145 - RNA, 83 nt, Homo sapiens
cgaacaggcagggccagacccaggcgcaaggaagaagagacgccgcgcggcagacaaggcccggcaggcaaagcgggcgggga

SEQ ID NO: 89146 - RNA, 69 nt, Homo sapiens
gggcggagcagacacagacagcagagggagacaacggcaagcggagaagagcaaggccgaaccgagagg

SEQ ID NO: 89147 - RNA, 82 nt, Homo sapiens
gcggagcaaaaaaagagcccgcaagaagaacagagacagcagccaaacccccaggcgacaccccaagagggccgccaccacg

SEQ ID NO: 89148 - RNA, 72 nt, Homo sapiens
ccgggcccggaggagcgaacaaggcgacaacacagacagaggcacaaaaggagaaagcagaagaaacaggag

SEQ ID NO: 89149 - RNA, 78 nt, Homo sapiens
accagcgggccggaggagccagagcgcagaaagagaaaccaggcggggaacaagccagcagcccaaggagaagcccca

SEQ ID NO: 89150 - RNA, 82 nt, Homo sapiens
cggggcgacggccccacccccgagcccagcaccgcgggaaggagaaagacagcaaagaaaaggagaagaaaggaaaaaaaca

SEQ ID NO: 89151 - RNA, 74 nt, Homo sapiens
gggaggacaagaggagaaccgcaaagggcagcagagagccagcaccacgagcgccagaaagccgcacacgacgg

SEQ ID NO: 89152 - RNA, 72 nt, Homo sapiens
ggcgcggcgcgggcggcggggcccacgggagaaaagcccagaaccgagacagagcggaaaagcaacgaaaac

SEQ ID NO: 89153 - RNA, 75 nt, Homo sapiens
ccccgccagccacggagccaaggcggcagcgcgcgagggaccggccagaaagccccggaggcaaccagcagggac

SEQ ID NO: 89154 - RNA, 80 nt, Homo sapiens
aaaacacgggccaacacggcgcgaaagccagggaagggccacggacagagcgaaggggagaggaggaggcgacccacgcg

SEQ ID NO: 89155 - RNA, 37 nt, Homo sapiens
cacagagccaagcgccaagccggcccggcagaaaacc

SEQ ID NO: 89156 - RNA, 50 nt, Homo sapiens
aaaaaaaaccaaagcccgaagaaaagcggaggcccccgggccagggacca

SEQ ID NO: 89157 - RNA, 70 nt, Homo sapiens
ggaaaagaccacccggcgacaccaaagagcaccgcgaagcagaagaaacacacaggagaacccccgagaa

SEQ ID NO: 89158 - RNA, 47 nt, Homo sapiens
aaggaccaagaaccagccccaggcaagagcagagaggagaaaaagcg

SEQ ID NO: 89159 - RNA, 77 nt, Homo sapiens
caccggcgacggcaggcgaccacgccacgcccgggccacgagcagggaaggggggagacgagaaaacagaagcagcg

SEQ ID NO: 89160 - RNA, 83 nt, Homo sapiens
caagagggaagcagacgagagcaaggacaagagcggcaaggggccaccagccacaaaggcgcccagaaaaggacacccaaaga

SEQ ID NO: 89161 - RNA, 75 nt, Homo sapiens
gccaaggggagaccacaccaagcgggagacacaccacgccaagggggacaacagagccgacacagccaagaagca

SEQ ID NO: 89162 - RNA, 80 nt, Homo sapiens
aagcgcccgcggacggggaggaggagcaggagcggaggaggagccgccgccgccaggcaaaaggccaaaacggaagaacc

SEQ ID NO: 89163 - RNA, 86 nt, Homo sapiens
ggaaaagacggccaagcgaccccaacgccaccagacgcacggagagcgagaaggaaaacaccacacacggaggccaccgcgggacc

SEQ ID NO: 89164 - RNA, 63 nt, Homo sapiens
ggacagacgagagaacgaggcaaacgaagcacggcaggccaccagccggcaggacgcgcccgg

SEQ ID NO: 89165 - RNA, 38 nt, Homo sapiens
cccggaacaacagccgcaacgaaagggggcaaaagaaa

SEQ ID NO: 89166 - RNA, 77 nt, Homo sapiens
aagagaaccccgcggggaaggggggcagaggccggaccccagcacacagaagccgagacggaaagagaccgaacacc

SEQ ID NO: 89167 - RNA, 84 nt, Homo sapiens
cgccgggagcgccgggagcagcccgaggccgcggcgaaaccaggggagccgagccaaagaagccaaagccccagacaaccacag

SEQ ID NO: 89168 - RNA, 58 nt, Homo sapiens
caccgcgggacgaaaacacagggcccaaggcacacccagcgaacccaccagccccagg

SEQ ID NO: 89169 - RNA, 75 nt, Homo sapiens
ccaggagcaagggaaagaacccggcggggaaaagggaaggaaaagagacgcagaaacaagcccacaagagggagc

SEQ ID NO: 89170 - RNA, 53 nt, Homo sapiens
cagagagcgcacagcaggcaagggaccgaaaacaaggacacgaggcacaagca

SEQ ID NO: 89171 - RNA, 92 nt, Homo sapiens
gcgcgccccccggcgaggacgacgcgcaacgcgcaccaacccaggccggaacacccagaagagaaggggaccagagcagcaccggcccggcc

SEQ ID NO: 89172 - RNA, 79 nt, Homo sapiens
aagaaggcccgcccccaagcccggagcccggcgcccccgcaagaggacggcgccggcagccgcaaagcagacaaaggag

SEQ ID NO: 89173 - RNA, 70 nt, Homo sapiens
aaggaccagagcgacgagaagagagagaagggagagagaccaaagacgagaggccccaaccagggaaaga

SEQ ID NO: 89174 - RNA, 61 nt, Homo sapiens
aaaaccagggcccacagaggagagacgaggacgcgcacaggaaaggacgcggaacaagcag

SEQ ID NO: 89175 - RNA, 86 nt, Homo sapiens
cggagagggaggcgggaggagcggcagccgcgaggaggcgcgggagggcgagaacgaccccgagacgacacgaagcagaggagcca

SEQ ID NO: 89176 - RNA, 78 nt, Homo sapiens
agcaacccccaggagaagagcccaagcagcgccagacaaagagcaagggcggcaggagggaaagcaaggaaacgcccc

SEQ ID NO: 89177 - RNA, 56 nt, Homo sapiens
agacaccggacaccgagggcccccaaaagcaaaccagccggcgggcgccacaacgg

SEQ ID NO: 89178 - RNA, 74 nt, Homo sapiens
gggggaagaggcgcggccggaggaaaccaagacagcccaaacgccccacgaccagggagcgaggcggccagggc

SEQ ID NO: 89179 - RNA, 72 nt, Homo sapiens
caccggagggacggcacagggaggccagccggagaagcgagcagcggcagggaagcaaagagcacccgagcc

SEQ ID NO: 89180 - RNA, 71 nt, Homo sapiens
ccccgcggcccggcagggggaacgggagggggacaagcaaagggacagcaaaggcgcagcaccagcaccca

SEQ ID NO: 89181 - RNA, 78 nt, Homo sapiens
cgcgcgccgcaacgcaggcaccggcaggcgagacgcagaaaacagacacacagcggagacaagcagggccggcaggag

SEQ ID NO: 89182 - RNA, 89 nt, Homo sapiens
cgagcgcggagaacccgcccagaagccagaccccagccccaaagagcaacagaaggcgaagccacagaaccccgaagcagccaagccag

SEQ ID NO: 89183 - RNA, 72 nt, Homo sapiens
agccacgggccaaaggaaaacaccacaagaggacaaccggaaaggagcgccgcaggcgcgacacaaaaacgg

SEQ ID NO: 89184 - RNA, 69 nt, Homo sapiens
agaggagaagaaaggagaagaagaccgagaggaacaaagacagaaaccccggcccgacgagaagaggcg

SEQ ID NO: 89185 - RNA, 76 nt, Homo sapiens
ccccccaacgagggagccgggaggccccacccgccaggccaggcgggggacagccggcgcggcccaagaagagaca

SEQ ID NO: 89186 - RNA, 73 nt, Homo sapiens
agcacaggcgcaagggccaccggggagcgaaggccaagagggcaaggaagaggagaggagacgccggagcggg

SEQ ID NO: 89187 - RNA, 76 nt, Homo sapiens
gaccaagaaccagggggaaacggccaaagggaaacagacgaggacaccaggggagaagcacaggggaggcccggca

SEQ ID NO: 89188 - RNA, 65 nt, Homo sapiens
cggcggccgggcacgccggaaaaggccgaagggcacgaaagaggcaagagagcgcgcgcgaaggg

SEQ ID NO: 89189 - RNA, 73 nt, Homo sapiens
aaaaggaaacgagaagcggggcagacaacaggcacaaagagagaaggaacacccacagggcagacagagaaag

SEQ ID NO: 89190 - RNA, 85 nt, Homo sapiens
cgaaagcaggcgcgggggggcgcgaggacccggacagccgaccaggaggagcagagcccagcgccaaccggcagcccacaaccgc

SEQ ID NO: 89191 - RNA, 76 nt, Homo sapiens
gcccgggaacgcgacgcgagagaaggacccacggcgcgcgaaggggggccacgggccccgaccgcccacaagcgca

SEQ ID NO: 89192 - RNA, 81 nt, Homo sapiens
gagcgcggagaacgaaggcggacagcccgcgaaaccaggcgaccccgcacacacacccaccagccacggcagcccagcggg

SEQ ID NO: 89193 - RNA, 62 nt, Homo sapiens
cgagcgccacaaacgaccgggacaagcaaggggccaaggagccaaggaggaaacccacaaca

SEQ ID NO: 89194 - RNA, 79 nt, Homo sapiens
gaccaaggggcgagagcccccaccccagacaggggaacagggcacagcccacccagccagacagacacagcacagcagc

SEQ ID NO: 89195 - RNA, 80 nt, Homo sapiens
agggcaagccaaaaaagcccaggaagaagacgaggagcggcagacagaagggaacagccaaaaggaacagaagggagaga

SEQ ID NO: 89196 - RNA, 77 nt, Homo sapiens
ccagacccggcagaacggaggggaacagaccccgcggacggcgagggaaggcaacaccaaaaagagacccagcccaa

SEQ ID NO: 89197 - RNA, 72 nt, Homo sapiens
agaaggcacagaaagcaccagaggaaggacaaacccgaggcgagaaccaagacaacaggcgaagaagggaaa

SEQ ID NO: 89198 - RNA, 77 nt, Homo sapiens
cgaacacaccaaccaaccagcaaccagccagcgacggaaccggccgggcgagagacagggaagaccaggaagggggg

SEQ ID NO: 89199 - RNA, 79 nt, Homo sapiens
gagagaaaaggagacgaagagcaccagggccggcccagggagaacgcaaaaccaccacccccacaaaaaacgcagggag

SEQ ID NO: 89200 - RNA, 84 nt, Homo sapiens
gaagaaaaaaaagcaaaacaaaaaagaggcgaagacgagaggaacgcaggggaaaggaaaaacacggccagaaaggaggggcag

SEQ ID NO: 89201 - RNA, 73 nt, Homo sapiens
gccgccccaccggacccgcagggccaggccgccacgaaaacaagaaagaaccccacagccagcagaaacagcc

SEQ ID NO: 89202 - RNA, 80 nt, Homo sapiens
aaagaggcgcccagaaagcagaacaggccaccgggccaacgaaagcagaagacaacaggagcgaggcagaacacccccag

SEQ ID NO: 89203 - RNA, 75 nt, Homo sapiens
aggcccagccgcaagaagcagacacgggcgaggacaacggcacagcaagcaacccggccgaggggggcaccccgg

SEQ ID NO: 89204 - RNA, 83 nt, Homo sapiens
gaggaggacgccagacgcacggaaagcagcgcaggagccaagaccacagcagcacccaggggagccagccaagacacggagcc

SEQ ID NO: 89205 - RNA, 82 nt, Homo sapiens
gcgcgaccaggaggcggcggcgccgccggcggaaaagaaggaggccagcgggacacacaaagaaagacgaaggacacccaaa

SEQ ID NO: 89206 - RNA, 69 nt, Homo sapiens
gcgcaggcgccccaacggcaggggaggagaaacagcggggaaaggggcgaggagaccgcagccgagcag

SEQ ID NO: 89207 - RNA, 77 nt, Homo sapiens
aagagcgagaaacgcggaaagaagcagaagggggcacccgaggaggaagagggcagggcccacggaaagaagggaaa

SEQ ID NO: 89208 - RNA, 38 nt, Homo sapiens
ccccaagggcgggaacaggacacaagaaggaaagggaa

SEQ ID NO: 89209 - RNA, 75 nt, Homo sapiens
cagagccggaagcaacacgcagcgggagcagcggaagacaccaaggccagggagggccaccgcacggaagagacc

SEQ ID NO: 89210 - RNA, 75 nt, Homo sapiens
gagagaagccagagaagaccaagacaacaagaaggaccaagcaggaggaaacagaacgacagcccgcaccgacgc

SEQ ID NO: 89211 - RNA, 69 nt, Homo sapiens
cacccaccacaaccacacacaggagcagggacggggggaaaagcgcacccgggcccgggcgagaaagaa

SEQ ID NO: 89212 - RNA, 84 nt, Homo sapiens
gcgagggagcccgcgcggcgagagcccacaggcccccacaggaaaccaagggaacagccagggccagagcaccccagccaggac

SEQ ID NO: 89213 - RNA, 85 nt, Homo sapiens
gagggaaacaagaaaacacaaagaggcagcaaagaggaaaggagcagggcccgggaagccaccaacgcgaccacggccaagcccc

SEQ ID NO: 89214 - RNA, 77 nt, Homo sapiens
cggcccgccagggggagcccgccacggagagccgcagggcggagaacggaaaagcaccaggaagcagagaggaccgc

SEQ ID NO: 89215 - RNA, 72 nt, Homo sapiens
aacccgcccccgggccaagcagccagcagaaacaagcaacaaacgcaaaaacggagggcgcacaaaagagca

SEQ ID NO: 89216 - RNA, 83 nt, Homo sapiens
cggccgaggaaggaacggcccccccccagcccgccccaaaaggacaccaggggggaaaaaccacacaggcaaagaacgcgcaa

SEQ ID NO: 89217 - RNA, 73 nt, Homo sapiens
ccaggcccaggaagacagccacgggccgccaggaggccgggaacgaacagcggcgccacaggagccgcagaag

SEQ ID NO: 89218 - RNA, 70 nt, Homo sapiens
aggcccgaaccagaaacaggcacaggagacgagccaaacagccccagccgcagcccgaggagccgcccac

SEQ ID NO: 89219 - RNA, 75 nt, Homo sapiens
agaccaggcagagagccagagacggccaggagagagggccgcagcagcaagcgcagaaccagacaggcagaagga

SEQ ID NO: 89220 - RNA, 72 nt, Homo sapiens
aacgaggaggaaggagaacgagggggcaccaaaacagcgcccacacaaacaaagcaacgggaccgaccccag

SEQ ID NO: 89221 - RNA, 53 nt, Homo sapiens
gcaccaggcgagcagcgcccccggaggaaggccaggaacgcagaagaccgcag

SEQ ID NO: 89222 - RNA, 80 nt, Homo sapiens
gagcggcgagcgcgaaggcacgagcggagggagaacaagaacgcagcaaggcgccaccggaagaaacgggaggggaggag

SEQ ID NO: 89223 - RNA, 42 nt, Homo sapiens
acccgccaaagccgccgggcaagaaaaccgagaaaacgggac

SEQ ID NO: 89224 - RNA, 74 nt, Homo sapiens
gggagccgacgcgaggggacaaaggcgcaagcgagaggaaacgggccccaaggcgaccggagacacgagaccag

SEQ ID NO: 89225 - RNA, 69 nt, Homo sapiens
accagagggcaaaccggcaggcgcccggacacagaagaggacagccgaacacaaccccagagccggcag

SEQ ID NO: 89226 - RNA, 76 nt, Homo sapiens
caacgagaaaacccacagagaggagcggagaacacagaaccggcccggggagagccagagcgggagagggcacggg

SEQ ID NO: 89227 - RNA, 87 nt, Homo sapiens
gaagaacaaagcgagcagaaagggcgagcggcagagcgggacaagacaccccggacacgggaggcgcacgccaggaccgacgggaag

SEQ ID NO: 89228 - RNA, 80 nt, Homo sapiens
caccgaaaaacagaggacgaaagcgcgcgcgcagggagcagcacccccaccgcaggggcagaagggagcggaagcgcacg

SEQ ID NO: 89229 - RNA, 79 nt, Homo sapiens
gcgacgacccgcgcaagcgcaccaggccagaaccgcgccggaccgggccggaaccacgaggagagcaggagaccagaag

SEQ ID NO: 89230 - RNA, 79 nt, Homo sapiens
ccagccgagcgcagcagcccgccggggcgccgcagcccccggggcccacggccgcccgccaccagaaaagagcggcccg

SEQ ID NO: 89231 - RNA, 79 nt, Homo sapiens
acgaccaccggccgcgggcccggaacacgagaccgaccgcccccaggaggggaggcggcggccggggcagcgccgcgag

SEQ ID NO: 89232 - RNA, 78 nt, Homo sapiens
agcaccaaaccaagaggcggccagcaggaggcgagaagaggcgacccgcggcgagagcccccccagagcgccagggcc

SEQ ID NO: 89233 - RNA, 74 nt, Homo sapiens
aggccccccagccacgggaacggggagcgggcggccagcggcaagacggagagcgggccacggagccggaggaa

SEQ ID NO: 89234 - RNA, 88 nt, Homo sapiens
gcgagccggagcgcggagcccggccccgcaccaggaggaggacgacagcacgcccagccaacaggcaaggccccggggcaccagccga

SEQ ID NO: 89235 - RNA, 70 nt, Homo sapiens
ggcaagggcgcgaacccagaagcaagcgacaaccgaaaggaccaccggcagaggaacgagaacccggacc

SEQ ID NO: 89236 - RNA, 67 nt, Homo sapiens
agagaagacgacgcaccgcaggcagacaaaagggccaaagaagggagagagccccagggcgaagacc

SEQ ID NO: 89237 - RNA, 75 nt, Homo sapiens
cagaacggagcggaccagacgaggggcacgaagacccgaccaggagacggggagcggcagaagcacagccaggca

SEQ ID NO: 89238 - RNA, 87 nt, Homo sapiens
ccaggcgaacaagacgacaccgccagcaccgaccaccgaggcggagggggagaacacccaggagaaagacagcaaagaaaaggagaa

SEQ ID NO: 89239 - RNA, 87 nt, Homo sapiens
cggccccagcaccccagcgcgcagggccgccaggggcgccggggcgggccccggccagggcccaggcagccggggcggaacccccag

SEQ ID NO: 89240 - RNA, 89 nt, Homo sapiens
gcacccgcaaaccccaggcgagggggcgccgccccggaaagccgccaacgggcccgcccgagcgggaagaagccgcagcaagccgcagc

SEQ ID NO: 89241 - RNA, 73 nt, Homo sapiens
gcgggaagcaggcggcaaccacccgcacggagggcaacaacacggcaccacacaagcgaagaagccgagaaac

SEQ ID NO: 89242 - RNA, 75 nt, Homo sapiens
gaacgccccccgggcggcggggagggagggcagaagaagaaaagaaaacggaagaaagggaccccagcagaagag

SEQ ID NO: 89243 - RNA, 79 nt, Homo sapiens
ggcggcgcgcgcggcgcgggacgcgcgcgggcacccacggagccccggggcgccaccggggaccgcaaggccgcggggc

SEQ ID NO: 89244 - RNA, 34 nt, Homo sapiens
gaccgaccaccaaaacgaggaggaaaacccaaac

SEQ ID NO: 89245 - RNA, 67 nt, Homo sapiens
caagaggcacaacaaacggagagcaaagacacagagggcgaaccaaagaaggaaggcgacccaaaac

SEQ ID NO: 89246 - RNA, 71 nt, Homo sapiens
gaacacccaggcgacaggccgggaccgaccagagaagcaagaggaagcaccgaccacagccagcaggaaag

SEQ ID NO: 89247 - RNA, 73 nt, Homo sapiens
acggccaaaggagccgaaacccgaccccagggaggagaagcacggccacacaggccagagacccagcaggagc

SEQ ID NO: 89248 - RNA, 82 nt, Homo sapiens
aaccccgcccgcagcgacacaccaagcggaggggacgccacgcaacgccgcacccaggccacagaggaggaaagagagggga

SEQ ID NO: 89249 - RNA, 80 nt, Homo sapiens
gggacaccagcagccgcgcggagcgggaggaggaccgaaaggcacgcagcacgggggcaggggccgacccagaacgccag

SEQ ID NO: 89250 - RNA, 78 nt, Homo sapiens
caaccaccagaaaacaggcagcgaagccgcagcagccagaggagagcggagcgaagaggggagggagacacccaggca

SEQ ID NO: 89251 - RNA, 82 nt, Homo sapiens
gcgaccccacagagacccacacaagcagggcgaagacggacgaacgacccacaaccaagagagggccccccgcagaccccgg

SEQ ID NO: 89252 - RNA, 61 nt, Homo sapiens
gaaaagcaggacgcaggaagaggcccgcccacaggaccagcccagcagaagacaggccccg

SEQ ID NO: 89253 - RNA, 39 nt, Homo sapiens
cacagcagcaccgaggaggagagggaagggcgccggaaa

SEQ ID NO: 89254 - RNA, 64 nt, Homo sapiens
ggggggcgcgcccgccgacggggggcccgagccggaaaggccaggcaggaaggacacgggaagc

SEQ ID NO: 89255 - RNA, 102 nt, Homo sapiens
ggcaagaggagcagaacgggagagggagcacaggggcaacacagaagcagagcagggaaggaggcagcaccccagcgaacccggagcgagcacacccaggcg

SEQ ID NO: 89256 - RNA, 69 nt, Homo sapiens
ggaaggcgcccacaacaccaaccacaccggagcaggacaagcgaacagcaggaacagaaaccccaaaca

SEQ ID NO: 89257 - RNA, 80 nt, Homo sapiens
cagcacagcaccgcagccacaggaaacacagcagcgaccacaagccgggcgcccagccccgcagcggacggcgcgccacc

SEQ ID NO: 89258 - RNA, 84 nt, Homo sapiens
cccccggcgggggcgggacagcggcccccggagggggcagcccgggagaaccgcggcggccggagcgggacaaaagcagaaacg

SEQ ID NO: 89259 - RNA, 65 nt, Homo sapiens
caaaaagagagggccacgagagagaaagacacagccccgacggacagaccaacgggacaagaagg

SEQ ID NO: 89260 - RNA, 83 nt, Homo sapiens
gcaaacagcccgccagacacggcaggccaagaagcaccgagcgcgaacaaacggaggacaccgccagagggcgcaggcagcgc

SEQ ID NO: 89261 - RNA, 72 nt, Homo sapiens
aagccgcggcagccgcggaccaccgccgccaggggggagccacccaaaggaggaaccggagaagagaagcga

SEQ ID NO: 89262 - RNA, 79 nt, Homo sapiens
ccacccgaggaagacgaggacaggacagagcccccgaggccccagaacaccgcgcgccgggggcccggaaagggacgcg

SEQ ID NO: 89263 - RNA, 76 nt, Homo sapiens
cccgcgccgccgaccccccggcgccgcgccggcggcgacccacaggaccgcgaacaaggaggccacaaaacacccg

SEQ ID NO: 89264 - RNA, 79 nt, Homo sapiens
cgggacgacgcacaagacaacgcacgacgcacccccagacgccgacccagaaagccagggacaccaaaccccgagcgcc

SEQ ID NO: 89265 - RNA, 56 nt, Homo sapiens
gccgcgcgcgaccaaaggccccggccgcagccaggagcggcaccgcccggccccca

SEQ ID NO: 89266 - RNA, 87 nt, Homo sapiens
caccaaggggcaacaagcacccacaaggggaccgggcaaggggccgaagaagacaagaggcacacagagacagaccaacggcagcca

SEQ ID NO: 89267 - RNA, 76 nt, Homo sapiens
ccacagacagcaggagcgaggccgggaccggagcaccggcagacccggggaccgggaagaaccgaccaggcccgcg

SEQ ID NO: 89268 - RNA, 71 nt, Homo sapiens
cggggcagccgagggccaagggagccgcgcaaaggccccggcaagaagaggggggcgggccgagcacccgc

SEQ ID NO: 89269 - RNA, 77 nt, Homo sapiens
aggaggcaaggaagagcaccaaaagaagaacggcaagaaaccccgaaccaaacagagcccaaggagcggcaaagaaa

SEQ ID NO: 89270 - RNA, 71 nt, Homo sapiens
acccgcgaagcggggaagaggcccagccagagaggaaggcgccagacacagaaaagaaagagagcaaccac

SEQ ID NO: 89271 - RNA, 45 nt, Homo sapiens
ggaaaaagaagggaggggggagagagcagagggcaccagcgggac

SEQ ID NO: 89272 - RNA, 81 nt, Homo sapiens
gagagccaaagaaggcgccggaccgaaggcgcgaccacgacgagaagcgggggccgcagcggggcaccaacgcagggacgc

SEQ ID NO: 89273 - RNA, 68 nt, Homo sapiens
gcaagggaaggaaaggcccaacacacagcggaaacgggcccccgcccaacaggcacaaccagagacag

SEQ ID NO: 89274 - RNA, 76 nt, Homo sapiens
gccagcgcccaccggggcgcgaggaggggaaagcgcgaaaaagggcgcaaggccaagccagagacacacggaggaa

SEQ ID NO: 89275 - RNA, 77 nt, Homo sapiens
acccaaggccacaacgccgcaacaaaagaaacccgggccgcggaaggcccgaaggcaggaggaacagcgacacacga

SEQ ID NO: 89276 - RNA, 72 nt, Homo sapiens
cagccagcggcaagaaagggacgcagaaaacgcacagcacgagaaaagcgaaaagaacacaaccagcacacc

SEQ ID NO: 89277 - RNA, 87 nt, Homo sapiens
ccgagagcgcgaaacgcacgagaagaccgaggaggagaaggggcggcccggaggccgagaggagcggagagacaagacgaagcccgg

SEQ ID NO: 89278 - RNA, 78 nt, Homo sapiens
gaaacccagaaggccaagacgcccagaccacagaggaacgcacagacaggccggcgccagcgccagcgaggaaccgaa

SEQ ID NO: 89279 - RNA, 71 nt, Homo sapiens
ccggcccacgcgcggccaagggggagaggcaccagcaacagaccaaccgcagcaagcacagagacaggaag

SEQ ID NO: 89280 - RNA, 76 nt, Homo sapiens
cgcgaccacaaggaacgaggggccccaagagcacagaccagcagccgccaaagaaacaacgaacgagcaaggaagg

SEQ ID NO: 89281 - RNA, 31 nt, Homo sapiens
gggagagccaaagaagggagccgcccaaccc

SEQ ID NO: 89282 - RNA, 58 nt, Homo sapiens
gaggcaagcagagcgcggccaagaacagaggaagggccggccccacacaccaaaaagc

SEQ ID NO: 89283 - RNA, 70 nt, Homo sapiens
ccgagcccgccgcgcgggcccgcccgacgcggaagggaaagaaccccgggagcgaagaagcggaacgaca

SEQ ID NO: 89284 - RNA, 61 nt, Homo sapiens
cgacagcagcgaaagaccaggccccagccgggaaagaggccccaggcccccgaagggccag

SEQ ID NO: 89285 - RNA, 72 nt, Homo sapiens
cccccggacagaccaacgaaaacaaggcaagcggggggaaaaaccacacaaaaaaaagaagagaacacagca

SEQ ID NO: 89286 - RNA, 74 nt, Homo sapiens
gacggacgaccagaggccgaggacggagagcggcaacacccagcacacaaaggaggcccacagcagacccaggc

SEQ ID NO: 89287 - RNA, 71 nt, Homo sapiens
cagccgccgcgcccgcccgacccgccaccgccaggccagggcaaagcagcgaaggagcagcagagggagag

SEQ ID NO: 89288 - RNA, 97 nt, Homo sapiens
gcggcagcgggcggacggccggcgggggcggcggcggccagcgccaggcgaagggagggccgccccaaccgacgcaccagccggaggaggagggaca

SEQ ID NO: 89289 - RNA, 83 nt, Homo sapiens
ggaaaggaaccaggagagagcagccagaggcgcaagacggacaacacgaagaagcagcgaaagggagacagagaagaagggaa

SEQ ID NO: 89290 - RNA, 68 nt, Homo sapiens
cagcagaagcgccgacaaacacggaacaacaaggaaagcaccaggacaccaacccaccaacacgagcc

SEQ ID NO: 89291 - RNA, 42 nt, Homo sapiens
ccgacacacagccccccaaagccaaaacagggccagacggga

SEQ ID NO: 89292 - RNA, 77 nt, Homo sapiens
aggaaccgagcaacgcggccccagccgcggagacacaacaacagaggcagcaacgcagaagaccgaagaagcagccg

SEQ ID NO: 89293 - RNA, 72 nt, Homo sapiens
gccaagaagcccggcaaaacgcgccggcgaggaggcgaacaccccagggccgaagggggccccaagagccac

SEQ ID NO: 89294 - RNA, 76 nt, Homo sapiens
aacacggcacacgcaggcaacaaggaagagcaagcaggacaggccaacggaagggggcaaaaggccaaacagagga

SEQ ID NO: 89295 - RNA, 76 nt, Homo sapiens
ggccgcagcgagagcgaggaggaggagcgagagaagaaaaagagcaaagagagaagacaggaaaaacacgagcaga

SEQ ID NO: 89296 - RNA, 78 nt, Homo sapiens
ccaacaggaccggaacgcccagacgggggaccgagcagggcacgcagaagcggcccgaggacaaaaaagcagcagaaa

SEQ ID NO: 89297 - RNA, 59 nt, Homo sapiens
cccaccgccagcccggccgcgagcgcggccgcaggagcgcccaccccacgggaggccgg

SEQ ID NO: 89298 - RNA, 81 nt, Homo sapiens
caacaccggacaccgagaggaaccacaagcagggaccaagaaaggcccagggaccaaagcccggacaaggcccgagcacca

SEQ ID NO: 89299 - RNA, 93 nt, Homo sapiens
gggccacacaagccccaggagcacccacgggagaccggggggcaagaaaaggaagaagaagcacaccaccccaagaagaaaagcacaagagaa

SEQ ID NO: 89300 - RNA, 77 nt, Homo sapiens
agagccggggaagacagggaagccagacagggccgagaaaaggggccagcgagccggacgccgggaaggaagaacag

SEQ ID NO: 89301 - RNA, 73 nt, Homo sapiens
gcccgagcggagagccaggcgagagaggcccgggccccggaccagacagagcaaaccgccacccgggacaacc

SEQ ID NO: 89302 - RNA, 82 nt, Homo sapiens
gacgagcgacccgggagacacgacggcaagccagaccgggagggagggccgaccgaggggaccagcaaggccccagccagca

SEQ ID NO: 89303 - RNA, 85 nt, Homo sapiens
accccggggcagggcaagcacgggaagaagcagcggacccgccaccacacggcaccgggaaggacgcccagagaccggcagcgca

SEQ ID NO: 89304 - RNA, 56 nt, Homo sapiens
gcgccgggccacgccggccacccccaaaacagggcgaagagcccagaggcacgcca

SEQ ID NO: 89305 - RNA, 36 nt, Homo sapiens
ggaaagcacgcgcacagagacccgacagaagcaagg

SEQ ID NO: 89306 - RNA, 76 nt, Homo sapiens
gacagcgaaagggaaaacccccacacggaggggacgaagacaaaaaccagaacgccaacggcaagaaagggaaggc

SEQ ID NO: 89307 - RNA, 77 nt, Homo sapiens
ggcgcgcaggagccaagggccaccgacgggagagagcaccccaacagggcagcaggccagcccgaaaagccaagcca

SEQ ID NO: 89308 - RNA, 75 nt, Homo sapiens
gcgaaaagcccgaaggcagagcggacccaccaaaggaaacgacagcaaggacagggcagaccgccagcagcacag

SEQ ID NO: 89309 - RNA, 78 nt, Homo sapiens
agcccagagagccgagaccacagccgcagaaagcaacaaagcgagagcacaagaaaacagccccgagcaccagaccac

SEQ ID NO: 89310 - RNA, 94 nt, Homo sapiens
cccgccgcgacgaggagccagcccaaggccacaccaggcagcccccaaacccggcccaggaaaagggaggaagcaccgaggagaggcacgcagg

SEQ ID NO: 89311 - RNA, 64 nt, Homo sapiens
caccccacccccagcccaacaacagggcagagcagagaccaaggagccaggaaggagaagaggg

SEQ ID NO: 89312 - RNA, 81 nt, Homo sapiens
gcaccgggacggaccgagaccggaccgagagcggaccgagagcgcgaaacgcacgagaagaaagcgaccgcaggcccacgg

SEQ ID NO: 89313 - RNA, 56 nt, Homo sapiens
gcgagcaagcggccaagagggcgaacacgagccagagaggcaccaacacaagagac

SEQ ID NO: 89314 - RNA, 85 nt, Homo sapiens
cccacggccaccccgccgcgcaggagcgggcaccacccaaagaagcgccaagagaaaccaccaagagccaggaaggcaaaggccg

SEQ ID NO: 89315 - RNA, 67 nt, Homo sapiens
ggagacccaaggaaagcacgcaagcaaaacgaccggcagaacaaggagagcacggccgcagggccgc

SEQ ID NO: 89316 - RNA, 68 nt, Homo sapiens
gaagacgaagcacggcaaaccaccagccaaaacaccgacagacgaacagaagaggaccggcagaaaag

SEQ ID NO: 89317 - RNA, 66 nt, Homo sapiens
ggcggcggcggcggcgcggcccaaaaggaccaggccaaccggagcgcacccacgccacaagccgga

SEQ ID NO: 89318 - RNA, 87 nt, Homo sapiens
gcgccgccggcgaaggaggaggcggccggaggagccagcccccacagagcgggagcgaccggaccaccggacagcccgaacccaagc

SEQ ID NO: 89319 - RNA, 74 nt, Homo sapiens
gaggccggcacgcccgcccgaggcgacggccgcggcgcacaggaaaagcgacacaccaggcgccaagccacacc

SEQ ID NO: 89320 - RNA, 53 nt, Homo sapiens
accacccagaggagcaacagccggacgagcgggagaggacaccacacaaaaaa

SEQ ID NO: 89321 - RNA, 98 nt, Homo sapiens
gccgaaccgcagccccgcacaccaccgccgccgggccggaggccacgaggaaggaagaaacacgacaacggaggagcccgggccgcagccgcccgcac

SEQ ID NO: 89322 - RNA, 75 nt, Homo sapiens
ccgagaaggacagagaaccgggaacaggcggacggccagcccacacagaggccagcgccaagaagccggggccac

SEQ ID NO: 89323 - RNA, 71 nt, Homo sapiens
acccagagggagaaaagcaccgagaaagggcgggaagcggggaaaggaaaacaccagcacaccaaagaccg

SEQ ID NO: 89324 - RNA, 84 nt, Homo sapiens
cgacccgacgggccaccgcgaccccgggggcagcacgccacacagacagaccaacagagcagagcagaccggaggccagacagg

SEQ ID NO: 89325 - RNA, 109 nt, Homo sapiens
ggagaaggcggaggagggaaggaagcaggaccgcacaccgacaggcggagcgcgagaggcggagaacggaaaagcaccaggaagcagagaggaccgcagaagggaagga

SEQ ID NO: 89326 - RNA, 71 nt, Homo sapiens
ccacgacaggacacggaccccgaggaagcccgcaccagagagaacaaggaagggggaagaaaacgaccacc

SEQ ID NO: 89327 - RNA, 88 nt, Homo sapiens
gcaaagcccccacgcccagccaggagcaccgccgaggacccagcacaccgagggacccaaagacaggaccacgcaccagcagagaagg

SEQ ID NO: 89328 - RNA, 71 nt, Homo sapiens
ggaagccagaagaggaggaaaaggccacgggaggaagacccaaaagacgaaggaagaccaaggaagaacag

SEQ ID NO: 89329 - RNA, 70 nt, Homo sapiens
ggagagagagaaggccgaagaccagaaaaacaggacccgaaacacacgcgcacagagcggggcaacagac

SEQ ID NO: 89330 - RNA, 83 nt, Homo sapiens
cccccaaacacagggagaggagccacagacccgggaaggacccacacacaggagagggcgggcggaaccccacgcaacaggcc

SEQ ID NO: 89331 - RNA, 89 nt, Homo sapiens
ccacacccaccaacaacaccacaaaaccacagccaaggggagccacgaagcccccacccacaggcgacagaggcaccgcaccagagggc

SEQ ID NO: 89332 - RNA, 80 nt, Homo sapiens
caagcggcccccccggaagcgggcccccccagcaccgggaggggaggcggcccgcaaggccaccgcgccgccaggggagc

SEQ ID NO: 89333 - RNA, 58 nt, Homo sapiens
gaggccccccagccaaggaacggcaaagaccaccacaaagagaagaacgggagcggca

SEQ ID NO: 89334 - RNA, 61 nt, Homo sapiens
ccccccacaggggagacagaggccaccacacgggcgcggggaacgagggggacacaccacc

SEQ ID NO: 89335 - RNA, 72 nt, Homo sapiens
gcaggaaagcccgagcagaaacagaaccaaagaaccgaacaaaagacgagcaaccgaaagaaaaaaccacaa

SEQ ID NO: 89336 - RNA, 74 nt, Homo sapiens
gagaccaaggcggagcaccgaaaagacacacggcgcagcccggcacggggccgcacgaggaacccgcccccccc

SEQ ID NO: 89337 - RNA, 68 nt, Homo sapiens
agggaaaaaagcagagcccaggagaaaccggacgcgacgggagggcccagaggagacaggggaaccag

SEQ ID NO: 89338 - RNA, 84 nt, Homo sapiens
agggaacgggcggccccggagagagagccgcgcacgcacagacaagggccgacagcgcagaaggaccggagagcgcagcgcgag

SEQ ID NO: 89339 - RNA, 74 nt, Homo sapiens
gacacagccgcaagaacaacacgcccaggccggcaccccgggcgcagagccgaaagaagcagaggaagaagccc

SEQ ID NO: 89340 - RNA, 84 nt, Homo sapiens
cggcaccgggaggccgggccgagcgacccacagcggggccgggccccgaccacccagagaaaggaaaggagccagagaaggagc

SEQ ID NO: 89341 - RNA, 109 nt, Homo sapiens
cgaacagggaggagagacggcggcggaaaaccccaaaaggacaaaggacaaaaccgaccacaggcccgcaggagagagaagagaaggcaggaacgaagagaaaacagaa

SEQ ID NO: 89342 - RNA, 70 nt, Homo sapiens
cgaaggcgcgcaccggaagcaccagcgaggaagcacagcccgagaggaagaccacgccccgacaacaaag

SEQ ID NO: 89343 - RNA, 76 nt, Homo sapiens
ccaaaacaggcaaacggagacgcgcagaagaaagggacaaacacgaacgcccgaacaccacaaacacgccaaagca

SEQ ID NO: 89344 - RNA, 86 nt, Homo sapiens
gcgccccggggcagaccgcggccccccgggcgcacaagcagagggccagaaccaccgccagagccgggcgcgaggcacaagccaag

SEQ ID NO: 89345 - RNA, 76 nt, Homo sapiens
cgggcggaagacaggccacccagcggggagcacggcgagcagccaggccaggagagggcgggacccgagagaacgc

SEQ ID NO: 89346 - RNA, 78 nt, Homo sapiens
gccagaagaaaacgaggggcggaacacccgccaaagcagagaaaaggggcacccgaggaggaagagggcagggcccac

SEQ ID NO: 89347 - RNA, 69 nt, Homo sapiens
cgggacccgggcgcccgcgcccgccccaacccagccacagcggaagcccgcgggccccgcagaagcagc

SEQ ID NO: 89348 - RNA, 83 nt, Homo sapiens
ggggcaacaagagcgaccgggcgcccggaggccggggagccacggacggagccagggaaggggacgcgcgccccgagcacgca

SEQ ID NO: 89349 - RNA, 81 nt, Homo sapiens
caggcagaccggggacaacaaagcgcgggaacaaagcagcccaggcagaccccagaaagcaaaccccacgagaacaaagca

SEQ ID NO: 89350 - RNA, 80 nt, Homo sapiens
cgacgggcaggggagaaacgaacaacccgacccccaaaccacaccagagcgaccaccccagccagcgaagacggaggacc

SEQ ID NO: 89351 - RNA, 71 nt, Homo sapiens
agcgagcgagggggggcgcgccggaaaccggagcgcgcagcagaaaccccaccacgcggcaggggccgccg

SEQ ID NO: 89352 - RNA, 77 nt, Homo sapiens
gaggagccagagaagcgccaaaggggccgcaagcagggggaacacccgcccagccgccggacccagaagcacacgac

SEQ ID NO: 89353 - RNA, 61 nt, Homo sapiens
gcagaccgaggggcaccgaccgcacgggccacccaaaacagacaaccgagcacaaaaaagg

SEQ ID NO: 89354 - RNA, 75 nt, Homo sapiens
cgccgaccccccggcgccgcgccggcggcggccggcggaccgcaggcagcgagccgcccggccaggaagccgggc

SEQ ID NO: 89355 - RNA, 74 nt, Homo sapiens
ccaagaagaagaaggagagccggcacgcagacggaaggacagcagaccacagcccggcaggcccaaaaacccaa

SEQ ID NO: 89356 - RNA, 83 nt, Homo sapiens
gagccacccccgccgcgcaaaagccggaaacgggggcggccagaacagagaacaccgaggcgaagagccgccgcgcccaggcg

SEQ ID NO: 89357 - RNA, 69 nt, Homo sapiens
caaagacggagagcccagagacacggagggaagccggaagcggcaacagcaaagggaaaagaggagacg

SEQ ID NO: 89358 - RNA, 82 nt, Homo sapiens
cgggagcgcgcccgccgagcgcaacagcggcgggcggggcaccccagaggcggccagcaacagcgccaggccccaccgacac

SEQ ID NO: 89359 - RNA, 79 nt, Homo sapiens
ccggcccccgggacggcccaaggccagcccgcagggggagacgaaccggcaaggaacagacgaagagcagagccaggcg

SEQ ID NO: 89360 - RNA, 75 nt, Homo sapiens
gaggcccgcagccaggagggaaaagcaccagagagccaagaggaaggaagcccaacaggagaaaaaccgcggacc

SEQ ID NO: 89361 - RNA, 79 nt, Homo sapiens
gggagcgagcgggcagcgcgacaaaagcacccagacaaaaaccggcaagagacaaaacacgacacagagaccgacaaga

SEQ ID NO: 89362 - RNA, 72 nt, Homo sapiens
aagggacgcacgggagcgagcacaaacgacacacgcaaaccacaaagcccagcaacccgaagagagggcgca

SEQ ID NO: 89363 - RNA, 82 nt, Homo sapiens
ccccaagagcgggagcaggacaagaacccaaccagcagcaaaacaccaaggaaagggagcagcaaccccagagcagagccag

SEQ ID NO: 89364 - RNA, 67 nt, Homo sapiens
gggccagaggggaggacaggcgccacgaaccaaaggcagagacagaggaagaggcagagccggggaa

SEQ ID NO: 89365 - RNA, 68 nt, Homo sapiens
accgaaggaagagccaccagcgacaaacaggaaaggaacaagggggcgcaacagcccaggcagcacgg

SEQ ID NO: 89366 - RNA, 96 nt, Homo sapiens
agcccggcgcccgcggccagccgcaagacccgccacaagcaacgcgggaagagaagaacgaaaacaaacggaagagagggcagcaagaaagaacaa

SEQ ID NO: 89367 - RNA, 76 nt, Homo sapiens
gcagcccggagggcgggagaacagcaagaccagccggacccggaaacagcagagcaaaaagcggaaccacaagaag

SEQ ID NO: 89368 - RNA, 80 nt, Homo sapiens
gaaggggggagaacggcggcagaaccaagaaagaccaacagcaacagcaagggacgagccgagacacagaagccgacagc

SEQ ID NO: 89369 - RNA, 82 nt, Homo sapiens
gaaagcggcggacagccgaagcaaggaccgggacacccagagccaaaggagccgaacccaaaaagagcagcaccgcgagcga

SEQ ID NO: 89370 - RNA, 71 nt, Homo sapiens
gagaagaggacgcggagacaagagcgcaccccccggaggcggccgagcccacgcgacgaagaacaggagag

SEQ ID NO: 89371 - RNA, 69 nt, Homo sapiens
cgcaagacccgcgagaacccggggacccaaggccgccaggagacagaccgacagcaacaagaaagaaac

SEQ ID NO: 89372 - RNA, 73 nt, Homo sapiens
agcacaaaagggaaagagacggagaaaagaagaacacgcccaaaacgagacaggcgagacaagaggaacaccc

SEQ ID NO: 89373 - RNA, 73 nt, Homo sapiens
gaacccgaccccgcggagacagcgagacccgccaggagcaaaggccggcaaagcaccaggcacagcaagcgcc

SEQ ID NO: 89374 - RNA, 80 nt, Homo sapiens
gcggaacgaccagccgggcagggggaaccggcagcggccccacagccccgcgaccaaaacaacgggacaacagagccgac

SEQ ID NO: 89375 - RNA, 44 nt, Homo sapiens
gccccgggcaccaggcagcaacaggagcaggccgggcccgccag

SEQ ID NO: 89376 - RNA, 77 nt, Homo sapiens
agaccgagcggagcaccacgagaggcacaggccggaagggcaccccacagcaagaccgagaagaaacccgacgcaca

SEQ ID NO: 89377 - RNA, 60 nt, Homo sapiens
cgcgcggcggcaccgggaggccgggccgagcggaagaagagagggcgaaggaggccacac

SEQ ID NO: 89378 - RNA, 68 nt, Homo sapiens
gcaaggcaaggaaaggaccccaaagccagaccagcacaagcggcaaccggaaaaaaaacccacggggg

SEQ ID NO: 89379 - RNA, 39 nt, Homo sapiens
ccaacaccgcgacacgcagggcacacgggccacagagga

SEQ ID NO: 89380 - RNA, 58 nt, Homo sapiens
ggagcagcggacccaggcaggcagaaacgaggcgaccgagcagacagaggcaggccgc

SEQ ID NO: 89381 - RNA, 68 nt, Homo sapiens
cacgaacgcccaccccccgaacccagccgcaccgggcaggcgaggcaaaggacacagaagaaaggaca

SEQ ID NO: 89382 - RNA, 55 nt, Homo sapiens
aggaaggaaccagccaaaaagcaaggaaggaagaaggaaaagcggaagcgcagac

SEQ ID NO: 89383 - RNA, 56 nt, Homo sapiens
ggagaagggcagcacggcagggaccccgacggagagacaaagaagacggagggggg

SEQ ID NO: 89384 - RNA, 79 nt, Homo sapiens
caaagaggagagaccccaggaacggggaccacggcaggcccaggggaagacagggagcagccacccccggggggccccc

SEQ ID NO: 89385 - RNA, 81 nt, Homo sapiens
cggacgaagcgagaagccaaacaacgaccgagaggcgcggcgcaagaaggcgaaccaagggaacaaagaaagaagacgaag

SEQ ID NO: 89386 - RNA, 74 nt, Homo sapiens
acgcgacagcgaggaagcgcaccacagcacaaaagggcgcaccgcccagcaacccgaggccaggcggacacgac

SEQ ID NO: 89387 - RNA, 47 nt, Homo sapiens
ggccggcggcaaaggcgcagaaagcgaaaggaacaaaacgaagagca

SEQ ID NO: 89388 - RNA, 81 nt, Homo sapiens
ggcccccagaagcacggaaaagcccccggccaaaggagaggaggccgagacggcgcgcacggcaaccccgggagaaagcgc

SEQ ID NO: 89389 - RNA, 78 nt, Homo sapiens
gaggccggacccagcgagcgggcggcacgcacgcagggggaaagcaggggagaaaagaaaagaaagacgggaaagaag

SEQ ID NO: 89390 - RNA, 78 nt, Homo sapiens
aaaaaaggggacaagacacaggacacaagggcgaccgggggaaccaagacgccaacgcgccgccagcgaggaacaacg

SEQ ID NO: 89391 - RNA, 83 nt, Homo sapiens
gccgaccccgagaagcgcggaccggaccaggaccgggaccccaccggccaaccgcaccaagacacaagacacccaagaagccc

SEQ ID NO: 89392 - RNA, 75 nt, Homo sapiens
gcaggggagagggaggcgccccgcacaccaagccaggccgagacaacaccacaaccgaccacacgccgggacacc

SEQ ID NO: 89393 - RNA, 71 nt, Homo sapiens
aaggaaagacgccaaagaaagcagcaacgaccaagcggaaaagccagggcggaaaccggcaagaggaagag

SEQ ID NO: 89394 - RNA, 71 nt, Homo sapiens
aaaggcaccaggccaccacagaaacaaaagcaacaaagagggaaggaaccacaccaagaacaaccgccaag

SEQ ID NO: 89395 - RNA, 68 nt, Homo sapiens
gaccagagggacccaaagacggagagaaggcagaaacaaaaaagggagagaaaaagcccggcggggag

SEQ ID NO: 89396 - RNA, 82 nt, Homo sapiens
cccaagcgcacgagacccgcggacagaaagacagaagaaaaccaaggcgaaggggacgcaaaagaggggccgccggcccagg

SEQ ID NO: 89397 - RNA, 35 nt, Homo sapiens
ggcgaaacgaagcagcagccagaaccaagccgcca

SEQ ID NO: 89398 - RNA, 74 nt, Homo sapiens
cggacaccccggcacagcccacccagaagaccgggaagccggaagcaggacgccgcccgaagcgggaacgcccg

SEQ ID NO: 89399 - RNA, 74 nt, Homo sapiens
gggacggaggggacgcaaaaagaggaaaagcggccaacaaggagagaagagacgaggaggaggggagaccgcgg

SEQ ID NO: 89400 - RNA, 74 nt, Homo sapiens
aggccccgcagcgacgacggacagcaaggaaccccgacccgcggcagcagcgccccaggcccggacccagccac

SEQ ID NO: 89401 - RNA, 82 nt, Homo sapiens
ccgggagcgcgagcaggagcgcgcaagcggcgggggccggacaccacccgacagcgaccagacagagcgccgccaccgccgc

SEQ ID NO: 89402 - RNA, 83 nt, Homo sapiens
ccggcggacacgagcgccagaccgccggcaccgccacagggaccagaagaagaccgacagccaacagcgggcgccaacacagg

SEQ ID NO: 89403 - RNA, 54 nt, Homo sapiens
ggaaaccccaacacagagccaagcgccaagcaaacccaagacggaaaagggggg

SEQ ID NO: 89404 - RNA, 85 nt, Homo sapiens
agcggccgcagcagcagcggcagcacaggcacacagcaaagagggaaccaagaccaggacaaagaagacccggagagacaagccg

SEQ ID NO: 89405 - RNA, 79 nt, Homo sapiens
acaggccccggcaccagggagaccaaagaggaaggggaccaacacagagggagaaagcagaaaacgccagaaaggaaaa

SEQ ID NO: 89406 - RNA, 74 nt, Homo sapiens
gcccgggagggccggggccgcgccagcaaaacaaacggagagaggagggagaaacaaaggccaaagacgcagga

SEQ ID NO: 89407 - RNA, 78 nt, Homo sapiens
ggccgagagccgcccgggccagcggccgcgcacccccggccggaggcaccagcggacccagacaggagcgcgggaaga

SEQ ID NO: 89408 - RNA, 80 nt, Homo sapiens
gcggagggaccaggcagaccgacccccacccagccaagcacaagaagaaacaccccgccccccacaacaggagaaaaggg

SEQ ID NO: 89409 - RNA, 83 nt, Homo sapiens
ccggcgggagcgcgaacgagcgacggcggaacccggggccgggacgcagcccggcggcagcaggaaagaccacagcaagacca

SEQ ID NO: 89410 - RNA, 80 nt, Homo sapiens
ggggcggcagccgggacgcgcacggcggccagccggcgcggcgccgcgggcaggggcacgcccgggaagaacaggagagg

SEQ ID NO: 89411 - RNA, 85 nt, Homo sapiens
aggccgagccgggaccaggcccgggggcggcggccacgccaaggacgggagaacgcgccgccggccggggcgcagggacacgggg

SEQ ID NO: 89412 - RNA, 62 nt, Homo sapiens
gccaagaaaaaggacaaggacgccaggaaaccaagacaaagacccaaaggcaagggaacagc

SEQ ID NO: 89413 - RNA, 73 nt, Homo sapiens
agcgccgcgggccgcaggccgcgagcagcggacgccggccgccgcaggagaaacccccagacagcggccaggc

SEQ ID NO: 89414 - RNA, 121 nt, Homo sapiens
gcagcgcccggaccggccgagaggaagacgagccgggaggaacggcccggaaacaggaggacgagaacacgagacccgcacaaaaccccgccccccaggccacacaggggccgagacgggg

SEQ ID NO: 89415 - RNA, 74 nt, Homo sapiens
aggaggcacagagccacaggaacgaggggggccaacgcacagccaaaaacccaaacgcaagggacgcacaaggc

SEQ ID NO: 89416 - RNA, 69 nt, Homo sapiens
ccgacgaaggggaaccacaacaggggaaagaggagcaagaggggggggcccccccgaagaaaggaaccg

SEQ ID NO: 89417 - RNA, 58 nt, Homo sapiens
caagccgacggcacagcaagcggggggcaagcacacaagaagcccaccgcccaccgcc

SEQ ID NO: 89418 - RNA, 69 nt, Homo sapiens
cagaggaagaccccggagcgcgaggacccggccacaaaagccaccgagacaaggagaggggcgcaaccc

SEQ ID NO: 89419 - RNA, 85 nt, Homo sapiens
cgggccgcgaaccgcagacagcggccaagaagacacaaaggacggaggcacgacaaagaaacagccggaaaagcacgagcacaag

SEQ ID NO: 89420 - RNA, 74 nt, Homo sapiens
agaggacgggagccgagacccccaacaaaaaaaaccgcagcaaagggcacaagcccccgaagacaagaggccgg

SEQ ID NO: 89421 - RNA, 72 nt, Homo sapiens
aaaacccaggagaaggacaggagaccaaggagaacagagccacacgaaggcaaaaaacacgaggagaaaaaa

SEQ ID NO: 89422 - RNA, 70 nt, Homo sapiens
aaacgcagaacaaagccaaaggcccgacaaggagacccggaaaggcggcaccaggacgccgaaaagcgac

SEQ ID NO: 89423 - RNA, 101 nt, Homo sapiens
ggaacacagcacgagaccccccgcgagagcgcaaacacccccagacaaagcagccgagaccgacccgcccgcccgcggccccgcagcagcccaagaaggaa

SEQ ID NO: 89424 - RNA, 58 nt, Homo sapiens
ggaagggcaagccgcagccccccgccccccccgcagcgcgcagagcccggccaagaac

SEQ ID NO: 89425 - RNA, 76 nt, Homo sapiens
gggaaacgcccaggacaaacccagaccacacaagggcaggggggaaaggggcccggaagggaccaacgcaaggagg

SEQ ID NO: 89426 - RNA, 39 nt, Homo sapiens
gccccgagagccgggacacagggccaccggaccaggagg

SEQ ID NO: 89427 - RNA, 75 nt, Homo sapiens
cgagagaggcaggcggagccgaccgggccagcaccacgacggacgaaggacagcccacggagagagacggccaag

SEQ ID NO: 89428 - RNA, 77 nt, Homo sapiens
gcaagagccaacccaaaaccaagaccaagagaagcaaagggagaaacaacgcaaaaacacaggcccagaaacagcag

SEQ ID NO: 89429 - RNA, 69 nt, Homo sapiens
ggaccggagagccgcggaggacggggagcccggagcaaccaggagcaaaaggcaaaacaaagcaaaagg

SEQ ID NO: 89430 - RNA, 77 nt, Homo sapiens
cgaagcgaaagggaagacagggccagaaccagagaaggaaagcaaagcgaccaagggcagagaaagagcgagaggga

SEQ ID NO: 89431 - RNA, 72 nt, Homo sapiens
ccggagacggcgacccaggcacggggagccacagaagcgaccccaaaccggacggaaaaggcgcacacgacc

SEQ ID NO: 89432 - RNA, 87 nt, Homo sapiens
gggaaccagcgaggcgagaagcggcgagggcgcccgagagacggcgagaggaaaggcaagggcagaaaagaggggaaaaggccagcc

SEQ ID NO: 89433 - RNA, 68 nt, Homo sapiens
cgccccgcacgggacccgcgggccccggcccagcaaccgacaacgcggcccgccaaagcggacgccgg

SEQ ID NO: 89434 - RNA, 75 nt, Homo sapiens
cagcggaaacagaagaaggagccgagaagaagaaccagaacaaagaaaccacagaaaggagaaaccagacaaaga

SEQ ID NO: 89435 - RNA, 64 nt, Homo sapiens
gagaaggaccaagaaccaggccacggcacggcaaggagagaaacggagggccggaaggaaagag

SEQ ID NO: 89436 - RNA, 87 nt, Homo sapiens
aaaaagccagaaacaacgccaagggaccaagaaaggcccagggaccaaagcccggacaaggcccgagcaccaggaccgcagaaggcc

SEQ ID NO: 89437 - RNA, 79 nt, Homo sapiens
gccgcggacgaagaggcgaccgccagacggagcacacggacagagcaggccgggcccgccagggcacgcgcccgccacg

SEQ ID NO: 89438 - RNA, 77 nt, Homo sapiens
gacgagcggccgaagcagcgcgagccagccgccgcgccaagaaacgcgcggccgggccgaccaaagccgggcaacgc

SEQ ID NO: 89439 - RNA, 83 nt, Homo sapiens
accgacgccacccggaaagaagcagcacgacagaaacaccacgacagacacaagaagaagaaaaagaaaaaagaagaggaccg

SEQ ID NO: 89440 - RNA, 74 nt, Homo sapiens
ggggccaggccgcgccagcaggcgcaccccaagcgcgggcggcgggcagacaaccgcgcagcgccgggcggacg

SEQ ID NO: 89441 - RNA, 40 nt, Homo sapiens
cggggagacacagcacaagacagccacgcgcagagcgaac

SEQ ID NO: 89442 - RNA, 62 nt, Homo sapiens
cgggaccggaggagacacggcccgcaggcgccgaagaagggagggcagccaagcaggaccac

SEQ ID NO: 89443 - RNA, 80 nt, Homo sapiens
gagggagaagaaagcacagccggaaaggcagagaacgcacccgggagaaaaacccgccaagccgggacaggacccaaggg

SEQ ID NO: 89444 - RNA, 77 nt, Homo sapiens
agagggccccggggcgagaagggggacccaggaacgaacgaagacagccagccccagaacgagcgcgcaagcccacc

SEQ ID NO: 89445 - RNA, 56 nt, Homo sapiens
cgcgagggccgagacggcgcggcaagggcgccggagccgagagcgccgcgcggcgc

SEQ ID NO: 89446 - RNA, 72 nt, Homo sapiens
gccaaggaggacagaagaaccgccagggcaccagacagccacgcagacacagccaggggaggcaagcagggg

SEQ ID NO: 89447 - RNA, 65 nt, Homo sapiens
cgccaacacacgcaaagcagagaaagccaccaagccaaaagggggcagacacgcgcagaaccgca

SEQ ID NO: 89448 - RNA, 79 nt, Homo sapiens
accaccggacaaccgacaaaacggcggaggcggaccggggggcccgggcccgccagacccgcagaccaccaaccccgac

SEQ ID NO: 89449 - RNA, 84 nt, Homo sapiens
gagaaagacacgcaacagaaggaaaccagaggaggaaggcaagagaaccaccacagacgaccaggcggaggccgccagaagaaa

SEQ ID NO: 89450 - RNA, 114 nt, Homo sapiens
gccggcgcagggagaagcccgaagaccggagcagggcagcagagcgcgagggaacggagaccggcacaccgaagaggcaaggcagcgagggaccagaccggagacgcgggaaga

SEQ ID NO: 89451 - RNA, 75 nt, Homo sapiens
ccagcacccccaagcgggcagacgccagcaggaccagacgcacaggggccaggaagaagaggacacagaaggcgc

SEQ ID NO: 89452 - RNA, 73 nt, Homo sapiens
cccccgagcccgcaacggaccagcggcaaccacgggaaagcgggaggaaggacaggcgaagaaaacaggccag

SEQ ID NO: 89453 - RNA, 72 nt, Homo sapiens
agcgcccgggaaccccaggcccgggggcacaaggggcagaaaaccacaaaccaggaaagcggagcaagggac

SEQ ID NO: 89454 - RNA, 72 nt, Homo sapiens
cgccggcccagcaccccgagaaccgcaggagccagagaacaagcacaaacgcggccaaggaaagcagacaga

SEQ ID NO: 89455 - RNA, 59 nt, Homo sapiens
ggagaccgcagcggcccgcacgacccacacagcaccgacgagaggcggggaaaaaaagg

SEQ ID NO: 89456 - RNA, 79 nt, Homo sapiens
ccagccacaacccagcggagagcgcaacaagcgaccaggacgaaaaggacggcggaagacacccaaggccagagccagc

SEQ ID NO: 89457 - RNA, 107 nt, Homo sapiens
ggccagcacgggacaccgcaccaaggcggggaagggccaacccaacagcacagaggacccaaagacaggaccacgcaccagcagagaaggaaagcaaaccgaagcag

SEQ ID NO: 89458 - RNA, 32 nt, Homo sapiens
gagcccagcgacaggcccacgcggaccggcag

SEQ ID NO: 89459 - RNA, 62 nt, Homo sapiens
ggaacggcacaaccccccaagcggcacgcgaccagaagcaacagaagagggccacacgggga

SEQ ID NO: 89460 - RNA, 80 nt, Homo sapiens
ccgcaaccaccgccgcagagcgaacgcggcgcggaagggccacgaggaccgccgggagagccgcccaccccccacccgga

SEQ ID NO: 89461 - RNA, 55 nt, Homo sapiens
aagcccagggaggccaccaggcaccggcacggaccaccccaacaccgggggagaa

SEQ ID NO: 89462 - RNA, 60 nt, Homo sapiens
agagagagccgcgcacgcacagacaagaccagaacaaaaaccagaaaaaaggaacaacaa

SEQ ID NO: 89463 - RNA, 88 nt, Homo sapiens
gcagagggggcgggggcagcccgccagcacaagaggaagaagaagagggaggaccaggagacggacccagacacccgacgggaaaagc

SEQ ID NO: 89464 - RNA, 63 nt, Homo sapiens
ggagcacgccggcccagcccaaacgggcagcgaaggacgaaaaagagccacgcccccacgagc

SEQ ID NO: 89465 - RNA, 84 nt, Homo sapiens
ccccagaaaccaacccaagaaccgaaccgaagagccgaagagagaaaggcaaaacagaagaggagaggaagaacaagaaggagg

SEQ ID NO: 89466 - RNA, 43 nt, Homo sapiens
agcagaggaagaggaaagcgaacggggcccagccagggaccag

SEQ ID NO: 89467 - RNA, 66 nt, Homo sapiens
cagccggcgccggcgcacggcccgagcgggggcagccgcagaggcgcggagaaggggcgccacgca

SEQ ID NO: 89468 - RNA, 87 nt, Homo sapiens
gccaggggcccccccagccgccccgggggaagggcggaggacgcagacagcgggcccgagagccgcagcgggggcgaggagaccagc

SEQ ID NO: 89469 - RNA, 71 nt, Homo sapiens
ggacgggagaagacaacacgggccgaccgcagcggaaggggccggacacaagagggcaagaaaggcgcgac

SEQ ID NO: 89470 - RNA, 43 nt, Homo sapiens
gaaagaccaccaggagcacacaacaagcgggagccggcaggaa

SEQ ID NO: 89471 - RNA, 80 nt, Homo sapiens
aagaaggcagcaggcaacagcagcagagaaaacagcagcagaggggccaagagagaacgaaagaggcgaaaagagaacgg

SEQ ID NO: 89472 - RNA, 89 nt, Homo sapiens
accgacagcgccgccaccgagccgggcccaccccccaccaaggaagggacaggagcgcagcaggccacccaagcggaggcccggcgaac

SEQ ID NO: 89473 - RNA, 53 nt, Homo sapiens
aaggaccaagaaccagcaacacccggagagcccagagggaacgaagaagagga

SEQ ID NO: 89474 - RNA, 58 nt, Homo sapiens
aagcgcagcaccagaaaaaggaaagcccaagcaaaggcaacagagggaaaagacaaac

SEQ ID NO: 89475 - RNA, 64 nt, Homo sapiens
cggaaggccaaaggcgcgcaaggaggaagggaaaggagcggaaggcgaaaagagcaggagagga

SEQ ID NO: 89476 - RNA, 69 nt, Homo sapiens
agcaagccgggaagaaggggaacggcccagaagaacagcggggaggagcgcggcagagaacacggaaag

SEQ ID NO: 89477 - RNA, 79 nt, Homo sapiens
cagcacgcgccccacagcccgcaccagcaccccggcaccgagacaggcccccaggccgagcgaggaagacaaaccggcc

SEQ ID NO: 89478 - RNA, 72 nt, Homo sapiens
gacggggaaggccggggcgcccggcgccggccgagaaggcagaggcgggcagagccagaaggagagccaagc

SEQ ID NO: 89479 - RNA, 80 nt, Homo sapiens
acgccccggggagaagcgagagccggggccggacgagaaagccgaaggagacgacggaggagaccggcagagggcacgag

SEQ ID NO: 89480 - RNA, 85 nt, Homo sapiens
gcggcaggcccaggcagaagacgcgcccggggacgggaccagcggagaagggcccgcagcgaccagaggaacccgagcaggaaca

SEQ ID NO: 89481 - RNA, 74 nt, Homo sapiens
gcccacgcaccccaccggcgcgcgcggcggcccgcgcacagaaggggaggggccagaaccagcaccagaaagag

SEQ ID NO: 89482 - RNA, 73 nt, Homo sapiens
accccccgggaaccacccgcgcccccaggggcagaaaacaaaagcagcaaaagccaacgcacaggccagcgaa

SEQ ID NO: 89483 - RNA, 109 nt, Homo sapiens
gcggagggccgagggagggccgagccagccgcggccggaggagcccccaggccagacaccaggcgccgagaaggccagcagagaaacaggcaggagaggcccacaggcg

SEQ ID NO: 89484 - RNA, 85 nt, Homo sapiens
gagcgccccagcgagaaggagggagaaaggcgggcccgggaacagagaagaacccaaggacagcaggcacagccccacaaagcgc

SEQ ID NO: 89485 - RNA, 77 nt, Homo sapiens
ccagacccaaacaacggcagaagcaggagagccaggcacaaaaaggggaagacaaaagcagacccaaccaaggaaag

SEQ ID NO: 89486 - RNA, 66 nt, Homo sapiens
gcacgggaaagaaaacaggggaggacacaaccccagagagcggaacgagcaacaaacagaggaaca

SEQ ID NO: 89487 - RNA, 56 nt, Homo sapiens
acccaggcacggaggagggaaagacacaggaacgccacaagaaacaacagcaaggc

SEQ ID NO: 89488 - RNA, 72 nt, Homo sapiens
acagagccacccaacggacggggaggcagcaggacacaccggccgagggcccaccagccacgggcgggccgg

SEQ ID NO: 89489 - RNA, 78 nt, Homo sapiens
cgcgaagcgacacacgagccgccgggacagcccaaaaggccacaccgacggggaacgacgggcaccgcccggccaaag

SEQ ID NO: 89490 - RNA, 90 nt, Homo sapiens
ggcggcggcagcgacggcagcggcggcggcggacaaacaggcaccgcagaagaacggaccgaagccaaagaacaagagcgcagggacaga

SEQ ID NO: 89491 - RNA, 37 nt, Homo sapiens
aaccggagagagacaggaagagacgcagcgaaaaccc

SEQ ID NO: 89492 - RNA, 75 nt, Homo sapiens
caggcggccgggagagggagcggagggaccacagcagcagcacaggaaaaccaaggagaggacacgccagcaggg

SEQ ID NO: 89493 - RNA, 82 nt, Homo sapiens
gacgagcccgagcggagagccaggcgagagaggcccgggccccggaccagaccccaagacagcgggcgcgaccaaggaaaca

SEQ ID NO: 89494 - RNA, 72 nt, Homo sapiens
cagcggccgcgcacccccggccggaggcaccagccgagacacagccagcgcgccagaaaccggggaacgaga

SEQ ID NO: 89495 - RNA, 93 nt, Homo sapiens
ccacgcaccgaggaaccagcagccccggaccccccgacaccaacgagcccaggcacacccagagcccccagcagccgggggcccccaacggcc

SEQ ID NO: 89496 - RNA, 77 nt, Homo sapiens
caagaggggaagaggacgggcaggcggaagcgccagaggagccaccagcacccgcaaaccacccgacccgaagccga

SEQ ID NO: 89497 - RNA, 34 nt, Homo sapiens
accccccggagccaggcggccaaggaacaagaca

SEQ ID NO: 89498 - RNA, 90 nt, Homo sapiens
cggcgcccccgcaagaggacggcgccggcagccgacaacccagaaaagaaaaggccaggggcgccgaaaaacccgggaacaaacaggggg

SEQ ID NO: 89499 - RNA, 70 nt, Homo sapiens
caggaaaggagagacagaaaggaaaagacaaagaaagcgaaaaaggcagcgggagagaggagagcagaga

SEQ ID NO: 89500 - RNA, 77 nt, Homo sapiens
ccggcaacaagggcccgaaggggagaagagccagccgaaagcagaacaggccaagcagaacccccgaccgaaaaacc

SEQ ID NO: 89501 - RNA, 77 nt, Homo sapiens
aaagaccaccgccaaagcggcacaaacaacggaagccaaaaagcacaacggcacaaagcggacgaccccccacacca

SEQ ID NO: 89502 - RNA, 63 nt, Homo sapiens
gcgagagagcccggacgaaagcacggaacaacagacggcagaacacaccggggagggcaggcc

SEQ ID NO: 89503 - RNA, 73 nt, Homo sapiens
gggagagcgcgaagaggagaaaaggcgaaagggaggagagagcgaggccacccagaaggccagccccagcggc

SEQ ID NO: 89504 - RNA, 79 nt, Homo sapiens
cgggcgcggccgaccgccgggaccggagggaggaagcgggacacccgggagcaggaaagcccggggaaccgacaacacc

SEQ ID NO: 89505 - RNA, 88 nt, Homo sapiens
gcgaagacgcgaccgcggcgcgagcaccaggacaaccaccaccagcgagcaaaagaacaaagaccaagaccaagaagcgccccagcgg

SEQ ID NO: 89506 - RNA, 78 nt, Homo sapiens
gagccaaggaaacaggagcgaagcccagcgggccggacggggcggggggaacggagacgacagaagagcaggcgagga

SEQ ID NO: 89507 - RNA, 78 nt, Homo sapiens
ggacaagccgcgcggggacccgacgcccgcacgacaaggcgagggaaaccaacacaagacggcagccaaagaaagaga

SEQ ID NO: 89508 - RNA, 65 nt, Homo sapiens
ccacccccgggggaaaagaacgagaacccaaggaaagaccggaaagaaggaagaaaagacacagc

SEQ ID NO: 89509 - RNA, 67 nt, Homo sapiens
aaggaccaagaaccagagccagaaaaggagaccaggaggcaaggacagcaaacggagaaacaaagga

SEQ ID NO: 89510 - RNA, 70 nt, Homo sapiens
acggggcgagccggaggagcacccaaccccgcgaagaaagaagaggcccgaaccaacgccacgaaggcaa

SEQ ID NO: 89511 - RNA, 72 nt, Homo sapiens
caaaagccaagaggaggacagcgcacacagcaagcacgaggaacgcaagcacaggaccagaaacgaaaggca

SEQ ID NO: 89512 - RNA, 49 nt, Homo sapiens
ccaaaggggcggcacggagaaacaggcgagaagcaggcggagggagcgc

SEQ ID NO: 89513 - RNA, 72 nt, Homo sapiens
caggaagccagcgggggcagccagccgagggccaccgggaaggacagaaggacagcagaccacagcccggca

SEQ ID NO: 89514 - RNA, 75 nt, Homo sapiens
acacaaagccgaaggcggggccggggccagccaagaccacaagccagccacagccagaagggcaagaaaacaaga

SEQ ID NO: 89515 - RNA, 60 nt, Homo sapiens
agcgccgccgccgggaccccgcccagcagcggcggagaaaccaccacaaacacgaggcca

SEQ ID NO: 89516 - RNA, 83 nt, Homo sapiens
cagagaggcagcagaagcgcaacaaacgaggcacggcaaggcccggaaggggacgccaccaaacaaggcagacaggacacgac

SEQ ID NO: 89517 - RNA, 76 nt, Homo sapiens
caaagagcaacaaaacagagagcaggccccagcaccacagacaccagcccaccacggagaggaaaaacgagccaag

SEQ ID NO: 89518 - RNA, 41 nt, Homo sapiens
cccccgagacccagccaaaagagagcccgaccaagcccaaa

SEQ ID NO: 89519 - RNA, 78 nt, Homo sapiens
aggaggagcccggccggccgcgacgcaggccccacgaggggagggcgagccgccaggaaaagaagcacccagggccac

SEQ ID NO: 89520 - RNA, 76 nt, Homo sapiens
cgagaccggggcgaaacaaggggaagacaggaagacccccagcgaacaaaagccccccacccccccagccgaggac

SEQ ID NO: 89521 - RNA, 66 nt, Homo sapiens
cccggggacccccgacgccaggcagcgcccccaaacgagacaggacacgaacaagccgaaggaccc

SEQ ID NO: 89522 - RNA, 61 nt, Homo sapiens
acagccgaccgcacaaagcaagaagcccaacaagacagagcgaaaagccagcgccaccaga

SEQ ID NO: 89523 - RNA, 78 nt, Homo sapiens
gacacccgcacaaccaagagacaccaaggagacgcccaaggaaccccgccggccaccggcgggcacagcgacagaaaa

SEQ ID NO: 89524 - RNA, 70 nt, Homo sapiens
ccacagaaaaggccacgacccaccccgaagagcaacggaaccagcgccgagcgaaccaacagagccggac

SEQ ID NO: 89525 - RNA, 77 nt, Homo sapiens
cgaagccaccgaggcagaacaacaacggaaaaggagaagcgggccaaggaaagcggagggagccccagaggacggcc

SEQ ID NO: 89526 - RNA, 48 nt, Homo sapiens
gaccaggcagcacccacaggcggcaggcggagggggccggagggaggc

SEQ ID NO: 89527 - RNA, 69 nt, Homo sapiens
cgggaacaaaccaaaagcaaccggcaaacacggaagccaaggacaggcaagcagaagaggaacagaaga

SEQ ID NO: 89528 - RNA, 59 nt, Homo sapiens
aggccagcgcggccaagacccgccgcaagcgccacgggacagccaacaccagaccgagc

SEQ ID NO: 89529 - RNA, 57 nt, Homo sapiens
aaagcccagggagcggcggcagcaggaagaccaacacgcacgaagggaacacacgga

SEQ ID NO: 89530 - RNA, 44 nt, Homo sapiens
ggacccaggcgcggaggcgaggccagcaggacaggaagaggcag

SEQ ID NO: 89531 - RNA, 76 nt, Homo sapiens
cgggcagcgagacgaaaaacccacagggccagacaaccacgccgggcgcccaggcgggaagaaagaaaagagcaag

SEQ ID NO: 89532 - RNA, 85 nt, Homo sapiens
ggagaggaggaccgcacgagaaggagcgcaagcaccagaaggcgggagaccagggccagcccggccacaccccaggcggcacccg

SEQ ID NO: 89533 - RNA, 46 nt, Homo sapiens
gccaccaggagcccgagagagaagggacagaccacacgcggacacc

SEQ ID NO: 89534 - RNA, 79 nt, Homo sapiens
acagaaggaacgacgcggaccagaagccagagcgaggacgccggcaggaacgggaagggcacaggaagaaaggaccaag

SEQ ID NO: 89535 - RNA, 89 nt, Homo sapiens
agaaagaaacaagcggcaagagaggcaccccgaagaggcgaggagcaacccagaagagcaaggagcaaaccaagacggccaagggggag

SEQ ID NO: 89536 - RNA, 74 nt, Homo sapiens
caggagcgagaccaacgggagccccaaggcggaccacccaagcacgggacagagcagaagaccgggaggccggc

SEQ ID NO: 89537 - RNA, 82 nt, Homo sapiens
acaaagccggcacgcgcgcgagacagggaaagcggaaccaccaaaaggaggagacaacgaccagaaaacggagcagccagcc

SEQ ID NO: 89538 - RNA, 74 nt, Homo sapiens
ggacccgaggcgagccaagcagggacacaaaagcaaccgagagggaaacaaccacgcgaaaaggagacacagca

SEQ ID NO: 89539 - RNA, 42 nt, Homo sapiens
aacacaaccacgcccggcgagcaaaccagccagcacgggggc

SEQ ID NO: 89540 - RNA, 80 nt, Homo sapiens
ggccgcagccgacccaacaggcgggcgccaggcaccagggccgaccacacggagagaacagaggccggacccgcacagag

SEQ ID NO: 89541 - RNA, 77 nt, Homo sapiens
cccggcacaccagagggacacccgaagaaggaccgaagagaccagaccacaaccgaaaaggacgaacaaagcgccaa

SEQ ID NO: 89542 - RNA, 67 nt, Homo sapiens
gggcaagcggaagggagcccaagaggaccagacccacggcagggcaaccccaccgcggaaggcaggc

SEQ ID NO: 89543 - RNA, 79 nt, Homo sapiens
aacaaaggagaacaggaggacgcaggccaaacaaaacgggcgggggggggcacccccaaaggaagggccccgggcaagg

SEQ ID NO: 89544 - RNA, 77 nt, Homo sapiens
cgcgcccaggcggaggcagcggcacggggacgagagccggcagaggcgggcagaaggacgacagcaaagggaaacga

SEQ ID NO: 89545 - RNA, 61 nt, Homo sapiens
caggaacgaagccagaaggaaagggagcagcaccggccacacccacagcacgaccggaacc

SEQ ID NO: 89546 - RNA, 77 nt, Homo sapiens
aggaaccagcgcagaaacacagcacaaacaccagaggaaaaccaaggagaggacacgccagcagggggaaggaaacg

SEQ ID NO: 89547 - RNA, 80 nt, Homo sapiens
aagggaaggcgcgaggaggaaaggaggacgaggcagacagcaagcgcgggcggcgacccagacgccccacagcggcgggg

SEQ ID NO: 89548 - RNA, 51 nt, Homo sapiens
aggcgcacccggggccaaagcagggcaccgagcaccgagaaaaagaaggag

SEQ ID NO: 89549 - RNA, 55 nt, Homo sapiens
cacacgggaggagccaacagcaggaaggcaggccaagacaagcgcgcacgcggcc

SEQ ID NO: 89550 - RNA, 50 nt, Homo sapiens
caaaggagagaggaccacccagaggagcaacgaaaagaaggaggccagcg

SEQ ID NO: 89551 - RNA, 68 nt, Homo sapiens
gaaggccaaacgaagaccaagcacaaaccggaaaacgaacgccgggcgcccacccaccagggagccac

SEQ ID NO: 89552 - RNA, 86 nt, Homo sapiens
cggccacccagcgagaggagaggcgcccccggggacgggccaaccgccccccagcagcaggcacgggcgaaccccgagccccgccc

SEQ ID NO: 89553 - RNA, 79 nt, Homo sapiens
aaaggagacccgacgcaacgcggagcgcaaggcgagggacgagaacgagcaaagagcaaggaagaagcaccacgaccaa

SEQ ID NO: 89554 - RNA, 81 nt, Homo sapiens
agagcgagcgagggggggcgcgccggaaaccggagcgcgcagcagggcggagaacggaaaagcaccaggaagcagagagga

SEQ ID NO: 89555 - RNA, 61 nt, Homo sapiens
acggccaccccgccgcgcaggagcgggcaccacccaaagaagcggagagacaaagcgaaag

SEQ ID NO: 89556 - RNA, 84 nt, Homo sapiens
cggcggccgggaaggcgacccggcggcgggaggccacgccagccgccaggcggcgcaggagcccaaggacccagaacccaaaaa

SEQ ID NO: 89557 - RNA, 62 nt, Homo sapiens
cacggccagggcaggcggccggcagagaacagccacaggaagagggaacaaagaaggaaaca

SEQ ID NO: 89558 - RNA, 67 nt, Homo sapiens
acccagagaagaagggcaacgaacaagggcaagcaagaccaaaaaaggcgggaggaacgaaccacag

SEQ ID NO: 89559 - RNA, 77 nt, Homo sapiens
aaaggccccgacagccaccaaaggacaggagaaaagaaagcaaccagccgagacaagcagccaaaccaaagaagcag

SEQ ID NO: 89560 - RNA, 79 nt, Homo sapiens
cccagggccccggcgccgcccccgacgcgccagaggaacagcgcccccgggcccccacgacaggggcccagcgaagggg

SEQ ID NO: 89561 - RNA, 75 nt, Homo sapiens
agcaccaggcagcaagagacaggggggccgcagccggccaggggacccgaagggggcgagacgacacagaaaaga

SEQ ID NO: 89562 - RNA, 65 nt, Homo sapiens
gagaaagcaacggaaacgaagaaggcccagcccaccagaaacgcgcgaaacagacagcaccacag

SEQ ID NO: 89563 - RNA, 79 nt, Homo sapiens
gaaaccccggaggaacgaagcccaaacaccgggagaagaaaaagcagaaaggaacagaaaacaaaagaacaaggcacaa

SEQ ID NO: 89564 - RNA, 68 nt, Homo sapiens
aaagaagcgaggcagacagaagagaagaggcaggggcaccagccagcgaccagggcccaaaaaaggag

SEQ ID NO: 89565 - RNA, 67 nt, Homo sapiens
acagaagaagcaacacgagaaccaccccgacacaacaccaccaagggcgaaccaaagaaggaaggcg

SEQ ID NO: 89566 - RNA, 55 nt, Homo sapiens
cgcgccgaggaggccggaaagacagcgaacccacccaacacggcaaaacaaagac

SEQ ID NO: 89567 - RNA, 49 nt, Homo sapiens
aaagcacaacaacgcagaaagcccacaaaaggagcacaacaggcagaca

SEQ ID NO: 89568 - RNA, 86 nt, Homo sapiens
ccaccggcagcagcagcaccaccggacgggaccaagccgagacaccagacccgagccaagaagaccaagagcaaagcaggaaaggg

SEQ ID NO: 89569 - RNA, 84 nt, Homo sapiens
gccggggccccaacagagccacgcaccgcggcacggggcaaccgggcggccacgcccgcgcagggggggccccagcccggccga

SEQ ID NO: 89570 - RNA, 79 nt, Homo sapiens
cagacacaagaagaaaaacgaaccacgagcggaagcacaacgggaagaaagggcgaaaagccaggagcaaaagacgagc

SEQ ID NO: 89571 - RNA, 83 nt, Homo sapiens
gccgcggagacccccgggggaagaggaagaagggcccaccaggagcgcgaacggcggccaaagcgccagacaagggccgagcc

SEQ ID NO: 89572 - RNA, 74 nt, Homo sapiens
aacaaggaaagggaacgaacgacagcccgccaggagcacaacgccgagaaagccagcgacgcccaaaggagacc

SEQ ID NO: 89573 - RNA, 72 nt, Homo sapiens
cggaccaccagaaagcaccccacaggccgagaccgggaggaagcggagaaaagagccccgaacggggcgccc

SEQ ID NO: 89574 - RNA, 68 nt, Homo sapiens
ggccgcagcggggcccagcacgagaggcaaaaccaccggaggaacgaccaaaggagaaaacagcccag

SEQ ID NO: 89575 - RNA, 82 nt, Homo sapiens
cggagggcacaagagcaaagagagaaccacccgcacacagccaaagcgcaaagcccggacagaggcacaggaagacaacagc

SEQ ID NO: 89576 - RNA, 80 nt, Homo sapiens
acaggagaccggaggccaacggcagaagccaccacaaaagcgaaagggcacaccacagagaaggggaagggaacaaccac

SEQ ID NO: 89577 - RNA, 77 nt, Homo sapiens
caacccagccacaaccacacaggagcaaagccaacgcccaggggagaaaacaaggccgggggagcacccagaacagc

SEQ ID NO: 89578 - RNA, 87 nt, Homo sapiens
cgcccagcagagagacagagccaggagaaaccaggacccaccccgcaccagggggcgcaacacgaccaggccacgcagccagacccc

SEQ ID NO: 89579 - RNA, 81 nt, Homo sapiens
acagaaaaaaggagggacaacaacgggacagggagccacacacacagccgggagcgcccagcccagcaccaccaaccacgg

SEQ ID NO: 89580 - RNA, 85 nt, Homo sapiens
gcagaagaccacaacagggacaccggccagcgcagcacgggacgcgaccggaaggcagaccgccgaccaggcacgcccaaccccg

SEQ ID NO: 89581 - RNA, 73 nt, Homo sapiens
cgcccgagaaggggacggcgggcgagggaggggaccgccgcggcggcaggagggaaagcaaggaaacgccccc

SEQ ID NO: 89582 - RNA, 84 nt, Homo sapiens
gccgccgccagggcgcagggccgggccgccgcgcaccgcagcgccggggcacgacacaaaaacagaccagagccacgcacacag

SEQ ID NO: 89583 - RNA, 34 nt, Homo sapiens
ccgagacgcggcaaggaagaccgcaggaaagcag

SEQ ID NO: 89584 - RNA, 80 nt, Homo sapiens
gcgcgcgccgcgccgcccgagcacgccgcgcagcccggccgccggcccccaacagcgccggaaacccgaccgccccaggg

SEQ ID NO: 89585 - RNA, 37 nt, Homo sapiens
ggacccccccgccgcgggaggagcccagaccgagaac

SEQ ID NO: 89586 - RNA, 63 nt, Homo sapiens
agacccggggacccccgacgccaggcagcgcccccaaacggcacgagaacagggcggagaaag

SEQ ID NO: 89587 - RNA, 73 nt, Homo sapiens
gaagcgcgcgagcccgggagcacgaggaaaacagaaaagcagaaaaaagaagagaaaagaaacccgagccgcg

SEQ ID NO: 89588 - RNA, 61 nt, Homo sapiens
ggcaccggaacccacggggcagaggcagggaccgaaaaaggagagggggagaaaagaagag

SEQ ID NO: 89589 - RNA, 68 nt, Homo sapiens
cggggacggagccggcaaacagggcccggcagccaacaacagccaggagccggaaagccagggaaaag

SEQ ID NO: 89590 - RNA, 55 nt, Homo sapiens
aagagaacccagggaagccgaagagccagaacacagagccagagaaaaaaaacac

SEQ ID NO: 89591 - RNA, 65 nt, Homo sapiens
acagggggagaaacacccgaacgaaggaggaagggaggcgccgaaccaaggcaaacgggaaccaa

SEQ ID NO: 89592 - RNA, 53 nt, Homo sapiens
ggagcggggcaggggcgacgagagcgcgcgagccaaagcagacccccaagcga

SEQ ID NO: 89593 - RNA, 57 nt, Homo sapiens
gacaaggagccaggaccccggaccagcaggagcaggaaggagagaagggaaggaccc

SEQ ID NO: 89594 - RNA, 64 nt, Homo sapiens
ccccgagcaccaccagagccaccacccaccaccccagccagcagagcaccggccagaacaagcc

SEQ ID NO: 89595 - RNA, 61 nt, Homo sapiens
gcggcgagggggcggccggaaggcgaaaccaaccaaacgccccaccagccacagcggcaga

SEQ ID NO: 89596 - RNA, 82 nt, Homo sapiens
gcgaccagagagcggcggaaaggaaagcccgacagaagcaccgagacccaagaaaggcgccacaggagccgcagaagcaaag

SEQ ID NO: 89597 - RNA, 38 nt, Homo sapiens
acgccccggaccccaaggcggagaacggaaaagcacca

SEQ ID NO: 89598 - RNA, 75 nt, Homo sapiens
gcgccaggagcccgagcccgccccagccccggccccagaagagggcggacacgggacaaagcggcgcacgcacgg

SEQ ID NO: 89599 - RNA, 65 nt, Homo sapiens
cgaagcaagaggaacagaaaagagaaagggggacagcaggaaccagaaagcaggagcccggaaag

SEQ ID NO: 89600 - RNA, 62 nt, Homo sapiens
gggaggccacagcagccagccggcccgaggacaccgacaccagcaggccccgggggcgccga

SEQ ID NO: 89601 - RNA, 76 nt, Homo sapiens
cgcagagagggacggggagagaaaagggaaagcagagggagaacaaagaggaccaagcaacaaaagaagaagcgga

SEQ ID NO: 89602 - RNA, 54 nt, Homo sapiens
gcggaagccaacacgcggaggaggccacagaacaccgccggccacaccggccac

SEQ ID NO: 89603 - RNA, 51 nt, Homo sapiens
cagcccagaaccaccgaagaaagcaagcagcggcggaagaaaagaaaagac

SEQ ID NO: 89604 - RNA, 81 nt, Homo sapiens
acggagcgggcccgggccagaggcagaaaacggacggaagaaaaggcggccgaccaacgggagccgcaaggacaacagccg

SEQ ID NO: 89605 - RNA, 37 nt, Homo sapiens
aacaggccaggaagacgaagacaggacacagaacaga

SEQ ID NO: 89606 - RNA, 71 nt, Homo sapiens
gagcgacagaagacaaacagcaaggggcaaagccccaggaccagcccgccacgccccagaaagcccaaccc

SEQ ID NO: 89607 - RNA, 77 nt, Homo sapiens
ggccccgagccggcccgggcgagaccccgaaggggacaggaccgccaaaagggacagccccggaaccaagcaaaggg

SEQ ID NO: 89608 - RNA, 85 nt, Homo sapiens
caaacaagagaacgggcccacacaacccaggcaaccaacagggcgagccagcccccacccagaggagaacgaaaccacgacaacc

SEQ ID NO: 89609 - RNA, 75 nt, Homo sapiens
ccccacacggcgcaccagggggcggcggggccccccgccagcggggcggagaacggaaaagcaccaggaagcaga

SEQ ID NO: 89610 - RNA, 86 nt, Homo sapiens
cggcgagagccccggcacccccggaccgaccagggcagacccaggcgaagccgacgagcccgaacagacgcaccagcgggaggaag

SEQ ID NO: 89611 - RNA, 67 nt, Homo sapiens
aacccccccgcgggaaacaggacccaaagacaggaccacgcaccagcagagaaggaaagcaaaccga

SEQ ID NO: 89612 - RNA, 76 nt, Homo sapiens
caagggggaagaaaccagcaggcaaccaaaaggaaacaaaagggcgacagcccagaggaccgaggcgcgagaagag

SEQ ID NO: 89613 - RNA, 77 nt, Homo sapiens
aaacaaagcagcaggccgaagcgacaaaaaggccggagagccacagcaaacgaccagaggacaagacaaagggagca

SEQ ID NO: 89614 - RNA, 70 nt, Homo sapiens
cccacccgcgggaacccgccgccagggcaagaaaaggagaagaaagaagaaaaaaaagagcaaaacaccg

SEQ ID NO: 89615 - RNA, 78 nt, Homo sapiens
gggccccaacaccagccgccgccccgcagccccccgcagcacccagccggccacgaacccaggagaaacgagagggac

SEQ ID NO: 89616 - RNA, 85 nt, Homo sapiens
agaggcaggacggaagcgagcgcagagagccggcacgacagaaaaagcacaggaaacccagcagcgccggacccgggaagaacgg

SEQ ID NO: 89617 - RNA, 76 nt, Homo sapiens
ggcggggccgcacgggaccccggaacccgcgcgcgcccacgacgccgagagagccaccaaagaagaccagacaggg

SEQ ID NO: 89618 - RNA, 81 nt, Homo sapiens
cgggaaccggaacacagagagggagcggcaaacagccgcaggagggaagcgcacggaaaccgccccgggaggcacagagca

SEQ ID NO: 89619 - RNA, 72 nt, Homo sapiens
gaccggggaaagggaaccagcacagcgacacccaaagccaagaaaaccaggcccgacagcaagaaaaaagga

SEQ ID NO: 89620 - RNA, 72 nt, Homo sapiens
agcgggccagaacggccaggagacgcaacgggggagccccccagacccgaaaggagacaagaggacagccgc

SEQ ID NO: 89621 - RNA, 106 nt, Homo sapiens
acgccccgaggcggcagaccgcccccccagccgcgcggcccccagaccccggcgcggaggcccacgcggaccggcagcgccaccggaccaccagacaaggacacgg

SEQ ID NO: 89622 - RNA, 73 nt, Homo sapiens
ccgccggcgccgggcgcggaaggccccgggggcgccgagggcacaagggcaacgacagaagggcgaagccaac

SEQ ID NO: 89623 - RNA, 82 nt, Homo sapiens
cacaagccgccagagaaaagggccagacaagagcaccagggaaaacacgccagccaaagcaagaacccaagaaggcagaagc

SEQ ID NO: 89624 - RNA, 83 nt, Homo sapiens
ggccacagacgacccccgggcacaaccagccggaagcgccaagaagacacccgacacaaaaaggagacccaaagccaaggaga

SEQ ID NO: 89625 - RNA, 105 nt, Homo sapiens
aggaccaggagggcaacccagagccaacaccgaaaaaggcacggaagggaaacaaggcccgcagaggaaagaacccagggaccaagcgaaacgcaaacggaaccc

SEQ ID NO: 89626 - RNA, 77 nt, Homo sapiens
gcgaccggaagaagcagcaggagcagcagcgcagccacccaaggagaggcccacaacgacacgcaaagcccaagaaa

SEQ ID NO: 89627 - RNA, 75 nt, Homo sapiens
gcaaaggccagcaaagcaggcgaggaggagcaccggaaagaacgaacaagcagaaagcacgaacaacgagaacaa

SEQ ID NO: 89628 - RNA, 67 nt, Homo sapiens
cagaaccccggaacaagaaccacgcccgcaccagccacgacgaaagacacccagcagccagccgcag

SEQ ID NO: 89629 - RNA, 77 nt, Homo sapiens
cacccacgacacccaaccccgggacgaaagagcggcgccaccccgggagaaggcgaccgagacgcaagcaacggcac

SEQ ID NO: 89630 - RNA, 73 nt, Homo sapiens
aagaaaaaagcgccaaaaggcggagcagaaaacaagaagagagaagggcacagaccaagacaacgaaccccgg

SEQ ID NO: 89631 - RNA, 73 nt, Homo sapiens
ggccaagaaggcaggaagaaagggcaggcgagagagggggaacaggaccaacggaacaacacagggaccggca

SEQ ID NO: 89632 - RNA, 88 nt, Homo sapiens
cggaaccggggaccgaagaagagaacaagcgccagaccggagaagccgcggcgccccggaacccccgagcggcgccccaggcccccgc

SEQ ID NO: 89633 - RNA, 59 nt, Homo sapiens
caggaaagacccagaagacgggcagcgcccaccaagccaaaccacggaggaggggaaga

SEQ ID NO: 89634 - RNA, 69 nt, Homo sapiens
gagaccaggagcgcccgcgcgagaacgcaaagggacaagagaaaaaaagggcgggcgaacaaaaagagc

SEQ ID NO: 89635 - RNA, 80 nt, Homo sapiens
cgggaggcgccgcccgggacaccccaccacacagggggaccggaggagagaacaaccaagcggaaacccacccaagccca

SEQ ID NO: 89636 - RNA, 41 nt, Homo sapiens
acaaagaggacccgacagggggaagaccaacacacaccccc

SEQ ID NO: 89637 - RNA, 69 nt, Homo sapiens
aaggccagggaaacacagaggggaagaaggaccgggaaaaggccccagaagaggacgcgcccaaagcga

SEQ ID NO: 89638 - RNA, 64 nt, Homo sapiens
caaaaagacccaccaaggaagcagcggccacgccagggggggccgcccgcccaaggcaggaaga

SEQ ID NO: 89639 - RNA, 76 nt, Homo sapiens
gaaggccagcaggaacaggccagcgaaaggggcggccccccgcagggcagaaaggcaaagaagagccccaccagac

SEQ ID NO: 89640 - RNA, 72 nt, Homo sapiens
accgccgacccgcggcggggggagccggccacccaccgcagcagaaagcagagagcccagaagaaaccaaag

SEQ ID NO: 89641 - RNA, 65 nt, Homo sapiens
gaaggaaaggcaaaccaacggcccagaagaagcaagacggacaaccaccagagccagggggccaa

SEQ ID NO: 89642 - RNA, 80 nt, Homo sapiens
cgacaggcgcggcacgggaggcggaggcgccccgccagaaacccgagaagcaagggaaagcgggcgaaaaggaacgagca

SEQ ID NO: 89643 - RNA, 74 nt, Homo sapiens
agaggaccaaaccgacgaccgccccgcccgaaggagcagccccggaaagaagaaacacaacgggagaaccaccc

SEQ ID NO: 89644 - RNA, 69 nt, Homo sapiens
gaggggagcagcgccggggccgccgaccaacacccgaggcggacgcagagacagacggcgaagacaaac

SEQ ID NO: 89645 - RNA, 79 nt, Homo sapiens
acgcagaggagaggagaaaggagacgcagaacgggcagagaccgcaggaagaagcgaagaggcccggccaacgcaacag

SEQ ID NO: 89646 - RNA, 78 nt, Homo sapiens
acagcaagcgaagccgaaaaagcgcccgagacgggcccgccgaaaggacagcccaaggcggaaaagcgaaggaagcca

SEQ ID NO: 89647 - RNA, 41 nt, Homo sapiens
gccagacagcagagaggagaacaggggagccccccagccag

SEQ ID NO: 89648 - RNA, 78 nt, Homo sapiens
cgggcccgcggccccgcggcccggcccaccagcgccccagaggcccagcacccaggaggggagagaacaaaacaaagg

SEQ ID NO: 89649 - RNA, 66 nt, Homo sapiens
ccaggagggaccggaaagcaccccggccacagcgcccgagaaaagcacagcacccgcaggccaaca

SEQ ID NO: 89650 - RNA, 83 nt, Homo sapiens
caccaccagcaccccccaaaggggagaaaggcgcccaacccagagccacgggaaggagggaagaacgcgcggggccccgaccg

SEQ ID NO: 89651 - RNA, 72 nt, Homo sapiens
gcggggcggggcgcggggacgcgcggcgcccgggcgagaggccggcaccagcaccaacggccacacaggcac

SEQ ID NO: 89652 - RNA, 84 nt, Homo sapiens
aggaggccacacagaaggacggcccgacggaaggagccgaagcggcaccggaggggagcggagagggcagaggagcggcggagg

SEQ ID NO: 89653 - RNA, 66 nt, Homo sapiens
cggaaaaagcggaaaaagggagggacaagagcagcaccaagcgcagaggaagcgggaacacacaag

SEQ ID NO: 89654 - RNA, 84 nt, Homo sapiens
cgagcccgacccaggacaggacccagcgcgggacagccaggaaaccccccaggcaagaggcgcaggaccgggaagaccaacaaa

SEQ ID NO: 89655 - RNA, 75 nt, Homo sapiens
cccggccgcccggacgagcgagaccgcaccagagaacggccgagcgaccaggagaggagcccccgcccgaagacc

SEQ ID NO: 89656 - RNA, 112 nt, Homo sapiens
gccggacacccaccccgcccccaggcagcagaccaagggaggaccgcgcacaaagcaccagcccgaagaagccgggcagaccaggcagcagcggaaaggagcagggaaggac

SEQ ID NO: 89657 - RNA, 67 nt, Homo sapiens
ggggcccggcgacacgcgaccagagaagcaagccggccagaggccccccacaaagaaaagaagagga

SEQ ID NO: 89658 - RNA, 77 nt, Homo sapiens
aggaccccggaagccagaaaggcaaccagcaagcagaaggaaaagagcagccagagcgcggaacacaagagaggaag

SEQ ID NO: 89659 - RNA, 81 nt, Homo sapiens
gcggggcgcgcggcgccggcggcgcgcgacccccgcgcagggacccaggaggaaaccagcagccgcaccgcccgagaaggc

SEQ ID NO: 89660 - RNA, 74 nt, Homo sapiens
cccgacccacaggccagagaggagccaaaaaccgaacacccggaaggggacaagggacggcgaacagaccccgc

SEQ ID NO: 89661 - RNA, 71 nt, Homo sapiens
cacaaaaaacaaaggcaccccaccagccgaaaaaaaggaacagagacaaaggacccagaaggaaagaaacc

SEQ ID NO: 89662 - RNA, 77 nt, Homo sapiens
aaagccccagccaaccaaacacaccccgaaagccacaacaaggcgccaccggaagaaacgggaggggaggagccggg

SEQ ID NO: 89663 - RNA, 61 nt, Homo sapiens
cagaccacagcacagccgggaaggggagccaccagccccccgagacgacaacccccccggc

SEQ ID NO: 89664 - RNA, 52 nt, Homo sapiens
ccagggcaccgggagcggaaacgggcagcccagaacagaaagacgacccagc

SEQ ID NO: 89665 - RNA, 82 nt, Homo sapiens
gcacgacgagcggagcgaagcaggcagcgggagcgaggaggagcggggggaaaggagaaggcggacgcagaaggcagagacg

SEQ ID NO: 89666 - RNA, 69 nt, Homo sapiens
gaaaggcacccaccagcacagagagcccccggggcagagccacacccagccaagaaaggaaacagcacc

SEQ ID NO: 89667 - RNA, 76 nt, Homo sapiens
ggaggacggccggcacgcgcccaaaggaggagagcaaacacacacggagaaagcgacggcgccggaaccagaccaa

SEQ ID NO: 89668 - RNA, 87 nt, Homo sapiens
gcgccacaccaaggccaagaacgggcaccggcgggagaaaaaacgcaagccgcaggaccgacgcaccgggaggcgaagcggcagccc

SEQ ID NO: 89669 - RNA, 75 nt, Homo sapiens
cgccacgcaagggcgaggcagccccaaacaccgagccacggcaggaagcacagaacccgggccgccagagcccac

SEQ ID NO: 89670 - RNA, 63 nt, Homo sapiens
ccccagcaccacagcccgcagccccgccagccacccccagaaaagagcggcagcacgcaaaga

SEQ ID NO: 89671 - RNA, 68 nt, Homo sapiens
cgccgcgcgcagagaccccgcaggcgggacgaagggaacccgccgggcggcccggcacccagcccccc

SEQ ID NO: 89672 - RNA, 56 nt, Homo sapiens
acaacaggcagacagacaaacacgcacgagaacccccagcaacccaaccgaccgga

SEQ ID NO: 89673 - RNA, 72 nt, Homo sapiens
caggggaaggacacaaaagaaagcgacaaggaacaaggagccaaaaaccgaacacccggaaggggacaaggg

SEQ ID NO: 89674 - RNA, 78 nt, Homo sapiens
aggcgcggagcgggcagccgccgccaccccgcggccgcacccccgccccaggccacccaccccaccagagccggacac

SEQ ID NO: 89675 - RNA, 74 nt, Homo sapiens
agaaaccccaagccccaaaggggggggaagacaacccggagaacacccaggggacgcccagaccaaacaacaaa

SEQ ID NO: 89676 - RNA, 77 nt, Homo sapiens
cccccgacgggacgcaggagacagacgacgaacgggaaccagggaacaagcagcagccgagagccgaaagggccagg

SEQ ID NO: 89677 - RNA, 56 nt, Homo sapiens
gcacagggcaaagaaaaagaagaagcacacacacagggcgagaagaaaagaagcag

SEQ ID NO: 89678 - RNA, 73 nt, Homo sapiens
cacgcccgggcccggcccaacaggcagagcccaaaacaacccgcccagagccgacgcaccgccagagccggca

SEQ ID NO: 89679 - RNA, 57 nt, Homo sapiens
ccgagagcggaccgagagcgcgaaacgcacgagaaggagcaaaccgcgcagagagcg

SEQ ID NO: 89680 - RNA, 85 nt, Homo sapiens
ggcgcccaagccaagcacggcgagaggcccggccagagaccgccgggggagcaaggcgaccgggcgcgcccgaaggggccgccgc

SEQ ID NO: 89681 - RNA, 72 nt, Homo sapiens
cggaggcccccagcccagagcccgggcacagaaccaccgaccagaaggaacagggacgggggcagggacaag

SEQ ID NO: 89682 - RNA, 76 nt, Homo sapiens
cacagcacacgggggcgcacggcccgggccaggaagaccgaggagcagggagcaaccacaaggaaaggaaaccacc

SEQ ID NO: 89683 - RNA, 83 nt, Homo sapiens
gagacgacagcccaaacaggagcggagcagccaaagaggcacggaagaacacgggaaagcagcaaaaagaaaaaaggaaccag

SEQ ID NO: 89684 - RNA, 74 nt, Homo sapiens
gagagaaaaaagaaacagaagaacacaaccagaagaacgaaggaggggccacggggccggggagccaccaggag

SEQ ID NO: 89685 - RNA, 80 nt, Homo sapiens
aggagcggccgcgccgccgcgcgagaggaaaaaaggacgggacacggagaggcgcgggaggaaacggaggcgcggggcaa

SEQ ID NO: 89686 - RNA, 77 nt, Homo sapiens
cgggagggcccgccagccgcgcccggggcaacgaggaacaggccaagaaacaacacagccaaggccagcgccacggc

SEQ ID NO: 89687 - RNA, 42 nt, Homo sapiens
ggccaaggcacggaggccgcggagggaaacaaaagcagcagg

SEQ ID NO: 89688 - RNA, 77 nt, Homo sapiens
ggaggggggcacccggacaggccgccgccggaaaccgacaggaacacgaggacccaaagaacaaacccggagagaag

SEQ ID NO: 89689 - RNA, 70 nt, Homo sapiens
cgcgcccgccgcgggagagaggacccccccccccccccaagggaggcccagggggccagcggacccggac

SEQ ID NO: 89690 - RNA, 71 nt, Homo sapiens
aaaagacccacaggcgcaaccaacagaccgggcgagggagcaagagaacgcgcaaaaagcaaccagacgaa

SEQ ID NO: 89691 - RNA, 81 nt, Homo sapiens
cggaacgggcgggcggcccccgccccgcagagagcggaccgcggggacaccagaccgcacaggaaaagcgggagagaagcc

SEQ ID NO: 89692 - RNA, 82 nt, Homo sapiens
aacaaccagcccaaccacacgcaacaaccagcagcacagaggaccgcaagggggagacagccgagacagcaaagaaagcacg

SEQ ID NO: 89693 - RNA, 51 nt, Homo sapiens
cgcccagccggcgagggacgccgcaggacagcagaccacagcccggcaggc

SEQ ID NO: 89694 - RNA, 80 nt, Homo sapiens
agcaagacaccggacaccgagggcccccaaaaggcaaaagcagaccggaaaacccaccggcaagaccacacccgagggga

SEQ ID NO: 89695 - RNA, 58 nt, Homo sapiens
cgcgaggaggaaaggaggacgagaacccgggcggggccggacggggggagaaggaaaa

SEQ ID NO: 89696 - RNA, 97 nt, Homo sapiens
caggaaggccgagaccaggaaaacgccgcccacacaccaaggagaggaggccagagaggagcccacccccaacagaagagagaggaaaccgaaaaac

SEQ ID NO: 89697 - RNA, 52 nt, Homo sapiens
ccaagccacaacacgccagggggaacaacgaaaagaaaaacagaaaagagag

SEQ ID NO: 89698 - RNA, 66 nt, Homo sapiens
agacgggggacgcagggaggagcgggacaccccggaagcgggaaagagagcgacagaccagaaggg

SEQ ID NO: 89699 - RNA, 92 nt, Homo sapiens
cgagcgaagcacccccagcggggaccgcccgggacaacagcgcggggcacaggcccaaggacaaaaacccgaagagcaaacgggaggacggg

SEQ ID NO: 89700 - RNA, 79 nt, Homo sapiens
accagagggaaaaagaccacagaaacaggcaggggcacaccagacagacaggaacaggaccaagaccgaggaggcgaag

SEQ ID NO: 89701 - RNA, 73 nt, Homo sapiens
cagaaggagcggcggacacacagacccccaccaagcagccagaagaaaagagaacacacacggagagcaccac

SEQ ID NO: 89702 - RNA, 64 nt, Homo sapiens
gcgcgaggagcagcgaaaacggggagagccggaccccaggccggacagcccgggagacgagccc

SEQ ID NO: 89703 - RNA, 36 nt, Homo sapiens
agaaccaacgaacccacgggacaaccacccccaagg

SEQ ID NO: 89704 - RNA, 63 nt, Homo sapiens
aagacaggcggccaaacagcaccaaaccgcccccaaagccagagcccaagccaaaaaggcccc

SEQ ID NO: 89705 - RNA, 54 nt, Homo sapiens
gcaagagggaccccgacggacaccccccaggaaaacccagaggaaccaaagccc

SEQ ID NO: 89706 - RNA, 106 nt, Homo sapiens
aagccagaaccaggccgcacacagcacggcaagccgcggaaacaaagcgaaagcgcgaagaaacagcaccaggacacgcccgccggcgccgacaccaggaccagca

SEQ ID NO: 89707 - RNA, 77 nt, Homo sapiens
cgaaacgggccgaaagaccgccgcccagccccaaagagcgagacacagggacaggcagaccagcacagggcgcccca

SEQ ID NO: 89708 - RNA, 77 nt, Homo sapiens
gacaagaggcggacggggagcgaacgggacagcccacacccggcgcggaggggaaccggggacccaggaaggggaaa

SEQ ID NO: 89709 - RNA, 56 nt, Homo sapiens
cggggcccacaacccaacaggaagcgcagaagggaccagggacgagacggaagaca

SEQ ID NO: 89710 - RNA, 79 nt, Homo sapiens
aagccagccagccgccgaacagagcccgcccagggaggaggcggacacgccagagcggacgcacaggaagaaagggcag

SEQ ID NO: 89711 - RNA, 40 nt, Homo sapiens
acaaggagcaggcgcgaagaagccagacagccgaaacaac

SEQ ID NO: 89712 - RNA, 66 nt, Homo sapiens
aaccgaccagggcaacaccaaaaacaaaacgaaccaggacggcaagggaggcaagcaggggggcaa

SEQ ID NO: 89713 - RNA, 70 nt, Homo sapiens
aaaaagacgcaaggcgcgcaaggacgggccaacgcacggcccggcagagccagcaccccccgcggcagcc

SEQ ID NO: 89714 - RNA, 84 nt, Homo sapiens
cgagcggcggcggcggcagcgggcgggccccgagagcagcagcgaacgaaaacaaacggaagagagggcagcaagaaagaacaa

SEQ ID NO: 89715 - RNA, 87 nt, Homo sapiens
agaccggaccgagagcggaccgagagcgcgaaacgcacgagaaggagagagaagcccagaaacagcggagaagcaaacgagaagcac

SEQ ID NO: 89716 - RNA, 77 nt, Homo sapiens
gcggcggcgcgggccggagcaggggcgcagaagacgaccccgacgcaggccaggagccgcggacagaagccgagcac

SEQ ID NO: 89717 - RNA, 95 nt, Homo sapiens
aaacggaaccgggaggcgacgcacacgagcggaggcgaagcggaggccgcaggacggcacccgagaaggacaaggccaccaagcacgcgcacacc

SEQ ID NO: 89718 - RNA, 78 nt, Homo sapiens
ggggaaaacacaggacagcaaaaacaagcgggaaggggaaaggggacacaaggaacagaaagaaggggcgcgggccgg

SEQ ID NO: 89719 - RNA, 78 nt, Homo sapiens
ggaacaaaccgaagaacagcgggaaagaaggcaaaacacggggaaacacacagaagaccgcagaccaagggagcaggg

SEQ ID NO: 89720 - RNA, 72 nt, Homo sapiens
cggagacagggaaccggggggagggcagaaacaggaagaagagccaaaggagggcacaggaaaagaccccac

SEQ ID NO: 89721 - RNA, 79 nt, Homo sapiens
ccccggcccacaggggggggcaaacccgagagaacggggggcccccaaagggaagccaaacacaaaggaagaagcccgg

SEQ ID NO: 89722 - RNA, 54 nt, Homo sapiens
caaaggccgaagcccagccggcagagggaaacgaaaagccacgggagagagccg

SEQ ID NO: 89723 - RNA, 52 nt, Homo sapiens
ggaagagaaggagcggagcgccaagcccggccaaaaaacccccacaagaagc

SEQ ID NO: 89724 - RNA, 67 nt, Homo sapiens
gagcgcggaagggcaacgaaacacaggggccaggggccaacgacaaaaaagaaagcagcagccagag

SEQ ID NO: 89725 - RNA, 59 nt, Homo sapiens
acccacaggaaacagcgagacagggcaaggccagagaaggcgggagaaagacacgaacc

SEQ ID NO: 89726 - RNA, 73 nt, Homo sapiens
ggccagaaagcaccagcgcagagcaacaggggaccaggggagagggacacccagcacaccagaagaggggaac

SEQ ID NO: 89727 - RNA, 93 nt, Homo sapiens
caccaccacgccagccgcaccagccgcccaagccgcacagccgcggcggcagcagcaggagagaaggaagaggcccagcagaagggaccgcga

SEQ ID NO: 89728 - RNA, 76 nt, Homo sapiens
acacagaaacacgaagaagagagacaaccaaaagacacaagggcacgaaagagaacccgaaaggaagaggaagaga

SEQ ID NO: 89729 - RNA, 83 nt, Homo sapiens
acggcggccgcagaacggcgagagcggagcgggacccgcgaaccagcaccagacagaagacgcagaagagcagcgaagagcaa

SEQ ID NO: 89730 - RNA, 73 nt, Homo sapiens
gcagagcgggcagaaaaacccacagggcacgagcaaaaaaaagccccgagcaacaaaccagggaacgacgcag

SEQ ID NO: 89731 - RNA, 77 nt, Homo sapiens
cagggcaagccacacggggggcccaacgaggcgcggggcaggagggagaccgagggaccggagcggaggaccgggac

SEQ ID NO: 89732 - RNA, 84 nt, Homo sapiens
cccgaggcgaggcgcccggcccccgcccgccgcgcccagagaagggagcacgcacgcgcaagggcacacaggcccgagcacaaa

SEQ ID NO: 89733 - RNA, 83 nt, Homo sapiens
cgggccggggccccgcagcgacaacaggaggccggaagacccaaagcgagcccacaccccagaccacgccgccaggaggcaac

SEQ ID NO: 89734 - RNA, 78 nt, Homo sapiens
acaaccgaaggacgcggccccgaggggcagcggggccggcgggaggacggccaccccgggccccagggagcgcgccgg

SEQ ID NO: 89735 - RNA, 75 nt, Homo sapiens
gccaccaccccagcagaagcagcagggacaacagacaggaagcgaccagcgggcagaagaacccacaggcgacac

SEQ ID NO: 89736 - RNA, 86 nt, Homo sapiens
cggcggagcagcggagcaggcccggagggagcgcccagagcagacccagcagcgacacgccgggccccaggacaacaaccgcaacc

SEQ ID NO: 89737 - RNA, 70 nt, Homo sapiens
cggaacgagcagcagacaggggaaacagcgaacccgaccacgagagaaaaaggccgaaaggagcgaaggc

SEQ ID NO: 89738 - RNA, 85 nt, Homo sapiens
gaggcgggacgccgagaagggaacagccgcgacacggcgggcaggaaaccaccccgcgcaccgccgcagagagacggggcaccgg

SEQ ID NO: 89739 - RNA, 76 nt, Homo sapiens
ggcgagccgaaaagcgagcgcgaggaaaaggcggcgggaggcaacagagcccagaggggggaaacaggccgagcag

SEQ ID NO: 89740 - RNA, 82 nt, Homo sapiens
cagccgaccagccgcggagccgggggcagggggacacgccagcggcgcagccgacggaagaccgggagacaaaacaacagca

SEQ ID NO: 89741 - RNA, 53 nt, Homo sapiens
aggcgccaccgcggagaaaagaaagacagcagagaacacgcagcccaagggcg

SEQ ID NO: 89742 - RNA, 72 nt, Homo sapiens
ggcgccgcggagaccccgcggcccggcagggggaacgggaggggggccaggaggggaggagggagggccacg

SEQ ID NO: 89743 - RNA, 68 nt, Homo sapiens
cgcaaggacagaaacgcaggaaagaccaaaccccaaagcaggccaaacccaggaggacaacaagaagg

SEQ ID NO: 89744 - RNA, 65 nt, Homo sapiens
gggaccccggagcccagaagacagagggcgaggacgaaaaggcccaggccggcggaaaacccacc

SEQ ID NO: 89745 - RNA, 72 nt, Homo sapiens
cgggcggcgccgccccaccggacccgcagagcacaaggccagcccgcccgaaaccaaaggcaggacaacaga

SEQ ID NO: 89746 - RNA, 75 nt, Homo sapiens
gacggggggggccggaggagcagcgggccagaacggccaggagacgcaacgagagaagaagaaggaggccgcggc

SEQ ID NO: 89747 - RNA, 57 nt, Homo sapiens
cgcgcggcgcggggaccgcggcccggcccgccgccccggggcacgccaggcaaccaa

SEQ ID NO: 89748 - RNA, 83 nt, Homo sapiens
aaggccaacacacgccccggcgccgaccaggcagcgagagcccagagaagggaagaaagcggaaaagaaaagaagagaaccaa

SEQ ID NO: 89749 - RNA, 59 nt, Homo sapiens
cagaaaaccaggaaagcagacacgcgcaccgcagggccagcaaagggcaggccaaggaa

SEQ ID NO: 89750 - RNA, 72 nt, Homo sapiens
caggagcgcggaagacgcacaagggaagacgcgcagcaaggaggagaccggaagagcgaccacgcccggcga

SEQ ID NO: 89751 - RNA, 85 nt, Homo sapiens
ccgcccgagcgccgagaaagccccgggagaagcagcgccgcccggggcagaccaggcagggggccagcacagacacagccagcca

SEQ ID NO: 89752 - RNA, 78 nt, Homo sapiens
cacacccgcagagcgaggaccggaagcaaacggggacagcgccgaccggaacagggaccacggaagcccaggaccagc

SEQ ID NO: 89753 - RNA, 60 nt, Homo sapiens
ggaaagagagccacacgaagaacacggccaaagcagaagaaggaagcaagagaagaacca

SEQ ID NO: 89754 - RNA, 73 nt, Homo sapiens
aaaaaaacagaaaaaacggaaaagaaggcagcggaaacgcagacacgaacgggccgaagacaacggcaagcgg

SEQ ID NO: 89755 - RNA, 67 nt, Homo sapiens
ccacccccaccgccaggcaaagcgccgcaaggcacagccagcccgccagggacacacagacgccaca

SEQ ID NO: 89756 - RNA, 74 nt, Homo sapiens
caaaaggcaaaggggagagaaggggccgccacaaaccaggaacccaggagaggcaccagggcaacagaagaagg

SEQ ID NO: 89757 - RNA, 73 nt, Homo sapiens
accagccagaccgggaagaaacgaaggggggaggcccaggccaaaagaggaagcgagacaacagagggagacg

SEQ ID NO: 89758 - RNA, 80 nt, Homo sapiens
ggagaagcgcccaagcggacgaaagccacacacgaggaggggcacggaagcaaaagccacgcccagaacccaggcggaga

SEQ ID NO: 89759 - RNA, 72 nt, Homo sapiens
gcaacagagagacaaaaaggacgccgagcaaagcccacaaaagaggcagcagacagcaacagcagcagccgc

SEQ ID NO: 89760 - RNA, 87 nt, Homo sapiens
acaccccgagcgaggccaacccaggaggaggagccacagaccaaaagcgaagcacaccccagcaccacggagaccagcaacgacaga

SEQ ID NO: 89761 - RNA, 76 nt, Homo sapiens
gggccacaaagccccccggagacgcaaccaaggcggccgagagcaggaggcgggcgcgcagccccgccggacggcc

SEQ ID NO: 89762 - RNA, 70 nt, Homo sapiens
ggcggggcgcaaaccgagacaagcaccccgaagcgccgaaaggaccagcgaccaacaaggagccaggacc

SEQ ID NO: 89763 - RNA, 85 nt, Homo sapiens
ggcacagaagcgggcggcggcgcgccgccccgggcggccgcgggcggggccggccgcgcacccagacccgagccgccgccgccgg

SEQ ID NO: 89764 - RNA, 77 nt, Homo sapiens
ggccgcgcacacgccgggacgcgacgccagcacgacccaccgcacgcagaagcggaacaagagcaaacggcgaaacc

SEQ ID NO: 89765 - RNA, 63 nt, Homo sapiens
agacccaaacccagcaaagaaggaagggcccacagacaagccgcccccccacccgacggagcg

SEQ ID NO: 89766 - RNA, 92 nt, Homo sapiens
gcacgcaacaagggcagggcaagcagagcgaccagccgccaaagccaccaaaaccccaacaggggcaccgagcacggaggcgcagacgccga

SEQ ID NO: 89767 - RNA, 58 nt, Homo sapiens
caaagaacggcaggcaaaaagcaaggagagggcggggacacagcgggcaggaagaaga

SEQ ID NO: 89768 - RNA, 67 nt, Homo sapiens
gcaacccaagcaacgaacagcggagggaagaaggcaaaaacggaccaaagaaaacggagaacagcaa

SEQ ID NO: 89769 - RNA, 81 nt, Homo sapiens
gcgggcccgccccgcccccgccacccgagcgcggagcagcgaccagagagcgcggccggaggacagaccccagcggaggga

SEQ ID NO: 89770 - RNA, 75 nt, Homo sapiens
gggggggaccaaacgagaggcgggcaggaggacccaaacgaaggggagggaccggggcggaagagcaggcaggcg

SEQ ID NO: 89771 - RNA, 74 nt, Homo sapiens
aagagaccagccagcaagcagaaagcggggaggacacccaccaagagaagccgaagcccaaggaacaagcgggc

SEQ ID NO: 89772 - RNA, 87 nt, Homo sapiens
gagaggcggcaaggaaagggccacagcagagacgcgaaggagaggcccagaacccaagcacggggcagaggaaaaaagaccgagcgg

SEQ ID NO: 89773 - RNA, 103 nt, Homo sapiens
caccaccaggggaggaggaaaacacacagacgaaggcaaaagaggaggcaagacagagaacagaaaaggagaaaaggagaaaaggaccgaaagaggaagagag

SEQ ID NO: 89774 - RNA, 112 nt, Homo sapiens
cccggcgccgcgcgccgccgccgcccgggcgggagccaggagcgacgcaccgccaggcaggcacaaagggaagagcccggagcaggaggagaaaggaaacagaggagagaac

SEQ ID NO: 89775 - RNA, 78 nt, Homo sapiens
gcgaagagaacgcgcccaagggcggggacacgggccgcgcgaaaaaggacaaaccggcgaccacacacggggacgacg

SEQ ID NO: 89776 - RNA, 57 nt, Homo sapiens
gccgggcccagacaaaaaacaggagccacccacgagaaagccacagagcgaaaaaaa

SEQ ID NO: 89777 - RNA, 78 nt, Homo sapiens
cggcaacacggacacccacagcggggcggcggcggcggcggcgcggcccaaaaggagcgggaaacacccggcgaagcc

SEQ ID NO: 89778 - RNA, 70 nt, Homo sapiens
caaccagggagaaaccgacacaaaagcagagcgcgaacggagaaagggagacaaggagacaagcacacca

SEQ ID NO: 89779 - RNA, 74 nt, Homo sapiens
cggccaggcggcgacacgccaaccccgggaaagacaaggagccgggccgagaaaccgaaccagagaccagagaa

SEQ ID NO: 89780 - RNA, 89 nt, Homo sapiens
ggaagcccagacaccaggaaaccccagaggaggcgggcccggagcaggcaagaacgccaggagccagaaccccgaggaaaggggaaaag

SEQ ID NO: 89781 - RNA, 76 nt, Homo sapiens
gcgcggccggagcaggaaccagcacgggggaaaaagccccggggcgggcaccggccgaccgcggccggggaggggg

SEQ ID NO: 89782 - RNA, 78 nt, Homo sapiens
ggaggaaaccggcagaccccagacccaaacaacggcagaagcaggacggaagaagaggagaagcgacggaagaacggg

SEQ ID NO: 89783 - RNA, 73 nt, Homo sapiens
gaggcacgggccacacacagccccacaggcccggaggcggagcccgaagaaaaacagacccaaggcaacagga

SEQ ID NO: 89784 - RNA, 68 nt, Homo sapiens
agagcggaaacgaccggcagggagggaaggcaagagccaacccaaaaccaagcgccccggcaaaacaa

SEQ ID NO: 89785 - RNA, 72 nt, Homo sapiens
aagccgcgcggggacccgacgcccgcacggcacggaagaacacgggaaagcagcaaaaagaaaaaaggaacc

SEQ ID NO: 89786 - RNA, 75 nt, Homo sapiens
cccccccaggagcgaaagggaagaagaacagcgaacccacccaacacggcaaaacaaagacaccacacccaaaag

SEQ ID NO: 89787 - RNA, 78 nt, Homo sapiens
caggagaggaagcgaggaagaagaggaggaagaaacgagagcagggaagccccaggaggcccccaaggaaccgcaccc

SEQ ID NO: 89788 - RNA, 79 nt, Homo sapiens
acaccgggccagccgccaccaccgggaggcaaagcgggacagaaaccagccggacaccaagcggcagaaggccacccaa

SEQ ID NO: 89789 - RNA, 54 nt, Homo sapiens
gcccaggcacaagggagaggacagacagacgcccgcagaacaagaaggagaggg

SEQ ID NO: 89790 - RNA, 64 nt, Homo sapiens
cgcgcgaaaggaggaagcaaacaccagcaagaaggacagaaaacgggccccagacacaagcccc

SEQ ID NO: 89791 - RNA, 59 nt, Homo sapiens
gggacgcgcgcgggcacccacggagccccggggcggaaaggcaaccgggggggggcccc

SEQ ID NO: 89792 - RNA, 58 nt, Homo sapiens
acgcaagccaccgggcgggaccgaagacggagggcccccaagccggcaggggaacgag

SEQ ID NO: 89793 - RNA, 68 nt, Homo sapiens
aaacccaacccggaaccgcgcgaaacgcccagaaaccaagaagcagcacgccggaaaaccaacgacca

SEQ ID NO: 89794 - RNA, 76 nt, Homo sapiens
ccggcccaaaggggggagcgcgcgacaccaccaaagcaagggacggaaaggcaccagggagaaccggggaaggcgg

SEQ ID NO: 89795 - RNA, 75 nt, Homo sapiens
gaagacaaagaacagccacaccagggcccacacaacgcaaggaaagaggcagagaaagcaagagacgcaaccgaa

SEQ ID NO: 89796 - RNA, 95 nt, Homo sapiens
gggggcagccgccacacgggggcaccacccccagccgcaggcccaggaccggccgcgccgcacaagccgagagcagccccacgagccacaccaga

SEQ ID NO: 89797 - RNA, 60 nt, Homo sapiens
ccaagaagcaccacaaagaaaggaagggacggggagcaccagccaaggccccggcccaca

SEQ ID NO: 89798 - RNA, 76 nt, Homo sapiens
cccaaaccaggaaaaggagggaaaggggcccagacagcggagcagcgcaagcaagccacaccgagcaacgggaagc

SEQ ID NO: 89799 - RNA, 85 nt, Homo sapiens
ccacagcccaaagaacaagaggaaaaaagagacggggccaaaacagaaaggaacgaggaagcagaaaggcgaaggaacacacgac

SEQ ID NO: 89800 - RNA, 89 nt, Homo sapiens
gaaaccaggaggagcacgcaagcgagcaccagcagagccaggccccggggccccagcggcaccagcggagaccacgggagccgcgccgg

SEQ ID NO: 89801 - RNA, 79 nt, Homo sapiens
ccacggaccaaacgggagagcgcagccaggagcaggaggcaagcagggcgggcccggcgggcccgcgacacccagaagg

SEQ ID NO: 89802 - RNA, 80 nt, Homo sapiens
gccgggccgcgcggcgaggcggccgcgaacagcaggaacaggaacgccaccacaagaaagaaacaagccagaggaaaccg

SEQ ID NO: 89803 - RNA, 75 nt, Homo sapiens
gcagcagcccgcagccggagcagcccgccgagagccaaagcacaggaaacacggggacaaagcgggagaaaaaca

SEQ ID NO: 89804 - RNA, 88 nt, Homo sapiens
gagccgccgcaccgcacccggccagcccccccccagaccacaccggggcccgccggaaagagccccaagcccgcagccccagaagaaa

SEQ ID NO: 89805 - RNA, 73 nt, Homo sapiens
cccgacccaacgcggcgacggcgggcgcgcacgacgacggcggacgcagcggcgggggcggcgcggggcagag

SEQ ID NO: 89806 - RNA, 76 nt, Homo sapiens
ccggcaacacgacacccgccacacccgacccgccaagaagccgcgagcaccacagaaccaggaaccaagagcgcac

SEQ ID NO: 89807 - RNA, 88 nt, Homo sapiens
cggcagaccgacacgccggggcgcccgcgcgcggggaccccacggggccaaaacagaagaggcaaagcccagccacagcagcagccca

SEQ ID NO: 89808 - RNA, 70 nt, Homo sapiens
gaaccagacaaagacaaggaacaagaggcacgggccccccggcagcgaagcgcccgagcggcagccgccc

SEQ ID NO: 89809 - RNA, 61 nt, Homo sapiens
gcgcaaccgggagcccaggaagcgcagacacaaggcagcagcgccccgagccccggcggca

SEQ ID NO: 89810 - RNA, 57 nt, Homo sapiens
gcgggaccgggcgcagacggcgagaccccgcacaggacccaaagacaggaccacgca

SEQ ID NO: 89811 - RNA, 86 nt, Homo sapiens
acccgaggcgcagggaagacgcaccgcggacgcccgcgagcggcgcacgggccgaccagagagacggggcaccagagccaggaggc

SEQ ID NO: 89812 - RNA, 59 nt, Homo sapiens
aggccagcgggcggagagggagccccggaagcggcagaaggcggcagggagcacgcacc

SEQ ID NO: 89813 - RNA, 82 nt, Homo sapiens
gccccgccccgccccggccgcgcaagggcacccgcgacgacgagacgacacccaaagccgacacagcccccgaggagcagcc

SEQ ID NO: 89814 - RNA, 54 nt, Homo sapiens
gcggcgccagccccagcccgaacacagaggacagggaaaagacaacaaaagaag

SEQ ID NO: 89815 - RNA, 58 nt, Homo sapiens
caaccaggcccaaagaagaccagcggaggcccgcagccccaaggacagccagcgggca

SEQ ID NO: 89816 - RNA, 56 nt, Homo sapiens
agcccagggagcggcggcagcagcaccgccccggagccacagcaaagccacccaag

SEQ ID NO: 89817 - RNA, 85 nt, Homo sapiens
cagcgcagcaggagagaagaaaacgggaaccagaaggagcagcaaaaagagacccaaccagaagaagcccaaaaaagaagaaaaa

SEQ ID NO: 89818 - RNA, 75 nt, Homo sapiens
aggacgcgggcaggagaacggccggcaagaaaaggcacacacacccgcaggagagcgccggagaaaggaagaacc

SEQ ID NO: 89819 - RNA, 78 nt, Homo sapiens
gaagaaacgagcggcgcccaagaacagccaaagcgacggccccaaccacggagcaacgcaccggaacacaacacaccg

SEQ ID NO: 89820 - RNA, 73 nt, Homo sapiens
ggcccggggaccacagccgcggcccaggcccaaggaagacggaggagagaaaacacaaaaggcaccacagagc

SEQ ID NO: 89821 - RNA, 79 nt, Homo sapiens
caagacgagggggcgaccaaccggcaggcacacgaccagccccgcgaaccgaggcgagaaaagacagcgacggcgcaaa

SEQ ID NO: 89822 - RNA, 80 nt, Homo sapiens
aacagagccgggagcaagaagaacacccagaggccggggggggcacagagccccggaagacagcccccagcgaccagacc

SEQ ID NO: 89823 - RNA, 90 nt, Homo sapiens
ggcccccagccgcccgaccgcgcgccggagccccagacgccgacaccccaggccacgagccccaggccacggcagcaggcccagccccca

SEQ ID NO: 89824 - RNA, 74 nt, Homo sapiens
cagaagaaagcaagaagccgcgggacccgggaccaaagggaggggaaacaagaaccagacaggcacaggcgagg

SEQ ID NO: 89825 - RNA, 84 nt, Homo sapiens
ggggacagaggcaccaaggaccccaagacagagccgacaaaaggacaaggggcgaagcccgggggagaggagggagagagaccc

SEQ ID NO: 89826 - RNA, 73 nt, Homo sapiens
caacacaccaacccggcagggcccagcgcccaaccccgccggacagcacagcacacgacacccccgggaccgc

SEQ ID NO: 89827 - RNA, 80 nt, Homo sapiens
ggcaccgcgcgaagcggccaaagccgcccagacggccaccggcgggaggaacaaaagcgccagaggaagaaaaaagccca

SEQ ID NO: 89828 - RNA, 84 nt, Homo sapiens
gagggccgggacgggagaggggccgaaccggaagggcggaggccccggcggcaggcccgcaccgccgccagaggcgagggagcc

SEQ ID NO: 89829 - RNA, 84 nt, Homo sapiens
ggggggcgcagaggacacgaggcggcgggcggagacaggaccgcggcgagcaagagaaagggggacaccaaagcggaaaccagg

SEQ ID NO: 89830 - RNA, 61 nt, Homo sapiens
ggcagcgcccggagaggaagaggcaagggcagaacagagcagcccaaggcacaagagaaaa

SEQ ID NO: 89831 - RNA, 54 nt, Homo sapiens
agacaaggagagaagaaccaaagaagcaaaacacgagggaagacaggcggcacc

SEQ ID NO: 89832 - RNA, 76 nt, Homo sapiens
aagaaggaaggaccaacacaccacaccgaaagcagagggccacagcaagggcggacgccgacagaccgggaacacc

SEQ ID NO: 89833 - RNA, 113 nt, Homo sapiens
gggccaccggaaagcacagagaagcaaaaaccggaaaagacggcagccgccgggggaacagagaggcccgcggggcacgggcagggaaggagaagggacacgagggggcagcg

SEQ ID NO: 89834 - RNA, 61 nt, Homo sapiens
cggcgaggaagagacgacagcaaggcggaaacaagggacgaacaaaacaccgaggaaggac

SEQ ID NO: 89835 - RNA, 86 nt, Homo sapiens
cccacaccccaagcacccaggaaccggcaacagaaaaacaaccaccagcgagcaaaaaggcaaagaccaagaccaccaagaagcgc

SEQ ID NO: 89836 - RNA, 77 nt, Homo sapiens
acgcgggacgcggcggcgccggccccggggagaaacggcgccacaggagccgcagaagcaaaggcaccgccaaaccg

SEQ ID NO: 89837 - RNA, 78 nt, Homo sapiens
gccacgcagcaggagcaggggacgaaggcgaggcaaaccccacagaaggaaagaacaaagcgagcaacagggaccaac

SEQ ID NO: 89838 - RNA, 72 nt, Homo sapiens
cccgcaaggaacccggcccccagggccacggcagcgggcgcggggagcaagaacaaagggggccaacggaga

SEQ ID NO: 89839 - RNA, 67 nt, Homo sapiens
agccccgcacagcagagagcaacccgaaaagacaccccaaagcgacaagccaaaagcccacccagcc

SEQ ID NO: 89840 - RNA, 81 nt, Homo sapiens
cgccagcaccgcgcccaggccgaaccgggcagcaaggacgcgacgcaaacagcagacggaagaccccacggcaaaaccaca

SEQ ID NO: 89841 - RNA, 74 nt, Homo sapiens
gaccgggcacagacaacccccaccgcaaccagaaacaaacaaaaaaacccagggaccaggaaacgccggaagga

SEQ ID NO: 89842 - RNA, 71 nt, Homo sapiens
agggcacagcccaaagagaaaggaggagagaaagaacccacgcaggacgacagaagaggccggacaagaga

SEQ ID NO: 89843 - RNA, 69 nt, Homo sapiens
aaaggagacgaagagcaccagacgcacagcaggcaccacccacccagccgagggaacgcgaccccccgg

SEQ ID NO: 89844 - RNA, 80 nt, Homo sapiens
gcaggggccaaggagcacggacggacccagcacgaggaggcgcgaggagagccaagcccgggcgcggacaggaacccaaa

SEQ ID NO: 89845 - RNA, 80 nt, Homo sapiens
aagcccgagagcacggacaggcaacagggagagccgaacccccgaggccagcacgagaagcccaccagaggcgaggggag

SEQ ID NO: 89846 - RNA, 68 nt, Homo sapiens
acgaacaaggacagagggcacagaacggaacccgagagagacgcagcgcaaggccgggggaggccaca

SEQ ID NO: 89847 - RNA, 49 nt, Homo sapiens
caaccgggaagggaaccggaaaagacaagaagccgaggccgccagcgcc

SEQ ID NO: 89848 - RNA, 77 nt, Homo sapiens
ccgagcccgccagcgacggcgcccgggagcggccggagcgagggagaccacaaaaggccccagccaccaggagcagg

SEQ ID NO: 89849 - RNA, 77 nt, Homo sapiens
cggaacagcgaggccagcaggagacggagccacggagcagccagaacggaagaccaaccagaagacacacaaagcag

SEQ ID NO: 89850 - RNA, 70 nt, Homo sapiens
aaacaaggaacaaaggacagagcaaggagcggaagcccccaaaggaaaacagagagggaagaacaccaaa

SEQ ID NO: 89851 - RNA, 75 nt, Homo sapiens
aacgcacaccggcccacaccacagcaagccaacaccaggcaccggaggcaaagggcaaaggggagaagcacaccg

SEQ ID NO: 89852 - RNA, 52 nt, Homo sapiens
aacggagcgaagcaaagcgcaggaaagcgcagaacggcggaggaaagccaac

SEQ ID NO: 89853 - RNA, 74 nt, Homo sapiens
ggaacgaagggacaagacccgccagaacagcccaaaggggcaggacaagacagaaggccaagggagggacggga

SEQ ID NO: 89854 - RNA, 91 nt, Homo sapiens
cgaagcgagcaagacgccaagcacaggcggcgaacgacaggcagggaggaaagacaggaaagaagccaccacagaaaccgaagagccaggg

SEQ ID NO: 89855 - RNA, 57 nt, Homo sapiens
gaaaaaaaagggagaaacagaccaagggaaaagcaccgagcagaaggcccgaacagg

SEQ ID NO: 89856 - RNA, 76 nt, Homo sapiens
ggaagcacaggcccaagaagccccccacacacaggcaagacgaacagcaaggagaaagaaagggaaaacacaaggg

SEQ ID NO: 89857 - RNA, 70 nt, Homo sapiens
acaagaggggcacaaaaacaccacgccgagaacccaggaggacgcacccagacccagccaacgagcacag

SEQ ID NO: 89858 - RNA, 78 nt, Homo sapiens
cacaaaacggacagaaaaccccaccaggccagacagacacagcacagcagccacgaagagcaaagcaagccgaaaaac

SEQ ID NO: 89859 - RNA, 54 nt, Homo sapiens
gagaccgccaaccaccacagcagaggcagcccacggaacccagaacaggccaag

SEQ ID NO: 89860 - RNA, 69 nt, Homo sapiens
gagggaggagagagggagagccaaagaagcagcccaaaaccaacaacaaggagacaagcccccacgcca

SEQ ID NO: 89861 - RNA, 68 nt, Homo sapiens
gccggcccccagagccagaaacagaggaggcccacagcgaaggagcggcccagaggcaagaggaggag

SEQ ID NO: 89862 - RNA, 63 nt, Homo sapiens
ggacgcgacacaagcacaaaagcggaggaaaaggcacagaaaacgaacgagaaacgagggaga

SEQ ID NO: 89863 - RNA, 75 nt, Homo sapiens
gcgacagacgcaccaaaggcgagcgagaaaccccccaagcgagcagacccaaacagcccaccaaggaacagcccc

SEQ ID NO: 89864 - RNA, 75 nt, Homo sapiens
ggagggacggcacagggaggccagccggagaagcgagcagcgcgcagaaccggccgaaaagcacaaacagcaaga

SEQ ID NO: 89865 - RNA, 75 nt, Homo sapiens
gcaggccgcaacaccagaggcgaagcaaagccagggaaggaaccaggaaggaggccaaggaccgagccgccgcca

SEQ ID NO: 89866 - RNA, 105 nt, Homo sapiens
ggggcagaagcagggccggccacaaacggagaaggaaacaaccccaaggaccaggaccaccgagagcgcgccaaagaaaaaagccaaagccagaaaaaaggaacg

SEQ ID NO: 89867 - RNA, 79 nt, Homo sapiens
agcaacggggcacacagcaaagacaggcagggcgaccgcccgacgcacacacggccaagggcggcgcgagcggaccagc

SEQ ID NO: 89868 - RNA, 40 nt, Homo sapiens
gggcccaacagagggaagaccaagcacgagcagcccccgc

SEQ ID NO: 89869 - RNA, 37 nt, Homo sapiens
aaacaacacaccagacagggacggaccggacccagac

SEQ ID NO: 89870 - RNA, 77 nt, Homo sapiens
cgcggagcaaaaaaagagcccgcaagaagaacagagacagcagccaaacccccagggcagcacgagcagcgccgcac

SEQ ID NO: 89871 - RNA, 92 nt, Homo sapiens
aggagccgcggagccggcgcgagaggggcgcggccggagcgggcggcgagacaaaggcgacgggaagacccgaaacaagaagaagagaacag

SEQ ID NO: 89872 - RNA, 73 nt, Homo sapiens
gacgaaagcacacaagccccaagacgaggggccaggacaggaacaaaaaagcggggaaaacaaaaaaaagaag

SEQ ID NO: 89873 - RNA, 39 nt, Homo sapiens
ggggggcaaacccgagagaacggaggagaacaaggccag

SEQ ID NO: 89874 - RNA, 77 nt, Homo sapiens
aagcgggaggcaggcagccagaaaaaggccgaccccgcccggaagagcacagaccccagcagggggcgaagacgacg

SEQ ID NO: 89875 - RNA, 75 nt, Homo sapiens
cgcgcaggagcgcccgcaggaccagcggcgccgacaccggaacagcgcccggaacagaaagaaaggccacagccc

SEQ ID NO: 89876 - RNA, 80 nt, Homo sapiens
aggaggaggggagaggccggaggacaccaacagcacaacaacagcaacggaggcgggaccggaacaggcacaccccacac

SEQ ID NO: 89877 - RNA, 55 nt, Homo sapiens
gcgcacagcaacagcgaaggcaaagaacggacaaaccggcgaccacacacgggga

SEQ ID NO: 89878 - RNA, 34 nt, Homo sapiens
cgaagaaacaaagcaagccaccaaacccagaggg

SEQ ID NO: 89879 - RNA, 80 nt, Homo sapiens
gagaaccgcaaagggcagcagagagccagcaccacgagcgccagaaagccagagacgcgcacgaaacgacgaagaggccc

SEQ ID NO: 89880 - RNA, 62 nt, Homo sapiens
gcagcccccagagcgggaccacagggccggacgggcacccagaggcgccaggacggcgggac

SEQ ID NO: 89881 - RNA, 79 nt, Homo sapiens
aagaaacaaagaacggacccacaccgaggcacccgaagaagagaccaccaaccaggagacgagcgccaaagacagaagc

SEQ ID NO: 89882 - RNA, 54 nt, Homo sapiens
aagggaaggcacggaagagcgcagccggagagagcaaagggggcgaacagagcg

SEQ ID NO: 89883 - RNA, 55 nt, Homo sapiens
cgcggccagcgaaaacgcccagggaccggaagccagagcacagaagagcccgggc

SEQ ID NO: 89884 - RNA, 74 nt, Homo sapiens
cgacgaggcccccggcagcgaccgaccgggcagcagccccgaccccagaggagaaggcagagcccccccaggca

SEQ ID NO: 89885 - RNA, 36 nt, Homo sapiens
cagagacgaaccaggcaaaggcaaaagagccgggaa

SEQ ID NO: 89886 - RNA, 78 nt, Homo sapiens
cagaccgcagaggaagaaagcggaaagagcgacaaacaaagaaagacggacgaccagcgaagcaggccccggcagccc

SEQ ID NO: 89887 - RNA, 80 nt, Homo sapiens
gggaacaacccgcgcccaggccagcgccccaggccaagagggacccacccggcggggaggggcgaccccggggcccggcc

SEQ ID NO: 89888 - RNA, 60 nt, Homo sapiens
cgcccccccggcgggcagagcccaggcggaggcaaggcacgaccggccaccgcaaccccg

SEQ ID NO: 89889 - RNA, 72 nt, Homo sapiens
cagcgcccggcgaccccgcgcgcacgcggcgcgccgggccacacgggggcgagccacccaggccgcgaagca

SEQ ID NO: 89890 - RNA, 59 nt, Homo sapiens
cccgggagcccccgcccggagacacgagaccccagcaggcaccaccaccagccaagaca

SEQ ID NO: 89891 - RNA, 81 nt, Homo sapiens
gacacagccagccagccacacggcagaaaaagagcaggacgaggagcggaggcggcagcagcagagaagagagcgcaagcg

SEQ ID NO: 89892 - RNA, 64 nt, Homo sapiens
gaacagcagaccaggcagcagccgcagcaggcagcaggcaggagaagggcaccggggaggaccg

SEQ ID NO: 89893 - RNA, 41 nt, Homo sapiens
gggggggcaaacccgagagaacggaagaacggaccgaagcc

SEQ ID NO: 89894 - RNA, 83 nt, Homo sapiens
ggcggcgcgcgcggcgcgggacgcgcgcgggcacccacggagccccggggcggaccgcccccagacagaacggcccccgcacc

SEQ ID NO: 89895 - RNA, 82 nt, Homo sapiens
gaaggggaaccacagggcacccacagccagcaggcaggaaaggcaccaaaccgggaggaaccacccagggaaaggaggccag

SEQ ID NO: 89896 - RNA, 70 nt, Homo sapiens
caaaggacaaaaacaaagggaaggaaaggaaacagacagcgcgaggagagaagccacaagcaacgaaagc

SEQ ID NO: 89897 - RNA, 81 nt, Homo sapiens
gggggaccgaacccccgccgcagccaggagccgaggccgaaagcccgggcgcgccaggcacagccaagagcggaccggcag

SEQ ID NO: 89898 - RNA, 93 nt, Homo sapiens
agcagccggcagcagcccccggggcaagagcaggagcccggcaccccccgccgacaaggaggcccgggaccgggagcccgggaccgggagccg

SEQ ID NO: 89899 - RNA, 80 nt, Homo sapiens
gaccaacagaaaaaaccaacagacaacaagagcccaaacaagaggcagcaaagcggccaagagaagaccccccaggagag

SEQ ID NO: 89900 - RNA, 78 nt, Homo sapiens
aggcgcggcggcggagcggcgccggggccgccacgccgggaaggaagccgcccccaacgcagacgccacccagagcgg

SEQ ID NO: 89901 - RNA, 96 nt, Homo sapiens
aaaaccgccaaacgcaggcacaaggcgcagggggaaaaaggggcagaccaacaccacccagcaaaaaccccgacgaacgcgccagggagcgccaga

SEQ ID NO: 89902 - RNA, 86 nt, Homo sapiens
ccaggcccagcgggcggcaagagcaggaggcggaggggggaaggcgcccgcgcacaggccccagacacgaggccagcgcagcgacg

SEQ ID NO: 89903 - RNA, 69 nt, Homo sapiens
gccaccccaacgccaaacgacagaggcgagaccaaagccaacaacaggccagaacaagaagcacaaacc

SEQ ID NO: 89904 - RNA, 63 nt, Homo sapiens
aaggaccaagaaccaggccgacaggagggaagaaaccagacaagaaaggaggaaacgcaggaa

SEQ ID NO: 89905 - RNA, 77 nt, Homo sapiens
cccaacggacgccgcgcagggacacggcaccgcgccggcccgccagaacgggcagcaaggccgccgacggcccgcac

SEQ ID NO: 89906 - RNA, 85 nt, Homo sapiens
gggccaccggacgcacccacagcgaccccgcacacacacccaccagccacggcagcccagcggggacccagccgccccgcccgcg

SEQ ID NO: 89907 - RNA, 52 nt, Homo sapiens
cccaagagaacgccacgaaaggaaaaagaagagcacaagaccagcagacgac

SEQ ID NO: 89908 - RNA, 85 nt, Homo sapiens
ggagggcagacaacccgcagccacgcggccagcaccaggcaggcaccccagcgcgaggccacaccgggccgcggagcagcccccc

SEQ ID NO: 89909 - RNA, 73 nt, Homo sapiens
gcaagcaccagcacccgcagcccggaaccacgcaccagacaacacagggggagcaggacaacggccaaaagcg

SEQ ID NO: 89910 - RNA, 75 nt, Homo sapiens
gacgcccgcgggacccggccagggggcaccgaggacacaagggcgagcgcggccggagaggaagcgggggcccag

SEQ ID NO: 89911 - RNA, 84 nt, Homo sapiens
cggcgccgccaggccgacgaaaagcccaagggaggaaaacccagaagagcccagaggggaagggcagaggagaccccgccccaa

SEQ ID NO: 89912 - RNA, 72 nt, Homo sapiens
cagccaaaaacgccgaaacggaaagcccaagaggagacgacgggaggggaccaggagagaagaaggccacac

SEQ ID NO: 89913 - RNA, 72 nt, Homo sapiens
agcccaagagcacaggggaagaagcacagccacgagccaacacaggacgcaaaacgggagagcagagagaga

SEQ ID NO: 89914 - RNA, 79 nt, Homo sapiens
cagcggaagacaaaccacaacaacacagcagagagaggacagaaagcagcaacacgcccagggagcagagaggacagag

SEQ ID NO: 89915 - RNA, 54 nt, Homo sapiens
agagaaaagacacaggagaacgggaggcgcagaaagaggccaggcgaaccagcc

SEQ ID NO: 89916 - RNA, 79 nt, Homo sapiens
gcccgaccaggccaggggagggggcacggccccggccagcccaggacaagaacaaagggcggaccaaaggaccagaccg

SEQ ID NO: 89917 - RNA, 70 nt, Homo sapiens
ggccagcccccccaaaaaggaaagacaccggcggcaggccagccacgaaaagacaccagagcgaagaaca

SEQ ID NO: 89918 - RNA, 79 nt, Homo sapiens
ccgcggagcaaaaaaagagcccgcaagaagaacagagacagcagccaaacccccagcgaaggagcccagagagccacag

SEQ ID NO: 89919 - RNA, 58 nt, Homo sapiens
ccccagagcggcgccgagagacggcgacgaccaggacgagaacgaaaacaaacggaag

SEQ ID NO: 89920 - RNA, 72 nt, Homo sapiens
aaacgaccaagccagagaacagcccccacgcagcccagaagggaccccaccacgccgggacaccaccccagc

SEQ ID NO: 89921 - RNA, 75 nt, Homo sapiens
ggcagcgccgacggcagccggcaccgacggcggaccgacccgagccggaagggaccggaaggaaaggagcgcaga

SEQ ID NO: 89922 - RNA, 79 nt, Homo sapiens
ccccaaccccggcagccccagagccccaggagggacagcgggaaccaccagcgcggagaccgggcagggacggagaagg

SEQ ID NO: 89923 - RNA, 74 nt, Homo sapiens
caacaacaacgcgacaaaggagagaaacagccaaaacagcacaacagccgaccggacagaagacagaccgacag

SEQ ID NO: 89924 - RNA, 75 nt, Homo sapiens
agcacccaacgaccaaagaggaagggagcgacgcgcccacccgacaaagggccgagaggcagagcaccggcaccc

SEQ ID NO: 89925 - RNA, 58 nt, Homo sapiens
ccagagccaccaacaaccccaccagcagcccaccaagccccaagggaggaagaaaccg

SEQ ID NO: 89926 - RNA, 64 nt, Homo sapiens
aggcggcaacgcggagcggagaggaagcgggagggacaggagaacaggcacgaccccaccggca

SEQ ID NO: 89927 - RNA, 70 nt, Homo sapiens
cagcgccggccacccaaagcacgggggcaacagaggggaggggaaggaaagaacacggaaaccacggaac

SEQ ID NO: 89928 - RNA, 69 nt, Homo sapiens
aaaggaaggcggaaaaaaacggggaccaggacaagacggacaaagagaggccgccagcgcggagaagga

SEQ ID NO: 89929 - RNA, 53 nt, Homo sapiens
agcgccgaccgcaagcagccagacccagccgggccaccgacagacagaaagcg

SEQ ID NO: 89930 - RNA, 77 nt, Homo sapiens
ggcggggcgaggcggccgcggggcccgagcgcagggccacgagcagggaggcaagaaccacaacaaccagccaaacg

SEQ ID NO: 89931 - RNA, 75 nt, Homo sapiens
agcagaggagaaagaacagcgacccacagagagagggagaagaacaggaagaagaacggccaaggaaaggccagc

SEQ ID NO: 89932 - RNA, 84 nt, Homo sapiens
ggagagccaccccccaaagcaggacaacggacggccggcagggggagagcgccaccccagcacccaaaccccacagcaccacca

SEQ ID NO: 89933 - RNA, 79 nt, Homo sapiens
gaggacgccagcacgcgcaccccaaagcagcccaaacagaaagacagggagggagaaaagaagcagcccacgaaccccg

SEQ ID NO: 89934 - RNA, 68 nt, Homo sapiens
aaagagaagcagacccagaaccagcaggaaacggaagaggaccacggagcagccacgacacgggagag

SEQ ID NO: 89935 - RNA, 75 nt, Homo sapiens
aggaagagaacaccaagagaaagcagcagcacacaaggaaaggcgagcacacagagaggggaagggcagcagcag

SEQ ID NO: 89936 - RNA, 77 nt, Homo sapiens
cgcaacccagccagccaccaggggagagaaccgaagaggacagacggcccggacaggaggacccagcccgaggacac

SEQ ID NO: 89937 - RNA, 63 nt, Homo sapiens
gcagaacgcaggaggagaacgacagaccggggagccgcacaaagccacagcccgagcacgcgc

SEQ ID NO: 89938 - RNA, 83 nt, Homo sapiens
gagggcgggagcgagggcgagggggcccggaggggcgcccaggccgagcacccaggcgcagacagcgggcaggccagagacag

SEQ ID NO: 89939 - RNA, 85 nt, Homo sapiens
cgcagacggcgggggcacgacagcgcaaggaggccgcacccaaggccgcagacaaggaaagccaggccagaagaaggaaggccgg

SEQ ID NO: 89940 - RNA, 85 nt, Homo sapiens
gccgacggaggaggaggagccccaaacagagagacgcaaacagcagacggaagaccccacggcaaaaccacacccgaggcgagcc

SEQ ID NO: 89941 - RNA, 77 nt, Homo sapiens
gaaacgaccccaccagccccaaaaggcggcaacagccagcagaaaacgagcccggcacagagaacggcagacgaccc

SEQ ID NO: 89942 - RNA, 81 nt, Homo sapiens
caaagccccgcaacgaggggagaggagagggaggagcaacgggggaagccccgaggaagcaggagccacagcaccccaccc

SEQ ID NO: 89943 - RNA, 86 nt, Homo sapiens
cagcagacagggccccacagcaacagaggcacagccaagggggaggaggccagcaggaaaaggcgaggagggacgcgacagaaccg

SEQ ID NO: 89944 - RNA, 80 nt, Homo sapiens
cggaagaggaggaggaggaggaggaggggcagggaggagggacagggagagaagaagaccgcggagccggcaaggcacca

SEQ ID NO: 89945 - RNA, 46 nt, Homo sapiens
aaaagagaagaccagaccaaggcagggcgcgggaacaggacgacac

SEQ ID NO: 89946 - RNA, 64 nt, Homo sapiens
ggaaagcaccgaggcacaacagggaacgccgcagaaagaagaaggggcaagaacagccacagca

SEQ ID NO: 89947 - RNA, 84 nt, Homo sapiens
gcggaggccgccggcgagccgccaagaggcggcgcagccaccccgcgggaacgcccagcgcggaaaaccagcaagaagcgacaa

SEQ ID NO: 89948 - RNA, 105 nt, Homo sapiens
cacgccagccgcaccagccgcccaagccgcacagccgcggcggcagcagcaggagagacgacgacacgcggaggcgccggaagcccccacccaacaagaccccac

SEQ ID NO: 89949 - RNA, 79 nt, Homo sapiens
cagaggcggagcccgcagaccgcagaaggccggagacaccagcagagagcgcccccacccccaggcccgagggacagga

SEQ ID NO: 89950 - RNA, 76 nt, Homo sapiens
gccgccggacgcccccccgcagcgccgagagacgccccaccaggcacagacacccagggggcggcaagaggcggca

SEQ ID NO: 89951 - RNA, 80 nt, Homo sapiens
gagagcagcgacgagaaggagacacaccgagcggcagcgcgaagagacgaacgaagacgcgcagaccagaagcaaaaaaa

SEQ ID NO: 89952 - RNA, 66 nt, Homo sapiens
gccgaagaggccaagacccacaggcacaggaagagggcggcacgcggccagagagcacaacgggag

SEQ ID NO: 89953 - RNA, 67 nt, Homo sapiens
aagacccagacccgcccgccagaaccgcgcgccacccacaaccaggaagaaggaccggggagacagg

SEQ ID NO: 89954 - RNA, 82 nt, Homo sapiens
gccgggcaaaccgaacccgcgccgcaccccacacggcgcaggggacaccaaaacagcccgcggggagagagccaggccgagg

SEQ ID NO: 89955 - RNA, 82 nt, Homo sapiens
ggcagaaaaggagagacgagaggaaaccggaccaggcagacacaccgacgaaaagaagacggaggaaccgaggcccagcacg

SEQ ID NO: 89956 - RNA, 63 nt, Homo sapiens
aaacagcaggcgaaacaagacgcaggaaagcagacccaccgaaggcaagagccagcacaggag

SEQ ID NO: 89957 - RNA, 72 nt, Homo sapiens
agaccacgcaccacgggcgaggaaccaccccaggggcgcacgaaagggcaggaagggaaacaaggccaggga

SEQ ID NO: 89958 - RNA, 77 nt, Homo sapiens
gcccaggccgggcccccagccggggcgcgagccgggagccagagccaggacaaaaccaggcagaaccaacacgaacc

SEQ ID NO: 89959 - RNA, 69 nt, Homo sapiens
agacccaggccgagccgagaggcaagacaacacacccagaaggaccaagagaagcaaagggagaaacaa

SEQ ID NO: 89960 - RNA, 69 nt, Homo sapiens
ccgaacgcaaggaaacaggaacccaaagccggccagaccgaagagcaggcggggcggggaaggagacac

SEQ ID NO: 89961 - RNA, 79 nt, Homo sapiens
gggagagagagcggagccggaacagcaaaacaccagaaagaagaggcaccccaccgaaggggaacgcaaggcggggaaa

SEQ ID NO: 89962 - RNA, 68 nt, Homo sapiens
cacgcggccagcgaaaacgcccaggcaaaaccacggaccccagcaggcaccaccaagaggcaaagaca

SEQ ID NO: 89963 - RNA, 88 nt, Homo sapiens
gaacggaagaaagccagaacagcaagaaacaaacgcacccagaaacaagacccagagcaggacggacaccgaaccggcggcgaggccc

SEQ ID NO: 89964 - RNA, 79 nt, Homo sapiens
gcgcgccccccaccgaaccaagcaccgggagcccgccgccccgaaaccaccgcgagcggagcgcagaggcaggcgggcc

SEQ ID NO: 89965 - RNA, 74 nt, Homo sapiens
gaaaggaaagaggaaaagagaagaggaagaaaaaaggagaggacagaaagcgcaaagaggacaagaagggcaga

SEQ ID NO: 89966 - RNA, 73 nt, Homo sapiens
gacccgccaccaccaaaaaaccaccccccagggcggagaacggaaaagcaccaggaagcagagaggaccgcag

SEQ ID NO: 89967 - RNA, 68 nt, Homo sapiens
cagcagcaaggccagcaaccgcacagcccaagggcaagaaagccccacaccgggcccggggggaggcc

SEQ ID NO: 89968 - RNA, 55 nt, Homo sapiens
cgggcacccccaggggaccaacccaggggaaaaccaaaagaggccgaacaacggg

SEQ ID NO: 89969 - RNA, 73 nt, Homo sapiens
agacaccgcaccgcacgaccccccacacgacccccagggaacaaagagcagaggccagcagccaccgacagcc

SEQ ID NO: 89970 - RNA, 64 nt, Homo sapiens
cgcgcaggccgcaccacgcgaaccggacggcccaccacgacgggcgcgcccggagaggaggaag

SEQ ID NO: 89971 - RNA, 67 nt, Homo sapiens
aaggagaacgaaaagagagcaaaacagaaggcacagaagagaaagggacacaaacccagaaaacggc

SEQ ID NO: 89972 - RNA, 57 nt, Homo sapiens
aagggaaaagcaccggggacaccagccaggagagaaccagaccgggcggagacaagc

SEQ ID NO: 89973 - RNA, 80 nt, Homo sapiens
cgccgcaggagacgagaggacgggaccaggcgaagcggccgagcaggcgagcgaacgacgggccaggacaggacaggacc

SEQ ID NO: 89974 - RNA, 75 nt, Homo sapiens
agagcaacaaccgggccacaagagaaagagcacggcgaagcaaagagggcaaccccaaaaggaggggaagcgcac

SEQ ID NO: 89975 - RNA, 77 nt, Homo sapiens
ggaggccgagggccaggcccacgaggggaaccccgcgggagcaaacacacgaccacagacgacaaaacggaacaagg

SEQ ID NO: 89976 - RNA, 85 nt, Homo sapiens
ccccgcccccgccgccgcgcacaaccgcacggcagggaaagcaggcaggagggagagcgccgaagaaccaccccccgccccgggc

SEQ ID NO: 89977 - RNA, 79 nt, Homo sapiens
gggaacaggaagacaacaaagaaagaaacaaggcaggagcagggacggggggaaaagcgcacccgggcccgggcgagaa

SEQ ID NO: 89978 - RNA, 65 nt, Homo sapiens
gaggagccgagacaggacagcaccccagaaggagaacccaagccccgggacaacaaggcaaagcg

SEQ ID NO: 89979 - RNA, 98 nt, Homo sapiens
aaagcccagaaggggagccagccccgcagaagaaagcgaggccacggaagaaagggcaggcgagagagggggaacaggaccaacggaacaacacaggg

SEQ ID NO: 89980 - RNA, 93 nt, Homo sapiens
gcgagcagccagagacagcccagacagggccccgggacacggagcgacggcagcccccagggagccggcccaggaggacagaccggaacaccc

SEQ ID NO: 89981 - RNA, 80 nt, Homo sapiens
ggagggcagggaggccgcgggcaacagccccccgccggcggccggggggcaacaacgccggccacacggggggggaggga

SEQ ID NO: 89982 - RNA, 85 nt, Homo sapiens
ccgggacggaccgagaccggaccgagagcggaccgagagcgcgaaacgcacgagaaggggacccaccacacagaggacacaagaa

SEQ ID NO: 89983 - RNA, 58 nt, Homo sapiens
aggagagggaagggagaggcacacccggcagaccacacgagcgaagcggagcaaaccc

SEQ ID NO: 89984 - RNA, 113 nt, Homo sapiens
caggccggagagagaaggaagaacacccccaccggccaggcgagaaaggcagaccacacaacaaagacgcgccgaggaaggggaagggccagagcggcaacaccaaccagagg

SEQ ID NO: 89985 - RNA, 75 nt, Homo sapiens
aggacaagaaaccgagccacgaccgccgagaggccagggccccgggcgcgggagccagccgaagaaaggaaaaga

SEQ ID NO: 89986 - RNA, 72 nt, Homo sapiens
ggcggagaggcaaagacagaggagcccgccccggggaagggacaacagcagagaaaggcgggacgacagcgg

SEQ ID NO: 89987 - RNA, 76 nt, Homo sapiens
acagagagcagcagcgcccggacgcccagaaagggcgacaggccaccaacacacgggcgcgagaaacagggaaacg

SEQ ID NO: 89988 - RNA, 75 nt, Homo sapiens
caaagagccaacggcaaacgggaagaagagcaggcagcagccaaaacacgacaacaaggacgacacaggaaagca

SEQ ID NO: 89989 - RNA, 71 nt, Homo sapiens
gccccaagcgacaggggagggacccagggcggagaacggaaaagcaccaggaagcagagaggaccgcagaa

SEQ ID NO: 89990 - RNA, 73 nt, Homo sapiens
ggagagagagaagccggcggaagggcagcagaaccagccacggggacaggaacgaagccagacaccaggacag

SEQ ID NO: 89991 - RNA, 78 nt, Homo sapiens
ggggcggcgggcgcgcgggaggccaagaccgcggggaggagccgcagcgccagcaccaggcccaccaagccgagaaca

SEQ ID NO: 89992 - RNA, 53 nt, Homo sapiens
gggccccaacccaccaaaagcacagacagcggaaagacccaggggagcagagc

SEQ ID NO: 89993 - RNA, 76 nt, Homo sapiens
gaaccgcaagcggccaagcacaaagagcgccccacgagagaacggcacacgcgagcgacgcaaacagcagacggaa

SEQ ID NO: 89994 - RNA, 69 nt, Homo sapiens
aaaaaggcccccccacgcaaagagacagggaaaagagggccccacggcccaggagccggagagcacagg

SEQ ID NO: 89995 - RNA, 50 nt, Homo sapiens
ggacaagcacaacacgcaaaacccggggaaaaggaaaccagaagagggac

SEQ ID NO: 89996 - RNA, 76 nt, Homo sapiens
gagcccaacaccacccgagagccccaagaggcccacaggcaaggggagcccgagaggccacacgggagagacagca

SEQ ID NO: 89997 - RNA, 47 nt, Homo sapiens
gaagaccaaacccggaaagaaggcaccgaagccccacacgcggcccc

SEQ ID NO: 89998 - RNA, 81 nt, Homo sapiens
agaaaagaagaagaagagggaaccccagcgccaaaggaccgaagaggcaaagagcgcgaaacgaaagaaacccagaaacaa

SEQ ID NO: 89999 - RNA, 73 nt, Homo sapiens
acacggagaccaggcaagcagggaccggagggaagaagacccaaagaagggcgacacaacgcccccaggagag

SEQ ID NO: 90000 - RNA, 77 nt, Homo sapiens
gcgacgccgggggcgcagaccgggcaagaccacccgcaagcacgcggaagaagaagcgcacaaggagcacaacaggg

SEQ ID NO: 90001 - RNA, 73 nt, Homo sapiens
ccggggcggcccggcggagacaaaagcacccagacaaaaaccggcaagagacaaaacacgacacagagaccga

SEQ ID NO: 90002 - RNA, 78 nt, Homo sapiens
agccgaggggcacaccagaacaacacacaaaggaagaccagaggagagaaacaaggaacccgaaaagcgaacaacccg

SEQ ID NO: 90003 - RNA, 75 nt, Homo sapiens
agacccaaaaaaaagaggagcagcaggcacagcacgggcagagccagaaaaggaaccaggaacgcgggaccccca

SEQ ID NO: 90004 - RNA, 60 nt, Homo sapiens
aggaggaagcaggagcagcccaagcgccccccacgcaggaagaggagaggcggacgcagg

SEQ ID NO: 90005 - RNA, 86 nt, Homo sapiens
caaagaagaaagcccacagagacacaaccggagcccagagccacgcaaaaggcgacaggaagaagggaacagccgccggaagccga

SEQ ID NO: 90006 - RNA, 67 nt, Homo sapiens
gcggaccagccagccagagccacccggaagacccaccaccaaaaaaaaagccaaccaacagaagacc

SEQ ID NO: 90007 - RNA, 57 nt, Homo sapiens
cgaacggagagccagccgggaggggggaggggaacagcagcggagaacacggcagag

SEQ ID NO: 90008 - RNA, 71 nt, Homo sapiens
acgccagcggagaacgcggcaaagcgagacacgagcaagaagccaaaccgacccagaggcaaggaaaacag

SEQ ID NO: 90009 - RNA, 73 nt, Homo sapiens
accagacgcagaaaaccaggaagggaacaccggcagagagagagacacaccagacgagaaagcgacggagcgg

SEQ ID NO: 90010 - RNA, 77 nt, Homo sapiens
ccaagaagccggcgaagacgaagggccccaccacgacacagcaagagaagggagggaaggaggacgcgcaccgagga

SEQ ID NO: 90011 - RNA, 72 nt, Homo sapiens
cagccccccgcggcggcagccacagaggagagacaggcggcgcagagcagaaaaccagccggagcagcaggc

SEQ ID NO: 90012 - RNA, 85 nt, Homo sapiens
aaaggagcacaggcgggagccaaggacacccgagaaaagaagaggagcacaggcagccaaggcaagcaaggaagaggagaaaaga

SEQ ID NO: 90013 - RNA, 80 nt, Homo sapiens
gcgaggcggcggcgcccggagggcagcgagggagcacaaaagaacaaaagggaaaaaaggacggcagcacacaacaaaac

SEQ ID NO: 90014 - RNA, 69 nt, Homo sapiens
gccgcaacgcaagcggggccacgaaacaaccagaacggagagggccgaaaagggcccggaagaccagca

SEQ ID NO: 90015 - RNA, 82 nt, Homo sapiens
gggggacaccaccggaccccgacccgccgccggcccggccgcgcccgggaaaggggggagaaagaagacaaggaaagaacac

SEQ ID NO: 90016 - RNA, 74 nt, Homo sapiens
cgagaacaaaggagagaggaccacccagaggagcaacgacacgaggaggccagagaaacaagcaagcggcacca

SEQ ID NO: 90017 - RNA, 70 nt, Homo sapiens
ccggaaaaaaagggcggcccgaaggcaaggaagaagcccagggcacggccaggggggaaacgccagcagg

SEQ ID NO: 90018 - RNA, 81 nt, Homo sapiens
aacacgaggccacggggaaacacagcagaacacagacccccccagcgcccgccccagcacccgaagacgccgacaacgcag

SEQ ID NO: 90019 - RNA, 69 nt, Homo sapiens
gaagggcagggcgagcgcccccgccagggccgaccagggacgccagaggggaagccgcacgagggagag

SEQ ID NO: 90020 - RNA, 86 nt, Homo sapiens
ccgaggggagcgcggggcccggcagaaagggccagaacccgggagcacagaacgggaagagagcgagccccagagccccggaagag

SEQ ID NO: 90021 - RNA, 66 nt, Homo sapiens
caggagccggcgcccccgcccgaggaacgcaagcagaaagaccgcaaagcagcagcacgaacaaaa

SEQ ID NO: 90022 - RNA, 77 nt, Homo sapiens
gcggcccgccccgcggcccaggccgccaggcacagagaaggcaaacgggagggcgaggacaccaagagcagcgcgga

SEQ ID NO: 90023 - RNA, 74 nt, Homo sapiens
cggagccggaggaaaggacaagcacaaaggaaaagagccagcaggcaacagggcggggcacggaaccggggaag

SEQ ID NO: 90024 - RNA, 81 nt, Homo sapiens
gcaccggaaaggccaccagccccacaaagggaaggccgaagacgcaaccaaccaaaacagccagccgcagagaccccaaac

SEQ ID NO: 90025 - RNA, 85 nt, Homo sapiens
ccagaagacgcgcgcgcaggacgaagagccagaagcagcaggaccggcggaggagcgagagcaggacagaggaccagcgacaaac

SEQ ID NO: 90026 - RNA, 81 nt, Homo sapiens
cgagcaggcgccgccccagcccgcgaacggacagagcgggagccaccagcgccaaagggaagccaggagcccgggggcacg

SEQ ID NO: 90027 - RNA, 70 nt, Homo sapiens
ccgagaagcggggcaccacgaaggaccgaagagagaaggaacagaacagacaccaccgaaacgcgccaag

SEQ ID NO: 90028 - RNA, 72 nt, Homo sapiens
cgcgcacaagggcagagggccagagcccagaaaagagggaaggaacaaagcagagaaaccaaaaggccagac

SEQ ID NO: 90029 - RNA, 102 nt, Homo sapiens
cgcggagaaggagaggggaccgcccggacacaagaaaaagagcgaaaaagacacgccgggacggcaccaggacaagcgagggagacacgggcggaagccgag

SEQ ID NO: 90030 - RNA, 42 nt, Homo sapiens
gccagccgagcaccgcagcggagacgcaagaagaacacgaag

SEQ ID NO: 90031 - RNA, 68 nt, Homo sapiens
agcgccggaaaccaacaaggcggcgaggaagcacagcaccaggcccgggacgcggacagaacaaagcg

SEQ ID NO: 90032 - RNA, 71 nt, Homo sapiens
cacccagaagaacgcccagcaggagagagggaagcagaaggaagagaacccaagaccaagaagaaggaaag

SEQ ID NO: 90033 - RNA, 84 nt, Homo sapiens
gcccagagcaagacgaaagggggagaacaaggaggcacagcaccccgaaaccccggaccaacacaaaggggcacacacgcgcac

SEQ ID NO: 90034 - RNA, 57 nt, Homo sapiens
agcgcgcggagaaccagagaagccggggccacagggaacggggggcagcggccccaa

SEQ ID NO: 90035 - RNA, 73 nt, Homo sapiens
cccggcgaaggagcgcaacccaggaaggagacgaggagggcagaggccggaggcgaagcaagcaggcaaagag

SEQ ID NO: 90036 - RNA, 71 nt, Homo sapiens
aaaccacagacacgagggaggacagcaaaaaccagggcccacagaggagcgggggggccccacaacaaaag

SEQ ID NO: 90037 - RNA, 76 nt, Homo sapiens
acaggaaggagggggaagacaggccagccgacacgggagacagggcgagggcagaaagggcccagccggcagaggg

SEQ ID NO: 90038 - RNA, 82 nt, Homo sapiens
ccggagaaacgaggagccagaagcagcgcagcaaacaagcacgaagaggaacggagagaagcgcagggacacaaagagagcg

SEQ ID NO: 90039 - RNA, 62 nt, Homo sapiens
cccgccccggagcccgagaagacagacagcacccaagaaaacccaggccgcgaaggagaaga

SEQ ID NO: 90040 - RNA, 67 nt, Homo sapiens
gccgggggaaggggaaaccggaccacacgcgccgaagcggaggcccggcagggcagagacacccaag

SEQ ID NO: 90041 - RNA, 36 nt, Homo sapiens
ccaaggcgccggaaggacggcggaggcagggcagac

SEQ ID NO: 90042 - RNA, 72 nt, Homo sapiens
ccagcccccggaagaaaagggcccgggagaccacggaaaaggcggacgcagcccccaacccgaccggcaacc

SEQ ID NO: 90043 - RNA, 78 nt, Homo sapiens
gggcgcaagagcagcgaagagcaggaggaggaggagcagaggcggaagcggagaccccggaggccccaggcaagaaaa

SEQ ID NO: 90044 - RNA, 84 nt, Homo sapiens
cgccaccccgggagcagaaggaccgaacccaggagcccgcacggacagagcgggagccaccagcgccaaagggaagccaggagc

SEQ ID NO: 90045 - RNA, 52 nt, Homo sapiens
cggggcccaggaacggaaaagggcagccgcacggacaacggcaagcggagaa

SEQ ID NO: 90046 - RNA, 70 nt, Homo sapiens
gagaacgcgcgggcccacgcgcacacgaccaagccacggagaaccagaaggagagcaccacccccacaga

SEQ ID NO: 90047 - RNA, 87 nt, Homo sapiens
cggagagcagcagccgcccgccaaccccaggggaccagaggaaccagcccgagcggggcaaaagcagggcaacggcccggccaaagg

SEQ ID NO: 90048 - RNA, 78 nt, Homo sapiens
aaaccccaacacagagccaagcgccaaaggacgccagcccggcagaaggcagaagcacgggggacaagcaccagcaga

SEQ ID NO: 90049 - RNA, 58 nt, Homo sapiens
gccgacccaacaggcgggcgccaggcaccagggcccggaagaaaacccgcggccaggc

SEQ ID NO: 90050 - RNA, 38 nt, Homo sapiens
caaggcccaagacccaggcgaaaaggcccgccgagaca

SEQ ID NO: 90051 - RNA, 38 nt, Homo sapiens
cgaaagacccagacagacagagcgcgggggccgcccgc

SEQ ID NO: 90052 - RNA, 80 nt, Homo sapiens
ggaacggcggagcagggagcccaaagaccccggagacagaaaccacgcaacgggcacacacggcaacgccccgacaggga

SEQ ID NO: 90053 - RNA, 70 nt, Homo sapiens
acaaaaccagaaaccgcacgggaacgcgcaaaacaggaaagcaggcggagacaggcaaccagcaggacga

SEQ ID NO: 90054 - RNA, 80 nt, Homo sapiens
accgcagcagggggcagaacccagaggcgggaggggccgggaggcagaggggcagggggaaacagcccaggcacaggaag

SEQ ID NO: 90055 - RNA, 78 nt, Homo sapiens
acgggcggccggccgacccccgcgcgacggcgacgcgggaggccagacagacaagagaagagaggaaaagaaacccgg

SEQ ID NO: 90056 - RNA, 84 nt, Homo sapiens
gcggcgggaggagccgccccgagacaccccaagagaagcacggagagcccaagaagcaggcagccccgcgggccggagcggcgg

SEQ ID NO: 90057 - RNA, 75 nt, Homo sapiens
cagcgggccggaggagccagagcgcagaaagaggaaaagggacaagagccggccgggaaacccaaagagaacagc

SEQ ID NO: 90058 - RNA, 98 nt, Homo sapiens
agaggccgaccgagacgggcggagaggagaaggacaggagcgcgggcaagcagccaagacggcagaaagggaagaaaaggagaagcgaaagaggaggc

SEQ ID NO: 90059 - RNA, 43 nt, Homo sapiens
gggacaagacccgccagaacagaccgaaggacacagcccgcag

SEQ ID NO: 90060 - RNA, 78 nt, Homo sapiens
acaacgccacgacaccggcacccagcaccacccggaggagaccggcagcagggaggcagacagaaaaagaaacgcaag

SEQ ID NO: 90061 - RNA, 76 nt, Homo sapiens
ggaaacaccgaagggaagaacacaccagggcagacacgaaaaaagcacgggaggggagagagaaccggcacaccgg

SEQ ID NO: 90062 - RNA, 74 nt, Homo sapiens
gacgccggagcaaacgacgagaaagcccacagccaaagccgggcggacgcgaacagggaagcggaaccaaaaaa

SEQ ID NO: 90063 - RNA, 75 nt, Homo sapiens
gagggaagggaacggaaacagaggaggaccccaggaaaggcaggaaagggcagaaacacagaaaaagaaaagccc

SEQ ID NO: 90064 - RNA, 69 nt, Homo sapiens
aaggcgagagaacaaagaccacacaggaaacaaggaaggagcccaaccaggaacaacaccaaacaccgc

SEQ ID NO: 90065 - RNA, 75 nt, Homo sapiens
gagcagaaaaaagaaggaagcccaaagacgcaaaggaacgcggcaagagaggagaacaaaccccagcaaagaggg

SEQ ID NO: 90066 - RNA, 72 nt, Homo sapiens
gaaagccgacaaccacacgaacagacaaccggaggaaaaggcccaggcgagaaagaaaccggaagaaagaga

SEQ ID NO: 90067 - RNA, 65 nt, Homo sapiens
gcccaaggggccggacacgccgccgacaaggacgagcagaaggccaacggaccacaccaaaagcc

SEQ ID NO: 90068 - RNA, 77 nt, Homo sapiens
cccgaacacgaggaaggacaggcaggagaggcagcaggacaagggaaccggaagccgagaaagacccgaccagaggg

SEQ ID NO: 90069 - RNA, 56 nt, Homo sapiens
aaaggggaacccaccgccgcagaggaaaaccgccgccggggccagcaagaacaaaa

SEQ ID NO: 90070 - RNA, 109 nt, Homo sapiens
cagacacgagaagcaaagacagggacaggacagcgagcgaggacgaggaacggcggcccagacccagccggaccgcccggaaaagaagacccgagagagagccacgcag

SEQ ID NO: 90071 - RNA, 61 nt, Homo sapiens
gagccaggcccagccggaggccacccgggccagcacgaggagacgggaacagagaagcgag

SEQ ID NO: 90072 - RNA, 83 nt, Homo sapiens
gaaggcgacaaggccaagaccgccagcaaaggaagacgagggggggccgcccgcccaaggcaggaagaggggccgcaaagaag

SEQ ID NO: 90073 - RNA, 71 nt, Homo sapiens
gaagaagacaggcacgaaacccaaaaagcaaaaaacgcccacaccagaggccagcacaaacacgggaacgg

SEQ ID NO: 90074 - RNA, 74 nt, Homo sapiens
gagagccacggagaagaagcgcggcccacacacccagccgggacgcaggagacagcccacaccggcaggccaac

SEQ ID NO: 90075 - RNA, 74 nt, Homo sapiens
cgggaaccccgcgaagggccacaagccgcagaagacagggaggcagagccgagccagagggacgaggcaggaga

SEQ ID NO: 90076 - RNA, 67 nt, Homo sapiens
cgccccaggaagcagaagcggagacagacgggaggggacacggacgcggaacgcacagcacccaaaa

SEQ ID NO: 90077 - RNA, 55 nt, Homo sapiens
gagagaggacccccccccccccccaagccaagcaaggccggacagcacagggcac

SEQ ID NO: 90078 - RNA, 53 nt, Homo sapiens
gaaaaggcagcgcaaccaacccagcccgaaaggaagacagaccgcgaggccac

SEQ ID NO: 90079 - RNA, 75 nt, Homo sapiens
cgccgaggagagccccagcgcagcaaagagccggaaccgcccagagagcagccaaacgagggccccgacgacaca

SEQ ID NO: 90080 - RNA, 92 nt, Homo sapiens
cggaggcacagcgcagcgacgagagggaccaggggcgcaagggacccacgaaggagaagcgggggccaggccgaaaggcccggaagcagaag

SEQ ID NO: 90081 - RNA, 52 nt, Homo sapiens
acgaagcccggccacccccagccccgcccccacagcgaaccccaagcccgac

SEQ ID NO: 90082 - RNA, 62 nt, Homo sapiens
acccgacccagagcccccgcccggggagaaaagagcagggaacagaaccggggccgagggag

SEQ ID NO: 90083 - RNA, 73 nt, Homo sapiens
aaaagaaacaaggaaaaaagaacacaaagaaaagaaaaaccgagaccacaagagagaagagaggggcaccgga

SEQ ID NO: 90084 - RNA, 77 nt, Homo sapiens
gaaaagcaacggggaaggcaaacgagaagcgggccaccggacccaggacaacaaagcgcgcagaaacccaagggaaa

SEQ ID NO: 90085 - RNA, 76 nt, Homo sapiens
ccccagcggccccggcccccggcgccccagcgaggaagaaccggaggcacagaagacccggcgcgggagcagaaac

SEQ ID NO: 90086 - RNA, 80 nt, Homo sapiens
cagaaaggaccgaaccaagacacaagaaaaggaaggggagaaaggacccagccacagagaccgaggagcccaggaggagg

SEQ ID NO: 90087 - RNA, 73 nt, Homo sapiens
agagagacgcccggagcggggacaacccaaagacggccaccgcgcaggaccagcaccacggcggacagccaaa

SEQ ID NO: 90088 - RNA, 66 nt, Homo sapiens
aaagagggggaacgaagcagaaccggcccgccgcccggagcacggccacaagcccccccggaacac

SEQ ID NO: 90089 - RNA, 76 nt, Homo sapiens
ggggggaacagggacagacgccccacacgcgcccggggcgaggagcccacgaccaccagagagcgacagggaaaga

SEQ ID NO: 90090 - RNA, 76 nt, Homo sapiens
agacaccacgcaaacaaagagcccagcaagaccacgacacgagagcgccgccagccggaaggagacacggccaccg

SEQ ID NO: 90091 - RNA, 77 nt, Homo sapiens
accgcaacacggcgcggaaaacgcgaacgggagcaggaaggagagaagggaaggacccagggaaaccggagacacag

SEQ ID NO: 90092 - RNA, 81 nt, Homo sapiens
agcccccccaagcccacagcaggcaacggggaaaaaccccagccacccaagaagaaccgcggaggccgaacccgccccgag

SEQ ID NO: 90093 - RNA, 65 nt, Homo sapiens
agggaacccgcccgcaaaaggccacaaaacggaaaagcggcggacagggcagaccgccagcagca

SEQ ID NO: 90094 - RNA, 80 nt, Homo sapiens
ccggagaacggccaggcggccccgagcggaacggagaaagcgaggaagagcccacagagaaaaaaccacaggacaaggga

SEQ ID NO: 90095 - RNA, 58 nt, Homo sapiens
aggacgaggccgacagcacgccgagaagaccgcggaccaggggcaacaggccggcgcc

SEQ ID NO: 90096 - RNA, 77 nt, Homo sapiens
gccgccgcggagggagaggcgcagagcgagggcaggaggcgaaaacgcaaacaagagagcggggcagggaaccagca

SEQ ID NO: 90097 - RNA, 79 nt, Homo sapiens
aggaggaaggggggccccaaacgaggcagcacacggaacggaccccagggaaagaggccccgggaccaaggacacgcag

SEQ ID NO: 90098 - RNA, 78 nt, Homo sapiens
gagaagggggagaaaaggaacagaaaaggaagcgacacagcaagacggagacagcagaaggcagaaccgcagaaccgc

SEQ ID NO: 90099 - RNA, 61 nt, Homo sapiens
ccgcaagaggagggccccacagaaccgggcaccaggcacgaacccgagaaaacaggcaacg

SEQ ID NO: 90100 - RNA, 83 nt, Homo sapiens
acagaggccagcgcgcgcaacacaagacaagaacccacgagagccgcacagccacacgggggagcccgcccccggggacccgc

SEQ ID NO: 90101 - RNA, 59 nt, Homo sapiens
cgcgaaacccgaaccaaagggacaagcaaggggccaaggagccaaggaggaaacccaca

SEQ ID NO: 90102 - RNA, 73 nt, Homo sapiens
accccacacggaagaacgaaggcaaggaaaggacccccgggacacaccaggaccgggagaacgaagaggagcg

SEQ ID NO: 90103 - RNA, 71 nt, Homo sapiens
ggcagcggagaaaacaaccagggccgagaagaagcggggacggcaaaacagccaacggaacaccaaggaaa

SEQ ID NO: 90104 - RNA, 83 nt, Homo sapiens
gaagggaagaggcccagccggcccgcgggggagccccgggagccgcacggacccaaagacaggaccacgcaccagcagagaag

SEQ ID NO: 90105 - RNA, 39 nt, Homo sapiens
ccaagacggaaccagccagggaaacacaaagaagacacc

SEQ ID NO: 90106 - RNA, 70 nt, Homo sapiens
cggaaccaaagccagccggcaacgaagacgcagggaggcgcagcagccccagccaggcaggaaacacccc

SEQ ID NO: 90107 - RNA, 73 nt, Homo sapiens
agccaggcagaccccgggcagcagggcgggacaacacaagggaaccaaggagggcgccgcgggcgcgccgccg

SEQ ID NO: 90108 - RNA, 70 nt, Homo sapiens
cagacaggcaggcaaaaacaggagaccgcggccgaccagagaacagcgaaacagagacaagagcacggga

SEQ ID NO: 90109 - RNA, 77 nt, Homo sapiens
ccacacccaggcagcaagggcaccgcgagcaagggggaaaccgaggaaccaagcgaaacgggagacgggcgcgacgg

SEQ ID NO: 90110 - RNA, 66 nt, Homo sapiens
cgacaccagcaacgcccaggagcaagacaggggaggccaaacagcagccaaacccccgaaggggcc

SEQ ID NO: 90111 - RNA, 120 nt, Homo sapiens
gcagcccccggagccagaggagaggcgcccccgccggccgccgcgccgcccggcagcccggcagccgcgccaaggaggcgaagcgccgcccgcacccaagccagcaccccggaccggaaa

SEQ ID NO: 90112 - RNA, 71 nt, Homo sapiens
gaggggcaccaaggcccgagccgggaggagagcagcaagaagcgccaaacgcgagcgcacaagaggagcca

SEQ ID NO: 90113 - RNA, 70 nt, Homo sapiens
agagggcagacggacaagagcgcggaacaggacgccccgaaccagcgccgaagaaggacgacagggccac

SEQ ID NO: 90114 - RNA, 84 nt, Homo sapiens
caaggaaccgccgcgggaggcaacgaggagaagaggaccgggaaacgcggccccggcagcaaggaggaaaacgaaggcacacag

SEQ ID NO: 90115 - RNA, 51 nt, Homo sapiens
ccgccagagacacagaggcccgaagaagccgaagcccaagagcacccccca

SEQ ID NO: 90116 - RNA, 60 nt, Homo sapiens
cccggagccggccagcgcaccaaccaggaaaggagcagcagaacgaaggaagaagggaaa

SEQ ID NO: 90117 - RNA, 61 nt, Homo sapiens
ggagccaaccgcccaggaaggacaaagcacacgccccacgggcgagaagacacggccagcg

SEQ ID NO: 90118 - RNA, 88 nt, Homo sapiens
aacaggagaagaaccaaaagaaacacaaacaaacgcaaaggaggaagaagggggaaagggaaaagaggaagagagaaacagagagaag

SEQ ID NO: 90119 - RNA, 81 nt, Homo sapiens
cccaggcagcacagggagcccaagcccagaaaccacacccaaaggccgccgcgcccagcagacccgacccccacacaccgc

SEQ ID NO: 90120 - RNA, 80 nt, Homo sapiens
gcggcggcgcgccacccgccccgcaggagaggaggaagaaaggagcagagaggcgcccaagccgaggacggaagcaaaaa

SEQ ID NO: 90121 - RNA, 72 nt, Homo sapiens
gcaggaagaggaggagagggcgggcaggaggcgccaaagggcgaggcccaccagagcaaaacgcggaacgaa

SEQ ID NO: 90122 - RNA, 82 nt, Homo sapiens
cgcacggagcgggcccgggccagaggcagaaaacggacggaagaaaaggcggccggcggccccagccccgcagccccgcccg

SEQ ID NO: 90123 - RNA, 72 nt, Homo sapiens
gagaagcaggaagggcaaacacgcagacgaaggaggagacacacagccccagacgggaggaaaaaaggaagg

SEQ ID NO: 90124 - RNA, 80 nt, Homo sapiens
ccgcggccgacgacgcgggagagccgcccccaggcggaagcacagcccgacagaccgaagaaaagagaaacacaagagga

SEQ ID NO: 90125 - RNA, 67 nt, Homo sapiens
accagcggccagaggcaggagacggccccaaaaagcaaccccacaccccggcgagggggaaaaaccg

SEQ ID NO: 90126 - RNA, 80 nt, Homo sapiens
gcgaccgagcgggcccggagccaccggcccagccaaaccagaaaggggacagcggcgggcagggagcacggaaggaacca

SEQ ID NO: 90127 - RNA, 82 nt, Homo sapiens
gggacggaccgagaccggaccgagagcggaccgagagcgcgaaacgcacgagaagggggcggcggcaggaggcgcgccacgc

SEQ ID NO: 90128 - RNA, 83 nt, Homo sapiens
acacggaccacaacacaacgccaaggacaagacgggagacccgaaacagcagccagaagcccagggggcccaggacggaaaac

SEQ ID NO: 90129 - RNA, 82 nt, Homo sapiens
gcgaggccagagaaagagaagcggcacccccaggaagcgcgaacaagcacaagcccggcggagcccaccaccacggcaagca

SEQ ID NO: 90130 - RNA, 71 nt, Homo sapiens
aaggccagagaagcgggaaaaaagacagagggaaagcacggaacacggggaagcacgcaggaacagaagac

SEQ ID NO: 90131 - RNA, 75 nt, Homo sapiens
cgaccccccgaacggaccccgcgagcaccagagcggcgaacacgccgacagggccaccgaaagacacagggaggg

SEQ ID NO: 90132 - RNA, 78 nt, Homo sapiens
ccacaaggcaccgccgaggaagaaccggccccccagaacgagcccgacccaggacaggacccagcgcgggacagccag

SEQ ID NO: 90133 - RNA, 38 nt, Homo sapiens
acccacgccacaccaccccccaggcccaggacacacaa

SEQ ID NO: 90134 - RNA, 77 nt, Homo sapiens
aacaccagaaagagccaccgcaccggacccgccagagggggggaagaaacgacacggcccccaggccagcggacagg

SEQ ID NO: 90135 - RNA, 83 nt, Homo sapiens
caaacaccacgagaaccgcagcccacacgagccgccggccgacgagacacgccggaggaaacagacgcacgggaaacacaagg

SEQ ID NO: 90136 - RNA, 77 nt, Homo sapiens
cggcgggcggggccgagggccgcgggcgccaggaggggggcgacaagggaccaacacgagcggccaacaagcccacg

SEQ ID NO: 90137 - RNA, 81 nt, Homo sapiens
accgaggcgcgggagccgcaccaccaacgcggccgacaacagccggcgccgccacggccacaaccccgcccacaggccccg

SEQ ID NO: 90138 - RNA, 51 nt, Homo sapiens
ggaaagcagaagacaaaacaggggcaaccgcgcaacggcgccggaggacag

SEQ ID NO: 90139 - RNA, 70 nt, Homo sapiens
agcagagcgcaggaaagacaagccgggagcagacaagagggaacccggaacaaggaaacaacggaaaagg

SEQ ID NO: 90140 - RNA, 76 nt, Homo sapiens
gacaagcagagacgaaccaggcaaaggggacggaaagagagccgcagcgcagaacaagggaaaaaagggcaaaaag

SEQ ID NO: 90141 - RNA, 79 nt, Homo sapiens
gaaaacacggagaccaccccagcacgaacagacagacccagaaaacacccgacacgaagaccagaaccaaaaccagaca

SEQ ID NO: 90142 - RNA, 76 nt, Homo sapiens
cgaagcccagggaaccaccaaccccaggcgcgacacaaaaacggggacggggcaggaagaagccccagaccacagc

SEQ ID NO: 90143 - RNA, 70 nt, Homo sapiens
ggccccaagccaaacgaaccagaagaaggaaccaagaaaggcagagggggcgagggaggaaagggggcaa

SEQ ID NO: 90144 - RNA, 90 nt, Homo sapiens
ggcggcagagccgaacgcgagggcggcgcccggggacggagcgcgcgcaaaggaggaagagcaagcaggcccgagggacaaagaaggcag

SEQ ID NO: 90145 - RNA, 61 nt, Homo sapiens
aaagcccaggaagccgccgaaccaggagaagacacggcaccggagggggcggcccgaccga

SEQ ID NO: 90146 - RNA, 72 nt, Homo sapiens
cacccgggcgcggccacacgcgacgggggagccgcgggccgacgcccgccgcggccggggaacaggccacag

SEQ ID NO: 90147 - RNA, 71 nt, Homo sapiens
ccaagccgggccgcccgcggcggaccaaaagccagccccacggaggaacccgggaccggccaccccggccg

SEQ ID NO: 90148 - RNA, 36 nt, Homo sapiens
aaccaaggaaaagaaaggcccagaaggggaagaccc

SEQ ID NO: 90149 - RNA, 49 nt, Homo sapiens
gcgggaggccagaggaagggggaaagacgaagggcgggaccgcaaaaaa

SEQ ID NO: 90150 - RNA, 70 nt, Homo sapiens
gagaaaagaccgccggagaaaagacaggaagggaaggggcggagacgggcggaacgcaggaggccagagg

SEQ ID NO: 90151 - RNA, 79 nt, Homo sapiens
ccggcgcccgcgccccggcggggggaagcccgcgccgccggcaccagagccccgggcaaggggagcagacaacaaaacg

SEQ ID NO: 90152 - RNA, 87 nt, Homo sapiens
gcagaagaggcagaaggaagagaagaggggccaggaagcgggaccggaaggagagcggagcgccggaggagagggcgaggggccgag

SEQ ID NO: 90153 - RNA, 72 nt, Homo sapiens
gaagaggacaagagacgacacgcaagcaggcaaccgaaacagacaggcccacagaagccggcaaaccccgac

SEQ ID NO: 90154 - RNA, 55 nt, Homo sapiens
gcaacaaggcaagaaaaaggaaccgaagaacaaagagggacagggcgagccaaga

SEQ ID NO: 90155 - RNA, 77 nt, Homo sapiens
gaggggaaaggccggccagcgggacaggagggcaggaagagcgcagcggggacaagccgcaaggaggaagccggcgg

SEQ ID NO: 90156 - RNA, 65 nt, Homo sapiens
gcggcgagaaggcggacccagacagcgaccccagagaagggcccgacccaggcaagcgagcaggc

SEQ ID NO: 90157 - RNA, 81 nt, Homo sapiens
gcgacccggagacagcccaaaacccggaagagcgccccaggagaaacaagcccaaaaacccagaacagaagacaaagagag

SEQ ID NO: 90158 - RNA, 96 nt, Homo sapiens
ggagacgagaccagaggccgaaccgggcgacaagaggccgggcgccccgcaggacacaagggaaacacaaagaagacaccagaagggccagcacca

SEQ ID NO: 90159 - RNA, 86 nt, Homo sapiens
gaggaggcgcgggagggcgagaacgaccccgagacgaaaaggacccaagggggcaaaggcggaaacagcagaggacaccaggagag

SEQ ID NO: 90160 - RNA, 75 nt, Homo sapiens
gaggcaggaagaccgccaacagacgcggccggagcccccccagacacacgagggggacaccgccagcccagcacc

SEQ ID NO: 90161 - RNA, 71 nt, Homo sapiens
ggagagacgaaccgaagcgggcgggcccccccacccagagcccgagaaaagcacagcacccgcaggccaac

SEQ ID NO: 90162 - RNA, 68 nt, Homo sapiens
gcggccaggggcgcgaccccccggcacggggccaaaaaggcacgagggaacgggaaagaacagagaag

SEQ ID NO: 90163 - RNA, 80 nt, Homo sapiens
ggaccgggaaccacgggggccgcggccggaccgagcgcccgacccggcgaggaagagcccgccaccagggagaaagcacg

SEQ ID NO: 90164 - RNA, 61 nt, Homo sapiens
acccaacaagccgcaacgaaaaccggaaaagggaggacagcaaggagaccaaaaaacaagc

SEQ ID NO: 90165 - RNA, 57 nt, Homo sapiens
aacggaagaggcggggagcggccccagcgcagaacggaggacccagacagacggcac

SEQ ID NO: 90166 - RNA, 86 nt, Homo sapiens
agccaaaagacgcagagccccagggcggacagcagcccggggcaaccggagccccccaggagggcaagaccggaaagcagccccac

SEQ ID NO: 90167 - RNA, 40 nt, Homo sapiens
gccccgagagcgggacacagacggagccgccgcgcccagg

SEQ ID NO: 90168 - RNA, 37 nt, Homo sapiens
cgccaaagcgggcagaggagggccaaacaggggcaac

SEQ ID NO: 90169 - RNA, 84 nt, Homo sapiens
ccgggaagcgcggaaaaagggacaaaggagagcaccagacacaaggaaggggaggaccccaaaaggcgaggaggccccagaaaa

SEQ ID NO: 90170 - RNA, 81 nt, Homo sapiens
acaagaaaggcaacaaaaccacgcaggcagcccaccccacaccgggccaaaaaaagggcgccccaaaaggaacaaaaggga

SEQ ID NO: 90171 - RNA, 67 nt, Homo sapiens
agggaaaacaagccgaaaggaaagccaaacggggaaagacgaagggcgggaccgcaaaaaagaccag

SEQ ID NO: 90172 - RNA, 41 nt, Homo sapiens
gccacaggcagcgaacgggaaaggacagaagacggaagaaa

SEQ ID NO: 90173 - RNA, 73 nt, Homo sapiens
acacggcaaaccccaaaaacagaaggggaaaagcaccaaggcagggagcacgcgggcaggcagcccagcaaac

SEQ ID NO: 90174 - RNA, 63 nt, Homo sapiens
ggcacagagggagacacccagagaagaagggcaacgaacaagggcaagcgcacagccaagcaa

SEQ ID NO: 90175 - RNA, 87 nt, Homo sapiens
gcaccagcaggcacccgaagacccccagcagcagacccaagaagacagaccccgaggagacggccacgaagacggcaaggaggaaag

SEQ ID NO: 90176 - RNA, 73 nt, Homo sapiens
gaaccaagagaacccgagccaggaggaaaaaaaaggaccacggaaaagaaacagcgccggcggaaaccccacg

SEQ ID NO: 90177 - RNA, 80 nt, Homo sapiens
ccaagccaaagaacccacacaaggacaaggagagcagagcgacacgaaaagacagaccgacaacagcccagaagaagcca

SEQ ID NO: 90178 - RNA, 79 nt, Homo sapiens
gaggaacacgccggaaacaaggagcaagaacgaggccaaggaggagggacacagagacagcgaagaaagaacgcccgag

SEQ ID NO: 90179 - RNA, 79 nt, Homo sapiens
accgggagaggaggccaggacaccggaagccgggaaaggcaaaaggcaaaccggcggaagcggagaagacccagcgagg

SEQ ID NO: 90180 - RNA, 78 nt, Homo sapiens
cggacccccgcaaggcaaccgggaggggagacggcacaggagagggccaaaacgaaggagaagcccagaagagagggg

SEQ ID NO: 90181 - RNA, 84 nt, Homo sapiens
cggggcaacgggccgacagcacagaagcacgcgccgcaggccgaggcagaaggacagaccaccaaggcgcccacgggccccaaa

SEQ ID NO: 90182 - RNA, 71 nt, Homo sapiens
agaaccgcaggagccagagggaaaggaggacaaaaggaaaaaaaaaaagggaagacagagaggcggggaaa

SEQ ID NO: 90183 - RNA, 55 nt, Homo sapiens
agcgggcccacagaaaagcagcccaacgaaaaccgcgaaacaggaacacgaaaga

SEQ ID NO: 90184 - RNA, 76 nt, Homo sapiens
aaaagggaagaaaacccagaagagggagcacccgggcgaaagaggagccagacaggacaagagggcagcaccgcag

SEQ ID NO: 90185 - RNA, 59 nt, Homo sapiens
cggaagccacacaggccagaacgaggaaaccaacagaagggccgaaacggagcaggaac

SEQ ID NO: 90186 - RNA, 73 nt, Homo sapiens
ggagcgacggggaggcgcggccaacggggccacaagacagggccagcacagcaaggggaacaggggaaagaag

SEQ ID NO: 90187 - RNA, 55 nt, Homo sapiens
cggacgacccaacgcacagacgagcggcggagccccccccagcgccgaaggcccg

SEQ ID NO: 90188 - RNA, 79 nt, Homo sapiens
aaaccaagccaggaccaggaccggcgccagaagccgcagcccggagcagggccgcgccacgccggccccagcgcgcaga

SEQ ID NO: 90189 - RNA, 80 nt, Homo sapiens
gcacgcacaggcaacggccgaggagagggaagggagaggcacacccggcagaccacacgagcggcagagagccacaagag

SEQ ID NO: 90190 - RNA, 84 nt, Homo sapiens
agaggggccgagaagccaacaagcaggaggccagagaacggaaaaaccaaccagcaaaaccccagccccggaccaagcgcagca

SEQ ID NO: 90191 - RNA, 78 nt, Homo sapiens
ccggcgaccgcaccacaagggacgagaccaaacggaagaggcacaagcaccaacaagaaggcgaacacgcagccccaa

SEQ ID NO: 90192 - RNA, 98 nt, Homo sapiens
cacccgcgcgcgcccgggaggaaggaacgaggcaaggagcaaagcagcggcgcagcccgggggacaagagaaaaaaagggcgggcgaacaaaaagagc

SEQ ID NO: 90193 - RNA, 37 nt, Homo sapiens
ccggacgcgcgagacggacggagccgcagaagccgcc

SEQ ID NO: 90194 - RNA, 57 nt, Homo sapiens
cagaaaagcagaaggaaggacgaagcaaagaacaacaagaaggagaaagacacaacg

SEQ ID NO: 90195 - RNA, 62 nt, Homo sapiens
cggcgaggacggggcgccggcgccgccgcccccgggccgcggccgcaggacaaaaagcgagc

SEQ ID NO: 90196 - RNA, 66 nt, Homo sapiens
aaacggggggcgcggagggaccagcgagcgggaaaggcccgagccaaaagacccagagaaaggagc

SEQ ID NO: 90197 - RNA, 70 nt, Homo sapiens
ccaagcgacgcaggcagaagcgagacggcaaggccaagcaacaggcgcacgcggaggagggcgacgagga

SEQ ID NO: 90198 - RNA, 86 nt, Homo sapiens
ccaggccgggaacgacacagaccccgcacggagcgaggaccggagacagcagcagaagcagaaaaaggcaaacgagaagaaggagg

SEQ ID NO: 90199 - RNA, 80 nt, Homo sapiens
gcgaagccacaaccgggaccgggccggccaccgcgggcccgacggccacacaggggcgcggggcgccgggggcggggggc

SEQ ID NO: 90200 - RNA, 75 nt, Homo sapiens
acaagcaccaagcgccaggccggcgaagagaccgaagacagaaagacaaggaccgagcgaaaaaaaacgaaagag

SEQ ID NO: 90201 - RNA, 76 nt, Homo sapiens
ggcgacgggaagcgaccgcaggcgggcccccgaccgacagcccaagcacaaaacaacccaaaagaagagccggcca

SEQ ID NO: 90202 - RNA, 70 nt, Homo sapiens
gaggcgccccagagcccagggcaggacaccgacaggaacagggaccacggggcggaaggcggaccgaacg

SEQ ID NO: 90203 - RNA, 77 nt, Homo sapiens
cgagaagcgccacaagaacagcgacaccgcccccgccaggggacccaagggagagagggaacggcgaaagggcagcc

SEQ ID NO: 90204 - RNA, 80 nt, Homo sapiens
gaaacaccggaggagcggggagggggacacacaaccgcccagccggcgagggacgccgcagacccaagaaggagaagccc

SEQ ID NO: 90205 - RNA, 64 nt, Homo sapiens
gccccaccggacccgcagggaaaaggaaaccagaagagggacgaagaaaacagcgcagcgccca

SEQ ID NO: 90206 - RNA, 79 nt, Homo sapiens
accagagggaaaaagaccacagaaacagaaagcacacaggcagacagagaacaccacgggacaaagccagcggagggca

SEQ ID NO: 90207 - RNA, 58 nt, Homo sapiens
ggaaggggccagcggagacagcaaggcgagcccacaccaaccggcccacccaccgacg

SEQ ID NO: 90208 - RNA, 70 nt, Homo sapiens
cgcccgcgcgcgggaagaggcggaacaggcaccaagccggcggggcggacaacggcaagcggagaagagc

SEQ ID NO: 90209 - RNA, 79 nt, Homo sapiens
gcagaaaggcacgaagaaaagagaaggaaaaacagaacggcaaaccggaaaaaaacgggccggccgcggagaaccgaaa

SEQ ID NO: 90210 - RNA, 39 nt, Homo sapiens
ggccacgcaagccgcccggaacggagagaggggcgccgg

SEQ ID NO: 90211 - RNA, 76 nt, Homo sapiens
caccagccccagaacgggcgcagaagcaggaacagcaggcaaaagggaaagcaaggggaagggcccaagaagacac

SEQ ID NO: 90212 - RNA, 77 nt, Homo sapiens
cccccagccacgggaacacagaagcgaaggggacagggggagaaccgccagggaaacccgggggacagacacaagac

SEQ ID NO: 90213 - RNA, 68 nt, Homo sapiens
ccgacgagcggcccggaccggagaccgccaaagacgacgaacccaaagaacagaaaaggcagaaaaaa

SEQ ID NO: 90214 - RNA, 72 nt, Homo sapiens
agggagaagccagcggaagaacaggggaccaggcagccagaagaacccaggccaaaagaacaggaccaagcg

SEQ ID NO: 90215 - RNA, 80 nt, Homo sapiens
ggacgaggagcgagcaagcgggccgcggacaaccaccccggagcaagagagagcaagccacacaggcccggcagacccgc

SEQ ID NO: 90216 - RNA, 70 nt, Homo sapiens
acccagcccaggccgcacggacggggggggcgaggggcacagaggcaggcacaaaaccacaagcgacaac

SEQ ID NO: 90217 - RNA, 80 nt, Homo sapiens
cacagcacagccgggaaggggagccaccagccccccgggccggcccagggagaacgcaaaaccaccacccccacaaaaaa

SEQ ID NO: 90218 - RNA, 74 nt, Homo sapiens
accaagaaccagccgggagaagaggcacaaggacaggcacagagaacagaacaaaaaaaaaccaggaacaccca

SEQ ID NO: 90219 - RNA, 83 nt, Homo sapiens
cgccgaggaagcggaggacaaaagggcagccggagcagcaagcgggccgaccgcaggaggacagagcacccgacgccaggggg

SEQ ID NO: 90220 - RNA, 73 nt, Homo sapiens
agcccccaggagcgggaacaggcaccggcaggccggcgcagagcacagaggaagccaacccgcagggagcccc

SEQ ID NO: 90221 - RNA, 78 nt, Homo sapiens
ccgcagagagccccagcaggaaggccaccgagggaacccgaccggacccagccccagaagccagcacggagcggccag

SEQ ID NO: 90222 - RNA, 82 nt, Homo sapiens
ggggcgcaggcaggggcccggaagaccccagaaaacccgcagcccaaagggcagaagaagaagaagacgcaagacggcaggg

SEQ ID NO: 90223 - RNA, 72 nt, Homo sapiens
gccagcagcagcagagcacggcagcgccacagccgcacacggcgggaaaacggcacaaggcgacgagggagg

SEQ ID NO: 90224 - RNA, 72 nt, Homo sapiens
aaagacagccaacaaaagaggcggaacgcagaagcgcccaggaacacaggcggaagcagcgcagcacagcga

SEQ ID NO: 90225 - RNA, 89 nt, Homo sapiens
accccgggaggcgccggccagagccggcgagccggaggaagccaccaggggaaaggaaaccaaaccaggaaagaaggacaaggagcgag

SEQ ID NO: 90226 - RNA, 74 nt, Homo sapiens
ccggccccaggaccgaggaccgagacagaggacagcggggacaggagacacccgggcccccagcgaacccgaaa

SEQ ID NO: 90227 - RNA, 62 nt, Homo sapiens
caagaagcccggcaaaacgcgccggcgaggagggaccaagaaaggcccagggaccaaagccc

SEQ ID NO: 90228 - RNA, 74 nt, Homo sapiens
ggaagcagcaagccgcaaagggcgggagagagaagaaaaaacaacccagaacggaaacgggggaccaggaacac

SEQ ID NO: 90229 - RNA, 69 nt, Homo sapiens
gagcccacgaacccgaagcccccaaagagagaaccggagagcacccaacagccacagacaagacaggac

SEQ ID NO: 90230 - RNA, 66 nt, Homo sapiens
accagagacggcccgcggccggcgcgcaggggagaagcagaccgcaccaggcgggaccccgaaaaa

SEQ ID NO: 90231 - RNA, 73 nt, Homo sapiens
ggggcgaacgcggccgagcaggacgagaagccaaggagagcccggagggcccgggccggggaagaacacgccc

SEQ ID NO: 90232 - RNA, 72 nt, Homo sapiens
gccaacagcggaacccggggagacaacaacaagccgaagaggcgaggagccagcacaggggaacacagcaac

SEQ ID NO: 90233 - RNA, 81 nt, Homo sapiens
cggagcgcaaggcgagggacgagaacgaggacgaaaccagcacggagcccaaggaaaggggcccacgacaagggaaaaacc

SEQ ID NO: 90234 - RNA, 71 nt, Homo sapiens
gcacggagggcccccgcgccgcaagcagacggcaagagggccaaagaaacaccaacagaaggaaaaaagga

SEQ ID NO: 90235 - RNA, 77 nt, Homo sapiens
ggagagaaaggcggaagacgaggccagccagaccaaggacagccaaggaagccaagaccaggaggggacgggacggg

SEQ ID NO: 90236 - RNA, 38 nt, Homo sapiens
gccacccacacaaacagcagacaaacgacccaggccga

SEQ ID NO: 90237 - RNA, 69 nt, Homo sapiens
ccaaaaccggcggggacagaaggcaaaggcagcaccccaggaaaaaagggcgaaccaaagaaggaaggc

SEQ ID NO: 90238 - RNA, 83 nt, Homo sapiens
gagggcgggccggccgcggcggagggaaaaaggaagaggagaaggaaagcccgaacccgcagacaacaggagacacggaagcc

SEQ ID NO: 90239 - RNA, 72 nt, Homo sapiens
acagccgaaaacacccacaggaaccacacggacggcagcagccgcccaaaacacaaaccaaagaagaaaccc

SEQ ID NO: 90240 - RNA, 76 nt, Homo sapiens
ggccgggacaaaacccgaaagaggcgcagcgcccagggagcagcagaccagggcccgccgagaggggcccccggga

SEQ ID NO: 90241 - RNA, 83 nt, Homo sapiens
ccgaaggacgggagagccacggagaagaagcgcggcccacacacccagccgggacgcaggagggggcccagcagccccgcgcg

SEQ ID NO: 90242 - RNA, 70 nt, Homo sapiens
cggagaaaccaccggcggaccgcacaagcaggccggaccgggcagcccggccccccagggggaccaccaa

SEQ ID NO: 90243 - RNA, 68 nt, Homo sapiens
gaggcccccaagcggggcgccacgggacagccaacaccagaccgagcccacgcgcgccacagggaggg

SEQ ID NO: 90244 - RNA, 74 nt, Homo sapiens
gacggacagcaaaaccccagcggcagaacgcacagagggagagcagggggagaaagaccggcagacggcacggc

SEQ ID NO: 90245 - RNA, 73 nt, Homo sapiens
cccggccccgccgagcgcgccggaccggcgcccggacaacccgaacagagagcaagaggaggagaccgcacaa

SEQ ID NO: 90246 - RNA, 73 nt, Homo sapiens
caaaaagacggacagcccacgggaacaagaggggacagaaagggggagaagggaagcgccaagaagcaacaag

SEQ ID NO: 90247 - RNA, 72 nt, Homo sapiens
aaggaggaacgacaggaacgcaggcaaagcacaaggaccagcgcagacccagaggaggagccagacacacag

SEQ ID NO: 90248 - RNA, 73 nt, Homo sapiens
cgcagggcgcccccgccggacaccagaaggccagaaggaacgaccaaagagaacgagacaaaagaaaaagcgg

SEQ ID NO: 90249 - RNA, 80 nt, Homo sapiens
gacaaaacaaccaacgaagacaccgagcgaaagagaaagagaaggagagcggaccgcggccaagaaagcgagggccagag

SEQ ID NO: 90250 - RNA, 69 nt, Homo sapiens
cgcagccccccagacgacgagaaagccgcagcggggagaagcccacgcgaaaacaacaaggaaaaaaag

SEQ ID NO: 90251 - RNA, 76 nt, Homo sapiens
gcggacccgaagaaggacggcgacccgccgaagcaccgcgggcgcgcggggaaaagcacagggccaggaagcagag

SEQ ID NO: 90252 - RNA, 86 nt, Homo sapiens
gcagacggagcgagggcgcagaggcaggcaggcagaggccagagacggagcaggaagcccgcggccggcgagcggcagaagaccgg

SEQ ID NO: 90253 - RNA, 78 nt, Homo sapiens
agcgggagaggggagggggaagggcgagggcgaggagagggaaggacagaaagagcagacaggagacccaacacccca

SEQ ID NO: 90254 - RNA, 63 nt, Homo sapiens
cgaggaccaggacaagcgacccacccaaggaccgagcaggcagaaagcgagaggaaccccaag

SEQ ID NO: 90255 - RNA, 48 nt, Homo sapiens
cgggacgggaaacgaaacgaaaagagacagcagggcaaaacgggccac

SEQ ID NO: 90256 - RNA, 77 nt, Homo sapiens
aggcccagcccaggggggccgaaagaaacgagccaccagccaaggacagagggcaagagagacccagccaaggcggg

SEQ ID NO: 90257 - RNA, 78 nt, Homo sapiens
ccaagagagagaagagaacccaacaacagcccgccagaaaagggcgcgaacagcaagaaaaccagcccagggcaagag

SEQ ID NO: 90258 - RNA, 69 nt, Homo sapiens
caacccccccccggcgccacaagcgagccaggccagcagccgaaccagaaaagcacggcgccgagagga

SEQ ID NO: 90259 - RNA, 85 nt, Homo sapiens
ggcagcggcccagcggcagcagcagcggcgggaggagccccgggggcaacaagaggaaacaacagcacgggacggcggaacaaaa

SEQ ID NO: 90260 - RNA, 67 nt, Homo sapiens
aagaaggacccggagaaagggaccaagccaccgcaccagccaagacagacgggccagacaaccaagg

SEQ ID NO: 90261 - RNA, 74 nt, Homo sapiens
aaggaccgggaccggggcgcccagacgaccggaagagcaccgggagaaaacgcaggccacaaagacaggaccaa

SEQ ID NO: 90262 - RNA, 73 nt, Homo sapiens
ccaaccaaagcgccaaagaaaggagcggagaaagagacaacacggccagggaagcacagcagagaagcgggag

SEQ ID NO: 90263 - RNA, 84 nt, Homo sapiens
cggacgccggcccgcgcgcgcaccccgcggacgccacagcgcaccccccagaaccggagaaccccagccagagccccgacaaca

SEQ ID NO: 90264 - RNA, 66 nt, Homo sapiens
agagccaaacgccaaggcggcaacaacggcaagcggagaagagcaaggccgaaccgagaggaaggg

SEQ ID NO: 90265 - RNA, 49 nt, Homo sapiens
gcggaagcccggccagaagaaccaacgagagaccacaagggaaagacgg

SEQ ID NO: 90266 - RNA, 70 nt, Homo sapiens
acgagaaaaaggaaggagcagcagaacgaaaaggggaaacagacaagaggccgccccagaagggaccgaa

SEQ ID NO: 90267 - RNA, 75 nt, Homo sapiens
acaaaaccgcaaaacggcgggcaagagggacaagggaaacacacagaagaccgcagaccaagggagcagggcggg

SEQ ID NO: 90268 - RNA, 86 nt, Homo sapiens
gggcagccggccacggagcgccgcagagcgaagccgaacagccagggggccgaggcccgggaaccgccgaaccccaccgcccccgc

SEQ ID NO: 90269 - RNA, 52 nt, Homo sapiens
cgccgcgggagagaggacccccccccccccccaagagcccaaaagcaaagca

SEQ ID NO: 90270 - RNA, 54 nt, Homo sapiens
cggagcgacacgacacagggcaagcccgggcggaggaggaagagggggcaccca

SEQ ID NO: 90271 - RNA, 45 nt, Homo sapiens
cgcagggcgcccccggagagccacgcagaaaccaaagagccggcg

SEQ ID NO: 90272 - RNA, 78 nt, Homo sapiens
caagcggccggcccacgcccgcgggccaccgcagagccccaaggacaccaagaaaccaagacacggcccagacaaggc

SEQ ID NO: 90273 - RNA, 78 nt, Homo sapiens
agccaaaccagaagaggagggcccagaagaaaaaggggagcccccgagcgcccgcgacgcagcacggacccacaacga

SEQ ID NO: 90274 - RNA, 79 nt, Homo sapiens
cgcccggcgcgcggcgcgccgcccggcgagcgggccggaggaaaagaaagcaggagaccgcaacgacccacccgagcca

SEQ ID NO: 90275 - RNA, 67 nt, Homo sapiens
accaagggcgaaggagccggcccaagccaggagcccccgacagcgaggcccccgaggccaaccccgc

SEQ ID NO: 90276 - RNA, 62 nt, Homo sapiens
acagggcgcacagccgcggagagaagagacgaggaggaggggagaccgcggcaggacacgag

SEQ ID NO: 90277 - RNA, 71 nt, Homo sapiens
acacaagaaggccagagagcccgggaagcgcagagggaacacggccacgaggggaacgggacagagagaag

SEQ ID NO: 90278 - RNA, 74 nt, Homo sapiens
gaaacggaaaaacagaaaccgaaaaggcagaggcccggcgcgggggcaccacaacccaaaacagggaccagagg

SEQ ID NO: 90279 - RNA, 57 nt, Homo sapiens
gcaccgaaccggagaccgaggaggaggaggagacgccagagagccgccacaccccac

SEQ ID NO: 90280 - RNA, 79 nt, Homo sapiens
ggcgaggcagaccggagccagaagcacagaccccaaacgaccagaacacacaagaaccgggagaacgaacaaaccaagc

SEQ ID NO: 90281 - RNA, 69 nt, Homo sapiens
caagacaaaaccagacaaaaaggcaagcgggacccgacgcacaaaacagaagagaaacaaaacaccgag

SEQ ID NO: 90282 - RNA, 73 nt, Homo sapiens
cccggcccggaaagcccgccacagcggcccggccccccggacagacgccgacgcccagaaagagccgccgggc

SEQ ID NO: 90283 - RNA, 57 nt, Homo sapiens
acacacacacgccggcgccggaggacgagagccgcccccaggcacggggcgaccacc

SEQ ID NO: 90284 - RNA, 52 nt, Homo sapiens
gagcagccaggcggcgggccaggagcagcagaacggagagaaacagcagcag

SEQ ID NO: 90285 - RNA, 76 nt, Homo sapiens
ccagccaagccaagacagggaggggacggaaacgccaccagcaggaggaagagaaaagagcaccggccagcagaac

SEQ ID NO: 90286 - RNA, 84 nt, Homo sapiens
gagaaggaggccgccaaccgggccagggaggggcgaaggcaaaaacccccaaagccacgccgcgccacacccacgaagcaccga

SEQ ID NO: 90287 - RNA, 80 nt, Homo sapiens
caaggcaaggagcgcccaacacccaggggagaaccgaacgggagcgaccagcaggaacgagccaacgggacgcaaagccg

SEQ ID NO: 90288 - RNA, 73 nt, Homo sapiens
agcaccccggcaccggaacagaacagcggcagcggaccagaacgaaagaaccaaacagaaggcggacaacccg

SEQ ID NO: 90289 - RNA, 74 nt, Homo sapiens
caccaaggaacgggcgcagcgagagaaccccaggaccccagcgaacccggggccagacgacagcgaggaccaaa

SEQ ID NO: 90290 - RNA, 73 nt, Homo sapiens
cggcagaaaaaggacagaagaacacgaaaagaggccgaggggcagccgaccgaagaagcggggccaaggagcg

SEQ ID NO: 90291 - RNA, 72 nt, Homo sapiens
caacggcggagcaagcaccacaggcggacagaccccacagagcccgggagaaacagacggccccacccgcga

SEQ ID NO: 90292 - RNA, 70 nt, Homo sapiens
gacggccacggcaaacgggggagacaggagacaaaccagcaggcagaaaacaacgaaagaaaggaaaaac

SEQ ID NO: 90293 - RNA, 81 nt, Homo sapiens
caacgaagaagggcgagggagcaagcgcacacgaagagaagcaaggcccaagacccaggcgccaggcggcgaagagagcag

SEQ ID NO: 90294 - RNA, 84 nt, Homo sapiens
agcgggcgagcggggggacgccggcggagacgcgggcgaggaccaagaacgcccagcccgcgggcaccggcagaaaggaggagg

SEQ ID NO: 90295 - RNA, 51 nt, Homo sapiens
agaaccacaccaagagacccaagaggacgaaacaggaggaaaaccccagag

SEQ ID NO: 90296 - RNA, 30 nt, Homo sapiens
gaagaccgccccacaaaaacggaggccggc

SEQ ID NO: 90297 - RNA, 76 nt, Homo sapiens
cacggccagacgcccccacgcgccccagaccaccggcagggaacagccgagcagaccgaggaggcccaccagcaga

SEQ ID NO: 90298 - RNA, 63 nt, Homo sapiens
cagcccgacgcccgaggagaaggaggagggaaaggcaaagaacaaggaggccaccgccgaaag

SEQ ID NO: 90299 - RNA, 80 nt, Homo sapiens
caaagccaagcccccagcagcgggccccggggaacgaccaagcacagcacacagcggggacaccaccgcgcccagacagc

SEQ ID NO: 90300 - RNA, 67 nt, Homo sapiens
gagagcggagcagaagagcgcccccgagaagccagccaaaggcaggacaaaaaacgaaggccgaaga

SEQ ID NO: 90301 - RNA, 65 nt, Homo sapiens
aagaagaggggcaccgacggcggggagcggagaagcgcgccaacgcaaagccacacgggcacggc

SEQ ID NO: 90302 - RNA, 78 nt, Homo sapiens
acgggaaacaaggaagccccaagcccacagagagcgccaagccccaaagaagaaccagacgagaagagacggcacccc

SEQ ID NO: 90303 - RNA, 77 nt, Homo sapiens
gcagcggggaccggaacccgggacggaccgcggggacacacacgcaggcggacaagaagagcccggacccccggcgg

SEQ ID NO: 90304 - RNA, 69 nt, Homo sapiens
cagaaggaacgcagaaacacaggaccccccccaacgagcaaagcaccacaggggaaaacaagcagaacc

SEQ ID NO: 90305 - RNA, 61 nt, Homo sapiens
gagcaggaagcaggcacaaggaaaaacgaaagccgcggcaggaaaaccgaaagcgccaggc

SEQ ID NO: 90306 - RNA, 65 nt, Homo sapiens
gcgggccgccgagcggacccggaccgggggagcgagaacccgagcagcgccagagcaacacaccg

SEQ ID NO: 90307 - RNA, 77 nt, Homo sapiens
gaaaacccagccagaaagcagagcggagaaccacccaccgaacaaagcagaacgcaacaggcggacaggcagaagaa

SEQ ID NO: 90308 - RNA, 53 nt, Homo sapiens
aaaagcaagaggccgcgcccgcagagccggcggcggaaaacaccccaaaagcc

SEQ ID NO: 90309 - RNA, 88 nt, Homo sapiens
gcgcccacgcaccgagccccgaggagaaggcgcgaggaggaaacagacacggacagagggggggaaaaaaaaggcaacaggagaggcg

SEQ ID NO: 90310 - RNA, 71 nt, Homo sapiens
acacaaagagccgcgggggcgggacacaaggacaccagaagacgacagcgaacacccgaaggagccagcaa

SEQ ID NO: 90311 - RNA, 80 nt, Homo sapiens
caaggcacggacccacgcaagaacagaagaccggggaccagaagggagaagaagcaaaaggaaccacccaaaagaagcca

SEQ ID NO: 90312 - RNA, 78 nt, Homo sapiens
gcgcgcagaaccagaccgggagcacgcacccacgagggggaacaaaggccgacaaagaacacaaggggaaagagaaaa

SEQ ID NO: 90313 - RNA, 76 nt, Homo sapiens
gcgcgccacaacaggccgggcgggaacaagcccggaacaggcccacccaagacaggaccgaaggcaccgggcccag

SEQ ID NO: 90314 - RNA, 70 nt, Homo sapiens
aaaaccacagcacagaaacaccacggcggcgccgaggccccaaggcagcgcacccagacaccggggccca

SEQ ID NO: 90315 - RNA, 57 nt, Homo sapiens
gcacaacggggggaacgccaaagggaggccaggccacacaagccccagccaaaacca

SEQ ID NO: 90316 - RNA, 72 nt, Homo sapiens
gaagaaccgagcagaagaagaagacaaagagggaggagaaagagacacaacaagccccaagggagaagcaga

SEQ ID NO: 90317 - RNA, 76 nt, Homo sapiens
acggaggagcgagccacggcgagagccaaaccggcgccaagccccaacacaggccaaggaccacaaagcccgccca

SEQ ID NO: 90318 - RNA, 67 nt, Homo sapiens
aacacgccggaaaccccgcccacagcacgaggacagcagaccacagcccggcaggcccaaaaaccca

SEQ ID NO: 90319 - RNA, 67 nt, Homo sapiens
gaaaaggaggcggagaagagaaagaagcccagcgggccccgggagagcaggaggagaccaaacacca

SEQ ID NO: 90320 - RNA, 58 nt, Homo sapiens
gcagagcgcaggacgccacagcaagaggaccccaccgcaaccacagacccgccaggcc

SEQ ID NO: 90321 - RNA, 86 nt, Homo sapiens
gcaggagccgcggagccggcgcgagaggggcgcggccggagcgggcggcgagacaaaggcgacggagccagagcggaagcacgacc

SEQ ID NO: 90322 - RNA, 42 nt, Homo sapiens
gggacccgaccccggcagagggggcaggaagggagcaggaaa

SEQ ID NO: 90323 - RNA, 71 nt, Homo sapiens
gggcgggcccccccacccagagggcggaaacaggaggaaaaccccgaacacgaaagagcagcccgaaacgg

SEQ ID NO: 90324 - RNA, 77 nt, Homo sapiens
aaaagggcaaggaggagaaaaagggggcacagcgaagagcacccacccgcaccgcgccggagcgaaggggcgaacca

SEQ ID NO: 90325 - RNA, 62 nt, Homo sapiens
gacaggaaggaaagagggcaaccgaagaccaacaagcgaagaaaagggacggccagagcccg

SEQ ID NO: 90326 - RNA, 55 nt, Homo sapiens
aaagagcggaacaagggcggaggagagaaagaacccacgcaggacgacagaagag

SEQ ID NO: 90327 - RNA, 82 nt, Homo sapiens
gccagagaccaaacaccaggaagccacaaagaaggggacaccccaaaggaagaacagggcccagcaaaaggagagaggaaaa

SEQ ID NO: 90328 - RNA, 75 nt, Homo sapiens
gggggacgcgccaggcacagcagcagagggacggaaacagacgacgacacggacaggacggcggacagggcgacg

SEQ ID NO: 90329 - RNA, 69 nt, Homo sapiens
agagaggagacccaacagacgggaagggaaaagaaaggccacgggaggagggcaacgaggaagcccagg

SEQ ID NO: 90330 - RNA, 77 nt, Homo sapiens
ggacagaaagccaaaaaggagaaagaaacaacgacagagacgggaaagaaagaagaggcagaggagaaggcagccaa

SEQ ID NO: 90331 - RNA, 85 nt, Homo sapiens
ccgggcccaggagcggaggggcagggggcgaggacagcggccgccgaacaccaagcgccgcacaaggagaaagacagcaaagaaa

SEQ ID NO: 90332 - RNA, 78 nt, Homo sapiens
caaccggcagacccgacgaaggaaaagcagcgaagagcccagcgaggcaccgccacagaggcgcacacggcaagagcc

SEQ ID NO: 90333 - RNA, 37 nt, Homo sapiens
gacgcagggcgcccccgagagcccgagcccagcacag

SEQ ID NO: 90334 - RNA, 70 nt, Homo sapiens
aaaggcgggcacaggccgaccgcgcggcccacacgggacaggaagggaaccggacaggggccaccccgag

SEQ ID NO: 90335 - RNA, 52 nt, Homo sapiens
gccaaacacccggaccaggggagagaccccgagaagcaggcaaggagaagcc

SEQ ID NO: 90336 - RNA, 82 nt, Homo sapiens
gccaagaggaggacagcgcacacagcaagcacgagggccagcgagacagaccgaaacccaaagaaaaggagcgcgcccaacg

SEQ ID NO: 90337 - RNA, 84 nt, Homo sapiens
cggaggcgcggcaggagggagcaggagcggaccggcccggaagccacccaggcccaggaccgagcccgacgcccacagacaggc

SEQ ID NO: 90338 - RNA, 83 nt, Homo sapiens
gccaaaacacaaggaaccgccggaaagaaccggaaggggcgaccggaccgggagaagaaggcgccgaggcaaggggacagcac

SEQ ID NO: 90339 - RNA, 58 nt, Homo sapiens
agaccgcaggggaaaaccaaagaccgacaagacccggaagccaaagagagagagagag

SEQ ID NO: 90340 - RNA, 78 nt, Homo sapiens
cagaggccacacccacagagaacccagacaacaggacgccgccaaggaagaaaccgacaagaacaaacgccgggagaa

SEQ ID NO: 90341 - RNA, 64 nt, Homo sapiens
gaaagaggacacagccgagacaccaccccagaggggacggagaggcagaggagaccaggccccc

SEQ ID NO: 90342 - RNA, 67 nt, Homo sapiens
gcccccaaacaacccgaggacccggagaagaccacggagacgaaaagcacaggggaacaaagacagc

SEQ ID NO: 90343 - RNA, 68 nt, Homo sapiens
ggccagcgacgcaccgagaaaggaaggaaaaccgacgagaaaaacgggccgagaaagcgagcgaaaag

SEQ ID NO: 90344 - RNA, 72 nt, Homo sapiens
gggaaacaagcacgggcgagccaggacacgaccacaacacagcccacaggcacagccacaggagcagccaga

SEQ ID NO: 90345 - RNA, 78 nt, Homo sapiens
cccaaaaagcacaaggcgccgcacgacaggcagcaacacagggaacccgcggcccggggaggaacgcaccggaggaca

SEQ ID NO: 90346 - RNA, 73 nt, Homo sapiens
ggacacgggaaaaccgaagccgaagaggccaagacccacagggcggagaacggaaaagcaccaggaagcagag

SEQ ID NO: 90347 - RNA, 54 nt, Homo sapiens
aaaaacccggccccagggcagggcagccggacgcaagcgggacaaacccaccca

SEQ ID NO: 90348 - RNA, 79 nt, Homo sapiens
gccagcgacccccaggaaaggaaaaacccacaaacagcacaacgggcaggccgaacggccacagggacaggaacccaca

SEQ ID NO: 90349 - RNA, 73 nt, Homo sapiens
ggcgaggagacaaaaaagcccaaggcggcccggcccgcagacggccaaagccggccaccaggaaccaccaggg

SEQ ID NO: 90350 - RNA, 73 nt, Homo sapiens
cagaaaaccgaggcaccaagccggccagcaagacccgagcccagaaagaccacagcaagaccacgcccccagc

SEQ ID NO: 90351 - RNA, 64 nt, Homo sapiens
aagcgccaaaggaggcaacaagggagaagcagcaacggacagcagaccacagcccggcaggccc

SEQ ID NO: 90352 - RNA, 63 nt, Homo sapiens
ggagacgcaaggagccaccagcacggaccaggaggcgagcaacagaaccaagaccggcagcgg

SEQ ID NO: 90353 - RNA, 95 nt, Homo sapiens
ccccaagcagcagcaggaccagaggcgagagggccccagccgggccagaagcagaccccaagaagaagcggaagaggagccgcggaaccaagaca

SEQ ID NO: 90354 - RNA, 80 nt, Homo sapiens
ggagggaagcgcccggggccggccgccgcgggaccgaggaaaagccgcaccagggacgcccggagcggcccacacacggg

SEQ ID NO: 90355 - RNA, 38 nt, Homo sapiens
agacggcggcgcccccagcaaagcccagcaggccacag

SEQ ID NO: 90356 - RNA, 90 nt, Homo sapiens
cgcgcacccagaaacaggcgaagccaaagcagcacgcgaggaggaaaggcaccccaccagacccacacagcgacaggaagaacagaccaa

SEQ ID NO: 90357 - RNA, 70 nt, Homo sapiens
aaaaaaaggaaacacacaaacgcagcccggaaacagacagcacagaaaaacagggaaaacacgacagaag

SEQ ID NO: 90358 - RNA, 80 nt, Homo sapiens
gaaagaaccacaagcccacgggacacgcggcaggaacgggacaaccaccaccagcgagcaaaagaacaaagaccaagacc

SEQ ID NO: 90359 - RNA, 94 nt, Homo sapiens
gacagagcggcgggacagcccaagggccagcaccgcgcccaggcagagccagaccgagaccgaggacaggccggacaccgcagcccaaaggaga

SEQ ID NO: 90360 - RNA, 83 nt, Homo sapiens
ggacggaccgagaccggaccgagagcggaccgagagcgcgaaacgcacgagaaggccccagggaaaggaccgaggcaggaaag

SEQ ID NO: 90361 - RNA, 82 nt, Homo sapiens
gcagaggggggggcccaccaccgcccagcccccggggacgggggacaggagcgagcccacaggagcacaggagcgccaccac

SEQ ID NO: 90362 - RNA, 82 nt, Homo sapiens
agaacagagacagcagccaaacccccaggccccaaggacgccccccaaggacacggaagcacgggcccagggacgagcggag

SEQ ID NO: 90363 - RNA, 54 nt, Homo sapiens
gagcaagcgggggaccgaacaaggcaaaaggggggagccgccaccaaaagcaga

SEQ ID NO: 90364 - RNA, 55 nt, Homo sapiens
gaggccagaaaccgcccggagcacgaccgaggcggccaagacaaggccgagaccg

SEQ ID NO: 90365 - RNA, 77 nt, Homo sapiens
aagcggggagcgcccgcgacagaggagggaggaaaacaaccgagggcagaaaagcaccgggaggaaagagagccaca

SEQ ID NO: 90366 - RNA, 70 nt, Homo sapiens
cccgcgggcaggggaaccggcgagcgcagggaacccggaggacccgacagaaaaggaagaggcagaggcc

SEQ ID NO: 90367 - RNA, 42 nt, Homo sapiens
gcagcacggcgccgccccaagaacaacccgacgagcaccgac

SEQ ID NO: 90368 - RNA, 99 nt, Homo sapiens
cccagccaaagaaacaagccgggaaagggacaagaagggcaaagccgaagaggccggggggcagcaggaggccccgccacgggggcccacagagcggaa

SEQ ID NO: 90369 - RNA, 83 nt, Homo sapiens
gaaagacaaaaagggagagggaccgaagggcacacagggaccaagaagccccggggacacgcgagaaaagacgccgaagggaa

SEQ ID NO: 90370 - RNA, 60 nt, Homo sapiens
ggaccagcgggaaggcagacagcgagggcgacgaggcggagaacggaaaagcaccaggaa

SEQ ID NO: 90371 - RNA, 63 nt, Homo sapiens
acaccccaacaaacaccagcgcgggccgcagacagcagagagggaagcccccaccccaccccc

SEQ ID NO: 90372 - RNA, 77 nt, Homo sapiens
agggaaagcgggggaggagcgcggcgcggcaggcgccacaggagccgcagaagcaaaggcaccgccaaaccgaaaac

SEQ ID NO: 90373 - RNA, 72 nt, Homo sapiens
agaacacaagccacgacgaaaaagaagcccaaggccaaagagaagaggaagcccggaggaggagagagagag

SEQ ID NO: 90374 - RNA, 84 nt, Homo sapiens
cagggcgcgaggcgggcgcgcccgcggagaggccgggaagacgaccccgacgcaggccaggagccgcggacagaagccgagcac

SEQ ID NO: 90375 - RNA, 70 nt, Homo sapiens
gccaacacgcaccgcaggcacagagcgggccgcccgagggagggggccggcagggagaccccccagcccg

SEQ ID NO: 90376 - RNA, 60 nt, Homo sapiens
gccaaagccccggaccgccaagaaaaagacaacggccagccaaaccaaaaggccgggggc

SEQ ID NO: 90377 - RNA, 76 nt, Homo sapiens
cgcacggcagcggcaccacggcgacgcacaaggaggcaggggaagcacaaaagcgcacccgcgccagcgaggaccg

SEQ ID NO: 90378 - RNA, 73 nt, Homo sapiens
aaaagaagggcccgagccagggcagcaaaagacaaacgaagcacaaaccagaggccccacccgcggagaacaa

SEQ ID NO: 90379 - RNA, 62 nt, Homo sapiens
cggccgacagagccacacacagcgaaagcaccccaggcacaggcgggagccagcacacaaac

SEQ ID NO: 90380 - RNA, 39 nt, Homo sapiens
aagacaaacaaccagcccaggcacgcagcacgggggcag

SEQ ID NO: 90381 - RNA, 81 nt, Homo sapiens
aggaaccgcccgcaagagcgagccgccgccccgggcgcagacagagcaccagcaccagcagaggccgccaagggggcgggc

SEQ ID NO: 90382 - RNA, 114 nt, Homo sapiens
cgccccccgacgccccgccgccgccgaggaggcgagcagccgggagacaccgccaccgccagacaccgaaaacgagaaacgaaagagacacgggggcacaaccgagcccgggga

SEQ ID NO: 90383 - RNA, 112 nt, Homo sapiens
cagcaccggccaggggggacgaacccgcagcaggcccgcccgcccccgcggcgagaggaaggagggggaagggccaacgggaagacggaagccccaaccacaaggagcgcag

SEQ ID NO: 90384 - RNA, 76 nt, Homo sapiens
agagcaaagccaccccccgaggaaaaagcaaccgcacgaaaaccggaacacagagcaaccaccgcccaagaagcca

SEQ ID NO: 90385 - RNA, 78 nt, Homo sapiens
agccacagcggggcggagaggaagaccacggaacaagagaaggagagaacacggcacagacaagacccgacgcaaaac

SEQ ID NO: 90386 - RNA, 103 nt, Homo sapiens
gaagagagaaaagagagaaccccaaccggggaggaaaaccgacgaagaacagaggcaggaaaggccggcccagcaaaaggaccagaagacaccccacgaaccg

SEQ ID NO: 90387 - RNA, 78 nt, Homo sapiens
aaccgaaacggaaagaagcaccggagagacagcacagcacccacaaagcaacgaggcggggcaccaggcccagacggc

SEQ ID NO: 90388 - RNA, 35 nt, Homo sapiens
aaaggacgacagccagagaggaggagccaccgacc

SEQ ID NO: 90389 - RNA, 76 nt, Homo sapiens
aacacaaagaagcaacggaaaaccgcaacccggaagggaaagcaacacaacaagagagaaggaaagacagaacaga

SEQ ID NO: 90390 - RNA, 68 nt, Homo sapiens
agaagcaccgggggaaagcccacagagaggaccggaggaacgcaagcacaggaccagaaacgaaaggc

SEQ ID NO: 90391 - RNA, 88 nt, Homo sapiens
ccgggaagccaccgaggcccaagacgcagggaagggcacaaccccgagaggccgaggccgcgaggaacaagggaagcgcccagcagaa

SEQ ID NO: 90392 - RNA, 78 nt, Homo sapiens
gccgccgggcgccagcggacaaaagcagccgagaacccgccgcggcgcccgcccaggccaagggggggaaggacccca

SEQ ID NO: 90393 - RNA, 81 nt, Homo sapiens
ggagcgccaaacgcccgaaagaagcggacggagaaccgggcggggcggcccaaggggaagcgggcccggccccgcgggaag

SEQ ID NO: 90394 - RNA, 77 nt, Homo sapiens
acgcacccacccacgccaggaccccgccaaggagccccacgagagcagagaaagggggacaccaaagcggaaaccag

SEQ ID NO: 90395 - RNA, 66 nt, Homo sapiens
ggagagcacacgcccgccgccgacgaacggggagaagacagcagggccagggccgaaggggggacc

SEQ ID NO: 90396 - RNA, 78 nt, Homo sapiens
ccaagcagcagaaagggaagaggcaaaagaaaccaaggggccgaaggcagcacaacgcccagaaaacgaaggaaggag

SEQ ID NO: 90397 - RNA, 80 nt, Homo sapiens
gcgagggagcccgcgcggcgagagcccacaggcccccacagacggcagccggcccgggcgcccccagacacggaccgcgc

SEQ ID NO: 90398 - RNA, 63 nt, Homo sapiens
cgacgaggaggacgcagcacgaccccaagcggagcgcaacccaggaccccagagggccggcgc

SEQ ID NO: 90399 - RNA, 76 nt, Homo sapiens
ggaggcccgacaagcgaacccaagaacaggaggccggacaggacaaaaggacacaacccacacaagaggagaagag

SEQ ID NO: 90400 - RNA, 75 nt, Homo sapiens
gccgggaagaccacgagggaggcacagcgacagcagcgcacaggggcccgggagagcgggccacgcgcgcagacc

SEQ ID NO: 90401 - RNA, 78 nt, Homo sapiens
aaaacgccgcagggagacgaaagcgccaacgacccgccacacacagagagggacccccccgcggcggcgaggcccgag

SEQ ID NO: 90402 - RNA, 74 nt, Homo sapiens
accagaaggcagagaggggccccagaggagaaacacggacggggaggcaagcaacacgccggacgagacaccgc

SEQ ID NO: 90403 - RNA, 40 nt, Homo sapiens
gaaaggcacgaaagccaggacagccccccggacacaagac

SEQ ID NO: 90404 - RNA, 65 nt, Homo sapiens
gccgcaagcacgagagcggccaaccaaagcgaaggcggcacccccacaagcgggaggaacagaca

SEQ ID NO: 90405 - RNA, 114 nt, Homo sapiens
ggccggcgcacccaggagaaggagcagacaagaccccaacaacaaggcccccaagacaagcgggagccggacagcagcaacccagcaaaccaccaaaagaccaccacccgccgg

SEQ ID NO: 90406 - RNA, 89 nt, Homo sapiens
gaaaaacggccaaagaagggccaagccgggaaaaagagaacgagccaccacaggcagcggcaccaacggacagggacaagaagaagcgg

SEQ ID NO: 90407 - RNA, 69 nt, Homo sapiens
aaaaggccagcgaggaggccgcgcgggagcggaaggaaaagggaagggagaggccacgagggggcagaa

SEQ ID NO: 90408 - RNA, 55 nt, Homo sapiens
ggcgagaacgcgcagaccggggagggaaagaaagccaaaaggaccaggcagcaac

SEQ ID NO: 90409 - RNA, 85 nt, Homo sapiens
gaccacaggccgaccagggccgcacaggaaccgcagacccggggcacagggaccaggaggaagaagagagccgagggaagacaga

SEQ ID NO: 90410 - RNA, 55 nt, Homo sapiens
cgagcgcgccaggccgacagccgcggccgggcccgagaggagaacaagcggagaa

SEQ ID NO: 90411 - RNA, 74 nt, Homo sapiens
ccaggagcgccacgcgcggaaggcagcgcccagcagcgcaggcacagccagggcgaaagaagaccccgccaccg

SEQ ID NO: 90412 - RNA, 63 nt, Homo sapiens
cgggaaacgggcgaagcgacgagccgcgaggaggcacacgcagaacagaggaagcaaaaagcc

SEQ ID NO: 90413 - RNA, 63 nt, Homo sapiens
gacgacgacgacgaggaagaggaggcgagggccggcgcggcccagcaagccgaaagcagaagc

SEQ ID NO: 90414 - RNA, 54 nt, Homo sapiens
agacgagcagaaccgcggacccagaacgccggaggacccggccaaaccacaggc

SEQ ID NO: 90415 - RNA, 89 nt, Homo sapiens
gaggaggcgagcagccgggagacaccgccaccgccaggccggggggggcacagagccccggaagacagcccccagcgaccagacccagg

SEQ ID NO: 90416 - RNA, 73 nt, Homo sapiens
ccgcggaaaggcacccaccagcacagagagcccccggggcagacagagcggaagaccaaacccaagacacaac

SEQ ID NO: 90417 - RNA, 110 nt, Homo sapiens
ggggaccccaagaagaccacagagggacccggacaaccagaggcagccagcagggggagaaggggcagaccaacaccacccagcaaaaaccccgacgaacgcgccaggga

SEQ ID NO: 90418 - RNA, 84 nt, Homo sapiens
gacgacgcagaaaggagacacgagcagagaacgggccgggcagggcccccgccagggacccggcaaagagagaggcacacgccg

SEQ ID NO: 90419 - RNA, 95 nt, Homo sapiens
acggggcgccgaggcggcacagccgcccagccacccccaggacgcccgcaacccgacacgggacagagcgaagaaccccccaagaagacgaaacc

SEQ ID NO: 90420 - RNA, 75 nt, Homo sapiens
accagacggggacgcacacggaagaaacgcaacccaggaccaagaaaggcccagggaccaaagcccggacaaggc

SEQ ID NO: 90421 - RNA, 59 nt, Homo sapiens
gccgccccgcccggggacgaagagcgcagcccccggcgggcagcggacaaaagcaagag

SEQ ID NO: 90422 - RNA, 33 nt, Homo sapiens
cccaggacccccaaaacgcaaccgaacgcacac

SEQ ID NO: 90423 - RNA, 77 nt, Homo sapiens
caagagaagaagacgggcgcaaacagagcaggaccgcagggaggcagggaacaaacggaagcggagaaagagaaaac

SEQ ID NO: 90424 - RNA, 77 nt, Homo sapiens
cggaggggacgccacgcaacgccggaaagaccacagcaagaccacgcccccagccgggggaccaggccgaacgaccc

SEQ ID NO: 90425 - RNA, 37 nt, Homo sapiens
gcaagggccgggcgccgcaccagccaacaaccgaagc

SEQ ID NO: 90426 - RNA, 64 nt, Homo sapiens
gaccacaccagacacgggggacagaaagcaagacagggcccaaaaaggcaacaaacggagaaag

SEQ ID NO: 90427 - RNA, 66 nt, Homo sapiens
ggcgcccgcgccacagccaccagagccggcagcaaagagggaacaggggagagcacaagcgaaacc

SEQ ID NO: 90428 - RNA, 35 nt, Homo sapiens
acccaaaggcagcggagggcaaggccagagaaggc

SEQ ID NO: 90429 - RNA, 50 nt, Homo sapiens
cagccaccacaccaagacaccaggggagaccgaaaggcagcaggcgccca

SEQ ID NO: 90430 - RNA, 75 nt, Homo sapiens
gcaggaaacgcaaggaggggggaacacccaggccaggaggaagcgaagaaagagccaaaagaaagcaaagcgcag

SEQ ID NO: 90431 - RNA, 66 nt, Homo sapiens
acagaagcagcggaaccggagagggagagaccagaggcgcccccacgcgcggaaaggaaaacacgg

SEQ ID NO: 90432 - RNA, 73 nt, Homo sapiens
cggacggaggagcaggcgagaagagaaggccaaagccacccccaaaggcagaggaagaacgagcagggaacca

SEQ ID NO: 90433 - RNA, 74 nt, Homo sapiens
gggaccgccaccgggcggggccgcggcggcggagcgggcgcacccccgagagagccacggaagggcgccaagga

SEQ ID NO: 90434 - RNA, 68 nt, Homo sapiens
caagccggaagaaccgcagccgagcggggccggccacagaacaacagcccccccggcggaagccgcgg

SEQ ID NO: 90435 - RNA, 52 nt, Homo sapiens
gagacaaaggcaccggaaagccaggaaaaacacacacaaacccacaagcgaa

SEQ ID NO: 90436 - RNA, 66 nt, Homo sapiens
gcgaagcgaaagagaggacaaaagaacgacgacgccgcgaagaaaccaaggagaagaccaagaaac

SEQ ID NO: 90437 - RNA, 76 nt, Homo sapiens
ccagccgcgccgaaaggacacaggaacgccacaagaaacaacagcaaggcgagggccacgaaacagaggagaagaa

SEQ ID NO: 90438 - RNA, 78 nt, Homo sapiens
ggagcagcagaggaccggacgggcacacgggccccgagggacaggcgagccgaccgaggaggggccggcgggcccagg

SEQ ID NO: 90439 - RNA, 113 nt, Homo sapiens
gcgaggggggacccagaggacccagcagaccaagagcgaaggaagaggcaaagacgggacaggaacacgacaacagacgaaggacacggaaacgaacaagcacacgacaagcc

SEQ ID NO: 90440 - RNA, 82 nt, Homo sapiens
cccgcccccccccccacgcaaccccagaccaacacacagaacacaagcacaacaccgggcaacaagcaggcccagggaacag

SEQ ID NO: 90441 - RNA, 86 nt, Homo sapiens
cccaggcgccggcgggaaggcggggcgacccggggggcgcgcccagagccccgcgcagcccagggaagaacaccagcaggaaaaaa

SEQ ID NO: 90442 - RNA, 75 nt, Homo sapiens
cggaagcgcgcgggccgccaggcgcggaaggggcggcgaagaagccgggggaaccacagccggagaaggaggagc

SEQ ID NO: 90443 - RNA, 77 nt, Homo sapiens
agcaccaggagccccccgcccagacaaggccgcggccgcgggagaaaacgagggggaaggacaggagcacgccagga

SEQ ID NO: 90444 - RNA, 52 nt, Homo sapiens
cagacgcagggcgcccccggaccgggaaccccggacaaaacgcgcaaaagga

SEQ ID NO: 90445 - RNA, 74 nt, Homo sapiens
ccgggaagcggccaccgacacgcagcagcggccaggaagacacccgaagacaagaggaccaagaagaagcaagg

SEQ ID NO: 90446 - RNA, 72 nt, Homo sapiens
cggccggccccccccagcgcaaccagcaaacggccagcaccacgaggcgggaagcggcaggagcaaaacgga

SEQ ID NO: 90447 - RNA, 81 nt, Homo sapiens
cgagcgagggggggcgcgccggaaaccggagcgcgcagcaggccacccagaggagaaggccaccccgccggaggcacaggc

SEQ ID NO: 90448 - RNA, 75 nt, Homo sapiens
aggacccaagccgacaccacaacaaagaagaccacacacgggaaacacaaaaccaaaaaggagcagagcagaaaa

SEQ ID NO: 90449 - RNA, 81 nt, Homo sapiens
gggaccgaggagagcagcccgaggccaagccccgcccgaggacagcggcaccacccagagaaaacggccgcgacgggcccc

SEQ ID NO: 90450 - RNA, 84 nt, Homo sapiens
cgcaagcaggcaaccgaaacagggaccagcaccggcccccccggcaaccacgggggagcggcggaggaaaggacaaaacccggg

SEQ ID NO: 90451 - RNA, 39 nt, Homo sapiens
gggccagcgacaaaaagagacaacgaagagaggaaagaa

SEQ ID NO: 90452 - RNA, 72 nt, Homo sapiens
gggagaagaggacaaaaaaaaggcaaagacgggagcagacaacagccagcaaggcgaccaccaagaaaaggg

SEQ ID NO: 90453 - RNA, 52 nt, Homo sapiens
cggaccgggagacaccccgcacacacacccaaggaacagagacaaaggaccc

SEQ ID NO: 90454 - RNA, 84 nt, Homo sapiens
ccccgggccgggcgcgccgaggaagcaggagcggccaacagccggagcgaccccccagaccggccgccccccccccacggcacc

SEQ ID NO: 90455 - RNA, 77 nt, Homo sapiens
aagcccagccgcgaaaggggaggaagacaaggagaagccagcgggaaggaaaagacgcagcgaaagaaaaccgaccc

SEQ ID NO: 90456 - RNA, 65 nt, Homo sapiens
gaaggaccaagaaccagggaaaagaaggacggcgccagagaaggaacagggacgaaagggagagg

SEQ ID NO: 90457 - RNA, 78 nt, Homo sapiens
agcagcgcgccccaagcagcccggcgaccacaagaacaccaacaagagaaacggagagaagaaaaaacacgccagaga

SEQ ID NO: 90458 - RNA, 79 nt, Homo sapiens
cgaaggcaacaggagcgggaaacgacgaagggaacgcacgggaaagcgcgcaaaagacgcacacgggccgccgcgggcc

SEQ ID NO: 90459 - RNA, 33 nt, Homo sapiens
acccagggaagagaagagggcagaagaaagccc

SEQ ID NO: 90460 - RNA, 73 nt, Homo sapiens
gcccaagccagaaggacaggacgcaacgaaaccggcacggccgcccgaggccccacccgcggagaacaagggc

SEQ ID NO: 90461 - RNA, 89 nt, Homo sapiens
agcagcggacgacgggagcagacggacgggccacggggaggaggccagacagggacccccccgcggcaggaacgcacccggcggcccca

SEQ ID NO: 90462 - RNA, 76 nt, Homo sapiens
ccaacacccgcgggaagcacgcagaacccagcccccagcggacaaggcagcggaggaggagaaagagaggaccccc

SEQ ID NO: 90463 - RNA, 85 nt, Homo sapiens
aagggcaggcaagacccaccccgggaagaaagcaaacaggggagcgggccggagagaagagaggggcgcgaggagaaggaaacag

SEQ ID NO: 90464 - RNA, 64 nt, Homo sapiens
gcaccgggacgcgcacccccgcgccgcacggggacgaggggcgggcccaaagggcccgaagccc

SEQ ID NO: 90465 - RNA, 41 nt, Homo sapiens
gcaggcgcgcgccccccgagcaggagacgcccccggcacgg

SEQ ID NO: 90466 - RNA, 78 nt, Homo sapiens
cccgacacggggcgacacagcggccgagagacgcgaagggagggccgccccaaccgacgcaccagccggaggaggagg

SEQ ID NO: 90467 - RNA, 72 nt, Homo sapiens
acgggacaacaaaagagccacccaagggcaccacacaccacaaaccgagggaagaaaggacaacagaagacg

SEQ ID NO: 90468 - RNA, 71 nt, Homo sapiens
cgcggcgggccgccagagcgcacacggacccggacccaccccgcacccgagagacggggcgccagggccag

SEQ ID NO: 90469 - RNA, 94 nt, Homo sapiens
cgcggcgcacacagagcagagacgagcgaggcggagggagaaggccaaaacggaaaacgccgacaacaaagcagcaggaacaggcagagccaga

SEQ ID NO: 90470 - RNA, 76 nt, Homo sapiens
agaagaacccacaagagccccagaaaagagcaggaaaaaccagaagagaaaaaacaaaggggagaggcaccccgcg

SEQ ID NO: 90471 - RNA, 80 nt, Homo sapiens
gggcaaggaggggaggcgagaacacgaggaggagaagacagaggagccagaccaagagacagcacaggcgagcgagcaga

SEQ ID NO: 90472 - RNA, 81 nt, Homo sapiens
ggaccacacgggcacggcgaggggccggccgacaacacagggcgggagggacaccaggccaaaccaccccaagccgagcac

SEQ ID NO: 90473 - RNA, 71 nt, Homo sapiens
gccccacaccgaagacaacacccgcgaggaaaagccgcgacggcccgagagagaacacaagcccgaggcga

SEQ ID NO: 90474 - RNA, 70 nt, Homo sapiens
gacaggcggcgcacggaaacagccacagcagccgagcacaccacaggccaaacggaggaaggcaccacgg

SEQ ID NO: 90475 - RNA, 71 nt, Homo sapiens
caagagccaacccaaaaccaaaaagggaggacggcccccgaccacaagccgcgccccgcagaggggaagag

SEQ ID NO: 90476 - RNA, 75 nt, Homo sapiens
gccaggaaggagacacggccccccaaggaaaacaggcacccgaagagagacccagagaaggccgcaggcgccgcg

SEQ ID NO: 90477 - RNA, 99 nt, Homo sapiens
cccggggcggaaagcgcggaccgcgccgccccgccgcggcggggacgcagcaaggccaagacaggggacagccggccgaacggcagccccgggacccaa

SEQ ID NO: 90478 - RNA, 87 nt, Homo sapiens
agcgcggacaaggacccgaccgccgcgcgggggccaacaagcagagagacaaaaggacccaggaaaggaagacagcagagacaaagc

SEQ ID NO: 90479 - RNA, 61 nt, Homo sapiens
ggaggccacacaaccggcgccgggaaccgccgagccaccagggaagaaagaagagccaccc

SEQ ID NO: 90480 - RNA, 73 nt, Homo sapiens
agcgggaacaggcaggcacagaaaggcggaccaggcagcggacacaagcaacaacaaagcacggacccggagg

SEQ ID NO: 90481 - RNA, 89 nt, Homo sapiens
aaaaagaagggaaaggagcagggaaaagaccagaagcagagcgacacacaccgaagaaccaaccacaaaaaaggagaaacgaggaccga

SEQ ID NO: 90482 - RNA, 69 nt, Homo sapiens
gagaggagccaaaggaacggcaggccagcgcaacggaaacagaaaagagcgggaaccagccaacagaaa

SEQ ID NO: 90483 - RNA, 55 nt, Homo sapiens
gaccccagcaggggaagacagcagcgcccaaggacaagccaagcggcccaaaacc

SEQ ID NO: 90484 - RNA, 71 nt, Homo sapiens
cggaaagaagaaacaccgcaaagccagaccaggagaagagcagggggccgaaaggcagacgggaaaaaccg

SEQ ID NO: 90485 - RNA, 79 nt, Homo sapiens
caggacgcacgaccccacccagggcggccaggcccaccacacacgcagggcgcagcaaagaagagggaccacagagcgg

SEQ ID NO: 90486 - RNA, 76 nt, Homo sapiens
ggccggccagcacccggccccgcacccaagacacgcaaaccaccaggaccagggaacagaaggcggaaaacacaag

SEQ ID NO: 90487 - RNA, 73 nt, Homo sapiens
gcgggccgaacccagagcgagggggggaccaccgccggccaggggcggaaacgcaaccccccacgccagccag

SEQ ID NO: 90488 - RNA, 73 nt, Homo sapiens
gcagccgcaccggccaagggaaccccgacagcagagacgacgcggcaagcagcggaagaggacgacgcgacac

SEQ ID NO: 90489 - RNA, 74 nt, Homo sapiens
aagcggcaggaaagcgggagcaggcgaagcgagccagggaagcgaaccaggcgaacaagacgacaccgccagca

SEQ ID NO: 90490 - RNA, 62 nt, Homo sapiens
gccccggcccacaggggggggcaaacccgagagaacgggacaccgcgaccagcaccacccaa

SEQ ID NO: 90491 - RNA, 73 nt, Homo sapiens
gcaggccggggagcgccagcccggaggaacaaccggaccaacagaacaacgagagcaaagggacgaaaaagga

SEQ ID NO: 90492 - RNA, 79 nt, Homo sapiens
gaggcacaggagacccaggccaaggaccgagggagggggcagcgaacgcgaaaagaaccacaggagaacgcacaagaaa

SEQ ID NO: 90493 - RNA, 74 nt, Homo sapiens
gggagagccgccgcaaacccagaccggaagaaaacaggcgaaacaaggcacccccagcgccgaacacaggacgc

SEQ ID NO: 90494 - RNA, 79 nt, Homo sapiens
cccgcgccggcccggccgaccccggaagcgagcgcggacgccacccgggggcacagcaaggaacaaggaaacacgcaga

SEQ ID NO: 90495 - RNA, 71 nt, Homo sapiens
agcagcaaacagcgaccgccaagagacacacagggcaccagaccggaggaggagcgcgaagaagaccacag

SEQ ID NO: 90496 - RNA, 87 nt, Homo sapiens
ccagacagacgccggggaggcagcgcgggacccagcccaggcggcgcggacggggcgggacgcggcagagcgcaagccgacacgagg

SEQ ID NO: 90497 - RNA, 72 nt, Homo sapiens
agcgcccccgcccgcccccacccgcggcagcggcagcccgaggccggccgccgcgcccccaggcccggaacc

SEQ ID NO: 90498 - RNA, 73 nt, Homo sapiens
gcacagcgaggacggccgggcccgagggagagcagaacaggggaggagaaggaacagaacagacaccaccgaa

SEQ ID NO: 90499 - RNA, 79 nt, Homo sapiens
aacccagcgagaccgggccggaacgaaagcaggacggaggagcgaccaccggccacacacccccacggcgagacccaga

SEQ ID NO: 90500 - RNA, 77 nt, Homo sapiens
gaccgcgcaagaggcgaccccagcacggcaaagcccggagacaagcgggaagagcaagcgaggaaaaacaccaacag

SEQ ID NO: 90501 - RNA, 72 nt, Homo sapiens
ccgaagccagaagacggaaaaaacagcagggaaccccacagacggccagagggggccacgccaaccgcccgc

SEQ ID NO: 90502 - RNA, 71 nt, Homo sapiens
acaggcgcaaaacagggcaagcaggggaaaacaggagcaaacagcaagagggaaacagaaaaaggacaagg

SEQ ID NO: 90503 - RNA, 57 nt, Homo sapiens
acaccgcgacaccccaacaaacaccagcgcggacaacaggcacaaagagagaaggaa

SEQ ID NO: 90504 - RNA, 60 nt, Homo sapiens
cagagggcggaccccagaccaggcgggggcccgaccgaccccggacccaaagacaggacc

SEQ ID NO: 90505 - RNA, 70 nt, Homo sapiens
ggaacgcgaaaccaaagggaacgaaaagaccaaaacggacgaaaaggcgggaaaaccgccacaaagcccc

SEQ ID NO: 90506 - RNA, 89 nt, Homo sapiens
gcagggggaacacccaggccaggaggaagcgaagaaagagccaaaagaaagcaaagcgcagaaagggagaagacagggccgaggagggc

SEQ ID NO: 90507 - RNA, 74 nt, Homo sapiens
cgccagaggagagaggagaggagagaagaggacccacaacagaccggggaccacgggaaagcccccgcagccgg

SEQ ID NO: 90508 - RNA, 93 nt, Homo sapiens
ccaagccgcacagccgcggcggcagcagcaggagagcgcgcagggaccagcggcggagaccgcgagcggccccacagaggaccaggggaaacc

SEQ ID NO: 90509 - RNA, 80 nt, Homo sapiens
cgcgcccgcgccagccccgccccgggcaaagcccacggccgccgagcaggggccgggagaggaaggccccaagcagccag

SEQ ID NO: 90510 - RNA, 70 nt, Homo sapiens
gcaaacgaagggcaagaacaaaaaagcaggacaagacccaaaagggcagcgcaaaagaagagacagaggg

SEQ ID NO: 90511 - RNA, 70 nt, Homo sapiens
cgcagcggggacgcggacgcacggagccggaccagaccgccggagcacgccgagaccaccgaggacacaa

SEQ ID NO: 90512 - RNA, 63 nt, Homo sapiens
ccaccgggacaggcaccagcaaaagggaaccaccgaacgacccgcaccaacagccaagcagcc

SEQ ID NO: 90513 - RNA, 79 nt, Homo sapiens
cgcggaaacgcccgggacacccacaacaacaggccaacgcccggccagcgccacgcgagcgcgcaagggcggcgcgccc

SEQ ID NO: 90514 - RNA, 116 nt, Homo sapiens
ccaggccacgcgggaggcccaggcccccggacggcgcggaccccgacggcgccggaaaaccaagagaggcccaagcaacagcccccaccccaacacaccgggcccgcgcccacccc

SEQ ID NO: 90515 - RNA, 83 nt, Homo sapiens
cagaaaggcgcaggcccacccagggaccaaagaacccaccgccccgaggaaacgagaagcccagcaccacagcagcaccaaaa

SEQ ID NO: 90516 - RNA, 57 nt, Homo sapiens
gccgacaggcaccccgagcgccgcggagagcacaggagcacgggagcaggggcagac

SEQ ID NO: 90517 - RNA, 58 nt, Homo sapiens
aaaagcacacaacggagaccacagcccacagagcacgcagccccgaaggcggcccggc

SEQ ID NO: 90518 - RNA, 78 nt, Homo sapiens
cccgcggccggcccggcgcggcccagcgccccaggacccagaagaccccagacggggagcgcagcagagggagcgccg

SEQ ID NO: 90519 - RNA, 77 nt, Homo sapiens
cggagccaggaggccacgcaacggggccggggggcccgagcgacaccaaccacccaggcacagccacagccgcaagc

SEQ ID NO: 90520 - RNA, 60 nt, Homo sapiens
agcgggaaagaaggcaaaacacggaaccccaaggacccagacgaagagaacagcccacca

SEQ ID NO: 90521 - RNA, 69 nt, Homo sapiens
cgacaaaagaaccagaaaaagagaaggaggcgcgagagaaacaaggaaagcagaagaaagggagaggac

SEQ ID NO: 90522 - RNA, 67 nt, Homo sapiens
ccggccgggcccgccccacgaccacagagaagcaggcgaccaggcgcgcgggcaagaaagcagacgc

SEQ ID NO: 90523 - RNA, 50 nt, Homo sapiens
ggcccccaggccccgccagaggcaaaccacaacgggaagcggaaacccga

SEQ ID NO: 90524 - RNA, 86 nt, Homo sapiens
cgcccccacgcgcacagaggccacagagccgaccagacagcgacgggaggcggaccggcggaggaggcgggagcccagcccgagag

SEQ ID NO: 90525 - RNA, 71 nt, Homo sapiens
aagccaggcacaccgcaaggacccaaaggggaggaaagggcacacggcccgaacaagggaacaccagcaca

SEQ ID NO: 90526 - RNA, 88 nt, Homo sapiens
cacaaacgccaagccaggggacccagaaaggcgccaagcgcaccacagacaaacgcaaagggccagaacccacgcgccgcggccacgg

SEQ ID NO: 90527 - RNA, 88 nt, Homo sapiens
gccagacccggcacgccccagcacacgaggaacggcgacgccaaccccgcggcgaagagccacagggacaagcgaaacacagggaaag

SEQ ID NO: 90528 - RNA, 82 nt, Homo sapiens
gcgcacaacgcaggaccggcgccgaaggcccgccagacgcccaggagcgccaccacggggagaagacggggcgcagcaggcc

SEQ ID NO: 90529 - RNA, 81 nt, Homo sapiens
ggcggcggggcagggcagacaacaccgacgaggggaccgggccccgaaggagggacaggcacacacccagggggcccgaac

SEQ ID NO: 90530 - RNA, 61 nt, Homo sapiens
gagaagaaccagaagaggacagacacagagaaagacagggaaaccaagagcagagagagca

SEQ ID NO: 90531 - RNA, 76 nt, Homo sapiens
gacccggcgacaacacccggccccgagacagaagccgaaaagagaagagacccacgcaacgaagcagcccccaccg

SEQ ID NO: 90532 - RNA, 94 nt, Homo sapiens
gaggcagcggggcaggggcgcaggagcaaggaccaggagcaggacggggacaggaccgaaggagaagaaggagaaggggaggagaaggcaagcc

SEQ ID NO: 90533 - RNA, 83 nt, Homo sapiens
gcaccaagggcgaaggagccggcccaaggacagcccagagcaagcacacggaggcccgggagccagaccgggagcccgcccca

SEQ ID NO: 90534 - RNA, 80 nt, Homo sapiens
cgccgagcaagacaccgagacaggaagcggaacccagacaggcaagcagcaagaccagcgagacccaacagagggaacag

SEQ ID NO: 90535 - RNA, 67 nt, Homo sapiens
aaaaagcagccggcacaagacagagagaggagcgcaggaaagccaggaagggaaagacggagacaac

SEQ ID NO: 90536 - RNA, 59 nt, Homo sapiens
gggagagacagagacgagaagcaaagccaagaaaaccaggcccgacagcaagaaaaaag

SEQ ID NO: 90537 - RNA, 79 nt, Homo sapiens
aacggcgacagggacggccaggagcagccagacgccccgggcacgccaggaggagccgcagcagaccagcgcgagcccc

SEQ ID NO: 90538 - RNA, 80 nt, Homo sapiens
accccccgcccgccccccgcccccccagccggagaccagaggcaccgacgggaggcagcggcaagagcgggcaggcggga

SEQ ID NO: 90539 - RNA, 80 nt, Homo sapiens
gaacgacgcggcgcgcgcggacgaagagccccccccccaacaccgcgacacgcagcgcgccggagagcagccaagaaagc

SEQ ID NO: 90540 - RNA, 77 nt, Homo sapiens
gagccaccgcgcccggccgagaaaaccccgggcccagccacaaagccggaagccccaaaggccgcggggccaaaccg

SEQ ID NO: 90541 - RNA, 75 nt, Homo sapiens
ccacggcggaacaagcagcaaaggaacaacacacgaagagcccaggcaccaaaacagagcccaccgcacccaggc

SEQ ID NO: 90542 - RNA, 73 nt, Homo sapiens
gccagaaaggggagagcgcgaagcaaaggagcaagcggccgagccgaggcaggaagaggagaggcggacgcag

SEQ ID NO: 90543 - RNA, 71 nt, Homo sapiens
agccgcccggggcagggccgggagagcggaccgcgaccgcacaagcagccgccagcggaaccaagcggcgc

SEQ ID NO: 90544 - RNA, 74 nt, Homo sapiens
gcccagaagaggggggccgcagcgagccccggcagggaaaggcaggaccggcaaaaccagaaggccggaccggc

SEQ ID NO: 90545 - RNA, 79 nt, Homo sapiens
ccgcagggaaccgggaaagccaggagcccaggcaagccggcacaccggcgcgagcggaggcaaggcagaccggccacgc

SEQ ID NO: 90546 - RNA, 76 nt, Homo sapiens
ggggccacggggcccacaggacggggagacagcagcaggaacacaggaacaggacacccaaccgcgagaccagcaa

SEQ ID NO: 90547 - RNA, 76 nt, Homo sapiens
agaaccaaagggaaggcagcacgggggcagggcaaaacacacagcgagccccgggcaaggggagcagacaacaaaa

SEQ ID NO: 90548 - RNA, 70 nt, Homo sapiens
aggggcaaacgcccaggggccagcaccacagagagacagagcacagagggcgggcaggaaaaggagaacc

SEQ ID NO: 90549 - RNA, 72 nt, Homo sapiens
gaggaagcaaaagacggggaaaagaacagaacccaggagcacagcagcgaagcagcagaacgacaaaacgga

SEQ ID NO: 90550 - RNA, 80 nt, Homo sapiens
gccacagaaagggggaacccgagcggagcagcaggccaggccggagaccccccccgcaggccaaagccacccccaaaggc

SEQ ID NO: 90551 - RNA, 69 nt, Homo sapiens
gccagcccgacagccgcaaaacgcacaacggacacagaccacacgcacaagccccgaaccaaagacacg

SEQ ID NO: 90552 - RNA, 81 nt, Homo sapiens
gccccgccgcggcggggacgcaggcaccgccccgggaagaagacagagaggacaagcaccacaacagcccgccccccagga

SEQ ID NO: 90553 - RNA, 31 nt, Homo sapiens
cagagagacgaggcacagaaagaagaggcgc

SEQ ID NO: 90554 - RNA, 69 nt, Homo sapiens
gaaaggacacacgaaaacagacgggggaacaagagaccaaaagcccgaaaggacggaacccagaacaaa

SEQ ID NO: 90555 - RNA, 81 nt, Homo sapiens
agacaccagcccgaaacaccaccaaggacgagagaggagcgcgggccgagagcggagagcgggacgcaaggaggaggacgg

SEQ ID NO: 90556 - RNA, 76 nt, Homo sapiens
gacaacaagagaacagggcagggcaggggcggcggccagggacccaaagagagaaaaaagccgcccacaaggagag

SEQ ID NO: 90557 - RNA, 73 nt, Homo sapiens
agcacgaagggacgcgagagacgcaagacgaacaggaacagagaagcggaccaagcgagacggacgggaaaaa

SEQ ID NO: 90558 - RNA, 73 nt, Homo sapiens
ccagcaaaaacggagaaaaggcggagcccggcccgagagagaaagggaaagaaggagcggagcagaacaagga

SEQ ID NO: 90559 - RNA, 80 nt, Homo sapiens
ggggaagaaacagaaagaaacacaaaagcaaaagagagccaaaaaggccccaggagaaagccagcagcgagcgccaagac

SEQ ID NO: 90560 - RNA, 78 nt, Homo sapiens
ggccaggcaggaagacccgaccagcggaccggacagcaacccagccaaaggcagcgccgcacgaagaaacagagaacc

SEQ ID NO: 90561 - RNA, 74 nt, Homo sapiens
accaccacccgccaccgagcagagcgcgccgaggccgggccgggaaaagagagggcagcagcaaccagccgcaa

SEQ ID NO: 90562 - RNA, 66 nt, Homo sapiens
caacgccagcacacggaagaaagggaaccggagaagagagagaaagaccaaggccggaaaggaaaa

SEQ ID NO: 90563 - RNA, 96 nt, Homo sapiens
agacaagaccagggcgagcaccgccccagacgaccgggacaagacggaaccgccgagaccagaacacacggcgaacgagagaaaaaggccccaaac

SEQ ID NO: 90564 - RNA, 68 nt, Homo sapiens
cccgggccaggaccacacaggacaacaaaggacagacaccaaaaggaagcgggcacaaaaaaaagcgg

SEQ ID NO: 90565 - RNA, 75 nt, Homo sapiens
ggggagaaggcaggcaccacaaaaaggacaggccccgaagagcgaaagcgccaccggaggccgagccaccaccag

SEQ ID NO: 90566 - RNA, 58 nt, Homo sapiens
gcccgaggcgcagcagcaggaggaggaccgcagcaagagagcacaagaagagaacaga

SEQ ID NO: 90567 - RNA, 90 nt, Homo sapiens
ccgagggcggggaccggcggcgcggaggagcgaggcagcgacaggacgggaacgggccaaacaccagagcacccagaaggaacaaaagaa

SEQ ID NO: 90568 - RNA, 79 nt, Homo sapiens
agcagcccgcgagagcccagaaagagcgaaccacagcgcgaaaaaaccagaggaggagaagagccgcagggcccagcgg

SEQ ID NO: 90569 - RNA, 73 nt, Homo sapiens
cccggggcagaacccgcacccaagcacaaaggagacagcacaaaaggaggccagcccggccgcgagccgacca

SEQ ID NO: 90570 - RNA, 50 nt, Homo sapiens
gcgagcgcgcgcgcgaaaacccgggcagcaaacgccagagaaccaaagca

SEQ ID NO: 90571 - RNA, 74 nt, Homo sapiens
ggaccccagcccagaaaagcgagaagaaaggagcccgcgccccaaggaggcagcagccaaaccgcagaccggac

SEQ ID NO: 90572 - RNA, 68 nt, Homo sapiens
accgacgaacacacgagaccgacggcaccaaacggcaaggaggaaaaaaccagaaaccagacggcggc

SEQ ID NO: 90573 - RNA, 58 nt, Homo sapiens
gcccaaagagcagaacagagagacagccagcccagaccaggaggggaagacgggcccc

SEQ ID NO: 90574 - RNA, 83 nt, Homo sapiens
gcacggaggggaaccgaaaagaggcaggaacagagcgagaggacagccccagaaaagacacaccagaagagaaagaaaaaaga

SEQ ID NO: 90575 - RNA, 77 nt, Homo sapiens
ggggggcacacccagggacacccaccgggcgccaacagcccccgcaggcggcagcggggcaccgcggggccgaccca

SEQ ID NO: 90576 - RNA, 70 nt, Homo sapiens
cggcgccgaaggcccgccaggaaccggccgaaccagaccggagcaggggcagcgaaccagggccagagga

SEQ ID NO: 90577 - RNA, 77 nt, Homo sapiens
caggagaccaaggaaaggcccgggcagggccagaaaacagacagagaggcagaaaaaagaaagaagaaaaaggagga

SEQ ID NO: 90578 - RNA, 67 nt, Homo sapiens
cacaaagcccagccaacaggggaagaagcgacgacagaggaaccgcaggccagggcgagggcacgcc

SEQ ID NO: 90579 - RNA, 76 nt, Homo sapiens
gaacggaggaggagccgcagccaaaaggggaacaacgagagcgccccaagggagccagcgcagccacacaagcaca

SEQ ID NO: 90580 - RNA, 71 nt, Homo sapiens
gcgcgcgcgcgcgcgggggaaggcccgacggcggcccacgcgggacggccacaggcgacacccgcgcgccc

SEQ ID NO: 90581 - RNA, 56 nt, Homo sapiens
gaaaaccccaaaaggacaaagcagcaggcgcaaaaacgaacccacaaccgaacgac

SEQ ID NO: 90582 - RNA, 53 nt, Homo sapiens
ggacggcgccggcagccggggaaaggcagggccccgaagagacagaacagagc

SEQ ID NO: 90583 - RNA, 75 nt, Homo sapiens
aacacagacccagccgccaaagagcgaaaaccccagcggaaacccagccaagaacaaagagacaacagccccaac

SEQ ID NO: 90584 - RNA, 74 nt, Homo sapiens
gcgcccccccggacacacagaaccccgagaggggaaagaggaagagcacgcacaaccagaccaacgaggaacaa

SEQ ID NO: 90585 - RNA, 92 nt, Homo sapiens
gcagcagcggcagcacaggcacacagcaaagaggcccaggaggccagagccacgaagcggcggcggccccgggggccagggggccggggaca

SEQ ID NO: 90586 - RNA, 106 nt, Homo sapiens
gaggcccgcagcaaagcagggcaaccagccaggagaaagccacagaccgggcggcaccccaccgcccagccacagccccccccacaggagcaccggccgaagaacc

SEQ ID NO: 90587 - RNA, 79 nt, Homo sapiens
gagaaaaaaagaggaggcgccgccgcgggcaaccgccgcacacggccaccccagggcaccacgagagacggggcgccgg

SEQ ID NO: 90588 - RNA, 77 nt, Homo sapiens
gccaaggaagggcgccaggcacaccgacaaacgaagcggggccaggggaggacccgcccccagccgggccacccggc

SEQ ID NO: 90589 - RNA, 79 nt, Homo sapiens
agacgagaaaggacgaagcaggcaaaagcagaccggaaaacccaccggcaagaccacacccgaggggagcccaggacac

SEQ ID NO: 90590 - RNA, 61 nt, Homo sapiens
aacaccaggaagagaggaagcgggggccgagaccacacagaaacaagacagacgaagaagg

SEQ ID NO: 90591 - RNA, 57 nt, Homo sapiens
ggagcggagcgccaagcccggccaaaaagggacccagaaagaagcacaaaacaaacg

SEQ ID NO: 90592 - RNA, 67 nt, Homo sapiens
cagacaagaaagaagccaacaggaacgaggaaacaccacaggagggaaaagaccagagaggcagggg

SEQ ID NO: 90593 - RNA, 75 nt, Homo sapiens
ccgcaagacccgccacaagcaacgcgggaagagaaggcccaggaggcaagagcgagaagagcgcaagacagaaag

SEQ ID NO: 90594 - RNA, 83 nt, Homo sapiens
ccgcaccagcgccgggacgggggggccggcagggcaagaaggaacagacaaaaacggccggaaggaaacacaggacaccaggg

SEQ ID NO: 90595 - RNA, 115 nt, Homo sapiens
gcggcgaggaggggccccagcagcccccgaaggcccacaggacaggagagaaagacggcaccaggcgaggaaacagcccagcagcgagcggcaccagggggcccgacccccccga

SEQ ID NO: 90596 - RNA, 75 nt, Homo sapiens
aaccggaccgcgcaaacgacagccgaagccccggaagcccaagacgcggaggacagaagacggaagaaacggagc

SEQ ID NO: 90597 - RNA, 81 nt, Homo sapiens
gggcacagcgaaggaaagccagaggacacgaagggggccggccaaacagacaggaaaaggcccaggacagggaacggcgcc

SEQ ID NO: 90598 - RNA, 68 nt, Homo sapiens
agccgcagccgacccagcccggagcagcagccgcgcagagagcgaaagccaggaggagcgcagcgaag

SEQ ID NO: 90599 - RNA, 80 nt, Homo sapiens
cgccccgaccgcacgggccagcacagcaacaaggggaaccacgacagcggcggcccaggccaggccacgggcaaaacacg

SEQ ID NO: 90600 - RNA, 80 nt, Homo sapiens
ggccggccgggcagggccccgagaggcaggcaggggacccggacggagccggcaggggacgaagagcaaagccacgagga

SEQ ID NO: 90601 - RNA, 75 nt, Homo sapiens
gaaggcacgaaggccaggaagagaggagggagcaccggacaaaagagagaccaccgcacacaagacacaagagca

SEQ ID NO: 90602 - RNA, 100 nt, Homo sapiens
cggcggcccggccgcagcggcaacagaacgaaaaacagggcacgaaagcgcgcgcgcagggagcagcacccccaccgcaggggcagaagggagcggaagc

SEQ ID NO: 90603 - RNA, 79 nt, Homo sapiens
aacgcacagcccccaccagggcacgcccagaacccccgcaggcggggcgagcccagcccgccgcccccagggcgcgccc

SEQ ID NO: 90604 - RNA, 66 nt, Homo sapiens
ccagcaccccagggcgcccagcgagagaaaagacacagacggcaaaacccaaaaaaccagaagagg

SEQ ID NO: 90605 - RNA, 75 nt, Homo sapiens
ggaaacccggagggaaccaagaaagggcaggcacgagcaaggaggagccccgaaaagcaaagaaaaaggaaggac

SEQ ID NO: 90606 - RNA, 66 nt, Homo sapiens
ccaccaggccgggaagcccacggagcgcacagcgaggaggggggcgcgcagcccggggaccccccg

SEQ ID NO: 90607 - RNA, 78 nt, Homo sapiens
ggggaaagggaagcaagagccagacccaaacagcaaaccccgcgcccaccgcccgcaccacgcaagaacggcccgaga

SEQ ID NO: 90608 - RNA, 53 nt, Homo sapiens
agacacccccgagcaggcacacaccgggacccgcggcagcggcagcaccgccc

SEQ ID NO: 90609 - RNA, 54 nt, Homo sapiens
caaacaaaaaacaccagggagaaaggaggacccgggaagacagagacgggcaac

SEQ ID NO: 90610 - RNA, 53 nt, Homo sapiens
gaggaacaacggaaccagacgccaaaccaccggccaggaggcacaggacgcga

SEQ ID NO: 90611 - RNA, 71 nt, Homo sapiens
cacacagggaggaaggagcaacccgaaaaccagccagacacaaacaagggaaaagaggacgaggcgcgaaa

SEQ ID NO: 90612 - RNA, 79 nt, Homo sapiens
aaaagaagcagaagagaagacaaggcacaagcagaggaaccagggaaccgccgccagcaaccaacaggcacgaggaagg

SEQ ID NO: 90613 - RNA, 63 nt, Homo sapiens
gcgacacaagaagagggcggagcggagacgggagaagaaaagaccgggcgggggcgggcgccg

SEQ ID NO: 90614 - RNA, 71 nt, Homo sapiens
agacgcaaggagagcaacagagcacaagccggaaggaaacccagacacgcgcaagccccggggcagagaca

SEQ ID NO: 90615 - RNA, 82 nt, Homo sapiens
gccccagaaagccccagacggaaagagcacgcgaggggcaagcgcgagaagagcggcgcccacaaccccccgagcgcaccgc

SEQ ID NO: 90616 - RNA, 75 nt, Homo sapiens
gagcggacagagagaaaaggggcggccccccgggcaccacccaggaccgagaaaccccaggccggcagcccaccc

SEQ ID NO: 90617 - RNA, 73 nt, Homo sapiens
cccgaggagaaggagccggaaaagacagggggggacagcccggcagacgggccgcccccaggcaccaccaacg

SEQ ID NO: 90618 - RNA, 66 nt, Homo sapiens
agagccggcagcaaagagggaacagcaaagggcacaagcccccgaagacaagaggccggggagacc

SEQ ID NO: 90619 - RNA, 73 nt, Homo sapiens
cacccagagccgccaccagggggagaccgaagagcgcaaaaaccgaaaccgcccacggaaaagcaaacgccag

SEQ ID NO: 90620 - RNA, 67 nt, Homo sapiens
cccggcggacgccccggggacaccaccgaccagagacccagcaccggaagggggccggcaggacagg

SEQ ID NO: 90621 - RNA, 56 nt, Homo sapiens
ccgagcaggcgccgccccagcccgcgaacgcgagcgggcggacaccagaacgagga

SEQ ID NO: 90622 - RNA, 76 nt, Homo sapiens
gccgagggaaaaaccccggaagggcggacaccccacacgccgccacccccaccggaggcccagagggaggcacaac

SEQ ID NO: 90623 - RNA, 79 nt, Homo sapiens
cccagggcggggaacggaggagcgccgagccaggccgagggaacagagggaaaacgccaaaaaccgccaggagcaagaa

SEQ ID NO: 90624 - RNA, 78 nt, Homo sapiens
ccgccacccaaccacagcccgcccccccggggcccagcagggcgaaccggcgcgcgggccgcgcccaggagccgcacc

SEQ ID NO: 90625 - RNA, 77 nt, Homo sapiens
aaagaaagggaagaggaagaaagcgccaggcaggaacccaagaagaaggaagggcgcgcggcccggcacaccaggcc

SEQ ID NO: 90626 - RNA, 72 nt, Homo sapiens
gaccggaaagaccgcgagaaaaggccagggcccacgcaagcccccaaggaaaagaaagcagaggggaaacag

SEQ ID NO: 90627 - RNA, 69 nt, Homo sapiens
agaggggaagaggcgccgggacaggacagcgaacccacccaacacggcaaaacaaagacaccacaccca

SEQ ID NO: 90628 - RNA, 73 nt, Homo sapiens
ccggacacagcggaggagaagcgcaggagaaaggacggagaggccgcccacggagcgcagagccaaccccaag

SEQ ID NO: 90629 - RNA, 90 nt, Homo sapiens
gcaagggaccagcaaggcggcagagcaaggggcacgcagaaggaccggccacggccgccaggcacagagaaggcaaacgggagggcgagg

SEQ ID NO: 90630 - RNA, 71 nt, Homo sapiens
aagcaagagacagcgaggacagaaggaagacagcaaccggaaagggccaaccggcgcacagggagcagaag

SEQ ID NO: 90631 - RNA, 70 nt, Homo sapiens
cagaagaaagcggggaagccagcgaacgcagggcaaggaacaggaaaagggaggcaaagacaaccagaaa

SEQ ID NO: 90632 - RNA, 64 nt, Homo sapiens
accggaacccgcggacaacgaagagaggaaagaagcggaaaggagggagcacacaacaaggagc

SEQ ID NO: 90633 - RNA, 83 nt, Homo sapiens
cgccaacgcccgacgagcgccggcgggagcgcccccgggggagaccaggaccgcacagagaagcaaacggaggcggcgcggaa

SEQ ID NO: 90634 - RNA, 73 nt, Homo sapiens
ggcccaccagacaggcgccagagccccaggaggaacagacacagacgagaaacgcaggagaaggccaacccgg

SEQ ID NO: 90635 - RNA, 70 nt, Homo sapiens
gaacaccgacggagccagcccccaaaacacaagaggacggagaagcgacgaaagaagccgggacaaggac

SEQ ID NO: 90636 - RNA, 74 nt, Homo sapiens
agaccccacgaggccccgggcagcgggccggccacggcgggagagcggcaaagagacggggcaccgagccagga

SEQ ID NO: 90637 - RNA, 61 nt, Homo sapiens
caaggcgcgagagggcccgaggggaaaggagcaaagaggcggagaacgggcccaggggacc

SEQ ID NO: 90638 - RNA, 59 nt, Homo sapiens
cacacacagagggaaacggaaagagcaccacaagggaccccagcccggggcaggagcca

SEQ ID NO: 90639 - RNA, 81 nt, Homo sapiens
cagagggaaagaaacgaagcccgaagagaagcaagagagccaaacgaaggcagccaggacaaacccgaggcgagaaccaag

SEQ ID NO: 90640 - RNA, 83 nt, Homo sapiens
caagcgaagaagagcggaaaacaagggccaagaaggacaagaaggggagaagaaaagaaacggcaaaagaaaaaagaaaagag

SEQ ID NO: 90641 - RNA, 66 nt, Homo sapiens
ggacagagccagggacaccgggccccgaaacgcgggccagagagaggcgggagccaagaagaaaaa

SEQ ID NO: 90642 - RNA, 69 nt, Homo sapiens
gacccagccccccacccaacgcgagaggggcgaaaacgcggaagcggagacacaggcggcgcgggacgc

SEQ ID NO: 90643 - RNA, 72 nt, Homo sapiens
cagcggaaaacagccagcaacacgagaacaagaacacaaagcaggaccagggccgggagggcccgaacccaa

SEQ ID NO: 90644 - RNA, 45 nt, Homo sapiens
ggcgggcgagcacaggcacacacacgagaacccgcaacacaaacc

SEQ ID NO: 90645 - RNA, 84 nt, Homo sapiens
gggcagccaggcccccacagcccgcaggaaaccgaggaaggcagggaccggaaagaacaaaggcccaccggaagagcggcgaaa

SEQ ID NO: 90646 - RNA, 82 nt, Homo sapiens
agcaggaagcaagaggccgccgcggagacccagcgcacgggagcagccagagcgagaacgcggacaagcaaacaaagaggaa

SEQ ID NO: 90647 - RNA, 75 nt, Homo sapiens
gagagcggaagagagccgcagagaacaggagggggacagccaacagccgagccaggggcaaagagaaccaggaga

SEQ ID NO: 90648 - RNA, 77 nt, Homo sapiens
cccaaaccccaggccaagcagccaccagcagcccccagagcgggaccacagcgacggcggcccagacaccccgagca

SEQ ID NO: 90649 - RNA, 66 nt, Homo sapiens
gagcaagaaacgcaacacggagacggagggcacgcaaaaaaaccaagggaaaagagacaagaccga

SEQ ID NO: 90650 - RNA, 77 nt, Homo sapiens
gcaaagccaagaaagacagaagccaagaggggcaacaagacaccaggagcaggagaaagaagcagcgagcagcgccc

SEQ ID NO: 90651 - RNA, 76 nt, Homo sapiens
ccagaagcgagaggaaaaggcaaacgacgcagacagagggaaaaaagacaaggcccggccaacgcaacagggagcc

SEQ ID NO: 90652 - RNA, 85 nt, Homo sapiens
caaacaacgccacaaagaaaagagggaaaagcagcgccccagaaagcgagagcccagcagccagagcggcggggaggcagcaacc

SEQ ID NO: 90653 - RNA, 87 nt, Homo sapiens
cgccggggcgcccgcgcgcggggaccccacggggaaggagggccccggagcagccacaccaccgaggccccacccagcacgagcaca

SEQ ID NO: 90654 - RNA, 76 nt, Homo sapiens
gaaccaggccccagcggcagccacacagaccgaccaggagcccaggcagcaggggaacgaaaaagacccaaaggcc

SEQ ID NO: 90655 - RNA, 111 nt, Homo sapiens
acagaacaacagaagaggagagaggaacccgaagaagaaaggacgacagccagagagggcggagaacggaaaagcaccaggaagcagagaggaccgcagaagggaaggaga

SEQ ID NO: 90656 - RNA, 79 nt, Homo sapiens
ggcaggagagccggccgcgacaggacgagcgagccacccccggcgcccgcgggcccgccaggaagaagcggggagggag

SEQ ID NO: 90657 - RNA, 61 nt, Homo sapiens
gaggagagcagacacagagcagagcacggagcacagaggacgaggggcgcaccaacagaag

SEQ ID NO: 90658 - RNA, 73 nt, Homo sapiens
ccagaacaagcaggaaaggaaaaggcggagcacccgagagccaccaaagaagggaagaacgcagcggaacccg

SEQ ID NO: 90659 - RNA, 101 nt, Homo sapiens
gaacacgaaacaaacaggagaaagaaagacaagcgggaacagaacgcaaccagaagaagaaaaaagaggaacaaaggagcagaaagcgaacggacagaaga

SEQ ID NO: 90660 - RNA, 87 nt, Homo sapiens
cgcgccgcccgcaccacagacccgcccgccccgccggcccaccccggggagcaacagggccagcagggagcgcggagagaaagggcc

SEQ ID NO: 90661 - RNA, 71 nt, Homo sapiens
gaagaggacaagcagacagcaccaacggaaacgaaaagagacagcagggcaaaacgggccacacacagggc

SEQ ID NO: 90662 - RNA, 72 nt, Homo sapiens
cagagggagcgcaagccggcagccagccgagacggccaccccccgaccgaccacaggaccacccgaggcccc

SEQ ID NO: 90663 - RNA, 67 nt, Homo sapiens
cgagcgggaaaagaaaaaccagacaccacaccagacgagagagaccgagaagcaacaggaaaaaaga

SEQ ID NO: 90664 - RNA, 69 nt, Homo sapiens
accgacccgaacgaggagacgggcccccaaaaagcggcaaaagcaagagaacagagccaagaaagggag

SEQ ID NO: 90665 - RNA, 79 nt, Homo sapiens
acaccagaagacacacagggcagcccaagagaacgaaagcaaaaagcgccgaccagccgcaaaaaacaaaaagaagcgg

SEQ ID NO: 90666 - RNA, 55 nt, Homo sapiens
cgcgcagcagaggccaccccggggccggagggccgagggccggacaagcggaaag

SEQ ID NO: 90667 - RNA, 71 nt, Homo sapiens
aggcaggccccccggagcggccccgccgcggcaggcagcgccccgggaagccaccgcggcagccagagcca

SEQ ID NO: 90668 - RNA, 87 nt, Homo sapiens
acccgcgcgcgcccgggaggaaggaacgaggcaaggagcaaagcagcggcgcagcccggggcagcagcggacaggagaaccaacgcc

SEQ ID NO: 90669 - RNA, 71 nt, Homo sapiens
aaaggcccaaaggccgccaggccgcagacgcgaaggaacggcaaagacacagcaggagccaagccccccca

SEQ ID NO: 90670 - RNA, 72 nt, Homo sapiens
accaaagcacaaaaaacaccgaagccagaagacggaaaaaacaggaagcggcggcccgaggacaaggccacg

SEQ ID NO: 90671 - RNA, 54 nt, Homo sapiens
acacaaccgagaaggcaaagaaaagcaggccaaaacagaagaggcaaagcccag

SEQ ID NO: 90672 - RNA, 80 nt, Homo sapiens
caccggcaagcagacggacagaccccgcaggacggaaacccacaggcacacccaaggggaagaagggaagccagcagagc

SEQ ID NO: 90673 - RNA, 53 nt, Homo sapiens
cgcacaagccagaggccaacccaggacaacgaagagaggaaagaagcggaaag

SEQ ID NO: 90674 - RNA, 80 nt, Homo sapiens
aggccccgcaccagagcaacccagcccgccaggcggggagaccaggaggagcaggggaagaggcgacagacacccgccca

SEQ ID NO: 90675 - RNA, 80 nt, Homo sapiens
gaccagaagacgaaaacgcgagacccgaccagcggaccggacagcaacccagccaaaggcagcgccgcacgaagaaacag

SEQ ID NO: 90676 - RNA, 80 nt, Homo sapiens
cgggggcgccggcagaggaccaggcaccaccggccccggaagcgggaaccggggaggacggcgcacccagccacagaccc

SEQ ID NO: 90677 - RNA, 69 nt, Homo sapiens
caaagggagccagcaaggagggcggcccaaggcgggagaagagagacaaagaaaaacggaacagcaagg

SEQ ID NO: 90678 - RNA, 74 nt, Homo sapiens
gacaaagagaccgcaacaaagaccgaaacgaaaccgaagcgacagagaggagaacggaggaggaagaacaccgg

SEQ ID NO: 90679 - RNA, 76 nt, Homo sapiens
gcagacgggagcgcaaggcgccccaaggccagacaaaacgaccaccaagaggcgcggggacagcccagcacaaccc

SEQ ID NO: 90680 - RNA, 73 nt, Homo sapiens
cgccacaggacccaaggccggagccaccgcaagcagggcggccagaaggccagagacaccaaagcgcccacca

SEQ ID NO: 90681 - RNA, 80 nt, Homo sapiens
ccagccgccgcaggcgccgcacggaggcgcccggggacggggccgcagggagggccaagccgcccgccaaccggcagcgc

SEQ ID NO: 90682 - RNA, 72 nt, Homo sapiens
gcgccggagcggagcgcgggcgccggggagccagggcggacccaagaagggacaaacgggaacagacgccac

SEQ ID NO: 90683 - RNA, 85 nt, Homo sapiens
gacgaggccacgacaccaggggaggagcagacggccagagacacaaggccccggcagcagcagaaacgccgaagggaccaggcag

SEQ ID NO: 90684 - RNA, 77 nt, Homo sapiens
cgggagccgggagccggcaggcggaacgcgacaaacagcgaggcgcgcgaccacaaagccccaagaaaaacaagccg

SEQ ID NO: 90685 - RNA, 70 nt, Homo sapiens
gcagcaggagcaccggcccaagaaacagggaagaacagacacagcaccgacacgcgcaaaagcacgacag

SEQ ID NO: 90686 - RNA, 65 nt, Homo sapiens
ccgacgacggacgaggacgaggaggcagccacggggccccggagagaggaccagaaccagaccgg

SEQ ID NO: 90687 - RNA, 69 nt, Homo sapiens
gaacccgggccaaaccacccccacccagccgggcacgcccacggaagccccccaaagcgagggacacaa

SEQ ID NO: 90688 - RNA, 39 nt, Homo sapiens
acccagaggcaacaaaggcgaggcgacaaagaacgagaa

SEQ ID NO: 90689 - RNA, 87 nt, Homo sapiens
cggccccgggacgggcagcagcgcgacccgagccggcgcccgggccggccaggacgacccgccccccgggaagacacaaacgcacca

SEQ ID NO: 90690 - RNA, 82 nt, Homo sapiens
cggcacgagaccacgccaagagacagcgacagggacccccccccaggacggcgcgaggacacagggcgcacccgggagagga

SEQ ID NO: 90691 - RNA, 80 nt, Homo sapiens
cagaagagagaaacacccgggaaaacaaacaccgacaaaagaaaaaccgcaaagaagccagacgagagcaagcagggagg

SEQ ID NO: 90692 - RNA, 80 nt, Homo sapiens
ggcggagggggaccacacagccagaacagcggacgccacacccaagagaagcccgcccaagggccaaggccagagagagg

SEQ ID NO: 90693 - RNA, 72 nt, Homo sapiens
ccgaagacaccccccccccggaccagagccagacagcaaagccgacaggcagccggggaggagccgaaggaa

SEQ ID NO: 90694 - RNA, 86 nt, Homo sapiens
gcggggcggcggcgacgcggaccgcggacagcgaacccggaggagcagagcagaagcaaaggagaggagagacgcacggacaggag

SEQ ID NO: 90695 - RNA, 64 nt, Homo sapiens
ggaccacgaagcagccaagaggaaaggacacagaagaaggcagcaaagccgaacccagaaggcg

SEQ ID NO: 90696 - RNA, 47 nt, Homo sapiens
cagaggggaggaaacacaagaaaaccagagaaccccaaagacaaaag

SEQ ID NO: 90697 - RNA, 64 nt, Homo sapiens
gaagcgggacagaacagccaccaaaacagaagggcgggcgggcaccggcccagaaggaaagcaa

SEQ ID NO: 90698 - RNA, 85 nt, Homo sapiens
cgaccggacggccagaacccggcagccaggcacacccggaagcggaggcggcggggagcagcagcccaggggggaagacgcgcga

SEQ ID NO: 90699 - RNA, 75 nt, Homo sapiens
gagggcagaagaagaacgcggagaaagcccgaacgcgggaagaacgaagaaggacaaaaaggagaggcgacggac

SEQ ID NO: 90700 - RNA, 71 nt, Homo sapiens
gccgcacaggggcagggaaccgaaagacaagcagaagaaagagagacagcaaaaggcagaccgccacccag

SEQ ID NO: 90701 - RNA, 65 nt, Homo sapiens
cgcacggcaaggcagcgccgaagggcgagcggggaaaacgacccccaggaaaaagaaaaggacca

SEQ ID NO: 90702 - RNA, 69 nt, Homo sapiens
gcgcccccccaacacaggacggcgggacggagccgacccacccgggagacggggcaccagagccaggag

SEQ ID NO: 90703 - RNA, 37 nt, Homo sapiens
ggccgagacgaaaggcagagaccacagaggaaacagg

SEQ ID NO: 90704 - RNA, 78 nt, Homo sapiens
cggcccggaccgggagacacggccagacgcccccaggaaacgggaacacaggccagcacaaaacacagacggggacgg

SEQ ID NO: 90705 - RNA, 75 nt, Homo sapiens
cagcccccaagacgggacacaggaccgggggagcggccgaggacaagcacaagcagcaccaaaaggcagcacccg

SEQ ID NO: 90706 - RNA, 70 nt, Homo sapiens
accaccggcacaggacggccagaggcacagggagaaacagccccaggagagacaggaaaacgcccagaga

SEQ ID NO: 90707 - RNA, 75 nt, Homo sapiens
cccagcaaagggggaagccaggcgcggaagaagccaaaaagccccgacagacaccaaagaggggaaccccggaac

SEQ ID NO: 90708 - RNA, 60 nt, Homo sapiens
gggacaagccaaggccgcgagacggcgaagacaaacacccacagagggccacacaggacc

SEQ ID NO: 90709 - RNA, 61 nt, Homo sapiens
gcagaaggccgaaagagcacggacccggaaggcgaagacaccgcagccccgggaacgcgag

SEQ ID NO: 90710 - RNA, 85 nt, Homo sapiens
cccaggagaagacgcacaggaggacccagagaaggagggagagagaaaccaagagcagaagagaaggaggccaaaaaagaaagca

SEQ ID NO: 90711 - RNA, 84 nt, Homo sapiens
cgggagccgagcccagcaggaagcagaccccgaaaaccaagccgaggacgcggggccgggccacgcagaggcccacaggccacc

SEQ ID NO: 90712 - RNA, 76 nt, Homo sapiens
cggcgagccgggacgcgcggaacaaggaaacccaccgaggagccccccaacagagcgagagaggcacggagcgcag

SEQ ID NO: 90713 - RNA, 84 nt, Homo sapiens
cggaggcggacagagaggcaagcgcagggggacggggaccagcagcgcgccgccgcccaggagcgcaccgcgccccgcaagcac

SEQ ID NO: 90714 - RNA, 83 nt, Homo sapiens
cagcaacagccagacccggggcgaggacccccgacccagaaaaagcggggaaaacaaaaaaaagaaggagggaagagggggcc

SEQ ID NO: 90715 - RNA, 76 nt, Homo sapiens
aaagaacccaaacaagacgcaagaggagccgggcgggcggcgggagcagagcccggaggccccgagccagccccag

SEQ ID NO: 90716 - RNA, 82 nt, Homo sapiens
ggaacccccagacaaggccccaacgggggaagacccccacggggcggccaaggacccgcgccgggacccgggcgacagccag

SEQ ID NO: 90717 - RNA, 57 nt, Homo sapiens
aaagccgagggaagggggacgagccaagaaggacaggacacagaacagagaagaagc

SEQ ID NO: 90718 - RNA, 80 nt, Homo sapiens
aagcgaaggcaccgccaccggaaaccaggaaaaggccacaggaacgcgccgaaacacgcaccaccacccccccccaaggc

SEQ ID NO: 90719 - RNA, 52 nt, Homo sapiens
cagggaaccaaagaagaaggcccaaagaaacaggagcccgaaaacgaccagg

SEQ ID NO: 90720 - RNA, 60 nt, Homo sapiens
cagagccaagaaccacgggggcaaggcacggggagcgcaggaggacacccacagcgaccg

SEQ ID NO: 90721 - RNA, 84 nt, Homo sapiens
accgcgacgagcaccgggaaagggccgaagcgacaaaccaaccgcgagacgcaaagagacaagagagacaccccaaccgacaaa

SEQ ID NO: 90722 - RNA, 79 nt, Homo sapiens
cagccacacacaaggcggcaaagcgaaggagaagagagaagaagaacccaggccaaaagaacaggaccaagcggccaga

SEQ ID NO: 90723 - RNA, 70 nt, Homo sapiens
gggaaaagaaacagagaaaaccaagaccagaacacacaagaaccgggagaacgaacaaaccaagccaaca

SEQ ID NO: 90724 - RNA, 68 nt, Homo sapiens
gggcgaggcccgcggggccaggaggagaggggcaacggacacaggagacagccaccaggaacggagag

SEQ ID NO: 90725 - RNA, 68 nt, Homo sapiens
cagaaagcaaaccagcaggcaccaaggaaagcagaagacaacagggcgggaagagccgacggggccag

SEQ ID NO: 90726 - RNA, 83 nt, Homo sapiens
gaagggcagagcaagcaaagcacagacggcggacagcaccaggggcagccacaaccgaaacaacaggcaggagccagaagcca

SEQ ID NO: 90727 - RNA, 78 nt, Homo sapiens
gcaggccggacccacggcgcggagcgcaccaccagggaagggacgcaaaaaggaagccccacaaggaccaggcaaaac

SEQ ID NO: 90728 - RNA, 75 nt, Homo sapiens
ccaaaccgagagccagaacgaacaagccaacaggccacaaaagacaagacacgagaagggccaagaacaagaaga

SEQ ID NO: 90729 - RNA, 65 nt, Homo sapiens
gagggcaccaacggaaaaaggagaggaacaagagagcagcccacaaccccacgcagagggggacg

SEQ ID NO: 90730 - RNA, 78 nt, Homo sapiens
aaaggagccagggacaagcggcgacacggccaaggaggaggacagaccggcgcagagaaaagaaaaggagaaagaagc

SEQ ID NO: 90731 - RNA, 82 nt, Homo sapiens
ggcacaggaggaggggagaaaccccacccacacaggaccaaagggagacacacacggggaggcccaagcgggggcgagagga

SEQ ID NO: 90732 - RNA, 72 nt, Homo sapiens
caggaaaagaacccaagaccccagccggcgggcgcagcgcccccacaccccccggagggcgcggccagcccg

SEQ ID NO: 90733 - RNA, 101 nt, Homo sapiens
aggccgccagcagaggcggagcccgcagaccgcagaaggccggagacaccagcagggggggccccagcccggccgaacgggcgcacgacacaaacacaacc

SEQ ID NO: 90734 - RNA, 72 nt, Homo sapiens
ggaacggacccagggccagcacccaacaacgggcaaggcaccaggcgcgcgcggaagagacagacaggcggg

SEQ ID NO: 90735 - RNA, 72 nt, Homo sapiens
cacaggaggcgaagcaggagaacgcgaaccccggaggggaggcacaggaggcaaggggaggacccaggcgcc

SEQ ID NO: 90736 - RNA, 57 nt, Homo sapiens
aaacacagaaggagccccagcggagaaagagcccaggaggcaagagcgagaagagcg

SEQ ID NO: 90737 - RNA, 38 nt, Homo sapiens
gaaaacacggagaagagagggggaaacaaagcccagcc

SEQ ID NO: 90738 - RNA, 50 nt, Homo sapiens
cgaaagcgacgggaccgggggcacacccgaccaggccaaccgaccgcaag

SEQ ID NO: 90739 - RNA, 74 nt, Homo sapiens
gcggcaaccgagacacaaagggaaagcgagggagccccagaaaggcacccaggaagacaaacccacgaggcaca

SEQ ID NO: 90740 - RNA, 85 nt, Homo sapiens
cggaaaggccgcgcggacgaccggacacagaggacagcggcagcgacgagaaccggacaggaagggaggaaggcccgggaccgca

SEQ ID NO: 90741 - RNA, 86 nt, Homo sapiens
agaccgccccggggacagccagccccgcggaccagaccaggccgcggcccgggcacacagagagaggagaaggaagagcagagcgg

SEQ ID NO: 90742 - RNA, 75 nt, Homo sapiens
cggaacccgggaggggaggaccaaagacgagaacgggcaaggaggaagagcaggaccgcgggacacggcacagcg

SEQ ID NO: 90743 - RNA, 59 nt, Homo sapiens
cgcccaccccccgaacccagccgcaccgaaaccccacagcggagaaaaaggagaaaccc

SEQ ID NO: 90744 - RNA, 76 nt, Homo sapiens
cccccaaaaccacaaacgccacgcagaacagccaccaaggcgaccggcccgaggaccgccgcacgaccaaacgcag

SEQ ID NO: 90745 - RNA, 86 nt, Homo sapiens
cgccccccgcccccaagccgcggccaggaccggcggaccggccgcccggcccagccaacaccgacgcgccacgcagagccccgcca

SEQ ID NO: 90746 - RNA, 85 nt, Homo sapiens
ggcgcccagggacgccggagccccagagcgaaagaagcccagcgaaggaagaagcagcggaagaaagagcagagcgaggaaagca

SEQ ID NO: 90747 - RNA, 79 nt, Homo sapiens
ccacccaccggaccgccccaggagggcgcgggacacccccggcggagcgacagcggcaaaaccaaaacaagaaggcaga

SEQ ID NO: 90748 - RNA, 79 nt, Homo sapiens
gaagaagaaggaggcaggaagaaaggagcacgagaccggggcaaagagcaggagccagcaggccaagggaaaagcagcg

SEQ ID NO: 90749 - RNA, 76 nt, Homo sapiens
aggcccaggaggcgcgaaagacaacaggcacaaagagagaaggaacacccacagggcagacagagaaagaacacaa

SEQ ID NO: 90750 - RNA, 78 nt, Homo sapiens
ggaaacgcgcccgccgcgggcccggcaggagaaccgcacggccaagcccacacagaggaaaccgggagagagacagaa

SEQ ID NO: 90751 - RNA, 53 nt, Homo sapiens
gagccgcacgcggggaggggggccccgacggcagcccaccccgagcgcggaac

SEQ ID NO: 90752 - RNA, 66 nt, Homo sapiens
cggcaagaccaaggaggcgggggagacaccggcaggagcgggaggaggcggcagcggcggcggcag

SEQ ID NO: 90753 - RNA, 75 nt, Homo sapiens
gaagagacgaaaaagacgccggaaagacaagcacagcccgaccaggcccagggcgggacaacgacccgggacagc

SEQ ID NO: 90754 - RNA, 83 nt, Homo sapiens
ggaaacgggcaggagagaaaagacaaggagaaagcacaggcacacaagagaggagcccccaaaggaagagaggaggagaggaa

SEQ ID NO: 90755 - RNA, 77 nt, Homo sapiens
aagagacaagcgggagaaaaggacggcgcgccggagaaggcaaacccgcgaggaagaggaaagacaggaacaaacaa

SEQ ID NO: 90756 - RNA, 76 nt, Homo sapiens
acgagcagcagagcggaaggagccagccacaggcggcggaacggaacagaagcaaggcccgggcccgggaacaagc

SEQ ID NO: 90757 - RNA, 73 nt, Homo sapiens
gacccaaccaagggaccagccgcaggcaccaagaagaccaacaagcagaagagccaagacaaaaaggaggggc

SEQ ID NO: 90758 - RNA, 70 nt, Homo sapiens
caggagggcaaagaaacccgggagccaaagaacaaagcgaaaccacaacacccaaaagcaaggaagacca

SEQ ID NO: 90759 - RNA, 79 nt, Homo sapiens
cgagggagccgggccaacagagggacggccccagaaggcaggcgggcacaaaccgaagaggacaaggagagaagcagac

SEQ ID NO: 90760 - RNA, 78 nt, Homo sapiens
aagacagggcaaaggacagaccaggccgccaggcacagagaaggcaaacgggagggcgaggacaccaagagcagcgcg

SEQ ID NO: 90761 - RNA, 70 nt, Homo sapiens
caagcccggaagacgcgaccgggcaccggcgggggccggagccggaggaacgacgaaccagaagagaccc

SEQ ID NO: 90762 - RNA, 79 nt, Homo sapiens
cggagcggaggagacgggccgcacccgccccccgcgcccgccaccggccgccgcccggaccaaacgcccccccgagggc

SEQ ID NO: 90763 - RNA, 53 nt, Homo sapiens
gcggacaccccacacgccgccacccccaccggaggacacccagagcaacaaac

SEQ ID NO: 90764 - RNA, 81 nt, Homo sapiens
caacaccaccccccaccaggcaccagggccaacgagagacgcggggaggaggaggaggaagggagcggcagcaggaaggag

SEQ ID NO: 90765 - RNA, 57 nt, Homo sapiens
cagacaaccaggcaagcggaagaaccgaacacacaaagacagaccgaagagaaacag

SEQ ID NO: 90766 - RNA, 71 nt, Homo sapiens
ccaaggacacccaagagggcgagcaggacgaagcgcccgccaccaaggagccagaggggaaaccaccgaca

SEQ ID NO: 90767 - RNA, 81 nt, Homo sapiens
ggcgggggacgagcagcgcccccgagacgggcccgaggcagggcggcacgcggccacacacaggcgagaaccgggccgcga

SEQ ID NO: 90768 - RNA, 77 nt, Homo sapiens
gggcaccggggccgacgaacacacggggacaggaacaggacacccaaccgcgagaccagcaaggacgggggaccaac

SEQ ID NO: 90769 - RNA, 55 nt, Homo sapiens
gacccagagaaaaaccaacccaaagagaacccgggaaaccaggaacaacggaacg

SEQ ID NO: 90770 - RNA, 78 nt, Homo sapiens
aaaaacaaaacgaaccaggacggcaagcaagagaccagaagccaaaagacagagccagggaacgcagaggaaggaaga

SEQ ID NO: 90771 - RNA, 105 nt, Homo sapiens
aagaaccgagccgggcagccaggacagggcaaccaggcgggaccgcggccgcaccaaaggagaagggcgggacaacgacagcgccacccacagacggcaaagaaa

SEQ ID NO: 90772 - RNA, 74 nt, Homo sapiens
cgaggacaccgggccgccggagggaccccccaccgccgggaacaaagcagaacacaaaggggcccggaggccga

SEQ ID NO: 90773 - RNA, 71 nt, Homo sapiens
gggccgaccagcaccgccgggcaccccccgcacgccgggcgaaaggaagagcgaaaagaaagggagaaaaa

SEQ ID NO: 90774 - RNA, 35 nt, Homo sapiens
acacccaggaggcagaagccagacccacccaggag

SEQ ID NO: 90775 - RNA, 82 nt, Homo sapiens
accgcaccggggagccccgccaccgcaagagccgcagcagcgccccgcagagagagccggaggaggaggacgaggaggagga

SEQ ID NO: 90776 - RNA, 78 nt, Homo sapiens
acggcgcgcgggacggccgaggaaggaacggcccccccccagcccgccccaaaaggagacgacaccaagaggaaaaac

SEQ ID NO: 90777 - RNA, 70 nt, Homo sapiens
cgacacaagcccacgcgcccgcagcaagacgggacgggggggccccagcccggccgaacgggcgcacgac

SEQ ID NO: 90778 - RNA, 75 nt, Homo sapiens
gcaggcgggggcggcaccaggaggggccaccaggcccccaccccccggaaaagcaacggcgcaagaggcggggcg

SEQ ID NO: 90779 - RNA, 77 nt, Homo sapiens
gagacacgcaaaaaaacgacccgaagagaagggggacaaaggaccccccacagccagcgcccggacgaacccgcccc

SEQ ID NO: 90780 - RNA, 87 nt, Homo sapiens
cggagcacgggcaaggcggagaggacggagcggcgagcccccgcggcgacagaccagaagaaagagcaccggcaagaggaacgaaaa

SEQ ID NO: 90781 - RNA, 90 nt, Homo sapiens
ggagcaagagcagcggcgcagaaaggggaggccgggaggacgaaggcccagcccccggacacgggcggccggaaggcgaggccccgccag

SEQ ID NO: 90782 - RNA, 84 nt, Homo sapiens
ggaaccgcaaacccaacagccacaacacagcagcccccaggagagcaggaaaagccggagaagccaacaggcggaaggccagca

SEQ ID NO: 90783 - RNA, 75 nt, Homo sapiens
aacgcccaagaaaaagaaaagggcaccaggacccaggcccgaggcgacgacccccacccagaggagcgacacgcc

SEQ ID NO: 90784 - RNA, 63 nt, Homo sapiens
acgacaccggcccgcagagcagaacggggaggaacggcgggagaaggcgaaaggcccgagcga

SEQ ID NO: 90785 - RNA, 83 nt, Homo sapiens
cccccagaaaagcaaaccagcagcggggaacagaggccgaaagccgcccgacacacggccaaaacggaggagaacaagaagaa

SEQ ID NO: 90786 - RNA, 87 nt, Homo sapiens
acccccgcagggccagccgcccagcagggacgacaggaccgaccgaggccggacgaagagggcgaggaaaccaggcccaagaaggaa

SEQ ID NO: 90787 - RNA, 96 nt, Homo sapiens
acaggaccaaaccaagaccagaagaccgacaggaggccccggaagacggaaacgaaaaaggcagaagaacgcagacagaagaaggaaacaagaggc

SEQ ID NO: 90788 - RNA, 80 nt, Homo sapiens
cccgcaccagagcggggcaccgagccggagagaagagagaagaggaagagaagaggaagaaacgacgggcacgggagaag

SEQ ID NO: 90789 - RNA, 84 nt, Homo sapiens
gccagcaagccggagccgccagagccaaggccaagccccaagcagcaccccaagcagggggagacagaagcggaggccgaagca

SEQ ID NO: 90790 - RNA, 56 nt, Homo sapiens
agccaaaagaggaaacgagccgccaaacagagcggcaggagggacaggacagcgag

SEQ ID NO: 90791 - RNA, 68 nt, Homo sapiens
agaagaacagacgccgcacccccgcgacacaggaagaagaagcgcacaaggagcacaacagggagcgg

SEQ ID NO: 90792 - RNA, 67 nt, Homo sapiens
ggcaaggagccgagaagaccgacggggagaggcaggaaaaggaagagagaaggccacgcccgacccc

SEQ ID NO: 90793 - RNA, 74 nt, Homo sapiens
aaaaaaggagcgcccgagcgaccaaagaccgggaaaaggacgaaccaaagcaaaccacgggacgggggacccgg

SEQ ID NO: 90794 - RNA, 61 nt, Homo sapiens
agcagacagccccgggcaccaggcagcaacagaccaagacacccaggagaaagacagcggg

SEQ ID NO: 90795 - RNA, 57 nt, Homo sapiens
ccacgcacaagccccacaagagcaagacgcccagagaagagaggggccgcaggccca

SEQ ID NO: 90796 - RNA, 67 nt, Homo sapiens
cacagccccgcgccgccgaccccccggcgccgcgccggcggcggggccagaagccaagccgagcccc

SEQ ID NO: 90797 - RNA, 79 nt, Homo sapiens
ggcgcagcgacaacccagacgagaacccagagaagacgaagccgggaacggagaggaagaaaaacaaaggaccccaccg

SEQ ID NO: 90798 - RNA, 61 nt, Homo sapiens
cggcggcgcggaggagcgaggcagcgacaggacgggaacgggaaaaccgccgccggggcca

SEQ ID NO: 90799 - RNA, 73 nt, Homo sapiens
ccccggccagccggcgccggagcgaaacacgacggaaggaacagaggggaagacccaaggaggagacgacaac

SEQ ID NO: 90800 - RNA, 77 nt, Homo sapiens
ccagcaacaacgccagccagcagcaaggaaggcaggccaagcacaaggcagggacaggggggcaccagaagaaagga

SEQ ID NO: 90801 - RNA, 76 nt, Homo sapiens
gagagagccgaggagccagagcaaggggaacgccacggacgggacacagcgaaagcagagaaagccaagcacagga

SEQ ID NO: 90802 - RNA, 40 nt, Homo sapiens
agcgcagcccgaggcccaggggaaagacaaggagccgggc

SEQ ID NO: 90803 - RNA, 80 nt, Homo sapiens
aagaaggacggagagccccacgggaggcaaccagcgggggaggggccccagcccgagacagaggagcccagaccagccaa

SEQ ID NO: 90804 - RNA, 76 nt, Homo sapiens
aacagaaggacaaggaagggccaacgagcagagagaggcaaacacaaagacgaccaagaggagaccaagaacgacc

SEQ ID NO: 90805 - RNA, 67 nt, Homo sapiens
ccaaccgcccaggaaggacaaagccagggagggaaaacacaaacaacccgagcccagggccaacccc

SEQ ID NO: 90806 - RNA, 78 nt, Homo sapiens
gaagaagggcacccgaggagcagaacaccagagagcagcagccagccaagcgagggagccggcacagagaaaaggcca

SEQ ID NO: 90807 - RNA, 48 nt, Homo sapiens
gaaagaggaaagggaacacgagaagaaaaacccaagccggaacacagc

SEQ ID NO: 90808 - RNA, 75 nt, Homo sapiens
aagcccggcccaaacacgacccaacgaacaagacaagcaagccagacccccgccaaaagaaggggaccccagcca

SEQ ID NO: 90809 - RNA, 79 nt, Homo sapiens
gcggccagcaggaggcgagaagagagcacccccacgcccagagccgcgagggaccagccgcccgcccccccggggcaga

SEQ ID NO: 90810 - RNA, 71 nt, Homo sapiens
caaccccgaacagcacacaggaaggaggagagaagggcaagggccaaaagagcaccgaccacgacaccccg

SEQ ID NO: 90811 - RNA, 78 nt, Homo sapiens
ggaaagaggccaaaaggaagggcgcccaagaacaaaccaccgggagaaccaccaaaagaaacggccagaaaaaccaac

SEQ ID NO: 90812 - RNA, 80 nt, Homo sapiens
cgccccaccaccgccccaccaggaggagagcacccagcacggagggaacagcagagcaaaaaaggaacaggcaagagcgg

SEQ ID NO: 90813 - RNA, 79 nt, Homo sapiens
cagcaccgcacgcccgcaagggagcgccgggaggaaccgaggccacagagaggcaccccaccaccgcacggaagacgcc

SEQ ID NO: 90814 - RNA, 68 nt, Homo sapiens
cacaggaggaaaagaaggaagacccgcggaaggcacacaagacacagccaacaccgaaccgaaaccag

SEQ ID NO: 90815 - RNA, 66 nt, Homo sapiens
cagagccacaggcagcacagcaagcaggggaaaacgacccccaggaaaaagaaaaggaccagaaac

SEQ ID NO: 90816 - RNA, 73 nt, Homo sapiens
gccgggcggaagcgcggaaaggcaacgcgcggggagggcgggcccggaggacgaggcgcagacagcgaaagaa

SEQ ID NO: 90817 - RNA, 76 nt, Homo sapiens
gaagaagcacaagaaacagagcaggacgggccgcacggcagcagcacagagagaaccccagagggcgcggaagccc

SEQ ID NO: 90818 - RNA, 59 nt, Homo sapiens
cggaccggagacggggccaacaggacggaacacacccgaaaccacccgcgggcgggcgc

SEQ ID NO: 90819 - RNA, 63 nt, Homo sapiens
aggcggaagggcacagaggacacaggccggggacacaagcaacagccagaacaagccgaagca

SEQ ID NO: 90820 - RNA, 77 nt, Homo sapiens
ggaaggggccgacaaaagcgcagcaagacggccgcgcggcccgcagggagagaagaccaagaggcggagaagaggag

SEQ ID NO: 90821 - RNA, 63 nt, Homo sapiens
gcaagcagccgaagaaacagggggagagagggaggcgacgccgagacccccgcagcacgagcc

SEQ ID NO: 90822 - RNA, 62 nt, Homo sapiens
caacgaacagacggaaacaggaagaacacccaaacccaggaaagagaacccggaaacagcga

SEQ ID NO: 90823 - RNA, 80 nt, Homo sapiens
ccccggccccaggcaccgccagcacgcgccgccccgcgcgcgagccacgcagcccccagggaaagggagcagcaccggcc

SEQ ID NO: 90824 - RNA, 67 nt, Homo sapiens
gccaaaccagccaaaggaaacgccacacccgcgcaggggggagaagagaaacaaagagagcagaagc

SEQ ID NO: 90825 - RNA, 79 nt, Homo sapiens
agaccgaaggcagcacagcccgcccaaccccccagccaggccaggagcagccgggagacacggacggcagccgccaccg

SEQ ID NO: 90826 - RNA, 66 nt, Homo sapiens
cgcggggagggaggggcccacccagagacaagaccgaccccgaggacacaaagaccagaaccgagg

SEQ ID NO: 90827 - RNA, 74 nt, Homo sapiens
cggacgggagcaagcgacccggccggacccaccgaccagaaagggagccccaacccacgaagcgaggaacccac

SEQ ID NO: 90828 - RNA, 52 nt, Homo sapiens
cgacaagccacgggacgggaccagaacaagcccaacccgcccgcgcaagaag

SEQ ID NO: 90829 - RNA, 58 nt, Homo sapiens
gcaacaaggcgacgaaacagggaaagcacgaagggagcccagcgacacaccagcagca

SEQ ID NO: 90830 - RNA, 74 nt, Homo sapiens
gaccgggagaggacaagaccacgagccagcagagaccgggaggcagcaacccagaggccaccgccaagcaaaac

SEQ ID NO: 90831 - RNA, 38 nt, Homo sapiens
aagccaacccaggaggaaaaacggaggggaagcaaggc

SEQ ID NO: 90832 - RNA, 78 nt, Homo sapiens
cggccacccgagaagggagacgacgcgcgggccgcgagcggggcgacccgaggccagcaacagaagaaagcaagcacc

SEQ ID NO: 90833 - RNA, 84 nt, Homo sapiens
gcgcgccccaagcccgggcgccaccgcgccaccccgcgaggggcggggggcaaggcacgcagccgggcccgacccgcgggccgc

SEQ ID NO: 90834 - RNA, 87 nt, Homo sapiens
aaaacgcaaggccgaagccaaagccagcaccaggagacaaagccacaaaaacaccagaaaaaccaagcagaaaaggagcggcagcaa

SEQ ID NO: 90835 - RNA, 87 nt, Homo sapiens
gagccgggcgcggggagcgcgcgaagccggggcggagcacgcgagcagaggacagcagcggacggccggaccaagaggcgccgcccc

SEQ ID NO: 90836 - RNA, 84 nt, Homo sapiens
ggaccgcggagcggagccggccgacgcgggcgcgagggcagaaccggcgggacgacccgggacagcccacggggcagaccagcg

SEQ ID NO: 90837 - RNA, 72 nt, Homo sapiens
caagggaagaagggacccaaaagaaagcgggaacccacaacgaaggaaggaacagaggcacagcgacgcaaa

SEQ ID NO: 90838 - RNA, 79 nt, Homo sapiens
ggcgcggagagcccaccacgcgggaagagaccagcgaagaaggcccgaggaaaggggagacagggggacagagggcggg

SEQ ID NO: 90839 - RNA, 70 nt, Homo sapiens
cagggacgggggcagggacaagggaaagaaacggcggaaaaacagaacccacaggagggccagaggacaa

SEQ ID NO: 90840 - RNA, 56 nt, Homo sapiens
agacaggggaacacccccagagagagagccgcagagcaagcgaaaacaaacaagag

SEQ ID NO: 90841 - RNA, 76 nt, Homo sapiens
cgaaggcgcgcaccggaagcaccagcgaggaaggcaagaacggaagcacgggcggaggaaagcacaagcagagccc

SEQ ID NO: 90842 - RNA, 70 nt, Homo sapiens
gccagacccgcaccaaacaacccaggcaagagaaggcagcgcgggagacaaccacagaaacaccgaagac

SEQ ID NO: 90843 - RNA, 83 nt, Homo sapiens
gcccccgcggcgacagcggaggcgaagcgccggcaaccagaggagcaacaaacaaaggaagcagagggaagacagccaggcgg

SEQ ID NO: 90844 - RNA, 76 nt, Homo sapiens
gcaccgcccgggcccccacgccggcgggcgcagagcggaaagcaggcgacccaaaggccggcgacagaaaggcccc

SEQ ID NO: 90845 - RNA, 100 nt, Homo sapiens
gacccaaaaagacggacagcccacgggaacaagaggggacagaaagaaaaacaaccaccagcgagcaaaaaggcaaagaccaagaccaccaagaagcgcc

SEQ ID NO: 90846 - RNA, 76 nt, Homo sapiens
cggacaggaaccaaggaggaggcagaaagccaggagcgacgacccgcgcaagcgcaccaggggcaccgaaccccgg

SEQ ID NO: 90847 - RNA, 80 nt, Homo sapiens
gcagagcgagccggagaagagggggcccggggggaggaggggcaggcccggcgggaaaggggggacccaccccagaacag

SEQ ID NO: 90848 - RNA, 81 nt, Homo sapiens
acaacgggaggggccaccggaccccccaacaccccacgaaggcggcaccaagcagcgagagccagacaagccagacaccaa

SEQ ID NO: 90849 - RNA, 72 nt, Homo sapiens
caaagaacgcgcaaaacaggacgaaaacaaagggggaagccgagaagcacccggacacagcaaaggagaggc

SEQ ID NO: 90850 - RNA, 55 nt, Homo sapiens
gaagaaaacagcgggaagagacagccaagggaggcaccgccccaacccccccccg

SEQ ID NO: 90851 - RNA, 65 nt, Homo sapiens
ccaggaggagaccaggcgagagccaggagagggaggccgcgggagaaacgaaggaggcccaacca

SEQ ID NO: 90852 - RNA, 74 nt, Homo sapiens
ggccacccccacaggacgcagcccaccagggcagagaaacagcccagaagagaaaagaagccaagggacgccgc

SEQ ID NO: 90853 - RNA, 79 nt, Homo sapiens
ggacaacagcccgacaaccagggaagaccacaagaggggcagcagagccccagaagaaccccagccaaaacgccgagaa

SEQ ID NO: 90854 - RNA, 79 nt, Homo sapiens
gagggcgcgccgagacgcccgagaggagagcgggggcgggggagacaggacagccggcaccagcgaacagacccacagg

SEQ ID NO: 90855 - RNA, 72 nt, Homo sapiens
agaagagcagccagcaagcggaggacagcaggcagaagaccccagcccgacagcaacgggagaacagacagc

SEQ ID NO: 90856 - RNA, 71 nt, Homo sapiens
acggagagacaagaaacccagagaacgcccccgacaccacaagaaggggccgcccgaaagaagcccggagg

SEQ ID NO: 90857 - RNA, 71 nt, Homo sapiens
ggaccagagcaaggagaggaacggccaaaacgggggacggaaagagagccgcagcgcagaacaagggaaaa

SEQ ID NO: 90858 - RNA, 73 nt, Homo sapiens
cgaggccagcacgggaacgcgaagcgccaaagccagacaagaccgaagaccacggggagcaaaggcaggccag

SEQ ID NO: 90859 - RNA, 70 nt, Homo sapiens
ccaagggcgagccagagaaacacggaaacagaagacagccgaaccaagggcgacaaccagagacaagcag

SEQ ID NO: 90860 - RNA, 70 nt, Homo sapiens
caccacgcccggccgaaggcgggggaggagacccacccaaacaggagcgagcacaaacgacacacgcaaa

SEQ ID NO: 90861 - RNA, 65 nt, Homo sapiens
agacagagcagccagaggcggcacaggcagggcaaccccaaaaggcccaacccgcgcgccacacg

SEQ ID NO: 90862 - RNA, 61 nt, Homo sapiens
cggaggacacagccggacccggggcgcacaaaagagcacaaaagcaccaaggcgcacaaca

SEQ ID NO: 90863 - RNA, 78 nt, Homo sapiens
ccgccccgcgggggagggcggagcggcgcggccccagcccccgggggggcccgagcgccccggagaagcaacagaccc

SEQ ID NO: 90864 - RNA, 43 nt, Homo sapiens
ggcccagccggcagcggcccagagaagggccgaggaggaagaa

SEQ ID NO: 90865 - RNA, 79 nt, Homo sapiens
ggagaggcgacggcccgcagccggaccccaccggacggcggggccacgggcgccgggaggccagaacacagcagaaagg

SEQ ID NO: 90866 - RNA, 79 nt, Homo sapiens
agcgagcaaccagccacccagaccagcagggacacagcaggacaagaacgacagaaagagcaggcagcacacacagaaa

SEQ ID NO: 90867 - RNA, 59 nt, Homo sapiens
gccagaaaaggaccgggaggaaaggaggagaaagcgcgcaagaaacgaagggagaagga

SEQ ID NO: 90868 - RNA, 82 nt, Homo sapiens
aagagcgcggaacaggacgccccgacacaacccccggcccagagaccgccccagcggacgcccaagagcgggacggcgcaag

SEQ ID NO: 90869 - RNA, 80 nt, Homo sapiens
ggggcggcccaccaacaggaacagggcagacgagcggaggacacccaacccgggaaacccagcggcggcagaaccagccg

SEQ ID NO: 90870 - RNA, 85 nt, Homo sapiens
ggcgcgccggcccggcaacgcgcggcggccagcggccggcagaggacgggaccccggccggggcaggccccgggaccgacaacag

SEQ ID NO: 90871 - RNA, 62 nt, Homo sapiens
gcggacccacgcgcgggaaccaggggcagagggaccaccgacaggagcacagagcgggaaga

SEQ ID NO: 90872 - RNA, 74 nt, Homo sapiens
gcccaaacaaaaagcagacagcaaagcaagccaagagggcccagccaagaagcacggcaagagcagaaacggaa

SEQ ID NO: 90873 - RNA, 103 nt, Homo sapiens
aagagaggcagaagcggcagcgggagacaaagcccagaggacccagaggggcagcgggaccaagaaaggcccagggaccaaagcccggacaaggcccgagcac

SEQ ID NO: 90874 - RNA, 59 nt, Homo sapiens
gcgagcgaggaggaggcggagcggggcccgacggcccccacagagagcacacaaacaaa

SEQ ID NO: 90875 - RNA, 82 nt, Homo sapiens
gaagaaacgcacacgaagaacaagaaaaagcacaagagcaccaacgagggaccaccagggccaggggccggaggcagcggca

SEQ ID NO: 90876 - RNA, 84 nt, Homo sapiens
gggcgaggccgcggcagggcccgcaggcggcgcacaggaagcacggaaaaaggcagaaagaagaaaggaaagggaaagaaaagg

SEQ ID NO: 90877 - RNA, 71 nt, Homo sapiens
aaagggccaaagaagggagagaggaaagcccagaggccggaacagaggaaagagggaggacgccgaccagg

SEQ ID NO: 90878 - RNA, 74 nt, Homo sapiens
acccaacgcacaagacgccaagaggcaacagaagagggaaccaacccaaaccgagccaacggggaccgaggcac

SEQ ID NO: 90879 - RNA, 87 nt, Homo sapiens
cgacggcggaacccggggccgggacgcagcccggcggcagcagggaaggagcgaggcagcgggaggcaggcggagacggagacgcca

SEQ ID NO: 90880 - RNA, 100 nt, Homo sapiens
cgccaagggcggcgcggggccggcgcgccgcagcggccacccgcccccgccgcaccgagacgggcggcagagaagagaagagcacagcgggaggaaaggg

SEQ ID NO: 90881 - RNA, 81 nt, Homo sapiens
cacgcacaaagcaagcagcgggccgaagaacacaggcgcgcggggaggaaagcgagaggcggggacagcggcgaaacccaa

SEQ ID NO: 90882 - RNA, 60 nt, Homo sapiens
ccacaaaccgagggcggagcagaggaggccgggcagggcgcgggaacaggacgacacgag

SEQ ID NO: 90883 - RNA, 66 nt, Homo sapiens
agagaaggaacgggagaaagggaccgccaggggcgccagcaccgggcccgccagcagggccccgga

SEQ ID NO: 90884 - RNA, 78 nt, Homo sapiens
accagggaggacacggagaaggcgcccgagagaccgccggggcaccagcaacagaggcagggcagcaccagagcaaac

SEQ ID NO: 90885 - RNA, 86 nt, Homo sapiens
cagaggaccggaggccgggaagccaacgaccacacgcaaaggcggaaaggacgaggcagccacgggggagcgggcaccacagagcg

SEQ ID NO: 90886 - RNA, 74 nt, Homo sapiens
gcacgagggaggcaaaagcaggcagaacaacggggaacgcacgcggaggaagaaaccggagagcggggccagga

SEQ ID NO: 90887 - RNA, 93 nt, Homo sapiens
gcgaggaccgggggggagggggcccggcaggacgaggacgaaggccgaggaccagccaaggaagcaacacagcagcgagagaagcagaaaaag

SEQ ID NO: 90888 - RNA, 74 nt, Homo sapiens
gccaaagcgagagagggaagcgcccggccagaccccaacaggcccgaccaacaaagaaacccaacagacggaaa

SEQ ID NO: 90889 - RNA, 86 nt, Homo sapiens
acagcccagcgagaccgaggaaggaccgaagaggaaaccagcaacagaagcgccgccccagcgccacagcgggcccgcccgagcac

SEQ ID NO: 90890 - RNA, 79 nt, Homo sapiens
cgaacgaacagccagaagaaaagggcaggggcagaagcggaaccaccaggagacaaggaggcgcgcccaccaggaagcc

SEQ ID NO: 90891 - RNA, 38 nt, Homo sapiens
aaaacaagagaccacagaaggaacgagcaggaagggcc

SEQ ID NO: 90892 - RNA, 73 nt, Homo sapiens
gaggggggaggggcaagagagacgagaaagaacacgcggccaaacccggaggaggagacacgaacgcgggagg

SEQ ID NO: 90893 - RNA, 62 nt, Homo sapiens
aagcaagacccaggacaccccgaagccgagaaagggaaggaaggaacagagaagacccgccc

SEQ ID NO: 90894 - RNA, 72 nt, Homo sapiens
gcgcagagcacggccaacacgacccccaaggacgacccaagccggacacaagagggcaagaaaggcgcgacg

SEQ ID NO: 90895 - RNA, 52 nt, Homo sapiens
gacagcaagggacagacgggaaaaaagagcaccagagccagagaaaaaaaca

SEQ ID NO: 90896 - RNA, 71 nt, Homo sapiens
cggaagaagacccagggaaacccccaggcggcgcccagcggccacacgccccaagcgccacgcccgggcgc

SEQ ID NO: 90897 - RNA, 82 nt, Homo sapiens
ccagccgcaccaccacacaaaagaccagccgacagcgaccaaggccagagcgaaaggccacggccagccgccggcacgcagc

SEQ ID NO: 90898 - RNA, 59 nt, Homo sapiens
accaaccaaggcggaaagcaaagaggcggagacccaaaacaggagcccaccccgggccc

SEQ ID NO: 90899 - RNA, 77 nt, Homo sapiens
gaacaaacaagggaacagcagagcggcgaccaccagaagacaagaacaaagaaccaggaggcagcaaggacgagccc

SEQ ID NO: 90900 - RNA, 94 nt, Homo sapiens
cccgcggcaaccccggcaacccagggccggcgcgcgccaccagacgggaaggggcgcgggcaggacaccgccgcccgggacccggcgcaggacg

SEQ ID NO: 90901 - RNA, 75 nt, Homo sapiens
ccagagcccagggcaggacaccgacaggaacagggaccacgggggacaccgccgcccagccacaggaccgacacc

SEQ ID NO: 90902 - RNA, 84 nt, Homo sapiens
ccggggagggaaaccagccaagagaggcgccagacagcccagagaagccgcaaaggccagcaagccagaagggaggaaaacaca

SEQ ID NO: 90903 - RNA, 84 nt, Homo sapiens
ggccccagggaagagacccgcaaagaccgggagaccaagaaaaccgaagcccccacaagcaaaaaggaagaacaacagacggcc

SEQ ID NO: 90904 - RNA, 80 nt, Homo sapiens
agcccgagggacggggacggagagagcacgagcccacaggcccaaggggaaagcccgcgacaagggcggggggcggaaag

SEQ ID NO: 90905 - RNA, 55 nt, Homo sapiens
cacacgaaacaaccccgaccggccgcaggggccccggggacccaaccgccggcgc

SEQ ID NO: 90906 - RNA, 79 nt, Homo sapiens
gcgccgcccggcgagcgggccggaggaaaagaaagcacccgacagagcccagacaccagaacgcaaggaaccgaaggag

SEQ ID NO: 90907 - RNA, 79 nt, Homo sapiens
gcgacggcgccgagccgccgaaggcaccaacaggaggagggcagagccaagacgccagggaagaagggacacagagaca

SEQ ID NO: 90908 - RNA, 88 nt, Homo sapiens
cgagagagacaacccccgagacaaccaaggcagaggacagcaagggccacggaccccaggcaggggggccgacagaaaaagaagagga

SEQ ID NO: 90909 - RNA, 84 nt, Homo sapiens
ccaccagccggcagcccggagcgcccgcgccagccgcgcacaacggggcaccgagccggaaggaagaaggaaaagcggaagcgc

SEQ ID NO: 90910 - RNA, 81 nt, Homo sapiens
gacacgggggcaggcgccaggccccggccagcacgagagacagcccggccaacacccaggcacagcaaaggcccagaagaa

SEQ ID NO: 90911 - RNA, 73 nt, Homo sapiens
gcagcacagcacaggggcaagacgccaagagaaaaggcgagagcacaaagcaccaagagccgagaagcccgaa

SEQ ID NO: 90912 - RNA, 91 nt, Homo sapiens
cggagacagcacccgagcacgggacgagggagcggcacgagcaaaggcccgaaacaggagggagcgcggccgcagccaagccggaacagga

SEQ ID NO: 90913 - RNA, 57 nt, Homo sapiens
ggccaggggaggccgacgcccacgcgcggcaccaggaaaagggcagagcccaacaga

SEQ ID NO: 90914 - RNA, 54 nt, Homo sapiens
ggagcccgagagagaaggccccgagccaagaaccgccggcgcagcaccaccaac

SEQ ID NO: 90915 - RNA, 83 nt, Homo sapiens
ggagccgccgcgcgcccgcgcccccgcgcgacgccagacccgccagcgccgccagcgcccggcccggcccgaggaggacccag

SEQ ID NO: 90916 - RNA, 63 nt, Homo sapiens
aaacacaggaccccccccaacgagagaaccagagagcacagagaaagcgggaaacggccaaac

SEQ ID NO: 90917 - RNA, 77 nt, Homo sapiens
caggcccccagacgcccccacggcagaaggggaagccagcaacgcggaagcaaggagcagggacaagacaggaagcc

SEQ ID NO: 90918 - RNA, 76 nt, Homo sapiens
gcggacggcgcgagggagagggacaagccaaggccgcgagagccgggcacaaagccagcgagcgaaaaagccagca

SEQ ID NO: 90919 - RNA, 76 nt, Homo sapiens
cccccaaaggaaccggaggccgagagaccaagaagaagaaacaccagacagccgaagcccgccgcagcaagagaga

SEQ ID NO: 90920 - RNA, 81 nt, Homo sapiens
cgagagacccgcagaaccacacggaaggaagccggcccccgccgcccgcgccagaccccacaggggcacccgaggaggaag

SEQ ID NO: 90921 - RNA, 68 nt, Homo sapiens
cacggaacacggggaagggggaaacaggacgaaacaacccggaaaacaacaacaaaggaaaggaagcc

SEQ ID NO: 90922 - RNA, 71 nt, Homo sapiens
ggccgggcgaacagcaaaaggcacaaaacaacccaaggggaaagaaccgccaggggcaagcaccacccgag

SEQ ID NO: 90923 - RNA, 72 nt, Homo sapiens
caaaagaggaaacgagccgccaaacagcacagaggcccgaaagcagaacagagaaggaacgaaaagaaaaaa

SEQ ID NO: 90924 - RNA, 84 nt, Homo sapiens
gcgcggagccagcgcgcagaccagcggaacccagaaaggagcccagaaccagggaacacgagccaccccagggcacacaccaag

SEQ ID NO: 90925 - RNA, 36 nt, Homo sapiens
gacacagcgcgcagagcgacgacggacggaggacga

SEQ ID NO: 90926 - RNA, 87 nt, Homo sapiens
gccagccgcaccagccgcccaagccgcacagccgcggcggcagcagcaggagagggcgcacccacgacgcgcacaccaccggcagac

SEQ ID NO: 90927 - RNA, 81 nt, Homo sapiens
gacaccagcggccgacaccaacccccgcggacccagggagaaaccccccaggagaaaggaggacccgggaagacagagacg

SEQ ID NO: 90928 - RNA, 77 nt, Homo sapiens
cagccgcggcaaggaggaagccagccaggcccacgagaccccgcccgcggcagcacagcggacagccacaggggcca

SEQ ID NO: 90929 - RNA, 76 nt, Homo sapiens
ggaaaagaacgaaaagagcacaacccgagaagcggcagggcaggcaacaaaccgggagacaggcacacccacaacc

SEQ ID NO: 90930 - RNA, 70 nt, Homo sapiens
ccgagagcggaaacagcagaccccgccagacgggcaaaagaccaagcggcacaaacgccccacgggaaac

SEQ ID NO: 90931 - RNA, 81 nt, Homo sapiens
gaccccacaccacacaaaacccgcaacgagaacccagccaaaaagcacaaaagcaaacagaaggaaaagaccaaaaccaca

SEQ ID NO: 90932 - RNA, 71 nt, Homo sapiens
acggaccagaaaaaaccgaccaggcagagggggcccccaaagggaagccaaacacaaaggaagaagcccgg

SEQ ID NO: 90933 - RNA, 86 nt, Homo sapiens
agcagccgcccgccaaccccaggggaccagaggaaccagcccgagcggaaaccccccaggcaagaggcgcaggaccgggaagacca

SEQ ID NO: 90934 - RNA, 69 nt, Homo sapiens
accgaacgaagaaacaaacagaggaaccagagaaggagaaacagcagggccaaaggcaagaacccggga

SEQ ID NO: 90935 - RNA, 78 nt, Homo sapiens
ggcacccggacaggaggagccagggcccggcccgaaaggagagccaaaggggggcccacaaggagcgcccgcggggcc

SEQ ID NO: 90936 - RNA, 76 nt, Homo sapiens
caccgaaggaccggaagagggacagagcgggagccaccagcgccaaagggaagccaggagcccgggggcacgggga

SEQ ID NO: 90937 - RNA, 59 nt, Homo sapiens
acagacaccgagccagcaagcccccaacggcacagcgacccgaagaaaccgcagcaaaa

SEQ ID NO: 90938 - RNA, 78 nt, Homo sapiens
agggggcccggagcagagccagcaagacgcccggaggacccccccgcacaaagaaaaaggggccgcgcagacaacacg

SEQ ID NO: 90939 - RNA, 87 nt, Homo sapiens
gaacagcaaggaggcacggaacaccagcaccaggagcaggccccaccgcagcggcggacgagcaggacaggccgcaaagggacgagc

SEQ ID NO: 90940 - RNA, 76 nt, Homo sapiens
aagccacacagcaacacccaggaaaggacagaagccacaaaacacggcacgccagacacaacgagggccagcccag

SEQ ID NO: 90941 - RNA, 61 nt, Homo sapiens
acagcccgccaggcgggagaagaaccccccgaaaggaccccccagaaccggaacaccagga

SEQ ID NO: 90942 - RNA, 73 nt, Homo sapiens
gcgccagaccggcgagcccgagcagccccaggagacaccggccggaagacaccccagcagaggcacccccccc

SEQ ID NO: 90943 - RNA, 73 nt, Homo sapiens
acccagggaccgcgcccgccaccgggcgacggcaggagaccggaaaccgagagaaacgaagacgaagaaacag

SEQ ID NO: 90944 - RNA, 84 nt, Homo sapiens
cccccgggcagaaggcgggccgcaacgccacgacagaaggcgccaggcgggaaaccggcccagcggcgaaaccgggaccacgga

SEQ ID NO: 90945 - RNA, 62 nt, Homo sapiens
gggccagggaacccggcaccgccccagccaagacaagcaaacccaggaacacccggccggcc

SEQ ID NO: 90946 - RNA, 74 nt, Homo sapiens
aagcaggacccgagaggagccaccaaagccagcgcaaagccacaaacagaaggaagaggagaacaaacgcgacc

SEQ ID NO: 90947 - RNA, 75 nt, Homo sapiens
cgacggcagcggcggcggcggacaaacaggcaccgcagggacaagagaaaaaaagggcgggcgaacaaaaagagc

SEQ ID NO: 90948 - RNA, 96 nt, Homo sapiens
gccgaagaccagcccagaaaaccaaccccaaagggccagagagcaacgacccagcaagagccgccacaacaaacaccaaagagaaaacaggcagac

SEQ ID NO: 90949 - RNA, 79 nt, Homo sapiens
ggggccccacacccccccggggggggagagcgagcgacgggccagagccgccagagggggggcagggggggccggcaca

SEQ ID NO: 90950 - RNA, 81 nt, Homo sapiens
acaccaggcacccgggcccagccgggaacccccacgcggccagcgaaaacgcccagggccggggccagggccaccggccag

SEQ ID NO: 90951 - RNA, 70 nt, Homo sapiens
aacagaaaacaagaccggcccaacagagaaaggaaagccaaaaaggagaaccccagagaggggccacagg

SEQ ID NO: 90952 - RNA, 69 nt, Homo sapiens
cggccaagcacacacaccaccggcgggacaccagaggaccagaacccacgagaaacagacgagccaacc

SEQ ID NO: 90953 - RNA, 75 nt, Homo sapiens
cgccaacaagggccgccgcggacaaggcacgaggcgcggcgaccaccacagcagagcccggcgaaggaggagcag

SEQ ID NO: 90954 - RNA, 66 nt, Homo sapiens
cgcgcccaagccggcaccgagcggcggagacggcgagcacaagccacaacacagcagcccccagga

SEQ ID NO: 90955 - RNA, 72 nt, Homo sapiens
cacacgaccgggcccccacgggccccaggagaacacacaaccagaagcgaacgaacaggccaaaggacccag

SEQ ID NO: 90956 - RNA, 70 nt, Homo sapiens
aagggaagggaacaggaaaaccacacggccaggaaacggaaaagcaaggccggacaagacgcagagagcc

SEQ ID NO: 90957 - RNA, 57 nt, Homo sapiens
gcaccgcgcaggaggcagcccgcggcgcagccgcgagggcaaagaagggccacgggg

SEQ ID NO: 90958 - RNA, 51 nt, Homo sapiens
ggagcgccggaggcggccgcaccggagaagagacgccaacagaccggggag

SEQ ID NO: 90959 - RNA, 71 nt, Homo sapiens
gcacccccagggggccacagcgcccagccaaagaaggcggggacagagagcaccagcacccacggcaccgc

SEQ ID NO: 90960 - RNA, 86 nt, Homo sapiens
gccggcgcgcccggaggcggggcacacaggccccgagaaccaagagaacccccaccaaccaggcccggccaacggccccaacccac

SEQ ID NO: 90961 - RNA, 52 nt, Homo sapiens
ccgcccccccgggcaggaagacaaaaacagggcagggcaaagacgggcagag

SEQ ID NO: 90962 - RNA, 72 nt, Homo sapiens
gaacaggacagcggccacaacccaacgagaggcagaaacgaagcgaaaggaaaccaaaaggaaaaaacagaa

SEQ ID NO: 90963 - RNA, 74 nt, Homo sapiens
ccaccgccaagcaagaaagaggcgaagagacaaagaaacaacagcaagcgcagaccgacaagacggaaaccggg

SEQ ID NO: 90964 - RNA, 58 nt, Homo sapiens
cccggcccccgccccagcccgccggcggcggcggaagcaaagccagggagggaaccga

SEQ ID NO: 90965 - RNA, 79 nt, Homo sapiens
acggaagcaaggaacaaaccgaagaacagcgggaaagaaggcaaaacacggggcagagaaagagcgagagggaaaggaa

SEQ ID NO: 90966 - RNA, 68 nt, Homo sapiens
gggcggccacgcgggaccaccggcaccaccaaagaggcacccagacgggagagaagcgccggccggaa

SEQ ID NO: 90967 - RNA, 71 nt, Homo sapiens
acaccccgcagccggggccaaagggccccccaggggcccgcccagcagaccccccaggcgccccgccgccg

SEQ ID NO: 90968 - RNA, 73 nt, Homo sapiens
aaagacagaaagaagccacccgaccacgacaaggagggagccgccaccggacaccaaccagaagagaagaccg

SEQ ID NO: 90969 - RNA, 80 nt, Homo sapiens
aacccacacaggacgcggacaagggcggcaggccagaagaaggaagggagaggcaagaacgccaccgaaaacaaacacgg

SEQ ID NO: 90970 - RNA, 75 nt, Homo sapiens
caaaaagcacaaacaaacggacaaggagccacgggaagcagggagagagccggcaaaacccccccaaccagcgag

SEQ ID NO: 90971 - RNA, 57 nt, Homo sapiens
gggacgggagcggggacgggcagggggggccgagccggagccggcgccgccggggag

SEQ ID NO: 90972 - RNA, 55 nt, Homo sapiens
cgcacaggagagggaagggcaacaacacggcaccacacaagcgaagaagccgaga

SEQ ID NO: 90973 - RNA, 37 nt, Homo sapiens
ggaaaacccggaggcccggacaacgaacgaaggagac

SEQ ID NO: 90974 - RNA, 36 nt, Homo sapiens
cgcgcacccccaacacccccaagggcggcaggcccc

SEQ ID NO: 90975 - RNA, 74 nt, Homo sapiens
aggggacgagccggcgggcgaccaccacccgcgggcgggcagcgcaccccccacgggcagcagggggagaagca

SEQ ID NO: 90976 - RNA, 78 nt, Homo sapiens
aacggaaagaaaggcggcgaggaagagccagaagggggggcgaccgaggaaaaaaagaaccaagagaaaagacacggg

SEQ ID NO: 90977 - RNA, 70 nt, Homo sapiens
gaaaaccgagagggaagccccggaaccagcgagagacaccaaacaacgacgaaagacccacagaagcgcg

SEQ ID NO: 90978 - RNA, 63 nt, Homo sapiens
gcccgacacaccggcacgaaaaacccgcagggaacaccagcagacggggaacacagaaaaaga

SEQ ID NO: 90979 - RNA, 86 nt, Homo sapiens
ggcagcggagcggcgagcgcgaaggcacgagcggagggagaacaagaacgcagacaggacacagaacagagaagaagcagacgaga

SEQ ID NO: 90980 - RNA, 71 nt, Homo sapiens
gaaaaggaagcggaaggacagaagcgaaggggacagggggagaaccgccagggaaacccgggggacagaca

SEQ ID NO: 90981 - RNA, 62 nt, Homo sapiens
caagaaggcggaccagaagggaggaccacacggaccgccaccgcaagccccggggcagagac

SEQ ID NO: 90982 - RNA, 75 nt, Homo sapiens
cacagcggagcaacaaggagggaagccacaagcagacgacaacgcagacgaagaaccaagagaaaagacccacag

SEQ ID NO: 90983 - RNA, 81 nt, Homo sapiens
caggccggaacgaaagggaaaggcacgaggaaggaacagagccacagagaaaaagacgccacaacagaagagccagagaaa

SEQ ID NO: 90984 - RNA, 58 nt, Homo sapiens
caggaaccaccaggacagacgaaacacacacgcaggaaggaacccggacgaccaccag

SEQ ID NO: 90985 - RNA, 59 nt, Homo sapiens
gccgcgcacggacaccggcaaccgcccagcacaaggccaagagcccgggaccaaggcag

SEQ ID NO: 90986 - RNA, 46 nt, Homo sapiens
ggacaccgagccccagggcgcggcgcccacaagaaaggcagccccc

SEQ ID NO: 90987 - RNA, 84 nt, Homo sapiens
gacgacaagccgggagcgggcggccaaccaggcgagaacaccgagcaaagccaccaacaagcgacagcaagcgagcaaaccaac

SEQ ID NO: 90988 - RNA, 80 nt, Homo sapiens
gccggcccccccaggacaacccagaggcaacaaaggcgagagaagacggcccagcagagcacccaaccagcgggaacaca

SEQ ID NO: 90989 - RNA, 79 nt, Homo sapiens
cggccccgcgcccgcccaggggcgcgcgccgcgcggccccacggaggagaacagccgcacgggcggcgcccggcgcggg

SEQ ID NO: 90990 - RNA, 80 nt, Homo sapiens
ccgcgaagcgccgccggccccgccgccaagaggagcgagcggacccgcgaggaggaagacaccaccggacaccgaccagg

SEQ ID NO: 90991 - RNA, 85 nt, Homo sapiens
gccgagagccgcggcccggcggaaaggacagcagagacggagcgcaagaggacggcagcgcggcgaagggaccgccgcacccaag

SEQ ID NO: 90992 - RNA, 71 nt, Homo sapiens
aagggcacgagacacaaaccaaccaacggaaaacgaaggcagagggggcgagggaggaaagggggcaaaac

SEQ ID NO: 90993 - RNA, 71 nt, Homo sapiens
gcccaagcaaaagagacaaggaggccaaggaccgcacaaccaggaccgcagcgaagcacagcagaaggggc

SEQ ID NO: 90994 - RNA, 75 nt, Homo sapiens
cagcagccccagggccaccgagcagcggaaaacacagggaacccagcacacaggacggaacgcaacgaccgacca

SEQ ID NO: 90995 - RNA, 93 nt, Homo sapiens
agaaacaaaagaagaagagacaagaaagagaaggagaagaaagagcgaaaaccaaaagaccaagggacagggaaaaaggcgccaaagcacaga

SEQ ID NO: 90996 - RNA, 70 nt, Homo sapiens
cccccaagaggggaacaggccggaggaggcggaggccagccgagacaccacgacgccacacgacagagac

SEQ ID NO: 90997 - RNA, 80 nt, Homo sapiens
caagaaaccaaacaagccgaaagagcaaggaagaccacacgaaggggaaccccagcggcgaccggaacaaccagggaagc

SEQ ID NO: 90998 - RNA, 77 nt, Homo sapiens
agggaccgcgccaacggagagggaacaggcacgccccacccgccagccgagcccccgacgcagcacaaagcccccac

SEQ ID NO: 90999 - RNA, 72 nt, Homo sapiens
gaagccaggcaccccccacagaaagggcgggccagaagcccccaggaggagaacgagcaacggaagccagaa

SEQ ID NO: 91000 - RNA, 67 nt, Homo sapiens
cgcagggcgcccccgaggaaaggcaagggcagaaaagaggggaaaaggccagccgcacgcaggcaaa

SEQ ID NO: 91001 - RNA, 88 nt, Homo sapiens
gcgggagcggggcgcgcggcccccgcgcgccggcgcgcgggcgggccccaggcagcgccagacccggccacgaggaccagggggggag

SEQ ID NO: 91002 - RNA, 42 nt, Homo sapiens
ggaggacagcagagagaaagggcgcagcgaggaggggaagcc

SEQ ID NO: 91003 - RNA, 72 nt, Homo sapiens
caggagagacaaaggcaacggaggacaccagaccgcgaagacaagacccaaaaggagaccgagagcaaaaga

SEQ ID NO: 91004 - RNA, 89 nt, Homo sapiens
cccgcgggggcgcgccgcgcccgcacccgcgccgcgcgccgaggacccagccgggagggcgcaaggaagaagagacgccgcgcggcaga

SEQ ID NO: 91005 - RNA, 93 nt, Homo sapiens
cggaggacggggccgggcgaccgggcaccagcaggacccgaggccaggagccaggggcccagaaggccacccagaggagaaggccaccccgcc

SEQ ID NO: 91006 - RNA, 102 nt, Homo sapiens
aaccggagcgggagacgggacagacagccgcacgaaccggaccaggaggacgacggcaccacggagcccaggacccaagagcgcgcgggcaaacgaaacacc

SEQ ID NO: 91007 - RNA, 73 nt, Homo sapiens
aaccaccagcagcccccagagcggaacacagcgggcggcaaagaaggggcgaccacagaggccccccagcaga

SEQ ID NO: 91008 - RNA, 77 nt, Homo sapiens
ccaggagcgccacgcgcggaaggcagcgcccagcagcgcagaaaaacacgcgcgccgagccagaggagaccccagac

SEQ ID NO: 91009 - RNA, 38 nt, Homo sapiens
cccgccggcgagcagcgagcgcacgccacgaggagcag

SEQ ID NO: 91010 - RNA, 70 nt, Homo sapiens
cgccaccacaacccccagacgcaagccaagagagaagagggggaaaaaggaaggccgccggacagcgcag

SEQ ID NO: 91011 - RNA, 76 nt, Homo sapiens
acggccgcaccgcgcgagcacgggcggagcgaacggcggacccggacgacaccaaagagacccccacgagaaaggc

SEQ ID NO: 91012 - RNA, 81 nt, Homo sapiens
aagagccggggggcccacgcgcagccgggagaagaggcacaaggacaggcacagagaacagaacaaaaaaaaaccaggaac

SEQ ID NO: 91013 - RNA, 88 nt, Homo sapiens
cgaaaaaaccaggcccagacgacacgggaaaccccaacccccgaagacagcagaaggagacgcacgaagcagaacaaaaaaaaaagga

SEQ ID NO: 91014 - RNA, 81 nt, Homo sapiens
gccgaggcggcggcggcggcggggacgcccggcagcgaagccgacgagcccgaacagacgcaccagcgggaggaagaggga

SEQ ID NO: 91015 - RNA, 74 nt, Homo sapiens
ccacgaccgccccagcgacgccgcaacaaagggccagaaagaccacaagaggaaccagagaacaacagggcaga

SEQ ID NO: 91016 - RNA, 60 nt, Homo sapiens
caccgcgagcacgaacaagcagcgaagcgcgaaagaggcagaagaagggggagagccaaa

SEQ ID NO: 91017 - RNA, 62 nt, Homo sapiens
cgaccggccaacgacgccccaaggcgccaaggaggggacccccaggaacggcacaggggcag

SEQ ID NO: 91018 - RNA, 60 nt, Homo sapiens
agaccgcaccgcacggcggagcccgcacgcggcgggcagcggagccccgggcccagcagg

SEQ ID NO: 91019 - RNA, 82 nt, Homo sapiens
cggccacgacgggaccacggcagaagaggacgaggccgacagcacgccgagaaggaaccccacccagaagaaagaaaagcgg

SEQ ID NO: 91020 - RNA, 68 nt, Homo sapiens
ggaagagaacccacgccaaagaggaagcccaccacaaaaacgaaggcggcggacacacaccagaggga

SEQ ID NO: 91021 - RNA, 71 nt, Homo sapiens
gacgaaaggacgggaacaaagcgaaacagcacacggaaaaagagcgaaaacagccaacccgcaacaacggc

SEQ ID NO: 91022 - RNA, 61 nt, Homo sapiens
ccaggcgggacaagagagccgaggcgcccccaccacccacaagccgccggagaagagggag

SEQ ID NO: 91023 - RNA, 69 nt, Homo sapiens
gcccacccagggcaacggcagagcacacccaggaaaccagacccgacacaaagaccagggcaaagcacc

SEQ ID NO: 91024 - RNA, 56 nt, Homo sapiens
ggcagcggagaagcggagcgaggacgaagaaggagaacaggaggaggaaaacagaa

SEQ ID NO: 91025 - RNA, 80 nt, Homo sapiens
gcagaaggacgcccacgagcaaccaagacacagaggacccgaaaccggagagcaccgcgaaaaggcggccgagggcagcg

SEQ ID NO: 91026 - RNA, 73 nt, Homo sapiens
aggaaacggaccgcaacaaaaaagcccacggggagcaggagcacaacgaaaacaaacggaagagagggcagca

SEQ ID NO: 91027 - RNA, 82 nt, Homo sapiens
aaaggaaacaaaacgagcaaacacaggaacccaacgagccaaagacagcaaggccggaggaaaaacagcggggagaagagcg

SEQ ID NO: 91028 - RNA, 83 nt, Homo sapiens
cggccaggcggacaacgagaaacggacaaccaacggccaagaacaagaacaaaggccgcgacggagggcagaagagggagcac

SEQ ID NO: 91029 - RNA, 89 nt, Homo sapiens
gccccggagcgcccggcggcggcggcgcgcggccgggcggcgaggaagaggaaggaaggagcgcagcgagacaaagcaggaggacacaa

SEQ ID NO: 91030 - RNA, 75 nt, Homo sapiens
aagcagcgaagaagaggcccaacccccaccccgcccaaggaggcccagcgcggaagccgcagaaggaccggccag

SEQ ID NO: 91031 - RNA, 77 nt, Homo sapiens
ggcgggggcgccggcagaggaccaggcaccaccggccccggaagaccgacggcagggcaaaccagacgagagagaag

SEQ ID NO: 91032 - RNA, 79 nt, Homo sapiens
cggcgcaacaggacgcccggcggcagcggcggcagagaagaaacgccaggaagccaagcaagggcggaaaacagaagaa

SEQ ID NO: 91033 - RNA, 80 nt, Homo sapiens
agcccaacagagggaacacaaccagggagaccaaagaggaaggggaccaacacagagggagaaagcagaaaacgccagaa

SEQ ID NO: 91034 - RNA, 77 nt, Homo sapiens
caggaagcccgaagcccacacaccccgaaaacaaagacacgcagaggcagcagagaaaggaaggaaaccacccaggc

SEQ ID NO: 91035 - RNA, 63 nt, Homo sapiens
ggggacgaacagacgcggaacacaaaacgggagaagcagaccgcaccaggcgggaccccgaaa

SEQ ID NO: 91036 - RNA, 78 nt, Homo sapiens
gcggcgcggcggcggcccgccccgcggcccaggacaccccgggccaagaggacaacaagaagcgccggccacgccaca

SEQ ID NO: 91037 - RNA, 78 nt, Homo sapiens
ggaaaccggagcggcagagcagagcccgggaccaaggcagcaagggacggggggcaccccgcccgccgaagcaagaaa

SEQ ID NO: 91038 - RNA, 75 nt, Homo sapiens
caacaaccaaaccgacaaaggcaacaaaagaaacggaagcaaacgcagacaaagaacaagcaaccaccgaaacgg

SEQ ID NO: 91039 - RNA, 76 nt, Homo sapiens
gcggcaagaacccaggacgggggccacagcaacggggggggccgcccgcgaggccaacacccaacccaccgggaga

SEQ ID NO: 91040 - RNA, 70 nt, Homo sapiens
gacggcacagagcaaccgagcggaccaccggccgcgaggcgcgagagacagcaaccaaggacacgggcgc

SEQ ID NO: 91041 - RNA, 64 nt, Homo sapiens
cagggccgcggggacaggaccccggacgagcccggcgaggaaaaaggcccaggaagacaaaggg

SEQ ID NO: 91042 - RNA, 83 nt, Homo sapiens
cggcccggggcgcgcgcccgcgggcgcagaggacgaggagcaaggcgggagagggagcgcgagcgcgagcgcgagcggagcgg

SEQ ID NO: 91043 - RNA, 84 nt, Homo sapiens
gccaggccaacaggacggcgccggccccagccagggcacccccggacacagagggcgaccacaagaacacagacagggaggacg

SEQ ID NO: 91044 - RNA, 67 nt, Homo sapiens
ccccccagcccaagacccaggaccaagagaagacagaacacacgacaccagaagaaaccagaacaga

SEQ ID NO: 91045 - RNA, 77 nt, Homo sapiens
ccagaagccagagcgaggacgccggcaggaggcaaggaggccacggggccgaagacaccaaccgggcaccagccaaa

SEQ ID NO: 91046 - RNA, 71 nt, Homo sapiens
gcaagcccagacaagaggaaacaaaagggcgacagcccagaggaccgaggcgcgagaagagagagccaaaa

SEQ ID NO: 91047 - RNA, 77 nt, Homo sapiens
aaaagaaacaagaaggagaacaaaagcaaagccccagacggacggagccgcaggccaggacgccacccgacaccaga

SEQ ID NO: 91048 - RNA, 53 nt, Homo sapiens
aaggagggcagaagcggagagccaggaagaagcacccaaaagcaagcgcggga

SEQ ID NO: 91049 - RNA, 74 nt, Homo sapiens
gaaaaaaacgcaaaagaccaggagccgcaaagcaaaggacgaagcaaggcgggacaccagggagaaaaaaagaa

SEQ ID NO: 91050 - RNA, 75 nt, Homo sapiens
cgacaccgaggagcacacaccacgaaggagccagggcacgagcaggggccacccgaccaccggcccaccagaggg

SEQ ID NO: 91051 - RNA, 59 nt, Homo sapiens
ggcccacggacagaaggggacggagaggggagaaaaccgacgcacaccaaacgacaggg

SEQ ID NO: 91052 - RNA, 72 nt, Homo sapiens
gcaggacccgggaggaccaggagcgccccaagccggacacaagagggcaagaaaggcgcgacgggccgaaaa

SEQ ID NO: 91053 - RNA, 78 nt, Homo sapiens
cccgagggcaagaggagaggcgacagcgaaaagaagcaggacgccgcaaccacagggaaacccagacgacaaggaagg

SEQ ID NO: 91054 - RNA, 64 nt, Homo sapiens
cagcaagaacagagagagaggggacagacgagagaacgagcaaagcccagacaagccagggaac

SEQ ID NO: 91055 - RNA, 70 nt, Homo sapiens
aaaggggagagcgcgaagcaaaggagcaagcggccgagccgagaacaggagagagcagccgggcggccca

SEQ ID NO: 91056 - RNA, 92 nt, Homo sapiens
acgaagcaggccaggaagaaagagaggaaagaagaaaaccaagaaagccccacgagacgaggacgcgcacaggaaaggacgcggaacaagca

SEQ ID NO: 91057 - RNA, 66 nt, Homo sapiens
cagaaccgaacaacccgggacagaccagaacaaacggaaggaaagaggcagaaggccagaagggcg

SEQ ID NO: 91058 - RNA, 60 nt, Homo sapiens
gccacaaagccccccggagacgcaaccaagagccaagggagggacggacagggagcagag

SEQ ID NO: 91059 - RNA, 89 nt, Homo sapiens
agaaccaaggaccaaggacccaaagcacaggaaccaccgaaagcggcgcaacgaggccaggcgacccaaaagcaaaacaacagcccaca

SEQ ID NO: 91060 - RNA, 59 nt, Homo sapiens
cacacgaaggcagaggaaacgaggagccggccggcgcagagccagaaggcaaacacaac

SEQ ID NO: 91061 - RNA, 63 nt, Homo sapiens
ccaaacgacagggagccgaggacggagacacaaggacgaaggaccacagcacggcccacgaca

SEQ ID NO: 91062 - RNA, 81 nt, Homo sapiens
gggaggggccgggaggcagaggggcagggggaacgaagacccccgacgaaggacccggggcccggaggagaggagcacagg

SEQ ID NO: 91063 - RNA, 70 nt, Homo sapiens
gacccagcccacacaaaggaccaagacacggaccccgcaccaggccggaaggaaacccgagaggagcagg

SEQ ID NO: 91064 - RNA, 77 nt, Homo sapiens
aggagacagagggccagaagaggcagagcgagaaagacaggaaggacgaggccacaggaccagcgggagcaggagaa

SEQ ID NO: 91065 - RNA, 83 nt, Homo sapiens
gcgggcgagaggagcgagggaaggcagagcggagccagaaagaccagagaagagagacaaggggaaacccaacagagaagaga

SEQ ID NO: 91066 - RNA, 78 nt, Homo sapiens
gaacgcgccccccgccggagaagccaagcaagagcgagagaaaggcggcccaggcccgcacgggccgcagccacagcc

SEQ ID NO: 91067 - RNA, 125 nt, Homo sapiens
cgaacagcgggcgggcccggcccgggggccgccccggcgagccgcgacggcgccgcccacggcgagcgacggaaaaccggcagcaggagaggccacgccagggaaggggccaccagcaaaggaag

SEQ ID NO: 91068 - RNA, 71 nt, Homo sapiens
ccagggaccgggcgggcgggccccccggcaacgcggcaagccaaagcgccacagaccaagggggaaaagaa

SEQ ID NO: 91069 - RNA, 80 nt, Homo sapiens
ggaccgccacgcgcccgggagacgcccgcgccgccgcgaggaccaggaggagaccaggaagcagccgcacggcagccgcc

SEQ ID NO: 91070 - RNA, 64 nt, Homo sapiens
aggggaaccccggagaaaaggccaagaaggcaggaaaggagcagaacccgggccaaacagcacg

SEQ ID NO: 91071 - RNA, 66 nt, Homo sapiens
aaccagccgaaaacagccagacgcccaccaagaaggacgccaggaaagcaggcagagcaaccccca

SEQ ID NO: 91072 - RNA, 75 nt, Homo sapiens
agaggggggagacggggaagacaggccagcgcggccaagacccaccgcaaggaagcgccacgcagagagcaaggc

SEQ ID NO: 91073 - RNA, 55 nt, Homo sapiens
agaaccggagagcacccaacacaagcacaagcgaggggaagccccacccaaaacc

SEQ ID NO: 91074 - RNA, 69 nt, Homo sapiens
gcaaacccgaggagccagagaccaaagccacaaaaaaaaggggacaacaccaacaaagccagggagacg

SEQ ID NO: 91075 - RNA, 77 nt, Homo sapiens
cacaagacaaaggcgccgcagcaccccccggacccagccccgggacagccagcacaaaaaaacaaaacgagaacacg

SEQ ID NO: 91076 - RNA, 70 nt, Homo sapiens
gcacagcggcgcgcgccacgccgcgccacccgccaggcacaacagacaccccgaagaaccccaaagaaac

SEQ ID NO: 91077 - RNA, 77 nt, Homo sapiens
gaccggaacaggcacaccccacacaagcacgccaagaacaccggcagagagagagacacaccagacgagaaagcgac

SEQ ID NO: 91078 - RNA, 79 nt, Homo sapiens
acccagacccggagcccagggaagcagccgaccagccgcggagccgggggcagaccgggaacgggcgggcgagacagag

SEQ ID NO: 91079 - RNA, 51 nt, Homo sapiens
aaggcgcggccccacgaggcaggagcgcggcaccggagcagccccgacgcg

SEQ ID NO: 91080 - RNA, 48 nt, Homo sapiens
accgcaggggacccccagaggcccccccgggggcgagaagaaacggac

SEQ ID NO: 91081 - RNA, 76 nt, Homo sapiens
cccaggggacccagacgccccaggacaccaccagccggaggaccaagggggagacgcgaggaagcggcacaggggc

SEQ ID NO: 91082 - RNA, 73 nt, Homo sapiens
acacaagcccagaaaggacacaaaagagaggcagaaaccacagaggaaaagaggaccacccgcacccagggga

SEQ ID NO: 91083 - RNA, 85 nt, Homo sapiens
agaaggacggggggcagacaggagcccaagagcgccacagcagccaaacggggacgcccagagagccgaagaaggaggcggcggc

SEQ ID NO: 91084 - RNA, 83 nt, Homo sapiens
cgggaccgaggaaaagccgcaccaggcgccgcgcccggggagacagaaacgaggcgcccccagcagcaggaggacgacgacaa

SEQ ID NO: 91085 - RNA, 49 nt, Homo sapiens
cgaaaccacagcgaagggaaaagaagcggagaagcggaggagaccaagg

SEQ ID NO: 91086 - RNA, 62 nt, Homo sapiens
acaggcagaaaagccaggcacgaacagggaccgagcagagaaccaacggagaacagcccacc

SEQ ID NO: 91087 - RNA, 67 nt, Homo sapiens
cgcccccggcccgggcgggagcccgcaccaggcgcccccccggcggggaacaccgaagaacccccag

SEQ ID NO: 91088 - RNA, 73 nt, Homo sapiens
gaaacacaaagccggcacgcgcgcgaggcacccaagaacgaggccgcagaggacccacagccgcgcgcgaccc

SEQ ID NO: 91089 - RNA, 77 nt, Homo sapiens
cgacgccggcagaacacgcgcgggaccccgggcacggcgcgcgggaggacacagcaaagagcaaaaacaaaagaagc

SEQ ID NO: 91090 - RNA, 57 nt, Homo sapiens
agaaaccagcagcccagagaagcgaagggcccgccccaccgggggccaccccaggga

SEQ ID NO: 91091 - RNA, 35 nt, Homo sapiens
caacacggaacagacgcagagaagacagaggagcc

SEQ ID NO: 91092 - RNA, 66 nt, Homo sapiens
gacagccgccaggcacaaagaaggaaacagccacaagaaggagagacgcagagccagacaagacca

SEQ ID NO: 91093 - RNA, 74 nt, Homo sapiens
ccggacaaccagaggcagccagcagggggagaagaagaccggaaaccaacccgagagaaaaagggaaggaaggc

SEQ ID NO: 91094 - RNA, 71 nt, Homo sapiens
gaaggaggaaaaaaccacaaccaaagccccagagaaagaacaggagaagggaaaggcgacagagaagagag

SEQ ID NO: 91095 - RNA, 78 nt, Homo sapiens
agagagcagcacccggaaagagaaaccccaagccaaaggacacggccgagaccccgacgcccgacggccacacgccag

SEQ ID NO: 91096 - RNA, 78 nt, Homo sapiens
gaaggccacacccaggcagcaagggcaccgcgagcaaggacagcaggcaaaaaaaagaccgaacgagaaaaggcaccc

SEQ ID NO: 91097 - RNA, 80 nt, Homo sapiens
cgccggcaggagcgccgaccgcagggcccacgggagagggaaaagcccagccaaccagaaaaaaaggaaaccgaagccag

SEQ ID NO: 91098 - RNA, 77 nt, Homo sapiens
gacagcgacccgccccacccgcagcagaacaagggacgcagaaaacgcacagcacgagaaaagcgaaaagaacacaa

SEQ ID NO: 91099 - RNA, 81 nt, Homo sapiens
gggaaaggagagggacaggagggccagacaaggggaacacaagaggagagaaggggaccgcagggagaaaaggccagagag

SEQ ID NO: 91100 - RNA, 78 nt, Homo sapiens
acgaagccagcaaccaggaggaccggaagggacccccccgaaagcccggccagggccagaacgaagcacaacaggcag

SEQ ID NO: 91101 - RNA, 58 nt, Homo sapiens
acccacagaaagcaagggggacaaaacggccaacagacccacacccagaaaaaacccg

SEQ ID NO: 91102 - RNA, 75 nt, Homo sapiens
acaaggccaagggccaaggcggcggggagacgagaagaagggaacacggaaagcgagaccagcaaaaacaaaaca

SEQ ID NO: 91103 - RNA, 37 nt, Homo sapiens
acggccgcagggcaaccagggccgggggcccgccccg

SEQ ID NO: 91104 - RNA, 68 nt, Homo sapiens
ggccggccggccggcccccaaacgcgcccgcccccaggcccccgaaaacacaagaaaagcacgcacag

SEQ ID NO: 91105 - RNA, 39 nt, Homo sapiens
ccgcgcccccaccacccccacagagcccccaccgaccag

SEQ ID NO: 91106 - RNA, 40 nt, Homo sapiens
ccgcagcaaacagggcccaccagcaacggggcggcacaca

SEQ ID NO: 91107 - RNA, 69 nt, Homo sapiens
gcagcacacggaacggaccccagggaaagagaagagagaagaagcaaaccgggaccggaagcaccaagg

SEQ ID NO: 91108 - RNA, 72 nt, Homo sapiens
aaaccaaaaaccgcaccaacgggaacgggacacaccacaggaagaaggcgaccgagaacacagagaacggga

SEQ ID NO: 91109 - RNA, 71 nt, Homo sapiens
ggcgggccccgagagcagcagcgacagcgaacgggcacgacggccagcgaaacagagaacaaacagaaaaa

SEQ ID NO: 91110 - RNA, 85 nt, Homo sapiens
cgccagggacgggcacgggaagggcagcagggcgacagcaagaagccaagaagaagaacaacaagaaaaccaacaagaacaaaag

SEQ ID NO: 91111 - RNA, 74 nt, Homo sapiens
aagcagaacagaggccagaaagaaaaaggccccaagcgggccacacccaaaaccggacaggcagggcaagaaga

SEQ ID NO: 91112 - RNA, 63 nt, Homo sapiens
aagacggggcccacgccggaaggacaagagcgcccaagcggacagccccacccgacaccagcg

SEQ ID NO: 91113 - RNA, 80 nt, Homo sapiens
gaaagagacagcacaaaaagggcaacccgcccagaagaggcaccaggcccaccaaagaggggaagggaggcgaaggacga

SEQ ID NO: 91114 - RNA, 85 nt, Homo sapiens
cagaagagccaaggaaaaacagcaagaacccaaaaggcacgcggcagcgaaggggaaccacccccagaaccagccaccagcaggc

SEQ ID NO: 91115 - RNA, 75 nt, Homo sapiens
aagccggacccgcccagcagaagaagagaggagggagaacacagaaaccggccccaggccccgggaaaggcccac

SEQ ID NO: 91116 - RNA, 43 nt, Homo sapiens
ccgcgggaccaaagcagagggaggccgggcacacgccaggcca

SEQ ID NO: 91117 - RNA, 69 nt, Homo sapiens
gagaccgagaaaaaaggacaaccgcgcgggacccaaacggaaggaacggaggcgacaagaacgagccag

SEQ ID NO: 91118 - RNA, 78 nt, Homo sapiens
ccccgagcgcgccccacccgcgccccgccgagcgcacaaaacaggacagagcgggagccaccagcgccaaagggaagc

SEQ ID NO: 91119 - RNA, 74 nt, Homo sapiens
gccgcgaacgagccgagaaaccggaaccagacgccagaggagagcagcgagcagaaggggaaaaaagaagcgaa

SEQ ID NO: 91120 - RNA, 70 nt, Homo sapiens
acaaaggaacaccaagcggaaaagagcagcgcccagccccagcagggggagccacggaccagggggacgg

SEQ ID NO: 91121 - RNA, 83 nt, Homo sapiens
cgccagcgacagagccgaccagcaccccgcccagccagagaaacggagacaaaggacaggcagaaaccagaacaggcaaaggg

SEQ ID NO: 91122 - RNA, 59 nt, Homo sapiens
ggagaagaaacggaacagcccccagaagacaacggcaagcggagaagagcaaggccgaa

SEQ ID NO: 91123 - RNA, 53 nt, Homo sapiens
cgacccgccccaacaccggggaggaagggcggagaacggaaaagcaccaggaa

SEQ ID NO: 91124 - RNA, 62 nt, Homo sapiens
cggaggacagaagagaagaccgccccaagaggaaaccagaaggagaccccccagaaccggag

SEQ ID NO: 91125 - RNA, 73 nt, Homo sapiens
ggcgacagcgccgaacaggacacggaaaaaggagaccgcccagggaagacccacgggacgacgcacaagagga

SEQ ID NO: 91126 - RNA, 68 nt, Homo sapiens
acagaaccgacagggaggaacgcggggaggaggaggacaggcccggagcgccaccacaggcaagagaa

SEQ ID NO: 91127 - RNA, 66 nt, Homo sapiens
aaggagcagccaggggaccggccagggacaggcggaaggaacacacgggggcagcgccagacagca

SEQ ID NO: 91128 - RNA, 78 nt, Homo sapiens
agccagaccagcggccgggggcagaccccagcccacaacccacgcgcaccggggaaaaaccaacaaggcaaagcaaca

SEQ ID NO: 91129 - RNA, 109 nt, Homo sapiens
cccagcgcagcaagaccgccagccagagaacgcgagaccggggcgaaacaaggaaagaccacagcaagaccacgcccccagccgggggaccaggccgaacgacccggac

SEQ ID NO: 91130 - RNA, 79 nt, Homo sapiens
cccgcgccagcaccacgcccgcgccgcgccgccgccaccagcccaagagaaaggggaaagaaaaggcacccaaaagccc

SEQ ID NO: 91131 - RNA, 82 nt, Homo sapiens
ccacaaccaagggcgcaagcagccaagaagagggggacaaaaacgcgcggcgggggaggcgcagaccaaggcgcagcacagc

SEQ ID NO: 91132 - RNA, 75 nt, Homo sapiens
acgggggacaacccaagagaagaagcgcgagccgaacacccaacaagaaggcaacgacaaacagccaagcaagcc

SEQ ID NO: 91133 - RNA, 91 nt, Homo sapiens
agcacacacgagcggggcagcggagaaggccaacggcacaacgccacggggcacacccaagcaagagacaaccaggggaccgcaggcgcac

SEQ ID NO: 91134 - RNA, 56 nt, Homo sapiens
ggaagcacaaagggaccccagccgacgaaccacggaggcagcagacgacaggacgg

SEQ ID NO: 91135 - RNA, 74 nt, Homo sapiens
cgggccaagagcagaccgggcgaagggagaggacagcagggaggcgggacgcgggcaagagaagcacgacccag

SEQ ID NO: 91136 - RNA, 81 nt, Homo sapiens
ggccaggcccgaggcgccaaacaaacccaggaacccacccaaacggcacccccagacagaggggggagaccagacggcaga

SEQ ID NO: 91137 - RNA, 89 nt, Homo sapiens
ccgccgacgcccgcgccggcgccccgggaccgaaggagaagaaggagaaggggaggagaaggcaagccggaaagagcgaaagaaagaag

SEQ ID NO: 91138 - RNA, 77 nt, Homo sapiens
aaaggcgaaggagccgaaacagcagagcaggcacggagggaaggaagacacaagcccggaacagagaccaaagggag

SEQ ID NO: 91139 - RNA, 60 nt, Homo sapiens
gcagcccacgccagacgaccccacccgcgccgcgacccgcagggaggcgcgaggggcagg

SEQ ID NO: 91140 - RNA, 74 nt, Homo sapiens
cgccaacccccgagcaagacgggagccggaagagcgcagaagccggaagagagccaagccaggcccagcagccg

SEQ ID NO: 91141 - RNA, 82 nt, Homo sapiens
cgggccgcgggcgcggacgccggcccgcgcgcgcaccccgcggacgccacagcgcgaacgcacaccagcaccagcccaccaa

SEQ ID NO: 91142 - RNA, 60 nt, Homo sapiens
cacaggagacacgcgcgcacgaagcccagccagccaggggaagcccccccaagaaggggc

SEQ ID NO: 91143 - RNA, 73 nt, Homo sapiens
ccaccacaagcacggaggcgcaaaaaaagcccgccggggggaaggagacgcacacccacaccgggcaacaggc

SEQ ID NO: 91144 - RNA, 78 nt, Homo sapiens
aggaaagcgcagaaaagcggggacggcggacaaggcccagaacaagcacaacaagacccaaagcccgcagcgaccggc

SEQ ID NO: 91145 - RNA, 51 nt, Homo sapiens
aggaggccacgcagcaaaccacaggagaggagacgcgccaggacccacaac

SEQ ID NO: 91146 - RNA, 83 nt, Homo sapiens
caacacggcgcagcccaccagaagcccagcagccagcaccacacacaggaaccacagcagaggcgcacagccagcacagcccg

SEQ ID NO: 91147 - RNA, 64 nt, Homo sapiens
cgacaacacacccggcaggaacagcgcgagccacaaggcaaggaagcaggcggcaccacccaag

SEQ ID NO: 91148 - RNA, 50 nt, Homo sapiens
agcgcgaccgggaggcccagcgcggagacccacacaagggccacacgaac

SEQ ID NO: 91149 - RNA, 59 nt, Homo sapiens
aagacaaggcgcccaccccacagagcaagcgaaacgcgccgcgccaggacggcagccag

SEQ ID NO: 91150 - RNA, 73 nt, Homo sapiens
gaacgcggcaacaacggacagaggacgagaaggaaaccacaaggagaacacccacacgaggcaccccacagcc

SEQ ID NO: 91151 - RNA, 78 nt, Homo sapiens
gccaagagggacccacccggcggaaacaggaacacgaaagaggaaaaacgcacaagaaaccgaagccaaggaggagag

SEQ ID NO: 91152 - RNA, 77 nt, Homo sapiens
agaagagaggagccccaaagaaaagaaacaagccgcgaaggagagcgacaagaacaacggcgggggacgacacaacg

SEQ ID NO: 91153 - RNA, 80 nt, Homo sapiens
gaagagaaaaagcaaacgaccagacggcagggaggcacaaaggggaacacaggaaaccagccaccaccccgcggaggcca

SEQ ID NO: 91154 - RNA, 64 nt, Homo sapiens
gaagagaggagggagaacacagaaaccggccccagaacggggagagggaagaaacaagcccgaa

SEQ ID NO: 91155 - RNA, 76 nt, Homo sapiens
gccgcggggcgccgccacggccgcccggagaggccagaagcgcagccagggcagcggggaaaaggagcagaagaac

SEQ ID NO: 91156 - RNA, 71 nt, Homo sapiens
caaacaagcaaaaagacagggaagagacagggcacaggcaggagaaggaaaaagaagcaagacaaaagaca

SEQ ID NO: 91157 - RNA, 79 nt, Homo sapiens
aaaagcaacaaagagggaggggacaagcgagcagccaccaaagaaagagcagcgcacggcaccgagacaccgacgacgc

SEQ ID NO: 91158 - RNA, 72 nt, Homo sapiens
gcacaagcccgccaccacccaaagagacgaaacagagcaaagcccgggcgggccggagggagagaagggcca

SEQ ID NO: 91159 - RNA, 99 nt, Homo sapiens
agaaaacaccggcgaaaccaaccgcggggaacaggaaagccgagccaggcggggagagcagaaagacgagccgccggggaaaaagcgcagcaaagagac

SEQ ID NO: 91160 - RNA, 77 nt, Homo sapiens
aagggccgaccaggcagggaacaaccacagggcaggcaagaacaacccaagaaggacagcgcgacagaaggacagca

SEQ ID NO: 91161 - RNA, 77 nt, Homo sapiens
acgaccacaccgcgagaagacaaggaccacagggcgcaaggacaagaaaaccccaggacacagagcggggagcccga

SEQ ID NO: 91162 - RNA, 87 nt, Homo sapiens
gacgaggaggcggagcggacaaagaagcgaaaccgggaggagacacagcgcccgcccacacgcaggagacaagcagaagacgacagc

SEQ ID NO: 91163 - RNA, 50 nt, Homo sapiens
aagaaccacaccaagagacccaagaggacgaaacagacaggaccaccggc

SEQ ID NO: 91164 - RNA, 54 nt, Homo sapiens
cagacgcagggcgcccccggcccgaagacccaaggaacacacggaccgaaggac

SEQ ID NO: 91165 - RNA, 76 nt, Homo sapiens
acacacaagaaaggcaacaaaaccacgcagcgccgaaaagcgaaaagaaacaagccgcggcaacagcgaccccaag

SEQ ID NO: 91166 - RNA, 81 nt, Homo sapiens
gccccgaaacgcgagccggagaggagccgcaggagaaggaaccagcggggagaaggcccagcgaccgccaccgcaagagaa

SEQ ID NO: 91167 - RNA, 69 nt, Homo sapiens
aggcagaacagcgcgcacacggcgagcaaggaacccacgacaccacgaacaagaagccccagcaacaaa

SEQ ID NO: 91168 - RNA, 35 nt, Homo sapiens
cgacccggacacaaaaccaaaacccagcacaggaa

SEQ ID NO: 91169 - RNA, 83 nt, Homo sapiens
aaagcaggagcaggaggaagcgggcccacagaaaagcagcccaacgaaaaccgcgaaccgaccgacccccaagagaaaaccag

SEQ ID NO: 91170 - RNA, 85 nt, Homo sapiens
aagaacgggggacaacggcaaccaaagggcaccaacaaccgcggaagcgcaacaaggagggagccgagcgcgcccagaagacgac

SEQ ID NO: 91171 - RNA, 74 nt, Homo sapiens
aaagagccggagaccccgcagcagaagagggacggcggggaaaaacgcaggaccaaaagaaggcaaaagggagc

SEQ ID NO: 91172 - RNA, 57 nt, Homo sapiens
ccgaaggcgggggaggagacccacccaaacagccaacgagggacggacagcgcgaca

SEQ ID NO: 91173 - RNA, 79 nt, Homo sapiens
gccggggaaggcgagcgccccccccaaccacaaaacaggcggagggcggcgagcacccacaaaagcgaaaagccagaca

SEQ ID NO: 91174 - RNA, 72 nt, Homo sapiens
agacacgcgcagaagaggcacacaagcagcccagaagccgaaaagcaaggcccccacaagcaacccgccaca

SEQ ID NO: 91175 - RNA, 36 nt, Homo sapiens
gcggccaagacccgccgcaaggccgaggaaggcggg

SEQ ID NO: 91176 - RNA, 53 nt, Homo sapiens
ccccaaagcagccgacaggagacaaaccacagggggggagacagcgacaacca

SEQ ID NO: 91177 - RNA, 53 nt, Homo sapiens
gagcgcgaaacgcacgagaagagagaacaacaggggggagaggagagaaccag

SEQ ID NO: 91178 - RNA, 61 nt, Homo sapiens
caacggagacgcggaccagcagaaccagaagaaagcccggaaaaaggcaggcccgaccacg

SEQ ID NO: 91179 - RNA, 114 nt, Homo sapiens
cgcagccgccgcagacccggaagggaggcgggagaaggcgcaacgcggcgcgagaccaaagagcagcgggagaaaaagcccagaagagaaggaagaggaaagcaaaggagcagg

SEQ ID NO: 91180 - RNA, 72 nt, Homo sapiens
aggaagaaggcgagaccaccccgggcgggcccaaaggaccagccgagcagggccaccccagcccgaccccac

SEQ ID NO: 91181 - RNA, 66 nt, Homo sapiens
gaaacaacagacagcgggcaacagaaaccacacagaaacagagagaaacaaacagagagccgcacc

SEQ ID NO: 91182 - RNA, 76 nt, Homo sapiens
agggacagaacaaacggagaaccaggagggccgagaggacgaaaaaagggccggcccgaaaggggaccagaccgag

SEQ ID NO: 91183 - RNA, 74 nt, Homo sapiens
accaccccaaccaaaagggcgaaaagcggcacaggagcaggcagaagccgagggaacgagagaagcacaagaac

SEQ ID NO: 91184 - RNA, 52 nt, Homo sapiens
agcacaccccgcgaaaggaggaggcacagacacgaaggcggacggcgcagaa

SEQ ID NO: 91185 - RNA, 54 nt, Homo sapiens
ccaaggcaacacgcaggagcgccgggagaggaaggagccagacgacaggaaaac

SEQ ID NO: 91186 - RNA, 77 nt, Homo sapiens
gaagagccccgaggagaccaaaccccagccccacaccgaggagcgggcagagacggacacaccggggagaacgcaaa

SEQ ID NO: 91187 - RNA, 77 nt, Homo sapiens
aacaacgcggacccagagaagccgaccccaagaaagagagagacagaagccacagaaaaggacccaagggggcaaag

SEQ ID NO: 91188 - RNA, 82 nt, Homo sapiens
aaggaagaaaaggcggaccggcgaacgaagagaccacaccgcgccagaccccccaggagagccgccccgagccgggagaccc

SEQ ID NO: 91189 - RNA, 76 nt, Homo sapiens
aaaaggcgggcacaggccgaccgcgcgggcagcggaacgcgccgacgccgcaaccagcaccccgaggagcggaacc

SEQ ID NO: 91190 - RNA, 74 nt, Homo sapiens
cggcacggcgccgaccagcaccaggggaagcgggacaacggggaccggccaacgccccaccggcgccacgcggg

SEQ ID NO: 91191 - RNA, 66 nt, Homo sapiens
ggcacccagcggcacaaaaaggacgccggcaaccaagagaaggaagccaacaccggagccagaaag

SEQ ID NO: 91192 - RNA, 70 nt, Homo sapiens
ggcggagcacccaccacggagggaaagaccaggcagaccccgcccgcggcagcacagcggacagccacag

SEQ ID NO: 91193 - RNA, 74 nt, Homo sapiens
ccaagaaacggcgggaggcaagaccgcgacaaagggacccaaaaaggagggaaaaggccgagcgaaaccgaacc

SEQ ID NO: 91194 - RNA, 80 nt, Homo sapiens
gcaacggggaacaggagaaccaagggcacggaagggacggaggaaaagaacaagaacaggagaaaggcaggaggacgaaa

SEQ ID NO: 91195 - RNA, 105 nt, Homo sapiens
aacagaaggcgacaaggccaagaccgccagcaaaggaagacgagacacgccaccagccgagcccccccgggacaccgggccccggcagcgggacgagccccaggg

SEQ ID NO: 91196 - RNA, 80 nt, Homo sapiens
cggggccacaggcccacccggacgaagccacccccaccccaccaaaagacgaccccgacgcaggccaggagccgcggaca

SEQ ID NO: 91197 - RNA, 83 nt, Homo sapiens
gaaggaccaagaaccaggggcaaagaaaaaggagagaaaaagaggcaaaacaacaagaagaaaagagaaaaaagagagcgaag

SEQ ID NO: 91198 - RNA, 81 nt, Homo sapiens
acaccaagcggagccccaggagcgcagaagaaagacagcaacggagccaaaaaaagaccagcccaaaaaagcgcggagccc

SEQ ID NO: 91199 - RNA, 78 nt, Homo sapiens
gagggaggcaagacacccgagggagagcggagacacgagacgcagaggggagaacgcagaagcgcaacgacagggcag

SEQ ID NO: 91200 - RNA, 72 nt, Homo sapiens
cgcacgagggcagggcggaagaggcgccggaagcagacaaaaccaggcaggcgaagcaaaaaaaaacaggaa

SEQ ID NO: 91201 - RNA, 76 nt, Homo sapiens
cacccaaacgcggcacgggagggcccacacccaacccagccgagccgcccgccagaccccccgccggcgcggccgc

SEQ ID NO: 91202 - RNA, 81 nt, Homo sapiens
cagcgccggcgcccgggagacccaggaggagcccgcaggcagcggcccccacgcggcgggaaggaggagcacagaccacag

SEQ ID NO: 91203 - RNA, 76 nt, Homo sapiens
accggaagcgcccgaggcccgggcccgcgggggcaaccgggcgcagacgagcgacagagccaacgcaaaaccagac

SEQ ID NO: 91204 - RNA, 74 nt, Homo sapiens
aaaggaaagaaagaggaacagagagggaaaccagaagcccaggacgacagccaaagaccacgggggccaaacac

SEQ ID NO: 91205 - RNA, 67 nt, Homo sapiens
caggagacacagaagccgacagggagacacggcaggaacccgcgaagcgggaaggcgggaaaacggc

SEQ ID NO: 91206 - RNA, 61 nt, Homo sapiens
aaagacaagaacagagcgggggaaaagccagccagaacacagaacagaacacacggaaccc

SEQ ID NO: 91207 - RNA, 79 nt, Homo sapiens
gcaagaagcaagcagaaccgcagagaaccagcgcacaaaagacgaaagaaagggcagcaagacacgaagccgagaaaga

SEQ ID NO: 91208 - RNA, 80 nt, Homo sapiens
ccaggaacagagaccccgccgaaaaaaccgcccgcaggagcggaaaccacaaggacaaaccggcgaccacacacggggac

SEQ ID NO: 91209 - RNA, 79 nt, Homo sapiens
ccagagggaccagagaggaggcagaagacggccagggagagaggaacccaagacaccaccagagcagggaccgaagacg

SEQ ID NO: 91210 - RNA, 73 nt, Homo sapiens
gggaagacgccaagaagaccaagaaaacacggccaaaacaggggaagacgccaccgacaaaaggaaaacaaag

SEQ ID NO: 91211 - RNA, 77 nt, Homo sapiens
caggacggcaggaacagcaccacccccaaaacgggccaacgcacacacagaccagccaccacaacagcggcacagaa

SEQ ID NO: 91212 - RNA, 75 nt, Homo sapiens
caggaccgaagggccggaaagaaagcacaccaaaagaaacaacccaagagacacgggaagcaggacaccaaccga

SEQ ID NO: 91213 - RNA, 35 nt, Homo sapiens
aaagaggacgcacggaggagcacaaagacaggggc

SEQ ID NO: 91214 - RNA, 71 nt, Homo sapiens
cgccagcggccgggaccgaacaggcgacgaggggaagcacgagcaagaagggagaaaaaccggaacaagaa

SEQ ID NO: 91215 - RNA, 79 nt, Homo sapiens
agagccaccagccaagaccaagcgcgaaagcgccaaaaggacagcaggacgcaggaccaagcaaacaggaagaagaaaa

SEQ ID NO: 91216 - RNA, 69 nt, Homo sapiens
agaaaacccggaaccgcgacggcggcaggcaccgaaaacgagcagacccgaacccgacacgggacagag

SEQ ID NO: 91217 - RNA, 86 nt, Homo sapiens
ggagaagacggcggcggcgagggggggcggaaaagaaacgagaccagaaggaaagaaaaggaagcaacaacaaagcccagagggag

SEQ ID NO: 91218 - RNA, 80 nt, Homo sapiens
cggagccgccggaagggcgcccgcagccccccacggaacaaccaaagaggaggaaaggacgagcacgaggccgcagcgag

SEQ ID NO: 91219 - RNA, 70 nt, Homo sapiens
agccagagaagggcacacggccaacaccagcacgacggacaaggcagccacgcggggccaggaggaccaa

SEQ ID NO: 91220 - RNA, 79 nt, Homo sapiens
gggaaccggcgcgccggcgcgcggcgcggacaggcccaaacgcccgggcgcgccaggcacagccaagagcggaccggca

SEQ ID NO: 91221 - RNA, 75 nt, Homo sapiens
acggccggcacgcgcccaaagaaccccggcccaggaaagcggacagacagggccagcagaccacacaccaaaccc

SEQ ID NO: 91222 - RNA, 85 nt, Homo sapiens
acgcgacccggagacagcccaaaacccggaagagcgccccaggagaaacaaagaaaccaggcggggaacaagccagcagcccaag

SEQ ID NO: 91223 - RNA, 80 nt, Homo sapiens
cccgcgacagaggagggaggaaaacaaccgagggcagaagcgcccccgagggaagcaaggggccgagaacaagaagagaa

SEQ ID NO: 91224 - RNA, 84 nt, Homo sapiens
ggcggggcgggcgcgaccggagccccagcggccaagcagagcgggggggcggggccggcaccgcaagagcaggcggcagagcaa

SEQ ID NO: 91225 - RNA, 81 nt, Homo sapiens
ggacagcgaacagggaggagagacggcggcggaaaaccccaaaaggacaaagcgaaggaagaggacaccccaagacaaaac

SEQ ID NO: 91226 - RNA, 65 nt, Homo sapiens
cgaggggccaaggcagaagaaacggagaagggcaaaggcgggagaagaaccggaagccaagagcc

SEQ ID NO: 91227 - RNA, 93 nt, Homo sapiens
gagagcccgggaccgccaggccaccaccggccgcccagccaggacgcgcccggagaagagaaaaaagaggccggcgggaccaccgcccaccgg

SEQ ID NO: 91228 - RNA, 76 nt, Homo sapiens
gaacacggacaccaacgagcgaagcagcggagaagcggaggagaccaaggaggccaccaccacagaaggagcggca

SEQ ID NO: 91229 - RNA, 65 nt, Homo sapiens
cagccccaaggcgacgggcgaagaaccaggacgcaccccacaacagaaggagaagaagagacggg

SEQ ID NO: 91230 - RNA, 48 nt, Homo sapiens
gaccaaaacaaaaaggagccagcagcgcgggccaaacagaccaccccg

SEQ ID NO: 91231 - RNA, 79 nt, Homo sapiens
gcgggagaccgaggcccaaaacaaggacaacaggcagagaaaaaagaggggggagagccagggggccggggggggcaca

SEQ ID NO: 91232 - RNA, 76 nt, Homo sapiens
acagaaagccccagaaaaaggggcaaaaggcaagaacagaagaccggggaccagaagggagaagaagcaaaaggaa

SEQ ID NO: 91233 - RNA, 52 nt, Homo sapiens
ccagggaaacaacagcagaccaaagccgcgagaagcacgaacacacaaacgg

SEQ ID NO: 91234 - RNA, 69 nt, Homo sapiens
gaaggggagcgcaccgcccaaccccaagaggccaccaggcggcccggacaggaccgcacccaccagaac

SEQ ID NO: 91235 - RNA, 73 nt, Homo sapiens
gcggcgccaccggccacagccggcgcacaagcgcccgaccccccggacacccggcggaccccggaggccgagc

SEQ ID NO: 91236 - RNA, 74 nt, Homo sapiens
gaccagggccacgcaggcagggcagcccacaagagagggaaggagaaaggcagacgagggacagccacggccac

SEQ ID NO: 91237 - RNA, 82 nt, Homo sapiens
agacacaagaacccccaccacggggaggaaggaggacgaggccacgccccccaacaggaggggaggcaccaaagagaaagag

SEQ ID NO: 91238 - RNA, 82 nt, Homo sapiens
gcccgacgccaaccaagaagggaggagcgacggacgagccggagagggcccacgagacgcgaacaaacgccgcgccgccaga

SEQ ID NO: 91239 - RNA, 84 nt, Homo sapiens
ggcggcccaggcccggccccgaagagagcccggaaccaccggccgcagccgcaggcaccaggcagcagggaggaaaccaggcaa

SEQ ID NO: 91240 - RNA, 85 nt, Homo sapiens
cccggcgcgagccaagcgcgcgccggagagccacccgcacgaggcccgcgcccacgccgcgcccgccacaccggcaaccgcaggc

SEQ ID NO: 91241 - RNA, 79 nt, Homo sapiens
acgaaacgcagaagcgaggagaacagaagaaaaggagcccaggacagaccggagagggggcacgcaccagaacagacag

SEQ ID NO: 91242 - RNA, 79 nt, Homo sapiens
cggcagcccagcaccaaaccgccgaggcaggagaaaaggagacagcaaacaaagagcgccaccagcaaaaccagagaaa

SEQ ID NO: 91243 - RNA, 69 nt, Homo sapiens
aaccaagcgaacgggagggacgagcaggagagccagccgaggacgaagacgacggggagacagcggagg

SEQ ID NO: 91244 - RNA, 40 nt, Homo sapiens
gcaaagcagacaacaggcggcagaagaaaacgacaccaca

SEQ ID NO: 91245 - RNA, 55 nt, Homo sapiens
ggcggagaaaaaagacagaaaaccaaacaggaagcacgagggaaaaccagagaaa

SEQ ID NO: 91246 - RNA, 94 nt, Homo sapiens
agcccagccaagcccagccaagcccagccaagccccgccgacgcgggcaccggagccagccccgcagcgggccgaccggccccagcagaggaac

SEQ ID NO: 91247 - RNA, 69 nt, Homo sapiens
cccaccaaacacgccggaaaccccgcccacagcacgagaacagaaggaggagggccaggaaagacgcgc

SEQ ID NO: 91248 - RNA, 73 nt, Homo sapiens
aaggcaagagccaacccaaaaccaacagggaggagagagcgaggccacccagaaggccagccccagcggcccc

SEQ ID NO: 91249 - RNA, 78 nt, Homo sapiens
gacagggccgacggcgacgagggcgccacacgggccagggcagggccacccaggccccaggacggcgagagcccgggg

SEQ ID NO: 91250 - RNA, 83 nt, Homo sapiens
ccagccccggcgcccacagccgcgcaggcagaccagggaaccgggcagcagccgcagccgcccccgggacggccggccccccc

SEQ ID NO: 91251 - RNA, 87 nt, Homo sapiens
caggaacagggcaaaggagagcacaaccacgcagggaagcccaggggcagggccccaccaccaaacgcaaagaccgccagagagaag

SEQ ID NO: 91252 - RNA, 85 nt, Homo sapiens
ggcaacagggggagacaagcggaacaggagccgacgacccggaccaagaaggggaggcccgcggcagggccggagcgagggagag

SEQ ID NO: 91253 - RNA, 75 nt, Homo sapiens
cggaggcagaggcgccccgagcgccgccgccaggaagaccccgccccgagcccaggggacagacacacgcagggc

SEQ ID NO: 91254 - RNA, 70 nt, Homo sapiens
gaaggaccaagaaccagccgagaaagccagggccgacagcagcagacagcacaaacccagggccaagagg

SEQ ID NO: 91255 - RNA, 75 nt, Homo sapiens
gaccaagaaccagcccgagggcaacacccgagaccggcaagagcccagaggaggaaagacgagcccgagagagag

SEQ ID NO: 91256 - RNA, 74 nt, Homo sapiens
cgagcggaccggagccgccccgcggcaggcccagcgaaccgccagggagccagaagcaggggcgagccgcgccg

SEQ ID NO: 91257 - RNA, 65 nt, Homo sapiens
ggggcaaacaagccgaccggaaaaaggcccgggggaacgcaggagcagccagaaggagaaggagg

SEQ ID NO: 91258 - RNA, 77 nt, Homo sapiens
ccaagccaaccacagccaagagcagccaaacgacgccacgaacaaaagagaggcaaaagaggaaagagaaaaacaga

SEQ ID NO: 91259 - RNA, 59 nt, Homo sapiens
aggagcgcaggcagcagcccacggaaaaaaagacggcggacaggcagaagaacgacgag

SEQ ID NO: 91260 - RNA, 60 nt, Homo sapiens
gcagacgagggccaggccggggcgaccaacgaagaagcagacacaggccggacagacacg

SEQ ID NO: 91261 - RNA, 66 nt, Homo sapiens
accacccccaacaaccagggcaagcgaccggcccgaggaccgccgcacgaccaaacgcagaaccca

SEQ ID NO: 91262 - RNA, 79 nt, Homo sapiens
agggcagacaagacccggagggcgagccggcaccagggcccagcccccaggcccaggaagcccacccagccccgccacg

SEQ ID NO: 91263 - RNA, 71 nt, Homo sapiens
cagaccccgcggccccaaggcgggcccccacagagagcacacaaacaaagcgaaaccacggaagaaaaggg

SEQ ID NO: 91264 - RNA, 71 nt, Homo sapiens
ggagggaaagggaagacacgaaaaaagagaaagggccaacggcacacaacaaagaagaaaagggggaaaag

SEQ ID NO: 91265 - RNA, 104 nt, Homo sapiens
cagccgggaacccccacgcggccagcgaaaacgcccagaggcccaaagagggcagcgggcgcccagacccgggagggagacggaggccgcaccacaagcaccgc

SEQ ID NO: 91266 - RNA, 77 nt, Homo sapiens
cggcaaccgcccgaccagccgccccagccgccaggacccaacgcccgcgccgccgcggcccggcgaccgcggcgccg

SEQ ID NO: 91267 - RNA, 66 nt, Homo sapiens
ccccgggcgagcgcggcggcggagcccaagagacacaggcagaagaagaccgcaaggaagaagagg

SEQ ID NO: 91268 - RNA, 100 nt, Homo sapiens
ccagaccaccgggaccagcgcggaggaggcggggaccgggaccgggacggaccgggaggcaagaggagccaggagcacggggggaacaagaccgccggga

SEQ ID NO: 91269 - RNA, 79 nt, Homo sapiens
ccaagaaccaacccccaaaggcgggacagggggcacccgaggaggaagagggcagggcccacggaaagaagggaaaccc

SEQ ID NO: 91270 - RNA, 78 nt, Homo sapiens
ggaaggaagagacagagacagagcaaaaccaggcaaaccgacaccagcgacacaagcgcgagggaaccacagaggaca

SEQ ID NO: 91271 - RNA, 61 nt, Homo sapiens
cggccggcgcagcccgaccagccaagagccggcggcagacgacggacaacaaacggccgca

SEQ ID NO: 91272 - RNA, 72 nt, Homo sapiens
agaccgacaagacccagggcggagaaggaacagggagagaaacaacgggaacagaaaggagcgggcaaggga

SEQ ID NO: 91273 - RNA, 83 nt, Homo sapiens
gaaccccgaagacgggagaaaggagaacgggcgacggagccgggaaaggacaagccgaccccgaaccaggaccccaccccagg

SEQ ID NO: 91274 - RNA, 75 nt, Homo sapiens
aaggaaaaacggagagccacaaaaaaggaagcgaaagaaccccgaaaaacaaaggacggacaagaagccagggcc

SEQ ID NO: 91275 - RNA, 79 nt, Homo sapiens
gcggcggcccaccaaggaaagggcgacagcaacagccgccggcggaagacccagccaacaccaccgagagaccgaccca

SEQ ID NO: 91276 - RNA, 79 nt, Homo sapiens
ccagaggggccccggagccaggaacagaacagcggcaacagacgcggcaaaggcggaaaaacggcagcagagaacgcca

SEQ ID NO: 91277 - RNA, 85 nt, Homo sapiens
ccaggccgggcagccgccgacgagcaggggagcggacaacggaccgggcccagccagccgacagcaagccagcaagccaccaagg

SEQ ID NO: 91278 - RNA, 58 nt, Homo sapiens
cggaggaagaggaagaaaccaacaaacgagacagggagacgaaaaagggaaacggcca

SEQ ID NO: 91279 - RNA, 79 nt, Homo sapiens
cggggacccgcgacccagccccccacccaacgcggcacgcagcacgggggcaggggccgacccagaacgccagcgccgc

SEQ ID NO: 91280 - RNA, 75 nt, Homo sapiens
aggccaaaaagcgaagaaggcgcaaaagaccaaccccggaagggaaggcacaacacgccacccccccaccccccc

SEQ ID NO: 91281 - RNA, 62 nt, Homo sapiens
caccggagccagaaagaaacacgagcgggacacacagccgaaacgcgaagaaagcaaagaaa

SEQ ID NO: 91282 - RNA, 76 nt, Homo sapiens
gcacaccaagcacaagaagcggggagacccggcagagcaaggggcacgccccggacaggggcggcaccggcccaca

SEQ ID NO: 91283 - RNA, 77 nt, Homo sapiens
ggaagcccgaggccggcggaccgcagcgaaggcgaccagaagccgggggcggccccaaggccgagacgcaccagaag

SEQ ID NO: 91284 - RNA, 78 nt, Homo sapiens
gagggaacccaaaagaaaacgaggcagacccccccaagcccacggaacagaggcgcaccagccagaacagccgggcag

SEQ ID NO: 91285 - RNA, 63 nt, Homo sapiens
caaaaaaggaagggaaccaccaggaaacgcccgcagaagaaggaagaggaacaagcaaaaaga

SEQ ID NO: 91286 - RNA, 69 nt, Homo sapiens
cgacgagaccaacaagacgagggcgcagcacaggacgcaaaacgggagagcagagagagagcacgagca

SEQ ID NO: 91287 - RNA, 56 nt, Homo sapiens
agccaagcaggaccacccaccagccaccagcccaacagcagcgaacccagaaagag

SEQ ID NO: 91288 - RNA, 67 nt, Homo sapiens
aaacaagaagcaggaggaagggcagaccaagagaagcgcgcaagaaacacgcgagcgagcggcaaag

SEQ ID NO: 91289 - RNA, 74 nt, Homo sapiens
gcagacgccaacccgccgcgcaccgacccgacgcgccggcccacgcgcggccaagcacgccccaaaccaccaaa

SEQ ID NO: 91290 - RNA, 77 nt, Homo sapiens
aggaaacagcggcaagccacagacgcacaccgacagagaacccaggccaacacacagacagaggcagccaccccaga

SEQ ID NO: 91291 - RNA, 75 nt, Homo sapiens
ccgagccaagagcggccccgagagccgcgccgcagggcgcccggccgccaggccagcggggcgggaagaagcccg

SEQ ID NO: 91292 - RNA, 43 nt, Homo sapiens
ggcagaggcacaccgaaagacgaacagccacaccacaaccccg

SEQ ID NO: 91293 - RNA, 83 nt, Homo sapiens
caggacagccaggcaccagcaccaagaagccaggacaaaaccaggcagaaccaacacgaacccaagcacaaacaagaaaacga

SEQ ID NO: 91294 - RNA, 55 nt, Homo sapiens
gcagagccaaagcagaagcgaagagggcccagaggggcgaaagggaccgcccacc

SEQ ID NO: 91295 - RNA, 72 nt, Homo sapiens
aaaagaaacagcaaacaagaggaagagaacccccgaaacaacagcgcccccaaaagaagaaccaggcccagc

SEQ ID NO: 91296 - RNA, 78 nt, Homo sapiens
agcagccccgccacccggggcacgagaccgaagccgagaacaccgacagggagagcggggagcccagaaccaccgagc

SEQ ID NO: 91297 - RNA, 83 nt, Homo sapiens
aggggaacaagaggcgaccgagacggggagcccaaagcaaaggaggagaaagagaaggaaacccacagacccagcaaagagga

SEQ ID NO: 91298 - RNA, 54 nt, Homo sapiens
gaaaggaggaagaagacaccggggacagacaggagaggggagcaccccggggag

SEQ ID NO: 91299 - RNA, 36 nt, Homo sapiens
aggaggagcagccgggcacagaaagcgagagagcca

SEQ ID NO: 91300 - RNA, 72 nt, Homo sapiens
aagaaagaaacagcagacgggcggcacccaaaagcaagcgcgggaagcgacacccagaccccacgggagaag

SEQ ID NO: 91301 - RNA, 78 nt, Homo sapiens
ccgcgggcgcgcgggcgcgaccggcggcggcgcgagaacacaaagaacccaaacgaaaggaaaaggggacccaaacaa

SEQ ID NO: 91302 - RNA, 75 nt, Homo sapiens
gccccggggaccagaggagaccgccacacaagagaagacccaccgaggaggaggggaaaagggaggaggaggcag

SEQ ID NO: 91303 - RNA, 45 nt, Homo sapiens
agcccaggaagaagaggcagggcccgagggacgccagcccagggg

SEQ ID NO: 91304 - RNA, 119 nt, Homo sapiens
gaggaagcagaacgcgagcaccaggaggccgggagaggcagagaagaagccgcgggaggagggccagacaacacagggacacaacaaacacaaccgccacagaagcacaggcaacccca

SEQ ID NO: 91305 - RNA, 75 nt, Homo sapiens
agaacgccgcgaagcacccaaaggaggccagccccagggcaccagagcccccagaggaggacacagcgacaaaaa

SEQ ID NO: 91306 - RNA, 69 nt, Homo sapiens
gaacgcagcaccggaccgaggaccacgcaccaggggaggcagggcacaacacagcagcagcccaacccc

SEQ ID NO: 91307 - RNA, 82 nt, Homo sapiens
agccgggacggacagcgcgggagggcgccgcggggcagccgccgcccccgggaaggagcgacgaaaggaagaagccaggggc

SEQ ID NO: 91308 - RNA, 80 nt, Homo sapiens
acccagacaagcaccgaaaaccccaaagcggacggcccccaagacagaacaccgcagaccacaccccagcaaaaaagagc

SEQ ID NO: 91309 - RNA, 74 nt, Homo sapiens
cggcccgggcacacagcccgcggcccggaccaggcgccacgggacacggaaccaggaggagcggagcgccgcgc

SEQ ID NO: 91310 - RNA, 75 nt, Homo sapiens
gaccaacccacgccaaaacgaccagcagcgaaaccaaggccggggcccaagggagggcgcccaagaacaaaccac

SEQ ID NO: 91311 - RNA, 71 nt, Homo sapiens
gcgaggacaagcaaggaccgcaggacccaggccagaccggagcagcggggacaggaacacagcacccaccc

SEQ ID NO: 91312 - RNA, 73 nt, Homo sapiens
gaaaacaagggagcacaagggccgaacacagacagccaaccaggcgcaacaacaagaaggagaaagacacaac

SEQ ID NO: 91313 - RNA, 68 nt, Homo sapiens
ggaggggaggcccagccagcgcagcaggagaaccaggcggacggcgccccccacagaacaccagacaa

SEQ ID NO: 91314 - RNA, 71 nt, Homo sapiens
aaacccagacgggcagaagagagagaaagccaaggagaccgggagagagacgaaggacgcgcaggggcagc

SEQ ID NO: 91315 - RNA, 75 nt, Homo sapiens
ccccaaccgcgaacggacaaaagacagcagagaccgggaggcagcaacccagaggccaccgccaagcaaaacaaa

SEQ ID NO: 91316 - RNA, 77 nt, Homo sapiens
gacgggggccaagagagccccaaggaccggggcccgcacaccagcggcagggcagcgcggcccgcaccaaacggccc

SEQ ID NO: 91317 - RNA, 80 nt, Homo sapiens
aaaagaggacaccaacaggggggagaaagcaaggagaaacaaacccaaggggccacaccaggagggaaaaagcacaagaa

SEQ ID NO: 91318 - RNA, 78 nt, Homo sapiens
gccgaggggaccagccgggaggcgcccacccccaccaccgaccgcgcacaaagggaggcagccgccacaggcgagggg

SEQ ID NO: 91319 - RNA, 67 nt, Homo sapiens
gggcaccgagcaacgagggcaggagaaagcgcagaacagacgcaggaacgagaggcaccgaaaaaca

SEQ ID NO: 91320 - RNA, 71 nt, Homo sapiens
acggaaccaacacacaaagccgcagaaagcagcaggcggagaacggaaaagcaccaggaagcagagaggac

SEQ ID NO: 91321 - RNA, 72 nt, Homo sapiens
ccgggagggcaaggacaaaacacaaggaaaccaagcaggaaaggaaacagcacagacagcgcaaggagggga

SEQ ID NO: 91322 - RNA, 92 nt, Homo sapiens
cagacacgcgaaggggagaagccgaccgaacgcgccagcgcggggcaacaggaagggggagcaacagacaagcccgaaaggaacagcagcag

SEQ ID NO: 91323 - RNA, 85 nt, Homo sapiens
ccggcgggcccgaggcggcgagagaggcaggcggagccgaccgggccaggagccccggcacaaaggaagaagaaagaagggagca

SEQ ID NO: 91324 - RNA, 72 nt, Homo sapiens
aagacggcggacggaaaaaccaaaggaaaaagacccaaagcgcacgaggagcccagaacgcccccagcggcg

SEQ ID NO: 91325 - RNA, 65 nt, Homo sapiens
gggcacgcgaaggacagcaagaacaggaacagaagaacaaacgagacacaggaacaccccgaaac

SEQ ID NO: 91326 - RNA, 85 nt, Homo sapiens
ggaccccccccaggcagacgggacagcccagaaaccgccaaagacggaaccgccacagcaccaagcccgggaggagcggggacac

SEQ ID NO: 91327 - RNA, 85 nt, Homo sapiens
ccggaggagaggccggacggcgcgggcgccggcgaggagagcccgcggcgcagggaagagaacaacgcagaacaaagacgaaggc

SEQ ID NO: 91328 - RNA, 77 nt, Homo sapiens
gcggggcaagcagccgaccacagcagacgagagaaaagccacggccgagcaagaacgcaagaagcacaaagcagaag

SEQ ID NO: 91329 - RNA, 77 nt, Homo sapiens
accagccagagaacgccccaacgggggacccaccgacgagcaaggaggaacagcaagcgcagagaaggaagcacaga

SEQ ID NO: 91330 - RNA, 39 nt, Homo sapiens
agcgcggaaacgcccgaacgaagagccgaagcacaaagg

SEQ ID NO: 91331 - RNA, 76 nt, Homo sapiens
gagaggccagccgggaggacacacaagcggcggagcccgacccaggggacgagaaggacggggaggacaggagcag

SEQ ID NO: 91332 - RNA, 74 nt, Homo sapiens
accagagaccggacccgccaggaaaacaaagagggaaaacggagaaaagcccccccaggccagcgcaggaacac

SEQ ID NO: 91333 - RNA, 82 nt, Homo sapiens
cgcagccccgccagccacccccagggggagggaagcagccaagcgggcagaagaggaagccccagacacgagggcggcgaag

SEQ ID NO: 91334 - RNA, 81 nt, Homo sapiens
aagaccgcgacacccgaagcgagaaagggcaacccaacaacagccaccgggacacccgcaggccggggcagacaccacggg

SEQ ID NO: 91335 - RNA, 37 nt, Homo sapiens
gaccgaccaccaaaaagccccccaagagaacccaggg

SEQ ID NO: 91336 - RNA, 50 nt, Homo sapiens
gaggaacaacggacacgggggcaggacaggggagagaagacagaggaaac

SEQ ID NO: 91337 - RNA, 88 nt, Homo sapiens
ccgccaccagccgggcccgcgcgcccggccaagaggcaaaggggaggacgcagcaaaccaccagaaggcgacagcgaccgaagaacag

SEQ ID NO: 91338 - RNA, 77 nt, Homo sapiens
gaaccgcaaagaagaacaccaagaaccaggccagaaccgcgccggaccgggccggaaccacgaggagagcaggagac

SEQ ID NO: 91339 - RNA, 85 nt, Homo sapiens
caaaagccaagaggaggacagcgcacacagcaagcacgagggaaggggcacgaagaccaaccggccaaagaagagaacccagaaa

SEQ ID NO: 91340 - RNA, 77 nt, Homo sapiens
cgacccgcgaagccagagagacccaaggcaaaggagaggcaggccaagaccgagaacaagcgaaagcacaaaggccc

SEQ ID NO: 91341 - RNA, 73 nt, Homo sapiens
gacacacaagaaggaacaagccagagaaggcccgaggagagaacaggagcgcccggaggagggcgagaccacc

SEQ ID NO: 91342 - RNA, 67 nt, Homo sapiens
caggggccagggaaaggagcagagagagagagcagaagaaccgcaaagaagccaaaaacaacacaga

SEQ ID NO: 91343 - RNA, 69 nt, Homo sapiens
gagggaagaaacccagggcgagaaaggcacggagccagcagcagcaagcagcgggcaagacccgcgccg

SEQ ID NO: 91344 - RNA, 62 nt, Homo sapiens
cagggcaaaccagaaagacggcccccacagggcaggaagccgccgcccagccaggacgggga

SEQ ID NO: 91345 - RNA, 80 nt, Homo sapiens
cgcggggggcgaaaacagggagcagaggccacgcaagcccccccgggagagcaggaagacagcagggacccagggagcca

SEQ ID NO: 91346 - RNA, 96 nt, Homo sapiens
caggagccaggaccaggaaggaagaccccccaagacaccgccagaaaagaggagggcagagcccgaccacgccagacaagaaaggacacagagaaa

SEQ ID NO: 91347 - RNA, 81 nt, Homo sapiens
cccacgagagcaccaccagaaggcccgaggaaggaacgaagacacacacgaaaggccaaaaggagaaggaagggaagagca

SEQ ID NO: 91348 - RNA, 83 nt, Homo sapiens
caaggaaaagagcccggaaagaagcaacagagaggggagaacccacagggcccggcaggaaccggaacaacccacagggcaga

SEQ ID NO: 91349 - RNA, 73 nt, Homo sapiens
gggccgcccgggccccagaaaccccccgaagaagaccccccacacggggaaagacaaggagccgggccgagaa

SEQ ID NO: 91350 - RNA, 109 nt, Homo sapiens
gaagaaggccggcaacccacacaagcgaaggcgcgcaccggaagcaccagcgaggaaggagggccccaaggcggcagccccgaccgacggggcaacgcgaagaaacacc

SEQ ID NO: 91351 - RNA, 80 nt, Homo sapiens
agaggaagaacgaccagagcgacccgagcagcgcagacccccggaaggccaaagacagacgggcccagcacacagggaca

SEQ ID NO: 91352 - RNA, 68 nt, Homo sapiens
agggggcagagcgagggcaaacaggcgggacaagggcgcaccggggcgcagcgagggaggacaacggg

SEQ ID NO: 91353 - RNA, 81 nt, Homo sapiens
ccaagacgcggaacagcacaccaggagagaagcgacagccgcaggggaaaacgaagccacccaacggcaaagccaaggcag

SEQ ID NO: 91354 - RNA, 69 nt, Homo sapiens
accaagccagccgccccgcaggccaagccgacgccagcgggcgccacccaacaggcgcaccgcccacgg

SEQ ID NO: 91355 - RNA, 74 nt, Homo sapiens
cccgggcgggggcagagccagagggaaaaacagaggagacaacacccggagacaggcccaaagcagcgagagag

SEQ ID NO: 91356 - RNA, 71 nt, Homo sapiens
ggaaagaaaggacccaccgaaaacgggccgagagacgggcagaaagacaagaacaacaagcggaggccgga

SEQ ID NO: 91357 - RNA, 75 nt, Homo sapiens
cggcaggggagcggaggaagacggggcgcgggccaagcccggagaccagcacgaccgaggccccaccgacccaag

SEQ ID NO: 91358 - RNA, 81 nt, Homo sapiens
cggacagcagcaacccagccggccaaggagcagcagcagagccacgggacgaagacggaaacaggggacggcacaagggaa

SEQ ID NO: 91359 - RNA, 63 nt, Homo sapiens
cacgaaacgcccaaagagaacccaaaggagaaaaagaccgagaaccgggacagacccaaggac

SEQ ID NO: 91360 - RNA, 85 nt, Homo sapiens
gagcgccggagggagacaaccggcagaaaaacaccagccaccaagaagccgcgccccccgcacggagacaccccagcgcagacga

SEQ ID NO: 91361 - RNA, 77 nt, Homo sapiens
gacagcccgggcccggcggacagccgcacccgcgccccagcagacagaacagcagccacggggacagagggagagcc

SEQ ID NO: 91362 - RNA, 80 nt, Homo sapiens
gcccccccacgccgccaagcgggagcagaggggagagcggccgccgccgcgccgcccaccacaggagggagagcacggcg

SEQ ID NO: 91363 - RNA, 74 nt, Homo sapiens
ccagcgacggagcacgccacgggccacgcccaccggacacgcccggaggaaagacaaaccgacgacacagggcc

SEQ ID NO: 91364 - RNA, 71 nt, Homo sapiens
accagggccagggaccgcccagccccacacgcagagaacacggaccagaaaggacaccacgaacggggaca

SEQ ID NO: 91365 - RNA, 72 nt, Homo sapiens
aaagaaaacccaggcacacaaacgaagggagccggcaacacaagacacagcaccagagaaaaaaaacggacc

SEQ ID NO: 91366 - RNA, 76 nt, Homo sapiens
gagacccacagcagaccgccagaaaaagcggggaaggggggcaaaaaaaagaagcaagcgaagcaccgagcaccca

SEQ ID NO: 91367 - RNA, 71 nt, Homo sapiens
cggaaggcagcgcccagcagcgcaggcagccgccgcaaagggacgacgaagggacagccagaagggaagac

SEQ ID NO: 91368 - RNA, 70 nt, Homo sapiens
ccgaccacacacaccaggaaaaaggacgagcagccccagggggcagagcggaaggacagccggaaaaaca

SEQ ID NO: 91369 - RNA, 49 nt, Homo sapiens
ggcgagccaggccggaagcgggcggggggcacagcgacaccagggcgag

SEQ ID NO: 91370 - RNA, 70 nt, Homo sapiens
cgaagcagccacgaagaccccaacccaggagccgagcagaagccaaccccccccaaaacaacggacaccc

SEQ ID NO: 91371 - RNA, 75 nt, Homo sapiens
gagaggagaacgaagcccacaagaagaccgcaaaacgggacaagcccgcacgcgcagagacaagcccgcgcgcga

SEQ ID NO: 91372 - RNA, 87 nt, Homo sapiens
ccacgcgcggaaggcagcgcccagcagcgcagacagcgcgggagccaggaaacgcagaccccccacgagaagcaggcagagcaggca

SEQ ID NO: 91373 - RNA, 74 nt, Homo sapiens
caccgcggccaccgcaggcacaggccgaacagagcgggacaaagaaggacaagaacacacggagaagaggaaag

SEQ ID NO: 91374 - RNA, 76 nt, Homo sapiens
gccgccccggaggagaagccgccagggacgagacacccaggcaggccgaggcacacccagggccagcacaaagacc

SEQ ID NO: 91375 - RNA, 76 nt, Homo sapiens
acgagcgcgccaggccgacagccgcggccgggcccgagaagcacagcaccaaaaaaccggggagcacgaaaaagga

SEQ ID NO: 91376 - RNA, 74 nt, Homo sapiens
agagcaccagacacaaggaccaccgagcgcggagcagagaagaccacccaagaagaccaaggcccaaaaggacc

SEQ ID NO: 91377 - RNA, 73 nt, Homo sapiens
accaagaaccagggccagcagaacagagaagaccccggaaagaagaacgaagaaaacagaaccagaaagccaa

SEQ ID NO: 91378 - RNA, 63 nt, Homo sapiens
cgggaagacgccgaagggcgggaggaccgacccaaacggaccgaaacgaggaccaccaagaaa

SEQ ID NO: 91379 - RNA, 78 nt, Homo sapiens
gcacaaccggaggaaaggccaggaaccagagcccacgagaaaaggaagaccggcggcagcagaggagcccgggagcga

SEQ ID NO: 91380 - RNA, 83 nt, Homo sapiens
ccagcgaagggcggggccaacccggggccgaccgagcacgaacaccccgccaccgaccggggaggccgggcaggggccacgcc

SEQ ID NO: 91381 - RNA, 55 nt, Homo sapiens
ggaaaacaaaggagacccgaaaagcacggcacaacaggcacagcaaggcggggcg

SEQ ID NO: 91382 - RNA, 77 nt, Homo sapiens
aaagcagcaggccaacaacacacccacggaacaaccggacccgcagcacgaagcccagagaaacagagggcaaagag

SEQ ID NO: 91383 - RNA, 58 nt, Homo sapiens
gagaggaaccccaagccaagcccaagacaaaaacaggaaaacacaacaggaggcagac

SEQ ID NO: 91384 - RNA, 52 nt, Homo sapiens
gcacacagagagaccgagggagaaagaacccaagggccgggcgcgggccacg

SEQ ID NO: 91385 - RNA, 56 nt, Homo sapiens
gggagcacccgcgagggcccaaccccggacgcagcgcggcgcaagcccccccgggc

SEQ ID NO: 91386 - RNA, 70 nt, Homo sapiens
aagcaccacagccaccacaccaagacaccaggggagaccgcacccagaaacagaaacgcaggaccagcga

SEQ ID NO: 91387 - RNA, 76 nt, Homo sapiens
gcccagaaggaggaaaagagaccaagcggccgggcccgaggaccggcacaggcaggaaaagcaccaaggccaacca

SEQ ID NO: 91388 - RNA, 73 nt, Homo sapiens
aggggccgccacagcaggaagcggagacagagaaagaaccagaaggacgcacacagaccaaacggaaaaaaaa

SEQ ID NO: 91389 - RNA, 59 nt, Homo sapiens
ggggcccggacggcacacccacgaccggccaagggccaagccgcccgccaaccggcagc

SEQ ID NO: 91390 - RNA, 80 nt, Homo sapiens
gaaagcgccgccgccggcccgggagcgcaacacgcagcccacgcgccgaccacgagaccgagaagacaaaacagccacca

SEQ ID NO: 91391 - RNA, 76 nt, Homo sapiens
agaccggaccgagagcggaccgagagcgcgaaacgcacgagaaggggggaggacaccccacggcccgccaacgaca

SEQ ID NO: 91392 - RNA, 80 nt, Homo sapiens
ggcaggcgaggagaaagcggcgcgcggagaaccagaggaccggcaacaacccgaggacgaaccaccccgcgccagcagca

SEQ ID NO: 91393 - RNA, 79 nt, Homo sapiens
gccgaaagaaacacaagacgaacgggagaacagcagcagcccacgaacagaaagggaccgggcaaggagggacagcccg

SEQ ID NO: 91394 - RNA, 84 nt, Homo sapiens
cggaaggggcaagacgggcagcgcaggggcgggaaagacccaggagaagccgcccaaagaacggccaagagcgaaacagggaca

SEQ ID NO: 91395 - RNA, 61 nt, Homo sapiens
gccggccggcaaccgagggacccgcgccagaggcagacacccagcaccacggcagacaaca

SEQ ID NO: 91396 - RNA, 75 nt, Homo sapiens
ccgggacccgggcgcccgcgcccgccccaacccagccacaggaagggccgggccggggcacgggcccacggcccc

SEQ ID NO: 91397 - RNA, 52 nt, Homo sapiens
gcgacaagcgccccgacggagcgccaggacggagacagacccagcacggacc

SEQ ID NO: 91398 - RNA, 69 nt, Homo sapiens
cggccggcgggagacgccgaacagaaaagccagaccaaagcaaacaacggaaagcgggcagaggaaaag

SEQ ID NO: 91399 - RNA, 76 nt, Homo sapiens
ggagaaaccaagcagacccagacacgagaggcgagggacgacagagcaagcggcagagggcaagcgggaaaaagac

SEQ ID NO: 91400 - RNA, 54 nt, Homo sapiens
aaggaaaggggagaggacgaagccagaaaggcacagcagagaggccgggaccga

SEQ ID NO: 91401 - RNA, 79 nt, Homo sapiens
gaacccgcggcaaccgcccgaccagccgccccagccgccaggacccaacgcccgcgccgccgggaaacccagacgacaa

SEQ ID NO: 91402 - RNA, 69 nt, Homo sapiens
gcgccgacggacccggaaaaccggcccccaacgacaaaagccgggaaaaacagaaggcagcgcgaaggg

SEQ ID NO: 91403 - RNA, 55 nt, Homo sapiens
aaagcacgggggcaacagagcagcagcaaaaacaaccagcacgggagccccccgg

SEQ ID NO: 91404 - RNA, 56 nt, Homo sapiens
ccgagcacgccacccccacccgcacaggaccaagcacacacagccccggcgcgaag

SEQ ID NO: 91405 - RNA, 69 nt, Homo sapiens
gacccgaagcggggaccaggaaaaccccggggcccacacacacgcagggcgcccagcacgcccccacag

SEQ ID NO: 91406 - RNA, 60 nt, Homo sapiens
gagacaggacaaacgaagaagacaccacgaggcggcggagaacggaaaagcaccaggaag

SEQ ID NO: 91407 - RNA, 80 nt, Homo sapiens
aagggcccaagggccccccgggaacgcagcgcgcaggaccacggggaaagccaagaggaacaggcaggaaaacgacccaa

SEQ ID NO: 91408 - RNA, 71 nt, Homo sapiens
cggggacaagcgcgggaacggcgcggaaggggcccgggcagagggaaagcagaggacggaacaacccgggg

SEQ ID NO: 91409 - RNA, 89 nt, Homo sapiens
agcagaggcagcagccggacgagcagcggaggcggcgggagcgaggggaggggcgaccccggggcccggccagcacgaccgaggagggg

SEQ ID NO: 91410 - RNA, 74 nt, Homo sapiens
aagaggccagagcagacgaagaccaacgaaagaaaacacacacacacaaagcgcgaaaaggcgaaagcaaaccc

SEQ ID NO: 91411 - RNA, 70 nt, Homo sapiens
gcagagacgccggacaggaccgcacacccgggaaggggccgccacccacggcagagcaccagagcgacga

SEQ ID NO: 91412 - RNA, 73 nt, Homo sapiens
cagcaggaaggcagccacaacaggccaggggagcgccacccccaccagagccacacccagcggcggcaagaca

SEQ ID NO: 91413 - RNA, 69 nt, Homo sapiens
gaacacggacaagggcacaagaccagacccacaggaccgcgaacaaggaggccacaaaacacccggacc

SEQ ID NO: 91414 - RNA, 72 nt, Homo sapiens
gaagagagaccgacacccaagacaagacagcgcaaggcagggccagcaggcgaaagagaagcaaaggaagaa

SEQ ID NO: 91415 - RNA, 57 nt, Homo sapiens
gaacaagcccgaccgaaccggggaagaaacacggccggcaagaagccaacggagaac

SEQ ID NO: 91416 - RNA, 71 nt, Homo sapiens
caccggggacgcggacaaggagccggggccccacagacagagcccgaaagagggaacggcaccacgacccc

SEQ ID NO: 91417 - RNA, 74 nt, Homo sapiens
ccacgcgcggaaggcagcgcccagcagcgcagagcgaccaaagcagggcacccccgaaggacaggcacccggcc

SEQ ID NO: 91418 - RNA, 76 nt, Homo sapiens
caccaggggcggaaacgcggggacgccacaagccgaacacccaacaagaaggcaacgacaaacagccaagcaagcc

SEQ ID NO: 91419 - RNA, 110 nt, Homo sapiens
gcgggaggcccggaggaggaccgcgggggcacacgaggcgcacaagagccaaggcccaccaaggaccgacgagacgcgcgcagccggacagcaggggccagacaagacga

SEQ ID NO: 91420 - RNA, 69 nt, Homo sapiens
gcgcagccgaagcgagcgaacaaccaagaaacagaagggaacccgagggagcacagccaagacgagcaa

SEQ ID NO: 91421 - RNA, 77 nt, Homo sapiens
ccaccacaagcgcaagccaaagaacccaggcccagcaggcgcagcagcaagagggaaaaaggcaacgggaccgcggc

SEQ ID NO: 91422 - RNA, 83 nt, Homo sapiens
gccgggagaaccggaggaggaggccacacagaaggacggcccgacggaagaaccgagggcaccggagggaagcgggccaccgc

SEQ ID NO: 91423 - RNA, 60 nt, Homo sapiens
gcgggcgcggacgccgaggcaccgaggcaccagaggagagcccagaggcccggaaggcgc

SEQ ID NO: 91424 - RNA, 66 nt, Homo sapiens
agcacggaacacggggaaggagcaaagaacgcagaggggcagaaaagaagaacgaaaagacccggc

SEQ ID NO: 91425 - RNA, 54 nt, Homo sapiens
cggaggggcgaccaccggggacaggccgcgcgcggggcgaccaaaccggagaga

SEQ ID NO: 91426 - RNA, 83 nt, Homo sapiens
ggaaaagcaccagagacgagcgcccacacgcgcagcacaagcccgggggaaaggcagcgcgcagcagcggcacacaagccaaa

SEQ ID NO: 91427 - RNA, 75 nt, Homo sapiens
ggaagacacgaaaaaagagaaagggccaacgaaaagaaggcaacaggccaggggcgcccgcgcgaagacagagcc

SEQ ID NO: 91428 - RNA, 78 nt, Homo sapiens
aaacaagaagagagagcaaagacacccagcaaacggcggccggagcagagccggaggagccaccaacagaagcaggag

SEQ ID NO: 91429 - RNA, 78 nt, Homo sapiens
acgcgggcgcggacgaccggagcagagagcggcgagcaagggggggccccagcccggccgaacgggcgcacgacacaa

SEQ ID NO: 91430 - RNA, 73 nt, Homo sapiens
gagccacagagaagaaggagcagcaaaacccgaacggggagaccccgagaaaggaggagaaacaagcagcacc

SEQ ID NO: 91431 - RNA, 72 nt, Homo sapiens
acgcgccacaacgcaacgacggccgcgaacccggcaccccgagggagggaagggcgagcacgggccagcccg

SEQ ID NO: 91432 - RNA, 62 nt, Homo sapiens
ggcggcaagcggcgcgagcggcgagggcgcgcggagcccgaggccccaagacggaacccaaa

SEQ ID NO: 91433 - RNA, 62 nt, Homo sapiens
ggcaacagaaaagaaaagaggggcacagaaaaagcccgggcggaggaggaagagggggcacc

SEQ ID NO: 91434 - RNA, 73 nt, Homo sapiens
gagagagcgagcgagggggggcgcgccggaaaccggagcgcgcagcaggggacggccgcacacgggggagacc

SEQ ID NO: 91435 - RNA, 77 nt, Homo sapiens
cgggcgcaggcgccggcgagcgacgggcgggaggcggaccgggacgggcaccagccggggaaaggagcgcagcgccc

SEQ ID NO: 91436 - RNA, 61 nt, Homo sapiens
gcgggagaggcgagccgcgagagggccggcaggcccgggaagggcgcaccgcaaaccgggg

SEQ ID NO: 91437 - RNA, 83 nt, Homo sapiens
aagcaccccgcaagaagagacccagagagggaccagggccaaagaagagccggggggcaggcggacagcaagcgcagggacag

SEQ ID NO: 91438 - RNA, 75 nt, Homo sapiens
aggccgcgaaaaccacaacgcaccagagggcaagagcccagcgagacaccggaggaaaagaagcacccagggcca

SEQ ID NO: 91439 - RNA, 94 nt, Homo sapiens
cacaaggaaaccacacgcgcccagagccggacgagaccaggggcccagccacagaccaggaacacggccaaagccccagaggacaagccagaag

SEQ ID NO: 91440 - RNA, 71 nt, Homo sapiens
gcgccccgcaccagagcggggcaccgagccggcggggacgagagccccggcacaaacggaccaccagaaag

SEQ ID NO: 91441 - RNA, 88 nt, Homo sapiens
cccccacgcagaggccagcgaccacaagcagaagagcgggcgacgcacgaggcacacaggaaggaggggagcagggacgcgcggcggc

SEQ ID NO: 91442 - RNA, 72 nt, Homo sapiens
gggagcagagccgcaagggccaaagcccaagaacgaggcgaagccgacgagcccgaacagacgcaccagcgg

SEQ ID NO: 91443 - RNA, 83 nt, Homo sapiens
gccacccagcgagaggagaggcgcccccggggacgcaccccgggccgggagacgcaagggccggcaagagaagaacaccccgg

SEQ ID NO: 91444 - RNA, 64 nt, Homo sapiens
aacggggcgagccggaggagcacccaaccccgcgggccgcaagagacaccacaaaaggacaccc

SEQ ID NO: 91445 - RNA, 57 nt, Homo sapiens
aagcgaggagccacacagaccagaacggcagggcacaccaagccagaaggcgaggcg

SEQ ID NO: 91446 - RNA, 71 nt, Homo sapiens
gaggcagccgaaagaacgcaggaaggagaaacacagagcagcaaggcgaaccggcgcggagcggccgggcc

SEQ ID NO: 91447 - RNA, 80 nt, Homo sapiens
ccaacaagcacaaagagccaaaggacgggaagaacccacgcgcgacgaaaagagagagaaggaggaacccaggaggaaca

SEQ ID NO: 91448 - RNA, 74 nt, Homo sapiens
aaccagaacaacacaacggggaccacccgaaagcagggggccaggaaccaggacacagaggccccaaagccggg

SEQ ID NO: 91449 - RNA, 72 nt, Homo sapiens
acaccaagaaaggacaagagacggaaacccaaagagaggaggcggggagggaaaaacagcccggcccagaga

SEQ ID NO: 91450 - RNA, 52 nt, Homo sapiens
aaaggaggaaacagaaacagaggccacaggggagacaaccccaggacgggcg

SEQ ID NO: 91451 - RNA, 62 nt, Homo sapiens
ccgcgggagccgaagacccagcgaccgagcaagccccccgaagaacccgaaagcagggagcg

SEQ ID NO: 91452 - RNA, 66 nt, Homo sapiens
ccaggccgagccgagaggcaagacaacacacccagaagggagggagcaacgcgagccaagcagcag

SEQ ID NO: 91453 - RNA, 80 nt, Homo sapiens
cgaggagaccggcccagcccgagccgaaagcagggcagaggagcagcagggaggggaggagcacggccggccaccagcca

SEQ ID NO: 91454 - RNA, 78 nt, Homo sapiens
ccgggccagcagcccccccgcccccagcggcggagccacgaaaccaggacccggaaagggagcgacccagacaaagag

SEQ ID NO: 91455 - RNA, 69 nt, Homo sapiens
gacaaaagagggacacgcaggagaaggacagcacccagacccaaagcgcagaacccaggagcccaccga

SEQ ID NO: 91456 - RNA, 67 nt, Homo sapiens
gacaaagacgacggcgggcaacaggcaaaggaaaaaaggcggggcggcaccaccgagcccacgggca

SEQ ID NO: 91457 - RNA, 71 nt, Homo sapiens
ccgagagaagaagagaaacagaaagaacacaccaaggggagagaagcagccaaaaccaaccaacaacaacg

SEQ ID NO: 91458 - RNA, 78 nt, Homo sapiens
aacaagacgcccggacaagaggccagcaagcggccggaccacaccacccaccgcacggagggaagccggccagaagac

SEQ ID NO: 91459 - RNA, 70 nt, Homo sapiens
gacacaccccaggaaaaagacagcccgcagcacgaccagcaggaacgggacaagagaaaaaaagggcggg

SEQ ID NO: 91460 - RNA, 58 nt, Homo sapiens
ccaagagcggagacacggggaaacgcagggccgcaggggcgcggcacaggagaggggg

SEQ ID NO: 91461 - RNA, 68 nt, Homo sapiens
gggaacgcacagacaaaagcgcaccccaccagaaacgggggaggggaggagggagacaggggcaaaaa

SEQ ID NO: 91462 - RNA, 82 nt, Homo sapiens
ccggaccgcgcggacaccagccagcccggccacaagcaacagaagcagaagcgaggcaccagaccagagccccacagagagg

SEQ ID NO: 91463 - RNA, 54 nt, Homo sapiens
aggcaaggccgaacgaaaaccacccgcggacagggaaaaccgccagaacagccc

SEQ ID NO: 91464 - RNA, 85 nt, Homo sapiens
cacggagccgcgaggagacagcgaggcccgcggagaccagggagccgccggccgacgagacacgccggaggaaacagacgcacgg

SEQ ID NO: 91465 - RNA, 40 nt, Homo sapiens
ggacaaaggaacaggaccaggagccagcacgaacgcaccc

SEQ ID NO: 91466 - RNA, 77 nt, Homo sapiens
aaaccggggccacgcaggggggccgcaggacgagacacgggagaccacagagaggccccgccgcgcaggccacccgc

SEQ ID NO: 91467 - RNA, 76 nt, Homo sapiens
ccggacagccacaaagacccccagacacacacacccaacccaaaccaagggccgccgccaccgacaccaccgccac

SEQ ID NO: 91468 - RNA, 87 nt, Homo sapiens
cgaacggaacccaccggggaccgccaccgagagacacacagaggacagaccccccgggcacacagcacgaccaagaaggcggagcga

SEQ ID NO: 91469 - RNA, 75 nt, Homo sapiens
ccgcacccagggggagacgcagcggcaccacaagggcgaccgcagaacaaggacagcagaaagacccaacaaacg

SEQ ID NO: 91470 - RNA, 72 nt, Homo sapiens
cagaacaccagaacagcggccacccgacagcaagcaccggagggagaagacagaccccaagaagcccggcac

SEQ ID NO: 91471 - RNA, 85 nt, Homo sapiens
gaagacccccgaacagcgcggagcaaagaaagccacacgccccaccgggggccaaaaagcggcagcccagaaccggaagcgacca

SEQ ID NO: 91472 - RNA, 76 nt, Homo sapiens
aaggagacgggggacaacagggaggagaggaaagggcgacaccaagggccgaccccacagggaggccagggaggag

SEQ ID NO: 91473 - RNA, 56 nt, Homo sapiens
caaagaagagaccggacaagcaggggagccgccaccaaaagcagacggaaaaccca

SEQ ID NO: 91474 - RNA, 69 nt, Homo sapiens
gggacgagcaaaggaagcgcgaacagcagcgcagcaccgaggagcaacacccccagggagcccagaccg

SEQ ID NO: 91475 - RNA, 75 nt, Homo sapiens
ggaacgccacacagaggaaagcacaaaggaagacgaaccggagaagagaaggccgggacagcagaaaacagccag

SEQ ID NO: 91476 - RNA, 77 nt, Homo sapiens
ccggccgggccagcacccggccgagacggcggcagcagcggcacagcggcggagaaaccaccacaaacacgaggcca

SEQ ID NO: 91477 - RNA, 50 nt, Homo sapiens
gaaccaggcaaaccgcccagggaccaggaggagaagcaaccagagaggaa

SEQ ID NO: 91478 - RNA, 79 nt, Homo sapiens
caaaagagagcagccaaaccaagagccgccggcaccccaggaggaacagacaacgggagcagaagagagcaaagacgcg

SEQ ID NO: 91479 - RNA, 85 nt, Homo sapiens
cgggaggggaccggacaggcgccgcgccgccgcacgggaccgccgagccacaccggaccagagacaaggccccgagggaggagcc

SEQ ID NO: 91480 - RNA, 62 nt, Homo sapiens
cccccggcccacgacccaaggacacaacccggccgcagagcccagaaacgccgaagggacca

SEQ ID NO: 91481 - RNA, 81 nt, Homo sapiens
ccagcacccggccgagacggcggcagcagcggcacaggccccagcagccgaccgaggggaggaccagagaaaccagcaggc

SEQ ID NO: 91482 - RNA, 69 nt, Homo sapiens
gggggagagccaagacagacagggacaggcacccaccgcaggcaagaacagcagaaacaacacacaacc

SEQ ID NO: 91483 - RNA, 65 nt, Homo sapiens
cacccccagcgggcagacccagcgaggcgacaaccgaaaggggggcgggccgccggggaccccag

SEQ ID NO: 91484 - RNA, 73 nt, Homo sapiens
ggaggaggagaaagagaggggcaagagcccgcagaaaaagaggaggagcgcgaagaagaccacagcccaggag

SEQ ID NO: 91485 - RNA, 63 nt, Homo sapiens
ggggacaaacccgggagaacacccccccaggaggcgaggaaaccagggaaagcaacaccgaaa

SEQ ID NO: 91486 - RNA, 75 nt, Homo sapiens
accggaaaagacgcgcaaggaacgaagcaggcccaggagaaagcacaggacagcgcgagcgagagcgagaagcgg

SEQ ID NO: 91487 - RNA, 42 nt, Homo sapiens
ccgaggacccgcgagccccaggcgacaggcgccaaggagaga

SEQ ID NO: 91488 - RNA, 74 nt, Homo sapiens
ccagcagcgacaaacgcccacaaagcgggcacaccaagccagaaggcgaggcgcacggcagaaagccaacaggc

SEQ ID NO: 91489 - RNA, 88 nt, Homo sapiens
agagagaaccgccagaaaggagcggaagaggccacgaggcgcacaccgccagcccaagaaaaaggaggacccagacagcggcccccca

SEQ ID NO: 91490 - RNA, 75 nt, Homo sapiens
aaggccgcccccaccggacgaggccccccaaccaggcaaggaaggggccaccagaaggaggacgcagaagaccac

SEQ ID NO: 91491 - RNA, 75 nt, Homo sapiens
ccaaagacgcacagacccaccagcaagaagagcgccagcccccgcaaaacacagcaaagacaaagacgaacagag

SEQ ID NO: 91492 - RNA, 61 nt, Homo sapiens
gggaaggccggaaaggaccagaccgcccaggaaacggaccccagggagccggggggaacgg

SEQ ID NO: 91493 - RNA, 83 nt, Homo sapiens
gggacccagccaggcagaccccgggcagcaggggaaagggagcagcaccggccacacccacagcacgaccggaacccagcgac

SEQ ID NO: 91494 - RNA, 74 nt, Homo sapiens
ggccgacgacgacggcgcgaggaggacgagcggcgagggacggaaaaccagagcaaaaaagacacaggcagaga

SEQ ID NO: 91495 - RNA, 58 nt, Homo sapiens
gcgccacggaggggcagccacccccgcacccccccaggcagcagcagcagcaccggag

SEQ ID NO: 91496 - RNA, 58 nt, Homo sapiens
aagaacgaaaggagaacagcgaagagaaacaagaaagaagcaaaccgccagcaaaagg

SEQ ID NO: 91497 - RNA, 74 nt, Homo sapiens
gagaaaagaggcggcccacccccccggccgcgaggcagcacccacagggcacaccaaagcggggaaaagggaag

SEQ ID NO: 91498 - RNA, 79 nt, Homo sapiens
cgcggggcccgggcagcccagcccaggcacgggcacaagcggggggcagcccccgccggcaccagccggcaccacccca

SEQ ID NO: 91499 - RNA, 76 nt, Homo sapiens
ccccgcggcacaaccaggggaaaaccaaaagaggccgaacaacgggcaaccgaagagagggaaaagagacgcccgg

SEQ ID NO: 91500 - RNA, 58 nt, Homo sapiens
cggcacccgaaggccagaggaaagagaggggggcgccagcccaaagagcgagccaaag

SEQ ID NO: 91501 - RNA, 64 nt, Homo sapiens
caacgagaccaaagaggcaagggaagaaaagggaaccagcggagcgggacaacgcagcaacggc

SEQ ID NO: 91502 - RNA, 66 nt, Homo sapiens
caagaagagagaccgccacagcagaagaaaagaagggaaagacacggagaaagaagcggacccacg

SEQ ID NO: 91503 - RNA, 56 nt, Homo sapiens
cagcagcaggaacacaggcccaggggacacccagcaggccagggaagaggcagccc

SEQ ID NO: 91504 - RNA, 49 nt, Homo sapiens
aacccccccaacggaacagcaccccccaaggcccaggaaccgggccagg

SEQ ID NO: 91505 - RNA, 37 nt, Homo sapiens
aggaccaagaaccagagccgaggaaggcaccaggaga

SEQ ID NO: 91506 - RNA, 82 nt, Homo sapiens
cagaagcaaaacaggacgacccgaggaacagagagcagacagacagcgaacacggaagccacgaaaagcaaaagcacaggaa

SEQ ID NO: 91507 - RNA, 81 nt, Homo sapiens
gacaagccccagggaagccacagcaccccagcacccagagaaagccgcacaccccaccagagaaagggaaccaacggcgcc

SEQ ID NO: 91508 - RNA, 77 nt, Homo sapiens
cgaacaggcgggaagggaagggacgcaaaaaggaagccccacaaggaccaggcaaaacggaagagcacaagacccag

SEQ ID NO: 91509 - RNA, 68 nt, Homo sapiens
ggagcccagaagacagagggcgagggagaacacccagcagaggcgcaggaaaagcaccgaaagaacac

SEQ ID NO: 91510 - RNA, 74 nt, Homo sapiens
cagaacgcgggagcacaagaacgggccaagaagggcggagcaagaaccccacacgacaggagaaaaccggagga

SEQ ID NO: 91511 - RNA, 56 nt, Homo sapiens
gaaggcagaggcaacagacaggacaaaaaggacccgacagcacacccccaaaaaaa

SEQ ID NO: 91512 - RNA, 67 nt, Homo sapiens
gcacacaacaggaaaacaaaagaggagaaaggcagacaaccaggacagaacagggcgagagaaagag

SEQ ID NO: 91513 - RNA, 51 nt, Homo sapiens
aggccggcaaggaaccaacgaaacgagcccccaagggagcgagggcacacg

SEQ ID NO: 91514 - RNA, 75 nt, Homo sapiens
agacccggcgaggagaaccacccgcagaaggaggacgcagaaaacagaagggcaaagagaaaaaaaaaaaaggca

SEQ ID NO: 91515 - RNA, 73 nt, Homo sapiens
gccccggcacacgcgcagccccggccccggcccgccggagaaacagaggaacagcaccaaaaacgacgcgaac

SEQ ID NO: 91516 - RNA, 63 nt, Homo sapiens
aaaggaagcggagaaccacaaacgacacagccagggcaaacaaaaaaagccacacccacacgg

SEQ ID NO: 91517 - RNA, 65 nt, Homo sapiens
gcccgaacagaaccgcccggaccgcacaggcgcaggcgcaaggggccaggggaccaggcacccgg

SEQ ID NO: 91518 - RNA, 70 nt, Homo sapiens
cggagcaagcggacgcacacccccgccagggaggcagcacggcaggagacgaggagaggacagcaggaca

SEQ ID NO: 91519 - RNA, 73 nt, Homo sapiens
cccagggccaaggcaaagggacgccacacacagaacgacaccacagcgacaaccggcgaaccacaggagaaag

SEQ ID NO: 91520 - RNA, 83 nt, Homo sapiens
ccccagaaaagcgaggaagcaggcggagaagagacaaggaaaccccccaggcaagaggcgcaggaccgggaagaccaacaaac

SEQ ID NO: 91521 - RNA, 75 nt, Homo sapiens
aacgaggaagaagacaagggcggggccccaggccggcagccaagcgacgaggccgcaaagggacaaggagccacc

SEQ ID NO: 91522 - RNA, 82 nt, Homo sapiens
acaaggagagaaacaggaagaagggagggggaaaacaggaagagaacgaggagcaacccaaaggcgaaacccggaagacagc

SEQ ID NO: 91523 - RNA, 83 nt, Homo sapiens
gggaccccacgccagcccgacgggacggcgagcgcaccgcgccgcaggcacccggacaagcgggacaggagccagcggcccag

SEQ ID NO: 91524 - RNA, 69 nt, Homo sapiens
agaccaacccgacggccccccagagaacagaagcacggaacaaaagagaaacaacgaagcaagcccaag

SEQ ID NO: 91525 - RNA, 67 nt, Homo sapiens
ccagaagacagagggcgaggcagaacggggccccgcacccagacaaacaggcccgcagccccagagc

SEQ ID NO: 91526 - RNA, 77 nt, Homo sapiens
acacggaacgccaaacaaggaaaccccgggggggaccgaaaaccagagcagagaagggaagaggccagcacgccggg

SEQ ID NO: 91527 - RNA, 79 nt, Homo sapiens
cgggaacagagaggaagcagagggggggggccagcgacccggggccgagaagacacggccacggagacgcagaagaaac

SEQ ID NO: 91528 - RNA, 56 nt, Homo sapiens
cagcccgcagcacgaccagcaggaacggagaaaaaggcagccccggagacgaaaag

SEQ ID NO: 91529 - RNA, 80 nt, Homo sapiens
caaacggacgaaaagccgcaacggaagcgagaggcgagagggcgggcgcacggcgaaccagcggaacacgggcaacgggg

SEQ ID NO: 91530 - RNA, 60 nt, Homo sapiens
ccccacaaggaggcacccaccagcagcagcaagggcaagagagacggagaggagagcaac

SEQ ID NO: 91531 - RNA, 68 nt, Homo sapiens
gagacaaccgaagaccagggaaaggcaagagaaagcagacgagggccccgggagaaggccagcaaagc

SEQ ID NO: 91532 - RNA, 73 nt, Homo sapiens
aaaaggaaaggacccaccaagaaaaccgagaacagggggggcaaaaccaagcacggacggaagagagaggcaa

SEQ ID NO: 91533 - RNA, 79 nt, Homo sapiens
gccaaccagagagcccaagcccaaaaacaaacccgaaaaaacagaagacgccgcaaaagaacaacaagaaggagaaaga

SEQ ID NO: 91534 - RNA, 76 nt, Homo sapiens
ccgaagcgcgacggaaggggcaaaggagcagagaacgacaagccacacgaggacagcccgcaacaccaccgacagc

SEQ ID NO: 91535 - RNA, 70 nt, Homo sapiens
gaaacagagggagaacaagagagggaagcgagcggcacgcaaagccgaaaaacacgaaaggcggcccaac

SEQ ID NO: 91536 - RNA, 84 nt, Homo sapiens
cagccggagaccgagccgacacgggggcagccgcgagccccgcaccccgagagcggagaagcccgacccaaagacaggaccacg

SEQ ID NO: 91537 - RNA, 73 nt, Homo sapiens
gccgagcggacccggaccgggggcgcgaggcaccaaagcgaacgaagagcaccgggagcggcgaagaggcacc

SEQ ID NO: 91538 - RNA, 88 nt, Homo sapiens
acagacagaggagaaggcggcccaccccagagcaccggcagaagcgggcaccaacagacaaccagggcaagcagaggcaaaggcaagg

SEQ ID NO: 91539 - RNA, 56 nt, Homo sapiens
agacgaggcgacgccgcaaggacggccacggcagcaccgagacaaccaagcaaggg

SEQ ID NO: 91540 - RNA, 74 nt, Homo sapiens
ccaggcaaggacaggaccgacacagccacaagaaggcagcaaaccaagcaaccagccacccgaagccagcgaga

SEQ ID NO: 91541 - RNA, 63 nt, Homo sapiens
gaccacaacaagcaagcagcagcacgcgaaaggaccgagcaaaacccagggaccggagcccgg

SEQ ID NO: 91542 - RNA, 63 nt, Homo sapiens
gccgcggccggccacgcggccccacccacagagaacaggcaacaaaacagccggacacagacc

SEQ ID NO: 91543 - RNA, 95 nt, Homo sapiens
aaacgcagagagaaagagagaggaagccagcagccgacgaaggggagggcgaaacccagcaggcgcacacacaggaccgaggagagaaacccaac

SEQ ID NO: 91544 - RNA, 69 nt, Homo sapiens
gccgggcgagcgcaaaggaaggcgccgggcccgacccgcgagagggaccccgacggagagacaaagaag

SEQ ID NO: 91545 - RNA, 81 nt, Homo sapiens
cgggacaagacagggcaaaggacagaccagaacgccaacggcaagaaagggaaggccgcaaacagacacgcggaaaagccg

SEQ ID NO: 91546 - RNA, 82 nt, Homo sapiens
gaaaggaacaggaaaaaccagagcacgagagaaaaaagacccaaccaacgcaggcccgagcaagagaagcagccggagccca

SEQ ID NO: 91547 - RNA, 78 nt, Homo sapiens
gggaggacagaggaaaagccccagcgcgcgcccggacagacaaggaaggggcccccacggggagaaggaacaaccaag

SEQ ID NO: 91548 - RNA, 83 nt, Homo sapiens
gcgcgagaggcggcggcacgacgacggccccagcccagccaccagagcaccaagcagacacgcagggcggaaaacaccccaaa

SEQ ID NO: 91549 - RNA, 58 nt, Homo sapiens
ggcgaggcaccccaacagcagagaaacaaggggggacccacccaggaggcagaaacac

SEQ ID NO: 91550 - RNA, 74 nt, Homo sapiens
ccccaccacaaccgcccacggcgcccgaccagaggcgaccggacagcagcagcacagcaaagaacccaggccca

SEQ ID NO: 91551 - RNA, 61 nt, Homo sapiens
aagagcccggacaccggaagcgggaaaggaacgaagcaggaagggaacgagcggcaaggcg

SEQ ID NO: 91552 - RNA, 80 nt, Homo sapiens
gagaagaaggagagaaagaaggagaaaccggaacccagcagaagcaggaaagggaaaaagcgggaggcagacccaggaag

SEQ ID NO: 91553 - RNA, 77 nt, Homo sapiens
aggccgcgggggcaacggagaaaacccggaaccgcgacggcggcagagaccccaacaggcccgaccaacaaagaaac

SEQ ID NO: 91554 - RNA, 83 nt, Homo sapiens
ccccaccggaggacacaagaccagccgacagcgaccaaggccagagcgaaaggccacggccagccgccggcacgcagcgcgag

SEQ ID NO: 91555 - RNA, 87 nt, Homo sapiens
ccgccgcccgacccagggcccgcgggccaggagagcgccggcggccgggccgcccgcggcagagcagcagagcgccgcccacaagag

SEQ ID NO: 91556 - RNA, 69 nt, Homo sapiens
gcaacaccaggaaaaaaacaaagaagccagggcacggcaaacaggcacaagaccggcagggaggaagcc

SEQ ID NO: 91557 - RNA, 74 nt, Homo sapiens
cagcagccaaagaacaccaggagcaggcggcggccggggcagcgccgcgagccagcaacgggggaaggccacaa

SEQ ID NO: 91558 - RNA, 75 nt, Homo sapiens
gcgaggaccaagcaaggacccaccaggccgaagccagccggagcagcggcacaggagggcacccagcaccaggca

SEQ ID NO: 91559 - RNA, 77 nt, Homo sapiens
gaccccgcggaacgcccaccgcggagagcagcacgaccccagcacagaaccacgaagcgcccgagacgccaccacgc

SEQ ID NO: 91560 - RNA, 83 nt, Homo sapiens
agcagcaaggcccaaccagacgcagagccggggcaccacaacgacacacccagcccaggagcaggccgggcccgccagggcac

SEQ ID NO: 91561 - RNA, 61 nt, Homo sapiens
aacaagggcgagaggggggccggcggcaaagaaagcggggagcacgcagccaagacacagc

SEQ ID NO: 91562 - RNA, 73 nt, Homo sapiens
caaaggaacgcgccggaagaaaaggccgaggggcagcagcaggacagggaacccgggagacagcaacagacgg

SEQ ID NO: 91563 - RNA, 70 nt, Homo sapiens
gagagcaagccaaagaccaaggggggggcacccccacaacggcgacacgggcggaccacaaacccggcgc

SEQ ID NO: 91564 - RNA, 73 nt, Homo sapiens
agacggccgacccgccagaggaggccccccagccacggaaacaaagcaccgggaggaaagagagccacacgaa

SEQ ID NO: 91565 - RNA, 59 nt, Homo sapiens
gagcagcggcgcagaaaggggaggccgggaggacgaagagagccaacggaccacaacag

SEQ ID NO: 91566 - RNA, 66 nt, Homo sapiens
gaggaggacgagaagcagcggcgcagaagagagagaaaccggagagggaggggccgggacggaggg

SEQ ID NO: 91567 - RNA, 58 nt, Homo sapiens
cggaacacgagaaaggcaagcaaaggcgcaggggcccaggacaaagggacgcagggca

SEQ ID NO: 91568 - RNA, 89 nt, Homo sapiens
gccagcagcccgccccccggaagggcaccgcgacgacaccccggggaggcgaggagagagaggaaacggaacgaaacggcagcagcaag

SEQ ID NO: 91569 - RNA, 84 nt, Homo sapiens
gaggcgggagcgcggaaacggaaccgggaggcgacgcacacgagcggaggcgaaggaccgaaggagaagaaggagaaggggagg

SEQ ID NO: 91570 - RNA, 67 nt, Homo sapiens
gcacgccacgccacggccccgcacggggcgcacagaggaggcgggaaaacggcacaaggcgacgagg

SEQ ID NO: 91571 - RNA, 72 nt, Homo sapiens
ccgccagcggggagagccggcgagccaccaaaggacaggagaaaagaaagcaaccagccgagacaagcagcc

SEQ ID NO: 91572 - RNA, 80 nt, Homo sapiens
cccccaagggcgggaacagagggccacaacgagaaagaccgacgaaaagaagaaagaaccgcaaacacgcagaacagccc

SEQ ID NO: 91573 - RNA, 86 nt, Homo sapiens
gggaggagcaggccacacaggcacaggccgggagggaccgcccagaccggagggcgggaaaagaaccccagcgcgggacgaggacc

SEQ ID NO: 91574 - RNA, 42 nt, Homo sapiens
ggagaggaaaacagagagggccagaagcccaggaagcacaca

SEQ ID NO: 91575 - RNA, 78 nt, Homo sapiens
ccaaggaagccacggcagacacacaacccgacccgacgaagcgaggagggagagggagaggaaagccgaaggaaaacc

SEQ ID NO: 91576 - RNA, 100 nt, Homo sapiens
cgcaggacaggacaaccaccagccccaggaccccgcgcacgcagcaacgcggagcagacccccagcaccggggcgaacaggaacaaccagaagagcaccc

SEQ ID NO: 91577 - RNA, 77 nt, Homo sapiens
gaggggccaggggggacacggggagcgcgccgagcggagaccggacgggcgccagggaaggaccgcacacaagccgc

SEQ ID NO: 91578 - RNA, 72 nt, Homo sapiens
cgagcccacgggccccgcgcccgccaggacgcaacggaaaggacaaggacaccaaggggacagggcaaacaa

SEQ ID NO: 91579 - RNA, 74 nt, Homo sapiens
cgcacccccccacccagcagaggcacgagagccgcggccagcagcaggacaacggcaagcggagaagagcaagg

SEQ ID NO: 91580 - RNA, 90 nt, Homo sapiens
gcggggcggccggggcggcgcgacggcgggcgcaggaagaaggaccggggagacaggaacacgggcaagacagcgcgggcaccgccgcag

SEQ ID NO: 91581 - RNA, 77 nt, Homo sapiens
ggacaaaccaggggaagcaagacccccgaccggcgggggcccacaaccggggccgaaccaacccacagcgggcggcc

SEQ ID NO: 91582 - RNA, 77 nt, Homo sapiens
aagccaagagccgcagcagcccccgcccggagccccccggccagggccccgggcacaccgcaaggcagaacgccaac

SEQ ID NO: 91583 - RNA, 82 nt, Homo sapiens
cccacgccggcaagaagggggccaggccaccaaacacgacaggagggcaagaccgcaggccggacggagacagagacagaga

SEQ ID NO: 91584 - RNA, 44 nt, Homo sapiens
gaagccagcaaggagggcgaaagaaacccgcgcgaccgcagcaa

SEQ ID NO: 91585 - RNA, 77 nt, Homo sapiens
gagaggaaacagaacaccaggacacccagagcgggaaagcaacggagcaaggaaagagcagaagccaaacaggcgcg

SEQ ID NO: 91586 - RNA, 72 nt, Homo sapiens
acaccgaagacagccccccgggcggagccccggaagaggccgcacagcggacggcgcaggggcgcgcgggca

SEQ ID NO: 91587 - RNA, 76 nt, Homo sapiens
gaaccaaaagggacggacaaaggaacaggaccaggcgacacaacccaagacacgacagaaggccaacgaggggaca

SEQ ID NO: 91588 - RNA, 72 nt, Homo sapiens
ccgccggcgcgccccacgggccaggagggaacgggacccgaacaacgaaaaacaagcgaacagagaaaagag

SEQ ID NO: 91589 - RNA, 82 nt, Homo sapiens
acaccagcagcccccgggccaccgccccagcgccaccaaagaccgcgacgccaggaagcccggggcggcgacggagcacgac

SEQ ID NO: 91590 - RNA, 66 nt, Homo sapiens
cccgcggccgccggacggccgggcgcggaggccaggggggacgcgaagccagcggaggagaaaaag

SEQ ID NO: 91591 - RNA, 78 nt, Homo sapiens
aggaggaggacgagagggacaccagcgacagcagcgccggaggcgaacgaagagcgagggagaaagaagaaacaaaga

SEQ ID NO: 91592 - RNA, 81 nt, Homo sapiens
gccgacaaccacaacaggacacacccacagggcacaacaccgaagcacggagaagcgagacccagccccccccagaccagg

SEQ ID NO: 91593 - RNA, 79 nt, Homo sapiens
cagccaggaccaggcacccgggaaggaaaggagcgagaaaccaacaaggcgaaagcccagagccaggaccccgaaacgg

SEQ ID NO: 91594 - RNA, 58 nt, Homo sapiens
ccaccagcccagaaaagagaagagacaacaggcacaaagagagaaggaacacccacag

SEQ ID NO: 91595 - RNA, 59 nt, Homo sapiens
cacagaacaccagcagcaaacacaggacagccaacaaaaagacggcccagacccccccc

SEQ ID NO: 91596 - RNA, 70 nt, Homo sapiens
cagacgcagagagggcggcaggccagggcacgaggagagggggacagacaacagagcaacgcaacagggc

SEQ ID NO: 91597 - RNA, 81 nt, Homo sapiens
cggcggcagagagagcaccaacggacagcacagggcccgcaagggacgcccaagaggacccacaggccccacccggacgga

SEQ ID NO: 91598 - RNA, 79 nt, Homo sapiens
cccaggcaagagcccgcgagaaggacccaggagcgacaccgaacccacgacccacggaccaggaccaggagggcacggg

SEQ ID NO: 91599 - RNA, 74 nt, Homo sapiens
ggcacaaacgggcaccaggagaacaaaccgcgaccgcgccggcgggcccggggcgggaagcgacccagcaaaaa

SEQ ID NO: 91600 - RNA, 77 nt, Homo sapiens
agacgcagggcgcccccgggcggcgacggcggcgcgaggaccgaccgggcccgcggacgaagaaggcacccccccgc

SEQ ID NO: 91601 - RNA, 81 nt, Homo sapiens
gaaaaaaacgacgcggccaaggggacgccgaccgcgcaaacggcgcagaggcgggcccgaccacgaagcacacggcgcacc

SEQ ID NO: 91602 - RNA, 72 nt, Homo sapiens
ccagcaggagcgccggggccggggcgaacgcggccgccgaacaaggagagcaaacgaggaaacagaagagag

SEQ ID NO: 91603 - RNA, 78 nt, Homo sapiens
acacggaggggaaggggaaaaggcaaccaaagaccaagagaggagccagggaggggggaagacagggcccagcaccac

SEQ ID NO: 91604 - RNA, 61 nt, Homo sapiens
gaagcaaaaggcgaagcggcacagcaagaggagggagcggcgaggaggaggccgagaccag

SEQ ID NO: 91605 - RNA, 56 nt, Homo sapiens
aaggaccaagaaccagagagagccaggagagcccgggaacaaagacaaccagccac

SEQ ID NO: 91606 - RNA, 73 nt, Homo sapiens
gaacaagagcaagaacaagggacacaacgcgccacgaaggccaggccagggaggaaaacaaagagggaaaacg

SEQ ID NO: 91607 - RNA, 112 nt, Homo sapiens
agagccaagccacgaccggcggggcgcgccaaggacacggcacaccgaccgacggagcacagaccagcgcgcgaccggagccccacagcggcacaggccccagccaagcccg

SEQ ID NO: 91608 - RNA, 77 nt, Homo sapiens
gggcgaggcgggcgggccggcgagcgcagcgcgaccgggaggcccagccccgggagaagggcaggagcgcaaggcgc

SEQ ID NO: 91609 - RNA, 71 nt, Homo sapiens
aacaacacccgagcagcgcgaacacgaaaacgaagagacgagcaacacaagcggaaagaaggaaccgcccc

SEQ ID NO: 91610 - RNA, 61 nt, Homo sapiens
ggacgagaaaaccaagggaccggcaaaagaaaaacggcgcagaacggggaacaaggccacc

SEQ ID NO: 91611 - RNA, 63 nt, Homo sapiens
agccgcccccaagcacagcccaagcaaacacagggaccccggcccagcacggccacaagacca

SEQ ID NO: 91612 - RNA, 94 nt, Homo sapiens
aacaagggcgcggccgcgcccaggagcacggacgccagaacgccaccaggagagaacgccgcgccgcgcgacaacggcccggcaggcaaggccg

SEQ ID NO: 91613 - RNA, 77 nt, Homo sapiens
gcccgccggcccgcggccaccaccgggaccgccgccggccagcgagcggcacaccacgggccagaggcagaaccgag

SEQ ID NO: 91614 - RNA, 70 nt, Homo sapiens
cgagacaagcggcaaagacaacaaccacgacgaccaccaaaaagagggcgacccaccaacaggcaaccca

SEQ ID NO: 91615 - RNA, 60 nt, Homo sapiens
aaaaccacgacaaaaccacccaggaaagaacaggagacagcaaaaagagacaacgaacac

SEQ ID NO: 91616 - RNA, 79 nt, Homo sapiens
gcccggacgccgggcccgggagagagccaggcccgaggaggcggcgcggccgacgcccccacacgaggccgccacggcc

SEQ ID NO: 91617 - RNA, 74 nt, Homo sapiens
gccacacagcgcgaccgagaacgaaagagaccagaggaacacagccgaggggagggagcaaagccgcacacgga

SEQ ID NO: 91618 - RNA, 101 nt, Homo sapiens
gacggaaggaacaacacaggaggaggcacgaaccaccgggggagaggcaccaagaccacacgaggcccccggagggacccagaagcccaggccaaggcaag

SEQ ID NO: 91619 - RNA, 78 nt, Homo sapiens
ggcgcagcagaaagcaaaccagcaggcaccaaggaaagcagaagacaaagaacggcaacagggagaaaaagaacaaaa

SEQ ID NO: 91620 - RNA, 70 nt, Homo sapiens
gagacaagcaaaggaaggagccggaagaaacaacccgaacaccagggcaacggagacagaaaccaggagg

SEQ ID NO: 91621 - RNA, 80 nt, Homo sapiens
agagagaccgaagaaacaagccaccgaaacgcccgcagaagaaggaagaggaacaagcaaaaagacagaaacacgagaga

SEQ ID NO: 91622 - RNA, 71 nt, Homo sapiens
cccgaagggcccggggcaaagcacagacaggagaaagaagacagccacagaaaggcaggaaggaacggcac

SEQ ID NO: 91623 - RNA, 86 nt, Homo sapiens
aagaggaggcggaaaaggacgcaaagcccggcgaggcaaaagcagaccggaaaacccaccggcaagaccacacccgaggggagccc

SEQ ID NO: 91624 - RNA, 82 nt, Homo sapiens
gcggaccagggacccgcgaaagcggggcacaggcgggcacgcgcccaggagcagagggaaagcgaggcaacgccaggacaaa

SEQ ID NO: 91625 - RNA, 85 nt, Homo sapiens
cagaagccgaacacgacagaaagaaaggccaaagcagcagggcaccggcgggcacgcgagaagggaagaagacgaagagcagcag

SEQ ID NO: 91626 - RNA, 86 nt, Homo sapiens
gccgacccggcccgaggggaagcagccaggggacaccgcgcagggggcccccggccccgaagcaggccagcagcggcaggcgacag

SEQ ID NO: 91627 - RNA, 69 nt, Homo sapiens
cgcaggggcgcgcggggcggcgcgccgccgcgcggggcaggaacaaaacaaaccccagacgccccccac

SEQ ID NO: 91628 - RNA, 70 nt, Homo sapiens
agcgggccggaaggaaaaggggacggagcacaaacggaggaaacgacaaaacgggggcgggacagcgggg

SEQ ID NO: 91629 - RNA, 53 nt, Homo sapiens
gcgaaaaggaggaaaagaagccagaccgagaacccgggccgagaccaaccgac

SEQ ID NO: 91630 - RNA, 72 nt, Homo sapiens
agagagccaggcagaaaaccccccaggggaaaaagcagcaagggcaacaaagcccgaccgagccgggaaagc

SEQ ID NO: 91631 - RNA, 77 nt, Homo sapiens
ccagccccgagagcgggaacaggcacccgccaccacgcccagagaggaagaagacacggaccgacggacgggaaacc

SEQ ID NO: 91632 - RNA, 77 nt, Homo sapiens
gagcacccagcaaagagcccacacaggggaaccgcccaccgcgcccccagaacaggcgacccgggacccacagccac

SEQ ID NO: 91633 - RNA, 77 nt, Homo sapiens
caacggcaagaacaagccaagacccagagaagagaggagcgagaggaagcggaagaaaaccaacaaaggacagcggg

SEQ ID NO: 91634 - RNA, 81 nt, Homo sapiens
ccccccgggccacagcagcgaggcgcacaaacgaagaaaacacacagacagacagacagccaaaccaaacaggaagcaccc

SEQ ID NO: 91635 - RNA, 57 nt, Homo sapiens
gcgagcggcagcaggacaccccggagagaacccaagagaggagaggaacagaagaag

SEQ ID NO: 91636 - RNA, 72 nt, Homo sapiens
cacagaccgcagaggcaggaaacagcccgggcaccccgaggacaaccgagagaagagacgccaacagaccgg

SEQ ID NO: 91637 - RNA, 77 nt, Homo sapiens
agcgcgccgacgggcacaaggccaagcaagggaccccgacggagagacaaagaagacggagggggggccagccaccg

SEQ ID NO: 91638 - RNA, 48 nt, Homo sapiens
agaggggcaaggagcaagaaagagggccacacaggacaggacgccgac

SEQ ID NO: 91639 - RNA, 71 nt, Homo sapiens
ggcagggccacgagcaccgcgccggcccagcaccccgagaaccgcaggagccagagcaggaggaaagaaag

SEQ ID NO: 91640 - RNA, 81 nt, Homo sapiens
aaacaaccaacgaagacaccgagcgaaagagaaagaggccaagaagcccaggaggacagagacgaggacgaggagggccca

SEQ ID NO: 91641 - RNA, 81 nt, Homo sapiens
ggcgacaaggcccccccgcgaagaaggaagaacgagcaagcgcagcagcgccggggcgggagggggagcagaccggaagac

SEQ ID NO: 91642 - RNA, 74 nt, Homo sapiens
gggcccccacccccaacggcggccgccgcacacgcacacgagacagaggacagggagaagagccaaggagacca

SEQ ID NO: 91643 - RNA, 71 nt, Homo sapiens
agcagaccgcacgaagaccaagacggacacggaaaaaaccaggagcaaaccagccagcacgggggcccagc

SEQ ID NO: 91644 - RNA, 76 nt, Homo sapiens
gagcccagagggacaagcggcccacacgggacggcgcggccacccgcagaccagcggagaccacaagaaggcgcac

SEQ ID NO: 91645 - RNA, 77 nt, Homo sapiens
ggacccgccagccggaccgcgcaggccggggacacggcacagcaaggaggcgaaaaccaagagacacggcccgccca

SEQ ID NO: 91646 - RNA, 88 nt, Homo sapiens
ggcgcgacgaacaaccggcaggcggacggcacgcagcccggcgggaggaaaagaccaccacgaacgaagcgcgcggcaggcgcgcgcc

SEQ ID NO: 91647 - RNA, 82 nt, Homo sapiens
gccggagggggacaccaccggaccccgacccgccgccggcccggccgcgcccgggaaaggggaggccagagaggagcccacc

SEQ ID NO: 91648 - RNA, 108 nt, Homo sapiens
aacaaccccacaaggcggaaggccaaccaggagagcacgcagcaggaagagccaggcccgagcccaagcgcacgacaccagaggccgaagaacgaagacacaaaagaa

SEQ ID NO: 91649 - RNA, 70 nt, Homo sapiens
aaaggaaaaaaccaaacaagcaggaaaaggagaaggaagccaacaccggagccagaaagccgaacccacg

SEQ ID NO: 91650 - RNA, 75 nt, Homo sapiens
cgagaccggaccgagagcggaccgagagcgcgaaacgcacgagaaggacaagaaggaaaaagggaaacgaagaag

SEQ ID NO: 91651 - RNA, 56 nt, Homo sapiens
agcgcaaaagggaagacgagggcagggagcgccgaccacccggagcgaggcaaccg

SEQ ID NO: 91652 - RNA, 69 nt, Homo sapiens
agccgacaaggagaagcgcagcagcagaagcgcagaggggagaagcgcgaaagcagagaaggcagaagg

SEQ ID NO: 91653 - RNA, 76 nt, Homo sapiens
gccgggagacagccggaagcaaggcagaagaggccgcggagaccgacgcggaaaaaaagacccaggaggagcaaca

SEQ ID NO: 91654 - RNA, 76 nt, Homo sapiens
gggcagaaaaagcggaacagaggcaagcacggacagaaaagagcaccggccagaacaagccaaggagccaagacga

SEQ ID NO: 91655 - RNA, 88 nt, Homo sapiens
gccgcccagacgcgcccgcgggcccggccacggcggagccaagccaccaggagagaacgccgcgccgcgcgacaacggcccggcaggc

SEQ ID NO: 91656 - RNA, 81 nt, Homo sapiens
gggacagcacgcagcgaaggaagccgcgagcagaacgcgccagcaacacgggcgaccagcgagagcaggacggcgaccagg

SEQ ID NO: 91657 - RNA, 71 nt, Homo sapiens
acgagcccccaccccggcaagaaaggggccccaggggcgccacagccgaggcagcccggggggccccccga

SEQ ID NO: 91658 - RNA, 80 nt, Homo sapiens
ggagaggaagcagaaacaagggcacgcagaggagagaaccaccagccagcaggcaacaggcccagaccaggcccaaagag

SEQ ID NO: 91659 - RNA, 77 nt, Homo sapiens
gacgccaccccgcgcgcgcgcccccgcgcgcccccaggccggaccagcaagaaggaagagcaagcacaacaaaagga

SEQ ID NO: 91660 - RNA, 82 nt, Homo sapiens
ccaggaagagggacggaaccaccagaagccagcccccaggcggaacgcccgccccgcagagagaccccaacgaaacgaagac

SEQ ID NO: 91661 - RNA, 47 nt, Homo sapiens
ggagaaggaggccacggggggccggagcaagggaacaagaggacccc

SEQ ID NO: 91662 - RNA, 74 nt, Homo sapiens
gagggaaccgcgacggcacggccccggcgggggccgcagggcacccgccagcagccagcaacaccgccagcggc

SEQ ID NO: 91663 - RNA, 74 nt, Homo sapiens
aaaggaaggaaaagaaagaaggaccccaaggaaagaaaagacccgacgacacagcccaaaagggaaccggacaa

SEQ ID NO: 91664 - RNA, 78 nt, Homo sapiens
aggggaagccaaagaaggccggcaggccgcccagcgccagcggggcccccaagcgcccccccaccccaccaccggaca

SEQ ID NO: 91665 - RNA, 77 nt, Homo sapiens
accgacgccgccgcccggccaccggcgggcccgaggagagcgcggagccgcgcccccggaagggggccagcagacac

SEQ ID NO: 91666 - RNA, 81 nt, Homo sapiens
gaaggagggcaaagagaagaaggagaagcacaagaccaagacagccaacagccaaccgcaaagagagcaaacgccgagaag

SEQ ID NO: 91667 - RNA, 50 nt, Homo sapiens
cggccccccggacagacgccgacgcccagcaaggagaggccccggacagg

SEQ ID NO: 91668 - RNA, 75 nt, Homo sapiens
ccgcgcgacggcgacgcgggaggccagcaaagcgggccagacacgaagaggccggcgaaggaagaaggaccagcc

SEQ ID NO: 91669 - RNA, 47 nt, Homo sapiens
gggaaggcaagagccaacccaaaaccaaggagcggcgacagacacgg

SEQ ID NO: 91670 - RNA, 55 nt, Homo sapiens
cgggaagagaagacagcagagaaccacaaaaccgcaagcgggagaagaaccagag

SEQ ID NO: 91671 - RNA, 74 nt, Homo sapiens
caagcaccgacggaaacaggcgaaaaacaacgacgaaggaagaaaagcagaagaggcggccacccacgagccga

SEQ ID NO: 91672 - RNA, 79 nt, Homo sapiens
gaacaacaccagcacagcgcggcacaagaagacggcccagccgggaaggccccgggaaagagagcacggcaacagcgcc

SEQ ID NO: 91673 - RNA, 52 nt, Homo sapiens
aacagaaaacgcgaccaccagggcagaaagaaagcaggaccagggggaggga

SEQ ID NO: 91674 - RNA, 47 nt, Homo sapiens
ccgcccgagcccacagccccacgccagaggcgggaggcggcagaagc

SEQ ID NO: 91675 - RNA, 61 nt, Homo sapiens
agaacccagaggcgggaggggccgggaggcagaggggcagggaccggagaagaacaagccg

SEQ ID NO: 91676 - RNA, 89 nt, Homo sapiens
ggagcgggccaggcgcggagagaacaagagaacgggcaacccagaccacacaccggacaaggaaacaggaaagcccaaaggcgagccac

SEQ ID NO: 91677 - RNA, 83 nt, Homo sapiens
cgcgggccccagagggccgcagccgagcgccccgcaccgccaacgcgcccgacggccaggaggcgaagagacgaggaagccca

SEQ ID NO: 91678 - RNA, 76 nt, Homo sapiens
gacgagcaacccagcgccgaaacggagcgcgccccaccgcggccgccggggacacagagcccccggggcccgggga

SEQ ID NO: 91679 - RNA, 79 nt, Homo sapiens
gccgcgcgggagagggccaccgcccgccacccgcgcgccgccgccgaggagaaagagaaggacggagaagcgaaagcca

SEQ ID NO: 91680 - RNA, 73 nt, Homo sapiens
agaaggcagggggcacccagggcggagaacggaaaagcaccaggaagcagagaggaccgcagaagggaaggag

SEQ ID NO: 91681 - RNA, 67 nt, Homo sapiens
gcacagcaccggaccaggccagaggaccaaagaaaacagcgagggagaaaccacccacacagcagaa

SEQ ID NO: 91682 - RNA, 95 nt, Homo sapiens
cccaggaaaaagacagcccgcagcacgaccagcaggaacgcaaacggggacagcgccgaccggaacagggaccacggaagcccaggaccagcccc

SEQ ID NO: 91683 - RNA, 81 nt, Homo sapiens
cagacgccaccacgggcacccgcgccgggcaccgaggaccagccaagacaggagcacccgccccaccccccacaccaccgg

SEQ ID NO: 91684 - RNA, 84 nt, Homo sapiens
gggaaccgcacgcggcgggggaagaccagcggccagcaagcacaaagagagagagaacgcccccacagaagcaagcagcaggac

SEQ ID NO: 91685 - RNA, 80 nt, Homo sapiens
cgagaggacggagggggcccgacaaagcccccaagagaggaccaaagagcaggcaaggaacacggaacaccacccccagc

SEQ ID NO: 91686 - RNA, 68 nt, Homo sapiens
gggggcggcccgccccggacccgagcagaggcccaacccaaagcaagacagacgggaaggaggaacgg

SEQ ID NO: 91687 - RNA, 73 nt, Homo sapiens
cggcgaccgaggcagccccccaaagcccggccccacaggccggggggggcacagagccccggaagacagcccc

SEQ ID NO: 91688 - RNA, 76 nt, Homo sapiens
cgaacgccaaaaaaccagccacccggcaggaacaaagcggaaaagccagggcggaaaccggcaagaggaagagaaa

SEQ ID NO: 91689 - RNA, 70 nt, Homo sapiens
agaaagggaaccggagaagagagagaaagaccaagaacccaacaggacaccaggcccacaaagcacaagc

SEQ ID NO: 91690 - RNA, 71 nt, Homo sapiens
cgcggggaccgaaaggacagaacaggaccggaaagggcgaagagagaacacgcacggaaggaaggagacca

SEQ ID NO: 91691 - RNA, 77 nt, Homo sapiens
acggaaccggagcaggccggcgccacccgggcccggggcccgcccaccacaaaccaccaggcagcccaaggaggcac

SEQ ID NO: 91692 - RNA, 94 nt, Homo sapiens
cggcgcgggcggggcggaggcgaggagaaggaggagcgggccgggaggccgccgccagcaaggcgccaccggaagaaacgggaggggaggagcc

SEQ ID NO: 91693 - RNA, 78 nt, Homo sapiens
cgcggaccggcgccccggcgcgaagaggcggaccggacggccgagaaaggggagcaagaagaaagagcagggaggagg

SEQ ID NO: 91694 - RNA, 55 nt, Homo sapiens
cgaagggggaacaaagaggggggaaggagacgcacacccacaccgggcaacaggc

SEQ ID NO: 91695 - RNA, 98 nt, Homo sapiens
cggaaggccagcacccaaagggcgggccagagccgaaggacacccgaggaggaacgacgaagcgggacgggggcggccccgggaacgccggcagcacg

SEQ ID NO: 91696 - RNA, 83 nt, Homo sapiens
gcagaggccagaacaacagccggccagagccggacccggagcccggcggcccccaccagccaagcggagacccaggaagcgca

SEQ ID NO: 91697 - RNA, 77 nt, Homo sapiens
ccagccgagaacacgcaggcgccgcccacagcaggcgcccgccagggaacagccggcagggcggaagaaacgggcag

SEQ ID NO: 91698 - RNA, 71 nt, Homo sapiens
ggagccgggacacgccagcgcgggcccagggcggacaccccagggcgcagacaccacccgcggccgggggc

SEQ ID NO: 91699 - RNA, 79 nt, Homo sapiens
aaaccagagaagccggcgagacagccgaacgccggaagcacaagaggggcaccccccaccccgggacaccccagggcac

SEQ ID NO: 91700 - RNA, 61 nt, Homo sapiens
agcggaacaggcaggccagcaagcacaccaggccacgacaggaagaagccacacacagaag

SEQ ID NO: 91701 - RNA, 76 nt, Homo sapiens
cggcgggggacgggccccggcgcagaagcagggacaggggcagagacgagcccggcgacgagaccggggagggagg

SEQ ID NO: 91702 - RNA, 36 nt, Homo sapiens
aggccccccagccagggaacagagaccaggcaccag

SEQ ID NO: 91703 - RNA, 69 nt, Homo sapiens
agaggagggagaacacagaaacccgccccggaagagagaagaagcaaaccgggaccggaagcaccaagg

SEQ ID NO: 91704 - RNA, 69 nt, Homo sapiens
cggggagacacccgagggaggaacaaagccccaccaaaggggccgcccgaaagaagcccggaggggacg

SEQ ID NO: 91705 - RNA, 52 nt, Homo sapiens
ccaagcgaacggagagccagccgggagggacccaacagagggaccaagcaag

SEQ ID NO: 91706 - RNA, 77 nt, Homo sapiens
acacaacagggcaaaggccccgacagccgcggcccaggagcccgccggcccggcccccggccgcccgggccgcgccg

SEQ ID NO: 91707 - RNA, 72 nt, Homo sapiens
ccgcccacacccagaaaagaaggaacccgacaagagcgggaacagagccaaacggggacgcaagagaaagaa

SEQ ID NO: 91708 - RNA, 66 nt, Homo sapiens
gacggcgaggccccagaccacacgaagcagaccccacgagcgaaagggaaaaaacgaaggaggcag

SEQ ID NO: 91709 - RNA, 70 nt, Homo sapiens
acggagccagacacaaaacggacgaggaaaccggagaagccgcgaggcagaaaaccaagaaaaagccgaa

SEQ ID NO: 91710 - RNA, 76 nt, Homo sapiens
acaacaggaggagaaggagcaacaccagcaacacagccggccgaggaaggaaagaggagccgaacaaccaaaaacc

SEQ ID NO: 91711 - RNA, 51 nt, Homo sapiens
gcccagccccgagagcgggaacagggagcccggaaagcacacaaccaccac

SEQ ID NO: 91712 - RNA, 91 nt, Homo sapiens
gaagggcgcaaagcagcaccaaagcacgcccaaaggccagagcacagcgccaaagcaggagcaccaggccaagaaccccaaaaacagcagc

SEQ ID NO: 91713 - RNA, 73 nt, Homo sapiens
ggaagaacagaaaaccagagaagggaaacgacacgagcaaaaacgggacaacaggcacaaagagagaaggaac

SEQ ID NO: 91714 - RNA, 72 nt, Homo sapiens
agaggggggagacggggaggacaggccagcgcggccaagacccgccgcaaggaagagcccagacacacagag

SEQ ID NO: 91715 - RNA, 72 nt, Homo sapiens
caaaagagaaacccggcaggcccagaacacagcaggcaccgcaagaacagggcaggccacaacgccacaacc

SEQ ID NO: 91716 - RNA, 73 nt, Homo sapiens
gcaccccaggcaggccacggcaggaccgggcaggagacaggccggacagacagaggcgggcgagcggacgaaa

SEQ ID NO: 91717 - RNA, 86 nt, Homo sapiens
aaaacaagagccccaaagcagccaaaaggccgaagaacaggagaaggaagaacaaagaaagacagaggaaaggagaaacagaacaa

SEQ ID NO: 91718 - RNA, 67 nt, Homo sapiens
acacccaagggcagcgggggaaagcaagaaaccggacccaagacgcgaccagagacgaggcgcacag

SEQ ID NO: 91719 - RNA, 55 nt, Homo sapiens
cgccccacccgagcagagagaaagccgaaaaccagccccgcccacacacaccaac

SEQ ID NO: 91720 - RNA, 73 nt, Homo sapiens
cgaccggaaaaggccagcccagcaaagacagccgcaaaaacacagaagcgagaaagacagcaaagaaaaggag

SEQ ID NO: 91721 - RNA, 66 nt, Homo sapiens
aacagacaagacaccagaaagacagggaccaagaaaggcccagggaccaaagcccggacaaggccc

SEQ ID NO: 91722 - RNA, 85 nt, Homo sapiens
agaccgggcacagcaaagcgaggaccagaccagccgcaagaagcagaggccaggaggggcccagcccggccaggaggcggcggaa

SEQ ID NO: 91723 - RNA, 76 nt, Homo sapiens
agaaagagggcccccagacccagaaacccacagaaagacaccgagcggggccaggcagaagagagaaaaaccagaa

SEQ ID NO: 91724 - RNA, 82 nt, Homo sapiens
ccgaccgagcgggaggccacagcagccagccggcccgaggacaccgacaccagcaggccccaacccgcccagccagccacgc

SEQ ID NO: 91725 - RNA, 82 nt, Homo sapiens
aagggccaagcccacgcagagcaaagcggagagaccacaggaacagggaaacaagccagaaacccaacgccacgaacaagaa

SEQ ID NO: 91726 - RNA, 71 nt, Homo sapiens
cgggccggccccccagcccccaccacaggagcacgggaagacagagacagagcgaagacgaagaaaggacg

SEQ ID NO: 91727 - RNA, 58 nt, Homo sapiens
aagagagccggccaggacacacaggcccagacggagcggacagacggaagaagaagag

SEQ ID NO: 91728 - RNA, 64 nt, Homo sapiens
cggaaccgcacaaagcagacaacaaaaagcagccaccagcacggacaacaaccaaggcaaccag

SEQ ID NO: 91729 - RNA, 70 nt, Homo sapiens
cagcggaaaacacagggaacccagcacacaggacggcgcgagccggcccggccgaccagaagaagggccc

SEQ ID NO: 91730 - RNA, 80 nt, Homo sapiens
gcaagacgcgaccaaagccgacggggcaagccaggaggcccagcagcggggagagccagccccgacacccaggggcgaag

SEQ ID NO: 91731 - RNA, 89 nt, Homo sapiens
gcgggagcgcgaacgagcgacggcggaacccggggccgggacgcagcccggcggcagcagaccgcaacaccagaagggaaagaaaccag

SEQ ID NO: 91732 - RNA, 70 nt, Homo sapiens
ggaaaacagagaaccaagcggcaaagcaccgaacgacaacaggaaggaagccaccgcacgaggagaagaa

SEQ ID NO: 91733 - RNA, 86 nt, Homo sapiens
cccggggccccgcggcgcaggaggcggggagcgcagagcgggcgagcgcgcaccagcagacggaacaacgagagaaaacggggaaa

SEQ ID NO: 91734 - RNA, 80 nt, Homo sapiens
gacggagacggaaagccgggacaggaggagcggcggaagacgaacaagaagggggccgaggaacccagagaagaagaacg

SEQ ID NO: 91735 - RNA, 82 nt, Homo sapiens
gacaaggcgaccaaccaacaaccacgggaagccgcggccccaagcaccagcccacaccacaagaagaaacaaccgaccgaac

SEQ ID NO: 91736 - RNA, 71 nt, Homo sapiens
cgcggaacgcccaccgcggagagcagcacgaccccagcacaggggccccagggacgacgagacaacagaga

SEQ ID NO: 91737 - RNA, 88 nt, Homo sapiens
ccacccccacggcccccggcgccccggcccccgccccagcccgccggcggcggcgggaagaagagagggcgaaggaggccacacagaa

SEQ ID NO: 91738 - RNA, 80 nt, Homo sapiens
agacaggccagccaaagaaaccagacccaccgagcgggaaggcacgaaccggaaccaagaccaggacaaagaagacccgg

SEQ ID NO: 91739 - RNA, 73 nt, Homo sapiens
ccaagacccagcggaacggcaggccggcacagagaagaagaaaaaaagagcacaaaaacacagccacgcacag

SEQ ID NO: 91740 - RNA, 54 nt, Homo sapiens
aagcaccgggacccaggacgaggcagagcaacagggacacaagcaagaagaaag

SEQ ID NO: 91741 - RNA, 79 nt, Homo sapiens
aaagacacgaagaggaggaagcccaggagcgacaacagacaaaaacaaggccaaagacaagcagaagccaggaaaaagc

SEQ ID NO: 91742 - RNA, 89 nt, Homo sapiens
ggcagccccgacaaaagcaaacaggcaagcagagggccgagacagcggaccaggcccagcagcaggcaggccgggcagcgcgaagcagc

SEQ ID NO: 91743 - RNA, 67 nt, Homo sapiens
caccaaacacgccggaaaccccgcccacagcacgagcccagaccaaccgcagcggaccgacaccacc

SEQ ID NO: 91744 - RNA, 34 nt, Homo sapiens
caagcacacccaaaacgcgcagggagcgaacagc

SEQ ID NO: 91745 - RNA, 54 nt, Homo sapiens
caggacggcgaggcgaaacgaagagacagaccagacaaagacggagccaggcgg

SEQ ID NO: 91746 - RNA, 74 nt, Homo sapiens
cagagagccccagcaggaaggccaccgagggaacccgaccggacccagccccagaagacgcaaacagcagacgg

SEQ ID NO: 91747 - RNA, 103 nt, Homo sapiens
cggcacaggggccaggcccgcggggggggggcggcccaccgggaccgccggggcggagaacggaaaagcaccaggaagcagagaggaccgcagaagggaagga

SEQ ID NO: 91748 - RNA, 54 nt, Homo sapiens
caccagaccccaccagcaacgggcgaagagagaacacgcacggaaggaaggaga

SEQ ID NO: 91749 - RNA, 73 nt, Homo sapiens
cagcccgacggggccaccgcggcggcgcccgcaccgcgcccgcaaaccgagaaagcgacaggcaggcccggac

SEQ ID NO: 91750 - RNA, 79 nt, Homo sapiens
ccgcaccagggaaagcagggccagagggaaggaaacagcaaccaaaggcaaagggggaaacaggacaagaaacaggaaa

SEQ ID NO: 91751 - RNA, 75 nt, Homo sapiens
gggcaaagacgcaagaagaagaccaacaggcaaggaaaagagagacgaaagcacaaaaccaaaaagagacgcaga

SEQ ID NO: 91752 - RNA, 76 nt, Homo sapiens
ccgcccgggacgacaccgggcagggcagagcacccgacgcacacaggcgaggccagaggacaggccgagcgccggc

SEQ ID NO: 91753 - RNA, 75 nt, Homo sapiens
aaagaagaaagcgaaaagcgagaaaccacgggaaacacagacccagagaaagagacaggaagggaaggggcggag

SEQ ID NO: 91754 - RNA, 81 nt, Homo sapiens
gggaaggcgcgaggaggaaaggaggacgagacccgagcccaagaagaggacgaaggaaacaagggcagcccaacccaagcc

SEQ ID NO: 91755 - RNA, 82 nt, Homo sapiens
cgggaccccaagccaaagaacccacacaaggacaagggaaagcggacagacaccgcgccccgaaaaacgaagagagcagcag

SEQ ID NO: 91756 - RNA, 76 nt, Homo sapiens
aggagcagaagaacaccgcagcgcaagcggggccaccaagcaggcgcacccaccaacgaccagagcagacgcacag

SEQ ID NO: 91757 - RNA, 71 nt, Homo sapiens
agcaccagcacgaaacgaccccccccaccaaagagaacgggaagaccacaaccagagcggccacccgaggc

SEQ ID NO: 91758 - RNA, 74 nt, Homo sapiens
cagcacacggcaggcacggagagaggcacccggacaagcaagcaaccaaccgccagcaaaagcgcaggaccccg

SEQ ID NO: 91759 - RNA, 71 nt, Homo sapiens
ccagcggaccagcccgggcagcgagaaggaagaaggggaggaagaaacgcagggaccacgagagagagaac

SEQ ID NO: 91760 - RNA, 74 nt, Homo sapiens
cggacgcgcagcaggcggggaggacgaggggcccgggcccagagcggaagacaagacggggaagaacacggaaa

SEQ ID NO: 91761 - RNA, 82 nt, Homo sapiens
aggcaggaccaaggagccacagaggaccgacgcgcgcaggcagaggagaaggcagcggacaaagaggagcccgcgggcgccc

SEQ ID NO: 91762 - RNA, 83 nt, Homo sapiens
cgagcgcacccggaccccaaccagccccgcaacccggaccagcagaaaccagagggacaaggcgaaggaaaacaacaggcaac

SEQ ID NO: 91763 - RNA, 75 nt, Homo sapiens
gaagcgggaggcaggcagccagggacggacaagggagggccaagaacccggaggagggcaacaccggacagcaca

SEQ ID NO: 91764 - RNA, 73 nt, Homo sapiens
cggaggaaccacgcccacggcccacacgcaagggaaaccccagagcgccagaaagagcaaaacacagagacgc

SEQ ID NO: 91765 - RNA, 80 nt, Homo sapiens
gaaagacaaaaggcagaggaggcgcggcaggaagagaaacggcaacaggaggaaaccaaccgaggaaagagcgcaagcgg

SEQ ID NO: 91766 - RNA, 101 nt, Homo sapiens
ggggacgaggccccccggccagaagcggccccgggcggaagacgcaggagcaaagagaggacgaacgacaccgggccccccccggcgaggacccacgcgca

SEQ ID NO: 91767 - RNA, 56 nt, Homo sapiens
cggaggccacagccacaacaacccaggggacagagcgaagaaccccccaagaagac

SEQ ID NO: 91768 - RNA, 58 nt, Homo sapiens
cgggcccgggccaaccgaggggcacgcagaggcggagaaaaccagagagcagcgggca

SEQ ID NO: 91769 - RNA, 72 nt, Homo sapiens
ccacccgacccggcaccacacgcagaacgggcggacgggcgcccagccagcagggcaggggcccagaagcag

SEQ ID NO: 91770 - RNA, 75 nt, Homo sapiens
caaagcgggagagacggaccagaccagggccgagcacagggaaagaccaggagcaggccaagggcgcagaaaacg

SEQ ID NO: 91771 - RNA, 54 nt, Homo sapiens
cggccccccgcgcacggccagcgcagggcaacaacacggcaccacacaagcgaa

SEQ ID NO: 91772 - RNA, 77 nt, Homo sapiens
acaagggaggagaagacaagcaaaaagacgggaaacggcaaagggcaagcaacaggaggcaaacacgccccggggga

SEQ ID NO: 91773 - RNA, 72 nt, Homo sapiens
gcggcagagggcggaagacgcacgggccaggaccaagacgaggccccagacgacccgaccccagcgaaagag

SEQ ID NO: 91774 - RNA, 74 nt, Homo sapiens
gacaaaagggccaaagaagggagagaggaacggaaggaagccgaggagacagcccaaccgccggagaaagccga

SEQ ID NO: 91775 - RNA, 71 nt, Homo sapiens
gaaaaacagaaccacccaaacaaaagagagggcggcccagcgcgcggagggagaagaggcaacggcaagac

SEQ ID NO: 91776 - RNA, 76 nt, Homo sapiens
ggaggagcggggagggggacacacaaccgcccagccggcgagggacgccgcaggggaggcggcgccggcccccgcc

SEQ ID NO: 91777 - RNA, 71 nt, Homo sapiens
caaaaggggaacaacacagcccccccaacagagcgcaagacagaaaaagcggggaaaacaaaaaaaagaag

SEQ ID NO: 91778 - RNA, 80 nt, Homo sapiens
cggacaagagaccacacccaggaagccaggcacgcacagcagagggaaggaaggaacagcagcgcaaaaagagcagcaga

SEQ ID NO: 91779 - RNA, 80 nt, Homo sapiens
cggccgcgggcggaagacaggccacccagcggggagcacggcgagcagccaggccaggagagaccccgccccccgaggcg

SEQ ID NO: 91780 - RNA, 59 nt, Homo sapiens
accgccggaagagaacaaggcaaaaccaccaggccaaacagggccccccaggaccgcgc

SEQ ID NO: 91781 - RNA, 73 nt, Homo sapiens
gacggggcgccccacagaggggcgacggcaacaaccaagcgacagcaggccaggcaacaccacacaaggaacg

SEQ ID NO: 91782 - RNA, 68 nt, Homo sapiens
gcggacccagagcagggaagcagagacccacggcagggggaggccgggcgggggcagccccccccgcc

SEQ ID NO: 91783 - RNA, 52 nt, Homo sapiens
ccacaggagaaaggggaaagaagaacaggacagggcagaccgccagcagcac

SEQ ID NO: 91784 - RNA, 34 nt, Homo sapiens
aagaaagcagcccagggagagcccagcaaaaagg

SEQ ID NO: 91785 - RNA, 71 nt, Homo sapiens
cgaccggggcggaacccggcgaccacgccccggggcagcaggcgaccagcgccacggacagagacggagaa

SEQ ID NO: 91786 - RNA, 66 nt, Homo sapiens
agaggcacaccacaagccaggccaaaagcacagcaagggcaaagcccggaagagggaaggggaaac

SEQ ID NO: 91787 - RNA, 83 nt, Homo sapiens
acaccaagcggaaaagagcagcgcccagccccagcagaagacggaacgacaagagagagggaccaagagacacgagaaaagag

SEQ ID NO: 91788 - RNA, 63 nt, Homo sapiens
gcaccgcggaaacgacaccagaccaggcaacacggacagggggaacgggggcaccgcgaccac

SEQ ID NO: 91789 - RNA, 75 nt, Homo sapiens
aaagcgaaaagagaaccccccagcaacggaaaggaaggcagggagagaggagagagaggaacagggagcggggcg

SEQ ID NO: 91790 - RNA, 80 nt, Homo sapiens
gacggcgcgcgcccgaggcgaggaggagcgcggcggggaaggagggcgaaacaaaggaccagcacgggaaccggccgccc

SEQ ID NO: 91791 - RNA, 79 nt, Homo sapiens
gcgggaggccgcccagaagcggcgcgcacggacgcggagaggggagccgcagcacacacgcagggcccgcgaggcagcc

SEQ ID NO: 91792 - RNA, 71 nt, Homo sapiens
aacaccaggaggaagcacacacaaggaacccccggagagaccccccgaacccccccaccaccggaaggccc

SEQ ID NO: 91793 - RNA, 72 nt, Homo sapiens
agaagccaggaacaaagacaacaacccacgaaagccacgacgacgggcggcaaccaggggcccggagaccgg

SEQ ID NO: 91794 - RNA, 78 nt, Homo sapiens
ggacaggagagaagaagaagaaaccggagaaggaacagaccccggaggaggggaggccgaagacagcaccacaccagc

SEQ ID NO: 91795 - RNA, 73 nt, Homo sapiens
agagccaggcaccaggacagcggcggcgggccgggcagcccggccgacaaccacggggccaaggagaccgcac

SEQ ID NO: 91796 - RNA, 78 nt, Homo sapiens
ccagaagcaggcccccagccgcagccacaacaccggcaggaaccaccaggacagaccacagcagccgaagagagagga

SEQ ID NO: 91797 - RNA, 79 nt, Homo sapiens
gaggccgggcggcgaaggggcagaggcaaggcgggaccgacgcaggaagcccgagcaccgacgagaccagaagggcaga

SEQ ID NO: 91798 - RNA, 84 nt, Homo sapiens
acgaggacgggcgggggagccagaccgggggcagggagaaacaaaggcagcgcgccccgggggagcaggcccggcggaacgcag

SEQ ID NO: 91799 - RNA, 86 nt, Homo sapiens
gggagcgccgggacgcggagcccggagcggggcgacgaggcgagcgggggccgggcaggaacaggacggacgagaagccaggacag

SEQ ID NO: 91800 - RNA, 53 nt, Homo sapiens
caaaccgcggaaggacaagcaggggcgcagggagcaaaaaggggaaaacccag

SEQ ID NO: 91801 - RNA, 83 nt, Homo sapiens
caaaagggcgcggcaagggggcagggggaggagcagaaacacagcaggacagagggcaaaacagagcgagaaaaaggcacggg

SEQ ID NO: 91802 - RNA, 72 nt, Homo sapiens
gacggaggaagggggccaccgaggaccgcccaggcaacacgacaggcacggaccccaaaacaacaaacgaca

SEQ ID NO: 91803 - RNA, 64 nt, Homo sapiens
gaaggaccaagaaccagaccagagggaagcagaaagcaagaagcaaggagaggccacggaggaa

SEQ ID NO: 91804 - RNA, 74 nt, Homo sapiens
cacccccgccgcaccccagcagacacgggcacgccgaacgggcaccccgggcggaaaagagggaaggcgacacc

SEQ ID NO: 91805 - RNA, 76 nt, Homo sapiens
gcaaggagccgacagggggacacagccaggacacagccagaagcggaggggggccaaagggcgagggcacaaaaaa

SEQ ID NO: 91806 - RNA, 77 nt, Homo sapiens
ggacagccgcaggagccgggacacggcaggccagaggaccagaagcacgcaggaggacacgaagagaaccggcaccc

SEQ ID NO: 91807 - RNA, 85 nt, Homo sapiens
caaggccggagaaggccgccgggcccgggcaggggcggggcaacgcggaagccaccagccccaccaagacgggacaagcagggag

SEQ ID NO: 91808 - RNA, 83 nt, Homo sapiens
agaggccagacccccccggcacacagagcagaacaagaccaagaagccggagaggagaccgaagagagaaccaagaaaacgaa

SEQ ID NO: 91809 - RNA, 80 nt, Homo sapiens
ggagcagggagaagagaaagagacgcagagaggagcgggaaggccccgcacccggagaccgggggaagacaagcacaaga

SEQ ID NO: 91810 - RNA, 75 nt, Homo sapiens
acaccacccggagaggaacgggcgacgggcgcggccaggggagcaaaggacggaaaaccaaaagcagccaagagg

SEQ ID NO: 91811 - RNA, 76 nt, Homo sapiens
acgccggcggcggccaggccccaggacagggaggacgaccgcagccaagggggaagcaccacaccccggaccccaa

SEQ ID NO: 91812 - RNA, 68 nt, Homo sapiens
agccagccggcacgccaccgacaagcaagccgaagagaaagggacagacaggacgagaggacagaacg

SEQ ID NO: 91813 - RNA, 71 nt, Homo sapiens
cagggcagcgagcgcaaacccaggccgagggaggcaaagaggagacggacgcgaagacacaggcagccaaa

SEQ ID NO: 91814 - RNA, 85 nt, Homo sapiens
aggaggacgaggagagacagaagaagcggaggccggcaaagccaagggacagacaggacgagaggacagaacgaggcaaccaggg

SEQ ID NO: 91815 - RNA, 55 nt, Homo sapiens
ggcccgccaccagagcacacaggcagccgccgcaaagggacgacgaagggacagc

SEQ ID NO: 91816 - RNA, 97 nt, Homo sapiens
agcccggagcccaggcccggccacaggcccgcccaggaacacgagcccaaagagaacccccgagggcgggaaacggcaagagaccagaggacccaaa

SEQ ID NO: 91817 - RNA, 81 nt, Homo sapiens
acaagccaacaacaggacggaagccccaacacggaaaggcagccacagcagaggaaagagggaaagacaaaggccagcaga

SEQ ID NO: 91818 - RNA, 83 nt, Homo sapiens
gacgccgccggcaggcccgcgcaccagaacagagaacgaggaagaaaaggaaacccaaaaagacaaggccaagcagcaaaacc

SEQ ID NO: 91819 - RNA, 64 nt, Homo sapiens
ggcccgggcaccacgggcggcgccaggccggcccaagaaggaccaggagggccagagaaccggg

SEQ ID NO: 91820 - RNA, 79 nt, Homo sapiens
ggggcgagcgagcaccgagcaacacacgcagcggaaggagagacaggaagggcacagaaacggcgcgagggcagggaag

SEQ ID NO: 91821 - RNA, 77 nt, Homo sapiens
agcgaaaaggagcacgccaggcgaccacgagcccccaggccgagacaacgaacagacagcagcccacaaccccaggc

SEQ ID NO: 91822 - RNA, 79 nt, Homo sapiens
gccaaccccggggcacgcgcccacaggcgcagaccaaacacggcagaagacgggcccgagcaggagcccagggaccgga

SEQ ID NO: 91823 - RNA, 70 nt, Homo sapiens
cggaagagcagagagaaggcagggcaaaccagaaagacgcccacaacaagggaccggaacgaacaaaaag

SEQ ID NO: 91824 - RNA, 69 nt, Homo sapiens
aaaaaaacaaccaacccacagggcgaaggggcacacgagcgaggggggacgaaggaagccaagggggac

SEQ ID NO: 91825 - RNA, 71 nt, Homo sapiens
caggccggagggcacacacaacacagcaacagacagaaacaccagacagcgacagaaggaagaaaccaaac

SEQ ID NO: 91826 - RNA, 51 nt, Homo sapiens
ccccggagcgcggcacgaggcgggccgagccggggccggacgagaaagccg

SEQ ID NO: 91827 - RNA, 65 nt, Homo sapiens
ggccaaacaacaagcagaacaaacgaggcgaaggcgaggaaggaaggaacaggagacccagaccc

SEQ ID NO: 91828 - RNA, 41 nt, Homo sapiens
gaggaccagggcgaacaccgcgaagcagaaagaacggccaa

SEQ ID NO: 91829 - RNA, 71 nt, Homo sapiens
ggggaccagccacaggaggcggccgcacaaagagcacgaaggaagaggcccggaaaggaaggggggaaagg

SEQ ID NO: 91830 - RNA, 38 nt, Homo sapiens
ggacaagaacaacacacgagcagacggcagggacgcag

SEQ ID NO: 91831 - RNA, 81 nt, Homo sapiens
gagaaagcgcaagagcggcaggcacggcagcaagcaaaggaggaaaaggccaaagcgacaagaaagagaaacagaaggaga

SEQ ID NO: 91832 - RNA, 71 nt, Homo sapiens
ggacaacagcacaagcggcacaggcccaggaggacccgccggacaaaccaccagagcagagcggggaaccg

SEQ ID NO: 91833 - RNA, 78 nt, Homo sapiens
gggcacaggcaaaggcacgacccagaaagccaaggggccgcaaggccaggcgcgcagaggcacccaacggcacagacc

SEQ ID NO: 91834 - RNA, 79 nt, Homo sapiens
agcccccagggcacgagcccagcacaaggccagcccgacccgggaagaaggaaggccacccggcaaaccacagccggaa

SEQ ID NO: 91835 - RNA, 78 nt, Homo sapiens
agcagagccagggacggagagcaggcagcaggggaaccgcgcgaaggacacaccaccggacacaaggagagaacacgg

SEQ ID NO: 91836 - RNA, 70 nt, Homo sapiens
cggagggcacaaaacaccaggacaaagaagggacacaccaagcaaagggccgacacgcccccgaccgcca

SEQ ID NO: 91837 - RNA, 74 nt, Homo sapiens
aggcagcgaacgggaaagaacaacgacacgcaccacaagagagaacagccacccccgccccacgcaggggggaa

SEQ ID NO: 91838 - RNA, 70 nt, Homo sapiens
caggaagccgaggagagccgaggaggacaccaggagccgccgcggagaggccggaaggaccacggaaacc

SEQ ID NO: 91839 - RNA, 76 nt, Homo sapiens
ggaacagggagcgcccggcgcacagcgccaggccgaggcccaccgcgcgaccccaaacgccgcacacagccaggaa

SEQ ID NO: 91840 - RNA, 78 nt, Homo sapiens
gagaccggaccgagagcggaccgagagcgcgaaacgcacgagaagcccagaggaagaccccaggggaagaacagaacg

SEQ ID NO: 91841 - RNA, 73 nt, Homo sapiens
agcccccccagcccgcgaggccgaggaagaagccccaggggcaacgacccaggggagaagcacgggaggaccc

SEQ ID NO: 91842 - RNA, 70 nt, Homo sapiens
cgacaagaggccgggcgccccgcaggacacaagaggagcaacacccaaggagaaaccaccacaggaacaa

SEQ ID NO: 91843 - RNA, 51 nt, Homo sapiens
ggccccagaccacgccacagcagagcccccgcaaggggccggcacgggaaa

SEQ ID NO: 91844 - RNA, 66 nt, Homo sapiens
ccaccgccacagagggcacagggggggagcacagcgacgagggaacagaggcacagaaaagaaggg

SEQ ID NO: 91845 - RNA, 55 nt, Homo sapiens
ggaaggagcccagccccgaccaagcagccccccccacccggcacccgccagcaag

SEQ ID NO: 91846 - RNA, 67 nt, Homo sapiens
aggagccccagcgaaggaaagcggaacgacgacaccgagcaggaccaacacaagaagacaccaaagc

SEQ ID NO: 91847 - RNA, 76 nt, Homo sapiens
caagcccaagagccgcccaaaggaaaaagggcggaaaagcggggaaagaaagcccccaggacccaagccaccaggg

SEQ ID NO: 91848 - RNA, 79 nt, Homo sapiens
gaaagaacaggccagaaaacagaaggccacgcggaaacaaggcgaccccagaaagaaacccgcgccagagagccaaggg

SEQ ID NO: 91849 - RNA, 57 nt, Homo sapiens
gaaaacggaagcgcagggagaaggaagaggggaaaagaacaaagggcaaaggacaca

SEQ ID NO: 91850 - RNA, 59 nt, Homo sapiens
agcgcagcaaagaacacagaggagcgagaagcggcccgaaaggagaaaaagcaaagaaa

SEQ ID NO: 91851 - RNA, 81 nt, Homo sapiens
cacagaaggacgggagaacaccccacagggaagaggagcccggaagcaggaagaggagggcaggcacgcagccagcagcag

SEQ ID NO: 91852 - RNA, 55 nt, Homo sapiens
aggggccaagaaccgcaagggacccagacaggagcgcgggaagaagccggcccgg

SEQ ID NO: 91853 - RNA, 58 nt, Homo sapiens
ggggggggccagggagcccggaaggacagggaacaaaggcagagaaacgcaccccaga

SEQ ID NO: 91854 - RNA, 70 nt, Homo sapiens
ggcaaaccagaaagacgaagagcccaaacaaggagcacccagacggccggcaaaacagaaaggcgaacag

SEQ ID NO: 91855 - RNA, 40 nt, Homo sapiens
gcgccgaggagaacccagcggaaagcaaggcaaaccaggg

SEQ ID NO: 91856 - RNA, 73 nt, Homo sapiens
cgcgccccgcccggaccgcgcagaaccagggcggcggccagcgccacgcaaagcaccgggaggaaagagagcc

SEQ ID NO: 91857 - RNA, 96 nt, Homo sapiens
ccgggagaggccgcggcggccaggccccagacacagacgagcaggggaagggcggagaacggaaaagcaccaggaagcagagaggaccgcagaagg

SEQ ID NO: 91858 - RNA, 111 nt, Homo sapiens
gcccggggccccacccggccccgccgagcgcgccggaccggcgcccggacaacccgacgccaccccgccccaccgaggccggcgggccacagcaggcgccccgccggagaa

SEQ ID NO: 91859 - RNA, 79 nt, Homo sapiens
acagcccagcgcggcaagcccccgagggccagaagcccccaggaggagaacgagcaacggaagccagaagaagcacccc

SEQ ID NO: 91860 - RNA, 73 nt, Homo sapiens
gaggagagggcagacggacaagagcgcggaacaggacgccccgacggcccccccgagaggacgcccgggacgc

SEQ ID NO: 91861 - RNA, 65 nt, Homo sapiens
gaagagcggcgagcgacagcaaacaaccgaagcgccggccagaccaggcgagccgagagagagga

SEQ ID NO: 91862 - RNA, 68 nt, Homo sapiens
aggggcagggcaaccagccccaggacaggcacccgaaagagcgaaagcccagacaggaagcaacgagg

SEQ ID NO: 91863 - RNA, 79 nt, Homo sapiens
caaagccgcccagacggccaccggcgggaggaacaaaaggcaccaagcagccgaagagaaacaagggacagcagacaag

SEQ ID NO: 91864 - RNA, 36 nt, Homo sapiens
cccaaggaaggacccgccagcaaccaaaaccacccc

SEQ ID NO: 91865 - RNA, 73 nt, Homo sapiens
gaaaggggagcgaggaaaggggcggccgaggccaggcaggcaggggcagaaggcgacccagcgcagagcaaac

SEQ ID NO: 91866 - RNA, 69 nt, Homo sapiens
cgaggggaaggggaaacccaaacaacacccgcaccgggcgccccgcagacgagacccacccaccagcac

SEQ ID NO: 91867 - RNA, 75 nt, Homo sapiens
ccacccaaccggagccagacaccacgcagagccacgggcccgggaaccggaccagaccggcccagaggagccccg

SEQ ID NO: 91868 - RNA, 55 nt, Homo sapiens
agcccaagaaacaccaccaacaaacgcgagcaggcgacccaaaagagcgaaggaa

SEQ ID NO: 91869 - RNA, 76 nt, Homo sapiens
caggacaggagagaaagacgcccgacaaaccgcaaggcaacgaagcaccgccgggacaggccacagacgagaggag

SEQ ID NO: 91870 - RNA, 94 nt, Homo sapiens
agacggagcaaagcccccacgcccagccaggagcaccgccgaggacccagcacaccgaggggaggcggaaccaacccccggccagggaggggcc

SEQ ID NO: 91871 - RNA, 77 nt, Homo sapiens
gcagggcgccaaagcgagagagggaagcgcccggccagccgaagagagaaacccccaaagaagagccccccaaagca

SEQ ID NO: 91872 - RNA, 76 nt, Homo sapiens
ggaacccaggaggccagagagccgaccggaggacgcggagaaccggcacagcccccgggagccagggcagaaaccc

SEQ ID NO: 91873 - RNA, 65 nt, Homo sapiens
cagcacgaccaccacggcacgcagacccagacaacgccagaaaaccagagaccggccagaagaaa

SEQ ID NO: 91874 - RNA, 53 nt, Homo sapiens
ccggaaaaggccgaagggcacgaaagaggcaagagagaaagcgccaggacccc

SEQ ID NO: 91875 - RNA, 53 nt, Homo sapiens
cacagggaccaagcacccaagcacgagcccgaagggcccgcgggagagccgca

SEQ ID NO: 91876 - RNA, 79 nt, Homo sapiens
gcaacaccgcggcccacgggacccccaggagggacccgcagacagaaggacagagaagaacccagaaaaaagcaaggcc

SEQ ID NO: 91877 - RNA, 68 nt, Homo sapiens
gaaaggcggagggaccccaaaaaaaacaagaaccacggcacgaaaggagaggaccccaggccaggcgc

SEQ ID NO: 91878 - RNA, 77 nt, Homo sapiens
accggcgcgccccgcccggaccgcgcagaaccagggcggcggccagcgccacgccggacaaggcaaaaccagcaagc

SEQ ID NO: 91879 - RNA, 75 nt, Homo sapiens
ggagagacgccaggcaacggcacgccgagacggcccagacgcgcggcacaggcacgcgcgagccggggcgacccc

SEQ ID NO: 91880 - RNA, 82 nt, Homo sapiens
acacacaccccccaaagcgagaagccccagggacgacacaagaccaccaccaccgcggacggccggcgcggaagcggagccg

SEQ ID NO: 91881 - RNA, 80 nt, Homo sapiens
aaacaaaaaggaaaggagacaagcagagacgaaccaggcaaagggcggaagggcaagaaagaaggaaagcccaagaggga

SEQ ID NO: 91882 - RNA, 78 nt, Homo sapiens
agcgcccagccgaaagagggcagcccacagacacacccaaagcagcccacacagggcagacagaccgaaaacacgaag

SEQ ID NO: 91883 - RNA, 88 nt, Homo sapiens
ggaacacaacagaggggaagcccaacagagggaacacaaccagagggcaccaacaaggccagccagcagggcagacggccaggcaccc

SEQ ID NO: 91884 - RNA, 78 nt, Homo sapiens
caggggcggaggcggaggcagaggggaggcgcgaaagagcggggcccggcgcacccaccaccgccgcccacggcagcc

SEQ ID NO: 91885 - RNA, 56 nt, Homo sapiens
cacagcacagcacaccagaacagcggcagcgaaacagaacagaaggcccagcagca

SEQ ID NO: 91886 - RNA, 85 nt, Homo sapiens
ggggccgggacagccaagcacccgccgccggcagccgcggaaggaagggaccacagaccagcacgccggcgccacgaaccgagcg

SEQ ID NO: 91887 - RNA, 73 nt, Homo sapiens
aacacaaggggaaggggaaagcaacgaaaagagaacagagaagaggaccagcaaccgccccagcccagcgcca

SEQ ID NO: 91888 - RNA, 74 nt, Homo sapiens
aggggaggaggaggaggaagaggaggcaggggggaggggggcagcagaggagaggaggagggaggggaaaagga

SEQ ID NO: 91889 - RNA, 81 nt, Homo sapiens
ggaagaggcaaacagcgcgcaagaaaccgaaggggacccagcccggggacacaagcccccaagaccagagaccgaggaaga

SEQ ID NO: 91890 - RNA, 73 nt, Homo sapiens
ggcccagccgccgcacgggaacccaggggcacacccgaccaggccaaccgaccgcaagcgccagaggaacgaa

SEQ ID NO: 91891 - RNA, 81 nt, Homo sapiens
cccacaggagcgcccgcggaggagcgcccgggaccccacgagacccaggccccagggccgaagcggagcaggaaaaggacc

SEQ ID NO: 91892 - RNA, 81 nt, Homo sapiens
agcaagccgaggagaggcaagcaggaccagcgccccggcccccaacacgacagggcccacaggaaggggggagcggacacg

SEQ ID NO: 91893 - RNA, 61 nt, Homo sapiens
aacaccgcacaggcaggaggcaggccaaggccgcacacaaggcgacggcccggagccacac

SEQ ID NO: 91894 - RNA, 71 nt, Homo sapiens
gagagccagccccaaccgaacccagacgcagaaccagcgggccaccccccaccccagaggcaacagccgag

SEQ ID NO: 91895 - RNA, 69 nt, Homo sapiens
acacgcgacgggggagccgcgggagaaagcccgaacgcgggaagaacgaagaaggacaaaaaggagagg

SEQ ID NO: 91896 - RNA, 89 nt, Homo sapiens
agaaaacgcaaggagaaacccaagagcagcggcagagcaagcaccagaagcaccaggcgaagcagagcgcagccaacgcgaccggaccg

SEQ ID NO: 91897 - RNA, 100 nt, Homo sapiens
gcacacccgaaaagcgccaaggaaaaggacgagaacgccgcgacagaaaaaaacgcgcgaaaagcaggagaagagaaacaggacgcgaggaggagagagg

SEQ ID NO: 91898 - RNA, 73 nt, Homo sapiens
gacaagacgaggaagagaaggagcggagcgccaagcccggccaaaaaggacgcaccaaagaagacagacacgc

SEQ ID NO: 91899 - RNA, 75 nt, Homo sapiens
ggggccacccgcccagcgagagcagaaccaaccagcaggagcacgaccaaacagcagaagaagggccgggccggg

SEQ ID NO: 91900 - RNA, 77 nt, Homo sapiens
agagccggaggcagaggggggaccccggacggaccggcagaagagaccgacagcccacagacccagacagagggagc

SEQ ID NO: 91901 - RNA, 56 nt, Homo sapiens
gagccaccacgaccgggccagcgcaccgccccgcagcaggggacagaggcgccaac

SEQ ID NO: 91902 - RNA, 84 nt, Homo sapiens
gaaccaggaagcagccccaagacagccccaaggaagacgcaggggggaggcaaagaaagaagcccggaaacgggcggaagccag

SEQ ID NO: 91903 - RNA, 64 nt, Homo sapiens
cggccacaaaccagaggaggacgccggcccggcagaaaaccggggccgaaaaagagaaacaaga

SEQ ID NO: 91904 - RNA, 78 nt, Homo sapiens
gagcaaaccgcacagccgggcagaggcgccgggcggaccagcgcgggccagcacagccagaggagcaggccgaccaga

SEQ ID NO: 91905 - RNA, 74 nt, Homo sapiens
ccggacggaccgccacgcgcccgggagacgcccgcgccgccggacagagacacggagcgaagacgagaaggggc

SEQ ID NO: 91906 - RNA, 79 nt, Homo sapiens
cccagcccccgagaagcgggaacagccacggaagagcgaaggaacgccaaggcacgggcggccggcggccacaagggga

SEQ ID NO: 91907 - RNA, 55 nt, Homo sapiens
agaaaaaaacccaccacagaaccagggaccagaagagacaaagaggcccaccacc

SEQ ID NO: 91908 - RNA, 70 nt, Homo sapiens
agacaccgccaccaccgagaagacaaaacaagaacgaaaacaaacggaagagagggcagcaagaaagaac

SEQ ID NO: 91909 - RNA, 82 nt, Homo sapiens
cgcagaccgcagaaggccggagacaccagcaggaagacaagggaaaagggaccggggaaagggcaccaccgggaggaacagc

SEQ ID NO: 91910 - RNA, 81 nt, Homo sapiens
agaggcggccgggccccgcgcccgccccggccagggccgccccgggagcccgcgagggcgcaggagaaggcagagcgaccc

SEQ ID NO: 91911 - RNA, 77 nt, Homo sapiens
ggaagcggcagcgaggagacccggcgccgccaggccgacgaaaagcccaaggaagagccaagccacccaaacccgcc

SEQ ID NO: 91912 - RNA, 78 nt, Homo sapiens
ggacaacccggcggaccaagccgcgggagcagacggacggacgagcccggccaggggcggccaccccacgcgccgcgg

SEQ ID NO: 91913 - RNA, 68 nt, Homo sapiens
ggggaaaaggcagacggacagacccacaacaccaggcgccaggacgaggaaagccccaggaagaagaa

SEQ ID NO: 91914 - RNA, 77 nt, Homo sapiens
gccgcagcggaaagcaggagcacaggggaccaaccgaagagaaagggggcccaccacccccccacccgagggacgcc

SEQ ID NO: 91915 - RNA, 58 nt, Homo sapiens
ggaaacggacaaagcgggacaacccaggcgggacagagcacgagcagcagaggagaag

SEQ ID NO: 91916 - RNA, 61 nt, Homo sapiens
gccgggagcagcagcagcacccacccacaggggaagcgaagggaagcacgaaccccaggga

SEQ ID NO: 91917 - RNA, 80 nt, Homo sapiens
ccacagacacgagggaggacagcaaaaaccagggcccacagaggaggcaaggagagcgaaaggaaaacaaggcaccagga

SEQ ID NO: 91918 - RNA, 51 nt, Homo sapiens
gcagccagcaagcccaaagacagcgagaacaccaaggacccacaagaagaa

SEQ ID NO: 91919 - RNA, 58 nt, Homo sapiens
ggggaccgggcggcgagacccaccgcaggacccacagagagaaggagggggcagagca

SEQ ID NO: 91920 - RNA, 62 nt, Homo sapiens
cagcccccgagggcgggacacagacagaagacaggagccagagggacgggcagcaaaaagac

SEQ ID NO: 91921 - RNA, 68 nt, Homo sapiens
caaaccacccagacaagccacccaccgagcaggagacaagccaaacgcaccagacgaacccaaaggcg

SEQ ID NO: 91922 - RNA, 65 nt, Homo sapiens
cggggccccgcggcgcaggaggcggggagcgcagagcgggcgagcgcgggcccaacgaaccgaag

SEQ ID NO: 91923 - RNA, 77 nt, Homo sapiens
gaaaggaggggaacccaccgggggccacgcacaggcacacaaggccggcccccagcagagacggcaagcaggaaacg

SEQ ID NO: 91924 - RNA, 77 nt, Homo sapiens
agcccaggagaagcggagcggcagagaaaaaggccaccgagcacaccccacggcccggcggcacggcacgagggggg

SEQ ID NO: 91925 - RNA, 78 nt, Homo sapiens
cgcccagaagaagggaaggcgcgaggaggaaaggaggacgaggcaccaagcagccgaagagaaacaagggacagcaga

SEQ ID NO: 91926 - RNA, 76 nt, Homo sapiens
agaacggcagagcgaaacaccaaaaccagcggagcgacacagccaaccaaggaaagcaggcaaaagagaaagaaca

SEQ ID NO: 91927 - RNA, 80 nt, Homo sapiens
gcacggacacgaagggccacacccagcggccaacggaccgcgaccgcacaagcagccgccagcggaaccaagcggcgcgg

SEQ ID NO: 91928 - RNA, 85 nt, Homo sapiens
gaaacccagacagaggggagcacagagaaagagaagagaagagaaaggcccggagaccaagggaagacagagggaaaccagaccc

SEQ ID NO: 91929 - RNA, 57 nt, Homo sapiens
gcccgcacgggcgcgccaagggcacagagggagaggaagcccggggcggcgacggag

SEQ ID NO: 91930 - RNA, 87 nt, Homo sapiens
cacagagggggaaagccaaggaaaaacggagagccacaaaaaaggaagcgaaagggggcgcacacgcagaaagaacagcgaaaaagg

SEQ ID NO: 91931 - RNA, 56 nt, Homo sapiens
cagggcggccaccgagaggaaagaaagggcgggcaagaaggaaaagaagcaacaaa

SEQ ID NO: 91932 - RNA, 71 nt, Homo sapiens
agggcagagaaagaacagagacaaaggaccaaaggacaaagcaagagacccacagacagaaacccgcgccc

SEQ ID NO: 91933 - RNA, 56 nt, Homo sapiens
ccgcagcccccgccggccgcccaacaccgaacaccggggagaggcaccagcaacag

SEQ ID NO: 91934 - RNA, 75 nt, Homo sapiens
gagagggccgggagcgcgcagccagggaaacacaaagaagacaccagaagggccagcaccacgacaacacggcga

SEQ ID NO: 91935 - RNA, 81 nt, Homo sapiens
gggaggcagggggacgacaaggagggcagacaacccgcagccacgcggccgcaggagggaagcgcacggaaaccgccccgg

SEQ ID NO: 91936 - RNA, 73 nt, Homo sapiens
ggaggcacacacaagaccgcacgacaggcacagcagaacaggcgaacacgccacgaggccggccccgccagcc

SEQ ID NO: 91937 - RNA, 84 nt, Homo sapiens
gaagaggagagcgacaacggaaaagccccggccggggcgccaccggagccgccagcgccggcgcgggcacagacagggacccga

SEQ ID NO: 91938 - RNA, 84 nt, Homo sapiens
aggaaggcacaaaggaggaggaggaggacgacgacgaggggaacgccggcccccaccccccaagcaccgagaaggagaaagaga

SEQ ID NO: 91939 - RNA, 73 nt, Homo sapiens
agccgcagagcaagcgaaaacaaacaagaggacggggaggccgccagggaaaaacacgggaagagagccgaag

SEQ ID NO: 91940 - RNA, 78 nt, Homo sapiens
gacgaccggagacgaggggggagaaccagccgacggagcaggcagcagcccagggcccacaggccacccgccagacgc

SEQ ID NO: 91941 - RNA, 74 nt, Homo sapiens
agcccgggcaagagaccgcgcgggggaagcagaggggaaagcaaacagcgaagagaagacgaacagaaaagcac

SEQ ID NO: 91942 - RNA, 60 nt, Homo sapiens
ggaggccgcggggagacgcgggggacggggcaggaccacaggcacgggaacgaagagggc

SEQ ID NO: 91943 - RNA, 54 nt, Homo sapiens
gggcaccggagacacagaaggggcaggcaggccacacggcacacagcccaccag

SEQ ID NO: 91944 - RNA, 68 nt, Homo sapiens
cccggcgaacagcaaggcacaagaacaagaaccagaggacaacccagaagcccagaacagcggagacc

SEQ ID NO: 91945 - RNA, 73 nt, Homo sapiens
cccgggccaccaaaccacgacgcccccagaaggccaaacgccagggcgaaggaaccacagcacagccacagcc

SEQ ID NO: 91946 - RNA, 41 nt, Homo sapiens
gcgccagcccggagcagggcagagaaggcgacagaccgaag

SEQ ID NO: 91947 - RNA, 76 nt, Homo sapiens
ccgcaaaacgaggggcaaggaagcagggccgagggccagggccagacccccgacccgcgaacaggccaaaccgcca

SEQ ID NO: 91948 - RNA, 71 nt, Homo sapiens
acacgggggccacaaagccccccggagacgcaaccaagggcagcggagcagaaaaggaaacgaggcgcaga

SEQ ID NO: 91949 - RNA, 84 nt, Homo sapiens
cccgagcgcggcggcggcggccaggcccggcggcgacaccacgggaggcagaccacgagaagccaggggacgcagcccagagcc

SEQ ID NO: 91950 - RNA, 77 nt, Homo sapiens
caaggagccacggaaccgggagacagaagggccccaggaagagacgacagagacgaaaaaccgaggcgagacccaaa

SEQ ID NO: 91951 - RNA, 85 nt, Homo sapiens
gacgcccacagagcagacccccggggcccaggaacccggcccgcaagcaacagacaggcccacagaagccggcaaaccccgacgg

SEQ ID NO: 91952 - RNA, 77 nt, Homo sapiens
aggagaacaagaggaagcacacggaagagcgaaaaagagaaagcacaaaccaaggagaaacgaaagacggacagagc

SEQ ID NO: 91953 - RNA, 72 nt, Homo sapiens
aagacgccccaccacgaggccagcacgggaacgcgaagcgccaaagccagacaaggggacacagccagggcg

SEQ ID NO: 91954 - RNA, 73 nt, Homo sapiens
cgagacacagggaacgggaccaaggaaggaaaacaggacagaaaacagagccacccgcaccggggcgccgcga

SEQ ID NO: 91955 - RNA, 58 nt, Homo sapiens
agaggcaagggagacagcaaccaaccagccagggaagaaccacaaggagccgcaaaac

SEQ ID NO: 91956 - RNA, 66 nt, Homo sapiens
acacccagccagaaccccggaacaagaaccacgcccgcaccagccacccgccacaggaccaggcac

SEQ ID NO: 91957 - RNA, 81 nt, Homo sapiens
ggccagagggaaccaaccgggaccccaagccaaagaacccacacaaggacaaggaaagggaggacggcccccgaccacaag

SEQ ID NO: 91958 - RNA, 68 nt, Homo sapiens
cccgcagggacgaggccccaagacaagagagggcggcagaaggaacaccgagaaaccgcacaccggag

SEQ ID NO: 91959 - RNA, 89 nt, Homo sapiens
cggcccggagccggcgcgaaccggcccccgcagcgggacccgggggaggggcgaccccggggcccggccagcacgaccgaggaggggcg

SEQ ID NO: 91960 - RNA, 80 nt, Homo sapiens
gagggaagcggccccagcaccccagcgcgcagggccgccaggggcgccggacgaaaaacggaaacgccggaccaaaagca

SEQ ID NO: 91961 - RNA, 83 nt, Homo sapiens
ggcgaggaagggcagaagggcacagccacagcgccgagaggagcacgagccagggagccgccgggaccggcccgggagacgac

SEQ ID NO: 91962 - RNA, 73 nt, Homo sapiens
aaacagaaccgggaccaagagacgcaggagagcagcaggcccggccaacgcaacagggagcccacgcaagagg

SEQ ID NO: 91963 - RNA, 69 nt, Homo sapiens
ccggccaggcaagacgacgaacgcgccccccgccggaaaaccagaagcacgcgagacgcgcgggaggca

SEQ ID NO: 91964 - RNA, 84 nt, Homo sapiens
caccccacacgacccacaggagccccaggagcccagacaccagccccccaccaggacaggcgcaacagccagacccgccgaacc

SEQ ID NO: 91965 - RNA, 74 nt, Homo sapiens
cgaccggaggcaccggcaaggacagacaaaggagagaggcaccaccagaccaaagagagcgagaaccaaagagg

SEQ ID NO: 91966 - RNA, 75 nt, Homo sapiens
agagaggccggggaaagccggcgggaaaaagccaaagcaggccgccacaacgaaaagccaaaaaggagggaaaac

SEQ ID NO: 91967 - RNA, 69 nt, Homo sapiens
gccggaaaccaccacgacccaaagccgagccgggccagcccacacaccgcccccccggagacacggaag

SEQ ID NO: 91968 - RNA, 47 nt, Homo sapiens
agggagaagcacgcaacgagggagacagggaagaaaacgccagagaa

SEQ ID NO: 91969 - RNA, 59 nt, Homo sapiens
gcgccggcaaggcagccaacggagaaagggagacgggacaaggaggacaaccccgacga

SEQ ID NO: 91970 - RNA, 54 nt, Homo sapiens
acacgcagaacgggcggacgggcgcccagccaggcaaaccgaccaacggcggag

SEQ ID NO: 91971 - RNA, 63 nt, Homo sapiens
acgcgagaacaaaaaggacaaaccggcgaccacacacggggacgacggggaagccggacagca

SEQ ID NO: 91972 - RNA, 81 nt, Homo sapiens
gggcggcggcaacggggcacgaccggggggaagaggagcggaaaaacaagcaaaagaaaaacagggaaagaggagaaagaa

SEQ ID NO: 91973 - RNA, 61 nt, Homo sapiens
cgacggaggaggagggcgcaaacaaaaagcaacccacaaacaggaaccagaagccaacaag

SEQ ID NO: 91974 - RNA, 76 nt, Homo sapiens
agcaccagcacccgcagcccggaaccacgcaccagacaacacaggagaccaaagagaggggacacgacagaaaaac

SEQ ID NO: 91975 - RNA, 74 nt, Homo sapiens
accccaccccccacacgggggaccagcagggaccaagaggaaacggacaaccgagagagacgccgcgcgcaccc

SEQ ID NO: 91976 - RNA, 81 nt, Homo sapiens
aagacggggaagcaaccgccgagcaaggggacccggaggagacacagaagcagcaacaaagaaagacacgccagcaaccgg

SEQ ID NO: 91977 - RNA, 61 nt, Homo sapiens
aggaaggcgagggcgccgccgggccccagacggggagggaggcggaggcagcggcggaccg

SEQ ID NO: 91978 - RNA, 74 nt, Homo sapiens
cgggaacgagggggaagcggcccagggaggggagaagccaaaaggacaggcagagggcccaacaacagaagaac

SEQ ID NO: 91979 - RNA, 62 nt, Homo sapiens
aggggcggcgcgcgccgggcgccggaggcggaagacccgagacggcgcgagacaagagaccc

SEQ ID NO: 91980 - RNA, 61 nt, Homo sapiens
caccggacacgggacaacaacccagcggaccccccaccgggaagacacgcgggccacagag

SEQ ID NO: 91981 - RNA, 78 nt, Homo sapiens
aggaacggccgggcgagcggcacagccacgccaaggaggcagggccggcagacagccggaggcagccgagacccagac

SEQ ID NO: 91982 - RNA, 71 nt, Homo sapiens
accgccccggccaggaacacagacgggggcgagcggacccgcagccccaaagaagcacaaacaccagcccg

SEQ ID NO: 91983 - RNA, 79 nt, Homo sapiens
cgcaccaagggcgaaggagccggcccaagccgggccccgaggaccgagacaggagcacccgggccgcacagcaaggacc

SEQ ID NO: 91984 - RNA, 90 nt, Homo sapiens
agcggcagccccggacagggagggccgaccaggaggacagcaagcccacacgcggcaccaaacagagaaagccaaggaagggaggaagga

SEQ ID NO: 91985 - RNA, 76 nt, Homo sapiens
cgacgccagccagccgcagacagcccaggcgcgccccaggaagaacccccaggccccgccccaagcaggagcgacg

SEQ ID NO: 91986 - RNA, 79 nt, Homo sapiens
gacacagagaggaagacagagcgaagcgacgcggcccaaaagccgagagggagcagaagacaggcgccggggcgagggg

SEQ ID NO: 91987 - RNA, 79 nt, Homo sapiens
gacagcaaccaacaaccagaaaaacaacaccacagacaagcaggagccggggaaacgcaggaggcagaccgaccaaaca

SEQ ID NO: 91988 - RNA, 73 nt, Homo sapiens
gaggaggggagaaagaaaaaggggccaagaaccgcaaggacccaaagacaggaccacgcaccagcagagaagg

SEQ ID NO: 91989 - RNA, 81 nt, Homo sapiens
cccaaggacaacgcaagggggaagagagagaaacaaaagcgccagagccaagaacgacacgagaggcgagggacgacagag

SEQ ID NO: 91990 - RNA, 70 nt, Homo sapiens
agcgcgcagaagaaagccgcggaaccgcgacaccaagagggaagcacaggccagccaggaaagcgggagc

SEQ ID NO: 91991 - RNA, 80 nt, Homo sapiens
acgaaggacagcggcaccgccagacggccagaaagccgccagagcggggcacggagcgggggcacagagagcgcgaagga

SEQ ID NO: 91992 - RNA, 74 nt, Homo sapiens
cgcagcgccagcggccaaccagacgggggcaggggacgagccgcgcaaccgcagcgagacaccggggaaccccc

SEQ ID NO: 91993 - RNA, 107 nt, Homo sapiens
accgagcggcagcacagccgcggccggcgcaccgcggcagaaggccccaagcgccgcgcggacgccaaccacccgggcccacccggcccaagccccccccaagcagc

SEQ ID NO: 91994 - RNA, 84 nt, Homo sapiens
agagagacagacccagcaaacaggacgggaagaacagaagccgagacccacagcggggcaggaggagcgccaacccagccgccg

SEQ ID NO: 91995 - RNA, 65 nt, Homo sapiens
ccacgagaaaaccacccaaagccaaagggcagccaagaggagagggccggaagccccaagacaaa

SEQ ID NO: 91996 - RNA, 67 nt, Homo sapiens
gacaacccaaacaaccaaagggcagagacaggcaacagacggcaacgaaaggcacaaaaacgcaaca

SEQ ID NO: 91997 - RNA, 76 nt, Homo sapiens
cggaccagaagccagagcgaggacgccggcagaccgcaggcgggacaagaaaagaaaaagcaacagaaaaacaacc

SEQ ID NO: 91998 - RNA, 79 nt, Homo sapiens
ccagcgagccgggagacccagagagggaccaccggcgcacagagaccacggggggcagcgcagcccccacaacgagggg

SEQ ID NO: 91999 - RNA, 73 nt, Homo sapiens
acagacaaaaaccaggagaaacaaggagggccagccgaagaaaaaaaacgagaagcgcagagcagagggagac

SEQ ID NO: 92000 - RNA, 80 nt, Homo sapiens
gcaacggaagcgcagcaacagcaagccccgggcagaggccgcgacagccaccaaagcagcgcggacaagaaaagacagaa

SEQ ID NO: 92001 - RNA, 78 nt, Homo sapiens
cccgcccgcgcgccccggagcgcgaaggagcgcggggcgacagcaagagggcgcccggaagaggaaaggacgagagag

SEQ ID NO: 92002 - RNA, 82 nt, Homo sapiens
cacgccaccggaaccagcgggaaggagcgccaaaaaagagggggcgaagggaaaagccccgcaggaggccgaagcagcaaaa

SEQ ID NO: 92003 - RNA, 57 nt, Homo sapiens
acccgggaggcggagggcgcagaagaaggaagcaagagaagaaccagccggggagcc

SEQ ID NO: 92004 - RNA, 82 nt, Homo sapiens
gcgcggagcggacgccgcgacgggggcccgcgaggcgggcagccggggcgccagggcacgcacggcggacacagcagaaccc

SEQ ID NO: 92005 - RNA, 72 nt, Homo sapiens
accggccccggagcacagaaggcccgccgaaggagaagggcaggaagacccagcaggccggcccagagcagg

SEQ ID NO: 92006 - RNA, 46 nt, Homo sapiens
ggaggcgcggacacgcaaaccacacaagggcaccgaaaggccggcc

SEQ ID NO: 92007 - RNA, 66 nt, Homo sapiens
gaagggcgaaggggacaaggaacaaaccaagggacgagggcaagacaacagggcaaaagaaaaagc

SEQ ID NO: 92008 - RNA, 78 nt, Homo sapiens
acagaggaccgacagggaggagggagaacacagccaccgaacacggggcgaaaccaagaggagggaagcaggcagacg

SEQ ID NO: 92009 - RNA, 69 nt, Homo sapiens
ccgggcgaaggggccacgcgagcaagcggagaacgcccgaccaaggacacacaagaaaaggcccaaagc

SEQ ID NO: 92010 - RNA, 85 nt, Homo sapiens
cccaacgcaaaaacaaacacgacgccacagcaacaagcagggcgagcggagaaacggccgacggcacaagaccgcacgacagagg

SEQ ID NO: 92011 - RNA, 56 nt, Homo sapiens
gcggggccgacgagccggaggggcgccgcgggaggaagaagagagggcgaaggagg

SEQ ID NO: 92012 - RNA, 51 nt, Homo sapiens
aaaggaaacaacagggagcaaacagcaagagggaaacagaaaaaggacaag

SEQ ID NO: 92013 - RNA, 35 nt, Homo sapiens
ccgaaccagcacgggagccaggaggccgacccgac

SEQ ID NO: 92014 - RNA, 73 nt, Homo sapiens
gggccaccagcacggcccaggagcaagaaggagaggaacgaccagaagccgccaggagagaacccacacgcgg

SEQ ID NO: 92015 - RNA, 80 nt, Homo sapiens
agaaacacaagaagcagccagaaccacaccgcaggccaccgacgacacagaaaaacacaggccaaagagcaccaagagac

SEQ ID NO: 92016 - RNA, 73 nt, Homo sapiens
ggacgggacacagcccggcacacagcgcggccagagcggacccaaagacaggaccacgcaccagcagagaagg

SEQ ID NO: 92017 - RNA, 79 nt, Homo sapiens
agagccagagggagacggggggaggccccaggggaggaagcaacacagaagcaaaccgggcaaacaccaaaaagagaag

SEQ ID NO: 92018 - RNA, 81 nt, Homo sapiens
cccccaccaccccccaagccccaccgaggaagaaaagaaaggagccgaagaaccacggggcggagaacggaaaagcaccag

SEQ ID NO: 92019 - RNA, 81 nt, Homo sapiens
gaccggaccgagagcggaccgagagcgcgaaacgcacgagaagggcagcaggaacagcaggagagccccccacccgcgcaa

SEQ ID NO: 92020 - RNA, 85 nt, Homo sapiens
cgcagcgggagcggacggcgagcgcgagcggcgcgagaaaccggcaggcgcccgagcacgccaaccccaaccccacggacagcgc

SEQ ID NO: 92021 - RNA, 81 nt, Homo sapiens
aacccggacacccgccagcgagcggccgcccccagggacgcgagcccgcaacccccaagcagacggagccgccgcacccag

SEQ ID NO: 92022 - RNA, 79 nt, Homo sapiens
cacaagcggcgccgcgccccggccgcacgggcgaaagaaaccagaggagaaggagagaaaagaggaaggcaggagacac

SEQ ID NO: 92023 - RNA, 61 nt, Homo sapiens
gcaacacagaacgaaacgcgaacaagaggcgccagcgggcgcgccggaagaacagcgccac

SEQ ID NO: 92024 - RNA, 75 nt, Homo sapiens
aggaggggggaccccgcccagggcccagaggacccaacaccagaagacacacagggcggcgagccagcccccaga

SEQ ID NO: 92025 - RNA, 115 nt, Homo sapiens
gcgcgaaggccgggacccggccccggcccacaggggggggcaaacccgagagaacggagcagagaaagggggaggcggacccggcaacacgaaccggaaagccaaggaagagcca

SEQ ID NO: 92026 - RNA, 85 nt, Homo sapiens
caccccaccccaaccgcggccccgaggccaaggcgccaggcaggacgacagcagcagcagcgcgccccagagcgaagaagaacca

SEQ ID NO: 92027 - RNA, 60 nt, Homo sapiens
ccgaagagggggagggcgacgaccaaccaagggcaaaccggggaccgcagaagaagcgga

SEQ ID NO: 92028 - RNA, 85 nt, Homo sapiens
cagagacaccccggacgagggaaccgaggccagcaccaagccccccgggcgcgcagacccaacagaggaagccgcaagaaacggg

SEQ ID NO: 92029 - RNA, 81 nt, Homo sapiens
cgagcccagcaaagacaacagccagaagacgcggccgacccgggagccgacaacaaaaccgcccgccaaggacacgcacca

SEQ ID NO: 92030 - RNA, 76 nt, Homo sapiens
gaacacgccccaaaccagcagaagccacccaaaagaagaacaaaacccagccgcccgaggggccaaaggaaaagga

SEQ ID NO: 92031 - RNA, 69 nt, Homo sapiens
aacgcaagaagagagccgaagaaacccacgaagaggaaacgaaaagagacagcagggcaaaacgggcca

SEQ ID NO: 92032 - RNA, 73 nt, Homo sapiens
gggacacaccccaccaaaaacaaagagacacaacgggaaggagagacgagaggaccgccgaagagcaccagag

SEQ ID NO: 92033 - RNA, 60 nt, Homo sapiens
ccggccggcccggccccccagaaacgagaggggagacgaaaaaaacccgaaaagaaggaa

SEQ ID NO: 92034 - RNA, 82 nt, Homo sapiens
ggccaccgcccgccacccgcgcgccgccgccgaggagaaagaacggcggccaaagcgccagacaagggccgagccccggaga

SEQ ID NO: 92035 - RNA, 80 nt, Homo sapiens
gcgggagcccgggcaccagagcgacgggcaggaaggagggggcgcacaaacgaggagaggaaccgcacccaaggacggcg

SEQ ID NO: 92036 - RNA, 60 nt, Homo sapiens
gaagccggggcggaacagggcgcacacccgcacgcagaggccaaacagaccagcaccagc

SEQ ID NO: 92037 - RNA, 80 nt, Homo sapiens
gcaccccaccacgccgggcagaaggccgaaagagcacggacccggaaggagaagggaggccccagaagaagacgaaaaaa

SEQ ID NO: 92038 - RNA, 68 nt, Homo sapiens
ggggccagccacagcacagcaaagaaccacaggaccgggagacccaacagcaggagcggcagcccaca

SEQ ID NO: 92039 - RNA, 75 nt, Homo sapiens
gaccccagaagcagccggggacccggacaagccggagcagacggcagcacgggagaagacagaggagccagacca

SEQ ID NO: 92040 - RNA, 73 nt, Homo sapiens
acaagcagcagagaagaccaggaaagacaggaggccacccccaaagaaaagaacagagagaagggcgggagaa

SEQ ID NO: 92041 - RNA, 83 nt, Homo sapiens
gcccccagcaccacagcccgcagccccgccagccacccccagggaacccccaaagaaggaaagggagcaagccccccacgcgg

SEQ ID NO: 92042 - RNA, 79 nt, Homo sapiens
cgccgaccgcgccccggacggcccaagaagcgggccgccaaggacaggagcccaggggagcccagccggcgggggccga

SEQ ID NO: 92043 - RNA, 81 nt, Homo sapiens
aaagacccggggccggcccgcaaggcgcccccccagagagccagaaagaaaaagacgcgccagcaggcaacaaaaccaagg

SEQ ID NO: 92044 - RNA, 74 nt, Homo sapiens
accgagccggggcgccgggagcagggaccgcggggggacggaagcggcagcgggcagccggcccagcacaggga

SEQ ID NO: 92045 - RNA, 79 nt, Homo sapiens
accggggagggagaggcaggaacgcagcgcgcaggagacagagagaaagcaacagcaggccagccccagagcccgggga

SEQ ID NO: 92046 - RNA, 79 nt, Homo sapiens
acggcggcaggcaggcgagcaggcgaggaacgccgggcgcgggcccacgcggcgcagggagaaacaaaggcagcgcgcc

SEQ ID NO: 92047 - RNA, 78 nt, Homo sapiens
cccacccaaccagagcacgccacaggcgcaagcgcccaaagccaagggaacaccggcaaggaacacaacagcgagcaa

SEQ ID NO: 92048 - RNA, 85 nt, Homo sapiens
ggggagcggggccccacacccccccgggggggggcgcccgcgccggcagaggaggcgagcacccgccagggagaggaacccccgc

SEQ ID NO: 92049 - RNA, 74 nt, Homo sapiens
ggaaacacaaagccggcacgcgcgcgaggaaccgaacaagacagaaagcgggacgcgcaaccccaggccagacc

SEQ ID NO: 92050 - RNA, 80 nt, Homo sapiens
gagcagggcagggaaaagcgccgggcggaccagcagagagaagaagaaggaggccgcggccagaaacccaagaaaaagcg

SEQ ID NO: 92051 - RNA, 79 nt, Homo sapiens
gagaccgcagaaggagcggagcggcagcagaaggaggaaacccaccggcggagacacagaggcccaaagagagagagca

SEQ ID NO: 92052 - RNA, 68 nt, Homo sapiens
ggcacgcgggcccgagcgcagccgcgcagggagaagaggcacccagggggcgaggaagagacaggcgg

SEQ ID NO: 92053 - RNA, 77 nt, Homo sapiens
cagcagacgagaaaaggacgcgacacaagcacaaaagcggaggaaaaggaccagcccaacggggacccagcaggacc

SEQ ID NO: 92054 - RNA, 91 nt, Homo sapiens
gggccccggcagcgcggaggcccccggaagacaggagagccccaagagcccaagaacccaacaagggccccagaagacacagagacagaga

SEQ ID NO: 92055 - RNA, 67 nt, Homo sapiens
gaggaaccggagaccagaaaagggacagccggaaacagcgggggggcccaagaccaacacgcccacc

SEQ ID NO: 92056 - RNA, 63 nt, Homo sapiens
gccgaggcacagaagaaagagcgggccaacagacgggccacaggacagcggcacgaccaaaaa

SEQ ID NO: 92057 - RNA, 80 nt, Homo sapiens
gaagacgcacgccaagacaggggaagcgaagggaagcacgaaccccagggacaccgaaggagccaagaggccaacaaaac

SEQ ID NO: 92058 - RNA, 90 nt, Homo sapiens
cccggccacacacccagggaccaaccccaaggaggacgagggccgggccgggcgcgggcgagaaagcccagcacggaagagaaaaacacc

SEQ ID NO: 92059 - RNA, 74 nt, Homo sapiens
aggagaaacccaagagcagcggcagggcaaacagagaaacgcaaggaaaccagaccagccaagcaggaagagag

SEQ ID NO: 92060 - RNA, 74 nt, Homo sapiens
ggaggccacagcggccgggaccaagcgagggcggagaacggaaaagcaccaggaagcagagaggaccgcagaag

SEQ ID NO: 92061 - RNA, 81 nt, Homo sapiens
gcggagaacacaccaagaagcagcccagcaaacacgaacccaggaagcgcacaaacaacgcaggcacagccaaccaaccgg

SEQ ID NO: 92062 - RNA, 82 nt, Homo sapiens
cacacaagggagcagcgggacgcaagaggagccagagaccaagagcccagagaacagagcgccccaccgaagagccccagac

SEQ ID NO: 92063 - RNA, 53 nt, Homo sapiens
caagccaccaggagaagcaaaagaggacaggaagggaaacgaaaaaggccagg

SEQ ID NO: 92064 - RNA, 75 nt, Homo sapiens
ggggacaccccccccaaaagcccagagaaagcacaaagccaggaaaaagcagcccgacaaagagagggaaaaagc

SEQ ID NO: 92065 - RNA, 58 nt, Homo sapiens
gcgcgcagcagaggccaccccggggccggagggccgagaagcccgagagaaccagcgc

SEQ ID NO: 92066 - RNA, 61 nt, Homo sapiens
gcagagaaaacaccagcagagaagcggccaaaaggcccagggcccccggcagcggaaaaag

SEQ ID NO: 92067 - RNA, 80 nt, Homo sapiens
ccaggccacacacccacgggagagccacagggggggcacgagaagccgccgagagacccgccccgcagcaagagcacacc

SEQ ID NO: 92068 - RNA, 83 nt, Homo sapiens
cggaggcggaggcagcggggccgccgccgagcccggacccaaagacaggaccacgcaccagcagagaaggaaagcaaaccgaa

SEQ ID NO: 92069 - RNA, 74 nt, Homo sapiens
cggcacaacggggaccaagggcaaacaacccccagggggccacccaccgaggaaccaaaccacagacaaacaac

SEQ ID NO: 92070 - RNA, 51 nt, Homo sapiens
gagggagggagcagcccgggggacacgcaaaaagggacccaagggagagag

SEQ ID NO: 92071 - RNA, 80 nt, Homo sapiens
gcggcgggagcgggcggcgcgagcgggaggcggcggcgcagggaggccaacagacccaacccagaaggcaccaaacggag

SEQ ID NO: 92072 - RNA, 72 nt, Homo sapiens
cagcgccggaaaccaacaagagaaggaagccaacaccggagccagaaagccgaacccacggccagaggaaca

SEQ ID NO: 92073 - RNA, 83 nt, Homo sapiens
ccgacacccaccccgggaggccagccacccaaagccccaaggagaagaacggagacgggagaagggcagggcccgacacagcg

SEQ ID NO: 92074 - RNA, 89 nt, Homo sapiens
ccgcagaccagcgcccgaaggccgacacgcggcccgaggcaacggccacaggcccgcaagaagcccagcgcagcaagaccgccagccag

SEQ ID NO: 92075 - RNA, 71 nt, Homo sapiens
caaaagcagcggccggacagcgccacggcgggccgcgggaggacaccacccacaggggccagaaacagaga

SEQ ID NO: 92076 - RNA, 58 nt, Homo sapiens
cgggccgccagcggggacaggcagcgccccagaagaagggacacgagaaacgaagcag

SEQ ID NO: 92077 - RNA, 86 nt, Homo sapiens
gggacccccaggagggacccgcagaaacggccgggaaacagaagggcaaaacgaagcagcagagagaagcacacccagaaacagga

SEQ ID NO: 92078 - RNA, 56 nt, Homo sapiens
gagcgaggacgagggcgccggcgacggccaaaacaaaggggagggaggaggcgaga

SEQ ID NO: 92079 - RNA, 84 nt, Homo sapiens
cggcaccaggaagccggggacagaggcagcccaaaccgcgggacacgaccagacagaagagcaagaacgaggccaaggaggagg

SEQ ID NO: 92080 - RNA, 81 nt, Homo sapiens
acgaacccgcaagaggacgcagggcaagcagcccggccagggacagcgcacagcagggaaccacgaacgcgagacaaccac

SEQ ID NO: 92081 - RNA, 59 nt, Homo sapiens
aagaaaaacaggagaagaaggccgacacggagggggccagagaaccaggagcggcagac

SEQ ID NO: 92082 - RNA, 80 nt, Homo sapiens
gcaaacaagagaacgggcccacacaacccaggcaaccaacagcaggcggacaccgaccgcaggaaggaggaggaggaggg

SEQ ID NO: 92083 - RNA, 76 nt, Homo sapiens
acgccacaaggaggccacgaggcagcagccgggccccgcccgccccacgaacgaggcgcgacacaccagcggagcg

SEQ ID NO: 92084 - RNA, 63 nt, Homo sapiens
gaacggagggcgacggagggaggaagccaacccagagaccaggacagaggaagaaaggccggg

SEQ ID NO: 92085 - RNA, 79 nt, Homo sapiens
aaaaaagcagacaacgaggagaggacggggaccaaaggcacaggacacacagaaaggaggagcccaggaccaccgacag

SEQ ID NO: 92086 - RNA, 73 nt, Homo sapiens
gaaagacaacaaggccagaccacagaaacccggagaagggacagcacgagccaagggaggacgaagaggaaag

SEQ ID NO: 92087 - RNA, 75 nt, Homo sapiens
ggccgggcgccccgcaggacacaaggcgaaggagcacgcaagcagggaaaagggcaggaaaacacccgaaaaaaa

SEQ ID NO: 92088 - RNA, 73 nt, Homo sapiens
gcagccgagagacacagcgcgagaagccaaacaagggggcccagaggacccagaccaggagagggcgccggcc

SEQ ID NO: 92089 - RNA, 53 nt, Homo sapiens
gcccgcccggagggaaaggccgcaaggagaacgcaggaagaccggcccccgca

SEQ ID NO: 92090 - RNA, 66 nt, Homo sapiens
ccacccgcccacaacacaagaaggaggcgggggaagagaagcgaaggagaacgaaggagcgggaac

SEQ ID NO: 92091 - RNA, 76 nt, Homo sapiens
cgcccacaagcaggcgagcacacaaaaaaaccaaagaggagccagaccagaccaccaggaaagaccacagcaagac

SEQ ID NO: 92092 - RNA, 100 nt, Homo sapiens
ccaagcgcacaccaccagccaccccacaggacggaggcaaaacacccaagaccggccacagaccggggccgggagaggacaggaagagacccaaggagcc

SEQ ID NO: 92093 - RNA, 60 nt, Homo sapiens
cggaaaccgggaggggggcaggaaaaccaacaaggaaaaccggaagcacaagggagagac

SEQ ID NO: 92094 - RNA, 89 nt, Homo sapiens
aagaaccagcagcggaccggcaaaaaagcaaagaaagaagcaccgaagagccgcccggacaagagccgggaagcgggaaggcacggagc

SEQ ID NO: 92095 - RNA, 99 nt, Homo sapiens
ccaggcgggaagaggcgaaggccagagcacgagcacgggaaggccagcaacagaagaaagcaagcaccggggaaagcggcccgaaacaagcagaaggga

SEQ ID NO: 92096 - RNA, 64 nt, Homo sapiens
ccgaccaacacccgaggcggacgcagagacaggcgcagagacaaggaagggaagcggagaaaag

SEQ ID NO: 92097 - RNA, 72 nt, Homo sapiens
ggaaccaaggggacaaaccaacagaagggcaaccaggaggagggagacaggggcaaaaaacggcagggaaga

SEQ ID NO: 92098 - RNA, 73 nt, Homo sapiens
gacggggagcaggaggggccccgacacccagggaagagaagaaaccagagaaaccaacagacaaaccacaaca

SEQ ID NO: 92099 - RNA, 37 nt, Homo sapiens
cggcaccagcaaaccccacagcaccaggcaaagacgg

SEQ ID NO: 92100 - RNA, 33 nt, Homo sapiens
ccgagagcgggaacagggaggagcgcggcaaga

SEQ ID NO: 92101 - RNA, 82 nt, Homo sapiens
ggcgccacgcgggggcaagacgaagcaagccagggcgagcaggaagaagaacaagaacacacaagaaaacaggcgcagaagg

SEQ ID NO: 92102 - RNA, 66 nt, Homo sapiens
acacgaacgcagacgaaggccacagaagacgacggacagagagacacagacacaagacacggacag

SEQ ID NO: 92103 - RNA, 72 nt, Homo sapiens
gacacgagcgggaagcaggcggcaaccacccgcacggaggaaggaggcagaaagggagccccaagagagagg

SEQ ID NO: 92104 - RNA, 84 nt, Homo sapiens
aacagcggcaggcaaagcaacgcccgaaacgccaagcgaggacgcccccagagcagaagacagagcccagcaggccagccacaa

SEQ ID NO: 92105 - RNA, 88 nt, Homo sapiens
gcacgagaaagcccggcccacagaggccggcggcggcaaggagacgaaacggaggagcccaggaggaagaagaagcagccaaagaaga

SEQ ID NO: 92106 - RNA, 81 nt, Homo sapiens
aggcgcgcagaaccagaccgggagcacgcacccacgaggaaaacagggccagacgggaagaaacgagaagggaccaggggc

SEQ ID NO: 92107 - RNA, 73 nt, Homo sapiens
caaaagcccagaaagagacgaccgcaagcagaccaaagggcggaggcagggcccccaagggcggaacgcagcg

SEQ ID NO: 92108 - RNA, 79 nt, Homo sapiens
aggagcgagcagacgacaagccgggagcgggcggccaaccagaaacagccaacccgcaacaacggcagaagaaaagccc

SEQ ID NO: 92109 - RNA, 82 nt, Homo sapiens
agacgagagaaacccacgaagacgcgcggagaaagagaccaccgagaaacgccgaagggaccaggcagacgggaagaaccca

SEQ ID NO: 92110 - RNA, 71 nt, Homo sapiens
gagcaaaaacagccacccaagcccagcaaggacaaaggcaaaccgacaccagcgacacaagcgcgagggaa

SEQ ID NO: 92111 - RNA, 38 nt, Homo sapiens
agcaacaacgagcgacaccaaaggacacggaaacggag

SEQ ID NO: 92112 - RNA, 74 nt, Homo sapiens
ccgcgcgccacccacaaccaggcgaagggagggccgccccaaccgacgcaccagccggaggaggagggacaggg

SEQ ID NO: 92113 - RNA, 51 nt, Homo sapiens
cagggacgccagcagcaaagaccggaaggacccacaggccagaaacccaga

SEQ ID NO: 92114 - RNA, 68 nt, Homo sapiens
cgcccgccacggcccccggcaaggaccccacaagcgaccggcaaagcgccagagaacaacaaaggagg

SEQ ID NO: 92115 - RNA, 83 nt, Homo sapiens
cagggacagaccacgagcccggacaccgaggaggcccagacggaggacccgggaggccagcaccgaacccggggggaccgcag

SEQ ID NO: 92116 - RNA, 92 nt, Homo sapiens
gcaagcgggaccgcaccccgggcaagaccccccggccccacccgggagcggagaagaaagggaacagcgcgacgagcccacaggcccccggg

SEQ ID NO: 92117 - RNA, 61 nt, Homo sapiens
gccagaccgaacccagaaacagagggaggaagacagccagcaggggggaggacgcaccgcg

SEQ ID NO: 92118 - RNA, 71 nt, Homo sapiens
gaccaagaaccagaaccagcaacacacaagaaacccagccaccaagggaaaagagaagcaaggaaaggaag

SEQ ID NO: 92119 - RNA, 86 nt, Homo sapiens
ggacgccgcagagcgccgaggaggcccgcggggcaaccgccacgagacaccaagcggagaagcgacggaggagggggggaggacag

SEQ ID NO: 92120 - RNA, 66 nt, Homo sapiens
ccaggggacaaaaaaggaacgaggggcccagaagacaccgcgaggggccgccaccgagcccacgaa

SEQ ID NO: 92121 - RNA, 76 nt, Homo sapiens
cgcgaccaagcgaggcggacccgaagcggaccccgaggaagaaagccggaagcagaaaccaggaaaaaaaacgccc

SEQ ID NO: 92122 - RNA, 67 nt, Homo sapiens
cgcagggcgcccccggaaggaacgaaggcaagaaggacagcccccaggaagaacagcccgggagcag

SEQ ID NO: 92123 - RNA, 60 nt, Homo sapiens
ccaaggcgaggcaggacggcaaggagacggcccgaaggagggccgaggcaggcaggagga

SEQ ID NO: 92124 - RNA, 96 nt, Homo sapiens
cgcacgccaacccgcccccccgcaagagaaacgacgcaagggccaaacaagaaggcccgaagagaccccagcggaggagacccaaacgaggaccag

SEQ ID NO: 92125 - RNA, 73 nt, Homo sapiens
cgaagggaagaaccgaagcaaaggaagaaaagagacaggaagaagggcagccgggacagcacgagacaggagg

SEQ ID NO: 92126 - RNA, 82 nt, Homo sapiens
gcggcgcgaagcgaaaccggggccaagaaaccgaggaaggcagggaccggaaagaacaaaggcccaccggaagagcggcgaa

SEQ ID NO: 92127 - RNA, 68 nt, Homo sapiens
gggcggaaggggccagcggagacagcaaggaacccggcaccaagagcaacaaccgagaagaacaagaa

SEQ ID NO: 92128 - RNA, 99 nt, Homo sapiens
gagcaaaagaccggagacaggcaagccaaagggggagacaagaggagacaaaggacaggcagaaaccagaacaggcaaagggcccccagaccggcaaca

SEQ ID NO: 92129 - RNA, 79 nt, Homo sapiens
cagcaggcgccaccagcccggaggaagaacaagacagaggccaacgacccgggacaacagcaccaaccggagcagcaaa

SEQ ID NO: 92130 - RNA, 70 nt, Homo sapiens
gagagcccgggcggcacaagcacaagggaagccaagacgaacagaacagagcagaaagacacaaccgcag

SEQ ID NO: 92131 - RNA, 81 nt, Homo sapiens
ccggccccaccggcacggacaccacaccagacagacagcgcggcacgagaaggccggcccacagcccaaaaagaaacagga

SEQ ID NO: 92132 - RNA, 53 nt, Homo sapiens
agaaccagcagcaaagcaaccagggcaggcacccggccacgcccaacaaacca

SEQ ID NO: 92133 - RNA, 68 nt, Homo sapiens
ggccgagagacgggcagaaagacaaggacggcagacaagagaaaacaacaaggaacgacagaggaaag

SEQ ID NO: 92134 - RNA, 83 nt, Homo sapiens
cgacggggaaagaagcccaggggacgcccagcacccgccggccgcacccgaaagagaacaaagaacgaagggaagcgcagaaa

SEQ ID NO: 92135 - RNA, 68 nt, Homo sapiens
acgaggaccacaagccaaacagcaaccgagggagcgaagcaacaaggggaccgggaggagggcgccag

SEQ ID NO: 92136 - RNA, 74 nt, Homo sapiens
agaagcaacggaagaacccagagacgccacgaaagcaccgggaggaaagagagccacacgaagaacacggccaa

SEQ ID NO: 92137 - RNA, 79 nt, Homo sapiens
aggacgaggaaacaacgggcacaaaaacaaccagggcacaaccagggcagcagggggccagcagaacagagaagacccc

SEQ ID NO: 92138 - RNA, 62 nt, Homo sapiens
gccacaaaccaccccccgacccgaagaacgggaggaccgcgccaacaggacgaggagaccga

SEQ ID NO: 92139 - RNA, 79 nt, Homo sapiens
agcaggacacggaaagcgggccggcgcaagacagcggggagacaaccccccccaagaagcgagggacaagcacgaccca

SEQ ID NO: 92140 - RNA, 62 nt, Homo sapiens
accaggagcccgagagagaaggggaagacagccgccaccaggcgcccccccagcaaccaccc

SEQ ID NO: 92141 - RNA, 75 nt, Homo sapiens
caccccccacgcaccgcacaacaagaggccggcggggcgacaggaaaggggacaccacaggacggcagaagccac

SEQ ID NO: 92142 - RNA, 71 nt, Homo sapiens
gacaagggcagagggaacaggcagcaggaagcacggcgggcgaaacaggacaacaggcccaacccaagcca

SEQ ID NO: 92143 - RNA, 69 nt, Homo sapiens
ggcaacaacgcacccaccaccaaagaagcgagcggcgagagacgacaggcccaaaaaagggaaccgcac

SEQ ID NO: 92144 - RNA, 80 nt, Homo sapiens
cgaccccagcgggcccggggaggcaccgacgaggagggcggagaacggaaaagcaccaggaagcagagaggaccgcagaa

SEQ ID NO: 92145 - RNA, 41 nt, Homo sapiens
ggacaccagcggcagggccaaagaacgccaaccgaaagaaa

SEQ ID NO: 92146 - RNA, 76 nt, Homo sapiens
cggaccagccacgggagaagggcagcacggcaggagaagagaaaagggaaggcacggaggaagcccgagaccacga

SEQ ID NO: 92147 - RNA, 46 nt, Homo sapiens
gggacaaccagacggaaaacccgggagagacaaaggcagcgcgccc

SEQ ID NO: 92148 - RNA, 78 nt, Homo sapiens
agaaagggccccaagaaaacggcgaggaaagagaggagccccggaaagaaaaggacagacccggccagaaaggaagac

SEQ ID NO: 92149 - RNA, 72 nt, Homo sapiens
gcgcgcagggggaggaaaagccgggccacagaagcaccaccacaagccacaccaacaaacgaccccgaccac

SEQ ID NO: 92150 - RNA, 76 nt, Homo sapiens
gacagcaccaagagagcacgccacccagaaacccccccccggcgaagcaaaaaaaggacaaccaaacccaccacaa

SEQ ID NO: 92151 - RNA, 75 nt, Homo sapiens
cagagaaaggacagaacacagaaggacaaagaaccaagcagacagccaacaaaagggggagaggcaccagcaaca

SEQ ID NO: 92152 - RNA, 77 nt, Homo sapiens
cagaaccccgagagccaccccgcagaaggcggcgacccagcagaagaaggcacgacgacggagagaggaagaagacg

SEQ ID NO: 92153 - RNA, 76 nt, Homo sapiens
gcgggggaggcgagcgcgccgcccggagccgcgcacacgaggaccgcccacaagggaggcagaacgcaagagacag

SEQ ID NO: 92154 - RNA, 41 nt, Homo sapiens
aaggacgcaaagcccggcgagaacccaccggcacaaccgca

SEQ ID NO: 92155 - RNA, 83 nt, Homo sapiens
gacggcaacccacaaggccaagcacccccgcaccagccacacaccagacgcaaacagcagacggaagaccccacggcaaaacc

SEQ ID NO: 92156 - RNA, 75 nt, Homo sapiens
gaaagcggcagaacggaagcagcggaaccgcaaagaaaacagcgcgcggaaggagaacgaaggagcaggaaaacc

SEQ ID NO: 92157 - RNA, 75 nt, Homo sapiens
gccccagccaggggccggcgccggcgccgcgcccgccccggccacccggccagcgaggcaacagcaagagaaaag

SEQ ID NO: 92158 - RNA, 76 nt, Homo sapiens
gaagcgcgggaaaggggcaaaggaagcagcaggcacccaggggcaaagggacccaggccagcagcagccagcaggg

SEQ ID NO: 92159 - RNA, 70 nt, Homo sapiens
gaaacggccaggccacaaaggcagcacacaccagagcgaagcgagcccgagccccgggacaccaagggac

SEQ ID NO: 92160 - RNA, 79 nt, Homo sapiens
gacgagcagggagagcccggcccagaggacaagcagagcccaccaccaccaaccaggagacaggccagcgcgcggacag

SEQ ID NO: 92161 - RNA, 71 nt, Homo sapiens
cagaacacgggagaaaaaggaaaacgcggaaaaccgacacaacagccgggacaccacagcaagaggaacgg

SEQ ID NO: 92162 - RNA, 88 nt, Homo sapiens
cggccgcagagagccaccccgccagcaaggcgcagcaagccacagggcccgggaccgggagcccgggaccgggagccggggggccacc

SEQ ID NO: 92163 - RNA, 62 nt, Homo sapiens
cgccccacagcccgcccaacaccaaaacacagccaagggggggaagcaagaggacgacagcc

SEQ ID NO: 92164 - RNA, 77 nt, Homo sapiens
ccaccaacacaaggaaacaaacaacaaaaacaaaagccagaaaaccccaaagcaaacggcacacgcagccagaagca

SEQ ID NO: 92165 - RNA, 86 nt, Homo sapiens
cgcggcgcgcagcgcacgcccgggcgcggcgcaaggacgcacagacacggggccagccagaacaaccccagcaaccggcgagcaaa

SEQ ID NO: 92166 - RNA, 63 nt, Homo sapiens
ccgaggccccgcaacggcaagacagcacccaagaaaacccaggccgcgaaggagaagaccgga

SEQ ID NO: 92167 - RNA, 77 nt, Homo sapiens
gagagccagccacacgaggagacggaaccggagaaaagagaaacggcgcaggcgcagccagaacgcggggagcaaga

SEQ ID NO: 92168 - RNA, 67 nt, Homo sapiens
caaacacccagaacaacaaagagagacggaacagagaagcaacccaacagacaggcaaaagaaacag

SEQ ID NO: 92169 - RNA, 80 nt, Homo sapiens
cggggcggcccaccaacaggaacagggcagacgagcggaggacacccaacccggggaaccaagaccaggacaaagaagac

SEQ ID NO: 92170 - RNA, 81 nt, Homo sapiens
ccgcaagaaaggcccgaggccagcgggcccgcggaggcccgcgaggaacgacgccgaggaagacgagccagagaggcacca

SEQ ID NO: 92171 - RNA, 106 nt, Homo sapiens
aagagggacggaaccaccagaagccagcccccaggcggaacgcccgccccgcagagaggaggaaagaacaaagcaaagaagcaaaagaagaaacgcaggggacccg

SEQ ID NO: 92172 - RNA, 60 nt, Homo sapiens
cagggcggcggcgccaggcagggcgcaggcacacagagaaaaaaagggaacaaaacacag

SEQ ID NO: 92173 - RNA, 81 nt, Homo sapiens
accacggaccccaaggaagccacggcagacacacaacccgacccgacgagacaaccagggaagcagaaggcaaggaccccg

SEQ ID NO: 92174 - RNA, 67 nt, Homo sapiens
agaaggccggagacaccagcagcgaagggaaagaagaagaagagccagcgaggagaagagagaaccc

SEQ ID NO: 92175 - RNA, 74 nt, Homo sapiens
ccccgacccacggccaccaaaaagacacgggaggagacgaagcaagcacacggaggcaccaaccagcaacaggg

SEQ ID NO: 92176 - RNA, 78 nt, Homo sapiens
gaccaccgaaggaccggaagagggacacgagacagggacaggggcggaggagcccacacaccccacagcaagcccacc

SEQ ID NO: 92177 - RNA, 73 nt, Homo sapiens
ccaggagaggagcacgaggacaggccccgacgaggacagagaaagaggacacggccgacagacagcgggccgg

SEQ ID NO: 92178 - RNA, 50 nt, Homo sapiens
cagaagaagggcaccagcgaaggccgaaccggggcagcgcgcaaggagga

SEQ ID NO: 92179 - RNA, 87 nt, Homo sapiens
cgggccccagcccgggaccccacccccgcggacaggggggaaacgaggccgagcgggagaagccgcgggagcggaagacaggcccgg

SEQ ID NO: 92180 - RNA, 83 nt, Homo sapiens
ccagcaggcggagccaggggcgagaggaaggccgggagaccaggagcagggccagggcggggcagggggcgggaagccgggag

SEQ ID NO: 92181 - RNA, 84 nt, Homo sapiens
aggcggaaagagccagggggccgccaggagagcagccagcgggacagaaggaggaagagggagcaccacggaccccaaggaagc

SEQ ID NO: 92182 - RNA, 80 nt, Homo sapiens
ccaggaggaggcaggaccaaaagggaaaagcaccggaccaagaacgcccagcccgcgggcaccggcagaaaggaggagga

SEQ ID NO: 92183 - RNA, 75 nt, Homo sapiens
gcccaccagggcgcacgggacccgcccaagagccccaaaaacaccaggcaccccagccgacgccacacaggcaca

SEQ ID NO: 92184 - RNA, 71 nt, Homo sapiens
acggaccagagacacgccaagcagccagcccaggagagggcaacggcccagcggaggcagaggcgacaagc

SEQ ID NO: 92185 - RNA, 77 nt, Homo sapiens
gacacggggcaacgacgcagacggcagggggaaaagaccagccaagaaaccaggcccaagaaggaaaaaagaaaaca

SEQ ID NO: 92186 - RNA, 74 nt, Homo sapiens
ggaccggacgggcgccggggcaagagagaaggagcacgagcaggccagagaaggaaccaacggaaagaagaagc

SEQ ID NO: 92187 - RNA, 88 nt, Homo sapiens
cgagacacgcgggaggcggcgacgggcccgggagaagaggagaggaggagccagagagccgcggccccgcccacgaccacccgagcca

SEQ ID NO: 92188 - RNA, 81 nt, Homo sapiens
ggagaacgaacaccggaccgccagcgaagaagcacgagggaaccagaaggagcgcagaagagacaagcccggaagcagcac

SEQ ID NO: 92189 - RNA, 66 nt, Homo sapiens
ggagcacaacaggcagacagacaagaggccaaaggaagaccaggaaagaacagccagcagaaccaa

SEQ ID NO: 92190 - RNA, 67 nt, Homo sapiens
ccgggccacaagacccaaggcgcgcggggccgcgcagaaacacaggggaaacacgagagagcaacag

SEQ ID NO: 92191 - RNA, 67 nt, Homo sapiens
aaaacgaaccagaggagcaaccaccgaaacgggcgaaaaagaagaacagcaaaacacgaaaggcaaa

SEQ ID NO: 92192 - RNA, 72 nt, Homo sapiens
gaaggaccaagaaccaggaggggaggacaaaaccaacaacaagccacccacacgagaggaaggagagggagg

SEQ ID NO: 92193 - RNA, 60 nt, Homo sapiens
cgacccaggcaggaaaaccagccaaaggcaacggcagagacaccagagcaaccagaccag

SEQ ID NO: 92194 - RNA, 84 nt, Homo sapiens
cagacggcgacagggcggcggcgccaggcagggcgcaggcacgaacgagacacgccgggcgcgacccaccggccggcgggcccg

SEQ ID NO: 92195 - RNA, 77 nt, Homo sapiens
aaaacaagccggaaaggaggaaaaagaagaccagcgacaaaagagaaacccggcagccagccagagacgacacccca

SEQ ID NO: 92196 - RNA, 68 nt, Homo sapiens
gccccacacgcagaaaagggagaggagaaagcagggggcaggaaaccgaaaagagagaagccccccca

SEQ ID NO: 92197 - RNA, 79 nt, Homo sapiens
aaacaaaaccggggaaagcgaggaagcaaagaagagagggaaaccaaaagcaacagggaacagaacgccagaggccaag

SEQ ID NO: 92198 - RNA, 73 nt, Homo sapiens
aacagcacagcacgggacaaacgagcgcaacccccgaaacggaacgagcgaaagacgagcgaggaggcaggca

SEQ ID NO: 92199 - RNA, 55 nt, Homo sapiens
gaggagagaggaaggcgccgaggacggaaagccgggcgaggcgaggccacccggg

SEQ ID NO: 92200 - RNA, 77 nt, Homo sapiens
gagcggaggaaaagggccagggccgccaagggaaagaagacgagaaagggaaaaccaaaggaggagaagcgaaaggc

SEQ ID NO: 92201 - RNA, 79 nt, Homo sapiens
cgggcgggacccgaccccgcccgaggcccccacaagaagcagcggacgcgcccccaagaaaggaagcccggggcggcga

SEQ ID NO: 92202 - RNA, 78 nt, Homo sapiens
cagaaagcaacgagaaaacggcggacaccagaacgcagagaaggaggcaaagaagacaaaacgagcgaaccgcccaag

SEQ ID NO: 92203 - RNA, 62 nt, Homo sapiens
gcgagcacacgggggagcccagaggagacagggcgcagccacagcaggggagcggaagccag

SEQ ID NO: 92204 - RNA, 88 nt, Homo sapiens
gccgcaccccgagcgaccgaccccaagaagaagcggaagaggagccgcggaaccaagacacaaggaacagaagacaggaccaggaagc

SEQ ID NO: 92205 - RNA, 57 nt, Homo sapiens
gagggaccaggccaccgaccagaggaaagcaagccggagagggggaagccggaaaac

SEQ ID NO: 92206 - RNA, 74 nt, Homo sapiens
accagcggccgagcgcagcacccagccacgcgcccagcgccacaaggaaccacagcaggcaaaaacagcaaaag

SEQ ID NO: 92207 - RNA, 89 nt, Homo sapiens
agggcacagaacaacagaagaggagagaggaacccgaagaagaaaggacgacagccagagaggagagccaggaaccccaagacggagga

SEQ ID NO: 92208 - RNA, 94 nt, Homo sapiens
caacgcaagagaagagggaggggaaaagaaggagagaccgcacgcagggccacagcagcacgaggacagcccgaggcggagaacaccgaacacc

SEQ ID NO: 92209 - RNA, 77 nt, Homo sapiens
ccgggaaaacccggaccaggaagaaggaagacacacgaacaacacacgaggaagagaagaccgccaaagggacagag

SEQ ID NO: 92210 - RNA, 113 nt, Homo sapiens
ggaggccccagggaagcgcagaaagcaggcgaacccgcggcgcaaaacgggacccggcaaagagagaggcacacgccgccgaaggccaggagcagaggccaacgccccaagcg

SEQ ID NO: 92211 - RNA, 36 nt, Homo sapiens
acaagagcgacaaacgcagcgaaaacgaaacagaag

SEQ ID NO: 92212 - RNA, 49 nt, Homo sapiens
ggacacaggacagaacgggccgcaaaccagccggcgggcgccacaacgg

SEQ ID NO: 92213 - RNA, 82 nt, Homo sapiens
gcgacaagcagaaaagaagaagggggcaaacacacaaccccgacacaggagagaccgcacgcagggccacagcagcacgagg

SEQ ID NO: 92214 - RNA, 80 nt, Homo sapiens
cacacgaagccagaaaaacggcgaagggcccgacccaggcaagcgagcaggcgagcaggagcccacagccgagcagcggc

SEQ ID NO: 92215 - RNA, 82 nt, Homo sapiens
ccacccaccgacgccgacaggcagagccgcaacccggccaccaggcggagcgcaggagggcagacacagaggagaagccacg

SEQ ID NO: 92216 - RNA, 81 nt, Homo sapiens
gaccacaacccccagagaggagacccaccaggccagacgcccccggaacagcagggccggcaccgccgaggcagcccgccg

SEQ ID NO: 92217 - RNA, 77 nt, Homo sapiens
acagacagaaagaacgaaccaggggaaaagagccaacaaacaaagaccagaaaccccgcccaaagaccagcgggacc

SEQ ID NO: 92218 - RNA, 71 nt, Homo sapiens
gagaaggaccaagaaccaggcgccagggcagaaccgcggcagcgagaggggaagccggaaagaggcaagcc

SEQ ID NO: 92219 - RNA, 73 nt, Homo sapiens
caccggcccacagcgagagaaaaggaccaggacagacaccccacagaggcacgggcaaagaaaagcaagaaaa

SEQ ID NO: 92220 - RNA, 36 nt, Homo sapiens
ggcaagagcccgcgagaaggcccgcaccaaggaaga

SEQ ID NO: 92221 - RNA, 73 nt, Homo sapiens
cagaacccaaccccagaaaacggaagaaacagcgaccccgaacagagcccagaaaccaggcgccaggaacagc

SEQ ID NO: 92222 - RNA, 38 nt, Homo sapiens
gcgccccacgggccaggaggggaaccaaaacaggcccg

SEQ ID NO: 92223 - RNA, 84 nt, Homo sapiens
gaaaaagcccaaacagacaggcacggaggaagcaggaaggaccacccaagaggagaaaacgaagagcaccccacagaaccagaa

SEQ ID NO: 92224 - RNA, 82 nt, Homo sapiens
ccggccaccccgaccaagcaggagccacaggcaaaacaggaccaagacgcgagccaaagaggagcaagaagacccgagaaag

SEQ ID NO: 92225 - RNA, 92 nt, Homo sapiens
gagaccccgaggcagagacagggaggaggaagccagggccggaaacagaagcgcccagaggaccgcccgagcagaccccgaaagccccaccg

SEQ ID NO: 92226 - RNA, 85 nt, Homo sapiens
gccggcccccccacggaagggagagcacagcagacgaaccgaaaaaaagaaaagcaggccgacccaaagacaaggaaaagccaag

SEQ ID NO: 92227 - RNA, 56 nt, Homo sapiens
gaaagcaaccaaccaaaagaacgaaccagcaggagaccggaaacgagagaaacgaa

SEQ ID NO: 92228 - RNA, 69 nt, Homo sapiens
aagaaaggacagacgaaggagcagaacccagaacccgcaaagcaggaaacaaagaaacacaaaacaaac

SEQ ID NO: 92229 - RNA, 86 nt, Homo sapiens
aaccacggagccggcagcggcgcgggaggccggcggaggacacggagccacagcagaggagacgccgagaaccgcgcgaccgcaag

SEQ ID NO: 92230 - RNA, 75 nt, Homo sapiens
cacacgcgggaacaggggccgcaggagggaagcgcacggaaaccgccccgggaggcacagagcaggagacgccac

SEQ ID NO: 92231 - RNA, 66 nt, Homo sapiens
gagggaaaaaagagaggagcgaacgagacagaacaggaaaaaggcaccgagcagagcaggcaaaac

SEQ ID NO: 92232 - RNA, 67 nt, Homo sapiens
cagggagacgcacagccaggacaccggaaccgggaaagggccccgggaccaaggacacgcagacccg

SEQ ID NO: 92233 - RNA, 56 nt, Homo sapiens
accgacaccagcacccgcgacgcgcagcaaccacagggccggacgaggccaacagg

SEQ ID NO: 92234 - RNA, 58 nt, Homo sapiens
gcggaggcaaccagccaaaacaacggaaaacagcgacagcaaagaggaaaccccggag

SEQ ID NO: 92235 - RNA, 71 nt, Homo sapiens
ccggcaagaaaacgcgcaaacacaggacaaagagaaacaaaccgcaaaaggccgcgggaaaggcaaaaccc

SEQ ID NO: 92236 - RNA, 73 nt, Homo sapiens
gagggcagccccgagccaggcccgccgccgagcgaggcaaccggagccccgcggggaagaaagaagagagaag

SEQ ID NO: 92237 - RNA, 37 nt, Homo sapiens
cagagagcggaccaacgagcaaaaaaggcccggggca

SEQ ID NO: 92238 - RNA, 88 nt, Homo sapiens
ccgagcccggggagccggggccgcggcggcgcggggcccgggccgaggccgcggaccaggccaaccggagcgcacccacgccacaagc

SEQ ID NO: 92239 - RNA, 80 nt, Homo sapiens
gagccccacagaccggaaagcggcccccccaacccagagcaaagagacgccggaggcacccccgcccccgagagccggga

SEQ ID NO: 92240 - RNA, 67 nt, Homo sapiens
agggcgagaggggacagcccgcgcgacaccacccgcaaggcagccggcacccgcacaacccaggggg

SEQ ID NO: 92241 - RNA, 71 nt, Homo sapiens
cccaaccagggcagaagccgaacacgacagaaagaaaggccaaagcagcaggcaaacaagcagcaaggacc

SEQ ID NO: 92242 - RNA, 71 nt, Homo sapiens
ggcaggggaaaacaagacacacgcagagagccaacagcgaaaggcggagaaaacccggagaaccccggcac

SEQ ID NO: 92243 - RNA, 71 nt, Homo sapiens
gaagacgagaaggggccaaaaacacgagagcaccgccggccccaccggcccccagcggccggggccaaccc

SEQ ID NO: 92244 - RNA, 73 nt, Homo sapiens
acccgcggcaccgcgccccacgccgagaggccgccggaaacaccaggaggagggagcgaagaagcaagccggc

SEQ ID NO: 92245 - RNA, 74 nt, Homo sapiens
gaaaaaggggccaagaaccgcaagccaggcggcgaagagagcaggccgcccagaaggccagggcccagaaccgc

SEQ ID NO: 92246 - RNA, 84 nt, Homo sapiens
cgagcagggacagcgaccacgcgccaccagaagagggcgcacaaagaaggcggcccacaagcgggccccgaccagggagacccc

SEQ ID NO: 92247 - RNA, 74 nt, Homo sapiens
agcaaagcagagcgggcaggacaaccaggggaccagagaggacggcaccagccaggagacaaaggggcccggag

SEQ ID NO: 92248 - RNA, 82 nt, Homo sapiens
acaaccggccaccaaagggagcacggccgggacgggaaagagcaagggaaaaagaagggagcggccgaaggagccaccaggc

SEQ ID NO: 92249 - RNA, 77 nt, Homo sapiens
acagcaacccaaacacagaagaaaggggagcaagaagaaagagcagggaggagggagcgacaggaagaaagaaaccc

SEQ ID NO: 92250 - RNA, 70 nt, Homo sapiens
aacaaccgcaaccacccaacaagggacagggacggagaagggccaaaaaggacagaaaggcagaaaagac

SEQ ID NO: 92251 - RNA, 78 nt, Homo sapiens
aagagaggaaagacagccgaagggcacaggaccagaggaaggggaaaaaaaccgcccgccaggacacacacggaagcc

SEQ ID NO: 92252 - RNA, 118 nt, Homo sapiens
cgacgcccggagaagccaccagccgaagcaccaccaagaagcgcaaaccgggaaccagaaaagacagaggcgagaccggacaggaaagcccccagagaccaaccgagcaccagcacgg

SEQ ID NO: 92253 - RNA, 90 nt, Homo sapiens
ggaaaaccagagacggcggggggaggcggacccagcgcaacgggaccggaggacccccaacgccccacagaggaggggcggcaggccacg

SEQ ID NO: 92254 - RNA, 111 nt, Homo sapiens
aagccccccacgcagggacccaggcagaaaaggacacccccggggaaagcccgcagagacgggccgggcgaccccccacagccaggcggccacccccccacaccgccgccc

SEQ ID NO: 92255 - RNA, 79 nt, Homo sapiens
caagaccaccagccccgggccagcccagcccagaacccagacccaagaaccagaaccagccaagcggcaagaaggagaa

SEQ ID NO: 92256 - RNA, 60 nt, Homo sapiens
gcaaaaagagcccaaaacacagagcagacacaagagaaagacccagaaagaaaaaacaag

SEQ ID NO: 92257 - RNA, 72 nt, Homo sapiens
cgagacacaccagcccggcgccagacccaggggcagacgggaggaaaaaaaaaaggccaacaaaaagcaccc

SEQ ID NO: 92258 - RNA, 80 nt, Homo sapiens
ggcgaagaggaaaaaaaacagaacaggaggggagagggcaggaaccaccgcccaaaggaaccggcccgaagccgaaagcg

SEQ ID NO: 92259 - RNA, 80 nt, Homo sapiens
cggacaagccacgacagaaccaccgcaggaccagaaccgaccgaaccagccaaaagaagcaagggaaagaccaggagcca

SEQ ID NO: 92260 - RNA, 62 nt, Homo sapiens
aagggaccaccacagaagaccagaagagaacccgcagaccagcaacaacaaaggcacgggcg

SEQ ID NO: 92261 - RNA, 79 nt, Homo sapiens
aacagccacagcgagacaaaaagccagagccaaaaaaacggcggaaaaaagcggagaagagcccggagcgagagcgaga

SEQ ID NO: 92262 - RNA, 106 nt, Homo sapiens
cccagcgccaccaccacgccagccgcaccagccgcccaagccgcacagccgcggcggcagcagcaggagaggcgaggaccggcccagccaggcccggggcagcggc

SEQ ID NO: 92263 - RNA, 76 nt, Homo sapiens
cgccagggaaagaagcccagacggccgagaccaccaggcaaggggaaggggcgccgcccagccccagcccaacaac

SEQ ID NO: 92264 - RNA, 80 nt, Homo sapiens
gccgggggccggccgcgccggccggccgggaccaggccggcgcggaagaggccggcggcgggacggccccacgggacccg

SEQ ID NO: 92265 - RNA, 52 nt, Homo sapiens
cgcccagaacagaagaccaggcaaaagaaaccaccgacgaagcccgagacag

SEQ ID NO: 92266 - RNA, 72 nt, Homo sapiens
ccccacaacggggagaacagcccaaaaaagaaggacccagaaagagacagaagaagaggaagccaaggggac

SEQ ID NO: 92267 - RNA, 74 nt, Homo sapiens
agggagggcggcggcccaccaaggaaagggcgacagcaacagccgccggcggaagcaacggggcggcacacaag

SEQ ID NO: 92268 - RNA, 69 nt, Homo sapiens
gagccgacagccgcgccgggacaacagcgagcagcaaaaagaacgaaaagcgcaacaaaccagaacacc

SEQ ID NO: 92269 - RNA, 76 nt, Homo sapiens
gccccgccggcgcggcccgcggggcggcccccgggagcggagcaagggcccaggaggcaagagcgagaagagcgca

SEQ ID NO: 92270 - RNA, 72 nt, Homo sapiens
aaaggcgcaggggaggccggccccagggacaggagccagcggcccaggggcgggggaggaaacagagacaca

SEQ ID NO: 92271 - RNA, 72 nt, Homo sapiens
caccccccagaacccgaagggaaccaaagagggcgcagcaacggcacacagaggggagaccagacagaggac

SEQ ID NO: 92272 - RNA, 73 nt, Homo sapiens
gagaaccaagccagacaacagacggacagggacccgagaaacccccagacagcgagacgaccaagccacccag

SEQ ID NO: 92273 - RNA, 57 nt, Homo sapiens
gcagaaggagcaaaaggcggacaggcaggccagcgagcgccgacacccaacaagacc

SEQ ID NO: 92274 - RNA, 65 nt, Homo sapiens
aggacgagaacgccgcgacagaaagagcagcgagaagagccagagaagaaaggagaggagaaaag

SEQ ID NO: 92275 - RNA, 78 nt, Homo sapiens
aggcgagcagaggccgcgagcgacgcggcgccgagccggggaccgagcagaacacagaagacagccgacacagacccg

SEQ ID NO: 92276 - RNA, 85 nt, Homo sapiens
ccaggagcgccagcagaccagccgcccgccacacagggccgcaaccgccggggacccagggagccaacgggacaggaaaaccagc

SEQ ID NO: 92277 - RNA, 57 nt, Homo sapiens
cacggcaggaccgacaacacagaaacagggggggccgcccgcccaaggcaggaagag

SEQ ID NO: 92278 - RNA, 75 nt, Homo sapiens
cgggagcagaagggaggcccaagacccacaacaaaaggcgacagaaaaaggaccgccaaacccgggaaaaacgga

SEQ ID NO: 92279 - RNA, 62 nt, Homo sapiens
aaagggccaaagaagggagagagcgggacggggacggagaaaccacacacccaccaccacgg

SEQ ID NO: 92280 - RNA, 59 nt, Homo sapiens
cgggagcacagagcacggaagcgcgcccacccgggcagaaaacgcagaagcccacaggc

SEQ ID NO: 92281 - RNA, 38 nt, Homo sapiens
accgcaccacagcgcgaggccgcccgggcgccgacggc

SEQ ID NO: 92282 - RNA, 79 nt, Homo sapiens
gcgaccacacggcgcggggcaccgcgcgcccaggaccccacgcagagcgccagccgcgcagggcgcgaacccgggcacc

SEQ ID NO: 92283 - RNA, 63 nt, Homo sapiens
cgacgaccgcccgacggcacccgaagaacggagaccagaacagagagcccaagaaaagcagga

SEQ ID NO: 92284 - RNA, 78 nt, Homo sapiens
gaagcccccagaacgggacgaaaggagccgaggaaggacagggcgggaggggccaccgccaggccgcagcggccggag

SEQ ID NO: 92285 - RNA, 78 nt, Homo sapiens
aacaggaaccccaagaccccaacgcaggcccagcacccagaccagcggggcccagcggcggaacagcggccaagagca

SEQ ID NO: 92286 - RNA, 71 nt, Homo sapiens
ccagggggcgcccccgcgaggcagagcccaggaacaggcaggcgaggaagaaacagaagaaccgaacgcaa

SEQ ID NO: 92287 - RNA, 75 nt, Homo sapiens
aggaccaaaaagagagccaggcagaaaaccccccaggggaaaaagcagcaagggcaacaaaggacgccgccagcc

SEQ ID NO: 92288 - RNA, 73 nt, Homo sapiens
cgcccgccacggcgccgagccgcggccgagacagcaccagaagcgcgcgcgcacccggccccagagcgccccg

SEQ ID NO: 92289 - RNA, 76 nt, Homo sapiens
cccacagccacggcgccggcaacagaccacccccggagccagcagaaaacgagcccggcacagagaacggcagacg

SEQ ID NO: 92290 - RNA, 98 nt, Homo sapiens
aaccaacaaccacgggaagccgcggccccaagcaccagcccacggcccgagcgcccagcggaaccaacagccaggagcccggagagccagccgaaggc

SEQ ID NO: 92291 - RNA, 87 nt, Homo sapiens
ccagacccgaaggccaggagacccgaccccaagccaccaggagagaacgccgcgccgcgcgacaacggcccggcaggcaaggccggc

SEQ ID NO: 92292 - RNA, 74 nt, Homo sapiens
ggagggcagccaccaaaacagacccgggcagcaccagaacacaaaaggacacccccggcaccgaggaaaacaag

SEQ ID NO: 92293 - RNA, 77 nt, Homo sapiens
gggccagaacggcgcgcccacccgcgaccggccggcgagacagccccagggaaaggaccgaggcaggaaagaggcca

SEQ ID NO: 92294 - RNA, 81 nt, Homo sapiens
cagagcacaagcaacacaagcagggagaaggaagggaaaacgaagaaagaaaccggcagggaaaagaagagccaccgaaca

SEQ ID NO: 92295 - RNA, 71 nt, Homo sapiens
ggcggccagcgagagccaggcggacggcgcgccaccggccacgcaacccccgccgacccgaccagccgcga

SEQ ID NO: 92296 - RNA, 60 nt, Homo sapiens
cggaggaaaggcgcccgggcgggaaagggagcagcaccggccacacccacagcacgaccg

SEQ ID NO: 92297 - RNA, 69 nt, Homo sapiens
cgcccgccacgccgcaacccgcggcagagagaaaagggaccgggaggagggcgccaggagcaccaaccc

SEQ ID NO: 92298 - RNA, 90 nt, Homo sapiens
agaggccaggccgaggcccacgcagggccaggggggaagaggcagggggggcggcgaccgagcaccagcccccggaaaccaagcccaagg

SEQ ID NO: 92299 - RNA, 77 nt, Homo sapiens
accggggaccgcggaagggaaggaaaaaccgagggaaccaccgaccaaaaccaggcacaggcgcacccgcacaacaa

SEQ ID NO: 92300 - RNA, 72 nt, Homo sapiens
ggcgaccgccccaaggaaccacggggagagcacaagcgaaaccaggccccagcacaccagagcgcaggggac

SEQ ID NO: 92301 - RNA, 75 nt, Homo sapiens
gcaaggcacgaccggccaccacaaccacaccccgggcaagcgaccgcccagccccgaagggacgcaggcaggaaa

SEQ ID NO: 92302 - RNA, 83 nt, Homo sapiens
caccaccacccgcagaccccccagcagggccgccgcaacgcgcagcgccacgcagagccccgccaggaagacacgccggggaa

SEQ ID NO: 92303 - RNA, 42 nt, Homo sapiens
gccccagaggacaccagcggggcaccggagaaacacagagaa

SEQ ID NO: 92304 - RNA, 68 nt, Homo sapiens
gcaggacacacgaaaagcgggggagcaaacggggagggggaaccaggcaggacggcaagaagaaaccg

SEQ ID NO: 92305 - RNA, 80 nt, Homo sapiens
aaagaggaacaaggcggaggaacgagacgcgaaccaggaacggggggccacgacgggccaaagcggagaagacacaaggc

SEQ ID NO: 92306 - RNA, 72 nt, Homo sapiens
cggaccgagagcggaccgagagcgcgaaacgcacgagaagacccccgggcgcagggaggggggggcacccga

SEQ ID NO: 92307 - RNA, 73 nt, Homo sapiens
cgcgccggcccgcggaaaggccaaagcccagccccaggcacagaccccagcgagcggggggggagcggcagcg

SEQ ID NO: 92308 - RNA, 68 nt, Homo sapiens
gggcagggggaggagcagaaacacagcaggacagaagacaaacagaccccagaaagaagaagaggaaa

SEQ ID NO: 92309 - RNA, 69 nt, Homo sapiens
gcaaggcgccccaaggccagacaaaacgggcgcgagccacgagaggcgcccccaccagcaacaggggcc

SEQ ID NO: 92310 - RNA, 81 nt, Homo sapiens
ccgcgccccgccagcaccggccccaccacaggggaccgcaaagcggagcggcaagcccgaacaaggagggaagaagaagag

SEQ ID NO: 92311 - RNA, 86 nt, Homo sapiens
caacagccaaggaaaaaaagcagagaggagcggggagcaagcaggccggaaccgggaaccgaaaacaaagcagcccgaagaaaaca

SEQ ID NO: 92312 - RNA, 77 nt, Homo sapiens
agggcaacaccaaaaacaaaacgaaccaggacggcaagcaccaggcgaggaaacagcccagcagcgagcggcaccag

SEQ ID NO: 92313 - RNA, 51 nt, Homo sapiens
gaaccaaggaagaaggaaagggaagaccaacaacaaagcacaggccagacc

SEQ ID NO: 92314 - RNA, 64 nt, Homo sapiens
aaggccgaccagcagcagcagacgggaaaggggaggagccccagccccgcgacgaggaggaagc

SEQ ID NO: 92315 - RNA, 67 nt, Homo sapiens
aaggcagcccgcgcaggaacagcaaccggaagaggacagaaagaccaccgaagagcagagaagggaa

SEQ ID NO: 92316 - RNA, 73 nt, Homo sapiens
agaccgggagcgcagggcggcgccgagcaggacaccgagaggaagaagaaccgcagagaggaaaggcgccaca

SEQ ID NO: 92317 - RNA, 116 nt, Homo sapiens
cgcccggggacgcgcagggcagcgcgcgggggccgcccagaaagcgcagccaggcgggacggaggggagagcaggagggggacgacgggccgaagagaaaggaaacagaagaaaaa

SEQ ID NO: 92318 - RNA, 76 nt, Homo sapiens
gaaacaaacaggcacacagcaagaaccagcggcacggagagaagaggaaggaagaggaggcaaaaaaggagcaacg

SEQ ID NO: 92319 - RNA, 89 nt, Homo sapiens
gccgcccagcacggcaggagacgaggcacaggccagaaacagggaggggggaagacagggcccagcaccacaggacgggccgggaagcc

SEQ ID NO: 92320 - RNA, 75 nt, Homo sapiens
cgggaccacggcagaagaggacgaggccgacagcacgccgagaaggcaaacggcgaaaaaccgcaaacacacgca

SEQ ID NO: 92321 - RNA, 80 nt, Homo sapiens
ggagggcgggaccgcgcacccgaccccccggcccggggccagggcggccacagccaggaaagcggagggaaaggccaccc

SEQ ID NO: 92322 - RNA, 82 nt, Homo sapiens
cgcccaggaggagcaccggaaggggacccgaaagaaacgaggaagaaggaccggggagacaggaacacgggcaagacagcgc

SEQ ID NO: 92323 - RNA, 62 nt, Homo sapiens
agaaggccccgaggcggacagcagacgaagccggggacaagaccccggaccgccgcgccccc

SEQ ID NO: 92324 - RNA, 85 nt, Homo sapiens
ccgggagaccgccgaaggcgggaagggaagcggccaaggcacggaggccgcggccccgagccccggccccaaagacccaaaacag

SEQ ID NO: 92325 - RNA, 75 nt, Homo sapiens
gaccaaccaccggaagacagagaaacggcaggacacaaaacaaaggaccgaaagcgcggccaaaaagcacagcac

SEQ ID NO: 92326 - RNA, 72 nt, Homo sapiens
caacccagccagaccggagccccgggagacggcgaaggagaaccggaggaccagccaaagacagccagcggg

SEQ ID NO: 92327 - RNA, 53 nt, Homo sapiens
agcaaaccaaaagcccgacaccacggaaacccgcccggacgcgcgacccccgc

SEQ ID NO: 92328 - RNA, 79 nt, Homo sapiens
cgcggcgaggccgcgggcgcgggaggcccgccggcccgcggcccggggacccacacccagaccgaaggaaaagaagccc

SEQ ID NO: 92329 - RNA, 77 nt, Homo sapiens
ccgaggcggcgagagaggcaggcggagccgaccgggccagggagcagaagggccaacgcccccgcgagccagagaac

SEQ ID NO: 92330 - RNA, 72 nt, Homo sapiens
ggccaagcagagaacacagaaacaacgaacgagcaaggaagggccaaggcagaccccacaccggagaacgca

SEQ ID NO: 92331 - RNA, 74 nt, Homo sapiens
gagaaccgggagccagaggcagaagaaaaaccagcacgcaggaacaacagacaagcggaacaccgaagagaaga

SEQ ID NO: 92332 - RNA, 69 nt, Homo sapiens
aagcggaaggccgggagaaccgccagcgacgggaaggcaggacccacgcacgagcaacgagaagagaga

SEQ ID NO: 92333 - RNA, 74 nt, Homo sapiens
ccccgacggcccacgccagggagggggagacccgacacgggaagagaagaggaggccacccgaagggaaccgcg

SEQ ID NO: 92334 - RNA, 41 nt, Homo sapiens
cgggaggagacaacaacaagcccgagacgccagcaccggga

SEQ ID NO: 92335 - RNA, 80 nt, Homo sapiens
aaaagcaagaagggaaagaaaccgaagccccacaagccagggaagaccccgaaggaccaaggcaggaaagccaccgaggg

SEQ ID NO: 92336 - RNA, 77 nt, Homo sapiens
cggccgacccgcgcgcacccgaccgccccgaaggcgcacgcgaagcgccgcccagcgcgccacccggcgaggccacc

SEQ ID NO: 92337 - RNA, 76 nt, Homo sapiens
gaacgccacgcagcgccggaaacgccacgaaacccaccagagaaggcgcggccacccaggacccgggggaggcagc

SEQ ID NO: 92338 - RNA, 36 nt, Homo sapiens
cccgagacgggcccgccgaaagccaaggacgacaga

SEQ ID NO: 92339 - RNA, 80 nt, Homo sapiens
aggagcaagagccagcccaggaggcagaggaaagaggaaggcaaagaaaacagaccgagaacacgggaagcaaacaggga

SEQ ID NO: 92340 - RNA, 68 nt, Homo sapiens
gaaccgcaacagcaaagagccaaagcagacccccaagcgagcggagcggaaggagcgcgccccacagc

SEQ ID NO: 92341 - RNA, 71 nt, Homo sapiens
aaggcagcgcccagcagcgcagaagcaccagcaccaagaccagccagggagacgacccgcgggaacccacg

SEQ ID NO: 92342 - RNA, 73 nt, Homo sapiens
aaaggcagaaggggggcccaccgcagaacaaggaaggagaggaagagcaggcccagccaacaaccagaaaaac

SEQ ID NO: 92343 - RNA, 77 nt, Homo sapiens
caaccccggccccccaggccagccaagcacagaagccaaaaggcaaaaaccccccacgaaagaaacggaggccagga

SEQ ID NO: 92344 - RNA, 84 nt, Homo sapiens
agagaccaaaggcagggcaaggaaacggccacaaggcgacagcaagagggcgcccggaagaggaaaggacgagagagacacaaa

SEQ ID NO: 92345 - RNA, 74 nt, Homo sapiens
ggccgaaccacagcagcgcagcaagaagggccggagagcgcaggacgcaccaggcgaggaaacagcccagcagc

SEQ ID NO: 92346 - RNA, 78 nt, Homo sapiens
gggagaacggagaagaaacagccacggagaacaacagacgggagacgaacgaggaaacacacgccgagaagacggccc

SEQ ID NO: 92347 - RNA, 66 nt, Homo sapiens
cggggagcggccaaccacgaccgacggacaccacccgggcgggaaaagaaggaggccagcgggaca

SEQ ID NO: 92348 - RNA, 92 nt, Homo sapiens
cgccgagggaccaggccgacccgcggagacagacaagacaagaccggcggggaagcggggagaaagaagacaaggaaagaacacgaacgaga

SEQ ID NO: 92349 - RNA, 62 nt, Homo sapiens
ccgagcaacaccccggccaccgacccacaaggaccaagcacagagggcggaaaccgcggcgc

SEQ ID NO: 92350 - RNA, 101 nt, Homo sapiens
cgcgaccccagcagggccagacccgggccacgcgccccgcagcccggcagcggacaccaggcagaaagagcccacaagacaaaaaagcagacggaaacagg

SEQ ID NO: 92351 - RNA, 60 nt, Homo sapiens
ggaagagcaagcgggggaccgaacaaggcaaaagggggaccaagaaaggcccagggacca

SEQ ID NO: 92352 - RNA, 72 nt, Homo sapiens
cggggagacccggggacccccgacgccaggcagcgcccccaaacgccacgagagaagaaagaaaaagaaacc

SEQ ID NO: 92353 - RNA, 82 nt, Homo sapiens
agcccgcagcccgccggcgcgccccacgggccaggaggccccgcaagcccaagaggagggagggaaggacaccagcagaagc

SEQ ID NO: 92354 - RNA, 81 nt, Homo sapiens
agagacagagccaccagccaggaacgcagaaccagggacagccagagcagagaccccacaggaaaagcgccaagaggacag

SEQ ID NO: 92355 - RNA, 58 nt, Homo sapiens
gaccccgccccgccaagcgacaggccgcaccgcgaggaacccgagcccaccggcagca

SEQ ID NO: 92356 - RNA, 81 nt, Homo sapiens
cacggagcccagcaaccgccaggagaccagagaggagaggagccagccccagcaggcccaggcgcgcccaagccccacgac

SEQ ID NO: 92357 - RNA, 82 nt, Homo sapiens
gaggccccccagcccgcagaacagacccggaaacagacgggggacaaagcacaaaagaaaaaaaaaccaccaggagggaaag

SEQ ID NO: 92358 - RNA, 73 nt, Homo sapiens
ccccgggcccccgggcagccggcacacaaagggaagagcaagggacaacagacaccaaacagccagaggaagg

SEQ ID NO: 92359 - RNA, 81 nt, Homo sapiens
acccagaagggcagacaccaagaaggacgcacgaccgcccaagcaccgcgcacgcacgacggacaacaggaagccaagcca

SEQ ID NO: 92360 - RNA, 69 nt, Homo sapiens
cgaaaggagagacacggaacacaaggaagcaaaagcccagaagaacgacgaagcgggacgggggcggcc

SEQ ID NO: 92361 - RNA, 68 nt, Homo sapiens
gcacaggcccggccaggcacaagggcaccacaaagaacccacacccggggaaaggaggaggagacgcc

SEQ ID NO: 92362 - RNA, 83 nt, Homo sapiens
gcaaacggcccaccgccccgggggagaggagcacagaccagcgcgcgaccggagccccacagcggcacaggccccagccaagc

SEQ ID NO: 92363 - RNA, 76 nt, Homo sapiens
acccggaagcaagaagacaaacgaggggagaaagaaggggaaggacgcgcgggggcgagcacggagggagcggggg

SEQ ID NO: 92364 - RNA, 79 nt, Homo sapiens
aaagccccagagaagagaacgagaccccacacgccaccgaaaaggaaggaaagggccgagaaagaagagaggaagaaga

SEQ ID NO: 92365 - RNA, 77 nt, Homo sapiens
gccaaccagcggggcgaaaaacgggaaggagaagcaggagcacgcaggaggcacaagaaggaaagaggcagaaggcc

SEQ ID NO: 92366 - RNA, 77 nt, Homo sapiens
aaaagaagaaacgaacgaaagcaagaaaacccaacaaggggagagcgaaaagagcagagagcccacccaccgggccg

SEQ ID NO: 92367 - RNA, 76 nt, Homo sapiens
cgccgcaaaacagaacgcggccgggaacccaacaagggagcaaacagagaaagaacccaaacacacagaaaaaccc

SEQ ID NO: 92368 - RNA, 54 nt, Homo sapiens
gacagccaagaaccaaaaaggaccacgaagggacagagccggcaccaaaccgag

SEQ ID NO: 92369 - RNA, 81 nt, Homo sapiens
acaaaggcagcggaggcacggacaccacacacacacagcgccaaacacagcaaggcaacagaacagcgaacccccagaggg

SEQ ID NO: 92370 - RNA, 86 nt, Homo sapiens
aaaaccgccgcccggcccagcgggaccgcccaccagcaggagggcggaagggaggaccggcggcgggcggcgcccagcaggccgga

SEQ ID NO: 92371 - RNA, 76 nt, Homo sapiens
gaacgggacgggagccgcaaagaacaaggcaagaaccccaccaacacaggggaaagacaaggagccgggccgagaa

SEQ ID NO: 92372 - RNA, 92 nt, Homo sapiens
gcggacgccgcagagcgccgaggaggcccgcggggcaaccgccacgagacaccaagggaacccagaccaggccaaagcaaacaacagaagga

SEQ ID NO: 92373 - RNA, 84 nt, Homo sapiens
gggaccagcccggaacccgcaccaagccgcccacacgccaaccggccagaggacgagggcccccagcccccaccccgcagcgcc

SEQ ID NO: 92374 - RNA, 74 nt, Homo sapiens
agcgaaacaacgagagagccgaggagccagagcaaggggaacgccacggacggggaagggccccacaccaaacc

SEQ ID NO: 92375 - RNA, 75 nt, Homo sapiens
gagcccgggccagggacccgcggaaccaccggcgcagcacagcgacgcaccagggcaagagcgcaagacaaggac

SEQ ID NO: 92376 - RNA, 72 nt, Homo sapiens
ccaccgaagacgggccccaacacccagagacgaaaggacccagagagggaccagggccaaagaagagccggg

SEQ ID NO: 92377 - RNA, 76 nt, Homo sapiens
gagacccccgggggaagaagggggccaacaccacagagcgcgggcaacccgggcaggcggcgcagcggcaccacca

SEQ ID NO: 92378 - RNA, 73 nt, Homo sapiens
cggcgaagggcgggcacgagcaccggaagccagagaaggaacacaggccaagaaggacggaacggagaaaccg

SEQ ID NO: 92379 - RNA, 66 nt, Homo sapiens
aacaaaaacagcaacacaaaaaggcaccagagaagagcgaaagggacgcaaggaacaaaaggaaac

SEQ ID NO: 92380 - RNA, 56 nt, Homo sapiens
agcacccccagccgccaccaggaggcggggcaccaggcccagacggcgaacccgag

SEQ ID NO: 92381 - RNA, 80 nt, Homo sapiens
gcggaaaacagagaggccagaaaggcgcaggccaagcgcccacgccggaccgggcaggacgcagcaccagaaaagagccc

SEQ ID NO: 92382 - RNA, 72 nt, Homo sapiens
caaaggaacgcgccggaagaaaaggccaaagacgagaaccaggacgaacgaccccaccgaggacaccggaca

SEQ ID NO: 92383 - RNA, 78 nt, Homo sapiens
gggggacccagcccggggcgggcccgaggacgaccggcggcagccccagagcacgagcgaccccaagaggggaccaag

SEQ ID NO: 92384 - RNA, 80 nt, Homo sapiens
gccaccacccccagaggcccaacgggacgaaccacagggcggccagagcacacaccaggcacggacacccggcacaccac

SEQ ID NO: 92385 - RNA, 86 nt, Homo sapiens
aggaaggggggggcgacaacggcaccgggaaaaggggggagggaggagaaaccgggacaagcgggccaacagcagaagcgcccgaa

SEQ ID NO: 92386 - RNA, 81 nt, Homo sapiens
agaggcggggacccgccgaacggcagccccaagaacggaaagacgacaaaggaagcgacaggagagacggcccagccaccc

SEQ ID NO: 92387 - RNA, 69 nt, Homo sapiens
cacccacagaagagcccccacaacggggagaacagcccaaaaaaggaacggggagaaggggggcagccc

SEQ ID NO: 92388 - RNA, 83 nt, Homo sapiens
cagcagcgccggacccgggaagaacgggagccaagggacagccgcgcaaaccgacaccagcgacacaagcgcgagggaaccac

SEQ ID NO: 92389 - RNA, 75 nt, Homo sapiens
ccccgggcgggaagacagaaccagggccgggggccaggcggcgagccaaggggaaaggagcaagaagacacccac

SEQ ID NO: 92390 - RNA, 42 nt, Homo sapiens
aagaaagcagcgaagcacacacaggccaagaacccaaagcaa

SEQ ID NO: 92391 - RNA, 77 nt, Homo sapiens
acacccaaaaccgcccaaacaggaaaggcagaaggcggcagggagcacgcaccaggagcccacggcccacccacagc

SEQ ID NO: 92392 - RNA, 86 nt, Homo sapiens
gggagaccacagcaagacgccgggaccccggaaaccagaaagaaggccgggacagcagaaaacagccagcagaaaaagccaaaaag

SEQ ID NO: 92393 - RNA, 103 nt, Homo sapiens
cacaaaggcgcagcgccccccagagagagccccaacaggaaggcagcaggacacccagaaccaaaggcaagaaccggagcaggagaaaagccggaaagaaaac

SEQ ID NO: 92394 - RNA, 62 nt, Homo sapiens
ggcaagacaagccagaacgagaagcgcaccacaggaagcagccaggacggcaaagaggaaga

SEQ ID NO: 92395 - RNA, 77 nt, Homo sapiens
gccggggcagcgcgcacccgggccagcgcacagccccagcaggaggcaacgagggaacaaccgccgaagagccccag

SEQ ID NO: 92396 - RNA, 48 nt, Homo sapiens
agagccggagcgcggcccgaggaccgaccggcagacacggacgcgccg

SEQ ID NO: 92397 - RNA, 61 nt, Homo sapiens
acccacgcgcgggaaccaggggcagagggaccaccgacaggcgacaaaccaggagaacgga

SEQ ID NO: 92398 - RNA, 78 nt, Homo sapiens
cggggcccagggagaaaggcccaccggccgggagggcccagggcggggcccgagaaccgcccagagagcagccaaacg

SEQ ID NO: 92399 - RNA, 64 nt, Homo sapiens
ccggagcgggcgcggacgccgaggcaccgaggcaccagaggagggcagggcgaggaaaggagac

SEQ ID NO: 92400 - RNA, 39 nt, Homo sapiens
gagccggcccaccagacccaagcagagacgagacgagac

SEQ ID NO: 92401 - RNA, 86 nt, Homo sapiens
ggcggggccgccggggccgccaggagcccgaccgggagaggacaagaccacgagccagcccccagaagacaaggaaggggaccaaa

SEQ ID NO: 92402 - RNA, 62 nt, Homo sapiens
cccacagcgcgccccgggccgcaagaagggagccaagcggcgaccaggcaccggccagggcc

SEQ ID NO: 92403 - RNA, 60 nt, Homo sapiens
aggaggacacggaagagggaagaaagaagcagcgccagacggcgcggacggacagaagga

SEQ ID NO: 92404 - RNA, 80 nt, Homo sapiens
agccccggaaggaggcaacaccaccaccaggagccaccagaaaggaacagaaacaggccagaaaacaacagcccaaggcc

SEQ ID NO: 92405 - RNA, 46 nt, Homo sapiens
gggagaagcagacgaaggacagggagacggaagacggcagcggggg

SEQ ID NO: 92406 - RNA, 94 nt, Homo sapiens
ccgcaccaaaaacagaaaaagcacaacagagggacaacaaaagccccacaagagccaccaaaaaaagagcaaggcacagcgacaacacgaacgg

SEQ ID NO: 92407 - RNA, 77 nt, Homo sapiens
gccaaggcccgaacagaaccgcccgggcccgaagacaccccgccaaaaggacagaggaccacggagacagcagagag

SEQ ID NO: 92408 - RNA, 76 nt, Homo sapiens
agccaaccaaggcacaaacgcccgagggcagcaacagcaaaacccccaccggacgcgagacaaggagggacaggcc

SEQ ID NO: 92409 - RNA, 77 nt, Homo sapiens
cgggaaggcacaaagcagcgaaaggcggcacgggggcggacgggagcgggaagcgcccgacccgggcacggacaacg

SEQ ID NO: 92410 - RNA, 78 nt, Homo sapiens
aaaaggggcggacagaaaaggggaccagagacagagaaacagcgacgagcagacaggacaccaaggaggcggcaggcc

SEQ ID NO: 92411 - RNA, 82 nt, Homo sapiens
ccgacgcccccaggcccgccagggcccgaggccgggacacagacggaagggagggccacccacggcaggcccagccgcaaca

SEQ ID NO: 92412 - RNA, 75 nt, Homo sapiens
cgaaggggcaggaggagaaggcaaagagccagcccgcgcgaaaacggggaaccgcagaaggagcccagccccacc

SEQ ID NO: 92413 - RNA, 63 nt, Homo sapiens
aaggcggaaaaagacaccaccaacggaaaacaacacagccccgacggacagaccaacgggaca

SEQ ID NO: 92414 - RNA, 70 nt, Homo sapiens
aggcgcccaagaaaacgcgaacacgcgcccggagcggcccgacaagacccgccacacgcaccaggcgacc

SEQ ID NO: 92415 - RNA, 51 nt, Homo sapiens
agaccaccggagaaagaaacgacggcgcaaggaaggcggacccgggccaag

SEQ ID NO: 92416 - RNA, 50 nt, Homo sapiens
gcacgaaccagagcaagcagcaggcgcccggagccgccagaagggacgaa

SEQ ID NO: 92417 - RNA, 58 nt, Homo sapiens
gacagcaaacaacggaggcggaggcggcggcggggaggccaagaagagagcgggccca

SEQ ID NO: 92418 - RNA, 82 nt, Homo sapiens
gcagaagccgaaacacagacgagagggagggccggagccagggacagccgcccaggccgggaagcggagcgacaaaagagaa

SEQ ID NO: 92419 - RNA, 40 nt, Homo sapiens
gaccagccggggaacaccaaagaaaaccgagcgagcagcc

SEQ ID NO: 92420 - RNA, 78 nt, Homo sapiens
ggccccggcggggccggcggcggcgcgcccgggccggggagcaagcgccagagcaaaggggaccggacaacacacaca

SEQ ID NO: 92421 - RNA, 54 nt, Homo sapiens
caggcacggcacggggcagagcagaggcagcgagaagaaaaagaagagagagac

SEQ ID NO: 92422 - RNA, 60 nt, Homo sapiens
aggaagcgacacagcaagacggagacagcagaagcaggaaaaaccagccgcaagaacggc

SEQ ID NO: 92423 - RNA, 81 nt, Homo sapiens
gagggcgaccacaagaacgcgggaggcggcaggcccgggaagaccacgggccagaagacacgaggcccggaggcccggggg

SEQ ID NO: 92424 - RNA, 84 nt, Homo sapiens
ccccgcagaggaaggaagccggcgggcggggaacgccacccaagcagccgggacagcagcaccacaaggccacgcagcaacagc

SEQ ID NO: 92425 - RNA, 73 nt, Homo sapiens
gaaaaccacaggagcagaggaaggagacaagaggggcacaagaaggccaaccccaaaagagagaacacaggca

SEQ ID NO: 92426 - RNA, 80 nt, Homo sapiens
ggaaggcacgacaagaccggccacaggggagagccgcaccggccggacgggggacaggggcgcgaggaccagaccaggag

SEQ ID NO: 92427 - RNA, 71 nt, Homo sapiens
caaaacgaaccaggacggcaaggagcggaaacaggaccaaaagaacgaggccaagaaaagagggcacaaac

SEQ ID NO: 92428 - RNA, 59 nt, Homo sapiens
ccgagcaccagaacaggagcccacccagcaggcagccgccgcaaagggacgacgaaggg

SEQ ID NO: 92429 - RNA, 84 nt, Homo sapiens
gggccgccgagcggacccggaccggggacgggcccgggacacccagacagagagagcgcacgaagaagggcggaggacaaggag

SEQ ID NO: 92430 - RNA, 66 nt, Homo sapiens
ccgaccagacaaaaaggccgcgaccaggaagaaggacaaaggccagccagacgccccagaccccag

SEQ ID NO: 92431 - RNA, 73 nt, Homo sapiens
cgcccgcagggaggggagcggcgcggagccagcgcccggcaaggagcgagcgggagacaccggccggaaaggg

SEQ ID NO: 92432 - RNA, 81 nt, Homo sapiens
ggaaaaaaacgacacaccaggagaggagcgcagacgaggcgcaaagggacccagcagccagcgaagccccaaggaagccgg

SEQ ID NO: 92433 - RNA, 107 nt, Homo sapiens
agaaaacaaaaacgagaccaagagaaggcagccgagcaccgagccagcccaggaaaaggagagcccccgaaacaaagagacgcacggcggaccaagagcggagggac

SEQ ID NO: 92434 - RNA, 83 nt, Homo sapiens
cggcggagcccgaccacgacggccccagggaggagacgaacccaaccgggcccggcccgcaggaaggccgcggaccccccccc

SEQ ID NO: 92435 - RNA, 83 nt, Homo sapiens
gaaaaggcaaagcgggaagacccaagcccacgggaggcacggagggggcgaggcagagcccaaaaggcagagcgaggagagaa

SEQ ID NO: 92436 - RNA, 72 nt, Homo sapiens
ggggacacgcgcagaggcaagggagcaaacccgaacaaacagaacacaaggacccccacggagagaagagac

SEQ ID NO: 92437 - RNA, 73 nt, Homo sapiens
ggccagccgaagaggggcggcacccccggacagcccaaggcggaaaagcgaaggaagccacaagcacagccca

SEQ ID NO: 92438 - RNA, 84 nt, Homo sapiens
cgccggcacagccaggaggagaagaaccggcgaccgcagccggaccgcagcggcggcagaaccggccacacccaggaccggaac

SEQ ID NO: 92439 - RNA, 75 nt, Homo sapiens
gccccgcaagaaacgggggaagcagagcgcacaaagggaaaggggcagagaacacacagaagagaaaaaccgaac

SEQ ID NO: 92440 - RNA, 77 nt, Homo sapiens
gagaaaaaagcggaagcagaccacgaaggcgggagagagaacggaaaggagccaaggaaaacaaaagggcgagccag

SEQ ID NO: 92441 - RNA, 89 nt, Homo sapiens
ccagcggcaaggaccagaccgcgggaacagccagcaaaggcaggggaggaagccacccgaggaaaaacaagaaggggggcacagcagaa

SEQ ID NO: 92442 - RNA, 75 nt, Homo sapiens
gcaagacagaagaacggcacaagcaacgggagagcgggaagccccaaggcacaaaagaggaggaaagaagagcag

SEQ ID NO: 92443 - RNA, 60 nt, Homo sapiens
cagcagaggccacccgccacaaacaaacgagggcagaaagggcccagccggcagagggac

SEQ ID NO: 92444 - RNA, 72 nt, Homo sapiens
ggccgccccgcccccaccgccgcagacccccaagcagcagggcagagcacaccaggcagacaagcaaggaag

SEQ ID NO: 92445 - RNA, 62 nt, Homo sapiens
ccgaggcacggggcggacgacccagccggggggcacagccgggaagaagagagggcgaagga

SEQ ID NO: 92446 - RNA, 74 nt, Homo sapiens
gcggagcggcgaagagcaaccagcaacggggcggcacacaaggagcgaagggcagggagaacgccaggcacagc

SEQ ID NO: 92447 - RNA, 35 nt, Homo sapiens
aaggcaacgcgaagagaccaaaaggaaagcccggc

SEQ ID NO: 92448 - RNA, 79 nt, Homo sapiens
ccgagcaacggaccccccgaccggggaagacccagcaaccaacccccccggccagaggagccaccgcacccaggcggag

SEQ ID NO: 92449 - RNA, 79 nt, Homo sapiens
gggagcaccagccagaccgggaagaaacgaaggggggaggcccaggccaaaagagcaccgacacgcaaagaagagcccc

SEQ ID NO: 92450 - RNA, 81 nt, Homo sapiens
cacgccccgacgccgagggcccgcaaggccacagcacgggggccccagggcagccaaccccgcggcaggcacggccaccgg

SEQ ID NO: 92451 - RNA, 74 nt, Homo sapiens
caaccgggaagggaaccggaaaagacaagggggcaaagcgacagcgagaggaaaagaaagcgagaagaggcaga

SEQ ID NO: 92452 - RNA, 72 nt, Homo sapiens
agcagagacgcaacacggcgggccaccaagaaccagccgagagagaggcaaaacccccagaacgcgggcacc

SEQ ID NO: 92453 - RNA, 61 nt, Homo sapiens
cacccaggagacgggccgcgaagacaaggacgaggggaccaccccaacaacagccagcccc

SEQ ID NO: 92454 - RNA, 86 nt, Homo sapiens
aagcaaaacgggcaaaagaccaaagaaggcaaggagagaagagaagaacagcacaggacaggcggccgggagaggagggacagcag

SEQ ID NO: 92455 - RNA, 78 nt, Homo sapiens
gcaagaagggccggagagcgcaggacacagaggcacaaaaggagaaagcagaagaaacaggagaaagcaaaaaagaga

SEQ ID NO: 92456 - RNA, 66 nt, Homo sapiens
agagagacccccggcccagagcggccggacagagaaaaccggcgaggaagagggccacccgaaaac

SEQ ID NO: 92457 - RNA, 34 nt, Homo sapiens
cccgagggccgggcggagaagacacggacccgga

SEQ ID NO: 92458 - RNA, 76 nt, Homo sapiens
ggcggggcaggacagaagacaaaagagaagaagggcccgagggcaggacagcaggcaccggcgaagcacagagagg

SEQ ID NO: 92459 - RNA, 63 nt, Homo sapiens
cagcgccggacagagaagcccccaaggagcgcagaccgaggccaaaagaaaggaagaaaaccc

SEQ ID NO: 92460 - RNA, 83 nt, Homo sapiens
gggaaagcacaaagcaagagacagcgaggacagaaggaagcacagccagacaggcagaccgcgaagcggaccgccggacccgc

SEQ ID NO: 92461 - RNA, 83 nt, Homo sapiens
ggagcgcggggggacaaccccacgcaggacggaaggggacgcgggcaaggccccaagcaggcagacggcaagaagaagcgaaa

SEQ ID NO: 92462 - RNA, 80 nt, Homo sapiens
cacgcaccacgggcacccgaccggaacagcacacacaccaccaaccacaggaagaggacaccagcccgggagaagaggca

SEQ ID NO: 92463 - RNA, 74 nt, Homo sapiens
gccagaccacggaccaaagcagaaccacaaccgcgccaaggaggcgaagcgccgcccgcacccaagccagcacc

SEQ ID NO: 92464 - RNA, 72 nt, Homo sapiens
cgcgcggaggaaaggcgaacaggccccagggagagccccgagggggccacccgaaggccccccggccacccg

SEQ ID NO: 92465 - RNA, 83 nt, Homo sapiens
ggccggcccccccggggcaacccagacggcaacaaaggcgaggccagcgggagcccccgaccccaggagggcaagaccaagcc

SEQ ID NO: 92466 - RNA, 82 nt, Homo sapiens
gagcacgacggccccacgaggggcagcgcggggcccaggccaccggggcacacgggaggagacaggccgagaccgagggccc

SEQ ID NO: 92467 - RNA, 51 nt, Homo sapiens
agccacccgcgcgcaggagaaggaaacagaaccgaagccggaccggggccc

SEQ ID NO: 92468 - RNA, 78 nt, Homo sapiens
caaggggcagagcccggacgagggcgagaggcccacaggcacacagcaggaacgcaacaccagaggcacaggaaacag

SEQ ID NO: 92469 - RNA, 95 nt, Homo sapiens
ggacaccggcggccccaccagcagacgcagccgagacaccagcccgaaacaccaccaaggggcccgccagcggacagccgccgccaacgacagcc

SEQ ID NO: 92470 - RNA, 73 nt, Homo sapiens
cacacgagcggaggcgaagacggaaaccaaaaggaggaaagagaaagacaagaagcgagaggaacaaaagacc

SEQ ID NO: 92471 - RNA, 39 nt, Homo sapiens
cgggagcgacaaggacacaggcacgaaaagacagcaggg

SEQ ID NO: 92472 - RNA, 66 nt, Homo sapiens
acgagaggcaagaacacaaacgggaagagagagacagccgagggaagcaaaggaagggcaacaacc

SEQ ID NO: 92473 - RNA, 51 nt, Homo sapiens
aaaaacacggaagcgccgcaggccagcaaccaggagggagacgagacaaca

SEQ ID NO: 92474 - RNA, 85 nt, Homo sapiens
cccgcagcgaccggaagacgaggcggcgggggacaagcggcgccccagagcggacgaggcccaggaccgcagcccagccacacaa

SEQ ID NO: 92475 - RNA, 82 nt, Homo sapiens
ccgcgacggccggccgcgccaccgcaccgccaccggcccgacccacgcccgggggcggagaaggccaggcagcagcgcagga

SEQ ID NO: 92476 - RNA, 70 nt, Homo sapiens
cccacaggccccaggaaccacagaaacgacaacccgcaaggggcgcagggacccggccgcgggcccagcg

SEQ ID NO: 92477 - RNA, 84 nt, Homo sapiens
gcggaaggccccaacacccggagcagcgccacaagggacaggcaaaaaaaggcacaaacccagcacagagaagacggcgacaag

SEQ ID NO: 92478 - RNA, 74 nt, Homo sapiens
agaacacgagaagacacaagggaaaagggggaggaagagaagacaacgcacaacagagcgagaaaacagaagcc

SEQ ID NO: 92479 - RNA, 40 nt, Homo sapiens
gggccaggccgccgccgagccgagaaaccccaccacgcgg

SEQ ID NO: 92480 - RNA, 87 nt, Homo sapiens
aacaggagacaccgcaaaacacaagaagaaagaaaacaggcaaagcgccagcccaccggagaaggcagaggaagaaagaacagaccc

SEQ ID NO: 92481 - RNA, 75 nt, Homo sapiens
gacccggcaccacacgcagaacgggcggacgggcgcccagccaggcccggccaacgcaacagggagcccacgcaa

SEQ ID NO: 92482 - RNA, 82 nt, Homo sapiens
accggacaggccaaggcaggggccagaagacaaagcaaccaacgaggagcgccaggaaagaggcagagacgaagcagaagcg

SEQ ID NO: 92483 - RNA, 80 nt, Homo sapiens
agaacggaaagaaggaggccagaggcagggcgcgggcagcggagggcaggggacgaaaaggaagccccgcccagggaggc

SEQ ID NO: 92484 - RNA, 70 nt, Homo sapiens
gccaggcgcacagccagcggcgccccgaacgggagagaagaagagcccccaagcaccacggagggggaga

SEQ ID NO: 92485 - RNA, 76 nt, Homo sapiens
acgaggaggccgagagagaggccggagcccaccaagcgggaacccaggaacacagaccaccaggagccagccggcc

SEQ ID NO: 92486 - RNA, 73 nt, Homo sapiens
aaacaaaaaggccagaaagaggagcagagacgccggacaggaagcaaagaaccgcccgcagagaagcgggcgg

SEQ ID NO: 92487 - RNA, 57 nt, Homo sapiens
gcgcgaccgacggggcgcgcgcggggacaaagagaccccccaggaagaaaagaagag

SEQ ID NO: 92488 - RNA, 108 nt, Homo sapiens
agaaaggcagccggccaagcagagacccccaggacaacagacaacacccaaggcagcacaagggggcggcacacggagcccagcaggcggccaggcaaggggagcaca

SEQ ID NO: 92489 - RNA, 106 nt, Homo sapiens
acggcccccggcgccgcgcgagccgccgcccgcaccccgacggcggagggggggcaccagggggggcaggaggagcaaaggcgggcagggccagcaaacaaacgcc

SEQ ID NO: 92490 - RNA, 69 nt, Homo sapiens
aagccagccacggacaccaggcaggccagagcagcaccaggccagagccagaacagcccgagaacaccc

SEQ ID NO: 92491 - RNA, 75 nt, Homo sapiens
agcagaggagacaaaccggagaaggagccaagaaagagaaggagcacgcgcaaccggggcgagggcggggcagag

SEQ ID NO: 92492 - RNA, 77 nt, Homo sapiens
gagagggagccgcagcgagcagacgaagggagggaaggaaggaagagccaaaggacagggagaaggccgaggacgaa

SEQ ID NO: 92493 - RNA, 76 nt, Homo sapiens
caacgaaccggacagaggagccaaggaggggaaaggacaaggaaggagcggggaacgacacagcagaaaaagaagg

SEQ ID NO: 92494 - RNA, 78 nt, Homo sapiens
cggcagaaggggagagccaggcccagacaaggaaccgaggagaaggggacccagagaagacagcaaagggaaggggga

SEQ ID NO: 92495 - RNA, 84 nt, Homo sapiens
aaggcgcccccggcgcggcggcgccagcccgcgcggggaccgccaccgagcgagggcaacggggaggcagcccggccgcgcacc

SEQ ID NO: 92496 - RNA, 61 nt, Homo sapiens
agagagaccgggggaggcgacgcaaggcgacgggcggcggcaccaggacgccgaaaagcga

SEQ ID NO: 92497 - RNA, 88 nt, Homo sapiens
acggcgaagcaagcacgggcgacaagaaaaggccacgaggagggcacgcggaggagacgaagaggaggccggcagaagaaacacacgg

SEQ ID NO: 92498 - RNA, 68 nt, Homo sapiens
acaacacgcaagaacagcacgacacagacagcccacacagcccggaaagaaagaccacagcaagacca

SEQ ID NO: 92499 - RNA, 119 nt, Homo sapiens
gaccagggacgagcagcgaacgaggcaagcagcgccgagcccaggcaagagcccgcgagaaggagcagaagacagagggaggagggccacggacaaacacgggcccggcccagcagagc

SEQ ID NO: 92500 - RNA, 80 nt, Homo sapiens
gggccaacagacaaaaggcgggcaacgcggagaaggagcacaggcgagcggagcggccgccccaggaggccaagcaccgg

SEQ ID NO: 92501 - RNA, 82 nt, Homo sapiens
gcccacaaggacggaggggccccacgcccaccaacaaacgccagaagccgaagaaagcgggcaaagcggaagcaaagaaaca

SEQ ID NO: 92502 - RNA, 61 nt, Homo sapiens
acgccaggccgagcaccagccgggacgcggggaccggaacaggagcagagcgaggcagggc

SEQ ID NO: 92503 - RNA, 103 nt, Homo sapiens
aaaaaaaccacaaagcggccgaaacagaaaacaagagaccacagaagaacaacaagaaggagaaagacacaacgacagaagaaaaaacacaagaaaagacaag

SEQ ID NO: 92504 - RNA, 61 nt, Homo sapiens
cgcgcccaggagcacggacgccagaacgaaggagagcagcagccacgacgggccgagcaga

SEQ ID NO: 92505 - RNA, 74 nt, Homo sapiens
ggcccgaacacaacagaccacggaaagaccacagcaagaccacgcccccagccgggggaccaggccgaacgacc

SEQ ID NO: 92506 - RNA, 75 nt, Homo sapiens
gaacagacagccacgcagacggaaacaaggcaacagaaagagcaacagcagggcaacagacccaagggcccaaac

SEQ ID NO: 92507 - RNA, 66 nt, Homo sapiens
aagaaccaagccccaaaacggagccaggaacacgacaggccacgaagaccgagcacaaggaacgag

SEQ ID NO: 92508 - RNA, 79 nt, Homo sapiens
cgaagcggcgcgcaagcccagcccgcagcccacagcgaaccccaggcccaccggcccgcacccaccgggcacgggagac

SEQ ID NO: 92509 - RNA, 66 nt, Homo sapiens
aaaaagccagaagggcaaaaaggacaggaagagaaaggcaaaggcgacgggcacagcaacggagaa

SEQ ID NO: 92510 - RNA, 71 nt, Homo sapiens
gagagaagccaggagccaccaacaccaaaaagaaggacagcaaaaggagaaccagggagaggaggagaaac

SEQ ID NO: 92511 - RNA, 75 nt, Homo sapiens
cggccacgggcgggcaggcaagccccagaccagcggcgccggagcaccggagcagaagaccgagcccccgaaccg

SEQ ID NO: 92512 - RNA, 80 nt, Homo sapiens
aaacaccggagcacccaacaacgaacgcacagacgagccggaaagcaggaacgggacgagcccaggccacgcgcagccgg

SEQ ID NO: 92513 - RNA, 36 nt, Homo sapiens
gacaagcgaccgccacagggcggaggaggacgacag

SEQ ID NO: 92514 - RNA, 87 nt, Homo sapiens
cggcggcgagcggccggggcagagaggagcgggaaggccccgcacccggagaccgggggaagacaagcacaagagaggaggccgagc

SEQ ID NO: 92515 - RNA, 70 nt, Homo sapiens
ggcagaaccccaaaaccagcagaccacagacccacagcgaaagcaacaggcgaacaaacccaaagcccgg

SEQ ID NO: 92516 - RNA, 66 nt, Homo sapiens
ggccgagaagcggggcaccacgaaggaccgaagagagacacaagcagcgaggaccaggaacaacag

SEQ ID NO: 92517 - RNA, 75 nt, Homo sapiens
cgagcacagcacacaaggaccaccaagcagcgcccaaggggcggcccacggaacgagggcacccaacagcgcccc

SEQ ID NO: 92518 - RNA, 72 nt, Homo sapiens
ccgccaacggagccccaggggaaccaagaccaggacaaagaagacccggagagacaagccggaggacgcaaa

SEQ ID NO: 92519 - RNA, 83 nt, Homo sapiens
gaaaacagacgcccagccaaacaaaaaggaaaggagacaagcagagacgaaccaggcaaagaaacggaagaagacgccccaaa

SEQ ID NO: 92520 - RNA, 71 nt, Homo sapiens
aaagagaacacgaaacaaccagccaaagaaaggaaaagcgggagccaggagccgccgaagccacacaaaac

SEQ ID NO: 92521 - RNA, 77 nt, Homo sapiens
caccaggccaccacagaaacaaaagcaacaaagagggaaggaaaacacccggcagggaaggaaggaacgcaaccgaa

SEQ ID NO: 92522 - RNA, 72 nt, Homo sapiens
gccaaaaaacaagaaaccgcccgggaacacaccaggggcgagaaccagcgacggagcacgcgacggaaggac

SEQ ID NO: 92523 - RNA, 72 nt, Homo sapiens
aaagagcaaacacgcggaggaaccacgcccacggcccacacgcaagggaaaccccaaacccaaggaccgcaa

SEQ ID NO: 92524 - RNA, 73 nt, Homo sapiens
ccggccgcagggacccgcagggcgagaacgcggacaagcaaacaaagaggaaaaagagggcaacagcgaagga

SEQ ID NO: 92525 - RNA, 72 nt, Homo sapiens
gaccaggcaggcccacagcgccacagaaccgcccaaaaaggcaaagaaaccacgaggcccgcggcggaagcc

SEQ ID NO: 92526 - RNA, 101 nt, Homo sapiens
ggccggccgcgcgcgcggcggaagggccagacagcaaggcggcagcaggaacggcgaaagcacggaaagccaaagcaagggaacggggaccggaccgccca

SEQ ID NO: 92527 - RNA, 77 nt, Homo sapiens
accggaccaccccgaagaaagcacaggaagagaccagaagagcaggaggaaacaaaggaagaccaccaagaagagcg

SEQ ID NO: 92528 - RNA, 72 nt, Homo sapiens
aaggaccaagaaccaggaagagaccagaagagcaggaggaaacaaaggaagaccaccaagaagagcgggaca

SEQ ID NO: 92529 - RNA, 76 nt, Homo sapiens
gccgggcaagaccaggggccacagcccaaagagacccgggaggaagccaaggccaccgagccacaagaccacagca

SEQ ID NO: 92530 - RNA, 82 nt, Homo sapiens
gcaacgaggggacaggaggacggaagcccaagggcacaaagcagaaacccccgggagacaggggcccccgcgagaaggcaca

SEQ ID NO: 92531 - RNA, 110 nt, Homo sapiens
gccccgcagaggccaggaggacgaggagagacagaagaagcggaggccggcaaagccaagaaggaaagaggcagaaggccagaagggcgaagaagaaggaaaaaaggcca

SEQ ID NO: 92532 - RNA, 79 nt, Homo sapiens
aaagagcagccgcccccgccggccggcccaacagaccacggccgagccgggacaagccgccgcgccgaccagggaggga

SEQ ID NO: 92533 - RNA, 52 nt, Homo sapiens
aaggcagaggaacacaacagcgaaacaggacagcaagaacgcggacggaaca

SEQ ID NO: 92534 - RNA, 67 nt, Homo sapiens
cagcacgcgcaacaacagaagagccacccgcccaccacagacccaccagaagcgagacgccagcaag

SEQ ID NO: 92535 - RNA, 111 nt, Homo sapiens
cggcggccggaagcacgcgcccgcacccgggaccagcacaagggggcgcagagaacgcccaaagacccggcaggggaagcaaaggcgcgccccgacaagaaaggaaaaaag

SEQ ID NO: 92536 - RNA, 54 nt, Homo sapiens
aagcagcacgagagcgggacggggggcgcacacgcagaaagaacagcgaaaaag

SEQ ID NO: 92537 - RNA, 76 nt, Homo sapiens
ggaaaaacaacaacggggggcagcagcgcgaagacagcaaacacgaaaacaccacaggacaaaaccaagcagggac

SEQ ID NO: 92538 - RNA, 72 nt, Homo sapiens
ccagaagacagagggcgagagcaagcccagaacacagggcggcagggaccgaggcccgggaccgcccgaggg

SEQ ID NO: 92539 - RNA, 81 nt, Homo sapiens
gccgcaccggcgccccacccgcccccgcgggcgccgggccaggacggagagcagcaccagcagaagagggcccgaccacgg

SEQ ID NO: 92540 - RNA, 75 nt, Homo sapiens
acacagaccagggcaccagccccgacaccacacccagacccaaaggcaacaacagcaggcccacgaggccgagaa

SEQ ID NO: 92541 - RNA, 68 nt, Homo sapiens
ccccagaggacacacgccaagagaaacacgcagaacagaccacgcagaacagaaggaagaacgaacac

SEQ ID NO: 92542 - RNA, 79 nt, Homo sapiens
aaaagaacggaaagcacagaccgcggcaagggaggagagaaacaggggcaagaccgaagccacagcagcacagaggaaa

SEQ ID NO: 92543 - RNA, 61 nt, Homo sapiens
acaacgcggccaccacgaggacgcgggcgcgccgcgcagagcaccggggcgcacaagaccc

SEQ ID NO: 92544 - RNA, 80 nt, Homo sapiens
cggcgggggcggcggcggccagcgccaggccgacgcccgccgcggccggggaacaggccacagccaggagcgcacacagg

SEQ ID NO: 92545 - RNA, 34 nt, Homo sapiens
gcccaagcgggcccccgcagccagcaccagcccc

SEQ ID NO: 92546 - RNA, 85 nt, Homo sapiens
ggagccaggaagcgaagacggagcgggacgcagcggcggcagcgggcggcgacccccacgccagggaccggagcaagccaagcag

SEQ ID NO: 92547 - RNA, 75 nt, Homo sapiens
gaccaccaaggccaggaagcaagaagaccacagccaggagagcacgagagggaaggaaaagacccccacgagagg

SEQ ID NO: 92548 - RNA, 74 nt, Homo sapiens
gcccaccacaacaagaagagaaaaaaggcgccagcaaacagcccgcaggaaggagagggacaaaccacccgagc

SEQ ID NO: 92549 - RNA, 79 nt, Homo sapiens
ggagcggagggggagacagacccgccagccagaaggaaccaagcgcagcccagagggcacccgcaaacagcgggacccc

SEQ ID NO: 92550 - RNA, 58 nt, Homo sapiens
ggaacgaaacggccccggggggccagcaaagcaaacgccagaaggacaaggccgccag

SEQ ID NO: 92551 - RNA, 74 nt, Homo sapiens
acaaaccggagaaggagccaagaaagagaaggagaaagcgcagaacagacgcaggaacgagaggcaccgaaaaa

SEQ ID NO: 92552 - RNA, 80 nt, Homo sapiens
ccgccgccaccccgcggccgcacccccgccccagcagggagcgcccaagcagacacggggcccgcccacacaacgagcca

SEQ ID NO: 92553 - RNA, 55 nt, Homo sapiens
cacgcgcggacaaggacgacaacgcaccagggagggcagagagacggggcgccgg

SEQ ID NO: 92554 - RNA, 71 nt, Homo sapiens
gaaaaggacgagaacgccgcgacagaaaccaagcgaaagacagaggcccagccgaaagaggggaggcacga

SEQ ID NO: 92555 - RNA, 75 nt, Homo sapiens
agccgggggcagggggacagaaaacccccaggacaccaaaggaaccacgcaagagcccaacacccccccagccaa

SEQ ID NO: 92556 - RNA, 79 nt, Homo sapiens
cgcagggcgcccccggaccaaaacagaccaggaccgcccccaacggcccccgagagaaccgcggagagacagccgaagg

SEQ ID NO: 92557 - RNA, 78 nt, Homo sapiens
ccgaccccccggcgccgcgccggcggcgcggcggaggcggaccggggggcccgggcccgccagacccgcagaccacca

SEQ ID NO: 92558 - RNA, 67 nt, Homo sapiens
gccgcgggagagaggacccccccccccccccaagagccggagaaagcgggaacagcacaaggaggga

SEQ ID NO: 92559 - RNA, 98 nt, Homo sapiens
gaggcgggcaggagcggcggccaggccagacccgaaggccaggagacccgaccccaaggcagccgcgcaacggcccgcggcgcgggaggagacggccg

SEQ ID NO: 92560 - RNA, 91 nt, Homo sapiens
ccggacggaccgccacgcgcccgggagacgcccgcgccgccgccacgaaccgacggggaccccaagaggaaggaaccggagacgcagccag

SEQ ID NO: 92561 - RNA, 91 nt, Homo sapiens
gaaaacggacaaaacaacggagaccgcgaacccaagaacaagcaaagagcaacaggaacaagaccaccaacccacacaagccaccccagga

SEQ ID NO: 92562 - RNA, 78 nt, Homo sapiens
ggagaccaagccaaacaaggcacgcagggcggcggcggacccgcgcacgacccagacacgggaagcaggacaccaacc

SEQ ID NO: 92563 - RNA, 46 nt, Homo sapiens
gaagagcgccccaggagaaacaaaagagccacgaacccccgaacaa

SEQ ID NO: 92564 - RNA, 73 nt, Homo sapiens
ccaacgaggaacgcacgccaggagccagaggaagaccaaggaagccgaagcgaggccacggcgacgcacaaga

SEQ ID NO: 92565 - RNA, 76 nt, Homo sapiens
cggccagagcccacggcagcgccggagacaaccagggagacaaggaggagccaagcgggaaaaggggcaccgacgc

SEQ ID NO: 92566 - RNA, 79 nt, Homo sapiens
agacccagcagagggcgcgcaccggacaggaaaacagagccgggagacagcaagaccacccggcaccggcacggaccac

SEQ ID NO: 92567 - RNA, 63 nt, Homo sapiens
cgaagcggccgagcaggcgagcgaacgacgagacgccaaggccccaaaggacaaagcacagac

SEQ ID NO: 92568 - RNA, 73 nt, Homo sapiens
caccgaagacacaccccacaggaccccagagcgacagcccgggacaccaagaaagaacgacccacgcaggccc

SEQ ID NO: 92569 - RNA, 67 nt, Homo sapiens
gagaaggagcacagagaccagacccggcagagcaagagcacggggcccagagcaggcggacaggagc

SEQ ID NO: 92570 - RNA, 113 nt, Homo sapiens
gaggacccaccgggggcagggcgcaccacgaaaacaacacagcagggaagcagaaggaggacaaacaaagggaaaaagagccgaggacagaagccgacgaaacacaggaaggc

SEQ ID NO: 92571 - RNA, 67 nt, Homo sapiens
ccgagggaggagcccgcgccaaagaagagacgagcggcagcccacaagcaggaagaccagccccagg

SEQ ID NO: 92572 - RNA, 87 nt, Homo sapiens
gccgggcgaccccgcccgggcccggggagccaccagcgggcagcacaggaccccaccaccagccggcccgcgggccgacgccgccca

SEQ ID NO: 92573 - RNA, 70 nt, Homo sapiens
ccagcaacccaaaggcaacacacagaagagcggccacagaagacggcagcgaacgagaagagcaaggcgc

SEQ ID NO: 92574 - RNA, 85 nt, Homo sapiens
gccacacggagcaaagcgccccagaggaaacagaaggaggaggagagcagggggagaagaacagaagagagaacgcacaacagga

SEQ ID NO: 92575 - RNA, 79 nt, Homo sapiens
cagaccgaacccagaaacagagggaggaagacagccagcagaccccaagaagcaggcagacacaggcccaccaggacga

SEQ ID NO: 92576 - RNA, 59 nt, Homo sapiens
aacaggccaccgggccaacgaaaggacgacacaagaccaccaccaccgcggacggccgg

SEQ ID NO: 92577 - RNA, 78 nt, Homo sapiens
caggaggcacgccggccagccgccagaggccccacgggccaccggagaagacgaccccgacgcaggccaggagccgcg

SEQ ID NO: 92578 - RNA, 73 nt, Homo sapiens
ccaaccaggggcgagccgcgcgggagaagccagaggcccacgcggaccggcagcgccaccggaccaccagaca

SEQ ID NO: 92579 - RNA, 71 nt, Homo sapiens
ggcaagcacaagaccagcagagcaagaaggagacagacaggcccgcagaggggaccggacagagcccaccc

SEQ ID NO: 92580 - RNA, 48 nt, Homo sapiens
gagaggagaccagaacgaacccccccccccggaccgggggagcggccg

SEQ ID NO: 92581 - RNA, 81 nt, Homo sapiens
cccggggcgccgccgcgagcggccggacgccggagacccgcgggagggagcgcccgccaggggacaccagcagcgccgccg

SEQ ID NO: 92582 - RNA, 75 nt, Homo sapiens
aaagaagccccagcaggcacagcagcccggaaacgagggaaaaaacggaagcacaaaacaagagaagcacgaaga

SEQ ID NO: 92583 - RNA, 83 nt, Homo sapiens
aagcggggcaccacgaaggaccgaagagacaaaccagggccggaggaacgaaagagagagaaaacagagagaaaaacgcgaca

SEQ ID NO: 92584 - RNA, 77 nt, Homo sapiens
gcgcgccccgcggcgcccgcgccagacccaacagaggaagccgcaagaaacgggacgacaggaaggccagagaaggc

SEQ ID NO: 92585 - RNA, 77 nt, Homo sapiens
gccacaaagacccccagacacacacacccaacccaaaccaagaagaaaagaagagccccaggccaagggcgggagca

SEQ ID NO: 92586 - RNA, 113 nt, Homo sapiens
agaggagcggcccgcaggagagcaggcgggagcgaggccagcggaagagcgagaaggcgaagaaggacgcgaaagaagacagacccagagagaacacaccgccaccacccacc

SEQ ID NO: 92587 - RNA, 82 nt, Homo sapiens
gagcagccagaaagcggcacgaacagagccgggagcaagaagaacacccagagccgagagaaaaggggacgccacggacacc

SEQ ID NO: 92588 - RNA, 70 nt, Homo sapiens
gggggccggcccacagcacccggccccgcggggcgccagacaggacagcagccgcaaccaagcacacgag

SEQ ID NO: 92589 - RNA, 67 nt, Homo sapiens
aaggacacaggaaccgcagcacaaaaggaaggaggagacagacgcacccgcagacggggccgaaggg

SEQ ID NO: 92590 - RNA, 66 nt, Homo sapiens
cagagaacaacccccacagaaaagcagaccacgagaaagggaaaaggcccggaggaggaagcaaac

SEQ ID NO: 92591 - RNA, 74 nt, Homo sapiens
cccgcccagccccagagagcgggaacagggccggggccccgggagggccaccaccggacccgccagaccacaga

SEQ ID NO: 92592 - RNA, 68 nt, Homo sapiens
gggggaagggaccagggcaggaaggaaagccaagcgcaggccccagcggcggaggaaagagagccagc

SEQ ID NO: 92593 - RNA, 39 nt, Homo sapiens
gaggggagccacgaggaagcacagcagcagaacggggga

SEQ ID NO: 92594 - RNA, 76 nt, Homo sapiens
aaagaagcagccgcccagaaaaagagcacgacaggcgcaaaaaacaaccaggcgagcaacaacgcggagaacacac

SEQ ID NO: 92595 - RNA, 63 nt, Homo sapiens
ccaggaccaggccccaagcccgaggcccagaggaggagcagggagccaggagaaagaggaaga

SEQ ID NO: 92596 - RNA, 72 nt, Homo sapiens
ggccagcgagcaacgccggcgaagaagggaaacccagacgacaaggaaggccaagggacccacgaccaacca

SEQ ID NO: 92597 - RNA, 77 nt, Homo sapiens
cgaaacgcggacaacccgacacccacaccacaaccggccggccggcaacaccgagcagggaccggaggacccccaac

SEQ ID NO: 92598 - RNA, 79 nt, Homo sapiens
ccgggaccgcggagagaagcagcggacagcagagcaacgaacagacagcagcccacaaccccaggcaggagcgggcgac

SEQ ID NO: 92599 - RNA, 37 nt, Homo sapiens
gacacagcggcgaagcgcgcgcagaaccggccgaaaa

SEQ ID NO: 92600 - RNA, 65 nt, Homo sapiens
gggggggcaaacccgagagaacggagcgggagcccgacacgcgcgaccacgccccggaaagccag

SEQ ID NO: 92601 - RNA, 40 nt, Homo sapiens
ggggggcaaacccgagagaacggagcccggccagacaaga

SEQ ID NO: 92602 - RNA, 86 nt, Homo sapiens
aacgagccgcagagagccggacaaaccagacacgggaggaggaagaaggcaccacgacaaaccggagccgaggggagggaggccag

SEQ ID NO: 92603 - RNA, 79 nt, Homo sapiens
ggaacagacacggggaagcgcaaaaacaagacggggcgccccacagaggggcgacggaagcgccacgcagagagcaagg

SEQ ID NO: 92604 - RNA, 65 nt, Homo sapiens
gagcgccgcacaaaaagcagagagagagcccgagggaaaagacaggcaacaggaaagcaagggaa

SEQ ID NO: 92605 - RNA, 85 nt, Homo sapiens
gacggagccggagcgcggacgccgcggggcccgggacagggacaccggaaacggaccaaggagaggagagggggaagcaggcacc

SEQ ID NO: 92606 - RNA, 78 nt, Homo sapiens
aacaacccaccagcagccaccaaggaaacgcgagccccaccccaccgccggcggcaaccagggccagaccagaggaag

SEQ ID NO: 92607 - RNA, 86 nt, Homo sapiens
aggacagaccaccgaggcagaagaaacggcggccagagaagcagagccccgggaaggagcccagagccggcagggcacagcgggac

SEQ ID NO: 92608 - RNA, 76 nt, Homo sapiens
acggccaacgcagacaccagaagggcgggaggcagcggcccccacagggcagcgcaagaccccgcacggaagcagc

SEQ ID NO: 92609 - RNA, 70 nt, Homo sapiens
gccaccaggagcccgagagagaaggggggaggaacacgaccggaagacaggccaaggagagcagcgcgga

SEQ ID NO: 92610 - RNA, 103 nt, Homo sapiens
cgcgccgcgccgccgcccacaagcggcgccgcgccccggccgcacgggccaccggaagagaacagagacggcccggggccccagccaaggggcaggcaggaag

SEQ ID NO: 92611 - RNA, 75 nt, Homo sapiens
ccaacgaaagcaccagggaaaacccacccaggagaaagcccgaacgcgggaagaacgaagaaggacaaaaaggag

SEQ ID NO: 92612 - RNA, 75 nt, Homo sapiens
aagagccccgaggagaccacccccaggacggcgcgaggacacagggcgcacccgggagaggaccagccccgcccg

SEQ ID NO: 92613 - RNA, 78 nt, Homo sapiens
accggaccaaaagaaaaagacaaagaggcgaaagcaggacaggaagccaggagggaagcccagaagacgcacaagaga

SEQ ID NO: 92614 - RNA, 68 nt, Homo sapiens
gcgggccgcgaacacccacagagggagcgcaggggaagcggggacgagagccccggcacaaacggacc

SEQ ID NO: 92615 - RNA, 72 nt, Homo sapiens
agcgcccacggggacggagggccgagaagcggggcaccacgaaggaccgaagaggaaggcacggcgcaaacg

SEQ ID NO: 92616 - RNA, 79 nt, Homo sapiens
gcgccccccgccgccgccgccgcgcgccaaagcgcgccgccccgggcaaaagacccaacagaggaagccgcaagaaacg

SEQ ID NO: 92617 - RNA, 77 nt, Homo sapiens
ggggcgggaagcggcccccgggcgcgggcgaggccgggcggcgccgccccaccggacccgcagaaggagcacaacag

SEQ ID NO: 92618 - RNA, 71 nt, Homo sapiens
caacaaaaaagaacagcacgcccaagcaggagacgccaccgaaaaagccaaggcgaagccacagaaaggag

SEQ ID NO: 92619 - RNA, 78 nt, Homo sapiens
ggggaccggggacacacccacgaacacaaagggcccggacggagcccaagggagacggaacccaccggaaacgcagcc

SEQ ID NO: 92620 - RNA, 67 nt, Homo sapiens
gccaacacgaaggccaccgaggccgaacaagagcaaacggcgaaaccggcacagaagcacgggacgg

SEQ ID NO: 92621 - RNA, 79 nt, Homo sapiens
gaggcccaagaggccgcggggaaggaggcgcggcccgggcagcagggcggcagcgcccgagagagaacggccgagcgac

SEQ ID NO: 92622 - RNA, 40 nt, Homo sapiens
acccagagaaaagaagcaggcacagaaagcgaagggcgga

SEQ ID NO: 92623 - RNA, 74 nt, Homo sapiens
agagcaaaacagagcggaacgaacaaggggagaacacaggaaggaaaggccaaggcgagaagagagcaggagag

SEQ ID NO: 92624 - RNA, 83 nt, Homo sapiens
ggaagaggaacagccaggggcccacggaggccgcaggaggccaggccccagaccgcggggacccgagcagagccgggggccgg

SEQ ID NO: 92625 - RNA, 75 nt, Homo sapiens
acggagccgccacccagagcgcacggcgacgccccaggggaaaacccccgggaccaggaagcgaaagggggcaga

SEQ ID NO: 92626 - RNA, 35 nt, Homo sapiens
ggaaccagcgccgagggccgagacacagcccaccg

SEQ ID NO: 92627 - RNA, 78 nt, Homo sapiens
agggccggaccgagcggccggggaaagcccacagcgaagccaagcaaaaggagaagcggcaggcagccccacgaccga

SEQ ID NO: 92628 - RNA, 80 nt, Homo sapiens
cggagaggggccgcggaaaccggagggaagggcgcaaaagaccaaccccggaagggaaggcacaacacgccaccccccca

SEQ ID NO: 92629 - RNA, 75 nt, Homo sapiens
aaagaacagaaggaacgcagaaacacaggaccccccccaacgagaacggccaaccagggaaaggaaggagaacaa

SEQ ID NO: 92630 - RNA, 85 nt, Homo sapiens
gcgaagggaagaggcccagccggcccgcgggggagccccgggagccgcacggagcagagcgaggcagggccccagagacacaaga

SEQ ID NO: 92631 - RNA, 85 nt, Homo sapiens
agaggaggaggcgggaccaggcaagggccaggcagaggggaggagacacgaagcgacgcagagccagaagggaggcagggaacac

SEQ ID NO: 92632 - RNA, 80 nt, Homo sapiens
aacaccacgcaccgcagccgcgagagaggcaagccgggggaggaggccggacaagccgaagaaagcggaagaaccgaaca

SEQ ID NO: 92633 - RNA, 62 nt, Homo sapiens
acagagggggaaacaaagcaccgggacgcgcaaggaaggacaacagagaaagccagcacacc

SEQ ID NO: 92634 - RNA, 93 nt, Homo sapiens
ggggagccaaggaaacaggagcgaagcccagcgggccggacggggcggggggaacgcaaacaagcgaaaaacagacaagaaaccgcagagcgg

SEQ ID NO: 92635 - RNA, 77 nt, Homo sapiens
ccgcggggcagcgggccggcgccggcgcgccagaaaaccagcgacacgaacccccagcgaggaagcagccaagaaga

SEQ ID NO: 92636 - RNA, 76 nt, Homo sapiens
ggagggaggcccgaggaggggacggaggcaacggggacacgcacgagagggggcgaggaagagacaggcgggggag

SEQ ID NO: 92637 - RNA, 84 nt, Homo sapiens
agccccgggagcaccgagaagcggagaaggaaggccaacagccaggagaagccagcacggggagccacagcccgcagaggaccc

SEQ ID NO: 92638 - RNA, 66 nt, Homo sapiens
ggaaccgaagaaaggccagaggcccaagcccaaaggagggaagagagaaggcgaaggcacaaaaca

SEQ ID NO: 92639 - RNA, 51 nt, Homo sapiens
aacgaaagagaaaggcagccacggaccaggccgggccagcgcaccaggcag

SEQ ID NO: 92640 - RNA, 62 nt, Homo sapiens
aaggaaagcagcaagagaagagaagccgccgagaaaacaccgaaaggcgccgcccgcgccgg

SEQ ID NO: 92641 - RNA, 87 nt, Homo sapiens
aggccaacggcagaagccaccacaaaagcgaaagggcacaccacagaaccaccaggccccgaaagagccagagaaggaaggagggaa

SEQ ID NO: 92642 - RNA, 72 nt, Homo sapiens
caccaagcaacaacaggaaagaaaccgcaggacggacggacgggggccgggggcggggcgaggggcccaaac

SEQ ID NO: 92643 - RNA, 79 nt, Homo sapiens
gaacggcaggcaagcacaaagccagacccagccgcgccgaaaggcgacaaaccaagaggagccagaggcgaccgaaaga

SEQ ID NO: 92644 - RNA, 66 nt, Homo sapiens
ggagacaggaccgcggcgagcaaggacagaaaacgggccccagacacaagccccaccaagaggaca

SEQ ID NO: 92645 - RNA, 85 nt, Homo sapiens
cgcggaccccaagcccgccacgccgcccagcccggccccgcccgcgccggaagagccacgccggcacgcaaggggagcgcacccc

SEQ ID NO: 92646 - RNA, 79 nt, Homo sapiens
ggggcggcgaccgagaggcgcggagccggggacgcaaacggcagcggcagagaccaccacccaacccccggccccgcca

SEQ ID NO: 92647 - RNA, 77 nt, Homo sapiens
ccacccacaggccgcaaaggacccaggaagccacccgcagaggggcaaggagaaagggcaaacgcagcacacaaggc

SEQ ID NO: 92648 - RNA, 84 nt, Homo sapiens
ggagccggcgggcggggaacccaggccccgccgaggcggccagagcggggcccggcgcacccaccaccgccgcccacggcagcc

SEQ ID NO: 92649 - RNA, 75 nt, Homo sapiens
gacacaaaacccagacaccgacgggccgcgaggggaagaggaagcaaagccaaggggccagacccacgagaagcg

SEQ ID NO: 92650 - RNA, 52 nt, Homo sapiens
caaacaaaaacacgagagcgaccaagaggccagagcagcagcaaaaaaagga

SEQ ID NO: 92651 - RNA, 72 nt, Homo sapiens
ggcgaggccccaacccgggcgaagcgaaaggaagagcaacacacccaagaaagaccccccgaggaggaacgg

SEQ ID NO: 92652 - RNA, 67 nt, Homo sapiens
agacgccccaaaaaccggcccccagccgccagaccgcgccgggagcagagaccccggccgcccccag

SEQ ID NO: 92653 - RNA, 67 nt, Homo sapiens
gcgacgcgagaaggccgcagcaaggcgcgagcccgcggagcaccgcagcgggcccgagcgccggcga

SEQ ID NO: 92654 - RNA, 86 nt, Homo sapiens
gccgggcagcagccggccaaccgcagccaggagaaggagcggcaggcgacgaggaggcggagcggacaaagggccaggacaggaca

SEQ ID NO: 92655 - RNA, 60 nt, Homo sapiens
gacagacgcagggcgcccccggccccccaccccaagcaggaaccccaggagacaacccga

SEQ ID NO: 92656 - RNA, 76 nt, Homo sapiens
caaggaacacagcaagccgggcggacggaggcacccgagacgcggagcaggccgaggaccagacccggggacacac

SEQ ID NO: 92657 - RNA, 78 nt, Homo sapiens
agagaacccaacacagggaaaggaaccgcggacagacacacagacgggccaacaaccagccaaaccggccacaagcgc

SEQ ID NO: 92658 - RNA, 84 nt, Homo sapiens
ccgcgccgagggcggaggagcgcccggggccgggaccgacagcacgaggaggagagaagaaaagcggcccgagacaacaagggc

SEQ ID NO: 92659 - RNA, 57 nt, Homo sapiens
agacaagaaaccgcacaagaccgggagggcccgagaaaagacgccgcgcccaacccc

SEQ ID NO: 92660 - RNA, 79 nt, Homo sapiens
aaacccaagagcagcggcagagacggcaagcaggaaacggaggacggggaaaaaggaccacaagccacgaagaagagcc

SEQ ID NO: 92661 - RNA, 75 nt, Homo sapiens
acagagggggaaagccaaggaaaaacggagagccacaaaaaaggaagcgaaagaagccaggagggaagcccagaa

SEQ ID NO: 92662 - RNA, 54 nt, Homo sapiens
gacacagcacaccggagagacgaggggaaccaagccagagccaggagagagcag

SEQ ID NO: 92663 - RNA, 82 nt, Homo sapiens
cggaacaccccaacgggagacaagaagacgccaacgagcggcgcggacggcgcgcggacaccagccggaaccaaaaagaagc

SEQ ID NO: 92664 - RNA, 84 nt, Homo sapiens
cgcagccgcccaccaagcgccagaagacgagccggacgcccaaggcacgagaggacgagcaaacaaaagcaccggacacaacac

SEQ ID NO: 92665 - RNA, 62 nt, Homo sapiens
cgagcgaagccggaaaaccgcgggcgggggaccacacggaaccaaggcaagggaaaaaagag

SEQ ID NO: 92666 - RNA, 77 nt, Homo sapiens
cggcgccgcacccacaacagccagcaggccgaaacagaagcccgcgaagccgggaagaccaggagcagaaaaaccgc

SEQ ID NO: 92667 - RNA, 48 nt, Homo sapiens
ggaaaaccgaccaaccaacgaggcgcaggggcccaggacaaagggacg

SEQ ID NO: 92668 - RNA, 68 nt, Homo sapiens
gcacggacgcaccccacgggaacccacgaccaaagcggaaggccgccacagacaagccggcacggagg

SEQ ID NO: 92669 - RNA, 50 nt, Homo sapiens
aaaaaggaagcgaaaggggaaaagccagccagaacacagaacagaacaca

SEQ ID NO: 92670 - RNA, 76 nt, Homo sapiens
ggcacaggacggccagagggaaacaaacaaggaccaagcgggcagggaggcaccagaacacaacaaacgaacaagc

SEQ ID NO: 92671 - RNA, 77 nt, Homo sapiens
gaaaacccggagcgggccacaagcgagagaaacggcaaggacggggacacaagaccagccagcccagccacagagac

SEQ ID NO: 92672 - RNA, 81 nt, Homo sapiens
aagaaaacaaaaacgagaccaagagaaggcagccgagcaccgagccagcccaggaaaaggagagccaggaggcccagcagc

SEQ ID NO: 92673 - RNA, 50 nt, Homo sapiens
gaccacaggaaggacacaggcagggacaccagggccccgagcacaggagg

SEQ ID NO: 92674 - RNA, 83 nt, Homo sapiens
cggagaccgaaaagcccgccggccccagggccaacgaaccggcggacaagagcacacgaggggccacgccccacgcggaggac

SEQ ID NO: 92675 - RNA, 77 nt, Homo sapiens
cagacccgcgggacgggggaccaggcccgggcgggggaggcagaggaaaaacaccaccaggccaaccacagccgccc

SEQ ID NO: 92676 - RNA, 71 nt, Homo sapiens
gaagaacacaaccagaagaacgaagaaagcccgcacaccaaacgacaacggaagaacccagaccagcggga

SEQ ID NO: 92677 - RNA, 84 nt, Homo sapiens
agcgaggacgccggcaggggagggaacacacagagcagccccccagcccagcggcccagccccagccggccgggcacacacggc

SEQ ID NO: 92678 - RNA, 77 nt, Homo sapiens
gaaaccagcgcggggaagaagaacgggaggagggaagaaaagcgccgaccggaaaacagcaccaggaggcagcaaga

SEQ ID NO: 92679 - RNA, 82 nt, Homo sapiens
cccgccgcgcccaggagcggaacaacgcggcgagcgggagagcggaagccggcagaagaagacccaccaaggggcaacccac

SEQ ID NO: 92680 - RNA, 79 nt, Homo sapiens
gaagccgacagacaaccagcgaccggagaaacaaaacccgcacagcaaaggaaacaacaacagacgaaaagacaaccac

SEQ ID NO: 92681 - RNA, 68 nt, Homo sapiens
ccgaggccgaggggcccaggcagagcccggagaaaagccacaggcgccgaccccgacagaacgggccc

SEQ ID NO: 92682 - RNA, 76 nt, Homo sapiens
aaggccaaaaaggcaaccacagagagagagagggagggcaaaacaaacggagagaggagggagaaacaaaggccaa

SEQ ID NO: 92683 - RNA, 74 nt, Homo sapiens
aaagaaggagaaaagggagcagcaggagccccgcgggggcacgaagaacacaaagcaaaaaggaaaagaagaga

SEQ ID NO: 92684 - RNA, 59 nt, Homo sapiens
gcgcccgcgcggcgcggggaccgcggcccgggaccggagcccaccaccagcgaaggaca

SEQ ID NO: 92685 - RNA, 120 nt, Homo sapiens
agaggcagagccgggccagccaaacaggaagagggagcccgccgacagcccacacgaaagcggggaagcgaaggcagaaacacccacaacaggagacaccaaagaagagaaagacaagga

SEQ ID NO: 92686 - RNA, 82 nt, Homo sapiens
gcgcggcggggggcacaaaaggcaacgaggagcggcagcggcacggcagcgagagcggaggcccgcgagaggacggcggccc

SEQ ID NO: 92687 - RNA, 77 nt, Homo sapiens
cgaagacaacacccgcgaggaaaaggggaaaagccacggcaggacaaggggcagaccacaaggagagaagagaggga

SEQ ID NO: 92688 - RNA, 71 nt, Homo sapiens
agcagggaaaggacgcacccgcgcccaaacaggagcgaaggagaccgcaggaaacacacaaaagccaccag

SEQ ID NO: 92689 - RNA, 74 nt, Homo sapiens
ggaagcgcccgcgaccggaccgccccggggaaacccgggcgccgccaagagccgcagagaacgcgaacacaaac

SEQ ID NO: 92690 - RNA, 39 nt, Homo sapiens
ggaggcgcacacacaccaaaggacggaagcccgcgcagc

SEQ ID NO: 92691 - RNA, 79 nt, Homo sapiens
ccgaaggcggagcgacgggcggcgggccagggggcgcggggccgggcgcgcgagcaacacaaaaccggacagaagcagg

SEQ ID NO: 92692 - RNA, 85 nt, Homo sapiens
ccgagcaccaaccgaggcgccccggccgccgcgcacccggcagcaccagacagcgaccccccagaaaaggacagcaaagacccaa

SEQ ID NO: 92693 - RNA, 79 nt, Homo sapiens
caggagagcgccccagggcaagccccgcccggccaacaagccgacggaaagagcaaacagcaagcaacgccgcaccagg

SEQ ID NO: 92694 - RNA, 69 nt, Homo sapiens
cgaagaccaggcgggaaaaagaacccgccacaagaccaaaaaaaaaagagccaacagggagcggcggac

SEQ ID NO: 92695 - RNA, 76 nt, Homo sapiens
aggacggaaaaagagcagaccgaaaagcggcacgacaacaaaaccacagagagggggagcgggaagacccggacaa

SEQ ID NO: 92696 - RNA, 58 nt, Homo sapiens
aagaaccgaccgcccagcgcaccacgacaaagaagagaaaacgcggcagagcaacaaa

SEQ ID NO: 92697 - RNA, 82 nt, Homo sapiens
gagcgggaacgggagccgggcgcggggagcgcgcgaagccggggcggagcacgcgagcagagacgacaacccccccggcgga

SEQ ID NO: 92698 - RNA, 80 nt, Homo sapiens
cagccccgagcagcgggacacaggggcacaagaaggccaaccccaaaagagagaacacaggcaagacgaaaaccgccgaa

SEQ ID NO: 92699 - RNA, 111 nt, Homo sapiens
agcgaaaacagccaaaagaaaggccagcaccgaagaagaggagcggcggcaggaggcccaccaccagcggggccggggcgcgagggcagcccgcccaacccaagcaggagc

SEQ ID NO: 92700 - RNA, 58 nt, Homo sapiens
ggcgaaggcggcggaggaggagacccccaggcaaaccgccccgcagcaccacccggcc

SEQ ID NO: 92701 - RNA, 77 nt, Homo sapiens
cagaaacccacagcaagcccaggacccagaaaacagcaaagaagaagcaagaacaagcaacagacaaggccacacac

SEQ ID NO: 92702 - RNA, 57 nt, Homo sapiens
agaaaacagacagagcagaagaaaccaagacggcagagagacaagagcgcccaagcg

SEQ ID NO: 92703 - RNA, 77 nt, Homo sapiens
cagaaacagcaagaaaagcacaacggagcagcagacacgccggggacacagaagaggggagcgacgagaccagcgga

SEQ ID NO: 92704 - RNA, 74 nt, Homo sapiens
ccgagccagccccgacagcgggaaccaaacacaggggaaacacgagagagcaacagccgacagagcggcaccga

SEQ ID NO: 92705 - RNA, 74 nt, Homo sapiens
gacggacacaacggcagaccgcagaacacccagccaggacagagaagcagccaggccacacggagcagggcagg

SEQ ID NO: 92706 - RNA, 75 nt, Homo sapiens
acaacggcgaccagcccaccgaaaggagagaagcaggcacagaggacagaggccacgaagccagagcgcaaccag

SEQ ID NO: 92707 - RNA, 79 nt, Homo sapiens
agcagcaccagcggccggggaaaggggagcgccggaccagcgcgagcgccacggcacggccccacccgggcacaccgag

SEQ ID NO: 92708 - RNA, 73 nt, Homo sapiens
gagaaggccgggcgccgagccggaccggagagcacaagccggccacgagagccaacggaccacaacagagaac

SEQ ID NO: 92709 - RNA, 78 nt, Homo sapiens
aaggcgggcgcagcggcggagcggagcggagcccggaggacaaagccgaggcaccaaacgacccggacgcgacgggca

SEQ ID NO: 92710 - RNA, 84 nt, Homo sapiens
agcacgaccagccaagcgccggagcaaggaaggggaaagaagccaaggaaaaagcacccagaccaaaaaaaaaaaacaaccgag

SEQ ID NO: 92711 - RNA, 66 nt, Homo sapiens
ggagaaagggacggcagcaggaagccgcagaacccgccccgaaccgagaagaaggaaaaagggcaa

SEQ ID NO: 92712 - RNA, 77 nt, Homo sapiens
gaacagcccggcacagccccagcggagcgacgcagaagacggggacgcaccacgagaagaaacaccagaagaacaaa

SEQ ID NO: 92713 - RNA, 80 nt, Homo sapiens
agcggcgggggagagccgaaggagcagcccaggaccgagaccggagcagccggggcggagcgggaagaagacggcacggg

SEQ ID NO: 92714 - RNA, 39 nt, Homo sapiens
cagcccagacaggggccaggacccaggagaaggaccaga

SEQ ID NO: 92715 - RNA, 58 nt, Homo sapiens
gcagccggcaggagagcgacaaaccaaggagggaaacgaggaaagcaaaacaagaaaa

SEQ ID NO: 92716 - RNA, 74 nt, Homo sapiens
cgcagggaaggaccagacggggacgcacacggaagaaacgcaacccagggaggcgccaggcaagcggcaaccga

SEQ ID NO: 92717 - RNA, 63 nt, Homo sapiens
gggaacaggcacaggacggcgcccaaggcggaccggaagcgagcaggagcagagcggaagacc

SEQ ID NO: 92718 - RNA, 71 nt, Homo sapiens
aggacgaaaaaagggcaagaagccagaaggcgaacaagaggcgccagcgggcgcgccggaagaacagcgcc

SEQ ID NO: 92719 - RNA, 61 nt, Homo sapiens
aggagaaagccgagagaaggacaacaccacagggccgaggacaccggagccagccaggccg

SEQ ID NO: 92720 - RNA, 89 nt, Homo sapiens
cccagacgcgcccccggagagcagaaggggccccgggagcggagacagaggacaggagggcggagcgccagccccacccacccggagag

SEQ ID NO: 92721 - RNA, 76 nt, Homo sapiens
ggcgcaggaccggggaaccgccaaagcccgggcgcggaagaagccaagcgacgacagacccacaagcgccgccagg

SEQ ID NO: 92722 - RNA, 71 nt, Homo sapiens
accacggaccccaaggaagccacggcagacacacaacccgacccgacgagccacgaacgacgcacggaggc

SEQ ID NO: 92723 - RNA, 87 nt, Homo sapiens
agagacacccagggagaggaaacgggaacagaaagaaaagccgaaagagcgcggcggaggcaggacccagaccggacgggaacgggg

SEQ ID NO: 92724 - RNA, 71 nt, Homo sapiens
gagacggaagacaacccagacggcgcggacggacagaaggaacccccaccccgcgaccgcacaagaaaaac

SEQ ID NO: 92725 - RNA, 74 nt, Homo sapiens
ggcaaaacacggcccaccacccagagaaccggggacaaaccgcacagggccgccccccgggcgaggcagagacg

SEQ ID NO: 92726 - RNA, 75 nt, Homo sapiens
cgacgagagagaccggagaggggagagaggaacagggagggcccccgccagcccggcaggcgcggccccgaggga

SEQ ID NO: 92727 - RNA, 73 nt, Homo sapiens
gggagcgcggcgggcgcgcgccagggggggccacgcgaacccagcacgacaggcgagcgagggagggacgagg

SEQ ID NO: 92728 - RNA, 74 nt, Homo sapiens
cggccaaacaggcagcggggccagaccaccacggaaacaaggacgggcgggcagcccgccggccacacgcccgc

SEQ ID NO: 92729 - RNA, 73 nt, Homo sapiens
cgggcagagcgagccggagaagagggggcccggggggaggaggggcaggcccggcggacaaaccggacccaga

SEQ ID NO: 92730 - RNA, 77 nt, Homo sapiens
aaggcacgagagacgacgaggcgaagagccccgggcacccagggccagcggcccggccaacacgcacaggcaacccc

SEQ ID NO: 92731 - RNA, 59 nt, Homo sapiens
agacgagcggaggacacccaacccggccaaagcgaggccaggaacgacacaaggggaag

SEQ ID NO: 92732 - RNA, 74 nt, Homo sapiens
caccaaggaacgcaggaccagcgcagggaagagcagcccaacccggggaacggcgggcagacacaaggaacagc

SEQ ID NO: 92733 - RNA, 51 nt, Homo sapiens
caacaggaacccagacagcgcgcgccagggccggaaagagccccgaaccac

SEQ ID NO: 92734 - RNA, 55 nt, Homo sapiens
gagaaacgccgagaggggagcaacgcggaggaacagacacaaggacggccccagg

SEQ ID NO: 92735 - RNA, 72 nt, Homo sapiens
ccccaccgcgcccccacgcaaaaaggccggaggcagcaccgggggcgaccagaacggaacacagcaagccca

SEQ ID NO: 92736 - RNA, 58 nt, Homo sapiens
ccagaggagagagagagacaacaggcagaaggcggcagggagcacgcaccaggagccc

SEQ ID NO: 92737 - RNA, 77 nt, Homo sapiens
cgccgccgaagaagcacgaaagccccacccgccgcagcaagcagagaccggagaagaacaagccgacccaaagccgc

SEQ ID NO: 92738 - RNA, 56 nt, Homo sapiens
cgggagaaagggagccgagcgagaccacgcaccacgggcgccaggcagagaccaac

SEQ ID NO: 92739 - RNA, 73 nt, Homo sapiens
gacgaagaacccacagagcagacaagaaggaagaggaaggccgaagagaggcgacgaacggaaaaaaacaagg

SEQ ID NO: 92740 - RNA, 65 nt, Homo sapiens
gaacccccccaacggaacagcaccccccaagaggcgagagaaacagaaaagcgcgcaagaaagcg

SEQ ID NO: 92741 - RNA, 35 nt, Homo sapiens
acgaacccagccccagaacgacggaaaacacaaac

SEQ ID NO: 92742 - RNA, 87 nt, Homo sapiens
aacacacccaaggcacagagcagccagaaacggagaacaagggaagagaagcgaaggacgacagccaggggaggacaccacggcacc

SEQ ID NO: 92743 - RNA, 79 nt, Homo sapiens
ccggccgacaaccacggagagaaacagcagaggaaagcccgggccacaggagcgaaaaagaagaagaaaaaaaaaaggc

SEQ ID NO: 92744 - RNA, 68 nt, Homo sapiens
aacccgggccccgccaaacagaagaccaggacccaaaaagccccgaaggacgcgaaagggagccaccc

SEQ ID NO: 92745 - RNA, 103 nt, Homo sapiens
ggaacccaggaggccagagagccgaccggaggacgcggagaaccggcacagcccccggaaacagccaaaggccaggaggacagaggaccacggaccgggaaac

SEQ ID NO: 92746 - RNA, 40 nt, Homo sapiens
aacggagggcgacggagggaggcccacccgggcaggagag

SEQ ID NO: 92747 - RNA, 97 nt, Homo sapiens
ccaaggcaacaaggacaacaagagacgggacaagacagggcaaaggacagaccagggggcacccgaggaggaagagggcagggcccacggaaagaag

SEQ ID NO: 92748 - RNA, 67 nt, Homo sapiens
acaggaagagaaccgccgcgggcaggaaaggagggcgaaacacaagcaccacccccggaagcaccag

SEQ ID NO: 92749 - RNA, 110 nt, Homo sapiens
acacacgcccacaccacggaaagacccaaccagaagagacacaagggacaccccaagagaagcacggagagcccaagaagcaggcagccccgcgggccggagcggcggcc

SEQ ID NO: 92750 - RNA, 63 nt, Homo sapiens
cacggagggccagaacgaaaccgcccccaaagccagagcccaagccaaaaaggccccgcaaag

SEQ ID NO: 92751 - RNA, 61 nt, Homo sapiens
agaaggaccaagaaccagggagggagcggcgggaccgggcgcagacggcgagaccccgcac

SEQ ID NO: 92752 - RNA, 85 nt, Homo sapiens
gagacgcgcggggagcgcgccggaccaagcgggcccagaagcggaagacgaccccgacgcaggccaggagccgcggacagaagcc

SEQ ID NO: 92753 - RNA, 63 nt, Homo sapiens
ggcaccggaaagccaggaaaaacacacgcagaggcggaccggcgccagggcccggaagacacg

SEQ ID NO: 92754 - RNA, 76 nt, Homo sapiens
ccgaggaccaccacagaaggaagaagagacgaggacgcgcacaggaaaggacgcggaacaagcaggcagccaggca

SEQ ID NO: 92755 - RNA, 80 nt, Homo sapiens
caaaaaggcggaggggagccagcggcgccgaggcagcaaccaccgaaacgggcgaaaaagaagaacagcaaaacacgaaa

SEQ ID NO: 92756 - RNA, 85 nt, Homo sapiens
caggcccgaacgcgggggacgcccgacggcagcgcgggaaacgcaaaccgagacgaaagaggcggacgaacccaaggaggcagga

SEQ ID NO: 92757 - RNA, 60 nt, Homo sapiens
cgccgccgaggaggcgagcagccgggagacaccgccaccgccaggcacgagaacagggcg

SEQ ID NO: 92758 - RNA, 74 nt, Homo sapiens
ggcaccagggaagagccagcaaggcagagacacccagaccaacccagaccccaagcccagagcacgggacagag

SEQ ID NO: 92759 - RNA, 73 nt, Homo sapiens
gagaaggcggcccagccaaagacccagcaagcaaccacgagagcacaaggacaaccaacaacccccagaaccc

SEQ ID NO: 92760 - RNA, 65 nt, Homo sapiens
ccaccaggacacggagggccagaacggaagggcgcacggaaaaggcacccgggcaagcagggcac

SEQ ID NO: 92761 - RNA, 76 nt, Homo sapiens
ccaacagccagagagaggaggcgacaaagcagcacaggaagaaagccccagacaggaagagggcccaaccaagacg

SEQ ID NO: 92762 - RNA, 77 nt, Homo sapiens
cccgcgcagccgccggcgcgccgccaggaccagggggagccccccagacccgaaaggagacaagaggacagccgcac

SEQ ID NO: 92763 - RNA, 79 nt, Homo sapiens
gccgccgccgcggaaccgcggcgcagacagccaaggagacggcacgaagagccaggacaaacccaccgacggggaaaac

SEQ ID NO: 92764 - RNA, 77 nt, Homo sapiens
gaaagccagacccgcccaacagaaaaagagaggagggagaacacagaaacccgccccggggacaagcacaacagaac

SEQ ID NO: 92765 - RNA, 56 nt, Homo sapiens
aacaacgcagccaccagagaagccacagaagaagcggacagcccgaaagggaacca

SEQ ID NO: 92766 - RNA, 85 nt, Homo sapiens
gggaggggccccaaaggaaggccgggaccagcggacgaaccgacaggaggggcagcgaacccagagcacccaggcagcacggccc

SEQ ID NO: 92767 - RNA, 81 nt, Homo sapiens
acagaccaggacgaggcgcggagcagaaccccccgcaaggaaaaagggcggagaacggaaaagcaccaggaagcagagagg

SEQ ID NO: 92768 - RNA, 76 nt, Homo sapiens
gcaacagggagggacacacccaagcacggaccaaagagcgccacccgaaaccagcccagaacccgagaaacagaca

SEQ ID NO: 92769 - RNA, 77 nt, Homo sapiens
aacaggagcccagcagcagccaagaacaacgccacaaccccgaacgacacaaaggccgcgcccaggaagaaccaggc

SEQ ID NO: 92770 - RNA, 86 nt, Homo sapiens
cgacacgaaggaggaagaagagacgaagagacagcggagaagggaccaaaagaacccagccaacccgcagagggaggggaggggcg

SEQ ID NO: 92771 - RNA, 73 nt, Homo sapiens
cgcccagacgcggggagccgccggagcgagaagggaaacacaaagaagacaccagaagggccagcaccacgac

SEQ ID NO: 92772 - RNA, 64 nt, Homo sapiens
cccaggccagccaccccgcaggacagccacggagaaccacggggaccaagaagcgagcagccca

SEQ ID NO: 92773 - RNA, 85 nt, Homo sapiens
cccgcgcgcgcaccccgcggacgccacagcgcgagccggaagcaaggcgagcacccgcgagccacgcaggcaacgacgacggaaa

SEQ ID NO: 92774 - RNA, 68 nt, Homo sapiens
ccagggaagaggaccaaagcgaacaaaacgcacgccaccggggcacgcgcaagagcgaacaccaccgg

SEQ ID NO: 92775 - RNA, 73 nt, Homo sapiens
cgggaggacgcacccggggaaccagcaaacaagccgccacaggaccaggcaccaaggaacaccgaccagcgcc

SEQ ID NO: 92776 - RNA, 47 nt, Homo sapiens
cgagacgcagcacccgccaggccaccggccagccacaggaagaaacc

SEQ ID NO: 92777 - RNA, 78 nt, Homo sapiens
ggagaggaaaccccaaaaaagacaggggagaaaaggacacaaacggaggaagccggaaaccgggcaccggccagcccc

SEQ ID NO: 92778 - RNA, 70 nt, Homo sapiens
cccacagaggggcgacggaaacgcgcacacaacagccaccggcaggcccgcagccgaaccggggaggccg

SEQ ID NO: 92779 - RNA, 85 nt, Homo sapiens
gccgccgcccgcagccgccgcccgccgcagggcgcgacggcccgcacgcgccgcgccaccggcgcgcccgaggaggagcgggagc

SEQ ID NO: 92780 - RNA, 34 nt, Homo sapiens
ggaccaaacaccaaaacagacgagccagagaggc

SEQ ID NO: 92781 - RNA, 72 nt, Homo sapiens
aacaagacaccccccaccccagaaccccacacagacagaacagaaagcgcgcaaagcggaccaaaaccaggg

SEQ ID NO: 92782 - RNA, 74 nt, Homo sapiens
aagaaacaaggacacaagagaacacacaccgaagcaacccaaagcacgaacaagcaagcaggacaagcagaaac

SEQ ID NO: 92783 - RNA, 84 nt, Homo sapiens
cagaagaagcccagagagcaccccagcgaggcccacagaaaagccacaacccagaagccagcgaagagagggggaaaaccccag

SEQ ID NO: 92784 - RNA, 39 nt, Homo sapiens
acccgacggagcagacagaaaggacaaaaagagagcccc

SEQ ID NO: 92785 - RNA, 82 nt, Homo sapiens
gcggcgagaggaggccgccagcagaggcggagcccgcagaccgcagaaggccggagacaccagcagccccacacagggagag

SEQ ID NO: 92786 - RNA, 54 nt, Homo sapiens
cgagggaagggggacgagccaagaaggaagccgcggagcggaggggggaagggg

SEQ ID NO: 92787 - RNA, 68 nt, Homo sapiens
ccacagggcagggagagaaaagacccaggaccgcaccaggaaaccagcaggaaagcgaggagggacac

SEQ ID NO: 92788 - RNA, 67 nt, Homo sapiens
aaggaccaagaaccaggggccagagaacaagcccagacagcaagacgcgagcgcaggggaccaggca

SEQ ID NO: 92789 - RNA, 58 nt, Homo sapiens
acagggagcaccgaccgagcccacaaaccaaggcaccagcccagccacagccagccca

SEQ ID NO: 92790 - RNA, 82 nt, Homo sapiens
ggagcaacaaccggcgggccgaggccgcaggaggagggagaggagaaagccggacagacacacagagagagaagaaacgcaa

SEQ ID NO: 92791 - RNA, 64 nt, Homo sapiens
ccccccacgcaggagccccgaccagcaggggaaagacaccccagggacagcggagccgggaccg

SEQ ID NO: 92792 - RNA, 94 nt, Homo sapiens
cgccggggcccgccgcgccagcgcgcggggggcgccccccagcccggaggcgggcgggcgagacccgaaaggccacccaagcacgacaagagcc

SEQ ID NO: 92793 - RNA, 97 nt, Homo sapiens
aacccccccaaacagaaccaagcccaacagagcccacgggaagacaagagacagggagcagggaagccaacaaaaaacgggagggaccacaaaccaa

SEQ ID NO: 92794 - RNA, 79 nt, Homo sapiens
aggcgcagggcagaaaaacgagccacccgcgaaaagagccacggggccaagaaggaccaaaacagaccaggaccgcccc

SEQ ID NO: 92795 - RNA, 81 nt, Homo sapiens
cgcgcaagggcacccgcgacgacgagacgacacccaaaggaagaagacggcacgggacccccagcacaggcagcaggccgg

SEQ ID NO: 92796 - RNA, 75 nt, Homo sapiens
ggagagagagaagcaagcacgagccaagcaaggaaagccaaaagcaccggaacaacaaaacaaagagacccacac

SEQ ID NO: 92797 - RNA, 61 nt, Homo sapiens
ccgccgcccgccgccgcggagcagaggagagccaggcacaaaaaggggaagacaaaagcag

SEQ ID NO: 92798 - RNA, 81 nt, Homo sapiens
ggcaccagcacgacccaaggcacaccgggccgagcggcgccacaccggagacgccagggagccacacagaaaaagagcaaa

SEQ ID NO: 92799 - RNA, 77 nt, Homo sapiens
ggacccgcagggcgccaaagcgagagagggaagcgcccggccggaggcaggggaaaggacccaggagcggaccgcaa

SEQ ID NO: 92800 - RNA, 72 nt, Homo sapiens
acacacgccgagaagacggccccacggagacggccagaacaccacagcccacaaagaagaagcacagacgag

SEQ ID NO: 92801 - RNA, 75 nt, Homo sapiens
cagcccagagcgcaaagaaagaccgcgacggggcgagccggcagaggagcgggcagagaagaccggacagccgcc

SEQ ID NO: 92802 - RNA, 96 nt, Homo sapiens
gacaaaaggagacgagaagaagacaagaggagccccagaaaaagaccagggaaaagcccagcgaagaggacccagcaggaacagagggaaggaaaa

SEQ ID NO: 92803 - RNA, 71 nt, Homo sapiens
cccacaggaaaggagggaagccagaggccaaaggcaggaggcaagaaacgcgcaaaccaagcaaagaaagg

SEQ ID NO: 92804 - RNA, 70 nt, Homo sapiens
aggaccaccgacccaggacaggggccaaaggagaccggaaggaaggaaaccaacaggaaacaggaggaaa

SEQ ID NO: 92805 - RNA, 78 nt, Homo sapiens
caaggaaaaaaagcagagaggagcggggagcaagcaggagcaaagaagaacgaggcagcacaacaaaaacaaagaaaa

SEQ ID NO: 92806 - RNA, 54 nt, Homo sapiens
cccgggccccgggcgcccagaagcgcagaaccggccgaaaagcacaaacagcaa

SEQ ID NO: 92807 - RNA, 80 nt, Homo sapiens
cagggcgcccgcccggaccccgaccgcccaccggaagaccgcaagggcaggcgcagcccgcaaccagcccgagccggcag

SEQ ID NO: 92808 - RNA, 66 nt, Homo sapiens
acgggaagccaagcaacagcccacagggaaacacaaagaagacaccagaagggccagcaccacgac

SEQ ID NO: 92809 - RNA, 74 nt, Homo sapiens
ggaccaagaaccagaaagccacacacgaggaggggcacggaagcaaaagccacgcccagaacccaggcggagac

SEQ ID NO: 92810 - RNA, 81 nt, Homo sapiens
gaaaggccagacagacacgagggaccaggccagaacggcgcggcagggcgagagagcgaccaggggggagggacgggcccg

SEQ ID NO: 92811 - RNA, 76 nt, Homo sapiens
gccaggcgggaggaagaggcagaggacccaccgccagccacccacgccagcagagaggggagagcagaagacccca

SEQ ID NO: 92812 - RNA, 87 nt, Homo sapiens
caaaaagcggcggccgggaggggcgcggcagcgggcaagacacagcagcagccaagcgcaggccgcgaggcgagagccggcggaaga

SEQ ID NO: 92813 - RNA, 78 nt, Homo sapiens
ccgggacgcacacggcaccaaacggaacccagaccaggccaaagcaaacaacagaaggaaaagagccggagaccaaac

SEQ ID NO: 92814 - RNA, 58 nt, Homo sapiens
cgccgccccccgaggagaccgggcccggaagaaggaggcagcggccacaaaagccaca

SEQ ID NO: 92815 - RNA, 49 nt, Homo sapiens
gggcggcggacacaagcaggacgccccacacacggccggggcagcagaa

SEQ ID NO: 92816 - RNA, 79 nt, Homo sapiens
aagcccaccgccggaacggcgcggaccgcgcacgggaccgccgccccagcggggggggcccaaacgcccggaaaccccc

SEQ ID NO: 92817 - RNA, 73 nt, Homo sapiens
gagaccgaagccagcccaaacccaagggcagcagcaggaacaggaacagccaggagcacaaacaaaagacgga

SEQ ID NO: 92818 - RNA, 72 nt, Homo sapiens
agacaaaaacaaggccaaagacaagcagaagccaggagacgaagaggccaaagggaccgaacagccacaaac

SEQ ID NO: 92819 - RNA, 79 nt, Homo sapiens
acggcagcggccccggagacacaccggaacgcgcggaggaacgaaaagcggaagagggagcacgaaccgcgcaggcgac

SEQ ID NO: 92820 - RNA, 41 nt, Homo sapiens
ccgggacagaacaacagggcggcccaggcccgaccccgaag

SEQ ID NO: 92821 - RNA, 71 nt, Homo sapiens
ccaccacacgccagaggcgccaaacccaacagagcgaagacccgaaggccgcgagaccgagaaggacacgc

SEQ ID NO: 92822 - RNA, 71 nt, Homo sapiens
ggaaaagaacagagccacacaagaaggccagaacggcacgcaccaacccaagggaaggcaggggagacccc

SEQ ID NO: 92823 - RNA, 61 nt, Homo sapiens
cagaaggagcaaaaggcggacaggcagcgaagaaaagggacggccagagcccgaagaagaa

SEQ ID NO: 92824 - RNA, 58 nt, Homo sapiens
acgccgccacgacccccagggcggagaacggaaaagcaccaggaagcagagaggaccg

SEQ ID NO: 92825 - RNA, 88 nt, Homo sapiens
agcagccagaggaggaaaggcgccaggcagccgagcggagcggaagcggacgaggccacgaagacggcaaggaggaaaggaagaggaa

SEQ ID NO: 92826 - RNA, 62 nt, Homo sapiens
aggcggccaccgaggaggagcggcccgcaggcggggaggagggcaccacaggaggcagggag

SEQ ID NO: 92827 - RNA, 53 nt, Homo sapiens
ccgccccccagaggcaggcccagcacacccccgggccacccccggcagacggg

SEQ ID NO: 92828 - RNA, 80 nt, Homo sapiens
agacggggggggccggaggagcagcgggccagaacggccaggagacgcaacggacagcccagaaacgcaggaccggccga

SEQ ID NO: 92829 - RNA, 68 nt, Homo sapiens
gggacggccccaggagaagagccagagcgggaggacgacgagagaggaacacgaggacccaaagaaca

SEQ ID NO: 92830 - RNA, 75 nt, Homo sapiens
acagaagagacccaccaaaggacccaacaaaggaaggagcaagacgagaacaacgacaaaagaaggggcggggca

SEQ ID NO: 92831 - RNA, 63 nt, Homo sapiens
gcacacaacaggaaaacaaaagaggagaaagggcccaggcgcacccaggcagaaggaggaggg

SEQ ID NO: 92832 - RNA, 80 nt, Homo sapiens
cagcacagaaccaggccccgaggaacagagaaaagaaaccagcagacagaagcagggcgcccgcgccggcagaggaggcg

SEQ ID NO: 92833 - RNA, 73 nt, Homo sapiens
aaacagcaggaccagaacccgcgaaagagggaagcggcaaaccaaaagagcaacgggccaacaaaaagggcag

SEQ ID NO: 92834 - RNA, 75 nt, Homo sapiens
aaacaagacggggcgccccacagaggggcgacggcgcagaagagcaagaccgaagacaacaaaagaaaacaaagc

SEQ ID NO: 92835 - RNA, 91 nt, Homo sapiens
agcgcccgccccaaaagaacaccaggccaagcagaagaacgcaaggagcgcaggggaggaggaggcgagaagaggcggacgaccccaggcg

SEQ ID NO: 92836 - RNA, 77 nt, Homo sapiens
aggacagcggcagcccccagcagcccggacaggagagggagggaccggggcacgggccccccagcccgcggaacggc

SEQ ID NO: 92837 - RNA, 74 nt, Homo sapiens
ggaagaggaaccacaagaaaacaaaagaaacgcccacagaacaccgaggaacagaacccccacagcagcacgca

SEQ ID NO: 92838 - RNA, 70 nt, Homo sapiens
ggggaaggcagcgggggcccgcagccagagacggagcccaaaaggcagagcgaggagagaagaaggaggg

SEQ ID NO: 92839 - RNA, 87 nt, Homo sapiens
cgcggccaggcagggaggagaccggcacccagacaggggcgaaggcagaggaaggaccgggacagaacccaaaaaggacaagaggcg

SEQ ID NO: 92840 - RNA, 72 nt, Homo sapiens
ccgccaagcgcacacaaaagaggagaaaaccgggcgcagccgcagccaccccccccacgcgcaccaccacga

SEQ ID NO: 92841 - RNA, 78 nt, Homo sapiens
ccccagaggcgccaagacgggcaagagggacacgagaggcgagggacgacagagcaagcggcagagggcaagcgggaa

SEQ ID NO: 92842 - RNA, 80 nt, Homo sapiens
cacgcagaagagccgggaaagaaaggaaagcgaacgccaacggcaagaaagggaaggccgcaaacagacacgcggaaaag

SEQ ID NO: 92843 - RNA, 56 nt, Homo sapiens
agccggcccgcgccccccacagaagcgagaacggcaagaaagagagaaggaagaag

SEQ ID NO: 92844 - RNA, 71 nt, Homo sapiens
gcagaccgggcaagaccacccgcaagcacgcgccagcgaggggggccggggcaaagaccggcaagacggaa

SEQ ID NO: 92845 - RNA, 75 nt, Homo sapiens
gaaaaggacgagaacgccgcgacagaaaacacaaaagccaggaagacaagagcagaagaaacagaccgaaagaca

SEQ ID NO: 92846 - RNA, 75 nt, Homo sapiens
agggcgagagggcaccgcggacggggccgcccagcgggggagagcagcggcgccagcccgggccacaccgggacg

SEQ ID NO: 92847 - RNA, 66 nt, Homo sapiens
aggccaccagaggagcagaaagcagacagaaagagaaaagggacagagcgaggaaaaggcacaggg

SEQ ID NO: 92848 - RNA, 70 nt, Homo sapiens
ggaaaggccgcgggggcaacggagaaaacccggaaccgcgacggcggcaggcccgccaagcccccagccg

SEQ ID NO: 92849 - RNA, 72 nt, Homo sapiens
cgcacccaaaccaggacccaaaaaaggcaccgcgcaagggggacggaagcggcagcgggcagccggcccagc

SEQ ID NO: 92850 - RNA, 76 nt, Homo sapiens
agaacagcaacgagaaggggaggccaaagagacacagcccaagacaagacaagaccacacccgggagagacagagg

SEQ ID NO: 92851 - RNA, 53 nt, Homo sapiens
agaaaggcaacaaaaccacgcaggaaaagagcacgggccaggacccagaggac

SEQ ID NO: 92852 - RNA, 59 nt, Homo sapiens
cagaggcacacggccccagccccaccagcaggagcacacaggcagaccaacagaacgca

SEQ ID NO: 92853 - RNA, 73 nt, Homo sapiens
aaaagaggcgcaagaacgccagggagaacccgcaacacaaaccccaccaacaaagacaagaaggcagcaaaga

SEQ ID NO: 92854 - RNA, 88 nt, Homo sapiens
ccgccacgccgggcgacgacgaggaggaggcggccgccgcagccggggcccccgccgccgccggagcggccaagaagcgaaccaccgg

SEQ ID NO: 92855 - RNA, 82 nt, Homo sapiens
ggacgggcggaccagcagagacccacagaccaggcacccgcaggagaggccccaacaagcggagaggagaaaaagaaaccca

SEQ ID NO: 92856 - RNA, 80 nt, Homo sapiens
gaagcaggaccgcacaccgacaggcggagcgcgagagggaccgggaccgcgccaccccggacgcccgaacaggaccagga

SEQ ID NO: 92857 - RNA, 52 nt, Homo sapiens
ggggcagcgcgagagggaggccagcgaggaaccaagaacagagaccagcaca

SEQ ID NO: 92858 - RNA, 73 nt, Homo sapiens
cggccgaaaggggagacaggcggccacagggaaccacccaacaggaaacacacaaccacagaccacaaggaaa

SEQ ID NO: 92859 - RNA, 51 nt, Homo sapiens
gacaggacaaaagcagccaacaaggcgcaccaagggcaccagacgcccgag

SEQ ID NO: 92860 - RNA, 73 nt, Homo sapiens
ccaaggaccaggaaaaaacacagggaaacagcccgaacgcacagaagaaaccagcgcccagcgccgggagaca

SEQ ID NO: 92861 - RNA, 78 nt, Homo sapiens
aaagcgcccgcgcgaccacgggcccggcgccggcccccgccgcccgcggcggagaaaccaccacaaacacgaggccag

SEQ ID NO: 92862 - RNA, 74 nt, Homo sapiens
aggaagagccacaaaaacgagccggaaggaagagccccgaaagcacaaagcagaccaccagacacagagaagaa

SEQ ID NO: 92863 - RNA, 80 nt, Homo sapiens
cgcacaaacacgccacgcgcaggagcacacacggaggacaggaaaagccagagagcggcagagaagaagggaggcccaaa

SEQ ID NO: 92864 - RNA, 118 nt, Homo sapiens
cgcccgaggacagagaggcgagcgcccggaggggagagagcggaggacagccgagaggaggaaagaccacagcaagaccacgcccccagccgggggaccaggccgaacgacccggaca

SEQ ID NO: 92865 - RNA, 79 nt, Homo sapiens
ggcgggaagcagccagggcacgccaaggccagagaagaagcggaggaaggcccaccagaccaggggaggaggagaaagg

SEQ ID NO: 92866 - RNA, 65 nt, Homo sapiens
agggcgaagagacaaacaaaacccaccgagaaggggcgaagacccagaagggcagagccggagga

SEQ ID NO: 92867 - RNA, 76 nt, Homo sapiens
agcggaagacggccgcgcaaggaccgcagagcccagacccgcccaccagaggcccacgccccgcagagccccgccg

SEQ ID NO: 92868 - RNA, 75 nt, Homo sapiens
ccgcccgacccaaagggaaaacagaaacagcaaggaaggaacacaacaaaaacgcaccagggacgagcgggggga

SEQ ID NO: 92869 - RNA, 79 nt, Homo sapiens
caaagcagcggcgcagcccggggggaaaaagaaaagggcgaagacccgaagcagcgcaggaacagaagagaagaccaga

SEQ ID NO: 92870 - RNA, 76 nt, Homo sapiens
caagccggggacgagcaccacagaaaacacacccaggaccccaggacagggcgcaggcggaaaccaagagaagcac

SEQ ID NO: 92871 - RNA, 75 nt, Homo sapiens
agccacggcgccaccaccaggagaaggcgacaacaagaagaaccagacgcacggcaccacgagcagcaccggaca

SEQ ID NO: 92872 - RNA, 54 nt, Homo sapiens
cgggcagcaaccagcgaggcggcagggcacccccaagcaggcaggcagccagac

SEQ ID NO: 92873 - RNA, 80 nt, Homo sapiens
ggacaccaggacaagggggcacgcagccggggaccgcccggccgcgagccggcgcagacgcaaagccagagaagaagcgg

SEQ ID NO: 92874 - RNA, 78 nt, Homo sapiens
aggagcacagaagagcgaggagagaggaaacgaggcgggaagacgaaacgccaaaacacacaacgaaagggcacagcc

SEQ ID NO: 92875 - RNA, 82 nt, Homo sapiens
gagcaaaagaaaaggccaaaacgaaaaaccaaacagagggagcagaagaaacaggacgagaagaggccccccaaaggacaca

SEQ ID NO: 92876 - RNA, 104 nt, Homo sapiens
aaagcgcagcccgcagacagaggggcgacgaccgcacaacagaaggcaggaggacgcggcggcggcgaggagaccccggccccggaggccccgcacccccccag

SEQ ID NO: 92877 - RNA, 38 nt, Homo sapiens
cacccaccacagcagcagggcacaagacaagaaagacc

SEQ ID NO: 92878 - RNA, 73 nt, Homo sapiens
cgaaacagaacagagagaagcccacccgcgacacagggagaccagggaaaagacagcacagacccagacagac

SEQ ID NO: 92879 - RNA, 72 nt, Homo sapiens
gggaggaggaaaacacacagacgaaggcaaaagagggagccgaaaaaacagggaaagcagggaagaggcggg

SEQ ID NO: 92880 - RNA, 50 nt, Homo sapiens
ggccgagaaggcagaggcgagggaagaggaaagcacaaagacacccaacc

SEQ ID NO: 92881 - RNA, 76 nt, Homo sapiens
cgagcacgagaagaacagaggagaaccagaaaagcgagggaaagaagaaccaaggggaaaaaacacagaggcagac

SEQ ID NO: 92882 - RNA, 73 nt, Homo sapiens
ccggcaagaccgaaggcgccggccaaaagagcaacccccagccacaacgcgaaccgggcggacgaaggaggcg

SEQ ID NO: 92883 - RNA, 75 nt, Homo sapiens
cgagggcggacagcggggcccgcggaaaacagacagacaaggagaagccgagaagaacgagccaccaggaagcca

SEQ ID NO: 92884 - RNA, 64 nt, Homo sapiens
cgagggagcgagcgggcagcgcgggcggaaaacaccccaaaagccaaaagggaaaggaaaagac

SEQ ID NO: 92885 - RNA, 57 nt, Homo sapiens
cagacgcagggcgcccccgagcaggaaccaagggggagcccaccagaaacccccagg

SEQ ID NO: 92886 - RNA, 80 nt, Homo sapiens
gggaccaaggccgagagccggaacaaacgagggcccgggaggaccgacgcagccagacgaaccccagaaacccagaaaac

SEQ ID NO: 92887 - RNA, 58 nt, Homo sapiens
cccggacagagcccgggcgcgcagaggaaaggcaagggcagaaaagaggggaaaaggc

SEQ ID NO: 92888 - RNA, 76 nt, Homo sapiens
acaacacggaaggcggcacacccagacccagggaaagccaaggggcagagcacaagaacagccggggcggggaaaa

SEQ ID NO: 92889 - RNA, 62 nt, Homo sapiens
gcgcgggcgggaagaggcggcgggcaaccagaacaagccgggagaggaacagcgcgccgggc

SEQ ID NO: 92890 - RNA, 88 nt, Homo sapiens
gggaagaccgaggggcacaccgaccagccgcacgccgaccggcgccgggagaccggggcggaaaacaccccaaaagccaaaagggaaa

SEQ ID NO: 92891 - RNA, 38 nt, Homo sapiens
cacagcaaggaagacccacggagaaagggcaccaggga

SEQ ID NO: 92892 - RNA, 61 nt, Homo sapiens
gaaccgcgccccagaaggcagaggaacacaacagaagcaccagggaccaaaagaggaggga

SEQ ID NO: 92893 - RNA, 75 nt, Homo sapiens
aacgcaggacccaaagcccccgaggacgaagaggagccgaggggagaaggcgagcgggcagaggcgcaccacaga

SEQ ID NO: 92894 - RNA, 69 nt, Homo sapiens
ggcacgcccccacacggaggcggccccaggggggaccaacaagggagaaccaacagaacaaccggagga

SEQ ID NO: 92895 - RNA, 82 nt, Homo sapiens
cacagacagcaggagcgaggccgggaccggagcaccggcagacccggggaccgggaaggacaggacagccaggagggggcgc

SEQ ID NO: 92896 - RNA, 84 nt, Homo sapiens
cagagcagaccagaagagccaccagggagcgaaaccaagaaacacagcagggagagcaagacaccagcacgcgccccaccaccc

SEQ ID NO: 92897 - RNA, 62 nt, Homo sapiens
ccggagagcacggaccggagggacgccagacgggacacgcacaggggcgaggccggcccgag

SEQ ID NO: 92898 - RNA, 84 nt, Homo sapiens
agccgcccagacggccaccggcgggaggaacaaaagaaacaggacgcagagaacacagaagccagcaagcagcagggaagggag

SEQ ID NO: 92899 - RNA, 87 nt, Homo sapiens
cccgcgcgggggggagagccacgacgccgggaccgggaccgccgccgccgccgccaccaggcgcgccacgccccgaggccgggccag

SEQ ID NO: 92900 - RNA, 53 nt, Homo sapiens
cccgcggcgggcgcacaccacgccggaacacgaggacccaaagaacaaacccg

SEQ ID NO: 92901 - RNA, 75 nt, Homo sapiens
cacggaccagagacacgccaagcagccagcccaggagaggcgagcaccgcgggagaaggcacagggcagagcacc

SEQ ID NO: 92902 - RNA, 60 nt, Homo sapiens
gcagcccagcccgcccccagaaaccaggacacagacggaagggagggccacccacggcag

SEQ ID NO: 92903 - RNA, 74 nt, Homo sapiens
ggccacaagacaggggaccccagaaccaaacaagacaaaggaggcagcaaacagcacacaacggacggagaacc

SEQ ID NO: 92904 - RNA, 56 nt, Homo sapiens
accgaaaacaccaggaaagacaggagaccaaaaagaagggagaggaagaaagacca

SEQ ID NO: 92905 - RNA, 82 nt, Homo sapiens
ccacagccgcagcggagcccacgagaggcagcgccaggcggagcagaccaccgggaaaagcaacaacaggagaagagaagcc

SEQ ID NO: 92906 - RNA, 49 nt, Homo sapiens
gaaaggagccggccggcggcaaagggaagcccgcggcgggaagccccgg

SEQ ID NO: 92907 - RNA, 111 nt, Homo sapiens
ccacagcaaacaccgcccacagccggcaccagccggacaaaggagagaagggacccaggcgcacacacaaaggggagccaggaagaagacaaaacagagaggaagcagcac

SEQ ID NO: 92908 - RNA, 72 nt, Homo sapiens
cccacccaaccgagcccaccgccaccagaggagagagcgaagcaccgcgcagaccgaaaggcacacggagcg

SEQ ID NO: 92909 - RNA, 78 nt, Homo sapiens
agaacacaaaaaaacaaagaggcagaagcgaccagagcgaaaaacagggaggaggaaccaagaagaagcaggggagaa

SEQ ID NO: 92910 - RNA, 80 nt, Homo sapiens
ggccgacgagcaggagcgccgcaagggaggcgcaggagccggcagaggcgagaagaagaaaagaagagagcgaggagcgg

SEQ ID NO: 92911 - RNA, 80 nt, Homo sapiens
ggaaccacaccaccggcccagacaacccccacggcaccagccagcagccaccccggccagacccacgaggggaacgagca

SEQ ID NO: 92912 - RNA, 54 nt, Homo sapiens
ggaaaagccacggaaggagcccggagcggacaggaccacaaccagaaagaggga

SEQ ID NO: 92913 - RNA, 87 nt, Homo sapiens
ccgccccacggaggccagggcgacccagcccccgcccgcagccggacgacacgaccgccgcccgcgggaagaaggagaaagacaaag

SEQ ID NO: 92914 - RNA, 72 nt, Homo sapiens
caaggaggaaaacacacggccacaaagagcggccagaacggacgaaggccggggaaagagcccacagcgcgc

SEQ ID NO: 92915 - RNA, 91 nt, Homo sapiens
caccaggcacccgggcccagccgggaacccccacgcggccagcgaaaacgcccaggacacgcccaccaagaaagaaccggaaaggggaccg

SEQ ID NO: 92916 - RNA, 60 nt, Homo sapiens
cggaccgcgcaggccggggacacggcacagcaaggacggggcgaggacgcaaccaccacc

SEQ ID NO: 92917 - RNA, 57 nt, Homo sapiens
agacacgcagcggcggccagggaccaaccaggagcacaaaccccagcaacacacccc

SEQ ID NO: 92918 - RNA, 73 nt, Homo sapiens
ggaggcgggacgcggagaagaccaagagacagaagggacgggacgaggacccggggaagacaggagaaagcag

SEQ ID NO: 92919 - RNA, 79 nt, Homo sapiens
ccagccccagagccccacaccgggagggccacgccgggcagccaagagggaggcaccaagggacggagcggggcggccg

SEQ ID NO: 92920 - RNA, 82 nt, Homo sapiens
ggggaacggcacaacaaaaaagcggaccaaagacccaggaagacagggcggagaacggaaaagcaccaggaagcagagagga

SEQ ID NO: 92921 - RNA, 74 nt, Homo sapiens
agaccggcaccgaagaccacccagaaaacacccgacacgaagaccagaaccaaaaccagacaggcaccaaaagg

SEQ ID NO: 92922 - RNA, 70 nt, Homo sapiens
caaacggaggagcaagcacagacgaccccagccacccccagggccaggcaagaaagagcgcgacgaggaa

SEQ ID NO: 92923 - RNA, 66 nt, Homo sapiens
cccagaggaagaccccggagcgcgaggacccggccacaaaagccaccagaagcacgaacacacaaa

SEQ ID NO: 92924 - RNA, 71 nt, Homo sapiens
cgaaggcgaacgccgcggccaaggagccgccaaagccagacggcacaaggggacgaagaagaggaaaaagc

SEQ ID NO: 92925 - RNA, 86 nt, Homo sapiens
cgagagaaacgagcgaaagaggacacaagaaaaagcggagaacagccagcagcggcagaaaaacagccggacgggacagaacacga

SEQ ID NO: 92926 - RNA, 64 nt, Homo sapiens
gcgcccacagccacgggaccggcgcagggcccaggcgcacccaggcagaaggaggagggcagaa

SEQ ID NO: 92927 - RNA, 94 nt, Homo sapiens
gaagccagcaggcccccgacagaagacgggcgccggccccgcgggccacgggacacaggaccagaagaacccaggagaagcgagcaccaaggag

SEQ ID NO: 92928 - RNA, 86 nt, Homo sapiens
ggccccaggccgcccaaaccgcaagccccaagaagccacccccggcgagcggagaggaaaggaagacagaaaacagaagcaggaac

SEQ ID NO: 92929 - RNA, 68 nt, Homo sapiens
agaacgacaggccaccagccagcgggcaccagccgggcacagaccgagcagggcagacaaaaagagag

SEQ ID NO: 92930 - RNA, 59 nt, Homo sapiens
caggccaccacagaaacaaaagcaacaaagaggacgacgcagccagagcagcaagaggc

SEQ ID NO: 92931 - RNA, 79 nt, Homo sapiens
accacacccagcaaggaccccggccgggcaccaacgcaagagaacaacaagaccgaaaaaggagggagcgacgaagagg

SEQ ID NO: 92932 - RNA, 72 nt, Homo sapiens
agagggccaaaggcagcgacccccacgacagcccgccccccagaggcaggcccagccagacagccacccgca

SEQ ID NO: 92933 - RNA, 77 nt, Homo sapiens
gaccgacaggcgcgggagcgagggaggacgccgggacaccggaagccgagaaagaggaaaggcaagggcagaaaaga

SEQ ID NO: 92934 - RNA, 69 nt, Homo sapiens
agaaccacggacagggcaggaccagaaaaagcaggagacggccagaagaccccgggaaaggcgacgccc

SEQ ID NO: 92935 - RNA, 88 nt, Homo sapiens
gcggccgcagcaacccgccggggacgccgcgcaccccagaggagcgccaccgccaagagcagcagaacggcacgaaaaccaaccacaa

SEQ ID NO: 92936 - RNA, 81 nt, Homo sapiens
accggcggcgggacgacgcggacagcgggcggagccgacgagcggcgggccgaaacacaagcaaggaacacaaagaagaaa

SEQ ID NO: 92937 - RNA, 69 nt, Homo sapiens
cggacccggaccagccgaaaagccccgcccgcccggaagaccagaacacacaagaaccgggagaacgaa

SEQ ID NO: 92938 - RNA, 71 nt, Homo sapiens
aaggcgggcggcccaggaaccagacagaaccaaggagagacacacggaacaagagacaaaaaaagaagcac

SEQ ID NO: 92939 - RNA, 63 nt, Homo sapiens
caacggggcgacaaaaacaggacccccccgcggcggcgaggcccgagccagagaggaggaccc

SEQ ID NO: 92940 - RNA, 83 nt, Homo sapiens
gccccaccgaccgagcgggaggccacagcagccagccggcccgaggacaccgacaccagcagaacgcgcgagacggggacaga

SEQ ID NO: 92941 - RNA, 84 nt, Homo sapiens
gagccagcgggggaggggccccgcgcggaagagcggccggggaaaacgggcgaacccagaaggcccgggggaagaggaaaaggg

SEQ ID NO: 92942 - RNA, 80 nt, Homo sapiens
gaggaagaagaaaagcgaaaagcaaacacacgcagcagcgagcaggaaaacgcagcggcgggcagcggagggaaagaagg

SEQ ID NO: 92943 - RNA, 77 nt, Homo sapiens
cccggaaccgcgacggcggcagggccggcccagggagaacgcaaaaccaccacccccacaaaaaacgcagggagaaa

SEQ ID NO: 92944 - RNA, 91 nt, Homo sapiens
caacaccaacacgagggcggcggaaaaagccgccacacgccaaagaaaaccagagcgccaagagccacccaggaaggccgcaggagaaagg

SEQ ID NO: 92945 - RNA, 83 nt, Homo sapiens
gaacagggcagacgagcggaggacacccaacccgggcacaaaccgaagagcccggggcgggacgccacgaaagaaagggagac

SEQ ID NO: 92946 - RNA, 79 nt, Homo sapiens
gggaacgcagcgcgcaggaccacggggaaagccaagagcgagggaaaaagcgggaggaggcgggccagaacacgaccgg

SEQ ID NO: 92947 - RNA, 67 nt, Homo sapiens
gacccaaagacacgaaaaccaggaccgagaaggcgcagcggaaagggaagaagagagggcgaaggag

SEQ ID NO: 92948 - RNA, 85 nt, Homo sapiens
cggagagcccaggccgccccgccggagcccgggagcccgaggagaggaagccaccacgcaccggaagcgagaccaggaggagcgc

SEQ ID NO: 92949 - RNA, 80 nt, Homo sapiens
cgagaaggaggagccccccgcccggcagcgccccgcgagaagaaccgaagaaagacagccagcaggagcagcgaagggaa

SEQ ID NO: 92950 - RNA, 80 nt, Homo sapiens
gaaggaccaagaaccagccagaccgccgcccaccagaggaggaccgggagcgccggacagcgaacaaccggggaagagcg

SEQ ID NO: 92951 - RNA, 82 nt, Homo sapiens
gggcgggagcgcccaagggggcggagagcggggggggaacaccagcaggaaaaaagagcggcagaaggccaaacggccgagc

SEQ ID NO: 92952 - RNA, 82 nt, Homo sapiens
ggcgcgacgcagcgggccgggaaaaagacaagggcagagcagccggggaaaagggccaagaagcagaaaagagcacccgaga

SEQ ID NO: 92953 - RNA, 38 nt, Homo sapiens
gcggggacggcgcggccagcgagaggcccggccagaga

SEQ ID NO: 92954 - RNA, 80 nt, Homo sapiens
ggagaaagaggaaacgaggaaagaggcgcagcgaggaaagcacggccccccaccccccagcgggggccagcaaggaccac

SEQ ID NO: 92955 - RNA, 60 nt, Homo sapiens
cgaaccacccacagaccagccggaacaagagacccgaaaaggcacacacacccgcaggag

SEQ ID NO: 92956 - RNA, 73 nt, Homo sapiens
cggaggacacagccagggcggacgggaaagcagaaaaggccaaagaagagacgaagcaaaggcgcccggagcc

SEQ ID NO: 92957 - RNA, 89 nt, Homo sapiens
ggggagccagcgggagcggaagaggcagaggcgcaccaagagcagcccggcgaaacaaaaacgacgcaggaagaccccaacacagcccc

SEQ ID NO: 92958 - RNA, 81 nt, Homo sapiens
agaagccgagcaacaccccggccaccgacccacaagagcggggcccggcgcacccaccaccgccgcccacggcagcccagg

SEQ ID NO: 92959 - RNA, 68 nt, Homo sapiens
gaagagaggagggagaacacagaaaccggccccagaggcacaggaagcggagcgagacccagagcggc

SEQ ID NO: 92960 - RNA, 76 nt, Homo sapiens
accagagcggcccccagcaccacagcccgcagccccgccagccacccccagagacgggaacagagaagcgagcgga

SEQ ID NO: 92961 - RNA, 76 nt, Homo sapiens
ccggaggaggcgaccgcggcgcagcgacccccgccaggcaaaaggaaggggaaccagaagaggccaaccagcacga

SEQ ID NO: 92962 - RNA, 61 nt, Homo sapiens
gcgggaagagaacaggacagagggcacaacggcaaagcgcagaacaaaaaaggaaacaaaa

SEQ ID NO: 92963 - RNA, 54 nt, Homo sapiens
ccgaaaccaccgcgagcgggagccaaacaaaggaacgccaagcccggcaggacg

SEQ ID NO: 92964 - RNA, 54 nt, Homo sapiens
aagcaaagcagcagaaaacagaggcccacgcccccgaagaaaggaaacaggggc

SEQ ID NO: 92965 - RNA, 71 nt, Homo sapiens
ggcgagcgggacggaccgccggaacgcgaggaagcagaacacaccggggccgggggggcgaccggacaccg

SEQ ID NO: 92966 - RNA, 86 nt, Homo sapiens
acaacaggacgccgccaaggggacggcaaaacagaacagaaaggcggagaaaaaagagggggaaaagaccacgagaagacaggccg

SEQ ID NO: 92967 - RNA, 77 nt, Homo sapiens
gcagaggcaaccaggacaaaccacgagaaggaccaagcaggccagacaagccacgcggacagacccccgccaggaca

SEQ ID NO: 92968 - RNA, 53 nt, Homo sapiens
cccaacaaaagcagcaagcaagagcgaaggagaaaggcaacaaggcccgagcg

SEQ ID NO: 92969 - RNA, 81 nt, Homo sapiens
acccgcccgccccagccacccaggccccgccgcccgggggcgccgcccaccgcgcccgccgggcggaaaacaccccaaaag

SEQ ID NO: 92970 - RNA, 51 nt, Homo sapiens
caaaggaacacaacaggaggaggaagcgcccagaaccagggaccgacaggg

SEQ ID NO: 92971 - RNA, 71 nt, Homo sapiens
ggacccccggaggacgaggaggccccacagagccccagcaaaacagacgcccagaagagcacaaagaacca

SEQ ID NO: 92972 - RNA, 80 nt, Homo sapiens
agaccaccccacggccgccaccaagagagcagggcccgcggagccgcgccgaggggaagcagcaggcgcaaaaacgaacc

SEQ ID NO: 92973 - RNA, 74 nt, Homo sapiens
ggcaggacagcgccgcagcgggaggccagggggagacacaagaccgagccacgccgcaacagccccaagggggc

SEQ ID NO: 92974 - RNA, 79 nt, Homo sapiens
gcgcggaccggcagcagcggaaaccgaggggaaaagcaggaaaaagaaggaagccaacgaacggaacgaagaagacaca

SEQ ID NO: 92975 - RNA, 72 nt, Homo sapiens
acgcaacgaaaccggcacggccgcccggcacacggaaccccccaagaagcccggggaagaacaagcagggag

SEQ ID NO: 92976 - RNA, 71 nt, Homo sapiens
cgaacccagccaggaaaccggcacaccaaggagacggcaaagacagcgcaagaaagcccccaggacccaag

SEQ ID NO: 92977 - RNA, 55 nt, Homo sapiens
agcacgcagccaaccccagcaagacgaggggacaacgaaggaggcaagcaacaaa

SEQ ID NO: 92978 - RNA, 75 nt, Homo sapiens
gaaccaaccgaaaacagaaacaaacacaccagggaacacggccaaagccccagaggacaagccagaagagacaac

SEQ ID NO: 92979 - RNA, 72 nt, Homo sapiens
ggaaagccaggaaaaacacacggaacgccaggagcgccgggagacacacgcaaaaagaaaaggaagaaaaga

SEQ ID NO: 92980 - RNA, 61 nt, Homo sapiens
aggcccacaaggggcaaccacagagcaaacaaacaggcaaccaagacaaaaaccagccaga

SEQ ID NO: 92981 - RNA, 68 nt, Homo sapiens
ggcccaaccgaagaaaacaagagggggcacaggcccagacaaacaaaccaggaagaaaagagacccgc

SEQ ID NO: 92982 - RNA, 85 nt, Homo sapiens
ggagagacagaggcaccccggacagagacggaagcacgaagaaggaaaccagaggaggaaggcaagagaaccaccacagacgacc

SEQ ID NO: 92983 - RNA, 77 nt, Homo sapiens
caagggaaagccagaggcacaagcggcaaccggcacgcaccagagcagcccacaggacggcacccgccccacagccc

SEQ ID NO: 92984 - RNA, 69 nt, Homo sapiens
acaccagcagcggagaagcccagcaaaaagaggagaagcacccccccagaagaaaagagaagggacaag

SEQ ID NO: 92985 - RNA, 70 nt, Homo sapiens
cggcccgcccccaaagcgaccgacccggacgagaaacgcaaggaacccggcaccagccgggcaaaaaccc

SEQ ID NO: 92986 - RNA, 68 nt, Homo sapiens
gagggccgccagacggcagccagggccgcaccgcgaggaacccgagcccaccggcagcaccgcaccgg

SEQ ID NO: 92987 - RNA, 73 nt, Homo sapiens
gccagcgaacgcagggcaagggaaaaccaagacccagaccggagaccgagagacgaaggcagagcacgggcca

SEQ ID NO: 92988 - RNA, 73 nt, Homo sapiens
cggaggcaaccgcgcccccagagcccaggaaaaaaagaaggggagcgcgagaaggaaagcgccgcccagccag

SEQ ID NO: 92989 - RNA, 69 nt, Homo sapiens
gcgcgccgggagaccgcggaggccgacaggacgggcgccgccccgcgcggcagggagagagagagagag

SEQ ID NO: 92990 - RNA, 63 nt, Homo sapiens
gggacaggaagggaccccaggaaacagagagcccgagggaaaagacaggcaacaggaaagcaa

SEQ ID NO: 92991 - RNA, 77 nt, Homo sapiens
gacgccaaagacagcaagacggcgaggcggaacgagcccgccgaagaaagccgagaggcagcagggccggcacgcgg

SEQ ID NO: 92992 - RNA, 71 nt, Homo sapiens
ggcagaaccaaacccaccgcaagacagggaagcgcagccaaacaccgccaacaacggaaggccacgggaag

SEQ ID NO: 92993 - RNA, 59 nt, Homo sapiens
cagaaacgaaacagaacagagagaagcccaacacaagacacccaagaagcccagcagac

SEQ ID NO: 92994 - RNA, 95 nt, Homo sapiens
gagcacacaaaaaaagggggacgaaggccaccaaggggaagggccagaagaagcagcccaaaagaagaaaaaacaaagcaagcagaccaagcagc

SEQ ID NO: 92995 - RNA, 81 nt, Homo sapiens
ggacggcgagcgcgagcggcgcgagaaagccgccaggcacagagaaggcaaacgggagggcgaggacaccaagagcagcgc

SEQ ID NO: 92996 - RNA, 79 nt, Homo sapiens
acgccgcgggaagcccgccagaaccgaggggcccccaggaccaacccgagaaggaaggcagagcccacaaacccaagca

SEQ ID NO: 92997 - RNA, 74 nt, Homo sapiens
ggaaaggacaaaaccagaagcagggcaaacggagaaccgcccaaaccagcagaaagaaggggcgggcggcaggc

SEQ ID NO: 92998 - RNA, 77 nt, Homo sapiens
gccaaacagcaggaccagaacccgcgaaagagggaagcggcaaaccaaaagagcaacgagaacggccgaagccaagg

SEQ ID NO: 92999 - RNA, 48 nt, Homo sapiens
gcgccgcgccggcggcgcgaaccggacggcccaccacgacgggcgcgc

SEQ ID NO: 93000 - RNA, 71 nt, Homo sapiens
gaaagaaaggaaagacaaaaaacacggaaaacccacaggaaaacgccccacaggagcccccgcgcccaggc

SEQ ID NO: 93001 - RNA, 89 nt, Homo sapiens
gcggcgcaacgccgccgcgccgagggaccgccgggcggcggaaagcaggcggggaaaacacacacgccgcgggagcccaaggcggccga

SEQ ID NO: 93002 - RNA, 58 nt, Homo sapiens
gaaggaaggagcagggcaaccggggggagagccagcaaccggaagcaggagaagagga

SEQ ID NO: 93003 - RNA, 80 nt, Homo sapiens
cggacccggaaaagagcaaggagggggcccagcaggagagcagaggaaaaccaccgagagccccccagaagaaccccaaa

SEQ ID NO: 93004 - RNA, 75 nt, Homo sapiens
cccccagccgccgaagaccgcccgcccggagcccaccagggaggaccccccgagagacagaggagaggcaccgcg

SEQ ID NO: 93005 - RNA, 74 nt, Homo sapiens
gcgggcaccaccagcccagccacacagacggggacagaagcgcacccacgcgaaacccccgccaggaacaggac

SEQ ID NO: 93006 - RNA, 79 nt, Homo sapiens
acgacgccgggaccgggaccgccgccgccgccgccaccagagccgcagggcacccaaccaccagcaaggccaaacaaac

SEQ ID NO: 93007 - RNA, 71 nt, Homo sapiens
acaaaccggaaaacggaaagaaaaggagagcaccacgagaacgggaaaaagaaccagccagcaccgcaaag

SEQ ID NO: 93008 - RNA, 88 nt, Homo sapiens
acagacgaaggacagcggcaccgccagacggccagaaagccgccagagcggggcacggagcgggcccagggcccacaacggcaggcca

SEQ ID NO: 93009 - RNA, 76 nt, Homo sapiens
ccgccgagaccagcccaacaggaccaggagcgggagagggccagcaaaaacccgggcagcgacggggaaccccgga

SEQ ID NO: 93010 - RNA, 123 nt, Homo sapiens
ggaccaccgccgccgccgccgcgggaccgaggcgggcgcgggcgcgggcgccccggcgagccacgaagaacgagaccaccccaaacagcccacgaggcccgccccagaagaggagccagcaca

SEQ ID NO: 93011 - RNA, 73 nt, Homo sapiens
ccaaagggacaaggcgccaccacagagacaaggggaggagagaaaaaccacaagaggagcacagaccagcgcg

SEQ ID NO: 93012 - RNA, 81 nt, Homo sapiens
gaacacaggaccaggccacccaaggccgaagggaagaggaagaacgcgagaaaaaaacgagcgacagagaaggccggaaga

SEQ ID NO: 93013 - RNA, 73 nt, Homo sapiens
agaccaggaacaacacccgggaccagaaaacccaaccaggcaggacccgaggcgccagcagcagcaagaccgg

SEQ ID NO: 93014 - RNA, 64 nt, Homo sapiens
cgggcgagcccaggggcagccaccgccaggaccccagaaagaccccggaggaaaagcggaagcg

SEQ ID NO: 93015 - RNA, 67 nt, Homo sapiens
caagacacgccaaggggcggaagagagaaacaagagggaagagcaaacagaacaacaccccggagca

SEQ ID NO: 93016 - RNA, 78 nt, Homo sapiens
gcagccccccgcagcacccagccggccacggcagcaaagcaccgccgagggccaggggaagcgaaccggacacgcgac

SEQ ID NO: 93017 - RNA, 72 nt, Homo sapiens
acccgaggcagcgacacaagcggacagaacagacgggacccccagccaaaggcaaagacgcgaaaaacaaaa

SEQ ID NO: 93018 - RNA, 75 nt, Homo sapiens
cgaccgagcccaggagcgccacgcgcggaaggcagcgcccagcagcgcaggggcaaagaaaaaggagagaaaaag

SEQ ID NO: 93019 - RNA, 54 nt, Homo sapiens
cacagcgcgccaagcgaacggagagccagccgggaggaggaagcaggccagggg

SEQ ID NO: 93020 - RNA, 72 nt, Homo sapiens
cacgaggcaacgccccagaaaggagaaacagaaagccacaccccaaggccgaaaacccccagcccaggggca

SEQ ID NO: 93021 - RNA, 67 nt, Homo sapiens
cagagcgcagaacgaagcaacccaaaaaggcgcaagaaccaaaaacacaccaagaagcaggaggaga

SEQ ID NO: 93022 - RNA, 77 nt, Homo sapiens
ggccggaagccccccgcaccgcgcagaaccacccagccggagacacgccaccaccagaaaagcggccaggagcggaa

SEQ ID NO: 93023 - RNA, 33 nt, Homo sapiens
ccgaacgagcacggaaagaggagcacaggaggg

SEQ ID NO: 93024 - RNA, 77 nt, Homo sapiens
ccgcgccgcccaaggcgcaacgggggagcaagaacgaggccaaggaggagggacacagagacagcgaagaaagaacg

SEQ ID NO: 93025 - RNA, 70 nt, Homo sapiens
cggagcccgaggggccccgaccccggcgcgaagcaaagaccaggagaacacagcgaaaaagggcggggaa

SEQ ID NO: 93026 - RNA, 85 nt, Homo sapiens
gcagaagcacaaggcggcccgaccgccaagcgagccaccaaagaaggaggcgccaccacggggccgcagggaagagagcagagag

SEQ ID NO: 93027 - RNA, 90 nt, Homo sapiens
cgagcgagggggggcgcgccggaaaccggagcgcgcagcagaggccacaggacaccgcagcccaaggcacccaccgaggacaaccggacc

SEQ ID NO: 93028 - RNA, 78 nt, Homo sapiens
ccggccgccggcccccaacagcgccgcaccaagccaggagaagggagacgggcaagaccacgccccacacgcaaggcg

SEQ ID NO: 93029 - RNA, 80 nt, Homo sapiens
cgggggaggcaagaccgccccgccgcccagaggacgcccaacaccacccacccaccacgagcaaagaaaacccaggcgag

SEQ ID NO: 93030 - RNA, 79 nt, Homo sapiens
caagcaacggaccgaccgggcgaggggaggaggcgggggacagagacccaggcaggcccggagcaccgaaaccgagaag

SEQ ID NO: 93031 - RNA, 76 nt, Homo sapiens
ggccggcgggagacgcagcgcgacccagcaggcgaagccgacgagcccgaacagacgcaccagcgggaggaagagg

SEQ ID NO: 93032 - RNA, 55 nt, Homo sapiens
ccaaagagcagaagacaaaaacaccaaaccaacaccggaaaagccaacaaggacc

SEQ ID NO: 93033 - RNA, 72 nt, Homo sapiens
caacacgaaaaaaagaaaggaaaaaggagagagaaggcagcaggagaggagaagggaaaagaaggagaggag

SEQ ID NO: 93034 - RNA, 57 nt, Homo sapiens
ggcaacaaggccagcaccacgcgagaaaagccgacgcaagagggaaagcggagcaca

SEQ ID NO: 93035 - RNA, 77 nt, Homo sapiens
cggggccgacagaaggcaggcaccggcacggaccaccccaacaccgggggagaaccgggcccaccagggacacgggc

SEQ ID NO: 93036 - RNA, 75 nt, Homo sapiens
gcgcagaagggacaggaggagacagcgggccaagcagagagaacagccgcggagaaccgaaccaacagccagcca

SEQ ID NO: 93037 - RNA, 84 nt, Homo sapiens
ccgagagcgggagcgggcgggccaggcagagaacagcagaccacagcagggagcgggcgcaccacaggaagcgcaggcccagcc

SEQ ID NO: 93038 - RNA, 73 nt, Homo sapiens
aggccagcggccggcgggagacgcagcgcgacccagcagggaggacacgggagccagaggaaccaagcacacc

SEQ ID NO: 93039 - RNA, 82 nt, Homo sapiens
acacagaggaagcggagagaagagaccaggcccaggaaggaacgaggaagggccagaacggagacggggcgcgccgagaggg

SEQ ID NO: 93040 - RNA, 67 nt, Homo sapiens
cggcggccccaccacccagggacacacaggaagacgaacacggaacgggcgagaagaaagcagagag

SEQ ID NO: 93041 - RNA, 57 nt, Homo sapiens
gaaaacaaaagaaacgcccacagaacaccgaggggaaaagggaggaggaggcaggcc

SEQ ID NO: 93042 - RNA, 71 nt, Homo sapiens
aaggaggcagaggcacaccgaaaggaaagagggaaaaggcaacgagagcaaagagcaaacagccagggcca

SEQ ID NO: 93043 - RNA, 70 nt, Homo sapiens
gcccaccgggcccgggcaccacgggcggcgccaggccggcccaggcggagaacggaaaagcaccaggaag

SEQ ID NO: 93044 - RNA, 64 nt, Homo sapiens
gacgggcacccacagacggcgaaggcagccacagcgcccagagagagggaaaagaggacgaggc

SEQ ID NO: 93045 - RNA, 64 nt, Homo sapiens
cagaccacacccacagaaggagagcaaaggagacagggggaagacaaggcagcaagccggacca

SEQ ID NO: 93046 - RNA, 84 nt, Homo sapiens
agacagagcaagaaaagcccgggagcagaagggaggcccaagacccacaacaaaaggcacaggggcagagccagggcagccacc

SEQ ID NO: 93047 - RNA, 75 nt, Homo sapiens
gggcccagggacgagcggaggcacggaacccgacaccgcccacggaacaaggaaaaaaggggccagggacacgga

SEQ ID NO: 93048 - RNA, 87 nt, Homo sapiens
cggcggcgcaccgccgccgaggcgagggcgccaggcgggaagacgggagcgaagagacgccgaaagcgagaagaaagagcagagaag

SEQ ID NO: 93049 - RNA, 79 nt, Homo sapiens
cgaggagcgaggcacaggcgagccacccacaagaagcagaggacaggaggccccgagggacagaggacgcagaaaacaa

SEQ ID NO: 93050 - RNA, 57 nt, Homo sapiens
ggcccgccaccagagcacacagcgcccaccccacgggaggccgggacgggacaacga

SEQ ID NO: 93051 - RNA, 69 nt, Homo sapiens
caccacagcccgcagccccgccagccacccccagaccccccaaagacacacggacccaccaccccaccg

SEQ ID NO: 93052 - RNA, 76 nt, Homo sapiens
ggaaagacgagggagccaccaaggaagaaggaaagaccacggagaagacagaacggaagaaacaaaaaaaagaaga

SEQ ID NO: 93053 - RNA, 46 nt, Homo sapiens
gacgggccggaacacccggcgaaccagagccacaccagcggacagc

SEQ ID NO: 93054 - RNA, 37 nt, Homo sapiens
gacgccgcgcgaggggcggaagaacccaaaacaaaac

SEQ ID NO: 93055 - RNA, 87 nt, Homo sapiens
cgagcgcggcgcgccgagaaaggcacgggcgagagcgggaagagcacgcacaagcagagcgcacaccacggcgccggcaccggagga

SEQ ID NO: 93056 - RNA, 77 nt, Homo sapiens
aaaaaccgcagggcggagagaccagacaacaaagggaagagggagcgagacaagaggagaaggaaacagcagcgcag

SEQ ID NO: 93057 - RNA, 58 nt, Homo sapiens
gcaccacacgagaaggggacagagggggggcgcacacgcagaaagaacagcgaaaaag

SEQ ID NO: 93058 - RNA, 66 nt, Homo sapiens
cacccaaacgcagaaacagagccacgggggggacgcagccaaaagaaacagggaaaagcccaagga

SEQ ID NO: 93059 - RNA, 68 nt, Homo sapiens
aacccccaccgcaaccagaaacaaagaacaggcccaaagacgcacccacagagaaacccgacccgcag

SEQ ID NO: 93060 - RNA, 30 nt, Homo sapiens
cagggcgcccccgacccagcgacacaggac

SEQ ID NO: 93061 - RNA, 68 nt, Homo sapiens
gggacgcagggaggagcgggacaccccggaagcgggaaaggccaaggcagagagcgagggggcccgga

SEQ ID NO: 93062 - RNA, 69 nt, Homo sapiens
ccgcggcgcgggccggcggagcgaagcgccggcggcaaggacgggaaagaccacagcaagaccacgccc

SEQ ID NO: 93063 - RNA, 80 nt, Homo sapiens
gggccgaccaacccgaaaacagcagaccccgccccccgaggcgcagcccgaacccagcagccacacgccaacaacgagac

SEQ ID NO: 93064 - RNA, 58 nt, Homo sapiens
gcacgagaaggagagccagccccgaggaacccagccacagagcaccggggcgcacaag

SEQ ID NO: 93065 - RNA, 71 nt, Homo sapiens
cggccggcccagcgcccccacggagcagcacccacccgcacagccgagagggaacaggcacgccccacccg

SEQ ID NO: 93066 - RNA, 82 nt, Homo sapiens
gacgcggggaccggggccacggagcagggccgccccgaggagagcgacgcccgggcgcgccccggcagagcgagccaaaagc

SEQ ID NO: 93067 - RNA, 66 nt, Homo sapiens
cgaggaggaagcggggagggccagcaggcgagaaccacgccgacaacggcggaagaggaacgggaa

SEQ ID NO: 93068 - RNA, 75 nt, Homo sapiens
cgggggagagcacacgcccgccgccgacgaacggggcggaaggagagacaggaagggcacagaaacggcgcgagg

SEQ ID NO: 93069 - RNA, 38 nt, Homo sapiens
aacaaggaagggagcacggcaaccggcacgcaccagag

SEQ ID NO: 93070 - RNA, 75 nt, Homo sapiens
accggaacaggggcgggcggaagcacccagccggagaaaacccaaccaaagaggcacgaggaaacacgccgcacc

SEQ ID NO: 93071 - RNA, 79 nt, Homo sapiens
gaggagaaggccagcagcccagggaagagggaggcgaggagaagccggcaagaacgccccggcaaggacggaggcaggc

SEQ ID NO: 93072 - RNA, 76 nt, Homo sapiens
cccgacgacagcgggccgggaaaagggcacgaggccggaaccgcccagccccgaaagcaaggcaaaccagggggcc

SEQ ID NO: 93073 - RNA, 70 nt, Homo sapiens
ccgagagcgaaaacagacagaagacccgacagcccaggagcccgccgacagaaggggaacggcggagcca

SEQ ID NO: 93074 - RNA, 75 nt, Homo sapiens
agagcagaggaaagaaaagaaacaccgaaccgccacccaggcccaagaagggaagacaggaagaaggacggcaaa

SEQ ID NO: 93075 - RNA, 88 nt, Homo sapiens
agacgcgccgaggggccgggcacgagcggcgagaacaccagcaggaaaaaagagcggcagaaggccaaacggccgagcaggcgagcga

SEQ ID NO: 93076 - RNA, 75 nt, Homo sapiens
agagacacaagccgcgcccagcccccggcccaacaaaagggagaggagaccggagacggcgaggagaccaaaaga

SEQ ID NO: 93077 - RNA, 76 nt, Homo sapiens
cagcgacagccacacaacggacagacccccaggcaaaccgccccgcagcaccacccggcccggcaaccaggaaagc

SEQ ID NO: 93078 - RNA, 80 nt, Homo sapiens
ggaagacaaaaggaaacaaaacagaagacaacaagcaaggcagcgacacacaagagcaggaccaaacgcacaaagacgga

SEQ ID NO: 93079 - RNA, 78 nt, Homo sapiens
ggggcggccgcggcgccgggcgccgagccagagagaacggacccagagaagaaacaggaaacagaagaagagaagaaa

SEQ ID NO: 93080 - RNA, 76 nt, Homo sapiens
aaaagaagcagacaaagaaaaaggcaaagcacaagcaggacgaaagagggccccacgcccaaaccaaacgaacaaa

SEQ ID NO: 93081 - RNA, 72 nt, Homo sapiens
accgaggaccaccggcaccacaccaccaaaggaggaaggggagaagaaaaagcagcaaaagagaagcaggag

SEQ ID NO: 93082 - RNA, 65 nt, Homo sapiens
cgacgcaccgagaaaggaaggaaaaccgacgagcagcgccaacgcaaacacagcagggggacaca

SEQ ID NO: 93083 - RNA, 79 nt, Homo sapiens
agaagaagagagggaaggaacgaagcaagaacccggagaaaggcaagacgaacagcagacaccacgcaaacaaaagaaa

SEQ ID NO: 93084 - RNA, 61 nt, Homo sapiens
gacagagacaggacaacaccacagcccaaaggggcacaaaacgccccgggagagaagagga

SEQ ID NO: 93085 - RNA, 82 nt, Homo sapiens
agcgcagaaaggaagcgcgggccagcgacccgcgccagcgcccagggggggaaaccaccgcggcggaggcaggacccagacc

SEQ ID NO: 93086 - RNA, 56 nt, Homo sapiens
aacggcaccgacgcgggccaacacaacgcgggagcaccaagaagcagacaaaccgc

SEQ ID NO: 93087 - RNA, 68 nt, Homo sapiens
gcgcggcgcgggcgccgggggcaccgagggaaacggcgaaccaaaagaagagacacggacgcaaaaaa

SEQ ID NO: 93088 - RNA, 66 nt, Homo sapiens
ccgaggaccacggaagggcccagagaggccgccaagcagaagagggaacaccggagcgccgcgcag

SEQ ID NO: 93089 - RNA, 77 nt, Homo sapiens
gcgcagcccgcgcacagcgcccccgcccgcccccacccgcggcagcgaaaccgaaaccagcccccaaggggaaccag

SEQ ID NO: 93090 - RNA, 54 nt, Homo sapiens
accacagcccgaggcccggagcgaccagagggcaaggaggggcacaccacaagg

SEQ ID NO: 93091 - RNA, 76 nt, Homo sapiens
aagccaaccagcggggcgaaaaacgggaaggagaagcaggagcacgcaggaggcacaaggcccgccgcgccaccag

SEQ ID NO: 93092 - RNA, 73 nt, Homo sapiens
caaacaaggacaaccgaaaacgaacccaaaggagagcccggaggagacacacagccccagacgggaggaaaaa

SEQ ID NO: 93093 - RNA, 76 nt, Homo sapiens
gcacccgcaagaagcaccagcaagggccccagggcaccccgcgggcggcacccaccccccgagcccgcccgccggc

SEQ ID NO: 93094 - RNA, 77 nt, Homo sapiens
acacaccggaacaaagaaaaccaaaacgcaacagaaacaacaggcaagagggcagaagaaagaaaggaaagagaggg

SEQ ID NO: 93095 - RNA, 75 nt, Homo sapiens
cggcacccacggacacggcaggagagcgcgcgccgcgcgcccgcacaaacgccggggacaacaacccgaagacca

SEQ ID NO: 93096 - RNA, 62 nt, Homo sapiens
ccaaggcgcgcccggcgggccggaccaaggccgagagagcgcgccacgccacgcagcagcgg

SEQ ID NO: 93097 - RNA, 61 nt, Homo sapiens
aaagagcccacaaggaagaacaaagacgagccagacccccagccagcgccgcccggcacac

SEQ ID NO: 93098 - RNA, 66 nt, Homo sapiens
gagaagaaaagaagccaggcaaagaagaaaggccacacccgggcacgagacgacgggaccgaagga

SEQ ID NO: 93099 - RNA, 55 nt, Homo sapiens
ggacagagcacacgccagcaacgcccacgccaaaaagggaaaaaagagagccacg

SEQ ID NO: 93100 - RNA, 76 nt, Homo sapiens
caacggaaaaggccagaacccggggggcccaacccgagaacacaacccgaacaggaaaccaagagggcaaaagcca

SEQ ID NO: 93101 - RNA, 80 nt, Homo sapiens
cggcagggaagcggggggcagaggcgccgcggacggccgggccgacgggccgagcccagagccgggaagcccagaggcac

SEQ ID NO: 93102 - RNA, 81 nt, Homo sapiens
ccacacagagcaagaaaagccagaagcacagaccggcaaggagcccgcgcggacgcgcccacccccgccaaggaagcgcgc

SEQ ID NO: 93103 - RNA, 62 nt, Homo sapiens
cgggcgcggagaagcgcggagcagggaagacacacccaggaccaaccgaaaacaaacaccaa

SEQ ID NO: 93104 - RNA, 72 nt, Homo sapiens
acccacaccaggccagccgggaaccgaacccaaaacgagggggaccagagacacccgacccgaccacagcgg

SEQ ID NO: 93105 - RNA, 48 nt, Homo sapiens
cagaacggcacggccacgggcgggcaggcaagggaaagaccaggagaa

SEQ ID NO: 93106 - RNA, 98 nt, Homo sapiens
cgccagagccggagcgcgaaggccgggacccggccccggcccacaggggggggcaaacccgagagaacggagccaccaaaaccggcaaaggccgcgag

SEQ ID NO: 93107 - RNA, 69 nt, Homo sapiens
gacgaaaagccggacccaggagaagaggggagagggaccacacagaaacggccagggcgacagacaaga

SEQ ID NO: 93108 - RNA, 72 nt, Homo sapiens
gaaccggccccacccgggaggggggagcggcgggaggccaccgccaggccgacaaccagcgggagaacgaca

SEQ ID NO: 93109 - RNA, 67 nt, Homo sapiens
cacgaggaccagcgggccggagccccgagaagcaaccaagggcagaccgcacaagcagccccggaac

SEQ ID NO: 93110 - RNA, 38 nt, Homo sapiens
agcagagagaggggaaagccagcacaaaagaagcaaga

SEQ ID NO: 93111 - RNA, 87 nt, Homo sapiens
ggcgaccgccgcccgagcgcgcagccgcggcaggagacggcgaagaacagaggaacaacgccaacgacaagacgaggaccaacgcca

SEQ ID NO: 93112 - RNA, 78 nt, Homo sapiens
cggaaagggaagaggcccagccagagagccacaagcgaaaagcagaaaagacacaagagggccacaaggcacaaggag

SEQ ID NO: 93113 - RNA, 77 nt, Homo sapiens
ggcccgacaggagcacagggagagccggggagacaggagagccgcccagaacccccggaagggaccagcgcaaagag

SEQ ID NO: 93114 - RNA, 77 nt, Homo sapiens
aaacaagaagcgcaccccagacaacaggcaggggaggaccagcggacagcgcgggagccaggaaacgcagacccccc

SEQ ID NO: 93115 - RNA, 67 nt, Homo sapiens
ccgggaggcgcgcaaaagcgagaccgagccagcaggccaagggaaaagcagcggaaaaccagcccaa

SEQ ID NO: 93116 - RNA, 72 nt, Homo sapiens
aagaggacaagagacgacacgcaagcaggcaaccgaaacagacagaggcacaaaaggagaaagcagaagaaa

SEQ ID NO: 93117 - RNA, 95 nt, Homo sapiens
ggagccagggaggcggcggcgggaacgagggcgagcagaggacgacaggccgggagacccgggcccaaagccgaaggcaagggaaggaagaccga

SEQ ID NO: 93118 - RNA, 78 nt, Homo sapiens
cgcccgcgcggcgcggggaccgcggcccgcgcgaaaagcagggccgacgggccggggggagcggacaccggggggaca

SEQ ID NO: 93119 - RNA, 81 nt, Homo sapiens
gcaggaacagacacggggaagcgcaaaaacaagacggggcgccccacagaggggcgacgggcggcgagaccaggcgcaaga

SEQ ID NO: 93120 - RNA, 72 nt, Homo sapiens
ccaccgccgggaacaaagcagaacccccacgggggagccccccccagcagggccggcggaccgccgccggac

SEQ ID NO: 93121 - RNA, 85 nt, Homo sapiens
cggagcccggaacccgccggagccagccagccgcccgagcaccagcagacgccacacacagaacgacaccacagcgacaaccggc

SEQ ID NO: 93122 - RNA, 81 nt, Homo sapiens
cgcggcggccgcgcggcacccggccgcgggcggccgccgcgccgcccaggcccggaccaggcggcacagcaaacacacaag

SEQ ID NO: 93123 - RNA, 78 nt, Homo sapiens
agagccccacagagaccagagaaagaaagacccacaacccgaagaaaagaaacccaagaacgggacccaagaagaaag

SEQ ID NO: 93124 - RNA, 76 nt, Homo sapiens
acaagagcaccacagcacaggaaacagacaaagcagaggacggagaccgccaccggcggacgaccccagggacagg

SEQ ID NO: 93125 - RNA, 72 nt, Homo sapiens
cgaccaccccaagaacccagcccacaccacaacacagaacgaagagaagaagcgaggccggcggagggcgga

SEQ ID NO: 93126 - RNA, 100 nt, Homo sapiens
aaccgcagacagcggccaagaagacacaaaggacggaggcacgacagaagaagagggaaacccgcaggccagagaacaacacaccaagagaaaagggccg

SEQ ID NO: 93127 - RNA, 78 nt, Homo sapiens
aacgcagcagcagccgccaagacggcacccaggaacagccgcaacgccgcacacccagggcccagcaacagacagcca

SEQ ID NO: 93128 - RNA, 77 nt, Homo sapiens
agaagccccgaccagaagaggggcccccgccccgcgggcccacgagcccagaccagaagacacacggagaaacccag

SEQ ID NO: 93129 - RNA, 34 nt, Homo sapiens
cgcggcgagaggcagaacaacccagaaaagaaaa

SEQ ID NO: 93130 - RNA, 75 nt, Homo sapiens
ggcccggcgaaggacccggccgaggcgggcgcaagagaaggcaccaagagaggaaagagaggaaccggcagggaa

SEQ ID NO: 93131 - RNA, 76 nt, Homo sapiens
aaggcccaggagaggcaacccagccccgagccccgggaaaaccaggaccaaggccccaaaagagacggggcgccgg

SEQ ID NO: 93132 - RNA, 73 nt, Homo sapiens
cgcacgaccccaggggaaaagagaccgcggaaaagcaccaaacaggaagagaccagaagagcaggaggaaaca

SEQ ID NO: 93133 - RNA, 61 nt, Homo sapiens
aaaccggaacagcagcacagcaaagccacccgacgacgccacccacaaagaagcaagcccg

SEQ ID NO: 93134 - RNA, 86 nt, Homo sapiens
cgaccaggagccggggcggcgcaggaggagccgaggcgagccaacagcaccccccagacaggccaacaagggccccaggcagagcc

SEQ ID NO: 93135 - RNA, 85 nt, Homo sapiens
caccagcaggcaccccagggcccccaggggggccagccccagagcggagacaacagcaggagcaaggaaaggggaggagaggaaa

SEQ ID NO: 93136 - RNA, 79 nt, Homo sapiens
acaggacagccacgaaccaaggaaccagcaaaggccggggggggcacagagccccggaagacagcccccagcgaccaga

SEQ ID NO: 93137 - RNA, 79 nt, Homo sapiens
gggacgcagcccggcggcagcaggaaacccaccagagaaggcgcggccacccaggacccgggggaggcagcgaagaaaa

SEQ ID NO: 93138 - RNA, 73 nt, Homo sapiens
gagcaaccagaaccggagcaggaggcgcacaacacccaggcacacaggaccccgcgagccagcggcgacggga

SEQ ID NO: 93139 - RNA, 76 nt, Homo sapiens
aagaaccggaaaaaagaaagaggagcaaaaccaccccgaaaccgacacacgacagcaagaacccgcccagcagccg

SEQ ID NO: 93140 - RNA, 58 nt, Homo sapiens
cagaacaggaggggagagggcaggaaccaccgcccaaagagaagaacggcacacaccc

SEQ ID NO: 93141 - RNA, 49 nt, Homo sapiens
ggcagacaaaagggccaaagaagggagagcacaaggcacaaagcaggag

SEQ ID NO: 93142 - RNA, 89 nt, Homo sapiens
accgcggagcaaaaaaagagcccgcaagaagaacagagacagcagccaaacccccagggcccgggacgagcggcccagcgacgagcgaa

SEQ ID NO: 93143 - RNA, 103 nt, Homo sapiens
gacgcaccgcaggcagacaaaagggccaaagaagggagagaggagagaagagacgaggaggaggggagaccgcggcaggacacgaggacagcaacggcgcaca

SEQ ID NO: 93144 - RNA, 93 nt, Homo sapiens
gcggcgccggcagcagagaccaccagaaggggaagaaggagaaagggccaaccccgaagaagcaaacagaaacgaaggagacagagaagaacg

SEQ ID NO: 93145 - RNA, 78 nt, Homo sapiens
aagaagcaacacgagaaccaccccgacacaacaccaccacagcagaaagcagagagcccagaagaaaccaaagccaca

SEQ ID NO: 93146 - RNA, 80 nt, Homo sapiens
acaaggccccaaggacagcagaacaaagaaagcaaaagaaaaagaaaacagaaagcaacaaagaagcagaagaaggacac

SEQ ID NO: 93147 - RNA, 68 nt, Homo sapiens
agaacacacgcggccacggcgcgagccggaccagcaagacagaagacgacaaccggaacgggacaacc

SEQ ID NO: 93148 - RNA, 97 nt, Homo sapiens
aggacgggaccaggcgaagcggccgagcaggcgagcgaacgacgcggacccacaaaccgggagaccaagaacggcacacggacggagagagaacggg

SEQ ID NO: 93149 - RNA, 80 nt, Homo sapiens
cccggccgcgccgcccccggcgccgcgcgggcccgcagggagcgccgccagcagcccccccccagaaagacacggcgagc

SEQ ID NO: 93150 - RNA, 68 nt, Homo sapiens
gcgggggagacgaaaacacaacgggagacgcagcaggcgagagacaagagacacccccgccgccagag

SEQ ID NO: 93151 - RNA, 34 nt, Homo sapiens
ggaaaaccgacacaacagcggcagacaaggccca

SEQ ID NO: 93152 - RNA, 78 nt, Homo sapiens
cacgggcgggcggaggggagcgcaggcagcagaccagccagccccaagcagccgcacgacaaagaacgaagacaagag

SEQ ID NO: 93153 - RNA, 84 nt, Homo sapiens
cggccaggaggaagagaaagagacagcccacagagggcgaagacaggacggcccaggcagacacggaggaggaggaagaggagg

SEQ ID NO: 93154 - RNA, 71 nt, Homo sapiens
cacgccacggcgccccgcaagggcacagagcagaggacaccacaggaaggaggcgcagagagaaggccagg

SEQ ID NO: 93155 - RNA, 81 nt, Homo sapiens
agacaaaaaaaagagaaccgacaagccaaggccggcccagggagaacgcaaaaccaccacccccacaaaaaacgcagggag

SEQ ID NO: 93156 - RNA, 87 nt, Homo sapiens
ccgggaccagcccggaacccgcaccaagccgcccacacgccaaccggccagaggacgaggggggaccgggcaaggggccgaagaaga

SEQ ID NO: 93157 - RNA, 77 nt, Homo sapiens
cacaccccaaaacggagcgaaggaagacaaaaacccccaagaagccaagacaagaagcggagaagcgagagaaacac

SEQ ID NO: 93158 - RNA, 55 nt, Homo sapiens
aaccagagaaaaaacagcacacaggcagggaggggaaccaggggccgaaggcgac

SEQ ID NO: 93159 - RNA, 83 nt, Homo sapiens
aagaagggagagcgcccggccggcccggcccaccgcggcccggaaggaaccgggcagccccgcggagcgccccggagaagcaa

SEQ ID NO: 93160 - RNA, 70 nt, Homo sapiens
ccaacccgcccaggacaagccgcgcggggacccgacgcccgcacgggacggaaaaggcgcacacgacccg

SEQ ID NO: 93161 - RNA, 83 nt, Homo sapiens
cgcccccaccgggaccgaccgcaaacaaggagagccacgagcagccgagggcagaagaggcggccacccacgagccgacggca

SEQ ID NO: 93162 - RNA, 57 nt, Homo sapiens
aggagcagaccagaaggcgcagagagaacgcccgcgccaagcgggggcagcggggac

SEQ ID NO: 93163 - RNA, 77 nt, Homo sapiens
cgagaccagaaacacacagaccaaagcgagacacggaccaccgggggccgggcaccacggcgcccccgcggcacccc

SEQ ID NO: 93164 - RNA, 77 nt, Homo sapiens
gggaggcggcggcggaggaagccggagacagcaggggacagcaaacgcgaacagagcaaggcccccccgccgaacaa

SEQ ID NO: 93165 - RNA, 76 nt, Homo sapiens
aagagacagaacggaagccacgcacgccagaaaaacaaacacagggaggaaggcggaggcaggacacaaccagcca

SEQ ID NO: 93166 - RNA, 40 nt, Homo sapiens
cagccacgcagccccgcccccagaagaccaggagcacaga

SEQ ID NO: 93167 - RNA, 74 nt, Homo sapiens
aagcagcgcgcacagaaaaaaaaccaaggagccgggggaggcgcggagaaaacgggaaacggaaaaagagcgca

SEQ ID NO: 93168 - RNA, 63 nt, Homo sapiens
ggcgagcaccaccggaacgccgggagccgaaaggaggggcagcccgggacagcccgggaaaag

SEQ ID NO: 93169 - RNA, 66 nt, Homo sapiens
aagagccaaaaagcaaccagggcaaaacggacaacgagaacggcaacgggggccaacagaaacaga

SEQ ID NO: 93170 - RNA, 74 nt, Homo sapiens
acacaagccacacaacggaacaaccaccagcaccgagccagcccaaagacccaaacacaaagaagaacgggacc

SEQ ID NO: 93171 - RNA, 69 nt, Homo sapiens
aggcggcgcggacggggcggaggcggacacgagcgaaccgaaaagagacacggaggggaaaccagaaca

SEQ ID NO: 93172 - RNA, 76 nt, Homo sapiens
gggacgaggcgcggacgggcgcggcggggacggcgcccgcgccaccaccggcgaagaacccgacgaagcaacaggg

SEQ ID NO: 93173 - RNA, 78 nt, Homo sapiens
ggggacccaggcccagaagaaaagacaccagcaggaagaaagggcgacgccaacagagacagaccccagccggagccc

SEQ ID NO: 93174 - RNA, 51 nt, Homo sapiens
ccacaacagggacgcggcgcaaaggaaagaggcgaaaccccccccggcggc

SEQ ID NO: 93175 - RNA, 78 nt, Homo sapiens
cgcaagagaagcacccagaagaacgcccagcaggccagcccagaacaaagcaggccacggaaggagcacacaaaacaa

SEQ ID NO: 93176 - RNA, 77 nt, Homo sapiens
gaagaagcaggagcgacaaacgggaaaaaaggggaagcgagagaaaaacaagcgccacacggcagaccagagggaaa

SEQ ID NO: 93177 - RNA, 73 nt, Homo sapiens
aaggaccaagaaccaggggaaaggccagacagcgcagcagccgccagcacgcaacaccaagcagagcacggac

SEQ ID NO: 93178 - RNA, 78 nt, Homo sapiens
accggcgccgggacccggcccaggcggcgaggagcccgggcgccgaccggacgaccagacagaccaccggcagggacc

SEQ ID NO: 93179 - RNA, 83 nt, Homo sapiens
gccggacccagcgccggcccccaggcgaagaagcgcagccgcaccggccaaggccggaaggaacagaagaacaaaacgggcgc

SEQ ID NO: 93180 - RNA, 59 nt, Homo sapiens
gggaggagcgggagcgcgcgggcagccgggggaccggaaagcggacaacaaacggccgc

SEQ ID NO: 93181 - RNA, 73 nt, Homo sapiens
aagcacggaacccaaaggcagcggagcggggagaacgcgggcacagcggaaccgccaccacggcacaaggagg

SEQ ID NO: 93182 - RNA, 84 nt, Homo sapiens
gaagagcgcagcggcggccaacacgccaccgaagcgcaaagggacaggagaaggacggaagaggggccggagagaccgggcagg

SEQ ID NO: 93183 - RNA, 71 nt, Homo sapiens
acagcaaccggcaaggaaaaaaacaggggaccccccgcgcaaggccgaaaaagacgaacaaaaggaaaaag

SEQ ID NO: 93184 - RNA, 74 nt, Homo sapiens
agcgaacccaccccagggcgcaaggccaagacagaaacgcaaagaaacccgaaaagaagcccagaggacaggca

SEQ ID NO: 93185 - RNA, 79 nt, Homo sapiens
agaaccggcgccgccaaacagcccagccgcgccagcgcccggcgccgcgcgccacccccgaaaagaaaaggcagcgaaa

SEQ ID NO: 93186 - RNA, 76 nt, Homo sapiens
gcgggacagcaaaaagacccaccaaggaagcagcggccacgccaggacaccccccaggcacagccacaccccagcg

SEQ ID NO: 93187 - RNA, 72 nt, Homo sapiens
ccacccacgaccgggaccgagacagcgggagagggaaagcggagaggggaagagcacacaccagagcggcgc

SEQ ID NO: 93188 - RNA, 79 nt, Homo sapiens
cagcagcacgggcaccagaggagagagacgggcacacacaagagacggaaaaggaagggaaggagccgacaccacaagg

SEQ ID NO: 93189 - RNA, 72 nt, Homo sapiens
gggcaccgaggacccgcccgcccagacaagcagcagaccccagggcccgacagcacggagaccagggaagag

SEQ ID NO: 93190 - RNA, 82 nt, Homo sapiens
acccagcaccgggacacagcagccccagcggcgcccaggcccccgacgccgccgcgggagaccggaaaccgagagaaacgaa

SEQ ID NO: 93191 - RNA, 74 nt, Homo sapiens
ccgaggacacgcaggagccgggacagcccgccagaggaagaaaaaagcccaccgcccagaggccccccggacac

SEQ ID NO: 93192 - RNA, 74 nt, Homo sapiens
cgccccgcgccccgcagggccagagacacagcggaaacgcaaaagcgagaagaaaaagccagaggacaagaaga

SEQ ID NO: 93193 - RNA, 75 nt, Homo sapiens
aaagaagagaaaccagcgcggggaagaaggacccaggagacaagagaaaaacgagagcgcaaaggcaagaggaag

SEQ ID NO: 93194 - RNA, 73 nt, Homo sapiens
cacgggcccggcagaccaggggccagcacgaaagcagccaggagaagagcacaagaaacaagagccagcaggg

SEQ ID NO: 93195 - RNA, 113 nt, Homo sapiens
cggcgccgcgacccggccgcggaggcccaggcagccgcgcagcccgggcgcgcccgcacgcgccggggacgacaacagacggccaccggcggcagacagcccggagaagggga

SEQ ID NO: 93196 - RNA, 66 nt, Homo sapiens
caggagccacgcaggagggggacccgcccgcagccagaaccggcggccggaacgcgggaaaacggg

SEQ ID NO: 93197 - RNA, 58 nt, Homo sapiens
cacccaggaaacagcgcaagccaggagggaaaaggaggaaggagccagacaacaaggc

SEQ ID NO: 93198 - RNA, 53 nt, Homo sapiens
agggcagagacgcaggacaagaggaccgcagggaaggaaggccggaggagaac

SEQ ID NO: 93199 - RNA, 47 nt, Homo sapiens
ccccaagaccaagcgcgccacgcgcggcgcgccggcaggcggaacca

SEQ ID NO: 93200 - RNA, 75 nt, Homo sapiens
cggacaccagaaagacggaaccaggaagagagacgacgggcaacagacagggggggaacagcgccaggaggcagg

SEQ ID NO: 93201 - RNA, 56 nt, Homo sapiens
aaacaaaaaggccaaacaaagcccagcgagagcaacccccagccacaacgcgaacc

SEQ ID NO: 93202 - RNA, 74 nt, Homo sapiens
ccagcagcagcagagcccgccagacccccgaaggcaaaggaccggagccaagaaagggagggggaaacagccaa

SEQ ID NO: 93203 - RNA, 74 nt, Homo sapiens
gcagagccaagagaacaggcaacacagggacgcccagaaggaacgcagaaaacaagccgacagaagaaagcaga

SEQ ID NO: 93204 - RNA, 80 nt, Homo sapiens
acacacagaccgagcgggcaacaccaggcaccagcaaggggggcacacacagcgcccacagcagggcagcacaaggagaa

SEQ ID NO: 93205 - RNA, 55 nt, Homo sapiens
aagcaacggcggaaacaagggaaaagaaaggcggcgaagaagagccgagagggag

SEQ ID NO: 93206 - RNA, 67 nt, Homo sapiens
cagcggacaaaaaaaccgcgaccggccgcccgcacaagccagaggccaacccagggggccgggcacg

SEQ ID NO: 93207 - RNA, 77 nt, Homo sapiens
gccaggccccagggcgagcacagcacacaaggaccaccaagcaggaaaccagcaaaacagaaagagagaaaagcaag

SEQ ID NO: 93208 - RNA, 58 nt, Homo sapiens
ccccacaggaggggaggcgaccaggccgacgagcccgaaacggagagggcagcgaaca

SEQ ID NO: 93209 - RNA, 80 nt, Homo sapiens
aggaggcggcgcaccagcacccgcccacacccagagagcccaggaccaaacacggaacagggcacgcggaacaggagagg

SEQ ID NO: 93210 - RNA, 80 nt, Homo sapiens
cgccggagcagcagagaacggcaaagacccacggcgaagcggccccagagggagcccgaaaacacgagaaagccggaagc

SEQ ID NO: 93211 - RNA, 73 nt, Homo sapiens
aggccgccgggaggaggagaggacaggaccagggagcccacagcgcccaaaaagagacggaacagagaagcaa

SEQ ID NO: 93212 - RNA, 85 nt, Homo sapiens
ggagagcagcagccgcccgccaaccccaggggaccagaggaaccagcccgagcgaacaaggcaacagaacgaggagaaggcagaa

SEQ ID NO: 93213 - RNA, 64 nt, Homo sapiens
ccggagaagggaggaaaaccaacaagggaccaagaaaggcccagggaccaaagcccggacaagg

SEQ ID NO: 93214 - RNA, 55 nt, Homo sapiens
gcacaagggacaagacagcccaggccgggaaaggaaggggagacaacaacaagcc

SEQ ID NO: 93215 - RNA, 78 nt, Homo sapiens
cggcggggcgcgggagcccgaggccgcggggccgggcacccggcaggaggcagccggagcgcagcagacaacccagga

SEQ ID NO: 93216 - RNA, 68 nt, Homo sapiens
gagccacaaaaaaggaagcgaaagaagcacaaacaccagcccgaacgagacgagaaaccggagaccca

SEQ ID NO: 93217 - RNA, 75 nt, Homo sapiens
ccccgggagcccgcacggggaaggacgcaccggagcaaaacagacgacgcagggaaaagacagagaagaagaccc

SEQ ID NO: 93218 - RNA, 60 nt, Homo sapiens
gacacgaagcagagaaggacggccaagaaaccaggacccccagaggagccaccgcaccca

SEQ ID NO: 93219 - RNA, 71 nt, Homo sapiens
ggacccggagcagaagaagcaggaccgcggggagcgaagcgcgcggagacccaccaccaggacgcgaaaga

SEQ ID NO: 93220 - RNA, 77 nt, Homo sapiens
cgcaaaggccaaggggcggcaaaaagcagcacaaggaaaacgagagaaacgaaggcgagagaaacagcaaggcccga

SEQ ID NO: 93221 - RNA, 78 nt, Homo sapiens
gagcacagaagaccagagagcggccgggccagcgccggcggagggaagcgaccgcggaggcgcaccagggcggaggag

SEQ ID NO: 93222 - RNA, 78 nt, Homo sapiens
cgggacgcgcccgccgcccggcgcgcggccgcgcgcgcggccgcacgcggggcgcgcccaagcgcccgaagagcggaa

SEQ ID NO: 93223 - RNA, 47 nt, Homo sapiens
cagcagagggccacccgccccaagggccccgggcgcgggagccagcc

SEQ ID NO: 93224 - RNA, 85 nt, Homo sapiens
cccagaggagcggcggaggcaacgcagcggaagggggcccgaaggagacggagaccgaggacaggccggacaccgcagcccaaag

SEQ ID NO: 93225 - RNA, 33 nt, Homo sapiens
caaaaagccaaaagcagagcagccggccagaag

SEQ ID NO: 93226 - RNA, 70 nt, Homo sapiens
caccgaggccaacaacacaggcagaagagcgcggaccggaaacaacgggacgaagccccaaacacccaac

SEQ ID NO: 93227 - RNA, 39 nt, Homo sapiens
gaaaacaccaccggaccacgaccagagcggcacgagggg

SEQ ID NO: 93228 - RNA, 72 nt, Homo sapiens
cacggaggcgcccggaacaggaggagaagagagagggcgaaccaaagaaggaaggcgacccaaaaccacgaa

SEQ ID NO: 93229 - RNA, 73 nt, Homo sapiens
aaagcgaacacaaggaggaggcggagaaaagcagaagcccaggacgcccggcaccggagacgcggcgagggac

SEQ ID NO: 93230 - RNA, 75 nt, Homo sapiens
acgaagaacccacagaggccccgaagagcgaaagcgccaccggaggccgagccaccaccagacaagcacagagac

SEQ ID NO: 93231 - RNA, 78 nt, Homo sapiens
ccacgcaacccaaacccgggccgagcgacccccacccagcccgagagcagacacggcgcggaggagggaagggcacga

SEQ ID NO: 93232 - RNA, 53 nt, Homo sapiens
ggccggggggaaggggggagcggcagaacccggcgccaagaggggcaaagacc

SEQ ID NO: 93233 - RNA, 51 nt, Homo sapiens
agagagaggaccaccaggaaaagcacaaaaaggagagacaccgggaagggc

SEQ ID NO: 93234 - RNA, 76 nt, Homo sapiens
accggcccaggcgccccaaaaagcccacccccaggccagcgcacacgggacgggggcgaggagcacgaggacacgg

SEQ ID NO: 93235 - RNA, 82 nt, Homo sapiens
cgcacccgcacccgcaggccgagggacggccaagaagcgcaaggcaccacgcccaagacaccacgccaaggcagcgcaaggc

SEQ ID NO: 93236 - RNA, 78 nt, Homo sapiens
caccgggaaaccaggacacggacagacccagacggagcggaggaggccggaggcacaccgagcgggccacacccaaaa

SEQ ID NO: 93237 - RNA, 54 nt, Homo sapiens
caaacccaacaaccacagagggaggaaagagcacgccagcacgcaggcaggagg

SEQ ID NO: 93238 - RNA, 87 nt, Homo sapiens
aaaaccaaaggagaagaaaaccacagaagggagccacaaacaagaacacacaccccagccagaacggagggcagccaaccaccaccc

SEQ ID NO: 93239 - RNA, 38 nt, Homo sapiens
gacaagaccacgagccagacacccccggaccagaaacc

SEQ ID NO: 93240 - RNA, 79 nt, Homo sapiens
agacaggccgccaacaccgcaagccgcccaacagcacaagaagcgccaccacgccggcccgggggaaaggacccgaagg

SEQ ID NO: 93241 - RNA, 79 nt, Homo sapiens
gaacaccaggaaaaggcacgggaaaccccgccccaggggagaacaacaacgcggaccaggcccgcggcggaagccggca

SEQ ID NO: 93242 - RNA, 81 nt, Homo sapiens
gcccacaccaccacgcagagggagacgagagggggaccaaggggaggagcggcgagcaggaccgggcacggggagccaccg

SEQ ID NO: 93243 - RNA, 86 nt, Homo sapiens
cgagcgcggccggacgccagcggacacgcgggcgaggccaggccaaagaggcggagaagagcccccgaggccgaggacgcaagaag

SEQ ID NO: 93244 - RNA, 83 nt, Homo sapiens
gggagcgggaccggccggagagcccaggcaccagagcaccgccccggccgccggacagccccacccagcagggacaccgcggc

SEQ ID NO: 93245 - RNA, 79 nt, Homo sapiens
ccccaccaagagaagagcacagaagagggagaagggcgccgcgcccacggccagacccagagcgagacacacggacccg

SEQ ID NO: 93246 - RNA, 55 nt, Homo sapiens
ccccaaagacagggaggaccacgccggagcaagcagcaggcgcaaaaacgaaccc

SEQ ID NO: 93247 - RNA, 62 nt, Homo sapiens
gaaaaagcaggggcaagcaaaagcggcagaggccagcaggaaaaccagcgaggacagcggaa

SEQ ID NO: 93248 - RNA, 71 nt, Homo sapiens
gcggccccgaggaagcaaggccgcggggggagaccccaccaccgagagaacaacaggggggagaggagaga

SEQ ID NO: 93249 - RNA, 70 nt, Homo sapiens
aagggcaaggagccacaaagaagaaaacacaaaaacgggaaaggaacacccacaacacaaccagagcagg

SEQ ID NO: 93250 - RNA, 80 nt, Homo sapiens
ccagggagcggagcgcccggccggcagcgggaaggacccaaagacaggaccacgcaccagcagagaaggaaagcaaaccg

SEQ ID NO: 93251 - RNA, 40 nt, Homo sapiens
agcgcacacagcaagcacgagggggggcaggccacagcag

SEQ ID NO: 93252 - RNA, 70 nt, Homo sapiens
cgccacacagaaagaaagaacccaccccccaaccccggacagagaggaaggcacgcagagaacagagaga

SEQ ID NO: 93253 - RNA, 66 nt, Homo sapiens
gacaacgcccaagcagcaacaacgaagccaggaggagaagaccgggaggacagcgagcggagacaa

SEQ ID NO: 93254 - RNA, 96 nt, Homo sapiens
gcgcgggagccgggcaggacgccgagcgggacccccgccgccccgggggccggacgggcccaaacccgagcccgcaagcagagaccgggagcaaag

SEQ ID NO: 93255 - RNA, 42 nt, Homo sapiens
cgggaagcagggcgaggacaaagggggacggagggaggcccg

SEQ ID NO: 93256 - RNA, 51 nt, Homo sapiens
accagaaaaggaggaagagccaaaaacgagcaagggaaacaccacggggca

SEQ ID NO: 93257 - RNA, 77 nt, Homo sapiens
gacccgcacagggccagcacccccccaacagaaaacggccggaacgcgggacggagggacagagacggagcgccagg

SEQ ID NO: 93258 - RNA, 71 nt, Homo sapiens
accaagaaccagcacagcaggaacgagcaaggcagacaaaagagagacggaaacagcgggaaaacggaaag

SEQ ID NO: 93259 - RNA, 61 nt, Homo sapiens
gacacaggggagcaggcggaggcaagggagcgggggacagcgaaggagccaacccaagcag

SEQ ID NO: 93260 - RNA, 69 nt, Homo sapiens
gagagagagccccacgccaccggcgacagagaagagagggacggcgcaaaccagggcgaggcgggacag

SEQ ID NO: 93261 - RNA, 78 nt, Homo sapiens
gccaaccgccacaaccaccaagagaaacaagggaaaggccaccaggggacagacaaagagaccagaagaacaaggaac

SEQ ID NO: 93262 - RNA, 79 nt, Homo sapiens
gcccggagcaggaaaaacacagagacagacggcggcaggcgagagccacagaaggaggaggggacagcagcaggagccc

SEQ ID NO: 93263 - RNA, 82 nt, Homo sapiens
accacggcccacacaacgccccgacgcgcccgccccgcaggccaacacgggagaccacaggcggagcagcagcagccggagc

SEQ ID NO: 93264 - RNA, 73 nt, Homo sapiens
aaaccccaagaacaacacgacagagccggcacgacaaagagcaagggaaaaccagacaaggaaaacagaagga

SEQ ID NO: 93265 - RNA, 73 nt, Homo sapiens
aggacccaagggaacgaggagaagagccaggacacagcaggcaaccgcggcggaagaagaaagacggccaaaa

SEQ ID NO: 93266 - RNA, 56 nt, Homo sapiens
cgggaccagacgaggaacagcaaaaagccggcggaagaggaccaagaagggggcag

SEQ ID NO: 93267 - RNA, 78 nt, Homo sapiens
ccggaagcagcaccccacacgcccgggggcagggcacgcgcccgaggaaaggaccacccacccaccgcgcgggcagca

SEQ ID NO: 93268 - RNA, 69 nt, Homo sapiens
gccagagaagcgccaaaggcagggaaaacagaaccagaggcagggccaggacaccggaggaggggaccc

SEQ ID NO: 93269 - RNA, 65 nt, Homo sapiens
agaggccaacgcagaggaacggaacagaggaacagaaacgagaaagacagcaaagaaaaggagaa

SEQ ID NO: 93270 - RNA, 88 nt, Homo sapiens
gcgagaagacaaggaccacagggcgcaaggccacgaagacggcaaggaggaaaggaagaggaagacggcaagaagcgaaaaagacgaa

SEQ ID NO: 93271 - RNA, 71 nt, Homo sapiens
agccagaccaaagaaaacgagggaacgaacaaagggaccgcgcgggagggcggccaggaacgaggacagac

SEQ ID NO: 93272 - RNA, 61 nt, Homo sapiens
caggaaacaggcggcggcggggggagcgggaaggccacaagcccgcgccagaccaacaagc

SEQ ID NO: 93273 - RNA, 81 nt, Homo sapiens
gccagcggagcgaacccgagagcgggagcgggcgggccagcaggaaaccaaaccccccaaaggcccaggacaggacgaagc

SEQ ID NO: 93274 - RNA, 78 nt, Homo sapiens
cacgcagagcacaccggccaacagacgagccacccaaggggggacgccgccagaggcccgaaaggaaaggaaaagaga

SEQ ID NO: 93275 - RNA, 76 nt, Homo sapiens
gacaagaggagcagagagagcgcaaaagcggaggaaggagcgcagggggagggcgccagagacgagaggcaagcag

SEQ ID NO: 93276 - RNA, 62 nt, Homo sapiens
agaaagcccacagaaacacagcaaaagaggagaagagcaggcccagaaaaggcaaaaacggc

SEQ ID NO: 93277 - RNA, 126 nt, Homo sapiens
agacgccaccgccgcagcggcgcagcccacgccagacgaccccacccgcgccgcgacccgagaaggcaccggccaaagggggcgaccgggacaggacgacgacagcgcccgaagccaccagccccg

SEQ ID NO: 93278 - RNA, 84 nt, Homo sapiens
ggaaccaggccgagggggcgagggcgaagacgagaccagccgcgaacggacagaccagccaccacgcccgcccacacagcgccc

SEQ ID NO: 93279 - RNA, 88 nt, Homo sapiens
gagagcggggcgagagaagccaaggacccgaccagaaacccagcgaggacacagaccgcccacccaccaccccagagggaggccaaca

SEQ ID NO: 93280 - RNA, 78 nt, Homo sapiens
gcagcccaagagcgggcccgggggccccggaccaggaaaccccacgggaagcagcgcgcagagacaaccgcagcaccg

SEQ ID NO: 93281 - RNA, 76 nt, Homo sapiens
cagcagacccaccagagacaagccaggacccgaggcgaacaagaaccacgacgcagaacggaaaacagaagcgcaa

SEQ ID NO: 93282 - RNA, 39 nt, Homo sapiens
gagaggaacaagccaagcagaaacccgagaggagcagga

SEQ ID NO: 93283 - RNA, 84 nt, Homo sapiens
acaagaagaccgagcaaagagaccccggaacgacccaaagacaggaccacgcaccagcagagaaggaaagcaaaccgaagcagg

SEQ ID NO: 93284 - RNA, 62 nt, Homo sapiens
gaaacacaaaagacaaaacaaccaagcagggaaagcagacgacggcggaggcagggggaccc

SEQ ID NO: 93285 - RNA, 71 nt, Homo sapiens
agaccaagaacaaccgcggacacggagaggaagggcaggggcacaccagacagacaggaacaggaccaaga

SEQ ID NO: 93286 - RNA, 53 nt, Homo sapiens
gccaaccacgccagagacagcgcaccgacggagccggagagaagaagagcccc

SEQ ID NO: 93287 - RNA, 78 nt, Homo sapiens
ggaagacaaacaaaagagaaggcaacaaggcacacaagcggggaggaccccagaccacgagcagcaacccggaaacgg

SEQ ID NO: 93288 - RNA, 85 nt, Homo sapiens
gccaccgcgaccccgcccccagaaagacaacgggagagacaaggccccacggcggagcagaagggacaccccgaagacggggaga

SEQ ID NO: 93289 - RNA, 84 nt, Homo sapiens
cgcgcagggccgcagcgggagcggacggcgagcgcgagcggcgcgagaaaacccacaggaccgcgaacaaggaggccacaaaac

SEQ ID NO: 93290 - RNA, 77 nt, Homo sapiens
aggccacaaagcgcgacaccccggacccagccccaacggcaagcaacgcgcccaagacagagcagcacagggagcca

SEQ ID NO: 93291 - RNA, 93 nt, Homo sapiens
gaacacgcaaaggccggagagcccagagcgacccccggccaccgggcgggacagcccagagaccagcgaaagccgggaaacaaggcccacaca

SEQ ID NO: 93292 - RNA, 77 nt, Homo sapiens
aggaacccggacccggcgagcggacggggcgaggacgcaaccaccaccgacccgagccagcccgaccccggcggcca

SEQ ID NO: 93293 - RNA, 75 nt, Homo sapiens
aaggggccaccaggaggccagggggcgccagaggaagcgggcccacaacaaaacaagaagagacgggccgccccg

SEQ ID NO: 93294 - RNA, 78 nt, Homo sapiens
cgggccagcgaaagagcagggcagaggaagcccagaaggccaaaggcaaggaacgcgcacaggaagagaaagcgcaca

SEQ ID NO: 93295 - RNA, 82 nt, Homo sapiens
agcggacaaagagagaaaggagcaaagcccaccgccggcgcaggcagcacagaagaacgaagaaggcaacaagagagagggc

SEQ ID NO: 93296 - RNA, 86 nt, Homo sapiens
ccgcaccacggcaagggcaaccgcggggcaagcgggccacgcacccgcaccaaggccaaggccgcagccaagccggaacaggagcg

SEQ ID NO: 93297 - RNA, 83 nt, Homo sapiens
gaagcagggcgaaccagagaaaacggcaaggaagcaaaccgagagaaggaagaggccacccaaccccccccaaggagagaaga

SEQ ID NO: 93298 - RNA, 59 nt, Homo sapiens
gaacaaggcaaaagggaaacacagcaggcggacgcccggcgggagggcagcggcagaag

SEQ ID NO: 93299 - RNA, 79 nt, Homo sapiens
gaaaaagcgcagcaaagagacaagccaaagccgaccagggaacaacgggagaaacagcaacaaacaggaggcgcagggc

SEQ ID NO: 93300 - RNA, 66 nt, Homo sapiens
agaccaacgaaaggcccagacaacacggacagccagcacaaaaaaacaaaacgagaacacggaaga

SEQ ID NO: 93301 - RNA, 82 nt, Homo sapiens
gggcggaagaccaagggcgacacgcggcaccacccaagaagcgggcccccggacggccccaccccaacgcacggccacccac

SEQ ID NO: 93302 - RNA, 75 nt, Homo sapiens
ccaggcagagcagaagcaccccagaaaggagcaaacaaccccacagccaacaagaacaacgaaggcgaaccaacc

SEQ ID NO: 93303 - RNA, 81 nt, Homo sapiens
ggagacccccgggggaagaggaagaagggcccaccaggagcgcgggaccgggcggccacaaggggcaggaccaaagacgac

SEQ ID NO: 93304 - RNA, 75 nt, Homo sapiens
agaccgggccgcagaagaggccccaacccgggccagacaaaggacaaaggcagagccaggggacaggagcccgac

SEQ ID NO: 93305 - RNA, 79 nt, Homo sapiens
agcaccaggaccgggccggaacgagacgcacgagcggaagcgagggcaccaaccaggagaggagacaaacgaacccggc

SEQ ID NO: 93306 - RNA, 70 nt, Homo sapiens
ggaggcccggagcgcccggagccggaggcaaggaaacgaaacaggaagagggaccggaggcgcaacgcgc

SEQ ID NO: 93307 - RNA, 52 nt, Homo sapiens
gcagcccaaagcgaagacagacgcaaggacaaaggccacaagagacacaacg

SEQ ID NO: 93308 - RNA, 61 nt, Homo sapiens
accaagggcgggggcacaacacaggaacgccaacaggagcggcgcccggaagcggcggagc

SEQ ID NO: 93309 - RNA, 85 nt, Homo sapiens
aaaagccgcccacaaggagagcgaccacggggcaccagaaagaccacaggggacagagaaagaagaagaacaagcgccaagacgg

SEQ ID NO: 93310 - RNA, 99 nt, Homo sapiens
ggaggaaggggggccccaaacgaggcagcacacggaacggaccccagggaaagagggaagaagcaagccagaaagaaaccacccaagaggacacaagga

SEQ ID NO: 93311 - RNA, 60 nt, Homo sapiens
caggaacaccagagaccacgaacagagcgcaagaaagccgaaaaggaaaaggagccaggg

SEQ ID NO: 93312 - RNA, 80 nt, Homo sapiens
gacaagaggacaccgcggaggaagaacgggaggcaacagaaggggagaagcacacagaacccaaagagcacccaacgaga

SEQ ID NO: 93313 - RNA, 64 nt, Homo sapiens
ccaggaaaaagacagcccgcagcacgaccagcaggaacgggcaaagacgacacccggcgaaaaa

SEQ ID NO: 93314 - RNA, 76 nt, Homo sapiens
gcacccagggaaaggagacaaggaccgaaacagaaacggaacaccaagagaaaaggcggggccagcgccgacagaa

SEQ ID NO: 93315 - RNA, 43 nt, Homo sapiens
cgccggccgagaaggcagaggcgaacaaagggcaaaggacaca

SEQ ID NO: 93316 - RNA, 78 nt, Homo sapiens
aaaaaaagagacagccaagagaaagcccgaacgcgggaagaacgaagaaggacaaaaaggagaggcgacggacagagc

SEQ ID NO: 93317 - RNA, 83 nt, Homo sapiens
gcccagcagccagggccaggagccgggccgagccagggcccccagaggagagaaggagggaccgccgggccaccagaaagagc

SEQ ID NO: 93318 - RNA, 77 nt, Homo sapiens
gacccgccccgggggccgccagccgaaacaaaaaaacgagcaaaggcagaaaaaggaacggaacagcggaaggcaag

SEQ ID NO: 93319 - RNA, 76 nt, Homo sapiens
gcaacccggacaagcggggggccaaggcgacagcaaaacggagaaagaggagagggcaggggccgccggaggcaga

SEQ ID NO: 93320 - RNA, 76 nt, Homo sapiens
ccagcccaggaccccaggggaacaagaggccacgcagagccacgccgggaggccaacagacccaacccagaaggca

SEQ ID NO: 93321 - RNA, 71 nt, Homo sapiens
caggcaacacagggacgcccagaaggaacgcaggaacccgaaacgggacaaggaaaggaaaaaacgagacc

SEQ ID NO: 93322 - RNA, 73 nt, Homo sapiens
cgaagaggcagagagcaaagaacccccaagcaggaagcgggaaaaagccaaagcaggccgccacaacgaaaag

SEQ ID NO: 93323 - RNA, 68 nt, Homo sapiens
aagccacaacagggcggcaacaggggcgagaaagggccccggacgggcaggcagccaaccagccgcca

SEQ ID NO: 93324 - RNA, 60 nt, Homo sapiens
aaaaggagcagcccgggcaccacagaaaagccagaagcgcaccaggacccaaaaagcgaa

SEQ ID NO: 93325 - RNA, 82 nt, Homo sapiens
cgagccgggccgcggcgccgagcgaacggggagccgagcggagcgccgcggcgcagccagaggccggaccacggaaagaccc

SEQ ID NO: 93326 - RNA, 87 nt, Homo sapiens
ggaagcaccagacaagacaggagaggccacagaacacagacacgcagggagaaggcagccgggaaggagcggagacagaggagggac

SEQ ID NO: 93327 - RNA, 72 nt, Homo sapiens
gcagccaaaccgagaggacaacaggcacaaagagagaaggaacacccacagggcagacagagaaagaacaca

SEQ ID NO: 93328 - RNA, 84 nt, Homo sapiens
cacgcaaccccacccccagaagccagcagcagccagagaaccaggaaacggagaggaacacaggcgaaaggaacaggacggcca

SEQ ID NO: 93329 - RNA, 79 nt, Homo sapiens
acccccggacccgcacgaccgcccacagccggcgaccaccccggcgcccccggaggcgggggaagcgggccaggaacca

SEQ ID NO: 93330 - RNA, 86 nt, Homo sapiens
caccagggagacgcgggagcgagcgcagcaaagcgcccagccgccgcccgcgcccgcggccgggggaggccagagcccaggccgag

SEQ ID NO: 93331 - RNA, 81 nt, Homo sapiens
acgcacgggcgcacggaggacgggaaaaccagcagcaggccagaggagcccgagaaggcaggagagaccacggcggaacac

SEQ ID NO: 93332 - RNA, 80 nt, Homo sapiens
gcacgaccccggacacgggcaggcaggcgagcaccacgccgaaaaacgggagaacgccaaaaaacaaacgcccgcaaaca

SEQ ID NO: 93333 - RNA, 76 nt, Homo sapiens
accgcaacggagaggacaacggacacaacgaggccacaggggcaaaagcccggccaccggggacagaaccgggacc

SEQ ID NO: 93334 - RNA, 74 nt, Homo sapiens
ccgcggcccccggcacagagcccacacggagcgaccacacccacccaggggacccggcagaagaaagagagaac

SEQ ID NO: 93335 - RNA, 79 nt, Homo sapiens
ggagacacaacgcgacaacggaccaaaaacacgagaggggaggaggccccggcagcgcagacccggcaccaaagggcgg

SEQ ID NO: 93336 - RNA, 80 nt, Homo sapiens
agccaaggaaagaccccacggcaacagacaccgcgaaagcgaagcgcgaaaaccagcaaggagccagagaccaggagccc

SEQ ID NO: 93337 - RNA, 59 nt, Homo sapiens
ccccggagcccggagcaaggagaaccccggccaccgggccccacaggcaccagccggag

SEQ ID NO: 93338 - RNA, 83 nt, Homo sapiens
cgcacccccgacaaacaccacgagaaccgcagcccacacgcacaagagggccagggaccaggggacgcccaagacggccaccc

SEQ ID NO: 93339 - RNA, 80 nt, Homo sapiens
gggcagccgccgcgacggcggccccagcccgacccgggcggagaacggaaaagcaccaggaagcagagaggaccgcagaa

SEQ ID NO: 93340 - RNA, 81 nt, Homo sapiens
cagcccggggagccccgcgggccgcccagggaggaagcccgaaggagcagacacgggccaggcccagcccgacaccccaga

SEQ ID NO: 93341 - RNA, 83 nt, Homo sapiens
aggagggaggaagcgcgccgagccgggaacccaggccaagccaacaaccccagaaccaggcggcaaccccaggcgcgggcaga

SEQ ID NO: 93342 - RNA, 84 nt, Homo sapiens
cgaaaacggaagcgcagggagaaggaagaggggaaaaggcaaagcgaaaaagaccgcagggaaggccgccacgagacagaaagg

SEQ ID NO: 93343 - RNA, 56 nt, Homo sapiens
gagcggcccagccgcccaggacagaaccagacacgggggcacaacacccagagacg

SEQ ID NO: 93344 - RNA, 82 nt, Homo sapiens
ccgcagaagccgagaaaacaggaagaagaggccaacaacggccccaagcccccacagaacaccgaaccaaagagagccggag

SEQ ID NO: 93345 - RNA, 40 nt, Homo sapiens
cccgggcccggcaggcgagcagccccaacgagcggcccgc

SEQ ID NO: 93346 - RNA, 80 nt, Homo sapiens
gccagacaggaacaagacccggacaccaggccacagccgggaagcagagggagaaagggaggagcgcggcaagacaacca

SEQ ID NO: 93347 - RNA, 75 nt, Homo sapiens
cccacccagacgaagacagcccggacaccgacagcacagacagaacccgcaccagacggggaaggaagccacacc

SEQ ID NO: 93348 - RNA, 65 nt, Homo sapiens
ccgacgccacaggccaacgaggaaccaaagggagaggaaacgcgcggaccggagcggagaaccag

SEQ ID NO: 93349 - RNA, 83 nt, Homo sapiens
cgccagaaggaagaggcggacggaggagcaggcgagaagagaagggagacggcgaaaaccaaagaagaaaagcaccccaagag

SEQ ID NO: 93350 - RNA, 81 nt, Homo sapiens
gggaaggcgggagacgagaagccgaaaagcgcagcgagcggagccgccggaggaggcgccagcaggaaacacagccggaaa

SEQ ID NO: 93351 - RNA, 85 nt, Homo sapiens
gccggaacacccggaagccgagaaagagacaggggccaggccaggggcaggggaagcacccaaccaacgagcgggccacacagcg

SEQ ID NO: 93352 - RNA, 84 nt, Homo sapiens
ggggaaaagcccaggaggaagcaggagcagcccaagcgccccccacgcacgaaaacacaaagaaaaccgccaaaaagggaacag

SEQ ID NO: 93353 - RNA, 66 nt, Homo sapiens
cggacaacaccaggaaaagacagagggaggcccaggacgggagagacaagcagggaccggagaagc

SEQ ID NO: 93354 - RNA, 48 nt, Homo sapiens
ggcagagaggcgcagcagagagaccagaagaagacacgagaaccggaa

SEQ ID NO: 93355 - RNA, 89 nt, Homo sapiens
ccggaccgcagaggaagagaaaaagcaaacgaccagacggcagggaggcacaaaggggaacacaggacacgcccaccaagaaagaaccg

SEQ ID NO: 93356 - RNA, 37 nt, Homo sapiens
acacaaagcgggacaacggccgacagcaggaagcacc

SEQ ID NO: 93357 - RNA, 82 nt, Homo sapiens
ccgacgaggagggagacggcggacacacggaggcgcggggggaggagacaacaggagccaccggacagggacgagagaccgg

SEQ ID NO: 93358 - RNA, 72 nt, Homo sapiens
cgggcgaccgcggcccgccgacccccaggcggacaaacccgaaagggggcaaccagaaagccaggagccacg

SEQ ID NO: 93359 - RNA, 68 nt, Homo sapiens
gccacgacgccggcacccaaccagagaggaagacaacgaggcgcgggacaaccaacacaaccaaagag

SEQ ID NO: 93360 - RNA, 66 nt, Homo sapiens
gccccggcccgcgggccggcccggcacaggggggggaagaggaagaagcaaacgacagggaaccac

SEQ ID NO: 93361 - RNA, 89 nt, Homo sapiens
ccagcgagggcggcccggggcacccgcacgggaagcaggcccgccacaggggaaaaagggaagacccgaaggaagacaacacaaaaacc

SEQ ID NO: 93362 - RNA, 61 nt, Homo sapiens
ggggggcacacccagggacagaccgaccaacgggcagagggagcggccacaagcccaaggg

SEQ ID NO: 93363 - RNA, 82 nt, Homo sapiens
acgaccgaccgaccaaagccgaggccaccccagaccgcagaacagacgacgcccgaagcaaaagccacagaaaagacaagag

SEQ ID NO: 93364 - RNA, 90 nt, Homo sapiens
cgaggaaggcagcggggagacccaggcgcagcaacaaagggcagcgagcgaggccgggcgcaggcgaggcgcgcaggcaggcacaaggcc

SEQ ID NO: 93365 - RNA, 82 nt, Homo sapiens
ggccccgagggaggcgggacgggagacccgcaacgaaaacccccgggcccggagacgcgacagccgagcagccagaggagga

SEQ ID NO: 93366 - RNA, 70 nt, Homo sapiens
ccaaaagcacggaaaaaagaaaaaacgaacagacgagacacaaccagacacgcaggagaagacagaggag

SEQ ID NO: 93367 - RNA, 78 nt, Homo sapiens
cgcaggagcagcgcccaagaaggacaacaagcgcaggaacacggcagacggaagaaggaccggggagacaggaacacg

SEQ ID NO: 93368 - RNA, 79 nt, Homo sapiens
acccgggaagcggcaggcaaaaggaaaacaaaggcacaggagccacagaagcccggggcggcgacggagcacgacccaa

SEQ ID NO: 93369 - RNA, 79 nt, Homo sapiens
cgaggccaccagccagggaacgaggagacacggccagcccggagaccacaggagcagcagcagccaggaaagcaggaac

SEQ ID NO: 93370 - RNA, 69 nt, Homo sapiens
cccaaacggaacagcgagacacgggacaaaaaccaaaggcacaagcagaggaaccagggaaccgccgcc

SEQ ID NO: 93371 - RNA, 71 nt, Homo sapiens
ccgcggaaaccgacgcccgggggaaacagagaaagaaggcggccaggccaaccgaaggagggcggagagaa

SEQ ID NO: 93372 - RNA, 70 nt, Homo sapiens
aagcaaaaaggcacaagcggacaaaagggaacaggcaggacgaaggccaaccgcccagcaacaaagacga

SEQ ID NO: 93373 - RNA, 82 nt, Homo sapiens
ccgcagcggcgcagcccacgccagacgaccccacccgcgccgcgacccggggcggggaaacgcaaaggcaaaagcaagaaag

SEQ ID NO: 93374 - RNA, 70 nt, Homo sapiens
gaccccgaaaaaaagaggagcccgcaagaggccagcgaaaaccgaagccacaaccaacaggcgcacggag

SEQ ID NO: 93375 - RNA, 65 nt, Homo sapiens
ccacaaggaaaagaaaaacagaagcacagaaaacaggacacaaggcacgaggacgaagaggaaag

SEQ ID NO: 93376 - RNA, 59 nt, Homo sapiens
gcagcaggcggacgggccggcgcagcaggaggagagcacgcagccccgaaggcggcccg

SEQ ID NO: 93377 - RNA, 72 nt, Homo sapiens
aagaggggagaagacgaggagccagagggagaaaaccggaagagaaaggccgggaagcaggaaagaaaaaaa

SEQ ID NO: 93378 - RNA, 72 nt, Homo sapiens
aaggcaaaaccaaacaccccagcccacagagagcaaaacacaagagagcagggaggagccgagcacaccaca

SEQ ID NO: 93379 - RNA, 55 nt, Homo sapiens
aacccaagcaagcagcagaccaaacggagcggcggacaccagaagagaaaagggc

SEQ ID NO: 93380 - RNA, 73 nt, Homo sapiens
gggaaacgaccaaagaccagcaccggcccgaaacgccgaaaaacccaagggcaccacaggaggcagggaggac

SEQ ID NO: 93381 - RNA, 83 nt, Homo sapiens
aaggagccgaggagcgccagggggcggccgcgggcgcgagcggcacgcagacgaccgcagaggaggaggagggcaacccggac

SEQ ID NO: 93382 - RNA, 54 nt, Homo sapiens
gggaagaggcgagacagaagagagaggaagaggcgcagaacgacaagccaggaa

SEQ ID NO: 93383 - RNA, 79 nt, Homo sapiens
gaggacaggccagcgcggccaagacccgccgcaagcaccgccggccaggaggagagcgcaccaccaaaaaggcaaacac

SEQ ID NO: 93384 - RNA, 74 nt, Homo sapiens
cgaggcccccgggcccgggaaaacacacggccaggccccggggcagaagagcggcgccgaggagaaggaaaaag

SEQ ID NO: 93385 - RNA, 69 nt, Homo sapiens
cccagagaagaggaaaaccaccgggcagacagcgcagaagccgcacagcggcaagcagaccgagaaacc

SEQ ID NO: 93386 - RNA, 70 nt, Homo sapiens
caccacacgcagaacgggcggacgggcgcccagccaggagcgacagacagcaccaagaagaagcaaacgg

SEQ ID NO: 93387 - RNA, 73 nt, Homo sapiens
agcccggcagcagcaaccccagaaccagcggggaacagcccggccaccaagcacccacggaagcaccacaaac

SEQ ID NO: 93388 - RNA, 66 nt, Homo sapiens
acggagcgggcagcaggaagggacggcgcgcggacccacccaggaggcagaaacacgccgcgcgcc

SEQ ID NO: 93389 - RNA, 92 nt, Homo sapiens
acggcccggggaaacaccgcaccgagaaggacgaaggcaaaaacggaaaccggagagaaaaagagaagaaccgaagacagagacaaggagag

SEQ ID NO: 93390 - RNA, 64 nt, Homo sapiens
gggagcaagccggccagcaggagccaaacgaccaagaaagcgggacgcggaaaacgggacccgc

SEQ ID NO: 93391 - RNA, 78 nt, Homo sapiens
ggcggcggaccccgccgaccagagccccccaagagaacccagggggagccacgccggagcgggcaccggcgcggaccc

SEQ ID NO: 93392 - RNA, 86 nt, Homo sapiens
ggagaggcacccgagacccacggagaccgcgggaggagcagagcccaggaagccagggacggcagaaccgaacggggcggacacga

SEQ ID NO: 93393 - RNA, 65 nt, Homo sapiens
gcgaaccacggaaaggaggaagaagacaccggggacagacaggcagaccacaccaggaccgcaga

SEQ ID NO: 93394 - RNA, 73 nt, Homo sapiens
gggacacccggcacgcagcggagagcccgccaccaaccccgacaggagggagccagggcagaaacccccacca

SEQ ID NO: 93395 - RNA, 68 nt, Homo sapiens
agaggcgcggcaagacacacgacgacaacggcaagcggagaagagcaaggccgaaccgagaggaaggg

SEQ ID NO: 93396 - RNA, 60 nt, Homo sapiens
ccgggaccaggcccgggggcggcggccacgccaaggacggggacagggaggaaaaccaga

SEQ ID NO: 93397 - RNA, 68 nt, Homo sapiens
ggaacgcccgcagaaaaagaggcccccccccccgcgacgggcgaccgcagaacaaggacagcagaaag

SEQ ID NO: 93398 - RNA, 78 nt, Homo sapiens
gaaccagagaaaacggcaaggaagcagaagaaggcaggcccacaccacggggcagggcccagacccgcaagggaccac

SEQ ID NO: 93399 - RNA, 79 nt, Homo sapiens
cgcgccccgcgcccccggccgggccgcccggcggcaggcagggaaaccagcaggggagcagcaggacacgggccaccaa

SEQ ID NO: 93400 - RNA, 82 nt, Homo sapiens
gggcaggaccgcggacggaagccagaggagcagcgagccgcgccaccgccgcgaagcacagcgacccaggagcacgccgaga

SEQ ID NO: 93401 - RNA, 65 nt, Homo sapiens
acgcggaacacaggcaaaagggaaaggacagggggagaggcaaggaaacgacaagagaagaacac

SEQ ID NO: 93402 - RNA, 87 nt, Homo sapiens
ggcgccagccgggccacggagaggagcagcccccggagacagcggcacagagggccgccaggccagaaagacacacaggagagcggc

SEQ ID NO: 93403 - RNA, 70 nt, Homo sapiens
aggagggcgacggaaccaacggaggccagggcccgacaagagaggcggagccacccccacaacggaccag

SEQ ID NO: 93404 - RNA, 59 nt, Homo sapiens
ccgaaagccacagcaagaaggacgggcccagggaacacgggagccccggaccaccggac

SEQ ID NO: 93405 - RNA, 78 nt, Homo sapiens
gcggggccccggccgcaggagggagaccacagcaagacaccgggaccccggaagccaaaaaggcacagggggcgggcc

SEQ ID NO: 93406 - RNA, 69 nt, Homo sapiens
aaggcagaggcaacagacagaggaccacagaacgggcagcaaacaaagcagcacccacaaacgggaaaa

SEQ ID NO: 93407 - RNA, 81 nt, Homo sapiens
acagagaccagaaacacaggcagacggaagcacagaagcgcagcagacaggcagcaaagaaaggaggagaagcccagccgc

SEQ ID NO: 93408 - RNA, 80 nt, Homo sapiens
gacacaccaaggcacccagggcaggaaccacagagaacagcccggacacgcgcaccccgaggacacgggagcagaaggca

SEQ ID NO: 93409 - RNA, 67 nt, Homo sapiens
gcccgccggagcagccgaggccccccagccacgccgacagccgcagaacaggcgccagcggaaacca

SEQ ID NO: 93410 - RNA, 81 nt, Homo sapiens
agcccaggcacaagggaggcgacagagacagcagcaggggaaggagggcgaaacaaaggaccagcacgggaaccggccgcc

SEQ ID NO: 93411 - RNA, 77 nt, Homo sapiens
gcggcacccgggacaaggcagacgggagcgcaaggcgccccaaggccagacaaaaccaaaagaacacaaccggggcc

SEQ ID NO: 93412 - RNA, 72 nt, Homo sapiens
cgcgagagaggcaaaaacgcgagaccaggcaaggcgcacacacaaaggggagccaggaagaagacaaaacag

SEQ ID NO: 93413 - RNA, 78 nt, Homo sapiens
gcccagcggccccagagcccgcccgccgggagaagacgggcggagcaaggcagccgcggagcccgacacaggcccacc

SEQ ID NO: 93414 - RNA, 74 nt, Homo sapiens
ccaaccgaccacgggagagaagacgaccaaggcccgaaccgaaaagagaggaaaaaagccgcaagagaggagaa

SEQ ID NO: 93415 - RNA, 79 nt, Homo sapiens
gaggcgcagcccacccgggaagcccggcagaacccaggcgagggacagcccggacaggacacgacaccaaaaaagaaga

SEQ ID NO: 93416 - RNA, 82 nt, Homo sapiens
gcgccgccggccccgccgccaagaggagcgagcggacccgcgaggggaaaaaccacagcaaccagcaacgagcaacaagcag

SEQ ID NO: 93417 - RNA, 75 nt, Homo sapiens
ccaggagaggagggaacgcggagcgggacagaggaagacaggccccggagcaggacgacacggaaacaccgaccc

SEQ ID NO: 93418 - RNA, 78 nt, Homo sapiens
gaggggcgagaacgccacgcgggccggcgaaagcgaccgccagagcggaacgaccccagagcgagcccgcagcagccc

SEQ ID NO: 93419 - RNA, 76 nt, Homo sapiens
cggaaacagccacagcaggaacaaaagcccgggccacccgggacggagccaggcacgaggacggaggcggaccacg

SEQ ID NO: 93420 - RNA, 69 nt, Homo sapiens
cgaagacgccaaaaaaaagcccgacgaggagaggcgcgaacagggcccacccgccacgacacaggggaa

SEQ ID NO: 93421 - RNA, 75 nt, Homo sapiens
acgcagccaacgacaccggggccaaggccgcgagggcccggaacaggggcacgcacgaggcggaaccacaggaac

SEQ ID NO: 93422 - RNA, 77 nt, Homo sapiens
gagaccccgaaaaacgaggcagccagcccgaagaaaagggaaaacgcgcgggccaaggaagggaccacagaccagca

SEQ ID NO: 93423 - RNA, 73 nt, Homo sapiens
cccagggcaaacccacgccaagcacagccagccccaggggaaccaccccaaggggccacgggagacagccagc

SEQ ID NO: 93424 - RNA, 76 nt, Homo sapiens
agaggaggcgcaagacgcgaccaaagccgacggggcaagggcggagcacgccccggcccagcaggacggcagcccc

SEQ ID NO: 93425 - RNA, 55 nt, Homo sapiens
gaaggggccccagagccaaggaggaaggggccggggcgcaagcagccccagacaa

SEQ ID NO: 93426 - RNA, 67 nt, Homo sapiens
gaacccggcgcaagggaaaccgaagaagaacccgagccaaagggaggaaaacagacaaaccaaagca

SEQ ID NO: 93427 - RNA, 81 nt, Homo sapiens
gagacaggcggccacaggaaaagaccacagcgccaaagagaagagaaggagccaagacacgcacaccaggagagcccaggc

SEQ ID NO: 93428 - RNA, 68 nt, Homo sapiens
ggagcagaagaaccaaggaccagaggagccgcgcaccaggcccaaccagaaaaacagccaagcagaag

SEQ ID NO: 93429 - RNA, 71 nt, Homo sapiens
ggaggcgaggacgacggggcgagaccccgcccggaccgcaggaaggaggcagaaagggagccccaagagag

SEQ ID NO: 93430 - RNA, 67 nt, Homo sapiens
ggacgacaggccgggaggagcggaggcagcagaggccgcaggaagcgggagccagccaccaggaagg

SEQ ID NO: 93431 - RNA, 76 nt, Homo sapiens
gagaacgggacccggccagaggaaagaacccgagaaaagaaagggggccagagcagcaagaacagccccaagacgc

SEQ ID NO: 93432 - RNA, 56 nt, Homo sapiens
cggccgcgcacccccggccggaggcaccagcgaacgccacagaagagacccaccaa

SEQ ID NO: 93433 - RNA, 73 nt, Homo sapiens
gaacccccgaccgggagcccacgggggccaggaaggaacggcagccaggaaagagggagccaagcgaaggaaa

SEQ ID NO: 93434 - RNA, 38 nt, Homo sapiens
cccgagagcgggacgcagcgccggcagggaacgcgagg

SEQ ID NO: 93435 - RNA, 57 nt, Homo sapiens
aggggaccagaacggaacaggccggcggccccaccccccagcaaccgaacgagagcc

SEQ ID NO: 93436 - RNA, 45 nt, Homo sapiens
cggcccagcccaaacgggcagcgaagggagggcacagaaggaagg

SEQ ID NO: 93437 - RNA, 76 nt, Homo sapiens
gagagcgacagcccaagcaccaggaaaaaggacacagcccagaacccagaagacaaaagggcaacaagaaaacggc

SEQ ID NO: 93438 - RNA, 73 nt, Homo sapiens
agccgcgccggcggacccgcacggcggggagcaccgaaaggcaagaaagggcgcccaagcgcaaggaaaaggc

SEQ ID NO: 93439 - RNA, 56 nt, Homo sapiens
cagcagcgacccccgacggaggggaagacacagcacgacccagccagcggcccggc

SEQ ID NO: 93440 - RNA, 38 nt, Homo sapiens
acccggggaccaccagaaccaggcggaggcagggagac

SEQ ID NO: 93441 - RNA, 75 nt, Homo sapiens
gccgcacgcaccaccagcccgagcgaacacggggggagaacgggccccgcggccacaagcaaccgccaaggaccg

SEQ ID NO: 93442 - RNA, 86 nt, Homo sapiens
cagccaagcccgagcagggccagcccagcaggcagccgccccaagcccagggaagggcaaaggagaagaagaagcgagaagggcgg

SEQ ID NO: 93443 - RNA, 67 nt, Homo sapiens
gggccgccggcgaaccgcccgcggcccaaggacgcaggacccaggggcaaggcaggcagcgcccgga

SEQ ID NO: 93444 - RNA, 69 nt, Homo sapiens
caaggacaagcaggagcgggagccccaggagagaagaccaagaggcggagaagaggagaaaagggcaga

SEQ ID NO: 93445 - RNA, 70 nt, Homo sapiens
ccgaaacaagaaagaccacggcagcagaaaagggccgcaaggccaggcgcgcagaggcacccaacggcac

SEQ ID NO: 93446 - RNA, 73 nt, Homo sapiens
gacacggaggaaggaaaaggagaccgaggaaaggcaggaggcagcagaacaaaccaaagaagaaagcaaccca

SEQ ID NO: 93447 - RNA, 69 nt, Homo sapiens
acacaccaccggcggcaacccaaggagacggcgcgggggcggagagggaaagagagcccagcagaccgg

SEQ ID NO: 93448 - RNA, 74 nt, Homo sapiens
cgcacgaaacaagggaggccgcagcagcagggacacgaagcgagcgccgagggaggagagaaacaggagagaga

SEQ ID NO: 93449 - RNA, 62 nt, Homo sapiens
accaccaccgccgcgccccggcgcccccccgaggaaggggaaccacaaagaagagaaggcgg

SEQ ID NO: 93450 - RNA, 63 nt, Homo sapiens
cagcccccaagaccgggacacagcccaagccccaaagcagaacgagaggcgaagccaaagcga

SEQ ID NO: 93451 - RNA, 60 nt, Homo sapiens
cgacgagcaagaagcagcccaaagcgaagacagacgcaaggaaacaggaacacgaaagag

SEQ ID NO: 93452 - RNA, 76 nt, Homo sapiens
ggagacagcggcggaccagaagacaaggaggggaggccccagcaggaggacccgccggaccagccacgaaaagcca

SEQ ID NO: 93453 - RNA, 76 nt, Homo sapiens
gggcggggcaaggagcggcggcgcgcggcggagaaaccaccacaaacacgaggccagcaacgaccaacaagacaga

SEQ ID NO: 93454 - RNA, 75 nt, Homo sapiens
cgcacccacgaacgcccaccccccgaacccagccgcaccggccaccccccaccagcacagcagccacgggagggc

SEQ ID NO: 93455 - RNA, 72 nt, Homo sapiens
ccccgaaaaaagagagggggggaccgaccgcaacagaacggacccgagggaacaggcacgccccacccgcca

SEQ ID NO: 93456 - RNA, 74 nt, Homo sapiens
cggaccggaggaggggaaggcggcgcgggagccacacccaagccggaaaccggccggcgcaggcacacaccggc

SEQ ID NO: 93457 - RNA, 85 nt, Homo sapiens
aaagcagcaacgggcggggaggccggcggacccaccccaccgccagggggaagaacaaaagcgcagagagccgcccccagccgga

SEQ ID NO: 93458 - RNA, 78 nt, Homo sapiens
cagccgccaccggcagcagcagcaccaccggacgaggccggaagagcgggagcgggagccaggcagaaggccaaccaa

SEQ ID NO: 93459 - RNA, 75 nt, Homo sapiens
ggacacacgccaagagccgagggagaacaggcgggccagcacggcccgagcgcccgaagagcggaaagagagaag

SEQ ID NO: 93460 - RNA, 77 nt, Homo sapiens
gcaccccgggcgcaagacacagcggccgggcccaggaaaccagggcacaggaaaacgggccacaacacaacccccac

SEQ ID NO: 93461 - RNA, 66 nt, Homo sapiens
acccaaaagcacccgcacagcgcagagaacgaggagagaaagaacccacgcaggacgacagaagag

SEQ ID NO: 93462 - RNA, 79 nt, Homo sapiens
caaaggacaaaaacaaagggaagcccgccgagggccgggaaccgcagagaagagcaggggggccaggagaaggagcagc

SEQ ID NO: 93463 - RNA, 79 nt, Homo sapiens
agagaacaagacgaagaacagaaggcgacaaggccaagaccgccagcaaaggaagacgagaagcaccccagacaccagc

SEQ ID NO: 93464 - RNA, 56 nt, Homo sapiens
gagccacccgacacccggcagaccaaggccggggaaggccccgccagcgaccagcc

SEQ ID NO: 93465 - RNA, 84 nt, Homo sapiens
gcgagccggccggggcccccccggccggcagggggacgggggccagcggggcccggcgcacccaccaccgccgcccacggcagc

SEQ ID NO: 93466 - RNA, 75 nt, Homo sapiens
agccgccgccgcacgacagaagccgccagcgagccccacacaggaacgcccaaaacccgccggaccgaagaaggg

SEQ ID NO: 93467 - RNA, 72 nt, Homo sapiens
ccccgcacacgaggaagaaagacgaccccgacgcaggccaggagccgcggacagaagccgagcacggccgag

SEQ ID NO: 93468 - RNA, 61 nt, Homo sapiens
gagccagacagcagccaagggagcggcgacagacacgggaagcaagagaacggcgcagcgg

SEQ ID NO: 93469 - RNA, 76 nt, Homo sapiens
gccgggaccaggcccgggggcggcggccacgccaaggacgggaaggacaacccgggggacgccgccacgaagaaga

SEQ ID NO: 93470 - RNA, 70 nt, Homo sapiens
cagagaaacaagaggaacagaaaagaaccagaaccaagacaggcgcccagggcacaaaggggcgcgaagc

SEQ ID NO: 93471 - RNA, 70 nt, Homo sapiens
gagccggaacggaaggaggacaccacaggcgaaagggcgggggcgccgaggaagaaccgggggggacagc

SEQ ID NO: 93472 - RNA, 37 nt, Homo sapiens
gaagccaggggagacagcccgaagagcacagggaaag

SEQ ID NO: 93473 - RNA, 69 nt, Homo sapiens
agggccacgagcaccgcgccggcccagcaccccgagaaccgcaggagccagagacaaagccagacaaag

SEQ ID NO: 93474 - RNA, 70 nt, Homo sapiens
caggagccgaaagccaccacaccagacccaaggaacacagcaagccgcgcacacaagagagggccgggcg

SEQ ID NO: 93475 - RNA, 71 nt, Homo sapiens
ccgcccagcccccccacagggggaaacaagccaaccgcccagcggagcgacggaccaccagccaccacaac

SEQ ID NO: 93476 - RNA, 71 nt, Homo sapiens
cccaagagcacaggcagaaggcacaagggccagcacacggaccccgggggccgggagggagccacgcgaca

SEQ ID NO: 93477 - RNA, 67 nt, Homo sapiens
caggagaaggcagagagccgcagggcggagaaaaagggaacccgaggaagcaacagaaccggggcac

SEQ ID NO: 93478 - RNA, 63 nt, Homo sapiens
gaagagagccaccaacaggcggaaggccggacgacggcccggacccccagaagaggaccgcgg

SEQ ID NO: 93479 - RNA, 83 nt, Homo sapiens
ccgagggcccgcgccacccgcccacgccacaaagcagaaagcgaagcagaagccgagaacagcggcgagccggaaagaaccca

SEQ ID NO: 93480 - RNA, 54 nt, Homo sapiens
gggaacgcgaagcgccaaagccagacaaagggcccgcggccggcccgaccggac

SEQ ID NO: 93481 - RNA, 73 nt, Homo sapiens
caaagaggccgaggagagcccgccggggaacggcgagggaacccaggaaggagggcgacaaacaccagccggc

SEQ ID NO: 93482 - RNA, 67 nt, Homo sapiens
cgcccccggcaggggaaaaccaaggggcaaaccagaaagcaccgggaggaaagagagccacacgaag

SEQ ID NO: 93483 - RNA, 74 nt, Homo sapiens
ccgcccggcgcagcggggaccggcggcggcgcccaggcacccggcccggcaacggggcggcacacaaggagcga

SEQ ID NO: 93484 - RNA, 109 nt, Homo sapiens
acagccggagaagcgcggcgcacacggcaacccaggcacgaggccagccgaaggacaaggccagacgagcaggcacgcaggagcccgacccacagcagcgagccacccc

SEQ ID NO: 93485 - RNA, 78 nt, Homo sapiens
ccaggccccccaacaggacgccgaaggacaaccaaggccccaggggccccccccccgggggcgaccacgagcagccaa

SEQ ID NO: 93486 - RNA, 118 nt, Homo sapiens
agcgaggcgcgcccggagcgcagagaccggaagcacagccccgaggggcgaagccaccaagcggagcccggcacgggcaaacagagcaggcagggaaccgccaaggcagaggagcaga

SEQ ID NO: 93487 - RNA, 76 nt, Homo sapiens
cacacacacagcagaggcggcccccccacgcgacccgggccacccccacgccgaagaacgcggaagacggagcccc

SEQ ID NO: 93488 - RNA, 62 nt, Homo sapiens
cacaccacaaagaggagacaagagcaccaggcggagaagcagaacagcacaccgagaggaca

SEQ ID NO: 93489 - RNA, 61 nt, Homo sapiens
ccagcagacggggccccacaggacaggcagagacgcgggccaggcaaggaaaaagaccaag

SEQ ID NO: 93490 - RNA, 73 nt, Homo sapiens
acccacgagaagacgcagaggcaaaaaccacaacccgacccgcccgcccggacggcagcgccgcccaccaggc

SEQ ID NO: 93491 - RNA, 57 nt, Homo sapiens
cagcgcggcccgggcagggggaagaagcacagacgagaaacaaggcaagaaggcagc

SEQ ID NO: 93492 - RNA, 64 nt, Homo sapiens
cgcccagagccccgcgcagcccagggaagggaaagggagcagcaccggccacacccacagcacg

SEQ ID NO: 93493 - RNA, 72 nt, Homo sapiens
ggcagcaagcgggagcggggaaggcacggcggaaagcgccgaccgcaaaaaaacaacaccagggccccaaac

SEQ ID NO: 93494 - RNA, 78 nt, Homo sapiens
ccgcacccgggagggagagcggccggggccaggcccgcagaagcccacccagagagagaagaacaaggcggccaaacc

SEQ ID NO: 93495 - RNA, 69 nt, Homo sapiens
gcaggcgggcccccgccgccgcccggcccacggagcccaaacagaagccggcacagaaagggaccaaaa

SEQ ID NO: 93496 - RNA, 75 nt, Homo sapiens
ggggcgcggcccgggcacaggcgacgccggaccgcgaagagacgagaggggcacggaaggggagagggacgggga

SEQ ID NO: 93497 - RNA, 83 nt, Homo sapiens
aaggagcgaaacgcagcaagaaaggagaaccgagcgaaagaggcgacgaaagcaggcgagaggcagaacccggaaagaaggaa

SEQ ID NO: 93498 - RNA, 80 nt, Homo sapiens
gaggagccgggacacgccagcgcgggcccagagccccaggagggacagcgggaaccaccagcgcggagaccgggcaggga

SEQ ID NO: 93499 - RNA, 93 nt, Homo sapiens
gccgcccgggccgggggacccgcccgccaggccaccaaggagagccggagaggaggaaggagaagcccgggagcgcgcgggccggcggagcaa

SEQ ID NO: 93500 - RNA, 52 nt, Homo sapiens
acgaaggaaggcggagaacaccgcaggccagacggagagcgacaccaaagac

SEQ ID NO: 93501 - RNA, 86 nt, Homo sapiens
accgcccaccacgccagccaccacgcggcgcacaacgcaggaacaccgcacgcgcggaggaggcacgggagcgagcaagccggaag

SEQ ID NO: 93502 - RNA, 80 nt, Homo sapiens
cacgcacacccgagcccgggggcgcacggacaaaacccgcaccgcacccccacccagacggagccagggcggaccggcac

SEQ ID NO: 93503 - RNA, 34 nt, Homo sapiens
gagaagacacgagcacaaacgacaccgaaaacga

SEQ ID NO: 93504 - RNA, 77 nt, Homo sapiens
aagcagaggccagagcggagacagacgaaaagagacccccccaacgcgagggggagagaccagggacaaaagaaacg

SEQ ID NO: 93505 - RNA, 79 nt, Homo sapiens
gggaccgacaggggaagcaccgaaaaaccccagagggaaagccccacagcaagccgaaggcggaggcaaggcgcgaccg

SEQ ID NO: 93506 - RNA, 83 nt, Homo sapiens
gcccacgaggcaacacgcaaggccgccaccaggagccggaccagaccgccggagcacgccgagaccaccgaggacacaaccgc

SEQ ID NO: 93507 - RNA, 59 nt, Homo sapiens
gaggggcaaccagcggggcaccgggacgggccgagccgggcggagaacggaaaagcacc

SEQ ID NO: 93508 - RNA, 80 nt, Homo sapiens
agcccggcacacagaccggacacaggcgccacaggccgcaggagggaagcgcacggaaaccgccccgggaggcacagagc

SEQ ID NO: 93509 - RNA, 57 nt, Homo sapiens
cgagcaccgggaaggggagcgggggccgcggccaaagaggaaacgcgaccaaacagg

SEQ ID NO: 93510 - RNA, 78 nt, Homo sapiens
gcccagacggccaaacccgagccaaggaccacccaccgggcccccaaaggcgagaaaagagcggccccaacgcaaaac

SEQ ID NO: 93511 - RNA, 84 nt, Homo sapiens
ggaccgccgagcccacacccgccccgcccgggccccgccccccgcgccgccgggaagaagcccagcggaggcgaacggcccccg

SEQ ID NO: 93512 - RNA, 65 nt, Homo sapiens
ccgaaggcgggaagggaagcggccaaggcacggaggccgcggaaaccccccaggcaagaggcgca

SEQ ID NO: 93513 - RNA, 76 nt, Homo sapiens
agcagggcagcaggcggagaggacgcgaacaggcggagcaaaggacaacccaggccaggaccgcggcaagcgggag

SEQ ID NO: 93514 - RNA, 75 nt, Homo sapiens
agcgcgacggcgccggcagggaggcaagcgccccgacccgcaggccaggaacaccaggacagagcgggggcccga

SEQ ID NO: 93515 - RNA, 60 nt, Homo sapiens
agcggagaaggaccaccccagcggaagcaccagccacgggggcaggcagggccagagggc

SEQ ID NO: 93516 - RNA, 71 nt, Homo sapiens
gccaaacagaaaaaaagaggagcaagggaagcccaggaaacagcaccagaaaaaggaagagaggcaaggaa

SEQ ID NO: 93517 - RNA, 77 nt, Homo sapiens
gcggccggcggccggaggagcggcgcgcgcgcgcgcgcggggccccgcagaagggacacagcaggacaggaacggcc

SEQ ID NO: 93518 - RNA, 86 nt, Homo sapiens
gggaacgaaagacagaagcagagcgaacagagcaaaagaagcgaaccgggagcgacacaccccagagagagccgacagggaaccag

SEQ ID NO: 93519 - RNA, 72 nt, Homo sapiens
aagcaggagagaagaccagaagggaggagaaagggcaacagcgacggcacaaaggggaaagaggaagacaac

SEQ ID NO: 93520 - RNA, 80 nt, Homo sapiens
cacagaggaaccagaaaagaacgaggccaggagagaacggccgagcgaccaggagaggagcccccgcccgaagaccgggg

SEQ ID NO: 93521 - RNA, 76 nt, Homo sapiens
gacagcccccgaaaggaagcacaggggagaggcaagcacggaccaggacaggagagacaacggaggcaagaaagac

SEQ ID NO: 93522 - RNA, 72 nt, Homo sapiens
gcaagcaaggacgaagcgaagaaacgggaagcaaggaacaagggcaaggggccacagggcagccccagaggg

SEQ ID NO: 93523 - RNA, 74 nt, Homo sapiens
cgagggacaaaaggcgaagacgccaagaccacgaagaaagcccgggaacgagagcagaaccccacacaacccaa

SEQ ID NO: 93524 - RNA, 72 nt, Homo sapiens
cggaacaggcacaccccacacaagcacgccaagagcccaaaagcaaagcagggcagcaaagaacacaaaggc

SEQ ID NO: 93525 - RNA, 73 nt, Homo sapiens
ggaaggcggggaggaggccccaaagggcgagagcacagccccaggcacaacacaagaaaagcggggcaccggc

SEQ ID NO: 93526 - RNA, 73 nt, Homo sapiens
gccgcggcgccgggaccgcgcgcccacgccgcgccagacagaagacaggccagaaacccagaaagaaagaaaa

SEQ ID NO: 93527 - RNA, 76 nt, Homo sapiens
ggagccagggcccggcccgaaaggagagccgggaaggccggacacgacgggagcggcagacgacaggcaagagaaa

SEQ ID NO: 93528 - RNA, 67 nt, Homo sapiens
caagacccaccagaccacgcgaacaaaaagcccagaacgcacaagaaaggcccaggaggcaagagcg

SEQ ID NO: 93529 - RNA, 92 nt, Homo sapiens
gcgccaccaccacgccagccgcaccagccgcccaagccgcacagccgcggcggcagcagcaggagagggggacccgacgaccagggggagag

SEQ ID NO: 93530 - RNA, 81 nt, Homo sapiens
cggggacggagcccggcccgggcgagcggggcgcgccgcagagcggcaccgaaggacaggagcggcggagaaaccaccaca

SEQ ID NO: 93531 - RNA, 69 nt, Homo sapiens
gcacgcccaggacaacgccgaaggaaaagcacgcccaggccaaagggacccccgaacccggaacaggca

SEQ ID NO: 93532 - RNA, 73 nt, Homo sapiens
gaggaagggaggggaaaagaaaccaacccacagaacaggaagcacaaacaccagcccgaacgagacgagaaac

SEQ ID NO: 93533 - RNA, 80 nt, Homo sapiens
gggaccgcccggacacaagaaaaagagcgaaaaagacacgccgggaggccgagaaacaagcagcaagaaaagaacaagga

SEQ ID NO: 93534 - RNA, 73 nt, Homo sapiens
gcaggaccggccaggaaaacaagagcaagaccccaagcagcgcagccggcacccgcacaacccagggggccga

SEQ ID NO: 93535 - RNA, 34 nt, Homo sapiens
ccagagcggaaaaaaaagggggcacagagcggag

SEQ ID NO: 93536 - RNA, 75 nt, Homo sapiens
acaaacggaaagagaagcaaaaggaaacaacaggcccgacacgggaagagaagaggaggccacccgaagggaacc

SEQ ID NO: 93537 - RNA, 81 nt, Homo sapiens
acaaccaagggccccgcggaccaaggaagaacccgaagcaccgaagacgaccccgacgcaggccaggagccgcggacagaa

SEQ ID NO: 93538 - RNA, 67 nt, Homo sapiens
ggaccggggcagaccaaacggcaagggacaggcccgcgcggacagaaacagagagaacacagcaaag

SEQ ID NO: 93539 - RNA, 81 nt, Homo sapiens
gacaagccagcagccgccagacaagaggcggaggacccacaggagaggcacaggaccagaccaagacacacaaccaaacag

SEQ ID NO: 93540 - RNA, 81 nt, Homo sapiens
gggacggaccgagaccggaccgagagcggaccgagagcgcgaaacgcacgagaagggaagacaaggggaagcaacaccaga

SEQ ID NO: 93541 - RNA, 56 nt, Homo sapiens
ccacgacccgcagcaccgagaaaaccagaaagaaaagcccagaaagcggacaaaac

SEQ ID NO: 93542 - RNA, 56 nt, Homo sapiens
cgagggagaagcacaagacagcacagagacggaaccaaagccgaccccgaaacagg

SEQ ID NO: 93543 - RNA, 67 nt, Homo sapiens
ccaaggccgagcccccgaaacaaccaaccagagccaccaaaaccggcaaaggccgcgaggaaccacg

SEQ ID NO: 93544 - RNA, 68 nt, Homo sapiens
gaccgcggagcaccacagggaccacgacaagggagggccaagaacccggaggagggcaagccggacac

SEQ ID NO: 93545 - RNA, 89 nt, Homo sapiens
ggcgacgaggcacagaggaaggggagggccagcccgcgaaccggccggagacaggacacagaacagagaagaagcagacgagacagaaa

SEQ ID NO: 93546 - RNA, 71 nt, Homo sapiens
gcgggcccccagaggcgggcgaggaagagcaggggcggccgccgagccccccacacgcgcgcgggaacccg

SEQ ID NO: 93547 - RNA, 81 nt, Homo sapiens
gcgaccccggccgcggggccaggaagcggaggagccccggaggcagagcggcgccaggaaccacgccaacggaagcagggc

SEQ ID NO: 93548 - RNA, 77 nt, Homo sapiens
gccgcgggcggaagacaggccacccagcggggagcacggcgagcagccaggccaggagagagcaagcgaagaagagg

SEQ ID NO: 93549 - RNA, 78 nt, Homo sapiens
cagcagagggccgacgacagccagcaaagggggagagcaaaacggcggaggccgacgagcggggcagaccacgagcca

SEQ ID NO: 93550 - RNA, 41 nt, Homo sapiens
gaggcgcagagcgagggcaggagacgaaaaagagccacgcc

SEQ ID NO: 93551 - RNA, 78 nt, Homo sapiens
ccccggaagcccaaggaccccaacaacagcccaccccgggcacgaccaagaaacagggaaacagccgcagcgaggacg

SEQ ID NO: 93552 - RNA, 77 nt, Homo sapiens
gggcggcggcgccggcaggaagcgcccaggaggaaaagcccacacggaccaccccgccggaagggggccacccaccg

SEQ ID NO: 93553 - RNA, 80 nt, Homo sapiens
gccccgccgcggggcgcgcggcgccggcggcgcgcggcccccgcgcaggaccgccagcagcagccgaaaacgcacaagac

SEQ ID NO: 93554 - RNA, 89 nt, Homo sapiens
ccgagaagcacacgaccggcgacagcagccaggagcagagcgacagcggcgagcagaacacggcgagcggccacaaacccccccacgac

SEQ ID NO: 93555 - RNA, 74 nt, Homo sapiens
agggacccgcgaaagcggggcacaggcgggcacgcgcccaggcaggacagggaggaacagaaggaggacgggac

SEQ ID NO: 93556 - RNA, 83 nt, Homo sapiens
cgcgcccgaacggagagcgccacccgggacacagcgccaccccgagcagcggggaagcggcccccccagcgccgccgcccagc

SEQ ID NO: 93557 - RNA, 60 nt, Homo sapiens
cgccggcagccgccgccaccgcaagggaagagggaacagaaacgcccccgacggaaaccg

SEQ ID NO: 93558 - RNA, 74 nt, Homo sapiens
agcagcccgaacccagaaacccagggagagacggggcaccaagaaccacgaaagcgaacaccaaaaaaaaccaa

SEQ ID NO: 93559 - RNA, 52 nt, Homo sapiens
cgcggcccgcccgcccagaggcagaagccacagaccccgccggggaagaaca

SEQ ID NO: 93560 - RNA, 73 nt, Homo sapiens
cagacaacgccccaccagaggaaaaagagggaaccaaggacaaaccggcgaccacacacggggacgacgggga

SEQ ID NO: 93561 - RNA, 83 nt, Homo sapiens
cgcgccggaggcccggccacccgagaagggagacgacgcgcgggccgcgagcggggcgacccgaggggcaaaggaccggaagc

SEQ ID NO: 93562 - RNA, 77 nt, Homo sapiens
gaagacacaaggaacccagaaccgaaccgagccagcaagaagcaaccgaccacgggagaaaacggcagaccgcagga

SEQ ID NO: 93563 - RNA, 81 nt, Homo sapiens
caccacgggaggcagaccacgagaagccaggccgcaggagggaagcgcacggaaaccgccccgggaggcacagagcaggag

SEQ ID NO: 93564 - RNA, 74 nt, Homo sapiens
agacccaagaaaagcaacaggcagaggcagaaacagaaaaggaagcggaagggacagccaagcccgaagccaga

SEQ ID NO: 93565 - RNA, 74 nt, Homo sapiens
gcgccaccccccccagacgcccagcagacgagccggcccgcagaggccgagcagagaaagagcggcgagggaga

SEQ ID NO: 93566 - RNA, 77 nt, Homo sapiens
gaggagagcgcggagccgcgcccccggcagaaaacacagagaaaacacggagaaacagcaacaggagaaaaggggag

SEQ ID NO: 93567 - RNA, 78 nt, Homo sapiens
ggagacacacaagggcagccaaacgaggaacacaacagcgagcaacagcacagcaaggagagaaaaaaaagagagagg

SEQ ID NO: 93568 - RNA, 81 nt, Homo sapiens
aaggagccccgcgagggcgcgccggggagcaaccagaacaaacggacgccaccagacaaccacaggggggagcgggaggga

SEQ ID NO: 93569 - RNA, 64 nt, Homo sapiens
caacacacaggggcacgcgcggggagcccccacccccaaaaacgcggaagacggggcagcacaa

SEQ ID NO: 93570 - RNA, 91 nt, Homo sapiens
caaaacgaagggacgcaggaacgggacaaaagaaaagacgcacaaaggaaaaacgaagagccgaagaacaccagccccagaagggcgaaaa

SEQ ID NO: 93571 - RNA, 76 nt, Homo sapiens
aggaccggacccggcccgggagcaaaggacaccagaggaccagaacccacgagaaacagacgagccaaccagaccc

SEQ ID NO: 93572 - RNA, 73 nt, Homo sapiens
cggaccacagaagggcacagccagggcccaccagcggagccgcaacaaaggaccggggcgacaggcacggcaa

SEQ ID NO: 93573 - RNA, 59 nt, Homo sapiens
cggacacacagacccccaccaagcagccaagcgaaagacagaggcccagccgaaagagg

SEQ ID NO: 93574 - RNA, 50 nt, Homo sapiens
aaccggcccagacaacggcaaggcggcacgaggcaagacgggcccccagc

SEQ ID NO: 93575 - RNA, 77 nt, Homo sapiens
gcacggccccggccacgcagagcagccgaggcacaagccagcgcggcgggcgggaccagaagcggagaggggcgcgg

SEQ ID NO: 93576 - RNA, 75 nt, Homo sapiens
gaaagaaagagggcagacggcccgcacccagggcacaccggggaccaagacagaccgacaaaaaccaaaacaaag

SEQ ID NO: 93577 - RNA, 84 nt, Homo sapiens
gacggaaagcagaccgggcccgcagacggcaggagcagaccaaaggcacaggaagaagcgcaggcggaggcaggacaaaccagc

SEQ ID NO: 93578 - RNA, 71 nt, Homo sapiens
aaacgagaaggcagagaggggaagaccaagagcacagacaacccagaaaagaaaaggccaggggcgccgaa

SEQ ID NO: 93579 - RNA, 55 nt, Homo sapiens
gggaaaagacggcagagacagaacgccagccacacacgcagcacaacaggccaga

SEQ ID NO: 93580 - RNA, 68 nt, Homo sapiens
aaaaggcaaaggcaggcccaggagccaggaaaaacaagagcacaggaagacgcaccgcagcaccaaaa

SEQ ID NO: 93581 - RNA, 77 nt, Homo sapiens
cacccgacgccccgaaaaacggagcagccgaaagccagaggacaggagcagggaaaagccagaccgaccaaacaaaa

SEQ ID NO: 93582 - RNA, 80 nt, Homo sapiens
caggaacgcgcagccccgagcgccgcggacgcgcacgagggacggggaaaggaggaagaagacagaagagcccgcgaacg

SEQ ID NO: 93583 - RNA, 77 nt, Homo sapiens
ggcaaggccacaagggaacgggcggccccggagagagagccgcgcacgcacagacaaggggaccccacaccacaaac

SEQ ID NO: 93584 - RNA, 71 nt, Homo sapiens
ccagggagcggcggcagcaggaacaagccgcaagaccgaaaacccggcaccaaggaccaggcacaagcggc

SEQ ID NO: 93585 - RNA, 69 nt, Homo sapiens
cgcaacagggccgcacgcaaggcagaaaggaaccaggagccagcggaggaaaagaaaacagaccagcca

SEQ ID NO: 93586 - RNA, 91 nt, Homo sapiens
gggccggggccgcaaggccggagaaggccgccgggcccgggcaggggcggggcaacgcggaaggagagccggagaggaggaaggagaagcc

SEQ ID NO: 93587 - RNA, 88 nt, Homo sapiens
cagacgcagccgagacaccagcccgaaacaccaccaagcacaggacagaaagggccaagaccgacacagccgccacgcccaccagggc

SEQ ID NO: 93588 - RNA, 74 nt, Homo sapiens
gcaggaaccacaacccaaccaggccaagcaggaagcacgccgggaacgaagcacacggagaagcgggccaagag

SEQ ID NO: 93589 - RNA, 46 nt, Homo sapiens
aaccagggacaggcggcgaaccagaagcgagagagcccccggcaag

SEQ ID NO: 93590 - RNA, 72 nt, Homo sapiens
ccggggcgcgacaggcagacaggcgcggcggcggaccacagggggccggaggcaaccaccacacccccaggc

SEQ ID NO: 93591 - RNA, 73 nt, Homo sapiens
ccagagccgcagaacgaagccaacgaagaaaaagacagaaggccaggacaacaaccgacagcccccccacaaa

SEQ ID NO: 93592 - RNA, 69 nt, Homo sapiens
gcaggacgacggaaacagagcacaacaaaccgacggcaggcaaggaaaaggggaagaaggccaaccggg

SEQ ID NO: 93593 - RNA, 51 nt, Homo sapiens
accaaggccacgacaaaagagaaacaaagcaggcggagacagggcacaacc

SEQ ID NO: 93594 - RNA, 74 nt, Homo sapiens
gcgccaagaagccaccgccaagacggagaaaccaagcgcgaggaccaaaggagccgggccgggaggaggaccac

SEQ ID NO: 93595 - RNA, 73 nt, Homo sapiens
acaccggacaccgagggcccccaaaaggaaggcgcggcaacacagcgcagaaggaagggcaaagaggcagaga

SEQ ID NO: 93596 - RNA, 77 nt, Homo sapiens
gcaggagacacagccgaggcaccaaggccccccgggccaccgggcccccggcaccagcgcaggcggaaaccaagaga

SEQ ID NO: 93597 - RNA, 55 nt, Homo sapiens
aaaagcacgcacgaaaccggcaagccagcggaggggagagaagagaaaagggaag

SEQ ID NO: 93598 - RNA, 58 nt, Homo sapiens
agcaaaccgcggcgacccaaggaacggaagacgggcgaccaggccaaccggagcgcac

SEQ ID NO: 93599 - RNA, 78 nt, Homo sapiens
ggagccacgaaaccaggaccaacagggagcgccaccaccggacggcgcgcccagaacggagggcgggagggagaccaa

SEQ ID NO: 93600 - RNA, 76 nt, Homo sapiens
gcgggaagcgacacaaacaaaccgaaagaagaagaggagaagaaaagaccagacagccacggagaagagcgaagaa

SEQ ID NO: 93601 - RNA, 76 nt, Homo sapiens
aggaccgagaccggagcagccggggcggagcggaagcagggcgaaaacccgggggagaaaacaggcaccagaagca

SEQ ID NO: 93602 - RNA, 54 nt, Homo sapiens
gagagcgacaaaccaaggaggaacagcagaccagaggcccaggccccgcacggc

SEQ ID NO: 93603 - RNA, 67 nt, Homo sapiens
ggagccaggccaccagagcggagcggaggcagacacacacggggggagagggagggggggacacggc

SEQ ID NO: 93604 - RNA, 76 nt, Homo sapiens
ccagcagaagcgaacgagacacaagaaggaacgggaggaggacaggaaaccccgaaagggcacacaaagcgggaaa

SEQ ID NO: 93605 - RNA, 71 nt, Homo sapiens
ccgggccggcgaaaaaccgcaaaggaaggaaccgaagaaagaaaaacacggccaagggaaaaaagcagggg

SEQ ID NO: 93606 - RNA, 84 nt, Homo sapiens
cagaggcggcggcgcggggcccccagaaggacgccagcggagaacgcggcaaagcgaggaaaacaacggaaagaggaggaagag

SEQ ID NO: 93607 - RNA, 77 nt, Homo sapiens
cgagcccggaaaaccagaccagaaacggaggagcccgccgaagcagagacacaagcagcgaggaccaggaacaacag

SEQ ID NO: 93608 - RNA, 82 nt, Homo sapiens
gaggaacgccggccccacacccaaggcgcaaggccagcacggccccggggcggaggccgggcagacgcccgaaccggcagaa

SEQ ID NO: 93609 - RNA, 88 nt, Homo sapiens
ccgagaaggggacggcgggcgagggaggggaccgccgcgcacacgaccgcgagagggcgaagaacgccaaaacccaccaaccagagga

SEQ ID NO: 93610 - RNA, 70 nt, Homo sapiens
gcacccccagagacgcaggaaagcggggcagcaaggcaaggaaaaaacgaagagcaggggaaaacaaaag

SEQ ID NO: 93611 - RNA, 85 nt, Homo sapiens
gcacaccgaccagccgcacgccgaccggcgccgggagaccgggcaagaggaagaaacagcgcccccaccccaccccagccccagg

SEQ ID NO: 93612 - RNA, 55 nt, Homo sapiens
cgcagggcgcccccgacgcggacggcacgcacagcagagcacgccgcaggggacg

SEQ ID NO: 93613 - RNA, 63 nt, Homo sapiens
aacaggagcggagcagccaaagaggcgcgacacgccgaccgccgcgccagcacacccccggca

SEQ ID NO: 93614 - RNA, 57 nt, Homo sapiens
aagaccaccagcacaaagccccaccgaggcaccaccaaccaaagcggcaacccgaca

SEQ ID NO: 93615 - RNA, 66 nt, Homo sapiens
ggggaggaagaggaggaggaagaagaagggaggggcgggggcggaacccagcggacacccgggagc

SEQ ID NO: 93616 - RNA, 58 nt, Homo sapiens
acggagacaaaacagccaaaacggcgaggaaagagaggagccccggaaagaaaaggac

SEQ ID NO: 93617 - RNA, 78 nt, Homo sapiens
ccggaaccccccccccaacaacaccccacaggaaagagagccccagcacagcacaacagcaagcagccccaacagcgc

SEQ ID NO: 93618 - RNA, 74 nt, Homo sapiens
aagaagaacaacagccaacgcaaaaggagaaaacacaaggcccgagagccccaaccagaaaccacagacgccgg

SEQ ID NO: 93619 - RNA, 45 nt, Homo sapiens
cagagggagcgcaggggaagccccaaaaggcgagacaccggcacc

SEQ ID NO: 93620 - RNA, 70 nt, Homo sapiens
acggaccagacgaggcagaggcccccgcagcgcccaccaccacaggcccaggaagacacgagaagcccga

SEQ ID NO: 93621 - RNA, 73 nt, Homo sapiens
accagaaggaccgcagggccagggcgcagacgccgagggaagaaagagccaaacaggcgagaggaagaagcaa

SEQ ID NO: 93622 - RNA, 75 nt, Homo sapiens
cggaacccaagaaggcggagagaggaaggacccacgcccaccacaagcagaaacgaaggcacagaagcgaaagag

SEQ ID NO: 93623 - RNA, 83 nt, Homo sapiens
aggacgcggcagcccgggagcggcgagggaaaagcgaggcaaggcaggcggagccaagacccaccccgcggggccccagccag

SEQ ID NO: 93624 - RNA, 87 nt, Homo sapiens
ggaaagcaggaggaggggcggcggcgggaagacccgggcgcgccaggcacagccaagagcggaccggcagcggccagcgcagcggcc

SEQ ID NO: 93625 - RNA, 52 nt, Homo sapiens
ccgaaccgccacccaggcccaagaagcggaagccgcagaaggaccggccaga

SEQ ID NO: 93626 - RNA, 77 nt, Homo sapiens
ccccaggagcgaagcccccggcaggccaaagcccagaaggcggaagggccgcgagacacaaggaaccaagaaccgaa

SEQ ID NO: 93627 - RNA, 37 nt, Homo sapiens
agagcgcccgcgacgggagggagcgcagcacacaaag

SEQ ID NO: 93628 - RNA, 78 nt, Homo sapiens
ccccggcccacaggggggggcaaacccgagagaacggaccacgaaaacccggaagagcgagaggccaaggaaaggcgc

SEQ ID NO: 93629 - RNA, 84 nt, Homo sapiens
cgagcccggagaagaggaagaccccgccccccgaggcgcagcccgaacccagcagccacacgccaacaacgagacagccgcgga

SEQ ID NO: 93630 - RNA, 47 nt, Homo sapiens
aaacgcgcgggccaaggagcggaaacccaggagcgaaaaagacaaca

SEQ ID NO: 93631 - RNA, 84 nt, Homo sapiens
ccaaccgacgcaagggggagcccaggaggcgagcaaggcacccgagggcgaggccagccgggggcaccgggagcgccggccacc

SEQ ID NO: 93632 - RNA, 71 nt, Homo sapiens
aagaacacagggggaagccaagcagaacaaaaccggaacagaagacagggaaggacccaagagcggagaac

SEQ ID NO: 93633 - RNA, 89 nt, Homo sapiens
agccacagagagaaccaccagcagccaccaccaccaccaccaccacagagcgggaagaggggcgaggccgccagacccacccggacccc

SEQ ID NO: 93634 - RNA, 68 nt, Homo sapiens
gaaggaccaagaaccagggcccaacgcgcaggccacgggccggcggggaaacccaggcgaacagcaga

SEQ ID NO: 93635 - RNA, 67 nt, Homo sapiens
gacccacagccagcaacaccggccgaccaagcagaacccgagaagagccgagaaacacccgacaaag

SEQ ID NO: 93636 - RNA, 74 nt, Homo sapiens
aagaccagacgaacagacagaacgaacagagagacgaaggcagaaagaggccagaagaaacaccagggaaggag

SEQ ID NO: 93637 - RNA, 76 nt, Homo sapiens
gcacaagacagagagaggagcgcaggacgccgcaggcgccaaaaggaaacacggaagaccacaacacacaacccag

SEQ ID NO: 93638 - RNA, 72 nt, Homo sapiens
cgggacccgagaagaggcggaaaggagcaagacagaaaagagacaacgcccagcggcaagacgcaagacggg

SEQ ID NO: 93639 - RNA, 73 nt, Homo sapiens
gccagcccgccaagcccgaagggagcacgcacggcaccacagaaccagaccgcggaagacccccccgacccag

SEQ ID NO: 93640 - RNA, 68 nt, Homo sapiens
ccggccgcccaaggcgcccaaggaacgccaggagccagaaccccgaggaaaggggaaaagccgcaacc

SEQ ID NO: 93641 - RNA, 67 nt, Homo sapiens
ggcagaaaacccgcaaacacgccgccagaacccgcaccagcgcgggaagagggggaagcgagcacag

SEQ ID NO: 93642 - RNA, 81 nt, Homo sapiens
cggccccagcacggggccccccccccagcacggacccccggccagaagaagagacaaggcggcccaagaccccgagggaaa

SEQ ID NO: 93643 - RNA, 63 nt, Homo sapiens
ccggagcgggagccagaggccagggaggacaccgcccccagaaacccacaaagccccgagggg

SEQ ID NO: 93644 - RNA, 70 nt, Homo sapiens
caaaaaggggaaggggccgacaaaagcgcagcaagacggccgcgcggcccgcagggacagggggaccgcc

SEQ ID NO: 93645 - RNA, 70 nt, Homo sapiens
cccgggggagcggaaacggagggagcaggagagcaagcccggaggcacccaagaagcgggcgagggaagc

SEQ ID NO: 93646 - RNA, 56 nt, Homo sapiens
ccccgcggcggcagccacaggcagagggcaccacagacaagaaagcccccacggaa

SEQ ID NO: 93647 - RNA, 72 nt, Homo sapiens
gaggaacagaagaaaaagaaaaaagggcgggaacaaagagcagaggccagcagccaccgacagcccgcggcg

SEQ ID NO: 93648 - RNA, 91 nt, Homo sapiens
ggagagaggccgggcgagcagcaggagcaccggcccaagaaacaggaagacccagagagaagacagacgccacaaagagagggcaaaacca

SEQ ID NO: 93649 - RNA, 87 nt, Homo sapiens
ccggggcccggcgcgaggaggaggaggagggcgcgcggaggggaaaggcgccgaaaacaagccggaagccccaaggcacaaaagagg

SEQ ID NO: 93650 - RNA, 77 nt, Homo sapiens
cgccgagaaggggagacagaacagcagcaaagacagaagaacagcaagaaggaccgcggaagaggagaaccggaacc

SEQ ID NO: 93651 - RNA, 74 nt, Homo sapiens
caggccccccacagaaaaggaaaggaaaaacgggaaagagcgcagagggaccaaccgaaagaggaggagaaaaa

SEQ ID NO: 93652 - RNA, 82 nt, Homo sapiens
ccccgagagcgggacacaggaccggcagagaacaaagccaagaacgggcaagggaccaggagagcaacgcagcccaaacgag

SEQ ID NO: 93653 - RNA, 74 nt, Homo sapiens
ccaccgagaccgcgacgccggcagggaagaggacgaacgacaagaggggaggcgcacacgaggagcgaaaaccg

SEQ ID NO: 93654 - RNA, 54 nt, Homo sapiens
gcgacccgggagacacgacgggcgaaggagagggaagagccacgcccagcccac

SEQ ID NO: 93655 - RNA, 81 nt, Homo sapiens
aggccgcgggaggaggcgccccgcgcagcggcggcggagcagagcgccccagggcggagaacggaaaagcaccaggaagca

SEQ ID NO: 93656 - RNA, 79 nt, Homo sapiens
aggaggacagccggggaagggcccgcacgcccagagggacaaccaggccagggacgaccagacccagcccccaaggaca

SEQ ID NO: 93657 - RNA, 83 nt, Homo sapiens
gggcacaccaacaccgacaacccccggagacaacaaccgcgggcacccacggaaaaggccggccggcgaggagggcgaggaga

SEQ ID NO: 93658 - RNA, 78 nt, Homo sapiens
aaaagcagcaaacacgggacaaaaaccagaccaggaaagaccacagcaagaccacgcccccagccgggggaccaggcc

SEQ ID NO: 93659 - RNA, 57 nt, Homo sapiens
caagggcacgggaagaccggaggggacgaagaacggacaacagcagcgagagagaaa

SEQ ID NO: 93660 - RNA, 71 nt, Homo sapiens
ggagagcggggaagggggaaaggcaccaggacaagcaaagagaaagagcgcgcacgaaagcacacgaaaag

SEQ ID NO: 93661 - RNA, 63 nt, Homo sapiens
ggcacccagagaagaccagggccaggcgcgcagggggagccaccgagaggccgaagaagaaag

SEQ ID NO: 93662 - RNA, 85 nt, Homo sapiens
gccacgagccgccaaacacggggcagcaccacccggcagggggagaccgacacgaccagacgcgcgcgacagccagggcagcaag

SEQ ID NO: 93663 - RNA, 83 nt, Homo sapiens
agagaaaggagacccgacgcaacgcggagcgcaaggcgagggacgagaacgaggggggaagaaaacagacagaaacagagccc

SEQ ID NO: 93664 - RNA, 65 nt, Homo sapiens
gaaggcgcagaaagagagagcacagcggaaagagaggaagaagaccgcaaaagaaggcaacgcgg

SEQ ID NO: 93665 - RNA, 66 nt, Homo sapiens
acgacgcaccgcaggcagacaaaagggccaaagaagggagagagaacccccccaccaccggaaggc

SEQ ID NO: 93666 - RNA, 60 nt, Homo sapiens
cgacagggcaaagagcacggggacacagccacggcagcgcccaagcggaacacaagaccc

SEQ ID NO: 93667 - RNA, 76 nt, Homo sapiens
gaggagaaggcgaggccacagaaccagccacagcggggcggagaggccccccccgcgggcaaccgcccccgggaca

SEQ ID NO: 93668 - RNA, 85 nt, Homo sapiens
ggggccacgcgaggcccgccagaggcagaagaggccggaccggcgcacacagacccaggaacagagagcagggagcgcaccacac

SEQ ID NO: 93669 - RNA, 61 nt, Homo sapiens
aaacggcggcgccggggccggaggaaaaagccggcagccgccaaggaaaccgcggaagggc

SEQ ID NO: 93670 - RNA, 56 nt, Homo sapiens
ccaggggacacaacacaagaccaagccgacacagcacaggagggagcaggaaaaag

SEQ ID NO: 93671 - RNA, 69 nt, Homo sapiens
agcggaacaagaaagcagggcacccaggacgcagacgaacccaagaggggcacccgccacgagggcagg

SEQ ID NO: 93672 - RNA, 94 nt, Homo sapiens
aagagcaaccagaaagagagggacaaggcgagcagcgcgcaaagagagaaggcgggaccaagaagaaagaaagaagggacagacagcacacaag

SEQ ID NO: 93673 - RNA, 85 nt, Homo sapiens
ggcgaccgagccggagcgccgacgaccaagaggcgaagagggaggcccccccccacaaggcccgcaagcaccagccccacccgca

SEQ ID NO: 93674 - RNA, 86 nt, Homo sapiens
gaacgcgccggggcgcaccgagcccccaggacggcacagccggcccgggccgggagcgggcaggccaaaacagaagaggcaaagcc

SEQ ID NO: 93675 - RNA, 81 nt, Homo sapiens
aggcagagcggagaccaggagcagggcagagggacggcgacgcccaggcccgcagggcaagaagggcggggagacaggaag

SEQ ID NO: 93676 - RNA, 80 nt, Homo sapiens
ggaagagcgaggccccaggcacagagacagagagggcggaagagaagccacgcaccacgggcagccaaccggaccaccag

SEQ ID NO: 93677 - RNA, 83 nt, Homo sapiens
cacggcccgccccggcgggcagagaccagcaccggagaaggcaaaagcagaccggaaaacccaccggcaagaccacacccgag

SEQ ID NO: 93678 - RNA, 74 nt, Homo sapiens
cccgcagccgcccccagcaacgccgccacacccggagaccccaagacaggagaagcaacaacacacaacccaga

SEQ ID NO: 93679 - RNA, 82 nt, Homo sapiens
accccaaaaagccccaccagaaccaaggaagacaacaggggacgaacagaggcagacacccacaagcgggaggaagagcgaa

SEQ ID NO: 93680 - RNA, 90 nt, Homo sapiens
ggcaggccaggcgggaagaaggaggcacgccagaagaccgcccggacgggaagcgggaaaggggacacgagcagcggaccccgcggccgg

SEQ ID NO: 93681 - RNA, 70 nt, Homo sapiens
cgaaaccggggagagcagacacggaaccggggcgcaagaggacccagaaggaaaccgacccagcgggccg

SEQ ID NO: 93682 - RNA, 86 nt, Homo sapiens
gagcaggcggccgggcgcccgaagggaagaaagcggaggcggcggcgcgaaaagagaaaaaagaaaagagaagagaaggaagaaaa

SEQ ID NO: 93683 - RNA, 79 nt, Homo sapiens
aagcccggcgggacagggcggcgggaggcccagggagaacggggaagggacaaggacagagcgcgaagcgggccccgaa

SEQ ID NO: 93684 - RNA, 77 nt, Homo sapiens
gaaggccccacgaaggcaacagccgcagaaagcaacaaagcgagagcacaagaaaacagccccgagcaccagaccac

SEQ ID NO: 93685 - RNA, 64 nt, Homo sapiens
aaacgagagaagaacaacaaaaaagaacagcacgcccaagcagggggacacagccagggcgcag

SEQ ID NO: 93686 - RNA, 59 nt, Homo sapiens
ggaagcacaccaccaaggaacgggcgcagcgagaggggcgagccacaagggcaggagaa

SEQ ID NO: 93687 - RNA, 70 nt, Homo sapiens
gaacggaaccacaagcaaaagccagagaagcaagaggcaggagggggaaggcccccaccgagacccgaga

SEQ ID NO: 93688 - RNA, 78 nt, Homo sapiens
gaacgggcaaccaggaacaacaaggaggagagaacgggacaaggaggacaaccccgacgaagcaggggagcggagcag

SEQ ID NO: 93689 - RNA, 74 nt, Homo sapiens
caacacgcgggcagcgaacaagcgggagcaaggagggcgaagagcgaggagaagccagcccagaaagggaaaac

SEQ ID NO: 93690 - RNA, 72 nt, Homo sapiens
gcggcgggggcaagacgccgaagagacgcacgcgaacggaaacgcagcaagacgcgaggggcccggccgcgg

SEQ ID NO: 93691 - RNA, 60 nt, Homo sapiens
ccggggagcccgaccggaccgcggaggacacccaccggaaagccgaaaacaacaaagaaa

SEQ ID NO: 93692 - RNA, 54 nt, Homo sapiens
gcagagcgacagagacaaccgcaaaagggcagcgcaagaccccgcacggaagca

SEQ ID NO: 93693 - RNA, 61 nt, Homo sapiens
gggcgccggccccagggccccgacaagggaccgggcgggccccgcaggaaacccccaccgg

SEQ ID NO: 93694 - RNA, 87 nt, Homo sapiens
cggcgcaggaggcggggagcgcagagcgggcgagcgcgggggagaggcaccagcaacagaccaaccgcagcaagcacagagacagga

SEQ ID NO: 93695 - RNA, 78 nt, Homo sapiens
gggccgccggcccccgacagcagagacacaggacagcggaagcagagcgcggcccggcgcgcgccgacaggacgcccc

SEQ ID NO: 93696 - RNA, 76 nt, Homo sapiens
cgacagaagagacgggggagcacgagaggcccggccagagaccgccgggggagcaaggcgaccgggcgcgcccgaa

SEQ ID NO: 93697 - RNA, 82 nt, Homo sapiens
gagacccaacagaaaagaagaagaagagggaaccccagcgccaaagagcgaccaagccagaagaacaaccagaaacaaacaa

SEQ ID NO: 93698 - RNA, 76 nt, Homo sapiens
aggaggaggcacaccccggccgacgcaccccacacccgcaccagacaggaccaccgagcagaggggaagacacacg

SEQ ID NO: 93699 - RNA, 78 nt, Homo sapiens
aagaccagcgcaaaagcagaggacaagagggacggcagagcaagcggacagagcaaaaccgcccaccaccgagcgccc

SEQ ID NO: 93700 - RNA, 70 nt, Homo sapiens
aaagcaggaccaagaacgggcaggcaagcaggcaaagcagcacgccgaggcaagcgccccgcggccccac

SEQ ID NO: 93701 - RNA, 73 nt, Homo sapiens
aaacacagggggaggaacaacaccaggcaaggaaacaaagagccccgggaaaagaaaaaaaacgccccaaacg

SEQ ID NO: 93702 - RNA, 78 nt, Homo sapiens
ccaaaacagaggggaaaggagcgacgcaacaccgggagggacaggagaacaggcacgaccccaccggcaccaccacgg

SEQ ID NO: 93703 - RNA, 51 nt, Homo sapiens
aaacaccaccaacaaaccggagggaaggccaggacaggggaacaggcacac

SEQ ID NO: 93704 - RNA, 74 nt, Homo sapiens
gaaagaaagacccaacagaaacacggaccgaaagagggccaaagaggggggcggacagaacacgaagccagaaa

SEQ ID NO: 93705 - RNA, 76 nt, Homo sapiens
gaaccgcaaagaagaacaccaagaaccagacaagggaggcgaggacggacaaaaggaaacggacgggaggccagcc

SEQ ID NO: 93706 - RNA, 77 nt, Homo sapiens
cgaaccagccgccggagcaccgcagcggcgcccgcaggggaacgccaggagccagaaccccgaggaaaggggaaaag

SEQ ID NO: 93707 - RNA, 68 nt, Homo sapiens
acggaccccgaggacaggaaaaacagaaaagaggagagccacaggacccagcggaaggggaagccgcc

SEQ ID NO: 93708 - RNA, 58 nt, Homo sapiens
cagaggagccacacccccagaaacaacgaacgagcaaggaagggccaaggcagacccc

SEQ ID NO: 93709 - RNA, 82 nt, Homo sapiens
cgaaaaaagggcaagaagccagaagggcaacaacacggcaccacacaagcgaagaagccgagaaaccagccacgcagaagag

SEQ ID NO: 93710 - RNA, 98 nt, Homo sapiens
gggcaagggaccagcaaggcggcagagcaaggggcacgcagaaggaccggccacggcgggggccggccccagcccagacggaagagagagacccggcc

SEQ ID NO: 93711 - RNA, 81 nt, Homo sapiens
aaaagacaaccgagagcagaggccccacacccccagaaggacccccaggcgagcgggaaagccgaagaaaggagggcgaga

SEQ ID NO: 93712 - RNA, 61 nt, Homo sapiens
agaaaggggaccacaggccaaggacgcccaagcagcccagaaccgcaccgcccaaaagcag

SEQ ID NO: 93713 - RNA, 61 nt, Homo sapiens
cagaagaaaaccaaggcgaaggggacgcaaaagaggagagagccggagggcaggaagccgc

SEQ ID NO: 93714 - RNA, 69 nt, Homo sapiens
cccccgcccccgcaccaggacaggagagacaacggaggcaagaaagacggagaagcgagaagagaccag

SEQ ID NO: 93715 - RNA, 75 nt, Homo sapiens
caccccaacgggccaaaggcagccggagaaggaaaaaagcgccaagacagagagccgcggagggaacgccccaca

SEQ ID NO: 93716 - RNA, 57 nt, Homo sapiens
cggaagcacacaacaggaaaacaaaagaggagaaaggagaaaggagagcaaacacca

SEQ ID NO: 93717 - RNA, 69 nt, Homo sapiens
cagacgcagggcgcccccgaaacacggcaccgggggcggaaaagcagaaaggaaagggaagagcaagac

SEQ ID NO: 93718 - RNA, 79 nt, Homo sapiens
agggaggaggaaccgcaagcaggccgaacaagaaggaacacagaggggcgacagcccagacccgaaccaaggcaaccca

SEQ ID NO: 93719 - RNA, 77 nt, Homo sapiens
gcccccacaacggggaccaccgccccagcagacgcggaagcaggaccggacgccacacaggggggggcagcaaagcg

SEQ ID NO: 93720 - RNA, 71 nt, Homo sapiens
caaccagagcggagcgcagaccgaggaaaaggagagagggagcacggcccaggcagccaagaaggcagaga

SEQ ID NO: 93721 - RNA, 67 nt, Homo sapiens
aacacagcaggcaaacagggggcagcacgccgaaggagagaccagacaacaggccagggaagggaag

SEQ ID NO: 93722 - RNA, 55 nt, Homo sapiens
ccaaggaaaaacggagagccacaaaaaaggaagcgaaaaagccgggcaaggagaa

SEQ ID NO: 93723 - RNA, 80 nt, Homo sapiens
ccgccccaccaccccaccagacggcgccccaagaccagaggcaggagcgcagccggcagagaggagcccgcaccagcagg

SEQ ID NO: 93724 - RNA, 80 nt, Homo sapiens
gagaccaggcggcggaagagagccgggcccgccgggcgaagccgaacaggcaagacgaaaacaaggggcgagacacgaga

SEQ ID NO: 93725 - RNA, 73 nt, Homo sapiens
caaggagggaaaaggcagaaggagaaaaggcagccaaacgccggcaaacaaaagggcggacccgaaagagggg

SEQ ID NO: 93726 - RNA, 86 nt, Homo sapiens
aagggaggaagagcgggcaggggcggagaagaaggagcggcacaggcgccagggcaggccagagacggggcagcagcaggggcagg

SEQ ID NO: 93727 - RNA, 55 nt, Homo sapiens
aaccagaggaagaagcacccagagacgacaaaggaaggaccgagggacccgacac

SEQ ID NO: 93728 - RNA, 75 nt, Homo sapiens
ccacgcggaccgcggagagccggcgccgacggcgaccgcggcccgagagccaaggagggacaggcaagaaggaag

SEQ ID NO: 93729 - RNA, 57 nt, Homo sapiens
cgccccgccgcgccgcgcccaaccgcccccccccagaacgcgggggaaccagaagag

SEQ ID NO: 93730 - RNA, 79 nt, Homo sapiens
gaaggcccgagcagcgaacccaccaaggccacacggcgaccgcggggacgaggggacacaagacggcgaggagaagaca

SEQ ID NO: 93731 - RNA, 68 nt, Homo sapiens
ccgccgaacccgaaaggagcagagcagggaaaggacaagaaagaggacgcgcaaagaaaaagacaacc

SEQ ID NO: 93732 - RNA, 82 nt, Homo sapiens
agaagagaaggccaagagcacagagcaccgcggcagggggagcccaagccgggcccggacaacccccaccagaccaccgccc

SEQ ID NO: 93733 - RNA, 70 nt, Homo sapiens
gacaccccgccagcccggggcccacccccaggcgggggaggaggaggggacgaggcagaaacgcacgaag

SEQ ID NO: 93734 - RNA, 78 nt, Homo sapiens
gacgcaagggcgaggcacaccagcaggaggcgccagaaagaacaacccgaacgcaaaagaagccaccagaagaacaga

SEQ ID NO: 93735 - RNA, 75 nt, Homo sapiens
ggggcgccgcgcgggggcgcgggcgccgcgaacaagagaaccaacggcgaaaacggcggggaaaaaaggaagaga

SEQ ID NO: 93736 - RNA, 74 nt, Homo sapiens
gaagccgaggccccccagacagggaacccaaggagaccgggagagagacgaaggacgcgcaggggcagcagaca

SEQ ID NO: 93737 - RNA, 73 nt, Homo sapiens
aaagcgcagcaaagagacaagccaaagccgaccagggaacaacgggagaaacagcaacaccaacaagagacga

SEQ ID NO: 93738 - RNA, 84 nt, Homo sapiens
ggacgaaccacaggaagcgcggggcggcggcgaaaggacgacgaaaaggggaaaggagaaagaagggagaagaaacagagaacc

SEQ ID NO: 93739 - RNA, 83 nt, Homo sapiens
cgggccgcgggagccgcacgcggcgaaggaagaggagggcaagaagggcaagaagggaccccgacggagagacaaagaagacg

SEQ ID NO: 93740 - RNA, 58 nt, Homo sapiens
cacacgcaaaggagaaaggaaccgacagacacaaaaacagacgggaagccaaggaagg

SEQ ID NO: 93741 - RNA, 55 nt, Homo sapiens
agcagagccaacagaccgaacaaagaccagcaacaaggcagagcgaacccaagca

SEQ ID NO: 93742 - RNA, 75 nt, Homo sapiens
ccaacgcggcgacggcgggcgcgcacgacgacggcggacgcagcggcgggggcaggaagacggggcccaaagagg

SEQ ID NO: 93743 - RNA, 80 nt, Homo sapiens
ggaaagacaggagaccaaaaaggaagccagcccggagggagagaagggaacgagaaagaaaagacaaccaaggcaagggc

SEQ ID NO: 93744 - RNA, 84 nt, Homo sapiens
cgcccaccacgccagccaccacgcggcgcacaacgcaggaacaccgcacgcgcggaggagagcaaaggcacaacaccacgccca

SEQ ID NO: 93745 - RNA, 60 nt, Homo sapiens
cccaaaagaacgaggccggaagacgccgaaggaggcgaaccgcgagcccagaaggcgagg

SEQ ID NO: 93746 - RNA, 77 nt, Homo sapiens
aaccagaggaaaaaccacaggaggagacacgagggggcaccagccgaagccaggcaagcaagaaccaacaagaagac

SEQ ID NO: 93747 - RNA, 73 nt, Homo sapiens
acaagaaggacacaggagaagaaaggagaaacagagggagaacaagggaacagcccgggggaggcgcagaggg

SEQ ID NO: 93748 - RNA, 76 nt, Homo sapiens
aggcaccaacagaacaacacaaaggcagaaaagaagcccagaagcgggacaaagcaaaaaaccaacaagaaacaac

SEQ ID NO: 93749 - RNA, 74 nt, Homo sapiens
gaaaggaggccggaccgaggaaccaccaagaggcaacaggcccgaagacaccccgccaaaaggacagaggacca

SEQ ID NO: 93750 - RNA, 76 nt, Homo sapiens
cggcgccgaaagaagcacccaggccggaagccccccacgccggagagggcacggcggagaggcacgaggaacaagg

SEQ ID NO: 93751 - RNA, 36 nt, Homo sapiens
agaaagcgggacacacaggaagggccccacaccaaa

SEQ ID NO: 93752 - RNA, 78 nt, Homo sapiens
ggcaggaggaggaggaggggcccggcggcggggagggacagacagccagagggaaacgagagccagaagggaaagaca

SEQ ID NO: 93753 - RNA, 81 nt, Homo sapiens
gcaagcagggggcacccaagcaggaggcggcacagggagaacacagggccccaccgcgccccacagaaaacgagcaaagac

SEQ ID NO: 93754 - RNA, 85 nt, Homo sapiens
aagcccgccgcccccaaagcggaaccggacaccgagggcaacggcaggcggaggacccacaggagaggcacaggaccagaccaag

SEQ ID NO: 93755 - RNA, 46 nt, Homo sapiens
gccaacagaaacgcaccaccaagggcccaggacgacgaacggaagc

SEQ ID NO: 93756 - RNA, 49 nt, Homo sapiens
agcgggcggagggccaaagcgaagaagggaccagaacagagaagaaagc

SEQ ID NO: 93757 - RNA, 82 nt, Homo sapiens
gaccggggacgcacggaccaaaaacccgcaacagcccccgcccaagcaaggggacaggcgaggaagccgaagcgcaccacac

SEQ ID NO: 93758 - RNA, 73 nt, Homo sapiens
cgcacacagcgcgcaacgcgggagagcccgggccacccccccaggcaagagcacgcagccccgaaggcggccc

SEQ ID NO: 93759 - RNA, 81 nt, Homo sapiens
gcgggaaagaaggcaaaacacgggcaccgggaaaacgcagaggaacgagggggagccacgaggagaaggccacgcgggcgc

SEQ ID NO: 93760 - RNA, 82 nt, Homo sapiens
caagaacgcgggccaggcccagcagggccacggccaacccgaaaaaagagaagaacgcccagcccggggcggccagcagccc

SEQ ID NO: 93761 - RNA, 78 nt, Homo sapiens
cgaaaacggaagcgcagggagaaggaagaggggaaaaggacaaaccggcgaccacacacggggacgacggggaagccg

SEQ ID NO: 93762 - RNA, 69 nt, Homo sapiens
cgcaagaacgggaaccacacaacaggagaaagcccgaacgcgggaagaacgaagaaggacaaaaaggag

SEQ ID NO: 93763 - RNA, 73 nt, Homo sapiens
cagaacggcgcgacagggaaggaacagaagaggcgcccagaaacagcacggagaaacaaaacaccgggaaagg

SEQ ID NO: 93764 - RNA, 78 nt, Homo sapiens
ccagcaacagcagagcgccgcacgagacacccacacaccaagacaaggagaggcggagaagacaacacaggaggcccg

SEQ ID NO: 93765 - RNA, 73 nt, Homo sapiens
aagccgccggacggcgccacgaggacgggcgggggagccagaccgggggcaggcaggaaaggaggacacgaac

SEQ ID NO: 93766 - RNA, 42 nt, Homo sapiens
cccgccagaacgggcagcaaggagaacgcacaaccacgggga

SEQ ID NO: 93767 - RNA, 58 nt, Homo sapiens
gcagacaaaagggccaaagaagggagagaggaagaaggagaaagacaaagccccgaga

SEQ ID NO: 93768 - RNA, 72 nt, Homo sapiens
accccaagaccagagccgggaccccagccagcccggggcaagacggcagcccggggcagaagaggggacacg

SEQ ID NO: 93769 - RNA, 56 nt, Homo sapiens
gaagcaaagcaccaaagacgagaaagaaacagcaggaacccaaccgaagaagaaca

SEQ ID NO: 93770 - RNA, 74 nt, Homo sapiens
cgagacaggagccacagaccggacaggaacagagcacgagagcagccccgggaagggcaacaacaaaaaaagga

SEQ ID NO: 93771 - RNA, 78 nt, Homo sapiens
cggcggcagggcaagcggcgacggaccccaagaggaccaaagcccgaaagaagaagaagaaagagccgccccacgggg

SEQ ID NO: 93772 - RNA, 70 nt, Homo sapiens
ccccaaggacggcccaaacacgcccagaggaggggaacaggccggcgaacacaaagacacaaccaaagcc

SEQ ID NO: 93773 - RNA, 80 nt, Homo sapiens
gccgggggaggccgcaccgcagcgaggccaggaacccggggagaccccgacgggaggccgaggaaaagccaccaaggcca

SEQ ID NO: 93774 - RNA, 71 nt, Homo sapiens
agcacccggcacgccacggcgccccgcaagcacccacggagcgagagagacccgcgaaaccgacccaagaa

SEQ ID NO: 93775 - RNA, 75 nt, Homo sapiens
acaacaccaggacacagaaggcgaaacagaaggcggaggcagaacgaaagagggaacacacacaacgacggagcc

SEQ ID NO: 93776 - RNA, 77 nt, Homo sapiens
ccccagggaagcgcagaaagcaggcgaacccgcggcgcaaaacgagcgcaaaagacaacccacgaaaaccacaccca

SEQ ID NO: 93777 - RNA, 109 nt, Homo sapiens
gccaccaccacgccagccgcaccagccgcccaagccgcacagccgcggcggcagcagcaggagagacagagaagcagccaggccacacggagcagggcagggaggggag

SEQ ID NO: 93778 - RNA, 68 nt, Homo sapiens
aaccgcggcgcagcgcagagacccagggccggacagcccacgcgaggaaaaaacccaaaggcgaagga

SEQ ID NO: 93779 - RNA, 68 nt, Homo sapiens
gaagcacgaaaaacgccgcacgccccccagcggaaagcgccccacaccgcgccgccccaccgggaacg

SEQ ID NO: 93780 - RNA, 85 nt, Homo sapiens
agacccaccggaccccgaacccagggcacggaagcaccagacaggcccccgaccagcgaaagacacaacccgcccagggcaaaag

SEQ ID NO: 93781 - RNA, 87 nt, Homo sapiens
ggagcggcggaggccaaccagcgcccgccccgcgcaggccgcccgaagcagacacccgaagagcagaagccgaagggcagcagcaaa

SEQ ID NO: 93782 - RNA, 79 nt, Homo sapiens
agaggggagacacgccaaagccccaaggacgaccgaaaacccagccagacaaaagagaagcagaggagcgaagaaagag

SEQ ID NO: 93783 - RNA, 79 nt, Homo sapiens
cggggcgccgccgggcggccgggcgcggcgagcccagggggagccccccagacccgaaaggagacaagaggacagccgc

SEQ ID NO: 93784 - RNA, 78 nt, Homo sapiens
gccaagcagcaaagcggaccaggaagagggaacaagggggcggagcggcgccggcggcccgggcacagccgcccgaac

SEQ ID NO: 93785 - RNA, 87 nt, Homo sapiens
cacgccgcgcagcccggccgccggcccccaacagcgccgggcggagaacggaaaagcaccaggaagcagagaggaccgcagaaggga

SEQ ID NO: 93786 - RNA, 84 nt, Homo sapiens
cgcgccgcgcacccgcgccagcaccacgcccgcgccgcgccgccgccaccagcccaagagaaagaggcgagggcgccggcacca

SEQ ID NO: 93787 - RNA, 81 nt, Homo sapiens
ggcgagccgcgacggcgccgcccacggcgagccgcggagaaccgaaccaacagccagccaaagccaggcagcacagcacag

SEQ ID NO: 93788 - RNA, 65 nt, Homo sapiens
gagagcgaggaggcaaaaaggcggcaaacgccaagaaaagaccggaagggaaggccccaaagacc

SEQ ID NO: 93789 - RNA, 79 nt, Homo sapiens
ggagaccccaccgccggcgcgggaaacgggcgaagcgacgagccgcgaggagcgagaaaggagcacagacaaaaaagag

SEQ ID NO: 93790 - RNA, 85 nt, Homo sapiens
aaagcaggaggaggggcggcggcgggaagaaaagccaacaggcagaccagagacagcgccacgcacccggggagcagaccacgcc

SEQ ID NO: 93791 - RNA, 65 nt, Homo sapiens
aggagaaggaagaggcagagcaacaggccagggggcagaacagggaagccgacagcaaggcggaa

SEQ ID NO: 93792 - RNA, 76 nt, Homo sapiens
aacaacagaaaagagcaggcgaaccacaagaccaagaacacggggcgcaaaacaggcacccgagggaccaaagaac

SEQ ID NO: 93793 - RNA, 73 nt, Homo sapiens
cccagggccaggagcggaaaaaccggccaacacgggaaaaggcccgccgacacagccaccaagaaggcacaag

SEQ ID NO: 93794 - RNA, 68 nt, Homo sapiens
agagccgcgaaagacggagcagaaaaaggcaggacaggggggacaacgcgacggcgggacccagggac

SEQ ID NO: 93795 - RNA, 91 nt, Homo sapiens
cgccccggccgcgggcaccccggcccggccgcagcagccgccgccgccgcgcagggccaaggggaaacgcaggaagaagccaaaaaaaaga

SEQ ID NO: 93796 - RNA, 82 nt, Homo sapiens
ggaggcagccaagccgggccgcccgcggcgcaaaagcagaccggaaaacccaccggcaagaccacacccgaggggagcccag

SEQ ID NO: 93797 - RNA, 62 nt, Homo sapiens
acagaccagacacccaccggaacacaaccacgcccggcgaggcggaggggagcgaccgcgag

SEQ ID NO: 93798 - RNA, 68 nt, Homo sapiens
gagcggcagagccagccaagccagaggccgcgaaaggaaccagggcacacaagcaacagaagaaaagg

SEQ ID NO: 93799 - RNA, 77 nt, Homo sapiens
agacagcagcacaacaacgcaaccacagaaacaagggacaggaggccccgacgaacccaccgccaccccgcaagcga

SEQ ID NO: 93800 - RNA, 85 nt, Homo sapiens
cgcagggggacggggaccagcagcgcgccgccgcccagggagagcacagagccgggaaagcagaagaagaaaggagcgccacagg

SEQ ID NO: 93801 - RNA, 75 nt, Homo sapiens
gcggggggacgccacacagcacaacacaacacgccccgaagcaggccggcacaaggagaccagcagcccgaggca

SEQ ID NO: 93802 - RNA, 76 nt, Homo sapiens
aagcgccgccgcggcgcggaagcaacacaacaggaggcggaggcgaaagcggaacgagaacccgccacccccaccc

SEQ ID NO: 93803 - RNA, 72 nt, Homo sapiens
ggcgcccccagccggagccccagacaacccggacggccggccaaagcaccacaaaggcacagcacgaggaac

SEQ ID NO: 93804 - RNA, 78 nt, Homo sapiens
accacggagcaagggaaagagccgcaggcaagggacgaccaggaggagggcccaggacaagaggaccacacccagccc

SEQ ID NO: 93805 - RNA, 71 nt, Homo sapiens
ggacaacgaccggggcaccagggaaaacacacccgagacccagacagaggagcacccgaagaagacaagac

SEQ ID NO: 93806 - RNA, 77 nt, Homo sapiens
ggaagaggaagaccagaaacacaaggcaaagcagcaaccagaaccccccaaagagagagcaagccaaaccagaagaa

SEQ ID NO: 93807 - RNA, 50 nt, Homo sapiens
gaaagccagaaaacggaaccgagcaaggaaagcacaccggcccccaaaaa

SEQ ID NO: 93808 - RNA, 58 nt, Homo sapiens
ggccggcccggaggcgggacccagggcccagacaagcagaccggaagaccgacggaag

SEQ ID NO: 93809 - RNA, 80 nt, Homo sapiens
aagacaccggccagcggccagagcgagcaggcacgcagcacgggggcaggggccgacccagaacgccagcgccgcaagga

SEQ ID NO: 93810 - RNA, 65 nt, Homo sapiens
ggagaaggaccaagaaccagaacacagaagagaacccgaacacagcaggagcaagcgggggcagg

SEQ ID NO: 93811 - RNA, 94 nt, Homo sapiens
gcgcccgacccggcccaccaggggcggaaacgcggggacgccacaaggaggcaaaacccaacgaggacgggggaaagaaggaagggaaaaaaac

SEQ ID NO: 93812 - RNA, 56 nt, Homo sapiens
gcacagcaggagcgagaccccagagccaccaccggagaggaccggaaagaggcgca

SEQ ID NO: 93813 - RNA, 77 nt, Homo sapiens
cagggacccgagacggagaaaagcccgagggcacccaccagagcagacaaagaaggaaacccgggagaagaaccgag

SEQ ID NO: 93814 - RNA, 67 nt, Homo sapiens
ggaaaagccaacagcagaaagaagagagaagaagcaaaccgggaccggaagcaccaaggagaaaaag

SEQ ID NO: 93815 - RNA, 82 nt, Homo sapiens
ggacgagccgcaggacacaggggacccagaaagaagcacaaaacaaacgacagcagcagagaaacacgcaaagccgagggac

SEQ ID NO: 93816 - RNA, 69 nt, Homo sapiens
gcccggggcaacggccgcaacgcgggacggcaaacgcggaccggaccagcaaccgcacacacaccacgc

SEQ ID NO: 93817 - RNA, 41 nt, Homo sapiens
gcagagagagacagccacgccggaaacaccaaccggccaaa

SEQ ID NO: 93818 - RNA, 73 nt, Homo sapiens
ccagggagccaccaaccagacagaagacgaccggcggggcacgggaagaaaggaaagagaggcaaaagcagcc

SEQ ID NO: 93819 - RNA, 84 nt, Homo sapiens
ggcggaagcggagagcaacagcgcgccggcgagcagggcacaagacacagaggagaagaaacagagaagaccaaagaggagaag

SEQ ID NO: 93820 - RNA, 75 nt, Homo sapiens
aaaccgaccagaagagaaagagagaagccaaaccccaggcgcgcccgcgcccggggcggccaagggcccagggcg

SEQ ID NO: 93821 - RNA, 60 nt, Homo sapiens
aggggagacacggcagacaaagagccgcagacgcacagcaaccaccggacccgaaggcca

SEQ ID NO: 93822 - RNA, 116 nt, Homo sapiens
ccagcccgggcgaacccacacgcaaccccgccgagggcgagcaggagcgagagggcgagccccgcgagggggccaagcgccaggagcaccacccgaccagccgacccagcaaagac

SEQ ID NO: 93823 - RNA, 86 nt, Homo sapiens
gcaagaggcgcaaacaagccaacccaggaggaaaaacgcccggaccaaaaaacaggccaccgaggaaagaggggcccaagcacaaa

SEQ ID NO: 93824 - RNA, 77 nt, Homo sapiens
gaacaaaaagcagcaaaccggaccaccccgaagaaagcacagacacacggacaaccggaagagaccgcggagggggc

SEQ ID NO: 93825 - RNA, 64 nt, Homo sapiens
accagcgccaggagacagacacacagcacacgggaaccagacacaaagaggaagcccacacaga

SEQ ID NO: 93826 - RNA, 72 nt, Homo sapiens
ggaggaaaagaagccagaccgaggggacggaggcccggagcacggaagaaagccggaccgggaaagaagcgg

SEQ ID NO: 93827 - RNA, 65 nt, Homo sapiens
ccccaccgcgcagggagacccacaggaccgcgaacaaggaggccacaaaacacccggacccacca

SEQ ID NO: 93828 - RNA, 90 nt, Homo sapiens
aagaaaaaccccgacagggagcgaccggagcaaggcgggcggggggcgggggaaagcaccaagaagcagcggaagaagaagaagagagaa

SEQ ID NO: 93829 - RNA, 101 nt, Homo sapiens
ccgcaaggccggcgcggaggaggggagcagcgcgcaaggggaacccacacccgcccccagggccaccgcaggacgccgacaccacccccagcagacgccgg

SEQ ID NO: 93830 - RNA, 74 nt, Homo sapiens
acaacccgacggcggaaggccccaacacccggagcagcgccacaagggacaggcaagggaaggaccccccacag

SEQ ID NO: 93831 - RNA, 82 nt, Homo sapiens
ggcccaggacggccacccccgcagagggacaccaggccaaaccaccccaagccgagcacggggagcgcacacgccgaagcaa

SEQ ID NO: 93832 - RNA, 74 nt, Homo sapiens
cgccgcccggggcgaggcagggccagcagcaggcgggagagacaagaggagcagcagcggcaccgcccccaccc

SEQ ID NO: 93833 - RNA, 82 nt, Homo sapiens
agagcgggagcgcgcgcggcgcggcggccgggccccgagacggggacgcggagcggaggcagacacacacggggggagaggg

SEQ ID NO: 93834 - RNA, 72 nt, Homo sapiens
aaaggccagaggaaagccagaaggcaccagagagaggccgaacggagcagacaaaggcgcgcacagagcaca

SEQ ID NO: 93835 - RNA, 74 nt, Homo sapiens
agccagcgcaaacgcaacccagagaaggcacgggaccagagcaggaaacacggggacaaagcgggagaaaaaca

SEQ ID NO: 93836 - RNA, 66 nt, Homo sapiens
gggggagggggaggagccgaacgagccccagccaggcccagcacggcccccaaacgcaggagaaag

SEQ ID NO: 93837 - RNA, 82 nt, Homo sapiens
ggaaaacaggcagcgggagccgagagaaggcacggcggcgcagaaaaggaaagaacaagcaccggagagagagcaccagcgg

SEQ ID NO: 93838 - RNA, 74 nt, Homo sapiens
acggccccgaggcagccgggcagggcccccggccaaaggaaagagccgggggcccagagcggggaagaaaggag

SEQ ID NO: 93839 - RNA, 81 nt, Homo sapiens
ggccacacccgaaagcaaagagaacgcacgggcgccaggggccgaaagcccggccaacagccgccgcaaggaaagacaccc

SEQ ID NO: 93840 - RNA, 76 nt, Homo sapiens
ggggagaggaggcaggcccgcggcagggaagggaacaggagagaggagaagagccacccggggcgacacacaaagg

SEQ ID NO: 93841 - RNA, 85 nt, Homo sapiens
ccgcgcggccgggggcgcgggcggcggcgccggcaggaagacacgcagaccccaccaagaggcggagcgacccggcccaaggacc

SEQ ID NO: 93842 - RNA, 87 nt, Homo sapiens
cagcagccagccggcccgaggacaccgacaccagcagagagcgacaagcagcaggcgaacaccaccggagcccccaaggacagcggg

SEQ ID NO: 93843 - RNA, 83 nt, Homo sapiens
caccgaggacagaacaacagaaggaggggaaagccagcgcagcgcgagaagcgacagcgaagaagaagcgccgacccccaaca

SEQ ID NO: 93844 - RNA, 82 nt, Homo sapiens
gacaagccagcccccacgaccagccacacgacggagcggcgggaggggaaggagcagccacccgggcagaaaggccgggcga

SEQ ID NO: 93845 - RNA, 87 nt, Homo sapiens
gcacgcggccaggcggcgacacgccaaccccggaaagccaggccagaagaaggaaggccggggaggggacaggaaagacacaccacc

SEQ ID NO: 93846 - RNA, 31 nt, Homo sapiens
ccagaccagacggggaccgggccagagggga

SEQ ID NO: 93847 - RNA, 80 nt, Homo sapiens
gggccccaagcccagcgggaccgagccagggaggcgaggcccgcaccggaagcagaccaccccacgaagaccaagcccag

SEQ ID NO: 93848 - RNA, 81 nt, Homo sapiens
agcccggcgacggcacccgcaaccacagaggaggggcaacgcaaccaccaccgaggccccgaaaagcacggcgcagggagc

SEQ ID NO: 93849 - RNA, 102 nt, Homo sapiens
ccacagcccgccacaccgccggggccggagcgccgccgccgccgccgcggacaagagagggccaggccgagggcccgcccggccccaggagaagaaccagcc

SEQ ID NO: 93850 - RNA, 75 nt, Homo sapiens
aaacaggaccgggagggcgagagaaaggcgccaacaggaccagagcaaaggagggcagacgggccccggagcacc

SEQ ID NO: 93851 - RNA, 63 nt, Homo sapiens
gacaggaaagaacaggaagaggcacagggcaacgacaggggaaccccagggaccagcggacag

SEQ ID NO: 93852 - RNA, 61 nt, Homo sapiens
gaaaagggccagggagagccggggacgacacacacacggagggggaacaccaggcaggaaa

SEQ ID NO: 93853 - RNA, 80 nt, Homo sapiens
agcagcagccaggaggacgagagcccaagaccgagaaagacagcaaagaaaaggagaagaaaggaaaaaaacaaccccgg

SEQ ID NO: 93854 - RNA, 68 nt, Homo sapiens
cagccagaacgagcggcccaaaagacggcggcaacacggggaacagggcgagacaaacgggccgcccc

SEQ ID NO: 93855 - RNA, 79 nt, Homo sapiens
gcgcgcgcagcgacggacagaggcggagcgcgacccgcaggggacaacaggagaagcggaaggagaccacccaccaggc

SEQ ID NO: 93856 - RNA, 84 nt, Homo sapiens
gggggagaaaggaagagcaaccccagaaggcaacgcgccgcaaaacagaacgcgaccacgaaagagacaacggggaaccagccg

SEQ ID NO: 93857 - RNA, 82 nt, Homo sapiens
ccgccaagggcggccccgaggaagcaaggccgcggggggagaccccaccaccgcccacaagaggaacagaacgaaagcggcc

SEQ ID NO: 93858 - RNA, 81 nt, Homo sapiens
caaaccagaagaggagggcccagaagaaaaagggccaaccagaagacggagcaggcaaaggagaaaagccaagaagaccga

SEQ ID NO: 93859 - RNA, 73 nt, Homo sapiens
cagcccacagcccgccaccgcgcggagccgcagagcgggcaccagcggaagccgacaccggaacagaaacaca

SEQ ID NO: 93860 - RNA, 69 nt, Homo sapiens
cgagaagacgggcgcagaagaaagaccagaagaacagccccacgaaacacggcaagaccggaacgacag

SEQ ID NO: 93861 - RNA, 68 nt, Homo sapiens
gaagggggaacaacgagaaagaaggaggccaagaccaaaaacaagaggaagcaagagaggcaaaaggg

SEQ ID NO: 93862 - RNA, 54 nt, Homo sapiens
gagagcaccgccgagcggaccccaagaagccccccagggaaagcccaaccagca

SEQ ID NO: 93863 - RNA, 48 nt, Homo sapiens
acagaacaacaaggggagccgccggacggagaccaagacacaccaccc

SEQ ID NO: 93864 - RNA, 85 nt, Homo sapiens
cgaccggagcagagagcggcgagcaagggggggcccacccgcgggggcagggcagaacgaggccgcccagccggagcaggacgag

SEQ ID NO: 93865 - RNA, 72 nt, Homo sapiens
gcgaaacaggagcaaaagagaaagacaagccaacgaccaagagaaggcccaaaaacaggcccggcgggagca

SEQ ID NO: 93866 - RNA, 77 nt, Homo sapiens
ggcaacgacggcgacaggaaacaggaggagcgcacgcccagcccagggaagaggcgcggaacacaccccccccgccc

SEQ ID NO: 93867 - RNA, 81 nt, Homo sapiens
cccagagaccaacccaggaaaggccaacaggccgcaagaggggaaacaacagaagaagcaaggaaaacagagaggcacaac

SEQ ID NO: 93868 - RNA, 74 nt, Homo sapiens
aggaggaacagcaagccaagaccagaaccagcaaaacagcccgggggaggcaggaaaaaaccccgaacggccga

SEQ ID NO: 93869 - RNA, 73 nt, Homo sapiens
cggcgcggggcggcgggagagcccggcggcggagcggagaggagccaagcccaacgggacgggaaaacggcca

SEQ ID NO: 93870 - RNA, 54 nt, Homo sapiens
accaagaaccagggaaaaaaaaaccccggacaaagaaaagagaagcaaccgggg

SEQ ID NO: 93871 - RNA, 53 nt, Homo sapiens
aaggaccaagaaccagcgacaaggcaccagcacgggacggagaacggcacaac

SEQ ID NO: 93872 - RNA, 73 nt, Homo sapiens
cacggaaaaaacccacggccaacggacaagcagcaaaaaggagggagcagggacacacgaacaaagacaggag

SEQ ID NO: 93873 - RNA, 80 nt, Homo sapiens
ccacccgcgcccccaggcgggaagggacaagcgccgcgcccgagggccagaggacacaccgaccggcgaggcgccccagg

SEQ ID NO: 93874 - RNA, 77 nt, Homo sapiens
ccggcggcccacgcagcccgggcaagggccgggcccaaaagaccacagacacaaaaggaggacaaaaaagaccgaag

SEQ ID NO: 93875 - RNA, 76 nt, Homo sapiens
caaggacacgcaccagaagaaggagaaccagaaacaacaaacacaggcgccaacaggaccagagcaaaggagggca

SEQ ID NO: 93876 - RNA, 88 nt, Homo sapiens
cgagccagccgcaggaggaggaggcacgacggccgccacgccagccagcacccggaggcccggagggcaagggacaaggagaccccag

SEQ ID NO: 93877 - RNA, 81 nt, Homo sapiens
accgggccgccaggcaagacagcgacgcgccaccggcggggggcgagcaacaccggggagaaaaacgacaaacagagcgaa

SEQ ID NO: 93878 - RNA, 87 nt, Homo sapiens
acgagcaggaccaccaggccacgaggagggcgcgagaagacaaagagagcccagcgacgggaggggcagcaggggcagcagcggagc

SEQ ID NO: 93879 - RNA, 51 nt, Homo sapiens
ggcaggcgcggaggcaaaaaagggacggaagaggcacaagagaaagaagga

SEQ ID NO: 93880 - RNA, 82 nt, Homo sapiens
gggcaaccccgaaccaagcagccgccgaggccgcggcccaaaggccagggaagagaggcgggaagagggcgggcgcgacaga

SEQ ID NO: 93881 - RNA, 71 nt, Homo sapiens
ggcagaagggccgaggcgcccaagaggcgacgccggcggaaacgggaaagaccacagcaagaccacgcccc

SEQ ID NO: 93882 - RNA, 82 nt, Homo sapiens
aagaaggaagggagaggccaaaaagcaaccgaaggcccccgaggagcccagacagcgcagccacagcccccgacaagaaagc

SEQ ID NO: 93883 - RNA, 72 nt, Homo sapiens
ggagccccgaccccaggccccccacagaaaaggaaagagagcgagacacaggagaacgacgagaagaacaaa

SEQ ID NO: 93884 - RNA, 72 nt, Homo sapiens
aagcaaacggaccagaccgaccaccaaaaagcgaagaagcaggggagaggccgagcgaagaaccagcggcca

SEQ ID NO: 93885 - RNA, 79 nt, Homo sapiens
gcggccacggacccaccccgcgaggcggagacagcagccaacgcacgcaagggggccgcaaccaggagaacgagcagca

SEQ ID NO: 93886 - RNA, 73 nt, Homo sapiens
gaacaaaagggaaaaaaggacggcagcacacaacaaaacacaggagggggaagagggggccacggagcgaaag

SEQ ID NO: 93887 - RNA, 70 nt, Homo sapiens
aggagccagggcagagccccaggcgcaagcgaaccaggcagaaaaaccacagaaacgaaagaaaagacaa

SEQ ID NO: 93888 - RNA, 70 nt, Homo sapiens
gccccagagaagaaccaacccagcaaccagcagagagacagaagacgagacacccaagaaaacaacccca

SEQ ID NO: 93889 - RNA, 86 nt, Homo sapiens
caaggacgccggacagcgaaggaggccggaaaaccccagagaggagcacgcccggagcccacgagcccacccccaccccaggccgg

SEQ ID NO: 93890 - RNA, 79 nt, Homo sapiens
cgcggggccggagcggcgcagccggagggggccggagggaaccccagacagaagacccaggacaacacccccacacgcc

SEQ ID NO: 93891 - RNA, 78 nt, Homo sapiens
cgcggcgagccggacccaaggaccccccagcaacccgagaacaggcccagaaaaagagaccaggagcgcgcaaaagga

SEQ ID NO: 93892 - RNA, 81 nt, Homo sapiens
gaagacacccgacacaaaaaggagacccaaagccaaggagaagccccagcggcagaagccagaggggccgcaaggccaggc

SEQ ID NO: 93893 - RNA, 71 nt, Homo sapiens
ggaccaagaaccagcgagacggcacgccagccgggccacggagcagagaggcaacaagcgaggccccgcgg

SEQ ID NO: 93894 - RNA, 51 nt, Homo sapiens
cgccggccgaagacggccggaacagaaggagcggcggacacacagaccccc

SEQ ID NO: 93895 - RNA, 71 nt, Homo sapiens
ggaagagagaaccgaggaacgaagaaacagacacaacagagcagaagacgccgccagccaccggcgcgaag

SEQ ID NO: 93896 - RNA, 56 nt, Homo sapiens
gcgcccaggccagagaaggggaaggaggggcagcgaaccacgaggccgaaagcaca

SEQ ID NO: 93897 - RNA, 93 nt, Homo sapiens
gcagcaggaggggggagcggccaacccaagggccccagcccgggcccccaacgagccagacaacacagggacacaacaaacacaaccgccaca

SEQ ID NO: 93898 - RNA, 79 nt, Homo sapiens
gaacgccaccccaccccagagaacgaggccgcccaaggacgacgcagggccaaccaaggaagaccagagcgacaacgga

SEQ ID NO: 93899 - RNA, 86 nt, Homo sapiens
ccgcgcacccgcccgccccagccacccaggccccgccgcccgggggcgccgcccaccgcgcccgccgggggggccccagcccggcc

SEQ ID NO: 93900 - RNA, 118 nt, Homo sapiens
aaagagcggcacagagcagggcgacccacgaggagaagagaaaaagaaaaagagcgagaagagaggggcgggacagcggggagccggcccaccggcacaccaaacgccggaagacagc

SEQ ID NO: 93901 - RNA, 77 nt, Homo sapiens
cccccacgggggaaccgggagcgaagcccgagcgcgaggaagcacgccaaggaggcgagcggccccggaggaagagc

SEQ ID NO: 93902 - RNA, 65 nt, Homo sapiens
ccaaacaccaaaccaaacagggcagggccggaacaaaggcaccaggccaaagagaaggacagagc

SEQ ID NO: 93903 - RNA, 71 nt, Homo sapiens
cgcccccacgcggggggacgcccacccgggccacggcccccggaagccgggcccaaccgacagggcacgac

SEQ ID NO: 93904 - RNA, 82 nt, Homo sapiens
aaacaggggcgaaccccagccgccaccggggaccgcaaggccgcggggcccaacaaggcaagacacagcggggagggaggag

SEQ ID NO: 93905 - RNA, 90 nt, Homo sapiens
gccgggaggaccgagccaagagggcagccgccgaaggaacgcgacggcggcgcccgcagacaagcagaccggaagaccgacggaagacca

SEQ ID NO: 93906 - RNA, 75 nt, Homo sapiens
gcagacgcccgacggaccacagggggggcgaccgaggaaaaaaagaaccaagagaaaagacacggggagggagga

SEQ ID NO: 93907 - RNA, 89 nt, Homo sapiens
gaagagagaaaagagagaaccccaaccggggaggaaaaccgacgaaggccagcccaagaacacagggaacggcgggggagccacagccg

SEQ ID NO: 93908 - RNA, 80 nt, Homo sapiens
caacccggcggaccaagccgcgggagggcccacgagcagcgagcgcccccggcccccggccaccaaccacagccccccgc

SEQ ID NO: 93909 - RNA, 55 nt, Homo sapiens
gcagacagcgccacagaaccagcagcaaagaagcacgaaagaccaaaccagacgg

SEQ ID NO: 93910 - RNA, 69 nt, Homo sapiens
aggcaggccagagccgaaccaaagagcagcaggagacagcagaccaccccacgaagaccaagcccagaa

SEQ ID NO: 93911 - RNA, 75 nt, Homo sapiens
ccgggaggaagccgcaggaccggaccaggagccaacaggaaagcagaggggagcgaaagccacaccagacaaaca

SEQ ID NO: 93912 - RNA, 107 nt, Homo sapiens
gaggcgagacggaggccaagcccggcagcagcacggacaggagcacaacaggggcggagaacggaaaagcaccaggaagcagagaggaccgcagaagggaaggagag

SEQ ID NO: 93913 - RNA, 80 nt, Homo sapiens
gaacaccagccgaaagggcccaccgcaaggacggagaaggacacagggcggggacccgagcccagccccagacccagcac

SEQ ID NO: 93914 - RNA, 42 nt, Homo sapiens
aggaggagccagaagcagaaggggcaggaacggagaaaaacg

SEQ ID NO: 93915 - RNA, 78 nt, Homo sapiens
gcggggcggaccggagaagccccgagcaccccacagaagagaagccagagcccaaggcccgcggaagccagccccacg

SEQ ID NO: 93916 - RNA, 82 nt, Homo sapiens
cgcgccgcgccggagccggagaacggccaggcggccccgagcggaacggagaaagcgaggggagcccacccagaggcagggg

SEQ ID NO: 93917 - RNA, 65 nt, Homo sapiens
caagccaccaagccgggggcggaccccagggcgccaaagccacccccaaaggcagaggaagaacg

SEQ ID NO: 93918 - RNA, 77 nt, Homo sapiens
gagggaccgggacgccacagccagacaaaagcacccagacaaaaaccggcaagagacaaaacacgacacagagaccg

SEQ ID NO: 93919 - RNA, 67 nt, Homo sapiens
ccgcgcaccgacccgacgcgccggcccacgcgcggccaagaaggcagagggggcgagggaggaaagg

SEQ ID NO: 93920 - RNA, 81 nt, Homo sapiens
cacacgcaaagcggcaagagagggccggcaggcgaggcccgcggaggccgagagccccgccccggcacacggccccgcagg

SEQ ID NO: 93921 - RNA, 72 nt, Homo sapiens
ccaccccccacgcaccgcacaacaagaggccggcggggcgacaggccggcgcggcacccacaaagcacggga

SEQ ID NO: 93922 - RNA, 41 nt, Homo sapiens
acaacacccgaaccaagaccagccacacccaccgcccgggc

SEQ ID NO: 93923 - RNA, 71 nt, Homo sapiens
gccaagaagcggggcggagagaagcgcggagccagcgcccggcaaggagcgagcgggagacaccggccgga

SEQ ID NO: 93924 - RNA, 114 nt, Homo sapiens
ccaggccagcgacggaaacgaacgcagcaaacagacaacaaacagaacggcaaaaggcggggagacagagaaaaaaaaaacacccgcgcgggagggcagccaccaaaacagacc

SEQ ID NO: 93925 - RNA, 77 nt, Homo sapiens
cgaggaccagcagaggccagcacgagaacccaggacagcccaaggcggaaaagcgaaggaagccacaagcacagccc

SEQ ID NO: 93926 - RNA, 74 nt, Homo sapiens
agcaacacgaaggaggccacgcagcaaaccacaggagaggagcaccaggaagaagaggcggaagaaacaacaag

SEQ ID NO: 93927 - RNA, 81 nt, Homo sapiens
ggaggagccgcaggggcccggacaaggagaacccagcccgcgacacacacagagcacgcccacaggggggggccaagagcg

SEQ ID NO: 93928 - RNA, 61 nt, Homo sapiens
gcggaggacaacgccgccaagggggaaaaggaacagccgagcaagaccggcccgaggggac

SEQ ID NO: 93929 - RNA, 79 nt, Homo sapiens
gggccacagaggccacaggcggacccacaggccaaaaggcccggaacagccggacccggagaccacccagagaggaagg

SEQ ID NO: 93930 - RNA, 78 nt, Homo sapiens
gccccgggcgcggcaaggacgagccggggcgcgaagaccacacgaaggggcagaagagcacaagacggaagagaggag

SEQ ID NO: 93931 - RNA, 82 nt, Homo sapiens
gccgccgagccccggagcgggggggggccccacgcgaaagagaggacaccaggggggaaaaaccacacaggcaaagaacgcg

SEQ ID NO: 93932 - RNA, 80 nt, Homo sapiens
agggaagacaacaccagggggaggccaggggagccgcggcccgcggcccaccggacaaacccccaacccgcccaccaccg

SEQ ID NO: 93933 - RNA, 64 nt, Homo sapiens
cagaggaccaggagcaccgcccagaggcggaaaggcgcggaagccagacgaaacggcccacaga

SEQ ID NO: 93934 - RNA, 63 nt, Homo sapiens
agaccaggaagggaaagccccaggcacccacacagaggagaagaagagccgagaagacacggc

SEQ ID NO: 93935 - RNA, 82 nt, Homo sapiens
aggcccgcgaccgccgagccgcagccgccccgcggccaacagagccggaggcggacggggagggccgggccagcgcccgggg

SEQ ID NO: 93936 - RNA, 50 nt, Homo sapiens
gcaagcacgaggccccggggggccgcgagggcgcccaagcgggccgcacg

SEQ ID NO: 93937 - RNA, 40 nt, Homo sapiens
aaacccgacagcaaagaccaggccagagagcacgcagaca

SEQ ID NO: 93938 - RNA, 79 nt, Homo sapiens
cgggccggggagccggcaggacccgaagacgagcaccggggggaagaagaagggaacaagcggagggacgcacgagaac

SEQ ID NO: 93939 - RNA, 80 nt, Homo sapiens
ggcgcaggggccagagcgaggcgccccgcccgcggaccgcggcagcccagagcagagcgccgcacccacaccaaaggaag

SEQ ID NO: 93940 - RNA, 74 nt, Homo sapiens
ccggcggccaccggaaccgcaacgccaaacggagggaggagaagacagagcgaacagaagccgggagaaagcga

SEQ ID NO: 93941 - RNA, 77 nt, Homo sapiens
ggcgccggccgagaaggcagaggcgccaccgccccaccaacggggccaaccaaaaggagcaggccagcaagacgaaa

SEQ ID NO: 93942 - RNA, 76 nt, Homo sapiens
accagccccggcaagaccgaaggcgccggccaaaagagagcggaccgcgaagagagacacgcaggaaagccccagc

SEQ ID NO: 93943 - RNA, 76 nt, Homo sapiens
gggggaaggacgggcgggccggcgccggagacgagccggcgccgagcggaagaaccccagccacaaagaggaaaaa

SEQ ID NO: 93944 - RNA, 57 nt, Homo sapiens
ccaggccacacaagccccagccaaaaccaggacaggaggccagggcacgggaaggca

SEQ ID NO: 93945 - RNA, 73 nt, Homo sapiens
caccggagcgcgcacaaggccgaaagagaaagaagaagcagaagcagcggagggagaagccccgaggccagag

SEQ ID NO: 93946 - RNA, 76 nt, Homo sapiens
ggaagcgggccaccgcccggcccccaagacggcccccgggcggaagcgcccggacgcgggaccgagcccagagcac

SEQ ID NO: 93947 - RNA, 75 nt, Homo sapiens
accaggagcggccaccacaccgaaggcgcacacaagacaagaggaaaagggagaaccaacaaagagggcaccacg

SEQ ID NO: 93948 - RNA, 81 nt, Homo sapiens
ccacgggagccccgaccgggagaggagagcccccaggggagccggcggaaccaaaacggacaagccaaggcacgagccaaa

SEQ ID NO: 93949 - RNA, 74 nt, Homo sapiens
ggaccggcgccccggcgcgaagaggcggaccggacggccgaggagaagacagaggagccagaccaagagacagc

SEQ ID NO: 93950 - RNA, 73 nt, Homo sapiens
ggacaccacacgacgggaaccccggccccaccggagcgggcggaaagcagaccgcccagcagggacccaggac

SEQ ID NO: 93951 - RNA, 78 nt, Homo sapiens
ggaggggggcgcggggccacggcggccgaggagaggcagggcgcgagggcgggggcagcggcagcagcgggaagcccg

SEQ ID NO: 93952 - RNA, 75 nt, Homo sapiens
acaggcccgacgagcagcggaacagaccggaagcaccccagaaacagggcgcacagggcagagaagccgcagggg

SEQ ID NO: 93953 - RNA, 54 nt, Homo sapiens
agacccgccaggagcaaagggcggagaacggaaaagcaccaggaagcagagagg

SEQ ID NO: 93954 - RNA, 75 nt, Homo sapiens
gagggcgagcagaggacgacaggccgggagagcgccggagaaggacaggccgcaaccggaggaagcaccccccag

SEQ ID NO: 93955 - RNA, 50 nt, Homo sapiens
agcccacacacggaaagggagaggagagacaaccgcccacaacgcaagca

SEQ ID NO: 93956 - RNA, 89 nt, Homo sapiens
agagcgcgacgcacggacccagccagagcccccccacggcccccgcggacccccagccccgggcccaggagcccgagaaggaggagagg

SEQ ID NO: 93957 - RNA, 80 nt, Homo sapiens
ccgaggagaggcagggcgcgagggcgggggcagcggcagacagagcaccacccagaaaagagcaaccccggccaccagcc

SEQ ID NO: 93958 - RNA, 66 nt, Homo sapiens
gggggaccgcgccgcgaaaaaggccccggggccaaccaacaaaaaggcggacaacaccgcaacaaa

SEQ ID NO: 93959 - RNA, 77 nt, Homo sapiens
cccccacccaggccccgcaagaagggccgggggcgagccggagcgaccccggcaggcaacaaaaacccaaccaccac

SEQ ID NO: 93960 - RNA, 81 nt, Homo sapiens
gagacaccccacggggcagcgacaagagaccaagcaaggaaccagcgagcaaacgcaaacacaacagaaaaaagaaaacac

SEQ ID NO: 93961 - RNA, 95 nt, Homo sapiens
aacgcgaagaaaaacgcgggggacacccagccacacgcggagaagaggacagccaggaaggcaggaacagaccaacccccggcccccggaaaacc

SEQ ID NO: 93962 - RNA, 76 nt, Homo sapiens
cgccgcgggccgagaccccacaacgggagggccgcgaaaaggcaaccccacggcggcggcggcggcaggaggcacc

SEQ ID NO: 93963 - RNA, 74 nt, Homo sapiens
accggcacgaaaccaacaccgcccaaggaccgagcaacaggggaagaacacaggcgaggacagagggagaaaga

SEQ ID NO: 93964 - RNA, 79 nt, Homo sapiens
cggagcgccggaggcacaaccgcacgacggcgccaaccggccacagaggagcccaagggggcacaagaccacaagggac

SEQ ID NO: 93965 - RNA, 95 nt, Homo sapiens
caccgacgggccgcgaggggaagaggaagcaaagccaagcccgccgggacccaccaagggcccccacgacgcaggcggacgagaccacaccggag

SEQ ID NO: 93966 - RNA, 79 nt, Homo sapiens
ggcgcgaccgcacggcccgggacacacacccagaccgaagaacggcaaagagaaaagaagcagaaaaaacaggaaggag

SEQ ID NO: 93967 - RNA, 63 nt, Homo sapiens
gaaaagccaacgccggcgaagcgggccgacaagaaagccgaggcggggcgggcagcaaccgaa

SEQ ID NO: 93968 - RNA, 84 nt, Homo sapiens
agcagcaggggggcggcccgagccccggacaagcagcagcggcagcaccaaggggccagacacaacaggccggggccccaggag

SEQ ID NO: 93969 - RNA, 82 nt, Homo sapiens
ccagcccagcgacaacaggaggagaaacccagcagcagacaagcagcagggacaagagaggcccgcgaaaccccaaagaccc

SEQ ID NO: 93970 - RNA, 63 nt, Homo sapiens
acacagaccagagagaagacagcaaaacgccccaggaccgagcacacaaacccagccgccccg

SEQ ID NO: 93971 - RNA, 61 nt, Homo sapiens
ggcggcggcggccagcgccagggcaagaggagcagcagcggcggggccaagcgggagagcg

SEQ ID NO: 93972 - RNA, 76 nt, Homo sapiens
cgggcgcccgccggcacgccgccagccccgggggccacgagcggcccacccccagaggagaagaacagagcagagg

SEQ ID NO: 93973 - RNA, 86 nt, Homo sapiens
cgccccgcccgccacagcgcgcagacgcgacaagggccccagccccaccccagccccaaaggaggcgcgagagggacgccccggag

SEQ ID NO: 93974 - RNA, 72 nt, Homo sapiens
agccccgggaggggccggccccgcgccgcgcgcgggcccccccccgcgccggcgagaggcgggagcgacccc

SEQ ID NO: 93975 - RNA, 78 nt, Homo sapiens
caagggcgggccgaccggcggcaggagcgggccccccagggcgccccccgccaggaaacgaaccaccaacacccgaag

SEQ ID NO: 93976 - RNA, 75 nt, Homo sapiens
ccagggcccagaggaccccagccgcgcccgggagagcaagacacccaaaggacggcgggaagagggggcagaagg

SEQ ID NO: 93977 - RNA, 60 nt, Homo sapiens
agagcacaaagcagaagcacaaagcccgaagcagcgcccccaagagggagaagaagagag

SEQ ID NO: 93978 - RNA, 80 nt, Homo sapiens
ccaaagccacgcagaaaacagacgcgaaacccggggcacagaggcccgcggaacacgaagggcggagaagagaaacgagg

SEQ ID NO: 93979 - RNA, 72 nt, Homo sapiens
gaacgcaggacccaaagcacgagaaaacagcgagcccggacagaagcgaaaaacagaagcggacgagcaagg

SEQ ID NO: 93980 - RNA, 78 nt, Homo sapiens
agcgccggaaaccaacaaagacacaggacagcggaagcagagcgcggcccggcgcgcgccgacaggacgcccccgacg

SEQ ID NO: 93981 - RNA, 77 nt, Homo sapiens
acaaagaaccgaggacaaaaagaaagcaaaccccacgagaacaaagcacggcagaaacggaaaaaaaccaagaaagc

SEQ ID NO: 93982 - RNA, 84 nt, Homo sapiens
gacacgcccagggcacccaagaaacagcagcaaggaacgcgcagccagcaccagggcacgggccgggccgccaggaggcccaga

SEQ ID NO: 93983 - RNA, 58 nt, Homo sapiens
cccaagagcgggacgcagccccaagacgcggaccaggaaaaagggaggaacaaaccag

SEQ ID NO: 93984 - RNA, 51 nt, Homo sapiens
gagcagaacacaagccaacaaaagacaggccccccagagaagcccgagacc

SEQ ID NO: 93985 - RNA, 34 nt, Homo sapiens
ggcggcgaaaggggcgggccaagaagcgaaccac

SEQ ID NO: 93986 - RNA, 75 nt, Homo sapiens
aacgggcagacgaaaaagcgaaggaccaggcagaaaacaagccgcggacgggagccaggaacagagaggccagag

SEQ ID NO: 93987 - RNA, 83 nt, Homo sapiens
cagaaagaaggaaaaagcagaaagccagaggaaggccaggcgaaccagccgaaaaaggagaaaccaaaaggaaaagcgaacca

SEQ ID NO: 93988 - RNA, 62 nt, Homo sapiens
gaccaggacaggaaagacaaaaagggagagggaccgaagcaaaagaggcggcaaggcagccc

SEQ ID NO: 93989 - RNA, 72 nt, Homo sapiens
aagcagagaggaaaagcgaagggagagaaaccaccaccaccggggaggagaagaccacagaggaagagacag

SEQ ID NO: 93990 - RNA, 61 nt, Homo sapiens
acggggccagggaacccggcaccgccccaggaagggccgcccagcggcacccacgacgcag

SEQ ID NO: 93991 - RNA, 73 nt, Homo sapiens
aaccgagcgggccgaccaccgacaggaaacccgaagaggggagaaaaggaacaagaaaacaacggaggaacag

SEQ ID NO: 93992 - RNA, 74 nt, Homo sapiens
cgccgaagaagcacgaaagccccacccgccgcagcaagcagagcgaacgcagagcaagggcgcaggccgggcac

SEQ ID NO: 93993 - RNA, 77 nt, Homo sapiens
ccgccagccccaagaccggaaacagcaggaacgaacaaacaccccagagagcccaggccgagacgccccgacgccac

SEQ ID NO: 93994 - RNA, 74 nt, Homo sapiens
ggagaaggaccaagaaccaggggcagccaggacacacagacaaggcagaaacagaggcgggccgacaagagcac

SEQ ID NO: 93995 - RNA, 61 nt, Homo sapiens
acaggaccacaagggaaagggaacccagaagccgggagcggcaaaaggagaggggcacagg

SEQ ID NO: 93996 - RNA, 75 nt, Homo sapiens
ccgaggcaggaacagcacccggacggacacgagaccagcacccaagagccaacaggaagacagcccaacgaggac

SEQ ID NO: 93997 - RNA, 40 nt, Homo sapiens
aaaaggcagcacagagcacacgagaccgaagaacggcaaa

SEQ ID NO: 93998 - RNA, 72 nt, Homo sapiens
gaaagccacagccccagaacgacggaaaaacaaaaggaggcaggacaagagaagacccacaaaagaacgaca

SEQ ID NO: 93999 - RNA, 80 nt, Homo sapiens
aaagcccgggagcagaagggaggcccaagacccacaacaaaagagacggggcgacggggagaggcaggcgaggggacgac

SEQ ID NO: 94000 - RNA, 98 nt, Homo sapiens
gggccaggaacggcggacggggggcggcagccagccgcaggagcaagcaaccagagaacagaagcaagcccccccagaggccaagggagcagaagagc

SEQ ID NO: 94001 - RNA, 64 nt, Homo sapiens
aaaaaccaagaggacaagcagggacgcgaggagaccgacaaaaagaggagccaccggcccaggc

SEQ ID NO: 94002 - RNA, 53 nt, Homo sapiens
gaaaagaagggaaaacgaaggagaagcaacacaaagcagaagacgagggcaac

SEQ ID NO: 94003 - RNA, 72 nt, Homo sapiens
gagagcccggcgggggcgcaggcgcaaaaaccagacaccccacaccaccacccagacgaccaaaagggcacc

SEQ ID NO: 94004 - RNA, 76 nt, Homo sapiens
cccggaccaacaccaaccaccagcgcaagcggccagggcggccaggcgggggccaaggaccgacaccaccaaccaa

SEQ ID NO: 94005 - RNA, 56 nt, Homo sapiens
acaggaaacccgcaaggaagacacggcggggggcaaaggaaagccgcagcggggag

SEQ ID NO: 94006 - RNA, 79 nt, Homo sapiens
aagaccacagagggacccggacaaccagaggcagccagcagggggagacagcgaccggcccaaggacggacaagacgag

SEQ ID NO: 94007 - RNA, 76 nt, Homo sapiens
ggacgaggaccgagaccgcggccgggaccgaggaacacacgccgagcaagcaaagcaagaggcgagccggacggag

SEQ ID NO: 94008 - RNA, 72 nt, Homo sapiens
cggggcggcggccaacgccgacacacccgagagagggcgccccagcacacagagcacacccgggaccggacg

SEQ ID NO: 94009 - RNA, 91 nt, Homo sapiens
gcgcccgggccaccggccgcaggcccggagaggaagccgccagccaccaaggagaccaggcaaaacagcaaggaccagaagcgccgagccc

SEQ ID NO: 94010 - RNA, 75 nt, Homo sapiens
cagcaggaagagcgggaggaagaacagcaagggccaacggaagccagagaaagggaagggacgcaaaaaggaagc

SEQ ID NO: 94011 - RNA, 71 nt, Homo sapiens
aaaggaacggccacgagccgcggaggcccgagagcggccgcacaccggaggagggcgagaggggcagagca

SEQ ID NO: 94012 - RNA, 74 nt, Homo sapiens
acacgcacaaaagaagagggaaaggaacggcccgaggccaggagccaaagagcccgaacgcggcaacaacggac

SEQ ID NO: 94013 - RNA, 89 nt, Homo sapiens
aaaacagaggggcacaaccgacaggaaaaaaagcggaagagcgccagcacgggagcaccgcacaaggaaaaaccaagaacgacagcgag

SEQ ID NO: 94014 - RNA, 76 nt, Homo sapiens
cagccgcagaggacagcaggcccaagcgcacacccaggagaagaccggaaggcacaagcaacgggcagggagaggg

SEQ ID NO: 94015 - RNA, 77 nt, Homo sapiens
aaagcggggcacaggcgggcacgcgcccaggacaaagagcaaaaggcaccggcccagagacagagaagagacaccgg

SEQ ID NO: 94016 - RNA, 81 nt, Homo sapiens
gcgcggaagaagcaggaggcaagaaaggggaaccccggagaaaaggccaagaaggcaggagcaaaggagcagcaaaagggg

SEQ ID NO: 94017 - RNA, 66 nt, Homo sapiens
ggaggcgggagaaggcgcaacgcggcgcggccagccgacgccgggaagacaccaaggcggccgaac

SEQ ID NO: 94018 - RNA, 66 nt, Homo sapiens
agcacgggagggaagccccgcggcacgaacaaccaaggaaaagccaccccccaaagacccgaccac

SEQ ID NO: 94019 - RNA, 71 nt, Homo sapiens
ggggagcccgcgcccgccgcgggagagaggacccccccccccccccaagggaacaggaaacgaccccaaga

SEQ ID NO: 94020 - RNA, 72 nt, Homo sapiens
gcccgccccgcagcagccgcgcggccagagggcccccagggagaccccgggacaagggggcagcgacgggcg

SEQ ID NO: 94021 - RNA, 73 nt, Homo sapiens
aagggaggccagcggacgagagaccccagggaccaccgcaagaccggcccgaggcaccaacgcaaggaccccc

SEQ ID NO: 94022 - RNA, 81 nt, Homo sapiens
cgccggaaaggcagccaaaggacgacgagaacggcaggagcccagcggacggaggccgcccacagagacccaagacccagc

SEQ ID NO: 94023 - RNA, 73 nt, Homo sapiens
ccaggccgaggggcggacgcggccggcacacagagaaaaaaagggaacaaaacacagcaagcagacaaaaggg

SEQ ID NO: 94024 - RNA, 70 nt, Homo sapiens
ggagagcacaaacggaacgccggaacgagaaacggcgaggaaagagaggagccccggaaagaaaaggaca

SEQ ID NO: 94025 - RNA, 77 nt, Homo sapiens
aaaggggaaaaacgaacagagacgaggcggaacagagaaaagaaagccgcaaaagagcacaggcgcagaagccaacc

SEQ ID NO: 94026 - RNA, 56 nt, Homo sapiens
caccagaccggcacaggacccagagaggacacgggcaaggccagagaaggcgggag

SEQ ID NO: 94027 - RNA, 74 nt, Homo sapiens
ggggccggagcccgcgggaccacaaagagccggaaggcgaggcgcagcaaaggcaacaacgaacagaacggcaa

SEQ ID NO: 94028 - RNA, 73 nt, Homo sapiens
ggaaaaacggagaggaaaacccaaaaaaccggcgcacaagacccagcccccggagaagccaaggaagaccaag

SEQ ID NO: 94029 - RNA, 70 nt, Homo sapiens
cccaacccccaccccgcccaaggaggcccagcgaggcagcgagaagaaaaagaagagagagacacggaca

SEQ ID NO: 94030 - RNA, 60 nt, Homo sapiens
gaggccggccaggaacggcccgagggggacaaggagagaagagacgaggaggaggggaga

SEQ ID NO: 94031 - RNA, 72 nt, Homo sapiens
gccgggggcggccaagcgaggggaaaccgcgccagagacacagagacagaagagcagcacaggggaagagac

SEQ ID NO: 94032 - RNA, 96 nt, Homo sapiens
gaaaaaggcacacaccggaccaacggaaaagagcaaagcagcagaagggccagcaagaagaccgggaggacagcgagcggagacaaagaagaaaag

SEQ ID NO: 94033 - RNA, 56 nt, Homo sapiens
gagcgcgaaacgcacgagaagacacaaaaacggagcccaagaagcaagaagaggcg

SEQ ID NO: 94034 - RNA, 74 nt, Homo sapiens
gcgagccaccacagcacagggcggagaacggaaaagcaccaggaagcagagaggaccgcagaagggaaggagag

SEQ ID NO: 94035 - RNA, 80 nt, Homo sapiens
acacgaagcagagaaggacggccaagaaaccaggacccccaggacgaaaacgaagagggagaaagcagcagggaacaaga

SEQ ID NO: 94036 - RNA, 80 nt, Homo sapiens
gaaagcaccgcagccagaagaaccagggcaagaaagacccagggcggcgaagggaagaggcaaaggccccagaagcaacc

SEQ ID NO: 94037 - RNA, 45 nt, Homo sapiens
ggaaggaagagcaccgacacaaagaggagcaaagaagaacgaggc

SEQ ID NO: 94038 - RNA, 68 nt, Homo sapiens
ggaccaccagccagcgcggaccagaccggaacgcccaagccccaccgcgagggggaggaacagcaaaa

SEQ ID NO: 94039 - RNA, 51 nt, Homo sapiens
accagaaagccaaacagaaaggccccgggacagaggaggaagaggagggaa

SEQ ID NO: 94040 - RNA, 72 nt, Homo sapiens
gacccccccaggcccggcgcgcaggacagcgggcgaagcaagaaccgagcagacaaggagaacaccgcggcc

SEQ ID NO: 94041 - RNA, 69 nt, Homo sapiens
agaccgaccaccaaaagaaccgaaacaagagaaaagcaagaggccaaagaagacagagaacgaaagacc

SEQ ID NO: 94042 - RNA, 72 nt, Homo sapiens
agaaagggagcagacaaaacgccaagacaaaaccaacccaggcaagaaggccagaccaaagaaaagggagag

SEQ ID NO: 94043 - RNA, 69 nt, Homo sapiens
agaaagaggagcagagacgccggacaggcaagacccacaaaccaccaccaacacagaaagccagaacgg

SEQ ID NO: 94044 - RNA, 71 nt, Homo sapiens
cggagaggggcggcgccgcgcggccgaggacgccgccagccaccggcgcgaagccagaccagaccagcagg

SEQ ID NO: 94045 - RNA, 60 nt, Homo sapiens
aaaagcaccgccgcagggcgccggcacgggcagggcaaggacggcggccccggaccaggg

SEQ ID NO: 94046 - RNA, 72 nt, Homo sapiens
ccgcacgaagccggcccgaagccgacccccgcaaggaagcgcaggcgaggaacagcgggaaaaaaaaacccc

SEQ ID NO: 94047 - RNA, 81 nt, Homo sapiens
agcaccgcaggccggggaggaggaggaagaggaagaggaggagacccacgaaaaagaggcaaaccacaccaagcaaacaga

SEQ ID NO: 94048 - RNA, 53 nt, Homo sapiens
gaaacggaggagcccgccgaagcagccaacaaaggaacgagcagcaacggcca

SEQ ID NO: 94049 - RNA, 68 nt, Homo sapiens
caacaccggcaggaaccaccaggacagacacaaggcggccgaccaagggaccagcgcagcacccgaac

SEQ ID NO: 94050 - RNA, 37 nt, Homo sapiens
cccccaagacgagacacagacaaccagaagacgacag

SEQ ID NO: 94051 - RNA, 81 nt, Homo sapiens
ggagcgcccaccagaggagcgaaagagagaggccaaaacagaagaggcaaagcccagccacagcagcagcccagcagcaaa

SEQ ID NO: 94052 - RNA, 72 nt, Homo sapiens
accgggcagaacaacgaacagaagcacaaccagagccggccccgggcgagcaacggcccaaccaacccccgg

SEQ ID NO: 94053 - RNA, 78 nt, Homo sapiens
caccccaggcacgccagcaccgccccgggcaagggccacggagccaccccccagacacgcaaggaagagacagaggag

SEQ ID NO: 94054 - RNA, 79 nt, Homo sapiens
ggaaaagccacacgaggagggccaagacgggagagccacgggcccccggcaacgaacggagccaggacaaaaccaggca

SEQ ID NO: 94055 - RNA, 79 nt, Homo sapiens
gccacccaggcccggaggcagcgcagggggaagcacacaggccccagacaggggcggaggcacgaagcggagcccgaca

SEQ ID NO: 94056 - RNA, 50 nt, Homo sapiens
agccaccagaagccgggaaagacaagcacagccggaaaagaaggcagaaa

SEQ ID NO: 94057 - RNA, 60 nt, Homo sapiens
gccggaaaaggccgaagggcacgaaagaggcaagagagaggagcaagaggggggggcccc

SEQ ID NO: 94058 - RNA, 71 nt, Homo sapiens
accccgagagaaaacaacaacaacagggccccgcccaacaccccccccccaagagggagacaacaacagag

SEQ ID NO: 94059 - RNA, 63 nt, Homo sapiens
gaaaacgaagacagcaacaacggcaagcggagaagagcaaggccgaaccgagaggaagggcaa

SEQ ID NO: 94060 - RNA, 78 nt, Homo sapiens
cgggagacacgggaaagcggaccgagccggagcggacgacgaacgccaacggcaagaaagggaaggccgcaaacagac

SEQ ID NO: 94061 - RNA, 77 nt, Homo sapiens
cgccggcaggagacgaagagcccgggcggcgccgaccggccacgggcgagcgcggcagaagccgggacacgcccgca

SEQ ID NO: 94062 - RNA, 62 nt, Homo sapiens
gagaaaggaaacagaggagagaacacggagaaaaaggcagccccggagacgaaaagacaaag

SEQ ID NO: 94063 - RNA, 77 nt, Homo sapiens
cacgagccaggagaccaaggaccagccaccacggagaacacaccgcccgcgacacagggagaccagggaaaagacag

SEQ ID NO: 94064 - RNA, 76 nt, Homo sapiens
agaccacgacaagagcacaaccccgggggcgagaaagcgcgcacgggacgcacacagcacagaagagaaccagaga

SEQ ID NO: 94065 - RNA, 68 nt, Homo sapiens
gaaggcagaagacagaggaaaagaggaagagggcgggaaggcaggagcgcagggagaagaaacgaacg

SEQ ID NO: 94066 - RNA, 81 nt, Homo sapiens
aagcgcccgaggcccgggcccgcgggggcaaccgggcgcagacgagggcagggcggaggcgcacggaggccgagagaggag

SEQ ID NO: 94067 - RNA, 97 nt, Homo sapiens
aggccggagacgaggggacccaagcggagacagcaccgacagaaggaccaaaagaaggggagcccagaagcgagaggaaaaggcaaacgacgcagac

SEQ ID NO: 94068 - RNA, 66 nt, Homo sapiens
cgggagaaacccccggaaaaagcggacgccaaggagcgcggggaggggcgaccccggggcccggcc

SEQ ID NO: 94069 - RNA, 71 nt, Homo sapiens
caaccgaaagaaagcagagaggccccagaggcacagaagaccagggcagcagcggaagagcagggcacaac
